United States Patent Application Publication US 2019/0348154 A1 - sequence listing, part 57

SEQ ID NO: 212312 - DNA, 1335 bp, Klebsiella pneumoniae
atgagtacgctaatcacggataaggtcgataacgcagcggtccaaaaagaaaaactggacaccagtgcgtatttaccccataccccctggctgcaatttttactggtctgttgcctgtttgcgctatgggggatggcgggcaacctgaatgatattttgatcgcccagtttaaaaagggcttcgatttaacggatacccagacagcgctggtgcagtcgatttttttcctcggctacttttttgtcgccctgcccgcggcggcgctgattaagcgtttctcctataaagcggcgattattattgggctgtgcctgtacgccctcggctgcttcctgttcgttccggccgcacagatcatgacctacggcgcattcctcgcctgcctcggagtgatcgcctgcggactctcttttctggaaacgtcggcaaacacctactccagcctgctgggtccgattcaatcctccacccagcgtattaacttttcgcagatcttcaactcgctgggcgtgatctccggcgtattaattggccagctgatggtctttggcgaaaacgatccgagtcatgaacaactgctggcgatgcccgccgccgctgcagacgttgcacgccatcagatggttggtcaggtggtcgggccctatctgattatcggctccgtactggtggtgctggcgctggtgttcgtgtttattaaattcccgtcgtgcaagggcgcgcccgctcaacaacagcaactcccgacggaaagcatggggccaacgctgaaacgcctgtttgctatcccgcgctttcgcctcgggatcctgtcgcagtttttgtacgtcggcgcccaggttggcgtatggagcttcacgattcgctttgtgcagctcgtgcagcaaggcaccagcgagcactccgcgacttactggctgctggcttctctggtgatttacgccgtgggaaaaaccgtggccacctggttgatgaaccgtctgaatccggcgatgctgctcggaacgtttgccctggccgccaccgccctgttactgattgccgttttcagcggttcaatgctggcggtctatgcgctcattctggtcagcttctgtatggcgccatgctggccgacgaactttggtctggtgatcaaagggatggggaaagatacccagaccgcaggctcgatcgtggtgatgtcgattatcggcggggccgtaattccgctggtgatgggcattatctcggatatgaacggcggcaatatgcaaatcgcctttatcgctccgctcctgtgctttgtgtatgtcgctttctacggcttctggtgcgtgcgtaagggggtataa

SEQ ID NO: 212313 - DNA, 942 bp, Klebsiella pneumoniae
atgtcaggaaaagtctgtgtttttggttcattcaatttcgacatggtcgccagggtggatcgctttccggtaccaggtgagtcgttagtggcctgcggaagtatgaccagcgccggaggtaaaggggcgaaccaggccaccgccgcgctaaaagcgggagcaaatgtccactatatcggcaagattggcaatgacaccttcggccattttgcccgctgtcatctgaaaggcgtgggcttcaatgctgtgacgctgctggtcgccgaagagatccccaccggcaatgcgctgatttatgtcgccggtaacgatgccgaaaacatgattgccgtcgatcccggcgcgaatatgacggtgaccgatgatgaaatcgccggctgcattcccgctatcggctgcgcggatgtggttctggttcagctggagaacaatctttctgctattgaacaggtcatagacgccggcaaacaagccggggccctggtaatactcaatcccgcgccctggcagcccgttgagcacgcccttctacgcaaagtggatttacttacaccgaacgccacggaggccgggttaatgaccggacgccgggttgacagtctgacggccgcggctgaggccgccgacgtgttacatgctcagggcgcgcgcaacgtcattatcactctcggcgccagcggcgccctgctgagcgagcatggggtgaaatctcgtgttccctgctttccttctcacccccgagacactaccggtgcgggcgatgccttcaacggcgcgctggcggcgcggctggcctgcggggaaccgctacaggccgcagcccgattcgcggcggcctatgccgccgtcagtgtcgaaaagcaaggcgcctcatctttacctgagtacctggaggcacaggaacggcttctccgtgccgccgctgattatgagatggcataa

SEQ ID NO: 212314 - DNA, 690 bp, Klebsiella pneumoniae
atgcgttattacctttctccctcgctgatgtgtatggacatgatgaagctgacggaacagctgcgctttctaaacagcaaagccgacaggctgcatgtcgacatcatggacggccactatgtcaaaaatctggcgttgtcggccagctttgtggcgcagatccgtccctacacctcgcttcctatcgatgtccatctgatggtcgaagcgcccgcttcgtttataccggcgctgttagacgccggcgcagatgccttctcactgcatccggagaccatctgccgcgaagcgttccgggttatcaatatgcttcgtcaggcggggaaagaggtgggaatggtgctcaatcccgccacaccggttgagagcatccagcactatctgcatctgctcgataaggtgacggtgatgaccgtcgacccaggctatgccggtcagccgtttattcctgaaatgctcgccaaaattacgcagcttcatcagctcaaagagaccggcagcctccgcttcttgctggaagtcgatggctcctgtaaccgcaacacctaccgcgcgctgctgggcgccggcgcacagatattagtgatgggcagcagcggtttattccgcgctgatatgccgctcgagctggcctgggaaaccatgtcccgcgaactgtccgccgcgctgcactcccccgagctggtatag

SEQ ID NO: 212315 - DNA, 801 bp, Klebsiella pneumoniae
atgttgccgctggaacgtcatcgtttgattgttgaactgctgggccaacacggcgtcatgcgggtgaatgagattgcgcaagcgactcgggtctccagggaaacgattcgccgcgatctgagcgagctggaacgcaaagggatcttaacccgaagccacggtggagcgctggcggcggaaaatccgctgccggcgacccgggcggcggcatccgccctgccagttgaagatagccagggaagctttcagcacagaacgctgctgcacagcgaaggcaaaatgcgcgtggcccgtaaagcactgcagtttctccaaccgggacagaccattgtcctggacgggagtagcaccagctggtttttggcccggcagatgccggagatggcgttgacggtgattacgccctccattcgcatcttacaaactctgatgagccgacgctcgttgcatctcgtcgggctggggggggatttctccccgaccgaagagtcgttcttcggggaaaccgcctcacgaacgctacgcgaatatgccattgatacgctctttttctcctgccaggggctggagcgcgatagcggcttgtatgcgggtacgcaagcccacgccgccctgctgaaacagatgctgctgggcgcccgtcagactgtggctttggtcgacggcagcaagctggggcgaacaggcgtcgcgcgtatcggcggactgggcgagctggactgtctggtgactgaaaggtttgtcgatccgctgctggaaaaagagatgacctggcataacgtcagcctgcaaatcgcctga

SEQ ID NO: 212316 - DNA, 714 bp, Klebsiella pneumoniae
atgaatgaaacaacccgtcgttttgcacgtttagttgatctgagcgcagttcaggccaccagtaccgaagcggatgttcgcgcctgcgccgagctggctgccagatacaacattatttccgtccacgtactgccttgctggacgcgctttctcagtacgttgctgccgcagcagggtacgggagaggtgatgattggcggtccggtcggctttcccggcggtgggcataccaccgataccaaggttcaggaagtgcggcagctgattgccgacggcgctcgggaagtggatatggtcgtgaatatcggcaaagtgctctccggcgattatgactatgtgcgcgaagatttgcgccgcgtggtggaagccgccgcgccggttccggccaaagtgatccttgaaacgcactatcttaatgaggagcagattcgccgcgtgtgtgatattgccgtagaggtggggatgaagtgggtcaaaacctctaccggctgggcgcccaccggcgccacggtggaaaaagtcagcatcatcgccgaccagcttaaaggccgaatcgatatcaaaggcgccgggggcattcgcgatctggccacggtgcgtgcgctgtaccagcttggcgtgcgccgctttggcatgagccatggcgcggtaaccaaggtgctggctgaactggagcagcacccggaacgttttcccgagctgaacgccgattaa

SEQ ID NO: 212317 - DNA, 1506 bp, Klebsiella pneumoniae
atgaaagataaaatactcacgattgatgttggcactggcagtacccgcgccgctattgtgcgcattgacggcgcgatgatcggctttgcgcaaagagagtatgagcaaaccacgccgcgtgcaggttggtcagaacaggccccgtctttatggtggcaggccgcctgcgactgtatacacgaggtgctttaccgctatcctgaaacggcagcgcaaattgcggttattggtgcttgcggacagatgcatggcaccgtccttctggacgaccgtggcgagctggtggaggatagggcgttgctgtggaatgataagcgcagccagccgcaagttgacgcctttaacgcgcgcgaaggttgggaaaagtggctggcgcatttgaataatccgcctgcggcagcatggcccgctttcaagttagcctggtggcgcgaaaatcatccggatcgctggtcgcaactcgccaaagtattaatgccgaaggactatattaatttcatgctgaccggtgccatggcgaccgattatagcgaagcgtcgtgctatttcctgatggacagcgaaacccgtagctggtcttcgcaagcctgcgaaacgtttggtctgcgggtcgatcagctcccggagcttaaactttccagcgacataatcggccaggtgacgcagcgcgcagccgacctgacgggcctgccggcgggtatcccggtggttgccgggacgtcggatatggcggcctctctgctgggctcgggtgtgtatgaaccggggatggcgtctgattcaaccggcacgtcgacgctgatgacggtggtgtcgccgcggccgttacaccatccgctggttaataatcttcatcttgccaacgcggcctggggcggatttacgatcctcgacgccggcggcgatgccgttcgctgggcgcggctggcgcttgccgataaccagattacgcatccacagcttttacaggaagcggcggcggtgccggcgggggcagaagggctgctgtttcttccctatctgacgggagaacgtctggccgaacacacgaactcgcgggcacagttttttggcctgcagcgcaagcatcgccgcggtcatttattccgcgcagttctggaaggggtggcctttgcatcctggcgcaatcttcggcagctgcagaagtgcgggcagtatccgcaacaaatgatcgcttccggcggcggcgcgcgcagctcgctgtggcttgaaatcaaagcctcggcgtacaatctgccgatattatctacgcgtaatcaggagaatggcgtcaccggatgcggtattatcgccggggttggcgtagggttgtacgccgattttgccagcggcgtgcggcaaacggtgcagttcgacaaactgatctcaccggatccccttctgcgggattattaccacgcctgctgcgagctttttgatacgctgtaccggcaatccgctgccttatacgacaggctggatgcgctcagcgtaggacccgactga

SEQ ID NO: 212318 - DNA, 774 bp, Klebsiella pneumoniae
atgtttgcagaagaaagacaggagaagttactcggtattctcagggaaaaacgcaaagttgctgtttctgagatgtgtgacgtctttaatgtatctggcgctaccattcgtgccgatctccgccagctggaagaggaggggctgctgacccgaacccacggcggagccgttcttcgtacccgggcaagctttgaacaggcgtcggacgatcgcgaaattgtcaatctcagcgcgaaagagcggatcggccagcgcgcggcggcgctggttgaggatggcgacattatcgtgctggataccggtaccacgacgctgcatattgcgcgtaatattcgcgacagacagaacgtcacggtggtcaccaatgattaccaaatcgcccgggagcttgaggccagcgcctcgattcaaacgattctgctgggtgggatcgtcaagaagggataccactgcgtggtggcaattaacgggcgttccatactcgacacgctgaacgtcgataaagcatttatgggcaccaattcgctgtcgctgaaacacggcgcctgcgtggccgatatcatgctggcagaaacgaaacgcggcatggtggaacacgccagtcaggtgattattgtctgcgactatagcaagctgaataacacctcgcttgcccaatttaccgcagcagatcgcattgacaccgtagtggtggatcgtctgcctgatgacgttcaggcgtatcgtaatgctggcattcaggtgatctctctggatgaagaggagcatctttag

SEQ ID NO: 212319 - DNA, 930 bp, Klebsiella pneumoniae
gtggggcattacagaatgattcctgacaaatcggttgaaatactgctgggtgagctatcgagggatattgcacagcgcacacccggcaccggcgatttccctaccgccgtagaagggctcgaattgtttcgccgaaacgaacccgctcccccggtaagctgcctggtccctcccagtatcgttctggtggccgatggcgcgaagatcatgtgggttgggggtgaaccttatgaatataatgcggaaaaattcctgattacctctcttgacctgccggccagttcggaaatattgcaggcttcgacatcccagccctgcgtcggcgtagcctataagcttgaccagcgcgtgctaatggaattaattgcccagggaagcctgccgccggtcaaaaaacgagacgcgggaacgagtgtcgggataggtactattaccgatgctttgctggagcctttctgccgtctgctttctttgcttgacgaacctgaagccattcctgttctcgggccgctgatccaaagagagatacactaccggcttttgatgagcgatcagtccgatcatctcagacagattgcagcagtcgacggccatggctaccgtatcggtaaagctatcgactggttaaagaccaatattgcatcacctttacgcgtcgaggaactggcaagtcgggtgcaaatgagcacgccctctttccaccaccatttcaggcagcttgtgaggatgagcccgctacggtatcagaaatggctgcgcctcaatgaagccaggcgactgatgctgaatgaacattacgatgtcaccacagcagcctatgcggtcggttacgaaagcctgtcccatttcagccgggaatatacgcggatgttcggggaatcgcccaagagggatattactgaactgagaaagtcagcgggtaagctttaa

SEQ ID NO: 212320 - DNA, 240 bp, Klebsiella pneumoniae
atgcatgagtatttcagttacaactttcggccggtaatcactggcgataccaaacgctttgacattgatctggacgttctcaacgatagcgggcagatctgcttccttgatgttcaactgttcaagacgtgttggcgtaccaatttcttcaaaccacttctcaagcgcagcgatgccgtcgtggcagttaaaaaatggcttaaacctgaacgggttaaatttgctcgcggtgaaccctga

SEQ ID NO: 212321 - DNA, 915 bp, Klebsiella pneumoniae
gtggatcatcaaaaagttacttttaaaaaccgttacggcattacgctggccgcagatgtgtatcttccaaaagatcgcgggaacaagaagcttgctgcgcttgttatttccgggccttttggcgcggtaaaagagcaggcctcgggtctctatgctcagactttagcagagcgcggattcgtgacgctggcatttgatccctcttataccggtgaaagcagtggtgaaccccgcaatattgcttcacccgatatcaataccgaagactttatggctgcagtcgattttatgggactacaaccttatgtggatcgtgaacgtatcggtgtcatcggtatctgcggcatgggggggattgccctgaacgctgttgccgtggataagcgcgtaaaagcggtcgttgccagcaccatgtatgatatgagccgcgtaatgtcaaaaggctacaatgacagcgtaacaccggagcaacgcgagcaggcgctggagaagatgagtcttcaacgctgggaagatgcagcaaacggcaaaccggcataccagccagcctataataaactgaagggcggtgaagcacagttcctcgtggactatgcggactactacatgactaaacgcggctatcatccccgagccgtcaactctggcaattcatggtccgtgacaacgccgatggcctttatgaatttcccgctcatgacctatattaaggaaatttctccgcgcccgatcctgttcatccatggtgaaaaggcgcattcgctttacttctccaaaacggcttatgaagcggcaaatcagccaaaagagctgctgattgtaaaaaatgctacccatgttgatttatatgatcgtatggacaagatcccgttcgataacatcactgcatttttcaacaaaaatcttaataaataa

SEQ ID NO: 212322 - DNA, 372 bp, Klebsiella pneumoniae
atgtactggaaccctgaagtattaacaagaatagatgcggccgacgacctgaaaatcgcaccgtatcatcccgatatgaatacgaccggtacgccgacatggatatgggaagtgaaggtggacaaccgacttttcgtccgagcctatagtggtatccgttcaaaatggtatcaggctgcattgtcccagcaggcaggtaagatactggctatcggacaggaattcgacgtactgttcgcaaaaccctcggaccctgagcttgaaagtaaaattgatcaggcttacctgaaaaagtactccggcagcagctatgtttccgcaatgacagggatacgcgccagggcagccacgattgagattctaccttcgtga

SEQ ID NO: 212323 - DNA, 981 bp, Klebsiella pneumoniae
atgaaaaagatacttattattgtacccgatggcggcatgctgtttgaatccgccggtattgctgacattctgatgcaggccaaccgcctgcacccggaaggtgcccgggaaatctgctaccaggtcaagctagcgacaactcaaccgcatcaggttatccatggtcagtcaggtttaaatctgctggccgaccatcgtctgcatgagattgaccctcgcgagcccctcgataccatcatgattaccggcagaggtcaaaacccgcaggaggggatggcggtggttgactggttgcgccttgccgctccccatgcccgccgcatagtctccatttgcggcggtgcgatgctgctggcgcaaaccggactgctggacggcagacgggccactacccactggaagctgctggaaaccatgcaggcggaattcccgcagatccgcgtcgagggcgggccgctctatattcaggacgaacatatctggacctctggcggggtcagttccggctttgatcttacgctggcgctggttgaagaagactatggcttcagcctggcgcgcgatatcgcccaggacttcgtcatgtatctgcgtcgcccgggaggccagctgcagtttagccgctataaccttcagcagaccgccacccagggcccgattaacgatctgctggcgtggttgctcgaaaacctcaccgccgacctcagcgtagataagctggcggaaaaagtcgccatgagtccgcgaaatttcacccgcgtctttacccgggaaaccggcgcttcgccagcgcggtacgtcgcggaagcccgcctggccgccgcgcggcagcgtttggagcagactcacgagacgctggatcgtatcgccgagcaaacgggatttggcagcagtattaacctgcgacgcttgtttgagaaacagcttaacctcactccaggtgaatatcgtcaacgatttcactgtcgcaaaatggcgtaa

SEQ ID NO: 212324 - DNA, 1011 bp, Klebsiella pneumoniae
atggtaaaggtcggtattaacggttttggccggatcggacgcaatgtactgcgcgcagcactgaataatccggatattcaaattgtggcaatcaacgatttgacggacagcaaaacgctggcgcatctgctgaaatacgactcgcttctcggtaagctggatgcagaggtcaccgcgggtgaaggggggcttgttgttgatggtaaacccattaccgtattcagtgaacgcaacccggccagtattccgtggcgtcagtgtgaagtcgacatcgttattgaggctacaggattattcacggaccgtgaaaaggctgctgtacatatccacagcggtggcgccaagcgcgtgattatctctgccccgggtaaaaacgatgatttaaccattgtgatgggcgttaatgagagcctttactccccggataaacactacgtgatcagcaacggaagctgcaccaccaatggtcttgcacctgctgcacaggtcctgcaccagcatttcggtattaagcatggtctgatgaacaccacccatgcctacaccaacagccaggcgctgcacgatcagccggaaaaagatctgcgcggggctcgcgccgccgcattgtcgattgtgccttactccagcggcgcagcgaaggctctgggtaaagttattcctgagctggatgggcgtttaacgggatactcgctacgcgtccctgtgccagtggtgtccattgttgacctcaccgtcacgcttgagcgagatgtgacggtcgaagaggtgaacaatgcttttcgcgaagccgccgcagcgggacctctgaaagggatcctgggttatagcgatgaaccgctcgtctccagcgattaccagggagacccacgctcgtcgattatcgacggtctatcaacgctggtgattggcggtaatatggtcaaaattctggcgtggtacgacaatgaatggggattctctaatcgtctcgttgatctggcattgatgatggcaaagcgtgaaagctaa

SEQ ID NO: 212325 - DNA, 333 bp, Klebsiella pneumoniae
atgacggcatacggaacggagtttttctcaatgagagatgtaaaccgactcaggatccttcaggatgtcatcgaccgcaacctgcgtcctggtctggcagccgaaatgctcggtatcacgccgcgccattgcagccgtctgctgaaacgttatcgtcagtccgggccactgggcatgaataaccagagtcgtggtcgcaccggaaatcgcctgctttccgcatcattgactgatcaggccctgaatatcatccgtgaacgctatgccgattttggcgccacactgacgtgggaaaagctcgctgaaaatcacggtttactgatgagtttatga

SEQ ID NO: 212326 - DNA, 537 bp, Klebsiella pneumoniae
atgaccgcttataaccggcgctttggcaaagcaccccggcatgactttgatgttcaccggccacttgaaactgatgatgatctgaccgcatttttcacatggcgggaaccgcgccgtgtttcaaaatccctgacggtgcagtatgacaaagtgctctatctgattgaagacaatgagttaagccgaagggctattggcaagtacattgaggtatggcattacccggatggccggaaagagctccggctaaacggggttgtccttccctactccacctatgatcgccttcagaaaatcgaccagggggctatcgtggacaacaagcgcctcgggcgtacacttgaatttatcaaactggtacaggacaaacgcgacaataaccggtcacaggctctccctgccggagatggcccctcgcgccgacgcaggaaacccacagagaagaaatcccagcgatctctggacgaagacgatatgctcaatgcgctgaagacattacaatcacgttctgacgagattttcggtacaaggaaatga

SEQ ID NO: 212327 - DNA, 1038 bp, Klebsiella pneumoniae
atgaagtatgtgaatctgggtcgtagcgggttgaaagtctcccgtctttgtctcggttgtatgagttatggcgaacctgaacgtttgcctcaaccctggtccctggatgaaaaggcgtcacgaccgctcattcgtcaggcgcttgaagccggcattaatttttttgataccgcgaatatctactcgggcggtagttcagaagaaattacaggaaaagcgctgagagagatggccagacgcgacgagatcgttgtagcgacaaagaccttctttccgtggcgcaactcacccaataccgggtttctttcccgcaaggccatttttcagtctattgacgatagcctgatgcgcttaggcatggattatgtggatctctttcagattcatcgctttgactactccacgcctgttgaagagaccatggaggctctgcatgacgtcgttaaagcaggaaaagcgcgttatatcggcgcatcttctatggaagcctggcgctttgcaaaaatgcagcataccgctgagcgtaacggttggacccgatttatcacgatgcaaccgcaatacaacctgctttaccgggaagaagagcgcgagatgctgcccctgtgtgaagaccagggcgttggggtgatcccctggagtccgatggcacgcggcaggctcacgcgcgactggagtgtcacgtcccgacgaacgcaaaacgatgcctttgcgttaaaaatgtatgagaacgcagcccttctggataagcccgtgattgatgttgttgccagcattgccgaaaagcactcggtgccaagagctcatgttgcaattgcctggctgttatcaaaatccgtcatcacagcaccgatcattggcgcaacgaaaccagaacatctttccacggctatcagcgcgctggacttttcacttagcgatgccgaaatcacggaactggaagttcgctatctgccgcaccccgttgacgggatcattcccccgcttccggatacgccgccttccctcacgccgccttcagcgatccagaactattaa

SEQ ID NO: 212328 - DNA, 945 bp, Klebsiella pneumoniae
atgaatggactaaatcataacgcacttacatgcagtgccgtccccataccgccctgggagcgttctcttcagaccgtggaggcccagccgtacttcaacgtttcacaggcgtcgctcgtgctcgaagggatcgtgttcgatcggaacaataacctgctgtttgttgatgtggcgacggggcgcgtgtttaagctaaccccggagcggcagctttccattgtccttaaggagaattcattcggtgcttccggcctggcggtacacaaagatggacggatctttatcgcctcggtgggcgatatgcagcgtggttctattcgggctatcgaacccaacggcacccgtgagcagatgattgttgcccctgatactggatttcttgtcaacgatctggtctttgataatcagggcggattttatttcactgacagccggggaaattcagccgatccacagggtggggtgttctacgttagtcccaatgtcgggtcaattcatgccatcctgcctggactcgcggtcgggaacggcatagcgattgaccccgccggctctcagatatgggccacagaacacgctaaaaacaggcttcatcgcgtaagactgtcagacaccaccacggtcgccccgtttggttcagttgttacctatcagttcaccgggccggcgccagacggggcccgtgtcgacagcgaaggcaatgtatatgtggccatctcaggccagggccgcgtcatggtcttcaaccgcaacggactgcctattgggcaaattgtgctgcctgaccgcgacaaaggccgtaaccttaaatcgacaagcctggcgatccgccccgggcatcgcgagttgtttattgtcgctaacagcgggaccgaacccggtggagcgatgatttttcgatcgggcgcattcgcgccggcaccgtttcccttttcacatcagtga

SEQ ID NO: 212329 - DNA, 1182 bp, Klebsiella pneumoniae
atgagcaagatgatgcatgaccagccttctgctgccgtacccgcttcccgggaccggcgcaattttctgatcgccggcgccggtctggctttggccgcaaccacccttggcaggagcggcgccgtgatggcgaaaccggctggtcaggacacgcctaacgccccttcggaagctgttccggtccagaaggaaaccttaaccacacgtaaactcggctcgctggaggtgtccagcatgggactcgggtgcctgccgatggtgggttattacggcggaggtccgcgcgatcgtaaagccatggtttcgcttatccgggcagccttcgaacaaggtatcacgttctttgatactgccgaggtctacggcccccatctcagtgaagaatttgtcggggaagcactggcccctgttcgcgatcgtgtggtgattgccaccaagttcggcttcggcgtggaggaggggaagcccacttcccttaacagccatcctgaccatatccgccgcgccgtagaaggctcgctaaagcgtctgaaaacggaccacatcgatcttctctatcagcatcgccccgatccgaatgtgccgatcgaggatgtggcggaaaccgtgaaggcgttgatccaggagggtaaagtgaaacactggggactgtcggaagcgagtgccaggacaattcgccgcgcacatgcggtactccctgtgactgcggtgcagagtgagtatgccatgtggtggcgggaaccagagacgcggatatttccaacgctcgaagagctgggtatcggtttcgtaccttactgcccgactgcccgcagcttccttgccggagcagtcaatccaagccagcggttcgacagcaccgatcggcggcataacctgccacgcttccagcccgatgccctggccaaaaacatggtgctgcttgaattcgcgcagtcgtgggcccgtcgcaaaaacaccactccggttcagttcgcgctggcctgggtaatggcccagcggccctggattgtccctatcccgggtacgacgcaatatccgcacctgatagaaaacagcggcgcaccgcaagtccggttgacggacagtgagctacgcgaaatcgatgcggcgcttgccaaaatctcattgcagggcggccgcgccgatccgtttaccgaaagtcagtttgataaaagttaa

SEQ ID NO: 212330 - DNA, 987 bp, Klebsiella pneumoniae
atgaactatacgcatcttggccgcaccggcctgaaagtcagccgcctttgtctcggaaccatgaattttggtgacgtcaccgacgagaagaccagcgccagcattctggatgaggcgcttgaggcgggtatcaatttcattgatacagcagacgtgtatggcactgaacaatctcccgatatccagcaaggctcggggctgtccgaggaaattattggtcgctggcttcagcagggtggccgccgtgaacgcatcgttctggcgacaaaagtctatcagcctatgggaccgggcccgaacgatcgccggctttctgcttaccatattcgcaaagcctgcgaggacagtttgcgacggcttaagaccgaccatattgacgtctatcagatgcatcacatcgatcgtcatacgccgtgggaagagatctggcaggccatggaactgcttgttcagcagggaaaggttctttatatcggtagcagcaatttcgcgggctgggacattgcgactgcgcagtcagtcgccacggcccgtcatttcctgggtctggtcgccgagcaaagtctttataatctgacagcccgcaccattgagctggaggtcattcccgcatgccgccattttggcctggggttgatcccctggagcccgcttgccggagggctgcttggcggcgtactgaaaaagatggcaagcgggcgccgtgcaaggcccgcgtttgcccgtctaatcgaacagtatcgtccgcagctggaagcctacgagggattatgtgaggacctcggcgaaaccccctccgatgtggccctggcgtggctcctgcagaatcctgtcgttaccgctccactgattgggcctcgtacggtcgaacaactccagcaggcgcttcacgcaacgacagtcacgctatcagacgacaccatgagctgtctcgacgaaatctggcccggccccgggggagaagcgccccaggcttatgcctggtaa

SEQ ID NO: 212331 - DNA, 909 bp, Klebsiella pneumoniae
atgcaaataagcagagctgatgttgccgatcttatttatttcatggcgattgcacgtcatcgcagcttcagccgtgcggcaattgaattaggcgtcagtgcatcagcgctgagtcatgccctgaagggactggaaacccggctcggagttcgcctgcttaatcgcacgaccaagagcgtcacccctacggcagctggtgaggaactggttcagtctgttcttcagcctttcgacaccatagaaggcgcgcttgaatcgcttaaccggtatcgcaatacccctaccggacgtatccgcatcaatgcagccgttgaagcggcaaatcttttgcttgcgccggtcatgcccgcttttatggatcgctatcccgatattgaaatcgatattgtggccagcaaccgtatggttgacgtgactgatgcgggcttcgatgccggcatccgctatggtggcaccgtcccggaggacatggttgcccggcgtttatctgccgatattcgctgggttatcgcggcctcccctgattacctggaacgctacggaacgcctgaacatccggatgatttattacaccatcgctgcatcagcaatcgtctcggtgacgatcgggtttatcgctgggaacttgcgcgagacggcgaaacataccaaatgacagtgccaggctcagtgacggtcaatcatgccgaaacgggtctggtggccgtattgggcggggctggcctgatgtattttccggagcctcttgttgcaccctatgtcaaggatggacggctccgtctggtgcttacggaatggtccccactagaggaaggttttcatatctattattcaagccgccggcaattgccgaccgggcttcgccttctgattgagttcatacaggaggccaggccgctggggttgtga

SEQ ID NO: 212332 - DNA, 519 bp, Klebsiella pneumoniae
atgcgaatattgactgtggttgattatgatgagatgtggccgactttatttgagaacgagcgtactctgttgcagatgacgcttggtaaagtgatatcccggattcatcatattggtagcacctcggtgcctggattatcagctaagccagtaatagatatattaatcgaagttgctaatcttgaagaactggacagtctgaatcaggcaatggagggtgtaggatatactgtgcgtggtgaaaacggcattttaaatcgtaggtactttacaaaaggtggaaatcagcgtagtcatcatatccatgcgtttaccactggggatgctcaaatcataaaacacctggcattccgtgattaccttattaaacacaatgacgtagccattcagtacgctttaatgaaaaaaagcgcgatgttattatgtgaaaatgacagccaccgatacagcatttataaagcggatttcattcagaaacatcttcgtatggcgcttattgatgcggatcacctgggctag

SEQ ID NO: 212333 - DNA, 1251 bp, Klebsiella pneumoniae
atgttgagtaataactgttcgattctgctgattgacgatgatgccgatgtgctggatgcctatacgcagctgcttgagcaagcggggtatcatgtcagtgcctgtaataatccgtttgatgcgcgggagcaggtgccgaaagactggccaggcattgttttaagcgatgtctgcatgcccggctgctccggtatcgatttaatgacgttgtttcatcaggatgacgatctgctgccgattctgcttatcaccggtcacggcgatgtgccgatggcggtggaggcggtgaaaaaaggggcctgggatttcctgcaaaagccgatcgatccgggcaagctgctcacgctggtggacgccgcgctgcgtcagaggcaatcggttatcgcccgtcgccagtattgtcagcaaaaattacaggttgagcttattggccgcagccaatggacggttcggtatcgccagcgccttcagcagctggcagaaacggatattgcggtatggctttacggcgagccgggaaccggccgcatgaccggcgcgcgttacctgcaccagttaggacggcacgctgaaggtccgtttatcgcctgcgagctgactccggctaacgcccatacgcttaatgaactgatcgcccaggcccagggcggaacgctggtcttaagtcaccccgagcatctgactcacgagcaacagcatcagctggtacagctgcagagtcatgagaagcggccttttcgcctgattggtatcggtagcgcttcgctggtggagttggccgccagcagccagatagtggcggaactctattactgcttcgcgatgacgcaaattggctgccagcctctgtcaaagcgacctgatgatatcgagccgctgtttcatcactatttgcaaaaaacctgtcaacggctgaatcatcccgtcccggaggtggatgctggtctgttgaaggggatgatgcgccgggtgtggccaaataacgttcgcgaactggcgaacgccgccgagctgtttgcagtaggggtattaccactcgcagaaacggttaatccgctgatgcacatcggcgagccgacgccgctggatcagcgggttgaggacgtcgaacggcagatcatcaccgaagcgctgaatatccaccagggacgtattaatgaggtggcggagtatctgctgataccgcgtaaaaaactttatctcagaatgaagaagtatggtctgaataaagagcactacaaaggggtttag

SEQ ID NO: 212334 - DNA, 1995 bp, Klebsiella pneumoniae
atgctgcaacgcctgcggcaaatcagtatcagtagcagtctgcgcggggcatttctgacgggggcgctgcttacgctgattgtcagcagcgtaagcctctattcctggcatgaacaaagttcgcagatccgctattcgctggatgagtattttccgcgcatccatgcggcttttctgattgaagggaatctcaacctggtggtcgatcagctcaatgaatttctgctggcgccaaataccacggtacgactgcagctgcgcaaccagattatccagcatctggacaaaatagaacggctaagtcaggggttgtcgccggcagaacgccagcagttgggggtgatattgcaggacagccgcgcgctgctggcggaactggatcgcgtgctctacaacatgtttctggttcgtgaaaaggtgggagagcttgcggcgcggatcgactggctgcacgatgatttcaccaccgagctgaattcgctggtgcaggattttacctggcaacagggaacgctgctcgatcagattgaagcccgacagggggatgcgaggcagtatctgaaacgcgcccgggaagtgcagaatgaacagcagcaggtctataccctggctcgtattgaaaatcagatcgttgacgacctgcgcgacaggctcaatgaactgaaatccgggaatgatgacggcatgctggtggagacgcatatccgctatcttgaaaacctgaaaaaaacggcggatgaaaatatccgtgcgctggatgactggccgagcaccattaccctgcgacaaacgattgatgagctgctggaaattggcatggtgaaaaataatatgccggataccatgcgcgactatgttagcgcgcaaaaagcgctcgtggaagccagccggtccagagaagcgacgctggggcgcttcagaacgctgctggaagcccagcttggcagcagtcaccagcagatgcagatgtttaatcagcgtatggcgcagattgtccgggtcagcggcgggttaatcctggtggcgaccttgctggcgttgctgctggcatgggggctaaaccattattttattcgctcgcggctggtgaaacgctttagcgcgctgaatcaggcggtggtgcagattggtctgggccggaccgaggcgaccattccggtttacgggcgcgacgagctgggacgtattgccggtttgcttcgtcataccctgggtcagcttaatgcgcaaaaacagcagctggaacaggagattggcgagcgaaaagcgattgaggccgatctgcgcgccacgcaggacgagctgatccagaccgctaaactggcggtggtgggacagacgatgaccaccctggcgcatgagattaatcagccgctgaacgcgctgtcgatgtatctttttacggcgggaagggcgatcgaacagggacaggcggagcaggcgcggatgacgttaagcaaagcagaagggctgatcaaccgcattgacgcgattatccgctccctgcgccagtttacccgccgcgcagaactggaaacgccgctgcatccggtcgatttgcgtcagacgtttaccgtggcgtgggaactgttggcgatgcgtcataagcctcagcaggggacgctggtgataccggatgacactgtctggatccagggggacgaagtgcgcgtccatcaggtgctggtgaacgtgctgtccaatgccctcgacgcctgcccgcacgccgcgcaaatcaccgtgagctggcaaatccagggcggaaggctgtgcgtgttgattgccgataacggccctggctggcctgcggccttactcccttcgctgttaaagccgttcactaccagtaaaaccgtggggctcggaatagggctttcgatatgtgtttcgctgatgacgcaaatggaaggggcgttacgcctggcgtcgacgtttacacgcagtgcctgcgtggtgctggaattcaatttgacggatgtaaaagatgttgagtaa

SEQ ID NO: 212335 - DNA, 1272 bp, Klebsiella pneumoniae
atgaacgggatcacaaacatatttcttcgtggggtcgggataatgagcaaaatgttcgcgctgctgctgctgagcgcatggctgagaccctgtgcggcgcaaggcaatgagctggtgatggcgacgacattttctcccagcgccaccgtgtggattatcgatcgctggcagcaagagtcggggtcggtgatgataaggacgctcaaccgcaccagcgcctcgctggaacagttgcttgatacggcaaatgccgaaaatgtcgatctgatcctgacttcgtcgccgatgctgctgcagcatcttcaggagcatcaaaaactggcgccgttcagcggtgcgccggcagtaagccaacatcttgtgccggaatccattcgctccacctccgtggccgtggcgatctccgggttcggtttgctgatgaatcgcttggcactgatgacccggcatctgcctgcgccagcggactgggatgacctgaccgatccccgttatcagggggcgctgctgatgagcagtccgtcgcgttcggataccaaccatctgatggtggagtcgctgctgcaacaaaaaggctggattaaaggatgggaaacgctgttgacgacggcgggaaatctcgtgaccatttcatcccgcagctttggggtggcagataagattaaaagcggcctgggcgtggctggtccggtgattgataattacgccaatctgctgctgaacgatccgcacctggcttttacctatttccctcagtcggcggtttcgccgacctatgtcgcagtgcttaaaaacagccagcacgccagcgaagcgcggcggtttattcgctatctgttaagtccggagggccagacgatcctcgccgacgctaataccgggaagtatccggtaacaccgctggcgccaggcaatccacgggcggcgcagcaggcgatgctgatgaatcaaccgccattaaactatcgattgatcctcaaacgtcagcgtttggttcagcggatgtttgatacggcgattagctttcgtcttgcccagctcaaagacgcctggcgagcgctgcatagcgcggaggtccgtcttaagcgtccgctgcccgagatacgggcgctgctcacccgtgtcccggtggatccggccagcagcgaggatgaagcctggctggctcagttcgacaacaaaagttttgcggaacagcagatgatggagtggcagctctggcttctcaacaaccagcggcaggcgattactaaactggaagaactgaaatga

SEQ ID NO: 212336 - DNA, 1392 bp, Klebsiella pneumoniae
atgttatcattattaaaaaaaggcccgtcggcgaataaagttcctgctgagaaaattcaggcaacctatggtcgataccgtatgcaggcgctgctaagcgtatttctgggatacctggcgtactatatcgtgcgcaataacttcaccttatccacgccctatctgaaagaacagttagacctcagcgccacgcagatcggtttgctcagcagctgtatgctcatcgcctacgggatcagtaaaggcgtaatgagcagcctcgcggataaagccagcccgaaagtctttatggcctgtggcctggtgctgtgcgctatcgtcaacgtcgggttaggattcagtaccgcattctgggtcttcgctgcgctggttgtcctgaacggcctgtttcaggggatgggggtcggcccctcttttattactattgcgaactggttcccgcgccgtgagcgtggccgcgtaggggcgttctggaacatttcccataacgtcggcggcggaattgtcgccccgatcgtcggcgccgcattcgccattctcggcaccgagcactggcagagcgccagctacattgtaccggcctgcgtggcggtggtattcgccattagcgtactggtgctgggtaagggttcgccgcgcgaggaaggtctgccttcgctggcagagatgatgccggaagagaaagtggtgctgaagaccaaacacggccagaaagcgccggagaacatgagcgcatttcagatcttctgtacctacgtactgcgtaacaaaaacgcctggtatgtctcctttgtggatgtgtttgtctatatggtgcgtttcggcatgatcagctggctgccaatttacctgctgacggtgaaacatttttccaaagaacaaatgagcgtcgcattcctgttttttgagtgggcggcgattccgtctactctgctggccggctggctctccgacaagctgtttaaagggcgccggatgccgttagccataatctgtatgacgctaatcttcatctgtctgatcggctactggaaaagcgaatcgctactgatggtcacggtattcgcggcaattgtgggctgccttatttatgtcccgcagtttctggcctcggtccagaccatggaaatcgtccccagctgtgccgtcggttcagccgtgggtctgcgcggatttatgagctatatctttggcgcatcgttaggcaccagcctgttcggcgtaatggtcgataaaatgggctggcacggcgggttctatctgctgatgggcgggatcgtctgctgcatactcttctgctacctctctcatcgcggcgcgctggaacttgagcaacagcgtaaaatcaccgagcaggaagaggcccgactggcactggctgacgcacagtaa

SEQ ID NO: 212337 - DNA, 450 bp, Klebsiella pneumoniae
atgggattattaaattttgtgaaagaagcgggcgagaaaatatgggatgccgtctccggcgacagtaaagaagatcgggctgaaaagctgaaaaaacatatcgatggacttaatctgcctggcgccgaaaaggtcaatattgatgttgcggaagatggcaccgcaacggtcactggtgatgtcgcttcgcaggaggataaggaaaaaattctggttgcggtcgggaatgtcactggcgtaggccaggtcagtgacggcgttaaggtgacgcaaagcggggcggaaagtcgtttttacacggtcaaatccggtgacactctgagcgcaatctcaaaagcgatgtatggctcggccaatgagtatcaacgcatttttgaagccaataaaccgatgctgacccatcccgacaaaatctatccgggtcaggtgctgattatcccggcgaagtag

SEQ ID NO: 212338 - DNA, 873 bp, Klebsiella pneumoniae
atggaatctgtcatcatccccgtaagccagggcggctttgtcgccgccacgctctggcaaagacacaaagccaaagcattggtgatcgttcacccggcgacggccgttgtacagggattttataaaggattcgctgaatacctttataaaagggggtttagtgtcattacttatgattaccggggcactggtctttcgaagtccgggagagtccgtcacaacaaaaacaccatgtccgactggatcgagcaggacgtcggatgcatcaccgcgtgggcgaaagcccgagcccctggccttaccctgctggcgattgggcacagtattggcgggcatgccgtgctgttatcttccgcctccaccgacctgcgagccgccgtcatggttgcctcacacgcaggcgtgacaagcactatcagccaaacgaaggaaaagctgcgagtatggtgcttactgcgcgttttggggccggcactttgccggctctttgggtatatgccagccagacgtctcgggctgggtgaagatttaccggctccggcgatgcttcagtggggacgctggagcgcgatgcctgaatatttctatgacgacccggagtgggatgcgcgtcagcgggcaggaaagataaccttacctattctggtgttgggttttgatgacgacccttgggctaatacagaagccatctcacgcctgcttgctccagcgcaaaacgcaaaaatagaacgccgtgaaatacggcgggcggattacggactttcatccattggtcatatgggcttctttcgtacccggaatgcggagaaattatggcccctcgtcgcacaatggctggagagacattgcccggataagaggcggacgacctga

SEQ ID NO: 212339 - DNA, 645 bp, Klebsiella pneumoniae
atggaagcgtttagcgaacgcctgctgcgcgaacatcaaccggcgtggcaggcgatgcagcagcacccgtttgtgactgatatcgaacaggatcgtctgccgacagtcgtcttcaaccgctatctggtgtttgagggcaactttgtcgcgacggcaatcgcgatttttgccctcggggtcagcaaagcgccgggtattcaacagcagcgctggctgattggcgtgctgaatgccctggttgatatacagatcgcgtggtttgaacaggtgttgtcagcgcggcagatcgatcccgctgagtacccggatgatttgcccggggtacggcgctttcgcgacggtatgctgcggaccgcccacgagggcagctatgagcagattgtgaccctgatgttcggtgcggaatggatgtactatttctggtgccgacgggcgagcgaacattatcagagcgatgctgatttacgacgctgggtggaaatgcacgcggaggacgaattttatcagcaggctctctggctaaaaaacgaactcgaccgctgcgccatggcgctgagtgaagacgaaaagcaggcgttatcggcgctttacggcgaggtgctgcagtgggaaattgatttccatcacgcggcgtacgaggagtag

SEQ ID NO: 212340 - DNA, 714 bp, Klebsiella pneumoniae
atgcgtgatctgatccttcaactcagcaaaagttcgatttattcaacaaagcctggtctgattattgaaaatcatggcgatattcctttctctaaacctgaggatatcggccatgaaacctcagcgctgatggcggtcattaccgagaaagttcgtgaacgttttgctgtgccgctgggcattaacgttctggctaacgcggcgatcccggcaatggcgatcgccctggcgggaggcgccgatttcgtccgcgtaaaccagtgggccaacgcctatatcgccaacgaaggatttatagaaggggcggccgctaagacgctgcgctaccgcagtatgctgcgcgctgaacatattcgcgtttttgccgatagccacgttaagcacggtagccatgccattgtcgccgatcgttcgattcaggaactgacgcgcgatgtcgatttcttcgaggctgacgcggtgatcgccaccggccagcgtacgggcgatagcgccacgatggcggaaattgacgagatccgcgcggcgacggaactaccgctcctggtgggctccggggtgacaccggctaacgtgaagcagatcctcgggcggactcagggggtcattgtggccagtacaatgaaggtcgatggcgtctggtggaacgatgttgagctggcccgggtgaaacattttatgtcggtcgcgcaggccgcgctggaggaagcttaa

SEQ ID NO: 212341 - DNA, 1053 bp, Klebsiella pneumoniae
atggcagtacgaaaactcaccacaggaaaatggctttgcgaatgttaccccgccggacgtagtggacgtcgtgtgcgtaaacaattcgccaccaaaggcgaagctctggcttttgagcgtcacacgatggaagaaaccgaagcaaagccctggctgggtgaatcagtggatcgtcgaacactgaaagacgtggttgaactatggttcaaactacatggtaaatctctgactgctgggcagcatgtctatgacaaattgctgctgatggttgacgctctgggcaatccccttgcaaccgatctcacatctaaaatgtttgcccattatcgagataaacgactgacaggtgagatctacttcagcgagaaatggaagaaaggagccagcccggtcaccattaacctggagcaaagctatctaagtagtgtttttagcgaactatcccgtctgggcgaatggtcgtatccgaacccactggagaacatgcgaaaattcaccatcgcagaaaaagagatggcatggcttacccatgagcagattgttgaattgctggctgattgcaaacgtcaggacccaattctggcactggtagttaagatatgcttaagcacaggcgcacgctggcgtgaagccgtaaatcttacccgctcacaggtgaccaaataccgaattacctttgtcagaacaaaagggaagaaaaacagaagcatccctatcagtaaagagctttacgaagagatcatggcgcttgatgggttcaatttcttcacagactgttattttcaatttttatccgtgatggaaaaaacgtctatcgtgctccctcgcggtcaactcacacacgttctgcgccatacgtttgcggcgcacttcatgatgtcgggtggaaacattctggccttacaaaaaattctcggacaccacgatataaaaatgactatgcgttacgcacatctggcaccggatcatctggaaacggcgctccgtttcaatcctctggcaacgctgccaagaggcgacaaagtggcggcagcggttggcattaccccgtaa

SEQ ID NO: 212342 - DNA, 564 bp, Klebsiella pneumoniae
atggcccgtagaccaaacgatccgcagcgccgcgagcgcatcctgcaggcgacgctggataccatcgcggcgcacggcatccatgcggtgacgcaccgtaaaatcgccacctgcgcgaatgtgccgctgggatcgctgacctactatttcagcggcattgaggcgttaattgaggaggcgttcagcctgtttaccgccgagatgtcggcgcagtatcagcaaggcttcgtcggggtaacgaaccgggaacaagcctgcgatgccatcgcggatctgatcttcagcgcccaggtgaccacggcgcgcaatatggagctgatgtaccagctgtacgcgttctgcagcagtcagccggcgctgaaggcggtgatgcagaactggatgcggcgcagccagcagacgttggagcagtggttcgcccccgataccgcccgcggtctcgacgcctttattgaagggatgaccttgcactttgtcaccgaccgcgcgccgctgtcgaaggcggcaatccgcatgatggtcgggcagctggcgggggagagggcgcaggaagaggggcgctga

SEQ ID NO: 212343 - DNA, 1203 bp, Klebsiella pneumoniae
atgacgacgcaatcctcgcgcagagcgctgcagcttcggctatgggcgctgtttatgttctttttcatccccggcttgttaatggcctcctgggccacccgcacgccggcgatccgcgatctgttggcgctatccaccgcagagatgggcgtggtgctgtttggtctgtcggtggggtcgatgagcggtattctctgctcggcgtggctggtgaagcgctttggcacccgcaaggtcatccgcaccaccatgtccttcgccgtgcttggcatgctggtgctcagcctggcgctgtgggtcacttccgccccgctgttcgccttcggcctggccatcttcggcgccagctttggctctgcagaagtcgctattaacgtcgaaggcgcggcgatcgagcgggagatgaataaaacggtgctgccgatgatgcatggcttctacagctttggcaccctgttcggcgccggggtgggcatggcagtgaccggattcggtctgccggccgccccgcacatcctggcggctgcgctggtggctatcctgcccatcgccattgctatccgcgccattcccgacggcaccggtaaaaatgccgccgaagtcgcccacggtgaggcgaaaggtctgccggtgtggcgcgacgcgcagctgctgctgatcggcgtcattgtcctggcgatggcctttgccgaaggctcggccaacgactggctgccgctgctgatggtggatggccacggctttagccccacctccggctccctgatttatgccggtttcaccctcggcatgacgctgggccgctttaccggcggctggtttatcgatcgctacagccgggtggcggtggtccgcggcagcgcagtgatgggcgccctcggcataggcctgatcatcttcgtcgataacccctgggtggcgggcatctcggtgctgctgtggggcattggcgcctcgctcggcttcccgctgaccatctccgccgccagcgataccgggccggacgcgcccaagcgcgtcagcgtggtggcgatcaccggctatctcgctttcctcgtcgggccgccgctgctgggtttcctcggcgaacacttcggcctgcgcagcgccatgatggtggtgctgggtctggtgatggtggcggcgctggtcgcccgcgcggtggctaagccacaatctgaacccgttatggagaacagctaa

SEQ ID NO: 212344 - DNA, 813 bp, Klebsiella pneumoniae
atgagcatcaaactgattgcggtggatatggacggcacctttttaagcgatgccaaaacttacaaccggccgcgcttcctcgcccagtaccagcgaatgcgcgaacagaatattcgcttcgtggtcgccagcggcaaccaatattatcagctgatctcctttttcccggagatcgcccatcagatcgccttcgtggcggaaaacggcggctgggtggtgagcggcaatgaagacgtcttcaactgccaactgccggttcaccacttcaacgccgtggtcgaccatctgcagacgttgccgaatatcgaaatcatcgcctgcgggaagcgcagcgcctacaccctcaatcgctacaacgacgcgctgaagacggtggcggcgaagtattatcaccgccttgaactggtggatgattttaaccatctcgatgacaccatcctcaaatttggtctcaacgtgccagacagcctgatcccggaaattcagccgaagctgcacgcggcgctgggggacatggtcaccgcggtggccaccggctacggcagcatcgacttaattatcccgggtgtgcacaaagccaacgggctgcgcattttgcagcagcgctggggcattgaggatcacgaggtagtggcgttcggcgacagcggcaacgatatcgaaatgctgcagcacgccgggtttggctttgccatggccaacgcccgggaagacgtcaaagccgtcgcccgctatcaggcgccgcataacaacgaagaaggtgtcctgcagattattgataaggtgttggatcgcgaagcgccgttcgcctga

SEQ ID NO: 212345 - DNA, 1233 bp, Klebsiella pneumoniae
atgcaaaattattcgctttcaggccgccgcctcggaaggcaggcgctgttgttcccgttatgtctggtgctgtacgagttttccacttatatcggcaacgatatgattcagccgggcatgttagccgtggtgcaggaatttcaggtgggcaacgaatgggtacctacttcaatgactgcctatctggcaggcggcatgtttttacagtggctgctggggccgctgtcggatcgtattggccgccgtccggtgatgttgaccggcgtagtatggtttatcgtcacctgcctggcgacgctgctggcgcagaccattgagcagtttaccctgctgcgcttcctgcaggggatcagcctgtgctttatcggcgcggtgggctatgcggcgatacaggagtcctttgaggaggcggtgtgtatcaaaatcaccgccctgatggctaacgtggcgctgattgccccgctgctggggccgctggtgggcgccgcctgggtgcatgtcctgccgtgggagatgatgtttgtcctgttcgccgtgctggcggccatctcgttcttcggcctgcagcgggcgatgccggagaccgcgacgcggctgggcgaaaagctgtcggtgaaagagctgggccgcgactatcggctggtgctgaagaacctgcgcttcgtcgccggcgcgctggccactggctttgtcagcctgccgctgctggcgtggattgcccagtcgccggtgattattatcagcggcgaacaggccaccagctatgagtacggcatgctgcaggtgccgattttcggggcgctgattgccggcaacctggtgctggcgcgcctgactgcgcgtcggaccgtgcgctcgctgattatcatgggcggttggccgatcatgtttggcctgatcctctctgcggcggcgaccgtggtctcttcccacgcttatctgtggatgacggccggtctgagcttctacgccttcgggattggcctcgcgaacgccggcctggtgcgtttaaccctgttcgccagcgagatgagtaaaggcacggtctcggcggcgatgggaatgctgcagatgctgatcttcaccgtcggcatcgagctcagcaaacatgcttacgagctgggcggcaacgggctgttcagcctgtttaacctgctgggtggggtactatggctggggctgatgatttactttctgaaagataaaagcgtcggcaattcgcagcaggggtag

SEQ ID NO: 212346 - DNA, 594 bp, Klebsiella pneumoniae
atgctggaaaatattaactatgcgctgttcgccctgctcaacgcgacgcctgcctcgccgcagtgggccattgagatggcgatcttcatcgctaaagatctgattctgatcgtgcctctgctggtggtgacattgtggctgtgggggcctgcccagcggcagatggtgtttaagctgatgctggcgctgacgatcagcctgaccgtgtcgtgggcgatcggccacctctatccgcacgatcggccgtttgtcgccggcgtaggctataacttcctgcaccacgcggcggacgactccttccccagcgaccatggcaccgtcagctttacctttgccctggccttcctgttctggcatcgcctgtggtccggcgccctgctgatggccattgccgccgccatcgcctggtcccgtgtctatctcggcgtgcactggccgctggatatggtcggcgggctgctggccgggatgtgcggctgccttggcgcggcgctgatctggcacacgttcggcccggcgctataccatcagctgcagcggctgtatcgtctctgcttctccttgccaatccgcaaaggctgggtgcgcggctaa

SEQ ID NO: 212347 - DNA, 759 bp, Klebsiella pneumoniae
atggaaactcgccgtgacgaacgtatcagtcagctcattcaggcacttaaacgcagcgataagctgcatctgaaagaagccgcttccctgcttggggtgtcggaaatgaccattcgtcgcgacctcaatggccacagcggcccggttgtgctgctcggcggatacattgtgctggagccgcgcagcgccacccattatctgctcagcgatcaaaaaacccggctggtcgaggaaaaacgccgtgccgctcgccatgcggccgcgctgctggaggcccatcagatggccttcttcgactgcgggaccaccacgccgtggattattgacgccattgacgatgccctgcccttcaccggcgtctgctactccctgaacacctttctggccctgcaggaaaaaccccagtgccgcgcggtcctgtgcggtggggagtttcatgccagcaacgcgatttttatgccgctgagccttgaggataccctcagccatctgagccctgatatcgccttttactcggcggcggggatcgactgcgagcagggggcgacctgctataacctggaagagctgccggttaagcactgggcgatgcgtcacgcgcgctatcacgtgctggtggtcgaccacagcaagtttggcaaagtgcgtccggcgcgcatgggggcgttagcgaaatttgacgtgattgccagcgatatctgcccggatgatgagctggtcgcgctggcgaaggcgcagcagatttccctactgtattga

SEQ ID NO: 212348 - DNA, 1212 bp, Klebsiella pneumoniae
gtggctcttatgatgcatgacgctttttcccttcgcggcctcgcggcaggttgcgcgctgttatttcttgtcgcacctgcggtgcaggctgcggaacaactccccgacgccccttcaattgacgctcgcgcctggatcctgatggactatgccagcgggaaggtgctcagcgaaggcaatgccgatgaaaaactcgacccggccagtctgacgaagatcatgaccagctacgtggtagggcaggcaataaaagcgggaaaaatcaaactgaccgatatggtgaccgttgggcgcgatgcctgggcgaccggcaacccggcgctgcgcggctcatcggtgatgttcctcaagcctggcatgcaggtttccgtagaagatctgaacaaaggggtcatcattcagtccggtaacgacgccagcattgcgattgctgactacgtagcgggcagccaggacgctttcgttagcctgatgaacggctacgccaaaaagatggggctgaccaacaccacctttatgaccgtccacggccttgacgcgccggggcagttcagcaccgcccgcgatatggcgctgctgaccaaagcgctgatccacgacgtaccggaagagtacgcggtacataaagagaaagagttcactttcaataaaattcgccagccgaaccgcaaccgcctgctgtggagcagcaacctcaacgccgatggcgtgaaaaccgggaccaccgccggggccggctataacctcgtctcctcggccactcagggtgatatgcgtttgatcgccgtggtgctggggaccaaaaccgaccgcattcgctttaacgagtcagaaaaactgctgacctggggcttccgcttctttgaaaccgtgacgccgattaaaccagatgccaccttcgttacccagcgcgtgtggtttggcgatagcaatgaagcgaaactgggggctggcgaggcgggctctatcactttgccgaagggccagctgaaaaacctgaaagccagctataccttaaatcagccgcagcttaccgcgccgctggagaaggggcaggtggtcgggactatcgactttaagctaaatgataaaaccattgaacagcgtccgctgattgtcatggagtcggtaaaagagggcggcttcttcagccggatgatcgacttcgtgctgatgaaactgcacggctggttcggcagctggttctcctga

SEQ ID NO: 212349 - DNA, 627 bp, Klebsiella pneumoniae
atgattacactgtggggacgtaataactcgaccaacgtgaagaaagtacgctgggtgctggaggagctggatctgccttatcagcagatcctcgccgggctggagtttggtctcaaccatgacccggaatatctggcgatgaacccgaacgggctggtgccgctgttaaaggacgatgccaccggggtggtagtgtgggaatcaaatacgattattcgctacctggcggcccagtatggcgttgaccgtctgtggcttgccgcgccggcgcagcgcgcgcaaggggaaaagtggatggattggtccaacggcaccctctcacccgcccatcgcccggtattaatgggcctggtgagaacgccgccggagcagcgcgacccggcggccatcgccgcggggatcagcgcctgcgaagcgctgttcgccatgctggatgacgaactggccaaaatgccgtggctctccggcgagcagttcggccttggcgatattgccgtcgctcccttcgtctacaatctgttgtcgatcctcgacagctggcaaccgcggccccatctgcagcgctggtatcagcagattagccaacgtcctgcctggcgcgaagtagtgcagatcccggtgacctga

SEQ ID NO: 212350 - DNA, 1110 bp, Klebsiella pneumoniae
atgcgtccgatcccactgctgttgatattgagcgccttagcgctaccagccctgagccgggccgcggtgcgggtggaggtattgcaaaaccggctggcccagccgtggggcatggcctttctgcctgacgatcagggcatactgatcaccctgcgcggcggcgagctcaagcgctggcagccgggtaaaggtctgtcggcgccgatagccggcgtgccgcaggtatgggccaacggccagggtggcctactggacgtggcgctggccccggatttcgcccagtcgcggcgggtgtggctgagctatgcggaaagcgacgccagcggtaaggcgggcaccgcggtgggctatgggcggttgagcgaggatgccacgcagctgacgaactttaccgtggtctttcgccagcagccgaagctctccgtcggcaatcattttggcggcaggctggtgttcgacggcaaaggatatgtgtttatcgggctgggcgaaaataatcagcgtgccaccgcccaggatctcagcaagctgcaggggaaagtggtccgcctgacggagaccggaggtgtaccgccggataacccttttgtcggccgggctgacgccaggccggagatctgggcttacggcatccgtaatccgcagggcatggcgatgaatccctggagcgaggcgctgtggctgaacgagcatggcccgcgcggcggagatgaaattaatattccgcaggcggggaaaaattacggctggccgctggcgacgcacggtattaactacagcggcctgcccattccggaagcaaaaggcaaaacggttccggggaccgaacctcccctgtatgtctggccggtctctcccggggtgagcgggatggccttttattcggcgccgacctttccccagtggcagcataagctgtttatcggcgcgctgaaggagacatcgctgattgtcctggcggtggacggtaatcaggtccgcgaggaggggagattactggaggcgcgcggaaaacgcatccgcgatgttcgcgtgggacccgacggctatctgtacgttttaaccgacgagtctaacggcgagctattgcggttgagtcccgaggcttag

SEQ ID NO: 212351 - DNA, 384 bp, Klebsiella pneumoniae; identical to SEQ ID NO: 136296

SEQ ID NO: 212352 - DNA, 1242 bp, Klebsiella pneumoniae
atgacgtccggtaaaagaaactaccttctgttgagtcttttcgatttcctctacctgttcgcctggtcgtcgaccatggctttcttcgttatctggaccacccagcatcttggcatcagcgccacgaagaccgggctgctttactcggtcaacgcctttatcgccctgctgatgcagcctttcttcggctttatctctgacaagttcggcctgaaaaaacggcttatctggctgctggtcgccctgctcctgccggtgggccccttctttatctacgtttacgcgccgctgctggtgcacaacttttggtttggcgccttgctgggagggatctatctggggatcatctttaactccggctgcggagtaatcgactcttatatcgataagatttcccggcgctatcagttcgaatatggtcgtgtgcggatgtggggctcgttaggctgggcagcggcggcctggattgtgggtaaatatatcgacagcaatcctaatctggccttctggctcgccagcctcgccattgtcatcgccgccatctgctttatgctaaccaaaattgaattaaccgacgccgatgtggcgcgaagcgaatcgctgaaggtctctcatgcccttgagctggcgaagaatggtcagttctggatgctgctgctctttaccctgttcgtcacgcagatttacgacacctacgatcagcagtttgcccagtacttctcgctacagttcccgacgccggaggaaggcaaccgctggtacgggatcctcgcgtctattcaggtctgcggtgaaaccctgttcctctgcctgatgccatggtttgttaaccggaccggcgccaaatgggcgctgatcatcgccgggctgatcatgtcggtacgtattgtcggctcagccgtgcccctcggcccggtgtggattggtgcggtgaaaatgatgcatgctctggagaagccgttgattctggtatcggtctttaaattcatcgccgccaacttcgaccacaagctctcttcgacggtctatttgctggtgctgttcgtcgcctcgatcgccaccgccatttactctccgctggcaggctatctgtacgataccattggcttcgccaacacctatctgattctcggcagcgtcgccgggctctttaccctgatctctattttcacgctgcaggataagcgcgagccgaaaaaaaccggcgccacgccctccgcagccattaacccggcgcaataa

SEQ ID NO: 212353 - DNA, 1326 bp, Klebsiella pneumoniae
atgagcaatgtcacgcatcagccgaaaatcggcttcgtctccctgggctgcccgaaaaacctcgtggactcagagcgtatcctgaccgaactgcgcaccgaaggttatgacgtcgtaccgacctacgacaacgccgatatggtgatcgttaacacctgcggctttattgatagcgctgtgcaggaatcgctggaagcgatcggcgaagcgttgaaagagaacggcaaggtaatcgtcaccggctgtctcggcgcgaaagaggatcagatccgcgaagtgcatccgaaggtgctggagatcaccggtccgcacagctatgagcaggtgctggagcatgtccaccattatacgccgaagccgaagcacaacccgttcctgagcctggtgccggaacagggggttaagctgacgccgcgccactacgcctacttaaaaatctctgaaggctgcaaccatcgctgcaccttctgcatcatcccgtccatgcgtggcgatctggtgagccgtccgattggcgaagtgctggccgaagccaaacgcctcgctgacgccggcgtgaaagagctgctggtgatttcgcaggacacctccgcctacggcgtcgacgtcaagcaccgcaccggcttccacaacggtatgccggtgaagaccagcatggtcagtctgtgcgaagagctggcgaagctcggcatctgggtgcgcctgcactatgtctatccgtacccgcacgttgacgatgtgatcccgctgatggcggaaggcaagattctgccgtacctcgatattccgctgcagcacgccagcccgcgtattctgaagctgatgaagcgtccaggttctgcggaccgtcagctggcgcgcattaagcagtggcgtgaaatttgcccggatctgaccctgcgctccacttttattgtgggcttcccgggcgaaacggaagaagatttccagatgctgctcgacttcctgaaagaggcgcgtctcgaccgcgtcggctgcttcaagtacagcccggttgaaggcgctaccgccaacgagctggcggaccaggtgccggaagaggtgaaagaagagcgctggaaccgctttatgcagctgcagcagcagatctctgccgagcgtctgcaggagaaagtggggcgcgaaatcctggtgctggtagatgaagttgatgaagaaggcgccattggccgcagcatggccgacgctccggaaatcgacggcgcggtgtacctgaacggcgaaacccgcgttaagccgggcgacgtggtgcgggtgaaagtcgagcacgccgacgaatacgacctgtggggtacccgggtctag

SEQ ID NO: 212354 - DNA, 594 bp, Klebsiella pneumoniae
atgagggaaagctccgccgggagtcctttatgttatctgcggcttcagcgtagtttgcgctcccggttaatcgtctgcgttatgtctcttatggcgcagggagcgcacagggggcggccagtcgccgccgccccctgtacccccgggctccggccagcaacatcgccactgcgtggtgccttcgacttatccctgcaggcttcgggttgggccgaagcagcgtccctgcaaaacacggccctcagcccgcatccatgcggcctgcccctgcctttcgggaacgtctcagcgatgttgaggccgccagcaccggcagtttcagcaacaatggtgaataaattaacggcaggccgcacgaactgtaggccgggtaagacgttagccgccacccggcaatatgaaggcatgatgactgataaattacccggcggcgctgcgcttgcgcgggcctggggggatgagcctacgggaggaccccgtaggccgtggaatgcgctaagccgctatccgggaagctggactagacccgggtaccccacaggtcgtattcgtcggcgtgctcgactttcacccgcaccacgtcgcccggcttaa

SEQ ID NO: 212355 - DNA, 912 bp, Klebsiella pneumoniae
gtgcgattgcttaactggagaaggcaggcggcgctgaacgccatgccgggcatcagacccggcgagatccataccccctggcatgagttctggcggcgctttcgtcgccagccggtggcgatgggcgctggtattttcgtgctgttgctgattgcggtagccatcgttgccccatggatagcgccgtacgatgcggaaaattatttcgactacgaccgtctgaacgagggaccttcgctggtgcactggttcggagtcgactccctgggacgggatattttcagccgggtgctggtcggggcgcagatctcgctggccgccggggtactggcggtgctgattggcgcggccatcggcacggtgcttgggctgctggctggctactatgagggctggtgggaccggctcattatgcgactttgcgacgtgttgttcgcctttccggggatcctgctggcgatcgcggtggtcgccgtcatgggcagcgggatggccaacgtgatcatcgccgtggcgatcttctcgatcccggcgtttgctcgtctggtgcgcggcaatacgctggttctgaagcagcagacctttattgaatcggcgcgcagcatcggcgccagcgacgccaccattctgttcaaccatattctgccggggacggtgtcatcgatcgtggtttatttcaccatgcgcattggggtatcgattatttcggcggccagtctgtcgtttctcggcctcggcgcgcagccgcccaccccggagtggggcgcgatgctcaacgaagcgcgggcggatatggtgatgtctccgcacgtggcgctctttccggcggtggcgattttcgtgaccgtgctggcgtttaatctgctgggagatggcctgcgcgatgcgctggatccgaagttaaaggggtag

SEQ ID NO: 212356 - DNA, 921 bp, Klebsiella pneumoniae
atgctgaattatgtgattaagcgcctgctgggcctgatccctactctgcttatcgtcgcggtgctggtgtttctgttcgtccatatgctgcccggtgacccggcgcggctgattgccggacctgaggccgatgcccaggtggtggcgatggtgcgccagcagctggggcttgaccagccgctgcatgtccagttctggcactacatcaccaacgtgctgcgcggcgattttggcatttccatggcctcgcggcgtcccgttgccagtgagatagccagtcgctttatgcccacgctgtggctgacgctggccagcatgagctgggcggtactgttcgggatggcggcggggattgcggccgcggtgtggcgcaatcgctggcccgaccgtctgggaatggcgctggcggtgagcggcatttcgtttccggcttttgcccttggtatgctgctgatgcaggtgttttcggttgagctgggctggctgccgacggtgggggccgacagctggcggcactatattttgccgtcgttgacccttggcgcggcggtggcggcggtcatggcgcgctttacccgcgcgtcattcgtcgatgtgctgcatgaagactatatgcgtaccgcccgggcgaagggggtgagcgaaacgagggtggtgctcaagcatggtctgcgcaatgcgatgatcccggtggtgaccatgatggggctgcagttcggctttctgctcggcgggtcgatcgttgtggagaaggtgtttaactggccggggcttgggcgcttgctggtcgattcggtggagatgcgcgattatccggtgattcaggcggaagtgctgctcttttcgctggagtttattcttatcaatttagtggtggatgtgctgtacgcggccataaacccggctatcaggtataagtaa

SEQ ID NO: 212357 - DNA, 1542 bp, Klebsiella pneumoniae
atgacacaacctgtttcacgcaaatggtggctggcgctgagtatcgcggcggccctggcgagcgctcccgcctttgccgccaaagatgtggtggtggcggtcgggtctaacttcacgaccctcgacccctatgatgccaacgataccctgtcgcaggcggtggcgaagtccttttatcaaggcctgttcggccttgataaagagatgaagctgcaaaacgttcttgctgagagctataccgtgtcaccggacggcctggtgtacaccattaagctccacagcggggtgaaattccaggatggcactgactttaacgccgaggcggtaaaggctaacctcgatcgcgcgagtaacccggataaccatctcaagcgctataacctatataaaaatatcgccagcaccgaggcggtcgatccgactacggtcaaaattaccctgaagcagcccttctcggcgtttattaacattctcgcccatccggcgacagcgatgatttcgccggcggcgctgaaaaaatatggtaaggatatcggcttccacccggtgggcaccgggccttataagctcgacacctggaaccagacggattttgtgaaggtcagcaagttcgatgggtactggcagccggggctgccaaagctggattctatcacctggcgtccggtggtggataacaatacccgggcggcgatgctgcagaccggcgaggcgcagttcgccttcccgatcccttacgaacaggcgccgctgctggcgaaaaacagcaaactggagctggtggccagcccgtcgatcatgcagcgctacatcagcatgaacgtgacgcagaagccgttcgataatccgaaggtacgggaagccatcaactatgcgattaaccgccaggcgctggtgaaggtagcgttcgccggctacgccaccccggcgaccggagtggtgccgccgtcgatcgcctatgcccagacctacaccgcctggccatacgatccggcgaaagcgcgccagctgctgaaagaggcgggctaccctaacggtttcagcaccacgctgtggtcatcacataatcacagcaccgcgcagaaagtactgcagttcacccagcagcagctggcgcaggtggggattaaggcgcaggtgacggcgatggacgctggtcagcgggcggcggaagtggaaggtaaagggcagaaagagagcggggtacggatgttctataccggctggtccgcctccaccggtgaagccgactgggcgctgtcgccgctgttcgcctcgcaaaactggccgccgacgctgtttaataccgcgttttacagcaacccgcaggtggataacgcgctgagcgaggcgctgaaaaccaccgatccgcaacagaaaaccaaactctataaagaggcgcaggatattatctggaaagagtcgccgtgggtgccgctggtggtcgagaaactggtctccgcccacagcaagaacctcaccggtttctatatccagccggataccggctttagcttcgaacaggcggacctgacgccgtga

SEQ ID NO: 212358 - DNA, 1860 bp, Klebsiella pneumoniae
gtgtcgcaaactcacgaaaccgatacctgcgaagtgctggtggtgcgcaacctgaacgtggcgttccgccagcaggatgcgccggaggtgcaggccgtgcgtcagctttccttcagcctgcgccgcggcgagacgctggcgatagtgggtgagtccggttcgggaaaatcggtgaccgcgctggcgctgatgcgtctgctagacgcggccagcagcgaggtgaacagcgaggggctgtggttgcggcggcgtaaccggcaggtgatcgcgctcaatgagcaaacggacgctgagatgcgccgggtgcgcggcgcggatctggccatgatttttcaggagccgatgacctcgctgaatccggtttttaccatcggcgagcagattgccgaatccctgcgcctgcaccaggggctggggcgcgaagaggcgctgcgcgcggcgaaaaagatgctcgatcaggtgcgtattcctcaggcggaagagatgctctcgcgctatccgcaccagctctccggcggcatgcgccagagggtgatgatcgccatggcgctctcctgtcggccggcggtgttgatagccgatgagccaaccacggcgctggatgtcaccatccaggcgcaaattctgcaactcattgccgttctgcaaaaggagatggcgatgggggtgatctttatcacccacgatatgggcgtcgtggccgatatcgccgatcgggtgctggtgatgtatcgcggtgaggcggtagagaccggcagcgttgaggagatctttcgttcgccgcagcacccgtatacgcagtcgctgctggcggcggtcccgcggctgggggagatgcgtggccaggatctgccgcgccgttttccgctgccgggccagccgctggcggagagcgaaacgcccgatacggtagtcgccggcgagccgatcctgcaggtgcgtgacctggtggcccgttttccggtgcgcggcgggctgctcaatcgcgtgacgcgcgaagtgcatgcggtggagaaggtcagttttgatctctggccgggagagaccctgtcgctggtgggcgagtccggctgcggcaagtcgaccaccggccgggcgctgctgaggctggtagagacccagggaggcaccattaccttcgacggtcagcggatcgataccctcgccggcggcaagctgcaggctctgcggcgcaatattcagtttatttttcaggatccttacgcctcgcttgatccgcgtcagacggtcggcgattcgattatggagccgctgcgggtgcatggcctgctgcgtggggaagcagcgcgtgagcgggtcgcctggctgctgaagcgcgtggggttgcagccggagcatgcctggcgctatccccatgccttttccggcggccagcggcagcggatctgcattgcccgcgcgctggcgctgaatccgaaggtggtgatagccgacgagtcggtgtcggccctggatgtctccattcgggcgcagattatcaatctgatgctcgacctgcagcgcgagatgggcatcgcgtttctgtttatttcccatgatatggcggtggtggagcgcatcagccaccgcgtggcggtgatgtatcgcggtcgcattgtcgaaataggcccgcgccgcgcggtgtttgaaaacccgcagcacccctatacccgtaagctcatggccgccgtaccggtggccgacccgggccaccgtcatccgcagcgggtcctgctgtctgatgacgtcccgggcaatatttataagcggggcgaggagatcgccagcgtgccgttgcagcaggtcgggccgggccacttcgtcgcccgcgaatccgccgatgtgctgggcagaacataa

SEQ ID NO: 212359 - DNA, 942 bp, Klebsiella pneumoniae
atgggcaaggcggttatagcaattcacggcggcgcaggggcgatttctcgcgcgcaaatgacgccggagcgggagcgagagtatgtggcggcgctgtcgactatcgtcgaaagcgggcagaaaatgttggccgcgggcgccagcgcgctggatgccgtgaccgaggccgttcggctgctggaggagtgtccgttgttcaacgccggaatgggcgcggtatttacccgcgatcaaacccacgagctggacgcctgcgtaatggacggctacagcctgcaggcgggcgcggtagccggggtcaaacatttgcgtaatccggtgctggcggcgcgtctggtgctggagaagagtccgcacgtattactgatcggcgagggggcggaaaattttgccatctcccacgggatggcgcgcgtgtataacgatctcttttccactcctgaaaggctgctgcagctgcaggaggcgaaagcgggcggggagattatcctcgaccaccacgccgctcccctcgacgaacgccagaaaatgggcaccgtcggcgcggtggcgctcgatctggccggcaatctggcggcggcgacctccaccggcggcatgaccaacaaactgcccggacgcgtcggcgacagcccgctgccgggcgcggggtgttatgccaataatgccagcgtggcggtctcctgtaccggcaccggcgaagtctttatgcgcaccctggcggcctacgatatcgccgccctgatggagtatgggcagcttagtctctattccgcctgcgagcgggtggtgatggagaaactgccggctctcggcggcagcggcgggctgatagccgtcgatcgcgaaggcaacgtcgttttaccgtttaacagtgaaggcatgtaccgcgcctggtgctatgccggcgatacgccgaccattggcatttatcgcgaatag

SEQ ID NO: 212360 - DNA, 1236 bp, Klebsiella pneumoniae
atggattttaccgccggactgatgccgctcgacacagccctcgcccagatgctcgatcgtattacgccgctgaacgcgacggaaactgtaccgctgttgcaggccttctcgcgtgtgaccgcccatgacatcgtctccccgctggacgtgcccggctttgataacgcggcgatggatggctatgccgtccggctgaacgaccttcgcgacggcgccgcgctgccggtcgccggtaaggccttcgccggccagccgttcaacgacgcctggccgtcgggcacctgtatccgcatcatgaccggcgcgccggtgccggaaggctgcgatgcgctggtgatgcaggaagagaccgaacagaccgaggccggtgtgcgctttatcgcgccggtaaaagccgggcagcatattcgccgccgcggagaagatattgcccaaggcgcggtggtcttcccggcggggacacccctgacggtggccgagctgccggtgctggcctcgctgggcattgccgaggtcgaggtggtgcgcaaggtacgcgtcgcggtcttctcaaccggcgatgagctgcagctgccgggtcaaccgctcggcgacggccagatttacgataccaaccgcctggcagtgcacctgatgctgcagcagttgggctacgaggtcattaacctgggcattattcctgacgacccggcgaagctgcgcgacgcctttatcgccgccgaccagcaggccgatgtggtcattagctcaggcggcgtctcggtgggtgaagccgattacaccaaaactatcctcgaagagctgggggagatcggcttctggaagctggcgattaagccggggaaacccttcgccttcggcaagctcagcagcagctggttctgcggcctgccgggtaacccggtgtccgccaccgtcaccttctgtcagctggtgcaacccctgctggcgaaactctcgggcaagcacggcccgcttcaggcgccccgcctgcgggtccgcgccgccacgcgcctgaaaaagtcgcctggccgcctcgattttcagcgcggtattctgcagcgtaacccggacggcgaactggtggtgaacaccaccggccatcagggctcgcacattttcagctccttcagcctcggcaactgctttatcgtgctggagcgtgagcgcggccatgttgaagcaggcgaatgggtcgaggtcgaacccttcagtcacctgtttggggggctgtaa

SEQ ID NO: 212361 - DNA, 756 bp, Klebsiella pneumoniae
atgaccgttgagctgagcgatgaagagatgctgcgctataaccggcagatcgtcttgcgcggttttgattttgacggccaggagcggttaaaagccgctcgcgtgctggtggtcggcctcggcgggctcggctgcgccgccgcgcagtatctggccgccgccggggtcgggcagctcaccctgctcgatttcgacactgtctcgctctccaacctgcagcgccagacgctgcacagcgacgccaccctcggccagccgaaggtggattccgcccgcgaggcgctggcgcgcattaacccgcacgtccgtctggtcccgctcaatgccttgctggatgagaccgcgctggcggcgcagattgccgatcacgatctggtgctcgactgcaccgacaacgtcgacattcgcaaccagcttaacgtcggctgctttcagcacaaaaccccactggtctccggagcggcgatccgtatggaggggcaaatcagcgtctttacctatcaggatggcgaaccctgctaccgctgcctgagccgtctgttcggcgaaaatgccctcacctgcgtcgaagccggggtaatggccccgctggtgggcaccatcggttcgctgcaggcgatggaggcgattaagctgctgagcggctacggcacccctgccagcggaaaaatcgtcatctacgatgccatgacctgccagtttcgcgaaatgaggctgatgcgtcacccgcagtgcgaggtatgcggctcgcactga

SEQ ID NO: 212362 - DNA, 900 bp, Klebsiella pneumoniae
atgatcttcaacatccagcgctattccacccatgacggcccagggatccgcaccgtcgtcttcctgaaaggctgctcgctgggctgccgctggtgccagaacccggagagccgcgcccgtagcgaagatctgctgtatgactcgcggctgtgcctggccggctgcgagctgtgccagcaggcggcgccggcggttatcacccgcaccctcgatggcctgatcattcaccggcaaaacgttaacgacagccatatcgccgcgctgcgcgactgctgccccaccaccgcgctcacggtgtgcggcgaggagaagagcgtcgaggagatcatggcgacggtgctgcgtgataaaccattctacgatcgcagcggcggcggcgtcactctttccggcggcgaaccctttatgaacccaacgctggcgcaagcgctgttcgaagccagtcatcaggcaggcattcacaccgccgtggaaacctgcctgcacgtgccgtggaaatacattgaaccgtctttaccctttgtcgacctgtttctcgccgatctgaagcacgttgacgaggccgtttttcagcagtggaccgacggcagcgcccgccgggtgctggataacctgcagcgtctggcgctggcggggaaaaaaatgattattcgcgtgccgttgatccagggattcaacgccagcgaagccgacattgccgcgatcaccgattttgccgccgaccgcctgcaggtcagcgagatccattacctgccgtaccacacgctgggaatgaacaaataccagttactcagtcagccctacaccgcaccggacaaaccgctggatgctcctgagctgctcgccttcgcgcaggattatgcgcaaagcaaggggctaacggcgatattacgaggataa

SEQ ID NO: 212363 - DNA, 2433 bp, Klebsiella pneumoniae
atgactaccctgaagctcaacaccctcagcgcccgtatccaggcccataaaatggcgctggtgcatatcgtcaagccgccggtctgtaccgagcgcgcccgccactatacggagatgtatcagcggcatctcgataaaccgatcccggtgcgccgcgcgctggcgctggctcaccacctggcggagcgcaccatctggatcaagcacgatgagctgatcgtcggtaaccaggccagcgaagtgcgcgccgcgcctattttcccggaatacaccgtcagctggattgagaaagagatcgacgatctcgccgaccgccccggcgccggcttctcggtcagcgaggagaataaacgcgtattgcatgaagtgtgcccatggtggcgcggccagaccgtacaagaccgctgctacggtatgttcaccgatgagcaaaaggcgctgctcgccaccggcattattaaggcggaaggcaatatgacctccggggatgctcacctcgcggtcaactaccccctgctgctggagaaagggctcgacgggatgcgtgcgaaagtcgccgaacgccgctcgcgtatcaatttgacggtactagaagacctgcatggcgagcagttcctgaaagcgattgatatcgtgctggaagcggtcagcgatcacagcaaacgcttcgccgcgctggcgcgcgagatggcgacagcagaatcccgcgaatcacgccgccacgaactgctgacgattgccgaaaactgcgacgtcatcgcccatgagccgccgaaaaccttctggcaggcgctgcagctgtgctacttcattcagcttatcctgcagattgaatccaatggccattcggtatccttcggccgtatggaccagtacctctacccgtactaccgccgcgacgttgagttgcaacagtcgctggatcgcgaacaggccattgagctgctgcacagctgctggctgaagctgctggaggtcaataagatccgttccggctcacactccaaagcctctgccggcagcccgctataccagaacgtcaccatcggcggccagaatctggtggatggtaagccgcaggacgcggtcaacccgctgtcgtatgcgatcctggaatcctgtggtcgcctgcgttctacccagccgaacctcagcgtgcgctaccacgccgggatgagcaacgacttcctcgacgcctgcgtccaggtgatccgctgcggtttcggcatgccggcgtttaacaacgatgaaatcgtcatcccggaattcattaagctgggcattgagccgcaggacgcctacgattacgcggctatcggctgtatcgaaaccgcggtcggcggtaagtggggctaccgctgcaccggcatgagctttattaacttcgcgcgggtgatgctggcgacgctggaaggcggccgcgatgccaccagcggtcaggtgttcctgccgcaggagcacgccctgtcgaaaggcaacttcgctaacttcgatcaggtgctggccgactgggaccgccagattcgttactacacccgtaaatccatcgagattgagtacgtggtcgataccatgctggaagataacgtccacgatattctctgctcggcgctggtcgatgactgcatcgaacgggcgaaaagcattaagcagggcggcgcgaagtatgactgggtttccggcctgcaggtgggtatcgccaacctcggcaacagcctcgcggcggtgaaaaaactggtcttcgatcagggcgccatcggccagcaggagctggcgaaggcgctggcggaagatttcgacggtctgacccacgagcagctgcgccagcggttgatcaacggcgcgccgaagtatggtaacgatgatgacagcgtcgacgagttgctggcgcgggcctaccagacctatatcgacgagctgaagcagtatcacaatccgcgctatggccgcggcccgattggcggcaattattacgctggcacctcctctatttccgctaacgtcccgttcggcgcgcagaccatggcgacgccggatggccgtaaagcgcataccccgctggcggagggggccagcccggcctccggtaccgaccatctggggccgacggcggttatcagttcggtgggcaagctgccgaccggggcgatcctcggcggcgtgctgcttaatcagaagctgaatccgtcaacgctggagaacgagtccgataagcagaagctgatggtgctgctgcgcactttcttcgaggtgcacaaaggctggcatatccagtacaacatcgtgtcgcgcgacacgctgctggaagccaagaaacatcctgaccagtaccgcgatttagtggtccgcgtcgctggatactcggcgttcttcaccgccctgtcgccggatacccaggacgatattatcgcccgtaccgaacatacgctgtaa

SEQ ID NO: 212364 - DNA, 816 bp, Klebsiella pneumoniae
atgaccgttaaagttatcgtcaccgatatggacggaacttttctcaatgacgccaagcagtacgaccgcccgcgtttcctcgcccagtttgcgcagctcaggcagcaaggtatggaatttgttgtcgccagcggcaaccagtactatcagctgatctcatttttcccggaaattcgcgagcagatttcattcgtcgcagaaaacggcgctctggtttatgaacatggcaagcagctgttccacggcgaactgacccgccacgaatcacaagtggtgattggcgaattgctcaaagatccgcagctcaactttgtcgcctgcggcctgcagagcgcctacgtcagcgataaagctccggacgcctttgttgagctgatgtcgaagcactaccatcgcctacagcgggtgagcgactatcacgccatcgacgatacgctgtttaaattctctctcaacctgccggacagcgagatcccacagctgattgataaactgcacgtgtcgctcgacggcatcatgaagccggtcaccagcggctttggctttgtcgatttgattatccctggcctgcataaagccaacggcatcagccgtttgctcaagcgctgggatctttcgccgcagcaatgcgtcgccatcggcgacagcggcaacgacgccgaaatgctgaagctggtgaaatacgctttcgccatgggtaacgctgccgacagcatcaaggccatcgccggctacgctaccgacgataataaccatgacggcgcgctgaacgttatccaggccgtcctcgataacaccccgcccttcaacgcctga

SEQ ID NO: 212365 - DNA, 1266 bp, Klebsiella pneumoniae
atggctgctctcccgacccacgaaacacttcccgccgatcacaaagcggcgattcgccagatgaaacaggccctgcgggcgcaaattggcgacgtccaggcggtgttcgataagctctcagcgcgcatcagcgagcggttgcaggagattgagacactgaaagccgcaggccaggaggtctggccaaccattccgttccgcgatatcgccgaaggaacagtgagcgatgagcagcgcgcggccattaagcgccgtggctgcgcggtgattaaaggccacttcccacgcgaacaggcgctggcgtgggataccgcgatgctggaatatctggatcgcaaccatttcgacgatgtttacaaagggcctggcgacagcttcttcggttcgctggaggcttcgcgcccggagatctacccgatctactggtcgccctcgcaaatgcaggcgcggcagagcgatgaaatggcggcagtgcaatctttcctcaaccgcctgtggcgttttgaacagaatggcaaacgctggttcgatccggacgtcagcgtgatctatcccgaccgcatccgccgccgcccgccgggaaccacttcgaaggggctgggggcgcataccgattccggcgcgctggagcgctggctgcttcccgcctatcagcaggttttcgccaacgtttttaatggcaatatcgacgcctacgacccgtgggacgccgcgcaccgtaccgaagtggaagagtataccgtcgacaacaccaccaaatgctcggtgttccgcaccttccagggctggaccgcgctgtcggacatgatcccgggtcaggggctgctgcacgtggtgccgatcccggaggcgatggcttatgtgctgctgcgccccctgctcgacgatgtgccggaagatgagctgtgcggcgttgcgccgggcagagtgctgccgatctctgagcagtggcacccgctcttaattaaagcgttaagctcgattccagcgctgaatgccggggactccgtctggtggcactgcgacatcattcactcggtggcgccggtggaaaatcagcagggctggggaaatgtgatgtacattccggccgcgccgatgtgcgagaagaacctcgcctacgcgcagaaagtaaaaatcgccctggaaaaaggcgcctcgccgggggatttcccgcgcgaggactatgaagccagctggcaggggcgcttcaccctggaggatctgaatatccacggcaaacgggcgctgggtatgccggtctaa

SEQ ID NO: 212366 - DNA, 1245 bp, Klebsiella pneumoniae
atgttggaccaattcaggctagggcagaaaaatcgtctggcaaagcgctatttatgcaagttttttcatgaaatgagcgagatcgcatatttgacagcggaatttgcttgtaacgtgtgctttggcgattatgaaaattctttcatttttcaatcggagctggatcacaaaatggataaaaagctgcgcgtcgccgaaattgccgcccgcaccgggctatcgcccagcaccgtttcacgcgtcctggccgggaaagcgaataccagcgacaaggcgcgccgggcggtgctggactgcgcccgcgagctgggtgtcatgcaggggttggccgccgggcgtctgctgctcaatcatctgctggtgtttgccccgcagcgcgcattcgatgagcgatcggatatcttctactaccgggtgatccagagcatcaataacgcgctggcggcgcatgaagtgcgcctgcgctactgcgcgctggatgagaacgacagcgacgccaacctgtttcttgcccgcatgaatgaacctgagacccaggccgcggtgctgctggggatcgacgatccgcatattcatggcctggcggcggatctgggcaaaccctgcgtattgatcaactgtcgggatgaagggatgcggctgccgtccatcgctcccgatcatcggctgatcggccagtgcgcagcccgctatctgtttgatatggggcatcgggcggtgatgaacgtgatgtgcctgcgccgctataccatggagctgcggctgggggggattcaggaggcgtggcgcgcgcgtaatctgcgctttaccgccagccgggatcttatcagcgtcgccaactttagcgccagagagacggaagagcaggtgggcgcctggcttgacggcttacagggcaggccgttgcccaccgccttcctggtgggcggcgattttatggccgccggcaccgtcagcgcattgcaaaagcgtggcctgcgggtgccgcaggatgtctcggtgatgagcattgacggatttaatctggcggcgattcaggaggtgccgctgaccgcggtgcatgtgccgcgggatgaactgggcagcgaggcggtgcatctcctgcagcagcgcctgctgcgcccggaggcgccgcacggctcgctactgctgcatggcacgctggtggtacgcgattcggtacggcggatccggccgggcaaaggccataccgccgtcgagccgcaggggctgtatgacgattag

SEQ ID NO: 212367 - DNA, 1302 bp, Klebsiella pneumoniae
atgagtcaaggcctcaacaatgatatcgctgtcagcaaaacgcgccgggtagtgaaaaacctgcgctggtgggtgctggtcctgtttttacttggcgttaccgtcaactacatcacacgcaactcgctgggaattatcgcgccggaactgaaagcgaccctcggcattactaccgaacaatactcgtggatcgtcggcgcgtttcagctggcttacacgattttccagccgctgtgcggctggcttatcgacgtcatcggcctgaagcttggctttatgatctgcgccaccctttgggcgctggcctgtatcgcccacgccggggccggtagctggctgcacctggctatgttgcgcttctttatgggtggggccgaggcggccgctactccggccaacgccaaaaccatcggcgaatggtttccgaaatctgaacggccaatcgccgccggctgggctggcgttgggttctccatcggcgcgatgctggccccgccgatcatctacttcgcccacgcctccttcggctggcaaggggcgtttatgtttaccggcgcgctggcgctactgtgggtagtactatggtgggccttctatcagaccccggaaaagcaccccaatctcagcaaaagcgagctggagtacatcaaacaggataacgaagccccgccggtaaaacagcccttctttaccgcgctcaaaaccgtctcgaaaaataaacgtttctacgggatcgccattcccgcctttatggccgagcccgcctgggcggtgctgagtttctgggtgccgctgtacctggcgaaagagcacggcatggatttgaagcagatcgccatgttcgcctggctgccgtttctcgccgccgatctcggcagcgtggtcagcggctacctcacccgcctgtatgttcgctggttcggctgtacgcgagtgaactcggtgatcgccagctcggtaaccggcgcgttcctgatgctctccctggccctcgtcgccatcacccgcgatccctatatcaccatcatcctgatctccattggcggcttcggccatcagatcatctcctgcatgctcagcgcgctggtggtggagtctttcgacaagggacaaatggcgacggtcaacggtatgcgcggctccgcagcgtggatcgccagcttcttgttctcgttattaatcggggtgaccgccgacaaaatcggcttcaacccgctattcatcgccatgggtttctttgacctgattggcgccgttttcctggtggcatttattgctgaacgtcgcgccaagcgcgcctga

SEQ ID NO: 212368 - DNA, 2364 bp, Klebsiella pneumoniae
atgaagacgctgaaacactggagtttgcatcaacagctggagcatcacgttgaactgacggtcgatggccagcacaccctgtgcctgtacgtactggaagagaatttgttccgcgtcctgctaaaacgccagggccagctggcgctggatcgcacctggagcatcgctccgcagcaggatgtgccgtgggaaggccgcgcccgggatgacctcagcggttttagtctcccggcctggcagctggcccaggagggcgatacgctgactatcgccacccgccagctgcgcgtcaccgttcaccagccgctgtggctggagtggagctatcgcgacgaggccggcgaatggcagccgcttgccaatgaccgtccgaccagcgcctacctggcgaatgcccacggcgacggcgtcgcccattatctgagccgccgcaaagacgagcgtttctacggcctgggcgaaaaggccggcgacctgcagcgcaccggtaaacgctacgagatgcgtaacctcgatgccatgggctacaacgccgtcagcactgacccgctgtataaacatattccgttcaccatcacccagcgcagcgatatcagctacggcctgttctatgacaacctgagcagctgctggctggatctggggaacgagatcgacaactaccacaccgcctatcgccgctggcaggcggaagccggcgacatcgattattacctgtttaccggtaagcaggtgctggatgtgaccaaagccttcgttcgcctgaccggtaaaacgctgtttggacccaaatggagcctcggctacagcggctccaccatgcactataccgacgcgccggatgcgcaaaatcagctgatgaactttatccgcctgtgcgagcagcacgcgatcccctgcgattcgttccagctctcttccggctatacctcaatcaacggcaagcgctacgtctttaactggaactacgacaaggtgccgcagcccaaagtgatgagccagtcgtttcacgatgccgggctgaagctggccgccaatatcaaaccgtgcctgctgcaggatcacccgcgctacggcgaggtggcggagcgcggtctcttcattcgcgattcgcaaactgacgctccggagcgttccagcttctgggatgatgaagggtcgcatctcgatttcaccaatccgcaaaccgtggcctggtggcaggaaggcgtgaccacccagctactggagatgggcatcgattcgacctggaacgataataacgaatacgaagtatgggacggcgaagcccgctgctacggctttggccgtgaaatcgccatcaaacatattcgcccggtgatgccgctgttgatgatgcgcgcctcgctggaagcccagcagcgctttgcgccgcaaaagcgcccatatctgatctcccgctccggctgcgccgggatgcagcgctacgtacagacctggagcggcgacaaccgcaccaactgggatacgctgcgctataacatccgcatgggcctggggatgagcctttccgggctgtttaacgtcggccacgacgtcggcggtttctccggcgataaacccgagccggaactgtttgtgcgctgggtacaaaatggcgtcatgcatccgcgctttaccattcactcgtggaatgacgaccagacggtaaacgaagcatggatgtacccggaaatcaccccggcgatccgctcagccattgagctgcgctaccgcctgttgccctatctgtacactctgctatggcaggcgcatgctgatgatgagccgatgctgcgcccgaccttcctcgatcaccagcacgatgcgcagaccttcgccgaatgcgatgacttcctgctgggccgcgacctgctggtggccagcgtggtcgagccgggcgcccgccagcgtgaagtatggctgccggataatcaggccggttggtacgatttctacagccatcagtggttcgccggcggccagtgggtgacgctggacgcgccgctggaaaaactgccgctgttggtccgcgccggcgccggtctgccgcttagtgaacgtatcagccatgtcgatgcgcaaaaagacgatcgtcgcgaactgcagctgttcccgctgaaaggtaccggctcaacccgcggtctgctgtttgaagacgacggcgaaagctggggctataaacagggggatgcgctctggctggagtgggaaatgacctgcagcgccagcagcataaacctggatatcaacgcccgcggcaactatcgcccggcgtggaaagcgctgaagctgtcattaccggtaggagaaaagcgtaagctgctggtgaatggcgttgaaggaacggagtggaggttctga

SEQ ID NO: 212369 - DNA, 1593 bp, Klebsiella pneumoniae
gtgctagtatccagcaacgttaccatgcagtttggcagcaagccgctgttcgaaaatatctccgttaaatttggcggcggcaaccgttatggtctgatcggcgccaacggcagcggtaaatcgacctttatgaagatcctcggcggcgatctcgaaccgacgctgggcaacgtttctctcgacccgaacgagcgcatcggtaagctgcgtcaggatcagttcgcctttgaagcgttcaccgtgctggatacggtcatcatgggccacggcgagctgtgggaagtgaagcaggagcgcgatcgtatctacgccctcgctgagatgagcgaagaagatggctacaaagtggccgacctggaagtcaaatatggcgaaatggacggctactcggcggaagcgcgcgccggcgaactgctgctcggcgtcggcattccggttgaacagcattatggcccgatgagcgaagtcgcgccgggctggaagctgcgcgtcctgctggcgcaggcgctgttttccaatccggatatcctgctgctcgatgaaccgaccaacaacctggacatcgacaccattcgctggctggagcagacgctgaacgatcgcgacagcaccatgattatcatttcgcacgaccgtcacttcctgaacatggtctgcacccacatggcggatctggactacggcgagctgcgcgtgtatccgggcaactacgacgaatacatgaccgcggccacccaggcgcgtgagcgtctgctggcggacaacgccaagaaaaaagcgcagattgcggacctgcagtccttcgttagccgcttcagcgccaacgcctctaaatcgcgtcaggccacctcgcgcgcgcgccagattgacaaaatcaagctggaagaggttaaagcctccagccgtcagaacccatttatccgcttcgagcaggataagaaactgttccgtaacgcgctggaagtggaagcccttaccaaaggctttgatgaaggtccgctgttcaaaaacgtcaacctgctgctggaagtgggcgaaaagatcgccattctgggcgccaacggcgtgggtaaatccaccatgctgaaaaccctggtaggcgaactgcagccggacaacggcagcgtgaaatggtctgaaaacgcgcaaatcggctactacgcgcaggaccatgagtacgagttcgaaaacgacctgacggtcttcgaatggatgagccagtggaagcaggaaggcgacgacgagcaggcagtacgcagcatcctcggccgtctgctgtttagccaggacgatatcaaaaagccggcgaaggtgctttccggtggcgagaaagggcgcatgctgttcggtaagctgatgatgcagaagccaaacatcctggtgatggacgaaccgaccaaccacctggatatggagtcgattgaatcgctgaacatggcgctggagatgtatcagggcaccctgatctttgtctcccacgaccgtgagtttgtcagctcgctggcgacccgcgtcctggagatcactccggaccgcgtgatcgacttcagcggcaactacgaagactacctgcgcagcaaaggtatcgagtaa

SEQ ID NO: 212370 - DNA, 786 bp, Klebsiella pneumoniae
atgaccagcagcctatcgcgacacccggcttttttatccctgcagggcggcatcaattttcgcgacctgggcggccagcttgccgccgatggacgccgcgtccgcagcggcaagctattgcgatccggcgcgctaaaccggttaacggcggaggatctcaaccacctcgatactttgccgctcagccgggtgctcgactatcgcgaccccggagaggtagcccgtactccggacaagcttagcccgcttacccattatcttaacgcgccggccaatccgccggtgagcgaggtaaatgcgaaggtcaccgagctgaatgccgccacccttaacgcgctgaacggcgagcagtttatgctgcaactctaccgccagctgccgtttaacaacccggcctatcgccagctcgccgcctggctgaccacgccttttgaaggcgctttactgcaacactgcgcggtcggcaaagatcgcaccggcgtcggctgcgcgttaacgctgttcgccgtcggctgcgacagcgaaacggtgatggaggagtatctccttacccacggcatgctgacgcaggtggaggcctggatgttggagctgctcggcaacgacctcactgcccaagggcgccaaagcctggcggatattctgacggtaaaagagtcctatctcgccgccgcgctgtcggctattcaccagcgctatggcaccgtcgacgcctggctggcggcagagtaccagcttaccgcgccggttcgcgccgcgctgcaggcccggctgctggaagagtaa

SEQ ID NO: 212371 - DNA, 990 bp, Klebsiella pneumoniae
atgcgctcccatctactgtctcaatcattaacaaaggcctgtgtggcgttgatttcgcacacgacattaaagactatgaaattatctacactcttagcggcagccttcgccatcgtaggcttttgcaatacagcgtctgctgtcacctatcctttgccaaccgatggcagccgtttggttggtcagaatcaggtcattaccattccggatgataacaaacagccgctggaatacttcgcggcgaaatatcagatggggctttccaacatgctggaagccaacccgggggtggatacttacctgccgaagggcggtagcgtcctgaacatccctcagcagctgattctgccggataccgtgcatgaagggatcattatcaacagcgcggaaatgcgtctgtactactacccgaaaggcaccaataccgtgatcgttctgccgatcggcatcggccagttaggtaaagatacgccgatcaactggaccaccaaagtcgaacgcaagaaggccggcccgacctggacaccgaccgccaaaatgcatgctgaatacgccgccgccggcaacccgctgccagccgtcgtaccggccggtccggataacccgatggggctgtacgcgctgtatatcggccgtctgtacgccatccacggcaccaacgctaacttcggtatcggcctgcgcgtgagccacggctgcgtgcgtctgcgtaacgatgacatcaaattcctgtttgagaacgtgccggtcggcacccgcgtacagtttatcgatgagccggtaaaagcgaccaccgagccggacggcagccgttacatcgaggtgcacaacccgctgtcgaccaccgaagcgcagttccagggcggcgagatcgtgccgatcaccctgactcagccggtacaggcagttaccagccagtctgatgtcgatcagaacgtggttgagcaggctatccagaaccgctccggtatgccggtgcgtctgaactaa

SEQ ID NO: 212372 - DNA, 717 bp, Klebsiella pneumoniae
atgacggcgaagtatctgcaaatcgcgcgggaaataaaaaaacgcatcatcagccagcagtatccggctagcgcgccgctacccgaccagtttgcgctggcggcggagttcagcaccagccggatgaccatccagcaggcgatgcgccagttaatcgtcgaagggctgatctatacccgaaaagggcagggcacctttgtgcggaaaaatttccttcagctgtcgcagtgggagctgcccggcagcgactatttcggcgccaccaaaacctgggagcatcttggcgaggtgcaaagcgaagtggtgcgttttgcggtgcgctttcccagcgacaaggagcaaagttcgctgcttatcgacgccgatgccccggtgtatgactttgttcgcctgcggctgctcaacggcgagccggtatcgctggatctgacggtcatgccggtggggctggtgccggggttaaccaaaagccatctggaaggttccgtgtttcgctatgtgcaggagacgctggggctgaagctgatgggatcttaccgcgtggtgcgggcgatgaagcccggggaactggataaacagcatcttcactgcgaaccgaccgatccggtgctggaggtggagcaggttatctatctggaggatggcacgccgctggagtacgcccactgccattatcgctacgatcacggcgggattattctggtgaataacggctag

SEQ ID NO: 212373 - DNA, 1377 bp, Klebsiella pneumoniae
atgaagaacagactaccggcagattttttatggggaaattccgtctccagcatgcagacggagggggcgtggaacgagggtggcaaggggatgtcggtgtatgatatccgtcaaccggcggagttcgcctccgactggaaggtggcgaccgactcttatcatcgttatcgggaagatttcgatttgatgcaggatctgggcatgaactgctaccgttttcagatcgcctggagccgggtgtgccctgacggagatggcgaattcaatgaacaggggatcgccttctaccatcaatttatagatgaactgctcgcccgcggcattgagccgatgatctgcctgtaccacttcgatatgccgctgtcgttggcggagcgctacaacggttttaccgaccgccgggtgatggacgcttttatccgctacggccagaagatgatcgcctgctatggcgacaaggtgaaatactggctcacctttaatgagcagaatctgtaccattcgccggaagcgtttctgatttccggctatctgcagggggagaagaccctgcgcgaactgtatctgatccagcatcatgtcatgatggcgcacgtccatctgactcactatctgcaccagacgaagccgcagtgtcagatgggcggaatgctggctcacgctctggtctatacggctacctgcaaaccacgcgatatcctctgcgcccagcagctggatgagttcttaaaccagaacctgctgcgcgcctacgcgggtgagggttatagcccggaggtgatgcattttgtcgccgcggaaggattcgatgatatctatcgtccggaggatcttgccctgatggcgacggtgagggtcgattatctggcgttcagctattacgccagccgcacattgaacagcgacgcgatcccgccgggaacggcggtcaacaactatatgctgtttggcaaccaggataacccgttcctgaaagcgacggaatggaactggcagattgatccgctgggcttccggacgatcatcactcgttactataacgactggcgcctgccggtgttcccgattgaaaacggcatcggggtgattgagtcctgggacggcgaacatcccattgccgacgattaccgcatcgcttaccatcgcgaccatatcaacgccatgaaagcggccatctttgaggatggggcgcaggtgatcggctatctcggctggggattaatcgatatcctgagctcacagggcgatatgcgtaagcgctacggcgtggtgtacgtcaatcgcgaaaaccatgacctcaaggacctgcggcgggtgccgaagaagagctatgcatggctgaagcaggtgttccgcagcaacggcgaagcgatgtaa

SEQ ID NO: 212374 - DNA, 1113 bp, Klebsiella pneumoniae
atgactcttcccttcgtccagtcgctgctgcgcgatcgttttctccatttgctgctgattatcgcctgcgtgctcagcgccatcgtgccgtttgtcccggcaagctggccggcggccattgactggcataccatcgtcacgcttagcggcctgatgttgttgactaaggggatcgaactgagcggctattttgacgtgctgggccgaaaaatggcccgccgctttgtgactgagcgccagctggccatctttatggtgctggcggcggcgctgttgtctacctttcttaccaacgacgttgcgctgtttattgtggtgccgttgacgctgacgctaaaaaaatggtgcgccatcccggtgaaccggctgattattttcgaagcgttggcggtgaacgccggttcgctgctgacgccgatcggcaacccgcagaatattttgctgtggggacgatccggcctctctttcttcgggtttatcggtcagatgctgcctctggcagcggcgatgatgctgaccctgctggcgctgtgctggttctgttttccggcgaagcggctcagttaccagagcagcgacagggcgccgtcatggcaacccaagctcgtctggagctgtctgggactgtatgtggtgtttctgacggcgctggagatgaatcaggccctgtgggggctggcgctcgtgctgctgggcttcctggtgctggcccgggcggtgatcgtccatgtcgactggtcgctgttgctggtgtttatggtgatgtttattgacgtccatctgctgacccagcttccggcgctgcaccaggtgctgagcggggtggggaccctctccggcggtggactgtggcttactgctattggcctgtcgcaggtgatcagtaatgtgccctcgactattctgttgctcaactatgtcccgccgtcgatactgctcgcatgggcggttaacgtgggcggctttggcctgctgccgggctcgctggccaatattatcgccctgcgtatggccagcgatcggcgcatctggtggcgcttccatctctactccattccaatgctgctatgggcggcactcagcggctactggctcttcaaactcagcgcctga

SEQ ID NO: 212375 - DNA, 474 bp, Klebsiella pneumoniae
atgaaccgtcgcgcaggtaagccaataacaaaaaaagtgacgcagttagtgaatgttgaagagcacgtggaagggtttcgccaggtgcgggaagcgcatcgccgcgagctgatcgatgactatgtggagctgatctccgatctgatcaacgaagtgggcgaggcgcgccaggtggatatggccgcgcgtcttggcgtttcgcaacctacggtcgctaaaatgctcaaacgcctggccagcgtcggtcttattgaacagatcccctggcgcgggatcttcttaacctcggaaggtgagaagctagcccaggagagccgcgagcgccatcaaatcgtggagaacttcctgctggcgatcggcgtcagcccggagattgcccgacgtgatgcggaagggatggagcatcacgtgagcgaagagacgctggcgatgttcctgaaatttacccaaacacagggatctcaggaagcatga

SEQ ID NO: 212376 - DNA, 126 bp, Klebsiella pneumoniae; identical to SEQ ID NO: 135388

SEQ ID NO: 212377 - DNA, 1581 bp, Klebsiella pneumoniae
atgaatgtcaccaccctgaaagatacgctggtcgcccgccgactggcactgaacccatggacgggattctactttttacagtcgctgttaattaacctggcgctgggctatgaatttagcctgctttataccgtggcatttacctgtgtgttacatctgctgtggcgcgcctttccgcgcgtccagaaagcggtggtcggcgcctattccctgctggcggctctgtactatccctttggccaggcctacggtgcccccaacttcaacactctgctggcgctgcacgccaccaacgtggaagagtctacggaaatcctgaccatcttcccgtggtacaactatctgctggcggtcttcatcttcgctctcggggtcattgcggttcgccgtaggatcgttgagccatcacgctggggaaaaatggatacgctgggcctgttgttcagcatcgggatcttctttctccagccggtgcaaaaccttgcctggggcggtgtattcaaggtgattgacaccggttatccggcctttcgttttgtcaaagacgtggtggtgaataacaacgaggtgctggacgaacaggcccggatggcgcagctggctggcatgaaagacagctggcacgtgttggcggtaaagccaaaataccatctctatgtggtggtgatcggtgaaagcgcgcgccgcgatgccctcggcgctttcggtggccattgggacaacacgccgtttgccagctcggtaaacggttatctgtttaacaactacatcgccgccagcggctcaacgcagaaatcgctcggcctgacgcttaaccgggtggtcgatggcaaaccacagtatcaggataactttgtcaccctcgccaaccgcgccggtttccagacctggtggttctccaaccaggggcaaattggcgagtacgacaccgctatcgccagcatcgccaaacgggcggatgaagtacagttcctgaaaaacggcgatttcgaagccaataaaaacacccaggacgagcagttgctgaagctgaccgagcaggtgctctcaacccagcgtacccagccgcagctgattgtcctgcacctgatgggctctcacccacaggcctgcgatcggaccaagggcaaatacacggttttcgttcagtcgaaagagacctcatgctacctctacagcatgacgcagaccgattcgctgctggctaagctttatcatcagttgcaaaattccggtgacactttttccctgacctatttttccgatcatggtctggcgttcaaggagcggggcaaagaggtgcagtatctggcgcatgacgataagttccagcagaacttccaggtgccgtttatggtgctatccagcgatgacaaagcgcataaagtgattaaggcgcagcgttcggcgaatgatttcctcagtttcttctcccagtggaccgggatccaggcggcggaaatcaccccacgctatcggtttatctctgagcaaaaggccggtccggtgtacatcaccaacttccagctgcagaaggtggactacgctcacctcggtaccgatgagttcacagtcaattaa

SEQ ID NO: 212378 - DNA, 513 bp, Klebsiella pneumoniae
atgaataaaattgcacgtctttcagcactggccgttgttctggctgcatccgtaggtaccactgcatttgctgcaacttctaccgtaaccggcggttacgcgcagagcgacatgcagggtaaagcgaacaaagctggcggtttcaacctgaaataccgttacgagcaagataacaacccgctgggcgttatcggttccttcacctacaccgagaaggataacaacagcaacggtacttacaacaaaggtcagtactacggcatcaccgctggtccggcttaccgtctgaacgactgggcaagcatctacggcgtagtgggtgttggttacggtaaattccagaacaacaactaccctcataaatccgatatgagcgactacggtttctcctacggtgctggtctgcagttcaacccgatcgaaaacgttgctctggacttctcctacgagcagtctcgtattcgtaacgttgacgtcggcacctggattgctggcgtgggttaccgcttctaa

SEQ ID NO: 212379 - DNA, 888 bp, Klebsiella pneumoniae
atgcccggtccatccagaaaagcggcggcatggttgccgatactggtgattttagtcgccatgacctcgattcaaagcggcgcatcgcttgctaaatcgctgttcccggtggtcggcgccccgggcgtcaccgccctgcgtctggcgttgggaacgctgattctggtggtggtgttcaagccatggcggctacgtttctccccggcgcagcgcgtgccgctgctactgtacggcctggcgctcggggcgatgaactatctcttttatttatccctgcagcgcattccgctcggcgtggcggtggccctggagtttaccggcccgctggcggtggcgctgtttggttcgcgccgcccgctggattttgtctgggtggcgctggcgatcctcggactatggtatcttctgccgctggggcagaacgtggcgcaggtcgatttaaccggcgcgctgttcgccctcggcgccggggcgtgctgggcggtctatattctgaccggacagcgtgccggtgaagagcatggtccagccacggtagcgatggggtcgctcatcgcctcgctggtgtttgtgccgttaggcatggcgcaggccaccgatacgctgtggcagtggtcgctgctgccgctgggtttggggatcgcgattctctccaccgcgctgccctactccctcgagatgatggccctgacgcgcttgccgacgcgcaccttcggcacgctgatgagccttgagccagcgttagctgccctctccggtatgatcttcctcggtgaaacgctgaagctctcccagaccctggcgctcggcgcgatcattatcgcctcgatgggcgccacgctgactatgcaacggcagagtaaagtcgagcaggtcgatatcaattaa

SEQ ID NO: 212380 - DNA, 504 bp, Klebsiella pneumoniae
atgagtaccgcaaaactggttaaatcaaaagcgtctaatctggtctatacccgcaacgatgtcgctgacagcgaaaagaaagcgaccattgagctgttgaatcgccaggtgatccagttcattgacctgtcacttatcaccaagcaggcacactggaatatgcgcggtgcgaactttatcgccgtgcacgaaatgctggatggcttccgtaccgcgctgaccgaacatctggacaccatggccgagcgcgcggtgcagctgggcggcgtcgccctgggtaccactcaggtcattaacagcaaaaccccgctgcagagctacccactggacatccatcacgttcaggatcacctgaaagccctggctgaccgctacgcggtagtggcgaacgatgtgcgtaaggcgatcgacgaagcaaaagacgaagacactgcagatatcttcaccgcggcttcccgcgatctggataaattcctgtggttcattgaagccaacatcgagtaa

SEQ ID NO: 212381 - DNA, 747 bp, Klebsiella pneumoniae
atgaagtctgtatttaaagtttcactggctgcactgaccctggcttttgcggtttcttcccatgccgctaataagaccctggttgtcgccaccgatacggcgttcgtcccgttcgaatttaagcaaggcgataagtatgtgggttttgacgttgacctgtgggcggctatcgccaaagagctgaagctcgactacaccctgaagccaatggacttcagcggcattatcccggcgctgcaaaccaaaaatatcgatctggcgctggcggggatcaccattaccgacgagcgtaaaaaagcgatcgacttctccgacggctactataaaagcggcctgctggtgatggtcaacgctaataataacgacatcaaagatgtcaaagatctgaacggtaaagtggtcgcggtgaagagcggcaccggctccgttgactacgcgaaagccaatatcaaaaccaaagatctgcgtcagttcccgaacatcgataacgcctatatggagctgggaaccggtcgcgcggatgccgtgctgcacgatacgccgaatattctgtacttcatcaaaaccgcgggcaacggtaagttcaaagcggtaggcgaatcactggaagcgcaaaactacggtatcgccttcccgaaaggcagcgacgagctgcgtgagaaagtgaacggtgcgctgaaaacgctgcgcgacaatggtacctataacgaaatttataaaaaatggttcggcactgaacccaaataa

SEQ ID NO: 212382 - DNA, 660 bp, Klebsiella pneumoniae
atgcagtttgactggagtgccatctggcctgccattccgattttgctggaaggcgccaaaatgacgctgtggatttccgtcctcggcctggccggcggtctgataattggtctggtggccggtttcgcccgctgcttcggcggctggatcgccaaccacatcgcgctggtctttattgaaatcattcgcggcaccccgattgtggtgcaggttatgttcatctactttgcgctgccgatggcctttagcgatctgcgcatcgaccccttctccgcggcggtagtgaccatcatgataaactcgggcgcctatatcgcggaaatcactcgcggcgcggtgctctccatacataaaggcttccgcgaagcgggcctggcgcttggcctgtcgcgtcgcgaaaccattcgccacgtgatcctgccgctggcgctgcgccgcatgctgccgccgctgggcaaccagtggatcatcagcatcaaggatacctcgctgttcatcgtcatcggcgtcgccgaactgacccgtcagggacaggagatcatcgcgggcaacttccgcgcgctggaaatctggagcgccgtagccgtgatctacctgattatcaccctggtcctgagctttattctgcgtcgtcttgaaagaaggatgaaaatcctgtga

SEQ ID NO: 212383 - DNA, 723 bp, Klebsiella pneumoniae
gtgattgagtttaaaaacgtctccaagcactttggtccgacccaggtgctacacgatatctctctgaaaattaatcagggtgaagtggtggtcattatcggcccttccggttccggtaaatcaacgatgctgcgctgcatcaataagctggaagagatcaccagcggcgatctgattgtcgatggtctgaaggtcaacgacccgaaggtggacgaacgtctgattcgtcaggaagccgggatggttttccagcagttttatctgttcccgcacctcacggcgctggaaaacgtgatgtttggcccgctgcgggtacgcggcgccagcaagcaggcggcagagaagcaggcgaaagagctgctggcgaaagtcggtctggctgagcgcgcgcatcactatccgtccgaactctccggcggccagcaacagcgtgtggccatcgcccgcgcgctggcggtgaagccgaagatgatgctgtttgatgaaccgacctccgcgctcgacccggagctgcgccatgaagtgctcaaggtgatgcaggacctggcggaagagggcatgacgatggtgattgtgacccacgaaatcggctttgccgaaaaagtggcctcgcgactaatctttatcgacaaaggacgaattgctgaagacggcaatccccaggagctggtgaagaacccgcccagcccgcgcctgcgtgaattcctgcaacacgtcgcctga

SEQ ID NO: 212384 - DNA, 2196 bp, Klebsiella pneumoniae
atgccgtggatcctgcttttgctcgctgcactgtttactgccccgctttccgccgccaccctccccggcgtgccgacgcctaacactgataaaaacagcgccagcgaacccgatgtggaacagaaaagagcggcttatgccgcactggccgatgtgctggccaacgactccgcccgtcaggagctcattgaccagctgcgtaaagcagccgccacgccgccgcccgacagcaccccgacgctgacgccaccggcggtgaaagaagagaccacggtactggagaacgtcacccagataagccgggaatatggcgaacagctctcatcacgcttttcccagctgtggcgcaatatcaccggctcaccgcataagccctttaatccgcaaacctttaccagcgcggcctggcattttttactgctggccgggctggtgtttgccttctggtggctggtacgcctcgcggcgctgccgctgtatcgcaaaatgggcgaatggggacggcataaaaaccgcgatcgcggtaactggctccagctgcccctgaccatcgccggggcgtttatcatcgacctgctgctgctggcgctaaccctgtttgtcggtcagctgctaagcgatcgcctgaatgggaataaccctaccatcgccttccagcagagccttttcctcaacgccttcgcgctgatcgagttttttaaagctattctgcggctcattttctgcccgcgcattcctgccctgcggccctttaacctcagcgacgaggccgcgtcatactggagcctgcgcctgagcgcgctcagcagcctgattggttacggtctgatcgtcgcggtgccgattatttccaatcaggtgaatgttcaggttggcgcgctggctaacgtcgtcatcatgttgtgcattacgctgtgggcgctgtacctgatttttcataacaaagcggtgattactcaagggttgatccacctggccgaccactcactcgctttctttagcctgtttatccgcgccttcgcgctggtctggcactggctggcctgcgcctactttgtggtgctttttttcttttcgctgttcgacccgggcaacagcctgaaattcatgatgggcgccaccctgcaaagcctggcgattatcggcggcgcggcgctggtgtctggcatcctgtcgcgctggatagccaaaaccatcaccctgtcgcccgccactcagcgcaactaccctgaactgcaaaagcgtctaaatggctggatctccgcctcgctgaaggcggcgcgcattctcaccgtctgtgtcgccattatgctgctgttgagcgcctggggcctgtttgacttccgggaatggctgcataacgatgccgggcaaaaaacggtggatgtgctgatccgcatcgccctgatcctcttcttctccgccattggctggacggttctggccagcctgattgaaaaccggctggcatcggatattcatggccgtccgctgcccagcgcgcgggcccggacgctgctgacgctgtttcgcaacgcgctggcggtggtgatcagcaccatcacggtgatgatcctgctctcggaaattggggtaaacattgcgccgctgctggcgggcgccggggcgttagggctggccatttcgtttggtgcgcaaaccctggtcaaagacattatcactggcatatttatccagtttgagaacgggatgaacaccggcgacctggtcaccatcggtcctttgaccggcaccgtggaacgaatgtcgattcgctcagtgggggtacgtcaggataccggcgcctatcacattattccctggtcctcgatcaccacctttgccaacttcgtgcgcggcattggctcggttgtggctaactatgacgttgaccgccatgaggatctggataaagccagccaggcgctgaaggcagcggtggacgatctgctggcccaggaggagatccgcggtctgatcattggcgaaccgtcgttcgccgggctggtggggctgagcaataccgcctttacgctacgcgtcagcttcaccaccctgccgctgaagcagtggacggtgcgttttgccctcgacacccaggtgaaaaagcacttcgaccgcgccggggttcgcgcgccggtacagacctggcagcagctgccgatgccgggcgccgacagcccggccgccgagtag

SEQ ID NO: 212385 - DNA, 915 bp, Klebsiella pneumoniae
atgaaagcccagaaaccggggttacacccgcgtaaccgccaccatcaacgctacgacctgcccgcgctctgccaggcccatcctgacctgcagggctacattacgctcaatccgctgggtgagcagaccattgattttgccaatccgcaggcggtgaaggcgttgaataaagcgctgctggcgcatttctacgcggtcaaacactgggacattcctgacggctttctctgtccgccggtgcctgggcgggccgactatattcatcatctggcggatctgctggccggggatagcggcgaggtgccgaaggatgccacgatccttgatattggcaccggcgctaacctcatctatcccctgatcggcgctcacgagtatggctggcgctttaccggcagtgaaatcaacccgcaggcgttcgccagcgcgcaggcgattatcaatggcaacccgggcttgacccggcagatccgcctgcgccggcaaaaagagagccaggctatctttcacggcgtgatccataaaaacgagacctacgacgccacgctgtgtaatccgccgttccatgactccgcagagagcgcccgggcggggggcgagcgcaagcgccgcaacctcggactcggcgccgaaagtggcctcaattttggcggtcagcagcaggagctgtggtgcgaagggggcgaagtagcctttatctcgcagatgatccgcgaaagccaggccttcgcccgccaggtgaaatggtttacctcgctggtgtcgcgtggcgataatctgccgccgctctaccgcctgctgaccgaggtcggcgcagtgaaagtggtgaaaaaggagatggcccaggggcaaaagcaaagtcgctttatcgcctggagctttatggacgacgccaaacgccgtcgtccattctaa

SEQ ID NO: 212386 - DNA, 615 bp, Klebsiella pneumoniae
atgtacttttatcaaccttcgcagggccacggcctgccgcatgacccgctgaacgcgataatcgggcctcgcccgataggctggatcgcctcccaggacgccgagggccagcgtaatctggcgccatacagcttttttaactgctttaactatcggccgccaatcattggtttcgccagtagcggctggaaagacagcgtgcgaaatatcgtcgaaacaaaggagttcgtctggaacctggcgacgcgaccgctggccatggcgatgaatgaaacgtcagcctcgattccgcaccatgaggacgaattcgtgcgcgccggcctcaccgccgccgccagccgcctggtcagcgctccccgggtcgcggagagtccggtaaactttgagtgccgtctgtcgcagtgtattcaactcaccaccgccgacggcaaccctgtcgatacgtggctggtgctcggtgaagtggtcgccgtgcatatcgatgaatcactgctggacaacggtatctatcaaaccgcccgggcccagccgatcctgcgcgccggtggcccgagcgcctattacggtattgatgacagcctgcgctttgacatgatccgccctgacgcccgctaa

SEQ ID NO: 212387 - DNA, 261 bp, Klebsiella pneumoniae
atgaaattcgtctcgctgctgttcgccgcggcgctcaccgctcatgccaccgcggcctctcccctgccaccgccacccgtactgccctataacgggccgctccgccctgtcggcaccgtctccgccttcggcgccagcaccctggacgacctggcggccgccctcgcggataaggcccaccgccagggggcgatagcctggcggatcaatgccgccagcagcggtaaccggctgtacggttcagctataatttatcaataa

SEQ ID NO: 212388 - DNA, 267 bp, Klebsiella pneumoniae
atggcatcaggttgggcaggcgacggcgccgtacaggatcagatcgacagcactattgacgatgcggtggctcgcgcccgccgcgagcttccgcgcggcgaaagcaacaaattttgtgatgaatgcggagagccgattccggaggcccgtcgacaggccatcccaggggtcagatactgcgtgaagtgccagcaggagaaagatttacataacaatacattttcaggatataatcgtcgcggttccaaggatagccagctacgctga

SEQ ID NO: 212389 - DNA, 261 bp, Klebsiella pneumoniae
atgaaaaacatcacatatgctgccgctgccatcgctctgaccgctctttccttcggcgcctttgccgccgaaccggttacccccgctcaggctgaaagcatgaataagatcggcgtggtgtctgcgcaaggcgcaaccactttagatggtctggaagcaaaactggctgctaaagccgaagccgctggcgcgaccggctacagcattacttccgctaacaccaacaacaaactgagcggtactgcggttatctataaataa

SEQ ID NO: 212390 - DNA, 969 bp, Klebsiella pneumoniae
atggagtacagcaaaattataaaagaggtgggtcgcggtaagaatcatgcccgcgatctcgatgaagagaccgcccgtgcgctctacgcgcggatgctgaacagcgaggtgccggagctggagctggggggaatattaatcgccctgcgcattaaaggcgaaggcgaagcggagatgaaaggtttttacgccgcgatgcagcagcatacgctgcgcctgaccccgccggccggcaagccgatgccgatcgttatccccagctacaacggcgcgcgcaagcaggcgaacctcacgccgctgctggcgatgctcctgcacaagctgggatttccggtggtggttcacggcgtcagtcacgatcccacccgggtgctgaccgaaaccatttttaccctgctggacattccggccaccctgcacgccggacaggctcaggcgcagctggagggccatgaaccggtgtatatcccggtggggaccttctgtccgccgctggagaaacagctggcgatgcgctggcggatgggcgtacgcaacagcgcccataccctggccaagctggccacgccgtttggcgaaggggaggcattgcgtctctccagcgtgtcgcatccggaatatgttccccgggtggcgaacttctttcgcgagaccggtggccgcgcgctgctgatgcatggtaccgagggcgaagtgtacgccaacccgcagcgctgtccgcagatcagcctgattgatgagcagggcgtgcgggtgctgtacgaacgccagactgagatggcagcggaggcggtggtcctgccgacctcgaaagaccctgaggtcaccgcgcgctggattgaacgctgcgtcgctggcgtcgaaccggtgcccaactcgttgaagatccagcttgcctgctgcctgctggcctgcggggaagtcacctcgctggagcagggcctcagccgcgtcaacgactgttggtga

SEQ ID NO: 212391 - DNA, 2169 bp, Klebsiella pneumoniae
atggctttgaccgctgcgctgaaagcgcaaatcgccgcctggtataaggcgcttcaggaacagatcccggactttattccgcgtcccccgcagcggcagatgatcgccgatgtggcgaaaacccttgccggggaagagggcaggcatctggctatcgaagcgccgaccggcgtcggcaaaacgctgtcatatctgatcccgggcatcgccatcgcccgcgaggaacaaaaaacgctggtggtcagcaccgccaacgtcgccctgcaggatcaaatctacagtaaggacctgccgctgctgcgtaaaatcattccctacctgcgcttcaccgccgcctttggccgcggacgctacgtctgtccgcgcaacctgacggcgctggccagcaccgagccgtcgcagcaggatctgctggcctttctcgatgacgatctcaccccgaataatcaggcggagcagaagctgtgcgcgaccctgaagcaggatctcgacagctaccgctgggacggcctgcgcgaccataccgacaaagccatcgacgatgggctatggagccggctgagcaccgataaggccagctgcctgaaccgcaactgccactactatcgcgagtgcccgttctttgtggcgcggcgggaaattcaggaggcggaagtggtggtggccaaccatgcgctggtgatggcggcgatggagagcgaagcggtgctgccggagccgaaaaacctgctgctggtcctcgatgaaggccatcatctgccggacgtcgcccgcgacgcgctggagatgagcgccgagatcaccgccccctggtttcgcctgcagctggatctgttctgcaagctggtggccacctgcatggagcagtttcgtccgaaaaccacgccgccgctggccaatccggagcggctcaccgctcattgcgaagagcttttcgagctgattgcctcgttgaataatattctcaatctctatatgcccgccggtcaggaagcggagcatcgcttcccgatgggcgaactgccgcaggaggtgatggagatctgccagcggctggcgaagctcaccgagttgctgcgcggcctggcggagctgttcctgaacgatctcagcgaaaagaccggcagccatgacgtggtgcgcctgcatcgggtgctgctgcagatgaaccgcgcccttggcatgtttgaaagccaaagcaagctgtggcgcctggcgtcgctggcgcagtcctcaggcgcgccggtaaccaaatgggcgacgcgggtggtgcgcgatggccagatccacgtctggttccactgcgtcgggatccgcgtcagcgatcagcttgaacggctgctgtggcgcagcgtgccgcatatcgtggtgacgtcagcgacgctgcgctcgctaaacagcttctcgcgcctgcaggagatgagcggtctgaaggagaaagcgggggaccgcttcgtggcgctggattcgccgttcaaccacgtggagcaggggaaaattattattcctcaaatgcgttatgaaccgctgatggataacgaagagcagcacattgccgagatggcggcctattttcgccagcaggtggagagcaaaaaacatctcgggatgctggtgctgtttgccagcgggcgggcgatgaaccgcttcctcgagcatgtgaccgatctgcgcctgatgctgttggtgcagggcgaccagccgcgctaccggctggtggagctgcatcgcaaacgggtggaaagcggcgagcgcagcgtgctggtgggtctgcagtcctttgccgaaggtctcgatttaaaaggcgatctgctgagccaggtgcatatccataaaatcgcttttccgcccatcgacagcccggtagtgatcaccgaaggcgaatggctgaaaagcctcaatcgttatcccttcgaggtacagagtttgcccagcgcctcctttaatcttattcagcaggtggggcgtttgatccgtagccataactgctggggagaggtggtgatttacgataagcgtctgttgaccaaaaactacggcgcgcgtctactgaacgcgttacctgtttttcccatagagcagccgggcgttccggaggttatagtaaaacggaaagcaaaacagacagcaaaacagacagcaaaacagacgggccgcaaacgtcgctga

SEQ ID NO: 212392 - DNA, 1356 bp, Klebsiella pneumoniae
atgtcttttgattccctaggcctgaatcccgatatcctgcgcgctgtcgctgagcagggctacgttgagccgacccctatccagcagcaggcgatcccggcggtactgcagggccgtgacctgatggccagcgcccagaccggcaccggtaaaacggcgggctttaccctgccgctgctgcagcgcctgatccagaatgagccgcacgcaaagggccgtcgtccggtgcgcgcgctgatcctgaccccgacccgtgagctggcggcgcaggtgggcgagaacgtccgcgattacagtaaatacctgaatattcgctcgctggtggtctttggcggcgtgagcatcaacccgcagatgatgaagctgcgcggcggcgtcgacatcctcgtcgccaccccgggccgtctgctggatcttgaacatcagaacgccgtcagtcttgataaagttgaaatcctcgtgctggacgaagcggaccgtatgctggatatgggctttatccatgacatccgtcgcgtactggccaaactgccggcgcgtcgacagaacctgctgttctcggcgaccttctccgacgagatcaagggcctggccgagaaactgctgcacaacccgctggaagtggaagtggcgcgtcgtaacaccgcgtccgagcagatcacccagcacgtccatttcgttgacaagaaccgcaagcgtgaactgctgtcgcagcttatcggcgaaggcaactggcagcaggtgctggtgtttacccgtaccaagcatggcgccaaccacctcgcggaacagctcaacaaagacggcatccgcagcgcggcgatccatggcaacaagagccagggagcgcgtacccgcgcgctggccgactttaaatccggcggcattcgcgtgctggtggcgaccgatatcgccgcccgcggtctggatatcgaagagctgccgcacgtggtgaactacgagctgccgaacgtaccggaagattacgtccaccgtatcggccgtaccggtcgcgcggcggccaccggcgaagccttatcgctggtgtgcgtggatgagcataagctgctgcgcgatatcgagcgcctgctgaaaaaagagatcccgcgcatcgcgattgccggctatgagccggatccgtccattaaagccgaacctatccagaacggtcgccagcagcgcggcggcggtcgtgggcaaggtcagggacgcggcggccagggtcagggacgcagcggacagccgcgcagccagaataatgccccgcgccgtcaggacggcgaggcgccgaaagcgcgcactcaggacggcaaaccgccgcgccgccgtcgcccgcgtaaaccggctggcgaataa

SEQ ID NO: 212393 - DNA, 993 bp, Klebsiella pneumoniae
atgagccagagtcaaccccgtttaaaaacgtcggcgatgatcgcctcgattgctgatgaaggccaggcgaccgtccctgcgcccttcggcgtcgcgctgtcaaaactggcggcgcagcgcccggaaatcgtcggcatgaccgcggacctgtcaaaatataccgatctgcatattttcgcccaggccttcccggatcgctttttccagatgggcatggccgaacagctgctgatggcggcggcaggggggatggcgaaggagggatttattcctttcgccaccacctatgccgcctttgcaacccgtcgcgcctatgattttattcaccaggtcatcgccgaagagcatctgaacgtgaagatctgcgcggcgctgccgggcctgacgaccggctatggccccagccatcaggccaccgaagatctggcgatcatgcgcggtatccccgggatggttatcgtcgatccttgcgatgcgctggagatagagcaggcggtaccggccattgccgatcaccaggggccggtgtatatgcgtctgctgcgcggtaaggtgccgctggtgctggataaatatgactatcagttcgaactgggtaaggcgaagctgctggaggacggcaacgatgtgctgattatctcctccgggctgatgaccatgcgcgcgctggaggcggctgaaaagctgcgggccgataatatcggcgtggcggttctgcacgtgccgaccatcaaaccgctggatgagaaagcgattattgaacaggcgtcgaagccgggccgcctggtggtaactgcggagaaccacaccgcggtcggcggcctgggggaagcggtggccgcgctgctgatgcgtaagggcgtacgctgtgagctggatagcgtggggctgcccgacgcgttcctgttagccggcgccctgccgaccctccacgatcgctacggcatctccaccgcgaagattgtcgaaaaaattaagtatcgtctgcgttaa

SEQ ID NO: 212394 - DNA, 846 bp, Klebsiella pneumoniae
atgaagatgaccgaatcacaaaaagtcgccgcggcggcgtggcgtattcgccgttacgccctgcaaatgggggaagtgcaggggcagggctatatcggccaggcgctgggctatgccgatgtgctcgccaccgccttcagccatgccatgacctatcgcccggaagatcccgagtgggaggggcgcgatcgcttcctgctctctcatggccattacgctatcgcttattatgccgcgctgctggaggcgggcattatcccggaagccgaactggaaacctacggctccgacgacagccgcctgccgatgtccggcatggcgacctacaccccggggatggagatgtccggcggctcgctggggcaggggctgtccattgccgtcggcatggcgcttgggctgcggcagaaacagagcaaggcctgggtctacaactccatgtccgatggggagctggacgaagggtcgacctgggaggcagcgatgtcggcggctcactatggcctgagcaacctgattaaccttgtcgatgtcaacaaacagcaggctgacggcgattcacgcaaaatcctcggctttgagccgctgcaggataaatgggccgccttcggctggtacgtacagcgcgtggacggtaacgatctgccggcggtgatggccgcctttgacaacgcgaaaagttattccggcaatcagccgcgggtcattttatgcgacacgctgatgggcaaaggggtgccgttcctcgaaacccgcgataaaaaccattttattcgcgtcgatgccgacgaatggcaaaaagcgatcgcggtgctggacgctaacaaaccggaaggagtgctgtaa

SEQ ID NO: 212395 - DNA, 750 bp, Klebsiella pneumoniae
atgttattaaaagataaagtcgccattattactggcgcggcctccgcacgcggtttgggcttcgcgactgcgaaattattcgccgaaaacggcgcgaaagtggtcattatcgacctcaatggcgaagccagtaaaaccgccgcggcggcattaggcgaaggccatctcggcctggcagccaacgtcgctgatgaagtgcaggtgcaggcggccatcgaacagatcctggcgaaatacggtcgggttgatgtactggtcaataacgccgggattacccagccgctgaagctgatggatatcaagcgcgccaactatgacgcggttcttgatgttagcctgcgcggtacgctgctgatgtcgcaggcggttatccccaccatgcgggcgcaaaaatccggcagcatcgtctgcatctcgtccgtctccgcccagcgcggcggcggtatctttggcggaccgcactacagcgcggcaaaagccggggtgctgggtctggcgcgggcgatggcgcgcgagcttggcccggataacgtccgcgttaactgcatcaccccggggctgattcagaccgacattaccgccggcaagctgactgatgacatgacggccaacattcttgccggcattccgatgaaccgccttggcgacgcgatagacatcgcgcgcgccgcgctgttcctcggcagcgatctttcctcctactccaccggcatcaccctggacgtcaacggcggcatgttaattcactaa

SEQ ID NO: 212396 - DNA, 1332 bp, Klebsiella pneumoniae
atgtcacgtatagatacgctggtctgtactgacgccaggaaaacgaaatatcgtttcgtggttttgacgatgatttttctggtgtatgccatcaattacgccgaccgaacgaatattggcgcggtactgcctttcatcattgatgagtttcatatcaataattttgaagccggggccatcgccagtatgtttttcctcggctatgcggtaagccagatcccggccggctttttcatcgccaaacgcggtacccgggggctggtatcgctctccattttcggcttctccgcctttacctggctgatgggcacggtgagctcggtgtttggcctgaagctggtgcggctgggactggggctgagcgaagggccttgcccggtggggctggcttccaccataaataactggtttccaccaaaagagaaagccacagcaaccggcgtttacatcgcggcgaccatgtttgcgccgattattgtgccgccgctggcggtgtggattgcggtaacctggggctggcggtgggtctttttctcttttgctatacccggaattgtggcggccatcgcgtggtatctgctggtcaaatccaagcctgctgagagcggatttgtttcccaaagcgaactggcagagattaatgccgggcgtgaaagtcataataatagcgtacgcgaaaatatcttaattgccgaaagatttacctggctggataaaatcattcgggtaaagaagatggcgccaattgatacggcgaaaggcttattcacctcaaaaaatattctcggtgactgcctggcgtattttatgatggttagcgtgctgtacggattattaacctggatccccctgtatttagtgaaagagcgcggtttcgatgtaatgagtatgggcttcgtggccagtatgccgtgcatcggcggctttattggcgcgatcggcggcggatgggtttcggataagctattaggccgccggcgtaaacccaccatgatgttcactgcggtgtcaacggtggtcatgatgctaattatgctgaatatcccggccagcaccctggcagtttgtattggattattctttgtcggcttttgtttaaatatcggctggccagcctttaccgcgtacggtatggccgtttcggatagcaaaacctatccaatcgcctcttccataattaatagcggcggcaacctcggtggatttgtcgcgccgatggcggctggtttcttgcttgataaaaccgggagttttaattctgtatttacctattttggtatctgcgccgccattggtttggtggtgattcttttcctcgatgaaccacaataa

SEQ ID NO: 212397 - DNA, 924 bp, Klebsiella pneumoniae
atgagccaaccgctacccaataaaaatctgccgatgccctctttacgcaatatccaggcttttattgaagtcgccgctaccggcagccttaacctggccgcagagaatctcaatattaccgcctcggcggtcagccatcagatagctagcctggagcactttctggggaaaaaactgttctcccgcagcagcaaaggcgtcacgttaacggcggtgggagaaaaatatctcaaagaggtctccggggcgctaaatatgattggccaggccaccagccaggtgatcaacgatatccatcaggattatttacgcattcattcggcgccgagcttcggcctgctatggctgatgccccgtctggataaattccgccaggcgtggccggcgttaaaaatcagcctgacctgttcatacgaaagcatccagttctcccgggataatattgatatcgatattcgtcacgggctgtcacagtggccgacgctgctggtcagaaccattaaaaatgagcgcgtcctgccctacagcgcagcgtcttatttagcctgccatcctgtgcaggttgtggaagatctgctggcctgcgatctgatccactccgacagcaccttgattaactggagcaactggctgtcgtggcacaaggtccgcggctggcataaaaacttcatttttaatttcgaccggtcatatatgagcatcgaggcggccagaatggggatgggcgtgatcctcgagagcaatctgctggccggcggacacgtgcgccaggggcagctgacgccggtatttgccgacgagcggagcatgccggtcggcgcgcaccacttcgtcctcccccacgctaatgaacagaaggagaaggtccagcgcttcttcgcctgggtcgccggagagctgaaagaggaagggttccatatttga

SEQ ID NO: 212398 - DNA, 660 bp, Klebsiella pneumoniae
atgaccagtaaaggcgaacaggcaaaaaatcagcttatcgcggccgctatcgcccagtttggcgagtacggccagcacgccaccacccgcgatatcgccgcccaggccgggcagaatatcgccgctatcacctattattttggctcgaaagacgatctgtatcttgcctgcgcccagtggatcgccgattttatcggcgacaattttcgcccgcaggccgaagcggcggagcacctgcttgccggggaagcgccggatcgccaggcgatccgcgacctcatccttagcgcctgccacaacatgatcctgctgctcacccaggacgatacggttaacctaagcaaattcatttcccgtgagcagctggcgccgaccgccgcctaccatctgatccaccagcaggtgattgcccccctgcaccattatctcacccggctgattgccgcctggaccggctgcgaagccagtgatacgcaaatgatcctccatacccacgccctgctgggcgaggtgctcgctttccgtctcgggcgtgaaactatcctgctgcgcaccggctggacgcagtttgacgcgcaaaaaacggaacagattttcgaagtcattacctgtcatatcgatttcatcctgcatgggttatcgcaaaggagtttgggctga

SEQ ID NO: 212399 - DNA, 996 bp, Klebsiella pneumoniae
atgaaaaaacccgtcgtcgtcattctgctgatcgtaattcttctcgccgcgctgggcggcggctggtggtggtaccagagcagccggcagcagccgctgaccctgtatggcaatgtcgatatccgcaccgtcaacatgagcttccgcgttggcggtaggctggcctcgctgaccgtcgacgaaggcgacagcatccgcgccgggcaaactctcggcgagcttgaccgcgcgccgtatgaaaatgccctgctgcaggcccaggccaatgtctccaccgcccaggcgcagtatgacctgatgatggccggctaccgcgcggaagagattgcccaggccgcggcggcggtgaaacaggcgcaggccgcttacgactatgcgcaaaacttttatcagcgccagctcgggctgcgcgccagcagcgccatttccgccaacgatctggagaatgcccgctcctcgcgcgatcaggcgcaggcaacgctcaaatcggcgcaggataagctgcgtcagtatcgcgccggtaaccgcccgcaggagattgcccaggccaaagccagtctggaacaggcgcaggcggcgctggcccaggccaaactggacctgcacgataccgtgctcaccgccccttctgacggtacgctgatgacccgcgccgtcgagcccggcactatgctcaacgccggcggtaccgtactgaccctgtcgttaacgcatccggtgtgggtccgcgcctatgttgacgagaaaaacctcggccaggcgcagccgggacaagaagtgctgctctataccgacagccggccggataagccctatcacggcaaaatcggttttgtctcgccgagcgctgaattcacgccgaagaccgtcgagaccccggatctgcgcaccgatctggtctaccgtctgcgcattgtggtgactgatgccgacggcgcgctgcgccagggaatgccggtgaccatctcctttagccacgggaacggacatgagtga

SEQ ID NO: 212400 - DNA, 1740 bp, Klebsiella pneumoniae
atgagtgagaccgtcatcgccttaaacggcctgagccgccgttttcccggtatggacaggccagcggtagcgccgctcacctgtacgatccgcgccggctacgtcaccgggctggtggggcccgacggcgcggggaaaaccaccctgatgcgaatgctcgccggattgctcaagcctgatgagggtcgcgccagcgtgataggcttcgacccgctaaaagacgacagcgccctgcacgcggtgctcggctatatgccacagaagttcggcctgtatgaagatctgacggtgatggaaaacctgaccctgtacgccgacctgcgcagcgtcaccggcgaggcgcggaagaaaattttcgaccgcctgctggagttcacctcccttggtccattcaccgaacggctggcaggcaagctttccggcgggatgaagcaaaagctgggcctcgcctgtaccctggtgggcgatccgaaagtactgctgctcgatgagcccggcgtcggcgtcgaccctatctcgcgccgcgagctatggcagatggtgcacgagctggccggcgacggcatgctgatcctgtggagcacctcctatctcgatgaagccgagcagtgtcgcgatgtgctgctgatgaacgaaggcaaactgctctaccagggcgagccgacggcgctgacgcaaaccatggccgggcgcagctttctggtttccagcccgcaggaaaacaaccgccgcctgctgcagcgggcgctgaagctgccgcaggttagcgacggggtgatccagggcaaatcggtgcgtctgatcctgaaaaaggacgcgcgcattgaggaagtccagcagcatggcgacatgccgcccctgcaggtggccgacaccgcaccgcgctttgaagatgcgtttatcgacctgctcggcggcgccgggaccgctgaatcgccgttgggggcgattatccatcgcgttgacggcagcaaagaggaaacggtcattgaagcccagtcgttaacgaaaaagtttggtgatttcgccgctaccgaccatgtcgatttccaggttaagcgcggtgaaattttcggcctgctcggccccaacggcgccgggaaatccaccaccttcaaaatgatgtgcggcctgctggtgcccacctccggcaaagcgctggtgctgggaatggatctcaaggtcagctctggcaaggcgcgccagcatctgggctatatggcgcaaaaattttcgctgtacggcaacctcagcgtcgagcaaaacctgcgctttttctccggcgtctatggcctgcgcggccgggcgcaaaatgaaaaaatcgcccggatgagcgatgcctttggcctgaaaagtatcgcccgccacgccgccgacgagctgccgctcggctacaagcagcggctggcgctggcctgctccctgatgcatgaacccgatattctgtttctcgatgaacccacctccggcgtcgatccccttacccgccgcgagttctggctacatattaatagcatggttgataaaggcgtgacggtaatggtcaccacccacttcatggatgaggcggaatactgcgaccgcatcgggctggtctatcacggcaaacttatcgccagcgggaccccggacgcgctgaaggcccaggcggcggacgacagccagacggacccaaccatggagcaggcgtttattaccctgattaaccgctgggacaaggagaatagccatgggcaatag

SEQ ID NO: 212401 - DNA, 1134 bp, Klebsiella pneumoniae
atgggcaatagcattctctcctggcggcgggtccgcgccctgtgcgtcaaagagacccggcagattgtgcgcgatcccagcagttggctgatcgcggtggtgatccccctgctgctgctgtttatcttcggctacggcattaacctcgactccagcaggctgcgggtcggggtattgcttgagcagcagagcgaagaggcgctggatttcgtccataccatgaccggctcgccctatatcgacgccaccgtcagcgacagccgcaggcagctgattgagatgatgcaggccgggcgcatccgcgccatggtggtcattccggtggatttcgaccgccagatggcccgccccggcgccgacgcaccgctgcagctcatcaccgacggcagcgagcccaataccgccaacttcgctcagggctatgtggaaggtatttggcaaatctggcagcagcagcgggcggaagaccgcggcgaaacctttgaaccgctgatcgacgtgcagatgcgctactggtttaacccggcggctattagccagcactttattatccccggggcgatcaccatcatcatgaccgtggtcggcgccatactgacctcgctggtggtggcccgcgaatgggagcgcggcaccatggaggcgctgctgtcgacggagatcacccgcgccgaactgctgctgtgcaagctcattccctactatttcctcggcatgctggcgatgctgttgtgtatgctggtgtcggtatttattctcggcgtgccctatcgcggctcgctgccgatcctgtttgtcattaccagtctgtttttgctcagcaccctggggatggggctgctgatctcaaccattacccgcaaccagtttaacgccgcgcaggtggcgctgaacgccgcctttttaccgtcgattatgctgtccgggtttattttccagatagacagtatgccggcggtgatccgcgcggtgacctatgtgatcccggcgcgctatttcgttagtactctgcaaagcctgtttctggcgggcaatattccggtggtgctgctggtcaacgtgctgtttttgattgcgtcggcggtgatgtttatcggtctgacgtggctgaaaaccaaacggcgtctggattag

SEQ ID NO: 212402 - DNA, 1107 bp, Klebsiella pneumoniae
atgtttcaccgtttatggacattaatccgcaaagagctgcagtcgctgctgcgcgagccgcagacgcgggcgattttaatcatgccggtgctgattcaggtgctgctttttccctttgccgcgacgctggaggtgaccaacgccaccatcgctatctacaacgaggacagcggtcgccacgcggtggaactcactcagcgctttgcccgcgccaaagcctttacccacgtcctgctgctgcaaagcccgcaggcgatccagccgaccatcgatgaacaaaaagctctgctggtggtgcgcttcccggccgatttctcgcgcaatctggataactatcaaaccgccccgctgcagcttctgctcgacggacgcaactccaacagcgcgcaaatcgccgccaactatctgcaacagattgtgaaaaactatcagcaggagctgctggagggtaaagcgaagccgaacaacagcgagctggtggtgcgcaactggtacaacccgaatctcgactataaatggttcgtggtgccgtcgcttatcgccatgatcactaccatcggggtgatgatcgtcacctcgctgtcggtggctcgcgagcgcgagcagggcacccttgaccagctgctggtctcccccctcgccacctggcaaattttcgtcggcaaggcggtgccggcgctgatcgtcgccaccctgcaggcaactatcgtgctggcgattggtatctgggcctatcagatcccgtttgccggctcgctgctgctgttctatttcaccatggtgatttacggtctatcgctggtgggctttggcttattgatttcgtcgctgtgcgccacccagcagcaggcgtttatcggcgtgttcgtctttatgatgccggctattctcctgtcggggtacgtctcaccagtggaaaacatgccgcagtggctgcagaatctgacctggataaatcccatccgccactttaccgatatcaccaagcaaatttatctgaaggatgcgagtctggagattgtgtggggaagtttgtggccgctactggtcatagcggccaccaccggctcagcggcgtatgcgatgttccgaaggaagattgcgtaa

SEQ ID NO: 212403 - DNA, 438 bp, Klebsiella pneumoniae
atgaagtggcaacaacgtgtacgcgtcgcaacgggtcttagttgctggcagattatgttgcatctactggtcgtggcagtactggtgatgggttggattagcggcgcgctggtgcgcgtcggattgggactgtgcgtcctctacagcgtcacgctgctggcgatgctgtttttacagcgtcaccatgaggcgcgctggcgcgatgtgggagacttccttgaggagctcaccacgacctggtacttcggcgcggccatgatagcgctgtggctgctgtcgcgcgtgctgcacaacaacctgctgctggccctcgccgggctggtgatactggcaggcccggcggtggtctcgctgctggcgaaagataagagccgttaccctaaagcgttcgggctacaacaaggcggcaacgcagcgaatccccagaagcatagataa

SEQ ID NO: 212404 - DNA, 762 bp, Klebsiella pneumoniae
atggctgagccaacggcgggattttcgttgaacgtgctgacaattaacacccataaaggctttacggcgtttaatcggcgttttattttgcccgaactgcgcgacgccgtgcgcagcgttagcgcggatattgtttgcctgcaggaggtgatgggcgctcatgaggtacatccgctgcacatcgaaaactggccggatacgacccattatgaatttctcgccgacaccatgtggagcgactacgcctacgggcgcaatgcggtttatccggaaggccaccacggcaacgccgtgctgtcgcgctttcccattgaatactacgaaaatcgcgatatctcggtcggcaacggggagaagcgcggcctgctgtactgccgcatcgtgccgccgcggagcgggataactattcacgtgatttgcgtccatctcggtctacgcgccgaccaacggcaggcgcagttgaccatgctggcggagtgggtcaataccctgcccgcgggcgagccggtggtggtggctggcgattttaacgactggcgtcagcaggctaaccagccgttaaaagcccaggccgggctggaagagatctttacccgcgcccgcggacggccggcgcgcacctttccggtcagttttccgctgttgcgcctcgaccgcatttacgtcaagaacgcccacgccagtcgcccgaaggcgctggcccttaaacattggcggcatctgtccgatcatgcaccccttagcgtggagatacatttgtga

SEQ ID NO: 212405 - DNA, 1245 bp, Klebsiella pneumoniae
gtgaaatgtcgttggcaggaaggcaaccgcattacgctactggagaatggcgaccagtactatccggcgctgtttgcggccatcggtcgcgccagccggcgggtgatcctcgaatcctttatctggtttgaagatgaggtaggccggcggctgcacgcggtcctgctcgaggctgcccgccgcggcatccaggtggaggtgctcctcgacggctatggttccccggatctcagcgatgaatttgtcggcgagctcaccgccgctggcgtgattttccgctactacgatccgcgtcctaagctgatggggatgcgcaccaatctgttccgtcgcatgcaccgtaaaatcgtggtaatcgacgacaccaccgcctttgtcggcggtattaactactccgccgaacatatgagcgactacggtccggaggcgaagcaggattatgcggtgcaggtcgaagggccggtggtgctcgacatcctgcagttcgagctggaaaacctgcccaacagcgaaaccgcccgccgctggtggcgacgtcgtcgccaccagccggagattaaccagacccccggcgaggcgcaggcgctgttcgtctggcgcgacaaccaggatcaccgcgacgatattgaacgccactatctgaagatgctgaccagcgcccgccgggaagtgattatcgctaacgcctattttttccccggctaccgcctgctgcatgcgatgcgcaatgccgcgcggcgcggagtacgggttaagctgatcgtgcagggcgaaccggatattcccattgtgaagtttggcgcccacctgctctatcactatctcgttaagggcggggtgcagatttacgaatatcgccgtcgcccgctgcatggcaaggtcgctctggcagacgaccactgggccaccgttgggtcaagcaacctggatccgctcagcctgtcgctgaatctggaagccaatctgatcatccacgatcgggtgtttaaccagacgctgcgcgataatctcaacgggcttatcgcccgggattgccagcggatcgataaaacgatgctgccgaaacgcaactggtggcggctgggcgtcagcgtgatggctttccactttctgcgccacttcccggcatgggtcggctggttaccggctcataccccgcggctggccagagtcagcccgccggtccagccggaaattgaaactcaggaccgcgtcgagtctccagccagggataatccactatga

SEQ ID NO: 212406 - DNA, 966 bp, Klebsiella pneumoniae
atgagcaaatcacatccccgctggcggatggcgaaaagagtgctgaccgtgctcttttttatcgccgtcatcgtcctgttggtgatctacgcgcaaaaagtcgactggcaggacgtgtggaaggtgatccgcggctacgatcggctggccttgtttagcgccattgcgctggttatcgtcagctacctcatttacggctgctacgatctgctcggtcgggcctattgcgggcacaagctggcgaaacgccaggtcatgctggtgtcgtttatctgctacgcctttaacctgacactcagcacctgggtcggcgggatcggtatgcgctaccggctgtactcgcggctggggctgaacggcagcaccatcacccgtattttttccttaagcattaccaccaactggttgggctatattctgctgggcggggtgatattcacggcagatctggtgaagctgccgccgcactggtacatcagccagaccactctgcgcattatcggcggggtgatgctgatccttacgctttgctatctgttcggctgcgcgttcgccaaacgccgtcacctgacgattaaaggccagcggctggtgctgccctcctggcgcttcgcgctgctgcagatggggctctcggcggcgaactggatggcgatgggggcgataatctggctgctgttgggcagcgagattaactattttctggtattaggggtgctgctggtgagcagtatcgccggggtgattatccatattccggctgggatcggcgtgctggaggcggtgtttatcgccatgctctccggggaagatatttcgaagggcgcgatcattgccgccctgctcgcctggcgcgcgctctattatttcctgccattgctgctggcgacggtggcctatctgctgctggagagccgggcgaaaaagctgcggcaaaagaaccagcgcaagctggcccgcgaatga

SEQ ID NO: 212407 - DNA, 705 bp, Klebsiella pneumoniae
atggacagatatccgcgttccgattcaatagtgcagggccgtaccggcctgcagacttacatggcgcaggtgtacggctggatgacggtcggcctgctgctgacggcgtttatcgcgtggtttgcagcgaatactccggcggtgatgatgttcgtcttttcgagcaaaatcactttcttcgggctgattattgcccagctggcgctggtgtttgtgctgtcgggaatggtgcagcggctgagcgccgggatggccaccacgctgtttatgctctattcggcgctgaccggactgacgctatcgagcatttttatcgcctatacctattcctcgatcgccagcacctttgtggtcaccggcgggatgtttggggcgatgagcctgtatggttacaccacgaagcgcgatctgagcggcttcggcagcatgctgtttatggggctgattggcatcgtgctggcgtcgctggtcaacctgtggctgaagagcgaggcgctgatgtgggccgtgacctatattggggtggtgctgtttgtcggtctgacggcgtatgacacccagaagctgaaaaacatcggcgagcagattgatacccgcgacagcgccacgctgcgtaaatactcgatccttggcgccttaacgctgtatctggacttcatcaacctgttcctgatgctgctgcgtattatgggcaaccgccgctaa

SEQ ID NO: 212408 - DNA, 453 bp, Klebsiella pneumoniae; identical to SEQ ID NO: 135775

SEQ ID NO: 212409 - DNA, 249 bp, Klebsiella pneumoniae
atgattaaggttctgttttttgcccaggtgcgcgagctggtcggtaccgattcgctgacccttgatgccagcgaactggcgactgtcgaagcggttcgtcagcagcttgccgcccgcggcgatcgctgggcgctggccctggaggagggcaagctgctggcggcggttaaccagacgctaacctctttcgaacatccagtggccagcggcgacgaagtggcgttcttcccaccggtaacggggggctga

SEQ ID NO: 212410 - DNA, 489 bp, Klebsiella pneumoniae
atgtcacaactgacccatattaacgccgcgggtgaagcccatatggtcgatgtctccggcaaagcggaaacggtgcgcgaagcgcgcgccgaggcttacgttgaaatgcaggcgacgaccctggcgatgattatcgacggcagccaccataaaggcgacgtgtttgccaccgcgcgtatcgccgggatccaggcggccaaacgcacctgggagctgatcccgctgtgtcatccgctgatgctcagcaaagtggaagtcaatctgcaggcgcagccggaacataaccgggtgcgcattgaatcgctctgccgactcaccgggaaaaccggcgttgagatggaagcattgaccgccgcctcggttgccgcgctgaccatttacgatatgtgcaaagcggtgcagaaggatatggtgattggcccagtgcgcctgctggcgaaaagcggcggcaagtccggcgattttaaggtgggtgaatgccatgattaa

SEQ ID NO: 212411 - DNA, 513 bp, Klebsiella pneumoniae
atgagccaggctagcgctgagtttatcccgacccgtattgctattcttaccgtttccagccgtcgcggcgaagaggacgacacttccggtcactggctgcgcgaggcggcgcaggaggcggggcaccaagtcgtcgagaaggcgatcgtcaaagagaatcgctacgccatccgcgctcaggtatcggcgtggatagccagcgataacgtgcaggtggtgctgatcaccggcggcaccggttttaccgacggcgatcaggcgccggaagcgctgctgccgctgtttgatcgtgaggtcgaaggctttggcgaagtgttccgcatgctgtccttcgaagagatcggcacttcgacgttgcagtcccgggccgtggccggcgtcgccaatcgcacgctgattttcgccatgccgggctcaaccaaagcctgccgtacggcgtgggacaacatcatcgccccgcagcttgatgcccgcacccgtccctgtaacttcattccacacctgaagaaataa

SEQ ID NO: 212412 - DNA, 1023 bp, Klebsiella pneumoniae
atgaccgcgtctcccgtatttggaaaggtgtatatggcctcacagcttaccgatgcattcgcgcgtaagttttattacctgcgtctgtcgattaccgatgtgtgcaacttccgttgcacctactgcctgccgaacggttataagcccggcgccgtcaataacaatggctttctcagcgtagacgaagtacgccgggttacgcgcgctttctctgcgctgggcaccgaaaaagttcgcctcaccggtggggaaccctccctgcgccgcgacttcaccgagattattgccgccgtgcgtgaaaacccggcgatccgtcagattgcggtcactaccaacggttaccgcctggcgcgcgatgtcgaacgctggcgcgatgccggcctgacggcgattaacgtcagcgttgatagcctcgacgcccgccagttccatgccatcaccggccaggacaagttccaccaggtgatggacggcattgacgccgccttcgccgccggctttgacaaggtaaaggtgaataccgtgctgatgcgtgatgttaaccatcaccagctcgataccttcctcgcctggatccaaccccgtcgtatccagctgcgctttattgagctgatggaaaccggtgaaggcagcgacctgttccgccgtcaccatctctccggcatggtgctgcgcgatgaactgctgcgccgcggctggatccatcagatccgccagcgcagcgatggcccggcgcaggtcttttgtcacccggactacgccggcgagatcggcctcatcatgccgtatgaaaaagacttctgcgccacctgcaatcggctgcgcgtctcgtccgttggcaaactgcacctgtgcctgtttggcgaaggcggcgtcgacctgcgcgacctgatggccgaagaccagcagcaggccgcgcttgaggcgcggatcgccgaagccttaacccataaaaagcagacccatttcctgcatcagggcaacaccggtattacgcagaacctgtcctatattggcggttaa

SEQ ID NO: 212413 - DNA, 906 bp, Klebsiella pneumoniae
atgcgcaatcgtacattcgctgacctcgatcgggtggtcgcgctcggcggcgggcatggtttgggccgggtgatgtcctccctctcctcgctcggctcacggctgaccggcattgtcaccaccaccgataacgggggttccaccgggcggatccgtcgttcggaaggtggcattgcctggggcgatatgcgcaattgcatcaatcagttaattgccgagccgagcgtagcgtcggcgatgtttgagtatcgttttggcggtaacggcgagctttccgggcataacctcggaaatttgatgttaaaggcgctggatcacctgagcgtgcggccgttagaggcgatcaatttgatcagaaacctgctgaaagtggacgctttcctgatcccgatgtcagaacaaccggtggatttgatggcgctcgatcatgaaggccatgaagtttatggcgaagtgaatattgatcagcttgataatgtgccgcaggagctgatgctcaccccgccggtaccggccacccgcgaggcggtggaggctatcgccgaagccgatttgatcctcattgggccgggcagtttttacaccagcctgctgccgatcctgttgctcgacgagatggcccgggcgttgcgccgcaccccggcgccgatggtttttatcgataacctcggcaaagagcatagcccggccgcgaggctgtcgctggcggagcgcatcgcgattatggagcgctatgtaggcaagcgggtggtggatgcggtgatcgccggtccaaaagccgatatcagcggcattgacgaccggttggtgatccagacgccgctggaggccagcgacgttccctatcgtcatgaccgggcgctgctccgcggggcgctggagaaagcgatccagctgccgggctga

SEQ ID NO: 212414 - DNA, 1641 bp, Klebsiella pneumoniae
atgtcgttattgcctctgcgtcggccggtggtcagtcgcacgacttatctgattctctttgcttgctatatcggcatctttctcaacctggctttttatcgccaggttttcccgttactgccggtaaatagcctgcataactggctggtatttctcagtatgccgatcgtggccattagcgtgatgaatatcctcaccactctcgcctcgttcctgaagctggaccggctggtgattagcctgttcattctgctcagcgcctcggcgcaatacttcatctggaactttggcgtggtgatcgaccgcagcatgatcaccaatatcctcgacaccactccggcggaaagctttgctctactctccggcgaaatgattgccgtcctcggcctttccggggttttggcggtattcgtcgcctggtgggtgaaaatccgtaagcccgccacgcggtggcgcggcgcggcgatgcgcctgctcaatatcgccgtttcggcgctgctgattattctggtggccgcgctgttctacaaagattacgcctcggtgttccgtaacaacaaagagctggtgaaatccctgagcccttccaacagcattgtggccgtgaactcctggtatgctcatcatcggatggacaacctgccgctggtgaagattggcgaagatgccacgcagaaagcggtgatgcataacgctccccgtaagaacctgacgatcgtcgtgctcggcgagacttcgcgagcggataacttctcactgggcggctattcgcgcgacaccaacccgctgatgcggcaggacggcgtgatctattttccgcataccacttcctgcggcacggcaaccgcagtttccgtgccgtgcatgttctccaatatgccgcgcgcacattatgatgaagagctggcgcaccatcaggaaggcgtcctggatattctacagcgcgcagggatccgggtgctgtggaacgataatgacggcggctgcaaaggcgcctgcgaccgggtaccacaccagaacgtcaccgacctgaagctcaccgggcagtgcatcgatggcgagtgctacgatgacgtcctgttccataatctcgacagctatatcgataacctgcaacaggatggcattattgtgctgcataccatcggcagccacggtccgacgtactacaatcgctatccagcggcgtttcgcaaattcacgccgacctgcgacaccaatgagatccagggctgtacccgggagcagttgaccaatacctatgacaacaccatcctttatgtcgactatgtcgttgataaagcgataaaactactgcaatctaaacaggataaatttaccactagcctggtttatttgtccgaccacggcgaatcgctgggagaagatggcgtctatttgcatggtctaccgtattccatcgcgccggatacgcagaaacatgtgccgatggcgctgtggctctccgccgactaccagcagcgctacggcatttccgcgcactgtctgcagcagcgggcgcaaaaagagaattactcgcaggataatctgttctccaccctgctcggcctgctcggcgtcagcacccgcgagtaccaggcggcagatgatatcttaacgccatgtagagaggctggttga

SEQ ID NO: 212415 - DNA, 672 bp, Klebsiella pneumoniae
atgaaaatcttagtcattgaagacgatgcgctgctgttgcaggggttaattctggcgatgcaaagtgaaggatacgtgtgcgacggcgtctccaccgcgcacgaagccgcgctatcgctggccagcaatcattacagcctgatcgtgctggatctcggcctgccggatgaagacgggctgcattttctctcccgcatgcggcgggagaaaatgacccagccggtgctgatcctcaccgcccgcgatacgcttgaggatcgcattagcggtctcgataccggggcggatgactacctggtaaaaccctttgccctggaggaactcaatgcgcgcattcgcgccctgctccgccggcataacaaccagggcgataatgaaatcagcgtcggcaatctgcgccttaacgtcactcgccgcctggtgtggctgggtgaaacggcgctggatcttacgccgaaagagtatgccctgctgtcgcggctgatgatgaaagccggtagcccggtgcatcgcgagatcctctacaacgacatttacagctgggacaacgagccggcgaccaataccctggaagtgcatattcacaacctacgcgaaaagattggcaaatcgcggatccgcaccgtccggggctttggctatatgctggctaacaacatcgacacggaatag

SEQ ID NO: 212416 - DNA, 1098 bp, Klebsiella pneumoniae
atggctctgtttgcaactgaaacctggaccatgcgccaccggctgctgctgaccatcggcgccatcctggtggtctgccagctgataagcgtcttctggctatggcatgagagcaaagagcagatccagctgctggtggccagcgccatcgaagggcacaacaaccagaaacatgtggagcatgaggtacgggaagcggttgccagcctgctggtgccgagcctgctgatcgttggcctggcgctgtatatcagcatgctggcggtgcgcaagatcacccgcccgctttcacgactgcaaagcgaactggagaaccgcacgccggacaacctcactcctatcgtactcagcgaatcggtgcccgaagtcacggcggtgaccaccgccctgaatcagttggtttcccgcctcaatctgaccctcgaccgcgagcggctgtttaccgccgacgtggcgcatgagctacgcaccccgctggccgggctgcggctgcaccttgagctgctggcgaaagtgcatggcatgggcgtcgacccgctgatccagcgtctcgatcagatgaccaccagcatttcccagctgctgcagctggcgcgcgtcggccagtccttctccgccggcagctaccagcaggtgctgttgctggatgacgtggtaaaaccgctgcaggacgaactggaggctatgctggcgcagcgtcagcagcggctgctgctgacggatatcgaaaacgaggccgtcgtctctggcgatgcgacgttaatcggcgtgatcctgcgcaatctggtggagaatgctcaccgctacagccctgaagggtcgacgatccgcgtgtcggtgaaagcgggcctgatgccggtgatggcggtggaagatgaagggccggggatcgatgaggcgaaaagcggcgaactcagtaaagccttcgtgcgcatggacagtcgctacggcggcattggcctcggactgagcatcgtcacgcgcatcgctcagctgcatgacgcccagttttttttgcataaccgacagccagggccaggggtccgcgcgtgggtgctattcccgcagcgcgggggtcagaacgtcagcacccattga

SEQ ID NO: 212417 - DNA, 2022 bp, Klebsiella pneumoniae
atgagtaaatcgtttgtactgcattccgcctttcgcccctccggagaccaaccggaagccatccgccgcctggaagaggggctggaggatgggcttgcgcatcagacgctactgggggttaccggctccggtaaaacctttaccatcgccaacgtgattgccgacctacagcggccgacgatggtgctggcgccaaacaaaaccctggcggctcagctctacggcgagatgaaagagtttttcccggagaatgccgtcgagtatttcgtctcctactacgattactatcagccggaagcctacgttcccagctcagataccttcattgagaaggacgcctcggtaaacgaacatattgagcagatgcgtctgtcggccaccaaagcgctgctcgagcggcgcgacgtagtggtggtggcgtcagtctcggcgatctacggcctcggcgacccggacctgtatctgaaaatgatgttgcatctgacggtcggtatgctgattgaccagcgggcgatcctgcgtcgtctggccgaactgcagtatacccgcaacgatcaggccttccagcgcggcacttttcgcgtgcgcggcgaggtgatcgacgtcttcccggcggaatccgacgatatcgccctgcgcattgagctgtttgacgaagaggtcgagcgtctgtcgctattcgacccgctcaccggccacgtcgaagggacggtgccgcgctataccatttatcccaagacccactacgtaacgccgcgggagcgcatcgtccaggcgatggaagagatcaagcttgagctggcggagcggcgcaaggtgctgctggccaacaacaagctgctggaagagcagcgcttaacccagcgtacccagtttgacctcgaaatgatgaacgagctgggttactgctcgggcattgaaaactactcgcgctttctctccgggcgcggacccggcgagccgccgccgaccctgttcgactatctgccggcggatggcctgctggtgattgacgaatcccacgtcacggtgccgcagatcggcggtatgtaccggggcgaccgggcgcgcaaagagacgctggtggaatacggtttccgcctgccgtcggcgctggataaccggccgatgaagtttgaagaattcgaagcgctggcgccgcaaaccatctatgtgtcggcgactccgggcgcctatgagctggataaatccggcggcgaggttgtggatcaggtggtgcggccgaccggtctgcttgacccaatcatcgaagtgcgcccggtggcgactcaggtcgacgatctgctgtcagagatccgcctgcgcacggccatcaacgagcgcgtgctggtcaccactctcaccaagcggatggcggaggacttaaccgagtaccttgaggagcacggcgagcgcgtgcgctatctgcactcggatatcgacaccgtcgagcgcatggaaatcatccgcgacctgcgtcttggcgagtttgacgtgctggtggggatcaacctgctgcgtgaggggctggatatgcctgaggtgtcgttggtggcgatcctggatgcggataaagagggcttcctgcgttctgaacgctcgctgatccagaccatcggccgcgcggcgcgcaacgtcaacggcaaggccatcctctacggcgataagatcaccccctccatggccaaagccattggcgagaccgagcgtcgacgggagaaacagcagcgctacaacgaagagcacggcatcgtgccgcaggggctcaataagaaagtggtggatatcctgcagctgggccagggcctggcgaaaaccaaagccaaagggcgcggtaaagcgaaggccgttgagcctgccgggcttagcgctgtggatatgacgccaaaagcgctgcagcagaaaatccacgagctggaagggcagatgatgcagcacgcgcagaacctcgagtttgaggaggcggcgcaaatacgcgaccagctgcatcagctacgcgagctgtttatcgccgcctcctga

SEQ ID NO: 212418 - DNA, 723 bp, Klebsiella pneumoniae
atgttgaatttacaggcagtaaatcacttttacggcaaccagcattcgctgtggaatgtcgatctagtactacgcccgggagagtgcattggcgtactgggacgcgagggcatgggaaaaaccaccctggttaactgcattgctggccacctgccggtggccagcggccggatgacctggcatgacattggcgccccgccgcaggatctcacccccctgtccgctcaatcgcgcagcgccattggtatcggctacgtgccacaagataaacgcattttttcccaactcagcgtggaagagaacctgcacatcgccctggcggccgggaaacccggggctaacgccagcggcggcgagatttatgagcattttcccgagctctatgccctacggcagcgcaaaggcgcctcgctgagcgacgacgatcagtaccagctggcgctggccagggcgctgatcgtccagccgcggctgctgatccttgatgaaccctcgcgcggcagagggccgcgctgcctgcaaaagctggcggatctgctgctgcggttaaatcgcgatatcggcctgacggtgctgctcgccgagcagcacctgccctttatccgccgggtggcggatcgcttctgtgtcttgcaccggggccgtaacgtcgccgaaggcgatattatggcgctggatgagccgctgctggcgcagtggataacgccggatccagcgccctga

SEQ ID NO: 212419 - DNA, 723 bp, Klebsiella pneumoniae
gtgactaaacgtttttttgtcaccggaaccgatactgaagtcggtaaaaccatcgccagcagcgccctgctgcaggcggcgaatctgctgggttttcacactgccggctataagccggtggcctccggtagcgagcttaccggcgatgggctgcgtaatgaagatgcgctggcgctgcagcgtcatagtcgggtcgcattgcgttacgaccaggtgaacccctataccttcgccgagccgacctccccgcacatcatcagcgccgacgaagggcggccgatcgccgcggccaggctctccagcgggctgcgtgagctggaaggtctcgccgactgggtgttggtggaaggcgccggcggctggtttacgccgctctcggattccctgaccttcgccgactgggcgcaggcggaacagctgccggtcattctggtggtgggcgttaagctcggctgtatcaaccacgcaatgcttaccgctcaggcggtacgccaggcgggactaccgctggcggggtggatcgccaatgacgtacagccgccgggcaagcgccacgccgaatatctggcgacgctgaaaaaccgactggccgcgccgttcctcggcgaaataccgtggcttgccgatatcgcgcagcgcgacgatctcgggcagtatctggacctcagggcgctggatccggcgttatccactgcgccagcagcggctcatccagcgccataa

SEQ ID NO: 212420 - DNA, 756 bp, Klebsiella pneumoniae
atggccacagtgaataagcaggcggtggccgcggcgtttggccgggcggccagcggctatacgcaacatgatgaactgcagcggcgctgcgccgatctactgctgcgccagctggcgcgccgcgattttgcgcaggtgctggatgccggctgcggccccggcagtatgagtcgctattggcgtgaggcgggcagcgtggtgaccgcgctggatctctccgccgggatgctcgcccaggcgcagcgtaacgacgccgcgcagcattatctgctgggggatattgaggcgctgccgctgccggacgcctgcgtcgatctggcgtggagcaatctggcggtgcagtggtgcgacgatctacgggcggcaattggcgagctgtaccgggtggcgcgtcccggcggcagagtggcgtttagcacgctgctcgccgactcgctgccggagctcaatcaggcgtggcaggccatcgacgaccggccgcatgccaaccgtttccttagcgaagcggcggtgcgcgcggcgcttagcggcctgcgcgcgaccggcgaggttcatcagattagcctgccgttcgccgatgcgttgagcgctatgcgctccctgaagggcatcggcgccacccatttgcaccaggggcggaccgccgccccgcttggccgcggcaaactgcgcgagctgcagctggcctggccgcagcggcagggcatctgcccgctgacgtattctctttttacaggagtcattgagcgtgactaa

SEQ ID NO: 212421 - DNA, 1158 bp, Klebsiella pneumoniae
atgagctggcagcagcgaatcgatcgggcgctggacgagcggcgggcggcggaagcttttcgccgccgcctgccggtgacgcacggcgccgggcgctggctggagcgggaaggggagcgctggcttaacttctccagcaatgactatctgggcctgagtcagcatccggcgattatcgccgcctggcaacagggggccacgcgctatggcgtcggtgccggcggctcgggccacgtgagcggctatagcgaagcccaccgcgcgctggaagaggcgctcgtcgactggctgggctatccgcgcgcattgctgtttatctccggctttgccgcgaatcaggcgctgatcgccgccctcgtggagaaagacgatcggattgtcgccgaccgcctgagccacgcctctctgctggaggcggcgagcctcagcccggcccagctgcggcgctttacccacaacgatccgcagcagctcgcgcaactgctggctaagccgctggcgggcgaacagttggcggtcactgaaggcattttcagcatggacggcgacagcgcgccgctggcggccattcacgccgcgacgcaggccgcaggggcagtgttgctggtggatgacgcccacggtgttggcgtggtcggcgacgaaggacgcgggagctgcgccgcgcaggcggtgcgccctgagctgctggtggttaccttcggcaaggccttcggcgtcagcggcgcggcggtgctgtgcgacgaagcaatggccgattatctgctgcagtttgcccgtcatctgatctacagcaccgcgatgccgcccgcccaggcggtggcgttgagcgctgccctggggatcattcgcagcgatgaagggcggcagcgtcgcgacatcctggccgcccgcatccgtcagttccgtgaggggatgggcaaggtgtcgctggggttgaccgactccgtcagcgcgatccagccgctgatcgtcggcgacaacgcccgggcgctgaacctggcctgccgtctacgcgacgcgggctgctgggcaacggcgatccgtccgccgacggtgccggtcggcagcgcgcgtttgcgcctgaccctgacagccgcccatcatgctgaagacattaaccgtttactggaggtgctgcatggccacagtgaataa

SEQ ID NO: 212422 - DNA, 1041 bp, Klebsiella pneumoniae
atggctcaccaacctcgctggacaatgtcgcaagtaacggaattatttaataaaccgctgatcgatctgctattcgaagcgcagcaaatccatcgtcaacactttgatccgcgccaggtgcaggtcagcaccctgctgtcgatcaaaaccggcgcctgcccggaagattgtaaatattgcccgcagagcgcacgctacaaaaccggcctcgaagccgagcgcctgatggaggttgagcaggtgctggaatcagcgcgccaggcgaaaaacgccggctccacccgcttctgtatgggcgcggcgtggaaaaaccccaatgaccgcgatatgccttatctggagcagatggtgaaaggggtgaaggcgctggggctggagtcctgtatgacgctcggcaccctgaccgacagtcaggcgcagcgcctggccgaagcgggcctcgattactacaaccacaaccttgatacctcgccggaattttacggcaacatcatcaccacccgcacctaccaggagcgcctggatacgctggataaagtgcgtgatgctgggatcaaagtctgctccggcggcatcgtcgggctgggagagagcgtaaaagatcgcgccggactgctgctgcaactggctaatctgccgacgccgccggagagcgtaccgatcaacatgttggtgaaggtcaagggcacgccgctggcggataacgacgacgtcgacgctttcgatttcatccgcactatcgccatcgcgcgcatcatgatgcccacctcctacgtgcgtctctccgccggccgcgagcagatgaacgagcagacccaggcgatgtgctttatggccggggcgaactcgattttctacggctgcaagctgctgaccacgccgaacccggaagaggacaaagacctgcagctgttccgcaagctggggatcaacccgcagcagacggcggtgctggaaggcgacaatgagcagcagcagcgtctggagcaggccttactcaccccggacactgaggaatattacaacgcggcggcgctatga

SEQ ID NO: 212423 - DNA, 1308 bp, Klebsiella pneumoniae
atggtttacaagtcgcttatgacactggacgatctcgctttcgatcggcgccacatctggcacccctacacctctatgacttcccccctgccggtctacccggtggtgtccgcccacggttgcgagctgtccctcgccggcggcgaacagttggttgacggtatgtcttcctggtgggcggcgatccacggctacaatcacccacgcctcaatgcggcgctgaaggggcaaattgaccaaatgtcgcacgtgatgttcggcgggatcacccatccgccggcagtagcgctatgccgtcagctggtggcgatgaccccggcctcgctggagtgcgttttcctcgccgactccggttcagtggcggtagaggtggcgatgaaaatggcgctgcagtactggcaggctaaaggcgaaccacgtcgtcgttttctgaccttccgcaacggctatcacggggataccttcggagcgatgtcggtctgcgatccgcagaactcgatgcacagcctgtggcagggctacctgccggataacctgttcgcccccgcgccgcaaagccgctttgacggcgagtgggacgagatggatatggtgccgtttgcccgcctgatggccgcgcatcgtcatgaaatcgccgcggtgatcctcgaacctatcgtccagggggcgggcggcatgcggatgtaccatccggagtggctgaagcgggtgcgtaaaatgtgcgaccgggaagggatactgctgatcgccgatgagattgccaccggctttggacgcaccggcaagctgttcgcttgtgaacacgccgggattaccgccgacattctgtgtctgggcaaagcgctgaccggcggcaccatgaccctttccgccgccatcaccacccgaacggttgctgaaaccattagcaatggcgaagccggttgctttatgcacggccccacctttatgggcaatccgctggcctgcgcggtggccggcgaaagcctgcgcctgctggagagcggcgaatggcagccgcaggtgacggcgattgaagcccagctgcaggccgagctggccccggcgcggggatctgcgctggtcgcggacgtccgcgtgctgggcgctattggcgtggttgaaacccgtcgcccggtcaacatggccgccctgcagcgctttttcgtcgagcagggagtctggatccgtccgtttggccggctgatttatctgatgccgccgtacatcatcacgcccgagcagctgacccgcctgacccgtgcggtcaaccaggcagtgcaggacgaaacattttttagcgaataa

SEQ ID NO: 212424 - DNA, 477 bp, Klebsiella pneumoniae
atgaaactgatcagtcacgatctccaggacggcggtaagctgcctaatcgtcacgtcttcaacggcatgggctacgatggcgacaatatttcgccgcatctgatgtgggatgatgtgcccgcgggaaccaaaagctttgtggtgacctgctacgatccggatgcgccgaccggctccggctggtggcactgggtggtcgctaacctgccggccgatacccgcgtcctgccgcaaggggccggttccggtcaggcggagctgccggaagaggccgttcagacccgcaccgattttggtaaggcaggctacggcggcgcggcgccgccgaagggcgaaacccaccgctatatcttcaccgtccacgccctggacgtcgagaaaattgaggtggatgctgaggccagcggcgcgatggtcggctttaacgtccatttccattccctcgccagcgcctccatcaccgccctgttcagttaa

SEQ ID NO: 212425 - DNA, 1383 bp, Klebsiella pneumoniae
atgcaacaacaacacaagccacatctgctgcgcgggctcaatgcccgacacattcggtttattgcgctcggctccgctatcggcaccgggctgttctatggctcggcctcagccatcaaagcggcgggcccggcggtgctgctggcctatctgattggcggcgcggcggtgtttatcgtcatgcgcgcgctgggcgagatggcggtgcgcaacccggtttccggctccttcggcagctatgcccgccagtatctcgggccactggccgggtttattaccggctggacctacacctttgaaatggtgatcgtcgccctggccgacgtcaccgccttcggcatctatatgggattgtggtaccccgatgtgccgcgctggatctggatcctcagcatcatcttctttatcggcgcgatgaacctgtgcaacgtgcgggtatttggcgagatggagttctggctgtctctggtgaaggtggtggcgattatcgccatgatgctggcgggggcggggatcatcttctttggctttggccacagcttcccggccaccgggctggaaaacctctggagccacggcggctttgcccctaacggctggcagggcgttatcgcctcgcttggcatcgtgatgttcgccttcggcggggtggagattatcggcgtcaccgccgcggaagcgaaggatcctaagaaggtgatcccgcaggccatcaataccattccgctgcgcattatcctgttctacgtctgcaccctggcggtactgatggcgatcttcccgtggaacagctttggcgaacaggggagtccgtttgtgcttattttcgacggtctggggatcccggcggcggcgaccatccttaacatcatcgtgatcagcgccagcatctcggcgattaacagcgatatttttggcgccggacgcatgatgtacggcatgtcgaaagaggggctggcgccgaaaagcttccagcgcatcgccagcaacggtgtgccctggatgacggtggtggtcatgggcggcgcgctgctggcggcggtggtattgaactatctgatccccgagcaggtatttgtgctaattgcttcgctggcggcattcgccacggtatgggtgtggctgatgattctgctatcccattttgccatgcgccgcggtttgtctgccgaagagcgcagccagatcgcctttcccattccgttctggccggttgcgccgctgttgacgctgctgtttatggggctggtcatcgccgtattagggatgtttgccgaaacgcggatggcgctgatcgccggcctggtctggctcgggctgctgacggtggtgtggtatgcgcgggtgcgtaaaacggcgctgcaggtagccactgaacagtaa

SEQ ID NO: 212426 - DNA, 1527 bp, Klebsiella pneumoniae
atgaaatctttaactttgatcccgggtcaactcagcctgtcgcagctccgcgacgtttacagccacccggtaaatattaccctcgacagcggcgcgtttgccgccattgacgagagcgtggcctgcgtcaacgccatccttgccgaagggcgtaccgcctacggcatcaacaccggttttggcctgctggcgcaaacccgtatctcgacggaagatctggagaacctgcagcgttcgctggtgctgtcccatgcggcgggcgttggcgagccgctggacgatgatctgacgcggctgattatggtgctgaagattaacagcctgtcccgcggtttctccgggatccgcctgagcgtgatccaggcgctgattggcctggtgaatgccggcgtgacgccgtggatcccggccaaaggctccgtcggcgcttccggcgacctcgcgccactggcgcatatgtcgttaaccctgctcggagaaggtaaagcgcgggtacgcggcggcgaatggctgccggccaccgaagcgctgcgtcaggtggggctggagccgattaccctggcggcgaaagaggggctggcgctactcaacggcacccaggcctcgaccgcttttgccctgcgcggtctgttcgaagccgaggatctgttcgcctccgcggtcgtctgcggggcgttaaccaccgaagcggcgctgggctcacgtcgtccgtttgatgcgcgcatccatgaagtgcgcggccagcgcgggcagattgatgcggcggcgctgtatcgccacctgctgaccgacgatagcgcgatctcgcagtcgcaccataactgcagcaaggtgcaggacccgtactccctgcgctgccagccgcaggtgatgggcgcctgcctgacgcagatccgccaggcggctgaggtgctgctggctgaagccaacgcggtctccgataacccgctggtctttgccgccgaaaatgacgtcatctccggcggtaacttccatgccgaaccggtggcgatggccgcggataatatcgcgctggcgatcgccgaaatcggctcgctctccgagcgccgcatcgcgctgatgatggacagccatatgtcgcagctgccgccgttcctcgtcaaaaatggcggcgtcaactccgggtttatgattgcccaggtcacggcggcggccttagccagtgaaaacaaagcgctgtcgcacccgcatagcgttgacagcctgcccacctccgcgaaccaggaagaccatgtttccatggcgccggctgccggtcgccgcctgtgggcgatggccgagaacacccgcggggtgctggccgttgagtggctggcggcggcgcaggggctggatatgcgcgaaggactgaccaccagtccgctgctggaagaggcgcgtcacttgctgcgcgaacgcgtgccgcactatacgcaggatcgctacttcgccccggatatcgataacgccattgcgcttctggcggcccgtcacctgacgcgtctgctgcctgccgtactgcattaa

SEQ ID NO: 212427 - DNA, 1689 bp, Klebsiella pneumoniae
atgtcgcaaagcaaatatcgccagctggacgtccgtgcgccaagaggcacgacgctgaccgcgaagagctggctgaccgaagccccgctgcgtatgttaatgaataaccttgatcccgatgtcgccgaaaacccgcacgagctggtggtctatggcggtattggtcgcgcagcgcgcaactgggaatgctatgacgctatcgtgaaggcgctgaagaacctggaaagcgatgaaaccctgctggtgcagtccgggaagccggtgggcgtattcaaaacccatgaaaactcaccgcgtgtgctgatcgccaactccaacctggtcccgcactgggccacctgggaacactttaacgagctggatgccaaagggctggcgatgtacggccagatgaccgccggcagctggatctacatcggcagccagggcatcgtgcagggtacctacgaaaccttcgtcgaagccggtcgccagcactaccagggcagcctgaaaggccgctgggtattaaccgccggtctgggcggcatgggcggcgcgcagccgctggccgcgacgctggccggcgcctgctcgctgaacatcgaatgtcagcagagccgcatcgatttccgtctgcgtacccgctacgtggatgagcaagccacctcgctggatgacgccctggcgcgcatcaaaaaatacaccgccgaagggcgggccatctctatcgcgctgtgcggcaacgccgcggagatcgtaccggagctggtgaagcgcggcgtgcgcccggatatggtcaccgaccagaccagcgcccacgacccgctgcatggctatctgccgaaaggctggagctgggaagagtatcagcagaaagccgaatccgacccgcagggcactattctggcggcgaaacgctcgatggccgatcacgtgcaggcgatgctggccttccatgagatgggggtcccaaccttcgactacggcaacaacatccgccagatggcgcaggaagtgggcgtcagcaacgccttcgatttcccgggcttcgtgccggcctatatccgcccgctgttctgccgcggtatcggcccgttccgctgggtagcgctgtccggcgatccgcaggatatctacaaaaccgacgcgaaagtgaaagagatcatcaaagatgatcagcatctgcaccactggctggatatggcgcgcgagcgcatcagcttccagggactgccggcgcgtatctgctgggtcggtctggagtggcggcaaaaactcggtctggcgtttaacgaaatggtgcgcagcggcgaagtctccgcgccgatcgtcattggccgggatcaccttgactccggctccgtcgccagcccgaaccgcgaaaccgaagcgatgcgcgatggttctgatgcggtctccgactggccgctgctcaacgccctgctcaataccgccagcggcgcgacctgggtgtcgctgcaccacggcggcggggtaggcatgggcttctcgcaacactccgggatggttatcgtctgcgatggtaccgatgaagcggcggcgcgtatcgcccgcgtcctgcacaacgacccggcgaccggcgtaatgcgtcatgccgacgcggggtatgagattgccattgaatgcgcagcagaacagggtctgaatcttccgatggtggcggcaacgcaggggaacgctaaatga

SEQ ID NO: 212428 - DNA, 726 bp, Klebsiella pneumoniae
atgtttgcacaacaacctcgttccgcgcccgcgcctttctatgaaaaggtgaagcaggcgatcagcgaaaagatccacagcggcgtctggcgaccgcatgaccgtatcccgtcggaagctgagctggtggcccagttcggcttcagccgaatgaccatcaatcgcgcgctgcgtgagctgacggacgaaggcctgctggtcaggttgcaaggggtgggaacctttgtcgccgagccgaaagggcagtcggcgctgttcgaggtgcgcagtattgccgcagaaattgtcgcccgtcaccatcagcaccgctgtgaggtactcctgcttgaggagacccgggcggatcatattcaggcgacggcgctcagcgtcccggaaggcacccgcatctttcactcgctgatggtgcattacgaaaacgaggtgccggtgcaaatcgaagatcgctgcgtcaatgccgcagtggtcccggactatctgcatcaggactacaccgccaccacgccccatgattacctgtcgctgatcgcgccgttaactgaaggtgaacatattgttgaagcggtgcaggccacggcggaagagtgcgcgctgctgcatattcacgcccacgatccgtgcctgctgatccgtcgccgcacctggtcgacaacccacatcgtctcccacgcgcgcctgctgttccccggtagccgatatcgtctgcaggggcgctttggctcctga

SEQ ID NO: 212429 - DNA, 957 bp, Klebsiella pneumoniae
atgatgctgtggcaagctacgccagccagtctctggcagggacgcgacgacagcgcggaagcgcccaatgcgctgcgcctgttccagaccatcgtccgcgcggaacgcttcgcgccgcaggagatgcccggcgatatcgcgctgctcggcttcgcctgtgacgaaggggttcggcgtaacaaggggcgtaccggggcagcggacggcccggcgaccctgcgccgggcgttggccaatatggccagccatcagggtcatgaccgctgcgtggatatgggcaccatcagcgtcgacggcgagcagttagaagccgcgcatcaggcgctgcgcgaggcggtggccgactgtcagcgggtgggtaaacgcacgctggtcctgggcggcggccacgagacggccttcggccacggcgctggggtactggatgccttcccgggcgaaaaagtgggcattattaatctcgatgcgcatctggatctgcgctttgccgactgcgccagctccgggacgccgttccgccagttggcgctggagtgtgacgcgcagcagcgcggttttcactatacctgcatcggggttagccgggcggcgaacacccaggcgctatgggatgaagcggcgcgccgccaggtggctatcgttgaagatctggaggtgctgacagccttcgaaactcgcgtgttgccggagcttgagcgcaatatcgcgcaattcgaccgtctgtatctgactatcgatctcgacgtactgccggcgcgagaaatgccggcggtgtcggccccggcggcgctgggcgtgccgctggccacgctgctgcgcatcgttgagccgctgtgccgcaacggtaagctgcaggcggtggatctggtggagtttaacccgctgtttgacattgacggtcagggcgctcgcgcggcggcccgtctggcatggcaaatcgcccattggtggcgctag

SEQ ID NO: 212430 - DNA, 1320 bp, Klebsiella pneumoniae
atggtctttagtcacaaaaaaataacatttccctgcgctattgttgactttaccggcgttatgaaaataaatgtctatacaacccatgacaagttaagcgctatgactgaagccacttccgaactcgttatctggcgaaacgggcgtctcgccaccctgaaccccgatcacgctcaaccttacggcctgctggagcgccatgcgctgctggtgcgcgacggccgcatcgcggcgattgtcgccgaagatgacgtccccagcgggcgcagtatcgatcttgaaggccggttggtaacgccgggattaatcgactgccacacccatctcgtcttcggcggcagccgggcccaggagtgggagcagcggctgaacggcgtgtcgtatcaaaccatcagcgccagcggcggcggcattaactccaccgtgcgcgccacgcgcgacagcagcgaagctgaactactggcgctggcccagccgcgtctggaacgcctgctgcgtgaaggggtgaccaccttggagatcaaatccggctacggcctcgacctgccaaacgaacgcaaaatgctgcgggtcgcccgacaactggccgatcataatggcgtggaactgtcggcgacgctgctctccgcccacgccacgccgccggaatatcaaggcgatgctgacggctatattacgctggtctgcgagaccattttaccgacgctgtggcaggagggactgtttgaaagcgttgacgtcttctgcgaaaacgtcggcttcagcccgcagcaaactgagcgcgtctttcaggcggcgcaggcgctgggcattccggtaaaaggccacgttgagcagctctcgtcgctgggcggcgcgcagctggtgagccgctatcatgggctttccgccgaccatatcgagtatctgacggaagagggcgtggcggcgatgcgcgaaagcggcaccgtggcagccctgctccccggcgcattctacttccttaatgaaacccgtaaaccgccggtcgagctgctgcgcaagtaccaggtgccgatggcggtggcgaccgatttcaaccccggcaccagccccttcgccagcctgcatctggcgatgaacatggcctgcgttaagtttggcctgacgccggaggaggcgtgggccggggtgacgcgccatgccgcgcgggcgctggggcgccaggccagccacggccagctggcgccgggctttgtcgctaacttcgccatctgggatgctgagcatcccgtcgagatggtgtatgagccggggcgcagtccgctctggcatcgcgttgttcaaggagagttgcaatga

SEQ ID NO: 212431 - DNA, 1284 bp, Klebsiella pneumoniae
atgaacacatattccgtttcccgtctggcgctggcgctggccttcggcgtgacgctgtccgcctgtagctcgacgcctgccgatcaacagccctcaacgcagactgcaccgggcactaccgcgcgtcccatactcaacgccgaagaagcgaaaaacttcacgccggcggcctatttccagtcgctggctcccaacgccgccgcctggacgccgtctgccatcagcctgccggcgcagcctgactttatcgtcggccctgcgggaacccagggcgtaacccataccaccattcaggcggcggtggatgcggcaattgcccgtcactctaaccgtcgtctgtatatcgcgattatgccgggcgagtaccctggaaccgtctacgttccggcggcgccgggcgccctgaccctgtatggtactggcgataagccaatcgacgtgaaaatcagcgaagccattgattccgagatggatcgcaacacctggcgtcgtctggtcaatccaggcggtaaatatatgccgggtaaaccggcgtggtatatgttcgacagttgccaaagcaaatccgcggcgaccatcggcgtaatgtgttccgcagtcttctggtcacagaataatggtctgcagctgcagaacctgaccatcgccaacaacctcggcgacagcgttgacgccggtacccaccaggcggtggcattgcgcagcgatggcgaccaggtgcagatcaataaggtcaatattcttggccgtcagaacaccttcttcgtgaccaacagcggcgtgcaaaaccgtctgcaggacaaccgtcagacccgcaccctggtgaccaacagctacattgaaggcgatgtggatatcgtttccggccgcggcgcggtggtgtttgataacaccgatttccgcgtggtgaattcccgtacccagaaagaggcctacgtcttcgcgccggctactctgaagagcgtgacctacggcttcctggcgaccaacagccgcttcaccgcctccggggataacgtcgcgcagctcggccgcgcgctggatgtcgatggcaatagcaacggccaggtggtgatccgcgacagcgctatcaatgaaggctttaatattgcccagccgtgggcggcggcggtaggctccggccgcccgttcagcggcaacaccggcagcgccgatgacaaaggcaatctgcagcgcaacctcaacgacaacggcttcaaccgcatgtgggagtacaataaccgcggcgtgggaagcaccgtggtcgccgagccgaaacagtaa

SEQ ID NO: 212432 - DNA, 408 bp, Klebsiella pneumoniae
atggacggctttgccatctggcgcgtagcgtttgtggggtcaatgattgcggtcagcgcctttattctcgaagcctggctgcagccgcgcggctattcgccggagtttattcgtaccgtgctgttgcagactctggtcaccgcccagtggttctatatgctgaactgccgcgtatcggatggattctcgttaaccaaaggtctgctggccaacaaagggatctggatcgtcagcggcgtactgctggtgctacagctgctgattatctacgcgccttttatgcagatgctgttcggcaccaccgggctgccgttccgctactgggtgatcacctttatcatcggcttcgccatgttcctgatcgtggaactggaaaaaccgctgacccgcaaatggcgttccgcctga

SEQ ID NO: 212433 - DNA, 924 bp, Klebsiella pneumoniae
atgacagcggtgacctttttcaccatctataacacctgggatcgctttgattatgactatcactggatcctcgggctgctgacctttatctcgaccatcgcgacgccgctgttttttgtcgtggccggctatcttgatgcgcagacgcgccacgatgccaactggcaaattggtaaaattaaaagcgtggtcatcgtctttctgttttgggtgacggtctattatgtctgggagccttaccagcgcggctacctgatccagccctggtttattttcgccctgattgtcatctatacctttcatcctttgatcgcctggctcagccagcggcgcgggctctttttcgccgtgctcctgacgctgctgtgctgctcctacggttacgacctgctctcggtgatctacccggacagacatcttttcagtttgccgccgcagtatcgcctgtggacatggctactgttttatttaaccgggcagttgtttaacgatccaaaggtcgcggagtggatacgcaacccacaggtgattaaagggtcgattatcgctctgccctttgtctatttatttacctggttttatgaacgccatttcttcttcgccctgtttaaagcagatcgtaatgcgttcattctcacgggatcgcaaatttatatcctgatcgtcctgctggtgatcgccgctaacgccgtgcagtttaaaaagaaccgcgagtggaaagaggccgtgctggcgacggtcagtaaagcgatgaccggagtttatatcctccactattccgtgtttcacctgctggtgatgctcatccctgtgcattcgctagccaccaagttgggggtaatagcgctgacctttgtcctgtcggtgctcatttcccttgccgcgctctccagtacgctgctcaggaaggtgattaccttgtaa

SEQ ID NO: 212434 - DNA, 507 bp, Klebsiella pneumoniae
atgcgcggcaaaagcgtgatgctcctggccgggttagcctctctcgcgcaggcgaacgaacttaacctctattctgtgaataccggttcctatgtttaccatctgaccaataatcacggacaatatacagagaatttcgaaaatcattttttctcagtggagcggaaattctctgcagactccaaatacagccttctgcttggcactatgaataacagcttcaacgatcgctgcctggcgctgggggtgagaagagactggtaccacagcggcagcgggtggaccttcaaaggcgtttacggctataccggcgaattcttcttcgacgccttcgagcattgcggcgatcatggctcctataaagactttaaggacgccacggggatcggcttttcaccctatatctaccacgctatccagtataacttcaccgattatttcgccgttgaaagcggcattattattcccagcgtgtttgtgattagtatccagtggagcttccgctaa

SEQ ID NO: 212435 - DNA, 213 bp, Klebsiella pneumoniae; identical to SEQ ID NO: 136137

SEQ ID NO: 212436 - DNA, 555 bp, Klebsiella pneumoniae
atgtcacaccataatacttgctatcgttctgagcattacgatctgtggtttgataatggttttcttctctatgggatgtcgctgatcctgaatagcctgccggcatcttacttccgcaaaaaacatgttttcttcaccagcgacaattatttcgcggtactgcagcacaactataatcggcgggatacattatttattctgttaaccgaaggcaacgatcttaattttcttagtgaactgcctatgctgcgcttaccggccaactcgacgccggaagagttaaagatatttctgcatcaacccacccgctattacaaaacccatccggcgccaggcgcctcggtgcagtttaccgagcgggaaaagaaagttattcaacttatcagcaatggcgaagcggtcgccagcattggccggtcgctaaacctgcatataaaaaccatttatcaaatccggctgaatctgattaaaaagctcggctgcagcggtagaaccgatttttttaatatcagccgcagcgaaacgttcaaatcctggagccagattcacctgtaa

SEQ ID NO: 212437 - DNA, 735 bp, Klebsiella pneumoniae
atggcgttttacagtatcggtgaagtcgccgaacgttgcggaatcaatccggtcacactgcgcgcctggcagcgtcgttacggtctactgaaaccgcagcgtagcgaaggcgggcatcgacaatttgatgaagaagatatcctgcgtatcgaagagatcaagcgctggatagagcgcggtgtatcagtagggaaagtcaaagcgctgctggaggataacctgccggcggcgcgcgacgaatccgcgcatcttcaggaagagatgatgtccattctgcgttatatgcagcccgccagaatccgcgccaaattaatggcgctgagtcatcaacaccccatcgacaccctcatcgatagcctgttagtgccggtacgacagcgtctcaagctggatcagaatacctcgctggtgattagcagcatgctggacggcctgttaattgactgcgtagcgttgtttctcgccgaagcgcgtaaaaaaaatggcaaagagacgctgctggtgggctggagcaatgaggacaggacgcgtctgtggctggaggcatggcgtctttcccaacgcggctggcatgtcaacgttctcgccgaaccgctggagtcgccgcggcctgagctatttcccgggcagcatattttcgtctggaccggacgtgccgccacgcctctgcaggaggagctgctcagccactggcaggagcagggcttcagcatccattttcacggccaaaattaa

SEQ ID NO: 212438 - DNA, 1212 bp, Klebsiella pneumoniae
atgctaaccaccatcatttatcgcagccatatctgcgacaatgtctcattcaaatcgatcgaggccatggtcgccagggcaaacgaaagaaatgggcaggcggacgtcaccggtattttactttttaacgggacgcatttttttcaactcattgaggggcctgaagaaaaggttcaggatatttatcagcatatctgccgggatcctcgccactataatctggtggagttgctttgcgattatgcgccgtcccgtcgttttggtaaggtcgggatggaactgtttgatttacgcgaacacgatcgcgaggaagttctgcaggcggtgatggaccgggggacgtcaaaatatcagctcacctatgatgaccgggcgctgcaatttttccgtacttttgtcgaagccacagaaaaagcgaactattttgagattccttccgcagatagttgggtttttattcctgataaggagacgttctatcctgataccccgattatcgataatacggaaggttgttcctttgccttccagccgattgtcgaccctttcgcctgcgaaattatttcgtgggaagcgctgttgcgtacaccggacgggcaatcccccggcgcctattttgccgggctgaccggggacgatatttatctcgccgacctgcacagtaaacgggtggcgttgtcgctggcgggaaaattaggtttacgtaataaggcgttaagcattaatttactgccgatgaccatggtcaaagcgccgaatgcggtggctttcctgctcgacgaaattagtcgcaatgaccttattccggagcagattattgtcgagttcactgagcgggaagtgatttcgcggatggacgattttaccgatgcggtgcgcaaactgaagggcgcgggaattaatcttgccatcgatcacttcggcgccgggtttgccgggctatcgctgctggcgcaataccaacccgacagaattaaaatcgaccatgagctgatccgcaatatccaccaggacggaccgcgccagtcgattgtacaggcgattatcaaatgctgtacttctctggagattgcggtctcagccgtcggcgttgagcgtgctgaagagtggatgtggctggaatcagccggtatttcacagtttcagggcaatttgttcgccagcgcgcgcctggggggcctacccgccgtcgcatggccggagaaaaaatga

SEQ ID NO: 212439 - DNA, 246 bp, Klebsiella pneumoniae; identical to SEQ ID NO: 138801

SEQ ID NO: 212440 - DNA, 306 bp, Klebsiella pneumoniae; identical to SEQ ID NO: 138802

SEQ ID NO: 212441 - DNA, 267 bp, Klebsiella pneumoniae; identical to SEQ ID NO: 138803

SEQ ID NO: 212442 - DNA, 996 bp, Klebsiella pneumoniae
atgaaacaaaccgtttataccgccagcccggaaagccaacaaatccatgtctggagtcttgaagcggacggcaaactgacgctggtgcaggtggttgatgccccagggcaggtccagccgatggtggtcagccccaacaaggaatttctgtacgttggcgttcgtccggagtttcgcgtgttggcctatcgcatcacgccggataacggggcgttaacctttgcgggcgaagctgcgctgccgggcagcccgacccatatctctaccgatcgtcatggccgctttgtcttcagcgcctcctacaatcagggctgtgtcagcgtgaccccgctgcacgacggcctgccgggcgaaaccatcaccgtggtggaagggctggaaggctgccactcggccaatatctccccggataatcgcaccctgtgggtgccggcgctgaagcaggatcgcatttgcctgtttaccctcagcgacgatggtttcctctcggcacaggagcccgcggaagtgacgaccgtcgagggcgccggtccgcgtcacatggtattccatcccaaccagcagtatggttactgcgtcaatgagctaaacagctcgattgacgtctgggagctgaaagatcctaagggcaacatcgaatgtgtacagaccctggatatgatgccgcctgattttagcggcgtgcgctgggcggcggatattcatatcaccccggatggccgtcatctttacgcctgcgatcgtaccgccagcatcatcacggtgttcagcgtttcggaagatggtagcgtgctggcggtggaaggctatcagcctaccgagacccagccgcgcggctttaacctcgatcacagcggtaaatatctcattgccgccgggcagaagtcgcaccatatcgcggtgtacgatatcgtcggtgagcagggactgctgcaggagaaaggccgctatgcggttgggcaggggccgatgtgggtggtggtcaacgcccactga

SEQ ID NO: 212443 - DNA, 819 bp, Klebsiella pneumoniae
atgacaacacgcgtgattgccctggatttagacggcaccctgcttaccagcaaaaaaaccattctgcccgcttcgctggaggcgctggcccgcgccagagaggcaggctatcaggtcatcgtcgtcaccggacgtcatcacgtcgctatccatcctttttatcaggcactggctctcgatacacctgcaatttgttgtaatggcacctatttgtatgattatcacgcaaaaaaggttttggccgccgatcctatgccggtggagcaagcggtaagcctcactgccatgctcgccaaacagcagatccacggcctggcatatgtggacgacgcgatgctttatgaacaccccaccgggcatgtgatccgcacccgcaactgggcgcaggcgttaccggaagatcagcgtccggttttcgctcaggtcgattcgctggcgcaggcggttcgcgaagttaacgcggtatggaaattcgctctcaccgatgacgacattccccgcctgcagcggtttgcgcagcaggttggcgagacgctgggcctcgagtgcgaatggtcgtggcacgatcaggtggatatcgcgcgcgccggcaacagcaaaggcaaacgcctggcgcaatgggtggccgaccaggggctgtcgatgcaggatgtggtggccttcggcgataactacaacgatcttagcatgctggaagcggcgggcaccggggtggcgatgggcaacgcggtggacgaggtgaaagcccgcgccaacatagtcatcggcgacaatgagtccaccagcatcgccgagtttatctaccgccaactgctgtaa

SEQ ID NO: 212444 - DNA, 1059 bp, Klebsiella pneumoniae
atgctggagctggactttacccagaccctcggtagccactgcctgcagatccgtgaaactctgcccgccagcgggatcaccgccgtctttggcgtctccggcgctggcaaaacctcgtttattaacgccatcagcggcctgacccgaccccaggcggggcggatcgtgctcaatggccgggtgctgaacgacaccgcgcagcgtatctgcctggcgccggagcagcgccgtatcggctatgtctttcaggatgcgcgcctgtttccccattataaagtgcgcggcaatctgcagtatgggatggcgaaatccatggtcagccagttcgataagctggtggatctgctggggattgcgcccttgctggatcgtctgccgggccggttatccggcggcgaaaagcagcgagtggctatcggccgcgccctgctgaccgcgccggagctgctgctgctggatgagccgctggcctcgctggacattccgcgcaaacgcgagctattgccctacctgcagcggctggcgcaggagattcatattccgatgctttacgtcagccactcgctggatgagatccagcatctggccgatcgtgtgctggtgctggaggccggtaaggtgaaagctttcggtccgctggaggaggtctggagcagcagcgtgatgcacccctggctgccggcggagcagcagagtactatccttagcgccaccgtcgccgcgcagcacccgcagtatgcgatgacggccctggcgctgggggaccagttgctgtgggtcaaccggctcgaacgtcccgcaggcgacaccgcacggatccgcattcaggcgtcggacgtttcgctgacactggcccagccgtccgggaccagcatccgcaatatcttgcgcgccgaggtggttcagtatctggaggtcaacggacagattgaagtgcagctcagagtgagtggccgtctgctatgggccaggattagcccatgggcgcgggacgacctggcgatagcgccaggtcagcaggtgtttgcccagattaaaagcgtgtcgatcgccgcctga

SEQ ID NO: 212445 - DNA, 690 bp, Klebsiella pneumoniae
atgtttctgagcgaacccgaatggcaggcggtgctgctgagcctgaaagtctcctccctggcggtggccttgagcttgccctttggcatctttttttcctggctgctggttcggcgcacctttcccggcaaggcgctgctcgacagtattctccatttaccgctggtgctgcctccggtggtggtggggtacctgctgctggtggccatggggcggcgcgggtttattggcagctggctgtatgactggttcggcatcagctttgcttttagctggcgcggggcggtgctggcggcggcggtgatgtctttcccgctgatggtgcgcgccattcgcctggcgctggaaggggtggacgtcaaactggagcaagcggcgagaaccctcggggccagccgctggcgggtatttttgaccattacgttgccgttgactctgccggggattattgtcggcacggtgctggccttcgcccgctcgttaggggagtttggcgcgaccatcacgttcgtctccaatattcccggtgaaacgcgcaccctcccttcggcgatgtacaccttgattcaaaccccgggcggggagggggcggcggcccgcctctgcctcatcgccatcggtctggcgctggtttcgctgctgatttcggaatggctggcccgcgtgagccgccagcgcatgggaggataa

SEQ ID NO: 212446 - DNA, 774 bp, Klebsiella pneumoniae
atggcaggttcttggttacgcggggttgtcggggtatcactcacgctgtgcgtcgcgggtcaggcgctggcggcagagggtaaagtgaccgttttcgccgccgcatcgttaaccaacgcgatgcaggatattgcccaggcgtacaagaaagaaaaaaacgtcgaggtcgtgtcgtcgtttgcctcgtcgtcgacgctggcgcggcagatagaagcgggtgcgccagcggacctgtttatctccgccgatcagaaatggatggattacgcggcagataaaaaggccatcgttccggcaacccgcgccactctgcttggcaacagcctggtggtggtcgcgccgaaagccagtgcgcagggggcgataaccattgatgagaaaaccgactggaccagcctgctgaaaggaggccgtctggcggtgggcgatccacagcatgtcccggccggtatctatgccaaagaagcactgcagaaactcggtgcctgggagacgttgtcgccgaagctcgccccggctgaagacgtgcgcggtgcgctggcgctggtggagcgcaacgaagcgccgctggggattgtctatggctccgatgccgtggccagcaagggggtgaaagtggtcggcaccttcccggaagcctcgcatcagaaagtcgagtacccgctggcgattgtcgatgggcaccgcaatgcggctgtgagcgccttctatgactacctgaaagggccggaagcgtccgctatctttaaacgttacggatttaccacccgctga

SEQ ID NO: 212447 - DNA, 150 bp, Klebsiella pneumoniae; identical to SEQ ID NO: 138847

SEQ ID NO: 212448 - DNA, 789 bp, Klebsiella pneumoniae; identical to SEQ ID NO: 138846

SEQ ID NO: 212449 - DNA, 1473 bp, Klebsiella pneumoniae
atgtcatcattgcaaatttcgcaaggcacgtttcgcctgagcgatacaaagaccttaaaaatagaccacctgagcgtggcggcgggtgaaagctgggcgttcgtcggcagcaacggcagcggcaaatccgccctcgcgcgagccctggccggcgacctgcccctgctcagcggccagcgcgaaagccatttctcccgcgtgacccgcctctccttcgaacagttgcagaagctggtcagcgacgagtggcagcgcaataacaccgacctgctcagcccaggcgaagaagataccggccgcaccaccgcggagattatccaggatgaggtgaaagatcctgcccgctgcgcgcgcctggctgaacagtttggcatcagcgccctgctggaccgccggtttaaatacctgtcgaccggggaaacgcgtaagaccctgctgtgtcaggccctgatgaccgatccgcaactgctgatcctcgatgaacctttcgacggtctcgacgtcaactcccgccagcagctggctgccctgctggccgacctgcacagcgccggcatcaccctggtgctggtgctcaaccgtttcgatgagatcccggagtttgtgcaattcgccggcgtgctggctgactgcaccctcagcgagaccggcgagaagtcttccctgctgcagcaggcgctggtcgcccagctggcgcacagtgaaaaactggacggcatcaccctgccggagccggatgtcccaccggcccgtcatgcgctggcagactcggcgccgcgtatcgtgctcaacgacggcgtggtctcctataacgatcgcccggtcatcaatcacctctcatggaccgtgaatccaggcgaacactggcagatcgtcggtcccaacggcgccggtaaatctacgctgctgagcctggtcaccggggatcatccgcagggctacagcaacgatctcacgctctttggccgccggcgcggcagcggtgagaccatctgggatattaaaaagcatatcggctacgtcagcagcagcctgcatctggactaccgggtcagcaccaacgtccgcaacgtcatcctgtcgggctattttgactcgatcggcatttatcaggcggtctccgacaagcagcataagctggtgcagcaatggctggatattctcggcatcgataagcgcaccgccgacgcgccgtttcacagtctgtcgtggggccagcagcggctggcgcttatcgtccgcgcgctggtgaagcatccaaccctgctgatcctcgatgaaccgctgcaggggctggaccccctcaaccgccagctagtgcgccgctttgtcgacgtgttgattggcgaaggggccacacagctgctgtttgtctcgcaccatgcggaagatgccccggactgtattacccatcgcctggcgttcgttcccagtggagacggttacacttatcagctcggccccgtggcctga

SEQ ID NO: 212450 - DNA, 1017 bp, Klebsiella pneumoniae
atgaaagttctggttacaggtggtagcggttacattggaagtcatacctgcgttcaactgctgcagcagggacacgaggtggtgatcctcgacaatctctgcaacagcaagcgcagcgtactaccggtgattgaacgtctcggcggcaaagaagccacctttattgaaggcgatattcgtaacgaagcgctgatgacggagatcctccacgatcacgccattgaggcagtgatccacttcgccgggctgaaagccgtcggggagtccgtcgccaagccgctggaatattacgacaataacgtcaccggcacactgaaattagtctctgccatgcgcgccgctggcgtgaagaactttatctttagctcctccgctaccgtctacggcgatcagccgaaaatcccgtatgtcgaaagcttcccgaccggcaccccgcaaagcccctacggcaaaagcaagctgatggtggagcagatcctgaccgacctgcagaaagcccagccggagtggagcattgccctgctgcgctacttcaacccggtcggcgcccacccgtcgggcgacatgggggaagacccgcaggggatcccgaacaacctgatgccctacatcgcccaggtcgccgttggccgtcgcgaatcgctggccatttttggtaacgactatccgaccgaagatggtaccggcgtgcgcgattacatccatgtgatggacctcgccgatggccacgtcgcggccatggaaaaactggctgacaaagccggggtgcatatctacaaccttggcgccggcgtcggcagcagcgtgctcgacgtagtcaatgctttcagcaaggcctgcggcaaacccattaactaccatttcgcgccgcgccgcgatggcgacctcccggcctactgggcggatgctgccaaggccgaccgcgagctgaactggcgcgtaacgcgcaacctggacgaaatggcgcaggacacctggcactggcagtcccgtcatccgcagggttatccagactaa

SEQ ID NO: 212451 - DNA, 1047 bp, Klebsiella pneumoniae
atgagcgtatttaaccccgttgaccatccacatcgtcgttataacccgttaaccggacagtggattctggtttctccgcatcgcgccaagcgcccctggcagggggcgcaggaaacgccggcaaaacagaccttgccggcccacgatccggactgtttcctgtgcccgggcaacacccgggtgaccggcgacaccaacccgaattacaccggtacctacgtatttaccaacgactttgcggccctgatgaccgacaccccggacgcaccggagagtgacgatccgctgatgcgctgccagagcgcccgcggcaccagtcgggtgatctgcttctcgccagaccacagcaaaacgctgccggaactgagccttgaagcgctggaagacgtggttaaaacgtggcaggaacagaccgcggacctcgggaaaagctacccgtgggtgcaggtttttgaaaacaaaggggcagcgatgggctgctccaaccctcacccgcatggtcaggtgtgggccaacagtttcctgcccaatgaagcggaacgggaagaccgtctgcagaaagagtattacgccgcacagggccagccgatgctgctggactatgtgcagcgcgaactggccgacggcagccgcacggtggtggacaccgagcactggctggcggtggtgccctactgggccgcctggccgttcgaaacgctgctgttgccgaaagcgcacgtgcagcgcattaccgatctcaccgacgcccagcgcagcgatctggcactggcgttgaaaaagctgaccagccgttacgacaacctgttccagtgctcattcccctactccatgggctggcacggcgcgccgtttaacgacgaagaccataaccactggcagcttcatgcccacttttatccgccgctgctgcgctccgcgacggtccgcaagtttatggttggttatgagatgctggccgaaactcagcgcgatctgaccgccgagcaagctgccgaacgactgcgcgccgtcagcgacgtccattttcgtgaatccggagtgtaa

SEQ ID NO: 212452 - DNA, 1149 bp, Klebsiella pneumoniae
atgagtctgaaagagaaaacccaaaccctgttcgctgacgccttcggctacccggccagcaatgtcattcaagcgccaggccgcgtcaacctgatcggcgagcataccgattacaacgacggttttgtgctgccctgcgctatcgactaccagacggtgatcagctgtgcgccgcgcgacgatcgtaccgtgcgggtgattgccgccgattacgacaatcagaccgatgagttctctctcgacgcgccgattatcagccacgacacccagcagtggtcgaactatgtccgcggcgtggtaaagcatctgcagcagcgtaacagccactttggcggcgcggatctggtgatcagcggcaatgtaccgcagggtgcggggttaagctcctcagcctcgctggaagtcgccgtcggcaccgtgttccaacagctgtatcatctgccgctggatggcgcgcaaatcgccctcaacggccaggaggcggaaaaccagttcgtcggctgcaactgcggcatcatggatcagctgatttcagcgctgggcaaaaaagaccacgcgctgctgatcgactgccgttcgctgggcaccaaagccgtctcgatgccgaaaggcgtggcggtggtgatcatcaacagcaactttaagcgtactctcgtcggcagcgagtacaacacccgtcgtgaacagtgcgaaaccggcgcgcgcttcttccagcagcccgccctgcgcgatgtcacccttgagcaatttaacgccgtcgcccatgagctggatccggtggtcgcgaagcgcgtacgccacgtgctgacggagaatgcccgcactgtggaagccgccagcgccctcgaaaaaggcgacctgaagcggatgggtgagctgatggcagagtcccacgcctcgatgcgtgatgatttcgagatcaccgtcccgcagatcgacaccctggtggagatcgttaaggccgcgatcggcgataagggcggcgtgcgcatgaccggcggcggctttggcggctgcgtggtagcgttaatcccggaagatctggtcgataccgttcagcaggccgttgccaacgagtatgaagcgaaaaccggtattaaagagacattctatgtctgcaaaccgtcacagggggccgggcaatgctaa

SEQ ID NO: 212453 - DNA, 1044 bp, Klebsiella pneumoniae
atgctaacgcaaaccaccgcgctggccccggacggccggccatggcagcaggtgaccctgcgcaataagtcggggatgaccgtcaccgtggcggactggggcgcgacgctgctcagcgccgaggtgccgctggccgatggcagcctgcgccgaccgctgctgggctgcgcaaagctggaagactatgctcgccaggccgcatttcttggcgcctcggtaggccgctacgccaaccgtatcggccacagccgcttcccgcttgacggccaggtcgtcaacgtcacgccgtcaaacgacgcgggccaccagctccacggcggcccggaagggtttgataagcgccgctggcgcattgtccgcgccgacgagcaggaagtgctgttcgccctgacctcgcccgatggcgatcaaggctttccgggcaccctgcaggccaccgcgcactatcgtctgaccgacgataaccgcatcgcgattacctatcgcgccaccgtggaccaaccctgcccggtgaatatgaccaatcacgtctatttcaacctcgacggtgagcagggcgatgtgcgccagcatcagctccagatcctcgcccagaggtatctgccggtggaaagcgacggtatcccgggtggcgaactgaaagatgttgctaacaccagctttgatttccgccagccgaaaaccatcgccgccgacttcctcgcggatgccgatcagcaaaaggtgaagggatacgatcatgccttcctgctggatgccaaaggcgacgccagccagcctgcggcacaggtctggtcgcaggatggcaagctgcagatgacggtctatacctccgctccggcgctgcagttttactccggcaactatctcggcggcaccccgtcgcagacgacggagccctacgccgactggcagggactggcgctggagagcgaattcctgccggattcgccgaaccatccgcaatggccgcagccggactgtgtattacgtccgggccaggagtacgtcagcctgacggaatatcagtttatcgcccgataa

SEQ ID NO: 212454 - DNA, 753 bp, Klebsiella pneumoniae
atggctgtaactaagctggtactggttcgtcatggcgaaagccagtggaacaacgaaaaccgcttcaccggttggtacgacgtggatctgtccgagaaaggcgttagcgaagcaaaagcagcgggtaaactgctgaaggctgaaggcttcagctttgattttgcttatacctccgtgctgaaacgtgccatccacaccctgtggaacgtgctggacgaactggatcaggcctggctgccggttgagaaatcctggaagctgaacgagcgtcattacggcgcgctgcagggcctgaacaaagcggaaaccgctgagaaatatggtgacgagcaggttaaacagtggcgtcgcggcttcgctgtcactccgccggagctgaccaaagacgacgagcgctacccgggccacgatccgcgctatgcaaaactgaccgacgccgaactgccgaccactgaaagcctggcgctgactatcgaccgcgtcgtgccttactggaacgaaaccattctgccgcgcctgaaaagcggtgagcgcgtgatcatcgccgctcacggtaactccctgcgcgcgctggtgaaatacctcgacaacatgggcgaagacgagatcctcgaactgaacatcccgaccggcgtaccgctggtatatgagttcgatgaaaacttcaagccgatcaaacattactatctgggcaacgcggaagagatcgcggcgaaagcggctgccgtcgccaaccagggtaaagcgaagtaa

SEQ ID NO: 212455 - DNA, 1053 bp, Klebsiella pneumoniae
atgaattatcagaacgacgatttacgcattaaagagatcaacgaattattacctcccgttgcgctcctggaaaaattccctgctaccgaaaatgctgcaaacaccgttgcacatgctcgcaaagcgatccatcagatcctcaaaggcgacgatgaccgtctgctggtggtgattgggccttgttctattcacgatccggcagcggcgaaagagtatgccgcccgcctgctgaccctgcgcgaggcgctgaagggcgagctcgagatcgtcatgcgggtctattttgaaaaaccgcgcaccaccgtcggctggaaagggctcatcaacgatccccatatggataacagcttccgcatcaacgacgggttgcgcatcgcgcgcaaactgctgctggacattaacgacagcggcctgccggcggcgggggaattcctcgatatgatcaccccgcagtatgtcgccgatctgatgagctggggcgccattggcgcgcgaaccaccgaatcccaggtgcaccgtgagctcgcctccggactctcctgcccggtgggctttaaaaacggtaccgatggcaccatcaaggtggctatcgatgcgattaacgccgccggcgcgccgcactgtttcctgtcggtcaccaagtggggccactccgccatcgtgaataccagcggtaacggcgactgtcatattattttgcgcggcggcaaagagcctaactacagcgcgaagcacgtggcggaggtgaaaatcggtctggcgaaagcgggtcttccggcccaggtgatgatcgacttcagccatgccaactccagcaagcagttcaagaagcagatggaagtgggcgccgacgtatgccagcagatcgccggcggcgagcgcgccattatgggcgtgatgattgaaagccatctggtggaaggcaaccagagcctcgagagcggtgaaccgctgacctacggcaagagcgtcaccgacgcctgcatcggctgggaggataccgaaacgatcctgcgtcagctggcggaagcggtgaaaacccgccgcggctaa

SEQ ID NO: 212456 - DNA, 366 bp, Klebsiella pneumoniae; identical to SEQ ID NO: 138662

SEQ ID NO: 212457 - DNA, 945 bp, Klebsiella pneumoniae
atggcgcactcgcattcgcactcctctgtccaggctccggataacagcaacgcccgccggctgctatgggcgtttatcgtcaccgccggctttatgctgattgaagccgtcggcggcgcgatctccggctcgctggccctgctggcggatgccggccatatgctcaccgactccgccgctctgctgtttgcgctgctggcggttcgcttcgccagccgcccaccaaatgcccgccatacctttggctggttgcgtttaaccaccctggcggcgtttctcaatgctattgctctggtggtgatcaccatgctgattgtctgggaggcgattcagcgcttccagcatccgcagccggtagccggcgtgacgatgatggtcattgcagtcgccggtctgctggccaacgtgctggcgttttggatcctacatcggggtagcgaggagcggaatcttaacgtacgcgccgcagcgctacacgtgcttggcgacctgctgggctcggtcggcgcgatcgtggcggccgtggtgatcctcaccaccggctggacgcctgtcgacccgattctttccgtgctggtttcctgcctggtattacgtagtgcctggcgattactgaaagagagtctgaatgaattgctggaaggcgcgccgcgttcgctggatgtggcggccctgcagcgggatatccgtcgctctatcccggaggtacgcgatgttcaccacgtccacgtctggctggtgggggaaaaaccggtgatgacgctccatgtacaggtcgttccaccgcacgatcatgacgcgttactcaaccgcatcctgcatttcctggaacataaatatgaaattgcgcatgccacggtgcagatggagtaccagccctgcagcggcccggagtgccatctcaacacgatgcacgccgggcacgatcatcaccaccaccattag

SEQ ID NO: 212458 - DNA, 720 bp, Klebsiella pneumoniae
atggatttttttagcacgcagaatattttagtacatatacccatcggcgctggggggtacgatctctcctggatagaggccgtggggacgattgccgggctgttgtgtatctggctggcgagcctggagaagatcagtaactatgctttcgggctggtcaacgtcacgctgttcgccatcatcttctttcagatccagctgtacgccagcctgctgctgcaactgttcttttttgccgctaacgtttacggctggtatgcatggtcgcgacaaagcagcaaccatgaggctgagctgcagatccgctggctgccgcgcagcaaagcgctgggctggctggcggcctgcgtggtagcgatcggcttgctgaccctttttatcaacccgttctttgctttcctgacgcggatcgcggtcagcctgatgcaagcgctcggtttgcaggtcactatgccggaactgcagccggatgctttcccgttctgggactcctgtatgacggtgctgtcggtggtggcgatgatcttaatgacccgcaagtatgttgaaaactggctgctgtgggtgatcgtcaacgtgataagcgtggtgatttttgcccgtcagggcgtctatgccatgtcgctggaatacctcttgctgacgttcattgcgttgaacggcagccggatgtggataaacagcgcgcgtgagcgaggttctcacgcgttttctggctaa

SEQ ID NO: 212459 - DNA, 1044 bp, Klebsiella pneumoniae
atgagcgtaatgtttgatcctgaaacggcgatttatcctttccctgctaaaccgcagccgctgaccgtcgacgaaaagcagttttaccgcgaaaaaatcaagcgcctgctgcgcgagcgcgatgccgtgatggtggcgcattactacaccgatcctgaaattcaacagctggcggaagagaccggcggctgtatcgccgactcgctggagatggcgcgctttggcgcccgccattcggcctccacgctgctggtcgccggagtgcgttttatgggggaaacagccaaaatcctcagcccggaaaagaccattttgatgccgaccctgaacgccgagtgttcattggatctgggctgtccgattgaggaattcaacgccttttgcgacgcccatcctgaccgcaccgtcgtggtctatgccaatacgtccgccgcggtgaaggcccgcgccgactgggtggtgacctccagcatcgccgtggaactcattgaccatctggatagtcttggtcaaaagatcctctgggcgccggaccgccaccttgggcgttacgttcagcgtcagaccggcgcagacgtgctgtgctggcagggggcgtgcatcgtgcacgacgagtttaaaacccaggcgttgatgcggatgaaggctctgcatcccgaagccgccgtgctggtccatcccgagtcgccgcaggcgatcgttgagatggccgatgccgtaggctccaccagccagctgattgcggcggcgaaaagcctgccccagcgccagctgatcgtggccaccgatcgcggtattttctataaaatgcagcaggcggtgccggagaaaacgctgctggaagcgcccaccgccggcgaaggagcgacctgtcgcagctgcgcgcattgtccgtggatggcgatgaatggcctgaaagccattgccgagggtctcgagcagggcggcgctgaacatgaaatccatgtcgacgaagcgctgcgaaccggcgcattaattccccttaaccggatgctggattttgcggctacactacggggataa

SEQ ID NO: 212460 - DNA, 462 bp, Klebsiella pneumoniae
atggttattaacatccgccgttcccggcctgatgaaggggataaactgactgcgatctggtgtcggtcggtcgacgccacgcatgattttctgacaaaagcgtatcgaaaggagctggaggagatggtacgcgcatttttaccggaggctccgctgtgggtggcggttaatacggaagaccagccgatcgcctttatgctgctgaccggagaacatatggatgcgctgttcgtcgatccggatgtccgcggctgtggcgtggggaagttgctgattgagcatgcgctgtcgttaacgccgaagctgacgaccaatgtaaatgagcagaatgaacaagcggtcgggttttatcagaagatgggttttagggtgacagggcgctctgaaacggacgatctggggcaaccgtatccgttattgaatttgatgtatgagcagcaggctgaagcagactacgattga

SEQ ID NO: 212461 - DNA, 930 bp, Klebsiella pneumoniae
atgccaattcgggtgcaggacgagctgccagccgtcaatttcttgcgcaatgaaaacgtcttcgtaatgacgacaacacgtgcaacgactcaggaaatccgccccctgaaggtgttaatcctcaacctgatgccgaagaaaatcgagacggaaaaccagttcctgcgtctgctatcaaactctccgctgcaggtggatatccagttattacgtatcgatgcgcgcgagtcgcgtaatacccctgcggagcatctgaataacttttactgtaatttcgatgagatctgcgatcagaactttgacggcctgattgttaccggcgctcctttaggcctggttgagtttaacgatgttgcttactggccgcagatcaaacaggtgctggagtgggccaaggatcacgtcacttcgacgctgttcgtctgttgggcggttcaggccgcgctgaacattctgtacggcattcccaagcagacccgcgccgaaaagatttccggcgtctatgaacaccatattcttcatccgcacgccttactgacccgcggtttcgacgactctttcctggccccgcactcacgctatgctgattttccggccggacttattcgcgactataccgatctcgagatcctcgcggagacggaagagggcgatgcgtatttgttcgccagcaaagataagcgcatcgcctttgtcaccggccacccggagtacgatgccaataccctggcaagcgaatatttccgcgatgtggaagccggtttgaaccctgagatacctcataactatttcccacaaaacgacccgcagaacaaaccgcgcgccacctggcgcagccacggcaatctgctgttcgctaactggcttaactattacgtctaccagattacgccatacgatctgcgtcatatgaatccgacgctggaataa

SEQ ID NO: 212462 - DNA, 1602 bp, Klebsiella pneumoniae
atgacgcagcaggcgacaatcaccgatgaactggcctttagtcagccctatggcgagcaggagaagcagatcttaacgcctgaggcggtagaatttctgacggaactggtgagccgctttacgccggcgcgcaataagctgctggccgctcgtttgcagcaacagcaggctattgacgacgggcagcttccggattttatttcggaaactgcttccattagaaatggcgactggactattcgcggtatcccggctgatttgcaggatcgccgcgtggaaatcaccggccccgtcgagcgcaagatggtcattaacgcgctgaatgccaacgtcaaagtctttatggcggactttgaggattcgctggcgcctgactggcgcaaagtcattgatggtcaaatcaacctgcgcgatgccgtgaacggaaccatcagctacaccaacgaggccggcaaaatctatcagttgcagcccaatcccgctgtgctggtatgccgtgtgcgcggcctgcatctgccggaaaagcatgtgacctggcgtaatgaggccatccccggcagcctgttcgattttgcgctctatttctttcataactaccaggcgctgctggcgaaaggaagtggtccctacttctatctgccaaaaacacaggcctggcaggaggcggcatggtggaacgatgtcttcagttttacggaagatcgctttgacctgccgcgcggcaccatcaaggccacgctgctgattgagacgctgccagcggtgttccagatggatgagatcctgcatgcgctgcgcgaccatattgttggcctgaactgcggccgctgggattacatcttcagctatatcaagacgctgaaaaaccatccggatcgcgtactgccggaccggcaggtggtgacgatggataaacccttcctcagcgcctactcacgcttgttgattaagacctgccacaaacgcggcgcgtttgcgatgggcggtatggcggcgtttatcccgagcaaagataccgaacgtaaccgccaggtgctgagtaaagtcaccgccgataaagagctggaggcaaacaacggtcacgatgggacctggatcgcccacccgggcctggcggataccgccatggcggtgtttgaccgcgtgctgggcgataagccgaatcagctctcggtcacccggagcgaggatgcgccaattaccgctgaacaactgctggctccctgtgagggcgaacgcacggaagccggaatgcgcgccaacattcgcgtggcggtgcagtacatcgaagcgtggatctccggcaacggctgcgtaccgatttatggcctgatggaagacgccgcaacggccgagatctcgcgcacctctatctggcagtggatccatcatcagaaaaccctgaacgacggtaccccggtcactaaggcgctgttccgccagtggctggcggaagagctgatggtgattcaggaggagctgggagagcaccgcttcagccacggccgctttgacgatgcggcgcgactgatggagcagatcaccacctccgacgagctaattgattttctgacattgccgggctaccgcctgctggcctaa

SEQ ID NO: 212463 - DNA, 1320 bp, Klebsiella pneumoniae
atggagcatctgcacatgaaaacccgtacccaacaaatcgaagaattaaacaaagaatggacgaacccgcgctgggaaggcattacccgtccctacagcgcggaagaggtggtgaagttacgcggctcggtgaatccggaatgcacgctggcgcagcttggcgcggcgaaactgtggcgtctgctgcacggggaggcgaaaaaagggtacgtcaacagtctcggcgcgctgaccggcggccaggccttgcagcaggcgaaggcgggtatcgaagccatttatctctccggctggcaggtggcggcggatgctaacctggcgtccagcatgtatccggatcaatcgctgtatccggccaactcggtaccggcggtggtggatcggatcaacaacaccttccgccgcgccgatcagatccagtggtcagcgggaattgaaccgaacgatccgcgctttatcgactacttcctgccgatcgtggcggatgcggaggccggttttggcggcgtcctgaacgcctttgagctgatgaaatcgatgattgaagccggtgcagcggctgttcacttcgaagatcagctggcatcggtgaagaagtgcggccatatgggcggtaaagtgctggttccgactcaggaagcgattcagaagctggtggcggcgcgtctggcggccgacgtgatgggggtcccgacgctggtcatcgcccgtaccgatgccgacgccgcggatttaattacctcagactgcgatccgtacgatcgtgagtttattaccggggatcgcaccagcgaagggttcttccgcacccacgccgggatcgagcaggcgatcagccgcgggctggcctacgcgccgtatgcggatctggtgtggtgtgaaacgtcgaaaccggatctcgagcaggcgcgccgctttgccgaggctatccatgcgcgtttcccgggcaaactgctggcctataactgctcgccgtcgtttaactggaagaaaaatcttgatgataaaaccatcgccagcttccagcagcagctgtcggacatgggatacaaataccagtttattaccctcgcggggatccacagcatgtggttcaacatgttcgacctcgcccatgcctacgctcagggtgaggggatgcgccactatgttgagaaagtgcagcagccggaattcgccgccgggccggaaggctacaccttcgtctcgcatcagcaggaggtgggcaccggctacttcgacaaggtcaccaccattatccagggtggtacctcgtcggtaacggcgctgaccggctcgaccgaagaagagcagttttaa

SEQ ID NO: 212464 - DNA, 1785 bp, Klebsiella pneumoniae
atgacgcgtggtcttgaattactgattgcccaaacgatattgcagggatttgacgcgcagtatgggcgttttcttgaagtcacttccggcgcgcagcagcgctttgaacaggctgactggcacgccgtgcagcaggcgatgaagcagcggatccatctctacgatcaccacgtgggcctggtagtagagcagctgcgctgcatcaccgaagggaaaagcaccgacgtcgattttcttctgcgggtgaaacagcagtacacccaacttttaccggattaccctcgctttgaaattgctgagagctttttcaattcggtctactgccgcctgtttgaccaccgctcgctgacccccgagcggctctttattttcagctcgcagcccgagcgaccctttcgtaccctcccgcgaccgctggcgaaagatttctttccggaacgcggttggtcgcacctgctgggtaaagtactgtccgatctgccgctgcggctaccgtggcaaaacaaagcgcgggatatcggctatatcattgccagtctgcaggaggcgctgggggaggaactgctcgccacctgtcatctgcaggtcgccaatgagctgttctaccgcaataaagccgcctggctggtgggcaaactggtcatgccgatggcgacgctgccttttttgctgccgatccaccgcagcgaagagggtgagctgtttgttgacacctgcctcacaacccatgccgaagcgagtatcgtttttggcttcgcgcgttcctattttatggtttatgcgccgttgcccggcgcgctggtggaatggctgcgcgagatcttgccgggtaaaacgacggccgagctgtacatggcgattggctgtcagaagcacgccaaaaccgaaagctatcgcgaatatctacactacattactcgctgcgatgagcagtttattgaagcgccgggtattcgcgggatggtgatgctggtgtttaccctgccgggctttgaccgggtgtttaaggtgatcaaggaccgcttcgcgccgcagaaagagatgaccgccgcccatgtgcgggcttgctatcagctggtaaaggagcatgaccgcgtcgggcggatggcggacacacaggagtttgaaaatttcgtgctggataaacggcaaatcgcgccggcgctgctggcgctgctgcaggcggaagcggggaacaaactcaccgatctcggcgaccgcatcgtcatcagccatctctatattgaacggcgaatggtgccgctcaacctgtggctggagcaggttaacggccaggcattgcgtgatgcggtagaagagtatggcaatgctatccgccagctggccgccgccaacatctttcccggcgatatgttatttaaaaacttcggcgtcacccgccatggccgggtggtgttctacgactatgatgaaatctgctatatgacggaagtgaattttcgcgagatcccgccgccgcgctatccggaggatgagctggccagcgagccgtggtacagcgtttcgcctggcgatgtgtttccggaggagttccgccactggctgtgcgccgacccgcgcattgggccactgtttgaagagatgcatgccgacctgctgcgcgccgactactggcgcgcactgcagatgcggattaaaaacggccatgtggaagatgtctacgcctaccggcgcaagcagcgttttagcgtgcgctatggcgccgacagtagaccagataaggcgtttacgccgccatccggcaaggtgcgccgatctgcctga

SEQ ID NO: 212465 - DNA, 831 bp, Klebsiella pneumoniae
atggccacaacccccattcccgcgaaacgcggcagaaaacccgcggctgccactgcccagcaggctggcggtcaggttcagtcgctgacccgcggcctgaaattactcgaatggattgccgagtcccacagcagcgtcgcgctgaccgaactggcgcagcaggcgggtctgcccaactccacgactcaccgtctgctgaccaccatgcaacagctgggcttcgtccgccaggttggcgagctgggtcactgggccgtaggggcgcatgctttcgtggtcggcagcagctttctacaaagccgcaatctgctggccattgtccacccgatcctgcgccagctgatggaagattccggtgaaacggtgaatttagcggtgctcgaccagagcgaccaccaggcgatcattatcgatcaggtgcagtgcacccagctgatgcggatgtcggcgccaatcggcggtaaactgccgatgcacgcttccggcgccgggaaggcgtttctcgcgcagctgagcgaagagcaggtcaccagtctgctgcaccgtaaagggctgcatgcctatacgcatgccacgctggtctccccgctgcatctgaaggaagatttagcccagacccgcaagcggggctactctttcgatgatgaggagcacgcgctcggcctgcgctgcgtcgccgcctgcatttacgatgaacatcgcgaaccgttcgcggcaatctccatctcaggccccatctcgcgtatgaccgatgatcgggtgactgagctgggcgcgctggtgatcaaggcggcgaaggaagtgacgctggcgtatggcggggttaaataa

SEQ ID NO: 212466 - DNA, 3684 bp, Klebsiella pneumoniae
gtgagcagcaaagttgagcaactgcatcagcagttaaaagaacgtattctggttctggatgggggcatgggcaccatgatccagggctatcgtctgagtgagcaggactttcgcggtgagcgctttgctgactggccgtgcgacctgaaaggcaacaacgacctgctggtgctcagcaaacccgaagtgatccgcgagatccacgacgcctatttcgaggccggcgcggatatcattgagaccaacacctttaactcgacgaccatcgcgatggcggattaccagatggaatccctgtcggccgagatcaactttgccgcggcgaagctggcccgcgccagcgccgacgcctggacggcccgcacgccggaaaaaccgcgctatgtcgcgggcgtgcttggcccgaccaaccgcaccgcctctatctcgcctgatgtgaacgatccggcgttccgtaatattacctttgaccagctggtggccgcctatcgcgaatccacccgggcgctggtggaaggtggcgtggatctgatcctgattgaaacggtgtttgatactctgaacgctaaagcggctatatatgcggtgaaagaggagctggaggcgttaggcgttgacctgccgctgatgatctccgggaccattaccgatgcctctggccgcacgctttccggacagaccaccgaagccttttataactcgctgcgtcacgccgaagccttatcgtttggtctgaactgcgccctcgggccggacgagctgcggcagtacgtccaggagctgtcgcgcattgccgaatgctacgtcaccgcgcacccgaacgccggccttcccaacgccttcggcgaatacgatctggacgccgacaccatggcgacgcaaattcgcgaatgggcggaagccggtttcctcaatatcgttggcggctgctgcggtaccaccccggagcatatcgccgccatgagccgggcggtagcgggcctgccgccgcgtcagttgccggaaattgcggtggcctgccgcctcgccggcctggagccgttgaatatcggcgacgatagcctgttcgttaacgtcggtgaacgaactaacgtcaccggctcggcgaaatttaagcggctgattaaagaagagaagtacagcgaagcgctggacgttgcgcgtcagcaggtggaaagcggcgcgcagattatcgatatcaacatggacgaggggatgctcgacgcggaagcggcgatggtgcgtttccttaacctgattgccggcgagccggacattgcccgcgtgccgatcatgatcgactcctccaagtgggaagtcattgaaaagggcctgaaatgtattcagggcaaaggcatcgttaactcgatttcgatgaaagagggcgtcgaatcctttatccaccatgcgaaactggttcgccgctacggcgccgcggtggtggtgatggctttcgacgaggttggtcaggccgacacccgcgaacgtaaaattgagatttgccgtcgcgcctacaaaatcctaaccgaagaggtcggcttcccgccggaagatattatcttcgaccccaatatctttgccgtcgccaccggtatcgaagagcataacaactacgcacaggactttatcggcgcctgcgaagacatcaaacgcgagctgccgcatgcgctaatctccggcggggtctccaacgtctccttctccttccgcggtaatgacccggtacgtgaggcgatccacgccgtattcctctactacgcgatccgcaacggcatggacatggggatcgtcaacgccggtcagctggccatctatgatgacctcccgggcgagctgcgcgacgcggtcgaagacgtgatcctcaaccgccgcgatgacagtaccgaacggttacttgagctggcggaaaaatatcgcggcagcaaagcggacgacggcgcgaatgcccagcaggcggagtggcgcacctgggaagtgaaaaaacgcctcgaatattcgctggtgaagggcattaccgaatttatcgaacaggacaccgaagaagcgcgtcagcaggccgcccgcccgattgaggtcattgaagggccgctgatggacggcatgaacgtggtcggcgatctgttcggcgaaggcaaaatgttcctgccgcaggtggtgaaatccgcccgtgtaatgaaacaggcggtggcctaccttgagccgtttattgaagccagtaaagagcagggctccagtaacggcaaaatggtgattgccacggtaaaaggcgacgttcatgacattggcaaaaacatcgtcggcgtggtgctgcagtgcaataactacgaaatcatcgatcttggcgtgatggtcccggcggataaaattctcaaaacggccaaagaggtaaacgcggatctaattggtctttccgggctgattaccccatcgctggacgagatggttaatgtggcgaaagagatggagcgccagggctttaccatcccgctgctgataggcggcgcgaccacctcgaaagcgcatacggcggtgaaaatcgagcagaactacagcggcccgaccgtttacgtacagaacgcctcgcgcaccgtcggcgtggtgtctgcgctgctctcggacacgcagcgcgacgagtttgtcgcccgcacgcgcaaagagtatgaaacggtgcgtatccagcatgggcgtaaaaaaccgcgtacgccgccggtgacccttgccgccgcgcgggaaaacgatctggcctttgactgggagagctacacgccgccggtggctcatcgtctgggagtacagacggtggaagccagtatcgagactctgcgcaactacatcgactggacgccgttcttcatgacctggtcgctcgcgggtaaatatccgcgcattctggaagatgaagtggtaggggaagaggcgcagcgcctgttcaaagacgctaacgagctgctggataagctgagcgcagagaaaaccctgaacccgcggggcgtggtgggtctgttcccggccaaccgcgtgggcgacgatattgaaatctatcgcgatgaaacccgcacccacgtgctgacggtgagccatcatctgcgccagcagacggagaaggttggcttcgccaactactgcctcgccgattttgtcgcgccgaagctgagcggcaaggcggactacatcggcgccttcgccgtgaccggcggcctggaagaggacgcgctggcggatgcctatgaagcgcagcatgatgactataacaagatcatgatcaaggccatcgccgatcgcctggcggaggcctttgccgagtatctgcatgagaaagtgcgcaaggtttactggggatatgcggccaatgagaacctcagcaatgaggagcttattcgcgagaactaccaggggatccgaccggcgccgggatatccggcctgtccggagcataccgaaaaggggaccatctggcagctactggacgtcgaagcccataccggcatgaagctcaccgaatcgttcgccatgtggccgggcgcatcggtttccggctggtacttcagccatccggatagcaagtacttcgccgtggcgcagatccagcgcgatcaggtcgaagattacgcgctgcgtaaaggaatgacgccggcggaggtcgagcgctggttagcgcctaatctgggctatgatgcggactag

SEQ ID NO: 212467 - DNA, 1632 bp, Klebsiella pneumoniae
gtgttaactctgctacacctgttgtccgcggttgctctgctggtgtggggcacgcatatcgtgcgtaccggggtgatgcgcgtctatggcgctcgcctgcgtaccgttctcagtagcagcgtagagaaaaagccgctcgccttctgcgcgggtcttggcgtgactgcgctggtgcaaagcagtaacgccaccaccatgctggtgacctcatttgtcgcccaggatttagtgggtctgatgccagcgctggtgatggtgctgggggccgacgtcgggacggcgctgatggcgagggtgttgaccttcgacctgtcgtggctgtcgccgttgttgatatttatcggggtgattttcttcctcggccgcaagcagacccgcgccgggcagcttggacgggtggggattggtctggggctgatcctgttggccctcgagctgattgtccaggccgtacaccccataacccaggcgaacggtgtgcaggtgattttcgcctcgctgaccggcgatatcatgctggatgctttgattggcgccgtatttgcaatcattagctactccagcctggcggcggtgctgttaacggcgacgctgaccgcggcgggagcgatctctttcccggtggcgctgtgtctggtgattggcgccaacctgggatcggggctgctggcgatgcttaacaacagcgcggcgaacgcggcggcgcgccgggtggcgctgggcagcctgctgtttaagctggtggggagtctgattattctgccgttcgtccatccgctggccgcggcgatgcaaaagctgccgttggccgagtccgagctggttatctacttccacgtcttttacaacctgctgcgctgcatcgcgatggtgccctttgccggaccgatggcgaagctgtgccagcgtctgatccgcgatgagcccgagctggataaccatctcaaacccaagcatctcgacccgtcggcgctggacaccccggcgctggcgctggccaatgccgcgcgtgagacgctgcgcattggtgacgcgatggagcagatgctggagagcctgcacaaggtgatgcatggcgaaccgcgtcaagagaaagagctgcgccgtatggcggatgatatcaacgtactttacaccgctattaagctctatctggcgcgaatgccaaaggatgagctggcggaagaggaatcccggcgctgggcggaaattattgagatgtcgttaaacctcgaacaggcgtccgatatcgtcgagcgaatgggcagcgagatcgccgataaatcgctggcggcgcggcgcgccttctcggtagaagggttaaaggagcttgatgcgctgtacgatctgctgctcagcaacctgcagctggcgatgtcggtcttcttctccagcgatgtgcccagcgcccgccgcctgcggcgcagcaaacaccggttccgcattcttaaccgccgctactcgcatgcgcacgttgaccgtctgcatcagcagaacgtgcagagcatcgaaaccagtacgttgcacctggcgctgctgggggatatgaagcgtctgaacagcctgttctgctcggtggcttacagcgtgatggagcagccggatgaagacgacgaacgggatgactactga

SEQ ID NO: 212468 - DNA, 810 bp, Klebsiella pneumoniae
atgattaaccgcgatacgctgctgtgcatctccctggcgggtcgccccggcaacttcggcacccgctttcataactatctgtatgacaagctgggattgaactacctctacaaagcctttacgactaaggatattgaggcggcggtaaaaggggttcgcgcattgggtatccgcggctgtgcggtctccatgccgtttaaagagagctgcataccgtttcttgacgcgatcgatccgtcagcaaaagtcatcgactccgtcaacaccatcgtcaacgacgacgggaagttaaccgggctaaacaccgattacatcgcggtcaaaagcctgatcgccagccatcggctcgataccaacgccagagtgatgattcagggtagcggcggcatggggaaagccgtcattgccgccttccgtgatgccggtttccgcgacgtgatcattgcggcccgcaatcgccagcgcggcctggcgctggcaaaacagtatggctttcagtggcagcccctgcccgaagggatcgcagccgagattctggtcaatgtcacaccgctgggcatggcggggggagcggaaagcaacacgctggcgttcagcgaggccatggtggcccaggccagcgtcgtgtttgacgtggtcgcgttgccggcggaaactccgctgatccgcctggcgcaacaacggggtaagcaaaccatcagcggtgcggaagttattgccctgcaagccgtcgagcagtttgccctttataccggcgtacggccggatagcgcgctggtggcagaggcctcggcgtttgccagaagctag

SEQ ID NO: 212469 - DNA, 1233 bp, Klebsiella pneumoniae
atgcaaacaacaacggccctgcgcctgtatggcaaacgagacctgcgcctggaaacctttaccctcccggcgatgcaggacgatgagatcctcgcccgggtggtcacggacagcctgtgtctttcctcatggaaagaggccaatcagggtgccgatcataaaaaggtgccagatgatgtggccaccaggcccattattatcggtcatgaattctgcggcgaaatccttgccgtcggtaaaaagtggcagcataagtttcagccagggcagcgctacgtgatccaggccaacctgcagttgcccgaccgacccgactgccccggctactcattcccatggatcggtggcgaagccacccatgtggtgatccccaatgaggtgatggcgcaggattgcctgctcacctgggagggggatacctggtttgaaggatcgctggtggagccgctctcctgcgtcattggcgctttcaacgccaattatcatctgcaggaggggagttacaaccacgtgatggggatccgtcctcagggacacactctgatcctgggcgggacggggccgatggggctgctggctatcgactatgcgctgcacggccccatcaatccttcactactggtagtgaccgataccaataagccgaagctcagctacgcccgccgtcattacccctctgagccgcagacgctgatccactacctcgacggccatgaggccagtcgcgatacgctactggcgctcagcggcggccatggcttcgacgatatcttcgtgtttgtgccaaacgaacagctgatcaccctggcctcctcgttgctggctccggacggctgcctgaatttctttgctggcccccaggataagcaattcagcgccccgatcaacttctacgacgtgcactacgcctttacccactacgtcggcacctccggcggtaatactgacgatatgcgcgccgcggtggcgctgatgcaggcgaaaaaggtccagacggcgaaagtggtcacccatattctcggcctgaacgccgcgggcgaaaccaccctcgatctgcctgccgtcggcgggggaaaaaagctggtgtataccggaaaagccttcccgctcacgccgctgggcgagatcgccgatcccgaactggcagcgattgtggcgcgtcaccatgggatctggtcccaggaggctgaagcgtatctgctggcccacgcggaggatattacgcatgattaa

SEQ ID NO: 212470 - DNA, 825 bp, Klebsiella pneumoniae
atggaacagaaaaaaatcacgcaaggcgacctggtgagcatgtttctccgctccaacctccagcaggcctcctttaacttcgaacgtattcatggcctggggttttgctacgacatgatcccggcgatcaaacgcctttatccgctcaaagccgatcaggtcgcggcgctgaagcgtcatctggtgttctttaataccacgccggcggtgtgtggcccggtgatcggcgtcaccgccgccatggaggaggcccgggctaacggcgcggccattgacgatggcgctatcaacggcatcaaagtgggtctgatgggcccgctggccggcgtcggcgacccgctggtctggggcacgctgcggccgattaccgcggcccttggcgcctcgctggccctctccggcaacattctgggacctttgttatttttctttattttcaatgcagtgcggctggcaatgaagtggtacggcctgcaactgggcttccgtaaaggggtcaatatcgtcagcgatatgggcggtaacctgctgcagaagctgaccgaaggcgcctccattctcggcctgtttgtcatgggggtgctggtgaccaaatggaccaccatcaatgtgccgctggtggtttcccaaacgcccggtgcagacggcgccaccgtcacgatgaccgtccagaacatcctcgatcagctctgccccggcctgctggcgctgggcctgacgctactgatggtgcgtctgctgaacaagaaagtgaatccggtctggctgattttcgcccttttcggcttaggcattatcggcaacgccctcggctttctgtcctga

SEQ ID NO: 212471 - DNA, 801 bp, Klebsiella pneumoniae
atggaaattagtaccctacagataatagccatatttattttttcctgtattgccggaatgggcagcgtgctggatgaatttcagacccatcggccccttatcgcctgtaccgtgattggcctcatcctgggcgatttaaaaaccggggttatgctcggcggtacgctggagctgatcgccctcggctggatgaacgtgggggcagcgcagtcgccagattcggcgctggccagcattatctccgccattctggtgattgtgggccaccagagcattgccaccggtatcgccattgctctgccggtggccgccgccgggcaggtgctgaccgttttcgcccgtaccattaccgtggtgttccagcacgccgcggacaaagcggccgaggaggcgcgctttcgcaccatcgacctgctgcatgtctccgcactgggggtgcaggcactgcgcgtggcaatcccggcgctggtggtctcgctgttcgttagcgcggatatggtcagcagtatgctcagcgcgatcccggaattcgtcacccgcggcctgcagattgccggtggtttcattgtcgtcgtgggctacgcgatggtgctgcgaatgatgggcgtgaaatacctgatgcccttctttttcctcggttttctcgccgggggttatctcgacttcagcctgctggccttcggcggcgtgggcgtcatcatcgcgctgatctacatccagctcaatccacagtggcgtaaagctgaacccgccgcctccactgccccctctgcccccgcccttgaccagcttgacgactaa

SEQ ID NO: 212472 - DNA, 495 bp, Klebsiella pneumoniae
atgcaaattaccctcgcccgtattgatgaccgactgattcatggccaggtcaccaccgtgtggtcaaaagtcgccaacgcccagcggataattatctgcaatgacgatgtatttaacgatgaggttcgccggaccctgttgcgccaggcggctccgccaggcatgaaggtaaacgttgtcagtctggaaaaagcggttgcggtctatcataacccgcaatatcaggacgagaccgtcttttatttatttaccaatccacacgatgttttaacgatggtgcgccagggcgtgcagatcgccacgttaaatattggtggcatggcctggcgacccggtaaaaaacagctaaccaaagccgtttctttggatccgcaggatattcaggcattccgtgaactcgataaactgggcgtaaaactcgatttacgcgtggtcgcatcagatccgtcagtcaatattctcgacaaaattaacgaaacagctttctgcgaataa

SEQ ID NO: 212473 - DNA, 408 bp, Klebsiella pneumoniae
atggttcacgctatcttctgcgcccacggccagctggccggggccatgcttgattcggtatgcatggtctacggcgaggttaacgtcagcgccgtcgcgtttgtccccggcgaaaacgcggcggatatcgccattaacctggaaaagttagtaagcgcccacaccgatgaggagtgggtaatcgcggtagatttgcagtgcggaagcccatggaatgccgcagccgggctggcaatgcgtcacccgcagatccgggtgattagcggcctgtcgctgccgctggcactcgagctggtggataaccagcataccctgagcgccgatgacttatgccagcatctgcaggccatcgccagtcagtgctgtgtggtctggcagcagccagaaaccgttgaggaggagttctga

SEQ ID NO: 212474 - DNA, 804 bp, Klebsiella pneumoniae
atgaatacctggttaaatttaaaagataacgtcattatcgtgaccggcggcgcctcgggaattgggctggccattgtcgatgaattattatcacaaggtgctcatgtccagatgattgatattcatggcggcgatcgtcatcacaatggcgataattatcacttctggccgacggatatttccagcgcgacagaggtgcaacagactatcgatgccattattcagcgctggtcgcgtattgatggtttggtcaataacgctggcgtgaatttcccgcgtttattagtcgacgaaaaagcaccggccggccgctatgaattaaacgaagccgcttttgaaaaaatggtcaatatcaaccagaaaggggtgtttttcatgtcgcaggcggtggcgcgtcaaatggtcaaacagcgcgccggtgtgattgtcaatgtctcttcggagagcggcctggaaggttctgaaggtcaaagctgctacgccgcgaccaaggccgcgctcaacagctttacccgctcctggtccaaagaattgggtaaatatgggatccgcgtggtcggcgttgcgccggggatcctcgaaaaaaccggtctgcggacaccggaatatgaagaggcgctggcctggacgcgcaatatcaccgtcgagcaacttcgcgagggatataccaaaaacgccattcccatcgggcgggcaggaaagctctcggaagtggctgattttgtttgctatctcttgtcagcgcgcgccagctacatcaccggagtcaccactaacattgccggcggaaaaacgcgcggttaa

SEQ ID NO: 212475 - DNA, 954 bp, Klebsiella pneumoniae
atgaccatggaaaacagtgacgatatccggttgattgtcaaaatcgcccagctctattacgagcaggatatgactcaggcgcaaattgctcgcgagctggggatctatcgcaccaccatcagtcgcctgctgaagcgcggccgcgagcagggcattgttaccatcgccatcaactatgactacaatgaaaacctgtggctcgagcaacagctcaagcaaaaatttggcctgaaagaggcggtggttgccagcagcgatgggctgctggaagaagaacagctgagtgcgatgggccagcatggcgccctgcttgtcgatcggttgctggagccaggcgatatcatcggtttttcatggggccgcgccgtgcgttcgctggtggagaacctgccgcaggccagccagtcacgccaggtgatctgcgtccccatcatcggtggaccttccggtaaactggagagccgctaccatgtgaacaccttaacctacggcgcggcagccagactgaaagcggaatcccaccttgccgattttccagccctgctggataacccgctgatccgcaacggcatcatgcagtcccagcactttaaaaccatctcatcctactgggacagcctggatgtggcgctggtgggtattggttcaccggccattcgcgacggcgcaaactggcacgccttctacggcagcgaagagagcgacgatctcaacgcccgccacgtcgccggggatatctgttcgcgtttctacgatattaacggcgggttagtcgataccaatatgagcgaaaaaaccctgtcgatcgaaatggcgaagctgcgccaggctcgctattccatcggcatcgccatgggggaagagaaatactctggcattcttggcgcattgcacggacgctatattaattgtctggtgacaaacagagaaacggctgagttattactgaaataa

SEQ ID NO: 212476 - DNA, 876 bp, Klebsiella pneumoniae
atgctgcccgactcatcaacccgattaaataaatacatcagcgaaagcggcatctgctcgcgtcgcgaagcggaccgctttattgaacaaggcaacgtctttatcaatggcaagcgcgccactattggcgatcaggtgaagcctggcgatttagtcaaagtgaacggacggttgattgagccgcgcgaagcggatgatctggtactgattgcgctgaataagccggtcggcattgtgagcaccaccgaagatggcgagcgcgacaacattgtcgatttcgtcaaccacagcaagcgtatctttcctatcggccgtctggataaagactcccaggggctgatcttcctcaccaaccatggcgatctggtgaacaagatcctgcgcgccggcaacgaccatgaaaaagagtatctggtcacggtcgataagccggtgaccgatgagttcattcgcggcatgggcgcgggggtaccgattctcgggaccgtgaccaaaaaatgtaaggtaaagaaagaagcgccgttcgttttccgcatcactctggtgcaggggctgaatcgccagatccgtcgtatgtgcgagcactttggctatgaagtgacgaagcttgagcgtacgcggatcatgaacgtgagcctgacggggatccccttgggtgaatggcgtgatctaaccgatgacgagctgatcgacctgttcaagctgattgaaaactcctcttccgaagcgaagccgaaagccaggccgaaggccaaagcggcgactcccggcatcaagcgcccggtggtgaagatggaaaatagcaacgataagggccgcccggctggtaacgggaaacgtttcacccagccgggacgtaaaaagaaagggcgttaa

SEQ ID NO: 212477 - DNA, 273 bp, Klebsiella pneumoniae
atggcactcccccgtattacacaaaaagagatgaccgagcgcgaacagcgcgaattgaaaacgctgcttgaccgcgcgcgtattgcgcatggccgcccgctgagcaatgcggaaacgaacagcgtgaaaaaggaatatatcgataagctgatggcgcagcgtgaagcggaagcgaagaaagcccgccaggtgagaaaacagcaggcttataaaacggataaggaagcgaccttttcctggtcggcgaatacgccgacccgcggcaggcgttaa

SEQ ID NO: 212478 - DNA, 930 bp, Klebsiella pneumoniae
atgctcgcaactctgacgcggctgttcccgttatgggcactgctgctctccgttctggcctattacactcccaccaccttcaccccaattggcccatgggtcaccaccctgctgatgctgatcatgttcggtatgggcgtgcatctgaagctggaggatttcaaacgcgtcctgtcgcgtccggcgccggtcgctgcggggatatttctgcactatctggtgatgccgctcgccgcctggctgctggcgctgctgtttcatatgccgccggagctttccgccgggatggtgctggtcggcagcgtcgccagcgggaccgcctccaacgtgatgatctttcttgccaaaggggatgtggcgctgtcggtgaccatctcctcggtctccaccctcgtcggcgtcgtggcgacaccgctgctcacccgtctgtacgtcgacgcgcatattcaggtcgacgtcatgggcatgttgctcagcattctgcagattgtggtcattcctatcgcgctgggactgattgtccatcatctgctgccgaaggtggtgaaagcggtagagccgttcctgcccgccttctcgatggtgtgcattctggcgatcatcagcgcggtggtggcgggttccgccgcccatatcgcctccgtcggcctggtggtgattatcgcggtgatcctgcataacactattggtctgcttggcgggtactggggcggacgtctgtttggttttgatgaatccacctgccgtacgctggcgatcgaggtggggatgcagaactccggcctggcggccgcgctgggtaaaatttacttcggcccgctggcggcgctgccgggcgcgctgttctccgtctggcataacctgtccggttcgctgctggccgggtactggtcaggaaagcccatcgccaaaaaagccgacaagcgctga

SEQ ID NO: 212479 - DNA, 1350 bp, Klebsiella pneumoniae
atgacagatctagtcgtcgccaaatttggcggcaccagcgttgctgattttgacgcaatgaaccgcagcatcgatgtggcgctgctcgatgccaatacccgtattgttgtgctctccgcctctgccggcgtgaccaacattctggtggccttagcgggagggctggaacccaccgaacgtttttcccagctggacgctctgcgtcagatccagttcaatattctggagcgtttgcgttatcccaacgtgatccgcgaagagattgagcgcttgctggaaaatatcacgacgctggcggaagccgccgcgctcgcctcctcaaccgccctgactgacgaactggtcagccatggcgaactgatgtctaccctgctgtttgtggaaattctgcgtgaacgcggtattcaggcgcagtggtttgacgcccgtaaagtgctgcgcactaacgatcgctttggccgcgccgaaccggacatcgccgccgtcgccgaactgacccagcagcagctggcgccgcgcctggcggaaggcctggtggtgacccagggctttatcggcagcgaagcgaaaggccgcaccaccaccctcggccgcggcggcagcgattataccgccgctctgctcggcgaagcgctgaatgccacccgcgtcgatatctggaccgatgtcccggggatctatactaccgacccgcgcgtcgcgccggcggcgaaacgcatcgacgtcatcgcctttgaagaggcagcggaaatggccacctttggcgccaaagtgctgcatccggcgaccctgctgcctgccgtgcgcagcgatatcccggtgtttgtcggctccagtaaagagcctaaagcgggcggtacgctggtgtgtaaaaccaccgagaacccgccgctgttccgcgcgctggcgctgcgtcgccggcaaacgctgctgacgctgcacagcctgaatatgctgcactcccgcggcttcctcgccgaagtgttcggtattctggcgcgccataacatctcagttgatttgatcaccacctccgaagtgagcgtggccctgaccatggacaccaccggctcgacctctgcgggcgataccctgctgacccaggcgctgctgaccgagctctcttcgctgtgccgcgtggaagtggaagaaaatctggcgctggtcgccctgattggcaatgagctgtcgaaagcctgcggcgtcggcaaagaggtctttggcgtcctcgagccgtttaacatccgcatgatctgctatggcgcctccagccacaacctgtgcttcctggtgccgggcgacgatgcggagaaggttgtgcagaagctgcatcataatttgtttgaataa

SEQ ID NO: 212480 - DNA, 1650 bp, Klebsiella pneumoniae
atgaaaaacatcaacccaacgcagacctctgcctggcaggcattacagaaacacttcgacgaaatgaaagatgtcactatcagcgagcttttcgccaaagatagcgaccgtttttctaaattttccgcgacgttcgacgatctgatgctggtggacttctccaaaaaccgcatcactgaagagacgctggctaaactgcaggatctggcgaaagagactgacctggcgggcgctatcaagtcgatgttctcaggtgagaagatcaaccgcaccgaagaccgcgcggtactgcacgtcgcgctgcgtaaccgcagcaatacgccgattgtggttgatggcaaagatgtgatgccggaagtgaacgctgtgctggagaagatgaaaaccttctccgaagcgattatctccggtagctggaaaggctacaccggcaaaccgatcaccgacgtggttaacatcggtatcggcggctccgacctcggtcctttcatggtgaccgaggcgctgcgtccgtataaaaaccacctcaacatgcactttgtctctaacgtcgatggcacccatatcgccgaagtgctgaagaacgtgaatccggaaacgactctgttcctggtggcgtccaagactttcactacccaggaaaccatgaccaacgcccacagcgcgcgcgactggttcctggcaaccgcgggcgacgacaagcacgtggcgaaacacttcgccgcgctttccaccaacgcgaaagcggttggcgagttcggcatcgacaccgccaacatgttcgaattctgggactgggttggcggccgttactccctgtggtcggcgattggtctgtccatcattctctccgtgggcttcgacaacttcgttgagctgctgtccggcgcgcatgcgatggataagcacttctccaccactccggcggagaaaaacctgccggtgctgctggctctgatcggcatctggtacaacaacttcttcggtgcggaaaccgaagcgattctgccgtacgaccagtacatgcaccgctttgccgcttacttccagcagggcaacatggagtccaacggtaagtatgttgaccgtaacggccacgcggtagactaccagactggcccaatcatctggggtgagccgggcaccaacggtcagcacgcgttctaccagctgatccaccagggcaccaaaatggtaccgtgcgatttcatcgctccggctatcacccacaacccgctgtctgaccaccatcagaaactgctgtctaacttcttcgcccagaccgaggccctggcctttggtaaatcccgcgaagtggttgagcaggaatatcgcgatcagggtaaagacccggcgaccctggagcacgtggtgccgttcaaagtgttcgaaggtaaccgcccgactaactccatcctgctgcgtgagatcaccccgttcagcctcggggcgctgattgccctgtacgagcacaaaatcttcacccagggcgcgatcctcaacatcttcacctttgaccagtggggcgttgagctgggcaaacagctggctaaccgcatcctgccggagctgaaagacggcagcgaagttagcagccacgacagctctactaacggcctgattaaccgttataaagcctggcgcgcataa

SEQ ID NO: 212481 - DNA, 456 bp, Klebsiella pneumoniae
atgcctgagcttcgtgataccggcgtacgtaacgtcgtttgtggggaaaatgtcgttatttaccagcccgccaacctctatgattgccagctcggcgataacgtcttcgtcgggccgttcgttgagatccagcggaatacccgcatcggcgcgaacagtaaaattcagtcccatacctttatctgcgagtacgtcaccatcggccagcgctgctttatcggtcacggcgtgatgtttgccaacgacctgtttcgcgagggtaaaccaaacgccgaccgcgccagctgggggcggatcgagattggcgatgacgtgtcgatcggcagcggcgccacgattctggccgtcagcatctgcgatggggtggtgataggcgcgggcagcgtggtaacgaagtccattaccgagaaaggcgtgtgggcggggaatccggcgaggctgctgcggcggctataa

SEQ ID NO: 212482 - DNA, 510 bp, Klebsiella pneumoniae
atgttaactattcgacaggcatgtcccgaggacgcgccccagcttagcgcgatgggctatgccagctatcatcaccactttgctcatctctggcgcgatgccgatgaactggcgttatttcttaagcaagaatatgccgaagatgcgctacgtcggagtcttgcggatgcgacccaacactggctcatcgccgaagccccctctcctgttggtttcgctaaatatagctatcagcagcgaatggctgacgacggcaagattggtacgctgctgcataagctctacctgatgccggggaagactggccaccgctacggcgagcatatttttcacgccgtcgagacgcgagcaaaaacggccggtgaaagttggctgtggctggaagtactcgccgcgaatcccgccgcgcgccgtttttacgaacgccaggggatgcagcacatcagagacacgattttccactccgccagccagcaaagcaccttacatattctggccaaaccgatttga

SEQ ID NO: 212483 - DNA, 381 bp, Klebsiella pneumoniae
atgattattaccaccgctgacgcgcctgccgctatcggcccgtacgtgcagggcgtcaatctcggcgcgatgaccatcacctccggtcagctgccgattaatccgctggacggcaccatgccaggcgatatcgccgaacaggcgcggcaatcactggagaacgtgaaagccatcgtcgaagccgccggactcacggtcgggcagatcgttaaaactacggtgtttgtcaaagacctggcggattttgccgccatcaatgccgcctacgaggccttctttatcgaacaccaggcggcctttccggcgcgctcctgtgtggaggtggcaaggttaccgaaagatgccggcgtcgaaatcgaagcgatcgctttcgcccgctaa

SEQ ID NO: 212484 - DNA, 132 bp, Klebsiella pneumoniae
atggagttcgacttaaaaaatccgaaggtgatcgccgccatcatctgcacgctcgccagcttccgtttaggtctggtgtgggtggtagtgagcggcgtcggctcgctggtgttgttaaattattttatgtaa

SEQ ID NO: 212485 - DNA, 168 bp, Klebsiella pneumoniae
atgagtaatagctattttatcgccctgacgctgggcatggccgcggtgacttttctcatccgtttctcgtttatcggcctggccggcaagatccagatgtccgagcgggtgaccaaaacgctacgcttcgtgccggtcactgttctgccggccatcatcaccatttag

SEQ ID NO: 212486 - DNA, 741 bp, Klebsiella pneumoniae
atgaataaaaaagtcatcttccgcggcgccagcgctattatgcccctatgcatcggcgactttccattttcatttattgtcggcgcattaagcgttagcgcgggcatgagcgtctggcagagtacggcgtggtcggcgatcgtcattgccggctcggcgcaaatgctggcactgaatatgttaaaaaccggcgccacgctcggcgtgattattttcaccacattaattatcaatcttcgccacgtgctgtatagcgcctctatttccggcagcgtgcgtgaagcttcattctttaaaaaatgctttatgtcctatgcgctcaccgacgaggtgtatgccaccaccgtcaaagagatggaaggaaataaaaaggaaaaatatctgttttatggttcggcgatgattaccttctgggcgatttgggtgctggctgattttcttggcgcgctggtcggcgcctcgtttccccacattgagaaatacggtctcgatttcgccatggtcgccgcctttatcgccatcgtggtgccgcaaattaaaagccaggcctgcaccgtcgccgcggttgtagccgccgtttccggcgtgctgttagtggtcctaccctattcgctgggtatcgtcgtcgcctcagtgcttggcgtcctcgccggcctgtgcgtcgacctggcggaagagcgcaagcagatggcaaaaaccgaatccgatatgccgttagtggaggcgatggaaaatgagtaa

SEQ ID NO: 212487 - DNA, 1278 bp, Klebsiella pneumoniae
atgaacaccgataacgcttccctgtacgtaaaatggctcaaacaagaggtcgccccggctttaggttgtactgaacccgtcgctatttccttcgcggccgcctacgccgcacaatatctggatcagccttgcaccaaaattagcggttttatttccgccaatctttataaaaacgcgatgggcgtcaccatacccggcaccaccgtttgcggtgtaccgctggcagccgcaattggcgcatttggcggcgacccgcaaaagggattaaaaacgctggaagatatcactccgcggcacgttgaaatggcgcagaagctgatcgccaataacgccgttgatattgccgtcgaagagactccggattttattcatctcgatttaaccctctctgctggcgagaattgctgtcgtgtcgtggtcaaaggaacccacaccaacgtggtcgagctttatattaatggccagccgcagccattaagcgaaaaacagaatacgcacacccagcgcgaaacgctgcccactttctcgctacaacaggcttacgactttattaatcgcgtcgactttaatgatattcgctttattctcgacgccgcgcgcttaaactccgcgctggcggcagaaggcaaaacaaaaaaatatggcctgaacattaacggtaccttttctgacgcagtgaaaaacggcctgatgagcaacgatctgttaagcaaggtgatcatcaacaccgtcgccgcttcagatgcccgcatgggcggcgcgccggtggtagcgatgtctaacttcggctcaggcaatcagggcattacagcaaccataccggtagtggtggttgcagagcatctcggcgtcgatgaagagaccctggctcgcgctttgtctctatctcatctcaccgccatctcaattcattctcgttatacgcgcttatctgcgctatgcgcagcctcaaccgccgctatgggcgccgccgccggtatggcctggctgtttacccgcgatatcaacaccattaataccgcaattattaatatggtcagcgatattaccggcatgatttgtgatggcggttccaacagctgcgcgatgaaagtctcgtcagtggtatccagcgcctttaaggcggtactaatggccatgcaaaatagctgcgctggcgccaatgacggtattgtctgcgccgatgtcgagcagactattaataacctgtgccgtctggtgattaaaccaatgactctcaccgataaagaaattatcagcattatggtcgctaaataa

SEQ ID NO: 212488 - DNA, 411 bp, Klebsiella pneumoniae; identical to SEQ ID NO: 139272

SEQ ID NO: 212489 - DNA, 891 bp, Klebsiella pneumoniae
atggctatggtccaacccaaatcgcagaagctacgtttatttaccacgcatctcctgctactgatttttatcgccgcgattatgtttccgctgctgatggttatcgctatctcgctgcgcgaaggcaacttcgccaccggcagcctgatcccggataccatctcctgggagcactggcgtctggcgttaggcttcagcgtcgaacacgccgatggccgcgtcacgccgccgccgttcccggtcctgctgtggctgtggaactcgattaaggtcgccgggatcaccgcgatcggtatcgtcgctctctccaccacctgcgcttacgctttcgcccgtatgcgcttcccggggaaagcgaccctgctgaaagggatgctgattttccagatgttcccggcggtgctgtcgctggttgccctgtacgcgttgtttgaccgcctgggccagtacatcccgttcgtcggcctcaacacccacggcggcgtcatctttgcctacatgggcggtatcgcgctgcacgtctggacgattaaaggctacttcgaaaccatcgatggctcgctggaagaagcggcggcgctggatggcgcgaccccatggcaggctttccgtctggtgctgctgccgctgtcggtgccgattctggcagtcgtgtttattctgtcgttcatcgcggccatcaccgaagtgccggtcgcctcgctgctgctgcgcgatgtgaacagctataccctggcggtaggtatgcaacagtatctcaacccgcagaactatctgtggggcgactttgccgccgcggcggtgctctccgccattccgatcacggttgtcttcctgctggcgcagcgctggctggttaatggcctgacggcgggtggagtgaaaggttaa

SEQ ID NO: 212490 - DNA, 1545 bp, Klebsiella pneumoniae
atggatgccgttaaaaagagacactggtggcaaagcccgcaactcacatggtctgtgattggcttactgtgcctgctggtgggttaccttgttgttttgatgtacgcccagggggagtacctgttcgccatcatgacgctgattttaagctcagttggcctgtatattttcgctaatcgcaaggcttatgcctggcgctatgtttatcccggcctcgccggcatgggcctgtttgtcctgtttccgctgatctgcactatcgctatcgcgtttaccaactacagtagcaccaaccagctgacctttgagcgtgcgcagcaggtgctgatggatcgttccttccaggccggcaaagcctataatttcacgctgatccctgcgggtgacgagtggaagctggcgctgaccgacggcgaaagcggtaaaaactacctttctgacgcctttaaatttggcggcgagcagaagctggcgttaaaagaaaccgacgccctgccggaaggcgagcgcgccaacctgcgcgtgattacccagaatcgcaccgcgctgaaccagctgaccgctgtgctgccggatgacagcaaagtcatcatgagctccctgcgccagttctccggtacccagcctctgtataccctcggcgaagacggggtactgaccaacaatcagacccacgttaaataccgcccgaacaacgacgtcggcttctaccagtcaattaacgccgacggcagctggggcaatgagaagctgagcccgggctacactgtgactatcggctgggacaactttacccgcgtcttccacgatgaaggcattcagaaaccgttcttcgcgatcttcgtctggacggtggtgttctcggtgctgaccgtggtgctgaccgtcgcggtggggatgatcctcgcctgcctggtgcagtgggaagcgctgaaaggcaaagcgatttatcgcgtcctgctgattctgccgtacgccgtaccgtcgtttatttcgattctgattttcaaagggctgttcaaccagagctttggtgaaatcaacatgatgctcagcacgctgttcggcattaagccggcctggtttagcgacccgaccaccgcgcgcaccatgatcatcatcgtcaacacctggctgggctacccgtacatgatgatcctgtgcatggggctgctgaaggcgattccggacgatctgtacgaagcgtcggcaatggatggcgccggcccgttccagaacttctttaaaattaccttcccgctgctgattaagccgctaacgccgctgatgatcgccagcttcgcctttaactttaacaacttcgtcctgattcaattgttgaccaacggcggtccggaccgtctcggcaccaccaccccggccggttataccgacctgctggtgagctacacctatcgcatcgcctttgaaggcggcggcggtcaggacttcggcctggcggcggctatcgcaacgcttatcttcctgctggttggcgcgttagcgattgtgaatctgaaagccacgcgcatgaagtttgattaa

SEQ ID NO: 212491 - DNA, 1191 bp, Klebsiella pneumoniae
atgaaaatcaaaactggcgctcgcatcctcgcgctgtcggcactgaccacgatgatgttttccgcctctgccctcgcaaaaattgaagaaggtaagctggttatctggattaacggcgacaaaggctacaacggcctcgctgaagtgggtaaaaagtttgaaaaagacaccggcattaaagtttccgtagaacacccggacaagctggaagagaaattcccgcaggttgcggcgaccggcgacggcccagacatcatcttctgggcgcatgaccgtttcggcggctacgcgcagtcgggcctgctggcggaaatcaccccggacaaagcgttccaggacaaactctatccgttcacctgggatgcggttcgctataacggcaaactgatcgcctacccgatcgcagtcgaagccctgtccctgatttacaacaaagacctggtgccgaacccgccgaagacctgggaagagatcccggcgctggataaagaactgaaagcgaaaggtaagagcgcgctaatgttcaacctgcaggaaccgtacttcacctggccgctgatcgctgccgacggcggatacgcgttcaagtttgaaaacggcaagtacgatgtgaaagacgtcggcgtggacagcgcaggcgcgaaagcgggcctgaccttcctggttgacctgatcaagaacaagcacatgaatgccgacaccgactactccatcgcggaagcggccttcaacaaaggcgaaaccgcgatgaccatcaacggtccgtgggcgtggtctaacatcgataagagcaaggttaactacggcgtgaccctgctgccaacctttaaaggcaaaccatcgaaaccgttcgttggcgtgctgagcgcggggatcaacgccgccagcccgaacaaagagctggccaaagagttcctcgaaaactacctgatgaccgatcagggtctggaagccgttaacaacgacaaaccgctgggtgccgtggcgctgaaatccttccaggaaaaactggaaaaagatccgcgcatcgctgccaccatggcgaacgcccagaaaggcgaaatcatgcctaacatcccgcagatgtctgccttctggtatgccgttcgtaccgcggttatcaacgccgccagcggtcgccagactgtcgatgctgcgctgaaagatgcacagagccgtatcactaagtaa

SEQ ID NO: 212492 - DNA, 1110 bp, Klebsiella pneumoniae
atggcgagcgtacagctgcgaaatgtaacgaaagcctggggtgacgtggtggtatcgaaagatatcaatctcgatatccacgaaggggaattcgtcgtgtttgtcgggccatcgggctgcggcaaatctaccctgctgcgtatgattgccgggttagaaactattaccagcggggacctgtttatcggtgacacccgcatgaacgagatcccaccggcagaacgcggcgttgggatggtattccagtcttatgcactctatccccacctttccgttgcggaaaatatgtcgtttggcctgaagctggccggcgcgaaaaaagatctgattaaccagcgggtgactcaggttgcggaagtgctgcagctggcccatctgctggagcgtaaaccgaaagccctctccggcggtcagcgccagcgcgtggcgattggtcgtacgctggtggcagagccaagcgttttcctgctggatgagccgctttccaacctcgatgccgccctgcgcgtccagatgcgtatcgaaatctcccgtctgcataagcgactgggccgcaccatgatctatgtcacccacgatcaggtggaagcgatgaccctcgccgacaagatcgtggtcctcgacgccggccgtgtggcgcaggttgggaaaccgctggagctctatcactatccggctgaccgcttcgttgccggcttcattggttcaccgaagatgaacttcctgccggtcaaagtcaccgcgacggctatcgatcaggtgcaggttgaactgccgaaccgtcagcaaatctggctaccggtggacagcgccaacgtgcaggcgggcgccaatatgtccttaggtattcgaccggagcatttattgcccagcgatatcgccgatgtaacccttgaaggcgaggtccaggtcgtcgaacagctcggtcacgaaacgcaaattcatatccagatccccgccatccgtcagaacctggtttaccgccagaacgacgtggtgttggtagaagagggagccacattcgctatcggtttgccgccagaacgttgccatttattccgtgaggatggcaccgcttgtcgtcggctgcataaagagccgggcgtgtaa

SEQ ID NO: 212493 - DNA, 1290 bp, Klebsiella pneumoniae
atgatgattactctgcgcaaacttcctctggcggtcgccgtcgcagcaggcgtgatgtctgctcaggcgctggctgtcgatttccatggctacgcgcgttccggcattggctggaccggcagcggcggcgagcaacagtgcttcaaagcaaccggcgctcaaagtaaataccgtcttggtaacgaatgtgaaacctatgcggaactgaagctgggccaggagctgtggaaggaaggggataagagtttttatttcgatactaacgttgcctattccgtgaatcaggaagatgactgggaaagcacctctccggcgttccgtgaagccaacatccagggtaaaaacctgatcgactggctgccgggctccacgctgtgggcgggtaaacgcttctatcagcgtcatgacgttcacatgatcgacttctactactgggatatctccggcccgggtgcaggtctggaaaacgttgaccttggcttcggtaagctctctctggccgctacccgtaactcagaaagcggcggctcttatactttctccagcgatgacaccaaaaaatatgctgcgaaaactgccaacgacgtctttgatatccgtctggcgggtctggaaaccaacccgggcggcgtgctggagttaggggtcgattacggccgtgctaacccgcaggatgactatcgcctggaagacggcgcgtcgaaagacggctggatgtggaccggtgaacatactcagtctatctggggcggcttcaacaagtttgtggttcagtacgccactgacgcaatgacctcctggaacagcggccactctcaggggaccagcatcgataacaacggcagcatgatccgcgttctggatcacggcgcgatggacttcaacgatgactggggcctgatgtacgtggcaatgtaccaggacgtggatctggacagcaagaacggttctacctggtacaccgtgggtgtccgtccgatgtacaaatggacgccgatcatgagcacccagctggaaatcggttacgacaacgtgaaatcccagcgtaccagcgaaaacaacaaccagtacaaaattactctggctcaacagtggcaggcaggcaacagcgtctggtctcgtccggctatccgtatcttcgcaacctacgcgaagtgggatgaaaactggggctacagcaacacctccggtctgcagacgaaagacagcagcggaagcggcgctttcacctccagccgcggtgacgacagcgaagttaccttcggtgcccagatggaagtgtggtggtaa

SEQ ID NO: 212494 - DNA, 924 bp, Klebsiella pneumoniae
atgaaaatgaagaaaactctcgtcgctctgtgtttatccgcagggatgttggcatgcgtgccggggatgagccttgccgatgttaactttgtaccgcagaacaccagcgccgcgccggctattccagccagcgcgctgcagcagctgatctggacgcctgccgatcaatcaaagacgcagagcgttgatttaactaccggcggtcaacgcctggatgtcccggggatcgtcggaccggtcgccgcctggagcgtgccggccaatatcggtgagctgaccctgacgctcgacagcgaactgaacaaacataagcagatttttgcgccgaacgtgctgattctcgaccagaacatgacgcccgcggcgttcttccccagcaattactttacctatcagcagccgggcgtgatgaccgctgaccgcctgggcggcgtgatgcgcctgaccccggcgctgggccagcaaaagctctatgtgctggtgtttaccactgaaaaagatctccagcagaccacgaccctgctggatccggcgaaagcctatgccaaaggcgctggcaatgcggccccggatatcccggatccgatcgctaaacataccaccgatggcgtgctgaagctgaaagtgaaaactaatagcacttccagcgtgctggtggggccgctgttcggctcttccggcccgggtccggtaaccgtcggcaacaccgcggcgccggtagccgcgccagccgccgccgcggcgccggccgccaaaagcgagccgatgctcagcgataccgaaacctacttcaacaatggtattaagcaggcggtgaaacaaggtgacatcgacaaagccctgaaattgatgaacgaagctgagcgcctcggctcgaaatccgctcgttccacctttatcagcagtgtaaaaggcaaggggtaa

SEQ ID NO: 212495 - DNA, 498 bp, Klebsiella pneumoniae; identical to SEQ ID NO: 136083

SEQ ID NO: 212496 - DNA, 867 bp, Klebsiella pneumoniae
atggagtggagtctgtcgcagaataagctgttggcgtttcatcgcctgatgcgcactgacaaaccgatcggcgctttgctgctgctgtggccgacgctgtgggcgctatgggtggcctcgccgggcgtcccgccgctgtggatcctggcggtattcgtcgccggcgtctggctgatgcgcgccgccggctgcgtggtgaatgactatgccgaccgaaaatttgatggtcacgtaaagcgtaccgcccgccgtccgctgccgagcggcgatgttaccgagaaagaggcgcgaacgctgtttatcgtgctggtgctgctctctttcctgttggtgctcaccctcaacaccatgaccattctgctgtcggtggcggcgctggcgctggcgtgggtctatccgtttatgaagcgctacactcatctgccgcaggtggtgctgggcgcggcctttggctggtcgatcccgatggccttctcggccgtcagcgaatcgctgccgctgagctgctggctgatgttcctcgccaatattctgtgggcggtggcctacgatacccagtatgcgatggtggatcgcgatgacgacgttaagatcggcatcaagtcgacggcgatcctgtttggcgaaaacgatcgtctgattatcggtatcctgcaggtggccgtactggcgctgatgggcgcggtgggttggctgaatgggctgggctgggaatattactggtcgctgttcgtggcggcgggtctgtttggctggcagcagaagcttatcttcaatcgcgaccgcgataactgcttcaaagcgtttatgaacaataactacgtcgggctggtgctgttcctcggcctggcgatgagctacctgtaa

SEQ ID NO: 212497 - DNA, 2424 bp, Klebsiella pneumoniae
atgtccggctggcaacgaatttactataaattactgaatttaccattacaggtgctggtaaaaagcaagtctattccggcagagcctgcccaggaattaggactcgatacctcgcgtccggtcatgtacgtcctgccctataattcgaaggcggacctgctgacgctgcgcgcccaatgcctggcgcatgatttacctgacccgcttgaaccgctggaaatcgacggcgccctgctgccgcgttacgtattcatccacggtgggccgcgcgtatttacttattacacgccaaaagaagagtccatcaagctgttccacgattacctcgatctgcaccgcaaccatccggacctcgatgtgcaaatggtgccggtttcggtcatgttcggccgttcgccgggtcgcgagaaaggagaagtcaatccgccgctgcggatgctgaacggcattcagaaatttttcgccgtctcctggctcggccgcgacagcttcgtgcgcttctcgccgtccgtttcgctgcgccgcatggcggatgagcacggtaccgataagatcatcgcccagaagctggctcgcgtcgctcgcatgcattttgcccgccagcggctggccgccgtcggcccgcgtctgccggcccgccaggatctgtttaataaactgctggcctcgaaagcgattgcccgcgcggtggaagacgaagcgcgcagcaagaaaatttcgcacgagaaggcacagcagaacgctatcgcgctgatggaagagattgcggcgaacttctcatacgagatgatccgcctgaccgaccgcattctcggcttcacctggaaccgcctgtaccagggtatcaacgtgcataacgccgagcgcgtacgccagctggcgcacgacggccatgaaattgtctatgtcccctgccaccgcagccacatggactatctgctgctctcctacgtcctgtaccatcaggggctggtccctccgcatatcgcggcgggcatcaacctcaacttctggccggccgggccgatcttccgccgcctcggcgccttctttattcgccgcacctttaagggcaacaaactctattccaccgtgttccgcgaataccttggcgaactgttcagccgcggctattccgtggagtatttcgtcgaaggcggccgctcccgtaccggccgcctgctcgatccgaagaccggtacgctgtcgatgaccatccaggcgatgctgcgcggcggaacccgaccgatcaccctggtgccgatttacatcggctatgagcacgtgatggaggtaggaacctacgccaaagagctgcgcggcgccactaaagagaaagagagtctgccgcagatggtgcgtggcttgagcaagctgcgcaacctgggccagggttacgttaacttcggcgaaccgctgccgctgatgacctatcttaaccagcatgtgccggattggcgggaagcgatcgacccgatcgaagcggttcgcccctcctggctgacgccgacggtgaatagcatcgccgctgacctgatggtgcgcatcaataacgccggcgcggccaacgccatgaacctgtgctgtacggcgctactggcctcccgccagcgttcgctgacccgtgagcagctcacccagcagttagagtgctacctcgcgctgctgcgcaatgtgccctattctccggatgcgaccgccccatccgcttcagccagcgagctcatcgatcatgcactgcagatgaacaagttcgaagtggagaaggacaccattggcgacatcatcatcctgccgcgcgagcaggcggtgctgatgacctactatcgcaacaatatcacccatatgctggtgatgccgtcgctgttagccgctctggtgactcagcatcgtcatctcagccgcgccgaagtgctgcgtcatgtggaaacactctatccgttcctcaaggccgagctgttcctgcgctgggaaaaagcggagctggccggagtggtggatgcgctgattgccgagatgctgcgtcaggagctgatcgtcgtcgatggcgatgtcatgagcctcaacccgtcgcactctcgctccctgcagctgctggccgctggcgcccgcgagacgctgcagcgctatgccatcaccttctggctgctgagcgctaacccggcgatcaaccgcagctcgctggaaaaagagagtcgcaccgtggcccagcgtctgtcggtgctacacggcatcaatgcgccggagttcttcgacaaagcggtgttcagcaccctggtgttgaccctgcgcgatgaaggctatatcagcgacaccggcgacgccgagccggaagagaccctgaaggtttatcggatgctggcggacttgattacgtcggatgtccgactgaccattgagagcgtcacgcaggacgacgcgtaa

SEQ ID NO: 212498 - DNA, 369 bp, Klebsiella pneumoniae
atggccaataataccaccgggttaacccggatcattaaggcggcaggttactcctggaaaggatttcgcgcggcgtggatcaacgaggctgcgtttcgtcaggaaggcgtcgccgctatcgtggccgtcgcggtagcctgctggctggacgtcgacgccatcacccgcgtattgctgattggctcggtcctgctagtgatgatagtcgaaattctcaacagcgcgattgaagcggttgtggaccgtatcggctcggattttcacgagctttcagggcgcgccaaagatatggggtcggcggcggttctgctggcgattatcatcgcgctgatcacctggggaacgctgctgtggagtcattatcactaa

SEQ ID NO: 212499 - DNA, 609 bp, Klebsiella pneumoniae
atgaaagcgttaacgaccaggcagcaagaggtgtttgatctcattagggatcatatcagccagacgggcatgccgccgacgcgtgcggaaattgctcagcgcttggggttccgttccccaaacgcggcggaagaacacctgaaagcgctggcgcgtaaaggcgcgatcgagatcgtctccggcgcttctcgcggtattcgcctgctgacggaagaagagcaaggcctgccgctgatcggtcgcgtcgccgccggtgagccgctgctggcgcagcagcatattgaaggccactatcaggtcgacccgtcgatgtttaagcccaacgccgatttcctgctgcgcgtcagtgggatgtcgatgaaagacatcggtattctggatggcgatttgctggcggtccacaaaacccaggatgtgcgtaacggtcaggtggttgtcgcgcgtatcgatgaagaagtgacggtgaagcgtctgaaaaagcagggcaatgtcgttgaactgttgccggaaaacagcgagttttccccgatcgtcgtcgatctgcgccagcagagttttaccattgagggtctggccgttggcgtgatccgtaatggagaatggctgtag

SEQ ID NO: 212500 - DNA, 1317 bp, Klebsiella pneumoniae
atgctgctcaacgctgccgataaagcgctgtggcgtcttgccctccctatgattttctccaacatcaccgtcccgctgctggggctggtggatacggcggtgatcggccacctggacagcccggtatacctcggcggcgtagcggtcggggcgacggccaccagtttcctcttcatgctgctgctgttcctgcgcatgagcaccaccgggctcaccgctcaggcctggggcgccaaagatccgcagcgcctggcgcgggcgctggtgcagccgctggccctggcgctgggcgccggggtgctgattatcctgcttcgcctgccgctaattgacctcgctctacatattgtcggcggcagcgaggcggtgcttgagcaggcgagacggtttctcgaaattcgctggctcagcgcccccgcctcgctggccaacctggtgctgctcggctggctgctgggcgtccagtacgcccgggcgccggttattctgctggtggtgggtaatctgttgaatattgtgctcgatctgtggctggtgatgggcctgcgaatgaacgtccagggagcggcgctggccacggtcaccgcggagtacgccaccctcattattggcctgctgatggcgaagcgggtgctgacgctgcgcggcgtgtcgctggcgatgctgaaaaacgcctggcgcggggatctgcgccgtttattggcgttgaatcgggacatcatgctgcgctcgctgctgctgcagctgtgctttggcgcgctgaccgtattcggcgcccgtctgggcagcgacatcgtggcggttaacgccgtactgatgaccatgctgacctttaccgcctacgcgctggatggctttgcctatgccgtggaggctcactccggccaggcctacggcgcgcgcgacggtagccagttgctggaggtgtggcgggcggcctgccggcagtccggcatggtggcgctggcgtttgccctgatttacagcctggcggggcagtacattatcgcgttgttaacctcactgccttccctgcagcagctggccgatcgctatctgatctggcagacgatcctgccggtggtcggcgtctggtgctatctgctggacggcatgtttatcggcgcgacgcgcggcgctgagatgaggaacagtatggcggtcgccgcggcggggtttgccgtgacgctgcttacgctaccggtgcttggcaaccatggtctgtggctggcgctggcggtgttcctcgccctgcgcggcctgtcgctggcgctgatctggcgtcgtcactggcgacgcggcacatggtttagttag

SEQ ID NO: 212501 - DNA, 210 bp, Klebsiella pneumoniae; identical to SEQ ID NO: 136088

SEQ ID NO: 212502 - DNA, 516 bp, Klebsiella pneumoniae
atggataagaccccttcgcaagagatgttagcgcatgctgaaaagctttgcgcacagcgcggcgtacgcctgactccacagcgtctggaagtgttgcgcctgatgagcctgcagcaaggggcaatcagcgcctacgatctgctggacttgctacgtgaaaaagagccgcaggcgaagccgccgacggtttaccgtgcgctggagtttttactcgagcagggttttgtccataaggtagagtcaaccaatagctatgtgctgtgccatctgttcgaccagccgacccatagctcggccatgtttatctgcgaccgctgcggcgtggtaaaagaagaagcggcggaaggggtggaagatatcatgcatacgctggcggcccgcatggggtttgccctgcgccacaatgtgatagaagctcacgggctttgcgcgggctgcgtggaagtcgaagcctgcagcaccccgggacactgccagcacgatcatactattcagctcaaaaagaaagcccgctga

SEQ ID NO: 212503 - DNA, 489 bp, Klebsiella pneumoniae
atgaaacgacctgattgcattcgccactggcgcgaactggaagggcccgacgatgctacttatcccgacagcccggagcgtttttcaatcggcgcgccgctggggcgaggtttacgtctcaaccggctggggatccaccacgagcggctgccgcccgggcggcgcacctcttatccacacgcggagagcgatgaggaagagttcatctacgtgctggagggctatccggaagtgtggataaacggctatctctggaagctggagcccggcgacagcgtgggttttcccgctggtaccggcatctgccacacctttctcaataacaccgagcaggaagttcgtctgctggtggtgggcgaggccaacaagaagtacaaccgcatttattacccgctcaatcccggctatgccgcgacgcgccaggatcgttgggttgaccatccgccgcagttcttcggtccacacgacggcaagccgcggaaaaagtaa

SEQ ID NO: 212504 - DNA, 942 bp, Klebsiella pneumoniae
atgctcgactggaccgaccgacactgccgctacttcctgcggctgctgtcgcggcatacgctgctgtataccgaaatggtgaccaccggggcgattattcacggcaaaggggactatctggcctatagcgaagaagagcacccggttgctctacagctcggcggcagcgatccccaggccctggcgcagtgcgcgaagctggccgaggcgcgcggctatgatgagatcaacctcaacgtcggctgcccctccgaccgcgtgcagaacgggatgtttggcgcttgcctgatgggcaatgcgccactggtggccgactgcatcaaggcgatgcgcgatgtggtgtcgattccggtcacggtgaaaacccgtatcggcattgacgaccaggatagctatgagtttctgtgcgacttcattgagacggtctccggcaagggcgagtgtgagatgtttattattcacgcccgcaaagcctggctctccggcctgagtccaaaagagaaccgcgagatcccgccgctggattacccccgcgtctggcagctgaagcgcgatttcccccatctgacgatggcgatcaacggcggcatcaaatcgctggacgaagccagagtacagcttgagcatatggatggggtgatggtcgggcgtgaggcctatcagaacccgggcattctggcctcggtcgaccgcgaaattttcggcgtcgccggcgcggatgccgatccggtagcggtggtgcgagccatgtacccctatattgagcgcgagctcagcaagggcacctatctgggccatattacccgccatatgctggggctgtttcaggggatccccggcgctcgccagtggcgtcgctacctgagcgaaaatgcgcataaagccggcgccgatattgcagtgctggagcatgccctgaagctggtggcagataaacgttaa

SEQ ID NO: 212505 - DNA, 243 bp, Klebsiella pneumoniae
atgctggaactgctatttgtcattggattttttgtcatgctgctggtcaccggcgtatcgctgctggggattatcgcggcaatcgtggtggcgacggcgctgatgttcgtcggcgggttgttcgccttgatgatcaaattactgccgtggctgctgctggcggtggcggtggtgtgggttattcgggcgctgaaatccccgaacggaaatgcttttcgcgacaataaccgttggcgttactaa

SEQ ID NO: 212506 - DNA, 984 bp, Klebsiella pneumoniae
atggcaacacgcatcgaattttcgaaacacgggggaccggaggtgcttcaggcggttgagttcacgccacgcgatcccgcagaacatgagattcaggtcgaaaacaaagccatcggcatcaactatatcgacacctatgttcgcagcggcctctatccgccgccgtcgctgccgagcggcctgggcaccgaggcggccggcatcgtcagtaaagttggccatggggtcacgcatattaaggtaggcgatcgggtggtgtacgcccagtcggcgctcggcgcctacagcacggtacacaatgtgctggccgacaaagcggcggtcctgccggacgctatctctttcgaacaggccgccgcgtcgttcctcaaaggattaacggtctggtatctactgcgcaaaacctatgaaattaagcctgatgagatgttcctgtttcacgcggccgctggcggcgtggggctgatagcctgtcagtgggcgaaagcgctgggggcgaaacttatcggtaccgtcggcagcgcgcagaaagcgcagcgcgccaaagaggcgggcgcctggcaggtgattaactatcgcgaggagtctatcgtggagcggctcaaggcgctcaccgacggtaagaaagtggccgtcgtctacgactcggtggggaaagatacctgggaggcctctctggactgcctgcagcgccgcggcctgatggtcagctttggtaactcctccggtccggtgaccggcgttaatctggggatcctgaatcaaaaaggctccctgtacgtcactcgcccatcgctgcagggctatatcaccaaccgggaagaactggaggaagcctgcagtgaattgttttcgctgatcgccagcggggtgattaaagtggacgtggctgaaagtcagatctatccgctgagcgaagcgcggcgggcgcatgaagttctggagagccgggtgacgcagggttcgagtttgctgctgccataa

SEQ ID NO: 212507 - DNA, 1416 bp, Klebsiella pneumoniae
atggcaggaaataaacccttcaacaaaccacagacagaaacccgcgaacgcgatccgcagctcgccgggctgaaagtcccgccgcactcgattgaagcggagcagtcggtgttgggcggtttaatgctggataacgagcgctgggacgacgtcgccgaacgcgtcgttgccgacgacttttatacccgtccgcaccgtcatatttttaccgagatggcgcgcctgcaggagtccggcagcccgattgacctgattacgctcgccgagtcgctggagcgtcaggggcagctggacagcgtgggcggcttcgcctatctggccgaactgtccaaaaacacgcccagcgcggctaacatcagcgcctatgccgacatcgtgcgcgaacgcgcggtggtgcgcgaaatgatttcggtggccaacgagatcgccgaagccggcttcgacccacaggggcgaaccagcgaagatctgctcgacctcgccgaatcccgggttttcaaaatcgccgaaagccgggccaacaaagacgaagggccgaagaacatcgccgatgtcctcgatgccactgtcgcccgtatcgaacagctgttccagcagccccatgacggcgtcaccggggtcaataccggctacgacgacctcaacaaaaagaccgccggcctgcagccgtcggatctgattatcgtcgccgcccgtccatcgatgggtaaaacgaccttcgcgatgaacctcgtggaaaacgcggcgatgctgcaggacaaaccggtattaatcttcagtctcgagatgccctcggaacagatcatgatgcgttctctggcctcgctgtcgcgcgtcgatcagacccgcattcgtaccggtcaactggacgacgaagactgggcgcggatctccggcaccatgggcatcctgctggaaaagcgcaatatctatatcgatgactcctccggcctgacgccgacggaggtgcgctcccgcgcgcggcgtatcgcccgcgagcacggcggcatcggactgattatgatcgactacctgcagctgatgcgcgtgccgtcgctctccgacaaccgtacccttgagattgccgaaatctcccgctcgctgaaggcgctggcgaaagagctgcaggtgccggtggtggcgctgtcgcagcttaaccgctcgctggagcagcgcgccgataagcgcccggtcaactccgacctgcgtgagtccggctctatcgaacaggatgccgacttaatcatgttcatttaccgtgatgaggtctatcacgagaacagcgatcttaaaggcatcgcggaaattatcattggtaaacaacgtaacggtccgatcggcaccgtgcgactgacctttaacggccagtggtcgcgtttcgataattatgccggtcctcagtatgatgatgagtaa

SEQ ID NO: 212508 - DNA, 1080 bp, Klebsiella pneumoniae
atgcaagcggcaactgtagttatcaaccgccgcgctctgcgacacaacctgcaacgtctgcgtgaactggcgcccgccagcaaactggttgcggtagtgaaagcgaacgcctacggacacggtcttctcgagaccgcgcgaacgctgaccgacgccgacgcctttggcgtcgcccggctggaagaggcgctgcgcctgcgagcggggggcatcgcccagccgatcctcctgctggaaggcttttttgctgcggaagacctggcggtgatcgccgcccagcgcctgcatacggcggtgcatagccccgaacagctggcggcgctggagcaagccgatctccccgagccggtgaccgtgtggatgaagctggataccggcatgcatcgcttaggggtgcgcccggaggaagccgaggcgttttatcagcgtctgagccagtgtaaaaacgtccgccagccggtgaacgtggtgagccacttcgcgcgcgccgatgagccgacctgcggcgccaccgaacgccagctggacatcttcaccacctttaccgaaggcaagccgggcttgcgctctatcgccgcctcgggcggcattctgctgtggccgcaatcgcattacgactgggtgcgccccggaattatcctgtatggcgtgtcgccgctggacgatcgctccaccgggaaagatttcggctgccagccggtgatgaccctgacgtccagcctgattgcggtgcgcgagcataaagcaggggagcccgtcgggtacggcggcacctggatcagcgaacgcgatacccgtctcggcgtggtggcgatgggctatggcgacggttatccgcgtgcggcaccgtcgggcacgccggtactggtcaatggccgggaagtgccgattgtcggccgggtggcgatggatatgatctgcgttgacctcggaccgcaggcccaggataaggccggcgacgcggtagtgctgtggggagaggggctcccggtagagcgcatcgccgagataacgaaagtgagtgcttacgaacttattacgcgactgacctcccgcgtcgccatgaaatacctcgactaa

SEQ ID NO: 212509 - DNA, 1194 bp, Klebsiella pneumoniae
gtgtttcaaaaagttgacgcctacgccggcgaccctattctttctctgatggaacgcttcaaagaagacccgcgaagcgacaaagtcaacctgagtatcgggctgtactacaacgatgacggcattatcccgcagctgcaggcggtggcggaagcggaagcacgcctgaacgccgagccgcatggcgcctcgctgtatctgccaatggaagggttgagcggctaccgtcaggcgattgcgccgctgctgtttggcgcagagcataccgcgcttaagcaaaatcgcattgcctctattcagacggtcggcggttcgggcgcgctgaaggtcggggccgacttcctcaaacgttactttcctgagtctcatgtctgggtcagcgatccgacctgggaaaaccacatcgccatttttgaaggggctggcttcgaagtaagtacttacccctggtttgataaagccaccaacggcgtgcgctttgaggacctgctggcgacgctgcaaacgctgccggcccgcgatattgtgctgctgcacccttgctgccacaacccgaccggcgccgacctgacgccagcccagtgggaccgcgtggttgaggtattgaaagcgcgtcagctgatccccttcctcgacatcgcctaccagggctttggcggggggctggaagaggatgcctacgccattcgcgccatcgccagcgccgggatgccgatgctggtcagcaactcgttctccaaaattttctcgctgtacggggagcgcgtcggcggtctgtccgtggtctgtgaagacagcgaaaccgcgggccgcgtgctgggtcagctgaaggccaccgtgcgccgcaactactccagcccgccaagctttggcgcgcaggtggtggcgacggtgctgaacgatgcagctctgaaagccacctggcaggcggaagtggacgccatgcgcgcgcacatcctgaccatgcgccaggcgctggtcgacgcgctgcagcaggttgccccgggtagcaaagtggattacctgctcaagcagcgcgggatgttcagctataccggatttagcgcggcgcaggtggatcgtctgcgcgacgagtttggcgtctacctgattgccagcggacgcatgtgcgtggcggggttaaactcacgtaatgttcagcaggtagcgaaagcttttgccgcggtaatgtaa

SEQ ID NO: 212510 - DNA, 714 bp, Klebsiella pneumoniae
atgcgcaaacttactctcgcccttgcggcggcttctctcctgttcacgctgaacagcgccgttgtggcgcgcgcctccacgccgcagccgctgtgggttggcaccaacgtggcccagctggccgagcaggcgccgatccactgggtttcggtggcgcaaattgagaacagcctgctggggcggccgccgatggccgtcggttttgatatcgatgacaccgtcctcttctccagtccgggtttctggcgcgggcaaaaaaccttctctcccggcagcgaggattacctgaaaaacccacagttctgggaaaaaatgaacaatggctgggatgaattcagcatgccgaaagaggtggcgcgccagctgattgcgatgcatgtgaagcgcggggacagcatctggttcgtcaccggccgcagccagaccaaaaccgaaaccgtttctaaaaccctgcaggatgattttctcatcccggccgccaatatgaatccggtgattttcgctggcgataagcctggccaaaacaccaagacccagtggctgcaggcgaagcagataaaggttttctacggcgattcggataatgatatcaccgccgcccgcgaagcgggcgcccgtggcatccgcgtgctgcgggccgccaactcctcctataagccgttgccgatggctggcgcgctgggcgaggaagtaatcgtcaattccgaatattga

SEQ ID NO: 212511 - DNA, 417 bp, Klebsiella pneumoniae
atgtggtatcagcaaaccctgacgcttgggccaaaatcccgcggttttcatctggtcaccgacgaaatccttggccagatccgcgggctgtccggggtgaaggttggcctgctgcacctcctgctccagcatacttccgcttccctgacgctcaacgaaaactgcgatcccaccgtccgctatgacatggagcagtattttctcaacgccgtaccggacaatgcgccgtatgaacatgactatgaaggccctgacgatatgccgtcgcacatcaaatcatcgatgcttggcgtgtcgctaatgctgccggtcgaggacgggcgcgtcaggctgggaacctggcagggcatctggctgggggagcatcggatacacggcggttcgcggcgcatcgttgcgacgctcatgggggaataa

SEQ ID NO: 212512 - DNA, 357 bp, Klebsiella pneumoniae
atgacaatttcggagttattacagtactgcatggcgaaaccgggagcagagcagagcgtccacagcgactggaaagccacgcagattaaggtctcagatgtgctgtttgccatggtgaaggaggttgaggaccagcggccggcggtcgcgctgaaggcgagtccggagctggctgagctgctgcgtcagcagcatcgcgatgtccggcccagccagcatctcaataaagcgcactggagcaccgtctatctggatggctcgctgccggattcgcaaatctactacctggtcgatgcgtcttatcagcaggcggtgaaaatgctgccggagccggtccggcagcagcttacccgctaa

SEQ ID NO: 212513 - DNA, 2826 bp, Klebsiella pneumoniae
atggataagatcgaagttcggggcgcccgcacccataatctcaaaaacatcaacctcgttatcccgcgcgacaaactcattgtcgtcaccgggctttccgggtctggcaaatcttcactcgctttcgacaccctgtatgccgaaggccagcgtcgctacgtcgaatcgctctccgcctatgcgcgacagttcctgtcgctgatggagaagccggacgtcgaccatatcgaagggctgtcgccggcgatttccatcgaacagaaatcaacctctcacaacccccgctcgacggtgggtactattaccgaaattcacgactatctgcgtctgctgtacgcccgcgtcggcgaaccgcgctgtccggatcacgacgtgccgctggcggcgcaaaccgtcagtcagatggtcgataatgtcctcgcccagccggaaggcctgcgcctgatgctgctggcgcccattattaaagagcgcaaaggcgagcacactaaaaccctggaaaacctcgccagtcagggctacatccgcgcgcggatcgacggtgaggtctgcgatctgtcggatccgccgaagctggagctgcagaagaagcacaccattgaggtagtcatcgaccgcttcaaggtgcgcgacgatctggcgcagcgcctggccgagtcgtttgaaaccgcgctggagctctccggcgggaccgccattgtggctaatatggatgatgagaaagcggaagaactgctgttttccgccaacttcgcctgcccgatctgcggctacagcatgcgcgagctggagccgcgtctgttctcctttaacaacccggcgggcgcctgcccgacctgcgacggcctcggcgtgcagcaatatttcgatcccgatcgcgtggtgcaaaatcccgagctgtcgctggcgggcggcgccatccgcggctgggatcggcgtaacttctactacttccagatgttgaagtcgctggcggagcactataaattcgacgtcgaagcgccatggggcaccctcagcgccaacgtgcagaaagtggtgctgtacggttcaggtaaagaaagtattgaattcaaatacatgaatgaccgcggggatacctcggtgcgccgccatccgttcgaaggcgtgctgcataacatggagcgccgttacaaagagacggaatccagcgcggtgcgcgaagagctggcgaagttcatcagcaaccgtccgtgcgccagctgcgacggcacgcgtctgcgtcgcgaggcgcgccacgtgtttgtggaaaacaccccgctgccgaccatttccgatatgagcatcggccatgcgatggatttcttcaacaatctgaagctctccggacagcgggcgaaaatcgccgaaaaagtgctgaaagagattggcgatcgtctgaaattcctcgtcaacgtcggcctcaactacctgacgctctcccgctcggcggaaacgctctccggcggcgaagcccagcgtatccgtctggcaagccagattggcgccgggctggttggcgtgatgtacgtgctggatgaaccctctatcggcctgcaccagcgcgataacgaacgcctgctcggcaccctgatccacctgcgtaatttaggcaacacggtgatcgtcgttgagcacgacgaagacgccattcgcgccgccgaccatgtgatcgatatcggtcccggcgctggcgttcacggcggccaggtagtagcggaagggccgttggaggccattatggcggtcccggaatccctgaccggccagttcatgagcggtaaacgcaaaattgaagtgccgaagcagcgcgtgcccgccaacccggagaaagtcctcaagctgaccggcgcgcgcggcaacaacctgaaggatgtaacgctcaccctgccagtgggcctgtttacctgcatcaccggcgtctccggctcgggtaaatccacgctgatcaacgataccctgttcccgattgcccagcgccagctcaacggcgcgaccatcgccgaaccagcgccgtatcgcgatatccaggggctggaacatttcgataaagtgatcgatatcgaccagagcccgatcggccggacgccgcgctccaacccggcaacctataccggggtgtttaccccggtgcgcgagctgttcgccggcgtaccggagtctcgctcacgcggctatacgccggggcgctttagctttaacgttcgcggtgggcgctgcgaagcctgccagggcgatggagtgatcaaggtcgaaatgcacttcctgccggatatctacgtgccgtgcgaccagtgcaaaggcaaacgctataaccgcgaaacgctggagattaagtacaagggtaagaccatccacgaagtgctggatatgaccattgaagaggcgcgtgaattctttgatgccgtaccggcgctggcgcgtaagctgcaaaccctgatggacgtcggcctgacctatatccgccttggccagtcggcgacgaccctgtccggcggcgaggcgcagcgcgtgaagctggcgcgcgagttgtccaagcgcggtaccggccagacgctgtatatcctcgatgagccgaccaccggtctgcacttcgccgatatccagcagttgctggaagtcctgcaccagctgcgcgatcagggcaataccatcgtggtgattgaacacaacctcgatgtgattaaaactgccgactggattgtcgatctcggcccggaaggcggcagcggcggcggcgaaatcctggtctccggtacgccggaaaccgtcgccgagtgcgaagcctcgcacaccgcgcgcttcctcaagcccatgctgaaataa

SEQ ID NO: 212514 - DNA, 525 bp, Klebsiella pneumoniae
atggccagcagaggcgtaaacaaggtgattctcgtcggtaatctggggcaggacccggaagtacgctacatgccaagtggcggcgctgtcgccaacttcacgctggcaacttccgaatcctggcgtgacaagcagaccggcgaaatgaaagagcagaccgagtggcaccgcgttgtgctgttcggcaaactggcggaagtcgctggtgagtatctgcgtaaaggctcacaggtgtacattgaaggccagctgcgtacccgcaagtggaccgatcaatccggtcaggacaaatacaccaccgaagtggtggtgaacgtgggcggcaccatgcagatgctgggcggccgtcagggcggcggcgcaccggcaggcggcggccagcagcagggcggttggggtcagccgcagcagccgcagggcggcaaccagttcagcggcggcgcgcagtcccgtccgcagcagcaggccccggcagcgccttccaacgaaccgccgatggacttcgacgacgacatcccgttctaa

SEQ ID NO: 212515 - DNA, 1581 bp, Klebsiella pneumoniae
atgaacgcctactcgctatcacgtctgtttatcgcctggctcacctgcctcgcgacactgttattcgctcctctgctgccggcagtagaggcggaaaaagcgccgccggcagcagccgaagacaacacgctatcgattcatatcgacgatatgctacggccatggagaggcgatttgcctggcatgatcgaccgtcgtaccattcgggtattaaccacctacagcaagaccttcttttttattgataaaggcacccagcgcggggcgacgcacgacatttttatcgcgctggaaaacgagctgaataaacagctagcgaaggataaaaagctcaaacagcgccacctgaagctgcatatcgtttttgtgccggtcagtcgggacaatctctttatcgcgcttaatgaaggtaaaggcgatattgcggctgccaatctgactatcacgccctcgcgggaagcacaggtcgatttcgcccagccgctctacagcaacgtgaaagaattactgatctccggcccggcttcaccgaaggtcgacagcctggagcaactctctggtcaaaccgtctttgttcgccgctcctccagctattacgacagcctgcaagcgctgaacgcccgatttgccggtgagtcgcgcccaccggtgatactggaggcggcgccggaagcgctggaggatgaagatctgctggaaatgctcaacgccgggctgattccgctgatcgtcgtcgatcagcataaagcgttgttctggaaacaggtgtttccaaaaattcaggtccatgacaatgtggtgctgcgcgacggcggcgacattgcctgggcggtacgcaaagacagcccgcagctgctgacggtactgaacaacttcgtcaaaaagaatcgtcagggcaccacgctgggcaatactctcctgctgcgttacctgaaaaatgctaaatatgtcaaaaatgccgcggcgagtaaggaacgacgcaaattcctcgcgatggtagatgtcttccgcaagtacggcgatcgttacgacgtcgactggctgctgatggcggcccagggataccaggagtcgcggctgaatcagtcggtacggagccacgtcggcgccatcggcgttatgcaggtgatgcccagcactggaaaagagctgaaggtgggcgatattaaacagctggatcccaatatccatgccggcgtgaaatacatgcgctggatgatggatcggtactatgccgatgagcccatgacccggctcgataaagcgctgtttacctttgcctcctataacgcgggtccggcgcgtatcgcccgcctgcgcaccatgactaaacagcgaggatttgacccgaacgtctggttcggtaacgtcgaaaatatggcggcagaaaaaattggcgccgagacggtaacctacgtcagcaatatctataagtattacatcgcctatcggctgatcgtcgatgacatggcccgcaaacagaaagcgacggccgtaccgcggcaggagccggtagcgcagccagccaaaccgcagcccagcgtggcgacagccgccaccgctcaggtgcccgtcatctga

SEQ ID NO: 212516 - DNA, 2259 bp, Klebsiella pneumoniae
atgaaatacacgtctcacttcccgctggggatcgtcattcctctgctcgcctgtagcgtgccgctgcaggcggcagagaacatgaccgaacaatcgacgcctgacgagagcgccgccactgccgaaaatcacgaggagacgatggtcataaccgccgccaggcagaacctgcaggcgccgggcgtgtcgaccatcaccgcagaagagatccgcaaacatccccccgcccgcgatgtgtcggagttaattcgtacgcagcccggggtaaacctgaccggcaactctaccagcgggcagcgcggcaacaaccggcaaattgatatccgtggcatggggcctgagaataccctggtgctggtcgatggtaaaccggtgaccagccgtaactcggtgcggtatggctggcgcggcgatcgtgactcccgcggcgataccagttgggtgccagcggagatgatcgatcatatcgatgtgatccgcggcccggcggcggcgcgctatggtaatggcgcgatgggcggggtcgtcaacatcgtgaccaaaccgaccacaccagaatggcacgggtcgtggaatacctatatgaatgctccgcagcaccgtaaagaaggggcgacgaaacgtactaactttagcctcaatggtccgctgtcggacagtgtcagcttcaatctctggggtaatctgagtaaaacccaggccgatgcacaggatattaacgccgggcatgaagcggaacgtaccggttcctacgccggttcttatcccgccggacgtgaaggggtggtgaacaaagatattcacagtaagctgcgctgggagtttgccccgatgcaggccctggagtttgaggccggttacagccgccagggtaatctctatgccggcgacactcaaaacaccaataccagtacgctggtgaagagtatgtacgggaaagagaccaaccgtctctaccggcaaacttacggcgtaacatggaccggcggctgggataatggcgtgaccagcaacagctatgcccagtacgaacacacccgtaactcgcgaatggatgaagggctggcgggcggtacggaagggatcttctccagtagcgagttttcagatatcgatctggccgatgtcctgctacatagtgaagtgaatattccgtttacgctgggggtcgatcagaatctgacgctggggacagaatggaatcagcagcggatgaaagatggcgtatcgacaacccaggcgctctcttacggcactatcgatggcgtatcggctaccggtcgtagcccgtactccagcgccgagatcttctcgctgtttaccgaagataatatggcgctaacggacagcaccatgctgacacccgctctgcgcttcgatcatcacagcatcgtcggcaataactggagtccctcactgaacctgtcccaagagctgacagacgactggacgctgaagctgggcattgcccgtgcttacaaggcgcctaacctctaccagttgaacccgaactatattctctacagcaacggtcaaggctgttatgccagtagttccgcctgctatctgatggggaatagcgatctgaaagcggagaccagcgttaataaagagattggtcttgagtacaagcatgatggctatcaggcggggatcacctggttccgtaacgactatcacaataagattgagtcagggtatgcggcggtgggtaccgccagcaacggcaccaccaatatctatcagtgggaaaacgtaccaaaggcgttagtggaaggcctggaaggaacgctgaatctgccggtgggggaggcggttaactggagcaataacctgacctggatgctgcagagcaagaataagacgacaggcgaccggctgtcagtgatcccgcagtttaccttgaactcgaccctaagctggcaggttcgtgaagatctctccctgcagagcacctttacctggtatggccgacagaaaccaaaacgcttcaattataagagcgaggcggtcagcggcagcgaactaaacgaagtcagcccatacagcattgtcggcctcagtgcgacctgggatgtgaacaaaaatctgagcttcaccagcgggatagataacctgtttgatattcgccactaccgggcagggaatgcgcaaacgaccggcaacgcgacgacgggagcttatctgtatggcgcgggtgccgagacctataacgaatcggggcggaccttctttatgagcgttaatactcatttctga

SEQ ID NO: 212517 - DNA, 369 bp, Klebsiella pneumoniae
atgggattggccgcaattatgcgtagcaaaacgctccagcaatcggtattaagcgacctgctcttgtggatcgataataatctggataagaaactgaccgtcgacgatctgagcgatatctctggttattccccctggcatttgtttcggctcttccgtcattattttgatcgttcgccaatggaatatatccgccagcagcgcatgtcgctgtgttgccgtttattactgacaacgcctggttaccgaatcgtcgatatttgtatgatggtcggttatgacgatctcagtgcgtttaatcgtaccttcaaaaaatatcatgcgctcacgcccactcagtatcgctatcagatcacgcggcaaaaataa

SEQ ID NO: 212518 - DNA, 1761 bp, Klebsiella pneumoniae
atgacacgcttactcaagacaatcttgcccatcatcctctgcgccctcttcgggttatcgttcgcttcacccacgcaggctgtcgccagtctgccgatcgttcttcccgcgctgacatgcgatgcgctaagcgctaccgacttcagcgcggccgttggcgcaaaggtcactatcaatcacactgaaatgcagacctccgcgcagggaagctggtgcaaggtgagcgccactatcgcccctgagattggcgtgcagattgccctgccgactcaacgctggagtcaacgttttttgcaggtcggctgtggcggactgtgcgggagtattaacctgagtctgtcgaatgccagcggctgcctgccggcaatgaacggcgagtttgtggtggcagcaaccgatatggggcaccatggcagtatgatggatgcgtcatgggccgaagatccgcaaaagcgcatcgattttgcctggcgcgccaaccacctgaccgccgtgctggccaaagcggtgatgcagacgctttaccgccagccgccaaagtatgcctactttatgggctgctcagacggcggtcgcgaagcattgatggaagcgcagcgctttccgcaggattttgacggtatcagcgctggcgcgccagcggcctttttccagtttcagaactccttcttccacggctggaatgtggccgccaatcagcgcccggacggtaccgctatcctgctgaaaaatcgccttcctctgattcaccaggccgtgctggctcactgcccgacgctttccggcgtgcaggatggtatcctgcaaaatccgtatgcctgtcagttctctgagtcatggctcccccgctgtcctgccgatgctcgggaccgttctacctgcctgacgcaggaagagatcgaggtggtgaaaaagctctaccgcggcgcttacgacagccacggcgcccagttcgtcgcgggcggtctgccgctgggttccgagctacgctggccggtgcccgagacgccgaccggccactcaatgtcggaaatgatggtactaccggctctgcaatccgtgctcctgccaggagaaaaacagaagatccaatcgatgcgggatttcccgcttaaccagcagaattttgacgccgtcgcccaactggcgccgctctataacgcggcaaataccaatcttcatgcctatcaacagcgcggcggcaagcttatcctctggcacggtctggccgatgactccgtcagcccggccttttctatcgcctattatcgcggcgtagaagcagaaatgggccatgccgcaacggataccttcctgcggttattcctgctgcctggggtagcccattgcggtaatggcgaaggttacgatcaaattgatctccttaccccgctgatgcgctggaccgaggaaggcatcgccccgcaggagatcatggccggcaaacgggcaacagccgctgccgacctgccgccgatgacagaaaaaccagatgcgcaaacgcagtttcacggcgtgcagaaagtcagtcagccttacgctgacgccgctccagctgttatcgcgactcgtccggtgtatcccttcccggccattgcccgttataacgggcgcggcgacgtgaatgacggcgaaaattatcatgcagagcaaacaaccgcctttggtcatctgcagctggcaaaacccgccagcgactatattggccctgataatcaaaaaaattatcaggttcgccacggcacactcactgttcaataa

SEQ ID NO: 212519 - DNA, 2424 bp, Klebsiella pneumoniae
atgttaaaaaagactcatatcatcagcggattattgatcgcccctttaacgttatatgccgcaacatcatatcaagttgatgatatccgttttgaagggctacagcgcgtgaccgtcggggcggcgctattaagtatgccattgcacgcgggagatgcggtgacgccagaagatgtcagcgaggcagtgcgcgcgctgtatgcgagcggcaatttcgaaaatgtgcagatcctgcgcgatgggaaaacgctggtggtgcaggttaaggaacggcccactattgccagcgtcagtttttccgggaataaggtagtgaaggatgatgcgctaaaggaaaatctcaccgcgtccggtatttctgcaggtagtgcactggatcgaaattcgcttagcgaaatagaaaaggggttgcaggatttctattacagcgcggggaaatacagtgcgcaggttcacgcggtggtgaccccgttaccgcgtaatcgcgttgacttaacgttcgtttttcaggaaggcatctcggcgaaaatcgcacaaataaacattatcggtaatcaggcgtttcgggaagagacgctcctggaccagcttcagctacgtgataatgtgccgtggtggaacgtggtagccgataaaaaataccagaagcagaagctggaagccgatctggaaacgctgcgcagtttttatctcgatcgcggctatgcgcgctttgctatcgagtccacgcaggtcagtatgaccccagataaaaaatccctgtatatcactatcgccctcaatgaaggcgaacgttatcgggtcgaccgaactcaggtgacaggcgatctggctcagcatgggccggagatcgaggcgcttgcccagccgctggcgggggcatggtatagcggggcgcaagtcaccacggttgaaaatgagatcaaaaagcactttggtaagtatggttatgcctggccgcaggtgacgtccacgccggaaatcgatgatgcgcatcaccgcgtggtgctgcatattcaggtcaacgcgggccgccgctactcggtacgccagatccgcttttccggtaacgacacctcccgggacgcggtgctgcgtcgtgaaatgcgccaaatggaaggggcgtggctcaacaacgaaaaagtcgatcaagggaaggtacgtcttgatcgaacgggtttttttgagaacgttgaacagcagatcgttccggtcaatggaacggcggatcaggtcgatgtggtctacaaggtgaaggagcgcaacaccggctcattcaatgtgggcctgggatttggtacggacagcggcgtgagctatcagcttggcgtgacgcaggataactggctgggaacgggtaatagcgttagcttcaacgggacgcgcaacagctaccagtcttatcttgaactgggggcgacgaacccgtggtttaccgtagatggcatcagcctgggcggaaagattttttataacagctatgatgcttctgatgcggatgccgggagctataaccagcagagctatggtttaggtagtacgctagggtttcccattagcgaaaataactccctgaacctgggactggattatgtccataatcgcctgaccaatatggatccggagctgacgacctggcgctacctcagctctcggggaatcgagcccagcgtggtgacgaaagatggcgacagcggcgcaaaatatagcgccaacgattattttgtgagtcttggatggggctacaacgatctcgatcgcggcttcttcccgcgtgcgggaaacaagagcagcctgagcggtaaagtgacgctccccggttcggataatagctactacaaactctcttttgacaccgcccagtatctgccgctgagcgagaacaagcgctgggtctggatggaacgcctgcgcgcaggctatgccggcgggttagacggcaaaagtgtgccgttctacgataacttttacgcaggcggttcgtcgtcagtgcgcggattttcttctaacaccattgggcctaaagcggcctattaccgctgtaacggtagcgaaagcagctatagcgcctgcccgctggacgcctcgtctgatgcggtcggcgggaatgccatggcggtgctgaacagcgaatttatcattccaaccccctttgtgaatgataagtacgccgatagtctgcgaacctcgctgtttgttgacgcggggacggtctggagtacatcctggcacaacaccgcgcagacgctggcggcagggatccctgactacggcgatccgagtcatattcgtctctccgcggggattgccgtgcagtggatgtctcccctcggtccactggtcttctcctgggcagagccgtttaaaaagtacgatggtgataaagccgaacagtttcagtttaatatcggcaaaacctggtag

SEQ ID NO: 212520 - DNA, 354 bp, Klebsiella pneumoniae; identical to SEQ ID NO: 136166

SEQ ID NO: 212521 - DNA, 762 bp, Klebsiella pneumoniae
atgacggaagcacaacgagagtcattatgcgccttgattcgccaggcaggcgcccacgcccaggcgctgcgcgatgcgggattacaggtcgataaaaaagcgcgccaggactttgtgtcgcaggcggatctcgcggtagaacaagagattaaaggctggctgcaggcccactttcccgaggagggtttcctcggcgaggagagcggttttgaaggcaacgaccagaccgtctgggtgctggatcctgtcgatggcaccaccaactttatcctcggcatggattactggtgcatctcactggcgcgagtgtgccagggcgagctgtcgctcggcatcatttacgcccccgatcgcgatgaatttttcttcgccgcccgcggcgaaggcgcgtatctcaacggtcggcgcctgacgctacgcgagccggagcccgatgcggtggtgatcggcatggggcgctccagccgggccccggccagcgactacgcccgggctatcgacacgctgctcgacgccggtctggagtatcgccgttttggcgcgggcgccctgatgctggcgcatgtcgccgccggtcagctccacgcctattatgaagcgcatatgaacagctgggatgcactggcaggcatgctattgattgaggaggcgggcggaacgtgcaatgcgtttctcgccaatgcgggcctgcggcgaggcaacctcgtgctggccggctgcgcaagcgtccagcctcgactggccgccctgctggcgaaatga

SEQ ID NO: 212522 - DNA, 1014 bp, Klebsiella pneumoniae
atgaacccacgcaaacccagcgtcaccgcccaggatgttgcccggcgagcgggcgtctcccgggcagtggtgtcccgggcgttgagcaacaacggcagcatctctcccgacgcccgggcgcgggtactgcgcgccgccgaagagctggggtatcaggttaacttcctcgcccaggggctgaaccgtcagcgcagccacttaatcggcgtgatcgtctcgcgcatcagcgatccttttcgcagtaccctgcttgatgcgctgcttaacgagatccagcgccagggctttcaggcgctggtgagcgagatccacagcgagcaggatctggcgcagaccttgcgccgtttcgctcagtttcgcgtctccggcgttatcgtcacctccggccagccgccggaggcgctggtgaacgagtgcgtccagcagcatattccggtcgtgggcattaatcgtcagccgacgatccccggtgtggattacgtttgttctgacaacgccgccggcgccgaactggccgccgaccagctgctgcgcagcggctgtcagcgctttggctggctcaaccaccatccttccacctgggccggccgcatgcgcggggaagcgttcggccgggcgctgcaaacgcgcggagtggacgtcgaacgccacctggcgatcctcgcctgtcagcaagaaggttacgcgggcgggttacaggctgcggcgctcgccgacgaggcgctggaggggatcttctgcgccaacgcccagcttgcctgtggctttctcgatggaatgcgccagcgcggcagagaggctccggcggattttcagctgattggttttgataacacgccgacgaccgcgcaatatagctatcagctcaccacgctacatcaggatgtggcggcgatcgcccgccaggcgctcgcccggcttctggagcgcgccgccgacccttcgcaaccttcacgcaccacctgggtggaggtaaccttaattcaccggcgcacgtcgccctttgttatctga

SEQ ID NO: 212523 - DNA, 771 bp, Klebsiella pneumoniae
atgaaaatagatgtgcttggctgcgggagcgccttttcctgcacgcaaaatacctccgcgctgcgggtgatcgatgcggacaacaaacagtggttaatcgactgcggccccaccgttccccgcgcgctctggcagcgcggcggcgaggtcaacgatatcgacgcgatctacttcacccacgttcacccggaccactgcaccggcctgacggcgctactgaaccactggaaaagttattcccgtcagaagccagtcattatctactgccagccggcgcagcagccggtgctcatgcagctggccgcgctggcgaactggccgcaggcggaccttggtttcaccatcgactggcaggaatgccgcgaagcctggacgtggcaggactggcagatccgcactgcccccacccagcatgagctgagtaatcgcgccatccgcatcaccattgccgggcagacgctgttttacagcggcgatggccgaccgaccgccgactcgatagccctgatggccggcgccgggctggcgtttcaggagtgcgcctcggtagcagccctggacgatgacgcctcgcatggcgatttcccctcctgcctgatgctgttcagaacgctgcagctcccggcgatggggctctatcactgcgaggatgcttctctgtcggcgctaaagcaggcctgtcagccgtggccgggcttattcgtttcccgggatggactcaccttaacgctgccgcgtcccacgcccactgacgagacgtacctcctatga

SEQ ID NO: 212524 - DNA, 1032 bp, Klebsiella pneumoniae
atgagttatttacagatctccggccttaaaattagttatggcgataaggtggttttacataatatcgatctggcggtagagcagggagagatgattgctctactgggcccgtcgggatgcggaaaaaccacgctgctgaacgccctctgcggctttattccggtgcaaagcggcgaggtggctattgccagccgaacgatcactcatcttgcgccggagcagcgcaatatcaccatggtatttcaaagctacgccctgtggccgcacctgacggtagcgcgcaatatcggctatggcctgaagctgcgcaaatggcgcggggcggatatcgcgcggcgggtggcggagctgctgcgaatagtcaatctcgaagggcttggcgaggtgaaagtgaccgaactgtcgggcggccagcggcagcgggtggcgctggcgagagccctggccatagagccccaggtgctggtgttggatgagccgttatctaatctggatgccaaagtgcgcctgaatgtgcgccatgaaattaaatctctgcaaaagagactggggttcacgtcattaattgtcacccacgatcagcaggaagccttagtgatggcggaccgcattgcggtattaaatcaggggcgtattgaacaaaccggcacgccggaagaaatatatcaacgccccgcgacgcccttcgtcgctgattttatgggggccgataataaaataatttccggtgaattatccgctgccgcaatatccggtttatctgccgctcagcagggtgacaacgttatttattttcgcagcgccgatgccgcgctcgctgaattaacgcagcctgcgccgcaggagggactggctctggaaggcgtggtggagcaaagcgcgtttctgggcaatctgtatcgtcacagcgtgcgctgccatgaccgcctgctgctggcggatgccgcgcagtgctggccgacaaaaagccgcgttcggctccatgtgccaacgccggccctgcatatttttcctttaccactatcacagtga

SEQ ID NO: 212525 - DNA, 1140 bp, Klebsiella pneumoniae
atgttgactaagacgaaagcagcgatcgtaacgaccctcttcctgagccttggcgcacaggccgacaccattctcaacgtcgccaccgcgggcgatcagaatatggtggattatgtaaaaacctggctggggccaaaatttgaagccgctcatcccggcgtcaaggtgcgggtgatcggtaccggccccggcgacgccgggtcgaataaaattagcgagaagctaacggcccagcaggagagcggcgcgcagcggtgggatatcgacgtcgcggtagtgcaccagaaggcgggcggtgagcaggtggcaaagggattgctgcaaaaataccgtcaggatattcagaccggcggcatggtgagttcgccgagcgccatccaggcgctgggcgttaacgttgacggatacgtgatgccgatgttcttaagccagaccgctatcgcctggaacagcgatctggtcactaccccgccgacgtcgtatgacgagctggtggcctggacgcagaaacacccgcaggcttttggctataacggcatcaagaacggcatgtccggcgtcagctttgtggtgggctggatctacgcctacgggaccgacgcccagcgtctctccgccgggccctatgataaaagcgtcgaaaaaggctggcagcaggcctatgagaagctaaaggcgttcaataaaaacgtaactttcaccccgggcaacgccgggacgctcgatatgctgagccggggggaaatcgccatgggcccggtgtgggtcgatatgttctatagctggaaagatcagggcaagctgccgccgtcgatcaagcttgctttactggcgccgggcatgccgggccagccgatgtattacgtcatcccggcgaaggcggcgaatccgcagctggcgcgcgactttatcgcgctggccaccagcccggaagtgcaggcgcaggggatcgtcaagcagttcaactggtatccgggcatcgacgccgggcaggtgaagccgaagctggatgcggcgacctggcaaaagctgtttgccgaaatctcgccggaagcgctggcgaagtatggcaaaagcttcccgatcgccccctactttgacgatatcaaagagggttacgaaagccaggtggctaattaa

SEQ ID NO: 212526 - DNA, 834 bp, Klebsiella pneumoniae
atgtccagttcattaaaatatctgctgctggttgccccggcggcgctgatgatcgcgatcctgtttttgtatccgctggggttttcgctggtctcggcgtttaccgcgccgggacagccgttcaccctcgatcacttccgcaaggtctatgcgctctacgccagcgatgtgctcttttcgctgcttatcgtgctgatctcagtggcgctgttagcgctgctcgccattaccctgtcggcagtgattgcgctgtcaccctgccgacccgttgtgcgtttgctgggttttttgtatcgcctgccgctgtttattccttttatcgttgttgcccagatgatgcgcacttttctcgccaaaaatggcctgatgaacaatgcgctggtggcggccgacctggtcacgccgctggagacgctctcctggctgggatggaaagggatagtgatcacctttgtctggaagcaactggcctttgccacgctgctgatctgcggggcgatggcggcgctggagtcgtcgcagatccttgctgcacgtaatcttggcgcctcccggccgcggatcctgttcgatatcatgctgccgcaggtcctgccgactatcggcgtggcgctggtgctgtcgacggtgaccatgatgtcggtgctgtcggtaccgttgatgatcggcgtgggggccccgacgatgctaaccgtggatatggcatttcgcgtcaattcctatggtgattacgcggtagcgaatgcgcttggcgtggtgtcgctggcgatctgcggcgcgctgtcgtggttttacctgcgccacagcctgcagcaaaaaggcggtgaatcatga

SEQ ID NO: 212527 - DNA, 858 bp, Klebsiella pneumoniae
atgaaagcgctggccctcgtatcaacctcggcatggtgggtgaaagggcgccgtaaagtgcgcgccagtccggtgctacagaccctgctgctgctgtttatgctgctggcgatgtttggtccgctgctgaacctgttgatctggaccgtagcggaaagctggtattttccccattcgctgcccagccggtgggggctgaagtactggtatcaggttttcaatccatacagcgatgtctccagctcgctgttaaccagcgtgctgatcgctctgttatcggtgggggtctgtttgctgatttccgtacccgccggctatgcgctttcccggcggaaaatgccattacggatgctgttcatgctgctatttcttatcccgcaggcctttcctaacctgacggtatacatgaatgttgccagattgttttatcagtggggattgaacggcagtatcgcaggggtggtgctggtgcatagcgtccacggtctgatgtactcggtgtggatctgtgtggccgcgttttcagccatcgacccgctgctggcgcgggcatcgcgtaacctgggcgccgggccggtgtataccttctggcacattgtgctgccgcaggcggcgccggggatcgttgccgccagcatctttgtttttctggagtcgctggatgagtttaccggcactttcttcgtcggggcgccggatatcaccacgctgccgctgctgctctataacgccagcatgtcgggtaactatcaggtctcgtcgattaccgcgctgattttgctggtcccatcgctgctctttatggtggtgatccataaatttatgcgtccggagatgatggcgaaattagggaaataa

SEQ ID NO: 212528 - DNA, 282 bp, Klebsiella pneumoniae
atggcttccattactaccagtgtcgtattattgcgctggcccctggtgagcgcggtactgatgtttctcgccagctcactgaatattcagcttcgcaaaagcgattacgccggtctggcggtgatctgcagctgcctcggcctggccgccgcctgctggttcgccaccggtttgctcggtatcaccctgcttgatatagccaaaatctggggcaatatcaaagatgtgatgattgaagtcatgagtcagacgccgccagagtggccaatgatgatgacctga

SEQ ID NO: 212529 - DNA, 1605 bp, Klebsiella pneumoniae
atgggtgacagtgcgccgcataaggcgctaagactcatcggaacaggtttggttattttattgccagtggtgctggcattgtggtttgcccagctgcgggctaaagccgaaaccattgatcaattacactcattttcgcagctggcgctggaaaaaacggaaatggtcatccgggaagcggatcaggctcgggctaaagccagccagtatcgcggtgagttgtgttcagcggatcaccagcgttatttactgcatattgtgcgcggcctgctgtatgtggaagatctgatctacgctaacggccagcgctttatctgttcaacgtccgttcatcagcaaaccggctggcggatgccggcggctaattacaccaaaaagccggatgtcgcgatttactattaccgggacacgccgttttatccgggctttgccatgaattatatgcagaaggggccctatgttgtggtggttaatcccttctcgtacagctcggtgatcgccagcgaccgcgatttagcctatggcgttttcgataccaaaaccaacctctttttctcggtaagtaacaatgtcgagcccgcggaactccatgcgttaattcgcgaaggcgataccttttttaatcagaatggccgggtgtatacgatcgcccgctccgctattcgccccatcgccgtcattatgtccacctcgcgggccagctactatcacaacttttgtgaccaggccagtctgacgctgccgctggggataatttgcagtattttactggtgctggtgtggtcgcgcacccgccgacagtatcactcgccgcgcaatatgctgcagcgggctctgagctgccgccagctgcgcctgcactaccagccgattatcgatattaaaaataaccgctgcgttggggcggaagcgctgctgcgctggcctgggtttgacggtccggtgatgaacccggcggagtttattccgctggcggaaaatgaaggcatgattgcccaggtcacggactacgtggtggatgaactgttttatgaaatgggtgagtttctggccagccatccacagttgtatatagccatcaatctctctgcgtcggatttccattcggcgcggctgatttcacagatcagtgagaaagcgcacagctacgcggtctgtatcggacaaatcaaaatcgaagtgaccgagcgcgggtttatcgacgtaccgaagaccacgccggtgatccaggcgttccgcgaagcaggctatgaaattgccatcgacgatttcggcaccggctactcgaatctgcataatctgcacgcgctgaacgtcgatatcctcaaaatcgataaaaccttcgtcgatacgctcaccaccaacaacaccagccacctgattgctgaacatatcatcgagatggcgcgcgggttgcggttaaagacgattgcagaaggcgtggagacgccggagcaggtaagctggctctacaagcgcggcgtacagtattgccagggctggctgtttgcgaaagcgatgccggcgcgggagtttatgcagtggttagccaatgctcccgcgcccgcgaacgtgcctcagccgccgcgtcacgcggagatctga

SEQ ID NO: 212530 - DNA, 330 bp, Klebsiella pneumoniae; identical to SEQ ID NO: 136156

SEQ ID NO: 212531 - DNA, 459 bp, Klebsiella pneumoniae
atggaaaagaaatcaccccgcatcaaaatgctgttgacgcctggagaagtggcaaaacgaaccggcgtggcggtctcggccctccatttttatgagagtaaaggactgatccacagtcagcggaatgccggcaatcagcggcgctaccggcgtgacgttctgcgcgcggtggcgattatcaaaattgcgcaacgtattggcatcccgctggccactatcggcgacgcgtttggcgtgctgccggaagggcacaatctcagcgcaaaagagtggaagatgctgtcatcgcagtggcgtgaggagctggatcggcgcattcataccctgacggcgctacgcgaccagctcgacggctgtatcggctgcggctgtttatcgcgacgcgactgcccgctgcgcaacccgggcgataaactgggggaagagggaaccggcgcccggctgctggaagacgagtga

SEQ ID NO: 212532 - DNA, 669 bp, Klebsiella pneumoniae
atgctgacggtacatcatcttaatcaatcacgatcgcaacgcgtactgtgggcactggaagagctgcagctgccttatcagatagtccgctatcagcgggagaaaacgatgctggcgccggcggcgctgaaaaaaatccatccgttgggcaaatcaccggtactggaagataacggctatgtgctggcggagtccggggcgatcctcgagtatttgcaggaaacctgggacagcggcgggttgttgaagccgcagggaattgacgacaaactgcagtaccgcttctggctgcactatgccgaaggctcgctgatgccgctgctgttaatgaagctggtgttcgccagccttggcaaaccccctgtgccctttggcgttcgctcgctgggttcgctgctgggaaaggggatacagaaaacgtggctcgatccgcagctggccacccatgcgcggttcattgacgaccatcttgccgcacggccatggttcgctggcgagcggctgagcatggccgatatccagatgagcttcccggtgatggcattgttggcgcgcggcggcatgcatgaccttgtccatatcgaggcctggcgtcagcgagtggaacagcgaccggcctggcaacgcgccatcgagcgcggcggccccttcaccttacccggcgcctga

SEQ ID NO: 212533 - DNA, 1350 bp, Klebsiella pneumoniae
atgtctacgccttcagcgcgtaccggcggctcattggacgcctggtttaaaatttcggcgcgcggcagcaccgtgcgtcaggagattgttgcaggtcttactacctttctggcgatggtgtactccgtcatcgtggtgccgggcatgctcggtaaagcgggcttcccgccggccgcggtgtttgtctcgacctgtctggtagcgggcgttggctcgctggcgatgggattatgggcgaatctgccgatggcgatcggttgcgctatctcgttgaccgccttcaccgccttcagcctggtgctggggcagcagatcagtattccggtagccctcggcgcagtattcctgatgggggtcctgtttacggtgatctcggcaaccggcatccgcagctggatcttgcgtaacctgccgcagggcgtggcgcacggtaccgggatcggcattggcctgttcctgctgctgatcgccgccaacggcgttggtctggtgatcaaaaacccgctggacggtttgccggtggcgttgggcaactttgacagtttcccggtggtgatgtcgctgattggcctcgcggtgatcattggtctggaaaaaatgaaggtgccgggcggcattctgctgaccattatcggcgtgtcgattgtcggcctgattttcgatcccaacgtccatttctccggcattttcgctatgccatccctgagcgatggccagggtaattccctgatcggcagcctggatatcgtcggcgcgctcaacccggtcgtgctgccaagcgtgctggcgctggtgatgacggcggtctttgacgccaccggtaccatccgcgcggtggctggccaggcgaacctgctggataaggacggacagatcatcaacggcggtaaagcgctgaccaccgactccctgagcagcgtcttctccggtttagtcggggcggcgccggcggcggtttatatcgaatcggcggcgggtaccgcggccggtggtaaaaccggtctgaccgcggtgacggtcggtgtcctgttcctgctgatcctgttcctctccccgctctcttatctggtgccggcctacgcgaccgcgccggcgctgatgtacgttggcctgctgatgctgagcaacgtggcgaaaatcgatttcaatgactttgttgacgcgatggctggcctgatcaccgcggtgtttatcgtgctgacctgtaacatcgtgacgggcatcatgatcggtttcgcgaccctggttattggccgtctggtctccggcgagtggcgcaaactgaacctcggcacggtgattatcgctgtggcgctggtggtgttctacgccggcggctgggcgatttaa

SEQ ID NO: 212534 - DNA, 1647 bp, Klebsiella pneumoniae
atggaaatattctttaccatcctcatcatgacccttgtggtctcactctccggggtagtgacgcgcgtactgccctttcaggttccacttccactgatgcaaatcgccattggcgcgcttctggcgtggccgacctttggtttgcacgttgaatttgatccagagctgtttctggtactgtttatcccgccgctgctattcgccgacggctggaaaacgccaacccgcgaatttattgaacacgggcgcgagatcctcggcctggcgctagcgctggtggtcgtgacggtggtcggcatcggctttctgatctactggattgtaccgggcattccgctgatcccggcgttcgcgctggcggccgtgctgtcgccgaccgacgccgtggcgctttcgggcatcgttggggaagggcggataccgaagaaaatcatgggcattctgcagggggaggcgctaatgaacgacgcctccggcctggtctcgctcaagtttgccgtcgcggtggcgatgggcaccatggtctttaccgttggcggcgccaccgtagaatttctgaaggtggcgattggcggcgtgctggccgggtttgtggtgagctggtcgtatggccgctcgatgcgcttcctcagccgctggggcggggatgaacccgccacgcagattgtcctgctgttcctgctgccgtttgcctcctatctgattgccgaacatatcggtgtctccggcatcctggcggcggtggcggcggggatgaccatcacccgttccggcgtgatgcgcaccgcgcccttggccatgcgcctgcgcgccaacagcacctgggcaatgttggagtttgtcttcaacggcatggtcttcctgttgttgggcctgcagctgccggatatcctctccagttcgctggtggcggcggaggccgaccccaacgttgagacctggatgctgtttaccgacattatcctgatctatgccgcgctgatgctggtgcgttttggctggctgtggtcgatgcgtaagctcagtcagcgcttcctgaagaagaagccgatggagtttggctcctggactacgcgcgagctgctgatctcctccgttgccggggtgcgcggggcgattaccctcgccggtgtgctctccattcctctgctgctgccggacgggaatgtctttccggcgcgctatgagctgattttcctcgccgccggggtgatcctgttctcgctgttcgtcggggtgattgcgctgccgatcctgctacgtcacattgaatcgagcgataatgtgcagcagcggaaagaggagcgtctggcgcgcgcggcaacggctgacgtggcgattgtggcgatccagaagatggaagagcgtctggcggcggataccaaagagaatatcgatacccaactgctgaccgaagtcagttcgcgggtgatcggtaacctgcgccggcgcgccgatgggcgtaacgacgtggaaacctctatgctcgaagagagtctggaacgccgcttccgcctggcggcgctgcgctctgagcgcggcgagctgtatcatctgcgcgccacccggcagatcagtaacgagacgctgcagaagctgctccacgatctcgacctgctggaagcgctgttaatcgaagatcaataa

SEQ ID NO: 212535 - DNA, 882 bp, Klebsiella pneumoniae
atggatatccgaacgctgcgctatttcgttgaagtggttcgtcagcagagttttactcgcgcggcggaaaagctgtttgtcacacagcccaccatcagcaagatgctcaagaatctcgaagatgagctgaactgcacgctgttgatccgcgacggccgcaaactactgctcaccgataccgggcgcgtcgtttttgaacgcggccaggcgatcttgggcgagttcagccagctggagtcagagctgagcgatatcaaccacctgcataaaggggtgctgcggcttggcattccgccgatggtcgggatgctgatggccgagccgatcagtcgcttccgccagcgctatccgggcgtcgagctgaagatcgccgagtttggcggcctgacggtccagcaggcggtcagcaatggcgaacttgatatggcgatgaccgccctgcctgtcgaggaggatagcagcctcaccattctgccgttgttcaatcacccgctgtgcgtcctgacgccaaggaccgcggagtgggaaggtaaaacctcgctctcgccggccgagctggcgtcgcatccgctggttatctacaacgaggaatttgcccttagccagcagctgatgcggctgtttgccgagcatgacgtgaagccacgtatcgcggtgcgcagcggccagtgggattttctcgccgccatggtgcaggcgggcattggcgtagcgatcctgccggagccgatttgccagcgtctcgaccggcagaatttttgctggatcccgttgcaaagcgagctgcgttgggagctggggatgatttggcgggaaggcgtatatatgtcgcgcagcgctgaagcctggctgacgtgcagcaaagcgttctggctggaataa

SEQ ID NO: 212536 - DNA, 408 bp, Klebsiella pneumoniae; identical to SEQ ID NO: 136150

SEQ ID NO: 212537 - DNA, 690 bp, Klebsiella pneumoniae
atgagcgatgccgtgctgagtatcctgtgcctggtggcgacgctggtcctctattacgccaacaaaaaactgtatcgacgttttcataaactccctctgatgccgctggtgttcacgccgatcctgctggtgctgattctggtggtaggccatatctcttatcagagctatatgggagagacccactggctgctgtggctgctgggcccggcgaccatcgcctttgccgttccggtgtatgaaaatgtcgcggtgattaaacgccactggatgtcgctcagcgccggggtggtgacggcggtagtggtggctgtcaccagttccgtatggctggcgcgcgggtttatgttgtctgatgaaattcagcgtagcctggcggtgcgctcggtgaccacgccctttgcgctggcggcggcgaaaccgctcggcggtcaacccgatttggtggcgctgtttgtggtgatcaccggcgtgtttggcatggcggtgggagatatgctgttcttacgtcttgctatccgggaggggatggcgaaaggagccgggttcggcgcggcttcccatggtgcgggaacggcgcgctcgtatgagctgggccagcaggagggcgtggtggccagcctggtgatgatgctgtcaggcgtagtggtggtgctggctgcgccggtcgtccgctggctgctgttttaa

SEQ ID NO: 212538 - DNA, 540 bp, Klebsiella pneumoniae
atgaagatgagtaaaaaatttctggcgggtgccctgattttctctgcctgcagcgcgctgtctaccgttgcgcaggctgataacaccattacctttaatggtattgtttccgataccacctgtacggcgaccattgatggcggtgtaacggctattgatatgggcaccacctcagtggcggatctgaaagcgtataccttcggcgctgccaagaacttctcctttagcttagctgattgcccgaccgcggaagaaggtggcaacagtatcgcccgcgtcacttttggcggtgtttccgataccgcgaacagcgattattttaaaaaccaggcaactgatgagccggcaaccggcgtcgctgtggcccttttcgacgaagcgggcaatgtgatgaagaataacgaagagggttctgatgttgatatctcttcgggtgcagcaaccattccgttcaccgttaaaatggtgaaatcgggtgatgccgatccgacgaaaggtaccgttcagacaaccgtgacttataacgtgacctatcattaa

SEQ ID NO: 212539 - DNA, 690 bp, Klebsiella pneumoniae
atgagatatcctttttttgcgatcggtttattgctgtcttcttccttcgcgcaggccagcgtggtcgttggcggtacgcgtctggtttttgatggtacgaaaaataacgctgtaataacggttgagaataaagatcagaacagcaatatcgttcagtcctggctctcggtggttgatgcagcctcacccgccaaagacgcatttattattacgccgccgctgtttcgtctcaaagccggggagaaaggatttgtccgcgtagttcgatcaggaaagaaattacccgacgatcgcgagtcgatgttttggctcaatattaaagggatcccggcaacagaatatgtacctgataaaaatgtcgtacagtttgcgattaattcgaaaataaaattgatttatcgacccgctgcgttaaaaggtaatacaccggaatcgtacgctgaaaaattacagtgggggaaagagaggacgtcggtgacggtaaaaaataactcaccgctgtatatgaatttctcacaggttagccttaacggtaaaaatatttctggcgcatggtttgctgccccgttttccaccttaaaaatacccgtgcagagtagcctgtcggcgacaggaaaaaaagagatcacatggagcgtgattaatgattatggtatgtcagggaagaaatataccgctatcattcagtag

SEQ ID NO: 212540 - DNA, 2580 bp, Klebsiella pneumoniae
atgattatggtatgtcagggaagaaatataccgctatcattcagtagcgttgagctgctattttcaactaaaagtatctgcgtcgctattattctgtgcctaagtactctaccctctcgcgcggaggccggcgaatatttcaacccaaatttactcgaagtcgccgagagtcctgcggcttcggttgatctatcctatttttcgcaagatggcataccgccgggcacctatcacctggatgtttacatcaacgataagtacgtcagttcagactcgctgacttttcaggaaattagccatgacgcaggcgcgactgcttctccctgcctgtccgcggagtatctgaattcatggttgattaataccaccgcctatccgcagttgttcgaggcaggggaaacctgcgcccggctgtcggcgatccccgggatgacgttctcggtatctcttgcccagcagcgcattgattttaccgtgccgcaggccgccatgctgaatcgccccagagactatattcccgagagccagtggcaacaggggatcaatgccggtcttctcaactatagcgtcaccgggcagcgtaatgcgccgcggcataacggcgccactatcgacagtcagttcgtcagcctgcagcctgggctgaatctgggaccatggcgcctgcgcaactacagcacctatagccacagcgataacaacagccgctgggagtcggtttactcctatcttgcccgcgatattcacaccctacgcagccagctggtggtcggtaatacgtatacctcttccggcattttcgacagtttgagttttaccggtctgcagctcagttcggacaaagagatgctgccggatagcctgcatggctttgcgccgacgattcgagggatcgcgcgcaccaccgcggaggtctcggtttatcagaatggttacagcatttataaaaccaccgttgctcccggcgcctttgaaattaacgatctgtacgccaccggcagcgccggcgacctgtacgtcaacattaaagagtctgacggcagcgagcaaaactttgtggtgcctttcgcgtcgctggcgatcctgcaacgtgagggccagctggactatgcgctgagcagcggcaggacgcgatcgggtagctccgacgataaagaatataactttattcagtcttccctggcctatggcgccaccagcaacatcactctttatactggtttccagcaggcggaagataaatataccaacctgttgttaggcgctggctttaacctcggtactatcggtgcgctgtcgtttgatggctctcagtcgtgggccgacgtgaaaaccagcgatacggcctcgtcaaccagtaaagagcaagggcaatcgtatcgcgtccgcttcagtaaaagctttctgcagacgggcaccagcttttccgtggccggttatcgctactccacctcgggatattattcgtttcaggactttgtcgataactcttccacacagcgcgactgctgtacgcagagcggcagaacgaaaggccggtttgacgcatcgttgtcgcagacgctgtttggctatggttcgctctcgctttcgttggtcaatgagacctactgggacagttcgcgtatggaatcggtgggcgtgggctatagcgggtcgattggcaaggcctcctactttattaactattcctataaccgcaatgtgcaaagcaccgatgacagcagcaataaccggccatccagcgatacggtcgtctccctgacgttaagtattccgcttggtgagacgctttcggcaaattacaccctgaaccatggtcggcataacgacaccacgcacagcgtggggctcaacggctcggcgttcgaggatcgttccctgaactggagcgtactggaagggtacaacacgcaggataaaagcacctccggcaacctcagcgtcaactaccagggttcgaaaggggatgtggctggcggctatggctacgaccgctacagcaatcactacaactattcgctgcgcgggggcatggtcgcccatgcgggcggactcacgctatcacggtttctgggcgagagttctgcgctggtcgaaacgcctggcgtcagcgatgtgacagtgcgcggtcagacaaacgtgacgacggatgccgccggatatgcggtggtgccttacgtccgtccgtaccatcgtaacagcctggcgctggatgaacaggaaatacctggcgctgaagtggataacgtcgccagaacggtggttccgacgcgcaatgcgatcgtcaaagtgaagtacgacacgcgaattggctataaggcgatgctcaccctgcgtacccgcaatggcgtggtgcctttcggcgcgctggtgaccctcgataatgatcacggtagcgcgtcgcgcagcaatatcgttggcgatgaggggcaggtgtatctaacggggctgcagaaaaaaggccagctgttagcgcgctggggggagaaaagcagtgagcagtgcaccgttcattatgacttctccggcatggcccttggcgacgatattctgttctatcaggcagaatgtcggtaa

SEQ ID NO: 212541 - DNA, 549 bp, Klebsiella pneumoniae
atgaatatgcgagacggcagcacaaggggcctcctggtggccattttgctgctctcccttccggcgctggcttatgagggcagcagcacggtcaattttaacgtcacgggcaccatcgaagcgccttcctgtgaggtggccgtggagccgtcgaacagtatcgatttaggcaccgtctcctcgcagacgttctccggacatgccggggcgagcggcgccagcgtgccggttaagctggtcttttccagctgttccgccgatgcgtcggcggtgaccatcgcgtttagcggcaccagcttcgatagcacccacgcttcaatctataaaaacttccagactggcagcaacggtgccagcggcgtcggtttgcagctgcagagcatggccgaccagcagccccttggccccggcgaccagtatctctatacctttggggacgatgcggatatccatacctttaatatggtggcacgtatgttttcgccttatggccaggtaaggtccgggatggtcgggtttaccgccacgttcgatgtggcctacaaataa

SEQ ID NO: 212542 - DNA, 1098 bp, Klebsiella pneumoniae
atgaaaaaactgatcttattgctcatattggcactgtgtcccgtctatagctgggcggcctgcacgggaaccaactatggcgatgtctcgatgaccaacctgccggaaaagatcctggtcaatgccgggagctataccgcagggacggtactgtatgactcggggaagattacgcgctcgcaaacggaattgcttaactgtgaggggagcacctacgcggtttttgcctggtcctcgaacaatgccggggcactgataggggataatatctatgccacctcggtgcaggggatcggtatccgcgtcaaggtgtggctcaatatcagcggtgaatatggcgatgacaccgatgatttcagccccgactcgcaggtgcattatattggtgatgtgaattattacctcggaaagccgacaggtcttttcgactctttcgcgtcgactcattataccccggcgtatcagctgcagctggtggccaccggcggcgccatcgccagcaagagtcaattatcgttcagcgacccggtggccacggtatcggccaaggataaaaaggggaccatcgctatttcacaactgcacatcagcggcaccaccagcatccagctaatcccgatggggtgtattgtcggtagcaataatctcagtttttccatgggcagcatcaatgccagtgagtttaataccgcgacgaaggtgggtagcgcgcggcagtctctgagcctctcctgcgagccgggaactaacgtttcgatgcgtgtggcggctgcttctgcaagcggggataaccctgacaatacggtgatggccctcacggcggaacagaatgccgccactggcgtgggagtgcagttaaatttgaatggcaaagcactgccgttaaataccgatatcagcctctatacttcgagccgcgcgacggtgaccaacagcggcgcggataccagctacagctatttcaccaaccccgacagccccggaggcgcagcggccatgcagacgctcgccttatccactaactattacaggacggggagcgcggtgaccgcggggacagccaacgccaccggggtgatcacctttacttataactga

SEQ ID NO: 212543 - DNA, 1656 bp, Klebsiella pneumoniae; identical to SEQ ID NO: 136142

SEQ ID NO: 212544 - DNA, 312 bp, Klebsiella pneumoniae
atgaatgaacaactttgtcagcggatagaaaatagttcgcatttcagggagttagttgcatcacggcaacggtttgccgccattctgtcagtgattatgttagtgatctacgtgggctttattttgcttatcgcctttgcacccggctggctcggcaccccgctgcacgccggaaccagcgtcacccgcgggatcccgctcggcattggcgtgatcgtcatttcgtttatcctgaccggtatttatgtctggcgagctaacggtgaattcgaccgtttgaccaaaagcgttctcaacgaggtaaaagcatga

SEQ ID NO: 212545 - DNA, 1959 bp, Klebsiella pneumoniae
atgagccaaattcacaaacaccctattcccgctaatattgcggaacgttgcctgattaacccggatcagtacaaggcgcagtaccaacaatccataaccgaccctgatacattttggggcgagcagggcaagatccttgactggatgcggccctatacccgtgtaaagaacacctccttcgcaccgggtaatatttccatcaaatggtatgaagatggcaccctgaacctcgccgctaactgtctcgaccgccacctcgccgaacgcggcgatcaaaccgccatcatctgggaaggcgacgacgccagccaaagcaagcacatcacctaccgtgaactgcatgccgacgtgtgccgtttcgccaatgtgctgctcgacctcgggattaaaaaaggcgacgtggtcgctatctatatgccgatggtgccggaagccgcggtggcgatgctggcctgcgcccgcatcggggcaatccactcggtcattttcggcggcttctcgccggaggcggtggccggacgcattatcgactccagctcacgcctggtgatcaccgctgacgaagggctgcgcgccggtcgcgccatcccgctgaagaaaaacgtcgatgacgcgctgaaaaacccgaacgtgaaaagcattgagcacgtggtggtcctgaaacgcaccggcggcaatatcgactggcaggaaggccgcgatctgtggtggagcgacctgattgcaaacgccagcgccgaacaccggcccgtcgaaatgaacgccgaagatccgctgttcatcctctatacctccggctccaccggtaaaccgaaaggggtgctgcacaccaccggcggctatctggtctatgcggccaccacctttaaatacgttttcgactaccatccgggcgatatttattggtgcaccgccgacgtgggctgggtcaccggccatagctatctgctgtacggcccactggcctgcggcgccaccaccctgatgttcgaaggggtgccgaactggcctacgccggcgcgcatgtgccaggtcgtcgataagcataaggtcagcattctctataccgccccgacggctattcgcgccctgatggcggaaggcgacaaagctatcgaaggcacagaccgctcctcgctgcgcattcttggctcggtcggcgaaccgattaacccggaagcctgggagtggtactggaagaagatcggtaacgagaagtgcccggtgatggacacctggtggcagaccgaaaccggcggctttatgatcactccgctgccgggcgcgattgagctgaaggccggctccgcgacgcgtccgttcttcggtgtccagccggtgctggtggataacgaaggcctgccgctggatggcgccaccgaaggcaacctcgccatcgccgactcctggcccggccaggcgcgtaccctgttcggcgaccatgagcgctttgagcaaacctacttctccactttcaaaaatatgtactttagcggcgacggcgcgcgtcgtgatgaagatggctattactggatcaccggccgggtggatgacgtcctgaacgtctccggacaccgtctggggaccgccgagatcgaatcggcgctggtgtcgcacccaaaaatcgccgaagcggcggtggtggggatcccgcataacatcaaaggccaggccatctatgcctacgtgacgctcaatcacggcgaagaaccgacgccggagttgtatgccgaagtgcgtaactgggtacgcaaagagatcggtccgctggcgacgccggatgtgctgcactggaccgattcgctgccgaaaacccgctcgggcaaaatcatgcgccgcattctgcgtaagattgccgcaggcgacaccagcaacctcggcgatacctcgaccctcgccgatcctggcgtcgtggaaaaactgctcgaagagaagcaggccattaccatgccatcgtaa

SEQ ID NO: 212546 - DNA, 1314 bp, Klebsiella pneumoniae
gtgaagaaaacaaaaaaagtcagtctggcctggcaaattttgctagccctggtgctgggtatccttctgggcagttatctgcattaccacgctgaaagtcgcgattggttaattagcaatttgctgacgccggcgggcgatatctttatccatctgattaaaatgatcgtggtcccgattgtcatttcgaccctggtggtcgggattgccggcgtgggtgacgccaaacagttagggcggatcggtgccaaaaccattatctatttcgaagtgatcaccacggtggcgattgtgctgggtatcaccctggccaacgtcttccagccggggacgggcattgatatgtcgcagctggcggcagttgatatttcgaaatatcagaacaccaccgccgaagtgcagagccatgcgcacggtctgatgggcaccatcctgtcgctggtgccgaccaatatcgtggcatcgatggcgaaaggcgatatgctgccgattatcttcttctcggtgctgtttggcctggggctctcctcgctgccggcgacccaccgtgagccgctggtgacggtcttccgctctatctccgagaccatgtttaaagtcacccatatggtgatgcgctatgcgccggtcggggtattcgccctgatttcggtaaccgtcgccaccttcggtttcgcctcgctgtggccgctggccaagctagtgttgctggtttactttgcgatcctgttcttcgcgctggtggtgctggggattgtcgcgcgcctgtgtggtctgagcatctggatcctgatccgcatcctgaaagatgagctgattctggcttattctaccgccagttcggagagcgtactgccgcgcattattgagaagatggaagcctacggcgcgccggcgtcgatcaccagctttgtggtgccgaccggttactccttcaacctcgatggttcaacgctgtatcagagcatcgcggcgatctttatcgcccagctgtacggtattgacctctctatctggcaggagattaccctggtgctgaccctgatggtgacctcgaaagggatcgccggcgtgccgggcgtctccttcgtggtgctgctggccaccctgggtagcgtcgggatcccgctggaagggcttgcctttattgccggcgtcgaccgtatcctcgatatggcgcgtaccgcgctgaacgtggtgggtaatgcgctggcggtgctggttatcgccaagtgggagcataagttcgatcgcaaaaaagcgctggcctatgaacgcgaagtgctgggcaagtttgataaaaccgcccaataa

SEQ ID NO: 212547 - DNA, 687 bp, Klebsiella pneumoniae
atgaaatacctctttttatttctactggttttcaccagcggcgcagcggtggccaccgaacctggcagtcagtatcaacagcaggccgaagccggcgatcgacgcgcgcaatattaccttgccgatacctgggtcagctccggcgattatcaaaaagccgaatactgggcgcagaaggcggccgcccagggcgatggcgatgcgctggcgctgctggcgcagctcaaaatccgtaacccccaacaggcggactatccgcaggcccgccagctggcggaaaaagccgtcgaggccggcagtaaatccggagagatcgtcctcgcgcgggtgctggtcaaccgtcaggctggcgccaccgacgtagcgcacgccatcacgctgctgcaggatgctgcccgggatagcgaaagcgatgcggcggtagatgcccagatgctgctggggctgatctacgccagcggcgtacacggcccggaggatgatgtgaaagcaagtgaatactttaaaggcagttcatcactttcccgcaccggctatgccgaatactgggccgggatgatgttccagcagggagagaaaggctttatcgaaccgaataagcagaaggcgctgcactggctcaacgtcagttgcctggaggggtttgataccggctgcgaagagtttgaccggattagtaaaggataa

SEQ ID NO: 212548 - DNA, 1680 bp, Klebsiella pneumoniae
atgagtaatgccatcacggagattgataacaccgatctggtgtttatcttcggttacaacccggcggattcccaccctatcgtggcgaatcacgtcattaacgctaaacgcaacggggcgaaaattatcgtctgcgacccgcgcaaaattgaaaccgcgcgcatcgccgatatgcacattgcgctgaagaacggctcgaacatcgcgctgctcaacgccattggccacgtgattattgaagaggatctgtacgataaatccttcgtcgccagccgttccgaaggcttcgaggagtatcgcaaaatcgttgaaggctatacgccggagtcggtggaggagatcactggggtcagcgcccaggagatccgcgcctgcgcccggatgtatgccagcgccaaatccgccgccatcctgtggggcatgggcgtcacccagttctaccagggcgtggagacggtgcggtcgctgaccagcctcgcgatcctcaccggcaacctcggcaagccgaacgtcggcgtcaacccggtacgcggccagaacaacgttcagggcgcctgcgatatgggtgcgctaccggatacctatccgggctatcagtacgtcaagttcccggagaaccgcgaaaaattcgccaaagcctggggcgtggaaagcctgcctgcgcataccggctatcgcatcagcgaattgccgcaccgcgcggcgcacggtgaagtgcgggcggcgtacattatgggtgaggatccgctgcagaccgacgccgaactctcggcggtccgcaaagcgttcgacgatctggaactggttatcgtccaggacattttcatgaccaaaaccgcctccgcggccgacgtcatcctgccgtccacctcgtggggcgagcacgaaggcgtgtataccgcagcggaccgcggcttccagcgcttctttaaagcggtggagccgaagtgggacctgaaaaccgactggcagatcatcagcgaaatcgccacccggatgggctatccgatgcattacaataacacccaggagatctgggacgagttgcggcatctgtgcccggacttctacggcgccacctacgagaaaatgggtgagctcggctatgtcatgtggccgtgccgcgatgagtccgacgccgatcagggaacgtcgtatctgtttaaagagaagttcgataccccgaacggactggcgcagttcttcacctgcgactgggtcgcgccgatcgataagcttaccgacgagtacccgatggtattgtcgacggtgcgcgaggtcggccattactcgtgccgttcaatgaccggtaactgcgcggcgctggcggcgctggcggatgaaccaggctatgcgcaaatcaacaccgccgacgccgaacggctaggcatcgaagatgaagagctggtatgggtcaattcgcgtaaggggcgcatcatcacccgcgcgcaggtcagcgatcggccgaataaaggcgcggtgtacatgacctaccagtggtggatcggcgcctgtaacgaactggtctcagagaacctgagtccgataaccaaaacgccggagtacaagtactgcgcggtcaacgttgagcggattgccgatcagcgcgccgcggaacagtacgtgatcgacgagtacaacaagctgaaatcccgcctgcgcgaaagcgcgatgggttaa

SEQ ID NO: 212549 - DNA, 420 bp, Klebsiella pneumoniae; identical to SEQ ID NO: 138253

SEQ ID NO: 212550 - DNA, 729 bp, Klebsiella pneumoniae
atgaaaccagtcattttagtggtggatgatgacagggcgatgggcgagctgctcagcgatgtgctcggcgcgcacgcgtttgaagtgcttgtcagccagaccggcaacgacgcgctgacgacggtggcgcagcgggcggatatcgcgctggtcttactggatatgatcctgccggatacccatggcctgcaggtgctccagcagctgcagcgcacgcggcctgagctgccggtggtgatgctctccggtctgggcagtgagtctgatgtggtggtgggtctggagatgggcgccgatgattacatcgccaaaccgttcagctcgcgggtggtggtcgcccgggtgaaagcggtactgcgacgcagcggggcgctggccggcgaggcgtcgggcgccggtgctggcctgacgtttaacggctggcggctggataccacgcgctgtgaactgtataacccgcagcagcaggcgatcccgctgacccagggagaatatggcctgctgctggcgctggcgcagaacgcgcgccgggtattgaatcgcgaacagctgctggcgctgacccataacgaaagcaccgaggtattcgaccggaccatcgatgtgctgatcatgcgcctgcggcgcaaaattgagctcaacccgcatcagccgacgttgattaaaaccctgcgcggtctgggctatgtcttttccgccgacgtgacccacagcgagaaggcggcgtag

SEQ ID NO: 212551 - DNA, 759 bp, Klebsiella pneumoniae
atggcaacaaaattaaactggctgctgcaaaacagcgctcccggagatgtgatccttcagtcctggttaagccagcatgccatctctccctctctgtcctttaaatacgcgcaaagtggctggttaaaaaaaagaggcaacggcgtatatgcgcgtgcgggacgtgagccggagtggaacgatgcattagcatgtttgcaaaatcagcttgccgctccggtgtatgttgcggggctcagtagcttagtctggcagggccgttcacactatctacagctaaaacaaaaccagtgctggcttagtgtggaaaataaagcgctgctgccgaaatggttcagggaattcccgggtgtggagtggatagtcatatcggggaaaaaactgccggtgctggatgatagataccgtgtaacgcttgatataaaagggaaaaaactcatcggcagtgcgccagaactggctgcttacgagttgctgagcgcggtgccggggaccctctcatttaaccacgctgcagagcttttccaggggctggttaatcttaatcctcgtaaagtagagtatcttctttccgtcagccagtccgtgcaggccaagcgtttgtatctcttcttcgccagtttttacgagcatggctggctcaaacgaatcgatagccaaaaaatcgatctgggagcgggcaagcggcaaatcgtggaaaatggaaagttcaatgctcaataccaaatcacagtgcctgaacgctttcaaaaggaataa

SEQ ID NO: 212552 - DNA, 918 bp, Klebsiella pneumoniae
atggatatacaggcgccttattatcggcaggttgctctgctaatgcaggttttaccctatgttgctgtcgaacgggaatttgcgctgaaaggtggcactgccatcaatctctttatccgcgatttccctcgattatcggtggatatcgacctcgcctgggtgcccctggaaagcagagccatcgctttacctcatatacgggatgcgcttgcacgtattgccgccaatctgcaacaacaggcaggtatgagcgctgtattacaagctaatcgttcagatgagatgcgtgtcattgttactaccgatagcgcgcaaataaagatagaggtttcaccggtcgcccggggaacattatatccaccacaggagcgagaagtggtgggggcggtagaggacgtttttggctatgccagccttccagtggtttcgttgcctgacctctacggtggaaaattatgcgcggcgctggatcgccagcatcccagagatttttatgacgtgaaattacttcttgatgcgcaggagcttgaccgtcccattttcaatgggtttatcgtgtatttactgagccataatcggcctctggctgaagtgctgaatcctcgctggaaagatattgctgaacctttttaccgtgaattcagcgggatgacatttgagacgatagccctggaggaactgacagcagtccccaacaggatgattgctgcgttaaaatcctgtttcacacaacaggatgtcgattttttactgtcatttaaacgaggcgaaccagactggcgtttagcgccggaaatgcgtattcaggatttgcctgccgtgcagtggaaattgcgcaatattcatcagatgccagcgataaaacgcgctgagtcattagataaactggaaaaggtgctggccgagtggcgcagttag

SEQ ID NO: 212553 - DNA, 1008 bp, Klebsiella pneumoniae
atggaacggaaaggcattattgccgcaggcaacatgctggtcgatcatgtccaccagatcgggcagtggccggagcgcggctggctggtggaaattgtccatagcgaacgcgccaccggcggcgcgccgctgaatgtcctgctgaccctggccaaaatgcacgccgggctgccgctgcaggcggtcggcctgattggcgaggataacgatggcgactacatcaccgccatgctcgatcagtaccatatcaatcgccagctcgtacagcgcaccagctccgcccccacctcgatgacccaggtgatgaccgacgccgaaggccagcgcactttctttcactctcccggcgccaaccgcctgcttgatctcccggcttttgagccgctggatgcgccgctgaaaattttccatctcggctatctgctgctgctcgaaagcctcgatcgccccgatgaagtgtacggcacccgcagcgcgcgactgctggcgcagatgcgcgagcgaggctatgaggtgtccctcgatctggtgtcgcgcaaaggcgacccgcgctaccggccgctggtcctgccggcgctgaagcatcttgactacctgaccatcaatgaactggaagccagcgagtttagcgggctggagattcgtctacccaacggcgagccgcacgtcgccaatatcgcccgcgccgccagcgcattgcttgacgccggcgtacgccagcgggtagtgatccattgtccggagggggcatggggcgtctcccgtaccgaagccgggcgctgggtaccgtcatgtcggctaccgccggaggagattatcggcagcgtcggcgcgggggacgccttctgtgccggcctgctgtacggcagccacgaacgctggccgttaaccgccagtctgcagctggctcacgcctgcgcccgcgccagcctgcaggccgccaatgcgatcgacggcgccaaaacgctccctgagctgcaggcgtttatacaattgcaggatggttag

SEQ ID NO: 212554 - DNA, 942 bp, Klebsiella pneumoniae
atgcgtttaaaaccgatagtcaccgcgctgtgtgctggcgcgctgctggccgcctccccttttgcgtcggccaaagagctgaaagcgattggcgtgacggtgggcgaccttgccaacccgttctttgtgcagatcaccaaaggggcggagctggaggcccgcaaactggcgggggataacgtcaaagtgacgctggtctccagcggctacgatctgggccagcaggtggcgcagatcgataactttatcgccgccaaagtcgatatgatcatcctcaacgccgccgattcgaaaggcattggcccggcggtgaagcgggccaaagaggccgggatcgtggtggtggcggttgacgtcgccgccgaaggggccgacgccaccatcacctccgataacacccaggcgggcgagctggcctgtaaatacattagcgaccgcctgaacaacaaaggcaacgtggtgatcatcaacgggccgccggtctccgccgtacaaaaccgcgtcgaaggctgcgaaacggagttcaaaaaacacccggacattaaaatcctctccgccaaccagaacgccaaaggcagccgggaaggcggcctggaggtgatgacctccctgctggcggccaatccgaagattgacggcgtgttcgcgatcaacgatccgacggcgattggtgccgatctggcagcgaaacaggcgcagcgcagcgagttcttcatcgtcggcgtcgacggcagcccggacggcgaagaggcgctgaagcgtaagaactcgctgttcgtcgccaccccagcgcaggacccacaggtgatggcagcgaaggcggtggagattggctacgacatcctgcagggcaaacctgcgccgaccgcgccggtactgatcccggtgacgatgatcgacaaaaataacgtcagctcttacaaaggctggaccgtgaaataa

SEQ ID NO: 212555 - DNA, 999 bp, Klebsiella pneumoniae
atgagcataccgaaagagacctccgcgccggtcgcgaaatccgcttcggcgaaaaaaatgttgatgggcgacctgatgcagaccgtcggcattctgccgatcctcatcctgatcgtcgccgttttcggctttatcgcccccaactttttcacggaaagcaatctgctgaatatcacccgccaggcctcgatcaacattgtgctggcggcgggaatgaccttcatcatcctcaccggcggcattgacctttccgtcggctccatccttggcaccaccgcagtggccgcgatggtggtgtcgctgatcccggcgtttgcgttgctgtcgattccggcggcgctgatgctcggcctgctgctcggcctgttcaacggcgcgctggtcgccttcgccgggctgccgccgtttatcgtcaccctcggcacctacacggcgctgcgcggcgccgcctatctgctggccgacggcaccacggtgatcaactccgatatcagcttcgagtggatcggcaatgactacctcggcccggtgccgtggctggtagtcatcgccctggcggtgatcgcggtgtgctggtttatcctgcgccgcaccacccttggggtgcatatctacgcggtgggcggcaacatgcaggcggcgcggctgaccggcatcaaagtctggctggtgctgctgtttgtctatggcatgagcggcctgctctccggccttggcggggtgatgagcgcttcgcggctgtacagcgccaacggcaacctcggcgtcggctacgagctggacgccatcgccgcggtcattctcggcggcaccagcttcgtcggcggtatcggcaccatcaccggtacgctggtgggggcgctaattatcgccaccctcaataacggcatgaccctgatgggggtctcctacttctggcaactggtgatcaaaggggcggtgatcatcattgcggtgctgatcgacaaataccgtacccgacatcatcaaagtgcataa

SEQ ID NO: 212556 - DNA, 1521 bp, Klebsiella pneumoniae
atgaccgccaccccggtactggaaatgcgccatatcgccaaagcttttggcaaattctacgcgctgaagggcgtcgacctgacggtctggcccggcgagatccatgccctgatgggggagaacggcgccggaaaaagcacgctgatgaagatcctcgccggcgcctataccgccaccagcggcgagatcctgatcgacggaaaaccgcaaacgatccgcggccccaaggacgcgctggccgccgggatcacgttgatctaccaggagatgcagctggcgccgaacctgaccgtcgcggaaaacattttcctcggcagcgagctggcgcgcggtggtctggtgcagcgcaaagccatgctcagccaggcgcaggcggtgatcgaccgtctcggcgcccagttcaaagccagcgaccgggtgatgaccctgaccatcgccgaacaacagcaggtggagatcgcccgcgccctgcaccgtcaaagccgcattctggtgatggatgaacccaccgccgccctctcctcgcgggaaacccagcgcctgttcgagctcatcctgcgcctgcgcgatgaggggatggcgatcatctatatcagccaccgcatggcggaagtgtatgagctctccgaccgggtcagcgtcctgcgcgatgggcagtatgtcggcagcctggtgcgcgacaagctcaacgcgccggagctggtgcgcatgatggtcggtcggccgctcagcgatctcttcaataaagaacgggacattccccgcggccagccgcgcctgcgggtcgaggatctgaccgatggcggcaagattaagcccagcagcctggtggtgcatgccggcgaaatcgtcggcctcgccgggctggtcggcgccgggcgttccgaactggcgcagctgatcttcggggtgcgcaaagccaccgccggggtgattgagatcgacggcgagccggtggtgatccactcgccgcgggaagccatcgacctcgggatcggctttctgaccgaaaaccgcaaagaacaggggttgtttctcgaactggcagcccaggaaaacatcaccatggcgacgctggagcgcgacgcgacctgggggatgctcaaccgccggaaggcgcaaaccatctccgatgacgccatccagttgcttaacatccgcgtgccgcacgcccaggtgcgcgccggcggactgtccggcggcaaccagcagaagctgttaatttcgcgctgggtggcgattggcccgcgcattctaatcctcgatgaacccacccgcggcgtcgacgtcggcgcgaaaagcgaaatttaccgcatcatgaacgacatggcgcgccagggcgtcgccattctgatgatctccagcgagctgcccgaagtggtgggcatgagcgaccgggtctatgtgatgcgcgagggcgttatcgccggcgagctacaggccggtgatattagccaggaaagtatcatgacgctggccaccggcgtgaccgattctcaccttaaggcagggcaactatga

SEQ ID NO: 212557 - DNA, 2286 bp, Klebsiella pneumoniae
atgaccgctcgccgacacccgtttttcaccagcgcccgtggccgcctgctctcctttaatctgctgatgggcgtggtcaccctgttggtcagcggcgtggcggtgttcggctttcaccacgccagccagctgcaggagcaggtgcagcgccagactctcaacgacatgcgcggcagtatggatctggcgcgggacacggcgaatgtcgccacggcggcggtgcgcctgtcgcaggtggtgggggctctggagtacaaaagcgaagcggaacggctgctggcgacgcagcaggcgctgaagcactcgctggcccagctggcggcggccccgctggcgcagcaggagcaggcgcgggtggccaatattattcgccgcagcaacgcgctgcagcagagcgtggcggagatgctggagcgcggccagcgccgccatctgcagcgcaatgcgctgctgagttcgctttaccagaatcagagtaacctgcgccatctcgccgatcttaacgatcgcggcggggataaggcgatcgatccgcgccggctggccgagatggaccggctgatcgtggctgcgatccataccgtcacgccgcggtcgatcgtcctgcaactcgaccagctgcgcggcgccctgccgacacgcagcgccgatcccgcgctggcgtttgtcctccctgatgtgacccgcgaactggcgacgctggccccgctgtcggcccagctggaggagagcgacctgacgatcagctggtacatgtatcacatcaaagcgctggtcgcgttgcttaacgaagatatcaatcagtacgtgacccgggtggcggaagcctcagagcagcgggcggcgcagagccatcgggagctgcgctccatcagtatgtttattctgctttccgcgctgctggcgctggcgatcaccggctgcgccgggtggtacatctaccgtaatctcggctcgaacctgaccgccatctcgcgggcgatgtcgcggctggctcagggagagccgaacgtctcggtgccggccctgcagcggcgcgacgagctgggggagctggcgcgggcctttaacgttttcgcccgcaatatggcgtcgctggagcacaccacccggctgctgaaagagaagaccaaccagatggagatcgatcggattaagcgccaggagctggaggaggcgctgctgcatagtcagaagatgaaggccgtcggccagctgaccggaggtctggcgcatgactttaacaacctgctggcggtgattatcggcagccttgagctggtggagccggatgcgcgcgatgcgccgcgcctctccagggcgctgaaggcggcggagcgtggggcgcttctgacccagcggctgctggccttttcgcgcaagcaggcgctgcatccccaggcggtggcgatggcgccgctactggagaacctcagcgagctgatgcgtcattccctgccggcgaccttaagcctggagattgaggcgcagtcgccggcgtggccggcatggatagacgttggccagctggaaaatgccctgatcaatctggtgatgaacgcccgcgacgccatggcggggcgcgacggggtcatcaaaatacgcacctggaatcagcgggtcacccgcagcagcggccagcggcaggatatggtggccctggaggtgatcgatcatggcagcgggatgtcgcaggcggtgaaagcccgggtgtttgaaccgttcttcaccaccaaagccaccggcagcggcagcggcctggggctgtcgatggtgtatggctttgtgcgccagtctggcggccgggtggcgctggagagcgcgccggggcaggggacgacggtgcggctgcagctgccgcgagcgttgaccgaggttgagaaggaggtggcgccagcggtggacgagccgcccccggcgggcgagcggctggcgctggtgctggaagatgaagaggatgtccgccagacgctatgtgaacagctgcatcagctgggctggctgacgctggaaaccgccagcggtgaagaggcgctgcagctgctggaggcctcgccggatattgccctgctgattagcgatctgatgctgcccggcgccctgagcggcgccgatgtgatccataccgcccgacgccgctttccggcgctgccggtgctactgatcagcggccaggatttgcgtccggcgcagaacccggccctgccggaggttgagtggctgcgtaagccgtttacccgcgcccagctggcgcaggcgctgagcgcggcgtacgcgaggatttga

SEQ ID NO: 212558 - DNA, 369 bp, Klebsiella pneumoniae; identical to SEQ ID NO: 138583

SEQ ID NO: 212559 - DNA, 759 bp, Klebsiella pneumoniae
atgagcctgaccctccgcttaaccggcaccggcggcgctcagctggtgccggtcttcggctgcgactgcgcggcctgccgccgcgcccgccgcgaggagagccaccgacgccgcccctgtagcggagtggtcacgttcaacagcgccgtgacgctgcttgatgccggacgaccggatctgatggagcatcatcccgccggcagctttcaacaggtgctgctgacccactaccatctggatcatgtgcaggggctatttccgctgcgctggggagtcggcgcgtcgattccggtctatggcccgccggatgacgccggctgcgacgatctgctcaaacaccccggtctgcttgactttagccataccgtcacgccgtttgtgatgtttaacctgcaggggctgcgggtgacgcccctaccccttaatcactcgaagctgacctttggttatctgctggagtcggcccacagccggctggcctggctctcggataccgccgggctgccggacaagacgctgaagtttttgctcaataaccgcccgcaggcgatgatcatcgactgcagtcatgagccgcgcgcgcagaccccgcgtaaccataacgatctaaacaccgtccgcagccttaaccaggtcattggctgtccgcgggtgatcctcacccatatcagccaccagtttgacgtctggatgatggataacccgctgccgacaggtttcgaagcgggctatgacgggatggaaatagcgctggattaa

SEQ ID NO: 212560 - DNA, 564 bp, Klebsiella pneumoniae
atgccaggaaaactgatttggctggtgggcccctccggctccggtaaagatagcctgctggcggcgctgcgccagcgcgagcacccgcagctgctggtggcccatcgttacataacccgcccgtttaacgcgggcagcgagaatcatatcgccctcagcgaacatgagttttttacccgcgccgagcagcatctttttgctctcagctggcacgccaacaatacttactatggcattggcgtggagatcgacctctggctgcacgccggctttgacgtggtggccaacggctcccgcgcccacctggcgctggcccgggaacgttacggagaggttctggtgccgatctgtctcgccgtctcgccgccggtgctgcgccagcggctggagcagcgcggccgggaaaacgcgctggaaatcgcccagcgtctggaacgcgccgcgcgctataagccggacaactgcctgacattgaataacgacggcagtctccgacaatcggtcgatgaatttttccgcctgctgcgcagccacgcggcgcgcgaagcggatcaactggtataa

SEQ ID NO: 212561 - DNA, 1137 bp, Klebsiella pneumoniae
atgattatcaataacgtaaaactggttctcgacgacgaggtggtccacggttcgctggaagtccatgacggtcgcatcctcgccttcgccgaaagccagagccggctgccgcaggcgctggatggggaaggcggctggctgctgccgggccttatcgagctgcataccgataacctcgacaagttctttaccccgcggccgaaggtagactggccggcccactcggcgatgagcagccatgacgccatgatggtcgccagcggcatcaccaccgtgctggacgccgtggcgattggcgacgtgcgcgatggcggcgatcgtcttgagaatctggagaagatggtcaatgccgtggaggagacgcaaaagcgcggtctcaaccgcgccgaacaccgcctgcacctgcgctgcgagctgccgcatcacaccacgctgccgctgtttgaaaaactgatcgatcgcgagtcggtgagcatggtctctctgatggaccactcgccgggccagcgtcagtacgccgatcgcagcaagtaccgcgattattatcagggcaaatatcatctgacgcatgacgaaatggaccgttttgaagccgagcagatggctctggccgccacctggtcgcagcccaatcgccagaccatcgccgccatgtgccgcgcccgccgtatcgccctcgccagccacgacgacgccaccgaggcgcatgtggccgaatctcaccagctagggagcgtgatcgccgagtttcccaccacgctggccgcggcgcaggcttcacgtcagcacgggatgcacgtcctgatgggggcgccgaatatcgtgcgcggcggttcccactccggcaacgtcgccgcccaccagctggcgagccacggtttgctggacatcctctcatctgactattaccccgccagcctgctggatgccgctttccgcatcgccgacgccgaggacaatgccttcaccctgccacaggcgatccgtctggtcagtcagcatccggcgcaggcgctgggccttgacgatcgcggcgtcatcgccgagggaaaacgcgccgacctggtgctggcgcaccgtcgcggcgaacatatccagatcgaccatgtctggcgccagggaaagagggtcttttaa

SEQ ID NO: 212562 - DNA, 681 bp, Klebsiella pneumoniae
atgatccgcgttgaaaacgtccataaaacctttgttctgcaccagcagcacggcgtgcgtctgccggtgctggccgacgcctcgctgaccgttaacgccggggagtgcgtggtgctccacggtcactccggcagcggcaaatcgaccctgctgcgttcgctgtacgccaattatctgccggacagcggccatatccatatccgccacggcgacgaatgggtggacctggtcaccgccaccccacgcaaggtgctggaagtgcgcaaaaccaccatcggctgggtcagccagtttctacgggtgatcccgcgcatttcagcgctggaggtggtgatgcagccgctgctcgatcttgggacgccgcgcgaagcgagcgccgcgaaagccgcccagctcctgacccgcctcaacgttccggaacgcctgtggcaccttgcgccgtccaccttttccggcggcgagcagcagcgggtcaacatcgcccgcggttttgcggtcgactatccgatcctgctccttgatgaacccaccgcctcactggatggcaaaaacagtgctgccgtggtcaacctgatccacgatgccaaagcgcgcggcgcggccatcgtggggattttccatgacgaaggggtacgccgtcaggtcgccgaccgactgcactctatgggaatgacagcatga

SEQ ID NO: 212563 - DNA, 759 bp, Klebsiella pneumoniae
atgaaccagccattacttgctgtgaataacctgactcatctctacgccccggataaaggttttcgcgatgtctccctcgagctgtggccgggagaagtgctcggcatcgtcggcgagtccggctccggtaaaaccaccctgctgaaggcaatctccgcccgcctgacgccgcagcagggcgaggtgctgtaccagcagcgctcgctgtacgccatgagcgaagccgaacgccgccgcctgttgcgcaccgaatggggcgtagtgcatcagcacccgatggacggtctgcgtcgccaagtctccgccgggggcaacatcggcgaacggctcatggccaccggcgcccgccactacggcaacattcgcgccaccgccgaaaagtggctgcaggaggtggagattcccccctcgcgcatcgacgacctgcccaccaccttctccggcggcatgcagcagcgtctgcagatcgcccgcaatctggtcacccagccgaagctggtgtttatggatgaacccaccggcgggctggatgtgtccgtgcaggcgcggctgctagacctgctgcgcggcctggcggtggagctgaatctggcggtggtgattgttacccacgatctcggcgtcgctcgcctgctggcgaaccgtctgctggtgatgaagcagggccaggtggtggagagtggcttaaccgaccgggtgctcgacgatccgcaccatccttacacccagctgctggtgtcgtcggtgttgcagaattaa

SEQ ID NO: 212564 - DNA, 849 bp, Klebsiella pneumoniae
gtggctaacccactgactggctataactttgcttacctcgacgagcaaaccaagcgcatgatccgccgggctattctcaaagcggtagcgattcccggctaccaggtgccgttcggcgggcgcgaaatgccaatgccctacggctggggcaccggcggcatccagctgaccgccagcgtcatcggtgagaacgacgtgctgaaggtgattgaccagggcgcggatgacaccaccaacgcggtgtcgattcgtcagttctttaagcgcgtcaccggcgtcgccaccaccgagcgtaccgaagacgccaccctgatccagacccgccaccggatcccggagacgccgctggtggaggatcagatcctgatctaccaggtgccgatcccggagccactgcgctttatcgagccgcgtgaaaccgaaacccgcaccatgcacgccctggaagagtacggcgtcatgcaggtgaaactgtatgaagatatcgcccgcttcggccatatcgccaccacctacgcctatccggtgaaggtcaatggccgctacgtgatggacccttcgccgatcccgaaattcgataacccgaaaatgcacatgatgccggcgctgcagctgttcggcgccgggcgcgaaaagcggatctacgccgtgccgccctataccccggtggagagtctcgatttcgacgaccatccctttaccgtgcaggagtgggatgagccctgcgccatctgcggctcgcgccacagctacctcgacgaagtggtactggatgacagcggccagcggatgtttgtctgctccgataccgactattgccgccagcagagcgaggggcagaaaaaatga

SEQ ID NO: 212565 - DNA, 1065 bp, Klebsiella pneumoniae
atgtacgttgccgtcaagggcggcgagaaggcgatccgcgccgctcacgccttacaggaacagaaacgacggggcgatggacggcttcccgaactgagcgtcgaacaaataggcgaccagctcagcctggcggtggaccgggtgatgaccgagggcgggatcgccgaccgcgaactggcggcgctggcgctgaagcaggccagcggcgataacgtcgaagcgatcttcctgctgcgcgcctaccgcaccaccctgccgcggctggcggtcagcgaaccgattaacactgcggagatgcgcctcgaacgccgcatctccgcagtgtacaaagatattcccggcggccagctgctgggccccacttacgactacacccaccgcctgctcgattttaccctgctggccaatggcgaagcgccgtctgtgcagcaagccgatggcgaagcagagccgacgccgcacgtctttagcctgctcacgcagcaggggctggcgaagaccgaggaagatcgcggcacgccgcccgacgatatcacccgcaccccgccggtctacccctgctcgcgttcctcgcgcctgcagcagctgatgcgcggcgatgaaggctacctgctggcgctggcctattcgacccagcgcggctatggccgcaaccatccgtttgccggcgagatccgcagcggctacgtgcaggtggaaatcgtcccggaagagctgggctttagcgtcaatattggcgagctgctgctgaccgagtgcgagatggttaatggcttcgtcgccccgcaggaggagccgccgcacttcacccgcggctacggcctgaccttcggcatgagcgagcgcaaagcgatggccatggcgctggtcgaccgtgcgctgcaggcgccggactatgacgaagagattgccggcccggcgcaggatgaagagtttgtgctggcccacgccgataacgtcgaagcggccggcttcgtctcgcatctgaagctaccgcactatgtcgatttccaggccgaactggcgctgctgaaacacctgcaacgggagaacgaacgtggctaa

SEQ ID NO: 212566 - DNA, 585 bp, Klebsiella pneumoniae
atgaccttacaacccgcttttaccctggctgtgcaggatgcccaacacagttttcgtcgcctgctgaaagcgatgagcgagccgggggtgattgtctccctgcagcagcttcagcacggctggcagccattgaacgtggcctccaccagcctgctgttgacccttgccgatcatgaaacaccggtctggctcgccagcgccctgcgtaacgatctggtgggacagaatctgcgctttcataccggcgcgccgctggtggaccagccgcagcaggcggtctttgccgtcgccaatgacggcatcagcgccgagcagctcaacgtcctttccgctggcaccgtcaccgcgccggaaaccggcgtcacactgatcgttcagcttgccagcctcagcggcggacgcatgctgcgcctgaccggggcaggcattgccgaagagcgaatgatcgcgccgcagctgccggactgcatcatcgacgaattaaccgaacgcccgcacccgttcccgctgggcatcgacctgatcctcacctgcggcgagcgcctgctggcgatcccgcgcaccacccacgtggaggtgtgctaa

SEQ ID NO: 212567 - DNA, 453 bp, Klebsiella pneumoniae
atgcacttcgataccgccacccgccagcgctggatgtccgtgctggcccacagtgaaccgcaggaccttctggcgcgcatgcagtccctgcagctggcgccggaatatgaattgattcgcaccccggaaaccgggctggtacagctccaggcccgcatgggcggtatcggcgaccgcttctttgccggcgacgccacccttacccgcgcagcggtacgcctggctgacggtaccctcggttacagctggatcttaggccgcgaccgcccgcacgctgaacgctgcgcggcgatcgacgccctgctgcagtcgccccgccattttcacaccttaatggaaaccctgataaccccgctggaagcgctacgcagcgcgcgcattgaagcccgacgcgccgaagtcaacgccagccgggtcgacttctttaccctggttcgcggagataacgtatga

SEQ ID NO: 212568 - DNA, 726 bp, Klebsiella pneumoniae
atgcacctgtccagacatccgaccagttaccccacgcgctatcaggaaatcgccgcccgacttgagcaggagctgcgccatcactatcgctgcggcgactatctgcccgccgagcagcagctggcgacacgcttcgacgttaaccgccacaccctgcgccgggctatcgaccagctggttgagcgcggctgggttcagcgccgtcagggcgtgggtgtgctggtgctgatgcgccccatcgactacccgcttaacgcccaggcgcgcttcagccaaaacctgctggaacaaggcagcgatcccaccagcgaaaagctgctgtcggtgctgcgccccgccagcgcccatgtcgccgaggcctttggcatcaatgagggcgagaacgtgatccacctgcgtaccctgcgccgggtcaatggcgtcgccctgtgcctgatcgaccactacttcgccgacctgcgcttctggccggtgctacagaccttcagccacggctcgctgcacgatctgctacgcgatcggctcgacgtcgaactgacccgcgtacgcaccaaaatcagcgcccgccgcgcgcaggcaaaagagagcaagctgctggaaatccccaatatggcgccgctgctctgcgtccgcacgctcaatagccgcgagggcgagtcggtcacagcggagtactccgtcagcctgacccgcgccgacatgattgaatttaccatggagcactga

SEQ ID NO: 212569 - DNA, 435 bp, Klebsiella pneumoniae
atgtccttaagtccctaccttgcctttgcgggcaactgcgccgaggcgatcgccttctaccagcagacgctgggcgcagagctgatgtttaaaatgacctttggcgaaatgccgcccccggcgcaggaagcgtcagacggctgcccgtctggccagaagatggcggatgatgctatcgcccacgccagcctgcgcatcaataatggcgagctgatgctgagcgacagcgccttcgggcccgatgtgcattacgccggcttcaccctcgtcctcgatcccagcgatgtcgctgaaggccagcgctggttcgacgcgctggctgtcggcgggcgcattgagatggcctggcaggaaaccttctgggcccacggcttcggcaaagtcgtcgaccgctttggcgtcccctggatgatcaacgtggtcaaacaaggctga

SEQ ID NO: 212570 - DNA, 336 bp, Klebsiella pneumoniae
atgcaactgccacactgcccaaaatgcgattcgacttacacttatgaagatagcggcatgtacatctgcccggaatgtgcccatgagtggaaccctgccgaggtgacgaaagagagcgacattctgatcgttaaagatgccaatggcaatttactggccgatggcgacagcgttaccgtcgtgaaagatctgaaggttaaaggcagctcttcgatgctgaaaatcggcaccaaagtgaaaaatatccgtcttgtcgaaggcgatcacaatattgactgcaaaattgacggttttggtccgatgaagctcaaatcggaatttgtgaaaaagaactga

SEQ ID NO: 212571 - DNA, 1503 bp, Klebsiella pneumoniae
atgcttaaaaggaaaaaaataaagcccatcacccttaaggatgtgaccatcatcgatgatggtaaactgaaaaaggcgatcaccgcggcctccctgggcaacgcgatggagtggttcgattttggcgtctacggctttgtggcctacgccttaggtaaagtcttcttccccgatgccaacccaagcgtgcagatgattgccgcgctgggtaccttctccgtaccatttttaattcgtccgttaggcggcctgttcttcgggatgctgggcgataaatatggtcggcaaaaaattctcgcgataactatcgtgatcatgtcgataagtactttctgtatcggccttattccgtcgtatgccacgataggtatctgggcaccgatcctgctgctgctgtgtaaaatggcgcaaggcttctcggtcggcggtgaatataccggggcgtcgatcttcgtcgcggaatactctcctgaccgcaagcgcggctttatgggcagctggctggactttggctccatcgccgggtttgtgatgggggccggcgtggtggttctcatctccagcgtggtgggtgaacagaactttctcgactggggttggcgtatcccgttcttcctggcgctaccgttaggtatcattggtctctacctgcgccatgcgctggaagagacgccggcgttccagcagcatgttgacaccatggagcagggcgatcgtgaaggattgcaggacgggccgaaggtctcttttaaagagattgccaccaagcactggcgtagcctgctgacctgtatcggtctggtgatttccaccaacgtgacttactacatgctgctgacctacatgccgagctatctgtcgcataacctgcactactcggaagatcatggggtgctgatcatcatcgctatcatggtcgggatgctgtttgtacagccggttatcggtatgctcagcgaccgtttcggccgtcgcccgtttatcctgattggtagcgtggcgctgtttgccctgtcgatcccggccttcattatgatcaacagcaacgtgactagcctgatcttcgccggcctgctgctgctggcggtggtgctgaactgctttatcggggtgatggcctcctcgctgccagcgatgttcccgacgcacatccgcttcagcgccctggccagcgcctttaacatctcggtgctgattgccggtctgacgccaaccctggcggcgtggctggtggagaccacccaaaacctgatgatgccggcgtactacctgatggttatcgcggtggtgggtatggcgacgggcctgtcgatgaaagagacggctaaccgtccgctgaaaggggcgaccccggcggcgtcggatatccaggaagcgaaagaaatccttggcgagcactacgataacatcgagcaaaaaatcgaagatatcgatcaggagatcgccgatctgcaggcaaaacggtcgcgcctggtgcagcagcatccgcgtatcaacgactaa

SEQ ID NO: 212572 - DNA, 939 bp, Klebsiella pneumoniae
atggaacaccgcttcacctctctgccccccgatccctttatgtgcagcagcgacgaaaagcagagccgcagcccgctggcgctctactccgagtatcagcgtatggatatcgaactgcgcccgccgcacgccatgcccaccagccactggcacggccaggtggaggtcaacgtgccgttcgatggcgacgtggagtatttgattaataacgaagtggtgcgcattgagaaaggctatatcactctgttctgggcctgtacgccgcatcagctgacccgccccggcgattgccagcagatggcgatattcaacctgccgatgcatctgtttctctcatggccgctggaccgggagcttatcaaccacgtcacccatgggatggtgattaaatccctcgccgcgcagcagttgagcgccttcgaagtacgccgctggcagcaggaactgagccacgagaatgaacagatacgccagctggcgatcgatgaaatcgccctgatgctgaagcggctgagcctcgccggctggcagccgattctggtcaataaaacctcacgcacccacaagaacagcgtctcgcgccacgcgcagttttatgtcagccagatgctggagtttatcgctgcccactacgaccaggcgctgaccgtcaatgccgttgccgagcacgtgaagctcaacccgaactacgcgatgggggtctttcagcgggtgatgcagcagaccatgaagcagtacataaccgccatgcgtatcaatcatgtgcgggcgctgctgagcgataccgacaagaccatcctggatattgcccttaccgccggttttcgctccagcagccgcttctacagcacctttacccgctacgtgggcatgccgccgcagcagtaccgtaaactcagccagcagcggcgtcacggcctggccttgccggaggcataa

SEQ ID NO: 212573 - DNA, 1353 bp, Klebsiella pneumoniae
atgtctgccccaaaaattacttttatcggcgccggttcgacggtgttcgtcaaaaatattctcggtgatgttttccagcgcccggcgctgaaatcggcgcatatcgcgctgatggatatcgatgaaacccggctggaagagtcgcatatcgtggtgcgcaagctgatggattccgtgggcgcgaacggcgaaatcagttgccaccgcgaccggaaaaccgccctgcagggcgccgattttgtcgtcgttgccttccagattggcggctatgagccctgtaccgtcaccgattttgcagtctgcaagcgccacggcctggagcagaccattgccgatacgctggggccgggaggcattatgcgcgcgctgcgcaccatcccgcacctgtgggctatctgcgacgatatgagcgaggtctgcccggacgccaccatgcttaactacgtcaacccgatggcgatgaacacctgggcgatgtacgcccgctacccgcatatcaagcaggtgggtctgtgccactcggtgcaaggcacagcggaagaactggcgcgcgacctcgatctcgatccggcggatttacgctaccgctgcgcggggattaaccatatggcgttctatctgtcgctggagaaaaagctcgcggacggcagctacgtcagtatctaccccgacctgctacaggcctacgccgacgggcgggcgccgaagccgaacctgcacggcaacccgcgctgcgaaaacatcgtccgctatgaaatgctcaaaaagctgggctactttgtcaccgagtcctcggagcatttcgccgaatacacgccatggtttatcaagccgggccgcgatgaccttctcgctcgctataaagtgccgctggatgaataccctaaacgctgcgtcgagcaactggccaactggcatcaggagctggagagctataagcgcggggagcgcattggggtgaaaccctcccgcgaatatgccagcaccatcatgaacgccatctggaccggcgagccaagcgtggtgtacggcaacgtgcgcaacgataatctcatcgacaacctgcctcagggctgctgtgtggaagtggcctgcctggtggacgccaacggcatccagccgaccaaagtgggcgcgctgccggcgcatctggcggcgctgatgcagaccaatatcaacgtgcagacgctgctcacgcaggcgatcctcaccgaaaatcgcgattacgtctattacgccacgatgatggatccgcacaccgccgcggtgctggggatcgaagagatctacgcgctggtggacgatctgatcgccagccacggcgactggctgccggcctggctgcaccgttaa

SEQ ID NO: 212574 - DNA, 1404 bp, Klebsiella pneumoniae
atgacaacaaagctcagctacggatttggtgcctttggtaaagatttcgctatcggtatcgtctacatgtacctgatgtattactacaccgatattgttggcttatcggtcggggtggttggcaccttgttcctggtggcaaggatcctcgatgcgatagccgatccgatcatgggatggatcgttaactgtacgcgatcgcgatgggggaagttcaaaccgtggatcctgatcggcacgataaccaactcggtggtgctgtatatgctgttcagcgcccaccacttcagcggcggggcgctgctggcgtgggtgtggctaacctacctgctgtggggcttcacctacaccatcatggatgtgccgttctggtcgttggtgccgaccattaccctcgataaacgcgaacgcgagcagctggtgccttacccgcgctttttcgccagtctggcgggatttgtcacggccggcgtcacgctgccgttcgtcaacgccgtcggcggcgccgatcgcggtttcggttttcagatgttcactctggtgctgatcgccttcttcgtcgtttccaccctcgtcaccctgcgcaacgtgcatgaggtttactcctccgacagtggtgtgagcgaagactccagccacctctcactgcgccagatggtggcgctgatctataaaaacgatcagctggcctgcctgttaggcatggcgctggcctataacacggcggcgaacattatcgctggctttgcgatttactactttacctacgtgattggcagcgcggagatgttcccgtattacatgtcctacgccggggcggcgaatttgctgacgctgatcctgttcccacgactggtaaaagggctgtcgcggcgcattctgtgggcgggtgcttcgatcatgcccgtgctgggctgcggcgtgctgttgctgatggcgctgggcggcgtttacaacatcgcgctgatttcgctggccggggtgctgttgaatatcggcactgcgctgttctgggtgctgcaggttattatggtggccgataccgtcgactatggcgaatatacgatgaatatccgctgcgaaagcatcgcctattccgttcaaacgctggtagtcaaagccggttcggcgtttgcggcctggtttatcgccatcgtgctgggtatcatcggttacgtgccgaatgttgtgcagtcgccccacacgctgctggggatgcaggcgattatgattgcgcttccgacgctcttttttgccctgacgctgtttctctatttccgttattacaaactgaatggcgatatgctgcgacggattcagattcacctgctggataaatatcgccgggtaccggaaaatgacgtcgagccggaacggccgattgtggtacccaatcaggtgtaa

SEQ ID NO: 212575 - DNA, 957 bp, Klebsiella pneumoniae
atgcgcatttttatcgatgatggttcaaccaatatcaaaatgctgtgggagcaagatggcgaaactttcacccatatcagccccaacagttttaaacgcggctggtctgccaccttcggttcggggaagccttttaactacacggtggatgatgaaaagtactcattcgacctgatcacccccgatgcgctcccaaccaataacattgactggcaatacagcccgttgaactccatcgctgtccatcatgcgctgctgaccagcggtcttgagccgcaggatgttgaaattgtggtcaccctgccgctgaccgaattttatgatgaagatgcgcaatatcgcctcgacaatattgagcgcaagaaaaagagcctgctgcgcgacgttaaactgaataaaggcgtggtgttcaatatcactaaagttaccgtgcgcccggaatcgattccggcgggcattagcctgtgtgatgagctgaaaccgtcgcattcggtgctgattatcgaccttggcggcaccacgctggatatttcaatggtcgccgggcagatgacctcggtttcgcgcatttacggcgacccgaagctgggcgtatcgctggtgaccgacgccgttaagctggcgctggcccgggcgaataccgacacctccagctataacgtcgaccagataatcatcaaccgccacgacgaagaatacctgaccgacaacatcaacgatccggatgcggtttctgaggtgaagaaggtgatcaataacagtatcgaacgtctgaccacgcgtgtcctgacggccatcgatagctttaaaggctattcgcacgcgatcgtcattggcggcggcgcgccgctggttgccgacgccattcgtgaacggatgggtctgcgcgaggatcgtttcgtggtggctgaagagccgcagtttgccctggtgcgtggtctgaaaattattggttaa

SEQ ID NO: 212576 - DNA, 372 bp, Klebsiella pneumoniae
atgactctggatcgcagaaaagtgctgatttacctgcgcccggatatcagcgccagcgagcgcttcgcggacgcaaaaattgaggcccatcaccgtggcgaccgcggcgatatgtcgcgtaccgcgctgctggcggggctggcgttaggggaagtcgatagccgcttgccgtcgatgctggcggcgctgctggcggaagatactaaaccggaaacgctgcgtaagatgctggcctcgttccttgagatccagccggcctctcccgccccggcagccgcgccaacagccgccccggctaaggcgccggagccgcccgcgccggtgagcgagagcgtctccgcgcgtaatctcgccggttcgttaccggattaa

SEQ ID NO: 212577 - DNA, 810 bp, Klebsiella pneumoniae
atgtcgttactggctaaatcgcgaaaagagggacagatccagcatattacgccgcaaagcgccggttggcgctatatcggctttgatgtctggatgttgaaaaaagggcagaccgtgacgctggagagcggcgatcgcgagctgtgcctggtgctggtcgccgggctggcgtcggtgaaaacgcaacatgccgatttcccgaatctcggtaaacggatgtcgccgtttgaacgcaccccgccgtggtcggtctacatcccgccgcaggataaagtcgaggtgactgccgattccgatctggagctggcggtatgcagcgcgccgggcaaaggcagcttcccggcacgcctcattcggccggaagacgtcggggtagagcaccgtgggaaagggcgcaaccagcgtcgggtgcataatattctgccggacagcgccgaggcggactgcctgctggtggtggaagtctacaccgacgagggggccaccagttcgtggccgtcgcataaacatgataccgcccagccgggcaaagagacgcagctggaagaaacctactatcaccgcttcgatccgccgcagggctttgccttccagcgggtctacaccgacgaccgcagcctggacgcctgtatggcgccctacaaccacgatgtggtgatggtgccgcgcggttaccatccggtggcagcgattgccggttacgatagctactatctgaacgtgatggccgggccggaccggaaatggctgttcacctgggaagatgaccacgcctggatcaacacgccggagtacccgcgccacgactga

SEQ ID NO: 212578 - DNA, 1506 bp, Klebsiella pneumoniae
atgacgatcacaggaaactttattggcgggaaaaccgttatcagcagcagcaacgaaacgatgccggtgtatgacccggcgacgggcaaagcggtgcgcgaagtcacggtgtcaaccgcgcaggaagtctccgaggcgattcaggttgctcgcgatgcgtttgacagctggtcccgtaccacgccgctgcgccgcgcccgcgtgctgttcaacttcaaaatgttgctggagcagcacgtggaagagctggcggggatcatcgtcagcgagcacggtaaggtgtggtcggatgcgctgggcgagctgacccgcggtatggaagtggtcgaattcgcctgcgggatcccgcacctgattaaaggcgaatactcctctgacgtcggcaccggcgtcgacagctactcgttgatgcagcccctgggcgtggtggcagggatcaccccgttcaacttcccggcgatggtgccgatgtggatgttcccgctggcgctggcctgcggcaacagtttcgtcctcaagccgcccgcgctggcgccgacggccgctgtgcgtctggcagagctgttgaaagaggctggtctgccggacggcgtgtttaacgtcgtgcactgcagcaatgaagatgctgagcagctgtacactgatccgcgtattgcggcggtgagcttcgtcggctcctccggcgtggcggagtatatctataagaccgccagcgcccacggcaagcgagtgcaggccttcggcgccgccaaaaaccacgcgattgtgatgccggatgccgatctcgacgctaccgttaacgccattatgggcggcgcttttggctccgcaggcgagcgctgcatggcgctgccggtggtggtggcggtgggagatgaaaccgccgacaaactgatcgcccgcctgaagccgctggtggaagcgctgaaagtaggcccgggctgcatgcgcggccaggaagagaacgagatgggaccggtggtgtctgatacccaccagaaaaaagtgctcggctatattgataaaggcgaaagcgaaggggcaaaactggtggtcgatggccgcaaactgcgcgtgccgggttacgacgcgggctactatgtcggcggcacccttttcgatcacgtcaccccggagatgaccatctggcgcgaagagatctttggcccggtgctggggattgtgcgcgcggcggactatgacagcgcccttgagctggtcaacagccacgagtttggcaacggcagcgccgttttcaccagcaacggccacaccgcgcgtgaattcgtccacgacgtgcaggcggggatggtcggggtgaacgtgccggtcccggtgccgatggcgttccacagcttcggcggctggaagcgctcggtgtttggcgcgttgaacgtccatgggccggacggcgtgcgcttctacacgcgtatgaagaccgccaccgtacgctggccggcagggcagcagaccgtatctgaattcagcatgccgacgttaggttaa

SEQ ID NO: 212579 - DNA, 822 bp, Klebsiella pneumoniae
atggccatcgcaatgcaacgtttttgtattaaccgcaaaatcgcgccagcgctcagcattgaagcgtttttccgtctggtgaaccgtctgggcctgaataaggtcgagctgcgcaacgatttacccagtggaaaagtgaccgacgatctgagccatcagcaggtgcgcgagctggcggcgcgctaccacatcgagatcctgacgattaacgcggtctacccctttaaccgtcgtagcgaagaggtgcggcagttgaccgaatcgctgctgaaagaggcccaggccatcggcgccaaatcgctggtgctctgtccgctcaacgacggcagcgaggtgccggccagcgaaaccctgggcgccctgcgcgacctggcgccgctgttcgccttctatggcatccacggcctggtggagccgctgggcttcccgcaaagctcgctgcgttctgcacatcaggcgcagacgctgatccacgacgcccgcgtgccgtttaagctgctgctcgacaccttccatcaccatctttacccgcaggcggcggacgagttcagccaggtggaggtggcggatatcgggctggtgcacctttcaggagtggacgatagccgtccgcgcgagcagctcaccgatgccgagcgcatcatgctaaccccgaaggatcgtctcggcacctgcgagcaggttaaagcgctggaagcccgcggctatcagggggtgtacgcttttgagcccttcgcccccgagctggcgcaatggagcgaagcggatatcgagcgcgaaattgagcagagcatcgcgctcatccagcgccactgcgcctga

SEQ ID NO: 212580 - DNA, 1503 bp, Klebsiella pneumoniae
atgagctcacccctgttgattgcgcgcacgctggataacgcgctctatttactgcccgcgatggccaaccgccatgggcttatcaccggtgcgaccggcaccggtaaaaccgtcaccctgcagaagctggctgagtcgttctcggagattggcgtgccggtatttatggccgacgtcaagggcgacctgaccggcattgccgccgcggggcagagctcagagaaactgcaggcgcggctggagaagatcggcgtcagcgactgggagccgcatgccaacccggtggtgctctgggatatctttggcgagaagggccacccggtgcgggcgacggtttccgatctcggccccctgctgctggcgcgcctgctcaatctcaacgaggtgcagagcggcgtactgaacattattttccgcatcgcggacgaccgcggcctgctgctgctcgacttcaaagacctccgcgccatcacccagtttatcggcgataacgccaagtctttccagaaccagtacggcaatattaacagcgcctcgatcggcgccatccagcgcgggctgttgaccctggagcaacagggcgccgagcacttcttcggcgagccgatgctggatattgccgactggatgcgcgtcgatgccagcggtaaaggggtgatcaatatccttagcgccgaaaagctctaccagatgccgaagctgtacgccgccagcctgctgtggatgctctccgagctctacgagcgcctgccggaagccggcgacctcgataaaccgaagctggtgttcttcttcgatgaggcgcatctgctgttcaacgacgcgccgcaggtgctgctggataaaattgaacaggtgatccgccttatccgctccaagggcgtcggcgtctactttgtctcgcagaacccggcggatattcccgacgccgtgctcggccagctgggcaaccgcgtgcagcatgccctgcgcgcctttacgccgaaggaccagaaggcggtgaaaaccgccgcccagaccatgcgcgccaacccggccttcagtaccgagcaggcgatccaggagctgggcaccggcgaggcgctgatctccttcctcgatgagaaaggcagcccgtcggtggtcgagcgggcgatggttatcgccccctgttcgcgaatggggccggtcagcgatgacgagcgcaatggtctgctgaaccactctccgctgtacggtaagtatgaggaggaggtggaccgcgagtcggctttcgaaatgctgcagcaaggggtgcaggtcgccaccgggcagcagtcggctccgccggcgaagggccagcagaacggcgatgacgacgggctgcttggcggcctgaaagatatcctgttcggcagcaccggcccgcggggcggtaaacgcgacggtatcgtgcagaccgcagcgaaaagcgcggttcgccaggtcaccaatcagatcgtccgcggcatgctgggcagcctgctgggcggacgcaagcgctaa

SEQ ID NO: 212581 - DNA, 1083 bp, Klebsiella pneumoniae
atgcaggcgtttggcgtacttgaccgttatatcggtaagacgattttcaacaccatcatgatgaccctgttcatgctggtgtcgctctccggcattatcaagtttgtcgatcagctgaaaaagtccgggcagggcagctacgatgcgctgggcgctggtctctacaccatcctcagcgtgccgaaggacatccagatcttcttcccaatggcggcgctgcttggcgcgctgctggggctggggatgctggcccagcgcagcgaactggtggtgatgcaggcatccggtttcacccggctgcaggtagcgctggcggtaatgaaaaccgcgatcccgctggtgctgctgaccatggccatcggcgagtgggtggcgccgcagggcgaacagatggcgcgcaactaccgtgcccagcagatgtacggcggctcgctgctctcaacccagcaggggctgtgggcgaaagatggccacaactttgtctatatcgaacgcgtaaaaggcaacgatgagctggggggcgtcagcatctatgccttcaacccggagcgtcgtttacagtcggtgcgctatgccgcttcggcaaaattcgatagcgaaaataaagtgtggcgtctgtcgcaggtggatgaatccgacctgaccgatccaaagcaggtgaccgggtcgcagatggtgagcggcacctggaaaaccaacctgacgccggacaaactgggcgtggttgccctggatccggatgcgctgtcgatcagcgggctgcacaactatgtgaaatacctcaagtccagcggccaggatccgggacgctaccagctcaatatgtggagcaaaatcttccagccgctgtcggtggcggtgatgatgctgatggcgctgtcgtttatctttggcccgctgcgtagcgtgccgatgggcgtgcgggtggtgacggggattagcttcggctttatcttctatgtcctcgaccagattttcggcccgctgaccctggtctacggcataccgccgatcatcggcgcgctgttgccgagcgccagcttcttcctgataagcctctggctgatgatgcgcaaggcctag

SEQ ID NO: 212582 - DNA, 1098 bp, Klebsiella pneumoniae
gtgataatcataagatatctggttcgtgagacgctgaaaagccagttggcgatcctattcatcctgttactgattttcttttgtcagaaattagtcaggatcctcggcgccgcggtggatggcgatatcccaaccaatctggtgctctcgctgttggggctcggcatcccggagatggcgcagcttatcctgccgttaagtctgttccttggcctgctgatgaccctcggcaagctgtacaccgaaagtgaaattacggtgatgcacgcctgcggcctgagcaaagccgtgctgatcaaggcggcgatgatccttgcgctgttcactggcgcggtggcggcggtcaacgttatgtgggcggggccgtggtcgtcgcgccatcaggacgaggtgctggccgaagctaaagctaaccccggtatggcggcgctggcccagggccagttccagcaggccagcgatggtaacgcggtgatgtttatcgaaagcgtcaacggcaaccgcttccatgacgtcttccttgcccagctgcgtccgaaaggcaatgcgcgcccctcggtggtagtggcggattccggcgagctgtcgcagcagaaagacggctcgcaggtggtgaccctcaacaagggcacccgctttgaaggcaccgcgatgctgcgcgacttccgcattaccgacttcaataactatcaggctattatcggccaccaggcggtgagcgccgatccggacgacaccgaacagatggatatgcgcaccttgtggaaaacccacaccgaccgcgcgcgcgccgaactgcactggcgcttcacgctggtggcgaccgtcttcattatggcgctgatggtggtgccgctcagcgtggtgaacccgcgtcagggccgcgtgctgtcgatgctgccggcgatgctgctttacctggtgttcttcctgctgcaaacgtcgattaagtcgaacggcggcaaaggcaaaatggacccggctatctggatgtgggcgattaacctgctctattttgcgctggcggtgctgttaaacctgtgggacacggtgccgatgcgccgcttccgcgcccgttttaataaaggagcggcctga

SEQ ID NO: 212583 - DNA, 1512 bp, Klebsiella pneumoniae
atggagttcagtgtaaaaagcggtagcccggagaagcagcggagcgcctgtatcgtggtcggcgtctttgaaccacgtcgcctctcccccatcgccgaacaactcgataaaatcagcgacggctacatcagcgccctgctgcgtcgcggcgagctggaaggcaaacctggccagacgttattgctgcaccatgtgccaaacattctgtctgagcgcattctgctgattggctgcggcaaagagcgcgagctggatgagcgtcagtataagcaggtcatccagaaaaccatcaataccctgaatgataccggctcaatggaagccgtctgcttcctgaccgagctgcacgtcaaaggccgtaacaactactggaaagttcgccaggcggttgaaaccgccaaagagacgctgtacagcttcgaccagctgaagaccaacaaaagcgagccgcgtcgcccgctgcgtaaaatggtctttaacgtgccgacccgtcgcgagctgaccagcggcgaacgcgccattcagcatggcctggcgattgccgccggcatcaaagcggcaaaagatcttggcaatatgccgccgaacatctgtaacgccgcctatctggcctctcaggcgcgtcagctggccgatacctacagcaaaaacgtcatcacccgggtgatcggcgaacagcagatgcgcgagctggggatgaacgcctacctcgccgtcggcaatgggtcgcagaacgagtcgctgatgtcggtcatcgaatataaaggtaacccggctgaggacgcgcgccctatcgtgctggtcggtaaaggcctgaccttcgactctggcggtatctccatcaagcctgccgaaggcatggacgagatgaagtacgacatgtgcggcgcggcggcggtgtacggcgtgatgcggatggttgccgaactgcagctgccgctgaatgtcatcggcgtgctggcgggctgtgagaacatgcctggcggccgcgcctatcgtccgggtgacgtcctgaccactatgtccggccagacggtggaagtgctgaacaccgacgccgaaggccgcctggtgctgtgcgacgtcctgacctacgttgagcgcttcgagccggaagcggttatcgacgtggcgacgctgaccggggcctgcgtgattgccctcggccatcacatcaccggcctgatgtcgaaccataacccgctggcccatgagctaatcggcgcctccgaactggcgggcgaccgcgcatggcgtttgccgctggccgacgagttccaggatcagctggagtccaattttgccgatatggcgaacattggcggccgtcctggcggcgcgatcaccgccggctgtttcctgtcgcgcttcacccgcaagtacaactgggcgcacctcgacatcgccggtaccgcctggcgttccggtaaggccaaaggcgcgaccggtcgtccggtggcgctgctgtcgcagttcctgctcaatcgtgcgggttttaacggcgaagagtga

SEQ ID NO: 212584 - DNA, 444 bp, Klebsiella pneumoniae
atgaaaaacgcaacgttctatcttctggacaatgacgccaccgtcgacggcctgagcgccgtcgagcagctggtgtgtgacattgccgcagaacgttggcgcaacggcaagcgcgtcctaatcgcctgcgaagatgaacagcaggcgattcgcctcgacgaggcgctgtggtcgcggccgccggagagctttgtgccgcataatctggcgggcgaaggcccgagaggcggcgcgccggtagagattgcctggccgcaaaagcgcaacagcagcccgcgggatattcttatcagcctgcggctaaactttgcagattttgccaccgctttcacagaagtgatagactttgtcccttacgaagacaatctgaaacaactggcgcgcgaacgctataaggcgtaccgcatggctggtttcaacctgaacacggcaacctggaaataa

SEQ ID NO: 212585 - DNA, 2856 bp, Klebsiella pneumoniae
atggaaaagacatacaacccacaagatatcgaacagccgctttacgagcactgggaaaagcagggctatttcaaaccgaatggtgatgaaagccaggagagcttctgcatcatgatcccgccgccgaacgtcaccggcagtttgcatatgggtcatgccttccagcaaaccatcatggataccatgattcgctaccagcgcatgcagggcaaaaacaccctgtggcaggccggtaccgaccacgcaggtatcgctacccagatggtggttgagcgtaagattgccgctgaagaagggaaaacccgccacgactacggccgcgacgcctttatcgacaaaatctggcagtggaaagcggaatccggcggcaccattacccgtcagatgcgccgtctcggcaactccgtggactgggagcgcgagcgcttcaccatggacgaggggctttccaatgccgtgaaagaagtctttgttcgcctgtacaaagaagacctgatctaccgcggcaaacgcctggttaactgggacccgaaactgcgcaccgccatttccgacctcgaagtggaaaaccgcgaatcgaaaggttccatgtggcacatccgctacccgctggccgatggcgcgaaaaccgctgacggtaaagattacctggtggtcgccaccacccgtccggaaaccctgctgggcgataccggcgtggccgttaacccggaagatccgcgctacaaagatctgattggcaaattcgtggtgctgccgctggttaaccgccgcatcccgatcgtgggcgacgagcacgccgacatggaaaaaggcaccggctgcgtgaagatcaccccggcgcacgactttaacgactacgaagtgggtcgtcgtcaccagctgccgatgatcaacatccttacctttgacggcgacattcgcgaaagcgcggaagtctacgacaccaaaggcaatgaatccgacgtctactccagcgagatcccggcggagttccagaaactggaacgcttcgcggcgcgtaaagccgttgttgcggcagttgacgccctcggcctgctggaagagatcaaaccgcacgacctgaccgtcccttacggcgatcgcggcggcgtggtgatcgagccgatgctgaccgaccagtggtacgtgcgcgcggacgtgctggccaagccagcagtcgaagccgttgaaaacggtgatattcagttcgtgccgaagcagtacgaaaatatgtacttctcctggatgcgcgatattcaggactggtgtatctcccgtcagctgtggtggggtcaccgcatcccggcatggtatgacaacgacggcaacgtctacgtaggccgtagcgaagacgaagtgcgtcaggaaaacaacctgagcgccgacgttgccctgcgtcaggatgaagacgttctcgatacctggttctcctccgcgctgtggaccttctccaccctcggctggccggaaaacaccgacgccctgcgtcagttccacccgaccagcgtgatggtgtccggcttcgacatcatcttcttctggatcgcccgcatgatcatgatgaccatgcacttcatcaaagatgaaaatggcaagccgcaggtaccgtttaagaccgtctacatgaccggtctgatccgcgatgacgaaggccagaagatgtccaagtccaagggtaacgtcattgacccgctggatatggttgacggtatcaccctgccggagctgctggaaaaacgtaccggcaacatgatgcagccgcagctggcggataaaatccgcaagcgtaccgagaaacagttcccgaacggcatcgagccgcacggcaccgacgccctgcgcttcaccctggcggcgctggcctctaccggccgcgacatcaactgggatatgaagcgtctggaaggttaccgtaacttctgtaacaagctgtggaacgccagccgcttcgtgctgatgaacaccgaagatcaggattgcggcttcaacggcggcgaaatggtgctctccctggccgaccgctggatcatcgcggaattcaaccacaccgtgaaagcgtatcgcgaagcgctggataacttccgcttcgatattgccgccggcatcctgtacgagttcacctggaaccagttctgcgactggtacctggagctgaccaagccggttatgaacggtggcaacgaagcggagctgcgcgggactcgccatactctggtcaccgtgctggaaggtctgctgcgcctggcgcatccgatcattccattcattaccgagaccatctggcagcgcgtgaaagcgatctgcgggatcaccgccgacaccatcatgctgcagccgttcccgcagtacgatgcttctcaggtggatgacgcggcgctggccgacaccgaatggctgaagcaggcgatcgtcgccgtgcgtaacatccgtgcggaaatgaacatcgctccgggcaaaccgctggaactgctactgcgcggctgcagcaaagatgccgagcgtcgtgtgaacgacaaccgcagcttcctgctgaacctggcgcgtctggaaagcattaccgtgctgcctgccgatgataaaggtccggtctcggtgaccaagattgtcgacggcgccgagctgctgatcccgatggcgggcctcatcaataaagaagatgagctggcgcgtctggcgaaagaagtggccaaaatcgaaggtgaaattggccgcatcgagagcaagctggccaacgaaggctttgtcgcccgcgcgccggaagcagtgatcgctaaagagcgcgagaagctggaaggctacgcggaagcgaaagcgaagctgattgagcagcaggcggtgatcgccgcgctgtga

SEQ ID NO: 212586 - DNA, 504 bp, Klebsiella pneumoniae
atgaatacgagcgtccccgcggcgacgttgctgcgtcgcattacggcggcagacaatgccgccatcgccagggtcatccgccaggtctcggctgaatatggcctgaccgccgataaaggctatacggtcgccgacccgaatctcgatgagctgtatgagctgtacagccagccgggctccgcctactgggtggtggagcaagagggggaagtggttggcggcggcggcgtcgcgccgctcgcctgcagcgagccggatatctgcgagctgcagaaaatgtattttatgaccagcgcccgcggccaggggctggcgaagaagctggcgctgctggcgctggactacgcccgcgaacaagggtttaagcgctgctatctggaaaccaccgccttcctgacggaggcgatcggcttatatgaacatctcggcttcgagcacattgacggaccgctgggctgcaccggccacgttgactgtgaagtgcggatgctgaaaacgctgtag

SEQ ID NO: 212587 - DNA, 765 bp, Klebsiella pneumoniae
atggattacccgcagattctttccccgattatcagcttcctgcactgcccgacgccgcaggcgtggattgacgaagcccgcaagccggaaaacctgccgctgctgctaaccgaccatatggtgtgcgagctgaaagcggcgcagaacgccatgctgctggtgcgtcgctacgtcgcggataaagctgacgccgacgaactgttggcctgcctgaagccgtacgaagacttcacctaccgccgggggccggagccggattttgtcaccctgcataaacggatcaacaaaagcgccatgccgcagaccgacgacccgtggggccgccagctgctggacagcatgattttgttgattaaagaggaactgcatcatttctggcaggtgcgggagatgatgctggcgcgcgatatcccctacgtcaaaatcaccgccagcaactatgcccgcggcctgcggcgcgaagtgcgctcgcatgagccggtgatgctgatcgataagctgatctgcggcgcctatatcgaggcccgctcttgcgaacgctttgccgccctggcgccgtggctggacgacgatctgcaaaagttctacctgtcgctgctgcgctccgaggcgcgtcactatcaggactatctggatctggcgcagaagattgccggagaagatatcagcgagcgggtgcgccagctcggcgaggcggaagcggcgctgatcctccgtccggaggccgagttccgctttcacagcggtgtgccggtagcggcgtaa

SEQ ID NO: 212588 - DNA, 423 bp, Klebsiella pneumoniae
atggcaaacccggaacacctggaagaacagcgtgaagagacgcgtctgattatcgaagagctgctggaagatggcagcgatccggacgcactgtacacgattgagcatcacctctctgcagacgatttcgaaaccctggagaaagtggcggttgaagcgttcaagctgggctacgaagtgaccgagcccgaagagctggaagtggaagagggtgacatggtcatctgctgcgatattctgagcgaatgcgcgctgaacgcagacctgatcgatgcccaggtggaacagctgatgacgctggcagaaaaatatgacgtcgagtatgacggttggggcacctattatgaggacccgaacggtgaagacggcgacgacgatgacgaagagtatgtcgatgaagacgacgatggtgttcgccactaa

SEQ ID NO: 212589 - DNA, 1005 bp, Klebsiella pneumoniae
atgtctgcgttttaccagaagcattttttaaagttactcgattttacgcctgcagaaatcaccgccctgctcgagctggcggcaaagctgaaagccgataagaaaaacggtatcgaagtccagaaactggcaggaaaaaacatcgcgctcatcttcgaaaaagactcaacccgtacacgatgctctttcgaagttgccgcatacgatcaaggcgcccgcgtgacctatctggggcccagcggtagccagattggccataaagagtcgatcaaggacaccgcccgcgtgctcggacggatgtacgacggcattcagtaccgcggccacggccaggaagtggtagagaccctggcgcaatacgccggcgtgccggtgtggaacggcctcaccaacgagttccaccccacccagctgctggcggacctgctgaccatgaaagagcatctgccgggcaaagcctttaaccagatgacgctggtctacgccggcgacgcgcgcaacaacatgggcaattcgatgctggaagccgccgccttgaccggtctggatctgcgcctggtggcgccatcggcctgctggccggaggccgcgctggtggagacctgcaccgcgctggccaaacagcagggcggcaacatcaccctgacggaagatatcgccgcgggggtgaaaggcgccgattttatctataccgacgtctgggtctcaatgggcgaggcgaaggaaaaatgggccgaacgtatcgccctgctgcgcgactatcaggttaacagcgcgatgctggcgctcaccggcaacccgcaggtcaagttcctccactgcctgccggcgttccacgacgatcagaccacgctgggcaaacagatggctgccgattacggcctgcacggcggcatggaggtgactgacgaggtgtttgagtcggcggcgagcgtggtcttcgaccaggcggaaaaccggatgcacaccatcaaagcggtgatggtggcgacgctttcacgctga

SEQ ID NO: 212590 - DNA, 726 bp, Klebsiella pneumoniae
atgtcgaattttggactgcaacagaatacttccgtaccgttatacaggcagctaaaagataaaatcctcagcgatatttcttccgggaaactcgctgaaggagagaaaatccccaccgagattgagctcagcgaactctacaatatcagccgtattacagtgcgcaacgcagtgaaagagctggtagccgaaggctatttggtaaaaaagcaggggaaggggacttttgtctgtctgcctaaaattgagcgtaaagttgttcacttacttagctttactgccgcatgcgatgctaatcatctaccaacccatagcgtagtgactcgtcgtgagattctgcgggactatcgtaatgcgcgtcagcttcttgagcttgagagcgatgattccgtgctttatatccaacgccttaggatcgctggcgatgcgccgttaatgttagagaataattactactctctgaaacgattaggttttttacagcaggaggatcttagcgggtcgctgtatcagctattgcgtgaaaaatatgcgatcgtgcctacctatgcgggtgaaacgacagtagaaatggtgcgtgcggattctgacagcgcaccgctgctgaagcaaccgcccggcgaaccgttattcctgatgaaaacgctaattctggatagccagcatcagcctattcattatggagaacagtatatcgtcgccgagcgttacacgtttagtttctga

SEQ ID NO: 212591 - DNA, 1419 bp, Klebsiella pneumoniae
atgcgtattgcaaaaataaagtgggcgatgccacactgctacgctctgattttcttcattattatattagtagcgctgctgacatggtgtattcccagcggcagttttgattatcactcagtgaccttacccggcggtgaaacgaaaacattagtgatcccagggtcttatcatctgctggacaaagtcagcagcgagggcgatttacgtcagggtattgccgccgtactggccgcgccgatggaggggattatcaaggccgccgacgtagtggcgtttgtgctcattgttggtggcgcttttggcattattttacgtactggcgcaattgagcggggtctggtggcgctggctgaacgcctggcaggtaaaggaattttggttatccctatcgcaatgaccttgtttagcctgggaggcgcgacttttggtatgagcgaggaggtgattcccctgtatgcgatctttatctccctgatgttcgcgctgggttatgactcaatgactgcgatcctgattctttttctgggaacccagattggctacgttggcgcaatgaccaatccgttctctgtactcattgcccagggcgtagcgggtattcagggaaatccgcagctttggctacgtgctattgcatggctggtcttcacgctactggcgattgcttacaccatgtggtacgcgcaccgtgttaaacgcactccgcaaaagtcgccggtatatgaaaatgattgtcgcaaccgcgagcagtttttgtcgatacaggatacgtcggtccatttttccatcgccgatcgggtaattatcatcgcctttgtgctggcgctggccgtcatctcatgggggctaatcacgcgtggctggtacatggttgagatcggctctgtgttcctggctctggggctgttttccgggatcgtcgggcgcatgggtattagcgggatggccgacagctttgtcgaagggtgcaaagagtttgtctacgccgccgtagtcataggtcttgcgcgcggtattctggtggtggcggagaacggacgaattatcgatacgttgctatttggtttgtctgaaatgctggaagggttgccgcagtatgcgtttaccactctgatgctattagggcataacgtcatcactttttttgtgccctcatcttcgggcgaggccgcgctcactatgcccgtgctggcgccgttaggcgatttggttggtatcaataaagaggcgatggtgatggcttatcaatttggcaatggcctgacgaacctggtctctcctaccggcggtgtattgctggctgggttgtctattgcgcgcattgggtttggtcagtggttaaaggccattgcgccgctgtttccggtgctgtggatagttagcgctgcttttgctgcgatttcggcctgggtctga

SEQ ID NO: 212592 - DNA, 1566 bp, Klebsiella pneumoniae
atgcatagtgatgctgctgatttgattttacgttctgatgctatttttactgctgccagaaatgagctatttagcggatatgtagtcattaaaaacggcgctatcgcggcgatgatagcgaatggggaagatattcaaacctggagaggtgaaagaactcgctttatcgaacttggcgatcgcctgatttgtcccggattttgcgataatcacacgttttttaccggctatatgagcatgcagcgtggcgtcgatctccatgccgcccgcgatagtaatcatgcccttgaactattacaggatgcagaaaaacttctccctgaggagaaaagcctctatggctggggctggtctgctgcccgttggggagcggtgcctgatgccagactattggatgacgctttcccgcagagaccggttgtcgccattaacgatgacaaaagctattgctggatgaaccgtgccgccgtggagctttatggctttaccgctgaagagtgcagcgcggaggcgagaatcgcattattggatgagatgctgtctgataccgcacagttaaaaaaagaaatgcgggcatttatggcccgacttgccgggcagggaatcacggcaataaaagacgtttgtttcaacgatgcgccgcagttgatgaatgcctgggatgaactggaaaaagaggatgcgctattgctgagagtaagcattgtttctcagcccgtatctgcgcctgtcgatcttgctttcggtgaacaggcccgacgccgctttcattcgccatggctgcggtttcatggctttaaatttatggtcgatggcgttattgccgatcataccggcgatatgatttacccctatgccgatcgtcccggcacgaacaatgaacgacccgttgattataatgccctgcgccagcaggttttgttggctgatgctcgtggattcaactgctgtatgaatgcggagggcgatgccgcaattcgccgctgtattgatatttttgccgaatgccgtaagcgtcacccgcagagcgtggttagacattctctgagcgatctggaatgtccgcatccaaacgatattcccagaatggctgagctcggcctttttgccgaagtttatgcacaaattctgctccttaacccctgcgaagcaggggcctatatgcgcgaacgctatggggaagagcgcgaagcgcaattctacgattatgccgcactatttggggctggcgtgacggtgactattggcaccgatctgcctctgtttattccttctgttcctgactcgatgtatgccgcctgcagtcgtcagttccctgatggttcacccgtgaatggctggtaccgcgaacgcggaatgacccgacaacagctcttaacggcatggacgctgaatagtgctcgacaccacggcatggaagagatgaccggtagccttgagccgggaaaacgcgcggatatcgcggtttttgaccgtaatttgttgagctgcccgaatgatgagttacggacttctaccgttgtactgaccctggtggatggccgtattacccatgaccttctgtaa

SEQ ID NO: 212593 - DNA, 834 bp, Klebsiella pneumoniae
atgatgaatgtgattggaattggcgataacgtcgtcgataaatatgttcatactcagactatgtatcccggtggaaatgcgctgaactttgccgcttatgcggccatgctggggcacaatgcggcctatctggggatttttggtaatgatgccgctgcggaacacgttatgcaggtgctggataaagttggcgtcaagtggccacactgtctgcaggtggcaggagagaatggctgcgcacagctgaaaatcgaagagggagaacggatatttcttggttcgaacgccgggggtattcgcaagacaacttcgatggattttatttttcagcatgagcaatacctgcgtgagtttgatctgatccatagcggctgttatagctatatggagacgcacttacctcagttacgcgagctcaacattcctgtctctttcgatttttcagatgactttgtactggagcaggcgctgccgctgtgccgttacgtcgacttcgccttcttctcatgcgccgactacagcctggcgcaaacacgtgaaattgtgcaacaagcgcaggccagcggaagtcgcattgtctgcgcgacgcgtggagatgaaggcgcgattttatttgacgggcaggattggtatcagcaggcacccgattacgtcactcccgtcgatacaatgggggcaggtgatgcttttattaccgctttcatttgccattttctggcccaacctacgggtaacaagcgcgaagcgattaccaatagcctgcaaaaagcagcagctttctcggcacaaatttgcctgaaagaaggggcatttggctacgggactcactactaa

SEQ ID NO: 212594 - DNA, 975 bp, Klebsiella pneumoniae; identical to SEQ ID NO: 137832

SEQ ID NO: 212595 - DNA, 453 bp, Klebsiella pneumoniae
atgattattggcaatatccaccatctgcagccatggctgcctgccgcgctgcgcgaggctatcgaacacgttatcgctcaggtcagcgaggcgacgccgctgggtaaacacgctatcgacggcgacaacctgttttatctgatttctgaagacaccaccgagccgcaggccgcgcgccgcgcggaataccatgctcgctatctcgatatccagattgtgctccgcggcagcgaggggatgaccttcagcaccttgccgccaggagagccgcagaccgactggctggcggagaaagacatcgcttttcttgccgaaggccagcaggagaaaacggtgatcctcaacgaaggggactttgtggtgttttatcccggcgaagtgcataaaccgctgtgcgccgttggcgccccggcgaaggtgcgcaaagcggtggtgaagatgctgatggtttag

SEQ ID NO: 212596 - DNA, 936 bp, Klebsiella pneumoniae
atggctaacccgctatatcaaaaacatatcatttccataaacgatctcagccgcgaagacctcgaactggtgctggcgacggcggcaaagctgaaagccaatccacaacccgagctgctgaagcataaggttatcgccagctgtttctttgaagcctcgacccgcacccgcctctcttttgaaacctcgatgcaccgcctgggcgccagcgtggtcggcttttccgacagcgccaacacctcactgggcaaaaaaggggaaacgctggcggataccatctccgtcatcagcacctacgtcgacgccatcgtgatgcgtcatccgcaggagggcgccgcgcgcctggcgaccgaattctccggcggcgtgccggtactgaacgccggcgacggcgctaaccagcacccgacccaaaccctgctcgacctgttcaccattcaggagacccagggccgcctcgaaaacctcaacgtggcgatggtcggcgatctgaagtatggccgtaccgtccactccctgacccaggcgctggccaaattcaacggcaaccgcttctacttcatcgccccggacgcgctggccatgccgcagtacatcctcgatatgctcgatgaaaaaggcatcgcctggagcctgcatagcgccatcgacgacgtgatggcggaagtggatattctgtacatgacccgcgtgcagaaagagcgtctggatccgtcggaatacgccaacgtcaaagcgcagttcgtcctgcgcgccgccgacctcgaaggggcgcgcgccaacatgaaagtgctgcacccgctgccgcgcattgatgaaatcaccaccgatgtcgataaaacaccgcacgcctggtacttccagcaggccggtaacggcatcttcgcccgccaggcgttactggcactggtactgaatagcgagctggcactgtaa

SEQ ID NO: 212597 - DNA, 462 bp, Klebsiella pneumoniae
atgacacacgacaataaactgcaggtagaagcgatcaaacgcggcaccgtgattgaccatatcccggcgcaggtcggctttaagctgctcaccctgttcaaactgaccgaaaccgaccagcgcatcaccatcggcctgaacctgccctccggcgaaatgggccgcaaggatttgattaaaatcgagaacaccttcctgaccgacgagcaggttaaccagctgtcgctgtacgccccgcaggcgacggtaaaccgcattgatgattacgaagtggtgggcaaatcccgcccgagcctgccggatcgtatcgacagcgtgctggtctgtccgaacagcaactgtatcagccacgccgaaccggtttcttccagttttgcagtgaaaaaacgcgctgatgacatcgcactcaaatgcaaatactgcgaaaaagagttttctcattatgtggtgctggccaactaa

SEQ ID NO: 212598 - DNA, 387 bp, Klebsiella pneumoniae
atgagcaaaactattgcgacggaaaatgcaccagcggcgattggcccctacgttcagggcgttgacctcggcagcatgatcatcacctctggccagatcccggtcgacccgaaaaccggcagcgtcccggaagacgtgtccgcgcaggcgcgccagtcgctgaacaacgtgaaagcgatcgttgaagccgctggcctcaccgtcggcgatatcgtcaagaccaccgtattcgtcaaagatctcaacgatttcgctaccgttaacgccacctacgaagcgttcttcaccgagcataacgccaccttcccggcgcgctcctgcgttgaagtcgcacgtctgccgaaagacgtgaagatcgagatcgaagccatcgccgtgcgtcgctga

SEQ ID NO: 212599 - DNA, 2709 bp, Klebsiella pneumoniae
atgctgaaaaattatacccggcagctgttcgcgcagcttagccgccatctgccacgtcgtttagtccagcgcgatccgctgccggacgcccgccatctggcgagtggccccattcctgaatcgcttggtcagcattgcctgaacgtggcggcgatggacgaccaggagatctggcgcgcctttgacagccaccctgaagggctcaatgaaggcgaagtggcggcgaaaatcctcaaacatggtgacaaccagatcccggcgcagaagccctccccgtggtgggtgcatctgtggacctgctatcgcaacccgttcaacctgctgctgaccgtgctcggcatcgtctcctattccaccgaggatctgttcgccgccggggttatcgccctgatggtggggatctcgacattgctcaatttcatccaggaggcgcgctcgaccaaagcggcggatgcgctgaaggcgatggtgagcaacaccgccaccgtgctgcgggtggtgaacgagcagggggagagccgctggctggagctgcctatcgaccagctggtgccgggcgacattatccggttgtcggcgggggatatgatcccggcggacctgcgtatcctgcaggcacgggatttattcgtcgcccaggcctcgctgaccggcgaatcgctgccggtggagaaagtggcccgcagccgcgatccgctgcagcaaaacccgctggagtgcgacaccctgtgctttatgggcaccaacgtggtgagcggctcggcgcaggccatcgtcttcgccaccggcggccgcacctggtttggccagctggccggccgcgtcagtgaacaggagagcgagccgaacgcctttcagaaaggcatcagccgggtcagcatgctgctgatccgctttatgctggtgatggccccggtggtgctgctgatcaatggctacaccaaaggcgactggtgggaggcggcgctattcgcgctgtcggtggcggtcggcttgacgccggagatgctgccgatgatcgtcacttcgacgctggcgcgcggggcggtgaagctgtcgaagcaaaaggtcatcgtgaagcacctcgacgccattcagaatttcggcgcgatggacatcctctgcactgataaaaccggcaccctgacccaggataagattgtgctggagaaccataccgacgtctccggcaaggtctgcgagcgggtactgcatgccgcctggcttaacagccactaccagaccggcctgaaaaacctgctcgacaccgcggtgctggagggcgttgagctggatgccgcccgcgggctggcggaacgctggcagaaggtggatgagatacccttcgacttcgaacgccgccgcatgtcggtggtggtgaaggaggatgacgccgcgcatcagctgatctgcaaaggggcgctgcaggagatcctcaacgtctcgacccaggtgcgctacaacggcgatatcgtaccgctggacgacaccatgctgcgccgcattcgccgggtgaccgataccctcaaccggcaggggctgcgggtggtggcggtggcgactaaatacctgccggcccgcgaaggcgactaccagcgcgccgatgagtcggacctgatccttgaaggttacatcgccttcctcgatccgccgaaagagaccaccgccccggcgctgaaggcgctgaaggccagcggcatcacggtgaagatcctcaccggcgacagcgagctggtggcggcgaaggtgtgccatgaagtgggactggatgctggcgaagtggtgattggcagccagatcgaagccatgagcgacgacgaactggcggcgctggccaaacgcaccacgctgttcgcccgcctggcgccgctgcataaagagcgtatcgtgacgctgctcaagcgtgaaggtcacgtggtgggctttatgggcgacggcatcaacgacgccccggcgctgcgcgcggcggatatcggcatctcggtcgacggcgcggtggatatcgcccgcgaggcggcggatatcattctgctggagaagagcctgatggtactggaggagggggtaatcgaaggccgccgcaccttcgccaacatgctcaagtacatcaaaatgaccgccagctccaacttcggcaacgttttcagcgtgctggtggccagcgccttcctgccgtttctgccgatgctgccgctgcacctgttgattcagaacctgctgtacgatgtctcccaggtggcgatcccgtttgataacgtcgatgatgagcagatccgcaagccgcagcgctggaacccggccgatctcgggcgctttatggtcttctttggaccgatcagctcgattttcgatatcctcaccttcggcctgatgtggtgggtgttccacgccaataccgtggagatgcagaccctgttccagtccggctggtttatcgaagggctgctgtcgcaaacgctgattgtgcacatgatccgcacccggcgcattccgttcgttcagagccgggccgcctggccgctgttcgccatgaccctggtggtgatggcggtgggtatcgcgctgccgttctcgccgctggctagctacctgcagctgcaggccctgccgctgagctacttcccatggctggtggcgatcctggcgggctatatggtgctgacccaggccgtgaagggcttctacagccgccgctacggctggcagtga

SEQ ID NO: 212600 - DNA, 948 bp, Klebsiella pneumoniae
atgcagaaccggctgaccatcaaagatatcgcgcgcttaagcggcgtagggaaatcgacggtatcccgcgtccttaacaacgagagcggggtcagcgaacggacccgcgagcgcgtcgaagcggtgatgcagcagcacggtttctcgccctcccgttccgcccgcgccatgcgcggccagagcgataaagtggtggcgattatcgtcacccgtctcgattcgctgtcggaaaaccttgccgtgcagaccatgctgcccgccttttatgagcagggttacgatccgattatgatggagagccagttctccccggcgttggtggaggagcatctcggcatgctcgcccggcgcaatattgacggcgtggtgctgttcggttttaccggcatcgacgaagcgatgctcgccccctggcgcgacaccctggtgctgatggcccgcgacgctcccggcttcgcctcggtgtgctatgacgacgagggggccatcacgctgctgatgcagcggctctacgatcgcggacaccgccacatcagttttcttggcgtaccgcacagcgacgtcaccaccggcgaacgccgccatctggcctacctcgccttctgtaaaaagcatcgtctgacgcccaccgccgccctgccggggctgggcatgaagcagggatatgacaccgtcgccagcgtgctgatggctgaaaccagcgccctggtctgcgcgacggataccctcgccctcggcgccagcaagtacctccagcagcagggtcgcgatgcgctgcagctcgccagcgtcggcagcacgccgctgatgaagtttctccacccggaaatcttgaccgtcgatccgggctatgccgagtccggacgccgggccgcccggcagttgatcgagcagatcgccggcagcgtcgatccccgccagatcgtgattcccgccgccctcaattaa

SEQ ID NO: 212601 - DNA, 1419 bp, Klebsiella pneumoniae
atgagcaaagtaaaccagcaggacatcgataaactgatcgaactggtgggcgggcgcggtaacatcgccaccgtcagccactgtattacccgtttgcgctttgtgctgaacgacccggccatcgccagaccaaaagaaattgagcagctgcgcatggtgaagggatgcttcactaacgccggccagttccaggtggtcatcggcaccgaggtgggcgattactacaaggccctgctggcgaccaccggccagacctccgccgacaaagagcaggtcaagcaggccgcgcggcaaaatatgaagtggcatgaacagttaatctcgcacttcgccgagatcttctttcccctgctgccggccctgatcagcggcggtctgatcctcggtttccgcaacgttatcggcgacctgcccatgagcaatggccagacgctggcccagatgcacccgtcgctgaaaaccatctatgacttcctgtggctgattggcgaggcgatcttcttctatctgccggtggggatctgctggtcagcggtgaagaagatgggcggcacgccgatcctcgggatcgtccttggcgtcaccctcgtctccccgcagctgatgaacgcctatctcctcggccagcaggtgccggaggtgtggaacttcggcctgtttaccattgccaaagtcggctaccaggcgcaggtgatcccggccctgctggctggcctggccttaggctttatcgagacgcgcctcaagcgcatcgtgcctgactacctctacctggtgattgtcccggtctgctcgctgatcctcgcggtgttccttgcccatgcggttatcggtccgttcggccgcctgatcggcgacggcgtggccttcgcggtacgccatctgttaaccggcagcttcgcgccgatcggcgccgcgctgttcggcttcctctacgcgccgctggtgattaccggtgtccaccagaccaccctcgctatcgatatgcagatgatccagagcatgggcggtaccccggtgtggccgctgattgcgctgtcgaatattgcccaggcgtcggcggtggtcggcatcatcatcgccagccgcaagcagaatgaacgtgaaatctcggtaccggcggcgatctccgcctatctcggggtcaccgagccagcgatgtacggtatcaacctgaaataccgcttcccgatgctgtgcgcaatgattggctctggcctcgccggcctgctgtgcggcctgaacggcgtgctggcgaacggcatcggcgtcggcggcctgccggggatcctctccatccagcctacctactggcaggtgtacgccatggcgatggctatcgcggtggtggtgccgattatcctcaccagcgtggtgtatcagcgcaagtaccgtcagggcaccttgcagattgtctaa

SEQ ID NO: 212602 - DNA, 1656 bp, Klebsiella pneumoniae
atgaatcatctcccccactggtggcaaaacggcgttatttatcaaatctatccgaagagttttcaggataccaccggcagcggtaccggcgacctgcgcggcgtcaccgcccgcctcgactatctgcaaaagcttggggtcgacgccatctggctgacgccgttctacgtctcaccgcaggtggataacggctacgacgtggcgaactacaccgccatcgatccctcctacggcacaatggccgactttgacgccctggtggcggaggcgaaggctcgcggcatccgtatcgtgctggatatggtgctgaaccacacgtcgaccgaacatgaatggttccgtcagtcgctgaataaggagagtccctaccgccagttctatatctggcgcgatggcgaaccggacgccctgccgaacaactggcgctccaaatttggcggtaacgcctggcagtggcacgccgacagcgggcagtattatctgcacctgttcgccattgagcaggcggatctcaactgggagaatccggcggtgcgcgccgagctgaaaaaggtctgcgaattctgggctgaccgcggcgtcgacggtctgcgcctcgacgtggtcaacctgatctcaaaagaccagacctttccctgcgatctggacggggatggccgccgcttctataccgacggcccgcgggtgcatgagttcctgcaggagatgagccgcgatgtcttcaccccgcgtaacctgatgaccgtcggcgagatgtcctccacctcgctggagcactgccagcagtacgccgcgctggacggccgcgagctgtcgatgacctttaacttccaccacttaaaggtcgattatcccggcggagagaaatggaccctcgcccgcccggactatgtggcgctgaaggcgctgttccgccactggcagcggggaatgcacaatcgggcgtggaacgcgctgttctggtgtaaccacgatcagccgcgcatcgtgtcgcgctttggcgacgaaggcgagtaccgggtgacggcggcgaagatgctggcgatggtgctgcacggcatgcagggcacgccctatatctaccagggcgaagagatcggcatgaccaatccgcacttcagcagcatcagcgattaccgtgacgtcgaaagccacaatatgtttatcgaacgtgcggcgcaggggcaaagcccggacgaactgctggcgatcctcgccagcaagtcgcgcgacaacagccgcacgccgatgccgtggcacgccggcgagaacggtggcttcagcgacggtgagccgtggatcggccttggcgataattaccaggagatcaacgtcgaggcggcgctggcggaccccgattcggtgttttatacctatcagcagctgattacgctgcgtaaaaccctgccgctactgacctggggtgattacgaggatctgctgccggagcatccgtcgctgtggtgctatcgtcgtcagtggcaggggcaaacgctggtagtcgccgctaacctgagccgcgagctgcaggcctggcagcccgctgaggccccgggcgagtggaagatgatcatcagcaactatgccgagaccaccccgcgcccgaccgggctgacgctgcggccgttcgaagcgatatggtggctgcagggataa

SEQ ID NO: 212603 - DNA, 1353 bp, Klebsiella pneumoniae
atgtcgaatacaagctggattgaacgttacgtcatgccggtggcgctgagaatcgccgggcaaaagcacgtcctgtcggtgcgcgacggcatcattctcaatatgccgtttatgttgattggctcattcttcctgattttcgcctacctgccgatccccggctatgccgacatgatgagcggcctgtttggcgaggtctggcgcgataaaatgctgtacccggtgaaagcgacctacgacattatggcgctgatttccagcttcggcatcgcctaccggctggcggagaagtatcgcactctcgatccgctgagcgctggggcgatgtcgctggtggccttcatgatgacgatcccgcagaacacgctgtttacgccggtacacggcgcggcggaggtgattaaaggggtgatcccggtgagcatggtcggcagccaggggctgtttgtcgccattgtcatttcgctgctgtcgacggagatttatcgtttggtcgccagccgcaatctcgttatccgcatgccggacggcgtgccgccggcagtggcgaaatcattccttgccctgatccccggcttctgcgtgctggcggtggtgctggcgctgcgcctggcggtcgaggcctcgccgttcggcgatatcaacagtatgatcgccaccctgattggtattccgatgcaccacgtcggcggtacgctgccgggcatgattatttcagtcattttgattggtattttgtggaccctgggcctgcacggcgacgcgatcgtactggtgtttatccagccggtatggctgtcgaatatgtccgagaacctgacggccttccagaacggtcagccgatcccgcatatcattactcagcagttttacgatctgtggattgcccccgggggtaccggcgcgctgctggggctggtgatttttatgttgctgcgtagccgtagccagcagatgaagcagctggggaaaattgccgcgcccggggcattgtttaacatcagcgagccgatggtgtttggcatcccgctggtgatgaacccgtactttttcctgccgtttattttaacgccggtgctgctggtgatcgtgtcctataccgcgatggcgaccgggctggtggcgccgcccgccggaatcgcgctgccgttcaccacgccgatcttcatcagcggctatctggcgaccggagggcatatctccggcacggtgctgcaggtggtgaatttagcgatttcgctggtggtctactatccgttcttccgcgcctgggatcggctaaaggcaaaagaagagcacgcctcggcgcaaccacaagcgagcgctgcgattgctgatgccgaccgcgcataa

SEQ ID NO: 212604 - DNA, 1308 bp, Klebsiella pneumoniae
atgcaagcactgaaaattgccgttatcggcggcggcagcagctacacgccggagcttattgaagggattatcgttcgttacgagcagcttccggtcacagagctggcgctggtagatgtcgaatccggccgggaaaaggtggagatcatcgccgcgctgacccggcggatgctgaaacataaagggctggagcaggtggcggtcagcgtccactttacgctcgatgaggccatccgcggcgccagctttgtgctgacccaactgcgggtcggacagctggcggcgcgcgccgccgatgagcggctgggtctcaagtaccacctgctgggccaggagaccaccggcgtcggcggttttgccaaggcgctgcggacgatcccggtgatccttgaggtggcgcgcaaagtggaacagctggcgccggaagcgttcattctcaactttactaatccggcggggatcgtcaccgaggcggtcagccgctacagcacggcgaagatcatcggcctgtgcaacgtgccgatcaacatgcagcacatgatcgtcgggatgctgggcgcccaggagtccgaagtaaaactgcgctttgccgggctcaaccatatggtttgggtgcataaggtgctacaggggcgcgaggatgtcaccggcaaggtgatcgacatgctgtgcgacggtaaggcgctgtcgatgaacaacattaaagagctgccgtggccggcggaattcctgcgcgcgctgaaggcgattccgtgcccctatcatcgctatttttggctgacgccggcgatgctggcggaagagatcgccgcggcgaaaaccaagggcacccgcgccgaacaggtgatgaaagtcgagcaggagctgtttgcgctgtacgccgacccgcagctggaagaaaaaccggagcaactgagctttcgcggcggcgcctactactcggaggtggccgtcgagcttatcaacgcgatctacaacaacctgggcgcggagatggtggtgaatacccgcaacaacggcgcgattcatggcctggatgatgatgcggtggtggaaaccaacagcattattgatgcgcaaggggcgcggccgctggcgttcggcccgctgccgccggcgatgaacggcctgacccagcaggtgaaagccttcgagcggttgacgattgaagccgcggtacacggctgtcgcgaaagcgcactgctggcgctggtggccaacccgctggtcggtaacgtcaccgatgcccaggcgctgctggatgaagtattaaccatcaaccgtcaatggctgacgcaatttaactga

SEQ ID NO: 212605 - DNA, 309 bp, Klebsiella pneumoniae
atgccacgaatcgtactctgttgtgccgcaggcatgtcgaccagcatgctggtgaacaaaatgaaagcagaagcccagcagcgtgcgctggcgctggaaatctatgcggtggcggtggcggaatttgaacgcgaattgccacacgccgacgtcatcctgctcgggccgcaggttaaatatgaagccggacggctaaccgcgctggccgcgccgcagggcaaggcggtggcggtgatcgatatggctgactacggcatgatgcgcggcgctgcggtgttggataaagcgctagccctgctcgaacactaa

SEQ ID NO: 212606 - DNA, 744 bp, Klebsiella pneumoniae
atggatatcgtaggtcagctgcaggaaggaatgcgccgctttagtgcccaggagtcgcgcgtcgccacctttattctacaaaatctaagctttaccgccagcgcctctattgacgagctggcagccagcgcgggggtcagccctgccaccattacccgcttcgcccgctcggtgggctgcgatgatattcgtgatctgcgtaaacagctggcgcaggccagcgaacggcgcgccagctggcttacgccggacagcgccgccctgcccgtcgcctggcgcgacaaacttagcagccttggcgttaccctaactcgtcagctcggccataccgcggaagcggcggtggaaaagtgtaaatcgcgcctgctgagcgcccgtgcggtacactgcttcgcccttggcgcccaggacgtgacgctggccgcgctgctccagcatcagctactgccctccggaatcgcgattaatctctgtcaggatgcggcgctgatgcggctgaccgccagcaccctcaatgacgatcatctgctgctggtgctggccactgccgaggccaaccctgtgttgcaaagcgccaccttgcaggcgcgcacgcagggagtgaccattattgctctgacgccggaacagcacgcccttggcgatatggccagcgccatcctgccgctgcccgctgacccgcagcaggctcgctatgccctgctactgctggtcgatctgcttaacgatacgttgattgcctga

SEQ ID NO: 212607 - DNA, 2139 bp, Klebsiella pneumoniae
atgacaccgcatgtgatgaaacgtgatggctgtaaagtgccgttcaactcagagcgcattcaggaagcaattctgcgtgcagctaaagcagcgggagtcgatgacgcagactattgcgccaccgtcgcagaagtcgttagccaacaaatgcagggccgcgcccaggtcgacatcaacgagatccagaccgcggtggaaaaccagctgatgtccggcccctataagcagctggcgcgcgcctacattgagtatcgccatgaccgcgatagccagcgtgagaagcgcggccgtctcaatcaggagatccgcggcctcgtcgagcagaccaactccgcgctgctcaacgaaaacgccaataaagacagtaaagtcatcccgacccagcgcgacctgctggccgggatcgtcgccaagcactacgcccggcagcacctgctgccccacgatgtggtgatggcccacgagcgcggcatgatccactatcatgacctcgattactcgcccttcttcccgatgttcaactgcatgctgatcgacctgaaaggcatgctgacccagggctttaagatgggcaacgcggagatcgagccgccgaagtctatctctaccgccaccgcggtgacggcgcagatcatcgcccaggtcgccagccatatttacggcggcaccaccatcaaccgcatcgatgaagtgctggcgccgttcgtcagcgaaagcttcaaaaagcatcgcaaaatcgccgaagagtggcagatcccggatgccgaaggctatgcccgcgcccgtaccgaaaaagagtgctacgacgccttccagtcgctggagtatgaggttaacacactgcataccgccaacggccagacgccgttcgtcaccttcgggttcggccttggcaccagctgggaatcgcggctgatccagcagtcgattctgcgcaaccgcattgccggcctcggtaaaaatcgcaaaaccgcggtgttcccgaaactggtgttcgcgatccgcgacggcctgaaccataagttcggcgacccgaactacgacatcaaacagctggcgctggagtgcgccagcaagcgcatgtacccggatatcctcaactacgatcaggtggtgaaagtcaccgggtcgtttaaaacgccgatgggctgtcgcagcttcctcggggtatgggaaaacgagaacggcgagcaggtgcatgatggacgcaataacctcggcgtgatcagtctcaacctgccgcgcatcgccctggaagcgaaaggcgatgaagccgccttctgggcgctgctggacgagcgcctgcagctggcgcgtaaagcgctgatgacccgtatcgcccgcctggaaggagtgaaggctcgcgtggcgccgatcctgtatatggaaggcgcctgcggcgtgcggctgaaagccgacgacgacgtctccgagatcttcaaaaacggccgcgcgtccatttctctgggctatatcggtatccatgaaaccatcaatgcgctgtacggcaaccagcatatgtacgacagcaaggcgctgcgtgagaaaggcgtggccatcgtccagcgcctgcgcgacgccgtcgatttgtggaaggaagaaaccggctacggctttagcctgtacagcacgccgagcgaaaacctgtgcgatcgcttctgccgtctcgacaccgccgagtttggcgtggtggaaggggtaaccgacaaaggttactacaccaacagcttccacctcgacgtggagaagaaggtcaacccgtacgataagatcgatttcgaagcgccgtacccgccgctggccaatggggggttcatttgctacggcgagtacccgaatatccagcataacctcaaggcgctggaagacgtgtgggattacagctatcagcacgtgccgtactacgggaccaatacgccgatcgatgagtgctacgagtgcggttttaccggcgagttcgagtgcaccagcaagggctttacctgcccgaaatgcggtaaccacgacgccgcccgcgtttccgttacccgccgggtgtgcggttatctcggcagcccggacgcgcggccgttcaacgccggcaagcaggaagaagtgaagcgccgcgtgaagcacctgggtaatgggcagattggttaa

SEQ ID NO: 212608 - DNA, 465 bp, Klebsiella pneumoniae
atgaattatcaccagtactaccccgtcgacatcgtcaacggccccggcacccgctgcaccctgtttgtctccggctgcgtccacgagtgccccggctgctacaacaaaagtacctggcgggtgaactccggtatgccgtttaccgctgagatggccgaccgcatcatcgccgacctcaacgacacccgcatcaaacgccaggggctttcactctccggcggcgatccgctgcatccgcagaacgtcgcggatattttaaagctggttcagcgcgtgcgcgccgaatgccccggcaaagatatctgggtctggacgggctataagattgacgaactgaacgccgagcagatggaagtcgtgaacctgattaacgtgctggttgacggtaagtttgtgcaggatttgaaagatccggcgcttatctggcgcggcagcagcaaccaggtcgtacatcatttgcgatag

SEQ ID NO: 212609 - DNA, 285 bp, Klebsiella pneumoniae
atgacctatgaactggagtttgatccacgagcctggcgcgaatggcagaagcctggcgagacggtcaaaaaacagttcaaaaataagctccagcagattgtgcagaatccgcgaattgagtcggccaggctgagcgatttaccggattgctacaaaatcaagcttaaggcgtcaggttatcggttggtgtatcaagtacgagatagtgtggtggtggtttacgttattgccattggcaaaagagagaaagcggccgtttatcatcaggcgaataaacggctctaa

SEQ ID NO: 212610 - DNA, 243 bp, Klebsiella pneumoniae; identical to SEQ ID NO: 137864

SEQ ID NO: 212611 - DNA, 1911 bp, Klebsiella pneumoniae
atgcgatttcccaaccaacgcttagcgcaactcttcaccctgctgcgaaatgaaacgctgccgcaggatgagctggcgcaacgcctgtcggtttccacccgtaccgtgcgcgctgatattaccgccctgaatacgctgctggcgcaatatggcgcgcagtttatccttaaccgcggtagcggttatcagctgaagatagataatccgacgagtttccaggcgctggaggagaccgcgccgaaggcgcagcacgtgccgcgtaccgcccaggatcgcatcacgtttctgctggtgcgtttcctgacgtcggcgttctctatcaagctggaagatctggcggatgagtggttcgtcagccgcgccacgttgcaaaatgacatggttgaggtgcgcgagcgcttccagcgctatcagctgactcttgaaacccgcccgcgccacggcatgaagctgttcggcagcgaggtgtcaattcgcgcctgcctgaccgacctgctgtgggagctgacccagcaaggcgatatcgcgccgccgatcggcgccgaggcctttgcggcggaggtgccagcgctgctggagccggtgctgcaggagacgctcacgcggcatcatattcgcctcaccgacgccggcgagcgctttgtctgcctgtatggcgcggtggtggtgcgccgcgtcagcgaaggctacccgctggccgatttcagcgctgaagatgtggcgcagaacgtccgcgacgccgcgcgcgagctgacgggcgagctgcagcggctggccgggaaacctttatcgcccgccgaagaagagtggctatgcgtgcatatcgcggcccgtcaggtgcaggatgtcgatccggaaactatcagcgccgacgatgatgaagcgctggtcaattacatcctgcgctacatcaacagccagtataattataacctgctggacgacgcccagttgcatgccgatctgctgacccacattaaaaccatgatcacccgggtgcgctaccagatcatgatccccaatccgctgctggataacatcaaacagcactacccgatggcctgggatatgaccctggccgcggtctccagctgggggaaatatactccgtacaccatcagcgaaaacgaaatcggctttctggtactgcatatcggcgttgggctggagcgccactacaacatcggctaccagcgtcagccgcaggtgctgctggtgtgcgataccagcaatgcgatggtacggatgatcgaggcgatcctgcagcgtaaatatccgcagctggagatcgccgctaccatctcccagcgcgagtacgaacagcgggacgcgatcgaggcggatttcgttatctcaacggtgcggatcggcgaaaaagacaagccggtagtgaccatcgcgccgttccccaccgactatcagctggatcaaatcggcaagctggtgctggtggaccgtacccgtccgtggatgctgaataaatacttcgatgccgcccacttccgggtggtcgataagccgatggatcagcaaacgctgttcgccgagctgtgccagcagctgctggaggaaggctttgtcgatgcggagtttcatgcttcggtggtggaacgtgaagcgatcgtcagcaccatgctgggggatggcattgcgctgccgcactccctggggctgctggcgaaaaagacggtggtttataccgttatcgccccgcagggcatcgcctggggcgacgaaaccgcccatctcattttcctgctcgctatcagcaagcgcgagtatgaagaggcgatggcgatctacgatattttcgtgactttcctgcgcgagcgcgccatgagtcgcctcgccgcgacccgcagcttcgatgagtttaaaacggtggcgatggagtgcgtcagccggttttga

SEQ ID NO: 212612 - DNA, 1155 bp, Klebsiella pneumoniae
atgcctgtcgctcgtcatctgcttgtcgcttcactgtccctgtttgccgccgccgcgggcgccgcgcaaacccactatgcctgggtaggcacctataaccccaatggcgaaggtctgtatcgctttaccgtcgatgccaaaaccggcgccctgcgcgataagacgctggtgagctcgttgccgaacgtcgcgcaattaaccgtgtcgcgcgatggcaaaacgctgtatgccgccagtgaggtcgaaaaaggcgtggtgcaggcgtggcgcattgaaaagaacggcgagctgaccgcgctcagccaggtcgcctccggcggcgccgggccggtgtatctctccctgacgccggacggtaagcatctgctggtggctaactatgtcagcggcagtatcgccgtgctaccggtgcaagaagatggtagcctggctgaggcggtggacaggcatcaggatgaaggcccggcaggcgccgaacgcccggcggcggccgtcgagggcagcttcgccatcagcgatcacaacggcccgcatgcccatatgatcgccgccgatcccagcgggaaatacgtttactctaccgatctggggctggatcggatctatcagtatcggctggatagcgccagcggcaagctaacgccgaacgatccgccgtttatcgccgcctcgtcgccgggagccggcccgcgccacttcgtctttacgccacagggcgacggcctgtggctgattaacgaggaagcgtcgacgctgaccttctatcatctggataagcaaagcggcctgctgcgtgaaggcaaaactgtctccgcgctgccggaaggttataaaggcaccagctttgccgccggacttgtgttgagcaacgatggcaaacagctatatgtcgccaaccgcctgcataacagcattgcccacttcacggtgctggccgacggcagcctgagtcaccaggaagatatctggacgcgtggcgattatccccgcaccctgacgctggataatcaggggcagtggctgtacgtcatgaaccagcgtagcgataatattacccgcttcagcgtggcgccgaaggatggcaaattaacctttgcctccgactatacgccggtcggtagcccatcgcagatggtgatatccgcccaaccctga

SEQ ID NO: 212613 - DNA, 741 bp, Klebsiella pneumoniae
atgaaactgaccccaaacttttaccgtgaccgcgtgtgcctgaacgtcctggcgggcagcaaagacaacgcccgtgaaatttacgacgcggcggaaggtcacgtcctggtcggcgtgctctccaaaaactatccggacgtcgccagcgcggtggccgatatgcgcgactacgcgaagctgattgataacgcgctctccgtcgggctgggggcaggcgatccaaaccagtcggcgatggtgagcgagatttctcgccaggtgcagccgcagcacgtcaaccaggtcttcaccggcgtggctaccagccgcgcgctgctcgggcagaacgagacggtggtcaacggcctggtctctcccaccggtacgccgggaatggttaagatctccaccggcccgctgagcagcggcgcggcggatggcattgtgccgctggaaaccgccatcgcgctgctgaaagacatgggcggcagctccatcaaatacttcccgatgggcggcctgaagcaccgcgccgagtttgaagccgtcgccaaagcctgcgccgcgcacgatttctggctcgagccgaccggcggtatcgatctggaaaactacagcgagatcctgaaaatcgccctcgatgccggggtaagcaaaatcatcccgcatatttacagctcgattatcgataaagccagcggcaacacccgcccggccgatgttcgccagctgctggagatgaccaaacagttagttaagtag

SEQ ID NO: 212614 - DNA, 1119 bp, Klebsiella pneumoniae
atgccttcgatttttgagaaataccatttaaaacaggtgattaatacttctggccgcatgacggcgctgggcgtttccacgccgcgcccggaagtggtggaagccgcgatggcaggtatgaaccagtactttgaaatgaaagacctggtgaataaaaccggcgagtacatcgccaaactgttggatgtggaaggggcgaccgttgtctcctgcgcgtcggcggggattgcccagtcggtagcggcggtgctggtgaaagacagcgactggctgctggagaacctgcacgttacgccgattgagaataacgaaatcgtgttgccgaagggccacaacgtcaacttcggcgcgccggttggcaccatggtggcgttgggcggcggtaagctggtggaagcgggctacgccaacgaatgttctgctcaacagctggcggcggcgatcactccgcgcaccgcggcaattctgtatatcaaatcccaccactgcgtgcagaaaagcatactcaacgtggcgcaggccgcggaagtggcgcgccagcataacttgccgctgatcgtcgatgcggcggcggaagaagatctgcagtgctactaccgcatgggcgccgacctggttatctacagcggcgcgaaagcgattgaagggccgaccagcgggctggtgatcggcaaaacgcagtacgtcgagtgggttaagcgccagtcgatggggattggccgggcgatgaaagtgggtaaagagggcattctcggcctgacctgcgccattgaacactacctgacggcgagcaaagagagcggtcagcagatggtggacaagatgacgccgtttatcgaacagctcaatactctcaacggcgtgaccgcgcgggtggtgtgggacagcgcgggccgcgatatcgcccgcgccgaaattaaatttgatgaagtcacgaccggcgtgaagaccggcgatctggttaacgcgctgaagcagggtgaatacgccatctacttccgcggctataaagcgaatgaaggcattatcgaagccgatgtccgcagcgtaaacgcggagcagctggcggtggtcgctcgccgcatcgcagaagttctgaataaggagaaacaagcatga

SEQ ID NO: 212615 - DNA, 1134 bp, Klebsiella pneumoniae
atgtttgatttactcctgcgccgcgcgcgcctcgtcgacgataccctgactgatatcgccattcaggacgggaaaatcgcggcgctgggcgagattagcgcgccctcccgtaaaaccattgagctgaacggcaaggtttacgtcagcgctggctggattgactctcacgttcactgctacccgaactcaccgatttatcacgatgagccggatagcgtcggcatcgccaccggcgtcaccaccgtgatcgatgccggcagcaccggcgccgacgacgtcgatgacttctatcaactgacccgtaaagcggcgacggaagtttatgcgctgctcaacatctcccgcgtcgggctgattgcgcagaatgagctggccaatatggccaatatcgacgccgccgcggtgaagcaggcggtgcagcgtcatcccgactttatcgtcggcctgaaggcgcggatgagcagcagcgtggtgggcgaaaacggcattacgccgctggcgcgcgccaaggccattcagcaggaaaacgacgatctgccgctgatggtgcacatcggcaataacccgccgaacctcgatgaaatcgccgatctgctgagcagcggcgacatcattacccactgctataacggcaagccgaaccgcattctgaatcctgccggcgagctgcgcagctctattactcgcgctctgcagcgcggcgtgcgtctcgatgtcggccatggcaccgccagcttcagctttgaggtggcgcggcgggcgattgcgctgggcattctgccgcacaccattagctccgatatttactgccgcaaccggatcgacggcccggtgcgctcgctggcgctggtgatgtcgaaattcctcgccatcggcatgacgctgccgcaggtgattgactgcgtgaccgtcagcgccgcagaagggctgcgcctgtcgcgtaaagggcggctggaagtgggcttcgacgccgatttaacgctatttcgcctggagcaccggcccacgctgctggtggatgctgaaaaagagagcctgcaggctgacaacattctggtgccgctggccgcgatccgcgcgggcaaaggctatctgaccgaacaagggagcgcggaacatgccttcgatttttga

SEQ ID NO: 212616 - DNA, 645 bp, Klebsiella pneumoniae
atggaacagaataaaggtttttggtatgccgactggtcgttcccgatctttgttggcctgctctcctccggcgtcttcgccgggacccacatgtactacctgtacggcatcggcgcctttaacgaagtagccttcgtggcgatgctgaagtcggggattgataccggcgtttacggcgcggtggcggcgtttggcgctagcttcctgttcgcccgcatcatcgaagggtcgctggtagggatcctcgatatcggcggcgcgatacagaccggtatcggtcttggcgtgccggcgctgctgctcggcgcgggctttgtcttcccggtggcgaacttcgccgcgtcgctggtcaccggcctggtcctcggcctggcggtgggctacatcatcattctggcgcgtaagttcaccatcaaccagagcgattccacctacggcgccgacgtgatgatgggggccggtaacgcctccggccgcttcctcggtcccttgatcatcctcagcgcaatgaccgcctcgattcctatcgggattggctcgctggttggcgcactgctgttctacatctggcagaaaccgatcaccggcggcgccatcctcggggcgatgatcctcggttccatcttcccggtggcgattagctaa

SEQ ID NO: 212617 - DNA, 777 bp, Klebsiella pneumoniae
atgttcctgataattttaataaaatcgcttatcatcggcggcctggtcggcgtcggcgtgggcgccggagcggcacgcatgtttcatgcccccaccacgcaggggatgggggcgtttcgaaccctgggcgagctgaattcctgtgagggcgatccggcctcccacttctcctttggccttggcttcttctttaacgcctgggcctcttccgttgcagcaggctccttcacccaggatgttgaccaccgcattatacccaactggggcgcggcggcgctgatgctgaaaaatcgtaacgtcggcgaaacgctgcacgatccgaaaaaaatggccatctcctgcggcatcatcggcatgattgtcgtcgccttcctcaacctgaccgcctcgtccgtaccggaagcgctgcaggtgaccgccgttaaggtactggtgccggcggcaaacctgctggtaaacaccgtgatgccggtgatcttctggctggcggcgatcgatgccggtaaaaaatcaggcttctgggcgacgattttcggcggcgccgcgcagctgattatgggtaacgccgtaccgggtctggtgctggggatcctgatcggtaaaggcgtcgaagagagcggctggaaccgggtgactaaagtgatgatggtggccatcgtcgcgctgtttgtcctcagcggcttcttccgtggcttcgacatgaagatgatcgaatccttccatctgaccgtgccgaactggctggacatgatccacaactcactcagcggcaagtaa

SEQ ID NO: 212618 - DNA, 300 bp, Klebsiella pneumoniae; identical to SEQ ID NO: 137855

SEQ ID NO: 212619 - DNA, 363 bp, Klebsiella pneumoniae
atggaacaaatcaccgtagtcattggcgaccgtctgggtaaaggccaaaaagtcgccgcaggcgctgaaaaagcgggcgcacgtgctgtggtcgtccctggcgttgcggccgacatgaagcttggcgacataatgaaagcggaaaatgccaccttcggcatctccttctgcggcagcggcggcgccggcgccatcaccgcccagaccaaatacggctacaaagcaaaatacggtatgcgctctattgatgagggcgtcaccgctatcaacgaaggctgcaacgtgctgggcttcggctttatggataaagaagagctgggcgagcggctggtagaagcctggaaaaagaaatacggcgcataa

SEQ ID NO: 212620 - DNA, 456 bp, Klebsiella pneumoniae
gtggggtcgatcacccctgccgcctccctttccacttcgaagtggaaaacaactcgctacaaactcctgacccccggcgctaccttgatttccagagacatcagcggggtaacacaagtgaataacggagcggtaataaacgacgtaggggagcaggcggcgcagaccgaacgcctggctgacaagatgttacagcaggtattcgccctgttaagccgtcacgacatcgtccctaacgacgttcaggagcaaatgctgacttcccacgtgcgggccatggcccaccggtcaatcagcggcgaaccgctaccggaagtggatgccagtctgttcgaagaaatttctgaagattcaatgatgctggcccgcgaagtggtcgcacagttcggcaacctgcctgatgaagaggcctggctgctctccgtccacttcgaagtcgcgaaagataacctgtaa

SEQ ID NO: 212621 - DNA, 387 bp, Klebsiella pneumoniae
atgcgtaaaaaactgttagcgatgctggctgtctctgcttttgcgctcggttcagcgtcggccttcgccgacctgggcgaagacatggacactctggcagaaaacctgcaagtggtacagaagacctccgacgccggcgagctgaaagcggcgctgaataagatgcgtaccgccgcggtcgatgctcagaaagagaccccgccgaagctggaaggcaaagcggccgacagcgctgagatgaaagattaccgtcacggtctggatattctgatcggccagatcgacggtgcgctgaagctggcgaacgaaggcaaggtgaaagaggcgcaggccgccgcggaggagtttaaaaccacccgcaacacctatcataagaagtaccgctaa

SEQ ID NO: 212622 - DNA, 1341 bp, Klebsiella pneumoniae
atgaaagtcatctctcaagttgcacagcagcgtaagacgctggaagaagccgttaccacggcactggaactggcggcaggtaaatctgatggtgcggaagtttccgtcagcaaaaccacgggcatcggcgtcagcacccgctatggcgaagtggagaatgtagaattcaacagcgatggggcattaggcatcacggtttaccatcagaaccgcaagggcagcgcctcctccaccgatcttagcccggacgctatcgcccgcaccgtgcaggcggcgctggatatcgcccgctatacctccccggacccgtttgccggcgtagccgataaagatctgctggcctttgacgccccggatctggacctgttccacccggcggaggtctccccggacgacgccatcgaactggccgcccgcgcggagcaagcggccctgaaggccgataaacgcatcaccaacaccgaaggcggcagctttaacagccactacggcattaaagtgttcggtaacagtcacggcatgctgcaaagttactgctcgactcgccactccctctccagctgcgtcattgcggaagatgacggcgatatggagcgcgactacgcctacaccattggccgggcgatcgaggatctgcagtccccggaatgggtcggggaagagtgcgcccgccgcaccctgtcacgcctggcgccgcgtaagctgtcgaccatgaaggcgccggttattttcgccaacgaagtggcgaccgggttgtttggccacctggtcggagcgattgccggcggcgcggtctaccgtaaatcgaccttcctgctcgattcgctgggcaaacaaattttgccggagtggctgaccattgaagagcatccgcacctgctgaaagggctggcctccacgccgttcgacagcgaaggcgtgcgcaccgaacgtcgcgatatcgtcaaagacggcgtgctgacccagtggctgctgaccaattactcagcgcgcaagctggggatgaaaagcaccggccacgccgggggcatccacaactggcgcattaacggccgcggcctgagttttgcaaagatgcttaaagagatgggcaccggtcttgtggttaccgaactgatggggcagggtgtcagtggcgtcaccggcgactactcacgcggcgcatccggcttctgggtagaaaacggcgaaattcaatatcctgtcagtgagatcaccattgcaggtaatctgaaagaaatgtggcgtaatatcgtgaccattggcgatgatattgaaacgcgcagcaacattcagtgtggttctgtgctgctgccggagatgaaaatcgccgggcaataa

SEQ ID NO: 212623 - DNA, 552 bp, Klebsiella pneumoniae
atgacaaagcagcccgaagactggctcgacgacgtgcccggtgatgacgttgaagatgaagatgatgaaatcatctgggtcagtaagagtgaaattaagcgcgacgcggaagaactgaagcgtcttggcgcggaactcgttgacctggggaaaaacgcgctggataaaattccgctggataccgacctgcgcgacgccatcgaactcgcccagcgaatcaaaaaagagggtcgccgccgccagctacagcttatcggcaagatgctgcgcaaccgcgatgtcgatccgattcgtcaggcgctggacaagctgaaaaaccgtcacaaccagcaggttgcgctgttccacaagctggagcagatccgcgatcgactgattgacgacggggatgacgccatcgctgaagtgctgaacctgtggccagatgctgaccgtcagcagctgcgttcgctgattcgcaatgcgaagaaagagaaagaaggcaacaagccgccgaaatcggcgcgcctgatcttccagtatctgcgtgaactggcggaaaacgaaggctaa

SEQ ID NO: 212624 - DNA, 1209 bp, Klebsiella pneumoniae
atgaaaaagacattggttctgacgacgatcgccctgctggtttccggctcggccgcggcaaaaacatgggtgctgacgaacgctgaagaggggatggataaaggaaactggcagatcaacagcgatcagctgaaggtgaaagatcatgcgttcagcattgagcagaaagtcctgcacggcggtaagcaggaaggcagcaaaatcctcaccattcatagtaaagacggcctgaccatcaccctgagcccgacacgcggcatgaacttgctgcgtattgagggtttcggcagccggatgggctgggattcgccggttaaagaggtcgtcaacccggcgtttatcaacctggaaagccgcaatggcctcggctggctggaaggattcaacgagatgatggtccgctgcggctatgaatggaccggccatccggtgaccgcggacgggcaaatttataccctacacggcaaggcgggcaacacgccggcctctctggtggaggtggaggtggccgacagcgcgccgtatgaaatccgcatccgcgggctggtgaaagagagcacctttaaaaaagccgatctgcagaccctgaccgaactgcgctacgtgccgggcagcaacagcttcagcttacatgacgtcttaaccaaccatgccgactatccgcatgattatcagatcatctaccacagcaacttcggcaccccgatcctcgaagaaggcgcgcgtttcctcgccccgatgtccagcatcagcccgttcaatgattacgctaagagtgggttaaaaacctggcaaacctatcagggaccgaccaaagattttgacgagatggtatttaatattcagcccctggccgatgaaaatcaccagaccctggccgccgtggtcaacaaagcgggcgataaaggggcctctattcagtttgatacccgtcagctgccggtcctgacgctgtggaaaaacaccgataccgtcaagcagggctacgtcaccggtatcgaaccggggaccagctacgcctatccggtcaccattgaacgcaaacaaaaacgcgtgaaacagctgcagccgggcgccagcgcgcagtttgatctaacctacaccctgctgcacgacagcgcccaggtagccgccgttgagcagaaaatcgctaagattcagggcgataacaaagtcgcggagaacgagacgccgatcgccaaagagtaa

SEQ ID NO: 212625 - DNA, 528 bp, Klebsiella pneumoniae; identical to SEQ ID NO: 138728

SEQ ID NO: 212626 - DNA, 1374 bp, Klebsiella pneumoniae; identical to SEQ ID NO: 138729

SEQ ID NO: 212627 - DNA, 999 bp, Klebsiella pneumoniae; identical to SEQ ID NO: 138730

SEQ ID NO: 212628 - DNA, 999 bp, Klebsiella pneumoniae
atgataaaacgtaatttaccattgatgatcacccttgcggtgtttgtgctgggctacctctactgcctgacccagttccccggttttgcctcaacgcgggtgatctgcaatatcctgacggataatgccttcctcgggatcatcgccgtgggcatgaccttcgtgatcctctccggcgggatcgatctgtcggtggggtcggtgatcgcctttaccggcgtcttcctcgccaaagcgattggcttttggggaatctcgccgctggtggcctttccgctggtgctggtgatgggctgcgccttcggcgcgtttatggggctgctgattgacgccctgaagatcccggcctttatcattaccctcgccggcatgttcttcctgcgcggcgtgagctatctggtgtcagaggagtcgattccgattaaccacccagtgtacgacaccctgtccgggctggcatggaccattcccggcggcggtcgtctcagcgccatgggactgctgatgctgctggtggtggtggccggtatttttgtcgcccatcgcacccgctttggcaaccaggtgtatgccatcggcggcaacgccacgtcggcgaatctgatggggatttcgactcgcagcgccacgatccgtatctatatgctctccaccggactggcgacgctggccgggatcgtcttttccatttatacccaggcgggctatgcgctggcgggcgtcggcgtcgagctggatgcgattgcctcggtggtgatcggcggtacgctgctcagcggtggcgtcggtaccgtgctgggaacgctgttcggggtggcgatccagggactgattcagacctacatcaacttcgacggcaccctcagctcatggtggacgaaaatcgccatcggcattttgctgtttatctttatcgcgctgcagcgtgggctgaccgtgctgtgggaaaatcggcagaatgcggcggtgacgcgggtgagcggggcggggagtcgctaa

SEQ ID NO: 212629 - DNA, 1026 bp, Klebsiella pneumoniae
atgatgcctcgatctctttcgcaaaccggcccggagaagcgacgcttcacctggccgaagggcaccccgcagattattgccctgctgctggttctgctggtagacagcctggtggcgccccatttttatcaggtggtgctccaggatggccgcctgtttggcagcccgatcgatattctcaaccgcgccgcgccggtggcgctgctggcgattggcatgacgctggtgatcgccaccggcggcatcgacctgtcggtaggggcggtgatggcgattgccggcgcgacggccgcctcgatgaccgtcgccgggcacagcctgccggtggtgctgttggccgcgctggccgcgggcgcgctggccggattgtggaacggcatcctcgtggcggtccttaagatccagccctttgtggcgacgctgatcctgatggtggccgggcgcggggtggcgcagttgatcaccgccgggcagatcgtcacctttgattccccggccctggcgtggctcggcagcggatcgtttctgctgtttccgacgccggtgatcgtcgccgccgctacgctgctgctgttctggctgtttacccgtaaaacggcgctgggcatgtttattgaggcggtagggatcaacatccgcgcggcgaaaaacgccggcgtcaatacccgcatcgtggtgatgctggcctatgtcctgagcggcgtctgcgcggcgatcgccgggatcatcgtggcggcggacatccgcggcgcggatgccaataacgccgggctatggcttgagctggacgccattctggcggtggtcatcggcggcgcctcgctgatgggcgggcgctttaacctgctgctctcggtggtgggggcgctgattatccagggaatgaacaccgggattttgctctccggcttcccgccggagctcaaccaggtggtgaaagcggtggtggtgctgtgcgtactgattgtccagtcgccgcgctttatcggtttactgaaaggggtacgcggccatgataaaacgtaa

SEQ ID NO: 212630 - DNA, 1503 bp, Klebsiella pneumoniae
atgagcgccgaggcacaccaggagatccttcgcaccgaaggacttagtaaattcttccccggcgttaaggcgctggataacgtcaactttagcctgcggcgcggcgaaatcatggccctgttgggcgaaaacggcgccggaaaatcgacgctgatcaaagcgctgaccggcgtttaccatgccgatcgcggcactatctggctggaaggccaggctatttcgcccaaaaataccgcccatgcccagcagctggggatcggcaccgtctaccaggaagtgaacctgctgcccaatatgtcggtggcggataacctgttcatcggccgtgagccgcggcggtttggtctgctgcgacgtaaagagatggaggccagggcgacggcgctgatggcctcctacggcttttccctcgacgtgcgcgagccgctgaaccgcttttcggtggcgatgcagcagatcgtcgctatctgtcgggccatcgacctgtcggccaaagtgctgatcctcgacgagcccaccgccagcctcgatacccaggaggtggagatgctgttcaccctgatgcgccagctcagggataacggcgtcagcctgatcttcgtcacccattttctcgaccaggtctatgcggtcagcgaccgcatcaccgtgctgcgtaacggcagcttcgtcggctgccgcgagacccgcgagctgccgcagattgagctggtgaaaatgatgctgggtcgcgaactggaccacaatgccctgcagcgggcgggccgtaccctgctgagcgataaaccggtagcggcgtttgaaggctacggtaaaaaaggaaccatcgccccgtttgacctgcaggtccgcccgggcgaaattgtaggcctcgccggcctgctgggttccggacgcacggaaaccgccgaggtgatcttcggcattaaaacggcggacagcgggaaggcgtggatcaaaggcaaacctcagaccctgcgctccccgcatcaggcttcctgcctcgggatcggcttctgtcctgaagatcgcaaaaccgacggcattatcgccgctgcctcggtgcgggaaaatatcgttctcgccctgcaggcgcagcgcggctggctgcggccgatcccccgccgggagcagaatgagatcgccgagcgctttattcgccagctggggatccgtaccccgagcgccgagcagccgatcgagtttctctccggcggcaaccagcagaaggtgctgctctcccgctggctgctgaccaaaccgcagttcctgatcctcgatgagccgacccgcggcatcgacgtcggcgcccatgcggaaattattcgcctgattgaaaccctctgcgccgatggcctggcgctgctggttatctcttctgaactggaggagctggtgggttacgccgatcgggtcattatcctgcgcgatcgccgacaagtggcggagatcccgctcgccgagctctctgttccggcgatcatgaacgctattgcggcataa

SEQ ID NO: 212631 - DNA, 957 bp, Klebsiella pneumoniae
atgtggaagcgcttacttcttgtcacagcagtttccgcagctatgtcgtctatggcgatagctgccccgctaaccgtaggtttttcgcaggtcggttctgaatccggctggcgtgcggcggaaaccagcgtcgcgaaagaggaggccgccaagcgcggtatcaccctgaagatcgctgatggtcagcaaaaacaggaaaaccagatcaaagcagtgcgttcctttattgctcaaggggtcgacgcgatcttcattgcgccggtggtggccaccggctgggaaccggtgctgaaagaggcgaaagaggccaagatcccggttttcctcctcgaccgttccattgatgttaaagataaagatctctacatgaccaccgtgaccgccaacaacgtgctggaaggccagctgattggcgactggctggtgaaaaccgtcgacggtaagccgtgtaacgtcgttgaactgcagggcaccgttggggctagcgtggccatcgatcgtaagaaaggcttcgccgacgcgattgccaaagcgtcgaatatcaaaattatccgctcccagtccggcgacttcacccgcagtaaagggaaagaggtcatggagagctttatcaaagctgagaataacggcaaaaacatctgcatggtgttcgctcataacgacgatatggccatcggcgccatccaggccattaaagaagctggtctgaagccgggcaaagatattctgaccggctccatcgacggcgtgccggatatctataaagcgatgatcgccggagaagccaacgccagcgtcgaactgacgccaaatatggccggcccggcgtttgatgcgctggagaaatacaaaaaagacggcaccctgccggagaagctgaccattaccaaatcgacgctgtacctgccggatacggcgaaagaagagttagagaagaagaaaaatatgggctactga

SEQ ID NO: 212632 - DNA, 531 bp, Klebsiella pneumoniae
atgagcttactcaacgtacctgcgggcaaagatctgccggaagacatctacgtcgtgatcgaaatcccggcgaacgcagatcctatcaaatacgaagtcgacaaagagagcggtgcactgttcgttgaccgtttcatgtccacggcaatgttctatccgtgcaactacggctacatcaaccacaccctgtccctggacggcgacccggttgacgtgctggtcccgactccgtacccgctgcagccgggctccgtgatccgctgccgtccggttggcgttctgaagatgaccgacgaatctggtgaagatgcgaaactggttgccgtaccgcacaccaagctgagcaaagaatacgatcacatcaacgatgtgaacgacctgccggaactgctgaaagcccagatcactcatttctttgagcactacaaagatctggaaaaaggcaagtgggttaaagtcgacggttgggataacgcggaagcggcgaaagccgaaatcgttgcctctttcgagcgcgctaagcagaagtaa

SEQ ID NO: 212633 - DNA, 1188 bp, Klebsiella pneumoniae
gtgaaaagcgttcgctatttcacccttaacttttctggcttcacgaccgccgcctgtgaaaaacaggggtatctgcgtcttatcgccggcgaccatgtcttttataccgataaacgctattttaacgacccctcgctttttgaccgcctgacgatcaatcagcctctgcaccttggcgtccgccgcctggacaacggcagttactggatccactggctcagcgatggcgaaacgctccttgagcccagtcaacgggtaaagcgctgggcccggccgctgctgattatcagcctgctgacgctcatcgtcgctcttatcccgctcgtgatgagcacctcagaatggggaaggttcggcttcggcattatcgcgatactggccttcatcgcgttgttaaccggcctctgcgagctactgttccaccgggcgctaaaaatgcaccccgccatgcgcgatctgttggcgaagatggcgcaggcccgccgccgcgacttttccttttgccagccgctaccgactacggcgcaaaccctccgccagtcggcgaagccttttacgcaagccctgccggaacgctatgccgtccggacgggaaaaattagcaatatcatttttaagaaatggttcgcggggaacccaacgcgggaataccatggcgttgggatacaatgcgacacggcgccgctggccttcttctggcagaacggcttcgccaacttcggcctacatccctttttttaccgccgtcaaccgccctttctcgctatcggcgatcggatagtcgtcgtctaccaacggaaagataacgacgtccaggcgttatacaacgtcagcgacgggggcgcttttctgaaaaatcatccctgttatcccggtgatcggcaaatgtcgctagtctataacctgttttatggcatggtgctggtgatttacctcctcatactcggcatgtcgctaaataacccatacaaaccagccaggggatttgggtggttaattcaggattcactggacatgctgtccctattattactcagtttcggcgggatcctggcggtactggagttgattggcccgacggcctggttattgtcacaccgggtggctgactggatgaagatgcgctcggcgatgcggcactacctgcagggagcggcccgccataccgcgctcgaggagatcatgtaa

SEQ ID NO: 212634 - DNA, 1167 bp, Klebsiella pneumoniae
gtgaaacagacccattatttcaccgtgaattttaccggcttcaccactgccgcctcggaagagcaaagctatttacgcctcattgcaggcgagcatgccttttataccgataaacgccattttaaagacccctcgctttttgaccgtctgaggctcggccagccgctacatatcggcacttgccgcctaaaggatggcagttactggatccactggttaagcgatggccacattttgctcgaaccttcccggcagccgctgagtattaaaaagcttcttcgacctgtcggcttggtcttttttgtttgcttgatcattctcgcttgtgctccatggttggatatttttttattattatgttttatcacaatgttggtgaatcccttcggcatcttctctttttgctcttgcaatttctcactcaggttacgtgttctcaatgcgaaaatgcagcgaacgaagcaaggcgatatttcattctgtcagcgtctggaaattctacccgctacttctgaaaggcatccaccatcggccaacaacgagatagcgctgccaaaagaatttgcgcttgaagaaggcgtgattctgaatagttattatcaaatatggttcgctacgagggtaaggccttattttatcaaagaaggcgcctgttttcagctggcgactcgtcactcgtttttttcagcgcgcttgacctggctgagcgatgccctgaataatcgttgtcgcccgccatttcttgccgatggggactgggttatcgccgcacgccggcatggatacgatgatcttcaggcgttatacaatgtcagtgatggcagtgtttatttaaaaaatagcccctttcatcccggcaatcagcagatggcatcaatttataaaatcgcgtacggcctcgtactcatagtgatgttttttacgctcaccatcaaactgcacgaccccatgcttaatctgggcagttggccattttatcgtgaaatgcttaccaggctgacaggcaccctgctcccgattaacctgctgttaatagtgatggagtttgtccgtatgattgcccatcccctgtcacgtcgggtggccggtagagtgaaggtacatcaggccatattacgttatgccagacgtcagggcgccagaatgacgccatgggaactgaagtaa

SEQ ID NO: 212635 - DNA, 345 bp, Klebsiella pneumoniae; identical to SEQ ID NO: 139243

SEQ ID NO: 212636 - DNA, 3777 bp, Klebsiella pneumoniae
atgagtttatggaagaagataagcctcggcgtcttaatcgtgttggtgctcctgctgggcaccgtcgggttcctggtggggaccaccaccggcttgcatctggtgttcaaagcggcggatcgctgggtaccggggctggaaatcggcaaagtgaccggtggctggcgtgatttaaccctcgataatgttcgctacgaacagcccggcgtggcggtgaccgccggtcagtttcacctcagcgtcaggttgcgctgcctgtgggacagcagcctgtgcgtaaacgacatcgcgctgcgcgatatttacgtcgccgtcgataccaagaagatgccgccctcagcgccggtcgaggaagaggacagcgggccgctgaatctctccactccttatccgatcaccctcagccgcgtcgcgctgcataacgtcaacgtcaaaatcgatgataccgcggtctccgtacgcgacttttccaccggcctgaactggcaggagaaaaatctgaccctgacgccgacctcgctgcaggggctgctgatcgccctgcctaaggtggcgaaagtggcgcaggagcaggtggttgagccgaaaattgacaacccgcagccgcaggaaaaaccgctcggcgagacgatgaccgacctcttctcgcagccggtgctgccggcgatgaccgatgtccatctgccgctgaacctcaatattcaggcgttccgcggcgagcagctgcgcctgaccggcgataccgatatcaccgtgtataacctgctgctgaaagtcagcagtattgacggccagatgaagctcgacgcccttgatatcgactccgatcagggcaaggttagcgcctcgggcagcgcgcagctgcaggataactggccggtggacattaccctcgccggaaccctgaacgtcgacccgatgaaaggggagaaggtgcagctgaaggtgggcggcgaagtgcgtaaaacgctcaaagtcggagtggacttaagcgggccggtcgcggccacgctgcgcgcggatgcgcagctggcggaggtagggctgccgctcaatatggagctgaagagtaagcagctcgcctggccgttcagcggcgagaagcagtttcaggccgacgatgtccagctgaagttcagcggcaaaatgaccgactatgcgctggccttctccaccgcggtgaaaggtcaatcgctgccgccggcgaaaatcgccctcaacgccaaaggcaatgaacggcagatcaatctcgacaagctgacggtcaatgccctggaagggaaaaccgagctgaaggcgctgctagactggcagcaggcgatcagctggcgcggcgagctgaccctcgacggcatcaacaccgccaaagaggtgccggactggccgtcgaagcttaacggccggatcaagacccagggcagcctgtacggcggcagctggcagatgtcggtgccggagctgaaaattaccggcaacgtgaagcagaacaaagtggatgtggcgggctcgctgcagggtaacagctatctgcagtggaaaatcccgggactgcatctggcgttaggcccgaacagcgctgatatcaaaggcgagctgggggtgaaggatcttaatctcgacgccaccatcgatgcgccgcacctggataatgcgctgccggggctcggcgggacggcgaagggcttggtaaaagtgcgcggcacagtcgatgcgccgcagctgctggccgatatcaccgcccgggcgctgcgctggcaggagctgaccatcgcccaggtcaacgtcaaaggggatgtgaaatccaccgatcagattggcggtaacctggacgtgcgggtggatcgcatcagccagccgggggtcaatatcagcctggtgcagctcaatgccaaaggtacagagaaacagcatgagctgcggctgcgcgtgcagggcgagccggtttccggccagctggcgctggcaggcagcttcgatcgtcaggccgaacgctggaaaggctcgctgagcgatacccgcttccagacgccggtggggccggtagcgctgacgcgcagcattgcgctggactatcgcaatctggagcagaaaatcagcatcgggccacactgctggaccaacccgaacgccgagctctgcgtgcctgaaaccattgacgcgggcgccagcggacgggcgcgggtgaatctcaaccgcttcgatctggcgatgctcaagccgtttatgccggaggcgacccaggccagcggcgtgtttactggtaatgccgatgtgagctgggacaccaccaaagagggactgccgcagggcaaagtgaccctcagcgggcgcaacgtcaaggtgacccaggtcgtcaacgacgcgccgttgccggtggcgttcgatacgctgaacctcagcgccgacctgcacaacaatcgcgccgagctgggctggcttatccgcctgaccaacaatggtcaactggatgggcaagtgcaggttaccgacccgcaggggcggcgtaatctcggcggcaacgtcaatatcagcaacttctcgctggcgatgatcaacccgattttcgctcgtggtgaaaaggcagagggaaggctcaacgcccgtctgcgtctgggcggcaatgtgaaaagtccgcagctgttcggccagatgcagctgagcggggtggatatcgacggcaactttatgccgtttgatatgcagccgagccagctggcgatgaacttcaacggcacgcgctcgaccctgcaggggacggtgaacacccgccaggggcaaatcgccctcagcggtaacgccgactggacgcagatcgataactggcgggcgcaaattgcggcgaaaggcagccgggtgcggatcacggtgccgccgatggtgcgtctcgatgtatcgccggatgtggtgtttaccgccacgccaagcctgttcaatctcgacggcaaagtggatgtgccctgggcgcggatcgtggtcaacgaggtgccggagagcgcggtcggtgtctcctctgatgaagtgatgctggataaaaacctcaagccgattaagcagcagagcgccagcatcccgatcaacagcaacctgaccattcacgtcggcaacaacgttcgtctggaagccttcggcctgaaagcgcgtctgaccggtgatttgaaagtggcgcaggacaagcaggggctgggcctcaacgggcagattaatattccggacggccgtttccacgcctatggtcaggacttgattgtccgcaaaggggagctgctgttctccggtccgccggatcagccgttgctgaatatcgaagcgattcgtaacccggatgccaccgaagacgatgtgatcgccggcgttcgcgtcactggctccgccgatcagccgaaagcggagatcttctctgatccggttatgtcccagcaggaagcgctgtcttatctgctgcgcggccagggtttgagtagtggtcagagcgatagcgccgcgatgacctcaatgcttattggtatgggggttgcacaaagtggtcaggttgtgggtaaaatcggcgagacgtttggcgtaagcaacttggcgttggacaccgaaggggtaggcgattcttcccaggtggtggtcagcggctatgtactgccgggtctgcaggtaaaatacggggtcggtatcttcgattccctggcgacgctgactttacgttatcgcctgatgcctaagctatatgtggaagcggtgtctggcatcgaccaggcgctcgatttgctctatcagtttgagttttag

SEQ ID NO: 212637 - DNA, 1734 bp, Klebsiella pneumoniae
gtgctaaaaatccgccagttatgtgtcaccagccttttgctggtcagcggggtcgccagcgcagcgaatgtgcgtttgcaggttgagggattatccggggagctggagaaaaacgttcgcgcccagctttccaccatccagagcgatgaagtcacgccggatcgtcgctttcgcgcgcgcgtcgatgacgccattcgcgaaggcctgaaagcgctgggttattacgagccgacgattgaatttgatttgcgtccgccgccgaaaaggggacgtcaggtgctgatcgccaaagtgaccccgggagaaccggtgcgcattggcggaaccgaggtgattctgcgcggcggcgcccgcaccgatagcgactacctggcgctgctgaaaacgcgcccggccatcgggacggtgctcaaccacggggattatgacggcttcaagagctcgctgacccgcgtcgccctgcgcaaaggctactttgacagcgagtttcttaagagccagctcggggtctccctcgaccgtcatcaggcgttctgggatatcgattacgacagcggcgaacgctatcgctttggccacgtcactttctctggctcgcaaatccgcgatgaatacctgcaaaacctcgtgccgtttaaagagggcgactactacacctcacaggacctggccgagctaaaccgccgcctggcggcgaccggctggttcagttcggtggtggtggcgcctgattttgctaagtcgcggaaaaccaaggtgctgcctctgcagggcgttgtctcgcctcgcaaagagaacaccgtggaaaccggggtcggctattccacagacgtcggtccgcgggtgaaagccacgtggaaaaaaccatgggtcaactcgtatggccacagcctgacctccagcgtcagcctctccgccccggagcagcagttcgactttacctataaagtcccactgctgaagagccccctcgaacagtattatctgatgcagggcggttttaagcgtaccgacctcaatgatacccaggccgactctaccaccctgggtgtctcgcgtttctgggagatgtcgagcggctggcagcgagcgattaacctgcgctggagcctggatcactttacccaggcgaacgtcaccaacaccaccatgctgatttatcctggggtctcggtgaaccgcactcgctcccgcggcggcctgatgcctacctggggcgattcccagcgctactcggtggactactccaacaccatgtggggctcggacatcaacttcatcgtgatgcaggcccaggacgtctggatccgtaccctctatgaccgccaccgctttgtggtgcgcggcaaccttggctggatcgaagcggacaactttgacaaggtgccgccagatctgcgttttttcgccgggggcgatcgcagtattcgcggctataaatacaaatctatctcgccgaaggacgatgacggcaagctgatcggggcctcgaagctggccaccggctcgctggagtatcagtacaacgtcagtggtaaatggtggggcgccgtgtttgtcgatagcggcgaagcggtcagcgatattcgcgagagcgatttcaaaaccggcgccggggtgggcgtgcgctggcagtcgccggtggggccgatcaagctggatatcgcccggccgatcggcgacaaagaagagcatggtttacagttttacatcggtctggggcctgaattatga

SEQ ID NO: 212638 - DNA, 639 bp, Klebsiella pneumoniae
gtgagtctatttgataaaacgcatcttgtcgcccaggcggatgcgctgcctggacgcaatacccccatgccagtggcgacgctccacgcagttaacggccactcgatgaccaacgtcccggcggggatggaagtggcgctgttcgccatgggctgcttctggggagttgagcgcctgttctggcaattgccgggggtttacagcaccgccgcaggttacactggcggctatacgcccaatccgacctatcgcgaagtgtgcagcggccagaccggtcacgcggaagcggtacgcgtagtttatgatccgcaggtgattagctatgagcagttattgcaggtgttctgggaaaaccacgatccggcgcagggtatgcgacagggtaacgaccacggcacccagtaccgctcggcgatttacccgctgaccccggaacagacggaggcggcaaaggccagcctcgcgcgcttccaggcggcgatgaacgacgcgcacgatacccgtcacatcaccaccgagatcgccaccgccaaaccgttctactatgccgaggacgatcaccagcagtatctgtataaaaatccgcacggctattgcggcatcggcggcattggcgtctgcctgccgcctcaggcgtaa

SEQ ID NO: 212639 - DNA, 1338 bp, Klebsiella pneumoniae
atgttaaacagtattttagtaatactctgtctgatagccgtcagtgcgtttttttcgatatcggaaatttcactggccgcctcacgtaaaatcaaactgaaactgctggccgatgaaggcaacgtcaacgcacagcgggtgctgaagatgcaggagaacccgggcaccttctttaccgtcgtgcagattggcctcaacgccgtcgccattcttggcggtattgtgggcgacgcggctttctcaccggcgtttcatagcctgctcagcgggtatttgtcgccggagctctccgagcagctgagcttcatcatctcttttaccctggtcaccagcttgttcatcctgtttgctgacctgactccgaaacgcatcggtatgattgcgcccgaaacagtggccctgcgcatcatcaacccgatgcgcttctgcctgttagtcttccgcccgctggtgtggttgtttaacggcatggccaacatgatcttccgcatcttcaaactgccgatggtgcggaaagacgatatcacttccgatgatatatatgccgtggtcgaggccggcgcgctggccggggtgctgcgcaagcaggagcatgagctaattgagaacgtgttcgagctggagtcccgcaccgttccttcctccatgaccccgcgtgaaagcgtcatttggtttgatttgcacgaagacgagcagagcctgaagaataaagtggccgaacatccgcactcgaagttcctcgtctgtaatgaagatatcgaccacattatcggttacgtcgattcaaaagatctgctgaaccgcgtgctggcgaaccagagcctggtgctgaccggcggcgtacagatccgcaacacgttgatcgtgccggacaccctgaccctgtcggaagcgctggaaagcttcaaaaccgccggggaagacttcgcggtgatcatgaatgaatacgcgctggtggtcgggatcatcactctcaacgacgtaatgaccaccctgatgggcgacctcgtcggccaggggctggaagagcagattgtcgcccgcgatgaaaactcgtggctgatcgatggcggtacgccgattgatgacgtgatgcgcgtgctggatatcgacgagttcccgcagtccgggaattacgagaccatcggcggctttatgatgtttatgctgcgtaaaatccccaaacgcaccgacgcggtgaagttctccggctataagtttgaggtcgtggatatcgataactaccgtatcgaccagctgctggtgacccgcatcgataacaagccaacggtgctggtgccgaagcaggcggaaacggcggaaagccagaacgcctga

SEQ ID NO: 212640 - DNA, 207 bp, Klebsiella pneumoniae; identical to SEQ ID NO: 134778

SEQ ID NO: 212641 - DNA, 558 bp, Klebsiella pneumoniae
atgaccctacgtagcatactggccgcctcgttactgcttctcccgctgctggccacagcgcataacttcgtcgacggccagcgcgtggcgcccgttggcgtcgcggatcggggagagcttattctggataaggataagtttagctataaaaactggaatagcgcccagctggcgggaaaagtgcgcgtggtccagcacatcgccggacgctcgtcagcaaaagagaagaatgccaacctgatcgaggcgattaaagcggcgggcttcccgcacgatcgctatcagaccaccaccattgtaaacactgacgacgccatcccgggcaccgggatgtttgtacgcaacagcattgaaagtaataaaaagctcttcccatggtcgcaatttatcgtcgacagcaacggcctggtgcggaaggcctggcagctggacgagaagagctcagcgatcgtggtgctggataagaacgggcgtgtgcagtgggctaaagacggcgccctcacccaacaagaggtgcagcaggtgatcgacctgctgcataaattgcttaataaatag

SEQ ID NO: 212642 - DNA, 744 bp, Klebsiella pneumoniae
atgttagaacaagtatgtcagcttgcacggaatgcgggcgatgccatcatggaagtctacgatggaaaccagccgatcaacgtcgccagcaagaaagatgattctccggtcacggcggcggatatcgcagcgcataaagtcattgtcagcggcctgcaggcgctggatccggataccccgatcctctccgaggaggacccgccgtcctgggaagtgcgccagcactggcagcgctactggttggtcgacccgctggacggcaccaaagagtttattaagcgtaacggcgaattcaccgtcaatatcgcgctgattgaaaacggcaagccgacgctgggcgttgtctatgcgccggtgatgaaggtgatgtacagcgcgcaaaatggcaaagcctggaaagaagagtgcggcgtacgcaagcagatccaggtccgcgatgcccgtccgccgctggtggtgattagccgctcccatagcaacgatccggagctgcaggagtatcttgagcaacttggcgaacaccagaccacctcaatcggttcgtcgctgaaattctgcctggtggcggaaggtcaggcccagctctatccgcgcttcgggccgaccagcacctgggacaccgccgccggccatgcggtcgcggtggccgccggggcgcatgttcacgactggcaggggaaaaccctcgactacacgccgcgtgaatccttccttaaccccggcttccgggtctctatttattaa

SEQ ID NO: 212643 - DNA, 1944 bp, Klebsiella pneumoniae
atgattaagtttagcgcaacgctcctggccacgctgatcgccgccagcgtcaacgccgcgacggtcgacctgcggatcatggaaaccaccgatctgcacagcaatatgatggacttcgactattacaaagatgccgccacggagaaattcggcctggtgcgtaccgccagcctgatcgaacaggcgcgggcagaagttaaaaacagcgtgctggtggataacggggatgtgatccaggggagcccgttaggcgactatatggcggcaaaagggctcaaagagggcgatgtacatccggtgtataaggcgatgaacaccctgaattacgccgtcggcaacctgggcaaccatgagttcaattacggtctcgacttcctgcacaaggcgctggccggggcgaagttcacctacgtgaacgccaatatcatcgatgccaaaaccggcaaaccgatgtttacgccgtacctgatccaggatacccgggtcgtggacagcgacggtcaaatccacaccctgcgcatcggctatatcggctttgtgccgccgcagatcatgacctgggataaagccaatcttaacggcaaggtgacggtcaatgacattaccgaaaccgcgcgcaaatatatcccggagatgcgggcgaaaggggctgatgtggtggtagtggtcgctcactccggcctctccgccgacccgtatcaggcgatggccgagaattcggtttactacttaagccaggtgcccggcgtggacgccattatgttcggccatgcccacgcggtgttcccgggtaaagacttcgccaacatcaaaggcgcggatatcgccaaagggacgctgaacggcgtaccggcggtgatgccgggaatgtggggcgatcatctcggggtggtcgatctggtgctaaataacgacagcggtaaatggcaggtaactcagagtaaagcggaagcgcggccaatctatgacgcggtggcgaagaaatcactggcggccgaagatggcaagctggtggcggtgctgaaagccgatcatgacgccactcgcgaattcgtcagcaagccgatcggcaagtccgccgacaacatgtacagctatctggcgctggtgcaggacgacccgacggtgcaggtggtcaacatggcgcagaaagcctacgtcgaacactatattcagggcgacccggatctggcgaagctgccggtgctctccgccgccgcgccgtttaaagtcggcgggcgtaaaaacgatccggcgagctttgtcgaagtggagaaaggccagctcaccttccgcaatgccgccgacctctatctctaccccaacaccctggtggtgatgaaggtcagcgggaaagaggttaaggagtggctggaatgctctgccggacagtttaaccagatcgatcccgccagcagcaagccgcagtcgctgatcaactgggacggcttccgcacctacaacttcgacgtcattgacggggtgaactaccagatcgacgtcactcagccggcccgctacgacggcgaatgtcagatgatccatccgcaggcagagcgtattaagcacctgaccttcaatggaaaaccggttgatccgcaggctactttcctggtcgcgaccaataactatcgcgcttacggcggcaaattcgccggcaccggtgagagccatatcgccttcgcctcaccggatgaaaaccgttcggtgctggcggcatggattggcgcgcaatcgaagaaggaaggcgcgatccatccggcggcggataacaactggcgtctggcgccgatccacagcaacacgccgttggatattcgttttgagacctcgcctggcgacaaagccgcggcgtttatcaaagagaaagcgcagtatccaatgcgccaggtggccaccgatgatatcggcttcgccatttatcagctggatttgagcaagtaa

SEQ ID NO: 212644 - DNA, 372 bp, Klebsiella pneumoniae
atggccgaaccgacgctgagcgagaaattgcgcaccggcaatttgtttgcggaacagtgcccgtcgcgcgatgtgcttaaacatgtcaccagccgctggggcgtgttgattctggtggcgctgcgcgagggaacccaccgtttcagcgatctgcgccgtaagatgggcggggtcagcgaaaagatgctggcgcagtcgctgcaggcgctggagcaggatggttttatcgaccgcgtctcttatccggtggtgcccccgcacgttgaatatagcctgacgccgctcggcctgcaggtgagcgagaaggtggccgccctggcggactggatcgaggttaatctgccctcggtgctggctaaccacggggagtga

SEQ ID NO: 212645 - DNA, 849 bp, Klebsiella pneumoniae
atgatcgctcttaccggtgccaccggccagcttggccactacgttctgcaagacctgcttaacaccgtccctgccagccagattgtggcgattgtccgcaacccggccaaagcccaggcgctcagccagcagggcgtggttgtccgccaggccgactacagcgacgaagcggcgctgaccgccgcgctgcagggcgtggataaactgctgttaatctcctccagcgaagtcggccagcgtgctgtacagcaccgcaacgtcattaacgccgccaaagccgccggggtaaaattcatcgcctataccagcctgctgcatgccgacacttcgccgctgggtctggccgcagagcatatcgaaaccgagcagatgctggccgactctggtatcgcttacgccctgctgcgtaacggctggtataccgaaaactatctggccagcgcgccgccggcgctggagcatggcgtgtttatcggcgccgccggcgagggtaaaatcgcctccgccacccgcgccgattatgccgccgctgccgcccgcgttatcgccagtgagggtcatgaaggcaaaatttacgaactggcgggtgataacgcctggacgctgagcgacctggctgccgagctgagcaagcaaagcgggaaaaacgtggtctaccagaacctcagcgaagccgatttcgccgccgcgctgaaaagcgtcggcctgccggccgggcttgccgatatgctggcggattccgatgtcggcgcgtcgaaaggcggactgtttgacgacagccgcaccctgagtacgctgatcggccgcccgaccacctcccttgccgagagtgtaaaaggcattctgtaa

SEQ ID NO: 212646 - DNA, 825 bp, Klebsiella pneumoniae
atgcagggcgtaccactccaatttagtgatgaaaaagaccgcgcgcgctttcgccatctcgaacagctgcccggggtggagctttaccacgcccatatatcccgctacgcctttgaaccccatacccacgaagccttcggcatcggcgtgattgagcaaggcgcggagcgctttcgctaccgcggcagtcagcatattgccgccgcaaactcaattgtcaccatgaatcccgacgagctgcacaccggcgaagcggaaaccgccgacggctggcgctaccggatgatttatctggagccggaccgtcttgaagccatcaccggggtgcgagactggtggttcagcgaggtggtccgcgaggatcctctacgttcccgacagattggccagctgatttatggcctgtggcatagcgacgatccgctggcccagcagggactgctgctcgacctcatcgacgccttccgccctctggcccaccatgcctctgcgcaaggtgaggccgggcatcgctttgaccgcgtgcgcgactacctgcacgataactatatgcgtcccatcaccctcgacgagctggcgcaggtggcggcgctgagcccgtaccactttcagcgccagtttaaagcccactatcacgtaacgccccatcagatgctgatggccatccgtctgtggcgcgccaaagcgttcctcacccacggcatgcccgccgccgaagtggcgatagccgtcggcctcaccgaccagtcccacctgacccgcgccttcacccagcgttacggcattacgccggtgcgctatcagaagcaggtcgccaggcgctaa

SEQ ID NO: 212647 - DNA, 972 bp, Klebsiella pneumoniae
atgattagtggtgtgttatacgccctgctggcggggctgatgtggggtttaattttcgtcgggcctttgctggtgccagagtatccggcgatgctgcagtcgatgggacgctatctggcgctgggcctgatcgccctgccgctggcgtggctcgggcgcgcgcgactgcgccagttgagccggcacgactggtggaccgcgctgggcctgacaatgatggggaaccttatctattacgtctgcctggccagcgccattcagcgcaccggggcgccggtttccaccatgattatcggcacgctgccggtggtactgccggtgttcgccaatctgctctacagccagcgcgacgggaagctgccgtggcggcgcctgtttccggcgctgatctgcatcgccgtgggcctgatctgcgttaacgtcgcggagctgcgtcaggggctgccgaattttagcccgtggcgctacggctccggcattgcgctggcgctgggatcggtggtctgctgggcctggtatgccctgcgcaacgcccgctggctgcgggagaacccgcatcaaccgccaatgatgtgggctaccgctcaggcgctggtgacgcttccggtttcgctggccggctatctcgccgcctgcgcctggctgcacggtcagcaggccgggtttcccctgcccttcggcccgcgtcctgcggtgtttattacgctgatgctggccatcgcggtgctctgctcatgggtcggcgcgctatgctggaatattgccagccagcggctgccgacggtgatcctcggcccgcttatcgtcttcgaaaccctggccggactgctgtataccttcctgctgcggcaaagcttaccgccgctgctgaccctgagcgggatcctgctgctggtgctcggcgtggtctctgccgtacgcgccagaccggaaaaaccgatgctgcagccgctggcggacgaaaaaaagtag

SEQ ID NO: 212648 - DNA, 663 bp, Klebsiella pneumoniae
atggctttccgtgaccaacctttaggcgagctggcgctgaccatcccgcgcgcctccgccctgttccgtcaatacgatatggattactgctgcggcggcaaacagaccctggcgcgcgccgcgtcgcgcaaagcgctggatgtcgcggtgattgaagccgagctggcgaaactggccgaacagcctctctcccgcgactggcgcgcggcgcccctcgcggagattatcgaccatatcatcgttcgctatcacgaccggcaccgtgaacagctgccggagctgatcctgcaggccaccaaggttgaacgcgtccatgccgataaaccgaacgtgccgaaaggactgactaagtacctgaccatgctgcatcaggagctttccagccacatgatgaaagaggagcagatcctgttcccgatgatcaaacagggaatgggcgcccaggccggggggccgatcagcgtgatggaaagcgagcatgatgaagcgggtgaactgctggaagtcattaagcacatcacccacaacgtgacgccgccgccggaagcctgtaccacctggaaggcgatgtataacggtatcaacgagatgatcgacgatctgatggaacacatcagcctggaaaataatgtgctgttcccgcgcgccctcggcggaaagtaa

SEQ ID NO: 212649 - DNA, 1404 bp, Klebsiella pneumoniae
atggtagatcaggttaaagtcgctgctgtcgagcaggagccgactgaacaatcgctacggcgaaatctcacaaaccgacatattcagctgatcgcgattggcggagcgatcggcaccgggttatttatgggttctggcaaaaccatcagccttgccggaccatccattatctttgtttatatgattatcggttttatgctgtttttcgtgatgcgtgccatgggcgaattactgctgtcgaacctcgaatataaatcctttagcgacttcgcggccgatctgctggggccgtgggcgggctactttaccggctggacctactggttctgctgggtagtgaccgggatggcggacgttgtcgccatcaccgcctacgcgcagttctggtttcccggactctccgactgggtcgcctcgctggcggtgatcctgctgctgctgggcctgaacctggccaccgtcaagatgtttggcgaaatggagttctggttcgcgatgatcaaaattgtcgccatcgtggcgctgatcgtggtcggcctggtaatggtgatgatgcatttcaaatcgccgaccggggtcgaagcctctttcgcccacctgtggaatgacggcggctggttcccgaaagggctgagcggcttcttcgccggcttccagattgcggtgtttgccttcgtggggattgagctggtgggtaccaccgccgccgaaaccaaagacccggaaaagtccctgccgcgggcgattaactccatcccgctgcgtatcattatgttctacgtcttcgcgctgattgtgattatgtcggtgacgccgtggagctccgtggtgccgagcaagagcccgttcgttgagctgttcgtgctggttggtctgccggcggcggcgagcctgatcaacttcgtggtgctgacctccgcggcctcctcggccaacagcggcgtgttctctaccagccgtatgctgttcggtctggcgcaggatggtcaggcgccgaagatgttcgccaagctgtcgaagcgtgcggtgccggcgaagggcttaaccttctcctgcatgtgtctgctgggcggggtggtgatgctgatggtcaacccgagcgtgattgccgccttcaccatgatcaccacggtgtcggcgatcctgtttatgttcgtctggaccatcatcctttgctcttacctggcgtatcgcaaaaaccgccctcagctgcatgagaagtcgagctacaagatgccgctgggtaaagtcatgtgctgggtgtgcatggccttcttcgtctttgtgctggtgctgttgaccctggaagacgatacccgtgaagcgctgatggtcaccccgctgtggtttgtgctgctgggcgcgggctggctgtttgccggcaaaaaacggctggcgaaataa

SEQ ID NO: 212650 - DNA, 621 bp, Klebsiella pneumoniae
atggcaaccccaacttttgacactatcgaagcgcaggcaagttacggtatcggcttgcaggttggacaacagctgagcgaatccggcctgcaggggctgctgccggaagcgctggtggcgggtatcgccgatgcgctggaaggtaaccagccgcaggtgccggtggaagccgttcaccgcgcgctgcgtgaaatccacgagcgtgctgacgctgtgcgtcgcgagcgttttcaggccatggccgctgacggccaaaaataccttgatgaaaaccgcgagaaagagggtgtgaacagcaccgagtctggtctgcagttccgcgtactgacccagggcgaaggcccgatcccggcgcgtactgaccgcgttcgcgtgcactacactggcaaactgatcgacggcaccgtcttcgacagctccgttgctcgcggtgaaccggctgaattcccggtgaccggcgtgatcggcggctggattgaagcgctgactctgatgccggtaggttccaaatgggaactgacgatcccgcacaacctcgcctacggtgagcgcggcgctggcgcatcgattcctccgttcagcaccctgatcttcgaagttgaactgctggacattatctaa

SEQ ID NO: 212651 - DNA, 675 bp, Klebsiella pneumoniae
atgcccgggcgctttgaactgacatctaccctggcgaaaatctggcacgccccggatcattttcgcctcctggacccgctgcctccgatgcaccgccggggaattatcgctggcttcctgttggttattatcggtattctgcttccctccgatgatagccaaagcccggcgtccaccagccgtgaagcgaacctgaacctacagtcgcagtcccagccgcaagctggcggcaatcaggccgttccgctgccgccgatcactaatacgcctaccgtgagcgacgccgatcagatggcgccggtcgccccggagccgattcaggatgagcagccggatcaggcgcagacgcagcagcccgccgcctcccagccttatcaatcctcatcacagcagtccgcgccgggtattgagcagcaatggcggacctatcgcatcgagtcaggcaaaaccctggcgcagctgttccgcgatcatgggctgccggccactgacgtctacgccatggcgcaggttgaaggcgctggcaagccgctaagtactttgcagagcggacagacggtgcagattcggcagaacgccaacggcgtggtcaccgggctcactatcgataccggcaacggccagcaggtgctgtttacccgccagtcgaacggcagctttgtgcgtgcgcgatag

SEQ ID NO: 212652 - DNA, 450 bp, Klebsiella pneumoniae; identical to SEQ ID NO: 135874

SEQ ID NO: 212653 - DNA, 228 bp, Klebsiella pneumoniae; identical to SEQ ID NO: 135875

SEQ ID NO: 212654 - DNA, 315 bp, Klebsiella pneumoniae
atgaccaaccgtctggagctgtccggcattatttgcaggactccacttcgtaaggtcagcccgtcaggaattcctcactgccagttcgtgcttgagcatcgttcagtgcaggaggaagccggttttcaccggcaggcatggtgtcagatgcccgttattattagcggtcatgagaaccaggccattactcacagtataacggtcggtagcgcagtaaccgttcgagggttcatctcttgccataaggcaaagaacggcttgagcaaaatggttctgcatgccgagcagattgaattgatagattctggagactag

SEQ ID NO: 212655 - DNA, 396 bp, Klebsiella pneumoniae; identical to SEQ ID NO: 135877

SEQ ID NO: 212656 - DNA, 276 bp, Klebsiella pneumoniae; identical to SEQ ID NO: 135878

SEQ ID NO: 212657 - DNA, 1194 bp, Klebsiella pneumoniae
atggttccgcgtttcgccaccttaggccgtatccccaaaggcgtttgggtactcggcggcgtcagcctgctgatggatgtctcctccgagatgatccacagcctcttaccgctgtttatggccactaccctcggcgccagcgtgataattatcggtcttatcgagggactggcggaagccaccgccctgatcctgaaggtcttctccggcgcaatcagcgactatgtcggcaagcgtaaaggactggcgctgctgggctacggcctgggcgcgctcagtaagccgctgtttgccatcgcccctaccgccggggtggtgtttagcgcccgcatgattgaccgcgtaggcaaaggtattcgcggcgcgccgcgcgatgcgctggtcgccgatgtcaccccgccggagatccgcggcgccgcctacggactacgccaggcgctggataccgtcggcgcctttctcggcccgctgctggcggtgctgctgatgtttatctgggccaacgattttcacgctattttctgggtggcggtcattcccgccgtgctctccattctcctgctcggattcggcctacaggagccaaaatccgccatcgcgcacaaacgcagcaatccgctgaagcgcgaaaacctgaaaaagctctccgccgcctactggtgggtggtcgcgatcggcagcattttcaccctcgcccgcttcagcgaagcctttctggtgctgcgcgcccagcagatggagatcccgctctataccatcccgctggtgatggtggcgatgaacctggtctacagcctcacggcttacccgttcggtaaactctcagacagcatgagccacagcaaactgctgcagtgggggctgctggtgttgatcctcgccgatatcgtgctggcgctcagcagccactggagcacgctgctgatcggcgtcgcgctgtgggggattcatatgggaatgacccagggcctgctggcggcgatggtcgcccatacggcgccaccggagctacgcggcacggcgttcggtatgtttaatctgatgagtggcctggctctgctgctggccagcaccggcgcgggggtactgtgggaaaccttcggcgccgcctcgacgttttacgccggggcgataatttgcgtggtcacgctcatcggcatgcgcgtgatgccgtcggcctatcgtcaggattaa

SEQ ID NO: 212658 - DNA, 687 bp, Klebsiella pneumoniae; identical to SEQ ID NO: 135880

SEQ ID NO: 212659 - DNA, 396 bp, Klebsiella pneumoniae
atggagatcatggactacccgctgatgaactcgatcagtaaagcgctgggctatgcccattacctgaataatccgtggttccagctttacccggatatcggcaatctgtcggcgtgggataacgacgtccagatggagctgaaggcggggagcgggcatatcgtggcggtacacgtcaaagacacgaagcccggcgtctttaaaaacgtgccgttcggcgaaggggtggtcgattttgaacgctgcttcgaaacgctcaagcagaccggctactgcggcccgtacctgattgagatgtggagcgaaaccagcgctgacccgctggcggaggtggcgaaggcgcgtgactgggtgaaggcgcggatggcccgcgcgggcctgatggaggcggcataa

SEQ ID NO: 212660 - DNA, 447 bp, Klebsiella pneumoniae
atgttggcgaaatccattccgctcggcatctatgaaaaagcgctccccgccggggagtgctggctggagcggctaaagcttgcaaaagcgctgggctttgatttcgttgagatgtctctcgatgaaacggacgcccgccttgcgcggctggactggagcccggagcagcgtctggcgctggtcaaggcggtggctgaaaccggcgtccgggtgccgtcgatgtgccttagcgcccatcgccgttttccgctgggtagtgaagacgacgcggtgcggcatcaggggctggagatcatgcgtaaagccatccgcctggcgcaggatgtggggattcgggtgatccagctggcaggctacgacgtctattaccagcaggcgaacgatgagacgcgccgccgctttcgcgacggcctgaaacagagcgtcgagatggccagccgagcctag

SEQ ID NO: 212661 - DNA, 651 bp, Klebsiella pneumoniae
atgtcattacctatgttacaggtcgccctcgacaaccaaacgctggccagcgcttatgaaacaacccgtctgatcgccgaagaggtagatatcattgaagtcggcactatcctctgcgtcggtgaaggtgtacgcgcggtgcgcgatctgaaagcgctgtatccgcataaaatcgtgctggcggacgccaaaattgccgatgccggcaagatcctgtcgcggatgtgcttcgaagccaacgccgactgggtcacggtgatctgctgcgccgatatcaacaccgccaaaggggcgctggatgtcgccaaagagttcaacggcgatgtgcaaattgagctgaccggcttctggacctgggagcaggcgcaggcgtggcgcgaggcgggtattcagcaggtggtctatcaccgcagccgcgacgcgcaggcggcaggcgtggcgtggagtgaggcggatatcagcgcgattaagcgtctgtctgatatgggcttcaaagtgaccgtcaccggcgggctggcgctggaagacctgccgctgtttgccgggatccctgttcacgtctttattgccggacgcagcatccgcgatgctgcctcgccggtggaagcggcgcgccagtttaaacgctctatcgcccagctgtggggttaa

SEQ ID NO: 212662 - DNA, 468 bp, Klebsiella pneumoniae
atgaaactccatgaatcactggcgcagaatcactccattcgcctgcaggcggaagcggaaacctggcaggaggcggtgaaaatcggcgtcgatctgctggtggccgccgacgtggtggagccgcgctactaccaggcaatcctcgacggcgtcgcgcagcacggcccctattttgtgatcgctccgggattagccatgccgcacgggcggccggaagagggcgtcaaaaaaaccggctttgcgctggtcacgctaaagaaaccgctgattttcaaccacgaagataacgacccggtcgacatcctgatcaccatggcggcggttgacgccaccacccaccaggaagtgggcatcatgcagatcgttaacctgtttgatgacgaagccaatttcgaccgtttacgcgcctgccgcagcgagcaggaagtgctggatttaatcaaaaacgccaccgcggcggctgtttaa

SEQ ID NO: 212663 - DNA, 306 bp, Klebsiella pneumoniae
atgaccgtacgtattctggctgtgtgtggtaacgggcaaggcagttctatgatcatgaaaatgaaagtggatcagttcctgacgcaatccaatatcgaccacacggtgaacagctgcgcggtgggtgaatacaaaagcgaactaaacggcgcggatatcatcatcgcttcaacccatatcgcgggggagattaccgtctccggcaataaacacgtggtgggggtgcgtaatatgctttcccccgcggatttcgggccaaagctgctggaggtgattaaagctcatttcccgcaggacgtgaaataa

SEQ ID NO: 212664 - DNA, 1401 bp, Klebsiella pneumoniae
atggcaatcctctacaacatctttaccgttttctttaatcaggtgatgaccaatgccccgctgctgctgggtatcgtcacctgcctgggctatatcctgctgcgcaaaagcgtcagcgtgattattaaaggcacgatcaaaaccattatcggcttcatgctgttacaggccggctccggcatcctcaccagcacttttaaaccggtggtggcgaaaatgtcagaggtgtacggcatcaacggcgcgatctctgacacctatgcctcgatgatggcgaccatcgaccggatgggcgaggcctatagctgggtgggctatgcggtgctgctggcgctggcgctcaacatctgttacgtcctgctgcgccggataaccggcatccgcaccatcatgctgactggccatatcatgtttcagcaggcggggctgatcgccgtctcgttctttatctttggttacggaatgtggacgaccatcatctgtaccgccgtgctggtctccctgtactggggtatcacctccaacatgatgttcaagccgactcagctggtcaccgacggctgcggcttctccatcggtcaccagcagcagtttgcctcgtggattgcctacaaagtggcgccgtatctggggaaaaaagaggagagtgtggaagacctcaagctgccaggctggctcaatatcttccacgacaacatcgtttccaccgcgattgtcatgaccattttctttggcgcgatcctgctttcctttggtattgacgtcgtgcaggcgatggcggggaaaacccactggacggtctatatcctacagaccggtttctccttcgcggtggccattttcatcattacccagggcgtgcggatgttcgtcgccgaactgtccgaagccttcaacggtatctcgcaacgcctgatccccggcgcggtgctggcgattgactgcgccgcgatttatagctttgcgccgaatgcggtggtgtggggctttatgtggggcaccatcggccagctgattgccgtcggcattctggttggcattggctcttcaattctgattattccgggctttatcccgatgttcttctccaacgcgacgattggcgtctttgccaaccacttcggcggctggcgcgcggcgctcaagatctgcctggtgatgggcatggttgaaattttcggttgcgtgtgggcggtgaagctcaccggtatgagcgcctggatgggaatggcggactggtcgattctggcgccgccgatgatgcagggcttcgcctccatcgggctggcgtttatggccgtcatcatcctgattgctctcgcttatatgttcttcgctggccgcgcgctgcgcgccgaagaagacgcggaaaaacaactggcagaggcctctgcccaataa

SEQ ID NO: 212665 - DNA, 1065 bp, Klebsiella pneumoniae
atgagtaaagtacagaccatcacccgtgaatcatggatcctgaacacctttccggaatggggcagctggctgaatgaagagattgagcaggagcaggttacgcccggcaccttcgccatgtggtggctcggctgtaccggtatctggttaaaatccgaaggcggggctaacgtctgcgtcgatttctggtgcggcactggcaaacagagccacggcaatccgctgatgaaaaccggccaccagatgcagcggatggcaggcgtgaaaaaattacagcctaacctgcgcaccacgccgttcgtgctggatccgttcgccattcgccagattgacgcggtcctcgcgacccacgatcacaacgatcatattgacgtcaacgtcgccgccgccgtcatgcagaactgcccggccgatgtgccgtttatcggcccgaaaacctgcgtcgacctgtggatcggttggggcgtgccgaaagcgcgctgtatcgtcatgaaacctggcgatgtcgtgaagatcaaagacattgagatccatgcgctcgatgcgttcgatcgcaccgcgctgatcaccctcccggcggaccaaaaagccgctggcgtactgccggacggcatggaccagcgcgcggtcaactacctgtttaaaacaccgggcggcaacctgtaccacagcggcgattcccactactccaactactacgcgaagcatggcaacgagcatcggattgacgtcgccctcggctcgtatggcgagaacccgcgcgggatcaccgacaaaatgaccagcgccgatatcctgcgcatggcagagtcgctcaacgccaaagttgtgatcccgttccaccatgatatctggtcaaactttcaggccgatccgcaggagatccgcgttctgtgggagatgaaaaaggatcgtctgaagtacggcttcaagccgtttatctggcaggtcggcggcaaatttacctggccgctggataaagacaatttcgaatatcactacccgcgcggtttcgacgattgcttcaccattgagccggatctgcctttcaaatccttcctgtaa

SEQ ID NO: 212666 - DNA, 756 bp, Klebsiella pneumoniae
atgacggaagcgcaaaggcaccaaattctgctggatctgctcgcccaaacggggtttgttaccgtggagcaggtgatgtcgcggctcgggatctcacccgctaccgcccgacgtgatatcaacaagctggatgaaagcggcaaactgaaaaaggttcgtaatggcgcggaagccattagcgaacagcgcccccgctggacgccgatgaacatccaccaggcgcaaaatctggatgaaaaagtgcgtattgcacgcgccgcttcgcaactgatcgcgccgggtgagagcatcgtcattaactgcggctccaccgcctttctgttgggtcgggaactgtgcggcaaaccggtgcagatcatcaccaactatctgccgctggctaactacctgatcgaccaggagcatgacagcgtgattatcatgggcggccagtacaaccgcagccacgccatcaccctcagcccccacggtagcgagaacagcctctatgccggacactggatgtttaccagcggcaaagggctcaccgccgaaggcctctacaaaacggatatgttgaccgccatggccgagcaaaaaatgcttaacgtggtcggcaaactggcggtgctggtcgacagcagcaagatcggcgagcgcgccgggatgctattcagccaggccggacaaatagacgtggtgatcaccggcaaacaggccgatgccgcgatcctcaaacagcttgaggatcagggcctcagcgtaatccgcgtttaa

SEQ ID NO: 212667 - DNA, 717 bp, Klebsiella pneumoniae
atgattgcactagaaatgcgcaacctcggcggtggtgaaattttacatgcctgtccgcaggagagtctggataagcccttgccctgtatcgtcttttatcatggctttacctcgtcgaagctggtctacagctactttgcggtggcgctggccgaggccggattccgggtgatcatgccggacgcgccggagcatggggcgcgctatcagggcgatgaggccgggcggatgcagcgcttctggccgattctgcagcagaatttcagggagtttcctgcgctgcgcgaggcgataatcgctgaaggatggctggaaggggagcggctggcggtggcgggcgcttcgatggggggaatgacggcgttgggcatcatgacgcatcaccccgagctgaacagcgtcgcctgtctgatggggtcgggctattttcgttccctgtcgcaaaccctgtttccctcgcctggctttgatgctgacagtctccgcgaatgggatgtcagccatcagctggcgtcccttgcccggcgaccgctgctgctctggcatggcgatgccgatgacgtggtgccgccggaagaaacctttcgactagagcaggcgctccggcaggctgaccttgccgccaggctgacctgcgtctggcagaaaggcgtccgccatcgcattacgccagaggcgctggctaccacggtcgccttttttcagcagcacctttaa

SEQ ID NO: 212668 - DNA, 309 bp, Klebsiella pneumoniae; identical to SEQ ID NO: 135890

SEQ ID NO: 212669 - DNA, 276 bp, Klebsiella pneumoniae; identical to SEQ ID NO: 135891

SEQ ID NO: 212670 - DNA, 1638 bp, Klebsiella pneumoniae
atgcactggcaaacgcacaccgtttttaatcaacccaccccgctgaataacagcaatctgtttctgtccgataccgctctgcgtgaagcagtggtccgcgaaggcgccggctgggatggcgatctgctcgccagcattggccagcagctggggacagccgaatcgctggagctgggacgcctggccaacagcaatccgccggagctgctgcgctatgacgccaccggcgcccggctggacgacgtgcgctttcatcccgcctggcacctgctgatgcaggggctgtgcgcgaatcgggtacataacctcgcctggcaggaggatgcccgcgaaggcgcgtttgtcgcccgcgccgcccgctttctgctccatgcccaggtggaggccgggacgttgtgtccgattaccatgaccttcgccgcgacgcccctgctgcagcacgccctgcccgcgccctttcgcgactggctgtcgccactgctgagcgaccgttacgatccgcaccttgcgcctggcggccagaagcgcggcctgctgatcggcatggggatgaccgagaagcaaggggggtctgatgtgctgagcaataccactcgcgcggagaaaacggcggaagggttttaccgactggtgggacacaagtggttcttctcggtgccgcagagcgatgctcacctggtgctggctcaggctccggcggggctctcatgcttctttgtgccgcgtctgctgcccgacgggcagcgtaacagcgtgcgtcttgaacgcttaaaagagaagctcggcaaccgctccaacgccagtagcgaagtggagttttatgaggcctgcggctggctggtgggcgacgaaggcgacggcgtgcggcagatcctcaggatgggcggcctgacccgctttgactgcgcgctgggcagccatgccctgatgcgtcgcgccttctcggtggcgctgtatcacgcgctacagcgtcaggcgtttggcaaaaacctggtcgaacagccgatgatgcgccagctgctggggcaaatggcgctccgtctggaggggcagaccgcgtttctgtttcgcctggcgcgggcctgggaccgtcgggatgatgcccgggaaagcgcctgggcgcgcctgtttacgcctgcggccaagtttgccatctgtaaggccggtatcccgtttgtcgccgaggcgatggaagtgctgggcggcatcggctattgcgaggagagcgaactcccgcgcctctaccgtgagatgccggtcaacagcatctgggagggctccggcaatattatgtgcctcgatgtgatgcgggtgctgagcaagcagccggcggcgatggagctgctggccgcggagtgtgcggaggtgaaaggacagaaccgccatctcgaccgcgcatggcgtcagctgcagcaactgctgaaacgacccgccgaagagcaggggagagagattgcccggctggtctatcgtcttggcgcgggggcgcagatgctgcgccatgcttcgccgccgctggccgaagcctggtgccggatgatgctcgacacccgcggcggcatacgtcttgacgcgccgaccctcgacgacctgctgctgcgggctatggggcgcgggcgccaggcgcctcaggcgtag

SEQ ID NO: 212671 - DNA, 732 bp, Klebsiella pneumoniae
atgagtgaaatgatttacggcatccatgcggtgcaggcactgctggagcgcgcacctgagcgttttcaggaagtttatattctgaaaggccgtgaggataagcgcttgctgccgctgatccatgccctggaagcgcagggcgtggtgattcagctggccaaccgtcagtttcttgatgagaagagcgaaggcgctgtgcaccaggggatcattgcccgcgtgaagccggggcgtcagtatcaggagaacgatctgccggatctgctggcgcagctcgatcaaccgttcctgctgatcctcgacggcgtaaccgatccgcacaacctcggcgcctgcctgcgtagcgctgacgccgccggcgtgcatgcggtgatcgtgccaaaagatcgttccgctcagttgaatgcgacggcgaagaaagtggcctgcggcgcggcggagaacgtcccgctgatccgcgtcaccaacctggcgcgcaccatgcgtctgctgcaggaagagaacgtctggatcgtcggaaccgcaggggaagccgaccatacgctgttccagagcaaaatgaccggcccgatggcgctggtgatgggcgcggaaggcgaaggcatgcgtcgtctgacccgcgaacactgcgatgagctgatcagcatcccgatggcgggcagcgtctcctcgctgaacgtctcggtggctaccggcatctgtctgtttgaagcagtacgtcagcgcagctaa

SEQ ID NO: 212672 - DNA, 2433 bp, Klebsiella pneumoniae
atgtcacaagatccattccaggaacgcgaagctgagaagtacgcgaaccctatcccgagccgggaatttatcctcgaacatttaactaaacgggaaaagcctgccagccgcgatgagctggccatcgagttaaatatcgagggcgaagagcaaaccgaagcgctgcgccgccgcctgcgcgcgatggagcgcgacggtcagctggtcttcacccgccgccagtgctatgccctgccggaacgcctcgatctcctcaaaggaaccgttattggccaccgcgatggctatggtttcctgcgcgttgaagggcgcaaagacgatctgtacctgtcgtcagaacagatgaaaacctgtattcacggcgaccaggtgctggctcagccgctgggcgcggaccgtaagggccgccgcgaagcgcgcatcgtccgcgtcctcgtgccgaaaaccagccagatagttggccgttacttcaccgacgctggcgtcggctttgtcgtcccggacgacagccgcctgagcttcgatatcctgatcccgccggaagagataatgggcgcgcggatgggctacgtggtcgtggtcgagctgacccagcgaccaacccgccgcaccaaagcggtgggtaaaatcgtcgaagtgctgggcgacaacatgggcaccggcatggccgtcgatatggcgctgcgtacccatgagattccttatgtctggccgccggcggtggaaaaacaggtttccggtctcaaagaacaggtgccggaagaggcgaaggccggccgcgtcgatttacgctcgctgccgctggttaccattgacggcgaagatgcccgcgacttcgatgacgcggtgtactgcgagaagaaacgcggcggcggctggcgcctgtgggtagccattgccgacgtcagctactacgtgcgcccggggacgccgctggatgcggaagcgcgcagtcgtggcacctcggtctacttcccgtcgcaggtagtgccgatgctgccggaagtgctgtctaacggtctatgctcgctgaacccgcaggtcgatcgcctgtgtatggtgtgcgagatgacgatttcgtcaaaaggccgtctgaccggttataaattctatgaagcggtgatgagttcacatgctcgcctgacctacaccaaagtgtggcatatgctgcagggtgaccaggaactgcgcgaacactacgcgccgctggtgaagcacattgaagagctgcataacctctacaaagtgctggagagcgcccgcgaagagcgcggtggtatctcatttgaaagtgaagaagctaaattcatcttcaatgccgaacgccgtattgagcgtatcgaacagactcagcgtaacgatgcgcataagctgattgaagagtgcatgatcctggcgaacatctccgccgcgcgcttcgttgagaaggcgcaggagccggcgctgttccgtatccatgataagccaaccaccgaagcgattacctccttccgtaccgtgctggctgagctgggactggagctgcctggcggcaacaagccggagccgcgtgattacgcagagctgctaacctccatcgccgatcgcccggatgcggaaatgctgcagacgatgctcctgcgctccatgaagcaggcggtctacgatccggaaaaccgcggtcactttggcctggcgctgcagtcatacgcccacttcacctcgccgattcgtcgttacccggacctgtcgctgcaccgcgctatcaagtatctgctggccaaagagcagggacataaaggcaacagcaccgagaccggcggctggcactacagcatggaagagatgctccagctgggtcagcactgttcgatgaccgagcgccgcgccgacgaagcgacgcgcgaagtgtctgactggctgaagtgcgacttcatgcaggatcaggtgggcaacatcttctccggcgtgatcgccagcgtgaccggctttggcttcttcgtccgcctgaacgatctgtttatcgacggtctggtgcatgtttccagcctggataacgactattatcgtttcgaccaggtggggcagcgtcttattggtgagtccggcggccagacctatcgcctgggcgaccgcgtggaagtccgtgtggaagcggtcaacatggacgagcggaaaatcgactttaccctgatctccagcgagcgtgcgccgcgtaatgtcggcaagaccgcccgtgagaaagcgaaaaagagtacctctggcaagccgggcggccgtcgccgccaggtgggtaagcaggtaaacttcgagccggacagcgctttccgtaaagagaaagagaccgcccgaccgaagaaagagaaaaaagcgaaaaaaccgtcggcgaaaacacagaaaatcgccgccgcgacgaaagccaagcgcgcggccaagaagaagatcgccgagtga

SEQ ID NO: 212673 - DNA, 426 bp, Klebsiella pneumoniae; identical to SEQ ID NO: 135901

SEQ ID NO: 212674 - DNA, 1299 bp, Klebsiella pneumoniae
atgggtaacaacgtcgtcgtactgggcacccaatggggtgacgaaggtaaagggaagatcgtcgatctcctgactgaacgggctaaatatgttgtgcgctaccagggtggtcacaacgccggccatactctcgtaatcaacggtgaaaaaaccgttctccatcttattccatcaggcattctgcgtgaaaacgtcaccagcatcatcggtaacggcgtcgtgctgtctccggccgcgctgatgaaagagatgaagggcctggaagaccgtggtatcccggttcgcgagcgtctgctgctctctgaagcctgcccgcttatccttgactatcacgtggcgctggacgtggcgcgtgaaaaagcgcgtggcgcgaaagcgatcggcactaccggtcgcggcattggcccggcttacgaagataaagtcgctcgtcgcggtctgcgcgttggcgatctgttcgataaagcaaccttcgccgataaactgaaagaagtgatggaatatcacaacttccagctggtgaacttctacaaagcagaagcggttgactaccagaaagtgctggacgatgtgatggcgattgccgacatcctgaccagcatggtggtggacgtatccgacctgctggatcaggcgcgtcagcgcggcgacttcgtgatgttcgaaggcgcgcagggtacgctgctggatatcgaccacggtacctacccgtacgttacgtcctctaacaccaccgcaggtggcgtggcgaccggctccggcctgggcccgcgttatgtggattacgtactgggcatcattaaagcttactcgactcgcgtcggtgcaggtccgttcccgaccgagctgtttgatgaaactggcgagttcctctgcaagcagggtaacgaattcggcgccaccaccggccgccgtcgtcgtaccggctggctggatgcggtcgcagtccgtcgcgcggtgcagattaactccctgtccggcttctgcctgactaaactggacgtcctcgacggcctgaaagaagtgaaaatctgcgttggctaccgtatgccggatggccgcgaagtgaccaccactccgctggctgccgataactgggaaggtatcgagcctatctacgaaaccatgccgggctggtccgaaaccaccttcggcgtgaaagagcgcagcggcctgccgcaggcagccctgaactacatccagcgtattgaagagctgaccggcgtgccggtggatatcatctctaccggtccagaccgtaccgagactatgattctgcgcgatccgttcgacgcgtaa

SEQ ID NO: 212675 - DNA, 198 bp, Klebsiella pneumoniae
atgaactccaccatttggctggcgctggcgctggttttagtacttgaagggcttggcccgctgctttatccgcgcgcctggcgcaaaatggtcgccagcctgagccagctaccggataatttattgcgtcgttttggcggcggacttgtggttgccgggattgtgatctactacatgttgaggaaatcgattggctga

SEQ ID NO: 212676 - DNA, 294 bp, Klebsiella pneumoniae; identical to SEQ ID NO: 138907

SEQ ID NO: 212677 - DNA, 1005 bp, Klebsiella pneumoniae
atgcgtaaatctgttatcgcgatcattgtcatcgtgctggtagtgctctacatgtctgtctttgtcgtaaaggaaggcgagcgcggtatcacgctgcgtttcggtaaagttctgcgcgacgacgaaaacaagccgctggtgtatgcgccaggcctgcacttcaagatcccgtttatcgaatcggtgaagatgctggatgcgcgtattcagaccatggacaaccaggctgaccgtttcgttactaaagagaagaaagacctgatcgtcgactcctatatcaagtggcgcatcagcgacttcagccgttactacctggcaaccggcggcggcgacgtctcccaggccgaggtactgctgaagcgtaaattctctgaccgtctgcgttctgaaattggtcgtctggatgtgaaagatatcgtcaccgactcccgtggtcgcctgaccctggaagtgcgtgatgcgctgaactcgggttcggccggtacggaagatgaggttagcaccccggcggctgacgacgcgattgctaaagcggcagagcgtgtggaagccgaaaccaacggtaaagtgcaggtgatcaacccgaacagtatggcggcgctgggtatcgaagttgtcgacgtacgtatcaaacagatcaacctgccggcagaagtgtcggaagcgatttataaccgtatgcgcgcggagcgtgaagcggttgctcgtcgccatcgttcacagggtcaggaagaggcggaaaaactgcgcgcgactgcggactatgaagtcaccaagacgctggcggaagccgagcgccagggccgtatcctgcgtggtgaaggtgatgcggaatcagcgaaactgtttgccgacgcgttcagccaggatccaggcttctactcctttatccgtagcctgcgtgcctatgagaagagcttccagagcaatcaggatgtgatggtcctgagtccggacagcgatttcttccgctatatgcgttcaccggattcggcgcgtaaataa

SEQ ID NO: 212678 - DNA, 1263 bp, Klebsiella pneumoniae
atggcgtggaatcagcccggtaataacggacaggaccgcgacccgtgggggagcagcaaacctggcggcaactctgagggaaatggcaataaaggcggtcgcgagcaggggccgccggatctggatgatatcttccgcaagttaagtaaaaaacttggcgggctcggcggcggcaagggcggagtgggcggcggcaatagcgcgcaggggcctcgcggaccgatgggcgggcgtattgtcggcatcgttgccgcggcggcagtgattatctgggcggccagcggtttctataccattaaagaggccgagcgcggcgtggtcacccgttttggtaagttcagccatctggttgagcctggcctgaactggaaaccgacctttatcgataacgttcaggcggtgaacgtggagtcggtgcgcgaacttgcggcttccggcgtcatgctgacctctgacgaaaacgtggtgcgcgttgagatgaacgtgcagtaccgcgtcaccgatccggagcgctatctgtttagcgtgaccagcgcggacgacagtctgcgtcaggccaccgacagcgcgctgcgcggcgtgatcggcaaatacaccatggatcgcattctgaccgaaggtcgtaccgtgatccgtagcgatacccagcgtgagctggaagagacgattcgcccgtacaacatgggtatcactctgctggacgtcaacttccagacggcgcgtccgccggaagaggtgaaggccgcgtttgacgatgccattgccgcgcgtgagaacgagcagcagtacattcgtgaagcggaagcgtataccaacgaagtccagccgcgggcgaatggtcaggcgcagcgtatcctcgaagaggcacgcgcctataagacccagaccgttctggaagcccagggtgaagtggctcgctttgcgaagatcctgccggaatacaaagccgcgccggaaattacccgcgagcgtctgtatatcgaaaccatggaaaaagtgctgagccacacccgtaaagtgctggtcaatgacagcaaaaacggcaatctgatggttctgccgctggatcagatgctgaaaggcgccgctgcgccggcagcaaagagcgatagtagtgacgccagcgatctgctgcgcctgccgccagcatccagctcaagcagcgccagcacctcatcaacctcgagctcaaccgggggtagcattatggaccaacgccgcgctaacgcgcagcgtaacgactaccagcgtcagggggaataa

SEQ ID NO: 212679 - DNA, 1281 bp, Klebsiella pneumoniae
ttgtttgaccgttatgacgccggtgagcaggcggtactggtacacatctatttttcgcaagacaaagatatggaagatctccaggagtttgaaactctggcctcttccgccggtgtcgaagcaatgcaggtgattaccggtagccgtaaagcaccgcacccgaagtattttgttggtgaaggtaaggcagtcgaaattgcggaagccgttaaagcgaccggcgcttcggtcgtgctcttcgatcatgccctgagtccggcgcaagaacgtaacatggaacgcctgtgcgaatgccgggttatcgatcgcaccggtcttattttagatattttcgcccagcgcgcgcgcacccatgaagggaaattgcaggtcgagctggcgcagctgcgccatatggcgactcgccttgtccgcggttggacccaccttgaaagacagaagggcgggattggtttgcgtggcccgggggaaacccagctcgaaaccgaccgccgtttattgcgtaaccgtatcatgcagatcctgtcgcggctggaaaaagtcgagaaacagcgcgagcaggggcggcggtcgcgtgcgaaagccgatattcctaccgtgtcgctggtgggctataccaacgccggaaaatcaacgctctttaaccagatcactgccgccgaggtctatgccgcgaaccagctgttcgccaccctggacccgacgctgcgccgcattgacgtccctgacgtcggcgaaacggtgctggccgataccgtcggctttattcgccacctgccgcacgatctggtagcagcgtttaaagcgacgttgcaggagacgcgtcaggcgacgctgctgctgcatgtgattgacgcggcggatgtccgcgtgcaggaaaacattgatgcggtaaatacggttctcgctgaaattgaggccgatgagatcccggcgctgctggtgatgaacaaaatcgacatgcttgacgattttgaaccgcgcatcgatcgcgacgatgaaaataaaccgattcgggtctggctttcagcccagaccggggttggcgtaccactgctttttcaggcattaacggagcgtctttccggtgaagtggcccagcatacgctgcgcttaccgccgaaagaagggcgactgagaagccgtttctatcagcttcaggcgatagaaaaagagtggatggaggatgacggcagcgtgagtctgcaggtgcgcatgccgatcgttgactggcggcgcctctgtaagcaagagccaacgcttgttgactatgtggtttaa

SEQ ID NO: 212680 - DNA, 309 bp, Klebsiella pneumoniae; identical to SEQ ID NO: 138903

SEQ ID NO: 212681 - DNA, 951 bp, Klebsiella pneumoniae
atgaatgatgtaaccgaggcgagcctgcccaaggcaatttttttaatgggcccgacggcctccggcaaaaccgcgctggcgatagccttacgtaaagttttgccagtagagttgattagcgttgattccgccctcatttatcggggaatggatattggcaccgccaaaccggatgctgcggagcttagcgctgcgccgcatcggctgctggatattttggatcctgcggaggcctattccgcggcggattttcgccgcgatgcgctggcggcgatggcggatattgtcgccgccgggcgaattccgctgttagtcggcggaacgatgttgtatttcaaagcgttgctggaaggattgtcgcccttaccgtcggctgacccagaggtcagagcgcggattgagcagcaggccgcagagcaggggtggaatgcgttacatcagcaattacaggagatcgatcccgtggctgctgcgcgtattcatccaaatgatccgcaaaggctttcccgggcactggaagtttttttcatttcgggtaaaactttaacggaactgacgcaaacgtcaggagacgctctgccatatcaggtgcatcagttcgccatcgccccggcgagccgtgaactgctccatcaacgcatagaacagcgttttcatcagatgttagcttcaggttttgaagcagaagtacgggcgctttttgcccgcggagatttgcatacggacatgccttccatccgttgtgtcggataccgccagatgtggtcatatctcaatggcgagatcccgtatgatgagatggtttatcgaggtgtttgcgccacgagacagttagccaaacgtcaggtcacctggctgcgcggttgggaaggtgtgcactggttagacagtgaacaacctgaacaagcgctcaacaaagtattacaggttgttggtgcgagccagaactga

SEQ ID NO: 212682 - DNA, 1860 bp, Klebsiella pneumoniae
atgccgattcaggttctgccgccgcagctcgccaaccagattgccgccggcgaggtggtggagcggcccgcgtcggtggtgaaagagctggttgagaacagtcttgatgcgggcgccacgcggattgacattgatatcgaacgcggcggcgcgaagctcattcgcatccgcgataacggcagcggcatcaaaaaagacgagctggcgctggccctggctcgtcatgcgaccagcaagatcgcctcgcttgacgatctggaggccattatcagcctcggctttcgcggcgaagcgctggccagtatcagttcggtggcgcgcttaacgctgacttcgcgcacggcggagcagcaggaagcctggcaggcgtatgctgaaggccgcgatcaggcggtgacggtgaagccggcggcgcacccggtcggtaccactctggaagtcctcgatctgttctataacaccccggcgcggcgcaaatttatgcgcaccgaaaagaccgagttcggccacattgacgaggtggtgcgccgcattgcgctggcgcgcttcgacgtcactatcaacctcagccataacggcaaggtgatgcgccagtatcgggccgtcgctcaggatggccagcgcgagcgccggctggggacaatttgcggcgccgcttttctcgaacatgcgctggcgatcgagtggcagcatggcgatctgaccctgcgcggctgggtcgccgatccgctgcataccaccccggcgctggcggaaattcagtattgctacgttaacgggcggatgatgcgcgatcggctgatcaaccatgctatccgccaggcctgtgaagacaagttaggggccgatcagcaaccggcgtttgtgctgtatctggagatcgatccccatcaggtggatgtaaacgtccacccggccaagcatgaggtgcgtttccatcagtcgcgcctggtgcacgactttatctaccagggcgtactgagcgtactgcagcagcagcttgacgcgccgctggcggaaaaagacgacccgccggcgccgcgcccgatgccggagaaccgcatcgccgcgggaggcaaccagtttgcgcggccagcggaagcgcgggaacctgcgacccgcttcagcatcacgccatcgcgtgagcctgcggcctccagcggcaaaccgggcggcgcgagctggccgcatgcgcagccgggttaccagaagcagcagggagcgctttatcgtcaactgctcgacacgccaacggcgccaaagccagcgttgcagcctccggcggcggcagagttggccggtcacagtcagagctttggcagagtgctgacgattgttggcggcgactgcgcgctgctggagcgcgagggcggtctggcgctgctgtcgttgaccgttgccgagcgctggctgcgccaggcgcagttgaccccgggagcggaggcggtatgtgctcagccgctgctgatcccgctgcggttaaaagttacggaaggggaaaagcaggcgctggccgccgctcagccggcgctggcgcagctagggatcgatgtgcataccgatgccctgcacgtgacggtgcgcgcggtccctttacccttaagacaacaaaatttacaaatcttgattcctgaactgataggctacctggcgcagcaaaacgcattcgacgtcggcaatatcgcccaatggatggcgcgtaatctgacgagcgaacagacgtcatggaatatggcgcaggcgattgcgctgctggcggacgttgagcgtctttgcccgcagctggtgagaacgccgccgggtggcctgttacaacctgtagatctccattcggcgatgaatgccctgaaagatgaatga

SEQ ID NO: 212683 - DNA, 1356 bp, Klebsiella pneumoniae
atgaagtatcgcataaccacctggcttgccgctgcgctgatgctgtcgagtcttcacgccactgcggcgagtttatccgatatccaggtctctaacggagaccagcaggcccgtattaccctaagctttgtcggtgagccggagtactcctttaccccacagggtaaacgtctggtggcgctggatatcaagcagaccggcgtattgcagggactaccgctgcagtttagcggcagcaacctggtgaagagtattcgcgccggcacgccgcaggatacgcagacgctgcgtctgctggtggatctgacggaagatggcaaaacccgggcggtgaagcaacagaacggggcgaattacacggtggtctttaccatcaacgccgacgcgccgccgccgccgcctccgccgcccgtggtggtgaaacgggccgacccgccgccggtgatgccttcccggacgacgacgtcagggcgtaacccgttcagctcgtcgggtcatgaacggcagacggtgatgacctcctctcagccggcgatgaccaacaatcagaccgtgactcgcccggcggcccgcacggtgtcggcggatgataaagtcattatcgccattgatgccgggcacggcggccaggatcccggcgcgattggcccgaacggcaccaaagagaaaaacgtgactatcgctattgcgcgcaagctgcgggcgttactgaacgccgatccgcagtttaagccggtgctgacccgcgacggggattactttatttcggtgatgggccgctctgacgtggcgcgtaagcaaaacgccaatttcctcgtctctatccatgctgacgccgcgccaaaccgcgatgccaccggcgcctcggtgtgggtgctctcgaaccgtcgcgccaacagcgaaatggccggttggctggagcagcatgagaagcagtctgaactgctcggcggggcgggcgatgtgctggcaaacagccaggccgacccctacctgagccaggcggtgctggatctgcagtttggtcattcccagcgcgtcggctacgatgtggcgaccaacgtgctgagccagctgcagcgtattggcaacctgcacaaacgccgcccggagcatgccagccttggagtgctgcgctcgccggatatcccgtcgatcctcgtggaaacgggctttatcagtaacaacggcgaagagcggctgctggggagcgatgattaccaggagcagattgcggaggcgatttataacggcttacgcaactactttatgcagcatccgctgcagtcggcgcctcgcggcgaggcggcgcagaccgccagcgccgcggcgccgggcgggatgttgattaactaa

SEQ ID NO: 212684 - DNA, 462 bp, Klebsiella pneumoniae; identical to SEQ ID NO: 138977

SEQ ID NO: 212685 - DNA, 1512 bp, Klebsiella pneumoniae
atgacgaaaaaccctgacagtataccatacaacatttggcctgcggaggcgctgcgcctggccgaacgagaggcggcggacagcctggggctgacgctgttcgaactcatgcagcgcgcgggcgaggcggcgttccagctggccagctgtgcttatcctgccagcgcgcactggctgatcctctgcggacatggcaacaacggcggcgacggatatgtcgttgcgcgtctggcacaggccgcggggcggcgggtgacgctgctggcggtggagagtgacagcccgctgccggaagaggcgcaggcggcgcgggaggcgtggcttaacgccggcggcgtgatccatgcggcgaccatcccatggcccgacgatatctcactgattattgatggcctgctcggcaccggtctgcgcagtgcgccgcgcgatcccgttgcggcgctcatccaccaggcgaaccaccacccggcgccggtggtggcgctggatatcccttccggcctgaatgcgcagacgggcgcgacgccaggtgcagtggtacaggccgaccatacgctgacctttatcgccctcaagccggggctgctgaccggcaaggcgcgggatgtcgtcgggcaactccaccatcatgcgctggggctcgaacgctggctcgccggacaaagcactcctctgacgcggttttgcgccgcccacctcgccgactggctgccgccgcggcgggccacctcccataaaggcgatcacggcaagctggtgattgtcggcggcgatcgcggcacggcaggcgctatccgtatgtgcggtgaagcggccctgcgcagcggcgcgggactggtgcgagtacttactcacccggagaacgtggcgcccattgtcaccgtgcggccggaattaatggtagatgaactgacgccgcagactctgaaagccgcgctggagtgggctgatgtggtggcgattggccctggcctggggcagcgcgaatggggacgcagcgccctgcggacggtggaaagttttaacaaaccgatggtctgggacgccgacgcgctgaacctgctggcattcaatcccgataaacgtcacaatcgcgtgctaacgccgcaccccggcgaagcggcccgtctgctgaacgtcagcgtggcagaaattgaaagcgatcgcttactttctgcgcagcgtctggtaaaacggtatggcggcgtggttgtgctgaaaggcgcgggcacggtagtggccagtgaaagcggggcgatgggcattatcgatgccggcaatgccgggatggccagcggcgggatgggcgatgtgctcacaggcatcatcgccgcgttgttaggacagcacctgacgccgtatgatgctgcctgtgccgggtgcgtcgctcatggtgatgccgccgaccgactggccgcccgcgagggcacccgcggcatgctggcgaccgatctcttttccacgctcaggcgtgttgttaacccggatgtgattgacgtagaccatgattaa

SEQ ID NO: 212686 - DNA, 1140 bp, Klebsiella pneumoniae
atgtcacagcccctcgatctcgttcagttagcgcaacaaatcaaacaatggggcacagagcttgggttccagcaggtggggatcgccgataccgacctcagcgccagtgaacccaaactgcaggcatggctggataaacaataccacggcgaaatggaatggatggcccgtcacggtatgatgcgcgcccgtccccacgaactgctgcccggtacgttacgcgtcatcagcgtgcggatgaactatctgcccgctaacgccgcctttgcccgcaccctgaaagatcccacgctgggttacgtcagccgttatgccctcgggcgtgattatcataagctgctacgtaatcgcctgaaaaagctgggggagaagattcaggaacagtgtgcttcgctcaattttagaccttttgtcgattccgcgcctatcctggaacggccaatcgcagaaaaagcgggccttggctggacaggtaagcactcactaatcttaagccgcgacgccggatcgttctttttcctcggcgaactgctgattgatctgcccctgccggtcgacagcccggttgcggaggagtgtgggcgctgcgtcgcctgcatgaccatctgtcccaccggggccatcgttgagccctataccgtcgacgcccggcgctgcatctcctatctcaccattgaactggaaggtgcaatccccgaggagttccgtccactaatcggcaaccgtatttacggttgtgatgattgtcagctgatctgcccgtggaaccgtttctcacagctcaccgatgaagaggatttcagcccacgcaaagcgctgcatgccccgctgctggtggagctgttcgcctggagcgaagcgtggtttctgaaggtgaccgaagggtcggcgattcgtcgcattggccacctgcgctggctgcgtaatatcgccgtcgcgttgggcaatgcgccctgggatgaagcccatcttcgcgccctggagagccgccggggcgagcacccgcttctcgacgaacacattgagtgggcgattgcccagcaactgaaaaagcggaacgccgacgccgttgaagtacagctgccgaaaaaattacgtctggtcagagtggtagagaaaggcttgccgcgcgacgcctga

SEQ ID NO: 212687 - DNA, 240 bp, Klebsiella pneumoniae
atgcttcgacagtcagacatcaccgcggctttccgcgagtccattttgcgcagttccaaggggttccagtaccttcacacccgcgacttcgttaccgcgctgcgccggcgcggcatccacttttccgaggtggaagctaacgcctggatcgcacgcgagcagacgtatttcgtcgacaaaacggcagagcacagcgaaaaccgcctgtggatgatggccaacatggggagggtgatctaa

SEQ ID NO: 212688 - DNA, 318 bp, Klebsiella pneumoniae
atgggctttccttcgccggcgtcagactacgttgagcagcgtctttctgttaactcgatctgcaatgtaggcccaaacacgctagttttcgagcgctctggtggttacgttgtactggatatctccctgaagccaaagcagggtagccaactgcttatacagcacggcggcgggacggagcttgccaagctgagaggaaggtcactgattaccgaagatggtgaagcgatcgagggtgaagccttagacgatgttagcgtcatcggggtcgtgacatttactatctgcgatgtgcgccaggacaatgcggttgtttag

SEQ ID NO: 212689 - DNA, 402 bp, Klebsiella pneumoniae
atgaaattagttatcgcctccgtaatttctctgctcagcttcagcgcgctggcggcgccagaggggacgctcagcgtacacattcttaatcagcaaaccgggctcccttcaccgggggtgcagattgagctggataaacagcagggggagagctggcagcatatcgccaccggtaaaacggatgccgatgggcggattaaatcgctctatccgcaggcggagaatatggagccgggggtgtataaagtgacgtttaaaaccggtgactattttaaaagccaaaatatgaatacgttcttcccggtgattccggttattttcaatgtcacaaagcaaaatcaaaaactgcatatcccgctgctgctcagtcagtacggatactctacctaccgcggcagctga

SEQ ID NO: 212690 - DNA, 171 bp, Klebsiella pneumoniae
atgtctggactgatcaatccacatgcggccccggaagaagcagcctatgcgctgctgattgagctcgttcgcgcccagcgcgtgccgcaatatgaaggcgaaatttccggcctgctggcgatgtacgacgaagccgttaaacactttaaagagaaagagaccgagcgttag

SEQ ID NO: 212691 - DNA, 1305 bp, Klebsiella pneumoniae
atgagcactacaccgttaacgctttcttttgccggacaacaaccgcccctcgccctgccgcaggtgccgggaacgcgggggccggtgggagtcgacatgcgcgggctagatcagtccggattctgcagctatgaccccggcttcgccaacaccgccggatgccagtcggcgatctcgtggatcgatacggaaaacagcgtgctattgcaccgcggctatccggtggatcagctggctcgccagtgcgattttctcgaagtggcctacatcatgctgaacggtgacgcgccggatgaggccagctatcaaacctttcgcgagaccatcacccgccatactctggtccacgagcagatagcccgcatgtgcagcggctttcgtcgcgattcgcacccgatggcgctgatgtgcgccctggtgggggcgctggcggcgttctatcatgatgtactggatgtggaaaatccgcagcaccgggcgctggccgccacccggctgctgtcgaaaatgcccactatcgccgccatgagctacaagtacaccattgaacaacccgccgcgtatccgcgcaacgatctctcctatgccggaaatttcctgcagatgctgtttgctatcccggcggagaaatatgttctgaatccggtcatcgagcaggcgatgaaccagatcctggtgctgcatgccgatcacgggcagtgcgcctcgaccactacggtgcgcgcggcgggctcctccggggcgaacttattcgcctgcgtcgccgccgggctggcgtcgctgtgggggccgatgcatggcggagcaaatgaatcgagcatgcgaatgctggaggagattgaaagcgtcgatcaggttccggcgtttctgcgccaggcgaagcgcgatccgcaggcatttcgccggctgggttttggcaactcgcgctaccgtcaccgtgacccgcgcgccgatatcctgcgtgaaaccagccatcgggtgctggcggaggtaggcatgtctgaccgcctgctgcaggtggcgatggcccttgaggacgtggcgctgaccgacccctattttgtggacaatggcctgtcgccaagcgtggatttctataccgcggtgatccttaaagcgatgaatctgccttcgtcgatgtttgcggtggtcaccgcggtcggtcggacggtcgggtgggtggcgcactggaacgagatgcaccaggcgccgctgaccatctaccggccacggcagatttacgttggcgagggctatcgggattacgtctcccgacgcggcgagcggtctgctgagctaaggtaa

SEQ ID NO: 212692 - DNA, 306 bp, Klebsiella pneumoniae
atgaaatcgtatctctacgctaaaaatcgcctcatgttgattatcctgagctggctaagcgcagacgaggcgttgccatctcgtcatgatttccagcagactgaaaccatcctcagcaccctgcatataccgtatgtgctgaagcccgaccttgatcaactgagagctacgctacagcaattactcgccacgcccaggccgcaggcctgtgaggtaggcgcttttctcagcgccctgttggcgctgtatacccggttaaccgaatataccgccgtcgagcactatctgctctcccggcatctctga

SEQ ID NO: 212693 - DNA, 663 bp, Klebsiella pneumoniae
atgttgatctgcattgcggattcagaatattttaatattgccctgaaagcgtatattaatgaaccaaacagcaagcctctggatattaaagaaatactctgttacccgtttagtggacagagtgagatgttctatactttttttgcgaccgatgccggagcccggctaagcaccatccttattgattacagcagcgtcagcatcgaagtactgcaggtcgcgctcagtttaaaatcgtttaatcccctgatccggatctttatttttgccaaatcaggctacccgttgagcgagctcgaacgcagcctcgccattgtgctcggcgcagagttcatcaccagttttgccgggctcagcgctgcccttgcccgcggtccgcgcttgacatcgccccccgccgacaagctctatatcgccatacctgacagctataacctgacccgtaaggaaacttttttaatcagcctgctgatggggggaatgccgttgtgtcacgtggccagcaccatgcagctcacgatcaaacgggtctactactaccgttcacgcgtccttagcaagctggcggtgaaaaataacgtggaactgatgaacaaagttcaggggatggtgttgcgccactaccgacaggagacaggccatgaaatcgtatctctacgctaa

SEQ ID NO: 212694 - DNA, 561 bp, Klebsiella pneumoniae
atgaaaaaatacagcagaggaatggcatctttcgtggtgatgatgatgctttctccggtagcggcacaggctgctgatggcaaagtcacctttaatggtgaagtcatcgaaaatacttgtacggtagtgaataaagacaagacggtaaccctaccgacggtccagcgttcagcgctcagcagcgcgggtgaaacggcgggcgtggttcccttcaccatcgatctgacgagctgcaccccaggggctgatgtctcggtgtacttcgagaaagatcaatacgtttccacggagggtcgactaaaaaacactctgtctgacggcacggaagcagaaaacgtcgatgtggagctgctgaacactcggtttacgccgattaacctcgcggagaccccggcggtcgctgcagacggcaccattgctcgcccggacgtgatcccggtggcggtggctgagcaggatggttccgcctcgctgcctttctatgcccgctactatgcgaccgacgccgctacggctggaaaagtcgctacctacgtcaactttacggtggtctatccgtaa

SEQ ID NO: 212695 - DNA, 696 bp, Klebsiella pneumoniae
atgcggcgtatggttctggcactgctgctgtccagctatttaccctcggcggacgccagcatggttattgacggcacacggattattttttccggcgacaaaaaagagatcgccgtccgggccaccaatatgggggagaccccctctctgacgcaggtctgggtcgacgatggccgcgtgcaaaatcaaccggaaaaggatgcggcgccgtttattgtgctgccgccgattgtgcgcatcgaaccgggaaaaggccagagctggcgcctggtgtttaacggcagccgcctgccgcaggatcgggaatcgctgttctggttcaatcttctggatatcccacctgagccgaaaaatggcaagactgacaattacctgcagctcgcgatacggtcgcgtatcaagctgttttaccgtccggcaggcgtggcggcggaaaaaatagccgcggaaaaagccctgagctgggcgctggctcctacgggcaacgggctgcgggtgagcaatgcctcagcgcgctatatcaccatcgacagcatcacccttaacggaaaaaaacacgctgccggcatggtcgccccgttttcctcgctggagatcgcgcctaaaggggtcgcgctgcgcacgctgccagccaaattcagcttcaccaccatcaatgattacggcgcggtagtgaatcataattatcctcagtaa

SEQ ID NO: 212696 - DNA, 2436 bp, Klebsiella pneumoniae
atgaaattcagggagatcaaggttgggttgatgctgctccttccctggcaggaggcatgggcggcagaggcgtttagttttaaccgcgcccatttgcacggcgccgcgcaggttgatctccagaaatatcaatacggtaatccactacacgccggacagtaccgcagcacgctctcggtgaatggccgggacctgggggaagaaacgtttgttatccaggaacacgatggccagcttgagccctgcatctcaccctcgctgttcgacgctctgcagctgaaggatgcccagtggccaaccgcggccacctgcctgcgtttttcgcagatcgataaggcgatcggctgggagtatgacagcggggaaaacgtcctgcgggtaaatatgccccaggcgctgctgcaaccccattatcggggggcggtgaacctgaaaaaggtggatagcggcgtgcccgccgcggtgctgcgctaccaggccaatagctatcagagcatcgtcgacggggacaccagcagccatcattatctcgggctggatgccagcctgcgcgcctttggctggcggttacatcaccagtccagctaccaggcgcaggaagggaatacgcactgggatagcattgccacctgggctgagagaagtgtagtgaactgggcgtccacgttacggctgggtcagggatggaccgacggaaccttctttgacagcgtcagttttatcggcggcaggctggctaccgatgtgcgcatgctgccgggctctcgccgcggttttgcgccgtcggtcagcggcgtggcgcgcaccaacgcccgcgtaacggtcacccagaacggcgctctgttgtacgaggcaacggttccgccgggcaaattcaccttcgacgatctctatcccaccaacgcaggcggcgatttacaggtgacgatccacgaggcggatggcagtcaggacacctttaccgtgccgtacgccacgctgcctggcctggtgcaggcaggcgcggtctattatgatctgtcgctgggctatctggatgaggacgggatcgccgggcggccgggatttggcgaagccacgctgcagtacggcttcaatgactatatcagcggctataccggcgctaacgcgacgacagattattactcgacgctggtcggcagcgccttcaatacctactggggcgcgctggcggtcgatctttcccgttctgcggcgaagggcagggagcacggctggcaggagggctaccgctggcgggtgtccgcatcaaaatcgtttacatccgatacgcgaatgctgctctcgatgagccacagcaacgacggcaattatcgctccattcgcgatgccgcctgggagcacgaccggcaccccaacgactggcgggagatgacccgctacagcgcgacgttgtctcagcaggccggcagcggcagtctgtcatttaacggaatctggagtgaggatgtccgccaccaccgctggcgctcatatcagctgggctatgccaaccgctatggtcagctcaattattatctgtatgcccagcagagccaggatatccatcaccgcaataatcaggtggtgggcgtctccttttcgctgccgttcgggcaggcgggcagcctgaccacccgctttaaccacgataaaaactacggcagccagctgcagtccagctataccggcagcgcaggcgagaaaaacgccttcagctacggtttgaccgccagctacgacatgccgcgggagaacccaaatgaagccagcgttgcggccaacggtagcctgcggacggattatgcgtacctgaacgccagcgccagcgccggtcgccatcagcagcagtactcgctgggggcgtcgggcgccctggtagcgcatcagggcggcatgaccgccacccccgaactgggggaaaccttcgccattgtggaagcgcccggcgcggtgggggcccgggtggctaaccgccttggacagccgattaaccgccagggttttacgatcatcccttacctcgatccctttaccgctaactggctggatctcgatccgcagggtctgaacgaccatgtggagattgtctccagcagcacgacggtggtgcccgattcgggcgcggcggtgaaggtcaaatttgtcacgcgtaccggctatgcctggtttgcccatgtcacgctgccggatggcgcggcgcccccgctgggcgcggaggtgttcgacgacaacggtcgggcggttggcgccgtcggtcagggcgggctgctgtatgcccgggtgccgcaggaccacggcagcgtctcggtagtatggggcgaacgcagcgggcaacgctgccggttggcctatgccatccgcgacgacgcggtgcagcaggttagcagcggcacgccgcatcaggtctgccggccgggaataaaggagaagtaa

SEQ ID NO: 212697 - DNA, 1026 bp, Klebsiella pneumoniae
atgaaaaaaatcatcgcatcaggggtacctcttctgctggccggcgggtactgcgcttcgctgtcggcagcgtgtcagatggtcagtggcaaaactatcgagtattcagtgaacgtcagccaggccagtatcaaccttgacgtcagcgatctccccatcggctccctgctatacagctacggagggatgattatcactaataacgaacgctgggagatcgcctgcagcggcagcgagcccggcgggtttcagagcattggcggttcccgggtcggcccggcgggagacggcaagccgggggatatctacagcatcgaccgcctgccgggcatcggctacagctttcagatgggggaacaggatggcattaatttcgatcccctgttcacggcctggccttccgcgccggtattttccggccagcgcgcatttcaggcggagaataaaaaaccgaccatctatttctggcggattgccgataacggcggtctaccgctgccgggcgaatattgccttaatgattaccttggcgatatttatcttggcggagtacaggcgatgcgcttcagcgtcagcgggctctgtattcaggtcaaatcacccacctgcaagattactgacgacagtaaaaacattaacgtcttcctcggacggcataacaaaaccgcatttaccgggctcaacagcaccaccgccccggttccttttaacatcaacctgacgaactgtgaaaatgtcggcagcgtgtttatgcagtttaacgcgacggtggacagcgctgtcgccgccaacgaagtgattaaaatcgatgaccaacctgaaggggcatccggacttggcgtgcagatcctcagtgccggcggctcgctggtgccgctaaaccaggtgagccaggtctggtccgggaaaaaaggcagtcagacgaactatcgtttatcctatcaggcccgctatatccagacgcagcccgcagtgactgcgggcgaagcgaacgccagcgcgaccttcgtggtgacttataactga

SEQ ID NO: 212698 - DNA, 867 bp, Klebsiella pneumoniae
atgaattatcaattagtgaagcaagtcagagaaaataacccattaagaaaaagcttcattgaccttgccgttaagacttttgacctgtcttttgaagagtggtatcagcaaggttactggaccgatgcctatatcccctatgcttttgtcgaacgcaataaagttatcgctaacgcttcggccaacatcatcgacctgcgctggcagggcgagccccggcgttatattcagattggcaccgtgatgaccgagccggaccaccgtaataagggattagccggccagcttatccatcacatcctgcaggactggcagcaggaggcggacgccttctttttattcgccaatcccaccacggtggatttttaccccaaatttggcttcacccgcagcgaagagtatcaatatattatgccggtctccccgcgagccggtgattttcgtaaactggatatggacagccctgacgatgtcgccctgctccgccattactatgaaaaatccaacccgttctcaccgctgcgggtggagcataactttggcctgctgatgttttactgctcagcctttatgaagcattttgtctattactcggcaaaaaatgaggcggtggtcatcgccatgcaaaacggtccggtgctgatctgctttgatctgttctgcgacgtgggtaagagcctgtcgacgctggtcaacgaactggccgatgaccacgtttaccaggccatcctcggttttacccccagtgaagaccggctcggcgagtatgagaagatagagggagaagatatcctcttcgtctatgaccagaaggaaaacctgtttaaagacaggaagttgatgtttcctttactggcgcatgcctga

SEQ ID NO: 212699 - DNA, 921 bp, Klebsiella pneumoniae
atgtcaaatttacccaaattttcccgcgcgctgttgcacccgcgttactggctgttgtggttgggaattggctttttgtggctgctggtgcaattaccgtatccggtgatctaccgtctgggaacggcgcttgggcggctggcaatgcgggtgatgaaaagccgcgcgcggattgccagacgtaatctcgaactctgctttcccgagatgagcgccgccgatcgcgaggcgctgctggtgaaaaactttgaatcgctgggcatggggctgatggagaccggcatggcctggttctggccgacgcaccgggtagcgcgctggaccgagaccagcggcgttaacgaggtggtggagcttctggaagaaaagcagggcattttactgatcggtatccattttctgaccctcgaaatgggtgcgcgaatgtacggcatgtttaccccaggcattggcgtctaccggcccaacgataacccgctgattgactggctgcaaacctggggacgcttgcgctctaacaagaccatgttggatcgaaaaaatctgaaagggatggtcagggcgctaaaagagggggaaattctctggtacgcgccggatcatgactacggtccggccagcagcgtcttcgccccgctgtttgccgtcgaacaggcggcgaccaccaccggtacctggatgctggcgaaaatgtccggggcgacgattgtgccgtttgttccgcggcgcaagcccaacggcatggggtatgaattgatttccctgacgccggagcgcacgccgccgctggcgagcgccgaggttacggcggcctggatgaatcagattatcgaacagtgcatcctgatggcgcccgagcaatacatgtggctgcaccggcgctttaagacccgcccggaaggagtaccgccgcgttactga

SEQ ID NO: 212700 - DNA, 273 bp, Klebsiella pneumoniae; identical to SEQ ID NO: 134900

SEQ ID NO: 212701 - DNA, 1569 bp, Klebsiella pneumoniae
atgctacaacctgttgttcgcgtcggtgaatggctggtaaccccctctgtaaaccaaatcagcaggaaggggcgccagcttacccttgaaccgcgtttaatcgatcttctggtcttttttgcccgccatccgggggaagtgcttagccgggacgagcttatcgaaaacgtctggacccggaacgttgtgaccagccacgtcgtcacgcagagtatttctgaactgcgcaagtcgctcaaagacggcgacgacgttagccttgagtacatcgcgacggtacccaaacgggggtataagctcacggtgccggtgatctggtgcaccgaagagggggaggagctagccccgtcgatggaggcgctgacgccttcgccgtcgaccgccgttcctgcgccgccggccgccggtgcgccatccgacgtctctgtccctctccctgatgccgccgcgccgccaccggctcctaccgtggccagcgcgccgtcaggccgcaagcgcctcactaccgccctggtgtgggggctgttcctgttggcgctgggcacctgcgtggcgctggtggcgctgtcgagcatggaatcgcggccgccggtcaacaaggcgcgtctgctgctcaatccgcgcgatatcgatatccacctggtgaatggcaactcctgcgctaactggtcgtcgcagcactcctacgccgtaggactggccagcctgatcaccacctcgctgaacaccttctcgacctttatggtgcatgacaaaacggactacaacatcaatgaaccaagcagttccggcaaaacgctgaccattgagttcgttaatcagcgccattatcgggcgcagcagtgctttatgtcggtccagctggtggacaacgccgacagctcgacgatgctggataagcgctactttgtgaccaacgataaccagctgaccatccagaacgatctgatgaacagcctgtcggatgccctggcgcagccgtggccggcgcgaatgcaggcgatgctcaggcaatatcagccctcgcaaagcgtggcgttaacctatttctaccagtcgcatcagctgttaatgaagggcgatgtcgattcattaagtaaggccagtagcctgctggatgatgtgattaagcgggcgccggattttatttacgcctatgccgaaaaaacgctggtggatgtattgcgccattcgcaacagccgcttgacgataaacagctggccgccctctacagtgaattcgagcgggtaggggcgatgccgggtataaaagacatggcgatttattatcaaataaaagcggtggattcattggggaagggcaaagtcgacgaagcaaataccgcaattaatagtgcgattgatttagagatgtcatggctaaattatgtgctgttagggaaagtctatgagatgaaaggtgagaaccgtctggctgccgattcttacatcacggcgtttaatttacgtcctggcgaagataccctgtactggattgaaaatggggttttccagacatcggttaaccgagtagttccatatctcgacaactttctctcttcagaataa

SEQ ID NO: 212702 - DNA, 1335 bp, Klebsiella pneumoniae
atgagttctgccaagaagatcgggctatttgcctgtaccggtgtcgtcgccggtaatatgatggggagcgggattgcattattacctgcgaacctggccagcatcggtggtattgccatttggggctgggtaatttcaattattggtgcgatgtctctggcttatgtttatgcccgactggccactaaaaacccgcagcagggcggtcctattgcctacgctggcgaaatatctccggcattcggtttccagaccggtgtcctttattatcatgcaaactggattggtaacctggccatcgggattaccgcagtttcttatctctctacgttcttcccaattttaaataacccggtgccagcaggtattgcctgtattgccatcgtgtggatctttactttcgttaatatgcttggcgggacctgggtcagccgtctgaccaccattggtctggtactggtgcttattccggtagtcatgaccgcggtcgtcggctggcactggtttgatgtcgctacctatcaggcgaactggaatacctccagcaccaccgatagccacgcggttattaaaagtatcctgctctgcctgtgggccttcgttggcgtagaatccgccgccgtgagtaccgggatggtgaaaaacccgaaacgtaccgtgccgctggctaccatgctgggcacagcgatggccggtatcgtctatatcgccgcgactcaggttatcgccggtatgtatcctgcttctcagatggccgcgtccggtgcgccgttcgcaattagcgcctctaccatcctcggcggctgggctgcaccgatggtatccgctttcaccgcctttgcctgcctgacttctctgggctcgtggatgatgctggttggccaggccggtgtacgtgccgccaacgacggtaacttcccgaaagtgtatggcgaagttgataacaacggtattccgaaaaaaggcctgctgctggccgcagtgaaaatgaccgcgctgatggtgctgattaccctgatgaactccgccggtggtaaagcctctgacctgttcggcgaactgaccggtatcgcggtactgctgaccatgctgccttacttctactcctgtgttgacctgattcgtttcgaaggcatcaacatccgtaacttcgttagcctgatttgttcggtactgggttgcgtgttctgcttcatcgcgctgatgggcgcaagctccttcgaactggccggcaccttcatcgttagcctgattatcctgatgttctacggtcgcaaaatgcaccagcgccagaacaacgcatcggataacaacaccaccgctaacgcgcactaa

SEQ ID NO: 212703 - DNA, 2148 bp, Klebsiella pneumoniae
atgaacgttattgcaatcatgaatcacatgggggtttacttcaaagaagaacccatccgtgaactgcatcgtgctctcgaacgcctggacttccgtattgtctacccgaacgaccgtgacgacttattaaaacttattgaaaacaactctcgtctgtgcggcgtgatcttcgactgggataaatacaatctcgaactgtgcgaagaaatcagcaaaatgaacgagtacatgccgctgtatgcgttcgctaacacctactccactctggacgttagcctgaacgatctgcgcatgcaggttcgcttcttcgaatatgcgctgggcgctgcggaagatatcgcgaacaaaatcaaacagaacactgacgaatacatcgacaccattctgccgccgctgaccaaagcgctgttcaaatatgtccgtgaaggtaaatataccttctgtaccccaggccacatgggcggtaccgcgttccagaaaagcccggtaggcagcatcttctacgatttctttggctccaacaccatgaaatccgatatctccatttcggtttctgaactgggttccctgctggaccacagcggcccgcacaaagaagcggaagagtatatcgctcgcgtgtttaacgcagaacgcagctacatggtgaccaacggtacttctaccgctaacaaaatcgtcggcatgtactccgcgccggccggcagcaccgtgctgattgaccgtaactgccacaaatcgctgactcacctgatgatgatgagcgacattacgccgatctacttccgtccgacccgtaacgcctacggtatcctcggcggtattccgcagagcgaattccagcacgcgactatcgccaagcgtgtgaaagagacgccgaatgcgacctggccggtacacgcggttatcaccaactcaacctatgatggtctgctgtacaacaccgacttcatcaagaaaaccctggatgtgaaatccatccactttgactccgcgtgggtgccttacaccaacttctcgccgatctatgaaggcaaatgcgggatgagcggcggccgcgtcgaagggaaagtgatttatgaaacccagtccacgcacaaactgctggcggcgttctcccaggcgtcgatgatccatgtgaaaggcgacgtaaacgaagagaccttcaacgaagcctacatgatgcacaccaccacctctccacactacgggatcgtggcctccaccgaaaccgcggcggcgatgatgaaggggaacgctggtaagcgtctgatcgacggctctattgaacgttccatcaagttccgtaaagagatcaaacgtctgaaaggcgagtctgacggctggttcttcgacgtctggcagccggagcatatcgatggtcctgaatgctggccgctgcgttccgacagcgcatggcacggtttcaaaaacatcgataatgaacacatgtacctcgacccgatcaaagtcacgctgctgactccggggatgaagaaagacggcaccatggatgacttcggtattccggcaagcatcgtggcgaaatacctcgacgaacacggcatcgtggtagagaaaaccggtccgtacaacctgctgttcctgttcagtatcggtatcgataagactaaagcgctgagcctgctgcgtgcgctgaccgacttcaaacgcgcgttcgacctgaacctgcgggtgaaaaacatgctgccgtcgctgtaccgtgaagatcctgaattctatgaaaacatgcgtattcaggacctcgcgcagaacattcacaaactgattgagcatcacaacctgccggatctgatgttccgcgcgtttgaagtgctgccatcgatggtgatgaccccgtatgccgcgttccagaaagagctgcacggtcagacggaagaagtgtatctcgaagagatggtcggccgcgtcaacgccaacatgatcctgccgtatcctccgggagtgccgctggtgatgccgggtgagatgatcaccgaagagagccgtccggtgctggagttcctgcagatgctgtgcgaaatcggcgcccactatccaggcttcgaaaccgatatccacggcgcctatcgtcaggcggatggtcgttacaccgttaaagtgctgaaagaagagaataacaagtaa

SEQ ID NO: 212704 - DNA, 1476 bp, Klebsiella pneumoniae
atgaaaacaccctcacagccgcgcgcgatttactacatcgttgcgatccagatctgggagtacttcagcttttacggcatgcgcgccttactcatcctttaccttacccaccagcttggcttcgacgacagccacgccatcagcctgttcagcgcttacgcatctctggtttacgttacccctattctcggcggctggcttgccgaccgcctgctcggcaaccgcacggcggtaattgccggggcgctgttgatgaccctcggccatgtggtgctgggcgttgagtcgacctccgcatggagtttgtacgtcgcgctggcgatcatcatctgcggctacggcctgtttaaatccaatatcagctgcctgctcggcgaactgtacgctcacgacgacccgcgtcgcgacggcggtttctcgctgctgtacgccgccggcaacgtcggctcgattgccgcgcccatcgcctgcggactggcggcgcagtggtacggctggcatatcggcttcgcccttgcggggatcggtatgtttatcggcctgatgattttcttaagcggcagccgccacttccggcatacccgcggcgtcgataaaccggcgctgcgggcggtgaagttcgtgctgccgacctggggctggctgctggtgatgctctgcctggcgccggtatttttcacgctgctgctgcaaaacaactggtccggctatctgctggcgatcgtctgcctgttcgccgcccagatggtggcgcggatcatgatcaaagccccggagcatcgtcgcgcgctgtggcagatcgtcctgctgatgctcgccggaacgttgttctgggtgctggcgcagcagggcggaagctcgattagcctgtttatcgaccacttcgtcaatcgtcgtctgctgaactgggacgtgccgaccgcgctgttccagtcagttaacgcgatagcggtgatggcggccggcgtggtgctggcgtggctgatgcgcccggaaggcagcgtgcgttctgtgctgcgcgtctggctgaaattttctttcggcctgctgctgatgggcggcggctttatgctgctggcgctcaatgcccgccatggcgcggctgacggtcaggcctcaatgggcatgatggtcgccgggctggcgatgatgggctttgccgaactgtttatcgacccggtggcgatggcgcaaatcacccgtctgaacatgcccggcgtcaccggcgtattgaccggcatttatatgctggccaccggcgcggtggccaactggctggcgggcgtggtcgcccagcaaaccaccgaatcgcaaatcagcgatacggcgattgccgcctatcagcatttcttcgcgcagatgggcgaatggacccttggctgcgtggcggtgatggtcattatcgcctttgccgcggcctgtagcgtcggcaaacgtcgtgcggctgccggtgaaattaccggcggcggcgcctga

SEQ ID NO: 212705 - DNA, 1518 bp, Klebsiella pneumoniae
atgtctgaacaacaagcacaaggtgccgatgaggccattgaccttaataatgaactgaaagctcgtcgcgaaaaactggctgcgctgcgtgagcagggcgtagctttccccaacgatttccgtcgcgatcatacctctgaccaattgcatgctgaattcgatgcgaaggacaacgatgaactcgcttccctgaacgttgaagttgcggtggctggtcggatgatgacccgtcgcgtgatgggcaaagcctccttcgtcaccctccaggacgtcggcggccgcattcagctgtacgtggcgcgcgatgacctgccggaaggcgtctacaacgaacagtttaagaaatgggacctcggcgatatcatcgccgcccgcggcaagctgttcaaaacgcaaaccggcgaactctcgatccactgcaccgagctgcgcctgctgaccaaagccctgcgcccgctgccggataaattccacggcctgcaggatcaggaagttcgctatcgccagcgctatctggatctgatcgccaacgaagagtcgcgtcatacgttccgtatccgttcgcagatcctcgccaccatgcgccagttcatggtggctcgcggctttatggaagtcgaaacgccgatgatgcaggtgatcccaggcggggcgtccgcccgtccgttcatcacccatcacaacgcgctggatctggatatgtacctgcgcatcgcgccggaactgtatctgaaacgtctggtggttggcggttttgaacgcgtgtttgaaatcaaccgcaacttccgcaacgaagggatctcggtacgccataacccagagttcaccatgatggaactgtatatggcgtatgcggactacaaagacctgatcgaactgaccgagtcgctgttccgcaccctggcgcagacggtgctgggcaaaaccgaagtgccgtatggcgaccaggtgtttgatttcggcaagccgtttgaaaaactgaccatgcgggaagcgatcaagaaacaccgtccggaaaccaacatggcggatctggataacttcgacgcggcgaaagcgctggcggaatctatcggtattcaggtagagaaaagctgggggctgggacgcatagttaccgaaatctttgacgaagtggcggaagcgcatctgattcagccgaccttcatcaccgaatacccggcggaagtttctccgctggcgcgccgtaacgacgtcaacccggaaatcactgaccgctttgaattcttcatcggcggccgcgaaatcggtaacggtttcagcgagctgaacgatgccgaagaccaggcgcagcgcttccaggatcaggtgaacgccaaagcggcgggcgatgacgaagcgatgttctatgacgaagactacgtgaccgccctcgagtacggcctgccgccgaccgcgggtctgggtattggtatcgaccgcatggtgatgctgtttaccaacagccataccatccgcgacgtgatcctcttcccggccatgcgtccgcagaagtaa

SEQ ID NO: 212706 - DNA, 426 bp, Klebsiella pneumoniae
atgaataagacctggcttttcaccaccctcaccctggcgctggtcgccgccgcgccggcccacgccattagcgcgaaataccgggaacagcttgaacgttccggctgcacgcagatgaccgatgggaccacctgcgatattcataaaaccaaagccgagaatgccgccgccgcgcagcacgccagcagcggcttcggcccctgggtgggcacctggtatgtttatacggagtatggcgataaaattgatgagattaccgtcaccgctaaaacggtgaaaacccatggtcatctggtcgaggaggcgaaagccagccagggtaaactgaccttccgggtgaaaagctcagcctttacgctgaacgacgcctttaacggcgtatgggcaaacggcagacagcgcggctccctgcaaaaagtcctgtaa

SEQ ID NO: 212707 - DNA, 921 bp, Klebsiella pneumoniae
atggcgacagagcaactgcggtggggcgtgagccccctgtgctggaccaacgatgtactcgaggatttaggcggtgatattcccctggatacctgcctgcgcgaggcgcgggaggcgggctatcagggcattgagttaggacggaaatttccccgccaggcatcaaccctgggcccgctgctggcggcggctgacctgcgcctggcgtccggctggtacagcggcatgctggccgaccgcagcgtggaagcggagctggaggcggtgcgggagcacgcccagcttctccggcagctcggcgcgaaggtgatggtttacggcgaatgcgggcaactgccaggtgaaaccccgcttgatgagcctatttcgctctcgccgccgttaagccgcgtcagcctggcggcgtattgccacaagctgaatacctttgctgacctgctgctgcgcgactatgacctccagctggcctatcaccatcatctgatgatgctggtggagcacgatgacgagctggagcggtttctgtctcacacccatgacaacgtcgggctggcgtttgataccgggcacgcctttgtcgccggggtcgagatcccgcgcgtactgcacaaatatggccaccgtatccgccatctgcatctgaaagacgtgcgtccccaggtgctggggcgtctgtatcgggaaaacctgagctttaacgaggcggtgcgcgccgggctgtttaccatcccaggcgacggctgcatcgactatgcgccgatcctcgactttgtccgggacagcgactaccgcggctggctgattatcgaagccgagcaggacccggcgatggcgccgccgctggccaccgccagccgcgcctatgcctggctggcgcaccatttatcttccccttcatcgtcagaggagtatgcatcatga

SEQ ID NO: 212708 - DNA, 1173 bp, Klebsiella pneumoniae
atgagcgcgcggttaaatatcggccttatcggctcaggttttatggggcaggcacacgctgacgcttaccgtcgcgcggcgatgttctatcccgatctgcccaagcgcccgcatctctacgcgctggcggatcaggatcaggcgatggccgaacgccacgcggcgaaactgggggcggaaaaggcctacggcgactggcgcgagctggtaaacgatccgcaggttgatgtggtggatatcacctcgccgaaccatctgcactacacaatggcgatggcggcgatcgcggcgggtaaacatgtctattgcgagaagccgctggcggtcaatgagcagcaggcgcaggagatggcgcaggcggcacggcgcgcgggggtgaagaccatggtggcctttaacaacatcaaaacgccggcggcgctgctggcaaagcagattatcgcccggggagatattggcgaaccggtgcgctttcgcggcacctttgatcaggggttttataacgacccgaacctgccctggtcctggcgctgctcgaaaaccctcggcggcagcggggcgcttggcgacctcggcgcccataccctgtccgtcgcccagtttttgctgggcgggatccgtgaagtgaccgccagcgcgcaaacctgcctgcgccagcgtccggtgccgcagaccgatgccgggtatgccagccgggtcgcggtcgatgccgagtggcgggaagtggaaaatgacgatcaggttcagtgcctggtcaatttcgacagcggcgccgcgggggtgattgaggcctcgcgcatcgccgccgggcggatcttcggcgtgttctgggaggtctccggcaccgaaggcacgctgtatatggacggggagcgctttaacgagctgcaggtctatcgcttcaacgatgataaacatgaccgcggctttaagacgctgtatgccgggagccagatcccggcctatgccggcttcttcggcttcgattttggcggcggcgggctgggctattttgacgtcaaggtgatcgaagtgcatgacctggtgcaggggatttgcggggagggcgactgctatcccaactttgaatttggtttgcagaatcagcgcgtgctgtcggcgattgaagcctcgatggccagccgtcgctgggtgaacgtggttaaagactaa

SEQ ID NO: 212709 - DNA, 1032 bp, Klebsiella pneumoniae
atgtttccgtcacacttaccaaccccgcgccgcccggcggcgcagagcattcccatcctgcgctggggcattatcggtcctggctggatcgccgagcgctttgtgcactcattgaaaacctacagccggcagcaggtggtggcggtggtttcccgcagccaggcgaaggccgaccgggtggccgcggaatgggggatcccccaggcttacggccaggtggaggagatgctggcgcgtccggatattgatgcggtgtatattgcgacgccgcacaaccatcactttcccgacggcatgcaggcgctgaaggcgggcaaacacgtgctgatagagaaacccttcgccctcaacctcggcgaagggcgtgagctgcaggccgaagccgcccgccaggagaagctggcgctggaggcaatgtggtgcgattacgcgccgaaatatgatgtgatccgccagctgctggaggatggggcgctcggcgacctgcataccctgctggccgatcacggcgagtatttcacccgcgaccaccgcatcttcaatgccgatcttgccggcgggccgatgatggacctcggcagctatgtgacctcgtttgcgctgatggtgggcggcatgccgcaggagattgtcgcccgcggcagcgccacggcggaggggctgaacggtcagacgtcgatgctgtttagctggcagaacgggatgcaggggttgttaaacaccactttgttcagcaacacgccgggcggggcggtggtggccggacgccaggcgaccctgacgatcgacggccagttttacgcccccggcggcttcacgctcgccgccagccagggcgggcaggtgctgcgctgggaagagccgcgcaatcgctacgaccagctgttctggcaggcggagcattttgcctggtgcatcggacagggggtgcaggactcgccgctgcggccgctcagtcgggtgctgcagaatctgcaggtgatggatgaggtgcggcgccaggtgggcgcggtgtttaacgaagaacgttaa

SEQ ID NO: 212710 - DNA, 1008 bp, Klebsiella pneumoniae
atgatctgcaaacgttttgccctggtaggcagtggttttatcggtcaggttcatgccgccagtcttgctcgtcatgaaggaagtgcgttgacgatggtggccgatgccgccccggagcgcgcccaggcgctggccgcccgctatggcgcccgggcggtgaccgtgagcgaggcgatccatagcgacgccatcgacgcggtgctgatcgccagttcaaccccgtcgcatgccgaactgctggaagccgccgccagggcgggcaaggcggtctattgcgaaaaaccgatcgacctcaccctggcgcgcgcccgtgaggtggtggagcgggtgctccccctgaacgtgccggtcactgtcggctttaaccggcgcttcgatagcagccatcagcagctccgccgccagctggagcaagggctgatcggccgggtcgagctggtgcagatggtctgccgcgcctccagcatgccgccgctcgactatctgcgcagctccggcggccagatgcgcgatcaggcgatccacttcttcgatctcctgcgctttctcactggcgatgaagtgcgcaccgtagcagcgatgggcgcggcgctggccctgccggacattgccgaatttggcgatgtcgacacctccatcctgatgatgcagatgcgcggcggcgcgctggcgcagctggacaatacccgccgcaccggccacgggtacgatgaacggatcaccctgctgggcgccgaaggcgcgctggagtccggtagccagtcgccggcgggccctaccctgtggcgcggcaatcagcgcattgagccgggcctgtggccggactggttcagccgggtacagggatcttattaccagcatcttgacgcctttattcgctccctgaatggtgaaaccgtcgccgacctgcccggcctgctggacggcctgcaggcgcaggccattgccgaagcggcagttcagtccctgcagcatggccagtttgtcgccgtcgacgactgtcgctga

SEQ ID NO: 212711 - DNA, 1035 bp, Klebsiella pneumoniae
atgaagagaggggcgatgaaaaacatttcactggcgatgctggccagacagattggcgtcggcgtggccaccgttgaccgggtgctgaacgagcgcggcggcgtatcgccgcagaccacgcgcaaagtgctgcaggcggcgcgcgaggcggggctgaagcggatcctgccggaggagcaccgctttccctggcagattgaggtctttctcagcagcaatgactcgttcttctttccgcagctggcgcaggattttgccgccgtggcggatagcctcggctatcgccgtctgaccttgcaccgcacctttgtcccggagtcgcagccaacgacgctggcccggcgcattgcgcgcagctgccagcagcgtcaagggatcatcgtcttcggcaatgaccatcccgcggtgcacgacgcgctgcaccgctgccgggaggctggcgtcccggcgatcaccctggcgacggacctgcccggcgccgaccgactctgccacgtggggatcaatcagctacaggctggccgcacggcggggttaatgctggggagaatgacgccgcggcccggcgaggtgctgatggtcagcggccggcaagattacagcgcgcatcgcctgcgcattcaggggttccgcgaggtgctgagccagcgctttccccacctgcagctcagcgacgtgctggcgggcgaggagcggcgggagcagatcacccgcctggtggagcaagccctgtgccgcagccggaatattgttgggatctataacaccgggcttggcaatacccagattgccgaggcgctggcccgccaccgccgcgaaggcgacgtctgctggatcacccatgagcgttacaacaccacccggcagcagctggcgaagggcagcctggcgttaacgctcgatcagaacacccgccagcacgcccagctggcgatcgacctgatgctgcgccatctggagtccggctaccagccgcaaacctatgccgacggtaaagtcgactttatcctctacagcgccgagaacgtggactaa

SEQ ID NO: 212712 - DNA, 924 bp, Klebsiella pneumoniae
atgaatattaagaaaacgattgttgcctctttgttagcctgcatgctgcctgcggtggttatggcaaaagatgtctccattggcgtctcgatggcgctgtttgacgataacttcctgacgatcctgcgtacctcgatgcaaaaagagatgaaaaaagatggcgttaaatcgcagatcgaggacgcgaaaggggatgtctcccagcagctgcagcaggtacagaactttatcggccagggggtggacgccattatcgtcaacccggtggataccaacgcggtgaaaccgatcatggatcaggccaccaaagccgggatcccgctggtgtttgtgaaccgccgtccgcaggcggagctgaccgacaagatggcctatgtgggatcggactccattctcgccggccgtctgcagatggaagcgctggcgaaagcgatgaacggtaagggcaatgtggcgatcctgctcggcgacctggcgaatgaatccactcgcgaccgcaccaaaggggtggaagaggtggtagcgaaatacccgaacatcaaaatcgtccagaagcagaccgcgaaatttacccgcaatgacgcagtggatgtggtcagcaactggatgaccagcggtgaggatatccaggccatcgcctccaacaacgatgaaatggcgatcggcgccctgcaggcgctgggcaaaaacccgaaccatattctcatcgccggcgtggatggcaccccggatgccctgcagatgctgaagagcggcaagatgatcgccaccatcttccaggatgcgaaaggccagggtgaaggcgcagtagacgcggccatcaagctggcgaacggcgagaaagtggaaaaaatcatcgacgtgccgtatcagctgatcaccaaagagaacatggctgaatttaccaaccgtaatcagaaatag

SEQ ID NO: 212713 - DNA, 1485 bp, Klebsiella pneumoniae
atgaacgcttttgcccttgaagccgaaggtatcagtaagttcttccccggcgtgaaggcgctcgataatgtctcattgcgcgtgcgtccgggaacggtgcatgccctgatgggcgagaacggcgccggtaaatccacgctgatgaaatgcctgatcggtatctatcgccccgataaagggtcgattcgcgtgaaaggggagccggtggagtttaccgacaccatggatgcgctgcgctcggggatctcgatgatccaccaggagctcaatctggtgccgcatatgacggtggcggagaatatctggctggggcgcgagccgatgaaatacggctttgtcgaccacggccagctgacccgccagacccaggcgctgctggataagctcaatatccgcttaaccgctgaccggctggtgggcgacctgagcatcgccgcccagcagatggtggagattgccaaagcggtttcatggaacgcggatatcgtgatcatggatgagcccacctcggcgctgaccgaaggcgaggtggctcacctgttcaccatcatccgcgacctgcgcgcccagggtaaagcgatcatctatatcagccacaaaatggatgagatctttgccatcaccgatgagatcagcgtctttcgcgacggcacctgggtagggagcaaaaacaccaccgaatttacccggcagtcgctgatcacccagatggtgggccgcgaattaacccagctgtttccgaaatttaataacaccatcggcgaagaggtgctgacggtgcgcaacctgacgcgtcagggcgtgttccatgacgtcagctttagcgtacgccgtggcgaaatcctgggcgtggccgggctggtgggcgccgggcgcagcgaggtgatggaaagcctgttcggtatggagcgcttcgacagcggcgaagtgctgatcgacggggcgccggtgaccatcgattccccctccgtggcgattgaaaaggggatggcattattaaccgaagaccggaaaaagtcgggcctgtttctggtgctgtcggtgctggaaaatatgagtatcgtcaaaatgccggaatatatcggcaagagcggttttgtccagcacgtgaaaatggccgaagactgcatggagcaaatacgccggctcaatattaaaacgccgacgatggatcaaattattaataacctcagcggggggaatcagcaaaaagtcctgattgcgcgctggctgttagcgcaaccgaaaatcttaattctcgatgagccgacccgcggtatcgacgtcggggcgaaggcggagatttatcatcttatcagtgaactggcgaatcggggggtggcggtgattatggtctcctctgaactgccggaaatccttggcatgagcgatcgggtcatggtgatgcatgaaggtcgtatcaccggcatcctggaaaaagacgaagccgaccaggaaaccattttgtcgttggcatcccattga

SEQ ID NO: 212714 - DNA, 1032 bp, Klebsiella pneumoniae
atgagtaatatgaaattaacggcggctccggccagcgagggttcctccttcttcgctaatttgcggcataaaatgccgaaagataccggcatctttgtggtgatgctggtgattgccctgacctttgaaatcgccggctggtatgttcgcgaccagtcgttcctgctcaataccaaccggctggtgctgattgtgctgcaggtggcgattatcggcatcatcgccgtgggcgtcacccaggtgatcatcaccaccgggattgacctctcctccggctcggttattgcccttgcggcggtggtggcggccagcctggcgcaaacctccgatagcctgtcgccaatgttcccggcgctggtcaacctgccggcggtgatccccatttgcgcggggatcggcgtcggcctgctgtgcggcctgaccaacggtttcctggtgacgcggaccggtatcccgccgtttatcgccaccctcgggatgatggtttcggcgcgcggtctggcgcagtattacactcagggcaacccgatcagcttcctctccgacagctttacggcgataggccagggtgcgatgccggtgattatcttcttcgtgatcgccgccgtgtttcacattgcgctgaagcatacccggtatggcaaatatgtgtatgccatcggcggcaacatgacctcggccaaagtgtccggcatcaatgtgaataaatatctggtgatcgtctacaccatcgccggggcgctctccgggctggcgggggtggtgctggcggcgcgcgtcagcagcggccagtcgagcatggggatgtcctacgagctggacgctattgccgccgcggtgatcggcggcagcagcttaatgggcggagtggggcgcattaccggcaccctgattggcgcgatgatccttggcctgatcaaaagcggttttacctttgtcggcgtcgatgcctatgtgcaggatattattaaaggcatcattatcgttgcggcggtaaccatcgatatgcgtcgcaaccggaaaaaacactaa

SEQ ID NO: 212715 - DNA, 609 bp, Klebsiella pneumoniae
atgaatacaccatcctttggcaaattctcgccgcgctggctagcgggaaaaaggggccttatcgtcacgctgctcgcggggctggcgatcctggcgctcggtcggggcatgaatttgccggccagagaggttttccgtgagaggcagatccgccagctggaggaggatgcgcagtgggtggcggaacgccttgagcggcggatgaacattccggcgccgcagcgggaagcgacctggccgctggcggcgatgcgcgccgctctccagaccctcgcccaggagcggcattatcagctgctgctggtgaatggcgacgggcatctgctggcggcatcgcacgcgctgccggccagcgtgctggcccaagtgcaggcgcagttcccgcgagagatgcagcccccgctgttcggcagccactaccagaccattcagccattcgccccgcatcaaaggatgttaagccgggcgctgaacggcaacgcggggctggcgggctggaatctggtgatgctggcgccggatggtggattgccctcgttgctggtggcttaccgctggccggtaacgatcggccttggcgggtgctcgccagcgcgctgctggcgctga

SEQ ID NO: 212716 - DNA, 1005 bp, Klebsiella pneumoniae
atgaaaaccaaacgcgtaactatcaaagatatcgccgaactggcgggcgtctccaaagcgaccgccagcctggtactcaacggtcgtggtaaagagctgcgcgtggcgcaggagacgcgcgagcgcgtactggcgatcgctcgcgaacagcactatcagccgagcattcacgcgcgctcgctgcgcgataaccgcagccataccattggtctggtggtgccggagatcaccaactacgggtttgccgttttctcccacgagcttgagacgctctgccgggaagccggcgtgcagctgcttatctcctgcaccgacgaaaacccaggccaggagagcgtggtggtcaataacatgatcgcccgccaggtcgacggcctgatagtcgcctcttgtatgcacagcgatgccgactatcagaaactcagcgaacagctgccggtggtgctgtttgaccgcttccccagcgacagcgccctgccgctggtgatgaccgactcggtcaccccaacggccgagctgatctcccgtatcgcgcctcagcatgcggacgagttctggtttctcggcggccagccgcggctgtcgccgtcgcgcgaccggctggcggggttcacccagggcctggcccaggcggggatcacgctgcgccctgagtgggtgatcaacggcaactaccaccccagctccggctatgagatgttcgcggcgctctgcgcgcggctggggcgtccgccgaaggcgctcttcaccgcggcctgcgggctgctcgaaggggtgctgcgctatatgagccagcatcatctgctggattccaatattcatctcgccagcttcgacgatcactatctgtatgattcgctttccctgcgcattgataccgtgcagcaggataatcgccagctggcctggcactgctacgatctgctcagccagctgatcgacggtcaggccccggagccgcttcagcgctacctgcccgccaccctgcagattcgccatccctga

SEQ ID NO: 212717 - DNA, 1401 bp, Klebsiella pneumoniae
atgtcattaccgtcacgtctgcctgcgatcctgcaggccgttatgcagggccagccgcaggcgctggccgacagccattatccgcaatggcatctggcgccggtcaacggactgctgaacgatcctaacggcttttgccaggtcgccgggcgttaccacctgttttatcagtggaacccgctcgcctgcgaccatacctataagtgctggggacactggagctctgccgatctgctgcactggcggcacgaacctatcgccctgatgccggatgaagagtatgaccgcaacggctgctactctggcagcgcggtcgagttcgagggtgccctgactctgtgctacaccggcaacgtgaaattccccgacggcgggcgcaccgcctggcaatgtctggcgaccgagaatgccgatggcaccttccgcaagctggggccggtgctgccgctgccagaaggctataccggccatgtgcgcgaccctaaagtgtggcggcaggacgggcgctggtacatggttcttggggcgcaggatgtgcaacagcgcggcaaagtgctgctgtttaccgccagcgacctgcgggagtggcgcctggtgggcgagatcgccgggcacgacgtgaacggcctggcgaacgccggctacatgtgggagtgcccggatctctttccgctggcggacacccacctgctgatctgctgcccgcaggggctggcccgcgaagcgcagcgctttctcaatacctatccggcggtgtggatggcaggccgcttcgacgccgaacgcgggatcttcgaccacggcccgctgcacgagctggacagcggatttgagttctacgcgccgcagaccatgcaggccgacgatggccgccgcctgctggtcggctggatgggcgtccccgacggggacgagatgcatcagcccacccgcgcgcagggctggatccatcagatgacctgcgtgcgtgagctggagtggcaggctggcactctgtatcagcgtccgctgcgcgagctggtcgccctgcgcggggaagcccagggctggtgcggacagaccctgcccctcgccccgatggagctggcctttgacatcgcccccaacagcacgctggggctggactttgccggcgccctgcagctcaccgtcaatcgcgacggtctgcgtctgtcgcgccgcggcctgcagacggcggagatgcatcaccgctactggcgcggcgaggcgcgccgcctgcggatctttatcgaccgctccagcgtagagattttcatcaacgatggcgaaggggtgatgagcagccgcttcttcccgggctatccggggcagctcatcttcagcggtgcgacgccggtggcattctgccgctggctgctgcggccatgcatggtagaataa

SEQ ID NO: 212718 - DNA, 1371 bp, Klebsiella pneumoniae
atggattttgaacagatttcccgctcactgcttcccctgctgggcggcaaggaaaatatcgccagcgccgcgcactgcgccacccgcctgcggctggtgctggtcgacgacgcgctcgccgatcagcaggcgattggcaaaatcgacggggtgaaaggctgctttcgcaatgccggacagatgcagatcatcttcggcaccggggtggtcaataaagtctatgccgcctttatccaggccgcaggcatcagcgaatcgagcaaatccgaagccgccgacctggcggcgaaaaagctgaacccgttccagcgcatcgcccgcctgctgtccaacatcttcgtgccgattattccggccatcgtcgcctccggcctgctgatgggcctgctggggatggtgaaaacctacggttgggtcgacccgagcaacgctctctatatcatgctggatatgtgcagttcggcggcgtttatcattctgccgatcctgatcggctttaccgccgcacgcgaatttggcggtaacccctatctgggcgcgaccctcggcgggatcctcacccatccggcgctgaccaacgcctggggcgtcgccgccggcttccataccatgaatttcttcggcatcgaagtggcgatgatcggttaccagggcaccgtcttcccggtgctgctggcggtgtggtttatgagcatggtcgagaagcggctgcgccgcgtgatccctgacgcgctggacctgatcctcactccgttcctgacggtgattatctccggctttatcgccctgctgctgatcggcccggccggtcgcgcgctcggcgacggcatttcgtttatcctcagcacgcttatcagccacgccggctggctggcgggcctgctgttcggcggcctctattcggtgatcgtcattaccggtatccatcacagcttccatgccatcgaagccggactgctgggcaacccatcgattggcgtcaacttcctgctgccgatctgggcgatggccaacgtcgcccagggcggcgcctgctttgcggtgtggtttaaaaccaaagatgccaaaataaaagccatcaccctgccgtcggcgttttcggcgatgctggggatcaccgaggcggcaatcttcgggattaacctgcgctttgtgaaaccgtttatcgccgcgctggtgggcggtgccgccggcggcgcctgggtggtgtcgatgcacgtctacatgaccgcggtaggcctgacggcgatcccggggatggctatcgtgcaggccagctcgctgctgaactacattatcggaatggcgatcgccttcgccgtggccttcgcgctctctctgacgctgaaatacaaaacggacgctgaataa

SEQ ID NO: 212719 - DNA, 1518 bp, Klebsiella pneumoniae
atgtataaaaaacggaagttagccattcttattgctttgctaaccggcaccgccgccgcccatgggcagacagacctgaacagcattgaagcgcgtctcgccgccctggaaaaacgcctgcaggacgccgagacccgcgccagcactgccgaaagccgcgccgcctcagcggagcagaaagttcagcagttaacccagcagcagcagcaaacccaggccaccacccagcaggtggccaggcgcaccactcaactggaagaaaaagccgaacggcccggcggctttgagttccacggctatgcgcgttccggggtgatcatgaacgactcggccgccagtaccaaatccggcgcttatatgacccccgccggggagaccggcggcgccattggtcgcctgggcaaccaggccgacacctatgtggaaatgaacctcgaacataaacagaccctggacaacggggcgaccacccgtttcaaagtgatggtggccgacggacagaccacttataacgactggacggcaagcagcagcgatctgaacgtgcgccaggcgttcgtcgagctgggcaacctgccgaccttcgaaggcccgttcaaaggctcgaccctgtgggccgggaaacgctttgaccgcgacaacttcgacatccactggattgactcggatgtggtgttcctcgccgggaccggcggcgggatctacgacgtgaaatggaacgacagcctgcgcagcaacttctcgttatacggccgcaactttggcgatatcgccgacagcagcaacagcgtgcagaactatatcgtcagcatgaataactttgccggcccggtgcagatgatggtcagcgggatgcgggcgaaagataatgacgaccgccaggacgcgaacggcaatctggtgaaaggcgatgccgctaacaccggggttcatgccctgctgggcctgcacaatgagagcttctatggcctgcgcgacgggaccagcaaaacggccctgctgtacggccacgggctgggcgccgaggttaaaggcatcggctccgacggcgcgctgcgcccgggggccaatacctggcgcttcgccagctatggcaccacgccgctgagcgatcgctggtttattgccccggccgtgctggcgcagagcagtaaagatcgttatgtcgatggcgacagctatcagtgggccaccctcaacctgcgtctgattcaggaagtgacgcagaacttcgccctcgcctgggagggcagctatcagtacatggatctgcagcctgaaggctacaacgatcgccatgcggtcaatggcagcttctacaagctgaccttcgccccgaccttcaaggtgggcagcatcggcgacttcttctcgcggccggagatccgcttctatacatcgtggatggactggagcaaaaaactggacaactacgccaacgatgacgcgttaggcagcaacggattcaaatcgggcggcgaatggtcgttcggtatgcaaatggagacctggttctga

SEQ ID NO: 212720 - DNA, 924 bp, Klebsiella pneumoniae
atgaatggaaaaatctgggtactcggcgatgcggtcgtcgatctcctgcccgatggagagggccgcctgctgcaatgccccggcggcgcgccggccaacgtggcggtcggtgtggcgcggctcggcggtgacagcgggtttatcggccgcgtcggcgacgatcccttcggccgttttatgcttcacaccctggcgcaggagcaagtggatgtgaactatatgcgcctcgatgcggcgcagcgcacctccacggtggtggtcgatctcgatagccacggggagcgcacctttacctttatggtccgtccgagcgccgacctgttccttcagcccgaggatctcccgccgtttgccgccggtcagtggctgcacgtctgctccatcgctctcagcgcggagccgagccgcagcacgacattcgcggcgatggaggcgataaagcgcgccgggggctatgtcagcttcgaccccaatatccgcagcgacctgtggcaggatccgcaggaccttcgcgactgtctcgaccgggcgctggccctcgccgacgccataaaactttcggaagaggagctggcgtttatcatcggcagcgacgacatcgtcagcggcatcgcccggctgaacgcccgcttccagccgacgctactgctggtgacccagggtaaagcgggggtacaggccgccctgcgcgggcaggttagccacttccctgcccgcccggtggtggccgtcgataccaccggcgccggcgatgcctttgtcgccgggctactcgccggcctcgccgcccacggtatcccggacaacctcgcagccctggctcccgacctcgcgctggcgcaaacctgcggcgcgctggccaccaccgccaaaggcgccatgaccgccctgccctacagggacgatcttcagcgctcgctgtga

SEQ ID NO: 212721 - DNA, 768 bp, Klebsiella pneumoniae
gtgagccaggcggaatatttcgccactccagatctggacttttccttccccacccgcttaggtatagttcaccaggtcgcggttagccccgccgcggtggccaaaggtaaaggagtgcgtagcgcgatgaaccccagttttggcgatatttacgatcggtaccagaagctgacgctgactacgcatctgccggcggtgatcgcctgcagtgaaacgctgagtttgggcaaagaccagggctttattccgcagccgggctatctctactttctgctgcaggggcaaatgacattggcctttggcgatgagcagaacctggtcgggattgttatcgcgcatatgccgttaggattactggaacattattgtccgtcggtcgcgctctattatcagtgtctgggcgagtgccagctggcgaaaataaccgccagcgattttgagcgaatattctttcattcgtcgccgggctatatgcaagagctgaccacgatcctggcctatatgggcatatttgcccttgatgcccactatgaacgcggcagccagaccagctttcagaccattaaatcgatgctgtcgcgctatttatatcgcggcgaaattgatgggggtcagcatgagagcctgtcggcatttattattaaacgaaccaatctctcgcgcagctatgtgtaccaggtgctggccgcgctgcgcgaggggggatatatcacggtgaaaaaaggcaagctgatctccatcgaccgtcatattcctgagaaattctaa

SEQ ID NO: 212722 - DNA, 345 bp, Klebsiella pneumoniae
atgaccctggactatgtggcgctggccattctgatcgccgtggccttaatacttttttatggcgtgattgttattcacgatattccttatgaaatcgccaaagagcggcgtcatcctcatcaggatgcgattcattatgccggttgggtcagcttatttaccctccacgcgctgtggcccttgttatggatctgggcgacgctgtggcgcgaagaccgcggatgggggatgcgccacattgccgacgagcagcaggcgctgcatcagcgtctggaaacggtggtccagcagctggaacaggtccagcgcgaggtggacgttctgaaagcgaaggaggcaaaataa

SEQ ID NO: 212723 - DNA, 1143 bp, Klebsiella pneumoniae
atggaaacgttaatgttgctgacctacgccgcgctatgcatcgtggtgtttaaagtttttcgcatcccgctcaataagtggaccgtgccgacggcggtgctcggcggtatcgccctgattggcgcggtgatcttcgggatgaactacaacttcccttataccgacgtcggtaaccaggtgtttcgcaccgtgccgattgtgtcgcaggtacgcggccgggtgcagagcgtaccggtgaagcctaaccagatgctgcataagggcgatgtgctgtttaccctcgacccgacgccgttccaggcgaaagtggacgatctgcaggcgcagataaaagctgccagtcaggatgcgctctccttaaacgcggcgttaagccaggcgcaggccgagctgagcagagcggtggcccagcgtgaccagtcgcggcgagagtatgcccgctatcgggagggccatgcccagggcgccttctccgatcaaatggttgatacccgtctgcagacgtggaaagccgatgaagccagcgtcagcgcggctcaggcaaaggtggttcaggcgcgtaatgcgctggactcggtggtgaagggcaaaaacaccaccgtggcctccctgctggcgcagctgcaaaaggcgcagtttcagctggagaacaccgtcgtccgcgccccggaggatggctatgtcagtaccgtcggcttacggccgggcaccatgtccactgcgctggggatgatcccgctgatgacctttgtgccggtggagggcgccgcctcgcgggagtacgtcgcggcatttcgccagaacgccctgcagcgtctgcacaaaggcgagcccgcggagctgatgtttccggctatcccgggcaccgtctttcgcggagaagtggccgacgtgctgccggcgattggcgagagccagttccaggggcagggcaaactgctgaccacagacgcgctcaatacccatggccgggcgctggtggtgctgaaggtgaccgatccgcgttttgccgaatacgctctgccgcagggggccaccctcgaggcggcggtctactcggatcatctgaaagagctgtcgctgatcaggaagatcctgatccgtatgaaaagctgggaaaactatatctatctcgatcactaa

SEQ ID NO: 212724 - DNA, 798 bp, Klebsiella pneumoniae
atgagcgaccagacattatccgggctgtcgctgtctcacttcagcgccggctaccccagacgcaaggtgatcgagaacctgacggttccccatctgccgcgagggaaaatcaccgcgctgctggggccaaacggcagcggtaaatcaacgttaatgcgggcgatggcgggtctgggcccctgccgcggcgagctgctgctggagggggaaaatctgctgacgcagccgttctcacgtcgcgcagagcaggtggtctatcttccgcagacgctgcccgccggcgtgcatctgcatgtgctggagtcgattatcgttgcccagcgcgccgccggaggacgccacagtccgcagcgccaggaggaagtgatggcgctgctgcgacagctggggattgcccatctggcgatgagctacctcgatcagctctccggcgggcaaaagcagctggtgggtctcgcccagtcgctgatccgccagccgcgcctgctgctgctcgacgaaccgctcagcgcccttgacctcaactaccagtttcacgtgatggatctggtgcgccgggagacccggcggcgcaacatcgtgaccctggtggtggtgcacgacatcaatattgccctgcgtcacgccgaccacgtgctgatgctcaaggcgggccagctgctcggcgacggcaccccggccgcggtcatcacccccgagactctggcggccgtctatggggtgcgcgggcgtattgaaccctgttcgcagggggtgcggcaggtgattattgacggcctggtggacagcgaggcctga

SEQ ID NO: 212725 - DNA, 1083 bp, Klebsiella pneumoniae
atgcgtttaacctccgactccgtgctcgacgggctgcccgccgggacctctggcatgatgaatgattatcgccgtatcgtgcgtcgccgtctgctgctgatcctcctgctggcgctgttgattgtcgcgtcgctgctgctcgattttatgctcggcccctccggtctgccgctgcagagcctgtggcagacgttaaccgatccggccagcgccgatccgggcacgcgcgccatcgtctgggatatccgcctgccctatgcggtgatggcgattatcgtcggtctggcgctgggactggccggcgccgaaatgcagaccatcctcaataacccgctggccagcccgtttaccctcggcgtctcctcggctgcggcgtttggcgccgcgctggcgattgtgctcggtattggcctgcccggtattcccggccagtggtttatctcggccaacgcctttatcttcgccctgctggcggccctgctgctggacggcatcacccgctggacccaggtggccacctccggcgtcattctgttcggcatcgcgctggtctttacctttaacgctctggtctcgatgctgcagttcatcgccaacgaagacacgctgcaggggctggtgttctggaccatgggcagcatcgatcgcgcctcctggagcaaagtcgccatcctgctggtcgccctggcgctggtgatgcccctgtcgctgcgcagcgcgtggaagctgaccgccctgcggttgggcgaggaccgggccatcagctttggcattaacgttcgccgtctgcgcctgaccacgctgctgcggatcagcattctgtcagcgctttcggtggcctttgtcgggccaatcggctttatcggcctggtggcgccgcatattgcgcggatgctcttcggcgaagaccatcgcttttacctgcccgccagcgcgctgatcggcgccctggtgctctccctggcctccatcgcctcgaaaaacctgatcccgggggccattattccggtggggatcgtcacttccctggtcggggtcccgttctttttgagcatcattttacgtcatcgggggcaggtatga

SEQ ID NO: 212726 - DNA, 1119 bp, Klebsiella pneumoniae
atggcaagaaaatcagtaagatcgctgttacttactgcgctgctcgcgacgcccctcctcagctatgcaacccaatatcccctgacggtcacggaccttgacggccggcaggtcaccctcgccaaagagccgcagcgtattattttgcaggatggtcgcgacattatgaccctcgccctgctggaccgggacaatccgtttaaacggctggtggcatggaataatctggcgaaaaagcaggatgttgccacctggcagatgctgaaaacgacgtggccccagtcggccacgatccttgacatgggcttcagcgataaagggaacgtcgatcttgaaagcgtcatcgcccgtcagccggatctgatgatcgcccagctgcgcgccaggccagcgctgatggagagcggcgtcatcgacaagctcagcgccctgcacgttccggtgctgtttgtcgactatgagatcgccccggcgaaagataccgcccccagcatcgacctgctgggcaaagtccttaaccgcgagagccaggccaaagcctttaccgattactatcgtcagcagctgcagtcgattcgccagaagaccgcgaccatcacgccgaaggccaacgtcttcgtggaagcgctggccggcaacagcgacgcctgctgctttacccacggccacagcggctggggcgggctggtggaggcggtcggggcgaacaatatcggttcgcagctgctgccgggcgcctccgggttcgtttcgctggagaaaatcatcagcatgaagcccgacgcctggatcatgaccggctcgaagcgcggcaacagccaggtgttgcccctgggttatgcggttaagccagaggcggtgaaggcccaggcgcagacgctgctggcgcggcctggggtcagccagatcccggcggtacaggaaaagcgggcctatggcgtttatcaccacttctataaccacccgtggaatattgtcggcatggaatacctggcgaaagatatctacccgcaggccttcggcgatctcaacccggatgagacgtaccattatatcgtgcgccatttcaccgacctgccggaccaaccgttcgtcttctcctggcagcagagcgagtaa

SEQ ID NO: 212727 - DNA, 390 bp, Klebsiella pneumoniae
atgaaaaaagcaatgattgcgttatcggctattctggttgcggctccggtttttgctgcgacaacacatgcaacagatgataccgtcgcggcggcgaatgccaacgccaacaccgctaaagagaagctgcatcaggcccagcacgagggcgaagagcagcagctgaaggcgaaacacgccgccgaaggcaagcaggacagcgtcggcagccaggtgagcgaaggcgcgcagaaaacctggaacaagaccaaagaaggcaccgagaaggggtgggataagaccaaagaggtcagtgaaaaaggctggaacgctaccaaatccggtgcggaaaagggctgggataaaaccaaaaccggcgccgaagaattaaaaaataaagtgactgaataa

SEQ ID NO: 212728 - DNA, 456 bp, Klebsiella pneumoniae; identical to SEQ ID NO: 138061

SEQ ID NO: 212729 - DNA, 1179 bp, Klebsiella pneumoniae
atgagtgattatgtaattccagaaattaaagcgacggaagcggaaatgatttctatccgtcattatttacatgccaatccggaattaagtcttgaagagtttaataccagcgaactggtcgccagcaagctgacggaatggggctatcaggtgacgcgcggtctcggcaagaccggcgtggtcggcagcctgagcaaaggcgattctccgcgcaccatcggtttacgcgccgatatggatgccctgccgatcgaggaaaccaccggtttaccctgggccagcacggcgccaggaaaaatgcacgcctgcggccatgacggtcacaccaccattctgctggcggcggcgaaatatatcgcctcgccggcctgtcagttcaacggcacggtgcatctgatttttcagccggcggaagaggctatcggcggcgcggatttaatgattaaagacggcctgttcgagcagttcccctgcgaacgcatctttggcttgcacaacatgccaggcctgcctgtaggcaagctgggcttctacgccggcaacttcatggcctcggcggacaccgtcaaaatcacgattaccggctacggcggccacggcgcccaccccgagcgcaccgtcgacccgatcgtcgccggtgcggcgctggtgatggccctgcagagcattgtggcgcgcaacgtgccgccgggggaaacggcagtggtcagcgtcggcaccttccaggccggtatcgcctccaacgtcattccggagagcgcggtgatggagctgagcgtgcgggcgatgaagcaggaaatccgcgacctgctgatcaagcgtattcacgagctcgctgactttaccgccaaaagctatggcgccagcagcgtagtggaggtttacgactcctatccggtattaaccaacagtcctgaagagaccgatttcgcccgggcgctggcgctggaggtgtttggccgcgaaggggtcctggagtcggtctcgccgatgaacgccagcgaggatttcgcttttatgctgcgcgaacgcccgggcagctacttcctgctcggcaatggcgagaaaggggagaagggcggttgcatggtgcacaaccccggctacgactttaacgatgacattatcaccatcggcgcgacgctgttcgcccgtctggtggaaaaacactgtcgctaa

SEQ ID NO: 212730 - DNA, 777 bp, Klebsiella pneumoniae
atgaaaaaatcactgttgctatggctggcattaatggcgtcgacgtcggcgctggccgaagggggaaaggagatccgcttcggcgtcgacccgactttcgcgccgtttgaatggaaagatccgcagggcaagctggcggggtttgatatcgatttaggcaacgccatttgtcagcagctgcaggcgaaatgcgtgtgggtggaaagcaatttcgacggcattatcccggcgctgaaggcgcgtaaattcgacgcgatcctttccgggatgtatatgaccgagaagcgcaaagcgcagattgcctttagcgacaagttgtataacgggccggtgttcctcgtggcgcgtaaaaataccctgcaaggcaatacgccggaacagctgaagggcaaaaccatcggcgtggagcagggctcggcgcaggagacgtatgttaaccagcactggcggccgcaggggataaacattgtggcctaccagggggccgatagcgtggtgcgtgacctggagtcggggcgcatcgacggcgcggtgctctccgggatgatggccgactacagcttcctgcagcagccgcagggtaaagaattcgcctttgtcggcggccatctgcaggacgatacgctgtttggcgccggggcggcgataggtttgcgtaaagacgatgaggcgctgcgtcaggaaattaacggcgcgattgcgaagattcttgccgacggcacctataaaaaattagctggcaaatattttagctttgatgtttattccgggacataa

SEQ ID NO: 212731 - DNA, 954 bp, Klebsiella pneumoniae
atgatgacacgtcctttgggcaaaaccggattttccatcgccccattagtctttggcggcaacgtctttggctggaccatcgatgaaaaaaccagttttgctcttcttgatgctttcgttgaccacggttttgacgctatcgatacggcggatgtttattcccgctgggcggagggcaaccagggcggcgaatctgaaaccataatcggccgctggctacaggcgcgccccggcatgcgcgataaagtcaaaattttcaccaaagtcggctccgatctcggcctccccggccataaagggctcagcaaagcctggatccaacaggcggttgacgactctctgcgtcgcctgaataccgattatatcgacctctatttctcccactggccggatccgcaaaccccggtggcggaaacgctggaggccttccacagcctgcagcaggccggaaaaatccgcgcgatgggggcctctaacctcgatgcgatgcagctggcgggggcgctggaggtggcgcgtaagggcggcttgcctgcgtggcaggtgctgcagccggaatataacctctaccaccgctctgcgtttgaaggcgcgctgtgcgatctctgcgtcagccgcgatatcggggtggtgacctactacagcctggcctcggggttcttaaccggtaagtaccgccagccgtcggatctgacacagagtcagcgcggaagcgggattggtaagtacctgaatccgcgcgggatgcggattatcgataccctggcggcggtcgcggacgagcagggcgcgaagccggctgaggttgccctggcgtggctgatcggccgcgaaggggtgaccgcgccgatcgccagcgccaccagcgtggctcaggtggagagttttgcccgcgcggcggcgctgagcctgagcgcggagcaagtggcgcggctggacggcgccagcgcctga

SEQ ID NO: 212732 - DNA, 792 bp, Klebsiella pneumoniae
atgacttcagaagccgtatttatccaggtcggcgcgctggccgatggttttgcgccgcacggtaacctgctggctaccgccagcctgcccgccggcgaaaactttaccttttatgtcgccgggagcgagccgcagcagctggttatcgaagatgagcagacgctaagctggaacggcaagcgcgccccctggcgggcgaccgccctgcgcccggacattctgtttatcgacttccttgacccggagcgggataacgccagcattagcgcggtatgcaacctgacgcagcgcaatgccacgctggtatacggccagctgccggacgaagccgccgcgcggctggacgccttcagccgggtagaacaagggttgccgctgaccgcggttgaggcccgtttcgtcttcgcccgcctggatgcccagccggggccgttgccgggctttaccgatgcgctcattggcatgcgcaatcagtacacctatagcccgaccgagcgctatgagcacatctatctcaacgataatttttacgcctggcagtgtctggacggcgtggaaaaggggctggcggatgtcgatcgctgccactatgtgcaggtggctgaggatctctatctgttcgtctggcgggagaaaatcattcccacgctgggggtgatcctcatcgatctgcagcagatgcgcactgacggcaagatcatgggctatcagggcagcgatttcggcgccctcagcaattttccggtcggcgccagcgcgaagatcctcaacgtcacccgccatcaggaatag

SEQ ID NO: 212733 - DNA, 777 bp, Klebsiella pneumoniae
atggcgagagtcgtggtgataaccggcggtggaaccggaattggcgccgcctgcccgcggctgatgcgcgccgcgggcgaccgggtgtttattaccggacggcgcgaagcgccgctgcaggctgtcgctgatgagaccggcgccacggcgctggtgggcgatgccgccgacggcgaggtgtggcgccagcggctgctgccggccatcctcgaccagaccggcgggattgatgtcctcatctgcagcgccggcgggatgggcaacagccccgccgccgagaccagcgaccgccaatggcgcgaggcgctggacggcaatctaaccagcgccttcgccagcgttcgcgcctgtctgccttcgctgattgcccgccgcggcaatgtgctgtttgtcgcctccatcgcctctctggccgccgggccgcaggcctgcggctacgtcaccgccaaacacgctttaatcggcctgatgcgctccgtcgcccgcgattatggcccccagggggtacgcgctaacgccgtctgtcccggctgggtcacgacgccgatggcggatgaagagatgcgcccgctgatgcaggcggaagggctgtcgctgactgaggcttatcagcgggtctgtcgtgacgttccgctgcgccgccccgccagccccgaggagatagcccaggccagtcagtttctctgttcgccgcaggccgccatcatcagcggcgctacgctggtcgccgacggcggggccagtatcgtcgatgttcccactctggcgtttgcctaa

SEQ ID NO: 212734 - DNA, 1734 bp, Klebsiella pneumoniae
gtgaacaaaaaagccatggccgcggcggtcagcatgatcctcgccggtggcgcgcacgccgcgcagcaggagcgtccaaacgtcatcgtgattatcgccgatgatatgggctactcggacatcagcccctttggcggcgagatccccacccccaacctgcaggcgatggccgagcagggaatgcgcatgagccagtattacacctcgccgatgtcggccccggcgcgctcaatgctgctcaccggcaacagtaaccagcaggctgggatgggcggcatgtggtggtacgacagcaccattggcaaggagggctacgagctgcggctgaccgaccgcgtcaccaccatggccgagcgctttaaagacgcggggtataacaccctgatggccggtaaatggcacctcggttttgttcccggcgccacgccgaaagatcgcggctttaatcacgccttcgcctttatgggcggcggcaccagccactttaacgacgcgataccgctggggaccgttgaagccttccacacctactacacccgcgacggcgagcgcgtctccctaccggatgatttttactccagcgaagcctacgcccgccagatgaacagctggattaaagcgacgccgaaggaacagccggtcttcgcctggctggccttcaccgcccctcatgatcccctgcaggcgccggacgagtggattaagcgcttcaaaggccagtatgagcagggttacgccgaggtctatcgccagcgcatcgcccgcctgaaagcgctgggaattatccatgacgataccccgctgccgcatctggagctggataaagagtgggaggcactaacgccagagcagcagaaatatacggcaaaagtgatgcaggtatatgcggcgatgatcgccaatatggacgcgcaaatcggcaccctgatggagacgctgaaacaaaccgggcgcgataaaaataccctgctggtctttttaaccgataacggcgccaacccggcgcagggtttctactacgaatctaccccggaattctggaagcagttcgataacagctatgacaacgtcggccgcaaaggatcatttgtctcctacggcccccactgggccaacgtcagcaacgccccctacgccaattatcacaaaaccaccagcgcccagggcggcatcaataccgactttatgatctccggtcccgggatcacccgccacggtaaaatcgacgcctcgacgatggcggtgtatgacgtggcgccgacgctatatgagttcgccggcatcgatccgaacaagtcgctggcgaagaagtcggtgttgccgatgatcggcgtcagctttaagcgctatctcaccggcgaagtacaggagccgccgcgcggcaactacggggttgaactgcatcatcaggcggcctgggtcgatggcgaatggaagctgcgacggctggtgccgcgcggcctcaccgccggcgacgcgccgtggcagctgtttaatctgcacgacgacccgctggagacgcatgatgtcgcggccgaacatcccgatcgggtcaaagccatgagcgaggcctacgaggcatttgctaagcgcaccatggttaccaaagcgcagggcaaaatgatcgactacgtcggtatcgatagcaaaaccgggcgctatctggcggtcgaccccgccaccatgaagccggtgcctgcgccgcaggcgatccctgtgagcgagatccattaa

SEQ ID NO: 212735 - DNA, 1188 bp, Klebsiella pneumoniae
atgctgaatatcgccgccctgcgccagcagcaaattccgctggccgctgagccgcgctcgccggtgccgtttcatattctgatgaagccgattggccccgcctgcaatctcgcctgccgctattgctattacccgcaggacgaaacgccggtcaacaagatggatgacgcgcggctggagcagtttatccgccgctatattgccgcccagcccgccggcgcgcgggaaatcaactttgtctggcaggggggcgagccgctgctggccggcctgagcttctacaaaaaagcgctcgccctgcaggcgcgctatgcccccgacggcgtgactatcagcaacagcctgcagaccaacgggacgctgatcaacgacccatggtgccgactgttccgcgaacatggctttattatcgggttgagcctcgaaggcaacgaagcgctgcaggactaccatcgtccggataaacgcggccggtcgacctggtcggcggcgctgcgcggcattgacctgctccatcagcatcaggtggactttaatctgctggtggtggtgcataacgagatggcggcccacgcggcggcgatttatgaccggctggtcagcctcggcgcgcgctatctgcagtttcagccgctgatgagcgaaggcgcggccctgcgcgaaggataccagctcagcgccgataactggggacgttttatggtcggcatctggcgacagtggcggaagcgctgcgatagggggcgggtgttcgttatcaatatcgaacaggcgtgggcgcagtatttcactcataccagcggcagctgcgtgcacagcgcccgctgcggcagcaacctggtgatggagcccgacggacagctctacgcctgcgaccacctgatcaacgccgaacatcggctgggccgcctcgatgagcagacgctcgccgccgcggtcgacgcctcggtgcaactgccgttcggtcagcagaaaagtctgcgccgcgaatgccagacttgctcggtaaaaatggtctgccagggcggctgcccggcgcatctcaacgccgcaggcaacaaccgcctctgcggcggctactaccgcttctttagcgacatcctcgcgccagtacgccccttttcccgcgacctgaatggcctgaaggcctggcgggccgcgtttgttgggactgcgcatactgcgtag

SEQ ID NO: 212736 - DNA, 684 bp, Klebsiella pneumoniae
atgtctgctttgttaaaagccagccgtaatgatgcgataatagcccgttgtttacagactatttcccagttaattccactaacttcagcggtgttttatcgagtaaataatcgtttaaaacccgaaaactatatattgcataatatttccgataatacgcaccaacaatatctggaaaacttccagccgctggatccgcttctgccgtcgcactttagccaccagaacaccaccgtggcggcgatgacgccgcggctctgcgaccgcaaccggcattactatcatgaatttatgttgccgaataacgtgcgcgacatgaccgagatctttatccgccgcgagcggcggatcgtcgccggtatctcgctgatgcgcgacgtgcctttctccagcgaagagcgccagcgggcccaggcggtgctgccgctggtagagctggccattcgcgactgcctgcaggaagaagatgatctgcccgccatcctgacggcgaaagagcgggaaatcgtcggcatggtgcgcgaaggcgccagcaataagctgattgcccgccagctggatatctcgctctcgacggtaaaaacgcacctgcgcaatattttcgccaagaccgaagtggtcaatcgtaccgaactggtttcccgaacctggatgccggccgctcagcgtacgctgcatctgtaa

SEQ ID NO: 212737 - DNA, 1173 bp, Klebsiella pneumoniae
atgtcgagtacacctctcactgataatgcgctttcccggcccgccgggctggtggtgtccctgcgtttgctggcggcgatcgtgatttttgccgctattgcgccgggtattctgatgaccgcgccggcggtggcggcgcagctggccagcgaatggcagctaaaacccgggcagatcggctggctgttctcagcggagctgggggcgatgagcctggcgacgctcccggcgtggtggtggatgagccgcctcgactggcggcgggttgccctgacggccggggtggtgtttctggccgccaacctcgcctcggcggtggtcacccagtatgagacgctgctggcggcgcgctttatcgcctcgctggcgggcggcacgttgatgattttgtgcatcagctgcgcggccggaacgccgaacccgtcgcgggtctacgccttctgggtgctcgggcaactgctgttagggatgcttggcctgctggcgctgcccggcctgttcgcgacctttggcctgaaggtggtgtatctgatcctcgccgccatcatgctctgctgtttgccgctggtatccgctttccctccgcgctttcaaccgctttcagtctcccgccagcagccgtcgacggcgctgtggcgtcaggcgctggcggtgctggcggtgctcactttctatatcagccttagcgccgtgtggacctttatcggcaccatcggcagcgcggcggggctgagcccgacgcaggtcggtctggtgctggcggcggcgacggtttgcggcattatcggcgccggcggcgcggccctgcgcggcacccggcgggccgatcgtttaccggtgtggctgggctacggcctgttgatcgtcagcgttgggctgctgatcggccagccgctgctggtgcgttacgccatcgcggcgctgctgtttaagttcacctggaccttcgtgctgccctttattctcgcccgcgtggccgggctcgataacagcggtcggctgatgaacagcatcaatctggtgatcggcggcggcatggcggctggcccgacgcttgcgggggccttactgcaacacttcgccagcgccgacccgctgctggcggcggcaggcgtctgcgcgctgctgtcactgattttaattgtggcggcatccgccgccgggaaggcttag

SEQ ID NO: 212738 - DNA, 1116 bp, Klebsiella pneumoniae
gtgaaaagaaaaaccggtttcttttttgatgaacgttgtttctggcacagtaccggtctgcacgcggtgacgctgccggtgggcgggtgggtacagccgcccgccggcggcggtcatgctgaatcgccagagaccaaacggcggatgaaaaacctgatggatgtctccgggctgacgccgcagctggcgctgcgcagcgcggcgccggcgagccttgaggacctgcggcggatccaccccgacagctatctggagcgcttcaaggcgataagcgataacggcggcggcatgctcggcaaagaggcgccgctggggccgggcagttatgaaatcgcctgtctttccgccgggctggcctgtgcggcggtggaagcggtgctgaagggggagctggataacgcctattcgctgtcgcgcccgcccggacaccactgcctgccggaccagtcgatgggattttgtttcctcgccaatattcccattgccgtcgagcgagcgaaagcgcagctggggctgggcaaggtggcgatcattgactgggatgttcaccacggtaacggcacccagcatatctacctgcagcgcgacgacgtactaactatctccttgcatcaggacggctgcttcccgccgggctacgccggcgaggacgatcgcggcgtgggcgcgggcgaaggttacaacatcaatattccgctgttggccggggcgggggatgacagctggcgctatgcgctggaaactatcgttattccggcgctggcgcgttttgagccggagctgatcatcatcgcctgcggctatgacgccaacgccatggatccattagcgcggatgcagctgcacagcgatagcttccgggcgatgaccgaacaggtccagcaggcggcggatcgcctgtgcggcgggaaactggtaatggtgcacgagggcggctacgccgaatcctacgtgccgttctgcggcctggcggtgatggaagccctgagcggcatccgcaccgaggtccaggatccgctgctggaatttattcaacagcagcagccgcgcgccacgttcgcgcagttccagcgccaggccatcgatcggctggcgcagcagtttggtttgctataa

SEQ ID NO: 212739 - DNA, 594 bp, Klebsiella pneumoniae
atgtcctccgtcccctggtttgaaacgccgttaatgaacgcggtgcagcgcgatctggcgggctggcccagcgaaaagctgagcgaacgcagcgcgctgctgcgcttgaacgacgccatcgccgtcaccttcagcgtgcgtcagaagcggctgtttatggccagcattcacagctgcgagtttgtcgtcgaggggccggtgacccggcccgctcgcggcaagatccgcgcccaccaatccggctggctaaaacgcctgccaatccgctttatcggcaataaagagagcgcggaactcgctggctatctcaacggttttcctaatctccagcagaccttaagcgagctggactaccgccgcttttcgttgacctttgacgatagcggctggcgctgcggcattgaaccctgggccgccagcgaagtggtctgtaaaatgccgccgctgcgccgttatctgcggctggaagcccagcagcggatgctgctgctcagcgtgctggcgatgattaatcaggcggtaagtcagtggatgcgcggtgaaatcgcagaagagaaagcattgacttccccgccatcaccgcggggaagctga

SEQ ID NO: 212740 - DNA, 1500 bp, Klebsiella pneumoniae
atgtttagtaacagactcgccagccatcttgagcgcggcgtcgtcggcttcccgaccaccctcgccagctccgtcgggctgatcatggccagcccggtgatcctgacggtcaccagcggcttcggcatgggcggcgataccttcgcgctggcggtgctgctggcctttattatgatgcaggcgcaggtcaccacctttgccgaggcggcgacgctcattcccaccaccggttcggtgtacgactatatctcctgcggcatgggccgcttcttcgctatcaccggcgcgctgtgcgcctatctgatcgtccatatcttcgccgggacggcggagacgatcctggcgggcattatggcgctggtgaacttcgagtcgattaacgcccagatggccgctcaccagaatacctggatggtgggcgtcggcatggtggtgattttcggcttgctcaacgccatcggcgtggaaatcttcggcaaggtcgaagtggtgctgaccttcggcatgtggaccacgctgaccattttcggcctgtgcggcatttttatggcgccggtcacccatctgtccggctggttcggcacgccgctgaacgttagcgatatcaacggcctgttcggctatatcggcatggcgatgtttatgttcgtcggttgcgaactggtgacgccgatggcaccggagatcaaacaggcccaccgcaccataccgcgggcgatggcgctgggcctgctgggggtcgccagctgcatgtttatctacggcgcggcgatcaaccgccaggtggagaataccgtgctcgacgcggccaacaacgtccatctgctggatacaccgatggcgatcccggccttcgccgaacgggtgatgggccacgccggccagtactggctgggggtcgggctactgttggccggctgcgccaccatcaatacgctgatggccgccgtgccgcgtattatctacggcatggcgctggacggcgcgctgccccgtttcctgacctggctgcatccgcgctttaagacgccggtgatcgccattgccatcggggtggcgatcccctgcctgcacgcctggtatctgaacggcgatctggaccgcatcgtgccgctgatcctcgccgcggtctgcgcctggggcgtcgcctatctgctggttactctgtcggtggtgatgctgcgcattcgccgcccggatctgccgcgcgcctaccgctcgccgtggttcccgctgccgcagattatctccagcgtcgggatcatcatcgctatcgtcaatatcacgccgcccgggatggacagccgccaggtgctggtgccgttcggcataatgctcggcctgaccgccgcttacgccctgttctggacggtgtgcgtgcagcgcgtcaatccgttcaagccgctggtagtggaagaggtggtggagcgcgccatcaacaattatgaaaaacagacccgcggggagatgacgccagatgtcctccgtcccctggtttga

SEQ ID NO: 212741 - DNA, 366 bp, Klebsiella pneumoniae
atgcacgcttttaaacttaaacacccggtacctgatctgcagccgatcggcagcgtcagcctgctcggcgcgacgccgaccgccggcgacccgcaggtagcgggcgcgatgatctacggcgagccgcaggacgcctttacctgcggactgttttcgtccactgaggggagctttaccatgacctatccgtttaccgagcacgccaccgtgctggagggcgaagtggagctgaccgtcgccggcggcgagccgcagcgctttgcgccgggcgacagctggtttgttaaacagggcaccgaagtggagtggaaaattctgacgccgcgctttgtgaagcactacctggcgaacgtcgagacccgctaa

SEQ ID NO: 212742 - DNA, 1302 bp, Klebsiella pneumoniae
atgaacatcaagatcgatgcgctgaactactacggcgcgacgaagaaatatcacctccatttcccggcgctacgggaagatattgaagccgatgtggtaattatcggcggcggcttctctggcattaacaccgcccttgagctggcggaacaggggatcaccaacgtggtggtgctggaggcgcgccatctcggctacggcggcaccgggcgcaacggcggccaggtgatggccggtatcggccacgatatcgaagcggtaaaaaagcacgtcggcaaagaggggctggagacgctgtttaaaatcgccaacctcggcgcgggcatcattcgcgaacgcatccgcaaatacaacatcgacgccgatttcgtgcccggctacggctatctcgcctataaccagcgacagcttaaaacgctgcgccagtgggagaaggagtttaaagccgctaccccggatgaagagatcgaactgtataccggaaaagaggtgcagcaggtggtgggctccgaggtctactgcggcgcgctgaaacatatgggcggcggccagatccattcactcaatatgctgctcggttcggcgcaggccgcccactcgctgggggtcaagattttcgaatcctcgccggtggtggaggtgaattacggcaaacaggtgcgggtacgcaccgcgatgggcagcgtcaaagccgccaaactgctgtgggcctgcgacagtttcctcaacaatatggagccggagatctacaacaagacgctggtcacttactcctaccaggtgtcgaccgagccgctctccgatgaactgatcgagcgcatcagcccgctgcgcggcgccttcagcgatattcgcccggtaattaactactaccgcgtcacccgggaaaaccgcctgctgttcggcagcgccacccgctttgtggagtatacgccgaacgatttcgccgcctggaatcgcaccttgctggcggaggtcttcccctatctcagggatgtgaagatcgatttcgcctggggcgggccgatggcctgtagcgccaatctgttcccgcagatcggcaccctacgcgatcacaacaacgtcttttacgtccaggggtactccggcttcggcgtcaccccgtcgcacatcgtgtgcaaaatcctcgccgaagggatcgacggcggttccgaccgctatcgcctgctgagcagcatcccccacgcgaccatccacggtcgtgacagtctgcgcttgctattagtcacggccggaaaactgatgcatcaaaccgccggtttctggaaaggccggagttaa

SEQ ID NO: 212743 - DNA, 1485 bp, Klebsiella pneumoniae
atgagcgagataaccttactggcggaagtgaccgccttcttacgccagccgcacgggcagtttattgccggtcaacgtgaggcgggccgcggcgcgccgttcgcggtgatcaacccggcgaccgggcgggcgattgccgaggtcaccgcggcggatagtgaccaggcggatcgcgctatggagagcgcccgccaggcgtttagtcagtggcgcgagatgccgacgctggcgcgcggcgcgctgctgctgaagctggcggacacgctggcagagcatcgcgaagcgctggcgcagctggaaagtctctgttccggcaaaactatcacgctggcgcggatgctcgagctggaccagtcggtggcgttcctgcgctacttcgccggctgggcggggaaagtcaccggtgaaacgctggatgtctcgctgccatcgatggccggggagaaatataccgcctttacccgccgccagccgctgggggtggtggttggcatcgtgccgtggaacttctccatcatgattgccatctggaagctggcggcggccctggtctgcggctgcaccatcgtcctcaagccgagcgaatatacgccgctgacgctgctgcgcgtggcggagctggcaaaagcggtgggtatcccggatggggtgattaacgtggtcaacggcgccggcggcgagattgcccaacggctgattacgcatccggcctgcgccaaggtgagcttcaccggctcggtggccaccggtgaaaaagtccagcagtcggccagtgcgtcaggtaaacgggtgacccttgagctggggggcaaaaacgccgcgctgttcctcgatgacctgacgccggaggcgatggtcaacggcattattgaagctggctacctgaaccaggggcagatttgcgccgctgcggaacgtttttatctgccgcagggaaaactggatgcggtactggcgctgctgaaagacaagctcagcgcttttgcgccggggtcgccgctggatgaacggacgctgatggggccgctggccaaccgccagcagtatgacaaagttttgcggctcattcagaccgcccgcgacgagggcgataccatcgtctgcggcggcgaagcgctgccgggggagggctatttcctgcagccgaccgcggttaaagtgcgcagcgaagagagtactctgatgcgcgaggagaccttcggcccggtatgcagctttatcggctatcgcagcgaagaagaggcgctggcacgaattaatgcttcgccgtatggactggcggccagcgtctggtcggataatattcgtcaggcgctacgctactcggaggcgattgaggccggcatcgtatgggtcaatatgcataccttcctcgacccggcggtaccgttcggcggcatgaagggctcgggcatcgggcgcgaattcggcagcgcgtttatcgatgattatacggagctgaagtcggtgatggtgcgatattaa

SEQ ID NO: 212744 - DNA, 1083 bp, Klebsiella pneumoniae
atgaaatacacacttccggcgttgacgctggccatcagcgcggcgttaagcggctgcgcgacgcctcattcctctgccgtttcccaaccggttgtcgactcgccagtccctaacgtggcgcaaccgctgcagcgccagctagcggaagggctgtacgagatggcgttaagcccgcagggtgatgcgctgtacgtcgccagcgctgaaggctttaaaaatgtacagggcggggcggtttacacactggatccgcacaccctcaataccatcggcctgacgcataccgatctgaaaaacttcgctttacagctctctgcggagggtaaaacgctgtatgtcagcaattcgctggacggcggcatcagcgctatcgacaccgccaccggcaaggtaaaaaaccgcctgctgttcagcgagcgcaatgaaaaaggtcgcccttatggggcccgtcagctgctgttgctgaataatactctctacgttggcgcggtcgccgacccggcgcaaatctgggtggttgacgccactaccctgaagctgaaaacgcggattaaaaataccggtaaatggatgaccggcctgcactactccgcgcaaaccggtcgcgtgtacgccgctaacggcagcggtgaaattctggtgatcaacccgcgtaaccaacgcattgaacagcgctggaagccgctgggcgacaagccggcgctgctgcttaatatggccgaagatagcgacaccggccgtctgttcgtgaccgacaactcgaaagcgaaaaccactctggtgctggatatccacagcggcaagctgcttaaacagctcgacgtcggcgattcgctggcggtgcagttcaataagaaacgccacgaaatttatatttcacagcgtgaatccggcaaggtcatcagccttgacgccagccgctacacgctgaagaaaagctgggcgctgccggccaatcccaacagcctgctgctttccgccgatggtcagacgctgtttgtcaccgtcaaacagcccttcaataaagaccactccactaaaggcccggacagcgtcgtacgtatcgacctgaacgcgcaataa

SEQ ID NO: 212745 - DNA, 2199 bp, Klebsiella pneumoniae
atgcacaccacgcactattcatccttcccgctgcgtaaaacgctgctggccttagccatcggcgccgccagtcaaacggcgatggccgcggacgctgccgccgcgaagcagcctggcgaagagaccctcatcgtcgaggctaacgaaaccagcgattttaaatccggcggcgacctggtggttccggcattcctcgatggccagatcgcccacggcggccgtctggggatgcttggcgaacaaaaagcgatggacgtcccgtttaacgtcatcggctatacctcgaagctgattcaggatcagcaggcgaaaactatcgccgatgtcgtcagtaacgacgctggcgtgcaggccgtacagggctacggcaacttcgccgagacctatcgaatccgcgggtttaagctcgatggcgatgacatgacgatgggcggcctggcgggcgtggtgccgcgtcaggtgatggacacccagatgctggagcgcgttgaaattttcaaaggggctaacagcctgcttaacggcgcggccagcagcggcgtcggcgggatgattaacctcgagccgaagcgggcggaagatctgccgaccgcacgcgttggcgtcgactatacctctgattctcaggtgggcggcaccctcgacctggggcgccgtttcggcgacaacaaccagttcggcgcccgggtcaacctggtgcaccgcgagggtgaaggcgctatcgataatgataaacgccgtaccacgctggcttcgctggggcttgattaccgcggcgaccgtttccgctcctcgctcgatttcggctatcagaagaaaacgttccacggcggtacgatgggcgtcaatatcagcggcgtggatttcattccggcgctgccggacaacagcaaaaactacagccagaagtggggctatagcgatattgaaagcgagttcggcatggcgaaggcagaatatgacctgaccgatagctggacggtatacagcgccctcggcggccagcattcgcatgaaattggtacctacagcgcgccgaagcttctgaataaaaacggcgatgcgacggtgggccgcctggatactaaccgcattatcgacgcgatcagcggcatgggcggggtacgcggcgatttcaataccggcgcgatttcgcataaggtgaacctcggctatgcggcgcaggtgcataccgatgcgaccgcctggcggatgtcggccaggaacccgaccactaatatctatgacaaccatgatgtggcgatgccggataacgcctattttggcggcaactaccacgatccgctggtcacctcgcgcagccgtacgcagggctggctgctgagtgataccctcggcttctttaacgataaagtgctgtttaccgccgctgctcgtcatcagaaagtggttgtgcgcaactacagcaacgccaccgggctggaagatacctcttcgcgttatacccaaagccgctggatgccgacgtttggcctggtgtacaagccgtgggagcagctgtcgctgtatgctaaccataccgaagcgctgcagccgggctctgtggcgccgacgacggcggccaatgccgggcagagtaccgggatcgcgcactcgaagcaggacgaagtgggcgtcaagatcgactacggtacgatcggaggatcgctggcgctgtttgaaatcaaaaaaccgaacgccatttccgataccgctggcaattacggcctcgacggcgagcagcgtaaccgcggcgtagagatgaacgtctttggcgagccgatgctgggactgcgtcttaacgccagtaccgtctggctggatgccaaacagactaaaaccgctgaaggcgcaaccgacggtaaagatgccatcggggtggctaacttctacgcggtactcggcgccgaatatgacatcaagccggtggaaggcctgaccgccaccgcgcgcgtcaatcatagcggctcgcagtatgccgatgcggccaataccaagaagctggatagctacaccaccctggatttaggcctgcgctatcgtatgcgtctgaacgccgaccagaacgaaatgatctggcgcgtcggggtgaccaacgtgaccaacgagaagtactggtctggcattgacgataccggtacttacctgttcgaaggcgatccgcgtaccgtccgcgtctcaatgagctacgacttctga

SEQ ID NO: 212746 - DNA, 1377 bp, Klebsiella pneumoniae
gtgaaagacgcgtcaacgtcgtcggagaccgtcacggaaagtggcccgacgcttcatcgcggtttacagaaccgacacattcaacttatcgcccttggcggcgccattggcaccggcctgtttctcggcattggtcccgctatccagatggccggtccggcggtcttactgggctacgccgtggccgggattgtcgcttttctgatcatgcgtcagctgggcgaaatggtggtggaagagccagtatccggttcctttgcccactttgcctataaatactgggggccgttcgccggctttctctccggctggaactactgggtgatgttcgtgctggtagggatggcggagctgaccgccgccgggatctatatgcagtactggcttcccgacgtgcccacctgggtttgggcggcggctttcttcatcattattaacgccgtcaacctggtcaacgtacgcttgtatggcgaagcggagttctggttcgcgctgatcaaggtgctggcgattatcggcatgattgccttcggcctgtggatgctgttcggcggccacggcggcagcaaagccgggttcgacaatctgtggaaacacggcggcttcctcgccaccggctggcacggacttattctgtcgctggcggtgatcatgttctccttcggcgggctggagcttatcggcatcaccgccgccgaagcgcaaaacccggaaaagagcattcccaaagcagtcaatcaggtggtctatcgtatcctgctgttctatatcggttcgctggtggtgctgctggcgctctacccgtgggtggagatcaaatccgacagcagcccgtttgtgatgattttccataatctggacagcaacctggtggcctccgcgctgaacttcgtcattctggtggcctcgctgtcggtgtataacagcggcgtgtactccaacagccggatgctgttcggcctgtcggtgcagggtaatgcgccgaaatttctcgcccgcgtcagcaagcgcggcgtgccggtgaactccctgctgctctccggaattatcacttcgctggtggtggtgctgaactacctgctgccgcatgaagcgctggggctgctgatggccctggtggtggcgacgttgctgctgaactggatcatgatctgtatggcgcaccttaagttccgcgccgcccagcgccgcaaagggcgcgaatcgaagttcaaagcgctgctggcgcccgccagcaactacttctgcattgctttccttgggctgatcctggcgctgatgtgcactatcgacggcatgcgtctgtcggcgatcctgctgccggtgtggatcctgttcctgtttatcgccttcaaactgctgcgccgcccggcgtaa

SEQ ID NO: 212747 - DNA, 1242 bp, Klebsiella pneumoniae
atggtcacaacaacagaaggtcgggaaagtgtccgcgtgagccaccgttttctggtgccgcggctgtcgttaatgatgtttatgcagttttttatctggggcagctggtcggtgaccctggggctggtgatgacccgctatgagatgtcattgctgatcggcgatgcgttctccgccgggccgatcgcctccatcttgtctccctttgtgctggggatgctggtggatcgctttttcgcctcgcagaaggtgatggcggtgatgcacctggccggggcggcgatcctgtggtttgtcccgcaggcgctggtggcgcagaacggcgccctgctgattggcctgctgttcggctatacgctgtgctatatgccgaccctggcgctgaccaacaatatcgccttccacagcctggccaatgtcgataaaaccttcccggtggtccgcgtgttcggcaccatcggctggattatcgccgggatctgcatcggggtgaccggtatctctgataccaccggcatcttcacgctggcggcgctctgttcggtcgcgctggcgctctacagcctgacgctgccgcacaccccggcgccggccaaaggcatgccggttcagtttcgcgacctgctgtgcgcggacgccttcgcgctgctgaaaacccgccatttcctgattttctccctctgcgccaccttaatttccgtgccgttaggcacctattacgcctataccgcgtcgtatctggcggatgccggcgtcaaagatgtcagcaccgcgatgtccttcggtcagatgtcagagatcgtctttatgctggtgatcccgttgctgttccgtcgcctcggggtgaaatacatgctgctcatcggcatggcggcgtggttcgtccgctacgcctttttcgctctcggagtcagcgaggaggggcgcttcctgctctatctgggcattttgctgcacggcgtgtgctatgactttttctttgtcgttggctttatctacaccgaccgcgtggcgggcgagaaggtaaaaggccaggcgcagagcatgattgtgatgttcacctacgggatcggcatgctgctgggctcgcagatctccggcgcgctgtataaccatctggtggccggccagagcgtgcctcaggcctgggtgaccttctggtggatcccggcggtggccgccgcggttatcgcgctgattttccttttctctttccagtacaacgagaaagagccgcactaa

SEQ ID NO: 212748 - DNA, 1023 bp, Klebsiella pneumoniae
atgaaaacgattaagggaccgggcatttttctggcgcagtttatcgggccgcgggcgccgttcaacaccctggcggggatagcgcagtgggccgccggcctggggtacaaggcattgcagatcccctgcaaccacccggcgatttttgatgtcgagcgggcggcggcgagccagacctactgcgacgaggtcagcggcatcctggcggagcatgggctggtgatcagcgagctgtccactcaccttgaaggacagctggtggcggtgcatccagcgtatgacgcggcgtttgacgcctttgccccggcggcgctgcatggcgatccgcaggcgcgccagcgctgggcggtggagaaagtgcgccaggcggcggtagcctccggccgcctggggctgcaggcgcacgcgaccttttccggggcgctggcatggccctttttttatccgtggccgccgcacaatcagccgcttctggatgaggcctttgccgagctggcccggcgctggcggccgctgctggacctcttcgacgagcagggggtcgatgtctgctatgagatccaccccggcgaagacctgcacgatggcgtgacctttgagcgttttcttgcgctggtggataaccatccgcgctgcaatatgctctatgacccgagccacctgcatctgcagcagatggactacctgacctatatcgatatctatcatgcgcgtattaaagcgtttcacgtcaaggacgccgaatttcgccgcaacgggcgcaatggcgtctacggtggataccagccctggcagcagcgggccgggcgtttccgctctcccggcgacgggcagatcgacttcaaaggggtgttcagtaagctgaccgaatatgattttgccggctgggcggtgctggagtgggagtgctgcctgaaggatagtgagaccggcgcgcgcgagggcagcgagtttatccgccgccatatcattcccgttgccggacgggccttcgatgactttgccgccggcgggagggagtaa

SEQ ID NO: 212749 - DNA, 1152 bp, Klebsiella pneumoniae
atgattcaggtcgcgattatcggggcagggtttattggcccggcgcatctggaggcgctgcggcggctgggagatgtcgaggtggtggcgttgtgcgacagccgccttgaggcggcgcagcgcaaggcgcgagcgctgaacattgcccatgcctacgacagcgtggaggcgctgctggcccatccggggctgcaggtggtgcataactgtacgcccaaccatctacatgcccagattaaccggcagatcctcgccgccgggctgcacgtcttctccgaaaaaccgctgtgtatgacggcggaggaggcgcgggagctggtggcgcttgccgcccgggccggcgtggtgcatggcgtcagcttcgtctaccgccagttcgctatggtccagcaggcggcggcgatgatccgccatggcgaggtcggcagaatcttcgcggcgcacggcagctatttacaggactggatgctgctggagaccgactacaactggcgggtcgattcggcgcaggggggcgcgtcgcggacggtggccgacatcggctcccactggtgcgataccgtgcagtttatgaccggtcggcggattgtcgaggtgatggcggatctgtctatcgtctggccaacgcgtaaagcgccggtcaatggcaaagcgaccttcagcgccgttcacgaggcgcaggcatatgaaacgcggcctgtcgataccgaggactttggctcggtgctgttgcgttttgacgatggcagcaagggcagctttatggtctctcaggtgagcgccgggcggaaaaaccgtctggcggtggagattaacggcagcctctgttctctggcctgggatcaggaagtgccccagcggctgtggatcggccaccgcgagcagccggatcgcctgctcagcgatgacccgagcctgctgcggccggaaatcgctgacagcgcccattaccccggcggccacattgagggctggccggacgcctttaagaatatgatggggcatttttatcaggcggtgcgcgccgggaagatgccggcggccggggcccggcgcttcgccgctttcgacgacggcgccgatgtgatgtacatcatcgaggcgatcgtcaaaagccatcaggaacagcgctgggtcagcgtcgaacgctga

SEQ ID NO: 212750 - DNA, 417 bp, Klebsiella pneumoniae
atgaggctcaccaccgcggttctcgccctcagctgtgccctggcaacgatcaccggctgcacctcgtcaaaatcgtcaccggaacgccatgcctacgccttcgtcgcccaccgctccgattttgtcggcggcaacttcaccgtcaaccgccaggaaaattaccgtttaaacctgccgacctttacggcgatgtatgcccgcggacagcaggataaagccgctggcatgagcgaaagtgatgcccgccgcaccgcggaagccatcaaacagcaggcggcgcagggcacccgcaccgagcacgccttcaccggcaatgccagcgacaaatgggataatgcgatggaaaataaagatgccgtcctgttcggcaacgagctctccggtgcctatctcgacggctatcttggggtgaaataa

SEQ ID NO: 212751 - DNA, 636 bp, Klebsiella pneumoniae
atgagagggtgtaactgtgagattaaatgtatcgcctgtggattaaactgccggattgaagcgaaaaataaaatagagcgcactctctgtggagagaagaaattttctgtgtggccagacaggaactatttttttaaacgggcagtaaatgatctggttttccgtgaactcacctgttttgtacctgaaggtatagtggtggtggatttttcattgggaaatatattgtactttctgaatgagtgctggaccaggaaattgcgggatagtggtctgaaaatcattctgatagcagataaaaacatgctgccaatggctaatttttggaggctgcgttccgggttttcctgggcagtagtggaagtgaatagtgacttaagcaacttaattaataaaataaaacgcgttatgctggggcggaaccttctgtgcaggcgcacaccgtcgctgacggagcatgaaatgaagacgctgtgcctgcttgcagaggggcattccagccaggatatcgcccgtatcatggcgtgcgatacccgcagcgtctaccgctttcaatactctttatgcaagaagttcggcgggctcaatcgcctgcgcaatctgcgcttcaggcatactatccccgcgctggattag

SEQ ID NO: 212752 - DNA, 684 bp, Klebsiella pneumoniae
atgatgaagaaaatgcttttcatcggattgtgcgggctgtgtattcagcccgcttccgcggtgtactttgattccatcatttatgatatggatgccagtaaagattttatctcccggccgttagtcaatgatacaagcagcaataacttatataccatctcggcttacaaaatcgccaggccgggcaacggtaatgaacggccggtgcccggtcaggacaaagacctggtctggtcgccgctgcagttcaccgtacaggccaatggccaggagtattttaaactctattaccgtgggcctggagatgacattgagcgatattatcgggtgatctttaaagaaacgcccgtcacggtttttccctggcgcatggagcagaaaaaactgaatattgtcccttcggtatcgatgagcaccattctcattgttcgccctcgaaaaacgcgtttccagtatgagatcaacgaagccacgggcaccattaaaaataccggcaatacctatttcagagtcattctccagaaaggttgtaatggtgatgatgaaagctctacacagttttatatgctgccaggggatagctggacaggccctgaggcgaagaatagcaacaggaaatatatcgtcgcattaggccgttatcataaattaggtgatggctgtttcatggatgcgccgggttaa

SEQ ID NO: 212753 - DNA, 1620 bp, Klebsiella pneumoniae
atgtctattaaaccccaggccatcatgctgctggccggctggctgctagccgcgccggctatggcacttaccgctactaacgacgggagcggcagcaacacctatatgtttatcgacaacgatgtcgatgatgaatatttcatcaccaccagctccctgtccccgcgcttcactggagccaatatctggacgaaatataaaacgaaccagcgtagtctgggatacatgggcaactcaggctggagttacagcaaccgctattttgacctctggatagacaactccccgattaaccaaccgtttctcgggctccgctgcatgtcaacgggcgcgaactgcccggcttcgggctatatccccgccgatgtactcgacaaagacggcttctatcacgcgatgtccggcaacagcgtggccaatggttactacggcgccggggtgctgagtcagtcggcatatgagtattttcgtaatcggccggtgggaaccatcgataatttgcagttgaatctttgctatatggactccaaagctgattatgactttgcttccggcgttcgctgtaaagatctccccagcggaggaaagtgggtttactacacgatgaacctcgaaaaggtctcgcatctgaccttaaacagtaccggcgcgatggcggaagtgtggattgccagcgacggtacgccaagcgtcaacctcggctctgaattgtgccagatgggggtggtagggagcgcttcggggatcatttgtaaaatggtgtcttacagctttcaggaaaccaaaaccctcaccacttcgcttgatttccggatggttatcgatacgacgctgctgggattttccccttcttcgtctgacgtcaagtacagcggtgatggcgccagctggaccaatttcggctcgactagcacctataacaaggtcttcaaaccgtcaggggagtacatctatgtctttctgtccaacgcttttttcaaaaaagctctcaaggcgggcacagatttaaccaacaaagatgagctgttcaccttttattttgataactccgtgactcctcaatcaggttattatcagtttacgccatcaacactaattaacatcatcccgcgtgaatacggcatcagcattatcgccagcgacgggagtgctcatccaaaagcatctggcaagatcggtagcgaaacgcccatcacctttgagtataaagttactacctccgcgtcgcgtcaggcggacagcatcaccgcccaggtgactggcgacgccatcaacatatatggtcagccatactgtctgtttacctcagcagacgagacgctaaaagtgccggtcccggccttcctcgaatggacttccgctgccggtaacgcggtaagagtgcgcaacagctgcggtgaaaaccccgttgatatgaccaacgccgcctgggttcagacggcctggaacgccaacgtcaacgatggtttcttttttaccaccacgctgaaactgctgtttccgatggatgactcgcattcacagttcactactgatggtcatgactggatgggaaccgtcagcgccaccggggatgtaaaagtgaccgccacctgggttggcgtcgatcggggggtatga

SEQ ID NO: 212754 - DNA, 2538 bp, Klebsiella pneumoniae
atggataatcttggttatgtcaaagggacgttgttcgctgggttattgattacagtaaaccagggttgggcagctaatgctacagcgccagtcaaagtcagtaactatattattccttcggtatttgctaacgcgttatatcagggcatgtcggtccctgtttttattcgttatgaaggcgataatagtacccaacgcagtcagcaaaaaatcgctgatgccatcctgaccatcaaggataatgagtttcgcctgaatcagatcgcgctcagcgatctgccggagcgaaccgaactatcacctcagattaaatcattgctcaacgagatgcaggataaaagcatcggcgacggtcagcgcgtttatatcaacaaagacgcctcactttcacttgatacgcgttccttttatctcgagctgacggttaaccgggcagccatgcaggccgctattttgccgcgtaccaatatgcttggagaatctaccgcccagaatctctcgagcgtgctgaattactcgatggggagctattacaacaaatatgagaataccgataacgccagcagctatctgacgctggataatacctggtcgctgcgggaacaccatctgaactttaacggttctctttacgggataggtaccggcaaccaggagagtaaactgtatcgctcgatgtacgaacgtgactatcagggacgccgcctggcaatgggtatggtggatacatggaatctgcaatcgattgccagcatgagcgccctgaattccagccgtatttacggcgtcagctatggcaataaaagcagttcacaaacgcaggacaatacgcttgctctggtgcccgtcacggtgtttctcccggccgctggtgaagtacacgtctatcgtgacggcaaactgctcagcattcaaaacttctcgatgggtagctacgagctcgatacgtcgcgtctgccatttggcatctacaacgttgatatccaggtggtagttaacgggcgcgtggtcagcagccggacggcgaacatcaataaaacgttcgcccgtaaatcgagcgtgaccggcgatctctcgtggcaaaccttcggcggcagcctcgaatacaacaagatggactatcgccacaaatacaacatcaattatggcacaaagaatacatggatagccgggatcgccgcggcaaccagccaaccctggctttccggcgtcaatctgaaaaccacgctctacggttttgacactaacggcgtcaatgaaacggaagcgaacgttattttcaacgacgcgttcagttttaaccagcaggggctgctcgctaccgacggcagctggcagagtacctccacctttaatatgagtttacccgacggttacggcaacctgtgggggtcgcgccagtacagttccatcggtaacgcgctcccgatgcagcagaatgactacgtgaccatcggcgccaatgccaatctgcgcaaaatcgcgccgttcctcggtacgctgagcgtcagccgaaccaataacaaatataccggcagcacctataccaacgtcgattacgaccaatcgctgttagccaatcgctatgcgaccgtgtcgctgcgcgccggtattcagaactatcaatacaacaaccatgaaaatctgcgtgataagtacgtcaatattgatgtctctatccccttctctacctggctcagcaccggcgtgtccagccagaatggaaacatgctggcgaacgccacgctgcgcaaaagctttgacgacagcgctattacccaggtgggagcatcggtttcgaagcagattaaacagaataaaaatgacgatagccgctatcgttccgacgattacgccgccaatggttacgtcagctatgacaccaaatataacgctggcaccgtctccgttagccgctcatcgcagcacagttcaaactacagcctgagctcgcagggcagcctggcctggacggaaaaaaatgtttatgtcggcaaaggcactcaaaccgcaggcctggtggtgaataccaatttcagcggcaaggggaggatgatggcgcagatcaacggccagaactacccgctgaccggcaaaagcaacttcatcagtcttccgccctacgccgaatacaaggtggagctgatgaacgacaaaaattcggaagacagcgtcgacatcgttaacggccggcggaacaaagtcgtgctctatcccggcaacgtcagcgtgattaacccggaaatcaaacagctcgtcaccgtatttggccgggtgaaagatcgccgcggtggttactacgccaacgccgatatacataaccacattggtaaaacacgcaccgacgaactcggcgagttcgccatggacgttgataagcgctatccggtgattaccctggtcgataaattcggcggtatttgcgaagtggatttggatctgcgagaagcgaaaggtgccgtatgggtcggtgagatcccttgtgagatccaacaacaaacggcatcagtgactggagatattaagaatgtctattaa

SEQ ID NO: 212755 - DNA, 678 bp, Klebsiella pneumoniae
atgaaactgaatccattattcctctctctctttttattcaccgtgacgccctcctcccatgcgattaatgtcggagacgtcacctcaataatggggccggatgcctcgactctggcaaaagaaatcattaataccaccgatacggcgcgttacgttagcgtcagcgtggagcgtatctcatcgcctatggccggtggcacggttatcccgatggcgaacagatcggaattattatcaacacccgccagcctgatattacccggcaatgctaaagagaactttcgttttttttacaaaggacctcaggataaccaggaacgttactaccgaatatcctggaccgatgagccggtaaccgagtttgaagccagtaaaaagaaaaaacagggcgaggcaacgacttcagccattattggtaccattctggtggtcgcgccgcgagaagaaagatttgactatcgtcgcgataatgacacggtaaccaatactggtaacgcttcattccgtgtgatctcctacggtccctgtcgtgataaagcgaaggatgagggacaaggctgccgtgagcgatattatgtcatgcctggtgtcagcgtaaaaataaagcataccgatctcaccaataaaaaaacgcgaattggaatatggcacggtgagcaatatataaatgtaaactga

SEQ ID NO: 212756 - DNA, 579 bp, Klebsiella pneumoniae
atgaaaaaaatcgtattagcaggtgttgcggctgcggctcttatctcttccaacgcaatggctgacgtaactgcttccgccactgcaagctgggatgcaagcgcaacgaaagacaccaccagcgcgctagttgtcactccgctgaaatccctgaatttccagtacgcggaagggattaaagcgtttaactctcagaaaggcgcttttgacatcaccatccagggccagtctggcgcgactgactttacgctgacctctcagatcgtgagcaacaccctgagccgtaccactgacgcctctactctggccgtcggtgtgaactggaacggcaacgcgctgaacaaatccaccccggtaacgatgattgatacttccaacaacatttccgcgggtctggatgcgctggctgtcgcgaccgccttcgcaggcgccgatcgcgtcagcactcagggtaacttcgatttcactatcgactccgcgacttctgacggcagcactgccgctgagttcaaagatttaaccgacggttactggagcggcgacgttcgcgttcagtttaatgcggtctggactatctaa

SEQ ID NO: 212757 - DNA, 618 bp, Klebsiella pneumoniae
atggttccacagaaatatgagaaggcatactgtattagctgccagtatcagtgcgaaatctatccacgacctacgataaaatcgattagatgtattgaaactcactattgcgtatggcctgataaaaacatctacttaaaaaatggcgtgcattgttttttaattaacaagcattacaacttctctaattctggatatgtttttgttgatttttctcgctacaacatcagattattcaccaatgataaatggattgaatatctgatcaaaacaggattgcggatagttttgattgccgacagattagcgcaaccactggcgttgtactggaaacaccgttgtcagcaaatactttcaattatctataccagcgatacccgaaatgagattgaaaggaaaatacatctttcctttctcggccaaaaagatggacgcggctatcgtcagaaactaagcgctcaagaggtattggtactcgatcttttacttgcagagaagtcagttaaagagatagcacaagaattgcagatggcagaaaaaagaatctacgcaatcaagctcagcttgcagaataagatgggaggcagagggaagttaaacattattttatctggataa

SEQ ID NO: 212758 - DNA, 393 bp, Klebsiella pneumoniae; identical to SEQ ID NO: 137809

SEQ ID NO: 212759 - DNA, 981 bp, Klebsiella pneumoniae
atgtctattcagaaaattgctcgtctggccggcgtctcggtggccacggtgtcgcgggtgctgaacaacagcgatacggtaaaagccaaaaaccgtgagcgcgtgctgcaggcgatcaaagagagcaactatcagccgaacctgctggcgcgtcagctgcgaaccgcccgcagcaatatgatcctggtgatggtctccaatatcgctaaccccttttgcgccgaggtggtgaaggggatagaagaagaggcggagaagaatggctaccgcattctgctgtgtaactccgggtcggatctggcccgctcgacctcgggcctgcagctgctctccggcaaaatggtcgacggcattattaccatgaacgcgctctccagcctgccggaactgaccaccatgattggcgatgcgccctgggtgcagtgcgcggagtatgccgacaccggcagcatctcctgcgtcgggattaacgacgtcgaggcggctcagggggcggtgtcccgactggccgatagcggccgccgccgcatcgcgctcattaatcacgacctcagctatcgctatgcccgtctgcgcgagcgcggctataaaagcgtgctgcacgtgcacggtctggcgtatcagcaggtgacctacgcgcaggatcttagcgcggcggccggtaaacgggcgatggagcaactgctgtcgcaagacgagaagcccgatgcggtgtttgccgtttcggactccctcgccgccggggcgctgcgggctatcgcccaggccggactacgggtgccgggggatatcgcggtgatcggcttcgatggcaccgagctggcggaagtggtctccccgcagctgaccaccgtcgaacagccctcccgggcgatcggccgtacggcggtgtctctactgatgaaacgcatcgacgatcccgacgctgccgtcgagcgggtgatgatggactggcgcgtgatagaccgcgccagcgtctga

SEQ ID NO: 212760 - DNA, 1245 bp, Klebsiella pneumoniae
atgcaggaattaatatcgcaaattgccgccttaggaatcgaaataacccccacccgctcgctgatgattatcttcggcattatcttgttcaccgccgtggtcgtgcatctgatattgcacaaagtggtcctgcgcgcatttgaaaaacgggcgctggccagcagccatctgtggctgcaaatcatcacgcagaataaactctttcaccgactggcctttaccctgcaggggatcatcgtcaacgtccaggcggtgctgtggctgcaaaaaggcagcgaggccgcggaaatattaaccaccgtggcccagctatgggtgatgatatatgccatgctgtccttcttctcgctgctggatgtcattttaaagctggcgcagaaatttcccgccgcctcacagctgccgctgaagggcatattccaggggattaagctggtgacggcgattattatcggcatcctgattatttccctgctgataggccagtcaccggcgatcctgattagcgggctcggcgcgatggccgcggtgctgatgctggtgtttaaagatccgatcctcggtctggtggccggtattcagctctcggccaacgatatgctcaagcttggcgactggctggagatgccaaagtacggcgccgacggcgcggtgatcgatatcggcctcaccacggtcaaggtgcgcaactgggacaataccatcaccaccattccgacctggtcgctggtctctgactcgtttaaaaactggagcggcatgtcggcctccggcggccgccgcatcaaacgcagccttaacatcgacaccaccagcattcattttcttgatgaacaggagcagcagcgcctgatccgggcgaaattacttaaaccctatatggattcacgccacgaagagataagcgcctggaaccagcagtacgccggggaacagtcggttctcaatgagcggcgaatgaccaatgtcggcaccttccgcgcctatctgcaggagtatttacgccatcatccgcgcatccgccaggatatgaccctgatggtgcgccagctggcgccggatgccaacggcttgccgatcgagatctactgcttcaccaacaccgtggtatgggcggaatatgaagggatccaggcggacattttcgaccatgtcttcgctgtggtggatgagtttggcttacgcattcatcaaacgcccaccggcaacgatattcgcgcgctgaccggcgccttctcccgctga

SEQ ID NO: 212761 - DNA, 1428 bp, Klebsiella pneumoniae
atgaatacgtctgctgtttcacccggccgcgccggtctgttgctgctgctgagcggccagatgctgccgcttattgatacctcgatcaccaatgtggcgctggacgccatcacccacaccctggcggccagcgccacgcagctggagcttatcgtcgcgctgtacggcgtcgcctttgccgtctgcctggcgatgggcagtaagcttggcgataactatggccgccggcgcctgtttatgtggggcgtcgccctctttggcatcgcttccctgctgtgcgggatggcgaacagcatcggcgccctgctggcggcccgcaccctgcagggcgccggggcggcgctgattgtgccgcagatcctcgcgaccctgcacgtcaccctcaaaggccccgcccacgcccgggccatcagcctgtatggcgggatcggcgggatcgcctttatcgtcggtcagatgggcggcggctggctggtgtcggcggacatcgccgggctgggctggcgcaacgccttttttatcaatgtgccgatctgcctgctggtgctggctctgagccgccgctatgtgccggaaacccgtcgcgagacgccgtcgcggattgactggcagggtacgctgtacctcgcgctgatcctctgctgcctgctgttcccgatggccctcggtccggagctgcactggccgctgtggctgcagctgatgctggtggcggtcctgccgctgctgttcgccatgcgtcagagcgccctgcgccagcagcagcgtggcgaccatcctctgctgccgccgcgtctgctgcagttgaccagcatccgcttcgggatggccatcgccctgctgtttttcggcgcctggtccggctttatgttctgcatggcgctgaccatgcaggaggggctggggatggcgccgtggcagtccggcaatagctttatcgccctcggcgtggcctattttatttcggcgctgtatgccccgcggcttatcgcccgctacagcatggggcggatcctgctgaccggtctggcggtgcagatcgccggtctcctgctgctgtgcgccaccttctcccgcttcggcgtcgccaccaacgccctgacgctggttcccgccacggcgctgatcggctatggccaggcgctgatcgtcaacagcttttatcggattggtatgcgcgatatcagcgccagcgacgccggggccgggagcgcaatcctcagcaccctgcagcaggcgaccctcggtctcggaccggctatccttggttcgctgttcctggcgctggcccgtcgcggcggcggaaactatccgcaggcgctgattgattttctgctggtcgaggtggccatgatgctgttgctgggggcgatagcgctgtggctacgccatcatctcaaccgacagccggcgacggtggcctcgtaa

SEQ ID NO: 212762 - DNA, 867 bp, Klebsiella pneumoniae
atgaccacgatgccgcaacgggagtcgacgatcgccgtgccggacgatcgacgcaaacagctgggggcctttctgcgcgcccgccgtgaaagcctcgatccgcagcgcctggggttgccccgggtgggccgccggcgcacgccgggtctgcgccgggaagaggtggcgatgctcgccgacgtcggcgttacctggtacacctggctggagcaggggcgggaggtgaatccgtcggaggcggtgctggtgggggtggcgaatgccctgcagtgcagtccgctggagacccggcatctgttcgtgctcgccgggctgaccccgccggaagccacccaggtgacggtgtgcgaaggcatcagcccagggacccgccggatgctggacagcctgatgccgcagccggccagcattcagaaaccgaactttgatattgtggcgtggaacgacagcttctgccgcctgatgggcatcgatttcgccaccctcccggaagaagatcgcaactgcatttatctctatctgacccatgagacctggcgcagccggatcgaaaatcgcgatgtgctgccgaccttcgtctcctatttccgcgccgcgatggccgagcaccgcggcgatccggcgtgggaaaacaaactggcgcgctttttcgccgcctcgtcggagtttgaagcgctgtggcatcagcgctacgaggtgcgcggcgtggaaaaccagattaaacattttaaccacccgcagctcgggcgattcagcctgcagcagatgtactggtattcggcgccgcgcaacggctcgcgcctgctggtctacctgccgatggacgaggcgggcgagcaggcgctggcgtggctggaccaacattaa

SEQ ID NO: 212763 - DNA, 1035 bp, Klebsiella pneumoniae
atgaacgtaacccgaaaagagcagcgcattattcagcgcgcgctgaatgcctggcaggccagcggggagttaaccccctcggacagccagcggctggcgcaaacgatgcgcgtctcccccttcgactggcggcgcctgagccgctatgccttctggaccgcgctggcctgcgtgctgatttccctgggcagtctgttcgccgacagcgagctggtggcgtggctgctgagcctgttcagccactcggcgctgatgcggatcctgctgcctgcgctgctggcagtcgtctgctacggctggggttttcgccgccagcggcgggagacgcagtggcactacagcaccgaggcgattttgtttctgggcgtcgtctttaccgcggtggcgctatggcagcttggcgaacggctggataacggcagcggccatatcgcaccgctgtttctggccggatgcgtgatttacggtgccattggctatattgcccgctccgggctggtgtggctcttttttctgctggcgctgggcaactggttcggcgcggaaaccggctacgtctcggggtggggcgcctactggctgggcatgaactacccgattcgcttcgtcctgttcggcggcgcgctgctggcgctctgctacggcgcgcaatccctgcttcgccagcggcagctgtttaccgtcagcaaggcgatgggcctcacgtacctgtttattgcgctgtggatcatgtcgattttcggcaattacgacgcagacagctggtaccaggtgagccaggcgcgactcctgccgtgggggctgctgtttgccgtagcggccggcgtctgcatttttatcagcctgaaaaccgatgacggaatgctgcgcggcttcggactaaccttcctggcgatcaatctctatacccgtttctttgagtttttctggaacgggatgcacaaagtgctgtttttcctgatccttgccgtctcgctggcggtgattggccgctatgccgagcgcatctggcatgcggggaacgttaagccatga

SEQ ID NO: 212764 - DNA, 2730 bp, Klebsiella pneumoniae
atgaataaggagtcgatttttcgccaactagaacaacggatcgccgggcgagcgctgacggcggaagcgctgggcgagtttaacgctatggccatcgccgatagcttgaagcaaaaacgcagcatcatcagccatcatctgaataatctccatcgcgagcagcgggtggtcaaagtgaacggtcgcccggtgctgtttttacccgttaccgttctgcgcgatcatcaccgcctggcggttcggcacggcgaatacgcctccattcaggcgctgtgcgcggatcgtcaggatagtctggcgcagctgattggcgcgcagggcagcctgcaggaagcattgcgccagtgcaaggctgccatcagctaccctggcgcaggtctgccgctgctgctgcggggccctactggcaccgggaaaagttttctagctcgccagctctggcactacgcaatagatgaaggtattttacctgccgatgcgccttttaccgtatttaactgcgccgagtacgcgaataatccagaactactgacctcgaagttatttggtcatgcgaagggggcctttaccggcgccgataaggccgttcctggtcttatcgagaccagcaacggcggggtgttgtttatcgatgaggttcatcggctgccgcccgaaggccaggaaaagttgtttcattttatggataacggtagctggcgccggctgggggagagcgccgacgagcgcagcgccacggtgcggctaatttttgcttcaaccgaggatctggaaaaacacttcctggcgacctttattcgccgtattccggtgattgtaaaaattctgccgatcgctgaacgcggccaattcgagcggctggcgtttatccaccactttttccgccgtgaagcccagcgtttgaaccacgatctggcgctggatggcgaaatcgtcagccagctaatgcgtgaaacgcttgaaggaaatgtcggtgggctggaaaatttgattcgcaatatttgcgccagcgcctggacatttggcgaacgtgatagcggtcttttacatataaaagcgggtttgctgcccgaccgattactggcggatgcgccttttacccttcagcaaaatagcgagcgggttatgatttaccgcgatggcgacgcgcagcctcttttttctggtcgtcaccatgaataccaacggctaacggaaaatatttgtagcctgtgcgaggagttggctcaggataatattagcgtgcggacctttgaaaagcttatttatcagaacgtgacgctctatcttgatgcgctgatgaatcaggagagtacggtctctctgcaggacaaacggctgcgctttattgaagatgtgggcaaagcaatcgctgtcaattatgaccttcagctaaatgtcgaattcgcttatcttaccggccgctacctcaccagcctccctctggcgccgcgcagcgttgctgagcccgtgcgtctggtgatgcagcgctggctggactcctcggcggggctggcgcaacgcatcgcggagaaactactggatgtcgtcaataataaatacgatctgctcatcgatacgcttgaccgtctggcgattaccgccattgtcagtaatgctatcgatgcgaccagcggcggaaaagtgaaagcgctgataatcgcccacggttattcgaccgccagcagcattgccggcgttgccaaccgcctgattggcgagaagatctaccaggccatggatatgccgatggaggtggcgtttaacgatgtcagtcgcgccgtggttgattatctccagcatacggacacgcgtgcgggtgtgatggtgcttattgatatgggctacaccaaggagattgccgatgcgcttttgtcggtgattaacggcccgctggtagtggtggataacgtcacgacccgcatggcgctgaacgttgccagcgagatcgcgttgggaaaaaacatcgaacaaatcgccgaagagatcgtgccgcttaatcagtcgcgttgggatgtgttctggcccgcagaaaaaaaagagcgtgtgctgctggtgacctgtattacaggtatcggtaccgcatttaaatttaaaaatctgatggagaagagcctgctcaacgattttgatattaacatcatcgcctgcgagtatacgcgcttaaaaaacagtcgtacggcggtatcgttgctccaccagtatgaagttattgcggtcgtgggtacccacgacccgcagctggccggagtgccctgggttggcattgaggaactacttggcgagcaggggcatcgacatctgagtcagctcttaagcggctatcttaatgaaaagcaaattgcgctgattaataaaaatatggttcgtgagttttcactgcataacgttgtcaactctctgacgatactgaatgctggaaaaaccatgggccatatcgaaaccattatcgctgagtggcaaaatacgcttggttttcattttaataataacttaattatcagtttatatgtgcatctcagctgtatgattgagcgtttggtaatgcgtaatgaaattagccattataaagatcttgagcaatttacccgccagcatggtgaatttattgccatggtgaatcactcgttccagcgcctgaaaatactctataacgtggcgctaccggtagcggaaattggctatattcacgatatttttgaattacgtattgaagattttagctggtaa

SEQ ID NO: 212765 - DNA, 987 bp, Klebsiella pneumoniae
atgtctatagctcatcaaaacgcacatactattattcgcgatattttatctaagcagcacattgagcgcgtatggtttgttggctgcggtggttcattaaccggtttctggccggggaaatattttctcgattgtgaagctaaaaagctggccgtcggctatgttaccagtaatgaatttgtccatgcgacgccgaacgcgttaggtaaaaacagcgtagtgatcctcgcctcgcagcagggcaacaccgctgaaacggtggaagccgcccgcatcgcgcgtcagaaaggcgccgccactattggactggtatatacccccggcacgccgctgtgcgaacacagcgattacactattgaatactgctgggcgcgctatcccgaaaccgtcgatccgacgcagcaaaaagcggcatacagcctgtggctggcgctggaagtgcttgcgcaaactgagggatacgcccattacgatgagatggtcagcgcctttgccagttttgaatccgtggtacgcggcgctcagcagcaggttcaggcggatgcgcgccattttgccgaagcctggaagagcgaaaaagtcatctacatgatgggcagcggcccctcattcggcgccgcgcatcaggaatccatctgtattctgttggagatgcagtggattaactccgccagcatccacagcggcgagtatttccacggcccctttgagattaccgaaacgggaacgccgtttattttattaaaaagcagcggccgcacccgcccgctggatgatcgcgcgatccgctttatcgaacgttaccagggaaaactgcagattattgacgtggaaaaggtgggaatcgacgcactgcacgccagcgtgcgcgaatatttctgcggcctgctgcacaactgcgtactggatgtttacaacctggcgctggccaccgctcgcaaccacccgctgaccacccgccgctatatgtggaaagtcgaatattga

SEQ ID NO: 212766 - DNA, 1062 bp, Klebsiella pneumoniae
atgcacgtagaagactatatgaatgaaacacccgcctgtctgctcgctatgctgacgcagacgcgggaagatctctggcaggcggcaaaagcgctaacggagcgcggcgtcacgcgtattatcctgaccggctccggtacctcttatcacggcgcgctgaccgcccgctcgtttatgcagcagtggtgcgggctacccgttgatgtctactggccttttctgctggatgattcggcgctgaccctcagcgacaaagcgctggtcatcggcatttctcagggaggcggcagcctctctaccctcgccgcaatggaacgcgcccgggcagccgggcatcttaccgcttccatggccggggaagcgccagccgttatcgaccgggcggcagatttggtcttaacagtaccctgtggagaagagcgggctggcgccaaaaccaaagggtatcactgcaccatacttaatctgatgctgctggggcttgctgtcgccagtcgccagcggcgcctgagcgatgaggagcgcaaggcgctactcgtccgcatggataccacgtttaatcatttgcctacgctcattgaggcctcgcaggcgtgggttctcaatcatgcccgaccgcttatcgacagcgcggacattcgcctgaccggtccggcaaggctgtttggcaccgttcaggaaggtgcgctaaagatgcttgaaacgctacgctgtccggttgccggttacgaatttgaggagttcatccacgggatctataacgccttcgacgagcgctctaccctgatcatgctcgatccgtttcccgatgagcgtcaggatcgcctggcggaaatacttggcggctggactcagcatatttatcgcattggtccacaagtcgaaaataacggcaaaaatatgcccttcgcatttattaacgatcccgactttgcggtctttgaatatattattccgttacaaatggtttgtgcccgactgccgccagtgaagggcatcgatcccgcaataccgaaggatccgcatttccaccagaaaatgaaaagtaaacaactcaattaa

SEQ ID NO: 212767 - DNA, 855 bp, Klebsiella pneumoniae
atgagcgaaatgacgcaaactgtggctggcgctacccagccgcaaagcgatgatgcaagccgcatcaccgcccgcgatttacgcagcgtgttctggcgctcctttacgctacagggctcctggaactacgagcgccagcagcatatgggctatgccttcgcaatgtcgccagccctgaagcgcatctatcaggacccaacggagctggggcgcgccctgcagcgtcatctggtgctgtttaacaccacgccccatctctcgacctttatcttcggcctgtcgattgccatggaagaagagaaccagcgtaacccagaatttaatgaggagtcgataaacgcgattaaaaccagcctgatggggccgctggcgggcatcggcgactccatattctggggatcattaaaggttatcgccgccgggatgggtatctatttcgcccagcagggcagcctgctgggaccgatactggcgctgttagtttataacctgccgcatcttttgtgccgctggtatggcctgaagctcggctaccgggcgggtacgacctggctgatgagaatttaccaaagcggccttatggaccgggtgacctatatcgcatcaattgttggcctcatggtcgtcggcgcgatgaccgccagcatgatagatatcaccaccccgctcagctttaccgccgggcagaccaccatgaaggcgcaggagtttattgacaaaatacttccttcgctgctgccgctgcttttcacccttgggatgtacaagttgatccgcaagggagtcaatattaactggatcctgctaggaaccgtcgcgtttggcatggcggccagcgcgctaggcctgctttaa

SEQ ID NO: 212768 - DNA, 744 bp, Klebsiella pneumoniae
atgttgctcaccgcaacgttactcggactgatcgctgccctggggatacttgatggccgcctgcttggggtatcaatgatcgatcgaccgctggtgatgtgcgccctcaccggtctggtctgcggtaatttacatgaggggattctgattggcgctacgctggagcttattttcctcggcaacgtcgccatcggcgccgcgcacccgccagatatcgtgaccggctccgtattggccaccgcgttttcgatcatgtccggtcgtggtccagaggctgcgctcaccatcgccatccctgtctcaatgctggcgcagacgctgggaatcctggtgcgcgtggtgaacgcccgctttggtcatctggcggaccgctatgcggcacagggtaatacccgaatggtcggcctgatgcacctcgccggtccgacgctactctattttttaaacggatttctaccggtattttttgccattctgcttggttcttcggcggtaagctggttcctggaggccattccaccggtgataaccaatggattgatcgtcgccagtaagatcctgccagcgctcggcttcgccctgctgatcagcatgatgctcagcagcaaactgatgccgtacctcggtctgggatttctgatagcggcatataccaaactggatattatcgccatcgcgctgttcgctgtggtgttggcatttatcatcagccagttccttaatcttaatcagcaggagagctaa

SEQ ID NO: 212769 - DNA, 471 bp, Klebsiella pneumoniae
atgattaaactcgtgcgcattgattatcggctgctgcacggccaggtggtttttgcctggacccgagcgctggatatcgaccatatcatcgtcgccaacgccaaagccgcggcggatgccttcattacgatgtcgcttaacctggcaaagccagcgggcgtcacgctggacatcgccaccgttgaacaggcggcggaaaagcttaacagcggcaagttggatcataaaaaagtcatggtggtcctgggcaatactgcggaaaccctcgcgctagtggaaaaagtcccaggaattagcgcaattaattacggcggtctgccacagaaggaaggggcaagacaattcggcaaggccatctatctgaccgaagaggaaatcgcccatagcagagtgctaaaagaaaaaggtattcggctggagatgcgtcaggtacccgcccactcggctgaactccttaacgaccaactttaa

SEQ ID NO: 212770 - DNA, 435 bp, Klebsiella pneumoniae
gtgaaacatatctatgtggccagccacggccattttgctcgcggactggtgaacagtttgtcgctgctgattggcgacgaacacggcgttatcccggtctgcgcctatgacgaagatatcgtgaccaccgaacagctggagcaaaccctggagcatctcatcgtccaggcgaatggtgatgaagtggtgatcttcaccgacctgcttggcggcagtatcaacaatagcgccgtgagcgtcttgatgcgacatcgcaacgttttcgtggtcgccggcatcaatctgactctgctgctggagtttctgctgtgcgaagaagccactaccgaggccgcgattatctacgccaccagcgcggcgcgtgaatccattgttttcatcaatcctctaataacacaaccatcctctgacccacagggagaatctcatgattaa

SEQ ID NO: 212771 - DNA, 654 bp, Klebsiella pneumoniae
atggatatcgtatcggtcgctttgaagcgctattccaccaaggcctttgacgccacgaaaaagctgactgccggggaagcggaacagctgaaaacgctgctgcagtacagcccgtctagcaccaactcccagccgtggcactttattgtcgccagcaccgatgaagggaaagctcgcgtggcgaaagccgccagcggcacctacgtgttcaacgaacgtaaaattcttgacgcctcgcacgtggtggtgttctgcgcgaaaaccgcgatggacgacgcctggctgcagcgcgtggtggatcaggaagaggccgatggccgtttcgccaccccggacgcaaaagccgctaaccacaagggtcgcactttctttgccgatatgcaccgcaaagagctgaaagatgacgatcagtggatggcaaagcaggtgtatctcaacgtcggcaatttcctgctgggcgtagcggcgatgggtctcgacgccgtgccgattgaaggggtcgattttgcgatcctcgatgaggaatttgacctgaaagcccagggctacaccagcctggtggtggtccgggtcggccaccatagcgtagaagatttcaacgctaccctgccgaagtcgcgtctgccgcagtcgacgaccattaccgagatttaa

SEQ ID NO: 212772 - DNA, 369 bp, Klebsiella pneumoniae
atgacccctgagatgctgcatccctgcgctcaccgtatcgccctgacctacccgtttaccgaacactgctggccctttgggccagagtacgacgtgtttaaggtcgacggccgcatctttatgatcaccatgactattcgcggccgggcgctggtcaatctcaaagccgagccgcagaagtcgctgctgaatcagcaaatttatcgcagtatcgaacccggctaccatatgaacaagaaacactggatcacggtggtgccaggagaggatattagcgaggatctgctggccgagctgattgacgattcgtggcatcaggtggtgaacaagctgagtaaaaaggcccagcagcgcctgcgtccgcgctga

SEQ ID NO: 212773 - DNA, 585 bp, Klebsiella pneumoniae
gtggctcgtccaaagagtgaagataaaaagcaagcgttactggaagctgccaccgcggctttcgcccagtccggcatagccgcctcgacgtcggccatcgcccgcagcgccggtgtggccgagggaacgctgtttcgctatttcgccaccaaggatgagttgctcaacgagctgtacctcgcgattaagctgcgcctggtgcgcacaatgatcgccgggctggatccggacgagaagcgcccgaaagagaacgcgcgcaatatctggaacagctatatcgactggggcgtgcgcaacccgatggagcacaaagcgatccgccggatggcgctcagcgagcgcatcaccgacgaaacccgccgccaggtaaaagagagctttccggagctcaacgaaatgtgccagctgtcggtgaaagagatattcctcagcgaggcgtaccgcgcctttggcgacgccctgtttctgtcgctggctgaaaccaccatcgaattcgccagccacgatccgcagcgcgcccgggagattatcgccctcggctttgaagccatgtggcacgccctgcatgaggcggacgccaaatga

SEQ ID NO: 212774 - DNA, 1101 bp, Klebsiella pneumoniae
atgaaccgtgtcactttcagcgtggtcgccatcatgttactcgcagcagcaacgacattgccgtttgttcttaatgccggttttggtaaggcgccgcagggggtacagcttagccaggtggaagcgtctccccactaccgggacggccagttccataaccagttgcccacgccagggttcaccgggcagaaaaatatgctggcggcgtggtgggatttcctgatgaccaaacgggaaaacgcccgtcccgcgcaaccgctgccgctggtgaagaccgatctggcgacgctgcccctcgggcaggacgtgatggtctggctcggccactcctcctggtacctgcagctggcgggaaaacgcatcctgatcgacccggtgttcagcgattacgcggcgccgttctcttttatcaataaagccttccccggcgactatccgtggcgggcggaagggatgccggagatcgatctgctgatcatctcccacgatcactacgaccatctggattacgccaccattcgcgccttactgccgaaaattaagcgggtcattacgccgctgggggtcggatcgcatctgcgctactggggaatggacggggcgctgattaccgaagcggactggcagcaggcggtaccggccagcgacgagctcaccgtccacgtgctgccggcgcggcacttttccggccgtgggctgaagcgtaaccagacgctgtgggccagttttctgttcgttacccggcagcaaaagatttattacagcggcgacagcgggtatgggccgcactttaaagcgataggcgatgagttcggtccggtcgatctggcgatcatggagaacgggcagtatgaccaggactggaaatatatccacatgatgccggatgaaacggctcaggctgccgacgacctgcgcgctcgcgcggtgctgcctggacatgctggacgattcgttttggcgaaacacagctgggatgaaccgtatcaacggctggcggctgccagcgaaggaagggcctggcgtctgctgacgcctgtgcagggcgagccggtgtgggtcgccgataagacgcaatcatttaacgcctggtggcgctaa

SEQ ID NO: 212775 - DNA, 342 bp, Klebsiella pneumoniae
atgacgatttccgctcaggtgattgatactatcgtcgagtggattgatgataacctgcatcaaccgctgcgtattgatgatatcgctcgccatgccgggtattcgaaatggcatctgcaacggctgtttttacagtacaaaggggagagcctggggcgctatattcgcgaaaggaagctgctgctggccgcccgcgatctgcgcgacaccgatcagcgggtctacgatatctgcctgaagtatggcttcgattcgcaacagacctttacccgcgtcttcacccggaccttcaatcagccgccgggcgcctaccgcaaagagaaccacagtcgcgcccactga

SEQ ID NO: 212776 - DNA, 249 bp, Klebsiella pneumoniae
atgaaacatccactggaaacgctgctctccgccgccgggatcttactgctggccctgctctcctgtttgctgttgcccgcgccttcgctgggcctgacgctggcgcaaaagctggttgagacattccatatgatggatctcaaccagctctatacggtgctgttttgtctgtggttcttagcgctgggcgccattgagtatctggtgctgcgctgggtgtggcgtcgctggttttccctcgagcggtaa

SEQ ID NO: 212777 - DNA, 2724 bp, Klebsiella pneumoniae
ttgaccaagatgaataacccaaagtttacgacgccctcgggcgacaccgcgccacggcaggtctggcagcagaccgttgacgcagtgctggcgcagaccaaaagccaggccgctgggttaagttccgcagacgccgccgagcgcctgaatacctgtgggccgaatgcgctgccggaaaagaaaggcaaaccgggctggctgcgctttctcgcccactttaacgacgtactgatttacgtgctgctggccgccgcggcgctgaccgccatcatgggtcactgggtcgataccctggtgatcctcggcgtgacggtgattaacgccctgatcggccatattcaggagagcaacgccgaaaaatcgctgcaggggatccgcaacatgctctccagcgatgcccgcgtccagcgtaacggcaagcatgagactatcccgacgcgcgacctggttccgggggatatcgttatcctgcgcgccggcgaccgcgtgccggcggatatgcgcctgattgaaacccacaacctgcgggtggaagaggcgatcctcaccggcgagtcgacggtggtggataaaatcaccgacgcgctggagggcgatctgccgctgggcgaccgggtgaacatggtcttctccgggaccaccgtcagcgccggcggcggcgtcggcgtggtgaccgccaccggcgcgcagaccgaactcggccatatcaaccagatgatggcgggtattgagaagcaccgtaccccgctgctggtgcagatggataagctcggcaaagcgattttcgccattattctcgccatgatggtggcgctgtttattttcagcctcgcgctgcgggatatcccgatgggcgagctgctgctgtcgctgattagcctggcggtagccgcggtaccggaaggactcccggcgatcatctcgattattctgtcgctcggcgtgcagacgatggcgcgcaagcgggcgattattcgtaagctgccgaccgtggaaaccctcggcgccatgaccgtggtctgctcggataaaaccggcaccctgacgatgaacgaaatgaccgtcaaagcgatcatcaccgccgactgctgctatcgggtggaaggcgacagctacgagccgcaggggcggatcttcctcgaggggagcgatgagcccgtgcaggttcagcccggcaccgtgctggagacctggctgcgcaccatcgacctgtgtaacgacagccagcttacccaggatgagcgcggtctgtgggggatcaccggcgggccgaccgaaggggcgcttaaagtgctggcggcgaaagcgcagctcccggcggtggaggcccgtctggtggccaagatcccctttgactcgcagtacaaatatatgtcgaccctgcagcacatcgatggcaatgcccgggtgctgatcaccggtgcgccggacgttatcttcgccatgtgccgcgagcagatgagccgccacggcgcggtgccgttcgaggcgcagtactgggaagaggagatggcgcgcttcgcccgtcagggactgcggatggtggcggcggcctgtaagccggccagccttgatgccaccaccctcaaccatgaggacctgcaggagggactgattttcctcggcatcgccgggatgatggatcccccgcgtccggaagccattgacgccatccacgcctgccagaccgccggcatccgcgtgaaaatgatcaccggcgaccacccgcagacggcgatgagcatcggccagatgctggggatcaccaatagcagccaggccatgaccggctaccagctggagcacatggacgatgcggcgctggcgaaggcggcggtggagtacgacatctttgcccgtaccagcccggagcataagctgcgcctggttaaagccctgcaggataacggcgaagtggtcggcatgaccggcgacggcgttaacgacgcgccggcgctgcgccaggccgacgtgggtatcgccatgggtatcaaaggcaccgaagtcaccaaagaggcggccgacatggtgttgaccgatgataacttcgcgaccatcgccagctcggtaaaagagggccgtcgggtctatgacaacctgaagaagaccatcctcttcatcatgccgaccaacctggcgcaggggttgctgatcatcatcgccctgctggcggggaacattattccgctgaccccggtgctgatcctgtggatgaacatggcgacgtcggcgacgctctccttcggcctggcctttgaggccgcagagcgcaacgtgatgaaccgtccgccgcgtaaaaccggccagcatgtgatggatggtttcgccgtgtggcgagtggctttcgtcgggtcgatgatcgcgattgccgcctttatccttgaggcctggctggcgccgcgcggccacagtccggagtttatccgcaccgtgctgctgcagatgctggtgacggcgcagtgggtctacatgatcaactgccgcagcagcgacagcttctccctgagcatgggcctgctgcgcaacaaaggcatctggctggtgaccggcgtcctgctgctgatgcagctggtcattatctatgtcccgctgatgcagagcatgtttggtacggaagcgctgccgctgcgctactggtttgtcactctggtcatcggcgtcgccatgttcctggtggtggaagtcgagaagcgtctgacgcgccggttccgcaaaacggcctga

SEQ ID NO: 212778 - DNA, 1080 bp, Klebsiella pneumoniae
atgattaaaaccttccgctttgctctgctggcctgcggtctggtcggcggcgccctgacggcgaccgccgcgccggcggtgccggtccgcgtcgccacggttgaactggctcctcatgctgaagaacgcgctatccccgggcgggtcgaggcgatccgcgccgtcgacattcgcgcgcgcaccgaaggggtgattgttcagcgccacttccaggacgggcagtatgttaccgaaggcgacctgctgtttaccctcgacgacgcgcagccccgcgcggcgctggctctggcgcaggccgagctgaaaagcgccgaagcctcattacgtcagtcgcagcagttgctcactcgctacgagcggcttatcaacaatcactccatcagccgcaacgacgtcgatacggcccggatgcagcgcgacgtcgccgccgctgccgtacagcaggccaaagcccgcgtcgaggcccagcagattgtgctcagctacactcagattgcggcgctggtgaccggtcgcgtgggccatagcgcctttcacgtcgggacgctggtcaattcgtccagcggcgtgctggtggacattgtgcagttggatccggtgcgggtctcgttcgccctcgacgaagccgcgtttttcagcaaaaccggccagcacgccgatatccacgctctgaagcaggcgtggctggcgcagattgaggttgatggtaaacggcgcgacggggtgttgacctctatcgataaccggatcgacgcccgcaccggcagcgtagcggtgcgggccgagttcgccaatccgcagcaccgtctgctgccgggcggcagcgtgacgatcctgttccgtccgcaggaactgccgtcgcgagtgatggtcccggccgccgccgtgcagcaggatccgcagggctttttcagctgggtgctgaagccggaccacaccgccgggcagcgtcgtctgaccctcgcggggcagcaggggcagcagtttgcggtcgagaaagggctgcaggcgggcgagcaggtgatcaccgacggcgcgcagcggttgcgcgaaggcgccgcggtgcaggtgctgaactag

SEQ ID NO: 212779 - DNA, 3093 bp, Klebsiella pneumoniae
atgctgaccttttttatccgtcgtccgcgatttgccatggtgatcgcgctgctgctgacctttgtcggcgcggtgtcgctgaagctgatcccggtggagcagtacccggcgatcacccccccggtggtgaacgtcagcgccagctggccgggcgccagcgcgtcagacgtggcggaagccatcgccgccccgctggagacccagctcaacggcgtcgatcatatgctgtatatggagtccaccagctcggatgaggggacgtaccgcctgagcataaccttcgcggcgggcaccgatgccgacctggcggcgatcgacgtgcaaaaccgggtggcgcaggcgctggcgcagctcccggcggaggtgcagcagaatggcgtccaggtgcgcaagcgcgccagcaatctgcttatgggggtaagcctctactcgccgctgggcacactgacgccgctgtttgtcagcaactacgccagcacccaggtgcgcgaggcgctggcccgcctgcccggcgtcggcgaggtgcagatgtttggcgcccgggattacagcatgcgtatctggctgcgcccggaccgcatgaacgcgctcaacatcaccacggatgatgtcgcccaggcgctgcgcgagcaaaatgtgcagggcgcggcggggcaggtgggcaccccgccggtatttaacggccagcagcagacgctgaccatcaacgggctggggcgtctgaacgaggcggccagctttggcgagattattatccgccgcggcgcgcaggggcagctggtgcgcctcgccgacgtggcgaccattgagctgggcgcccgcagctacagctccggcgcccagctgaacggtaaagcgtcggcctatctggggatctatccgacgcccaccgccaacgccctgcaggtcgccagcgcagtgcgtgcggagcttaaccgcctgcacactcgctttccggcggatctcacctgggaggtgaagttcgataccacccgctttgtggcggcgacgatcaaagagatcggcgtctcgctggcgctgaccctgctggcggtggtcgtggtggtgtcgctgtttctgcagagctggcgggcgacgctgatcgtagtgctggcgatcccggtgtcactgatcggcacctttgcggtgctctatctgctgggctacagcgccaacaccctcagcctgttcgcgatcattctcgccctgacgatggtggtggatgacgccattgtggtggtggagaatgtggaaaccaaaatggcggaagggctggatcgcctgcaggccaccgcccaggcgctgcggcagatcgccgggccggtaatcgccacgaccctggtgctgctggcggtgtttgtgccggtggcgctgctcccggggatcgtcggcgagctgtaccggcagtttgccgtgacgctctccaccgcggtggccctgtcgagcctggtggcgctaaccctgacgccggccctctgcgcgctgctgctgcgcccgcgtcctgcccggccggcggcggtgtggcgggcgtttaaccgtcttctcgacggcacccgcgacggctatggccggctggtaggcaggatgaaccgccgtccctggctggcgctggcggcgacggtggcggcaggcgcgctggtggcgttcagcttcacctcgatgccgaaaggcttcctgccgcaggaagatcagggttacctgtttgccagcgtgcagctgccggaggcggcgtcgctggagcgtaccgaagcggtgatggcccaggcgcgcaagctgctgatggctaacccggcggtggaggatgtgattcaggtgtccgggttcaacattctcaacggcaccagcgcctctaacggcgggtttatctcggtaatgctcaaggactggcatcagcggccgccgctggatgcggtgatggcggatattcagcgccagctgctgtcgctaccggaggcgacgatcatgaccttcgcaccgccgaccctgccgggcctgggcaatgcctcggggtttgatctgcgcatcctggcgcaggccggtcagtcgtcggcggagctggagcaggtgacgcgggagatcctccaactggcgaaccagcattcgcagctgagccgggtgtttaccacctggagcagcaacgtgccgcagctgaccctgacggttgaccgcgaccgggcggcgctgctggatgtgccggtggcgcagatcttcagcagcctgcagacggcgttcggcggcacgcgcgccggcgatttcagccgtaacaatcgtgtctatcatgtggtgatgcaaaatgagatgcagtggcgcgagcgggctgagcagattagcgagctgtacgtccgcagccgcgacggcgagcgggtgcggctgagcaatctggtcaccattacgccgacggtgggggcgccgtttattcagcagtacaatcagttcccgtccgtgtcggtgagcggttcagcggccgagggggtcagcagccgcacggcgatggcggccatggagcagattttgcaggcccatctaccgccgggatatgactatgcctggagcgggatctcctggcaggagcagcagaccggtaatcaggcggtgtggatcgtgctggcggcggtggcgatggcgtggctgttcctggtggcgcagtatgagagctggacgctgccggcgagcgtcatgctctcggtgctgttcgccatcggcggagcgctgctctggctgtggaccgcgggctatgccaacgatgtgtatgttcagatagggctggtgctgctgatcgccctggcggcgaagaatgcgattctgatcgttgagttcgcccgcagccggcgcgaggaggggctgtcgatagtcgacgctgcgcgcgagggggctacccgccgcttccgcgcggtaatgatgaccgcggtgtcgtttattatcggcatcatgccgatgatgctcgccaccggcgccggggcgcagagccggcggatcatcggcaccacggtattcagcgggatgctggtggcgacgatggttggcatcctgtttatcccgtcgctgtatgtactgtttcaacgtatgcgcgagtgggcgcatcggcgggggtaa

SEQ ID NO: 212780 - DNA, 2115 bp, Klebsiella pneumoniae
atggctcgtacaacacccatcgcacgctaccgtaacatcggtatcagtgcgcacatcgacgccggtaaaaccactactaccgaacgtattctgttctacaccggtgtaaaccacaaaatcggtgaagttcatgacggcgccgctaccatggactggatggagcaggagcaggaacgtggtatcaccatcacttccgctgcgactactgcattctggtctggtatggccaaacagtatgaaccgcaccgcgtaaacatcatcgacaccccggggcacgttgacttcactatcgaagtagaacgttccatgcgtgttcttgatggtgcggtaatggtttactgcgcagttggtggtgttcagccgcagtctgaaaccgtatggcgtcaggcaaacaaatataaagttccgcgcatcgcgttcgttaacaaaatggaccgcatgggcgctaacttcctgaaagttgttggtcagatcaaaacccgtctgggcgcgaacccggttccgctgcagctggcaattggtgctgaagaaggtttcaccggcgttgttgacctggtgaaaatgaaagccatcaactggaacgatgcagaccagggcgtaaccttcgaatacgaagatatcccggctgacatgcaggacctggctgatgaatggcaccagaacctgatcgaatccgcagctgaagcttctgaagagctgatggaaaaatacctgggtggtgaagaactgactgaagaagagatcaaaaaagctctgcgtcagcgcgttctgaacaacgaaatcatcctggtaacctgtggttctgcgttcaagaacaaaggcgttcaggcgatgctggatgcggtaattgattacctgccatccccggttgacgtacctgcgatcaacggtatcctggacgacggtaaagataccccggctgagcgtcacgcaagcgacgacgagccgttctctgcactggcgttcaaaatcgctaccgacccgttcgtgggtaacctgaccttcttccgcgtgtactccggtgtggttaactctggtgataccgtactgaactccgtgaaagctgcacgtgagcgtttcggtcgtatcgttcagatgcacgctaacaaacgtgaagagatcaaagaagttcgcgcgggcgacatcgctgctgctatcggtctgaaagacgtaactactggtgacaccctgtgtgacccggatgcgccgatcattctggagcgtatggaattccctgagccggtaatctccatcgccgttgagccgaaaaccaaagctgaccaggaaaaaatgggtctggctctgggtcgtctggctaaagaagacccgtctttccgcgtatggactgacgaagagtctaaccagaccattatcgccggtatgggtgagctgcacctcgacatcatcgttgaccgtatgaagcgtgaattcaacgttgaagcgaacgtcggtaaacctcaggttgcttaccgtgaagcgattcgcgcgaaagttaccgatatcgaaggtaaacacgccaagcagtctggtggtcgtggtcagtacggtcacgttgtgatcgacatgtacccgctggagccgggctctaacccgaaaggttacgagttcatcaacgacatcaaaggtggtgtaattcctggcgaatacatcccggccgttgataaaggcatccaggaacagctgaaagctggtccgctggcaggttacccggtagttgatatgggtatccgtctgcacttcggttcttaccacgacgttgactcctctgagctggcgtttaaactggctgcgtctattgcctttaaagaaggctttaagaaagcaaaaccagttctgcttgagccgatcatgaaggttgaagtagaaactccggaagagaacactggtgacgttatcggtgacttgagccgtcgtcgcggtatgctgcgcggtcaggaatccgaagtaaccggcgttaagatccacgctgaagtaccgctgtccgaaatgttcggttatgcaactcagctgcgttctctgaccaaaggtcgtgcatcatacaccatggaattcctgaagtatgatgatgcgccgaacaacgttgctcaggccgttattgaagcccgtggtaaataa

SEQ ID NO: 212781 - DNA, 471 bp, Klebsiella pneumoniae
atgccacgtcgtcgcgtcattggtcagcgtaaaattctgccggatccgaagttcggatcagaactgctggctaaatttgtcaatatcctgatggtagatggtaaaaaatctactgcagaaactatcgtatacagcgcgctggagaccctggctcagcgttctggtaaatctgaactggaagccttcgaagttgcgctcgaaaacgtgcgcccgactgtcgaagttaagtcccgccgcgtaggtggttctacttatcaggttccagttgaagttcgtccggtccgtcgtaatgccctggcaatgcgttggatcgttgaagctgctcgtaaacgcggtgataaatccatggctctgcgcctggcgaacgaactcactgatgctgcagacaacaaaggtactgcagttaagaaacgtgaagacgttcaccgtatggccgaagccaacaaggcgttcgctcactaccgttggtaa

SEQ ID NO: 212782 - DNA, 375 bp, Klebsiella pneumoniae
atggcaacaattaaccagctggtacgcaaaccacgcgcgcgcaaagttgcaaagagcaacgtgccagcgctggaagcctgcccgcagaaacgtggcgtatgtactcgcgtatataccaccactcctaagaaaccgaactccgcactgcgtaaagtttgccgtgtgcgtctgactaacggtttcgaagtcacctcctacatcggtggtgaaggtcacaacctgcaggagcactccgtgatcctgatccgtggcggtcgtgttaaagaccttccgggtgttcgttaccacaccgttcgtggtgcgcttgactgctccggcgttaaagaccgtaagcaggctcgctccaagtacggcgtgaagcgtcctaaggcttaa

SEQ ID NO: 212783 - DNA, 288 bp, Klebsiella pneumoniae; identical to SEQ ID NO: 138442

SEQ ID NO: 212784 - DNA, 360 bp, Klebsiella pneumoniae
atgaaacgtgtggcttttgtactttcctctgcgccgcacggcagcgccgccggcagggaaggcctcgatgccttattagcaacctccgcgctcaccgacgatattggcgtgttttttgtgggcgacggcgtgtttcagctgttacccgaacagcggcctggcgctgtgctggcccgcgactacatcgctacctttaaattgctgtcgctatatgatatcgaccagtgctggctgtgcgccgactcagcgcgagagcgcggcctggatcccgcgaccccgtgggtggtggatgtcgaatgcctggcgccggatgccctgcgcgcccgtctgcatgaatttgatgtgattttgcgtttctga

SEQ ID NO: 212785 - DNA, 387 bp, Klebsiella pneumoniae; identical to SEQ ID NO: 138440

SEQ ID NO: 212786 - DNA, 723 bp, Klebsiella pneumoniae
atgtccaggtcgcttttaaccaatgaaaccagcgagcttgacctgctggatcaacgtccctttgaccagaccgatttcgatattctcaaatcttatgaagcggtagtggacgggttggcgatgctcatcggttcgcactgtgaaatcgtgctgcattctttgcaggatctgaaatgctctgccatccgtatcgccaatggtgaacataccggccgccaaatcggttcaccgattaccgatcttgcgctgcgcatgctgcacgatatgacgggcgccgatagcagcgtttccaaatgctactttacccgtgctaaaagcggcgtactgatgaagtcggtgacgattgccattcgcaaccgcgatcaccgggtgattggtctgctgtgtatcaacatgaatctggatgtgccgttttcccagatcatgagcacctttattccgccagaaacgcctgaagtgaactcgccggtgaactttgcttcttcggtagacgatctggtcgcccagacgctggagttcaccattgaagaggtgaatgccgatcgcagcgtgtctaacaatgcgaaaaaccgtcaaatcgtgctgaatctctacgagaaagggatcttcgatattaaagacgctattaaccaggtagccgatcgtctgaacatctccaagcacaccgtctacctctatattcgccagttcaaaagcggcgatttccaggggctggataagtaa

SEQ ID NO: 212787 - DNA, 831 bp, Klebsiella pneumoniae
atgaaatcactgtttaaagtaacgctgctggcggccacaatggccgtcgccctgaatgcaccgttgaccttcgctgcagatacggcaacgaaggcagccccggcggctgagagtaaatcggcatttaaaaatgacgatcagaaatcggcctatgcgctgggcgcgtccctggggcgttacatggaaaactccctgaaagaacaagagaaactgggcattaagctggataaagcccagctgatcgccggcgtacaggacgcgtttgccgataagagcaaactgtccgaccaggagatcgaacagactctgcaggcctttgaaacgcgcgtgaagaccgcggctcagcagaaaatggaaaaagacgccactgagaacgaagccaaaggcaaagcgttccgtgacagctttgccaaagagaagggcgtgaaaacctcaaaaactggcctgctgtataaagtcgagaaagaaggcgctggcgatgcgccgaaagacagcgataccgtggtggtaaactacaaaggtaccctgatcgacggtaaagagtttgataactcttatactcgcggcgagccgctctctttccgtctcgacggcgtgatcccgggctggactgaaggcctgaagaacatcaagaaaggcggcaaaatcaagctggttattccgccggacctggcctacggtaaaactggcgtcccgggcatcccggccaactctacgctggtctttgatgtagaactgctggatatcaaaccggcgccgaaggcagatgcacagccggaagccgcaggcgatgcgaaagccgcggacgcgaaagctgacgctaagaagtaa

SEQ ID NO: 212788 - DNA, 219 bp, Klebsiella pneumoniae
atgcacgatagcacattagaaacgcgccttgcggagctggaaagccggctggcgtttcaggaaatcaccatcgaagacctcaacaaaaccgtgaccgcccacgagatcgagatggcgaagatgcgggagcatatgcgtctgatgatcgagaagctgaaggcgacccaaccctcccatatcgcctcccaggcggaagaaacgccaccgccgcactattga

SEQ ID NO: 212789 - DNA, 588 bp, Klebsiella pneumoniae
atgaaagtagcaaaagacctggtggtcagcctggcctatcaggtacgtacagaagacggtgtgttggttgatgagtctccggtaagcgcgccgctggattacctgcacggtcacggctccctgatttccggcctggaaaacgcgctggatggccacgaagtgggcgacaaatttgacgttgccgtcggcgctaacgacgcttacggtcagtatgacgaaaacctggtgcagcgtgtaccgaaagacgtcttcatgggcgttgatgaactgcaggttggcatgcgcttcctggcggaaaccgatcagggtccggtaccagtagaaattactgaagttgaagacgaccacgttgtggttgatggcaaccacatgctggctggccagaacctgaagtttaatgtggaagtcgtcgccatccgcgaagcgactgcggaagagctggagcacggtcacgtgcacggcgcgcatggccacgatcacgatcatgaccatggtcatgacggttgctgcggcggccacggccacgatcatggtcacgaccatggtaaaggcggctgcggcggccacggtggctgcggctgccactaa

SEQ ID NO: 212790 - DNA, 201 bp, Klebsiella pneumoniae
atggcagtgcgtaaacgttttattgccggggcgaaatgtccggcgtgccaggcgcaggattcgctggcaatgtggcgtgagaataatgtcgatgttgttgagtgcgttaagtgcggtcatcagatgcgtgaggcagataaagaggcccgtgagcatgtacgcaaagaggagcaggtgattggcatttttcatcccgactag

SEQ ID NO: 212791 - DNA, 1806 bp, Klebsiella pneumoniae
atggcgggatctgatttgctgctggcgggggtgttgtttttgttcgcggccgtcatcgccgtccctctggcttcaagactggggattggcgcggtgctgggctatctgctggccgggatcgccattggtccgtgggggctcgggtttatcagcgatgtggatgaaattctccatttctctgagctcggcgtagtgtttctgatgtttatcatcggcctggagctcaatcccgccaagctatggcgactgcggagctccatcttcggcgttggcgcggcgcaggtgatgctcagcgcggcgatcctcggtgggttgctgatgacgaccgggttttcatggcaggcggcggtggtcggcgggatcggcctggcgatgtcttccaccgccatggcgctgcagctgatgcgtgagaagggaatgagccgcagcgaagcgggacagctaggcttttcggtgctgctgtttcaggatctggcggtgatcccggcgctggcgctggtgcccctgctggccggttcagcggatgagcatgtgaactggttgacggtcggcatgaaggtcctggcctttgccgggatgctgattggcggacgctatctgctgcggccggtgttccgttttatcgccagctcgggggtcagggaggtgttcactgccgccacgctgctgttggtcctcggatctgccctgtttatggaggcgctggggctgtcgatggcgctgggcacctttattgccggcgtgctgctggcggaaagtgagtatcgccacgaactggagatcgctatcgatccgttcaaggggctgctgctcgggttgttctttatttccgtcggcatggcgctgaaccttggcgtactgtatacccatctgctgtgggtggcggtgagcgtggcggtgctggtggcggtaaaaatgctggtgctctatctgctggcccgtctctatggcctgcgaagttccgagcggatgcagttcgcgggcgtattaagccagggcggcgagttcgcgtttgtcctcttttcgctgcccgcctctcagcggttgtttcagcacgaccagatggcgctgctgctggtggcggtaacgttgtcgatgatgacgacgccgctgctgatgaaggggatagataagctattgtcgcgacggctgaacccggcggacgataccggtgaggcgccgtgggtggaggatgacaagccgcaggtgattattgtcgggtttggtcgctttggtcaggtcattggtcgcctgctgatggccaataagatgcgtattacggtactggagcgggacatcagcgcggtaaatctgatgcgcaactatggctataaagtctattttggcgatgccacccagctggagctgctgcgctcggcgggagcggaagaggcgcagtcgatcgtcatcacctgtaatgagccagaagataccatgcggctggtggaaatgtgtcaacaacactttccacatctgcatattctggcccgcgctcgcgggcgcgttgaggcgcatgagctgctgcaggccggcgtgacgcagttttctcgtgaaactttctccagtgcgttggagctggggcgcaaagcgctcatcaccctcgggatgcatcctcaccaggcccagcgcgcgcagctgcacttccgacgcctcgatatgcgaatgctgcgcgagctaatgccagtgcatactgatacggtacagatatcacgcgtgcgggaggcccggcgcgaactggaagagattttccagcgcgaaatgcagaaagagagccggcagctggacggctgggacgagtttgaataa

SEQ ID NO: 212792 - DNA, 561 bp, Klebsiella pneumoniae
atgtctcagacagcgaaagtgttgctgctgtatgcccacccagaatctcaggattccgtggccaaccgggttttattagagccggccttacagttgccgaacgtcaccgtgcacgatctctacgcgcactatccggatttttttatcgatattgcttacgaacaggacctgctgcgccagcatgaggtgattgttttccagcaccctttatatacctggagctgtccggcgctgcttaaggagtggctggatcgtgtgttaagccgcggcttcgccagcggcgccggagggaacgaactggcgggaaagtactggcgcagcgtgatcactaccggcgagcctgagagcgcctaccgtcgcgatgctaatcgctatccgatgaacgatattttacgtccttttgaactgaccgccggcatgtgccgtatgcactggatgagccccattatcgtctactgggcccggaggcagcagccagaggagctgcgcagccgcgccctggcctaccgggactggttggccaaccccatcgccgccggaggtgtccatggcgggatctga

SEQ ID NO: 212793 - DNA, 1905 bp, Klebsiella pneumoniae
atgattgttttctcctcgttacaaattcgtcgcggcgtacgcgtcctgctggacaacgccaccgctaccatcaatcctggccaaaaggtcggtctggtggggaaaaacggctgcgggaaatcgacgctgctatcgcttttgaaaaacgagataagcgctgacggcggcagtatgacctttcccggcaactggcagctggcttgggtgaatcaggaaaccccggcgctaccgcagccggcaatcgattatgtcattgacggcgatcgagagtatcgccagctggaggccgcgctccagcaggctaacgaacgcaacgacggtcatgctatcgccaccgtccacggtaagctggacgccatcgacgcctggacgatccgttcgcgcgccgccagcctgctgcacggtctgggtttcagcaatgaacagcttgagcggccggtcagcgatttttccggcggctggcgtatgcgccttaacctcgcccaggcgctgatctgccgctccgatctgctgctgctcgatgaaccgactaaccacctcgatctcgatgcggtgatttggctggagaagtggctgaagggctatacgggaacgctgatcctcatctcccacgatcgcgattttctcgatcctatcgtcgacaaaattatccatatcgaacagcagacaatgtttgagtacaccggcaactacagttcgtttgaagtgcagcgcgccacccgcctcgctcagcagcaggcgatgtacgaaagccagcagcagcgcgtcgcgcacctgcaaagctatatcgatcgcttccgtgccaaagccaccaaggccaagcaggcgcaaagccggatcaaaatgctggagcggatggagcttatcgctccggcgcacgtggataacccgttccacttcagcttccgccagccggagagcttgcctaacccgctgctgaagatggagaaagtcagcgccggctacggcgagcgtattattctcgactccatcaagcttaacctggtgccgggctcgcgtatcggcctgctgggccgcaacggcgccgggaagtcgacgctgattaagctcctggcaggcgagctccagcccgtaagcggcgagatcggcctcgcgaaaggcatcaagctcggctacttcgcccagcatcagctggaattcctgcgcgccgatgagtcgccgctgcagcacctggcgcgtctggcgccgcaggagctggagcagaagctgcgtgattatctcggcggctttggtttccagggcgataaggtgagcgaagaaacccgccgcttctccggtggagaaaaggcgcgcctggtactggccctgatcgtctggcagcgccctaacctgctgctgctcgatgaaccgaccaaccaccttgacctcgatatgcgtcaggccttaaccgaagcgctgatcgactttgaaggggcgctggtggtcgtatcgcacgatcggcacctgatccgttccaccactgacgatctgtacctcgtccacgatggtaaagtcgagccgttcgacggcgatctggaagattatcagcagtggctcagcgactcgcaaaaacaggagtcccagagcggcgagccgccaaaagagagcggcaacagcgcccaggcgcgcaaagatcagaagcgtcgggaagcggagctgcgcagccagacccaaccgctgcgcaaagagatcgcccgtctggaaaaagagatggacaagctcaacgcgcagttggccagtgcggaagaaaaacttggcgacagtgagctttatgacgcctcacgtaaagccgagctgaccgaatgcctgcagcagcaggccagcgcgaagaccgggctggaggagtgcgagatggcctggctggaggcccaggagcagctggagcgcatgcttcaggaaggctaa

SEQ ID NO: 212794 - DNA, 1023 bp, Klebsiella pneumoniae
atggttgaaatcatccccacagacatgacgccccccgaaaacgattcgcgtgagttccatccgatgcgcggcgtgggcaatcgtcatctgcaaaccatgctgccgcggctgattcgccgtaaattgcgctttaccccgcactggcagcgccttgagctgccggacggcgattttgtcgatctggcctggagcgaagacccgcaccaggcgcgccataagccgcgcctcgtcgtttttcacggcctggaaggcagtctgcacagcccgtacgcccatggtctgatccacgcggcgatgcagcgcggctggctgggcgtggtgatgcatttccgcggctgcagcggcgaacctaaccgcaatcaccgcatctatcactccggcgaaacggaagatggcacctggtttttgcactggctgaagcgcgagtttggtcccgcgccgaccgcggccgtcggctattcgctgggcggcaatatgctgggctgcctgctggcagaggaaggcgaccgctgcccgctggatgcggcggtgatcgtctccgcgcctttcatgctcgaagcctgcagctatcatatggataagggcttctcgcgggtttatcagcgctatctgctcaatctgttaaaagccaacgcttcacgcaagctgaaagcgtacccgggctcgctgcccgtcgatttacgccagctcaaagggatgcgccgcatccgggaatttgacgatatgatcaccgccaaaatccatggctttgccgatgcgctggattattaccggcaatgcagcgccatgccgcggctcagcgatatcactaagccgacgctcatcattcacgcgaaagacgatccgtttatggatcaccactctattccgccgcaggagcaactgcccgcgaacgtagagtatcaattgaccgagcaaggcggccacgttggctttgtcagcggcactctgcgtaaaccggagatgtggctggaaagacgcattcccgactggttaaaccgctggctggaggttcccgcatga

SEQ ID NO: 212795 - DNA, 219 bp, Klebsiella pneumoniae; identical to SEQ ID NO: 138813

SEQ ID NO: 212796 - DNA, 870 bp, Klebsiella pneumoniae; identical to SEQ ID NO: 138812

SEQ ID NO: 212797 - DNA, 405 bp, Klebsiella pneumoniae
atgcaagcgcgtgtgaaatgggtagaagggttaacctttatcggggagtccgcatcgggacaccagattctgatggatggcaactccggggataaggctcccagcccgatggagatggtgctgatggcggcgggcggttgcagtgcgatcgatgtggtctccattctgcaaaaaggtcgtcacgacgtgaccaattgcgaagtgaagctgacctccgagcgtcgcgaagaggctccgcgtctgttcacgcatattaatctgcattttatcgtcaccggcaaggcgctgaaagatgccgcggtctcccgggcggtggacctgtcggcagagaaatactgctcggtggcgctgatgctggaaaaagcggtgaacatcacccactcctatgaagtgatcgaggcgtag

SEQ ID NO: 212798 - DNA, 633 bp, Klebsiella pneumoniae
atggtgcttggcaaaccgcaaacagaccctacccttgaatggttcttgtctcattgccacattcataagtacccatcaaagagcacgctgatccaccagggtgaaaaagcagaaacgctgtactacatcgttaaaggctccgtggctgtactcatcaaggatgaagaaggtaaagagatgatcctctcctacctcaaccagggcgatttcatcggtgaattaggcctgtttgaagagggtcaggaacgtagcgcctgggtacgggcgaaaaccgcatgtgaagtggccgaaatctcttataagaaattccgtcagctgatccaggtgaacccggacattctgatgcgtctctcttcgcaaatggctcgccgtctgcaggtcacgtctgagaaagtgggcaacctggccttcctcgacgtgacgggccgtatcgcccagacgctgctgaacctggcgaagcaaccggatgccatgacccacccggacggtatgcaaattaaaattacccgccaggaaattggtcagatcgtcggctgctctcgtgaaaccgttggtcgtattttgaaaatgctggaagatcagaacctgatttccgcgcacggtaaaaccatcgtcgtctacggcacccgttaa

SEQ ID NO: 212799 - DNA, 2079 bp, Klebsiella pneumoniae
atgtggcgcaggctgatttaccacccggaagtcaactatgcactgcggcaaacgctggtgctgtgtctgcccgtggccatcggtcttctgctcggccatctccagcaggggctgttattttccttagtccccgcctgctgcaacattgccggtcttgataccccgcataagcgctttttcaaacgcctgattatcggcggctgcctgtttgccggatgcagtctggtggtgcagttgctgcttgcccaggcgatacccctgccgtttattctcagcggcctggcgctcttgctcggcgttaccgcggagatcagttcgctgcacgcgcggctgctgcccgcgtcgctgatcgccgccatctttaccctgagcctggcgggcaatatgcccatctgggagccgctgctgatctacgccttcggcacgctgtggtacggcgtgtttaactggttctggttctggctgtggcgcgaacagccgctacgggagtcgcttagcctgctttaccgggagctggcggactactgtgaagccaaatacagcctgctgacccagcataccgatccctcgaccgccctgccgccgctgctcacccgccagcagaaagtggtcgatctgattactcagtgctatcagcagatgcatatgctggccgctaaccaacgcaacgatcataagcgcctgctgcgggcgtttcagatggggctggatctgcaggagcatatttcggtcagcctgcatcagccggaagaggtgcaaaagctggtggaacgcagccatgccgaagcggtgatccgctggaacgcgcagaccgtcgccgcccgcctgcgcgtgctggcggatgacatgctctatcatcgctttccaaagcgctttcagatggataaacagatcgaggctctggaaaagatcgccagacaacatccggataacccggtcggccacttctgcgcctggcacttcagccgcatcgcccgggtgctgcatacccagcgcccgctgtatgcccgggacctgatggccgacaaagagcgtcgtttaccgctatttcccgcgctaaagaactacctgtcgctaaaatctcccgcgctgcgcaatgccgcccgcatcagcgtgatgctgagcgtcgccagcctgatgggcaacgccctgcacttgcctaagccctactggatcctgatgacggtgcttttcgtcacccagaacggctatggcgccacccgggtgcgtattgttcaccgggcggcgggaacgctcgccggcctgacgatcgccgggcttaccttgcattttcacgttccggagagctacaccctgagcgggatgctgctgattaccctgctcagctatctgatcattcgcaaacactatggctgggcgatggtaggctttacggtgacggcggtgtataccctgcagctgctgacgctcaacggggaacagtttattatcgcccggctgatcgacacccttatcggctgcctgatcgccttcggcgggatggtctggctgtggccgcagtggcagagcggcctgctgaaaaaaaatgcccacgatgcgctggaggccgaccagcaggcgattcgcctgatcctcagcgccgatccaaaagcccccgcgctggcctatcaacgcatgcgcgtcaaccaggcgcacaacgcgctctacaactccctgaatcaggcgatgcaggaacccgggtttaatacccactatctggaagatatgaagctgtgggtgacgcacagccagtttatcgtcgaacacatcaacgctatgaccaccctggcccgggagcatacgatgctgaccccggatcttgcccagcgctatctcgaatcctgtgagattgcgctgcagcgctgccagcagcggctggacagcgatggtcccggcagcgcaggggatgccaatattatggagtcgccggaaagcgaggcgccgatcggtccgttaagcaccctggagcagcatctgcaacgcattctgggccatctgaataccatgcacaccatttcatcagtggcatggcgtcagcggccgcaccatggcatctggctgcggaagatcagccgttaa

SEQ ID NO: 212800 - DNA, 1221 bp, Klebsiella pneumoniae
atggcaactgaacaaccggcaatcacccgcgccacattcgatgaagttattttgccaatttatgcaccggcagaattcatcccggtgaaggggaaaggcagccgcgtctgggatcagcaggggaaagagtatatcgatttcgccggcggtatcgcggtgacggcgcttggccattgccatccggcgctggtggcggcgctgcatcagcagggcgaaacgctgtggcacaccagcaacgtctttaccaatgagccggcgctgcgtctgggacgtaaacttgtcgaggctaccttcgccgagcgcgtggtgtttatgaactccggcaccgaagccaatgaaacggcctttaagctggcgcgtcactatgcggtgacccgccatagcccgtataaaaccaaaatcatcgccttccataatgcctttcatggccgctccctgtttaccgtttccgtcggcggtcagccgaagtattccgatggtttcggcccaaaaccggcggatattgtccatgttcccttcaacgatctgcaggcggtaaaagcggtgatggatgaccacacctgcgcggtggtggtggagccgattcagggcgaaggcggcgtgacggcggccacgccggctttcctgcagggactgcgcgagctgtgcgatcagcaccaggcgctgctcgtctttgatgaagtacagtgtggtatggggcgtaccggatcgctgttcgcctatatgcactacggcgtgaccccggatattctgaccagcgccaaagcgctgggcggcggcttcccggtcagcgccatgctgaccacccacgagatcgccagcgccttccatgcgggctcccatggctcaacctacggcggcaacccgctggcctgcgcggtcgccaacgccgccttcgatctgatcaataccccggcggtgctggatggcgtgagcgcgaagcgcgaactgttcgtcaaacacctgcagcggctggatgccgagtttgatctgttcagtgatatacgcgggatgggcctgctgatcggcgcggaactcaagccgcagcacaaaggccgcgcgcgtgatttcctatatgccgcggccgacgccggcgtcatggtgctcaacgccgggccggacgtgatgcgttttgttccctcgctgatcatcgacgagcaggatattgccgaggggatggcgcgctttgctcaggccgtggcaaaggtgattaacggctga

SEQ ID NO: 212801 - DNA, 564 bp, Klebsiella pneumoniae
atgatcctgcttatcgataactatgactctttcacctggaatctgtatcagtacttctgcgaactgggggcggaagtactggtcaggcgcaacgatgcgttgacgctggaggagatagcggcgctggcgccggagaaaatcgtgatctcgccaggcccctgcacgccggatgaggcggggatttccctcgcggttatccgccactatgccggaaaaacgccgctgctgggcgtctgtctcgggcatcaggcgatcgcccaggcgtttggcgcgactatcgtgcgggcggcccaggtgatgcatggcaaaacctcgcttatcgagcataacggcgaaggggtgtttcaggggctgaataatcccctgacggtgacccgctatcactcgctggtgattgacccgccgacgctcccgtccgagtttaacgtcactgcccgcagcgccagcggtgagattatggggatccgtcaccgcgaatgggatctcgagggcgtgcagtttcatccggaaagcatcctcagcgagcagggccatcaattgctggccaactttttgaaacggtga

SEQ ID NO: 212802 - DNA, 603 bp, Klebsiella pneumoniae
atgagcgataaattcggcgatgaacgcgatccttatctctatccggcgctgaacgtgttgcgcaaccgtctcggcatccgccaggctaaaaatctgcagcaggccgcctttgagatgacagcgctgcgggcggccactctgccgctgggcccgcgggtacgcggcttaccctatctgtgcgctattcatcaccagttgtatcaggatctgtttgactgggcgggccgcttgcgtgaagtgaacctctacctgggcgatacgccattctgccactttgcccggatcgaggaggaggggaatgccctgatgcaggcccttgagcaggaggattatctcagtggcctgccgcgcgataccttcatcgaacgcctgagctggttctatggtgaaattaatgtgctgcacccttttcgtcttggcaatggcctgacccagcgtattttctttgaacagctggcgatacatgccggctaccttcttaactggcgtgacgttgaccccgccggctggagtgcggcctgccagcagagcgcgatgggcgatctggccccgctggtggcgatctttcgcaaagtggtaagcgaagcgcgggaatctgagtag

SEQ ID NO: 212803 - DNA, 168 bp, Klebsiella pneumoniae; identical to SEQ ID NO: 137352

SEQ ID NO: 212804 - DNA, 570 bp, Klebsiella pneumoniae
atgctcaaatcaacactggcggcgatggctgccgttttcgctatttcagcgttctccccggccatggcggcaaagggcgatccgcatgtgctgctgaccacttcggcaggtaacattgagcttgagttaaacagccagaaagccccgatttccgtggataacttcctgaagtacgtcaacagcggcttctacaacaacaccacctttcaccgcgtgatcccgggattcatggtgcagggcggcggctttaacgaacagatgcagcagaagcagcctaacccgccgatcaagaatgaagcagacaacggcctgcgcaacacccgcggcaccatcgcgatggcgcgtaccgccgatcaggatagcgccaccagtcagttcttcatcaacgtggcggataacgccttcctcgaccatggccagcgcgactttggctatgcggtattcggcaaagtggtgaaggggatggatgttgcggataagatctctcaggtccagacccataacgttggtccgtaccagaatgtgccgaccaaaccggtcgttatcctctctgcgaaagtgctgccctaa

SEQ ID NO: 212805 - DNA, 1188 bp, Klebsiella pneumoniae
atgactaacagcaaccgtattaagctcacatggatcagcttcttctcctacgccctgaccggcgcgttggtgatcgtcaccgggatggtgatgggtaacattgcggattatttccatctgcccgtttccagtatgagcaacacctttacctttctgaacgccggtattcttatctctatcttcctcaatgcctggctgatggaaatcgtgccgctgaaaactcagctgcgctttggctttattttgatggtgctggcggtggccggcctgatgctcagccacagcctggcgctgttctccgcgtcaatgttcgttcttggcctggtgagcgggatcaccatgtcgatcgggaccttcctgatcacccatatgtatgaaggccgtcagcgcggggcgcgtctgctgtttaccgactccttctttagcatggcgggcatgattttcccgatggtcgccgccgtcctgctggcgcgcagcatcgagtggtactgggtctacgcctgtattggtctggtgtatgtcgctattttcgtcctgactttcggctgtgatttcccggtgctgggcaaaaaagcccagagtgaaaacagccagccggtggtgaaagagaagtggggcattggcgtactgttcctctccgttgcggcgctgtgctacatcctcggtcagctgggctttatctcctgggtaccggaatatgcaaagagcctgggcatgagcctcggcgacgccggtaaactggtgagcgatttctggatgtcctacatgatcggcatgtggtcattcagcttcatcctgcgcttcttcgacctgcagcgtatcttaaccgtcctcgccgggctcgcgacggtgctgatgtacctgtttatcaatggttcgccggagcatatgccgtggtttattctgaccctgggcttcttctccagcgccatttacacctcgatcattacgctcggttcgcagcagacgcgggtcgcttcgccgaagctggtgaactttatcctcacctgcggcaccatcggcaccatgctcactttcgtggtcaccggcccgattgtggcggccagcggtcccctggccgcgctacacaccgctaacggcctctatgccgtggtattcgtaatgtgctttatcctcggcttcgtctcccgtcatcgccagaacaacgctcaggcggcgtctcactaa

SEQ ID NO: 212806 - DNA, 1323 bp, Klebsiella pneumoniae
atgacagcagcgccgctttggttgattcagaacgtacgcctggcagaccgcgacggcctgtggcaaatagccattgataagggccgctttggcgagatcacgccgatgggggaggcgcacgatgaaagctacgaggtattgaacgctcgcggcgggctagcgatcccgccttttatcgagccgcatatccatctggataccacccagacggccggcgagccgaactggaatcagtccggtactctgttcgaggggattgagcgctgggcggagcggaaagcgctgctcagccatgaggacgtcaaagcccgggcgtggaaaaccctgaagtggcagatcgccaatggcgtgcagtttgtccgcactcatgtcgatgtttccgatcccacgttaacggcgctgaaggcgatgctggaggtcaaacaggaggtggcgccatgggtcgagttacagattgtcgctttcccacaggaggggatcctctcttaccccaacggcgaggcgctgctggaggaggccctcaagctgggggcggacgtcgtcggggcgatcccgcattttgagttcacccgtgaatatggtgtggaatcgctgcatatcgccttccgtctggcgcagcaatatgaccgcccactggatattcactgcgatgaaattgacgatgagcagtcgcgctttgttgaaaccgttgccgcgctggcgctgaaagcggggatagggccgcgggtaacggccagccataccaccgctatgcactcctataatggcgcttatacctcgcgtctgttccgcttgcttaagctctccggcatcaactttgtcgccaatccgctggtgaatattcatctgcagggccggtttgacgactacccgaagcgacggggcattacccgggtgaaggagctgttggcggcggggatcaacgtttgctttggtcatgatgacgtctttgacccgtggtacccgctggggaccggcaatatgctgcaggtcctgcatatggggctccatgtttgccagctgatgggctaccagcagatcaacgacggcctgcagcttatcaccgacaacagcgcccgcacgtttggcctcgaggattacggcattgtcagcggcaacccggctaacctgatcattctcccggcggagaatggctttgaggccgtccgctgccaggtgccggtgcgctggtcaattcgccagggaagggtgatcgcgaccacccagccggcgcaaagctggatccaaactgaccgcggtggcgaggagctttcttttatgaggaacagcccccttgcggatgcaaaggggccgaaggcttag

SEQ ID NO: 212807 - DNA, 2544 bp, Klebsiella pneumoniae
atgagcaaagtcagaatcgctattatcggtaacggcatggttggccatcgctttatcgaagagcttctcgataaggcgcctgccggacagttcgacattaccgtgttctgtgaagaaccgcgtatcgcctacgaccgcgtccacctgtcgtcttatttctcccatcacactgcggaagaactgtcgctggtacgcgaaggtttctatgagaaacacggcgtcaaggtgctggtcggcgaacgggcgatcaccatcaaccgccaggagaaagtgatccactccagcgccgggcgtaccgtgttctacgacaagctgattatggcgaccggctcatacccgtggatcccgccgattaaaggcgcggaaacccaggattgcttcgtctatcgcactattgaagatcttaacgccatcgaatcctgcgctcgccgcagcaaacgcggcgcggtagtcggcggcggcctgctcggactggaagcggccggcgcgttgaaaaacctcggcgtggaaacccatgttatcgaattcgcgccgatgctgatggccgaacagctcgaccagatgggcggcgagcagttgcggcgcaaaatcgaaagcatgggcgtgaaagttcacaccagcaaaaacaccaaagagattgttcagcagggcaccgaggcgcgcaaaaccatgcacttcgccgacggtagcgagctgcaggtcgatttcatcgtcttctcaaccgggatccgcccgcgcgataagctggccacccagtgcgggctggcggtcgcccagcgcggcggcatcatggtcaacgatagctgccagacctccgatccggatatctatgccatcggggaatgcgccagctggaacaaccgcgtctacggtctggtcgcccccggctataaaatggcccaggtggccgtcgaccatctcctcggcagtgaaaatagcttcaccggcgccgacctcagcgccaagctgaagctgttgggtgtggacgtgggcgggatcggcgatgcccacggccgcacgccgggcgcccgtagctacgtctatctcgacgaaagcaaagaagtttataagcgcctgatcgtcagcgccgacaacaaaacgctgctcggcgcggtgctggtcggcgacaccagcgactacggcaatctgctgcagctggtgctcaacgccatcgagctgccggaaaacccggattcgctgatcctcccggcccacgccggcagcggcaagccatcgatcggcgtcgataaactgccggacagcgcgcagatctgctcctgctttgacgtcagcaaaggcgacctgatcgccgctatcaacaaaggctgccacaccgtggcggcgctgaaagcggaaaccaaagccgggaccggctgcgggggctgtattccgctggtcactcaggtgctcaacgccgagctggcgaaacagggcatcgaggtcaacaacaatctgtgcgaacacttcgcttactcccgtcaggagctgttccacctgatccgcgtggaaggcattaaaaccttcgacgaactgctggaaaaacacggtcagggctacggctgtgaagtctgtaagccgaccgtcggttccctactggcctcctgctggaatgagtacatcctcaagccgcagcacacgccgctgcaggacagcaacgacaacttcctcgccaacattcagaaagatggtacctattcggtgatcccgcgctcagctggcggcgaaatcacgccggaagggctggtcgccgtgggccgtatcgcccgtgaattcaatctgtacaccaaaatcaccggctctcagcgcatcggcctgtttggcgcgcagaaagacgacctgccggagatctggcggcagctgattgaagcgggattcgaaaccggccacgcctacgccaaagcgctgcgaatggcgaaaacctgcgtcggcagcacctggtgccgctacggcgttggcgacagcgtcggcttcggcgtggaactggaaaaccgctacaaaggcatccgcaccccgcacaaaatgaagttcggcgtctccggctgcacccgcgaatgtgccgaggctcagggcaaagacgtcgggatcatcgccaccgagaaaggctggaacctgtacgtgtgcggtaatggcgggatgaagccgcgtcacgccgatctactggccgcggacctcgatcgcgatacgctcatcaaatatctcgaccgctttatgatgttctacatccgcaccgccgataagctgacccgcactgccccgtggctggacaatatggaaggcggtatcgactatctgcgcagcgtcatcatcgatgacaagctcggtctgaacgaccatctggaagaagagctggctcgcctgcgcgccgccttcgcctgcgagtggaccgagaccgtcaacaatccggcggcgcagacccgcttcaaacactttatcaacagcgaccagcgcgacccgaacgttcaggtggtgccggaacgtgaccagcaccgcccggccacgccgtatgagcgtatcccggttactctggtggaggaaaaagcatga

SEQ ID NO: 212808 - DNA, 327 bp, Klebsiella pneumoniae
atgagccagtgggtaaatatctgcagcatcgacgacatcctgccggccaccggcgtctgcgccctgctcggtcagcagcaggtggcgatcttccgtccctaccatgacgacagagtattcgccatcagcaacattgatccgttcttcaacgccagcgtactgtctcgcgggattatcgccgagcatgacggcgcgctatgggtcgccagcccgctgaaaaaacagcgcttccgcctgagcgacggcctgtgcatggaagatgccagccactctatcgcccgcttcgacgcccgcgtgaaagacggacacgttcagcttaaagcgtaa

SEQ ID NO: 212809 - DNA, 1374 bp, Klebsiella pneumoniae
gtggatcacttacccatattctgccagttgcgccagcgcgattgtttactggttggcggcggggatgtcgccgaacgcaaagcccgtctgctgctggatgctggcgctaacgtcacggtcaatgcgctcgacttcacgccccagtttcaggtgtgggctgattcacagatgctaactctggtgcagggggagtttatcccctcgctgctggataactgctggctggccatcgcggctactgatgatgagacggtcaaccagcaggttagcgaggcggccgaagcgcggcgtatcttctgtaacgtggtggatgccccgcgccaggccagctttatcatgccgtcgataatcgatcgctcgccgctgatggtcgccgtctcctcgggcgggacatcaccggttctggcgcgcctgctgcgcgagaaactggagtcaattctgcccctgcatctcggccagctggcccgctatgccggccatctgcgcgcgcgggttaagcagcagtttgccaccgtaggcgagcgtcgccgcttctgggagaagctgtttgttaacgaccgtctggcgcagtcgctggctaatgacgatcggcaggcagtcgcggataccactgagcagttactgacggagccgttggagcatcgcggcgaggtggtgctggttggcgccggccccggtgacgccgggctgctcacgctcaaaggcctgcagcagatccagcaggctgacgtggtggtctatgatcggctggtctccgatgacatcatgaatctggtgcgccgcgatgccgatcgggtattcgtcggcaagcgctcaggctaccactgcgtcccgcaggaggagatcaaccagatcctgctgcgcgaagcgcaaaaaggaagacgcgtggtccggctgaaaggcggcgatccctttatctttggccgcgggggggaagagctggagacgctttgcgaggcgggcatccccttctccgttgtgcctggcattaccgccgcctccggctgctccgcttattcggggatcccgttaacacatcgcgatttcgcccagggcgtccgcctggtcaccggccacctgaaaaccggcggcgagctggactgggcgaacctggcggtggagaagcaaaccctggtgttctacatgggtctgaaccaggcgccggcgatccgcgagaagcttatcgctcacggcatggctgaagatatgcccgccgccatcgtcgagaacggcaccgctgtgacgcaaaaagtggtcagcggcaccttaggacaactggatattctggcgcagcagatggccagcccggcgctgatcatcgtcggccgcgtggtcggtctgcgggataaactgaactggttttcgaaccattaa

SEQ ID NO: 212810 - DNA, 1005 bp, Klebsiella pneumoniae
atgactaagcccatcgtttttagtggcgcacagccctcaggtgaactgaccattggcaactatatgggtgcgctgcgtcagtgggtaaacatgcaggacgattaccactgcatctattgcatcgtggaccagcacgccatcaccgtgcgccaggatccgcagcagctgcgcaaggcgacgctggacaccctggcgctgtatctggcctgcggcatcgacccgcagaaaagcactatcttcgtgcagtcgcacgtgccggaacatgcccagctaggctgggcgctgaactgctacacctatttcggcgaactgagccgcatgactcagtttaaagacaagtcagcgcgctacgcggagaacatcaacgccggtctgtttgattatccggtactgatggccgctgacattctgctgtaccagaccaaccaggttccggtgggcgaagatcagaaacagcaccttgagctaagccgcgatatcgcccagcgttttaacgccatctacggcgatatttttaaagtgcctgagccgtttatccctaaatccggcgcgcgcgtgatgtcgctgctggagccgacgaaaaagatgtccaagtccgacgacaaccgcaacaacgtcatcggcctgctggaagatccgaaatcggtggtcaagaagattaaacgtgcggtcaccgactccgacgagccgccggtagtgcgttacgatctgaaagagaaagcgggcgtctccaacctgctggatatcctctccgcggttaccgggaaaactattcctgagctggaacagcattttgaaggcaaaatgtatggccacctgaaaggcgaagtcgccgaagcggtatcgggcatgctgattgacctgcaggagcgctatcaccgtttccgtaacgacgaagcgtttctcaatcaggtgatgaaagacggcgcggaaaaggccagcgcgcgggcttctcaaaccctgaaagcggtatacgaagcgattggctttgtcgccaagccgtaa

SEQ ID NO: 212811 - DNA, 762 bp, Klebsiella pneumoniae
atggataaattacaggcgatccgcggcatcgcatttgatctcgacggcacgctggtggacagcgcgccgggtctaacctcggcggttgataacgccctgtacgccctggagctgccggtggcgggagaagaacgcgttatcacctggatcggtaacggcgccgatgtcctgatggagcgggcgctgacctgggctcgtcaggagcgagcaacgttacgtgcggcgatgggtaagccttccgtcgacgatcatgatattccgcaagacgagcagctgcgcattttgcgtaaactgtttgaccgctattacgccgaagcggcggaagagggcagtttcctgttcccggcggtggccgatacgctcggcgcgctgtatgccaaaggcctgccgctggcgctggttaccaataagccgacgccgtttgtcgccccgctgttggacgcgctcgatattgcgaaatattttaccgtggtgattggcggcgatgacgtgcagaataaaaagccgcatccggaaccgctgctgctggtggcggaaaagctctctctggctccagccgagctgctgtttgtcggcgattcgcgcaatgatattcaggcggccaaagcggcaggctgctgctctgttggtctgacctacggttataactatggtgaaccgcttgcgctgagcgagccggactatctcttcgaccagtttaacgaactcttacccgctctcgggttaccgcacagtgaaactcaggaattgaaacatgactaa

SEQ ID NO: 212812 - DNA, 678 bp, Klebsiella pneumoniae; identical to SEQ ID NO: 137361

SEQ ID NO: 212813 - DNA, 828 bp, Klebsiella pneumoniae
atgaaaaagaatcgcgcttttctgaagtgggcagggggaaagttccccctgcttgacgatattaaaaagcatttgccggaaggcgagtgcttgatcgagccctttgtgggcgccgggtcggtatttcttaataccgacttttctcgttatatcctcgcggatatcaacagtgacttaatcggcctgtacaacatcgtcaaactgcgcaccgacgaatacgtcgccgccgcccgtgagatgtttaccccggaaaataacgtcgctgagcgctactacctgtatcgtgatgaatttaaccaaagccaggatccgctgcgtcgcgcggtgctgttcctgtatttgaaccgtcacggctacaatggcctgtgccgctacaatctgcgcggcgagttcaatgtgccgtttggccgttataaaaagccctatttccccgaagctgagctctatcatttcgccgagaaggcgcaaaacgccgagttttactgcgaatcttacgaagagtgcatgcaacgtgcggatagccgcacagtggtgtattgcgatccgccctatgcgccgctaacggcgacggcgaactttaccgcctaccacaccaacagtttcaacctggaacaacaggtactgctggcgcaaaaggcggaatcgctgatgaaaaagcgcatcccggtgctgatttccaaccaccgcacgccgctgacgcaggaatggtataaaaacgcggcagaaacgcatattgtgaaggtgcggcgcagcatcagcagcaacggtggtacgcgtaaaaaggtggacgagctattagcgctctaccgtccgcctaagaccaaataa

SEQ ID NO: 212814 - DNA, 1260 bp, Klebsiella pneumoniae
atgaaagccgatcgcaacgatcgtcgtgctggtcgttcccgtcagtcttccgagcgtgatgccgatccgcagatcaattttgacgatgttgatcttgatgccgatgaaggccgtccgacgcgcgctggtaaggcccgtcgcgagcgtgaagaggaagagttcgaagaagaactggatgcgcaagacgaggagatgctcgaagagcagcctgtagagcgtcgtccgcgcaagcgtaaaaaagcgccggccaaaccggcctcccgccagtacatcatgatgggtgtggggattctggtgctgctgctgttgatcgtgggtatcggttccgcactgaaatcgccatcatcttccagccagcagaccgcttccggcgagaagagcattaatctgtctgacgaccagtccgccagcatgcctgctgcgggccaggaccagactgccgccgctaacagcacctcacagcaggacgtaacggtaccgcctattgccgcgaacccgacgcagggccaggcagcggctgcgccgcagggccagcagcgtatcgaagttcagggcgatctgaacaatgcgttgacccagcagcagggccaactggacggcgccgtggctaactcgacgctgccgactgaaccggctaccgtcgcgccaatccggaatggcgccaatggcaccgcggcgccgcgccaggcgaccgagcgtcagacagcagcgaccccgcgtccggctgaacgtaagcataccgttatcgaagcgaagccgcagtcgaagccacaggccgtggcgaaaacgccggtagaatcgaagccggtccagccgaagcatgttgaaagcacggcgaccaccgctccggcgaaaacgtccgtcagcgaaagcaaaccggtggccaccgctcagagcaaaccgaccacgacgaccgcagcgccagcggcaacggcagctgcggcagcgccggcagcgaagagcgggaagacggcaggtgacgtcagctcaatgaaaactgcgccgtcgggtcactatactctgcagctcagcagctcctctaactacgacaacctcaacaactgggcgaagaaagagaagctggataaatatgttgtctatgaaacgtcgcgtaacggccaaccatggtacgtgctggtgagcggtatctatgcatcgaaagatgaagcgaaacgtgctgtcacctcgctgccggcggacgtgcaggcgaaaaatccatgggcaaaaccgctgcatcaggttcaggctgacctgaaataa

SEQ ID NO: 212815 - DNA, 1095 bp, Klebsiella pneumoniae
atggagaggcttactgttaccctcggggaacgtagttacccgattaccatcgcggctggtttgtttaacgatccagcttccttcctgccactcaagtcgggcgaccaggctatgctggtcaccaacgaaacgctggcgccgctttatctggataccgtccgctctgcgctggagcagtcaggggtcaacgttgacagcgtcattctgccagacggcgagcaatacaaaagcctggcggtgatggataccgtgtttactgcgctgttgcaaaaaccacatggccgcgacaccactctggtggcgcttggcgggggggtgatcggtgatttaaccggtttcgccgcggcaagctatcagcgcggcgtgcgtttcatccaggtccctaccaccctgttgtcgcaggtcgactcgtcggtcggcggcaaaaccgcagtgaaccaccctctcggcaaaaacatgattggcgccttctggcagccggtttccgtggtagttgatcttaactgtctgaaaactctgccgaagcgcgagctcgcttccggactggctgaggtcatcaagtacggggtgatcctggatggtgaattcttcagctggctggaaaacaacattgatgcgctgctggcgctggacgataccgccatggcgtactgcattcgccgctgctgtgaactgaaagcggaggttgtggcagccgacgagcgtgaaaccgggttacgtgctttactcaatcttggacataccttcggccatgctatcgaagcggaaatgggctacggtaactggctgcatggcgaagcggtggcggcaggtatggtgatggcggcacgcacgtccgaacggctggggcagttccgcgcgcaggatactcagcgcattatcgatctgctcaagcgtgcaggcttaccggtacgcggcccgcaggaaatgagtgcgcaggcgtatttgccccatatgatgcgcgataaaaaggtactggctggcgaaatgcggctggtgctcccgctcgcaataggaagcagcgagctgcgcggcggagtgccgcacgatgtggttcttggcgcgattgctgatactcagcaggcgcaacaataa

SEQ ID NO: 212816 - DNA, 522 bp, Klebsiella pneumoniae
atggcagagaaacgcaatatctttctggttgggcctatgggtgccggcaaaagcactattgggcgccagttagcccaacagctcaacatggaattttacgattctgatcaagagattgagaaacgcactggcgctgatgtgggctgggtcttcgatgttgaaggcgaagaaggcttccgcgaccgtgaagagaaaattatcaatgagttgacggaaaaacaggggattgtgctggcgactggcggcggctctgtaaaatcccgtgaaacgcgtaaccgtctctccgcccgcggcgtggtggtctacctggaaactacgatcgagaagcagttggcccgtacgcagcgcgataaaaagcgtcctttgctacaagtcgatgcgccgcctcgtgaagtgctggaagcgctggctgacgagcgtaacccgctgtatgaagagatcgccgatgtgactatccgcacagacgatcagagtgcgaaagtcgtcgcgaaccagattattcatatgctggaaagcaactga

SEQ ID NO: 212817 - DNA, 1245 bp, Klebsiella pneumoniae
atgatgcgatggataagcctgctgcttctgctgctgccgctggcggtggcccccgccgcccgcaatgataaaccggtttcgctggtgattgacgatgcgccagtggcccaggtgctgcaagccctggccgaaatgaaccataaaaacctcgtcgtcgcgccggacgtcagcggcacgctctccctgcgtctgcagaaggttccctggagccaggcgctgcgggcggtagcggatagcgcgggtctctctttgcaacagcaggggacggtcatctacgcgcacactcaggcctggcaaaaggcaaatcaggcgcagcgtgaagccgaacaggagaaacgcctgcagaacctgcccctgcaggcggagagcgtgaccctgcactttgccgacgctgaggagctggctaaaagcggcggaaagctgctcagcgccaggggacacctgatggcggacaagcggactaatcggctgctgatccgcgatgatgcccggcacctgccggcgttgaaggcctgggcgcaggagatggatctgccggtcggccaggtggagctggccgcccatatcgtgtcgatgagcgaaaccagccttcgtgagctgggggtgaagtggcggcttgcggaagccggaagcccgccaggctccgggcaaatcaccaccctaagcagcgatgtatcggtaaacgatgccagcacccgcgcagggtttaacatcggcaagatcaacggtcgcttgcttgagctggagctatccgcgctggagcgcaagcagcaggtcgaaattattgccagcccgcgtttattggcctcccacatgcagcctgccagcatcaagcagggaagcgagatcccctatcaggtttccagtggcgaaagcggcgccacttcggtggagttcaaagaggcggtgctgggcatggaggtcacgccgacggtgctgcagcagggaagagtgcggcttaagctgcgaataagcgagaatacgccaggccaggtgctgaagcaggaaaacggcgaagcgctggccatcgataagcaggagatagagaccctggtggaagttcgcagcggcgagactttagcgttgggcggcatcttttcgcagaaaaacaaaaccgcccgcgacagcgtcccgctgcttggcgatatcccggtactgggacgtctgtttcgtcgtgacgggaaagataatgaacgtcgcgaactggttgtctttattacgccacggattctggcagtacgttaa

SEQ ID NO: 212818 - DNA, 429 bp, Klebsiella pneumoniae
atgcggattaaccttcggggcgcctggacggggctgccgatcctgctcgcaatggggctgtcgggaggcggcgtggcgctctggcgcgatctgcgccctccgcaggcggcggtaacccgtgatgcggcgttgcaaacgcagtggcggcggatcatggcgctgcgcatccccggcgaggaaaatcccggggcgcgcatcgacacgcagtcattttcgcccatagccattccgctctccggagcgaagcttatcgcctggcgtccgcagggaagcggcggcgagatggagctgaccctgtcctggtcaacggtacccgcgcttttttcctggctggcgcgctgcgggatgaatccgcgttcgttttcgctgggccgtgaggcgcagacgctccgcctgcgactgctgctggaggcggaagatgagcggtaa

SEQ ID NO: 212819 - DNA, 534 bp, Klebsiella pneumoniae
atgacgcatgtcgttaatcttcttccctggcgcgacctgcgtcgccgccagcgcctgcgctacgtcctgttgttaaccatcggcattgtgctgctgggcgggatgggcctgctggtgagccgaacggcgcgtctgcagcgcgacttcctggcgacgcttcacacgacggccgacgcgcagctgctcgcttcgcttaagcagcgcgagcaggcgatgcgtgaggcgtggcagcagcatcaacggcagcgccagcagtaccagcgcagatcggcgatcgccgcctggcaacccaggctgcaggtgctggcggcagatctgcccgcgcaggcgtggctgacgcggctggagtaccagggcgtactcctcacgctggacggcctggcccttaacctgcaggcgctaaccagcgtggaggctgcgctgactcgcgtcgcgggattcgcgccggcaaaagccggcgggacccagcgcgacgccgaggggcgttggcagttcagttttaccctgacgggagcgcgcgctgatgcggattaa

SEQ ID NO: 212820 - DNA, 801 bp, Klebsiella pneumoniae
atggctttcagaaactggcggcttggaatgcatatccaacaggatagcattgccattgtcgcgctattgcatgaacgttcacactgggcgctgcgccgctggtggcgtatcccattgccgccggggctggtacgtcagggaatggtggcggacgtcagcgcactcggttcgcggctggccgcctggcggcgggagctaccggcgcagcatcaggttagtatcgcctttcccgcggtgcgcacactgcaaaagcgtcttccgtatccccagttcgccttgcgggagcgggaacaggcgacgtgggtagccagcgccatgagccagcagctggcaatgcctgcctccgcgctatgtattgattatgcgcccacctcgcgggatgacggctggcaggttacggcggcgcagcggctggatatcaatgttctgcgggagctggcagggcggctgcggctgcgggtggcggccatcgtaccggatgccagtgcgctcggcgcctttttcccctggatgactgcggcagaccagggcctggcgtggcgggatgaaaagcactggctgtgggcgacccgtgaggcctggggcagtgacgcctgcgctgatgtcgggtccttaagccagctggcggggcagcttcaggttccgctgcgcctgtgtattgacgcgggcgatgaggccagtcgctttgatgtctggcaagtgattcaccgtcggcagcccccgctgccagccgatggcgatcgttacgccattgcccttgggctggcgctgggaggcgggcggaatgacgcatgtcgttaa

SEQ ID NO: 212821 - DNA, 2559 bp, Klebsiella pneumoniae
gtgaagttcgtaaagtatctattgatccttgcagtctgttgcgtactgctgggagcaggctcgatttttggcctctacaaatacatagagccgcaactccccgacgtcgcaaccctgaaggatgtgcgtttgcagatcccgatgcaggtctatagcgccgacggtgagcttattgcgcagtacggcgaaaagcgccgtatccctgtgacgttgcagcaaattccccccgagctggtgaaagcgtttatcgccaccgaagacagccgcttctatgagcaccacggcgtcgatccggtaggtattttccgcgccgccagcgtggcgatgttttcaggccacgcctcccagggcgccagcaccatcacccagcagttagcgcgtaacttctttctcagccccgagaagacgttgatgcgtaagattaaagaggcctttctggccatccgcatcgagcagttgctgaataaagatgaaatccttgagctgtatctgaacaagatctacctcggctaccgcgcctatggcgtcggcgccgcggcgcaggtctattttggcaaacctatcgaccagctgaccctgagtgagatggcggtgattgccggtctgccgaaagcgccttccacttttaacccgctctattcgatggatcgcgcgaccgcccgtcgcaacgtggtgctgtcgcgtatgctgagcgaaggatacatcacccaggcgcaatacgatgaggcgcgcagcgaacccatcgacgccagctatcacgcgccgaaaatcgccttctccgccccttacctgagtgaaatggtgcgccaggagatggtgaatcgctacggtgagcaggcctacgaagacggttatcgggtctacaccaccattacccgtaaaaaccagcaggcggcccagcaggcggtacgcaataacgtgctggattacgatatgcgtcacggctaccgcggcccggccagcgtactgtggaaagtcggtgaaacgccgtgggagacgaagaagatcgtcgattcgctgaagcgtcagtctggctacggtccgcttttcccggcggtggtcacctccgcgaatgcccaggaggctgtcgcgctgttggctaacggcaactccgtttcgctgacgatggagggcgtgcgctgggcccgtcgctttatctctgatacgcagcaaggggcgaccccgcgtaaagtcaacgacgttgtgcaggccgggcagcagatctgggtacgcaaggtgggtgacagctggtggctgtcccagctcccggacgtcaactcagcgctggtctccattaacccgcaaaacggcgcgattattgcccttgtcggcgggtttgactttaaccagagcaaattcaaccgcgccacccaggcgctgcgccaggtcggctccaacattaaaccgttcctctataccgccgcgatggataaaggcttaacgctggcaagtatgctcaacgatgtgccgatctcgcgctgggatgcgggcgcaggttccgactggcggccgaagaactcgccgccgcagtatgccggtccgattcgtttacgccagggcctggggcagtcgaaaaacgtggtgatggtgcgcgctatgcgcgccatgggcgtagactacgccgccgagtacctgcagcgctttggcttcccggcgcagaacattgtccacacggaatcgttggcgctgggctcagcctcctttacgcccctgcaggtcgctcgcggttattcggtgatggccaacggcggcttcctggtcaatcctttctttatcagtaagattgagaacgatcagggcggggtcctcttcgaggagcgtccgaaaattgcctgtccgcagtgtgatttaccggtaatttacggcgatacgccaaaatccaacgtgctggaaaacaaggatgtggaagatgtcgccacctccgcggaaccgcagaatggcaacgtgccgccgcagccgcagctggagcaggccaaccagtcgctggtcgcgcagagcggcgcacaggaatacgcgccgcatgtgattaacacaccgctggccttcctgatcaagagcgcgctgaacagcaacatctttggcgagccgggctggatgggcaccggctggcgcgccggacgcgatctgcagcggcatgacatcggtgggaaaaccgggaccaccaacagctcgaaggacgcctggttctcaggctacggaccgggcgtggtgacctcggtttggatcggctttgacgatcatcgtcgcgatcttggccggaccaccgcctccggagcgattaaagatcagatctctggctatgaaggcggtgccaaaagcgcccagccggcctgggacagctttatgaagagcgtgctggaaggcgttccggaagaaccgttaactccgccgccgggtatcgtcacggtgaatatcgaccgcagcaccggtcagttggcgaatgggggcaatagccgggcggagtactttattgaaggaacccagcccacccagcaggcagtccgtgaggtgggcaccaccctgactgacggcggcggtgaaacccacgaattgttctga

SEQ ID NO: 212822 - DNA, 561 bp, Klebsiella pneumoniae
atgagcaaatcattacaaaaacccaccattctcaatgttgaaactgtcgcccgttcgcgcctctttaatgtcgaaagcgtcgatctggagttcagcaacggtgtgcgtcgcgtttatgaacgtatgcggccttccacccgtgaagcggtgatgattgtgccgattgtggatgatcacattattttgattcgtgagtatgccgtggggacggagtcctacgagctgggcttctccaaagggctgattgatccaggtgaaaccgtggatgaagcggccaatcgcgagctgaaagaagaggttggctatggcgccaataagctgacgtttttgaagaagctcagtatggccccctcctacttctccagcaaaatgaatatcatggtggcggaagatctctatccggagtcactgccgggcgatgaacctgagccgctaccgcaggtgcgctggccgctggcgcagctgatgtcgctgctggatgaagaagattttaatgaggcccgtaacgtcagcgcgctgtttttagtgcgggaatggctgcaggcccagggccgactctga

SEQ ID NO: 212823 - DNA, 2130 bp, Klebsiella pneumoniae
atgggcacctttctgatattccttacagctctgctaatctgcgtattgctcatcggatggtggtatcgcgctcacgccagacgccgccgactccccctactgctcgcctttagcgacgctaccacgcggcagcttcctgcggatgagcgccaggctattgagaagtatgttgccgagttgagccacgcccagcaggtgccggcgtccggtgcgaccagcgcgcctgtcgctctggcgctgaacgaacagagtgataccgtctatgcggtgacacgcgccatcacccgctacgggatcaccaccgacgcgccgaataaatggcgctatttcctcgattcggttgaagttcatctgccgccgttctgggaacagcatatcaacgatgaaaacagcgtcgagctgatccccaccgacagcctgccgctggttatcacccttaacggtcatagcctgagcgactatcgccaggaagcgcaaagctacgccctggaacgcgcttcggccacccaggcctccattcgcggcgaagagagcgagcaggtagagttgcggcagatccgtcgggaaacgcctgaagaacacgctctgaatcgcccggacgggctgcgcgaagcgatcctgatcgtcgcctcctttctgttcttttatttcagcctgattgggccagctgtctttaccccctggctggtcgccgcaggtttgttgctgctcgccgccggactgtgggggatttatgccccgccgcgtcgcgccgcgctgcgcgaaatccattgcctgcggggcgtccctaagcgctggggattgtttggcgaaaacgatcaggagcaaatcaataacatctcgctgggcattatcgatctcatctatcctcgccactggcaaccctggattgcccaggacctggggcagcagaccgatattgatatctatctcaaccgccacgtggcccgtcagggacgctacctgtcgcttcatgatgaagtgaaaaacttcccgctgcagtactggctacgcagcgcgattatcgccgccggcgccctggtggtggtgattatgctgtgggccagcgtaccgttgaatatgccgtttaagttcaccctgtcgtggctgaagggcgcgcaaacgattgaagccactaccgtcagccagctggaaaaagcccatgtgcgcattggcgatacgctgcgcctgaccggtaccgggatgtgtaacatccgcacgccgggcagttggtccgccaaagaggattcgccgttcctgcctttcgattgttcacagattgtgtggaacgacgcccctcctctgccgctgccggagtctgacattgtcagcaaagcgaccgccctgatgcagtccgtccagcgccagctgcacccggaaaccgacgatgattcccgcgtcagccctgccctacgctccgccattcagaaatcaggcatggtgctactggatgatttcggcgatatcgtgcagaaaactaacgatctctgctcggcaaaggatgattgcctgcggctgaagaatgcgttggtcaatcttggcaatacccgtaactgggaaacgttaaccaagcgcgccaccgccggcaagctggatggcgtgaacgtgctgctgcggccggtcagcgccgagtcgctggagaatctggtgaccacctcaaccgcgccctttgtgatacgcgaaacctcgcgggccgcgcaggcgctgaacagcccggctcccggcggttttcttatcgccagcgatgagggcagcgtactggtcaatcagccgtggccggcggtgagtctgtatgattatccggcccatgagcagtggggcgaactgcggcggctggccggtatgctcatgcatacccccttccatgccgaaggtatcgttaccaacctgtttactgacgccaacggcacgcagcatatcaacctgcatcgcatccccgaccgcagcggcctgtggcgttatctgggcatcaccctgctgctgctgtcaatggtggggtgcatggcttaccacgccgtgcaggccctgcgtcgttatcaacgccatcgtcagcgtatggaagagattcagaaatattacgaaagctgccttaatccggttttgctcccctcatctgactcgcaagattaa

SEQ ID NO: 212824 - DNA, 684 bp, Klebsiella pneumoniae
atgcactttgatatcgcctggcaggaggtcgataccgttctgctggatatggacggcacgctcctggacctcgccttcgacaactacttctggcaaacgctggtgcctgaaacctggggggccgcccgcggcctcaatttgcaggaggcgaaagaggccatgcgccaggagtatcacgccgtgcagcatacgctaaactggtactgtctggattactggagcgagcgcctgggtttggatatttgtgcgatgaccagcgaacaaggtccgcgcgccacgctgcgcgaggataccgtgccgttccttgatgcgctcaaggcctgcggtaagcgacgcattctgttgaccaatgcccatccccacaatctggcggtgaagctcaaacacaccggcctggacgcgcaccttgatttattactttccacccacacatttggttatccgaaagaggatcagcgtctgtggcgcgccgtggcggaggaaactggccttgaggcgcacaaaacgctgtttgtcgacgacagcgaggcgatactggatgccgcgagggagtttggcattcgttactgcctgggtattaccaatcctgactccggactggcggaaaagcagtatctgcgccatccggggctgaatgattaccgacgactgatcccttcgcttaccccgaaggagaggcgatga

SEQ ID NO: 212825 - DNA, 402 bp, Klebsiella pneumoniae; identical to SEQ ID NO: 137689

SEQ ID NO: 212826 - DNA, 879 bp, Klebsiella pneumoniae
atgactcaacacgatcaattacatcgttatctgtttgaaaactatgccgtgcgcggcgagctggtgacggtgtcggaaaccctggaacagattctggcgaatcacacctatccccaaccggtcaaaacggtgctggcggagctgttggtcgccaccagtctgctgaccgcgacgctgaagtttgccggcgacattaccgtgcagctgcagggggatggccctttacagctggcggtgatcaacggcaataaccagcagcagctgcgcggcgtcgcgcgcgtgcagggcgagattgcggacgatgcggatctgaaaacgatggtcggcaacggctacctggtcattaccatctctccggaagaaggtgagcgctatcagggcgtggtcggtctggaaggcgatacgctggccgcctgcctggaagattatttccagcgttcagagcagctgccgacgcgccttatcatccgcaccggcgatcatgaaggccagccgatggcgggcgggatgctgctgcaggtgatgccggcgcaggatgcccagactgccgacttcgagcacctggcgacgcttaccgagaccattaaggcggaagagctgttcaccctgccggcaaatgatgtgctgtggcgtctgtaccatgaagaagaagtcacggtctacgacccgcagagcgtggagttcaagtgcacctgctcccgcgaacgctgcgccggcgcgctgaagacgctgccggatgaagagattgatagcatcctcgccgacgaaggcgaaattgatatgcactgcgactactgcggtaaccactatatcttcaatgccatggatattgccgagatccgtaataacgcctctccggccgatccgcaggttcattaa

SEQ ID NO: 212827 - DNA, 1623 bp, Klebsiella pneumoniae
atgcgcgttaatcatggtttaaccccgcaggatctcaaggcttatggtatcaatgacgtccaggatatcgtccacaaccccagctacgacatgttgtttcaggaagagctcgacccgaacctggaaggctacgaacgtggcgtattaaccactctgggtgctatcgccgtcgacacgggcatttttaccggtcgttctccgaaagataagtatctcgtgcgcgacgacaccacccgcgacaccgtctggtggtccgataaaggcaaaggtaaaaacgacaacaagccgctttcgcaggaaacctggcagcatctgaaagggctggtgacccagcaactgtccggtaaacgcctgtttatcgtcgacgctttctgcggcgccaacgccgatacccgtctcagcgtacgtttcattaccgaagtggcctggcaggcgcacttcgttaaaaacatgttcatccgtccgagcgatgaagagctggctgaattcgagcccgacttcatcgtgatgaacggcgcgaaatgcactaatccgcagtggaaagagcagggcctcaattcggaaaacttcgtcgccttcaacctcaccgagcgcattcagttgatcggcggcacctggtacggcggcgagatgaagaaagggatgttctcgatcatgaactacctgctgccgctgaagggcatcgcctccatgcactgctcagccaacgtcggcgagaaaggcgatgtcgccattttcttcggcctctcaggcaccggcaaaaccaccctctccaccgacccgaaacgccgcctgattggcgatgacgaacatggctgggatgacgacggcgtgtttaacttcgaagggggctgctacgccaagaccatcaagctctctgaagcggccgagccagatatctatcacgccatccgccgcaacgccctgctggaaaacgtggtggtacgcgccgacggcacggtcgatttcgatgacggttcaaagaccgaaaatacccgcgtctcctaccccatcgaccacatcgacaacattgttaagccggtgtctaaagcgggtcacgctaccaaagtgatcttcctgacggccgatgcgttcggcgtcctgccgccggtctcccgcctgaccgccgaccagacgcagtaccatttcctgtccgggtttaccgccaaactggccggcaccgagcgcggcgtaaccgaacccacgccaaccttctccgcctgcttcggcgccgccttcctgtcgctgcacccgacgcagtacgccgaagtgctggtcaaacgcatgcaggcggctggcgcgcaggcttatctggtcaataccggctggaacggcaccggcaagcgcatctcgattaaagatacccgcgcgatcatcgacgccatcctcaatggctcgctggacaacgcggagacctttaccctgccgatgtttaacctgcagatcccgacggcgctcccgggcgtggatacccacatcctcgatccgcgcagcacctatggttccccggagcagtggcaggaaaaagccgaccagctggcgaagctgtttattgagaattttgagaagtataccgatacgccagcgggcgccgcgctggtggcggcaggaccgcagcgctaa

SEQ ID NO: 212828 - DNA, 1356 bp, Klebsiella pneumoniae
atgaaacgcgtgcgcttttcgccgcgcagctcctttgctcgcacactgctcctgatcgtcaccttgctgttcgtcagcctggtgacgacctatctggtggtactgaatttcgcgatcctgccgagtctccagcagtttaataaagtgttagcctacgaagtgcgtatgctgatgaccgacaaactgcagctggaggatggcacccagctggtggtgcccccggcgtttcgtcgtgaaatttatcgcgagctggggatttcgctctattccaatgaagcggcggaagacgcaggcctgcgctgggcgcagcattatgaattcttaagtcagcagatggcccatcagcttggtggccccacagaggtgcgggtagaggtcaataaaagctcccctgtggtgtggctgaagacctggctgtcgcccaatatctgggtgcgggtgccgctgaccgagatccatcagggcgacttctcgccgctgttccgctataccctggcgatcatgctgctggcgataggcggcgcctggctgtttattcgtattcagaaccgcccgttggtggatctggagcacgcggcgctgcaggtcgggcgcggcattattccgccgccgctgcgcgagtatggcgcctccgaagtgcgttcggtgacgcgagcctttaaccatatggcggcgggcgtgaagcagttggctgatgaccgtacgctgctgatggccggggtcagtcatgatttacgaaccccgctgacccgcattcgtctggccaccgagatgatgggcgagcaggacggctatctcgcggagtcgatcaacaaagatatcgaagagtgcaacgccatcatcgagcagtttatcgactatctgcgcaccgggcaggagatgccgatggagctggcggatctgaatgcggtgctgggggaagtgatcgctgcggagagtggctatgagcgggaaatcgccaccgccctgcaggccggcgaaattccggtacgtatgcacccgctgtctatcaagcgcgcgctggcgaatatggtggtcaacgcggcccgctatggcaatggctggatcaaggtcagcagcggcagcgaagcgagccgggcctggttccaggtagaagatgatggaccggggattaaacctgagcagcgggagcacctgtttcagccgtttgtacgcggcgacagtgcccgcagcaccagcggcaccgggctggggttggcgattgttcagcgtattatcgacaatcacaacggccggctggagattggctccagcgaacgcggcgggttactgatccgcgcctggctgccggtgcaccggatgctggcgccgatgaaacccgccagggagagctga

SEQ ID NO: 212829 - DNA, 720 bp, Klebsiella pneumoniae
atgcaagagaattataagattctggttgtggatgacgacatgcgcctgcgtgcgctgctcgagcgttatctgaccgagcagggcttccaggttcgtagcgtggcgaacgccgaacagatggatcgtctgttaacccgtgaatccttccacctgatggtgctggatctgatgctgccgggcgaagatggtctctctatctgccgtcgtctgcgcagccagagtaacccgatgccgatcattatggtgacggcgaaaggcgaagaggtcgatcggatcgtgggtctggagatcggggctgacgactatattccgaagccgtttaacccgcgcgaactgctggcccgcatccgggcggtgctgcgccgccaggcgaacgagctgccgggcgcgccgtcgcaggaagaggcggttatcgcctttggtaaattcaaactgaatttaggcacccgcgagatgttccgtgaagacgagccgatgccgttgaccagcggcgaattcgcggtcctgaaggcgctggtgagccatccccgtgagccgctgtcgcgcgataagctgatgaacctcgcccgcggccgcgaatactctgcgatggagcgctccatcgacgtacagatctcccgcctgcgccgcatggtggaagaggacccggcgcatccgcgctacatccagaccgtctggggtctgggctacgtcttcgtcccggacggttctaaggcatga

SEQ ID NO: 212830 - DNA, 474 bp, Klebsiella pneumoniae
atgaaaacgccgctgatcacccgcgagggatatgaaaaactgaagcaggagatggactacctgtggcgccaggagcgtccggaagtgaccaaaaaggtgacctgggccgccagtctcggcgaccgcagcgagaacgcggactaccagtacaacaaaaagcgcctgcgggagatcgatcgccgggtccgctatctgaccaaatgtctggaacagttgaaaatcgtcgattactcgccgcaacaggaaggtaaagtcttcttcggcgcctgggtagagattgaaaacgatgaaggcgatatcaagcgctttcgcatcgtcggttacgatgaaatttttggccgcaaagactatatctccatcgactcgccgatggcgcgcgcactgttaaaaaaagaggttggcgatctggccatcgtcaacacgccggcgggcgaagccagctggtatgtcaacgagatcgaatacgttaaatag

SEQ ID NO: 212831 - DNA, 2331 bp, Klebsiella pneumoniae
atgatgaatgattcgctctgccgcattattgcgggtgaacttcaggccagagccgaacaggtagaagctgccgttcgcctgcttgatgaagggaacaccgtgccgtttattgcacgttatcgtaaagaagtcaccggcggtctggatgacacgcagctgcgtaatctggaaactcgcctcggctatctgcgcgaactcgaagaccgtcgtcaggcgatcctcaaatccatcgctgaacagggcaaactgaccgacgcgctggaaaaagccatcaacaccacgctcagcaaaaccgaactggaagatctctacctgccctacaagccgaagcgccgtacacgcgggcagatcgctatcgaagccgggctcgaaccgctggctgacctgctgtggaacgaaccggcccacgatccggaagcggaggccgcaaaatatattgatgccgataagggcgtagccgacagcaaagcggccctggacggcgcgcgctatattctgatggagcggtttgccgaagacgccgcgctgctggcgaaggtccgtgactatctgtggaaaaacgcccacctggtctccaccgtcttcagcggtaaagaagaggaaggcgctaaattccgcgactacttcgatcaccatgaaccgatcgccaccgtgccgtcgcatcgcgcgctggcgatgttccgcggtcgcaacgaaggcgtcctgcagctctctttaaacgctgacccgcagtttgacgagccgccgaaagagagccacggcgagcaaattattatcgaccacctgggcctgcgcctgaataacgccccggcggacagctggcgtaaaggcgtcgtcagctggacctggcggatcaaagtcctgatgcatctcgaaaccgagctgatgggcaccgtgcgcgaacgcgcggaggacgaggcaatcaacgtcttcgcccgcaacctgcacgatctgctgatggccgcgcccgccgggctgcgcgccaccatgggactcgatccgggcctgcgcaccggggtgaaagtggccgtcgtcgacgccaccggtaaactggtcgctaccgataccatctatccccacaccggccaggccgccaaagcggccgtcgccgtcgccgcgctgtgtgagaagtacaacgttgagctggtggccatcggcaacggtaccgcctcgcgtgaaaccgagcgtttcttcctcgacgtgcagaagcagttcccaaaggtcaccgcccagaaggtgatcgtcagcgaagccggggcttccgtttactccgcctccgagctggcggcgcaggagttcccggacctcgacgtgtcgctgcgcggcgcggtctccatcgcccgccgtctgcaggatcccctggccgagctggtgaaaatcgacccgaaatccattggcgtcggccagtatcagcacgatgtcagccagacccagctggcgcgtaagctggacgcggtggtggaagactgtgtgaacgccgtcggcgttgacctgaacaccgcctccgttccgctgctgacccgcgtcgccggcctgacccgcatgatggcgcagaacatcgtcgcctggcgcgacgagaatggtcagttccagaaccgccagcagctgctgaaagtcagccgtctggggccgaaagcctttgaacagtgcgcgggcttcctgcgtatcaaccacggcgacaacccgctggatgcctccaccgttcacccggaagcttacccggtggtcgaacgtattctggccgccacccagcaggcgctaaaagatctgatgggcaatagcagtgcgctgcgccacctgaaggcagtggacttcaccgatgagaagtttggcgtcccgacggtcaccgacattatcaaagagctggaaaaaccgggccgcgatccgcgtccggagtttaagaccgcgaagttcgccgatggtgtggagaccatgaatgacctgctgccgggaatgattctggaaggtgccgtcaccaacgtcaccaacttcggcgcgtttgttgatatcggcgttcatcaggacggactggtacacatttcgtcgctttctgaccggtttgttgaggatccgcacaccgtggtgaaagcgggcgacatcgtcaaggtcaaagtgatggaagtcgatctgccgcgtaagcgtatcgccctgaccatgcgtctcgacgagcagccgggcgacagccacgcccgccgcggcggtggtcaggagcgcccgcagggtaaccgcccggccgcaaaagccgccaaaccccgcggtcgcgaggcgcagcctgccggcaacagcgcgatgatggatgccctcgccgcagcgatgggtaaaaaacgctaa

SEQ ID NO: 212832 - DNA, 228 bp, Klebsiella pneumoniae; identical to SEQ ID NO: 135073

SEQ ID NO: 212833 - DNA, 2319 bp, Klebsiella pneumoniae
atgcaaaaattaaccgttggtttaattggtaatcctaattccggcaagaccaccttatttaatcagctgaccggcgctcgccagcgcgtgggcaactgggctggggtgaccgttgagcgtaaagaggggattttcgccaccactgaccaccaggtcacgctggtcgacctcccgggaacctactccctgaccaccatctcctcgcagacctcgctggacgagcagattgcctgccactacatcctgagcggcgacgccgacatgctgattaacgtggtcgatgcctccaacctcgagcgcaacctctatctgacgctgcagctgctcgagctggggatcccctgcgtcgtcgcgctgaacatgctggatatcgccgaaaagcagcaggtgcggatcgatatcgacgccctcgccgcccgtctcggttgcccggtcattccgctggtatcgactcgcggacgggggatcgaagcgctgaagatcgccctcgaccgtcatcaggcgaacagcgatcttgagctggtccactatccgcagccgctgctgcgcgaagctgacctgctggcgcagcagatgtcagcgcagatcccgacccggcagcggcgctggctgggtctgcagatgctggagggcgatatctacagccgggcctatgccggcgacgctgccgataaactggatatcgctctggcgaatctcagcgacgagatcgacgacccggcgctgcacatcgctgacgcgcgctatcagaccatcgccgccatttgcgacgccgtcagcaataccctgaccgccgaaccaagccgcttcaccgccgcgatggacaaagtgatcctcaaccgcttcctcgggttgccgatttttctctttgtcatgtacttgatgttcctgctggcgatcaacatcggcggcgcgctgcagccgattttcgatgccggctcggtcgcgatctttgtgcatggcattcaatggctgggttacaccctgcacttcccggactggctgaccgtgttcctcgcccaggggatcggcggcggtatcaacaccgtgctgccgctggtgccgcagatcggcatgatgtatctgtttctctccttccttgaggactccggctacatggcgcgcgccgcctttgtgatggatcgcctgatgcaagccctcggcctgccggggaaatccttcgtcccgctgattgtcggttttggctgcaacgtgccgtcggtgatgggcgcccgcacccttgacgcgccgcgcgagcgtctgatgaccattatgatggcgccgtttatgtcctgcggcgcgcggctggcgatcttcgccgtcttcgcggccgccttctttggtcagaacggcgcgctggcggtcttctcgctctatgtgctgggcattgtgatggccatcctcaccggcctgatgttgaagcacaccattatgcgcggcgaagcctcgccgttcgtgatggagctgccggtgtaccacgtcccgcatatcaagagcctgattatccagacctggcagcgcctgaaaggctttgtgctgcgcgccgggaaggtgatcgtcatcgtcagcatcttcctcagcgcgctgaacagcttctcactgagcggtaaggtcgtcgacaacatcaacgactccgcgctggcctcggtgagccgggtcattacgccggtgtttaaaccgatcggcgtgcatgaagataactggcaggccaccgtcggcctgtttaccggcgcgatggcgaaagaagtggtagtgggtacgctgaacaccctctataccgccgaagatatccagaatgaggaattcaatccgcagaccttcagtctcggcgaagaactgctcgccgccgtcgatgagacatggcagggactgaaagacaccttcagcctcagcgtcctggccaaccccatcgaagccagcaaaggcgatggcgaaatggccaccggcgccatgggggtgatgggcagtaaatttggcagcgcagcggcggcatacagctacctgatcttcgtcctgctctatattccctgcatctcggtgatgggcgccatcgcccgcgaatcaagccgcggctggatgaccttctccatcctgtgggggctgaatatcgcctattcgctctcgacgctctattaccagaccgttagctttagcgatcacccgcgctacagtctggtgtgtatcctggcggtagtgttgttcaacgtggtgctcttcggcctgttgcgccgggcgcgcagccgggtggacgtctcgctgctggccacgcgaaaaacgccggcctcctgctgttccagcccggctggcgattgccactaa

SEQ ID NO: 212834 - DNA, 240 bp, Klebsiella pneumoniae
gtggcgtcgttaatggaagtccgcgatatgctggccctgcagggccgcatggaggcgaaacagctcagtgctcgcctgcagacgcctcagccgctgattgacgccatgcttgagcgcatggaagccatgggtaaggtggtccggatcagcgaaacgagcgagggctgcctctccggcagctgtaaaagttgccctgaagggaaagcggcgtgccggcaggagtggtgggcgctgcgatga

SEQ ID NO: 212835 - DNA, 270 bp, Klebsiella pneumoniae
atgaaacttgttacaggaatggttgcatctctggtgataggcaccctctctttcggcgcattcgccgcgaaagagatccaaaaagaagacgtggcgaagatgaatctgaccaaggtcggtagcattacgacctccaggacgacgtcgccgatggacgcccgacgcgatctgtcgaaaaaagccgatgagctgggtgggaaatactttgtggtgattgccgggcagaaaaacgaaaaaaccgtacacgcgaacgctgacgtttataaataa

SEQ ID NO: 212836 - DNA, 774 bp, Klebsiella pneumoniae
atgaacgacatctggtggcaaacaatcggcgaaggagattgtcatcttgtgctgctgcacggctgggggctgaacgctcaggtatgggattgcatcacgccgcagctggcttcgcattttaccctccacctggtggatctgccgggctatggccgcagcggcgggtttggggcgatgtcgctggaggcgatggcgcagcgggtgctggagcaggcccctccacaggcggtgtggctgggctggagcctgggcgggctggtggccagccaggtcgcgattatgcgtccggaacgcgtgcaggcgctggtgatggttgcctcttccccctgtttcgcggctcgtgacgactggcccggcatcaagcccgaggtgctggccggatttcagcagcagctgagcgacgatttccagcgcaccgtcgagcgattcctcgccctgcaaaccatgggcacagagagcgcgcgtcaggatgcgcgggcgttaaagcaggcggtgctctcgctgccgatgccttccgccgaggcgctgaatggcggactggagatcctcagaaccgtcgatctgcgtcaggcgctggtcaggctgccgatgccgtttctgcggctgtatggccggctggatggactggtgccgcgcaagatcgtcccgttgctggatgacctgtggccggaaagcgagtcaatcctcttcgataaggccgcgcatgcgccgtttgtttcccatcccgcggccttctgcgagccgctgctggcgctgaagacgcggctggggtaa

SEQ ID NO: 212837 - DNA, 675 bp, Klebsiella pneumoniae
atgctaacagcacacagcttatgctggctatgccaaatgccgctggcagtcgcccgctgggggatctgctcccgctgcagccgcgccctgctcgcctgtcccccgctctgcccgcagtgcggcctgccggcggcggcatcccgtcacccctgcggccgctgcctgcaaaagccgcctccctggcatcggctggtggcggtcaatgactatcgcccgccgctgagcggtctggtgcagcagctgaagtttcaccatcgcccggagctgggggccgccctcgcgcgtctgctgctgcagcgccttctgcagcgtgacgatttgccgccagtagacgctctggtcggcgtgccgctatggcatcgccgtcgctggcgccggggttataatcagtgcgacgaactgtgccgaccgttagcccgctggcgaggatgcgtctggcatcgcgaaggcctgactcgccagcgagcgggcgccgtccaacattcgctcaatgcccgccagcgcaggcagaacctgaaaaatgcctttcagcttgaatttgccgtgcagggactccatatcgctctggtggatgatgtcgtcacgaccggcagcaccgtcgccgagatatcccgcctgcttttgcgaaacggcgccgcgacggttcaggtatggtgtttgtgccgtaccttgtag

SEQ ID NO: 212838 - DNA, 576 bp, Klebsiella pneumoniae; identical to SEQ ID NO: 135066

SEQ ID NO: 212839 - DNA, 1317 bp, Klebsiella pneumoniae
atgccattagtcatcgttgctatcggggttgccctgttgttgctgttaatgatccgtttcaaaatgaacggcttcattgcgctggttctggtggcgctcgccgtcggattaatgcagggtatgccactggataaagtgatagtctccatcaaaaacggcgttggcggcacccttggcagcctcgcgctgatcatgggcttcggcgctatgctcggtaagctgctggcagactgcggcggcgcccagcgtatcgccaccacgcttatcaataagttcggtaagaagcatattcagtgggcggtggtcctgaccggcttcaccgttggcttcgccctgttctatgaagtgggcttcgtgctgatgctgccgctggtgttcaccatcgccgcctcggcccgtattccgttgctgtacgtcggcgtaccgatggcagccgcgctctccgtcacccacggcttcctgccgccgcatccgggtccgaccgcgatcgccaccatcttccatgccgatatgggcaaaacgctgctctacggcaccattctggctatcccgacggttatcctggcgggaccggtgtttgcgcgcttcctgaaagggatagataagccgatcccggaaggcctgcataacccgaaagtgttcactgaagaagagatgccaggctttggcgtcagcgtctggacctcgctggttccggtgatcctgatggcgatgcgcgccgtggctgagatgatcctgccgaaaggccacgccttcctgccaattgccgagttcttcggcgacccggtgatggccaccctgattgcggtactgattgccctgttcaccttcggtttgaaccgcggccgctccatggagcagatcaacgataccctgacctcttcgattaaaatcatcgccatgatgctgttgattatcggcggcggcggtgccttcaagcaggtgctggtggatagcggcatggataaatacatcgcctctatcatgcacgaatcgaacatgtctccgctgtttatggcgtggtctatcgccgcggtgctgcgtatcgcgctgggttcggcgaccgtggccgccatcaccgcgggcgggatcgccgcgccgctgatcgccaccaccggcgtcagcccggagctgatggttatcgccgttggctccggcagcgttatcttctcccacgtcaacgatccgggcttctggctgttcaaagagtactttaacctgaccatcggcgagaccatcaagtcctggtcggtgctggaaaccattatctcagtctgcggcctggtgggctgtctgctgctggggatggtggtgtaa

SEQ ID NO: 212840 - DNA, 2094 bp, Klebsiella pneumoniae
atggagagtaaacgcctcgataatgccgcgctggcggcgggcatcagccccagctatatcaacgcgcacggcaagccgcagtctatcgcggctgtcaccaaacagcgcctgctggatgcgatgcatcgctctaccgccgccacgaaagtggcggttaacccgctgccgaacgtgaaaattttcactcacggcaaaaaaatgtcgctgccggtggcaggacgcggtgagtatcagtggatcctgactactgaggacggtaagcagtatcaagggaaaacccgcggcggcgagacgctgccgctgccggccaaactgccggaggggtaccactccctgaccctcacccaggagggggagcgctggcactgccgaactatcgtcgcgccagcgcgctgctatgagccgcagccgctgaaagaggggaaaaagctgtggggcacctgcgtgcagctgtataccctgcgctcagagaaaaactgggggatcggcgattttggcgatctgcgggccatgctgccggaaatcgcccgccgcggcgggtcgtttattggccttaacccgattcatgccctctatccggcgaacccggagagcgccagcccctatagcccgtcttcacgtcgctggctgaacgttatttatatcgacgtcaacgcggttgaagatttccagcgtagcgaagaggcgcaggcgtggtggcagtctccggcaacgcagcaggcactgcaggcggcgcgggaaacggacgatgtggattataccgccgtcactacgctgaaaatgaccgcgctgcgtatggcgtggaaacaattctctcgtcgtgaagatgagcagatgacagcgttccgcgagtttgttctgcgcgaaggggaaagcctctactggcaggcggctttcgatgcgctgcacgcctggcaggtacaacaggacccgctgcgctggggctggccggcctggccgaaggcctttcaggatatcgacagcccggaagtgaaagccttctgcgttgagcatgaggatgacgtcagtttctatctttggctgcagtggctggcctggagtcagtttgccgcctgctgggaaaccagccagcgtgacggcatgccgatcggcctctaccgcgacctggcggtgggcgtcgccgagggcgggtcggaaacctggtgcgatcgtgaactgtactgcctgaaagcatccgtaggcgcgccgccggatattctgggcccgctgggccagaactggggcctgccgccgatggatccgcatatcattgccgcccgcgcctatgagccgtttatcgacctgctgcgcgctaatatgcagaactgcggcgcgttgcgcatcgatcacgtgatgtctgtgctgcgtctgtggtggatcccgtatggtgaaaccgccgaccatggcgcttacgttcagtatccggtcgacgatctgctgtcgcttctggcgctggaaagccagcgtcatcgctgcatggtgatcggtgaagatctgggcacggtaccggtggagatcgtcagcaagttacgcaacagcggcgtctattcttataaggtgctctattttgagagtgatgcagagaaaacgttccgcgcgccggcgctgtacccggagcaatcaatggctgtggcgacgacgcacgacctgcccactctccgcggctactgggaaagcggcgatctgacgttaggtaaagcgctgggcctctatcctgatgaggtggtgctgcgcggactgtaccaggaccgcgagctggcgaaacaaggactgctggacgcgctgcataagtacggctgtctgcccaagcgcgccggccataaggcctcgctgatgagcatgacggggatcctcaaccgggggatgcagcgttatattgccgacagcaacagcgccctgctgggcctgcagccggaagactggctggagatggcgacgccggttaacattccgggcaccagcaccgagtacccgaactggcgccggaagctgtccgtcaccctggagcagatgtttgccgatgaacgggtcaataagctgattaaggatctggataaacggcgcaaggccgcgagcaagaaagccgcctcctga

SEQ ID NO: 212841 - DNA, 2391 bp, Klebsiella pneumoniae
atgtcacagactacatttaacaaagctcagtttcaggctgcactgacgcgtcagtggcagcattttggtttacagtccgcttccgagatgacacagcgtcaatggtggcgcgcagtcagcggagcgttggcggaactcctggcggcgcagccggtagcgaaaccggcgcaaggacagcgtcacgttaactacatctcaatggagtttctgattggtcgtctgaccggcaacaacctgctcaacctgggctggtacgagggcgtcagcgacgcgctgaaaggctacgatgtcaacctcaccgatctgctggaagaagagactgacccggcgctgggtaacggtggcctgggacgtctggcagcctgcttcctcgactccatggcgacggtggggcagtcggcgaccggttacggtctcaactaccagtatggcctgttccgccagtcatttgacgatggccagcagatggaagcccctgacgactgggggcgcagcagctacccgtggttccgtcataacgaagcgctggatgtccaggtaggtatcggcgggaaagtcagcaaaaacggcgaatggcagccggcgttcgtcattaccggcgaagcctgggacctgccggtgcttggctatcgcaacaacgtcgcccagccgctgcgtctgtggcaggccaaacacgctcatccgttcaacctgaccaaattcaacgatggcgatttcctgcgcgccgagcagcagggcatcgacgcggaaaaactgaccaaggtgctgtacccgaacgacaaccatcaggccggtaaaaaactgcgcctgatgcagcagtacttccagtgcgcctgctcagtggccgatatcctgcgccgtcatcatctggcaggccgcaagctggccgaactggcggattacgaagtgatccagctgaacgatacgcacccgaccatcgccatcccggagctgctgcgcgtgctgatcgacgagcaccagctgagctgggacgacgcctgggcgatcaccagcaaaacctttgcttacaccaaccacaccctgatgccggaagcgttggaatgctgggatgagaagctggtaaaagcgctgctgccgcgccatatgcagatcattaaagagatcaacgaccgctttaaacagctggtggacaaaacctggccgggcgataagcaggtctgggcgaagctggcggtggtgcatgacaaacaggttcggatggccaacatgtgcgtggtgggcggctttgctgtcaacggcgtggcggcgctgcactcggatctggtggtaaaagatctgttcccggaatataaccagctgtggccgaacaaattccataacgtgaccaacggcatcacgccgcgccgctggatcaagcagtgcaacccggcgctggcctcgctgctggatgagacgctgaaaaaagagtgggccaatgacctcgaccagctgatcaacctggaaaaatatgctgacgatgcggcgttccgtcagacttatcgcgatatcaagcaggccaacaaagttcatctggctgagtttgtgaagcagcgtaccgggattgagatcaacccgcaggcgatcttcgatatccagatcaaacgtctgcacgagtataagcgtcagcaccttaacctgctgcatatccttgcgctgtacaaagagatccgcgaaaacccgcagtccgaccgcgtaccgcgcgtcttcctgttcggcgcgaaagcggcgccgggctactatctggcgaaaaacattatttttgccatcaataaggtagcggaagcgatcaacaacgacccgaaagtcggcgataagctgaaggtggtcttcctgccggactattgtgtatcggcagcagaaaaactgatcccggcggcggatatctccgagcagatctccaccgcgggtaaagaagcctctggcaccggcaacatgaagctggcgctgaacggcgcgctgaccgtcgggacgctggatggcgctaacgtggaaatcgctgagcaggtgggtgaggagaacatctttatcttcggccacacggttgaagaggtgaaagccctgaaagcgaaaggctacgatccgctgaaatggcgtaaaaaagacaagctgctcgatgcggtgcttaaggagctggagaacggcacctacagcaacggcgacaagcatgccttcgatcagatgctgcacagcctgctgcagggcggcgatccgtacctggtgctggccgatttcgaagcctacgtagcggcgcaaaaacgggtagatgagctgtatcgcgacgaggaggcctggacccgcgcggctatcctcaacaccgcgcgctgcggcatgttcagctccgaccgctcgatccgcgattatcagcaacgtatctggcaggcgaaacgctaa

SEQ ID NO: 212842 - DNA, 2706 bp, Klebsiella pneumoniae
atgttgattccgtccaaattaagtcgtccggtccgccttgaacacactgtggttcgtgagcgcttactggcgaaactttccggcgcgaacaattatcgtctcgtgctgatcaccagtcctgccgggtacggtaagacaacgctcatttctcagtgggccgcgggtaaaaacgatcttgggtggttttcgctggacgaaggcgacaaccagcaggagcgttttgccagctatctgatcgcggcgattcagcaggctaccggcaaccactgcgcggccagtgaagcgatggtgcaaaaacgccagtacgccagtctctcctctctttttgcgcagctgtttattgaacttgccgactggcagcgcccgctgtatctcgtcattgatgattaccatctgatcaataatccggtgatccatgacgcgatgcgctttttcctgcgccatcagccggagaatatgaccctggtggtcctgtcgcgtaacctgccgcagctgggcattgccaatctgcgcgtccgcgatcagcttctggagattggcagtcagcagctggcctttacccaccaggaggcgaaacaatttttcgactgtcgtctgacatcgcctatcgaagccgacgacagtagccggctgtgcgacgatgtcgccgggtgggccaccgcgctacaactcatcgccctctccgcccgccagaataactcctccgcccaacactccgcccgccgcctcgccgggattaacgccagccatctgtcggattatctggtggatgaagtgctggataacgttgacgcccgcacgcgcaactttttgctgaagagttctctgctgcgctcaatgaacgacgcgttaatcgtgcgcgtcaccggcgaagagaatggccagatgcagctggaggagatcgaacgccaggggctgttcctgcagcggatggatgattccggcgaatggttccgctatcacccgctgtttggcagcttcctgcgccagcgctgtcagtgggagctggcggttgaactaccggagatccaccgcgccgccgcggaaagctggatggcgcaaggtttccccagcgaggccatccaccatgcgctggcggccggcgatgccaaaatgctgcgcgatatcttgctcaatcatgcctggggcatgtttaaccatagcgagctggggctactggagcagtcgctggcggcgctgccatggtccaatctgctggaaaatccgcgcctgatcctgctccaggcctggctgatgcagagccagcatcgctacagcgaagtcaataccctgctggcgcgcgccgagcaggagatgagtgtggaaatggacaccgcgatgcatggcgacttcaacgcgctgcgcgcgcaggtggcgattaacgatggcgaccaggacgaggcggaacgtctgtcaatggtggccctggaagagctgccgctggccaactattacagccgcatcgtcgccacatcggtgcatggcgaagttctccattgtaagggaaagctgaccaaatccctcgccgtgatgcagcagaccgaacagatggcccgccgtcatgacgtatggcattacgccctgtggagcatcattcagcaaagcgaaatcctcttcgcccagggcttcctgcaggccgcctgggagagccaggagaaagccttccagctggtacgcgaacagcatcttgagcagttgccgatgcatgagttcctgctgcgcatccgttctcagctgctgtgggcatgggcgcgcctcgacgaggctgaagcttgcgcccgccaggggatggacgtgctatccacctatcagccgcagcagcagctgcagtgcctggcgctgatggtccagtgctcactggcgcgcggcgatctggataatgcccgcagccacctgaaccggctggaaaacctgctcggtaatggtcactatcacagcgactgggtctccaacgccgataaggtgcgagtgatctactggcagatgaccggtgataaaaccgcggcggccaactggctgcgccagacgccaaagccggagttcgccaacaaccacttcctgcagagccagtggcgcaacattgcccgggcgcagatcctgctgggcgacttcgaaccggcggaaatggtgctggaagagctgaacgaaaatgcgcgttcgctgcgtttgatgagcgatctcaaccgcaacctgctgctgctcaaccagctgtactggcagtcaggacgcaagagcgaagcgcagaaagccctgctggaagccctgacgctcgccaaccgcaccggttttatcaaccactttgtgattgaaggcgaggcgatggcccagcagctgcgccagctgatccagttgaacacgttgccggagctggagcagcatcgcgcccagcgtattctgcgcgacatcaaccagcatcatcgccacaaattcgcccactttgacgaagggttcgtcgagcgactgctgaatcatccggaggtgccggagcttatccgcaccagcccgctgacccagcgcgagtggcaggtgcttggcttaatctattccggttacagcaacgagcagattgccggcgagcttgacgtggcggccaccaccatcaagacccacattcgcaacctgtatcagaaactgggcgtcgcccaccggcaggacgcggtacagcatgcccagcagttgcttaagatgatgggatacggcgtctga

SEQ ID NO: 212843 - DNA, 759 bp, Klebsiella pneumoniae
atgaaacaaacacaacgtcatgacgccattatcgagctggtaaaaaaacagggttacgtcagcacggaagagctggttgagcagttcgcggtaagcccgcagaccatccgccgcgacctgaacgatttagccgaacagaaaatgatcctccgccatcacggcggcgcggcgctgccctccagctcggtcaacacctcctggcacgatcgcaaagcgacccagacggcggagaaagagcgtatcgcccggcgggtggccagcgagatcccggacggggcgacgctgtttattgatatcggcaccacgccggaagcggtggcgcacgccctgctcgatcacaacgatctgcggattgtgaccaataaccttaacgtcgccaacacgctgatggtgaaagaggacttccgtattattctcgccggcggcgaactgcgtagccgggacggcgggatcatcggggaagccaccctcgactttatctcgcagttccgcctcgacttcggcattctcggcatcagcggcgtagacagcgatggctcgctgctggagtttgattatcatgaagtgcgcaccaagcgggcgatcattgagaattcacgccacgtgatgctggtggtggaccataccaagtttggccgcaatgcgatggtcaacatgggcagcatcagtatggtcgatgcggtctataccgacgtgctgccgccggccggcgtgctgaaggtgatcactgataacaaccttcagctggagctgtgctaa

SEQ ID NO: 212844 - DNA, 825 bp, Klebsiella pneumoniae
atgattacctcttttgccaacccgcgggtggcccaggcgtttgtcgattatatggcgacgcaggggattatcctgaccatccagcagcatacccagagcgacgtctggctggctgatgagagtcaggccgggcgcgtcagggctgagctggcgcgttttctcgaaaacccggcggacccgcgctatctggcggcgagctggcagtccggacagaccaatagcgggttgcgctatcagcgctttcctttctttgccacgctgcggcataacgccggtccgttcacctgggcgattctgctgatctgcatcgcggtgttcatcctgcaaaatctgctgggcgatcagccggtgatgatttggctggcctggccctacgatccttcgctgcagttcgaagcctggcgctatttcagccatgctttcatgcatttctcgctgatgcatattctcttcaacctgctatggtggtggtatcttggcggcgcggtggaaaagcgcatcggcagcggcaagctggtggtgatcaccgtcatcagcgctctgctgagcggcttcgtgcagcaccagtttagcggcccgtggtttggtggcttgtcgggcgtggtctacgcgctgatgggctacgtctggctgcggggcgagcgcgatccgcagagcggtatttatctgcagcgcgggttgatactcttctctttagtgtggttaattgctggctggtttgacgttttcggcatggcgatcgccaacggcgcgcacgtggctggtctggcgaccggcctggcgatggcgtttgttgataccttacatgggcgaaaacgcgcataa

SEQ ID NO: 212845 - DNA, 330 bp, Klebsiella pneumoniae
atggaacagtttgaatgcatcaatgttgaagaagcgcaccagaaactgcatcagcagacggcggtactggtcgatatccgcgatccgcaaagctatgcgatgggtcatacgccgggcgcgtttcatctgaccaacgatacgctgggcgcgtttatgcgtgacaacgactttgacacggcggtgatggtgatgtgctatcacggcaacagcagcaagggcgccgcgcagtatctgctgcagcaggggtttgataaggtctatagcgttgacggcgggttcgacgcctggcatcgccatttcccggcggaagtggcgcgcgggacgttttaa

SEQ ID NO: 212846 - DNA, 1509 bp, Klebsiella pneumoniae
gtggaaaccaaagatctgattgtgataggcggaggcatcaacggtgccggtatcgcggcagatgccgccgggcgtggtttatccgtactgatgctggaagcgcgcgatctcgcctgcgccacctccagcgccagttccaaactgatccacggcgggctacgctacctcgaacactatgagttccgtctggtcagcgaagcgctggccgagcgtgaagtgctgttaaaaatggccccgcatatcgccttcccgatgcgctttcgcctaccgcatcgcccgcatctgcgcccggcatggatgatccgtatcggcttgtttatgtacgatcatctgggcaaacgcaccagcctcccgggatccaccgggttgcgttttggcgcagaatcggtacttaaaccggaaattgtgcgcggtttcgaatattccgactgctgggtcgacgatgcccgcctggtgctggccaacgcgcagatggtcgtccgcaaaggcggcgaagtgcgtacccgcacccgcgctatctcggcgaaacgtgagaatggcctgtgggtggtggaagcggaagatattgatagcggtgagaagtttacctggaaggcgcgcggcctggtcaatgccaccggcccatgggtcaaacagttcttcgacgaagggatgcatctgcgctcgccttacggcatccgtctgatcaagggcagccacatcgtggtgccgcgggtgcatacccagaaacaggcttatattctgcagaacgaagataaacgcatagtatttgttattccgtggatggatgagttctctatcatcggcacgacggacgtcgagtataagggcgatccgaaagcggtggccattgatgataaagagatcaactatctgctgaacgtctataacgcgcactttaaaaagaccctcagccgggacgatatcgtctggacctactccggcgtccgtccgctgtgcgacgacgagtcggattcgccgcaggccattacccgcgactataccctggatattcacgatgagaacggtcaggcgccgctgctgtccgtcttcggcggcaagctgaccacctatcgcaaactggccgagcatgcactggaaaaactgaccccctattacaaagggatcggcccggcatggaccaaaaccgcggtgctccccggcggcgatatcggcggcgaccgcgacgactacgcggcaaaactgcgccgtcgcttcccgttcatcagtgaatcactggcccgccattatgcccgcacctacgggagcaacagcgagtggatcctgaaggaagccagcgccctgagcgatctcggggaagatttcggccacgagttttatgaagccgagctgaaatatctggtggagcacgagtgggtgcgcagcctggatgacgccatctggcgtcgtaccaaacagggcatgtggctgactgccgagcagcaggcgcgcatcagcgaatggctggcgcagcatgcgggaaagtctgaactgtcgttagcgtcctga

SEQ ID NO: 212847 - DNA, 300 bp, Klebsiella pneumoniae; identical to SEQ ID NO: 135056

SEQ ID NO: 212848 - DNA, 348 bp, Klebsiella pneumoniae
atgtgggatgtagaaacgacggatacgtttgatgcctggttcgaattacaaagtagagctttaaaagaggatatgttggccacgatgctcatcctgtctgagtttgctccgcagcttgggcgcccgtatgttgatacggtgaaagattcaacgtttcagaatatgaaagaactgcgggttcagcatcatgggctccccatccgcgcctgttttgcttttgatcctctgcggaaagctatcgttttatgtgtgggcaataaggatggcatgaatgagaaacgtttttacaaagagatgattactctggctgacagagaattcagccaacacctgactaaggagcgataa

SEQ ID NO: 212849 - DNA, 2448 bp, Klebsiella pneumoniae
atgaatgtaccctttagctatgcatcaccgacgctgagcgttgaggcgttaaagcattctattgcctataaactgatgtttatcatcggtaaagatccggccatcgccaacaagcatgaatggcttaacgccacgctgtttgccgttcgcgatcgcatggtggagcgctggctgcgctccaaccgcgcgcagctctcccaggaagtgcgccaggtgtactatctgtcgatggagtttctgatcggccgcaccctctcgaatgcgctgctgtcgctgggcatttatgacgatgtgagcagcgcgctggcggagatggggctcgatctcgaagagctgatcgatgaagagaatgaccccgggcttggcaacggcggtctgggccgcctggcggcttgcttccttgactccctggcggcgctgggtctgccgggacgcggttacggcatccgctacgactacgggatgtttaaacagaatattgtcgatggccggcaaaaagagtctcctgactactggctggagtacggtaacccgtgggagtttgagcgccacaacacccgctataaagtgcgcttcggcggccgcattcagcaggaaggaaagaaaacccgctggattgagacggaggagatcattgcggaagcctacgaccagatcatccccggctttgacaccgacgccaccaacacgctgcgtctgtggagcgcgcaggccagtagcgaaattaacctcggtaaattcaaccagggcgactacttcgccgcggtagaggataaaaaccactccgaaaacgtctcccgcgtgctctatccggacgactcgacctactccggccgcgagctgcgcctgcgccaggagtatttcctcgtgtcggccacggtgcaggatatcctgagtcgccattacatgttgcataaaacctatgacaacctggcggacaagattgccattcacctgaatgacacccacccggtgctgtcgataccggagctgatgcgtctgcttatcgacgaacataagttcagctgggacgaggcgttcgaggtgacctgtcaggtcttctcctataccaaccacaccctgatgagcgaagcgctcgagacctggccggtggatatgctgggtaaaattctgccgcgccatctgcagattatcttcgagattaacgactatttcctcaagactttgcaggagcagtatccgaacgataccgacctcctcagccgcacctcgattatcgacgagtctaacggccgccgtgtgcggatggcctggctggcggtagtggtcagccacaaggtcaacggggtgtccgagctgcattcccgactgatggtggagtcactgtttgccgaattcgccaaaatcttcccaatgcgctttatcaacgtgaccaacggtgtgacgccgcgccgctggctggcgctggccaacccaccgctgtcgaaagtgctggatgagcatatcggccgcacctggcggaccgatctgagtcagcttgatgagctgaaacagcatatcgactacccgatggtcaatcaggcggtgcgtcaggccaagtttgagaacaaacagcggctggccagctatattgcccaacagctcaatgtggtggtcaatccgaaggcgctgtttgatgtgcagatcaaacgtatccatgaatacaaacgccagctaatgaatgtgctgcacgtcatcacccgctataaccggatcaaggccgatccgcaggccgagtgggtgccgcgggtgaatattttcgccggtaaggcggcctcggcctactatatggccaagcacattattcacctgatcaacgatgtggcggcggtgattaataacgatccgcagattggcgacaagctgaaggtcgtctttatccccaactacagcgttagcctggcgcagctgatcattccggcggcagacctgtcggaacagatctccctcgcaggcactgaagcttccggcaccagtaatatgaagtttgcccttaacggcgcgctgactatcggcacccttgatggggcaaacgtggagatgcaggagcacgtgggcgaagagaatatctttatcttcggtaacaccgcggaagaggtggaggagctacgtcgcagcggctataaaccacgcgaatattacgagcaggatgaagagctccaccaggcgctgacgcagatcggtaccggcgtcttcagcccggcagaaccggggcgctaccgcgacctgctggattcgctgattaactttggcgaccactaccaggttctggcggactatcgtagctatgtggactgccaggatcgcgtcgacgagctgtatcaaaacccggaagagtgggcttataaggcaatgttgaatattgccaacatgggctacttctcttctgaccggacgatccaggagtacgcgaaatatatctggcatatcgacccggtaaggctgtaa

SEQ ID NO: 212850 - DNA, 1434 bp, Klebsiella pneumoniae
atgcaggtcttacatgtatgttctgagatgttcccgctgttaaagacgggcggtctggcggacgtcatcggcgcactgccggcggcgcaaatcgcggagggtatcgatacgcgcgtgctgttgccggcgtttcccgatatccgtcgcggcgtggtggatgcccaggtggtgacccgccgggataccttcgccgggcggatcacgctgctgtacggccactttaacggcgtggggatctacttgatagacgccccgcatctctatgaccgtccggggagcccttaccacgataccaaccagcacgcttatcccgacaacgtcctgcgctttgcgctgctgggctgggtgggaagtgaaatggccagcggactggatccgttctggcgcccggatgtggtgcatgcccatgactggcacgccggcctgacgccggcctacctggcggcgcgcggacgcccggctaaatcggtgtttaccgtgcacaacctggcgtaccaggggatgttttactcctggcatatgaatgacattgagctgccgtggtcgttctataacatgcatggcctcgagtttaacgggcagatctcgtttctcaaggccggcctctactacgccgaccatattacggcggtgagcccgacctacgcgcgcgagatcaccgagccgcagtacgcctacggcatggaggggctgctgcgccagcgccatcatgaaggtcggctgtcgggaattctcaacggcgttgacgacggtatctggagcccgcaaaacgatctgctgctgccgatgcgctacgatcgcgacacgctggaggagaaggcggagaacaagcgtcagctgcagattgccatgggcctgaaggtcgatgataaagcgccgttgtttgccgtcgtcagccgtcttaccagccagaaagggctggacctggtgcttgaagcgctgccgggtctgcttgagcagggcggccagctggcgctactgggcgccggcgatccggtgctgcaggaaggtttcctcgccgccgccgccgaacacccgggcaaagtgggtgtgcagattggctaccatgaggccttctcccaccgcattatgggcggcgccgacgtcattctggtcccgagccgctttgaaccctgcggcctgacccagctgtatggtctgaagtacgggacgctgccgctggtgcgccgcaccggcggtctggcggacaccgtcgctgacagttcgctggagaatctggccgatggtctggcgacagggtttgtctttgaggacagcaatgcgctgtcattgctgcgcgctatccgtcgcgcctttgtcctctggtcgcgcccgtcgctctggcgctacgtgcagcgtcaggcgatgaatatggattttagctggcaggttgccgcgaactcctatcgcgaactttatcaacgcttgatgtaa

SEQ ID NO: 212851 - DNA, 1296 bp, Klebsiella pneumoniae
atggttaggcttgaaaaaaacgatccgctgatgctggcgcgtcaattacccatcaaatccgtggcgttgatcctcgcgggcgggcgtggcacccggctgaaggatctcaccattaagcgtgcgaaacctgccgttcactttggcggcaagttccgtattatcgatttcgcattatctaactgcattaactcagggatccgccgcatcggcgttattacccagtatcagtcgcacacgctggtgcagcacatccagcgcggctggtcgttcttcagcgaagagatgaacgagtttgtcgatctgctgccggctcagcagcgcgtgcatggcgaaaattggtatcgcggcacggcggatgcggtgacgcagaacctggatatcatcagccgctacaaggccgagtacgtggtgatcctcgcgggcgaccatatttataagcaggactactcgcgcatgctgatcgaccatgtcgaaaaaggggcgcgttgcaccgtggcctgcatgccggtgcccattgaagaggcatccgccttcggcgtcatggcggtcgacgaaaacgaaaaaatcattgagtttgtcgagaaacccgccaacccgccggcgatgccgaccgacccgaccaaatcgctggccagcatgggcatttatgtctttgacgccgcctatctttatgagctgctggaagaagacgatcgcaacgagaactccagccacgatttcggtaaagacatcattccgaagatcaccgaagctggcatggcttatgcacatcctttcccgctctcctgcgtgcagtccgacccgaacgccgaaccttactggcgcgacgtggggacgctggaagcctactggaaggctaacctcgatctggcgtcagtcacgccggagctggatatgtacgaccagaactggccgatccgcacccatatggaatcgctgccgccggcgaagttcgtgcaggaccgctccggtagccacggcatgaccctgaactcgctggtttccggggggtgcattatctccgggtcggtggtggtgcagtcggtgctgttcccgcgcgtgcgggtgaattcgttctgtaacattgattcggcagtcttgttgccagatgtctgggtggggcgctcatgccgcctgcgtcgctgcgtgattgaccgcgcctgtgttatcccggaaggaatggtgattggtgagaatgcggaagaggatgcacgccgcttctatcgctcagaggaaggtatcgtgctggtgacccgcgacatgctgcggaaattagggcacaaacaggagcgctaa

SEQ ID NO: 212852 - DNA, 1977 bp, Klebsiella pneumoniae
atgacctcactcgcggcaggcaaacctgcgccattgggcgccagctatgacggcaagggggtgaatttcgccctcttctccgcccatgcggagcgggtggagctgtgcgtattcgacgagcagggcaacgagcaacgcttcgatctcccggcgcgcagcggcgacatctggcacggctggctggccgccgccgggccgggcctgcgctacggctatcgggtacatggtccctgggacccggcgcaggggcaccgctttaacccggccaagctgttgatcgatcccagcgcccaccgggtcgagggcgatctgcctgacgatgagcgcctgcacggcggcatgtggcagcccgatcgccgcgacagcgccgcggtcgcgccaaaatcgcaggtggtggatctgcgctatgactggcgtggcgataaaccgccgcgtaccccatggggggaaacggtgatttatgaagcgcacgtgaaagggctcaccttgcttaatccgcagctaccggaagccattcgcggaacctataaagcgctgggccacccggcgatgatcgcttacttcaaatcgctgggcatcagcgcccttgagctgttgccggtggcgcagttcgccagcgagccgcgactgcagcggatggggttaagcaactactggggctacaacccgttggcgtggttcgcgctggatccgcgctacgccagcgacccggatcgcgccctggatgagtttcgcgatgcggttaaggcgctgcacgccgccggtatcgaagtgattctggatatcgtgctcaaccatagtgcggaaatcgatctcgacgggcccaccgtctccctgcgcggaatcgacaaccgtagctattattgggtaagggaggatggcgattatcacaactggaccgggtgcggtaatacgctcaatcttagccaccccggcgtggtggagtgggcgcgccagtgtttgcgcttttgggtggatgagtgccatgtcgacggctttcgcttcgacctcgcctcagtgatggggcggacgccggaattccgccaggatgcgccgctgttcgaggctatccgccgcgacagcgtgctgtcgcaggtgaaactgattgcggaaccctgggatatcggcccgggcggctatcagatgggtaatttcccaccgctgttcgctgaatggaatgaccattttcgcgatagcgcccgacgcttctggctacagcaaaatgtctccctgggggattttgcccaacgtttcgcggcctccagcgatctctttgcccgcgatggcaagccgccatcggcgacggtcaacctggtgacggcccacgatggcttcacgctgcgcgactgcgtttgtttcaatcagaaacacaatgaggcaaacggggaggagaatcgcgatgggactaacaataactacagcaacaatcatggtatagaaggattagaagcgaattttgcggtgattgaacggcggcgcgccagcgcgcatgcgctgctgacgacgctgctgctggctcaggggacgccaatgctgctggcgggcgatgaacagggccacagccagcacggtaacaataatgcttactgccaggacaacgccctgacgtggctggactggcgccaggcgaacccgggattaaccgcctttaccgcggcgctgatccacctgcggcgtcgtattccggcgctcacccgcaaccgctggtggcaggagggggatggcaacgtccgctggcttaatcgcaacgcccagcccctgactgccgcggagtggcagcagggggccgcgtgtatgcagatccagttgtcggatcgctggctgctcacgctgaacgccaccgcagaggtggtcgatatggttttacccgagggggaatggcgcgccgttcctccattcgccggagaggataatccggtcatcatggctgtctggcatgggcccgcgcacggagtgtgcgtatttcaaaggtcgtaa

SEQ ID NO: 212853 - DNA, 2187 bp, Klebsiella pneumoniae
atgtctaatcatattgatagagacgtgattaatgcgctaatcgccggtcatttcgcggatcccttttccgtgctcggcatgcaccgtactgacgccgggctggaagtgcgcgcattattacccgatgccaccgacgtgtgggttattgaaccgaaaaccggacgcaaagtcggcaagctcgaatgtctcgactcgcgtggtttcttcagcggcgtcctgccgcggcgtaaaaacgcttttcgctatcagctggccgtcacctggcacgggcagcagaatctgatcgatgacccttatcgctttggtccgctgttgcaggaccttgacgtctggctgctgtcggaagggacccacctgcgcccttacgaaacgctgggcgcgcacgctgccaccatggacggcgtcaccggtacccgtttctcggtgtgggcaccgaacgcccgccgcgtatcggtggtggggcagtttaactactgggatggccgtcgccacccgatgcggtttcgcaaagagtccgggatctgggagctgttcgttcccggcgcgcacaatggccagctgtataaattcgaactgattgacgcccacggcaatctgcgggtcaaagccgacccttacgcctttgagtcgcaaatgcgtccggaaagcgcctcgcttatctgcgatctgccgcccaaagtggaacagccagcggaccgtagagcggcgaaccagtttgatgccccgatctctatctatgaagtgcatctcggctcctggcgccgtcataccgataataatttctggctgagctaccgcgagctggccgaccagctggtgccctatgcgaaatggatgggcttcacccatctcgaactattgccggttaacgagcacccgttcgacggcagctggggctatcaacccaccgggctctatgcgccgacccgccgcttcggcacccgcgacgatttccgttactttatcaatgccgcgcacgccgccgggctgaacgtcattcttgactgggtgcccggccacttcccggcggatgattttgcccttgcctcgtttgacggcacttcgctgtatgagcacagcgatccgcgcgaggggtatcaccaggactggaataccctgatctacaactacggacgtcgggaagtcagcaactacctggtgggtaacgcgctgtactggatcgaacgcttcggcatcgatgcgctgcgggtcgacgcggtggcctcgatgatctatcgcgattatagccgcaaggcgggagagtggatccccaacgaatacggcggtcgggagaatctggaagccattgagtttctgcgcaacaccaaccgcatccttggcgaacagactccgggcgcggtcaccatggcggaagagtccaccgattttaccggggtgacccgtccgccagccggcggcggcctcggtttctggttcaaatggaacctcggctggatgcacgacaccctggattacatgaagctcgatccggtgcatcgccgctaccatcacgacaaaatgaccttcggcatgctctacaactacaccgagaattttgtgctgccgctctcccacgatgaagtggtgcacggcaaaaaatcgattctcgaccgcatgccgggcgatgcctggcagaagttcgccaacctgcgcgcctactacggctggctgttcgccttcccggggaaaaagctgctgtttatgggcaatgagttcgctcagggccgcgagtggaaccatgacgttagcctcgactggcatctgctggagggcggcgacaactggcaccacggcgtccagcggctggtgcgcgacctgaaccatacctaccggcatcataaagcgctgcacgagctggattttgacccctacggcttcgaatggctggtggtcgacgaccatgagcgctcggtgtttgtctttgtacgccgtgaccgggcgggcaacgagattatcgtcgccagcaacttcacgccggtgccgcgccacgactaccgcttcggcattaaccagccgggccgctggcgcgaggcgctaaataccgactccatgcactatcacggcagcaatcagggcaatggcggcgtggtggaaagcgacgctatcgccagccatggccgcgaacattcgctgtcgctgaccctgcccccgctggcgacgatctggctggtccgggaggcgcaatga

SEQ ID NO: 212854 - DNA, 1107 bp, Klebsiella pneumoniae
atgaaaaatgttggttttatcggctggcgcggaatggtcggctctgttctcatgcaacgcatggttgaagagcgcgatttcgacgccattcgcccggtgttcttctctacctcccagctgggacagccagcaccgtcattcggcggtagcaccggtggcacgctgcaggatgcgttcgatctggacgcgctgaaggcgctggacattattgtcacgtgccagggcggcgattacaccaacgagatttacccgaagctgcgcgcaagcggctggcagggttactggattgacgcggcttcttcgctgcgcatgaaggacgatgcgatcattatcctcgacccggttaaccaggatgtgatcaccgccggcctgaacaacggcgtgaaaacctttgtcggcggcaactgcaccgtcagcctgatgctgatgtccctcggcggcctgtttgctcaggatctggtggagtgggtcagcgtggcgacgtaccaggcggcttccggcggcggcgcgcgtcatatgcgcgagctgctgagccagatggggcagctgcataatcatgtggccgcggagctggcggacccggcttccgccatcctggatattgagcgcaaagtgacgtcgctgacccgcagcggcgagctgccggtcgataactttggcgtaccgctggcgggcagcctgatcccgtggatcgacaaacagctggataacggtcagagccgcgaagagtggaaaggccaggcggagaccaacaagatcctcgccacctcgtccgttatcccggtagacggcctctgcgttcgcgttggcgcgctgcgctgccacagccaggcgtttactatcaagctgaagaaagatgtttctatcccgaccgttgaggagctgctggccgcgcacaacccgtgggccaaagtggtaccgaacgatcgtgagattaccatgcgcgagctgaccccagccgcggtgacgggcaccctgaccaccccggtaggacgcctgcgtaaactgaatatggggccggagtatctatcggcctttaccgttggcgaccagctgctgtggggcgccgcggagccgctgcgccggatgcttcgccagctggcgtaa

SEQ ID NO: 212855 - DNA, 1266 bp, Klebsiella pneumoniae
atgcacgccttcgtggctttgatggtggtttctattggcgccggtctcttctccggcatgccgctggataaaatcgcggcgacgatggagaaagggatgggcggtacgctgggcttcctggcgatcgtcgtcgcgctcggcgcgatgttcggtaagatcctgcatgaaacgggggcggtcgatcagattgccgtcaagatgctcaaatcctttggccacaatcgcgcgcactatgcgattggtctcgccggtctcatctgcgcgctgccgctgttcttcgaagtggcgatcgtactgctgattagcgtcgccttctcgatggcgcgccataccggtactaacctcgtgaagctggtgatcccgctgtttgccggcgttgccgccgccgcggcgtttctgttgcctggaccggcgccgatgctgctggcgtcgcaaatgcacgccgactttggctggatgatcctgattggcctgtgcgcggccattccggggatgattatcgccggtccactatggggcaacttcatcagccgctacgtcgaattgcatattcctgacgacgtcacggaaccgcatctcggcgaaggcaaaatgccctccttcggcttcagcctggcgctgatcctgctgccgctggtgctggttggcctgaaaaccatcgccgcgcgctttgtgccggtgggttccactgcctacgaatggttcgagtttatcggccacccgttcaccgcgatcctggtggcctgcctggtggcgatttacggtctggcggtacgtcagggaatggcgaaagaccgggtgatggagatttgcggccacgcgctgcagccggccgggattattctgctggtgatcggggctggcggcgtcttcaagcaggtgctggttgactccggcgttggcccggcgcttggtgaagcgctgaccggaatggggctgccgatcgctattacctgcttcgtactggcggcggcggtgcgtatcattcagggctctgccaccgtggcgtgcctgacggcggtcggcctggtgatgccggtgattgagcagctgaactacagcggcgcgcagatggcggcattgtctatctgtatcgccggcggctcgattgtggtaagccacgtgaacgacgccggcttctggctgttcggtaaatttaccggcgccagtgaagcccagacgctgaagacctggaccatgatggaaaccatccttggcaccaccggggcgattgtcggtatgatcgccttccagctgctgagctaa

SEQ ID NO: 212856 - DNA, 531 bp, Klebsiella pneumoniae
ttgagcacgactaaccatgatcaccacgtctatgtcctgatgggcgtttccggcagcggaaaatccgctgtcgccagcgaagtggcgcatcaactgcatgccgcgtttcttgacggcgactttctccatccgcgcagcaatatcaccaagatggcctccggcgagccgctcaacgatgacgaccgcacgccgtggctgcaggcgctaaatgacgccgcgttcgccatgcagcgtaccaacaaggtgtcgctgatcgtctgctcggcgctgaagaagagctatcgcgacattctgcgcaagggcaacccgaacctctccttcatctacctgaaaggcgatttcgacgtgatcgaaagccgtctgaaggcgcgtaaagggcacttctttaaaacccaaatgttggtgacgcagtttgaaacgctgcaggaaccaggcgccgacgagagcgatgtgcttatcgtcgatatcgaccagccgctggaaggcgtggtggccagcaccatcgaggtgatcaacaaaggcagtcactag

SEQ ID NO: 212857 - DNA, 996 bp, Klebsiella pneumoniae
atgaaaaagaaaagacccgtacttcaggatgtagccgatcttgtcggcgtgaccaaaatgacggtcagtcgctatttacgcaacccggagcaggtctccgaagcgctgcgtggcaagattgccgttgccctcgatgaactgggttatattcccaatcgcgcccctgacattctttccaacgccaccagccgcgccatcggcgtgctgctgccgtcgttaaccaatcaggtcttttcggaagtactgcgcggtatcgaaagcgtcaccgacgccttcggctatcaaaccatgctggcgcactacggctataagccggaaatggaagagaaacgcctcgaatcgatgctctcctggaacattgacggcctgatcctcaccgaacgcacccatacgccgcgcaccctgaagatgatcgaagtcgccggcattccggtggtggagctgatggacagccggtcgccgtgtctcgatattgccgtcgggtttgataactttgaagccgcccggcagatgaccgcggcgatcatcgcccgtggccaccgccatgtcgcctatctgggggcgcgtcttgatgaacgtactatcatcaaacagaaggggtacgagcaggcgatgcttgacgccgggatgacgccctacagcgtgatggtggagcaatcctcgtcctattcttcggggattgagctgatgcgccaggcgcgccgcgaatatccacagctcgacggcattttctgcaccaacgatgacctcgcggtcggcgcggcgttcgagtgccagcgtctggggctgaagatccccgatgatatggcgatcgccgggttccacggccatgatatcggccaggtgatggagccgcggctggccagcgtcctgaccccgcgcgagcgaatggggcgcatcggcgccgaacggctgctggcgcgcattcgtggtgaagcgattacccctaagatgttagatttaggtttcacattgtcaccgggcggatcaatttaa

SEQ ID NO: 212858 - DNA, 696 bp, Klebsiella pneumoniae
atgatctatttacgcaaagcgaacgaacgtggccacgctaaccatggctggctggattcctggcatactttctctttcgccaactattatgacccgaactttatgggcttctccgccctgcgggtgattaacgacgacgtcatcgacgccggtcagggcttcggtacccacccgcacaaagacatggagatcctgacctatgtgctggaaggggcggtggagcaccaggacagcatgggcaacaaagagcaggtgccggcgggcgagttccagatcatgagcgcgggtaccggggtgcgccactctgagtacaacccgagcaaaaccgatcgtctgcgtctgtatcagatctggattattccggaagaaaccggcattaccccgcgctacgagcagcgccgcttcgacgccgcccagggcaaacagctggtgctgtcgccggatgcgcgagatggctcgctgaaggtgtaccaggatatggaactctatcgctgggcgctgctgaaagatgagcagtcggttcaccagattgccgcggaacgccgcgtgtggatccaggtggtcaaaggcgaagtgaccatcaacggtactaaagccaccaccagcgacggtttggccatctgggacgagcaggcgatttcggttcatgccgacagcgatagcgagatcctgctgttcgatctgccgccggtttga

SEQ ID NO: 212859 - DNA, 1038 bp, Klebsiella pneumoniae
atgactctgcactgcgcatttattggctttggtaaaagcaccacccgctatcaccttccttacgttttgcaccgcaaagaccgctggcaggtagcgcacatttaccgccgccgggcgaagcccgaggagcaggcgccgcagtattcccatattcatttcaccagcgaccttgatgaagtattaaacgatccactggtcaagctggtggtggtctgcactcacgccgacagccattttgaatatgcgaaaaaggcgctggaggcaggaaaaaacgtgctggtggaaaagccgttcaccccgacgctggaggaagcaaaaactctgtttgccctggcgaacagcaaaggtctgacggtgacgccctatcagaaccgccgtttcgactcctgcttcctgaccaccaaaaaggtgattgagagcgggaaactcggcgaactggtggagatcgaaagtcattttgataactaccgcccactggcggagaccaaccccggcggtccgcaaaacggcgagttctatggccttggcgtgcataccctggatcagaacatttcgctgttcggccgcccggaccatgtctcttacgatctgcgctcgctgcgcaataaagccaacccggatgacacctttgaagcccagctgttctacggcgatatgaaggccatcgttaagaccagccatctggtgcagatcgattacccgaaatttatcgttcacgggcacaaaggttcgtttgtgaagtacggcattgaccagcaggagaccagcctgaaggccaatatcatgccgggcgagccgggatttggcgcggacgacagcgttggcgagctggtgtatgtcaacgaggcaggggagatggtgcgcgaagcggtgccgctggagagcggcgattatggtcgggtgtacgacgcgctgtacgacaccctcgtcaacggccagccgaattacgtcaaggaaactgacgttctcaccaatatggagatcctgcagcgcggctttgagcagccttcaccggccaccattacccttacccgataa

SEQ ID NO: 212860 - DNA, 645 bp, Klebsiella pneumoniae
atggacaaacagtatctcgccataaacggcgccctttttttctggcttctcgcgctgatcgcctggtctgtcgatgcaagcgcgctggcgcgcctggcggccgcctgcgcgcttatcgctttcctcctccatagccaacggaacaagattaacgcgatgtttattaagaaaaataaaacggaacctcagatatcagaagcagccacgcctccggcaattaacccagaacccgaagcggtcgccagcaaaaaacacgagactacggtcatcgccagcggggtgcatttcgtcggcaatatagtcgccagcggccatgtctatatccacggtcaggtcaccggcaacattgaggccaaagagcatttgattaaggtaatgcgtgaaggccaggtggagggcaacgtcagctgccgggagctaataattgacggcaaggtgcagggccagtgtcatggcgacagcatcaccatcgaggagcacggccatctggagggtactctcgcctatcgcgcgctggcgatcaagaaaggcggcgtttttagcggtcgcgctgaaatgctggccgccgcggagaacaaaagtcatattctcggtctggtagcagacgcaccctccaaaaccgacgcggagcccgtcaggccgtag

SEQ ID NO: 212861 - DNA, 489 bp, Klebsiella pneumoniae
atgagtgacatagtgatacgccatgccgaaccgcgcgatgctgaacctttacatatgctgatggcgcacccggaggtctatcatgacacgctacagatcccctatccatcgatggaagcctggcaggagaagctacagcccagaccccatacctttcatctggtggcgacactggacgagcaggtcgccggacatctgtctctccatgttgagccgcgccctcggcgcagccacgtcgcaacctttggcatggcggttgccgccggccatcagggttgcggcatcggcagcgcgctgatgcgcgagatgatcgacctgtgcgacaactggctgcgcgtcgagcgtattgagctgacggtgttcgccgataatgccccggcgattgcggtgtataagaagtacggctttgagatcgaaggcaccggcaggcgttacgcgctgcgcaacggtgagtatgtggatgcgtattatatggcgagaatgaagtag

SEQ ID NO: 212862 - DNA, 1746 bp, Klebsiella pneumoniae
atgataaaaacaacaatatggcgtcaggtggtcatcgctgcgttgctggcggggggcagctttaccgtcgccgccaatccgccaccgccgccgccggtctcttatggcgtcgaggaagatgtgttccacccggtacgcgcccggcaggggatggtggcctcggtggacgcgctggcgacccgcgtcggcgtggatatcctgcgccagggcggtaacgctgtcgatgcggcggtagcggtaggctacgcgctggcggtcacccatccgcaggccgggaatattggcggcggcggttttatgatgctgcggactaaagacggcaagaccacggcgatcgatttccgcgaaatggcgccagagcaggccacccgcgacatgttccttgacgaccagggcaacccggacagtaaaaaatcactgacttcgcatctggcctccggcacgccaggcagcgtcgccggtttctccctcgcgctggaaaagtatggcaccatgccgttgaacaaagtgatccgtccggcgattaagctggcggaagaggggtttatcgttaacgatgcgctggcggacgatctgaagacctacggcagcgaagtgatcccgcagcatgaaaatagtaaagcgatcttctggaagaacggcgagccgctgaaaaagggcgatcggctggtgcagaagaacctcggtaagagcctggagctgattgccgagcacggcccggacgccttctataaaggggccatcgccgaccagatcgctgacgagatgaaaaagcacggcgggctaatcaccaaagccgatctcgccggctataaggctgtggagcgtacgccggttagcggcgagtatcgcgggtatgaggtttactctatgccgccgccgtcctccggcgggatccatatcgtgcagatcctcaatatcctcgaaaacttcgatatgcagaaatatggttttggcagcgccgacgccatgcaggtgatggcggaggcggagaaacatgcctatgccgaccgttccgaatatctcggcgatcctgacttcgtcaacgtgccgtggcaggcgctgaccagcaaggcttacgccaaagcgatcgccgccgagattgatgtcaacaaggcgaagccttccagccagatccgtccgggcaagctggcgccctatgaaagcaaccagaccacccacttctcggtggtcgataaagacggcaatgcggtggcggtgacctatacactgaatacgaccttcggtaccggcattgtggccggtgattccggcattctgctcaataaccagatggatgatttctcggcgaagcccggcgtgcctaacgtctatggtctggtgggcggcgacgccaatgcggtggagccgaaaaaacgcccgctgtcgtcaatgtcgccgaccattgtggtgaaagatggcaaaacctggctggtgaccggcagcccgggcggcagtcggatcatcaccaccgtactgcagatggtggtcaataccatcgatttcgggatgaacgtcgcggaagccaccaacgcgccgcgtttccaccatcaatggctgccggatgagctgcgggtggagaaaggctttagcccggataccctcaagctgctggaggcgaaggggcagaaagtggcgctgaaagaggcgatgggcagtacccagagcatcatggtggggccggacggcatgctgtatggcacctccgatccgcgttcgccggatgatttaacggcggggtattga

SEQ ID NO: 212863 - DNA, 321 bp, Klebsiella pneumoniae
atgaaagcgattctgtttctggcggtgctgatgccgcttggcgtattagcccagccgatcaatattaataacaaccctaaccagccgggttacgtggtccccagccagcagcgcatgcaaaatgagatgaaggtgcagcaacagcagcagcaaagcatgctgaagcaggatctgaacaatcagacccgctcgcagcagcagcatttgcaaaaccagctgcagactaatcagcagcgtgcggcccagggcggcaatctgaatgcgccgcagcaggtgcggccaaataacaacggtgggatgctgcggcagactaatccgtaa

SEQ ID NO: 212864 - DNA, 741 bp, Klebsiella pneumoniae
atgagtaactggccttatccccgcatcgtcgcccatcgcggcggcggtaaactggcgccggagaacaccctggcggctatcgacgtcggcgcccgctacgggcacacgatgattgaatttgacgccaagctgtcgaaggacgggcagatctttctgctgcatgacgataatctcgaacgcaccagcaatggctggggcgtagcgggcgagctggcgtgggacgatctgctgaaggtcgatgccggtagctggttcagccgtgaatttaagggcgagccgctgccgctgctctcccaggtggcggagcgctgccgtcgtcacgacatgatggcgaatatcgaaattaagccgaccaccgggctggggccgcagaccgggaaagtggtggcgctggccgcgcgcgatctatggcaaggcatgaccgcgccgctgctctcctcttttgaaatcgacgccctggaggcggcgcaggaagccgcgcccgagctgccgcgcgggctgctgctggatgagtggcgcgatgactggcgcgaattgaccacccggttgggctgcgtgtcgattcacctcaatcacaaactgctggatgcggcgcgggtggcgagcctgaaacaggccggcctgcacattctggtgtacacggtcaataaaccccagcgcgccgccgaactgctgcgctggggcgtagactgcatctgcaccgatgccattgatgtcatcgggccgaatttccagccttaa

SEQ ID NO: 212865 - DNA, 1071 bp, Klebsiella pneumoniae
atggctggtttaaaactacaggcagtaagcaaaagctgggatggcaaaacccaggtaattcaaccgctgacgctggacgtggcggacggagaatttatcgtcatggtcggcccgtcgggctgcgggaaatcaacgctgctgcggatggtcgcgggactggaacgggtgaccagcggcgatatctggatcgatcgtaaacgggtgaccgagatggagccgaaggatcgcggcatcgcgatggtgttccagaactatgccctttatccgcatatgagcgtggaagagaacatggcgtgggggctgaagattcgcggcatgggtaagggattgatcgccgagcgggtgcaggaggcggcgcgcattcttgagctggatggtctgctcaagcgccgcccgcgggaactgtccggcggccagcgccagcgcgtggcgatgggccgcgccatcgtgcgtgatccggcggtattcctgttcgacgaaccgttgtcaaacctcgacgccaagctgcgcgtgcagatgcgtctggaactgcagcagctgcatcgccgcctgaaaaccacctcgctgtacgtcacccatgaccaggtggaggcgatgaccctcgcccagcgggtgatggtgatgaacaaaggcgttgccgagcagatcggcaccccggtggaagtgtatgagaagccagccagccgctttgtggcgagctttatcggcagcccggccatgaacctgctggaagggcgcatcagcgatgacggcggtcgctttgagctggcgggcggcatgcagctgccgacgaatcatgagcaccggcgccacgctgggcgtaaaatgacgctcggtatccgtccggagcattttatcttaagctcgcaggcgcaaggtggtattccgctgctgatggacaccctggaaattttaggtgccgataacctcgctcacgggcgctggggcgaacagaagctggtggtcagactgccgcatcagcagcgcccggcggcaggcagcacgctatggctgcatctgcctttggaacatctgcacctctttgatggtgaaacaggaaaacgcgcatga

SEQ ID NO: 212866 - DNA, 846 bp, Klebsiella pneumoniae
atgattgagaaccgtcgcgggctgacgattttcagccacaccatgctgatcctgggtatcgccgtcattttattcccgctgtacgtcgccttcgtggcggcgacgctggataacaaatcggtatttgaaacgccgatgacgctgatccccggtggccatctgctggagaacatgaagaccatttggatgaacggcgtcggcgtcaacagcgcgccgttctggctgatgatgctcaacagcttcatcatggcgttcgccattacggtcggcaaaatcgtggtgtcgatgctttcggcgttcgctatcgtctggttccgctttccgctgcgtaacctgttcttctggatgatctttatcaccctgatgctgccggtcgaggtgcgtattttcccgacggtggaggtgatcgccaacctcaacatgctcgacagctatgccgggttaacgctgccgttgatggcttcggccaccgctaccttcctgttccgccagttctttatgaccctgccggacgagctgattgaagcggcgcgtatcgatggcgcttcgccgatgcgcttctttcgcgacatcgtgctgccgctgtcgaaaaccaacctcgccgcgctgttcgtcatcacctttatctacggctggaaccagtatctatggccgttgctgattattcaggatgtgaatcttggcaccgccgtcgccggtattaaaggcatgatcgccaccggcgaaggtactacccagtggaatcaggtgatggcggcgatgctgctgaccctgatcccgccggtcgtcatcgttttagccatgcagcgcgcgtttgtgcgcggcctggtcgatagtgagaaataa

SEQ ID NO: 212867 - DNA, 888 bp, Klebsiella pneumoniae
atgtcatcatcccgtccggtattccgctcgcgctggctgccctatgtgctggtcgcgccgcagctgattatcacgttgattttctttatctggcccgcaggcgaagcgctgtggtactcgctgcagagcgtcgatccctttggcctttccagccagttcgtcggcctggataactttgttgcgctgttccacgatccgtactacctggactcgttctggaccaccataaaattcagcgccctggtgaccgtcagcggcctgctcatttcactgtttttcgccgcgctggtcgactatgtggtgcgcggcagccgcttttatcaaacgctgatgctgctgccgtacgccgtggcccccgccgtcgcggcggtgctgtggatcttcctctttaaccccgggcgcgggctgatcacccatttcctcggcgagctgggctacgactggaaccatgcgcagaacagcggccaggcgatgtttctggtggtcttcgcctcggtgtggaaacagataagctacaacttcctgttctttttcgccgcgctgcagtcgattccgcgttcgctggttgaggccgccgccatcgacggcgccgggccgattcgtcgcttctttaagctggcgctgccgctgattgcgccggtgagtttcttcctgctggtggtcaacctggtttatgccttcttcgacaccttcccggtgatcgatgccgccaccgccggcggcccggtgcaggcgaccaccactctgatctacaaaatctatcgcgaaggtttcgccgggctcgatctatccgcttccgccgcgcagtcggtggtgctgatgttcctcgtcattatcctgacggtggtgcagttccgttacgttgaaagtaaggtgcgttaccaatga

SEQ ID NO: 212868 - DNA, 1317 bp, Klebsiella pneumoniae
atgatatcgttacgacatacagctttaggactggcgctgagcctggcttttgccggtcaggccctggcggttaccaccatcccgttctggcactcaatggaaggcgagctgggtaaagaagtggattctctggcgcaacgctttaacgcggccaatcctgattacaaaatcgttccggtatacaaaggcaactacgagcagagcctgagcgccggtattgccgccttccgtaccggcaacgcgccggctatcctgcaggtgtatgaagtcggcaccgccaccatgatggcgtcaaaagccattaagccggtctaccaggtgtttagcgaggcgggcatcaagtttgatgaatcgcagttcgtaccgacggtggccgggtattacaccgattcgaaaaccggccatctgctctcccagccgtttaacagctctaccccggtgctctactacaacaaagacgccttcaaaaaagccggcttagatccggatcagccgccgaagacctggcaggatctggcggcctacaccgcgaagctgaaagccgccgggatgaagtgcggctacgccagcggctggcagggctggatccagattgaaaacttcagcgcctggcacggtctgccggtggccacgaagaataacggcttcgacggtaccgacgcggttcttgagttcaacaagccggagcaggtgaagcatatcgcgctgctcgaagagatgaacaagaagggcgatttcagctacttcgggcgtaaagacgagtctaccgaaaagttctataacggcgactgcgccattaccactgcctcgtccggatcgctggccgatatccgccagtacgccaaatttaactacggcgtcggcatgatgccttacgatgccgacgtgaaaggcgcgccgcagaacgccatcatcggcggggccagcctgtgggtgatgcagggcaaagacaaagagacctacaccggcgtggcgaagttcctcgacttcctgaccaaaccggaaaacgccgccgagtggcaccagaaaaccggctacctgccgatcactaccgcggcctacgatctgacgcgtcagcagggcttctatgataagaacccgggcgccgatatcgctacccgccagatgctgaacaagccgccgttgccgttcaccaaaggtctgcgcctgggcaacatgccgcaaatccgcaccatcgtcgatgaagagctggagagcgtgtggaccggcaagaaaaccccgcagcaggcgctggattccgccgtgcagcgcgggaaccagctgctgcgtcgcttcgagcaagcgaccaaatcgtaa

SEQ ID NO: 212869 - DNA, 369 bp, Klebsiella pneumoniae
atgacgctgcagattatctcagcggaagagataatacagtttcacgacaggctgctccgcgtcacgcctggcgttgccggtatgcccgatccagggcgtgccgaagcgataatgtatagggtgctaaacaaaattgaatatgaaggtgtgacagacgtgtggcgactcgctgcgatgcatctgctggcgatttctcgcggtcatatatttaatgatggtaataagcgtacggcactgtttatcactctgctttttttaaagcgaaatggaattatattgccggcgaatccagacttcgtcggcatgaccgtcgaggcggcagcagggcaacttaccctggaacagattgtcgcgcgcttgcgcggatga

SEQ ID NO: 212870 - DNA, 222 bp, Klebsiella pneumoniae
atgagaacggttaactatagcgaagcccggcaaaatctggccgatgtgctggaaagcgcagtgacaggtgtacctgtgaccattacccgtcgtgggcataaatctgcagtcatcattagtgcagaagagtttgaacgctaccagacggccagaatggatgatgagttcgcggctatcatggcggttcatggtgatgagatcagggagcttgcggataaatga

SEQ ID NO: 212871 - DNA, 714 bp, Klebsiella pneumoniae
atggaaaacgcgatgttaacttttgacaacgtcagcgcccactacggcaagattcaggcgctgcacaacgtcagcctgcatatcaaacagggcgagatcgtcacgcttatcggcgccaacggcgcggggaaaaccaccctcctcggcacgctgtgcggcgacccgcgcgcctccagcgggcgcattgtctttgacggtaaggatattaccgactggcaaaccgcgaagatcatgcgcgaggcggtggcgatcgttccggaagggcggcgcgtcttttcgcgtatgacggtggaagagaacctggcgatgggcggtttttttgccgaccgcgatcagttccagacccgcatcaaatgggtgtatgagctgttcccgcgtctgcatgaacgccgtattcagcgcgccggcaccatgtccggcggcgagcagcagatgctggcgatcggtcgcgccctgatgagccaaccgcgcctgctgctgctggatgaaccgtcgctggggctggcgccgattatcattcagcagattttcgacaccatcgagcagctgcgcgagcagggaatgacgatcttcctggttgagcagaacgccaaccaggcgctgaagctggccgaccgcggctatgtgctggagaacggccacgtggtgctggaggacaccggcgacgcgctgttggccaacgaggcggtgcgcagcgcctatcttggcggttaa

SEQ ID NO: 212872 - DNA, 768 bp, Klebsiella pneumoniae
atgagtcagccattattatccgttagcggcctgatgatgcgtttcggcggtctgctggccgtcaacaatgtgtcgctggagctcagagagcgcgagatcgtctcgctgatcggccccaacggcgccgggaagaccaccgtctttaactgcctgaccggtttttacaagcccaccggcggcactattctgctgcgcgaccagcacctggaagggctgccgggtcagcagattgcgcggatgggcgtggtgcggaccttccagcacgtgcgcttgttccgcgaaatgacggtgattgaaaacctgctggtggcgcagcatcagcagctgaaaaccgggctcttctccggcctgctgaaaacgccggccttccgtcgggcgcagagcgaagcgctggacagggccgccacctggctggagcgtatcggcctgctggagcatgccaaccgtcaggccagcaacctggcctacggcgaccagcgtcggctggagattgcccgctgcatggtgacccagccggaaattctgatgctcgatgaaccggcggcggggctgaacccgaaagagaccaaagagctggacgagcttatcgccgagctgcgtaaccatcacaacaccaccatcctgcttatcgaacacgatatgaagctggtgatgggcatttccgatcgcatctacgtcgtgaaccagggaacaccgctggccaacgggacgccggaagagattcgtaataacccggacgtgatccgcgcataccttggtgaggcataa

SEQ ID NO: 212873 - DNA, 1278 bp, Klebsiella pneumoniae
atgaaaccgatgcgaattgcaatggcgctgctctctgccgtgatgttcttcattctggcgggcgtctttatgggcgtgcagctggagctgaacggcaccaaactggtggtcgataccgccgccgatattcgctggcagtggatcttcatcggtaccgcggtggtctttttcttccagctgctgcggccgctgttccagaaagcggttaagaacgtctccgggccgaagtttattatgccggcgattgacgggtcgacggtgaagcagaagctgttcctgatcgccctgctggtgattgccgtggcctggccgtttatggtgtcgcgcggcacggtggatatcgccaccctgacgatgatctatatcatcctcggcctcgggttgaacgtggtggtcggcctttccggcctgctggtgctgggctacggtgggttctatgccatcggcgcgtatacctttgcgctgctgaaccactattacggtcttggcttctggacctgtctcccgctggccggcctggtctccgcggcggccggtttcctgctgggcttcccggtgctgcgtttgcgcggcgactacctggcgattgtgaccttaggcttcggcgagatcgtgcgcattctgctgctcaacaataccgagatcaccggcgggccgaacggcatcagccagatcccgaaaccgaccttctttggcctcgaatttagccgcagcgcccgcgaaggcggctgggataccttcagcaacttcttcggcgtcaaatacgatccctccgaccgggtgattttcctctacctggtggcgttgctgctggtagtgctcagcctgttcgtcatcaaccgcctgctgcgaatgccgctgggccgggcgtgggaagcgctgcgtgaagatgagatcgcctgtcgttcgctgggcctgagcccgacgcgcatcaagctgaccgcctttaccatcagcgccgcgtttgctggcttcgccggcacgctgttcgccgcgcgccagggcttcgtcagcccggaatcctttaccttcgccgagtcagcctttgtgctggcgatcgtcgtgctgggcgggatgggctcgcagttcgcggtgatcctcgcggctattctgctggtggtctcgcgcgagttgatgcgtgacttcaacgaatacagcatgttaatgctcggcggcctgatggtgctgatgatgatctggcgtccgcaggggcttctgccaatgacgcgcgtgcagttgaagctgaaaaacggtcaggcgaaaggagagcaggcatga

SEQ ID NO: 212874 - DNA, 927 bp, Klebsiella pneumoniae
atgtccgagcagtttctctattttctgcagcagatgtttaacggcgtcacgctgggcagtacctatgcgttgatcgccatcggctatacgatggtgtacggcattatcggcatgatcaacttcgcccacggcgaggtctatatgattggcagctatgtctccttcatgatcatcgccgcgctgatgatgatgggcattgacactagctggctgctggtcgccgccggattcgtgggcgccattgtgattgccagcgcctacggctggagcattgagcgcgtggcctatcggccggtgcgtaactccaagcgcctgattgcgctgatctccgccatcgggatgtctatcttcctgcagaactacgtcagcctgacccagggctcccgcgacgtggcgctgccgagcttgtttaacggccagtgggtcgtcggccacagcgacagcttctccgcgacaatcaccaccatgcaactggtgatctgggtggtgacctttatcgccatgctggccctgacgctgtttattcgctactcgcggatggggcgcgcctgccgcgcctgcgcggaagatctgaaaatggccagcctgctcgggattaacaccgaccgcgtcattgccctgacctttgtcatcggcgcagcgatggcggcggtggccggcgtgctgctggggcagttctacggcgtgattaacccctacatcggctttatggccgggatgaaggcgttcaccgccgccgtgctcggcgggatcggcagtatccctggcgcgatgatcggcggcctgatcctgggtattgccgaggcgctctcttccgcctatctcagcaccgaatataaggacgtcgtttccttcgcgctgctgattctggtgctgttagtgatgccgaccggcattctgggccgcccggaggtggaaaaagtatga

SEQ ID NO: 212875 - DNA, 1110 bp, Klebsiella pneumoniae
atgaaaaggaacgcgaaaaccatcgtcgcgggcattgtcgcattagcgatgtcgcacgcggcgatggccaaggatattaaggtcgccgtggtcggcgcgatgtcggggccggtggcccagtggggcgacatggagttcaatggcgcgcgtcaggcgattaaagacatcaacgccagcggcggcattaagggcgacaagctggtggccgtcgaatatgacgacgcctgcgatccgaagcaagcggtcgcggtggccaacaaaatcgtcaacgacggcattcagtacgttatcggccacctgtgctcctcttccactcagccggcttccgacatctatgaggatgaaggcatcctgatgatctcccccggggcgaccaatccggagctgacccagcgcggataccagtacatcatgcgtaccgccggcctcgactcctcgcaggggccgaccgcggcgaaatatatcgtcgagaaagtcaaaccgcagcgtatcgccatcattcatgacaagcagcagtacggcgaagggctggcgcgttcggtgcaggacaacctgaagaaagccggggccaacatcgtcttcttcgatggcatcaccgcgggggaaaaagatttctccgccctgctggcgcgcctgaagaaagagaacatcgacttcgtctactacggcggctactacccggaaatgggccagatgctgcgccaggcgcgctccgtcgggttgaaaaccgtgtttatggggccggaaggggtcggcaacgcctcgctgtccaatatcgcgggcgccgcggcggaaggcatgctggtgacaatgccaaaacgctacgatcaggaccctgccaacagcgccatcgtcaacgcgctgaaagcggagaagaaagatccgagcggaccgtacgtctggatcacctatgccgccgttcagtcgctggcgcaggcgatggacagaaccggcagccagcagccgctggatttaatcaaagatttgaaagcgcacggggcgaaaaccgtgattgggccgctgacctgggatgaaaaaggcgatctgaagggatttgagtttggtgtcttccagtggcacgccgacggctcttcgagcgcggcgaaataa

SEQ ID NO: 212876 - DNA, 384 bp, Klebsiella pneumoniae
atgaaactgaccattatccgtttacagcacttcagcgatcaggatcgcattgatctggggaaaatctggccgtcgcaggatctgtcgacgctgacccttgatgaaaaccatcgtctctacgccgcccgctttaacgagcgcctgctgggcgccgtgcgcgttaccctgcgcggcgtcgaaggtgagcttagcgatctgtgcgtgcgtgaagtgacccgccgccgcggcgtcgggcaatacttagtggaagagacgttgcgtgataacccggcgatcaatagctggcgcgtcgccgaccacggggtggaggaccgcggcgtgatggcggcctttatgcaggcgctcggctttagcgcccagcagaatggttgggaaaagcattaa

SEQ ID NO: 212877 - DNA, 1098 bp, Klebsiella pneumoniae
atgaagggtaaagcgttactggcaggatgtattgccttagttatgagcagcgcggcgctggcggaagatatcaaaatcgcggtagtcggggcgatgtccggcccggtggcccagtacggcgaccaggagtttaccggcgcagagcaggcggtagcggatatcaacgctaagggcggcatcaagggcaataagctgcagatcgtcaaatatgatgacgcttgcgacccgaaacaggcggtagcggtagccaacaaagtggtcaacgacggcatcaaatacgtcattggtcacctgtgttcctcttccactcagccggcgtctgatatctatgaagacgaaggcattctgatgattaccccggcagcgactgctccggagctgacggcgcgcggctataaactgatcctgcgcaccaccggtctggactccgatcaggggccaaccgcggcgaaatacattctcgacaaagtgaagccgcagcgtatcgcagtggtacatgacaaacagcagtacggcgaaggtttggcccgtgcggtgcaggatggcctgaaaaaaggcggggcgaacgtggtcttcttcgacgggatcaccgccggtgagaaagatttctccaccctggtggcgcgcctgaagaaagagaatatcgatttcgtctactacggcggctatcacccggaaatgggccagatcctgcgtcaggcgcgcgccgccggtctgaaaacccagtttatgggcccggaaggcgtagcgaacgtctccctgtctaacatcgccggcgagtcggcggaaggcctgctggtaaccaagccgaagaactacgaccaggtgccggcgaacaaaccgatcgtggatgcgatcaaggcgaagaaacaggatccgagcggcgccttcgtgtggaccacctacgcggcgctgcagtcgctgcaggcaggcctgaatcagtctgacgatccggcggaaatcgctaaatacctgaaaggcgcgacagtagacaccgtgatgggcccgctgtcgtgggatcagaaaggcgacctgaaaggctttgagttcggggtctttacctggcatgcgaacggtacggcgaccgacgccaaataa

SEQ ID NO: 212878 - DNA, 1320 bp, Klebsiella pneumoniae
atgatggttctccgaatgaaagcctgtcctcagcatagtactgggaaggagggagtgaccatctcattaaatattatgtctgaaaactccaccttttctcccgtcctcaccggccgggaacgtacggctgtccctgcaaaatctctgagcttcgtcgaaggggtatcgatgattgtcggtaccaatattggcgcgggcgtcctctctatcgcctatgcgtcgagcaaagcgggcttcttaccgctgctgttctggctggtgctggtgggcagcctgacgacggtgactatgctctatgtcgcggaatccacgctgcgcacccgtaaacatctgcagctcagtggattatcgaagcgctacgtcggcggctttggcgcgctgatgatgtttctctccgtctgcgtcaatagcgtcggggcattgacggcgtatatgaccggcagcggtaagctgctgcactccctgtttggcatctcgccggcgctgggcagcgtgctgtttttcgttccggcggcaggggtactctacctggggctgaaggcgatcggccgcggtgagaaatttatcagcatcggcatggtggtgatgatctcggtgctggtgattgccacgctgttgaaagataccacccgcgtcggctatctgctcgacggcaactggctgtatatggttccggtcttcaacgtcgtggcattctgcttctcggcacagtatatcgtgccggagatggcgcggggcttcgccgacaaaccggaaaaattgcctaaagccatcatggtcggtatggcgctgacctttaccctgctggcgctggtgccgttgtcggtgatctcgcttaacggtctcgacaatatctcggatgtggccaccatctcctgggggcgggcgcttggcgaatgggccttcttctcagccaatctgtttgcgctgtgcgcgatgctgacctcctactggggactgggcggcagcttcctgaccaatatcttcgatcagttccgcctggggaatgacgaacagcccgcccggcgcctgatggtgctgctggtggtggcgatcccgccgttcgtactggcctatagcggcatggtctccttcgtcaacgcgctctattttgccggggtgttcagcggcgtcattttatcgattatgccgatcctgatgctcaagggcgcccgccagcgtggcgatctgaccccgggctggacctgtccggcctggatgacccatccgcttatccaatgcttcattgtgttgttgtatctttgcagcgccgcctacgcgatagcatccgcggtgggctacctacccgcaggctggtaa

SEQ ID NO: 212879 - DNA, 843 bp, Klebsiella pneumoniae
atgcattcattacaacgtaaagtactacgcactatttgccctgatcagaaaggcctcatcgcgcgtatcaccaatatctgctacaagcatgaactcaacattgtgcagaacaatgagtttgttgaccaccgtaccggtcgtttctttatgcgcaccgaactggaaggcatttttaacgacgctactctgctggccgatctcgacagcgccctgcctgaaggctccatccgcgaactgaatccggcaggccgtcgccgagtggtgattctggtgacgaaagaggcgcactgtctgggcgatctgctgatgaaagccaactacggcgggctggatgtcgatattgccgcggttatcggcaaccatgacaccctgcgctcgttggtggagcgctttggtattccgtttgagctggtcagccatgaaggactgagccgcgaagaacacgatcagcggatgggcgatgctatcgccgcccacgaaccggattacgtggtgctggccaagtatatgcgcgtcctgacgccagaatttgtcgcccgcttcccgaacaaaatcatcaatatccaccattcgtttttgccggcgtttatcggcgcccgtccctatcatcaggcctatgagcgcggcgtgaaaatcattggcgctaccgcccactacgtgaatgacaatctggatgaaggcccgatcatcatgcaggatgtgattcacgtcgatcatacttataccgcagaagatatgatgcgcgctgggcgcgatgttgaaaaaaacgtcttgagccgggcgctgtatcaggtactggcgcagcgcgtcttcgtttacggtaaccggacgattattctttaa

SEQ ID NO: 212880 - DNA, 459 bp, Klebsiella pneumoniae; identical to SEQ ID NO: 136621

SEQ ID NO: 212881 - DNA, 903 bp, Klebsiella pneumoniae
atgagaaagcttaaaattggtctggcgctaggtgcgggagccgctcgcggatggtcgcacattggcgtcatcaacgccctccagcgggccggtattgagattgatatcgtagccggttgttctatcggttcgctggtaggggcggcgtatgcttgtaaccgactcccggcactcgaatcatgggtctgctcattcagcaactgggatgtcctgaagctgatggatctctcctggcgccgggggggactgctgcggggggaaaaggtattcaatcattaccgccgcattatgccggtcaccgagattgaacgctgcgagcgccggtttgccgctgttgccaccaatttaagcaccggtagggagctgtggtttaccgaaggcgatctacatttagccattcgcgcctcctgcagtatgccggggttaatgtcgccagtaaggcataatggttactggctggtcgatggcgcggtggtcaatccggttcctgtgtcgctcacccgggcaatgggagcggatattgtgattgccgtcgacctgcaacatgatgcccatcttatgcagcaggatttgttctcccttgaaacgccgcggcaggaagcggaagagaaggaggggccatggcatactcgtctgcgcgcgcgcttgacgcgaatgagttcccgccgtacggccgtgacgccgacggcgatggagatcatgaccacatctatccaggtactggaaaaccgtcttaaacgcaatcgtatggcgggtgacccgccggatatcctgttgcagccatactgtccgcaagtttcgacgcttgattttcatcgcgccggagaggcgattgccgcggggcaactggcggtagaaaagaaaatggatgaattattaccattagtgcgtacagccgtttga

SEQ ID NO: 212882 - DNA, 1014 bp, Klebsiella pneumoniae
atgacgcagccattggcgggaaaacagattctgatagttgaagacgaacccgttttccgctcactcttgcatggatggctgacctcgctgggagcaacaaccttccaggcggaagatggcaaggatgccctgcataaaatgacggaggtgcatccggacctgatgatttgcgacatttctatgccgagaatgaacggtctggagctggtggaaacgctgcgtaaccgcggcgaacagttaccgatcctgatgatctccgccaccgaaaacatggcggatatagctaaagcgttgcgacttggcgtccaggacgtgctgttaaagccagtaaaagatttcgatcgcctgcgcgagaccgtttacgcctgtctctatcccgcgatgttcagttcgcgcgtggaagaggaagagcgtttatttgaggactgggatgcgctggtcagtaatcccatcgccgcttcaagactattgcaggaattacagccgccggtgcaacaggaaatgtcgcactgccgtattcattatcgacaactggtgtcggcagacaagcccggtctggtactcgatatcgcgccgctttcggaaaatgatttggctttctattgtctggatgtcacacgcgcaggcgataatggcgtgttggcagcattattgctgcgcgcgttgtttaatggtctgctgcaggagcaactggcgcaccagggacaacggctaccagaaatgggaagtttgttaaaacaggtgaatcaactgctgcgtcaggcaaatcttccgggccagttccctctgttagtagggtattaccacagcgggctgaaaaatttaattctggtgtcagcgggacttaatggcacgctgaatacaggggagcatcaaattcagattagtaatggcgttcctttggggacactgggtgatgcttatcttaaccaaattagccaacgctgcacctcgtggcagtgccaaatttggggggctggcggtcgtttacgcttaatgttgtctgcggaatga

SEQ ID NO: 212883 - DNA, 903 bp, Klebsiella pneumoniae
atggctgcccttaattctaaagtcagaaaagcggttatcccggttgcgggattaggcaccaggatgctgccggccaccaaagcgattccaaaagaaatgctgccgctggtagataagccgttaattcagtacgttgttaatgaatgcatcgctgcaggaattactgaaattgttctggtaacgcactcgtcgaaaaactctatcgaaaaccatttcgataccagttttgagctggaagcgatgctggaaaaacgtgtaaaacgccagctgctggaagaagtgcagtctatttgcccgccgcacgtgactattatgcaagttcgtcagggcctggcgaaaggtctgggtcacgcggtgctgtgcgcccatccggtagtgggagatgagccggtcgcggttattctgccagacgttattctggatgaatatgaatccgatctgagccgcgataacctcgctgagatgatctctcgcttcgatgagactggcgccagccagattatggttgaacctgtcgaagacgtaaccgcttatggcgtggttgactgcaaaggcgaatccctgaagccgggcgaaagcgtaccgatggtgggcgtggttgagaagccaaaagctgacgttgcgccgtccaacctggcggtggtggggcgttatgtcctcagcgctgatatctggccgctgctggcgaaaacccctccgggcgctggtgatgaaattcaactgactgacgccattgatatgctgatcgagaaagaaacggttgaagcttatcatatgaaaggcaagagccatgactgcggtaataagcttggctacatgcaggcgtttgtcgaatatggtattcgtcacaaaacgctgggcgacgattttaaagcctggctggaaacggcggtagcgaagtaa

SEQ ID NO: 212884 - DNA, 408 bp, Klebsiella pneumoniae; identical to SEQ ID NO: 136625

SEQ ID NO: 212885 - DNA, 528 bp, Klebsiella pneumoniae
atgcgtaccgtcgtttataccgctgagattgatgaccgctttggcgccggaaaagtcagttcgcgtatcgggctctcctcgccggcccgattgtataatccacagacctcgttatttgacgatattgcggcggagcaccagctaaagccgattcactgcgtgctggtggatgaaagccagtttctgacgcgtgaacaggttcatgagctgtccgaagttgtcgatacgctggatattccggtgctttgctatgggttgcggacggactttcgcggtgagctctttaccggcagccagtatttactggcctggtcagataagctggttgagctgaaaacgatctgcttctgcggccgcaaggccagcatggtattgcgcctcgatcaggaggggcgtccttataatgagggtgagcaggtcgtcatcggcggtaatgagcggtacgtatcggtctgccgtaagcattataaagaggcgctgagcgtcggttcgttaaccaaggtacaaaaccagcaccgtccctgctga

SEQ ID NO: 212886 - DNA, 2676 bp, Klebsiella pneumoniae
atggctgttactaatatcgctgaactgaacgcgcttgttgagcgtgtcaagaaagcccagcgtgaatatgccagtttcactcaagaacaagtcgacaaaatcttccgcgccgccgctctggccgctgcagatgctcgaatccctctcgccaaaatggccgtagccgaatccggcatgggcatcgttgaagacaaagtgatcaaaaaccactttgcttccgaatacatttacaacgcttataaagacgaaaaaacctgtggcgttctgtcagaagacgacacctttggcaccatcactattgctgagcctatcggcatcatctgcggtatcgtaccgaccactaacccgacttcaacagccattttcaaatcgctcatcagtctgaaaacgcgtaacgccatcattttctctccgcacccgcgtgcaaaagaagccaccaacaaagcggctgatatcgtgctgcaggctgccatcgcggccggcgcgccgaaggacctgattggctggatcgatcagccgtctgtagaactgtctaacgcgctgatgcatcacccggacatcaacctgatcctggcgaccggtggtccaggcatggtgaaagcagcgtacagctccggtaaacctgctatcggcgtcggcgccggtaacaccccggtagtcattgatgaaaccgccgacatcaaacgtgccgtagcgtccgtactgatgtctaaaaccttcgataacggcgtgatctgtgcttctgagcagtccgttgtggtggttgattcagtctatgacgcggttcgcgaacgtttcgccagccacggcggctatctgctgcagggtaaagagctgaaagccgttcaggacattatcctgaaaaatggcgcgctgaacgcggctatcgttggtcagccagcggccaaaatcgctgaactggcaggcttcaccgtgccggccaccaccaaaattctgattggtgaagtgaccaacgttgacgagagcgagccgtttgctcacgaaaaactgtctccgacgctggctatgtaccgtgcaaaagatttcgaagacgcggtagccaaagcagaaaaactggtcgccatgggcggtatcggccacacctcttgcctgtacaccgaccaggacaaccagccggctcgcgtggcttacttcggccaaatgatgaaaaccgcgcgtatcctgatcaacaccccggcttctcagggtggtatcggtgacctgtacaacttcaaactcgcgccttccctgactctgggttgtggttcctggggtggtaactccatctctgaaaacgttggtccgaaacacctgatcaacaagaaaaccgttgctaagcgagctgaaaacatgttgtggcacaaacttccgaaatctatctacttccgtcgtggctccctgccaatcgcactggatgaagtgattaccgatggtcacaaacgcgcgctgatcgtgactgaccgcttcctgttcaacaacggctatgccgatcagatcacttccgtactgaaagctgcgggtgttgagacggaagtcttcttcgaagttgaagctgacccgacgctgaccatcgtacgtaaaggtgccgacctggcaaactcctttaaaccagacgtgatcatcgccctgggcggcggttccccgatggatgcggcgaaaatcatgtgggttatgtacgaacatccggaaacccacttcgaagaactggcgctgcgctttatggatatccgtaaacgtatctataagttcccgaaaatgggcgtcaaagccaagatggtggcgatcactaccacttccggtaccggttctgaagttacgccgttcgccgtggtgaccgatgacgcgaccggtcagaaatacccgctggcagactacgcgctgaccccggatatggccattgtcgatgccaacctggtgatggatatgccgaaatcgctgtgtgcgttcggtggtctggatgcggtgactcacgccctggaagcttacgtttccgtactggcttctgagttctctgacggccaggcgctgcaggcgctgaaactgctgaaagagtatctgccggcttcctatcacgaaggttctaagaacccggttgcccgtgagcgcgtacacagtgccgcgactatcgccggtatcgcgttcgctaacgccttcctcggcgtgtgtcactcgatggcgcacaaactgggttcccagttccatattccgcacggtctggccaacgccctgctgatctgcaacgttatccgctataacgcgaatgacaacccgaccaagcagaccgcgttcagccagtacgaccgtccgcaggctcgtcgtcgttacgctgaaatcgccgatcacctgggcctctccgcaccaggcgaccgcaccgcagcgaaaatcgagaaactgctggcatggctggaaagcattaaagctgagctgggtattccgaaatctatccgcgaagctggcgttcaggaagctgacttcctggcccacgttgataaactgtctgaagatgcattcgatgaccagtgcaccggcgctaacccgcgctacccgctgatctccgaactgaaacagatcctgctggatacctactacggccgcgaattcgtcgaaggcgaagccggtgcgaaagccgaagttgctccggtaaaggctgagaaaaaagcgaaaaaatccgcttaa

SEQ ID NO: 212887 - DNA, 648 bp, Klebsiella pneumoniae
gtgactcaatcactgttcgatttttctgcatatttcaagtttttcatcggcttatttgccctggttaacccggttggcattattccggtattcatcagtatgaccagctatcagccggctgcggtgcgtaataagaccaacctcaccgccaacctgtcggtggcgatcatcctcctgacgtcgctgttcctcggcgatggcattctgcagattttcggtatctccattgactccttccgtatcgccggcggcatcctggtggtgaccatcgcgatgtcgatgatcagcggtaagctcggcgaagataagcagaacaagcaggaaaagtcggagacggcggtccgggagagcatcggcgtcgttcctctcgcgctaccattaatggccgggccaggggcaatcagttcaactatcgtctgggggacccggtaccactcctgggtgcatctggtcgggttctcactggcgatagcggtatttgccctctgctgctgggggattttccgtatggcgccgtggctggtccgtttgctggggcagacgggaatcaacgtcatcacccgtattatgggcctgttgctgatggctctcggcattgagtttattgtgaccgggattaaagcgcttttcccaggactgctgagttag

SEQ ID NO: 212888 - DNA, 1635 bp, Klebsiella pneumoniae
atgaccatcatcactaaaaagcgtttaatcgccgcgggagtgctatccgcactgatcgccggcaatatggcaatggcagcggatgtcccggctggagtgcagctggcagagaagcaaaccctggtacgtaatagcggcgccgagccgcaatcgctggacccaaataaaatcgaaggggtgccagaggccaatattagccgcgacctgttcgaaggtttgctgaatacttcgccgaaagatggccacccgatcccaggcgtggcggagagctgggataataaagattttaaagtctggaccttccatctgcgtaaagatgcaaaatggtctaacggcgagccggttaccgcccaggacttcgtatacagctggcagcgtctggtagatccgaaaacagcttctccttatgccagctatccgcaatatggtcatatcgttaacgtcgacgaaatcattgacggcaagaaagcgccgagcgagctgggcgtaaaagccattgacgaccacacgctggaagtcaccctcagcgaaccggtaccctatttttataaactgctggttaacccggcgatgtctcccgtctacaaaccggccatcgaaaaatttggcgaaaagtggacgcagcctggcaatatcgttaccaacggcgcgtatactctgaaagactgggtggtcaacgagcggatcgtgatggagcgtaacccgcactattgggataatgctaaaaccgtcattaacaccgttacctggctgccgacctcttccgaagtgacctatgttaaccgctaccgcagcggtgaactggacatgacttataaccagttgccgatcgaactcttccagaagctgaaaaaagagatccccaacgagctgcacgttgacccctatctgtgtacctattattacgaaatcaacaaccagaaggccccgttcaccgacgtgcgcgtgcgtaccgcgctgaagctgggtctggatcgcgatattattgctaataaggtgaaaggacagggcgatctgccggcctacggctacacgccgccttacaccgatggcgcgaagctgagcgagccggaatggtttacctggtcgcaggaaaaacgcaacgaagaagcgaaaaaactgctggccgaagccggctatagcgccgataaaccgttgaccttcaacctgctgtataacacctctgatttgcacaagaagctggcgattgccgccgcctcgctgtggcgtaaaaacctgggcattgacgtgaagctggtcaaccaggagtggaaaacgttcctcgatacccgtcatcagggcacctatgacgtggcgcgtgcgggctggtgcgccgactataacgagccaacctctttcctgaacaccatgctctctgacagttcaatgaacaccgcgcactataagagcccggcgttcgacaagattatggctgaatccgtaaaagcatccgatgaagcgcagcgcacggcggcctatgcgaaagcagagcagcagctggacaaagacagcgcgatcgtaccggtctattactacgttaacgcccgcctggtgaaaccgtgggtcggtggctataccggtaaagacccgatggataacgtctataccaaagacctctacgttatcaaacattaa

SEQ ID NO: 212889 - DNA, 921 bp, Klebsiella pneumoniae
atgttaaaatttatcttacgtcgctgtctggaagcgattccgacgctatttattcttatcaccatctcattcttcatgatgcgtctggcgccgggaagtccttttaccggggaacgcacgctaccgccggaagtcatggcgaatattgaagcaaaataccatttaaacgaccctatcatgacgcagtacttcaattatctgaagcagctggcgcatggcgattttggtccctcttttaaatacaaagattattccgtcaacgatctggtggccgccagcttcccggtttcagcgaaactgggcttcgccgcctttttactggcggtggtgatcggcgttgccgccggggtgatagccgccctgaagcaaaatacccgctgggactacgcggtgatgggggtagccatgaccggcgtggttattccgagctttgtggtcgcgccgctgctggtgatgatctttgccattaccctgcactggctgccgggcggcggctggaacggcggggcgctgaaatttatgatcctgccgatggtggcgctttccctggcctatatcgccagcatcgcgcgtatcacccgcggctcaatgattgaagtgctgcactctaactttatccgcaccgcgcgggcgaaggggctgccgatgcgtcgcattattctgcgccatgcgctgaagccggcgctgctgccggtgctctcctatatggggccagctttcgtgggcattatcaccggctcaatggtcattgaaaccatttacggcctgccggggatcggccagctgttcgttaacggggcgcttaaccgcgactactctctggtgctcagcctgacgatcctcgttggcgccctgactatcctgttcaacgccatcgttgacgtgctgtacgccgttatcgatccgaagattcgctactga

SEQ ID NO: 212890 - DNA, 909 bp, Klebsiella pneumoniae
atgatgttaagtaagaaaaatagcgaggcgctggaaaacttcagtgagaagctggaagtggaggggcgtagcctctggcaggacgcgcgtcgtcgctttatgcataaccgcgccgcggtgaccagcctgattatgctggtgctaattgcgctgttcgttaccttcgcgccgatggtatcgtcgttctcctacttcgataccgactggggcatgatgtccaatgctccggatatggcctccggccactacttcggaaccgactcctccgggcgcgacctgctggtgcgcgtagcgatcggcgggcgcatttcgctgatggtcggggtggcggcggcgctggtggcggtgatcctcggcacgctgtacggttcgctctccggttatctcggcggcaaagtggattcggtgatgatgcgtctgctggagatcctcaactccttcccgtttatgttcttcgtcatcctgctggtgaccttttttggtcagaatatcctgctgatctttgtcgccatcggcattgtgtcctggctggatatggcgcgtatcgtgcgcgggcagacgctaagcctgaagcgcaaagagtttatcgaagccgcgcaggtcggcggggtctcgacggcgagcatcgtgctgcgccatatcgtccccaacgtgctgggggtggtggtggtgtatgcctcgctgctggtccccagcatgatcctcttcgaatccttcctcagtttcctgggactggggacgcaggagccgctcagcagctggggggcattgctcagcgatggcgccaactcaatggaagtttcgccctggctactgttgttcccggcgggtttcctggtggtgaccctgttctgtttcaactttatcggcgatggtctgcgtgatgccctcgacccgaaagaccgctaa

SEQ ID NO: 212891 - DNA, 1014 bp, Klebsiella pneumoniae
atgaccatgattgaaacggcaaaagcgccgcaagcgcagagccacagcggactactgctggacgtgaaagatcttcgcgtcacctttaaaacgccggatggcgacgtcaccgccgtcaatgatctgaacttcaccctgcaggcgggcgagacgctcggcattgtgggcgaatccggctccggtaaatcgcaaaccgccttcgccctgatgggactgctggcggccaacggtcgcatcgggggttccgccacctttaacggtcggcaaatcctcaatttgcccgagcgtgagctgaacaaactgcgcgctgaacaaatctcaatgattttccaggatccgatgacctctcttaacccctatatgcgggtgggcgagcagttaatggaagtcctgatgctgcataaagggctgagtaaagccgaagcgtttgaagagtcggtgaagatgctcgacgcggtaaaaatgccggaagcgcgtaagcgcatgaaaatgttcccgcacgagttctccgggggcatgcgtcagcgcgtgatgattgccatggcgctgctgtgccggccccggctgctgattgcggatgaaccgaccactgccctggacgttaccgtgcaggcgcagatcatgacgctgttgaatgagcttaaacgcgaattcaacacggccattatcatgatcacccacgaccttggggtggtggcaggtatctgcgataaagtgctggtgatgtacgccgggcgcaccatggagtacggtcaggcgcgcgatgtcttctatcaaccgtcgcacccatactctattgggctgttgaatgcggttccacgtctggatgcggaaggcgatgcgttgttgaccattcccggcaacccaccgaacctgctgcgattgccgaaaggctgtccattccagccgcgttgcccgcatgccatggagcagtgcagcagcgcgccgccgctggaatcgttcgcgccaggccgcctgcgcgcctgctttaaaccggtgggggatctgctatga

SEQ ID NO: 212892 - DNA, 1005 bp, Klebsiella pneumoniae
atgaacgccgtaactgaacaacgaaaagtcctgctcgaaattgccgacctgaaggtgcacttcgatatcaaagatggcaagcagtggttctggcagccgtcgaaaacgctgaaagcggtggatggcgtgacgctgcgcctatacgagggtgaaaccctcggtgtggtaggggagtcgggctgcggcaaatcgaccttcgcccgcgccattattggtctggtgaaagcgaccgatggcaaagtggcctggctgggtaaagatctgctgggcatgaagcaggaagagtggcgcgacgtgcgcagcgatatccagatgatcttccaggatccgctggcctcgctgaacccgcgcatgaccatcggagaaattatcgccgaaccgctgcgtacctatcatccgaagatgccccgtcaggaagtgcgcgatcgcgtcaaagcgatgatgatgaaagttgggttgctgcccaacctgatcaaccgctatccgcacgagttctccggcggtcagtgtcagcgtatcggcatcgcgcgggcgctgatccttgagccaaagctgattatctgcgatgagccggtctccgcgcttgacgtgtcgattcaggcgcaggtcgtcaacctgctgcagcaactgcagcgtgagatggggctatcgctgatatttatcgctcacgatctggcggtggttaagcatatctccgatcgggttctggtaatgtatctgggccatgcggtggagctggggacctacgacgaggtgtaccataatccgctgcatccctataccaaagcgctgatgtcggcggtgccgatccccgatcctgatctcgagaaaacgaaaactatccaactgctggaaggcgaattaccctcgccgattaatccgccctcaggctgcgtattccgcacccgctgtccgcttgccggaccggagtgcgccaaaacccgcccggtgctggaaggcagtttccgccatgcggtttcctgccttaaggtagacccgttataa

SEQ ID NO: 212893 - DNA, 834 bp, Klebsiella pneumoniae
gtgggtatgctttctgccgctcgtctgcggctttatcatttacttttcgatcagaaccgacgttccggccgccgctttgaagggctgtgcggacttttcgccctgctcagcgtactggtgatatttatcgagtcgggactgggcacgcaatatcacctgacattagatgaatggcatattttcgtctggctggagctgctggtgaccgcggtctttaccctggaatacctgctgcgtatcgctacctggcccaatccgctccactatattttcagcttttgggggctgattgacctggcgacgattttaccgctgtatgtgatgtggctatggccggaaattagcctcaattatgtattcgcctggcgggcaatgcgggcgatccgcgcgctgcgtattctcaaactactgcgctttatgccttcgctcaacgtgttctggcgagcgattgtcagtgcgcgccatcagctgatcctgttttattcgtttatcgccattgtgatggtgattttcggctcgttaatgtatctgattgaggggccggaatacggctttaccacgcttaacgcctcggtctattgggccatcgtgaccatcaccaccgtcggctacggagacatcacgccgcacacgccgttgggtcgcatcctggcctccattcttatcctgatcggctactccattattgccataccgaccggacttatcaccacgcatatgaccagcgccctgaatcgtcgacgacagcagcgcctgtgtccgcagtgtcagcagggcgaccatgacgataacgcccgtttctgccatgcctgcggtcatgccttgccgaagtaa

SEQ ID NO: 212894 - DNA, 330 bp, Klebsiella pneumoniae; identical to SEQ ID NO: 137702

SEQ ID NO: 212895 - DNA, 1461 bp, Klebsiella pneumoniae
atgacaaccttttacacggtggtgaactggctggtcattctggggtactggctgttgatcgccggtgtaacattacgaattctaatgaaacgccgcgctgtcccgtccgccatggcatggttgctgatcatttatatcctgccgctggtggggatcatcgcctatctctcctttggcgagctgcatctcggcaagcgtcgggccgagcgcgccagggcgatgtggccctcgacggccaagtggttaaacgacctcaaagcctgcaaacatatcttcgcggaagataacagcccggtggccgaatccctgttcaagctgtgcgaacggcgtcagggcattggcggcgtaaaaggcaaccagctacagctgctgacggaatctgacgacgtgatgcaggccctgatccgcgatattcagctggcccgtcacaacatagagatggtcttttatatctggcagcccggcggcatggccgacagcgtcgctgaatccctgatggccgccgctcgccgcggagttcactgtcggctaatgctcgactccgcgggcagcgtggcctttttccgcagcccatgggcggcgatgatgcgtaacgccggtattgaagtcgtcgaagctcttaaggttaacctgatgcgcgtgttcctgcgccggatggacctgcgtcagcatcgtaaaatggtgatgatcgataactatatcgcctacaccggcagcatgaatatggtcgatccgcgctactttaaacaggactcaggagtcggacagtggattgatctgatggcgcgaatggaaggcccggtggcgacctcgatgggcatcgtctactcctgcgactgggaaatagagactggcaagcgcattctgccgccgcccccggacgtcaatatcatgccgttcgaagaggccagcggacatactattcacacgatcgcctccggaccgggctttccggaagatcttattcatcaggctctcctcaccgccgcctatgcggcgaaagagcatctgatcatgaccaccccctacttcgtacccagcgacgacctgctgcatgcgatctgtaccgccgcccagcgcggcgttgacgtgagcattattttaccgcgcaagaacgattcgctgctggtaggctgggccagccgggccttcttcaccgagctgctggcggccggggtcaaaatctatcagtttgagggcggactgttgcataccaagagcgtgctggtcgatggcgagctaagtctggtggggaccgtcaacctggatatgcgcagcctgtggctcaacttcgagattaccctggtcatcgatgacgccggtttcggcagcgatctggcggcggttcaggatgattatatctcgcgctcgcgcctgctggatgcccgtctctggttaaaacgtccgctgtggcagcggatcgccgagcgactgttttacttcttcagcccgttgctgtaa

SEQ ID NO: 212896 - DNA, 207 bp, Klebsiella pneumoniae; identical to SEQ ID NO: 137704

SEQ ID NO: 212897 - DNA, 648 bp, Klebsiella pneumoniae
atgttttcaataagccctgtatttttttgggctaacatttatgtacctgccgattttgaggattattgtgtgaataccctgaaaaaaaccgcattgctttctgtacttgccttatatattcctgtgtcgcaagccgcggctaaggaatacagtcttgatccacagcatacctcggttgtgatctcctggaaccatttcggcttctcaaaccctaccgcctatatctctgatgtttcagggaaactggcctttgataaagagaatccggagaaatcctcggtgaacgtcacgctgccagtgaaaaccattgacgctcacgtcaaggcgttaacggatgagtttttaggcaaagagtattttgatgttaaaacgtttcccgacgccactttccagagtaccaaagtggaaagcaaaggcgacaataaatatgatgtggaaggtaatttgaccattaaaggcatcaccaaaccggtggtcctgcatgccgtcctgaataagcaggatatgcacccaatggtgaaaaaagaggccattggatttgatgccaccggggtgataaaacgttcagactttaagcttgataaatatgtgccggcggtaagtgataacgtcaccatcacgttatccacggaagcctatgcaaaataa

SEQ ID NO: 212898 - DNA, 297 bp, Klebsiella pneumoniae
gtgctttacgttatctacgctgaagatatcgccgattctctggaaaagcggctgtcggttcgccccgcgcatctcgcgcgtttacaactcttacacgatgaaggccgactgcttaccgccgggccaatgccggccgttgacagtaacgaaccgggcgcagcaggattcagcggctcaacggtgattgccgagtttgaatcgctggaagcggcccaggcctgggccaatgacgatccgtatatcgccgccggggtttaccgccaggtctcagttaagccgtataagaaggttttttga

SEQ ID NO: 212899 - DNA, 738 bp, Klebsiella pneumoniae
atgacccttgatttacctcgccgctttccgtggccaacgctgctgtccgtggctatccacggtgccgttgtggcggggctgctttatacctcggtacatcaggttattgaacagccttctccgacgcagccgatagagatcacaatggtggcgccggccgatcttgagccgcctccggcggcgcagcctgtcgtggagcccgttgttgaacccgaacctgagccggagccagaggtagcgcctgaaccgccgaaagaggcgtcggtggtgatccataaaccggaacctaagccgaagcccaaacctaaacccaagcctaagccggagaaaaaggttgaacagccgaagcgggaagtgaagccggcagcagagccgcgtccggcctcgccgtttgaaaacaacaatacggcgccggcgcgtacagcgccaagcacctcgaccgcagcggctaaacccaccgttactgctccaagcggcccgcgggcgatcagccgcgttcagccgtcctatccggcgcgcgctcaggcgctgcgcattgaagggacggtacgggtgaagtttgacgtttcgcctgatggccgcattgataatctgcagatcctctctgctcagccggcgaatatgttcgaacgcgaggtgaaaagcgcgatgcgcagatggcgttatcagcagggaagaccgggtaccggcgtaacgatgaccatcaaattccgcctgaacggcgtcgagattaactga

SEQ ID NO: 212900 - DNA, 873 bp, Klebsiella pneumoniae; identical to SEQ ID NO: 137708

SEQ ID NO: 212901 - DNA, 285 bp, Klebsiella pneumoniae
atgagtaatgagattaccgcctgggtcgtcagcgtgaccttccatgaacaggcgctgacggagatcaatgaggtcagcaaccattttacccgtgccgggtttgtactgacgctcaatgatgaagagggcacgccccatgagctgggtaccaacaccttcggcctgctgagcggccagacggccgaggaagttaaggccctcagcgctggcctggcggaagcggcccttggccgcccggcggaaatcgctgtggccacattcgccgagtggttaaaagctcaataa

SEQ ID NO: 212902 - DNA, 933 bp, Klebsiella pneumoniae
atgaccaaaatttacacgctcacgctggccccctcgctggatagcgccacgcaaaccccacagatctacccggaaggcaaacttcgctgcagcgcgccggtatttgaacctggcggcggcgggatcaacgtggcccgcgccgtgacctttctcggcggcaaagccaccgccattttcccagtcggtggcgctaccggcgagcatcttgccgccctgctggccgatgagcaagtgccggtcgagaccgtcgaaacccgcgactggacgcggcaaaacctgcacgtccacgtggccgccagcggcgaacagtatcgcttcgttatgcccggcgcggcactgacggacgatgaattccgccgtctggaagagaaggttctgattatcgaacccggctctctgctggtggtcagcggcagcctgccgccaggtattagcgttgataacctgatgcagctggtgaaaaatgcgcaacagcagggactgcgctgcatcattgacagttccggcgatgcgctggccgccgcgctggacgtcggtaatattgagctggtgaaaccgaaccagaaagagcttagcgccctcgtgcagcgcgatctcagccaacccgatgacgtgcgccttgccgctcagtcgttgatccagtccggtaaagtgcgccgggtggtggtctccctgggtccgcagggggcattaggcgtggacgccagcggcagcgttcaggtagtgccgccaccgatgaaaagccagagcaccgtcggcgctggcgacagcatggtgggcgccatgaccttgcgtctggcggaaaacgccagccttgaagacatggtacgctttggcgtcgccgccggtagcgccgcgaccatcaaccagggcacccgcctctgctcgcgggccaatacgcaaaaaatctatgattatctctgcgggcgttga

SEQ ID NO: 212903 - DNA, 759 bp, Klebsiella pneumoniae
atgaagcttttaaagacagtacccgcagcggttatgctggcgggggggctttttgcgtctgttggcgcaatggccgatgattctgtatttaccgtcatggatgacccttccgctgccaaaaaaccgttcgaaggggtggttaacgcaggctacctggcgcagtccggcaacaccaagagctcttcgatgacggcggattccaccctgacctggtatggtaataccaccgcctggtcgctgtggggcaacgccagcaacacgtcgtccaatgatgagcgatcctcagaaaaatatgctgtcggcggacgtagccgctacaacctgaccgatatgaactatgtctttggtcagggtagctggctaacagaccgctacaacggctatcaacagcgcgatgttgtgacggcgggctatggtcgtcagatcctcaacgggccggtgcacagtctgcggtttgaatttggtcctggcgttcgctatgacgaatataccgacggggatactgatacccagccgttgggttatgcttcgggtacctgggcttggcagatgaccgataacgccaaattttcgcaaggggtatcggtgttcggcgccgaggacaccacggtcaactcagagagcgcgttaaacgtggcgattaacgcccatttcgccctgaaggtcgcctacaacgtgacctggaactctgagccgcctgcgtccgcgccggagcataccgatcgccggacctcgctctccctcgggtataagatgtaa

SEQ ID NO: 212904 - DNA, 234 bp, Klebsiella pneumoniae
atgaaaaacaatcgttataccatcgcagccctggcgctgtgcgtgctttcttttggcgcatcagccgccacgcccgttccgccatcgggtcatcaggatcatacccaggtaggtatcgccaaagcctctgacgttgaggctggttcgaatattgcgcccggcgcccctaccaccggaaaatccatgaacgacgcctttaatgtgcatacgctggtggccggcgagtggtcttaa

SEQ ID NO: 212905 - DNA, 1929 bp, Klebsiella pneumoniae
atgcctgtaattacgcttcctgatggcagccaacgccattttgaccacgcagttagtccgatggatgtcgcgctggatatcggtccaggcctggcgaaagccaccattgccgggcgggtaaacggtgaactggtagacgcctgtgacccgatcgaatccgattccactctctctatcatcaccgcgaaagatgaagaagggctggagatcattcgtcactcctgcgcgcacctgttaggccatgccatcaaacagctgtggcccaacaccaaaatggctatcggtccggttgtcgataatggtttctactatgacgtagacctcgaccacaccctgacccaggaagatatcgacgcgctcgaaaaacgtatgcatgagctcgccgagaaaaactacgacgttatcaagaagaaagtgagctggcatgaagcgcgtgaaaccttcgtgaaacgcggcgaaagctataaagtttctattcttgatgaaaacattgcccatgatgacaagcctggcctgtatcatcatgaagaatatatcgatatgtgccgcggtccgcacgtaccgaacatgcgcttctgccatcactttaagctgatgaaaaccgccggagcctactggcgcggcgacagcaacaataaaatgttgcagcgtatctacggcaccgcgtgggcagataaaaaagcgctgaatgcctacctgcagcgtctggaagaagccgccaagcgtgaccaccgtaaaatcggtaagcagctcgacctgtatcacatgcaggaagaggcgccggggatggtgttctggcacaatgacggctggaccatcttccgtgaactggaaacgtttgttcgttctaaactgaaagagtaccagtatcaggaagtaaaaggtccgttcatgatggaccgtgtgctgtgggaaaaaaccggccactgggacaactacaaagatgcgatgttcaccacctcttctgagaaccgtgaatactgtatcaagccgatgaactgcccgggtcacgtgcagatcttcaaccaggggctgaaatcctaccgcgacctgccgctgcgtatggcggaattcggtagctgccaccgtaacgaaccgtctggcgcgctgcatggtctgatgcgcgtgcgcggctttacccaggatgatgcgcatatcttctgtactgaagatcaggttcgcgatgaagtgaacgcctgtattcgtatggtctacgatatgtatagcacctttggcttcgagaagatcgtcgtcaaactgtcgactcgcccggaaaaacgtatcggtagcgacgagacctgggatcgcgcggaagcggatctggcggtggcgctggaagaaaataacatcccatttgaatatcaactgggtgaaggggcgttctacggcccgaaaattgaatttaccctgtatgactgcctcgatcgtgcatggcagtgcggtaccgtacagctggacttctctctgccgcagcgtttaagcgcctcctatgtgggcgaaaacaacgagcgtcaggtgccggtcatgattcaccgtgcgattctcggttctctggagcgcttcattggcatcctgaccgaagagttcgcaggcttcttcccaacctggattgcaccagtgcaggtagtggtcatgaatattaccgattctcaggctgaatacgttaacgaattgacgcgtaaactacaaaatgcgggcattcgtgtaaaagcagacttgagaaatgagaagattggctttaaaatccgcgagcacactttacgtcgtgtcccgtatatgttggtctgtggcgacaaagaagtcgaagccggcaaagtggccgtgcgcacccgtcgcgggaaagacctcggcagcatggacgtaaatgaagtgatcgagaagctgcaacaagagattcgcagccgcagtcttcaacaactggaggaataa

SEQ ID NO: 212906 - DNA, 435 bp, Klebsiella pneumoniae
gtgagtctgagagaagctatcgaaaaggctgaagaggctggagtagatttagttgaaatcagccctaacgccgagccgccagtttgtcgtatcatggactacggcaagttcctttatgaaaagagtaagtcttctaaggaacagaagaagaagcagaaagttatccaggttaaggaaattaaattccgccctggtactgatgaaggtgactatcaggtaaaactccgcagcctgattcgctttctcgaagatggcgataaggccaagatcacgctgcgtttccgcggtcgtgagatggcccaccagcagatcggtatggaagtgcttaaccgcgtgaaagacgatctggttgaactggcagtagtcgaatccttcccaacgaagatcgaaggccgccagatgatcatggtgctcgctcctaagaagaaacagtaa

SEQ ID NO: 212907 - DNA, 198 bp, Klebsiella pneumoniae
atgccaaaaattaagaccgtacgcggtgctgctaagcgcttcaaaaaaaccggtaaaggtggttttaagcacaagcacgctaacctgcgtcacattctgactaaaaaagctaccaagcgtaaacgtcacctgcgtccgaaagccatggtttccaaaggcgatctgggcctggttatcgcgtgcctgccgtacgcataa

SEQ ID NO: 212908 - DNA, 357 bp, Klebsiella pneumoniae
atggctcgcgtaaaacgtggtgtaattgcacgtgcacgtcacaagaaaattttgaaacaagctaaaggctactacggtgcgcgttctcgcgtataccgcgttgccttccaggctgttatcaaagctggtcagtacgcttaccgtgaccgtcgtcaacgtaaacgtcagttccgtcaactgtggattgcacgtatcaacgcagcagcacgtcagaacggtatttcttacagcaaattcatcaatggcctgaaaaaagcctctgttgaaatcgaccgtaagatcctggctgacatcgctgtattcgacaaagtagcgttcaccgctctggtcgaaaaagcgaaagcagctctggcataa

SEQ ID NO: 212909 - DNA, 984 bp, Klebsiella pneumoniae
atgtcacatctcgcagagctggttgccagtgccaaggcagccattaacgaggcatcagatgttgctgcgctggacaacgtccgcgtggaatacctgggtaaaaaagggcatctgaccctgcaaatgaccaccctgcgtgagctgccgccggaagagcgtccggcagccggtgcggtcatcaacgaggcgaaagagcaggtgcagcaggcgctgaacgcgcgtaaagctgaactggaaggcgcagcgctgaatgcgcgtctggccgcagagaccattgacgtctcgctgccgggtcgccgcattgaaaacggcggcctgcatccggttactcgcaccatcgaccgtattgaaagtttcttcggtgagctcggctttaccgtggcgacgggcccggaaatcgaagacgattaccacaacttcgatgcgctgaatattccgggtcaccatccggcgcgcgctgaccacgacactttctggttcgatgccactcgcctgctgcgtacgcagacctccggcgtgcagatccgcaccatggaaaaccagcagccgcctatccgtattatcgcgccgggccgcgtctatcgtaacgactacgatcagacccacaccccgatgttccatcagatggaaggtctgatcgttgataaaaatatcagcttcaccaacctgaaagggacgctgcacgacttcctgaacaacttctttgaagaagatctgcaggtccgcttccgtccgtcctacttcccgttcaccgaaccgtctgcggaagttgacgtgatgggtaaaaacggcaaatggctggaagtgctgggctgcgggatggtgcacccgaacgtgctgcgtaacgtgggtatcgatccggaagtctactccggcttcgccttcggcatgggcatggagcgtctgaccatgctgcgctatggcgtcaccgatctgcgcgcgttcttcgaaaacgatctgcgtttcctcaaacagtttaaataa

SEQ ID NO: 212910 - DNA, 2388 bp, Klebsiella pneumoniae
atgaaattcagtgaactgtggttacgcgaatgggttaacccggcgatcgacagcgaagcgctttccgatcagatcaccatggcgggcctcgaagtagatggcgttgagccggtcgccggcagcttcaacggcgtcgttgtcggtgaagtggtggagtgcggtcagcacccgaacgccgataaactgcgcgtcaccaaagtcaacgtcggcggcgaacgcctgctggacatcgtctgcggcgcgccaaactgccgtcaggggctaaaggtcgcggtagccaccatcggcgccgtgctgccgggcgatttcaaaatcaaggccgcgaagctgcgcggcgagccgtctgaggggatgctgtgctccttctccgagctgggtatttccgacgaccatagcggtatcatcgagctgccggcagatgcgcccatcggcaccgatattcgcgaatatctcaagcttgacgataacaccatcgaaatcagcgtcacgccaaaccgcgccgactgcctgggcatcattggcgtggcgcgcgatgtcgctgtcctgaacaaagcgccgctgaacgcgccggaaatcacgccggttgccgcgacgattgacgacgtgctgccgattcaggttgacgcgccgcaggcttgcccgcgctatctggggcgcgtggtgaaaggtatcaacgtcaaagcgccgacgccgctgtggatgaaagagaagctgcgccgctgcgggatccgctccatcgacgcggtggttgacgtgaccaactatgtgctgcttgagctgggtcagccgatgcacgcctttgaccgcgaccgtattgaaggcgggatcgtggtgcgcatggcgaaagaaggggaaaccctggtcctgctcgatggctctgaagcaaagctcgacagcgacactctggtcattgcagaccataacaaagcgctggcgatgggggggatcttcggcggggaacactccggcgttaacgacgaaacccagaacgtgctgctggaatgcgcgttcttcagcccgctgtccattaccggccgcgcgcgccgtcatggcctgcacaccgatgcctctcaccgctatgagcgcggcgtcgatccggccctgcagtataaagcgctggagcgtgcaacccgtctgctgatcgacctctgcggcggtgaagccggcccggtcattgacgttaccagcaaagagaatctaccaacacgcgccaccattacgctgcgtcgcagcaagctggatcgcctgattggccaccatatcgctgacgcgcaggtcaccgacattctgcagcgcctcggctgcgaagtgacggttggcgagggcgaatggcaggcggttgcgccgagctggcgtttcgacatggagatcgaagaagatctggttgaagaagtggctcgcgtttacggctacaacaacattcctgacgagccggtgcaggcgggtctgatcatgggaacccaccgcgaagcggacctgtcgctgaagcgcgtgaaaacgctgctgaacgacaaaggctatcaggaagtgatcacctacagcttcgtcgacccgaaagtccagcagctgatccacgccggggaagaggcgctgatcctgccaagcccgatctccagcgaaatgtcggcgatgcgcctgtcgctgtggaccggcctgctgggcaccgtggtctacaaccagaaccgtcagcagagccgggtgcgcatctttgagagcggcctgcgctttgtgccggacaccaatgcgccgctgggcattcgtcaggatgtgatgctggccggggcgatctgcggcaaccgctacgaagagcactggacactggcgaaagagacggtcgatttctatgatctgaaaggcgatctggaagccgttctggatttaaccggaaaattagcggatatcgaattccgtgctgaagcgaccaccgcgctgcatccgggacaatccgcagcgatttatcttaaaggtgaacgcattggtttcattggggttgttcatcctgagctggaacgtaaactggatctgaacggtcgcactctggtgttcgaactggagtggaacaagctcgcagaccgcgtggtgcctcaggcgcgcgatatttcccgcttcccggcgaaccgtcgcgacatcgcggtgctggtcgcggaaaacgtggctgccgccgatgttttagccgaatgtaagaaagttggcgtaaatcaggtagttggcgtaaacttatttgacgtgtaccgtggtaagggtgtggcggaagggtataagagccttgcgattagcctgatcctgcaggataccagccgtacactcgaagaagaggagattgccgctaccgttgccagatgtgtagaggcattaaaagagcgattccaggcatcattgagggattga

SEQ ID NO: 212911 - DNA, 300 bp, Klebsiella pneumoniae
atggcgcttacaaaagctgaaatgtcagaatatctgtttgataagcttgggcttagcaagcgggatgccaaagaactggtcgagttgtttttcgaagagatccgtcgtgctctggaaaacggagaacaggtcaaactctccgggttcggcaacttcgatttgcgggataaaaaccaacgcccgggacgtaacccgaagacgggggaggatattcccattacagcccggcgcgtggtgaccttcagacccggtcagaagctgaaaagccgtgtcgaaaacgcgtcgccgaaagacaaataa

SEQ ID NO: 212912 - DNA, 369 bp, Klebsiella pneumoniae
atggaaacaaaccgcatgacaattattcgtaataatccacaacctcgtcttgccgccagcgttgcgtatggcgatctgctgttcctctccgggcagacgccaaaaagcaatgaagacgatatcgttttacaaacccgtgaagtactggagaagatcgacgcgctgctggccgcagccgggagcgataagcagcacattctctccgcgcagatctggttgaaaaatatcgagcgtgactttgccgcattcaatgaggtgtgggtgcaatggatgccggaaggctatagcccggcgcgagcggccgtgcaggcggagatggcgcgaccagaaatcctggtggagatcatgctcaccgccgtcaaagcgtaa

SEQ ID NO: 212913 - DNA, 1254 bp, Klebsiella pneumoniae
atgaacaaacgcattgtcattatcggcggcggcgtggtcggtctggccacggcctgggaactgatcaagcgcggccatcaggtgcaattactggagcgcaatgccgaaccgggcagcgccaccagttttgccaacggcggacaattaagttaccgctacgtcgccccccttgccgacagcggcgttcccctgcagggaatgaaatggatgggcaaagccgattcgccgctgaatatgcgtctcaggatgtctctccagcagtggcgctggctgctgcagtttctgcgcgcctgtaataaccagaccaataaaatgaatggcgaccatattttacgcctgtcgctgctcagccgtcaggtcatgcaggcgtggcgggatgaggataatcttgccgatttccactggcggcgcagcggaaaattaattatccatcgtcgcgaatatgattttaataaagcagcaaaagggattgatcctcagtatcagcaggcgctgaatgctgaagcctgcctgcagctggagccggcgctcaaacatattagtccttctctgcagggcggaatctattcgccaggcgatgaaacggcagattgtcatcagttctgccttgccctgctcgacaagctcaatgccagcagcgactttagcctgctgacccagtgtgaggtgcggcgactccataagcgcgggggacgcatcagcagcctggagaccagtcaggggaccctcaccggcgatgagtatgtcgtcgccgccggtaacggcagtggttctctgcttgggcatctgggggttcgcgtgccgctgtgcgccctgaaggggtacagcctgaccctgccctatcctgaaaaagcaggtattgcccctgacatcagcgtcaccgactacgggcacaaaatcgtttatgcccgccttggccaacagctgcgcatcgcggcgatggtggacatcggctacgacggcgacgaactgcgcgaatgccgcattcaggcgctgaagaacatcgtcgcccgcagctttcctgaactggaggggctggacaaggccgaagtctggaccggcatgcgcccgtcaacgccagccggcccgccgatgctggggcgcgccggctaccccaacctgtggatgaacctcggccagggtagcctcggctttactctcgccgccggcagcgcggtggtgctgggcgcgttaatcgacaatcagatgccagacatttctttagaaggtctcacatggaaacaaaccgcatga

SEQ ID NO: 212914 - DNA, 915 bp, Klebsiella pneumoniae
atgaaactgcgtcatctggaaatcttctatgccgtcatgacctgcggctctttatcgcgggcggcggaagcgctcaatatctcccagcccgcggccagcaaagcgttaaaaagcgccgaaatgaagctgggttttaccctgtttcagcgggtgcgcggcaagctgctgccgaccagcgaggcgatcacacttttcgaaaaagcgcagagcatttatcaggacctggacaacctgcgcctgctggccgacaacctggctcgcgatccgcgcgccaagatcactttaggctgtctgccaagcctggggttaagcctggtgccggagctggtgaccgacttttatcagcaaaacagcaacctggtgatgacgctcactaccgagcacaccgagacgctggtcaaaaaactggatttgcgcgagatagatttggcgctgacgctacagccggtgcagcagggagagatcctgaccaccctgattgccgaagtaccgctggtgtacatcgaccgtcattatcgtcagggggcggtggagatcgaccagatcgaccagcagcgctggatctcgccgggaccgcactcgctctctgccgccatcgccacccgtcgcgacttttccaccacccggctaaacgtccagacctactatatggccaccgagttcgtgaagcgcggcatgggctgcagcatcactgatatcttctccgcccagcacaacctggccccggagatgatccatcccattacgccgccgatggcgattaacctctgtctgttacgccgggccgacgtttccctgagcccgatggcgcaaaagttcgtcgattttctctgccagcgtctgcgccagcagctcaaggagattaacctgcggttataccctgaccataaaaagtcaattgcgccgctggggtaa

SEQ ID NO: 212915 - DNA, 1434 bp, Klebsiella pneumoniae
atgagtgactcaacgctcacaggcaatgcgcctgtcagacaaaatatcacgcggaaaaacgttattattggtctgttattgctgctgttcgtgttgatcgcgctgtggtgccacggtcgaccaggcagcgggcttggtctgctgggatttacgccgctggtggcgctagcgatattatcgctgatcggcgttgatattgtgctggcggtcatctcctcgattattatcgccatgataatgacctcgaccggcctgccggaaatgggcacgatgctggcgaaatccaccgggtcatttattgccaccgttgggcttatcattatgctcggcgccggcgtgggggaagtggccacccgcaccggcgcagcggttgagctggtaaaatttgtcgtccatcgcatcgggttgtcgagtcagacgcgggtgaaattcggcattgtggcgtcatcgattttaatttgcggttcgttgggcactatggccggtggcaatgccattatcgtggcagtaatcattccggtggcggcagcggtacgcttgacgccgccaacggtcgccgcgctgatgatgaccgccggttccgttgggctgtttaccgggcctttcacccccagcaccgtgacgatcctcagcctcggtgggttgagctatccggactatctgctgtacgttggtctgccgatgagcgcggtcacgctgctggccggctgggtaatggcgggacggatccagaagatgaccgaaggcaaactgcgctatgacgtcgatctcgcggaaaagccgcaagaggatctcagcgccgcgcagcagcgtcggcgtaaattaagcgcgctggccttcgcggcgaccatcatcgtgatggcgatcgttggcgtggtgattaaagccggcttcagcttcgcgataatcgtgatgttgctggtggccctgatgaccggcctggtaggcggcctgcgaccgacgcagatccttcaggccctgtatcacggctgcggccgtctggtgtggatgtttattctctactggctgtacaacccgatccttgagctgatggatggcctgcacgcctatcaggggctgctggagtatacccaaccgctgctggaggggatctccccggcctggctgtgctttagcatcttcgcgttcaatattatcggccatgtgcccggtgcggcggtggctcagatgacctttactcataaaatctttggcccgatgctgatggccgccggcgtgccgccccaggggaccaccgccgtgctgctggcctcatcccaggtggactggttcgggccgtttccctcatcagatatgttcggccagatggggctggcgcagtctactcatctgaaatatatgctctataacggctgggcaatcgtggtggcgaacatcattctctttgcgctgctgtttcagattctggtgtaa

SEQ ID NO: 212916 - DNA, 987 bp, Klebsiella pneumoniae
atgctgactctcgcccatcttcaacagcgccgcagccggcgttggctcttcggattaacgctgttgctgctggtcaccctgctgatcagcctgtgcgcgggggagcaatggatcccgcccggcgagtggctcagcgccaaaggtcagctgtttatctggcagatccgcctgccgcgaaccctggcggtgctgctggtgggggcggcgctggcgctctccggggcgattatgcaggcgttgtttgaaaatccgctggcggagccggggctgctgggggtctccaacggcgcgggcgtcgggctgattgccgccgtcctgctgggcaaaggagtcttgcccggctgggcgctcggcctgtgtgccatctttggcgcgctgctgatcacttttattctgctgcgtttcgcccgccgccatctgtctaccagccgtctgctgctggcgggggtggcgctggggatcatctgcagcgccctgatgacctgggcagtctacttctccacctcttttgacctgcgtcagctaatgtactggatgatgggcgggtttggcggcgtcgactggcaacagctgtggctgatgatagccctcctgccggtgctctgctgggtctgtctgcagtcgcaacccctgaatttactggcgctgggcgaagtctccgctcgtcagcttgggctgccgctgtggctgtggcgcaaattactggtggtggcgaccggctggatggtcggcgttagcgtggcgctggcgggggcgattggctttatcggtctggtgatcccgcatattctgcggctatgcggcttgagcgatcaccgggtgttgctcccggcctgtatgctggccggggcaagcgccttgctgggggcggatatcattgcccggctggcgctttccgccgcagagctgccgattggcgtggtgacggcgaccctgggcgcgccggtctttatctggttgctgctgcgttcgcgggggcggggatag

SEQ ID NO: 212917 - DNA, 801 bp, Klebsiella pneumoniae
atgaagaagttgtttagcctggcgttaatcgccacctctgtcgccctgctgagcgcctgctccccggatgaagataataaagtaaaagtcgctatcaataccgggccggacgaagccatctggaaagtggtggagcaggtggcgaaggataaataccacctcgacgtcgaagtggtctccttcaatgattatgtgctgcccaacgaagcgctgaacaacaaagatgtcgatgccaacgccttccagaccctgccgtaccttgaggcgcagtcgaaagaacgcggctataaatttgcggtggtcggtaaaacctttgtcttccctatcgccgcctattctcaccggatcaaaaatatcagcgaactgcccgaaggggcgacggtgaccatttctaatgaaaccaccaccctgggccgcagcctgctgctgcttcaggcgcaggggttactcaagctgaaaccgggcgtcggctatttacccaccacgctggatatcatcgacaatccgaaacagctgaaaattgttgaagtggataccccgcagctgacccgtacccttgacgatccgaacgtcagcctgtcaatcattaacaccaacttctccgcccaggcgggcctgtcggccgcccgcgacggtctgtttatggaggggccggattccccatacgtgaatgcgatagtcgcccgcgaggataataaggacagcaagaaaattcaggaattaaaagccgccttccagaccagcgaagtcgcggaaaaagcgaaggaagtctacaaaggcgacgcgatcaaaggctggtaa

SEQ ID NO: 212918 - DNA, 552 bp, Klebsiella pneumoniae
atgcaacatgacattctgaataccgaagtgacgaccattgatggcgagaaaaccaccctggcatcctttgccggcaaggtgctactgatcgtcaatgtagcctcgaaatgcggcctgacgccgcagtatgagcaactcgaggatctgcaaaagcagtttgccgccgagggcttcagcgtgctggggttcccctgcaaccagttcctcggccaggagccgggcagtgaagaggagattaagaccttctgcagcaccacctacggcgtcaccttcccgctgtttagcaaaattgacgtcaacggcgaacatcgcgcgccgctctatcaaaaactgattgccgccgcgccgaaagcggtggccccggaaggcagcggtttttatgagcggatggccagcaaaggccgggcgccgctgtatgtggacgacattctgtggaacttcgaaaaattcctcatcgatcgccagggcaacgtcattcagcgcttctcgccggatatgacgccggacgatccgcagctggtggcggcgattaaaggaacgctggcgcaataa

SEQ ID NO: 212919 - DNA, 750 bp, Klebsiella pneumoniae
atgtcgtttctgatgcagctacaggatgtagaagcggcggggcgcctggccccgttttctgcggcctttcgcgccggggagattgtccatctggtggggccgaacggcgcagggaagagcacgctgctgacccgcatggcggggctgtccgacggccccggcacggttcattttaacggccggctgcttgacgagtggccggcgagggagctggcgcgccgtcgcggatatctgagtcaacaccagaccccgccgttcgccatgccggtatggcactacctggcgctgcatatgcagcagcagggtgatagcgcccgtctgagcgatatcgcggccaggcttggtctggacaataagctgggccgtccggtcaatcagctgtcgggcggcgagtggcagcgcgtgcggctggcggcagtgatcctgcagatcgatcccttgagtaattccgcgggtcagctgctgctgctggatgagccgatgaacagtctggatgtggcccagcaggcggcgctggatcggctgttacacgagctgagcgcggcggggattgcggtggtgatgagcagccacgatctcaaccataccctgcgccacgccggtcagagctggctgctctgccagggggaagccatcgcctgcggggagaccgccgaggtgctgaatgaggaaaatttaaccgccgcctatgcgatcccgttccagcgcgttgaggtggccggtcatattatgctcatcgcgtcacagtag

SEQ ID NO: 212920 - DNA, 465 bp, Klebsiella pneumoniae
atgcgcttctggttcatgttggcggcggcgttaattttagccggctgcagcagccatcgggcaccgccgccgaatcctcggctggctgactccatcacggtggtggcgaatctgaacgagcagttgcgcagctggcgcggcgcaccgtatcgctacggcggcatgacgccgcgcggcgttgactgctccggcttcgtggtgcgcacgtttcgcgataaatttgccctccagctgccgcgtgaaacccgcgagcaggcggaaatcggcacccgcatcgataagcgcgatctgctgcccggcgatctggtgttcttcaaaaccggctcaggggagagcggtctgcacgttggcatctacgataccgacaaccagtttattcacgcctccaccagccagggcgtcacccgttcctcgctggataacgtctactggaacaaaaagttctggcaggcgcggcgaatctga

SEQ ID NO: 212921 - DNA, 1443 bp, Klebsiella pneumoniae
atgaccctttcttttaccacccactggcgggatgaactgccggacttttacacttccctgtcaccaacgccgttggataacgcccgactcatctggcgcaacgccccgctggcgcaacagctgggggtgcccgacgccctgtttgcgcctgaaagcggggtcggtgtctggggcggcgaagcgctgcttccgggcatgtcgccgctggcgcaggtatacagcggccatcagtttggcgcctgggccggccagctgggcgacggacgcgggatcctgctcggcgagcagcagctggcggatggccgccgttacgactggcatctgaaaggcgccggcctgactccttattcgcggatgggggacggccgcgccgtgctgcgctcgacgatccgggaaagtctggcgtcggaggcgatgcatgctctggggatcccgacgacgcgcgccctggcgatggtgaccagcgataccccggtctaccgcgagcgcgtggagcccggcgcgatgctgatgcgggtggccgagagccatgtccgcttcggccatttcgaacatttttactatcgccgtgagccgcagaaggtccagcaactggccgactatgttattcgccaccactggccgcagctgcaggatgaggcggataagtacctgttatggttccgtgacattgtcatgcgtaccgcgcagactatcgccagctggcaaaccgtgggctttgcccatggggtgatgaataccgacaacatgtcgattctcggtctgaccatcgactacggcccgtatggcttccttgacgattttcaaccggacttcatctgcaaccactccgattatcaggggcgctacagttttgaaaaccagccggcggtggggctgtggaatctgcagcgtctcgcccaatcgctgtcgccgtttatcagcgctgaagcgttaaacgcggcgctggatgagtatcagcacgccttgctgaccgcttatggccagcggatgcgcgataaactcggcctgttcagccagcagaaaggggataacgacctgctggacgggctgtttgccctgatgatccgcgagaagagcgactatacccggacgttccgcctgctgagccacagcgaacagctcagcgccgcttcgccgctgcgcgatgagtttatcgaccgcgcggcctttgacagctggtttgccgggtatcgtgcgcggctgcgtgatgaacaggtggacgacgcgcagcgccagcagaggatgcagggcgtgaatccggcgctggtgttacgtaactggctggcgcagcgggcgattgagcaggctgaggcgggcgatatgggcgagctggagcgcttgcatgccgcgctggcagacccctttaccgatcgcgaggacgactacgtccgccgcccgccggactgggggaaacgtctggaagtcagctgctcgagctaa

SEQ ID NO: 212922 - DNA, 228 bp, Klebsiella pneumoniae
atgattatcattgttgccttgatttttattctgagagctatgacgcgtatggataacactgccacagctgaaaaaccaaaagacaatgccccttatcccgtggcgacggacagagagatcagcagtcgggttctgttaggcagcgaaggacgagtagtgattgagcatggcggccagcgctatctgctgcgccagacccacgccgggaagttaattctgaccaagtaa

SEQ ID NO: 212923 - DNA, 1047 bp, Klebsiella pneumoniae
atgaataaaacagacgaattgcgtaccgcgcgcattgagagcctggtaacgcccgcggagctggcccagcgccatcccgtgacggccgacgtggctgcccacgtctcggcctcccgccgccgaattgaaaaaatcctcaacggcgaagaccgccgactgctggtgattatcggcccctgctccattcacgacaccgacgcggcgctggagtatgcccgccgcctgcagggcatgcgcgagcgctaccagccgcagctggagatcgtgatgcgcacctattttgaaaaaccgcgcaccgtggtgggctggaaaggcttaatctccgatcccgacctcaacggcagctaccgggtcaaccacggaattgagctggcgcggcgcctgctgctgcaggttaatgagctgggggtaccgacggccaccgagtttctcgatatggtgaccggtcagtttatcgccgatctcatcagctggggagccatcggggcgcgcaccacagaaagccagatccaccgtgaaatggcctcagcgctctcctgcccggttggatttaaaaacggcaccgacggcaatacgcgcatcgcggtggacgccatccgcgcctcccgcgccagccatatgttcctctctccggacaagcagggtcagatgacgatttaccagaccagcggcaatccgtatgggcatattattatgcgcggcggcaaacggccaaactatcacgccgaggatatcgccgccgccggcgaggcgctgcgtgaatacgatctgccggaacagctggtcgttgatttcagccatggcaactgccagaagcagcaccgccgtcagctggaggtgtgcgccgatatctgtcagcaaattcgcgcgggctccaccgccatcgccgggattatggccgaaagcttcctgcaggaaggcactcagaaagtggtccccggccagccgttgacctggggccagtcgatcaccgacccctgcctgagctgggaagacagcgaaagattattgagcgagctggctgcggccaccgccacccgcctgtaa

SEQ ID NO: 212924 - DNA, 834 bp, Klebsiella pneumoniae
atggaaagtgctgtagatcgccacgtattttatatttctgacggtaccgccatcacggcggaggtgctggggcatgccgtgatgtcgcaattcccggtcgccatcagcagcgtaaccctgccgtttgtggaaaacatcagccgcgcgcgggcggtaaagaagcagatcgacgccatctatcagcaaacgggtattcgcccgctggtgttctactccatcgtcatcccggaaatacgcgacattattctgcaaagtgaaggcttttgtcaggatatcgtgcaggcgctggtggccccgctgcagcaggagctcaacctcgacccgacgccggtggcccaccgtacccacggcctcaaccccggcaacctgattaaatacgatgcgcgtatcgccgctatcgattatacccttgcccatgacgatggcatctcgctgcgcaaccttgaccaggcgcaggtgatcctcctcggcgtctcgcgctgcggcaaaacacccaccagtctgtatctcgccatgcagtacggtattcgcgccgccaactatccgtttatcgccgacgatatggacaatctggttctgccggcctcgctgaaacccctgcagcataagatgttcggcctgaccatcaatccggagcgtctggcggcgatccgcgaggagcgccgggagaacagccgctacgcctccctgcgccagtgtcggatggaagtgaccgaagtggaggccctgtatcgcaagaataaaatcccctgcctgaacagcaccaactattccgttgaggaaatagcgacaaaaatcatggacatcatggggctgaatcgcagaatgtactaa

SEQ ID NO: 212925 - DNA, 2379 bp, Klebsiella pneumoniae
atgtccaacaatggctcgtcaccgctggtgctttggtataaccaactcggcatgaatgatgtagacagagttgggggcaaaaatgcctcccttggtgaaatgattacgaatctgtccggtatgggtgtttccgtacctaacgggtttgccaccaccgctgatgctttcaatcagttcctggaccaaagcggtgttaaccagcgcatctatgcgctgctggatgaaaccgacattgacgacgtttccgcattagcgaaagcgggcgcgcagatccgacagtggatcatcgatacccccttccagagcgaactggaaaacgcgattcgcgatgcttatgacctgctgtccgccgatgacgccgaggcctcattcgccgtgcgctcttccgccaccgcggaagatatgccggacgcctccttcgccggacagcaagagacattcctcaacgtgcagggctttgacgccgtgctcgttgccgtgaagcacgtgtttgcttcgctgtttaacgatcgcgcaatctcctatcgcgtgcatcagggttacgatcaccgcggcgtggcgctctccgccggggtgcagaggatggtccgctccgatctggcctcctccggcgtcatgttctccatcgataccgaatccggctttgaccaggtggtgtttatcacctcggcgtggggtttgggcgagatggtggtgcagggcgcggtgaacccggacgaattctacgtccacaaaccgacgctggccgctggccgtccggcgatcgtgcgccgcaccatggggtcgaaaaagatccgtatggtttacgcgccgacccaggagcacggtaaacaggtgcgtatcgaagatgtgccgcaggcgcagcgcgatattttctcgttaagcaacgaggaggtgcaggagctggcgaagcaggcggtgcagatcgagaagcactacggccgtccgatggatatcgagtgggcgaaagatggccacactggtaagctatttatcgtccaggcgcgtcctgaaaccgtgcgttcccgcggccaggtgatggagcgttataccctccacgctcaggggcagatcatcgccgaagggcgcgccatcggccaccgcattggcgccggtccggtcaaggtgatccacgatatcagcgagatgaatcgcattgagccaggcgacgtactggttaccgacatgaccgacccggactgggaaccgatcatgaaaaaagcctcggcgattgtcaccaaccgcggcgggcgtacctgtcacgcggcgattatcgcccgtgagctggggatcccggcggtggtcggctgcggcgatgctaccgatcgcattcaggaaaatcagaatgtcaccgtctcctgcgccgaaggcgacaccggctatgtctacgccgagctgctcgacttcagcgtcaagagctccagcgtcggcgacatgccggatctgccgctgaaggtgatgatgaacgtcggcaacccggatcgcgcgttcgacttcgcctgcctgccgaacgaaggcgtcggtctggcgcggctggaatttatcatcaaccgtatgattggcgttcatccgcgcgcgctgctggagtttgacgaccaggagccgggcctgcagaacgaaatccgcgagctgatgaaaggctacgattcgccgagagagttctacgttggccgcctgaccgaagggatcgccaccctcggcgccgctttctatccgaaacgggtgatcgtgcgtctgtcggacttcaaatcgaacgaatacgccaacctggtgggcggcgagcgctatgagccggaagaagagaacccgatgctcggcttccgcggcgccggacgctacgtttccgaaagcttccgcgactgtttcgcccttgaatgcgaagcgatgaagcgcgtgcgtaacgacatgggactgaccaacgttgaagtgatggtcccgttcgtccgtaccgtcgcccaggcgaaagcggtggtcgaagagctggagcgtcaggggctgaagcgcggcgagaacgggctgaagatcattatgatgtgcgagatcccgtcgaacgccttgctggcggagcagttcctcgagtacttcgacggcttctccatcggttcgaacgacatgacccaactggcgctcggtctggaccgcgattccggtgtggtttctgagctgtttgatgaacgcaatgacgcggtgaaagccctgctgtcgatggccatccgcgcggcgaagaaacagggtaaatacgtcggcatctgcggccaggggccgtctgaccatgaggatttcgccgcctggctgatggaagaggggattgatagcttgtccctgaacccggataccgtggtacaaacctggttaggtctggcggaactgaaaaaataa

SEQ ID NO: 212926 - DNA, 1113 bp, Klebsiella pneumoniae
atgattaatccccatcagcctcgggacattccgcaaatactgctgtcggtgctgttcctggccctgattatcatatcctgcctgtgggttgtgcagccgtttattctgtccttcgcctgggccggtacggtggtgatcgccacctggccggtgctgctgcgtctgcagcgtgtgctgttcggcaaacgactgctggcggtgctggcgatgaccctgttgctgtttctgctattcgttattcctatcgctctgctggtcaacagcctggtggataacagcgttccgctgatcaaactcatcagcagcggaaatgtgacgctgccggatttcgcctggctcaacagcgtaccgctggtcggcgataaactgtactccgcctggcacggtctgctggatatgggcggctcggcgattatggccaaggttcgtccctatattggcaccaccaccagctggtttgtcggtcaggcggcgcacatcggcaagctgctggtctactgcggtttgatgctgctgttcagcgcgctgctctactggcgcggcgagcaggtggcctatggtttccgctacttcgccacgcgcctcgcggccaaacgcggcgacgccgcggtgctgctggccggccaggccgtgcgcgccgtggcgctgggcgtggtggtcactgccctcactcaggcggtactgggcgggattggccttgccgtctccggcgtgccctacgccgctctgctgaccgtggtgatgatctttacctgtctggttcagctcggccctttactggttttggtgccgtcgattatctggctttactggagcggggacaccacctggggcaccgtgctgctggtctggagctgcgtagtcggcaccatggacaacgttattcgtccggtgctcatccgcatgggcgccgacctgccaatgatccttatcctcaccggcgtcattggcggcctgatcgccttcggcatgatcggcctgtttatcggtccggtgctgctcgccgtctcctggcgactgtatgacgcctgggtgcatgaggtgccgccgccgccgaaagaccctgacgtcgtccttgaagagctcagtgagctggaggccggtcgcaagtaa

SEQ ID NO: 212927 - DNA, 3057 bp, Klebsiella pneumoniae
atgatcccacaaatttctcaggcgccaggggtagttcaactggtgctgaattttttgcaggtactggagcaacagggttttaccggcgataccgccaccagctatgccgacaggctaacgatggccaccgacaacagcgtctatcagctgctgccggatgcggtcatttttccacgatccacggcggacgtggcgctgctggcgcgcgtcgccgccgaaccgcgttttaaatcgctgattttcaccccgcgtggcggcggcaccggcactaacggccaggcgctgaacggcgggattatcgttgatatgtcccgctatatgaatcgcatcatcgagattaaccctgacgagggctgggtgcgcgttgaaaccggggtcatcaaagatcagctgaaccagtttcttaaaccctatggttacttttttgcgcctgagctatccaccagcaaccgcgccacgctgggggggatgattaacaccgacgcgtccggccagggatcgctggtgtacggcaaaacgtcggatcacgtgctcggcctgcgggcggtgctgatgggcggggatatcctcgatacccaggcggtgccggtggcgctggcggagacgctgggcaataccccctcgacggttggccggatctacaacacggtctaccagcgctgcaaggcgcagcgtgacctgatcattgataagtttcccaaactcaaccgcttcctcaccggatacgatctgcgtcacgtctttaacgatgagatgagcgagttcgatctgacccgtattttaaccggttcggaagggacgctggcgtttattaccgaagcgcggctggatatcacccgcctgccgaaggtgcgccgtctggtcaacgtcaaatatgactccttcgactctgcgctgcgcaatgcgccctttatggtcgaagcgaaagccctgtcggtggagaccgtcgattctaaagttctcaatctggcgcgcgaggatatcgtctggcactcggtaagcgaactgatcaccgacgtaccggataaagagatgctcgggctcaatatcgtcgaattcgccggcgatgacgcggcgctgattgaccagcaggttactaccctgtgccagcggctggacgagctgatggccgccagcgaggcgggcgtcattggctggcaggtctgtcacgatcttgaaggcgtggagcgcatctatgccatgcgcaagaaggccgtcggcctgttgggcaatgccaaaggcgccgccaagcctattcctttcgccgaggacacctgcgtaccgcccgaacatctggcggattacatcgtcgagttccgcgcgctgctcgacagccacggcctgagctatggcatgtttggccacgttgatgccggggtgctgcacgtgcgcccggcgctggacatgtgcgatccgcagcaggaggtgctgatgaagcagatctccgacgatgtggtggcgctgacggcgaagtatggcggcctgctgtggggcgaacatggcaaagggttccgcgcggagtacagcccggccttctttggcgagacgttgtatgccgagctgcgcaagatcaaagcggtcttcgatcccgataaccgcctgaatccgggtaaaatctgtcctccggaaggtatcgacgcgccgatgatgaaagtcgatgcggcgaagcgcggcacctgggatcggcagatccccatcgcggtgcgcagcagctggcgtggggcgatggagtgtaatggcaacgggctgtgcttcaactttgacgtcaagagcccgatgtgtccgtcgatgaaagtcagcaaccagcgcatccactcgccgaaagggcgggcgacgctggtgcgggaatggctgcgcctgctggccgaccgcggcgtcgatcccaaccagctggagaaggcgctgccggagcagggcgtcagcctgcgctcgctggtcgcgcgcacgcgcaacagctggcatgcgcgcaaaggcgaatatgacttctcgcatgaggtcaaagaggcgatgtccggctgtctggcctgtaaagcctgttcgacccagtgcccgatcaaaatcgatgttcccgagttccgctcgcgcttcctgcagctgtaccacagccgctatctgcggccggtgcgcgatcatctggtggcctcggtcgaatcttatgcgccgctgatggcgcaggcgccgaagacctttaacttttttattaaccagccttggctgaaaaagctgtcggagaagcatatcgggatggtcgatctgccgctgctctcggcgccgtcgctgaagcagcagatggccggccaccgctccgccaatatgacccttgagcagctcgaagcgctgagcgccgagcagaaagcgaagatggtgctggtggtgcaggatcccttcaccagctactacgacgcccaggtggtggccgactttatccgtctggtcgaggccttaggctatcagccggtgctcctgccgttctcgccgaacggcaaggcgcagcatatcaaaggcttcctcacccgcttcgcgcgcaccgcgcagaagacggcggacttcctcaaccgcgtggcgcagctgggcatgccgctggtgggcgtcgatccggcgctggtgctctgctaccgcgatgagtacaagcagacgctcggcgacaagcgcggcgatttccaggtgctgttagtccatgagtggttgccgaaggccctaaccagcgacgcccgtcccgatctgggcggtgagccctggtacctgttcggtcactgtaccgaagtgaccgcgctaccggcggcgacaaagcagtgggcagatatttttgcccacttcggcgcgaagctggaaaacgtcagcgttgggtgttgcgggatggctggcacctatggtcatgaagtgaaaaaccacgccaactcgttggccatttacgcgctctcctggcagcaggcgatgcagcggctgccgcgaaaccgctgtctggtgacgggctactcctgccgcagtcaggtgaagcgtattgaaggcagcggcgttcgccacccgctgcaggcgttactggagataatcggatga

SEQ ID NO: 212928 - DNA, 411 bp, Klebsiella pneumoniae; identical to SEQ ID NO: 135736

SEQ ID NO: 212929 - DNA, 249 bp, Klebsiella pneumoniae
atgggtattctttcctggatcatttttggacttattgccggtattttagccaagtggattatgccgggaaaagatggcggcggatttatcgtgaccgttattttggggatcatcggcgccgtggtcggcggctggatcagtaccctgtttggttttggcaaggtcgatgggtttaatttcggcagcttcgtggtagcggttatcggtgcgctggtggtactgtttatctaccggaaagtgcgtagctaa

SEQ ID NO: 212930 - DNA, 321 bp, Klebsiella pneumoniae
atgaaaaaagctctgcttgccctgttcgctatcgccaccgttaccgccgccagcgcctttgcggctgataaaaccgacgtcccggcgcctgtcgtcgataacggagtccgcccgccgatggagagggatcgtggccccctgccgccgttcccgccgcagcttctgccgcacagaccggtgctgttttcagccacggtagcaaccgatacgccagcggaaaccattaacaaactgaccgcgctgatccccgccggccaggcgaaacactacgaagtgcacgttgaggtggtgccggttggcgagggaaccgacagacaatag

SEQ ID NO: 212931 - DNA, 219 bp, Klebsiella pneumoniae
atgagagcgagtgtcattgcgttcgggagcctcttaattcagcagtacgctcataatcagcagtacggccatgcacatcgacataatactgatatcaacaatcattctgtacgacaaaagctccagctaaacgggtacggcgggcaggtaaaagcccatcttatagtggttaaagagtgtaccctgcctacttccattgaacaaacgtttattgactaa

SEQ ID NO: 212932 - DNA, 981 bp, Klebsiella pneumoniae
atgaataataaatttacctatacgattaagcgcacccggtttgatgaaaattataaccctgcggaaaatacgcgtattaccaccaacttcgctaatttagccagaggggtgaaccgtgaggaaaatctgcgcaatacgttaatcatgatgaataaccgttttaatagcctggcccactgggataatccccataacgatcgctatgcggtggaactggatattatttctgtcgagatgaatattgctcaggatagcgccagcttcccggtgattgagatcctgcaaacgcatattgtcgataaaaagagcggggagcgtcatgccggtatcgtcggcaataacttctcctcctatgtgcgggattacgattttagcgtactgcttctggaacataataaggaccagagtcgcttcagcgtaccggaaaactttggcgagctgcacggcaatatctttaaggattttgtgcaatccagcgcctggcgcgccaacttcagcaaggcgccggtgatttgcctgagcgtctccagtaaagatgtttaccatcgcaccggtaacgaacatccggtcctcggcattgaatatgctcaggaaggcgtctcgctgaccgagcgctatttcagcaaaatggggctgcaggtacgctattttatgccaaaaaacagcgtcgcgccgttggccttttattttaccggcgatctgctcagcgattacaccagcctggaactgatcgccaccatcagcacgatggagacgtttcagaaaatatatcgcccggagatctacaatgccaactccccggcggggcaatactatcagcccaatctcagccacctggatcattcattaacaaaaatcgtctatgaccgggaagagcgcagcctgttggcgattgagcaggggaaatttacacaacaacattttatcaacccgcacaagacgttgcttgagcaatggtctgctaatttcgcgctttgctaa

SEQ ID NO: 212933 - DNA, 1032 bp, Klebsiella pneumoniae
atgaaaacatggcttccgacatcgaccgccggcagtttaccgaaaccttcctggctggcgcagccagagaccctgtggtcgccctggaaactgtccagcgaagaattactggccggcaagcgcgacgccttgcggttatccctcgacgaccagctgcgggccgggatcgatattgtcagcgacggcgagcaaacgcggcagcactttgtcaccaccttcatcgagcacctcagcggggtggattttgccaaacgcgagatcgtgaaaattcgtaaccgctatgaggccagtgttccaacggtggtgggcgccgtggagcgccagaaaccggtcttcgtggaggacgctcgctatctgcggcagctcaccagtcagccgatcaaatgggcgcttccgggcccgatgaccatgatcgacacgctgtatgacaaccactataaaagccgggaaaagctggcctgggaatttgccaaaatcctcaatcaggaagcgaaagagttagaggctgcgggggttgatattattcagttcgatgagccggcctttaacgtcttcttcgatgaggtcaacgactgggggatcgccgccttagaacgagccaccgaagggctgaagtgtgagacagcggtgcatatctgctacggctatggcatcaaggccaataccgactggaaaaagacgctgggctccgagtggcgacagtatgaagaggctttcccgcagctgcagaaatcgtcccttgatattatctctctcgagtgccacaactcgcgcgtgccgatggatctgctggagttgatccgcggtaaaaaggtgatggtcggggcgatcgatgtcgccagccatgctatcgaaaccccggaagaagtggctggaaccctgcgcaaggcgctggcgttcgtcgatgccgacaaactctacccgtccaccaactgcggtatggcgccgctgccgcgccatgtcgcgaccggcaaactgcacgccctgagcgccggcgccgagattattcgtcgcgagctggcggcaaaataa

SEQ ID NO: 212934 - DNA, 1233 bp, Klebsiella pneumoniae
atgcctcttttctccctgcgccctgcggcaaccctctggcctccggtgttactgggaagccagttcgtttttaatattggcttttacgcggtcgttcctttcctcgccctcttcctgcgcgacgacatgctgctctcaggcggacttatcggcctgatcctcgggctgcgtaccttctcccaacagggcatgtttatcctcggcgggacgctggccgaccgctatggcgctaaggcgatcattctcgccggctgcgtcgttcgcgtcgccggttttctcctgctggcgtgcggggcgtcgctgtggcccattatcctcggcgcctgcctgaccggcgtcggcggcgccctgttctccccgtcgatagaggccctgctggcgcgggccggcacccacagccaggccaacgggaaacgcagccgcgccgagtggtttgcgctgtttgcggtatgcggtgaactgggagcggtgatcggcccggtggccggaggcgtgctgagcgggatcggctttcggcatatcgccctcgccggcgcgggaatatttcttctggcgctggcggtgctctttttctgtctgcccgccgacgggcacacgacaacaacgcgcagacgagtcccatggtggacgcctttgcgccagccgcgctttgtcgcgtttattctcgcctacagctcatggctgttgagctacaaccaactgtacctcgccctgccggtggagatccaacgttccggcggccgcgagcaggatctggcgccgctctttatgctggcctcgctgttgattatcaccctccagctccctctcgcccgcttcgcccggcgaatgggcgccgtgcgcatcctgccggtgggctttctgctgctgtcggcttcctttgccagcgtggcgttattcgccgccgccccacccgccgaaggttggctgcggttaatgccggcggctggttttgtcacgctgctcaccctcggccagatgctgttagtgcccgcagccaaggatctgatcccgctgttcgccgaggagtcgacgctgggcgcccactacggagcgctcgccaccgcaggagggtgcgcggtgttagccgggaatttactgctcggtcatttacttgaccaggcgctcattccgtcgccgcaggcggtttatccctggcttctgctggcgctgtttccgctgtgcagcgccgtcgccctgcgggcgatctgtcgcccgctggcggcaacatga

SEQ ID NO: 212935 - DNA, 762 bp, Klebsiella pneumoniae
atgagtatttgcgctgaaaatatcacctggaaggcaggcaaaaaggtcatcgtcaataatgtctcgctgcgggtgccgcgcggcgaaacggtcggactgctggggcccaacggctgcggcaaatcctcgctgctgcgcgttctggcgggcctgcgccgcccggatgcaggtcgcgtcaccctcgacggccaggatatcgcccggatggcgaaaaagcagctcgcccgccgcgtggctttcgtcgagcaacacggcatgaccgaggccaatatgcgggtgcgcgacgtcgtgcgcctgggacgcattccccaccactctccgttctcaaactggagcgctcaggatgacgaggcgattgccgccgcgctgcagcgggtagcgatgctggagaaaagcgaacagggatggttaagcctctccggcggcgagcggcagcgggtgcatatcgcccgcgcgctggcgcagagcccgagcgaaatcctgctggatgagccgaccaaccatctggatatacaccatcagatgcagttaatgcagttgatcagcgagctgccggtaaccagcattgtggccattcacgatcttaaccatgccgcgatgttctgcgattcgctgatcgtgatgcagcaggggcagatcctcgccagcgggacgccggaggagattttgtccgaagggctgctgtgggacgttttccgggtgaaaaccaaaatcgagatctccccttaccacggcaaaaagcacattcatttcatcgtttag

SEQ ID NO: 212936 - DNA, 1038 bp, Klebsiella pneumoniae
atgagcgtcgccgcgattgagacgcgccgcagcatactgctcaccggctggtgtttactggcagcgatcgtgctggcgctggtgatcgctgtgggcgtcagcgtcggcgagctggccatcccgctgcagaatgtcttttatgctatcagcaacagaaccggcttaaccgctgagccgctcaaccgtatctatgagagcgtaatctgggatttccgcctcagccgcgcgctggtcgccgcctgctgcggcgccggcctcgctatctgcggcgtcgtgctgcaaagcctgctgaaaaatgccctcgccgaaccctacgtcctcggcgtctccgccggggcctccaccggcgcggtgtcgatcgtggtgctgggccttggcgctggcgcgatttccctctcggcaggcgcctttgccggggccttcgccgccttcgcctttgtcgccttgctgactaacggcgcgcgcggcggcaatgagcgtaccattctggcgggcgttgccgcctcgcagttatttaacgccatcacggcttacaccatcagcacctccgccagcgcgcagcaggcgcgcgatgtgatgttctggctgctgggcagcttcagcggcgtccgctggcccgaattccagctggtcattgtggtggtgctcgcgggtctggcggtctgcctgtggtatgcccgggcgctggacgcgttcaccttcggcgacgatgccgccgcctcgctggggattgctgtgccgcgcgtgcgcctgatcctcttcaccactgcggcgctgatcaccgccaccatcgtcagcatggccggctcaatcggctttgttggcctggtggtgccgcacgtgatgcgtttcttctttggcccgctgcaccgaacgttgctgatcgccagcgcgctggcaggggcgatattgatggtactggcggacattgcgtcgcgcctgctgattgccccgcaaagtctgcccgttggggtagtaaccgccctggttggggtgcctttctttgccgtgattatctaccgctcaaggaataagtga

SEQ ID NO: 212937 - DNA, 999 bp, Klebsiella pneumoniae
atgaagaaggtcctctgcgcgttaggcttgatgttcaccgccgtcagttccgcgctggcaacaacctaccccctgacgattgaaaactgtggctatcaggagaccttcacccggccgccggagcgcgtggtcgcgctggggcaaaatacggtcgaaattctgctgctgcttgggctgcaaaagcaggtggtcgccagcgccttttggccgaccagcgttttaccgcagctggctgagcaaaacgcgaagattaaaaccctgacggtggaaattccgagcctggaatccgtgctggcgcaaaatcccgatttcgttcccgcccagttgccgctgctgctggggccggaaagcaaagtcgctaagcgtgaagatctcgctaccgtcggcgtaaacagctacgtctcaccggggatgtgcgccaccaaaaaggccaccggcgatatgtacggcagccggcaaaagctgtgggatatgacctggctgtatcaggaaattagcgatttttcccgcattttcaacgtcgaagatcgtggtcaggcgctgatagccgatttcaaaaaacgtgaagccgacctgcgccaggagtttggtaaaagcaaaaaggatctctcctttgtcttctggttctccagcgcctcgccttcggccgatgcctatgtcggcggtaaaaacagcgcctccggctttatcgccagcgtgctgggcggtcataatgcgataacctccgagaccgagtggcccacggtgagctgggagagcatcattgccgccaacccggatgtgatcgtggtcgccagtctggaccgtaaccgctgggcgctggataaggccgaggagaagatcaaatacctcaaaagcgatcccgccgtcagccagctggaggcggtgaaaaaaggccatatcgtggtcatggacggtcaggcgatgaatccgaccattcgcacgctttacggcgcggaacaggtgggcgagcagctgagaaaaatggggctgaactga

SEQ ID NO: 212938 - DNA, 912 bp, Klebsiella pneumoniae
atgaatacctctattccctgggagtggtaccgaacctttctcgccgtcctgcaggaaggctctttatcgggcgcatcgcgtaccctgaacatcactcagccgacggcggggcgccatattgccgggctggaggccgccctcggccaggccttatttacccgctcgcaaaccggcctgctggcgaccgacgcggcgctggcgctgcggatgcacgccgaggcgatggacaacaccgcccgggcgctggaacgcacggcggctaacttcagtcgcgacagagccgagctgcgtggcgtggtgcgggtggccgccagcgaggtggtcggcgcggaggtgctgccgccgctggttgcccggctcaggcaggcgtgcccgaatatcgtcatcgaactgatgctctccaatcgatttcaggatctgcttcaccgggaggcggatatcgcggtgcggatggtcgccccgcagcaggagcagcttatcgcccgccgtctcggcaggatcgagcttgggttacatgccaccgccgcctacctgacgcgccagggcctgcccacgaccctcgacgatctggccagccacgcgctgattggtttcgatagcaccacccctctcgttcgccgggccctgcaggcttacccccgttttcagcgcgaggcgttcgcgatgcggaccgatagcgacctcgcccagttgagcctgatccgcgccggagcggggatcggcatctgccaggcgcctcttgcggatggcattattcccctgcagcgagtgctggcggccgacttttctctgtatcttgatacctggctggtaatgcatgaggatctgcgccacagccctgcctgtaagcgggtatttgattttctcgcccaggggttgcaggcgtatattcgtggcccactggcgagctga

SEQ ID NO: 212939 - DNA, 987 bp, Klebsiella pneumoniae
atgaacagcagcggcaaggtacttattctgggagcaagcgggggcatcggcggggaagtggcgcgccggctggtggcagacaactggcaggttcgggcgctgaagcgcggcgcccagatgcgtgatcccgaagatggcatacagtggatagccggcgacgcgctggatggcggccaggtcgcggcggcggctgccggttgcgacgtcatcgtccatgcggtgaatccgccgggctaccggcactggcggcaacaggtactgcctatgctgcgcaacaccctgcaggctgccgaacggcagcgggcgcttgtagtcctgcccggcacggtctacaactatggaccggatgcctttccgctgattgctgaagaggccgcacaacagccggtgacccgcaaaggcgccatccgggtggcgatggagctggcgctgaaggattacgtgcagcgcggcggccgggcgttgattgttcgggcgggcgatttttttggcccgcgcgccggaaataactggttttctcaggggctggtcaagcctggtcagcttccccgcatcattagctacccgggggcgatcggcgtggggcatcagtgggcctggctgcccgacgtggccgccaccatcgccgcgctgctcgcccgcaggcgcgagcttgagccgttcgcccgctttcatatgcagggccactgggacccggacggcagcgaaatgagtcaggcgatccagcgggtggtcgcccgctatggcggcagggcggtagtgaagtcctttccctggtggctggtgaagatggcggcgcccttcaacgccaccctgcgcgaaatggtcgagatgcactatctctggcgtctaccggtacgcctgcgcaacgataaactggttgattttttaggcgcggaaccgcataccccgctcgacagcgcggtttatcagacgctgcaaggcctgggttgtctgcccgccggcgcgataaactccgaggcgtga

SEQ ID NO: 212940 - DNA, 615 bp, Klebsiella pneumoniae
atgacgaaaaatacccccacccctgcaagccgtggtccccatgaccacagcgttcgggaccagattcttgacgcggccatggcgcactttagtcgctatggctatgagaaaacgacggtcaccgatctcgccaaagcgataggcttttccaaagcctatatctataaattctttgactccaagcaggcgattggcgaggcgatttgcgccagccggctggagaagatcatggtggccgtcagcgaggccatcgccgatgcgccgtccgccagcgagaaactgcgccgcctgttccgggcgctgaccgaggccggcagtgaactgtttttcgaggatcgcaaactgtacgacatcgccgccgtcgcggcgcgcgataaatggccttcaacggaacagtatgccggtcatctgcagcagctgattggtcaaatccttgtcgaaggccgccaggcgggtgagttcgagcgcaaaaccccgctggatgaagcgaccctggcggtgtatatggtgatgtgtcctttcatcaatccggtgcagttgcaatacaatctcgacaccgcgcccaccgcggcggtgctgcttgcctccctgatcctgagaagtctctccccctga

SEQ ID NO: 212941 - DNA, 1110 bp, Klebsiella pneumoniae
atgctcaggctcaacgccgtccatcttgccgtctgcctcctgccgctggccctcgcgggctgcggcgaacctgccgatcatgacgacccccgcatccggccgccgctggtccgggtggcgaccgtcgagcgcgcggaggccggctcgcgggcctttaccggcgtggtagtggcccgaacccaaagcgacctcggcttcagggtggcgggaaaagtgcttgaacggcgggtggaaaccgggcagagcgtcaagcgcggtcagctgctgctgcgcctggatccggctgatctagccttgcaggggcagtcccaacagagggccgtagatgccgcgcgggcgcgagccaaaaaggcggccaacgatctggcccgctatcgcggcctggtggcgagcggcgccatctctgccgcggaattcgaccagattaacgcgacagcagaggcggcgagagccgacctcagcgcggcccaggcgcaggccaatgtggcgcaaaacgccaccggctatgccggactgctggcggatgctgacggcgtggtggtggaaaccctcgctgagccggggcaggtggtcagcgccgggcaggtggtgatccgcctggcgcgggcggggcagcgcgaagcgcgggtgcaactgccggagacgctgcgcccggcggtcggcagcgaggcgctggcgacacgctatggcagcgaatctcagccggtcacggcgaccctgcgcctgctttcggacgcggctgacgccaccacccgcacctttgaagcgcgctatgtgctgaacggcgcgctggcgaatgccccgctggggtctaccgtgaccctgcgcatcggcaacgaccaggcgccaggccaggtgctggcggtgcccctggcgtcggtctacgatccgggtaacggccctggcgtctggcgcattgcctctcgtccggccaccgtctcctggcaaccggtaactgtgctcggcctggatgatgaaaccgcgcgggtgaccggcccgctgaagcccggcgagccgatcgtcgccctgggcgcccatcttctgcgccagggcgaggcggtgcgtctggcggaacgacgcgagcataatgccgccgggagccagccatga

SEQ ID NO: 212942 - DNA, 3093 bp, Klebsiella pneumoniae
atgagcgccgggcgttttaatctctccgcgctggccgtccgcgagcggtcggtgaccctgtttttgattatccttatctccgtcgccgggctggtggcgttcttcggactcgggcgagcggaagatccgccctttacggtcaagcaaatgacggtcattaccgtctggcccggcgccaccgcgcaggagatgcaggatcaggtcgccgagccgctggaaaaacgactccaggagctaaagtggtacgatcgcacggagacctatacccgccctggcatagcgttgatcaccctgtcgctgcaggatcagaccccgccttccgaggtgccggagcagttttatcaggcgcgcaaaaagctcggggatgaggcgaaaaacctgcctgccggcgtctccggcccgatgatgaatgacgaattcgccgatgtcacctttgccctctttgctctgaaagcgcggggagagccgccgcggcagctggtgcgtgacgctgaagccctgcgccagcagctgctgcatgtatccggggtgaaaaaagtgaatatcctcggcgaacaggcggagcgcatttatctctcgttttctcatgatcgtctcgccaccctgggcctttcgccagaggcgatttttgccgcgctgaacagccagaatgtgctgaccgccgccggggctatcgagacccggggcgggcagatctttatccgcctcgatggggcgtttgaccgcctgcagcagatccgcgacacgccgattattgccgggggcagaacgctgaaactggccgatgtcgccacggttgagcgggggtacgaagatcccgccaccttcctgatccgccatcagggcgaaccggcgctgctgctgggggtggtgatgcgcgagggctggaatggtctggcgctgggaaaagcgctggatgccgaaacggccagcatcaatcagaacctgccgctcggcatgtcgttgaccaaggtgaccgatcagtcggtgaatatcagcgccgcggtcgatgagttcatgatcaaattctttgtcgccctgctggtggtgatggcggtgtgctttgtcagcatggggtggcgcgtgggcgtggtggtcgcggcggcggtgcctttaaccctcgccgtggtgtttgtggtgatggaggcgaccggcaaaaacttcgaccgcatcactctcggctcgctgatcctcgccctggggctgctggtggatgatgccattattgccatcgaaatgatggtggtaaaaatggaggaggggtatgaccgcctcaaagcctcggcctatgcctggagccataccgccgcgcccatgctggccggtaccctggtgacggccgtgggctttatgcctaatggatttgcgcagtccaccgccggggagtacgccagcaatgtgttctggatcgtcggtatcgcgctgattgcctcctggatggtggcggtgatttttaccccctggctgggggtgcacctgttgccggacagaaagcccgcggcggccggccacgccgcgctgtatgacaccccgcgctatcagcgcttccgtcggctgctgacccgggttattgctcgcaaatggcgcgtggccgccggggtggtggcgctgtttatcgtggcgatcctgggcatgagcgtggtgaaaaagcagtttttccccacctccgatcgtccggaagtgctggttgaagtgcagctgccttacgggtcgtcgattagccagaccagcgccgcggcggcgaaaattgagcactggctgcagcggcagccggaggcgaagattgtcaccagctatatcggccagggcgcgccgcgcttttacctggcgatggctccggaattgcccgatccctccttcgccaaactggtggtgttgaccgacgggcagggtgcccgcgaggcgctcaagcggcggctgcgggaggcggtggccaatggcctggcgccggaggcgcgggtgcgcgtcactcagctggtgtttggcccttattcgccttatccggtcgcctggcgggtgatggggcccgatccgcacgctctgctcgacatcgccgagcgggttaaatcggtgctgcaggccagtccgctgatgcgcaccgtcaataccgactggggttcgcgggtaccggtgatgcatttcagcctcaatcaggaccggctgcaggcgagcggactcagctcccagtccgtcgcccagcagctgcagttcctgctgtcagggatcccgatcaccaccgtccgggaagatattcgcgccgtgcaggtgatcggccgcgcggcgggcgacatccgtctggatccggcgaaaatcgccgacttcaccctggtgggcagcggcgggcagcgggttcccttgtcacagattggcgacgtgtcgatcaggatggaggacccgctgcttcgccgtcgcgaccgcacgccgaccatcaccgtccgcggagatgttgcggagaacctgcagccgccggatgtctccaccgcgctgatgaagccgctgcagcccattatcgactcgctgccgcctggctatcgcatcgagacggcggggtcgattgaggaatccggcaaggccacccgggcgatggtgccgttatttccgataatgatcgccctcacgctgctgatcattatcctgcaggtgcgttcgctgtcggcgatggtcatggttttcctgaccgcgccgctggggctgattggcgtggtcccgacgctgctgctgttcaatcagccgtttggcatcaatgccctggtgggcctgatcgccctgtcggggatcctgatgcgcaatacgctgatcctgattggccaaatccatcataaccaacaggcggggctcgatccgttccacgcggtggtggaggcgacggtgcagcgcgcccgcccggttctgctgaccgcgctggcggcgatcctggcgttcattccgctcactcattcggtcttctggggaacgttcgcctatacgctaattggcgggacgctggggggaaccatcatgacccttatcttcctgccggccatgtacgcgatctggttccgcatccgcccggagaacacggtacagcagacagagttgcaccttcagaggtaa

SEQ ID NO: 212943 - DNA, 1185 bp, Klebsiella pneumoniae
atgattgtttcagcccccagcgattatcgcgaagccgctcgtcgtcgtctgccccgcttccttttcgattatattgacggtggcgcggtggcggaaaacaccatgaacgccaacgccgccgagcttgcctcggtagctcttcgccagcgcgtactgtgcggggccggcgaaccgacgctggcgaccacgatccttgatgccccatgggcgatgcccgtggcgctggggcccgtcggcgccaccgggatgtacgcccgccgcggcgaagtccaggcggcccgcgccgcctcccgcgccgggatcccgtacaccttatccaccgtgtcggtctgctcgattgaagaggtggcgagccacgccagcggcgcgctctggtcccagctgtacgtactgaaagatcgcggctatatgcgtaacgcgctggagcgcgcctgggccgctggcatgaaaaccctggtatttaccgtcgatatgccaatccccggctcgcggtatcgcgataaccgctcagggatgtccgggccgcacgccaccctgcgacaatatctccaggcttgcacccatccgcgctgggcgatgaacgtcgggctggcgggcagacccctgtcgtttggtaatatcgaagcctacaccggccacaaaatgaccatggacgactatatggggttcatcagcaacaacttcgacccgtccatcgcctggcacgatctggagtggatccgcgacagctggcaagggaaattaatcatcaaagggatcctcgatgccgacgatgcgcgcaatgccgtgcggctgggcgccgatggtattgtggtgtcgaatcatggcggcagacagctcgatggcgccatccccaccgcccgggcgctacccagggtggtggatgcggtcggcgacgatctaacagtgcttgccgattccggggtgcgctccggcgtggacgttatacgtctgctggccctcggcgcgaaaggcgtgctgctcggtcgggcctatatttatgccctggccgcggcgggcgaagcgggcgtggcgcatctgctgcgcttatttgccgaggatatgaaggttaccatgaccctcaccggcgcgacctcgccatcggccatcagcctcgattgccttgatcgcctcgaacaggatcaacaccgcactcatgcggtgccggtatccttacccgcctga

SEQ ID NO: 212944 - DNA, 633 bp, Klebsiella pneumoniae; identical to SEQ ID NO: 137636

SEQ ID NO: 212945 - DNA, 396 bp, Klebsiella pneumoniae
atgcctaattcgaccttatttttcatcaccctttgtctctctcgcgtcctggtgactttcttcttctggatggcaggcatctacggcgtctttcatttcgcggagatcgttcaggagatggtgaccgtcggcctgccgtggccggtcttgttcgcggcgggcacgattttttgccagctggcgggttcggcgctgatcgtttttaatcctgccggctacggctggattggatcggtgatgctgattgtgtttacattactcactattccgctgggacacgccttctgggccttcagtgaaccccggcgcactgaggaattccatattgcgcttgaacacattaccgtggtcggaggattaattatgagcgcgctgtttgcaggctatcggcgatga

SEQ ID NO: 212946 - DNA, 198 bp, Klebsiella pneumoniae; identical to SEQ ID NO: 137638

SEQ ID NO: 212947 - DNA, 378 bp, Klebsiella pneumoniae
atggaagtacatgcaggaacttttaatcccgccgatttcagctggcagggactgaccatgacgccggccgctgccgcgcatatccgcgatctgatgcgcaagcagccggataagaaagggctgcggctgggcattaaaaccagcggctgcgccggttttggctatgtgctcgaaatgattgccgagccggcgcccgacgatctgctctttgaatctgacggggcgaagctgtttgcgccgctgcaggcgatgccgttcatcgacggcaccgagctggattatgtccgggaaggtttaaatgaaatctttaaatttcataacccgaaagcgcagcatgagtgcggctgcggcgaaagttttggggtgcaggcggagtaa

SEQ ID NO: 212948 - DNA, 1488 bp, Klebsiella pneumoniae
atgtcgcgtaatactgaagcaactgacgatgtcaaaacctggaccggcggcccgctcaactacaaagagggcttttttactcgcctgcaaaccgatgagctggccaaaggcattaatgaagaagtcgttcgggctatctcggctcgccgcaatgagccgcagtggatgttggagtttcgtctgaatgcctaccgggcgtggctggaaatggaggagccgcactggctgaaagcgcattacgataagctgaattatcaggattacagctactattccgcgccctcctgcggcaactgcgatgagacctgcgcctccgagcctggcgcggtgcagcagaccggggccaatacctttctgaccagcgaggtggaagaagcctttaaccagctgggcgtgccggtacgcgaagggcgcgaggtggcggtggacgcgatatttgactcggtgtcggtggcgaccacctaccgagaaaagctggccgagcaggggatcatcttctgttctttcggcgaggcgatccacgatcatccggaactggtgaaaaagtatctgggcaccgtagtgccggggaatgacaacttctttgccgcgctgaacgccgcggtggcttcggacggcacctttatctatgtgccgaagggcgtccgctgcccgatggagctgtcgacctatttccgcatcaacgccgaaaagaccgggcagtttgaacgcaccattctggtggctgatgaaggcagctacgtcagctatattgaaggctgctcggcgccggtgcgcgacagctatcagctgcatgccgcggtcgttgaagtcatcatccataaagacgcggaagtgaaatactccacggtgcagaactggttccccggcgataacaacaccggcgggatcctcaacttcgtcaccaagcgcgccctgtgcgaaggggagaacagcaaaatgtcatggacccagtcggaaaccggctcggccatcacctggaaataccccagctgcatcctgcgcggcgataactcgatcggcgaattcttttcggtggcgctgaccagcggccatcagcaggcggacaccggcaccaaaatgatccatatcggcaagaacacccgctcgaccatcatctcgaaagggatctccgccggacacagtcagaacagctatcgcgggctggtcaaaatcatgccgaccgccaccaacgcccgcaactatacccagtgcgattcgatgctgatcggcccggactgcggggcgcataccttcccgtatgttgaatgccgcaacaacagcgcccagctggagcacgaggcgaccacctcgcggattggcgaagatcaattgttctactgcctgcagcgcgggatcagcgaagacgatgccatctcgatgatcgtcaacggtttctgtaaagacgtcttctccgagctgccgctggagttcgctgtagaggcgcaaaaattgctggccattagccttgaacatagcgtcggctga

SEQ ID NO: 212949 - DNA, 747 bp, Klebsiella pneumoniae
atgttaagtattcaagatttacacgtcgccgtcgaagataaagcgatcctgcgcgggctgaaccttgaggtgcgcccgggagaggtccacgccattatggggccgaacggctcaggcaaaagtacgctttcggccaccctggccgggcgtgaagattatgaggtgactggcggtcgcgttgaatttaagggcaaaaacctgctcgaactcgctgcggaagatcgcgccggggaaggtatctttatggccttccagtatccggtagagatccccggcgtcagcaaccagtttttcctgcagactgcgctgaatgccgtgcgcaactatcgtggccaggaggcgctggatcgtttcgatttccaggacttaatggaagaaaagatcaagctgctgcagatgccggaagatctcctgacccgctcggtgaacgttggcttctccggcggtgagaaaaagcgcaacgatattctgcaaatggcggtgcttgagccggagctgtgcattctcgatgaatcggattcggggttggatatcgatgccctgaaaatcgtctcccagggagtgaatgccctgcgcgacggcaaacgcgcctttatcattgtcacccactatcagcgcatccttgactatatcaagccggactatgtccatgtgttgtatcaggggcggattgtgaagtcgggcgatttctctctggtcaaacagctggaggagcagggctatggctggcttaccgaacagcagtaa

SEQ ID NO: 212950 - DNA, 1275 bp, Klebsiella pneumoniae
atggctggcttaccgaacagcagtaacgcgctgcagcagtggcaccatctgtttgaagcgcagggcggcccgcgtaccccggaggccagtcagcatctgcagcagctgctgcgccttgggctgccgacgcgcaagcacgaggactggaaatacactccgctggatgccctacttaacggtcgctttgtcgccgatgagggggcctctctcagtgctgaacagcgtgatgcgctggcgctgccgctggacgcctggcggctggtgtttatcgatggccgctatcatcctcagctgagcgacgatcttgccgccagcggcgtggaggtcagtgtcgataatcagcgccagcatctgccggatgccctgcagccggaggtgtttctccatctgaccgaaagcctggcccagacggtgacccgcattcgcgtgccgcgcaaccgccgcctggataaaccgctgctgctgatgcatatcactagtggcctggccggcgatgcgctgaataccgcccactatcgccatcacctggcgctggagagcggggcggaggcgacgattgtcgagcattacctgagcctcaatgagcagccgcatttcaccggcgggcgattgaccatgacggtggccgataacgcgcacctccagcatatcaagctggcatttgagaatgcccgcagctatcacttcgcccataacgacctgctgctgggccgcgacgcctcggctttcagcagcagtttcctgcttggcggccaggtgctgcgtcaccagaccagcacccgcctgggcggcgaaaacagcaacctgcgcctcaattcgctggcgatgccggtgaaaaatgaggtctgcgatagccgcacctggctcgaccatcaggtcggctactgcaccagccgccagctgcacaaaaccatcgtcagcgataaggggcgggcggtgtttaacgggctgatcaacgtcgcgccgctcgcgctgaaaaccgacggtcagatgaccaacaataatctgctgctcgggcggctggcggaggtcgacaccaaaccgcagctggaaatttacgccgatgacgtgaaatgcagccacggggcgacggtggggcgcattgacgaagagcagctgttctatctgcgctcgcgaggtatcgaacagcaggcggcgcagcagatgatcctctacgccttcgccgccgagctcaccgaggctatccgcagcgacgcgctcagagagcaggtgctggcgcgtattggacagcgtttgccgggaggcactgtatga

SEQ ID NO: 212951 - DNA, 867 bp, Klebsiella pneumoniae
atgacattttcagtagaacaggttcgcgccgattttccggtactgaaccgggaggtcaacggtcagccgctggtctatctcgacagcgccgccagcgcccagaagccggaggcagtgatcggcgccgaagcggaattctatcgccacggctacgcggcggtgcaccgcggcatccataccctcagcgcggaagccaccgcgctgattgctcttgcgcatcagcatggcgcgaaagtgctggtggatggcgcccaggcggtgatgcaccacccggtggacgtccaggcgctgggctgcgatttttatgttttctccgcccacaagctgtatgggccgaccgggatcggcgtgctctacgcccggtccgagctgctgcagacgatggcgccttgggaagggggcgggtcgatgatcgccaccgtcagcctgacggagggcaccacctggaatcaggcgccgtggcgctttgaggccggcacgccgaataccggggggatcattggcctcggcgcggcgctgacctacgtcagccagctgggactgacgcagattgccgagtatgagcagacgctgatgcgctacgcgctcgatgccctgcgcgcggtaccggatctgatcctttacggcccggcgcagcgtaaaggggtaattgctttcaacctcggtcagcatcacgcctatgacgtcggcagcttcctcgataactacgggatcgccgtgcggaccggacaccactgcgcgatgccgttgatggcccggtatcaggtaccggctatgtgtcgggcatcgctggcgatgtacaataccacggaagaggtggaccgcctggtggccggcctccagcggatccgcaaactgttagggtaa

SEQ ID NO: 212952 - DNA, 417 bp, Klebsiella pneumoniae; identical to SEQ ID NO: 137644

SEQ ID NO: 212953 - DNA, 987 bp, Klebsiella pneumoniae
atgaaacgcaaaacgatgatcaccttagcccttctcagcgcccttggcgcctccacggcctcctgggccgttgattacccgcttcctcccgccaacagtcggctgattggtcagaatcagtactggacggtccaggagggagatcgcaacctgcaggcgattgcgcgccatttcgataccgcggcgatgctgatcctcgaagccaacgatacgattgcgccggtgcagccgaagcccggcactcaagtccttatcccttctcagatgctgctgcccgacgtgccgagggagggcattgtcgtcaacctcgccgaactgcggctgtattacttcccgccgggagagaatcaggtgcaggtctatccgctgggcattggccagttaggtctggaaacgccggagatgaccacccgcgtggggcagaagatccctaaccctacctggacgcctaccgccggcatccgcgcgcgctcgctggagaaaggggtgacgctgccagcggtggtcccggccggaccgaacaatcccctgggccgctatgcgctgcgtctggcctacggtaatggtgaatatctcatccacggaactaacgccccagacagcgttggtctgcgcgtcagctcgggctgtatgcggatgaacgctgatgacatcaaagcgctgttcagccaggtgaaaaccgggacgccggtacggattatcaatcagccggtgaagtttgccgtcgagccggatggtaaacgctatgtcgaagtccacaggccgctttcgcagaccgaaggggaaaacacccggaccatcgcttacacgctgccagcggcgtttcacgccttcgcagaggataaagcagtggatgacctgcagttgaaaaaagcgatgtcgagaagggcggggtatccggtggtggtgtcggcgggggcaggtagcacggcaacgtcgctgtcggcgcagaatagttcgtctgacaacggtctgcttacccaatag

SEQ ID NO: 212954 - DNA, 237 bp, Klebsiella pneumoniae
atgaatcgtactaaactggtactgggcgcggtaatcctgggttctactctgctggctggttgctccagcaatgctaaaatcgatcagctgtcttctgacgttcagactctgaacgctaaagttgaccagctgagcaacgacgtgaacgcaatgcgttccgacgttcaggctgctaaagacgacgcagctcgcgctaaccagcgtctggacaaccaggctcactcttaccgtaagtaa

SEQ ID NO: 212955 - DNA, 1413 bp, Klebsiella pneumoniae
atgaaaaagaccaaaattgtttgcaccatcggtccgaaaaccgaatctgaagagatgctgaccaaaatgctggaagccggcatgaatgtgatgcgtctgaacttctcccacggtgactatgcggaacacggtcagcgcatccagaacctgcgcaatgtgatgagcaaaaccggtaagaaagccgctattctgctggacaccaaagggccggaaattcgtaccatcaagctggaaggcggcaacgacgtctccctgaaagcaggccagaccttcaccttcactaccgataaatccgtcatcggcaacaacgaaatcgttgcggtaacctatgaaggcttcacctctgacctcgccgtcggcaacaccgtcctggtggacgatggcctgatcggcatggaagtcacggctatcgaaggcaacaaagttatctgtaaagtgctgaacaatggcgatcttggcgagaacaaaggcgttaacctgccgggcgtctccatcgccctgccggcgctggctgagaaagacaaacaggatctgatcttcggttgcgaacaaggcgtggacttcgtcgcggcctccttcatccgtaaacgttccgacgtcgtcgagatccgtgagcacctgaaagcccacggcggtgaaaacatccagatcatctccaaaatcgaaaaccaggaaggcctgaacaacttcgacgaaatcctcgaagcgtctgacggcatcatggttgcgcgtggcgatatgggcgtggagatcccggttgaagaagttatcttcgcccagaaaatgatcatcgaaaaatgtatccgcgcgcgtaaagtggttatcaccgccacccagatgctggactccatgatcaagaacccgcgtccgacccgcgctgaagccggcgacgtggctaacgccatcctcgacggcaccgatgcggtgatgctgtccggcgaatccgcgaaaggtaaatacccgctggaagcggtcaccatcatggcgaccatttgcgaacgtaccgaccgcgtgatgaccagccgtctggacttcaacaacgacaaccgtaaactgcgcatcaccgaagcggtgtgccgcggcgcggtagaaaccgctgagaaactggaagcgccgctgatcgtggtcgccacccagggcggtaaatccgcacgcgctgtgcgcaaatacttcccggatgccaccatcctggcgctgaccaccaacgaaaccaccgctcgtcagctggtgctgagcaaaggcgtggtaccgcagctggtggaagagattgcctctaccgatgatttctatcatctgggcaaagacctggcgctgaagagcggcctcgcgcgtaaaggcgacgtagtggtgatggtttccggcgcattagtgccgagcggcacgactaataccgcttccgtacacgtgctgtaa

SEQ ID NO: 212956 - DNA, 213 bp, Klebsiella pneumoniae
atgggaaataaagcgaaagacgacaacctgtaccaggaaatgtgccgcgtggtgggtaaagtcgtgctggaaatgcgtgacctgggtcaggagccgaaacacattgtcattgccggtgtgctgcgcacctcgctggcgaaccgcaaaatccagcgttcgccgctcaccgtggaggctatggagaaagtcattcatgcgctttccgggcactga

SEQ ID NO: 212957 - DNA, 639 bp, Klebsiella pneumoniae
atgaccgtcgttgcccatgatgaagcacaatccctgaaggcgcggattttcagcgccgctatcgctgtctttgctgaacacgggctgtcaggcgcccgcatggagcagatcgccaccgaggcgcagaccaccaaacgcatggtggtttactacttcaaaagcaaagaacagctctatcaggaggtgctgcagcatgtgtatgcgcggatccgcgaaaccgagcagcagctggggctggagaatgtgccgccggtggaggcgctggtgcggctggtgcgctggagcgtgcgctatcacgccacccatgcggactatatgcgcgtcatttgcatggagaatatgcagcgcggcaagtggttaaaaagctcgggtgaactgaagccgctgaatcgtaccgccctgtcgattctggaagacattttactgcgcggccagcagcagggcgtctttcaggcggggctcgacgcgcgcgatgtccaccggttaatcagcagcttcagcttttatcaggtgtcgaacttctacaccttcagcagcctgtatcttgacgatccgctacccgccatcgacgatgaagcgatggtggctcaccattgtgacattgccgtcagggcggtgatccgcttcgtgatttcctga

SEQ ID NO: 212958 - DNA, 1854 bp, Klebsiella pneumoniae
atgctgcgctctatcgccaccgtttcgatttccggcaccctgcctgagaagctgcacgctattgcggcggcggggtatcagggggtggaaattttcgagaacgatctgctctattatacggggacgccggcggaaatccgccagcttgccgccgatttagggttaaaaatcacgctttttcaaccctttcgcgattttgaaggcgccagtcgggcgcagtttgcggcgaatatggcccgcgctcggcgcaagtttgctctgatgcgcgagctgggctgcgagacgctgctgttgtgcagcaatgtacagccggactgctcggcggatagcgaattgcaggtcgcggacctgcgggcgctggccacgctggcggaagaggaggggatcgctatcggctatgaggccctggcctggggaacccatgtgaaccgctggcagcaggcctgggagcgggtgcggcgggtggacagcccggcgttgggcctggtgctcgacagcttccatattctggcccgcggcgacacgctggacgcgctaccgtcggtgccggtggagaaaatcacctttgtacagctcgccgatgcgccgtatatgaaaatggatttgctggagtggagccgccacttccgctgctttcccggacagggggagctgccgctggaggcgtttgccgagcagatcacccgctgtggctaccgcggcccctggtcgctggagatctttaatgacggttttcgcgcctcgccgaacggcgcgacggccaaagatggttatcgttcgctgctgtggctggaggagcaaacccgccgtcggctcccgacgtgcgatgccgatctgttttcaccgccgccgctgccggtctatcacgggctggagtttatcgagtttgccgccagcgccgccgaggcgcagcgcctggggcaacatctgcaggcgctgggttttcagcacgagggaagccaccgctccagacaggtgacgctgtggcgcaacggcggggcgcggatcgtcatcaaccatcagccgcacagctgggccgaccatttttatcaacgccacggggtatcgctctgcgcgatggcgctgcgggtcgagcagagcgcgtcgcttgtcgcccgcgcccgcgcgctggggtatgccacctggcagggcgacgccgggccgaacgaaacgccgatcccggcgatctgcgcccccgacggcagccttatctatctcatcgacgccggggaggctatctacgagcgcgattttcatctgcgtgatggcgtgacggtgcgcgaggattatctcggtatcgatcatctggcgctgggaatggaggccgacagccgcgataactgggtgatgttcttccgtacggtgtttggtttttcccttgagcatgagcagacgctgccggacccgtatggactggtgcgcagcctggcggtgcgcagcccgcagggcgatatccgtctggcgctgaatatttcgcagagccgggcgacgcagatcgcccgttccgttgcctgctaccagggggcggggctgcagcatgccgcctttgcctgccgcgatctgccggccgcctgcgaccagcttgccgaggttgcccgccatacgctgccgatcccggccaattattatgacgatttgctggcgcgctttggcggcgagctggacgtcgggcagcttcagcgccagcagctcctctatgaccgcgatccgcaggggggagatttcctgcatctttacacccggccctttaccgctggccgctttttctttgagttaactgagcgccgggctggctatgcgctctatggcgcagcgaatgcggccgtccgtctggcggcgatgcagtattgttag

SEQ ID NO: 212959 - DNA, 1323 bp, Klebsiella pneumoniae
atgagctcatatagccctaacccgacggctgccgcccagccagccgttaccgtgcgccgctcccggcggcgtatcggcattcttgcgctgttggccattggcaccatgatcaactatctcgatcgcaccgtactggggatcgccgccccaaagctcaccgctgagctggggatcgacccggcgatcatgggaatcctcttctccgccttcgcctggacctatgctctggcgcagatccccggcggattgtttctcgaccgctttggcaacaaagtgacctactttttgtcactgaccctgtggtcgctgtttaccctgttccacggcatggcggtggggctgaagactctgctgctgtgccgcttcgggctcggcattagcgaagcgccgtgctttccggtcaacagccgggtggtcagcgcctggttcccacagcaggagcgggcgaaggccacggcggtgtacaccgtgggggagtatctcgggctggcctgctttgcgccgctgctgttctggatcatggacggtttcggctggcgggtgctgttcgtcagcgttggcgccgtcggcattctgtttgccctggtgtggtggcgctgctaccgcgaaccgcatgaagatccgcgccttagccagcaggagcgcgagcatatcgaaaacggcggcggcctcagcgccccgaccgaccagcaggtggcgttcagctggccgctggtccgccagctgctgagcaaacggcagatcatcggcgccagtatcggccagtttgccggcaataccgtgctggtgttctttctcacctggttccccacctggctggccaccgagcggcatatgccctggctgaaggtcggctttttctccatcctgccgtttgtcgccgccgccggcggggtgatgtttggcggctggctctccgacaagctgctgaaagccaccgggtcagccaacctcggtcgtaagctgccgatcgttgccggcctgctgatggccagctgcatcatcaccgccaactggctggagagcgacctggcggtgatcctggtgatgtcgtttgccttttttggccaggggatggtgggtctcggctggacgctgatctccgatatcgccccgaaggggctgggcggtctgaccggcggcctgtttaacttctgcgccaacctcgcggggatcctcaccccgctggtgatcggctttatcgttgccgggttcggcaatttcttctacgccttgatctacatcggcggcgccgcgctgttgggcgtggtggcctatctgtttatcctcggcgacgtcaaacgtatcgagttatcgcagtaa

SEQ ID NO: 212960 - DNA, 837 bp, Klebsiella pneumoniae
atggtgattagtgggaatacgcggctgatagcgcaccttggctatccgaccgccagttttaaggcgccgatgatctacaacccgtggttcgttgaccagcaggtggacgtgaaggtggtgccgatgggggtcaggccggaggactacgccgcgtttattccgccgctgtttacgatgaccaacatcatcggcgcgctggtgacgatgccgcataaaatcgccacctgcgatctggtgcagcgcctgagcccgacggcggccatcgctggcgcctgcaatgccatccgccgcgaggctgacggtagcctgagcggagacatgttcgatggcgagggatttgtgctgggcctgcgtcgtaaagggtttaacccgcaggggacgcgggcgctggtggttggcagcggcggggtgggatcggctatcgccgcttccctcgcggcggcggggctcagcgccctgaccctgtacgatacccggcccgaggtggcgcacgccctcgccgggcggctgcatcagcactatccgcagctcgatatcaccctgatgcagcccgatcctgccggacacgagctggtggtcaatgccaccccgctggggatgaaggccagcgatccgctgccgctggacgttgaccgtctggcgccaggcgcctgggtgggggaagtcgtcatgactcaggagtacaccccgctgctgagggccgctcaggcacgacagtgccacatccagcgcgggaccgacatgctgtttgaaatgatccctgcctatctgcgcttttttgacctaccggtagccacccccgagcagctgcgtgcgctggcagaaattcgctactga

SEQ ID NO: 212961 - DNA, 744 bp, Klebsiella pneumoniae
atggcaaataccactctcacgctgctggcggcgggaagcctgagaagcgccttcctgccgctggtggcgcactttcggcagcacactggcctggcggtcgatgcgcagtttggccctgccggcctgctgcgcgagcggatcgaagccgggtcgccgtgcgcggtttttgcttccgccaacgcggcgcacccgcaggcgctgctgcaggcgggtctggcgcaggaatgccagggatttgccagcaaccagctgatgctgaccgcccggcggtcgccggacaacgatggcctggactggctggcgctgctcagcacgccccgcctgcggttggcgacctccacgccaggctgcgatccgtcgggagattatacctggcagctgttcgcccgaattgaggcacgctatccagggttgggcaacgcgatggccgggcgggcgcagcagctggtcggcggcagagactcactgagcgtgccgccgggagagatagccggcgcgtggcttattcgccagaatctggcggatctgtttatcggctatgcgcactatggccccgcgctggccgcctgcgacgatctgcgtaccctgaccatcccggcgccgtggaatattcgctgcgattaccagctggcgcgtctcagggccgatcccgccgcgctggccctgtatcgctttatcctcggcgacgttggtcaggggtatctccggcaggcgggttttatgccgttcagcgacgcagcgtaa

SEQ ID NO: 212962 - DNA, 750 bp, Klebsiella pneumoniae
atgaacagctcattatcgctgcaagcgctacgctacggccaccgtcagccgctcttcgccccgctcacgctggcctgccggcccggtgagatctgggcggtgctgggcgccaatggccgaggaaaaagtaccctgctggataccctgaccggcgtgctgccgccgctgggcggcgagatgcagtgcgagggcggcgtggccctggttccgcagtcgtttcgtcccgcttttcgctggcgcgtgagcgatgtggtgctgatgggccgggcccgtcacgtggatctctttgcccagccggacgaggaggatgcccggcgggttgagcaggcgctggcgcagctggggattgccgccctggccgaagatgacttcggtgccctctccggcggccagcagcagctggtgttgattgcccgcgcgctggtcagcgccagccagaatatcctgctggatgagccatgctcggcgctggaccttggtaaccagcaggtggtattgcagctgatcggcgacctcgcccaccgccaggcgcgcaccgtcctgttcaccacccatgatcccaaccacgccctacaggtggccagccatacgctgcttctgctgccggagggccggtggctggcgggcgagaccgccgacgtgctgagcgaaacgcatctccggcaagcgtacggcctgccggtacgcctgatccgccatgccgcctccgcgttccctctgctggcgccggggtttacgctgcgtcgctga

SEQ ID NO: 212963 - DNA, 1008 bp, Klebsiella pneumoniae
atgcccgctaactctcagccctggctggtgcagggaagcctggcgctggcgacgctggcgatcgcggtcgcctcgctctgtttcggccagtacccgttaagcctgagcgccgttggccacaccctggtccatctgccgccaggagaaggggtgatcgggcagatcgtctggtcggttcgcctgccgcgcgtggtgatggccctgctggccgggggcgcgctggggctgtgcggcgccaccttgcagggcgtgttccagaacccgctggtggacccgcacatcatcggggtgaccgccggctccgcctttggcggcacgctggcgatcctgttgggcgtcggcagtctgctgatgatggcctcgacctttttcttcggcctcgtcgcgctggggctgatttacgccctcgccgccctgcaggggcgggacagcacgctggggctgattctgtccgggatcattctcagcggcttcttcgccgcgctggtcagcctgatgcagtacctcgccgacagcgaagagacgttaccgaacatcgttttctggctgctcggcagcttcgcgaccgccagctggcataaggtactgcttatgtccctgcccctggcggtggctgccggggcgctgtggaagctgcgctggcgtatcaacctgctggccctggaggagcgcgatgcccgcagtcttggcgttccggtggccgcgctgcgtcgcggcgtgctggtttgctgcgctgtgctggtggcagcccaggtggcggtcagcggcagcatcgcctggatgggtctggtggtcccgcacctcgcccgtctgctggtaggggctgaccatcgtcgcctgctgcccaccgccttctggctcggcgccgcgctgatgctggtggtggacgatctggcgcgtacgctgacccaggcggagatcccgatcgggatcatcaccgccctgctcggggcgccgctgtttaccgtgttgctggtgcaatcccgacgccggagtacgacccgatga

SEQ ID NO: 212964 - DNA, 1059 bp, Klebsiella pneumoniae
atgtcaaaacaccccttactgctgggcctgacgctgctcagcgccagcctgttcaccggccaggccttcgccgaccgcaccgtcaccgaccagctgggtcgccaggtcaccctccccgaccacgtcacccgcgtagtggttctgcagcatcagacgctcaacctgctggtacaactgcatgccgccgaggatatcgtcggcgtcttaagcagctggaagaaacagctcgggccgcagttcgcccgctttatgcccgagatcgggcaactggcgaccccgggcgatctcacccaggtcaatattgaaagcctgctggcgctgcgtccgcaggtggttttcgtcgccaactatgcgccgccggcgatgatcgcgcagatccaacaggccgggatcccggtggtggccatctcgctgcgtcacgatgccgccggggaaaaaaataaaatgaaccccaccatggctgacgaagagcaggcctataacgccgggctgatggaggggatccgccttatcggcgaggtggtcgagcgccagcccgaggccgaggcgctgattcactacaccttcgaggcgcgcaagcaagccaatgcgccggtggccgatattccccagaaccagcgggtgcgggtgtacatggccaaccccgatctgaatacctatggcgctggcaaatacaccgggctgatgatggcgcacgccggggcgctgaacgtggcggccgccagcgtaaaaggcgcccgccaggtgtcgctggagcaggtgctggagtggaatccacaggtgatcttcgtccaggaccgttatccgcaggtggtcaaacagatagagaacgacccgcagtggcaggcgatcgatgcggtgaaacatcaccgcgtgtggctgatgccggagtatgccaaagcctggggttacccgatgccggaggccctggcgctgggcgagctgtggatggcgaaaaaactctatcctgcgcgctaccagagcatcgatgtggacagtaaagccagggattattatcagcgtttttaccgcgtggcgtggatgccagatgcccgctaa

SEQ ID NO: 212965 - DNA, 813 bp, Klebsiella pneumoniae
atgcgtgacgatgagtccgcagcgtacaaaacggtgcgcggattaagccggggtttattgttattaaaattgttaaataaattcgacggcggcgcgacgccgggcctgctggcggagtttagcggcctgcatcgcaccaccgtgcgccggctgctggagacgctacaggaggagggttttgtccgccgcagccgctccgatgacagcttccggttgaccattaacgtccgccaactgagcgatggatttcgtgacgaacattggatttctgccctcgccacgcagctgctcggcgagctgctgcgcgaggtgcagtggccaacggacatcaccaccctcgacgtcgacgccatggtggtgcgcgagactacccaccgcttcagccgactgtcgtttcaccgcgcgatggtcggacggcggctgccgctgctgctcaccgcctccggactgacgtggctggcctttgcccccgacgcggaacgcgacgccatcgtcagcatgctggccgcccgtccggaagctgagtatcagctggcccgcgaaccggaacggctggcggcgatcctcgcccgcacccgccagaacggctatggcgaaaacttccgcggctggcggcaggaggagaaaatcgcctcgatcgccgtgccggtctgcagtcagcagcgggttatcggctgcctgaacctggtctatatcgccagcgcaatgaccattgagcaggcggcgcagaagcatctccctgcgctgcagagggtggcgaggcagatagaagcccgcatggaggatgaagaagtgtggtacgaaatgccctga

SEQ ID NO: 212966 - DNA, 1665 bp, Klebsiella pneumoniae
atgacaacatctacacccgatattcaacccgccgtgcagcataccgctcaggtcgccatcgttggcgccggtccggttggtctgatgatggccaactaccttggccagatgggcatcagcgtgctggtggtggaaaagctcgccacactgatcgattacccgcgggccatcggcattgacgatgaatccctgcgggcgatgcaggcggtggggctggtgaatgacgtgctgccgcataccacgccgtggcacgccatgcgttttctcaccccaaaaggccgctgctttgccgatatccagccgatgaccgatgagtttggctggtcgcgccgcaacgccttcattcagccgcaggtcgatgcggtgatgtatcacggtctgcagcgtttcccgcaggtccgctgcctcttctcccgcgaagtggaagcctttagccagaccggtgacggtgtcacgttaaatcttaaaggaccggacggcgagcgggagacggtgcgcgcggactggctggtggcctgcgacggcggcgccagctttattcgccgtacgctgaacatccccttcgaaggtaaaaccgcgccgaatcagtggatcgtcatcgatatcgctaacgacccgctggccaccccgcacgtttacctgtgctgcgacccggtgcgaccctacgtttccgccgcgctgccccacggcgtgcgccgctttgaatttatggtgattcccggagaaaccgaagcccagctcagcgagccgcacaatatgcgccgtctgctgagcaaagtgctgccggacccggaccgcgtcgagctgatccgccagcgggtctatacgcataacgcccgccttgccgagcgctttcgcatcgaccgcgtgctgctggccggcgatgcggcgcacatcatgccggtctggcaggggcagggatataacagcggcatgcgcgacgccttcaacctggcgtggaagctggcgctggtggtcaacggtaaagcgggagagacgctgctcgacagctaccagcaggagcgccgcgaccacgcgaaagcgatgattgatctgtcggtcaccgccggctacgtgctggcgccgccgaagcgctggcagggggccgtgcgcgacggcctctcctggctgctaaattacctgccgccggtgaaacgctacttcctcgagatgcgctttaagccgatgccgcagtaccgcgagggggcgctgctgacggactgcgccggcaagacctcgccggtgggcaaaatgtttattcaaccgcaggtgacgctggagagcggcgagagcgtgctgctcgacgaggttatcggggcgaatttcgccattatcggctggggctgcaacccgcagtgggggctcgacgccgggcagatcgcccgctggcgcgcgattggcgtgcgctttatccaggtggtgccggaggtgcagatccaccgcgagcaggataacgcccccggcacgctgcgggtgggcgacaggcaaaatcgcctgaagagctggtttgctcagcataacaccgccatcgccgtggtcagaccggaccgctttgtcgccgctctcgccatcccgcagaccctcggcgcgcagctgaccgccctgacggaaaaactggccctcgcaaccggggataccgcccacgctgaagagaaggtggcctga

SEQ ID NO: 212967 - DNA, 945 bp, Klebsiella pneumoniae
atgcatgcctatttgcactgtctctcccacaccccgctggtgggattcgtggacccggagcaggcggtcctcgatgaagtgaacggggtgattgccgacgcccggcggcggatcgctgaattcgatccagagctggtggtgctcttcgcccccgatcactacaacggttttttctatgacgtgatgccgccgttctgcctcggggtcggcgccaccgcgattggcgacttcgccagcgccgccggcgacctgccggtgcccgccgagctggcggaagcctgcgcccacgccatcctcaacagcggtatcgacctggcggtgtcgtacaacatgcaggtggaccatggcttcgcccagccgctggagtttctgctgggtggcctggacagcgtgccggtgctgccggtgtttattaacggcgtcgccgcgccgctgccgggttttcaacgcacccggctgctgggcgaggcgatgggccgctttctcaataccctcaataagcgggtgctgatcctcggctcgggcggactctcgcaccagccgccggtgccggagctggcgaaggccgacgcccatctgcgcgatcgcctgctcggcggcggaaaacagctgccgccggacgaacgcgaacggcgccagcagcgggtgatcaatgccgcccgacggtttaccgaagacccgcactcgctccatcccctcaacccggtctgggacaaccgctttatgagcctgctggagcaggggcggctgagcgaactggacgcgatcggcaatgacgagctgtcggcgatggccgggaaatcgacgcacgaaattaagacctgggtggccgcttttgccgcgctatccgcttttggccgctggcgcagtgaaggccgctattaccggccgatccccgagtggatcgccggattcggctcgctgagcgccaccaccgagatttga

SEQ ID NO: 212968 - DNA, 867 bp, Klebsiella pneumoniae
atgagctatcaaccgcaaaccgaagccgccaccagccgattcctcaatgtcgacgaggggggccgcacgctgcgtatccatatcaatgactgcggcgacgggaaagagaccgtggtcatgctgcacggctccgggccgggggccaccggctgggccaacttcagccgcaatattgacccgctggtcgaggcgggctatcgcgtgctgctcctcgactgtccggggtggggcaaaagcgatgctatcgtcaacagcggctcgcgttcggatctcaacgcccgcattctgaaaagcgtggtcgatcagctggggatcgataaagtccatctgctgggcaactcgatgggcggccatagcgcggtggccttcaccctgagctggccggagcgggtggctaagctggtgctgatgggcggggggaccggcggcatgagcctgttcacgccgatgccgaccgagggcatcaagctgctgaacgccctgtaccgcgagccgaccattgaaaacctcaaaaagatgatgagcatcttcgtcttcgacacccgcgacctcaccgaggcgctgttcgaggcgcgtctcaacaatatgctgtcgcgccgcgaccatctggacaacttcgtcaagagcctggaagccaacccgaagcagtttcctgactttggcccgcggctgggcgaaatcagcgcgccaactctgatcgtctggggacgcaatgaccgcttcgtgccgatggacgccgggttgcgcctgctcgccgggatcgccggttcggaactgcatatttaccgcgactgcggccactgggcgcagtgggaacatgccgacagttttaatcagctggtgctcaatttcctcgcacgggcttaa

SEQ ID NO: 212969 - DNA, 807 bp, Klebsiella pneumoniae
atgactttttctcttgacgcgctggcccggcagctgcgcgacgcggaacagagcggccaggcgatcgccccgctgcgtgatattctcggcgtcgacaatgccgacgccgcctatgccatccagcgtctgaacgtccagcaccacgtggcccatggccggcgggtggtgggccgcaaggtgggcctgacccatcccaaagtgcagcagcagctgggcgtcaatcagccggacttcggcaccctgtttgccgacatgtgctacggcgacaacgccgaggtgccgtttggccgcgtgctgcagcccaaggtggaggccgagatcgccctggtgctgaagcaggatctgccgcatgccgataccacttttgatgaactgtataacgccatcgaatgggtattgccggcgcttgaggtggtgggcagccgcattcgcgactggtcaatcggctttgtcgacaccgtcgccgataacgcctcctgcggcctgtacgtcattggcggcccggcgcagcgtccggcgggactggatctgaagcagtgcgccatgcacatgacccgcaaccaggagctggtctccagcggccgcggcagcgagtgtctggggcatccgctgaacgccgcagtctggctggcgcgcaagctggcgagtctcggcgaaccgctgcgggcgggggatatcgtgctgaccggggcgttaggcccgatggtgacgattaacgagggggacagctttgtcgcccatatcgaaggtattggctcagtcgcggcacgcttcgttgccgccggagaaggagatcgtgatgcgtaa

SEQ ID NO: 212970 - DNA, 951 bp, Klebsiella pneumoniae
atgcgtaaacgtaaagtcgccattatcggctccgggaatatcggcaccgatttaatgattaaaatcctgcgccacggccagcatctggagatggcggtgatggtcggcatcgacccgcagtcggatggcctggcccgcgcccggcgcctgggcgttgcgaccactcacgaaggggtgggcggcctgatgcagatggcggaatttgccgacatcgattttgtttttgacgccaccagcgccggggcgcacatcaaaaacgatgccgcgctgcgcgaagcgaagccggggatccgcgttatcgacctgacgccggcggcgattggcccgtactgcgtaccggtggtcaacctcgcggacaatctccatcagggcaacgtcaatatggtgacctgcggcgggcaagcgaccatcccgatgatcgccgcggtctcgcgagtggcgaaggtgcattacgcggagattgtggcctcgatcgccagtcaatccgccgggccgggcacgcgggccaatattgacgaattcaccgaaaccacctcgcaggcgattgaaaaagtcggcggggcgggcaagggcaaagcgattattgtactgaacccggcggagccgccgctgatgatgcgcgataccgtctacgtcctgagcgagctggcgtcgcaggaggcgattgccgcctcgatcgccgaaatggcggcggcagtgcaggcttacgtcccaggctaccggctgaagcagcaggttcagtttgaggttatccccgaggacaggccggtcaacctgcccggcgtcggctgtttttccggcctgaaaaccgcggtttacctcgaagtggaaggggcggcgcactatctgccggcgtacgcgggcaacctcgatattatgacctcggcggcgctggcgacggcggagcaaatggccggggcaatgcacagcgcggcgggagcgacagcatga

SEQ ID NO: 212971 - DNA, 1017 bp, Klebsiella pneumoniae
atgaacggtaaaaaactttatatctcggacgtgacgctgcgcgatggtatgcacgccattcgtcaccagtattccctggcgcaggtgcagcagatcgccggcgcgctggataaggccggggtcgactccatcgaagtggcccatggcgatggcctgcagggatccagcttcaactatggctttggcgcccacagcgacatcgcctggattgaagcggcagcggatgtcgtgagccaggcgaaaatcgccaccttgctgctgccgggcatcggcacgctgcacgatctgaaagcggcgtatcaggccggagcgcgggtggtgcgggtcgccacccactgcagcgaagcggacgtcgcggcgcaacatattgcctttgcccgcgagctgggaatggacaccgtcggttttctgatgatgagccatatgatctccccgcaggcgctggcgcagcaggcgctgaagatggaatcttatggcgcgacctgtatctatgtggtggattccggcggggcgatgaacatgaacgacattcgcgaccgcttccgcgccctgaaggcggtgctgaagccggagaccgccaccgggatgcatgcccatcataatctgagcctcggggtggcgaactcgatcgtcgcggtggaagaggggtgcgatcgcattgacgccagcctggccgggatgggggcgggggcgggcaatgcgccgctggaggtgtttattgtcgccgccgacaagctcggctggcagcatggcaccgatctctacgccctgatgaacgcggccgatgagctggtgcggccgctgcaggatcgcccggtgcgtgtcgaccgcgaaacgctggcgctgggctacgccggagtctactccagcttcctgcgccacagcgaagcggcggccaagcgctatggcctcagcgcggtggatattctcgtcgagctgggcaagcggcggatggtcggcggccaggaggatatgatcgtcgacgtcgcgctggatctgcttaaccgcaataaataa

SEQ ID NO: 212972 - DNA, 1197 bp, Klebsiella pneumoniae
atgaccaagataacgactgcaaccccctcgcgcctggtggtcaccatcgggctctgttttatggtggccctgatggaagggctggatctgcaggcggcggggatcgccgccgtcggcatggcgcaggcctttgcgctggataaaatgcagatgggctggatcttcagcgccgggatcctcggcctgctgcccggcgcgctggtgggcggcatgctggcggaccgccacgggcgtaagcgcattctgttggggtcggtgctgctgtttggcctgttctcgctggccaccgcgctggcatggagcttcccgacgctgctgctggcgcgcctgctcaccggcgtcgggctcggggcggcattgccgaacctgattgccttaacctcggaagccgctggctcacgtttccgcggccgggcggtaagcctgatgtactgcggcgtacccattggcgccgcgctggcggcagcgctgggcttttccggtctcgccgcggcctggcagattattttctggattggcggcgtggtcccgctgctgctgatcccgttgctgatgcgctggctgccggagtcgcaggcgtttcagcgcgcggaggccagcgtgccgctgcgcaccctgtttgccccgggccaggccgccgctacgctgctgttgtggctgggttattttttcaccctgctggtggtctatatgctgatcaactggctgccgatgctgctggtgggccagggattccgcgccagccaggcggcgggggtgatgttctctctgcagatcggcgccgcctgcggcacgctgctgctgggggcgctaatggataagctcaccccgctgcggatgtcgctcctgatctacagcggcattctggcgtcgctgctggcgctgggcagcgcgtcgtcgctgactggcatgctgctggcggggtttgtcgccgggctgttcgccaccggcggacaaagtgtgctttacgctctggcgccgcttttttatcccgcggccatccgcgccaccggggtgggcaccgccgtggcggtggggcgtcttggggcgatgagcggcccgctgctggccggcaagatgctggccctcggcaccggcaccgtcggggtgatggcggcctcggcgccgggcattgtgctggccggcgtggcggtgttctggctgatgcatcgccagcagcgcgcggccatggtctga

SEQ ID NO: 212973 - DNA, 726 bp, Klebsiella pneumoniae
atggcttacacctcccgtttgctcaatgcgatccctggcatccgccacgcttttcttgatgtccatgaaaccgccgcctttccctatgccgagctggctccggtgaagctggtgcatggtaatgaggttcatcattatcagcagccgctgccgacgcgcccgcacgccgacgcggtgtttaccgcggtagccgggcaaaaggtgggggtggtgaccgccgactgtctgccgctgctgatcgcctcgcgcgacggtcgctacgtctgcagcgtgcatgccggctggcaggggctggtcagcggtattgtcgacaacagtctggcctgttttcgccagcagggggtggcattggccgatctggtcatcgccgtggggccgcatattcacccctgctgttacgaagtctccgccggattctatcagcaactgctggaccagcccggcggtgaccgggtggcccgccatcgccagcggctgttccattcccgttcgggcccggtcagcgatccgctcaaagccgccgcacgcggcagcgataatctgtggtttgatctgcgcgcctttgccgaagcgatcttcgcagaggcgggggtggcgtcggcgagcgttgaatggctggggagttgtacctactgcaccccgcagtcgctgggctcctaccggcgccggacccattttccggcgccgaagagctttcagtattcgtggatcatgcgcgaagcctga

SEQ ID NO: 212974 - DNA, 1581 bp, Klebsiella pneumoniae
atgtccacctacgcttatcgccaggccgccgggatccgccaggcgctgctcgaccgtcgtgaactggcgctgatcgacgtccgtgaagaggccgatttcgccaccgctcatccgctgtttgccgtcaatctgccgctcagcaaactggagctcgaggtccgccggcggataccgcgcttcaccaccccgctcaccgtctacgacaacggcgagggtctggcggagatcgccgtcgaacggctgcggtcctggggctatcaggatgtggccctgctggccgagggtctcgccggctggcgccgcagcggcggcgagctgtttcaggacgtcaactccgccagtaaagcctttggcgagctggtggaaagcgtgcgtcacacaccgtcgctcaacgcccaggaggttcaggcgctcatcgacagccggcaggaggtggtgatcgtcgacgcccggcgcttcgatgagtaccagaccatgagcatccccggcagcatcagcgtgcccggcggcgagctggccctgcgggtagagagcctgacgccctccccgcagacgccggttatcgtcaactgcgccggacgcacccgcagcatcatcggcacccagtcgctgatcaacgccggcgtgccaaacccggtccatgccctgcgcaatggcactatcggctggacgctggccggccagacgctggcgcaccagcaacagcggcaatacgatccctccgcccgcgcctccggcgcccgggccgctgaggtggcgcattttgccgaacgggccggggtggcggtcatcgatgaggccacgctgcaacgctggcagcagcagagcgaccgcaccaccttcctgtttgatgtccgcagccccgaagagtacgcggcgggtcactatcccggcagcctgagcgcgccaggcggccagctggtgcaggagaccgaccacttcgccagcgttcgaggtgcgcgcattgtgctgctggatgacgatggcatccgggcggcgataaccggctcgtggctggcgcagatgggctgggagacggcgcggctgagcgcgctgtcgaccagccagttgagcgaacgcggggtgccagccgccgaggtgccgcccggcccgcaggcggaggagataagcccggcgcagctggcgcaacagctggaagaacccggtacggtggtgctcgattttaccaccagcgccaactttgtcgctcgccatatccccggcgcgtggtggctaacgcgctcgcagctgcgccaggccctggacgtgatccctcccgcccaacgttacgtggtgacctgcggcagcagtctgctggcccgctacgcggtgccggaggtggcggccttgaccggtaaaccggtgcagttgcttaccggcgggacgctggcgtggatcgccgccggtctgccgctggcgcatggcgacagcggcctcgccgtcgagcgccgtgaccgctatcgtcgtccgtacgaaggaaccgataattccgccgaggccatgcaggcctatctggagtgggagtatggcctggtggatcagctggcccgcgacggcacccacggttttcgggtgctctag

SEQ ID NO: 212975 - DNA, 603 bp, Klebsiella pneumoniae
atgactgcaccacgactggaaaaattacgccatttcattcatgaggtagaccgcctgcaccgcgaacaccaccagaccgccccgctgcttgacgccgtggcgcagcggctggcggcgctggtgcgttacgacgactggctgccggaagagtacaccctgccgcatccgcaccattaccagcagtatctgctgcatgccgactccggggagcgcttctcgattgtcagcttcgtctggggaccggggcaagcgacgccgatccatgaccaccgggtgtggggggccattgggatgctgcgcggcgcggaggaaaaccagcgctaccagctggatgccgatggcataccgcgcgcgctgggcgccgccacgcttctggaagcaggccaggtggagaaagtctccgctgacgatggcgatattcatcgcgtcagcaatgcgctggcggatcgcgtctctatcagtattcatgtctacggcggcaatatcggcgcggtgaagcgcgccgtgtataccccggaagggcagcagaaaccgtttatctccggctactctaaccgccatttacccaatatctgggattcctcccgcgaacatcaaggataa

SEQ ID NO: 212976 - DNA, 894 bp, Klebsiella pneumoniae
atgcgcattgacgatatcgacgctttgctggccacggtgcagttttcctccctcaatcaggccgcggaatatctggggatcacccagtcggccatcacccggcgcctgcagcgtctggaacaggagctgaacgtcacgctgttagagcgccagacccgcccgctgaccctgaccgccgccggacaccgggtgtacgagcagtgtctgagcattaagcgtgagacgaaaaaactctacagcctgttggatccgcaaggcgagccgcgcggcgcgctgcgtctcggcgtgccgcagagtctcagcgagattgccctgccggcggcgctgtcggcgctgagccagcagtttcccggactgtcgccgcagatcacctgcggctggagcggacagctgcagcgccggctggaaaacggcgagctggacggcatgctggcgatggggcccgcccagcaaagcttcgccgagggctacagcgggcgcctgctgtgtcccctggaggtggtgccgatcgtcggccggcgtttgaatttgcgcgcgtcatccctgcgggagtgcgccgaacggggctggatccttaaccccgacggctgtggcctgcgcgccgggctcattcgcgagctgcagagccagggattgcggttgacgctcaacgtcgagagcgcgggcgcgcagctgcagatagcgctggtggcgcaggggctggggctgggtctggtgccgagggcggcgctggccagcagcccgtggcgggatgaggtcgcggtcctcagcctcagcgattttcagcctgcggtctcactgtggctgatccacgcccagtatctggcgaacctgcagccgccgctgacctttttcgccagcaaagtggtgcagcagttgaccgtatccgactga

SEQ ID NO: 212977 - DNA, 1086 bp, Klebsiella pneumoniae
atgagcattcagtttctcggcatgattggccaccgcctctcttccgaaacgattgccccggtggggccgatctttgaccgcgactatatcgttcgctttgcgcaaacccatgaagccgccgggtttgatcgtctgctggtcggccactggtccgatcaacccgacggctttctggtgacggccctggcgggactgtcgacgcagaaaattcagtacctgctggcccatcgccccggttttgtttccccaacccttgccgcgcgcaaattcgccacccttgagcacctgctggggggccgcttggcggtgcatatcatcagcggcggcaacgatgccgagcagcgccgggatggcgattatctcgaccacgaccagcgctacgcccgcaccgacgccttcctcgacaccgtgcgccaggtgtggaccagcgagcagccggtggatattcacaacgatttctatcaggccgagcaggcctggtccgccattcgcccgctgcaaaagccgcatcttcccatctacttcggcggctcgtcggaagcggccatcgccgtcgccggcaaacatgccgacgtcttcgcgctgtggggcgagtcgctggcgcaaaccggcgagaccatccagcgggtgcgcgccgaagcggcgaaacaccagcgtgatatcggcttcagcgtttcgttccggccgattatcgccgacagcgaagccgaagcctgggagaaagccgagcatatcctgcacgtcgccaccgagcaggcggcgcagcgcgggggcgggttcaaagccaaaccggacagaatcggcgcccagcggctgcgggctaccgcggcgcagggcagagtggtggacaaacgcctgtggaccggcatcgcccagctggtgggcggcggacataactccaccgcgctggtgggcaccccggagcaggtggcggatgcgctgctcgattactacgacctcggggtgcgtaacttcctgatccgcggcttcgatccgctgaacgacgcggccgactatggccgggcgctgctgccgatcgcccgggaaaaagccgcccggcgtgcagtggcggagcgcgcatcgtga

SEQ ID NO: 212978 - DNA, 1152 bp, Klebsiella pneumoniae
gtgatccatcctgagcgcgacgactgggcccggcagctgacggcgcttcgccaacagatggcggagcaggcggccagccttgacgccagcggcgagtttccctggcgtaatatcgaccatctgcgtgcggggggctggttaagtctcgccgtgccgccatcctgcggcggcgcgggcgccagtctggcccagctgcagcaggtcatcgccgccatcgcctggggagagccggcgacagcgctgattgtctgcatgcagtatctccaccatttgcggctggcggaaaacgacgcctggcacgcgccgctgcgccagcaggtttttcacgatgctgtcgaacacggtggcctcatcaacagcctgcgcgtcgagccggagctgggctccccggcgcggggcggcctgccggacaccgtggcgacccgtcgcgcggagggctgggacatcagcggccataaaatttataccaccggcattgaagggctgcgctggctggcggtgtgggccagaagcgatgataacccgccgctggtgggcacctggctggtgcctggcgacagcccgggcatcagcgtggtgaaaagctgggatcacgccgggatgcgggccaccggcagccatgaagttatttttaaccacgtgcgggtggcggcagagcacgcggtggatgtctggccgaccgatgcgccacccgccgcccaggccgaaccgtttcgcctgttcgccaaccggcagacggcgctgctggcggcgatctatgacagcattgcccacgccgctcacgactggctggtgaggtggctggcggggcgggtgcccgccggtctcggccatccgctctctcgtctgccacgggtgcaggagaaagtcgggcagatcgccgggctgctgctggtcaaccgcagcctgctggagcaggccgccgcgctgcgcttttccgccatcgaggccaatctggcgaaagtcaccatcaccgacaacgccattcaggcggtgaatatcgcgctcgagctgaccggcaatcatggtctcagccgacaaaacccgctggaacgccactaccgcaatgtgctctgcggacgggtacataccccacagagcgacagcgcctggctggcagccggcaacttcgtctttcaatcacaaggataa

SEQ ID NO: 212979 - DNA, 1038 bp, Klebsiella pneumoniae
atgaccagaacccttttttcccgccgccgttttttacagctcagcggcggcctggcgctggccggggtctctctgccgctgtgggctcatgatatggcggacatggccggcggcgatacccatccggcgctgcgcctgccgcagccctacaagattaagctggcgatcaacaaaagcgcggtatgcctcgcgccggtcgccgtcgccgagcagcagaagatattcagtaaatacaacctcgacgttgagtttgttaacttcggcaactccaccgatgtgctgctggaggcgatcgccaccggtaaggccgacgccggggtggggatggcgctgcgctggctgaaggcgctggagcagggctttgacgtcaagctcaccgccgggacccacggcggctgtctgaacctgctgacggctaaagactcgccgttcggcggcctcgagagcctgaagggtcaaaccatcggcgtcaccgacatggccggaccggataaaaacttcttcgccattctgcttaagcgccacggtatcgacccgatcagcgacgtgcagtggaaagtctacccggcggatctgctcagcgtggcgctggacaagcgcgaaatcgccgccatcagcggcagcgagccgtttagctatcgtctgctggagaccggcaagtatcagctgatcgccagcaatatgaccggggattatgccaacctcagctgctgcgtgctgggggtgagcgggagcctggcgcgggaccataaaccggccgccgcggcgctcacccaggcgatccttgaggcgcacagctatgccgctgcgcatccggaaagcgtggcgcaatccttcctcgcccatgccctgaataccagtgaagcggaggtgagcggcatcctccacgggcagggccacggccatcacgcggtgggcgaagcgttcgtgaaagagctgacgcagtatgcgatcgacctgcagcgggtgcaggtgatcaagccgggtaccgatccccatcagttcgcggagagtatctatgccaacgtattcgcctga

SEQ ID NO: 212980 - DNA, 996 bp, Klebsiella pneumoniae
atgccaacgtattcgcctgagcaggctctggcgcgccccaccagccgcgcgccgctgtggggagaagggctgctggccgccgcgctgtggctgctgggcggtctgtttactctgacctggcccgacgccgggcggcgctggccgtttagcgaaggctgggcgctggcgcaattcaccctcggcggcggcttgctgctgctggcgctgagctatcgctactggcgggcgcgcggcgcgcgtgtgctgcatgccggcaagtggctggcgctgctgccggtgctgtttgctgtctgggaagggctgaccgccaaaactgccgtgttgccggtaccattcttcgcgccgccgcaggcgctgatcgaggtgctgcacgacgactggccgcgcctgctcgacagcctgctgcactccctggggctgctggggctcggtgtgctgctgggtaccagcagcgggttcatcaccggtctggccatcggctggtcgcaacggattggctactgggtgcatccggtgttacgtctgctggggccggtgccgtccaccgcgctgctgccgctgtgcctgtttatttttccctcgagcttcggcgccagcgtgtttttgatcgcgctgagcacctggttcccggtcacggtgctgacctggtccggagtgatgggcattgataaggcgtggtacgacgtggcgcggaccctcggcgccagccagcgtttcctgatcctgcgggtggcgatccccgccgcgttgccgaacgtctttgtcggcctgtttatggggctcggcgcgtcgttttcggtgctgattgtcgccgaaatggtcggggtgaagtcggggatcggcttttacctccagtgggcccagggctgggcggcctatcctaatatgtatgccgcgctgctggtgatggccttgttatgctccggcctgataagcggattatttatgctgcgtgaccgtctgctgagctggcagcgaggagggatgcaatggtaa

SEQ ID NO: 212981 - DNA, 774 bp, Klebsiella pneumoniae
atggtaaccgagacgatagcgcgcggcgcggcggtatccatcagccatcttcatcatgcgtttacgcttggcaaacagacggtaccggtgctggagaatattagcctgcagctgcgcccgggggaaagcgtggcgctgctgggcccttccggctgcggtaaatcaaccctgctgcggctgctggcggggctggaagcgccgcagagcggacagatgcagatcgacggcgcggcgctcggcgccccggggccggagcgaattctggtgtttcaggatccgacgctctatccgtggctgacggtgcggcagaacgtgctgctgggcccgcaggcgcagggcaaaaaggggctggaggcgaaggcagacgcgctgattgaccgcatcgggctgcaggccttcagcgaggcgtggccgcggcagctgtccggggggatggcgcagcgtgcggcgctggcgcgcgccttgttgaacgaaccgcgtctgctgctgctcgacgagccgttgggcaaactcgattcgctgacccgcatcagtatgcagcgggagctgatcgccctctggcagcagcaggggtataccagcctgctggtgacccacgatatcgaagaggcgctgctgctgtgcgagcgggtgctggtgatgtcgccgcgtccagggcggattatcgccgagtttgcgctgccgctggcttttccccgtcatcgcgataacccgcagctgctgcagcatcgtcaggatatattgcgcatcctcggccaggaggcggattggtaa

SEQ ID NO: 212982 - DNA, 408 bp, Klebsiella pneumoniae
atgaacggcaccttctttatcgttctggcggcgcacttcgtgctgatctccgcctttaccttcagcaacgtaacgaccgggctggcgcgtatttccgctgatattgaaaacgtcgcctccagcctgggcgcttcgccgtggtatcgcctgcgccatgtgacgctgccgctgatgacgccgtggatgatctcggcgctggcgctgagcctgtcgttgtcgatgggagagctaggggcgacggtgatgatgtatccgccgggctggacgacgctgccggtgaccattttcagcctcaccgatcgcggcaatatcgccgatggctcggcgctgaccattgtgctggtgggcgtcacgctgctgttgatgatgaagcttgagcgtatcgcccgccgattaagccagagataa

SEQ ID NO: 212983 - DNA, 378 bp, Klebsiella pneumoniae
atgttgatttggtcgcgtaaaggccgcgcggcggcgggcgcgctggcggtgacgctttttgccggcgttttcctgctgccgctggcggtgattttactctccagcctgagtaaacaatggaacggcctgctgcccaccggctttacctttgcccactttgttaacgcctttcgcggcgcggcgtgggattcgctgttttcgagcctgatggtgggcttctgcgccagcctgctggcgctgctgtgcgggatgtgggcggcgctggcgctgcgccagcatggcgcgacgctacagaaatatcttggcctggcgttttatctgcccagcgccatcccctcggtttccgtcgggctgggcattctggtggcgttcagctag

SEQ ID NO: 212984 - DNA, 861 bp, Klebsiella pneumoniae
atggcgcaaaccctcacgcttgcgcgtccggcgcgaaatttacggccttacctgtggctggcattgccgctgctggtgctggcgacgctatttttctatccgctactgctgatcgccgaacaggcattacgtgacgccagcggcaacctgagcctcgagactttctggcaggtgatcgactcaaaacgctttattggcgcgctgctcaataccttacagattgcggtgttcgctacccttggctgcctggtactcggcagcgtgctggcgctgattctggtgtttattccgttccccggcagccaactggtgagccgggtcattgatacttttattgcgctgccgacctttcttatcactctcgcgttcacctttatttacggctcggcggggctgctcaacggcaccctgatggcgctgtttgcttttgaactgccgccggtagacttcctctattcgattaacggcgtgattctggcggagattaccgtctttacgccgctggtgatgcgtccgctgatggcgggattgcggcagatagataagagccagctggaagcggcgagtattctcggcgctcatccgttacgggtgattacccaggttatcttcccggcggcgctcccggcgctgatggcgggcggcagcctgtgcctgctattgaccactaacgagttcgggatcgtgctgtttattggcgccaaaggggtcaataccctgccgatgatggtctacagcaaggcgattctggagtcggattacagcgtggcctgcatgattgcgctgatcaatattctgctgtcgctggggctgtttatgctctatcggctggcggcggcgcgcactggcgtaaggagttaa

SEQ ID NO: 212985 - DNA, 1113 bp, Klebsiella pneumoniae
atgttgatgaaagccaccgtcacttcttccccgtcgctggcggggacttccgggatcaccctggactcgctgcgcgtttcataccacggcaacgtggtcttaaaaccgctgtcattgaccattgaacccggtgaggtgctggcgctgataggcccttccggttccgggaaaaccacggtgctgcgggcgattgccggttttgtgcaaccggctggcgggcggatcctgatcggcgatactgacgtcacccagctgccgccgtacaaacgcgggctggcgatggtggtgcagaactacgcgctgtttccgcatatgaaggtggaagataacgtcgccttcggcctgcgggcgcaaaagcagtccagggggcttatcgccgagcgggtgactgaagccttaaaaatcgtcggcatggcggattacgccacccgctacccgcatcagctttccggcggccagcagcagcgcgtggcgatagcccgcgcgattgccgtgcgtcctcgggtgctgttgcttgatgaaccgctgtcggcgctggatgcgcaaattcgccataacatggtggaagagattgcccgtctgcatcgcgaactgccggaactgaccattctctacgtcacccacgatcagaccgaagcgctgaccctggcggacaaaatcggcatcatgaaagatggctcgctgatcgcccacggcgaaacgcacgagctgtaccactatccgccgaaccgctttagcgccgaattcctcggccgtgccaatatcctgcaggcgacggcgctgaaagacagccccgagccggggctggttagcgtgagctgtggcggcggcctgattaacgccttcagccggggcggcctgcatggcaacaacaaactgttatgcattcgcccgcagcacatgagcctggcgccgcgatcggcaactagtaatcgtctcaacgccaccctgacgtcggtgcactggcagggcgatctgacgcatctgctgtgcgatgttgccggcgaagcggtgcggattgtgatgacccacgtgaacccgctgccgcgcgcgggggacaagctggcgctctacttcgaacctggcgatgcggttctgatcgaggtgcaatga

SEQ ID NO: 212986 - DNA, 1014 bp, Klebsiella pneumoniae
atgaaactctcccgatttgctctgctgtccctgttcgcgctgaccagctctccggtttgggcggacggcgtcgtcacggtttactccgccgacggcctgcatgacggcgataacagctggtatcagagccagttcgctgccttcaccaaagcgacgggcatcaaagtgcagtatgtggaaggcggctccggcgcgatcgtcgagcgtctggcgaaggagcgcaccaatccacaggctgacgtgttggtcacggtgccgccgtttatccagcgcgccgcgaaagagcaattgctggcaacctttaccccgcaaggtagcgcgcagatccccggcgctaacgaccgctacgcgccgctggtgaataactatctgaccttcatctataacagtcagttgctgaaaagcgcgccggccagctggcaggatctgctggatagccgctacaagaacaagttgcagtactccacgccgggtcaggcgggcgacggtaccgcggtgatgctgcaggcgttccatagcctcggcggtaaagacgccggttttgcgtatctgggtaagctgcaggccaataacgttggcccatcggcctcgaccggtaagctgacggcgctggtcaacaaaggcgagctgtacgtcgccaacggcgatctgcagatgaacctgtcgcagatggcgcgtaacccgaacgttaaaattttctggccggcggatgacaaaggcgagcgcagcgcgctggcgctgccctacaccatcgggctggtgcagaacggaccgaacagcgaaaacggcaaaaagctgatcaatttcctgctggataaaccggcgcaatccagcgtcagcgcgcgctcctggggcctgccggtacgcagcgatgtagcgccggatgatgctaactttaaggcggcgaaagcggcgctcgacggcgtgaagagctgggaacctaactgggacgatgtcgcggtatcgctgtcggctgacattgcccgctggcataaagtgaccgatagcgagtaa

SEQ ID NO: 212987 - DNA, 720 bp, Klebsiella pneumoniae
atgaaatcaccctctggcgagatgccgcaatacctgatgattaaggcgcagctgcaggcgcgtattcaaaacggcgccctcaaaagcggcgacaagctgccttccgagcgcgagctgtgcgcgctgttcaacacgacgcggattacggtgcgtgagagcctggcgcagctggaggccagcggcgtgatttaccgcgccgaccgccgcggctggtttgtgacgccggagcgtctgtggctggatccgacgcaaaataccaacttccacaagctgtgtctcgaacaggggcgcgaaccgaaaacggtgctgcttgatggccgcctggctgccgtgccgctggatgtgatggcgcctctggcgctgcagcccttcgatcaggtctacctgctgacccggctgcgctatgccgacgggcggccggtatgctactgcgaaaaccactgtctgcccgcgcgggtgcctgagctgctgcgccacgatctcaacggcagtctgaccgagatttatcaaactcactacgaactgatctataccagtatgcatctgtcgttttatcccacctcaatgccgccgcaggccgccgaggcgctgggggtgatggaggggcgcccggcgctgctgttgcgcaggctgaattacgatcagcacgggcgtattctcgattacgatattgaatactggcggcatgatagcctgcggatcgaagtcgatacccattga

SEQ ID NO: 212988 - DNA, 1104 bp, Klebsiella pneumoniae
atgacttcacgaaattacctgctgctgacccccggcccgttaaccaccacccgtacggtgaaagaggcaatgttgttcgatagctgcacctgggatgatgattacaatctcggcgtggtacagaccattcgccagcagctagtgcagttggctaccccggccgacggttatacggcggtgctactgcagggtagcggcagctacgcggtcgaagcggtgctcggcagcgtcatcggcgaacagggcaaagtgttgatcgtcagcaatggcgcctatggcgcgcgtatgattgagatggcgcagctgatgggcatcgcctgccacccttacgactgcggcgaagtctcccgtccggacgcggccgcgatcgaacagatcctgcagaacgacccggcgatcacccatatcgcgatggtacacagcgaaaccaccaccggtatgctgaatccgatcgaagaggtggccgaactggcgaaacggtacgataaacgctatatcgtcgatgcgatgagcagcttcggcggcattccactggatatcgccgcgctgaatattgattacctgataagctccgccaacaaatgcattcagggcgtgccgggctttgccttcgtgattgcccgcgaagcggagctggccgcctgcaaaggccgttcgcgctcgctgtcgctggatctgtacgcccagtggcgctgcatggaggacaaccacggcaagtggcgcttcacctcgccgacgcataccgtgctggccttcgcccaggcgctgaaagagctggcgcaggagggcggcgtcagcgcccgctatcagcgctaccgcaacaatcagcgccggctggtcgccgggatgcgcgcgctcggcttccggccgctgctcgacgatagcctgcactcgccgatcattaccgccttttattcaccggatgcgccgcagtatcgctttcacaccttctaccagaagctgaaagatcagggcttcgttatctatccgggcaaagtatcgcaaagcgactgcttccgcatcggcaacattggcgaagtctacgacgccgatatcaccgccctgctggcggctatcgacaacgccatgtactggaaacaataa

SEQ ID NO: 212989 - DNA, 810 bp, Klebsiella pneumoniae
atgaaccgtattagcgcactgatccttgactgggcaggcaccaccgtagacttcggctctttcgccccgacgcaaatcttcgtcgaggccttccgccaggccttcgatattgagataacccttgaagaggcccgcgtgccgatggggcttggcaaatggcagcacattgaggcgctgggcaaactcccttctgtcgacagccgctggcaggccaaattcggccgcgcgatgacggccgcggatatcgatgcgatctacgccgcgtttatgccgctgcaaatcgctaaggttgtcgatttttccgcaccaatagccggcgtggtcgacaccatcgccacgtttcgcgccgagggcctgaagatcggctcctgctcgggttatccgcgcccggtgatggaaaagctggtaccggccgccgccgcccagggctacgccccggaccactgggtcgccaccgatgaccttgccgccggcggtcgtccgggcccgtggatggcgctgcagaacgtgattaccctgggcatagacgatgtggcccactgcgtgaaggtcgacgacgccgcgccgggcatcagcgaagggttacatgccgggatgtggagcgtcgggctggcggtgtccggtaacgaattcggcgcaacctgggaggagtaccaggcgatgtcgaaagcggaaatcgccacccgccgcgagcgggcggcaggcaaactgtatgccgccggggcgcattatgtggttgataccctggcggacctgccggaagtgattgccgacatcaatgcccggctggcaaaaggcgagcggccttaa

SEQ ID NO: 212990 - DNA, 1194 bp, Klebsiella pneumoniae
atgagtcattcaaatgaaaccaaaccccatgcacgcgatctcgcgcggccaaactggtcggcggttttcgcggttgctttctgcgtcgcctgcctgattaccgttgagtttttgccggtcagcctgctgacgccgatggcgctggatttaggcatctccgaagggatggccgggcagtcggtgacgacgacggcattcgtcgcgatgttttccagcctgtttatcaccacggtgataggtaaaaccgatcgccgctacgtggttatcctgttttcactgctgctgaccctttcttgcctgctggtatctttcgctgatagcttcaccctgctactgctggggcgcgcctgtctgggcctggcgctcggcggtttctgggcgatgtccgcatcgctgaccatgcgtctggtgccgatgcgcgtggtgccgaaagcgctatcgattatcttcggcgcggtatcaatcgcgctggtgatcgccgccccgttgggcagtttccttggcgggcttatcggctggcgcaacgtctttaacggcgcggcggtaatgggcgtgctgtgtacgctctgggtgctgaaagcgctgccgtcgctgcccggtgaatcggcttctcagcagcaaaatatgtttggtctgctgaagcgtccgggggtgatggccggaatgtgcgccattttcatggcctttgccggacagttcgccttctttacctatattcgcccggtgtacatgaccctcgccgggtttgatgtcgacggcctgacgctggtgctgctgagctttggtatcgccagctttatcggtacctcgctctcctcggtgctgctcaagcgttcggtaaaagcggcgctggcgatcgcgccgctggtgctgaccgcctgcgcggtggcgctggtgctgtggggagagagcaaaatcatcgcctcgacggtggcgattatctggggcttcgcgtttgcgctgatcccggtggggtggtcaacgtggatcacccgttccctctccgatcaggcggaaaaagccgggtcgattcaggtggcggtgatccagctggccaacacctgcggcgccgcggtcggcggcattgcgcttgaccacttagggctgctgtcgccgctggtgttgtcagggatattgatgctgtttaccggcctgctggtggcggccaaagtgaaggtgaattcacccgcttaa

SEQ ID NO: 212991 - DNA, 360 bp, Klebsiella pneumoniae
atgcgtatctttaaaaccaaatggttcgccagagaggctagctctcatggcatttccgacgacgagctctatcaggcaattcaatctgcgcttcagggcaaagtggttgatttaggaggaggggtttataaaaagcgactcaacaagaatcgcgatcgcgcaatcatccttaccaaaagcgcagagtattggttttatacctttctatatgccaaacaggatatggccaatatcaaccatcgcgaattaatggggtttcgtgagttagcaaaacactatgccaatctctctgaagagaaaacgacggtcttagttaaaagtaaagaactggtggagatttgcgatgacagcaaaaaataa

SEQ ID NO: 212992 - DNA, 324 bp, Klebsiella pneumoniae
atgacagcaaaaaataaatacaaaagcccggctttcgaagcgatccatagcgctgcgtcggggctattcagcgttggcgcaatcccacaggaaacaatgcgccattttgatgaatcatgtctcggtagcgtagccacacttcaacccattgaaattaaagcgctacgtgaacaactcaatgttagccaacccgtgttcgctcgttatctgaataccagcgtgtctaccgtgcaaaaatgggagactggcgctaaacgaccgagcggaatgtcattaaaattgcttagcgtcgtacaaaaacacggcctgaaaatcctactgtag

SEQ ID NO: 212993 - DNA, 453 bp, Klebsiella pneumoniae
atgatctggataggactggccaccctggtagtggtgtttgttgtgggatttcgggtgcttacctctgattcacgccgcgcgatccgccgcctgagcgaacgcctcggcatcacgcctgtcccgctggaatcgatgatcgatcagctgggaaaaaccgccggtaatgagtatttgcgttacctggagcggccgaatgaagcgcatctgcagaacgccgcccaggtgctgctcatctggcaggtcgcgattgtcgacgccagcgaaaaaaacctgcattactggtatcgcctgatgcaaaaagcgcgtttagcggcgccgattaccgaggcgcagatccgcctggcgcaagggtttctgcgcgagctggacccggatgtgagcgatttacataacctacagcagcgctacaacgacctgtttctcccggaagacggcgtgcactggctgcactga

SEQ ID NO: 212994 - DNA, 1392 bp, Klebsiella pneumoniae
atgctggcctttctgaatcaggtgcgcaagccgaccttggatctgccgctcgatgtgcggcgcaaaatgtggttcaaacctttcatgcagtcctatctggtggttttcatcggctacctgaccatgtacttgatccgcaagaactttaacatcgcgcagaacgacatgatctccacctacgggctgagcatgacccagctggggatgattggcctgggcttctccatcacctacggcgtgggcaagacgctggtctcttattatgccgacggcaaaaacaccaagcagttcctgccgtttatgctgatcctctccgccatctgtatgctgggctttagcgccagcatgggggcgggttctaccagcctgttcctgatgatcgccttctatgcgctgagcggtttcttccagagcaccggcggctcgtgcagctattccaccatcaccaagtggacgcccagacgcaaacgcggcactttcctcggcttctggaatatctcccacaacctcggcggcgcgggcgcggcgggcgtggcgctgtttggcgccaactatctgttcgacggccatgtgatcggcatgtttatcttcccgtcgattattgcgctgatcgttggctttatcggcctgcgctacggtagcgactctccggaatcctacggcctcggcacggcggaagagctgtttggcgaagcgatcagcgaagaggacaaagagaccgaagaaaatgcgatgaccaagtggcagatctttgttgagtacgtgctgaaaaacaaagtgatctggctgctgtgcttctccaacatcttcctctacgtggtgcgtatcggtatcgatcagtggtccaccgtgtacgccttccaggagctgaagctgtcgaaagaggtggcgattcagggctttaccctgtttgaggtcggcgcgctggtcggcacgctgctgtggggctggctgtcggatctggccaacggccgccgcgcgctggtggcctgcatcgcgctggcgctgattatcgccaccctcggggtttaccaacacgccagcaaccagtacgtctatctggcctcgttatttgcgctgggcttcctggtgtttggtccgcagctgttgatcggcgtcgccgccgtcggtttcgtaccgaaaaaagcgatcggcgccgccgatgggatcaagggcaccttcgcctatctgatcggcgatagcttcgccaaactgggtctcgggatgatcgccgacggcaccccggtcttcggcctgaccggctgggccggcacctttgcggcgctggacgccgccgccgtcggctgtatctgcctgatggccatcgtggctatctttgaagagcgtaaaattcgccgcgagaaaaagaaccgtattttgcagaccgcctga

SEQ ID NO: 212995 - DNA, 1329 bp, Klebsiella pneumoniae
atgttcgcctttttaaaagccccgccggacgctgcgccgattagcgataaacgcgaacttgatgcgcgttatcgctactggcgtcgccatatcctgttgaccatctggctgggctacgcgctgttctatttcacccgcaaaagctttaacgccgcggtcccggaaattctcgccagcaacgtcctgacccgcagcgatattggcctgctggccacgctgttctatatcacctacgggctgtcgaaatttttctccggtatcgtcagcgaccgctccgacgcccgctattttatggggctggggcttatcgccaccggggtggtgaatattctgttcggtttttcttcctcactatgggctttcgcgctgctgtgggcgctgaatgccttcttccagggctggggctcgccggtctgcgcccgactgctgacggcctggtattcgcggaccgagcgcggcggctggtgggcgctatggaatacggcgcataacgtcggcggcgcgctgatcccgatggtggtgggagcggcggcgttgcactacggctggcgtgccgggatgaccattgccggctgtctggcgatcctcgccggactgtatctgtgctggcggctgcgcgatcgcccgcaggcggtggggttacccgccgtgggcgactggcgtcacgatgcgctggaaatcgcccagcagcaggaaggcgctgggatgtctcgtaaagcgatcctgacccgctacgtgctggccaatccctacatctggctgctgtcgttgtgctatgtgctggtgtacgtggtgcgggcggcgattaacgactggggcaatctgtatatgtcggagacgctaggcgtcgatctggtgaccgctaactcggcggtgaccatgtttgagctgggcggttttatcggtgcgctggtggcggggtggggctcggataagctgtttaacggcaaccgtgggccgatgaacctgattttcgccgccggaattttgctgtcggttggcggcctgtggctgatgccgttcgccagctatgtcatgcaggcggcctgcttcttcactaccggtttcttcgttttcggcccgcagatgctgatcggcatggcggcggcggaatgttcgcataaagaagccgccggggcggcaaccgggtttgtcggcctgttcgcttatcttggcgcctcgctttccggttggccgctggcgcaggtgatggatatctggcactggaccggattcttcgtggtgattgcgattgccgccggcatttccgcgctgctgctgctgccgtttttaaacgcgcaggcgccgcgtaccgccagcgaagcgtga

SEQ ID NO: 212996 - DNA, 1503 bp, Klebsiella pneumoniae
atgaaggccgtcgtctcacgattgctgtcggtcatcggctgcgcctttatcttcgcggccgcctggttctgcctgtggagcatcagtctgcatttggtggaacgcgcggatttagcggtgctgctgtttccctttggcctgcggctggggttaatgctgcaatgcccccgcggctactggccagtgctgctgggaaccgagtggctgcttatcttatggctggcgcaggaggtggcgctggcgcacccgataattttgatgaccggaagcctgctgactctgctgccggtggcgttgatctcgcgctaccggcagcagcgcgactggctgacgctgctgcgtcagggcggggcgttaatggccgccgcgctgctgcaatcgctgccgtggctggcggagggggacgaggggcttaacgccctgctgttgacgctgaccggcggcctgacgctggcgccgacctgcctggttttctggcactatcttaccagcaccgtctggcggccgctggggccggcgctggtggcgcagccggttaactggcgcgggcggcatctgatctggtatctgctgttattcaccattagcctgtggctgcagcttggcctgcccgccgagctctcccgctttaccccgttttgtctggcgctgccgattatcgccctcgcctggcactacggctggcagggagcgctgatcgccaccctgatgaacgctatcgccttgattgccagccagacctggcacgatcacccggtcgatttattgctttccctgctggcacagagcctcaccgggctgctgttgggggcggggatccagcggctacgcgagctgaaccagtcattacaaagcgagctggcgcgtaatcgtcggctggcggaacgcctgctggagaccgaagagagcgtgcggcgagacgtcgcccgcgagctccatgatgatatcggccagaccatcaccgcgatccgcacccaggccgggatcgtacagcggctggcgccggacaacgccagcgtgcgccagagcggtcagctgatagaacagctgtcgctgggagtttacgactcggtgcgtagactgctgggccgtctgcgtccgcgtcagctcgacgacctgccgctggagcaggcggtacgttcgttgatgcgcgagatggagctggaggaccgcggcattgtcagccatctcgactggcggattaacgaggcgggactgagcgagaaccagcgcgtgaccctgtttcgcgtttgccaggaggggctgaataatatcgtcaagcacgccagcgccagcgctgtcactctgcagggctggcagcaggatgagcgactaatgctggtgctggaagatgacggttgcggcctgccgccggggtcgaatctgcaggggttcggcctgaccggcatgcgcgagcgcgtgaccgccctgggcggcacactgacgatctcctgcacccatggtacacgggtgtgcgtcaatctaccgctgcgttacgcctga

SEQ ID NO: 212997 - DNA, 594 bp, Klebsiella pneumoniae
atgaccaccatcgcccttattgacgatcatttgattgtccgctccggctttgctcagctgctggggctggaagctgattttcaggttgtcgccgaatttggtagcggccgcgaggcgctgacggggctaccggggcgcggcgtgcaggtctgtatctgcgatatctcaatgccggatatttccgggctggagctgctcagccagctgccgaaggggatggcgaccatcatgctgtcggtacacgatagcccggcgctgatcgagcaagcgttgaatgccggcgcgcgcggcttcctgtcgaaacgctgcagccccgatgaacttatcgccgcggtacgcacggtggcggcgggcggttgctatctcacgccggatatcgccatgaagttggccgccgggcgccaggatccgctcaccaaacgcgagcgtcaggtggcggaaaagctggcgcagggcatggcggtgaaagagattgccgccgagctcggtctgtcgccgaaaaccgtccacgtacaccgcgccaacctgctggaaaagctgggcgtcagcaacgacgttgagctggcgcgccgcatgttcgatagctggcaatga

SEQ ID NO: 212998 - DNA, 288 bp, Klebsiella pneumoniae; identical to SEQ ID NO: 135093

SEQ ID NO: 212999 - DNA, 1689 bp, Klebsiella pneumoniae
atggcaagttcgggcaccacatcaaacacaatgcgctttaccggcgcgcagctggttgttcatttactggagcgccagggtatcactatggtcagcggcattccgggcggctccatcctgcctatctacgatgccttaagccagagcacgcagatccgccacatcctggcgcgccatgagcagggcgcgggctttatcgcccaggggatggcgcgtaccgaaggcaagccggcggtctgtatggcctgcagcggcccgggggcgacgaacctggtgacggcgatcgccgatgcccgcctggattcgattccgctggtctgcatcaccggccaggtaccggcctcgatgatcggtaccgacgccttccaggaagtggacacctacggcatctctatccccatcaccaaacataactatctggtgcgcgacattgccgagctgccgcaggtgatcagcgacgccttccgtattgcccagtccgggcgtcccgggccggtgtggatagacattcctaaagacgtacagtcggcgaccattgagctggaagcgctgcctgagcctggcgagcgcgccccggcaccggcattcgcgcctgaaagcgtgcgtgaagcggcggcaatgatcaacgcggcgaaacgtccggtactgtatctgggcggcggggtgattaacgcgccgcaggcgatccgtgagctggcggaaaaagccaacctgccgaccaccatgaccttaatggcgctgggcatgctgccgaaggcgcacccgctgtcgctggggatgctggggatgcacggcgcgcgcagcaccaactttattctgcaggaggcggatttactgattgttttaggcgcccgttttgatgaccgggcgattggcaagaccgagcagttctgcccgaacgcgaagattatccacgtcgatatcgaccgcgccgaactgggcaaaatcaagcaaccgcacgtggcgattcagggcgatgtggcggaagtcttagcccagctgaacccgcatattgaggcgcagccgcgcgaggaatggcgccagctggtggccgacttgcagcgcgaattcccctgcgccatcccgcaggaaagcgacccgctctcccattacggcctgattaacgccgtggccgcctgcgtggatgatgaagcgatcatcactaccgacgttggccagcaccagatgtggacggcgcaggcctacccgctcaatcgtccgcgccagtggctgacctccggcggcctcggcaccatgggcttcggcctgccggcagccatcggcgcggcgctggcgaatccgcagcgcaaggttatctgcttctccggcgacggcagcctgatgatgaatattcaggagatggccaccgccgccgaaaatcagctggatgtaaaaattatcctgctgaacaacgaagcgctggggctggtgcatcagcagcagagcctgttctatcagcagggcgtttttgccgccacctatccggggatgattaactttatgcagattgccgccggttttggcctgcaaacctgtgatttaaataatgaagtcgatccgcaggcggcgctgcaggcgatcatcgaccgtccggggccggcgctgatccacgtgcgcatcgacgcacagcagaaagtgtatccgatggtaccgccgggtgcggccaatactgaaatggtgggggaataa

SEQ ID NO: 213000 - DNA, 447 bp, Klebsiella pneumoniae; identical to SEQ ID NO: 135095

SEQ ID NO: 213001 - DNA, 834 bp, Klebsiella pneumoniae
atgaccctcaccgtattctgcattttgctgttcgccgccctgctgcacgccagctggaacgctatcgtcaaagccagcggcgataaaatgtacgcggcgatcggcgtcagcggctcggccgcgctgatcgccctggtgatgctcccctttgccccgcagcccgcgctggtcagcgccccctatctgctggcgtcgtgcgcgttacaggtggtgtatacggtgctggtggcgaagacctaccaggtatcggatatgagccagacctatccgctgatgcgcggcactgcgccgctgctggtggcggcgataagcgtgctgttcctcggcgatcgtctgtcgccgctggcctggctgggcataggcgtcatctgcctggcgattctggcgatggcctttaacggccgcgccagctcgcgcaaaggcatcgtgctggcgctgatcaacgcctgctttatcgccggttatacgctggtggacggcaccggcgtccggctggcgggctcggcgctgggctacaccctgtggaccttttttatgaacggcttctgcctgctgtgctgggcgatggtggcgcgacggcgtgaggccagtcgttatttacgtcagcactggaaaaaaggcatcctcggcgggatcggcaccatgggctcctacggcctggcgctatgggcgatgacccaggccccgctggcggtggtcgccgcgctgcgtgaaacctccattctcttcggcgcgctgatcgcctttatcgtcctgaaagagcaactgatgccgctgcgcatcgtggccgcctgcgggattgccgccggggcgatcctcctgcgcctggcgtag

SEQ ID NO: 213002 - DNA, 1185 bp, Klebsiella pneumoniae
atgaaacggcataagaacttcaatttgttgttgatgctggtactgctggtggccgtcggccagatggcgcagaccatttatattccggccatcgccgacatggcggtcgcgctgaacgtccgcgaaggggcggtacaaagcgtgatggcggcctacctgctgacctacggtatttcacagctattctacggcccgctctctgaccgcgtcggtcgccgcccggtgatcctcgtcgggatgtcgatttttatgctggcgacgctggtagctattaccacccatagcctgccggtgctgatcgccgccagcgccatgcaggggatgggcaccggggtcggcggcgtgatggcgcgcaccctgccccgcgacctgtacgaaggcgctcagctgcgtcatgccaatagcctgttaaatatgggtattctggtcagcccgctgattgccccgctgctcggcggcatcctcgacaccctgtggagctggcgcgcctgctacgctttcctgctggtcctgtgcgccggggtgaccttcagcatggcgaagtggatgccggaaacgcgcccggaaggggcgccgcgcaccaaacttctggccagctacaaaacgctgttcggcaccggcgcctttaactgctatctgctgatgctgatcggcggcctgtcggggattgcggtattcgaagcctgctccggggtgctgatgggcgcggtgctcggcctgagcagcatggcggtgagtattctgtttattctgccgatcccggcggcgttcttcggggcgtggtttgccggccgccccaacaagcgtttcccgaccctgatgtggcagtcggtgatctgctgcctgctggcgggtctgatgatgtggatcccagggctgctgggcatcatgaccgtctggaccctgctggtgcctgcggcgctgttcttcttcggcgccgggatgttgttcccgctggccaccagcggcgcgatggagccgttcccgttcctcgccggaaccgccggggcgctggtgggcggcttgcagaatatcggctccggcgtgctggcctggctgtcggcgatgatgccgcaaaccggtcagggcagcctcggcctgctgatgatgctgatgggcctgttgattctgctgtgctggctgccgctggcctcgcgctttacccaccatcagcagccggtataa

SEQ ID NO: 213003 - DNA, 924 bp, Klebsiella pneumoniae
gtggatgtgctaataaccttaggtacccggttgctgaacggctggcaactctccaggctgtcgacgtttgaggtggcggcgcggcacgagtcgttcgcccttgccgccgacgagctggcgctcaccccaagcgccgtcagtcaccggattaatcagctggaagaggagctggggatccagctctttgtccgctcgcaccgcaaagtggagctgacgcgtgaagggaagcgcgtttactgggcgctgaaggcgtcgctggatggtctcaatcaggagattctggacatcaaaaaccaggagctctccggcagtctgacggtctactcgcggccctctatcgcccagtgctggctggtgccggcgctgggggatttcagtcgccgctacccggccatctcgctgaccgtgctgaccggcaacgataacgtcaacctgcagcgggcgggtatcgatctggcaatctattttgatgacgcgccgtcgtcgcagctaagccaccattttctgatggatgaggcgatcgtgccggtatgtacgccgtattacgcccgccagctgcagttaacgtcaaatcctgccagtctgcgccactgtacgctgcttcacgatcgccaggcatggagcaatgattccggcaccgatgaatggttcagttgggcacaacaatttgggattgaactgccgcaatcgtcgggcatcggcttcgatcgttctgatttagcggtgattgcggcgatgaatcatgtcggggtagcgatggggcgtaagcggctggtgcagaagcggctggagagtggggagttgatcgccccgttcggcgatatgacgctgaaatgccaccagcactactatgtgaccaccctgccgggccgccagtggccgaaaatcgacgcctttatcgagtggctgcatagcctgacctga

SEQ ID NO: 213004 - DNA, 1338 bp, Klebsiella pneumoniae
atggaatcgcaaatttgggttgtgagcacattgctgattagcatcgtgttaattgtattaaccatcgtcaaactgaagtttcatccgtttctggcgctgctgctggcgagctttttcgtcggggcgatgatgggaatgggcccgctggagatggtcaacgccattgagagcgggatcggcggtacgctgggcttcctggcggcggtgatcggtctcggcaccattctcggcaagatgatggaggtctccggcgcggcggagcgcatcggcctgacgctccagcgctgccgctggctgtcggcggacgtgattatggtgctggtcggcctgatctgcggcattaccctgtttgtcgaagtcggggtggtgctgctgatcccgctggcattctccatcgccaaaaaaaccaatacttcgctgctgaagctggctattccgctgtgttccgcgctgatggtggtgcactgcgtggtaccgccgcatccggccgcgctgttcgtggcgaataaactgggggctgatatcgggacggttatcgtctatggcctgctggtcggtctgatcgcctcgctggtcggcggcccgctgttcctcaggctgctcggcaaccgcctgccgtttaaaccagtgccagccgagttttccaacctcgacgttcgcgaagaatcgacgctgccgtcgctcggcgctacgctgtttaccgtgctgttaccgattggcctgatgctggtgaaaaccgtcgctgaactgaatatggcgaaaggcggcacgctgtatacagtgctggaatttatcggcaaccccatcaccgcgatgtttatcgccgtctttgtcgcctattacatgctcggcatccgtcggcaaatggggatgggcgttctgctgactcataccgaaaacggctttgggtccatcgccaacatcctgctgattatcggcgccggcggcgcattcaacgcgattttgaaatccagcggcctggccgatagcctcgcggtgatcctgtcgaaccttgatatgcacccgattttgctggcctggctggtggcgcttatcctgcacgccgccgttggctccgccaccgtggcgatgatgggcgctaccgccatcgttgccccgatgctgccgctttatcccggcgtaagcccggagatcatcgccattgccatcggttccggcgccattggctgcacgatcgtcaccgattccctgttctggctggtaaaacagtactgcggcgccagcctcagtgaaacgttcaagtactacacgacagcgacatttatcgcgtcgctacttgcactggccgccaccttcctgctttctttcatcatctaa

SEQ ID NO: 213005 - DNA, 1329 bp, Klebsiella pneumoniae
atgaaaaacgctgacctgaccaccttaaccgcgaccttcccgcttgtgcaggatctgatcgccctgaaagaaactacctggtttaacccggcaaccaccaccctggcggaggggttgccttacgtcggtctgaccgccgacgatgtgcaagacgcccatgcccgccttcagcgcttcgcgccctatctggcggcagccttcccggaaaccgccgcgagctgcgggattatcgaatcagaagtggttgccattccggcaatgaaacgcagccttgagcaaaaattcggccagccaattagcggcgaactgctgctgaaaaaagacagccatctgccaatctccggctcaatcaaagcgcgcggtgggatttatgaagtgctgacccatgcggaaaagctggcgctggaagccgggctgctgacgaccgcagacgattatcgcaaattgctgacgccggagtttaaacagttctttagccagttcagcatcgccgtcggctccaccggcaaccttgggatgtcgataggcatcatgagcgcgcgcattggttttcaagtcacggtgcatatgtccgccgatgccagggcgtggaaaaaagccaaactgcgcagccacggcgtaacggtggttgagtatgaagaggactatggcgtggcggtcgaacaggggcgcaaggcagcggaatccgatccgaactgctttttcattgatgatgaaaactcacgcacgctgttcctcggctatgccgtagccggcgagcgcctgaaggcgcagtttgccaaagcagggcgcgtggtcgatgccgatcacccgctgttcgtctatctgccgtgcggcgtcggcggcggccccggcggcgtggcatttggcctgaagctggccttcggcgaccacgttcactgcctgttcgccgaaccgacccattcgccatgcatgctgctcggcgtctataccgggctccacgaccagatagcggtgcaggatttaggtattgataacctgaccgcggccgacggtctggcggtcggcagggcgtccgggttcgttggccgggcaatggagcgcctgctcgacgggttctatacccttgacgaccagacgatgtatgacatgctgggctggctggcggcagcggaaaatatccgccttgaaccctccgcgctggccgggatggccggagcgcagcgggtctgcgccagcaaagcgtaccatcagctgcaggggctgagtgagcaacagctgcagcaggccacccacctggtgtgggccaccggcggcggcatggtgccggaagaggagatggcgcagtacctggcgaaggggcgctaa

SEQ ID NO: 213006 - DNA, 501 bp, Klebsiella pneumoniae
atgacaggatgtccggcgaatttgcctctcactcatgcccccggccagcaacatgacactccctttcaggctgtcgtggtggaggcgcatcattgccatcaaccgcaggcgttctatgcacagcttcgtcaacaggggctcaccgctatccattttattccgcagctggcggccggcgacgccgcgctttggggagagtttctctgcgcagtctttcaccgctgggtgcgggaagatattgggcgcatcaatattttactgtttagcgagacgctgagcgcctggtgtggggagacgctgacccagccaggcgcgccggcggccaacagcacctgctacggctgcccgtggctgcgcctgtgccgctgtggcgaacaggaagacccgctgtgcgcgggttaccggcagttctacgattttagcgggccctatatgcgagtgatgcgggacctgcgacgacagcagcggccaccagaggcgctgatgccgctgctgcgctaa

SEQ ID NO: 213007 - DNA, 363 bp, Klebsiella pneumoniae
atggcggataaacgccgggcgcggcgggaaagcgatcccggtcttcagccagagcgcacctcgctggcctggtttcgcaccctgttgggctacggcgcgctgatggcgctggcgattaagcacagctggcaccgcgccggcctgccgttctggctgtcgatcggcgtgctggcgattgtggcggtgatcctctggggctatacccgccgtcgtcatctgatggatgtcgacgatagcgattttttacagccgcgggcggttcgtgacaaatttttgatcgcactcgcagtactttctctggcattcctgtttgctgttactcaccttcaaccgatcgttttattcattagggatatgtcatga

SEQ ID NO: 213008 - DNA, 348 bp, Klebsiella pneumoniae
atgaaaatctcccgcctcggcgaagcgccggattaccgcttttcgctggctaacgaacgcacctttctggcatggatccgcacggcgctcggttttctcgccgccggcgtcggccttgaccagttagcgccggactttgccacgccgctgatccgtgaaattctcgccctgctgctgtgtctctttgccggcggcatggccatctatggctatctgcgctggctgaataacgagaaggcgatgcgtctcaagcaggaccttccctatacccgcacgctgctggtgattagcattctgctgctggcggtggtggccgcggtgatgctgctggtggtgtatggcggataa

SEQ ID NO: 213009 - DNA, 1323 bp, Klebsiella pneumoniae
atgaaaaaattctcagttgttatcgcaggcggcggcagcaccttcaccccgggcattgtcctgatgctgctggcaaaccaggatcgttttccgctgcggtcgctgaaattttatgacaacgacggcgcgcgccaggagaccatcgccgaggcgtgcaaagtgatcctcaaagagcaggcgccggagattgagttcagctataccaccgatccgcaggcggcgtttaccgatgttgattttgtcatggcgcatatccgcgtcgggaaatatccgatgcgtgaacaggatgagaaaatcccgcttcgccacggcgtgctgggccaggagacctgcggaccgggcgggatcgcctacggtatgcgctctatcggcggcgtgctggagctggtggattatatggaaaaatattcgccgaacgcctggatgcttaactactccaacccggcggcgattgtggcggaagccactcgtcgtctgcggccgaacgccaaaatcctcaacatctgcgatatgccgatcggcattgaagggcggatggcgcagattgtcggcctcaaagaccgtaaacagatgcgcgtgcgctactacggcctcaaccacttcggctggtggacgtcgattgaggacctcgacggcaatgatttgatgccgaaactgcgcgaatatgtggcgaaatacggctatgtgccgccctcgaacgatccgcacaccgaggccagctggaacgacacctttgccaaagcgaaagatgtgcaggcgctggatccgcagaccatgccgaacacctacctgaaatattatctgttcccggactatgtggtagcccactccaacccggaacgcacccgcgccaatgaggtgatggatcatcgggagaaaaacgtcttcagcgcctgccgggcgatcatcgccgccgggaaatccaccgccggcgatctggagattgacgagcatgcctcctatatcgtcgatctggcgacggctatcgcctttaacacgcaggaaaggatgctgctgattgtgccgaacaatggcgcgatccataactttgacgccgacgcgatggtggagatcccttgtctggtaggccacaacggaccggagccgctgacggtaggcgacatcccgcatttccagaaagggctgatgagccagcaggtggcagtggaaaaactggtggtcgatgcctgggaacagcgctcttaccacaagctgtggcaggcgattaccctgtcgaaaaccgtgccgagcgcctcggtggcgaaagcgatcctcgacgacctcattgccgccaacaaagattattggcctgagctgcattaa

SEQ ID NO: 213010 - DNA, 1623 bp, Klebsiella pneumoniae
atgctcagtcaaatacaacgctttggcggcgccatgtttaccccggttttgttgtttccttttgccgggatcgtggtcggtatcgccatcatgctgcgcaacccgatgttcgtcggcgaagcgctgaccgcacccgacagcctgtttgcccagatcgttcacatcattgaggagggcggctggaccgtctttcgtaatatgccgctgattttcgccgtcggtctgccgatcggcctggcgaaacaggcccagggccgggcctgtctggcggtgctggtgagctttctcacctggaactactttatcaacgccatggggatgacttggggccacttcttcggcgtcgatttttccgctgaacccacggccggcagcggcctgacgatgattgccgggattaaaaccctcgacaccagcattatcggcgccatcgtcatctccggtctggtgacggccctgcacaatcgctatttcgataaacccctgccggtattcctcggcatctttcagggttcatcgtttgtggtcattgtcgccttcctcgcgatgatcccttgcgcctggctgaccctgctcggctggccaaaggtccagctgggcattgaatcactgcaggccttcctgcgctcagccggggcgcttggggtgtgggtttacatcttccttgagcgcatcctgatccccaccggcctgcaccacttcgtctatggcccgttcatctttggcccggcggtggtggagggcggactgcaggtctactgggcagagcatctgcaggcgttcagtcagagtacggaaccgctgaagacgctgttcccggagggcggctttgccctgcacggtaactcgaaagtgtttgggtcggtggggattgcgctggcgctctacttcaccgccgcgccggaaaaccgcgtcaaggtcgccggtctgctcatccccgccaccctgaccgcgatgctggtcgggatcactgagccgctggagttcaccttcctgttcatctcgccgctgttgttcgccgttcacgcggtgctggcggcgaccatggcgacggtgatgtacatctgcggcgtggtgggcaacttcggcggcggcctgctcgatcaattcttgccgcaaaactggatcccgatgttccatcaccacgcttcgatgatgttcattcagataggcatcggcctctgtttcaccgccctctacttcgtagtcttccgtaccctgatcctgcgtctgaacctgaagacgcctggcagggaagagagcgaaatcaagctctacagcaaggccgattaccaggcggcacgaggtaaaaccacggccgccgccgcgccagagacccggctgggtcaggccgctggcttcctgcaggccctcggcggcgccgacaacattgaaagcatcaacaactgcgccacccgactgcgcatcgcgctggtcgatatggcgaaaacgcaaagtgacgacgtctttaaagcgctgggcgcccacggggtagtacgccgcggcaacgggattcaggtcatcgtcggcctgcacgttccccaggtgcgcgaccagctggaaaacctgatgaaagattctctttcgaccgaacataccaccatgacggaggcagtatcatga

SEQ ID NO: 213011 - DNA, 723 bp, Klebsiella pneumoniae
gtgatctataaatccattgctgaccgcctgcggctgcggctgaattccgccgacttcgccatcggcagcccgctaccaggagagaaaaaactggccgaggagttcggggtggcgcgcatgactattcgcaaagccatcgatctgctggtggactggggattggttgtgcgtcgccacggctcgggaacttacgtggcgcgtaaagacgtccatcatgaaaccagcaatctgaccggcctggcggaagtgctgcgcaagcagggtaaagaggtggtgagtcaggtgctggccttcgaggtgatgcccgccccgccggccatcgccagtctgctgcggattaaaattgatgaacggatctacttctcacggcgggtgcgctacgtcgacggcaagccgctgatgctggaggatagctatatgccggtgaagctgttccgcaacctgtcgctgagtcatctggaagggtcgaaatttgattatattgagaaagagtgcgggatcatcatcagcgggaactatgaaacgctgacgccggtgctggcggacaagcagttggcgcgctcaatgaacgtcccggagcagacgccgctgctgcgtattacctccctttcctacagcgacagcggcgagtttcttaactattcggtcatgttccgcaacgccagcgagtatcaggtggactatcacctgcgccgcgtccaggcgcaaagcccgctagcttag

SEQ ID NO: 213012 - DNA, 1662 bp, Klebsiella pneumoniae
atgagtgagatagcattgacggtcagcgtgctggcgctggtggcggtagtggggttgtggatcggcaatgtcaaaatccgcggcgtcggctttggcattggcggcgtcctgtttggcgggattattgtcggccactttgtcgatcaggcaggggtcaccctcagcagcccgatgctgcattttattcaggaattcggcttgatcctgtttgtctacaccatcggtattcaggtggggccgggctttttcgcctcgctgcgggtctctggcctgcggctcaatctgttcgctattcttatcgttatcctcggcggcctggtgaccgcggtgctgcataaactgttcaatattcctctcccggtggtgctcggtatcttctccggtgcggtgaccaacacgccagcgctgggggccgggcagcaaattctgcgcgatctcggcgtaccgttcgaggtggtcgatcaaatggggatgagctacgcgatggcgtatccgttcggcatctgcggcattctgctgaccatgtggctggtgcgtctgttctttcgcatcaatgtcgagaaagaggcccagcggtttgaggagagcagcggtaacggccacgcccatttacacaccatcaacgtgcgggtggaaaaccccaacctcaaccagatggcgattcaggatgtgccgatgctcaacaacgacaacatcgtctgttcgcggctgaaacgcggtgagctgttgatggtgcctgcgccgggcacccttatccaggctggcgacctgctgcacctggtggggcgacctgaggatttgcacaatgcgcagctggtgataggccaggaggtggcgacctcgctgtcgacgcgcggcaccgatctgaaagtggagcgggtggtggtcactaacgaaaaagtgctgggaaagaaaatacgcgatctgcacgtcaaacagcgctatgacgtagtgatctcccggcttaaccgggcaggcgtcgagctggtagccagcagcagcgccagcctgcagtttggtgacatcctcaacctggtcggccgtccggaggcaattgacgccgtggccgccgaactgggtaacgctcagcagaagctgcagcaggtccagatgctgccggtgtttatcggcatcggactcggggtactgctgggatctatcccgttgtttattcccggcttccctgcagcattgaagctgggactggccggtgggccgctgattatggcgctgatccttgggcgtatcggcagtatcggcaagctgtactggtttatgccgccgagcgccaacctggcgctgcgcgagctggggatcgtgctgtttctggcggtggtcgggctaaaatcggggggtgactttgtcgccaccctgacccagggcgatggtctgagctggatcgcttacggtattttcatcaccgccatcccgctgctgacggtgggcgtcctcgcgcgcatgctggcgaaaatgaactatctgacgctgtgcggcatgctggccggctccatgaccgacccgccggcgctggccttcgccaacaacctgcacgccaccagcggcgcagcggcgctctcgtatgccaccgtctatccgctggtgatgttcctgcgcattatcaccccgcagctactcgccgtgctgttctgggggctaagctag

SEQ ID NO: 213013 - DNA, 825 bp, Klebsiella pneumoniae
atgaacgaacagcagccatttgaagcgattagaaagagcgatgaggcggggcgggagtattggtctgcccgcaaccttggtcccctgcttgactataaagagtggcggaatttttataaggtcattgcaaaagcgataatttcatgtgaggcgagtggtcatccctcggcagaccattttgttgaaaccaacaaaatggtcgaattaggttctggcgccagcaggaatcttgaagatttccacctctcacgctacgcctgctatctggtagtgcaaaatggcgatccgtcgaaaccggtgattgctgcggggcaaacgtactttgccttgcaaacccggcgccaggaattgcaagatgatcaaatatttaagtctctacgagaggatgaaaagcgactgttcctgcacaatgagctcaaagagcataataaacatctggttgaaacggcccaacgtgctggtgttgagacgactcttgattttgctgtctttcaaaaccatggttataaaggtctctatggtggtcttgaccaaaaagcaatccatgagcgtaagggcctaaagaaaagccaaaaaatactcgactatatgggatcgactgagctcgcggccaacctgtttcgtgctacccaaacggaagaaaaactacgtcgggacgcggttgattcgaagcaactcgccaacaaaacgcattatgacgtagggcaaaaagtacgccagactattaaagacctgggtggcactatgcctgaagcacttccttccccggagaaaagtattcagcaactcactatcgcagcgaaaaataagaacgcgcctgagtag

SEQ ID NO: 213014 - DNA, 429 bp, Klebsiella pneumoniae; identical to SEQ ID NO: 135110

SEQ ID NO: 213015 - DNA, 414 bp, Klebsiella pneumoniae
atgcgtaacttcgatctttccccgctatatcgttcagccattggtttcgaccgcctgttcaacctactggaaaacaatcaaagccagagcaacggcggctaccctccgtataacgtcgagctggtagacgaaaaccactatcgcatcgctatcgcggtggctggctttgctgaaagcgagctggagatcactgcccaggacaatctgctgatcgtcaaaggcgcccacgccgccgagcagaaagagcggacctacctgtatcaggggatcgccgagcgcaacttcgagcgcaaattccagctggcggaaaacattcacgtccgcggcgccaatctggtgaacggcctgctgtatatcgatctggaacgggtgatcccggaagcgaacaagccgcgccgcatcgaaatcaactaa

SEQ ID NO: 213016 - DNA, 333 bp, Klebsiella pneumoniae; identical to SEQ ID NO: 135112

SEQ ID NO: 213017 - DNA, 1221 bp, Klebsiella pneumoniae
atgaaacaagtcacttttgctccccgtcatcaccagcttaccaatattaatacctggactcccgacagccagtggctggtattcgacgttcgtccgtccggcgcatcgtttaccggcgaaaccattgagcgagtgaacgtaaacagcggtactgtggagaccatttatcgtgccacgcagggcgcgcacgtgggcgtggtaaccgtgcatccaacccaggagcgctatgtgtttattcatggccccgagcggccggatgcgcagtggcagtatgattttcatcatcgccgcggggtggtggcctttcagggggctgtcgagaatctggacgccatggacattacccccccctacacgcccggcgcactgcgcggcggcagccacgtccatgtctatagccccaacggtcagtttgtcagttttacctacaacgatcacgtgctgcacgagcgcgatccggcgctggatctgcgcaacgtcggcgtggcggcgccctatggaccggtgacgccgcagggacagcatccgcgcgaatatggcggcagccactggtgcgtgctggtaagccgcacgacgccggcacccgcgccgggcagcgatgagattaatcgcgcctatgaggagggctgggtcgggaaccatactctggcgtttattggcgatacgctggcggaaaatggcgataaagtgcctgagctgtttattgtcgatctgccgcaggatgaagccggctggaagcagcctggcggggcgccgctggccggtaccgcaaccacaatgctggcgccgccggcgggcgtcagccagcgtcgtttgaccttcacccaccatcgccgctactcgggactggtgaacgtcccgcgccactgggtgcgcgccaatccccaggcgacggcgatagcctttctgatgcgcgacgacgccggcgtagtgcagctgtggcttatttccccgcaggggggcgagccgcggcagttgacgcatcacgcgtcgggtatccagtcggcgtttaactggcatccgtcgggagagtggctgggttttgcgctggaggatcggattgcctgctgccatgccggtacgggagatatcacctttttaaccgatacgcatgcgccctcggcggacgcgatcgtcttttcgccagacggtaaacagattgcctggatggaggaggtggacggttatcgtcagctgtgggttacgcagaccggacgataa

SEQ ID NO: 213018 - DNA, 1293 bp, Klebsiella pneumoniae
atggatatttcagttaccgctgtaaaaaccgggcgccgccgttatctgacgctcatcatgatctttattaccgtggttatttgttatgttgaccgcgccaacctcgccgtcgcctcggcgcatattcaggaggagtttggtattagcaaagcggaaatgggctacgtattttccgcctttgcctggctgtataccctctgccagatccctggcggttggttccttgaccgcgtgggatcccggcttacctactttatcgctatatttggctggtcggtggcgacgttgctacaaggcttcgccaccggtttaatgtcgctcattggcctgcgcgctatcaccgggatcttcgaagcgccagccttcccgaccaacaaccgcatggtgaccagctggttcccggagcacgagcgcgcttccgccgtcgggttttatacctcggggcaatttgttggcctggctttcctcacgccgctgctgatttggatccaggagctattgagctggcactgggtgtttatcgttaccggcggtatcggcattatctggtcgctgatctggttcaaggtttatcaaccgccgcgcctgactaaaagcatcagtaaagccgaactcgactatatccgcgacggcggcggcctggtggatggcgatgcgccgctgaagaaagaggcgcgtcaaccgttatcgaaagcggactggaagctggtttttcaccgcaagctggttggcgtttaccttggacagttcgcggtaacctcgacgctgtggttcttcctgacctggtttccgaactacttaacccaggaaaaaggcatcaccgcgctgaaggccggctttatgaccacggtgcccttcctcgccgcgttttttggcgtcctgctgtctggttggctggcggataagctggtgaaaaaaggctactcgctgggcgtggcgcgcaaaacgccgatcatctgtggactgttgatctccacctgcatcatgggggcaaactacaccaacgaccccatctggatcatggcgctgatggcgctggcgttcttcggtaacggttttgcgtctatcacctggtcgctggtctcctccctggcgccgatgcgcctgatcggcctgaccggcggggtgtttaactttgttggcggcctgggcggcatcaccgtcccgctggtgattggctatctggcgcaggattacggctttggcccggcgctggtttatatctccgtggtggcgttgataggcgcgctgtcttatatcctgctggtcggcgatgtgaaacgtgtaggctaa

SEQ ID NO: 213019 - DNA, 1149 bp, Klebsiella pneumoniae
atgaaaataaccaatatcaccacgtaccgtttacctccgcgttggatgttcctgaagattgaaaccgatgaaggcatcgtcggctggggcgaaccggtgattgaagggcgcgcccgtacggtggaggcagccgttcatgaatttggcgattacctgattggtcaggatccggcgcggattaatgacctgtggcaggtaatgtaccgcggcggcttttatcgcggcggcccgattatgatgagcgccatcgccggtattgatcaggcgctatgggatattaaaggtaaggtcctgaatgccccagtgtggcaactgatgggcgggctggtgcgcgacaaaattaaagcctacagctgggtgggcggcgaccgccccgccgaagtgattgacgggattaagaagctgcgcggcattggttttgacacctttaaattaaacggctgcgaagagatgggtatcattgataattcccgcgcggttgatgccgcggtgaataccgtggcgcaaatccgcgaagcgtttggcaatgaaattgagtttggtctcgattttcacggccgcgttagcgcgccgatggctaaggtattaattaaagagctggagccatatcgcccattatttattgaggagccggtattagccgagcaggcggaatattatccgcggctggcggcgcaaacccatattcccattgccgccggcgaacgtatgttttcgcgctttgaatttaaacgggtcctggaagcgggcggggtggctattttacaacccgatctgtcgcacgcaggcggtattaccgaatgctataaaattgccggcatggcggaagcctatgacgttgggctggcgccgcactgcccgctggggccgatcgcgctggcggcttgtctgcacgttgatttcgtttcacataacgcggtcttccaggagcagagcatggggatccactacaacaaaggcgccgaactgcttgattttgtgaaaaacaaagaagatttcaatatggaaggcggcttctttaaacctctgatgaagccggggctgggcgtggaaattgatgaggcccgcgtgattgagttaagtaaaaacgcgccggactggcgaaatccgttgtggcggtatgaggatggatctgtcgccgaatggtaa

SEQ ID NO: 213020 - DNA, 618 bp, Klebsiella pneumoniae
atgcagtggcaaactaaccttccacttatcgctatcctgcgcggtattacgccagacgaggcgctggctcacgttggcgccgttatcgacgccggtttcgacgcggtcgaaatcccgctgaactcgccgcagtgggagaaaagtattccgcaggtcgtcgacgcttacggcgagcaggcgcttatcggcgcgggcacggtgctgcaaccggagcaggtcgacaggctggcggccatggactgtcggctgattgtgacgccaaacattcaaccggaagtgatccggcgagcggtgggttacggcatgaccgtgtgtccaggctgcgccaccgccagcgaagcctttagcgcgctcgatgccggcgcgcaggctctgaaaatcttcccgtcatcggcttttggcccggattacatcaaagcgttgaaagccgtgcttccgcccgaggttccggtctttgccgttggcggcgtgacgccggaaaacctggcgcagtggattaatgccggctgtgttggggcaggattgggtagcgatctctatcgtgccggccagccggttgaacgtaccgcgcagcaggcagccgcattcgtaaaagcgtatcgagaggcagtgaaatga

SEQ ID NO: 213021 - DNA, 879 bp, Klebsiella pneumoniae
atgacggctcgctacatcgcaatagattggggatcgacgaatttacgcgcctggctttatcagggcgaagaatgcctggaaagcaggcaatctgaagcaggcgtaacgcgcctgaatggtcgctctcccgctgcggtgttagcggaaatcacccagcactggcgcgatggcgccacaccggtggtgatggcagggatggtcggcagcaacgtgggctggaaaatcgccccttatttgccgcttcctgccgctttctcggatattggccagcagttaactgccgttggcgacaatatctggataattcccggcctttgcgtttcccgtgacgataaccataacgtcatgcgtggggaagaaacgcagctgctgggcgcacgcgccttagccccttcatctgtctacgtgatgccgggaacccactgtaagtgggtactggccgatcgccggcaaattcacgattttcgtactgttttgaccggtgaattgcatcatttgttgcttcagcactcgctggtgggcgccggcttaccgccgcaggaaacgtccgctgccgcattcgcggcaggtctgcagcgcggtatcaacaaccccgccgtcctgccgcagctgtttgaagttcgcgcttcgcacgtgctgggcgcgctgcctcgcgagcaggttagcgaatttctttccggcctgctgattggcgctgaagttgccaccctcagcgacacattcgccggacagcaggcgatcagtctcgtcgctgggtcatcgttaacatcccgctatcagcaggcattcgccgccattggccgcgaagtcagcgcggttgcgggcgatacggcatttcagacaggaataaggagcatcgcttatgcagtggcaaactaa

SEQ ID NO: 213022 - DNA, 690 bp, Klebsiella pneumoniae
atgactctcaataagaccgatcgcattgtgatctcgctgggcaaacagatcgtcagcggtaaatacgtcccgggttcggcgcttccggccgaagcggaactctgtgaggagtttgaaacctcgcgcaacatcatccgcgaagtgtttcgttccctgatggcgaagcggctgattgaaatgaagcgctatcgcggcgcgtttgtcgctcccagaaaccagtggaactacctcgacaccgaggtgctgcagtgggtactggaaaatgactatgacccgcgtcttatcagcgcgatgagtgaagtgcgcaacctggttgaacccgccatcgcgcgttgggcggcggaacgcgccacctcaagcgatctggcggaaatcgagtcggcgctcaatgacatgatcgccaacaaccaaaaccgggatgcctttaacgaagcggatattcgctaccacgaggcggtgctgcagtcagtacataacccggttttgcagcagcttagcgtggcgatcagttcgctgcagcgggcggtatttgaacggacctggatgggcgatgaaggcaacatgccgaaaaccctccaggaacataaagcgctatttgacgccattcggcatcaggatagcgacgcggcggagcaggcggcgttgacgatgatcgccagctcgacacgaaggcttaaggaaatcacatga

SEQ ID NO: 213023 - DNA, 1134 bp, Klebsiella pneumoniae
ttgagccgactgtttatcacttttctgctgctgatggtctgcccgacaggcagccaggccgaggcgctcagccgcgagaaaatcgacggctggctgcagcatctcggcgccagcgataagttcgacgccagcaaaggcatcgactggggcgtgatgcccggtccgttctatacgccggaactagggttgggcattggcaccgctgtcgtcggcctgtatcgtcccgacccgcaggataccaccagccagaactcgaccctgacgctcagcggctacgccagctctaccggcgcctttggcctcagcgtgaaaaactacacctttttcgatcgtgatctgtggcgcgtttttgtcgacgggtcgatagccaacacgcccacttattattgggggcagggttttcatgccggggataaagacaatgaaaaagagaagtataccgcccaggtactgaccctgcgacccaccctttatcggcagcttatcgatcatgtttatctcggggcgggatggtcgctggcggcgcagaatgccgatgagatggaccatgacgatcggccgaagatagaaaacactccacagggaccgtcggtattcagctccggcgccagcatcgatatcaactgggacgatcgcgactttgtccctaacccgcgccggggtcagtatgccaacctccgctatacccactatgcgcccggattaggtagcgatacccgctttgaggaatttcagctgcactatagccattatcatgccctgagcgagaaaagcgtgctcgcctgggaggccgatggcgccttcacccagggcgaggtaccgtggagcatgatgccgctgctcggcagcgatgaacggatgcgcggctactaccaggggcgctaccgggataaaaaggtcgtcagcggccagctggaataccgccggcagctcacctggcggcacgggattgtcgcctgggccggggcgggaaccatggggccctcactgtcgtcgctgaataatggccgctggctgccttcggcgggcgttggctaccgctttgaattcaaacctcgcgttaatgttcgcctcgactacggtatcggcaatggcagcagcggcttttacttccaggtcggcgaagcgttttaa

SEQ ID NO: 213024 - DNA, 1062 bp, Klebsiella pneumoniae
atgttggttacgctgccattcgcctctgttcagatttgcgcggccgcggaaccaacggcgccgctcgaaccggcgtatgcctatcacggcgcagagcctgcggatctgccggcgccagaaagtcgccagcctgcggccgcagcatcgtcctcgctactccctttgctaggcgatgaggccagaaagcgcggctacgtcctgccgctgccgtttggcgtcagcattaactatatggatatgcggcagaatattaatgtcgacagcattaacttcaccgggctgtcgctggatggccgcaatatcgattgcggtaaggatcctgtctgcaagcacgccgtgaataacattttcgctaatgggccggtctcgctggataacgctttccagattggcgttggtcatacgcgggaaagcagcaaaaccgagacgctcaagctggatgcctggctgctgccgtttatgaacgtttatggcctggtggggcacaccgaagggcattcaatttcgcagatagctgtcggcctgaagggaccgaacggtaaagtggtgcccctgccggggatgcaggatctcgactttcgtctcgattttaaaggtactacctacgggatgggcaccaccctggtgggcggcgtcggcaattggtttaccgtgctggacgccaactacacgcaaacgcgctttgatatcctcgacggcagcatcgatgcgcttaccttttcgccgcgcgttggctatcgtttcagtacgccatcggtcgatgcgctgcatctccccgccggaaagctaaatctgtgggttggcagcatgtatcaggatgtgcagcaggagtttaaaggcagcctcagcgatctctcgatgccgtcgccgatgctgcagaatatggttaatctggccaaccaggacaataacggtcgcttcgatgtgaagcagcatctgcagtcgccatggaacgttctggtgggcgcgcaatacgagctgacgcagaattttaatattactaccgagtttggctttgccgaacgtaacagtttctttattgccggcgagtatcgcttttga

SEQ ID NO: 213025 - DNA, 813 bp, Klebsiella pneumoniae
atggctattaaactgattgcaatcgatatggacggcacgctgctgctgcccgaccataccatctctccagcggtgaaagccgccatcgccgcggcgcgcgagcgcggtgttaacgtggtgctgaccaccggtcgcccttacgctggcgtccacagctatttgaaagagctgcatatggagcagccgggtgattactgcattacctacaatggcgcgctggtgcagaaggctggtgacggaagcaccgtcgcgcaaaccgcgctgagctatgacgactatcgcttccttgagcagctctcccgcgaggtcggctcccacttccatgcgctggatcgcaatacgctgtataccgcgaaccgcgatatcagctactacaccgtccacgaatcctatgtggcaaccattccgctggtgttctgcgaagcggagaaaatggatcctgagatccagctgctaaaagtgatgatgattgatgagccggcaatccttgaccaggccatcgcccgtattccggcggaagtgaaagagaagtacaccgtgctgaaaagtgcgccttacttcctcgaaatactggataaacgcgtcaataaaggcactggcgtgaagtcgctggccgatgcgctgggcatcaagccggaagagattatggcgattggcgatcaggaaaatgatatcgcgatgattgaatttgccggcgtcggcgtggcaatggataacgccattcctgcggtcaaagaagcggcgaacttcatcaccaaatcgaaccttgaagatggcgttgccttcgccattgaaaaatacgttttagcgtaa

SEQ ID NO: 213026 - DNA, 2415 bp, Klebsiella pneumoniae
atgtcgaattcttatgactcctccagtatcaaagtcctgaaagggctggatgcggtgcgtaagcgcccgggtatgtatatcggcgacacggatgacggcaccggtctgcaccacatggtattcgaggttgtggataacgctatcgacgaagcgctcgcgggttactgcaaagatatcgttgtcaccatccacagcgataactccgtctccgtccaggatgacggccgcggcatcccgaccggcattcacccggaagagggcgtctccgcagcggaagttatcatgaccgtcctgcacgctggcggtaaattcgatgataactcctataaagtttccggcggtctgcacggcgtaggcgtctcggtggttaacgccctgtcgcagaagctggagctggttatccagcgcgataacaaagttcacaagcagatgtacgaacacggtgtgccgcaggcaccgctggccgtgactggcgaaaccgacaaaaccggcaccatggtgcgtttctggccaagcctggaaaccttcaccaatgtcaccgaatttgaatatgacatcctggcgaaacgcctgcgcgagctgtcgttcctgaactccggcgtctctatccgcctgcgcgataagcgcgacggcaaagaagaccatttccactacgaaggcggcatcaaggcgttcgttgagtatctcaacaagaacaaaacgccgatccacccgaatattttctatttctccaccgaaaaagacggtatcggcgtggaagtggccctgcagtggaacgacggcttccaggaaaacatctactgctttaccaacaacattccgcagcgtgacggcggtactcacctcgccggcttccgcgcggcgatgacccgtactcttaacgcctatatggacaaagagggctatagcaaaaaagcgaaagtcagcgccaccggcgacgatgcgcgtgaaggcctgattgccgtggtatccgtgaaggtgccggatccgaaattctcctcgcagaccaaagacaagctggtctcctccgaggtgaaatcggcggtggagcagcagatgaacgaactgctgagcgaatacctgctggaaaatccatccgatgcgaaaatcgtggtcggcaaaattattgacgccgcgcgcgcccgtgaggccgcacgtcgcgctcgtgagatgactcgtcgtaaaggcgcgctggatctggcaggcctgccgggcaaactggcggattgccaggagcgcgacccggcgctgtccgaactgtacctggtggaaggggactccgcgggcggctctgctaaacagggtcgtaaccgcaagaaccaggcgatcctgccgctgaagggtaaaatccttaacgttgagaaagcccgcttcgataaaatgctctcttcccaggaagtggcgacgctgatcaccgcgctgggctgcggtatcggtcgcgatgagtacaatccggataaactgcgctaccacagcatcatcatcatgaccgatgcggacgtcgacggctcgcacattcgtaccctgctgttgaccttcttctatcgtcagatgccggagatcgtcgagcgcggccacgtctacattgcccagccgccgctgtacaaagtgaagaaaggcaagcaggaacagtacattaaagacgacgaagcgatggatcagtatcagatctccatcgcgctcgacggtgcgaccctgcacaccaacgccaatgcgccggcgctggcgggcgaaccgctggaaaaactggttgccgagttcaatgccacccagaaaatgattggccgcatggagcgccgcttcccgaaagcgctgctgaaagagcttatctatcagccgaccctgaccgaggccgacctggcggacgagcagaaggtgacccgctgggtgaacaccctggtctccgagctgaacgagaaagaacagcacggcagccagtggaaattcgatctccacgagaacaaagaactgcagcattttgagccggttattcgcgtacgtacccacggcgtggataccgactatccgctggataacgagttcattatggggccggaatatcgtcgtatttgtgccctgggcgagaaactgcgcggcctgatggaagaagatgcttacatcgagcgcggcgaacgtcgtcagccggtagccagcttcgagcaggccctggactggctggtgaaagagtcccgtcgcggtctctccatccagcgctataaaggtctgggcgagatgaacccggatcagctgtgggaaaccaccatggatccggacagccgtcgcatgctgcgcgtgaccgtcaaggatgccatcgctgccgatcagctgttcaccaccctgatgggtgatgccgttgagccgcgtcgcgcgtttatcgaagagaatgccctgaaagcggcgaatatcgatatttaa

SEQ ID NO: 213027 - DNA, 1074 bp, Klebsiella pneumoniae
atgtcactgacgcgcttgctcatcaaagacttccgcaatattgaaagcgcggatctcgctttatctcccggctttaacttcctggttggcgcgaacggcagcggcaaaaccagcgtgctggaagctatctacacgcttggccacggccgggcatttcgcagtttgcaaattggccgagtgatccgccacgagcaggatgcgtttgttctgcatgggcgtttacagggcgaagagcgggaaaccgccatcggcctgaccaaagacaaacagggcgacagcaaggtgcgtatcgacggcaccgacggccacaaagtggcggagctggcgcacctgatgccgatgcagctgattacgccggaggggtttactttactcaacggcggccccaaatacagaagagcattccttgactggggatgctttcataacgaagccggattcttcaccgcctggagcaacctgaagcgcctggtcaagcagcgcaacgccgcgctgcgtcaggtcagccgctatgcccagctgcggccttgggatctggaattaatcccgctggcggagcagatcagccgctggcgtgccgaatacagcgccgctatcgtcgaagacatggcggatacctgtcagcaatttttaccggaattcacgctcaccttctctttccagcgcggctgggaaaaagagaccgactacgcggaggtgctggagcggaatttcgagcgcgacagaatgttaacctacaccgcccacggcccgcataaagcggattttcgcattcgcgccgacggagcgccggtggaagataccttgtcgcgcgggcagcttaagctgctgatgtgcgccctgcgtctggcgcaaggagagttcctcacccgcgtcagcgggcggcgctgcctgtacctgatagatgattttgcctcggaacttgatgatgcccgccgcggtctgttatccagccgcctgaaagcgacgcagtcgcaggttttcgtcagcgcgatcagcgctgaacacgttatggacatgtcggacaaaaattcgaagatgttccgcgtggaaaaaggtaaaataacggattaa

SEQ ID NO: 213028 - DNA, 1101 bp, Klebsiella pneumoniae
atgaaatttaccgtagaacgtgaacatttattaaaaccgctgcaacaggtgagcggtccgttaggtggtcgtccgacgctgcccattctcggtaacctgctgcttcaggtcgcggagggcgcgctgtcgctgaccggtaccgatcttgaaatggagatggtggcgcgcgtggcgctggttcagccgcacgaagcgggcgcaacgaccgttccggcacggaaattctttgatatctgccgcggcctgccggaaggcgcggagatcgcggttcagttggaaggcgatcgcatgctggtgcgttccggccgcagccgcttctcgctgtcgaccctgcccgccgccgatttcccgaatctggatgactggcagagtgaagtggagtttaccctgccgcaggcgaccatgaagcgtctgatcgaagccacccagttctcgatggcgcaccaggatgttcgttactacttaaacggcatgctgtttgaaaccgaaggcagcgaactgcgcacggtggccaccgatggtcaccgcctggcggtctgttcgatgccgctggaagcgtcgctgccgaaccattcggtgatcgtgccgcgtaaaggggtgattgagctgatgcggatgctcgacggcggggatatcccgctgcgcgtgcagattggcagcaacaatatccgcgcccacgttggcgattttatcttcacctctaagctggttgatggccgtttcccggattatcgccgcgtattgccgaaaaatccggataaacacctcgaagcgggctgcgatattctgaagcaggcttttgcgcgcgcggcgattctctccaacgagaaattccgcggcgtgcggctgtacgttagcgaaaaccagctgaaaatcaccgccaataacccggaacaggaagaagcggaagagattctggatgtgacctacgccggaacggagatggagattggcttcaacgttagctatgtgctggatgtgctgaatgcgctgaagtgcgagaatgtacgcattctgctgacggattcggtgtcgagcgtgcagattgaggatgcggcctctcaatccgcagcctatgtcgtcatgcctatgagattgtag

SEQ ID NO: 213029 - DNA, 1404 bp, Klebsiella pneumoniae
gtgtcactttcgctttggcagcagtgtcttgcccgattgcaggatgagttaccagccacagaattcagcatgtggatccgcccattgcaggcggaactgagcgataacacgctggcactgtatgcgccaaaccgttttgtgctcgactgggtaagggacaaatacctcaataatatcaatggactcctcaatgatttttgcggtgcggacgccccgcagctgcgttttgaggtgggcgctaagcccgccagctcgctgcagaaaggggcggtaagcccggctgcggcggccattccggcggcgcaggtgcagaccgcgcgcgcggcgccgacgatcgtgcgccctggctgggataatgtcccggcgccggcggagccgacctaccgctctaacgttaacgtgaaacacacgtttgataacttcgtcgaaggtaaatctaaccagctggcccgcgcggcggcgcgtcaggtggcggataacccgggcggcgcctacaaccccctgttcctctatggcgggacgggtctgggtaaaactcacctgctgcacgcggtggggaacggcattgtggcgcgtaagccgaacgcgaaagtggtctatatgcactccgagcgtttcgttcaggacatggttaaagcgctgcagaacaacgccatcgaagagtttaagcgttactaccgctccgttgacgccctgctgatcgatgacattcagttctttgccaataaagaacgatcccaggaagagtttttccacaccttcaatgcgctgctggaaggtaatcagcagatcatcctgacgtcggatcgttatccaaaagagatcaacggcgttgaggatcgtctaaaatcccgcttcggctgggggctgacggtggcgatcgagccgccggagctggaaacccgcgtcgcgatcctgatgaaaaaagccgacgagaacgacatccgcctgccgggcgaagtggcgttctttattgccaagcgtctgcgctcgaacgtgcgtgagctggagggggcgctgaatcgcgttatcgccaacgccaacttcaccggccgggcgatcaccatcgatttcgtgcgcgaagcgctgcgcgatctgctggcgctgcaggaaaaactggtcaccatcgacaatattcaaaagacggtggcggagtactacaagattaaggtagcggatctgctgtccaaacgccgctcccgttcggtggcgcgtcctcgccagatggcgatggcgctggccaaagagctgaccaaccacagcctgccggaaatcggcgatgcgtttggcggccgagaccataccaccgtgctgcacgcctgccgcaagattgagcagctgcgtgaagaaagccacgacattaaagaagatttttccaatttaatcagaacattatcctcgtga

SEQ ID NO: 213030 - DNA, 198 bp, Klebsiella pneumoniae
atgttgacgcaaacgaaaactttcacgcgtcagacgtttaatccgattgcgttcatgtgcgcgtttcacgtttttcttggcgacggtgagaccgatgcggggatgccccagcgaattcaggcggccgaggatggtgatttgcggcgtgccagcccgttgtggctgctggaagacgaaagtgaaatgactgggagttaa

SEQ ID NO: 213031 - DNA, 1647 bp, Klebsiella pneumoniae
atggattcgcaacgcaatcttcttatcatcgctttgttgttcgtgtctttcatgatctggcaagcctgggagcaggacaaaaatccgcagccccagcagcagaccacgcagactacgaccacagcagcgggtagcgccgccgaccagggcgtaccggccagtggccaggggaaactgattacggttaaaaccgacgtgcttgagctgactatcaacaccaacggtggcgatattgagcaggcgctgcttctggcgtatccaaaaacgctgaaatcgaccgaaccgttccagttactggaaaccacgccgcagtttgtctaccaggcgcagagcggcttaaccggccgtgacggtccggataacccggcaaacggcccgcgtccgctgtacaacgtcgataaagaggcgtttgtgttggccgatggccaggatgagctcgttatcccgctgacctacactgacaaagccggcaacgtcttcaccaaaaccttcaccctgaagcgcggtggctatgcggtgaacgtgggttacagcgtgcagaatgccagcgagaagcctctggaagtctcgaccttcggtcagctgaagcagaccgctgcgctgccgaccagtcgcgatacgcagaccggtggcctgtccacgatgcatactttccgtggcgccgcgttctccactgcggattcgaaatacgaaaaatataaattcgataccattctggataacgaaaacctgaacgtcagcaccaaaaacggttgggttgccatgctgcagcagtacttcaccaccgcatgggtgccgcggaataacgggacgaataacttctacaccgccaacctcggcaacggcattgtcgctattggctacaaatcgcagccggtactggtgcagccaggccagaccgacaaactgcagagcacgctgtgggtcggcccggctattcaggacaaaatggctgccgttgcgccgcacctggatctgaccgtcgactacggctggctgtggttcatctcccaaccgctgttcaagctgctgaaattcatccacagcttcctcggcaactggggcttctcgatcatcgttatcacctttatcgttcgtggcatcatgtacccgctgaccaaagcgcagtacacctccatggcgaagatgcgcatgctgcagccgaagattcaggccatgcgtgagcgtctgggcgacgataaacaacgtcaaagccaggagatgatggcgctgtataaagcggaaaaagtaaacccgctgggcggctgcttcccgctgattattcagatgccgatcttccttgcgctgtactacatgctgagcgcctcggttgaactgcgtcatgcgccgtttatcctgtggatccacgacctgtctgctcaggacccgtactacatcctgccgatcatcatgggcgcgaccatgttcttcatccagaagatgtcgccgaccaccgtgaccgacccgatgcagcataagatcatgacctttatgccggtcatcttcacggtgttcttcctgtggttcccgtctggcctggtggtgtactacatcgtcagcaacctggtcaccattattcagcagcagctgatttaccgtggtctggagaaacgtggcctgcatagccgcgagaagaagaaatcctga

SEQ ID NO: 213032 - DNA, 1365 bp, Klebsiella pneumoniae
atgagccataacgacactatcgtcgcccaggcaacccctccgggacgcgggggtgtgggcatcctgcgtatctccggccttaaggcgcgcgacgtcgcgcaggcggtgctgggcaagctgccgaagccgcgctatgccgactacctgccgttcaacgacgttgacggtaccccgctggatcaggggattgcgctgtggttccccgggccgaactcctttaccggggaagatgtgcttgagctgcagggccacggcggcccggtcattctcgacctgctgcttaaacgtattctgaccctgccgggcctgcgcatcgccaggccgggtgagttttccgagcgcgcgttcctcaacgacaagctcgatctggcgcaggcagaggccatcgccgaccttatcgacgccagttcagagcaggcggcgcgctcggcgctgaattcgctgcagggggcgttctccgcgcgggtgaatcatcttgtggaagcgctcactcacctgcgcatctacgtggaagcggccattgacttcccggatgaagaaatcgatttcctttccgacggcaaaattgaagcccagctgaacgaggtgatggccgatctcgacgccgtccgcgcggaagctcgtcagggcagcctgctgcgcgaagggatgaaagtggtgatcgccgggcggccaaatgccggtaaatcaagcctgctgaacgccctggcgggccgcgaagcggcgatcgtcaccgatatcgccggtaccacccgcgacgtgctacgcgagcatatccatatcgacggcatgccgctgcatatcatcgataccgcaggcctgcgcgatgctaatgacgaagtggaacgtatcggcatcgagcgcgcctggcaggagattgcccaggccgatcgggtgctgtttatggtcgatggcaccaccaccggcgccgttgacccggcggagatctggccagactttatcgagcgcctgcccgctaaattgccgattaccgtggtgcgcaataaagccgatgtcaccggcgaagcgctcggtatcagcgaagtaaatggccactcacttattcgcctgtcggcacgtaccggcgaaggcgtggaggtgctacgtaaccacctcaagcagagcatgggcttcgataccaatatggaaggcggcttcctcgcccgccgccgtcacctgcaggccctggaagaggcggcgaaccatctgcagcaaggcaaagcccagctgctgggcgcctgggccggcgagctgctggcggaagagctgcgcctcgcgcagcaggcgctgagcgagatcaccggggagttcacttccgacgatctgctgggccgcatcttctccagcttctgtatcggcaaataa

SEQ ID NO: 213033 - DNA, 420 bp, Klebsiella pneumoniae
atgaccgttgaatataccgtgatcgagaaggtgccctccgccgaagcgttttgccacctgcgggtagccgccggcatgtcgccgcgccccctggaaggcgccagagccggactgccgcatagctgttatggcgtacatatcctctggcaggagacgccgatcgcgatgggacgcatcgtcggcgacggagcgattaatttcgatattgtcgacgtcgccgtcgatccggctcaccagggaaaaggccttggccggctggtgatggagaagctggtcgcctggctggacgctaacgcctttgatggcgcctacgttacgctggtggcggatgtgccggaactgtacgcgaagttcggcttcgaaagcgttcgcccggagagcgaggggatggcccgcgtctggcgaacccgcagtcgttag

SEQ ID NO: 213034 - DNA, 1179 bp, Klebsiella pneumoniae
atgacacgctttcttctctgcagctttgccctggttctgctctacccctccggcatcgatatgtatctggtcggcctgccgcgtattgctcaggacctgggggccagcgaggcgcaattacatatcgccttctcggtctatctggccggtatggcctccgcgatgctgtttgctggccgcatcgccgaccgctcggggcgtaagcctgtcgctattgtaggtgcagcgatctttgttatcgcctccctgctctgcgcccaggcgcataccagcagccacttcctcatcggacgctttatccaggggatcggcgccggcagctgctacgtggtggctttcgctatcctgcgcgatacgctggacgaccgtcgccgcgccaaggtgctgtcgttgctcaacggcatcacctgcattatccccgtcctggcgccggtgcttggccacctgattatgctgaaatatccgtggcagagcctgttctacacgatgaccggcatgggcgtcatggtcgctgtgctgtcggtctttatcctgcgtgaaacgcggccgacggcgcctccgcaggcagcgtcaccgcagcatgacgctggcgaatcgctgttgaaccgctttttcctcagccgcttactcattaccaccctcagcgtgacggtgatcctgacctacgttaacgtctcgccggtactaatgatggaagagatggggttcgaccggggaacttactcaatggcgatggctctgatggcgatgatcagcatggcggtctccttctcaacgccgttcgccctgtcgctgtttaatccccgcaccttaatgctgacctcacaggtgctgtttctggcggcaggcgtgacgctgagcctcgcgactcgccaggccgtcaccctgatcgggctgggcatgatttgcgccggcttctccgttgggttcggcgtcgcgatgagccaggcgctggggccgttcacgctgcgcgcgggcgtcgccagctcggtcctcggcatcgcgcaggtgtgcggttcatcgctgtggatttggctcgccgccatcatcggactcagcgcaatgaatatgctgatcgggatactcattgcctgtagcatagtgagccttgttttgttactggtcgtcaccccgccgcgggttgcgcaatacgatgaagaagccgctgtcgagtcttga

SEQ ID NO: 213035 - DNA, 960 bp, Klebsiella pneumoniae
atgaagaagccgctgtcgagtcttgatcttaatttactcctctgcctgcagctcctgacccaggagctcagcgttacccgtacggcgaagcggatgaacgtttcgccgtcagcggtgagcaagtcgctggccaaactgcgcgcctggtttgacgatccgctgtttgtgaaaaccccgctgggcctggcgcccacgccgctggtcagcagcatggagcaggatctggcggactggatgcagatgggcaaccaaatcctcgataaaccgcaccataccatgcccagcggcctcaaattcgaactggcggcggaaacgccgctgctgatgatcctgtttaacaccctctctcagcgcatctatcagcgctatccgcaggcattgattcgtttgcgcaactgggactacgactccctggacgccatcatccgcggtgaggtggatatcggcttctgcggacgcgaaagccatccgcagtcgcgtgagctgctgagcctgctgccgtggtatatcgattttgaggtgctgttcaccgacctgccgcaggtctggctgcgcgccgatcatccggcgctcagggaagagtgggatctggcggcattcttacgctatccgcatatcactatctgctgggaacaacgcgatacctgggccctggacgacgtgctgcaggagctggggtataagcgtaacgtggcgctgaccgtgccggggtttgagcaatcactttttatggccgctcagccgcagcacaccatgctggccaccgcgccgcgctactgtcagcactataatcagcagcaccagctgccgctcgtctcccggccgctccccctggaggcgcagcatctggaaaagctgcgcgttcccttcaccctgctatggcataagcgcaacagctacaacccgaagcttgtctggcttagagatacgctgaaagcgctctattccggtacgctttaa

SEQ ID NO: 213036 - DNA, 729 bp, Klebsiella pneumoniae
atggcaacgcattttgcaagagggatactcagtaccggggagccgctatcgacacgtttgtcagcggcctgtcatcaatccgcacgtcttctcccgacatatcgccaggctcgcttttgcgcgtcgcgctcgctgcttgccgagctgctgtttatgctttacggcatcagcgagctgcctgaaatcatcaacgaagcgaatggccgaccggtttttagcgatcgccaactgccccgcttttcgatcgcttatactggcaatatcgttggtgttgccctcaccaccgagggggattgtggcctcgacatggaactgcagcgcactgtccgcagccacgacgccgaccggcacaatttcagcaacaatgagaatctgtggattaacatacagcatgacccggacgaagcgcgcagccagctggtagcgctgcgccgcagcgtgctaaagctgaccggcgaagcatcaacgcagctgcagctgctgcccggctctggccgcctgcgcaccgccggcagtcagccaatcgaagcggtatgtgacgccgaatcgctgctggtatggtccattgccgctaccccgaacatcggctcgctgaaggtctgggaatatgatgctaagggaggtgactggcgcagcctggcagatgcgcagcagcgcgcacgcgaaccgtcagcccgcctgatgcgctttaccagcttacccatggaaaaaaccttatccctcaattga

SEQ ID NO: 213037 - DNA, 567 bp, Klebsiella pneumoniae; identical to SEQ ID NO: 137372

SEQ ID NO: 213038 - DNA, 1338 bp, Klebsiella pneumoniae
atgagtcaacaacaaaccagccagtcttctggccagggtctgctggagcgcgtatttaagctgcgcgagcacggcaccacggtgcgcaccgaagccatcgccggtttcaccacgttcctgacgatggtgtatatcgtttttgttaacccacaaattcttggcgtagcgggcatggataccagcgccgtgtttgtgaccacctgtctgattgccgctttcggcagtatcctgatgggtctgttcgcgaacctgccggtcgccctggcgccggcgatgggcctgaacgcctttttcgcctttgtggtggtgcaggcgatggggctgccgtggcaggtgggcatgggcgccatcttctggggcgccgtgggcctgctgctgctgaccatcttccgcgtacgttactggatgatcgccaatattccgcttagcctgcgtgtaggtatcaccagcggtatcggcctgtttatcggcatgatgggcctgaaaaacgccggggtgattgtcgccaatccggaaacgctggtcagcattggtcatttgacttcccacagcgtactgctgggcgtgctgggcttctttatcatcgcgattctggcgtcgcgcaacattcacgccgcggtactggtctctatcgttgtgaccaccctgctgggctggatgctgggcgacgtgcattacaccgggatcgtctcggcgccgccgagcgtggcttcggtgattggtcaggtcgatctggcgggctccctgaacctgggcctggccggcgtgatcttctcctttatgctggtcaacctgtttgactcctccgggacgctgattggcgtgacggataaagcgggtctcgcggatgccaacggtaaattcccgcgcatgaagcaagcgctgtttgtcgatagcgtctcgtcggtggcgggctccttcatcggtacctcgtcggtgacggcctatatcgaatcttcttccggcgtttccgtgggcgggcgtaccggcctgaccgccgttgtcgttggtatcctgttcctgctggttattttcctctctccgctggcggggatggttcctggctatgccgccgcgggcgcgctgatatacgttggcgtgctgatgacctccagcctcgcgcgcgtgaagtggagcgacctgaccgaggcggtgcctgcgttcatcaccgcagtgatgatgccgtttagcttctcgatcaccgaaggtatcgccctgggctttatctcttactgcgtgatgaagatcggtaccggccggctgcgcgagctcagcccgtgtgtgattatcgtttcgctgctgttcgtgctgaaaattgtctttatcgatgcacattaa

SEQ ID NO: 213039 - DNA, 666 bp, Klebsiella pneumoniae
atgactcaaccagaagcagtattttttgactgtgacggcacgctggtcgacagcgaggtgatttgctcccgcgcctacgttcacatgtttcaggaattcggcattacgctggacctcgccgagatttttaagcgcttcaaaggtgtgaagctgtacgaaattatcgacaccatcaacgctgagtatggcgttaatctgcaaaaggccaccctggagccgatttaccgggccgaggtcgctcgcctgttcgatagcgagctggaggtgattcccggagcccaggcgctgctggatgcggtaagcgtcccgatgtgcgtggtttccaatggcccggtcagtaagatgcagcactcgctcggacgcaccggcctgctgcgccatttcactgaccgcttgtacagcggctacgatattcagcgctggaagcccgacccggcgctgatgtttcatgcggcagaggccatgcaggtaaaagctgaaaactgtattctggtggatgactccagcgccggcgctcagtcggggattgccgccggcatggaagtgttttatttctgcgccgatccgcacaaccagccgatcgatcatcccaaagtgacgacctttaccgatctggcagagctgccggcattgtggcaggcgcgcggctgggatatcacgcgttaa

SEQ ID NO: 213040 - DNA, 720 bp, Klebsiella pneumoniae
atgaaaatgattgtgaccgaagattatgaagagatgagcctggtcgccagccatcatgttctgggctatatcacggcgccgcggcgggtgaatctggcggtgacggcggggagcacgccaaagcggatgtataagcatttgaccgccgccgtgaaaggcaaagcattctatgatcgggtgcactattacaacttcgatgagatcccttttcgcggccagtcgcgagaaggcgtcacgatatctaatttgcgccagctgttttttaccccggcgcagatcaaagaagagaacattcacaagctgacgctggacaacgccgctcagcacgatcgccagctggaagaggctggcggtctggatctgatggtgctggggctgggggccgacggccatttttgcggcaacctgccgaataccacccgctttcatgatcagacggtcgaagtgccgattcatggggaaatgattgctcttatcgctaacagcgagatgggcgggaatatctcggcagtaccagacagctatgtcaccatggggccgagaagcgtgatggcggcgaaaaatttattgctaattgtcagcggtgcggcaaaagcgcacgcgttaaagcaagtggtggaaggtccggtcagcgtgcaggtgccggcttcagtgctcaaattgcacccttcactggtgattattgccgataaagcggcggcggcggaattgcagcaataa

SEQ ID NO: 213041 - DNA, 1167 bp, Klebsiella pneumoniae
atgaaacgacatgcaatttatttcgccctggcgctggcgggcgcggcgtttaccctccaggcggcgccattacccgcgatgccggacccaagcctgccggtgagccactttatcacccaggttaacgcggataagagtatcacttaccgcttgtttgcccctgatgcccggcgggtctcgatagtgactggcgccacgccggactcctttgtctcgcacgacatgaccaaagcagcggacggagtctggacatggaaaagcgagccgatgaagcccaatctctatgaatactatttcgatgtggatggcttccgctcggtagataccggcagccgctatcagaagccgcagcgccaggtgaacaccagtttgattctggtgccgggcagtattcttgacgatcgggaggttgcgcatggcgatctgcgcaccctcacctatcactcgaaggctctgaacgccgaacgtcgtctctatgtctggacgccgccgggctatagcggaaccggcgatccgctgccggtgctctatttctatcatggctttggcgacagcggcctgtcggccatcgatcaggggcggatcccgcaaatcatggataacctgctggcggagggcaagattaagccgatgctggtggtggtcccggataccgaaaccgatatcccggaagcggtcgcggaaaacttcccgccgcaggagcggcgcaaaaccttctatccacttaatgcgcaggcggcggataaagagctcatgcaggatattattccgctgatcgatgcccgatttaacgtgcgtaaagatgccgacggtcgggcgctggcgggcctctcgcagggcggttatcaggcgctggtttccggaatgaatcatctggagagctttggctggctcgccacctttagcggcgttacgactaccacggtgccgaatgccggcgtggaagcgcagctgaagcagcctgacgcgatcaataagcagctgcgtaactttaccgtggtcgtcggggaaaaagattctgtgaccggtaaagacattgctggtctgaaaagcgagctggaaaaacagcagattaaatttgattaccaccagtatcccggcctgaaccatgaaatggacgtctggcgcccggcctacgccgagtttgtgcaaaaactgtttaaataa

SEQ ID NO: 213042 - DNA, 1635 bp, Klebsiella pneumoniae
atgatgagaaaaaacaggatcgcttcggcgatagtcttgctggcgccactttgttattcaactaatctgctagcgagccagttgacggtggaacaacggcttgagctgctggaaaaagcgctcaaagacacgcaaaaagagctcaaaaaatatcaggaccaggaaagaaaaagagaccagatttgggcctcatggtctcctcctgcggaaggtcagaagcgcaagaccgggggggcgaccgccgggccgaaaacggcggttaaaccggatgcggtgctggttaaaaatcaacaacctgtcaccgatggcgcgccagcctacagcgcgatgacgctgaaagactttagcaagttcgtgaaagatgaaattggctttagctataacggctacttccgttccggctgggggaccgcctcgcacggctcgccaaaatcatgggcgatcggttcgcttggccgcctgggcaatgaatattccggctggttcgatctgcagctgaagcagcgggtgtttcaggaaggcgataaacgcgtcgacgccatcgtgatgctcgacgggaacgtcggccagcagtattccactggctggtttggtgacaatgccggcggcgaaaactacattcaattctcggatatgtatgttaacaccaaagggttcctgccgtttgcgccggaagccgatttctgggtcggcaaacacggggcgccaaaaattgaaatccagatgctggactggaaaacgcagagaaccgatgcggcggccggcgtagggctggaaaactggcaggtgggcgccgggaaattcgatatcgcgttgattcgcgaagatgtcgatgattatgaccgttctttaagcaataagcagcaaattaacaccaacaccctggacgttcgttacaaagagattccgctgtgggataaagccagcctgatggttagcggacgctatgtcgccgccaaccaaagttcctctgagaaatataaagagggcaatgaaggttattatccgtggaaagatacctggatggctggtacctcgttaacgcagaaatttgctaacggcggctttaacgaattctctttcttactggccaataactctattgccagcagcttctcacgctatgccggatccagcccctataccacctttaatggccgctattatggcgatcataccaatggcaccgccgtgcgcttaacctcgcagggggaaacctatttacgcgatgacgttattatggcgaatgccatcgtctactcttttggtaacgacgtctatagctacgaaaccggagcccactccgattttgaatctatccgtacggttctgcgaccggcttatatctgggataaatataaccagaccggcgtcgagctggggtacttcaaacagcaaaacaaagatgttaccggcaagaaatataacgagtccggctacaagaccacgctgttccataccttcaaagtcaataccagtatgctgacctcgcgcccggaaattcgtttctatgccacctatattaaagcgaaggatattgacctggataaggccgtgaataataccaccagcatttttgaagacgggaagaacgatcagtttgccgtgggggcgcaggcggaaatctggtggtga

SEQ ID NO: 213043 - DNA, 726 bp, Klebsiella pneumoniae
atggacaacctaaatcttaacaaacatatttccggccagttcaacgctgaactggagtatatccgcacccaggtgatgaccatgggtgggctggtggaacagcagctctctgatgccatcaccgccatgcataaccaggacagcgatctggcgaaacgcgtcatcgacggcgacaagcaggtcaacatgatggaagtggctatcgatgaagcgtgcgtgcgcatcatcgccaagcgccagccgaccgccagcgacctgcgcctggtgatggcgatcatcaagactatcgctgagctggaacgcattggcgacgtggcggataaaatctgccgcaccgcgctggagaagttttcccagcagcaccagccgctgctggtgagcctcgaatcgctgggccgccacacggtgcagatgctgcatgacgtactggatgcgtttgcgcgtatggatctcgacgaagcggtacgtatctatcgcgaagataagaaagtcgaccaggagtatgaaggcatcgtgcgtcagctgatgacctacatgatggaagactcgcgcactatccccagcgtcctgaccgcgctgttctgtgcgcgctccatcgagcgtatcggcgaccgctgccagaatatctgcgaatatattttctacttcgtcaaaggtcaggatttccgtcacgttggcggcgatgagctggataaactgctcgctggcaaagatccgaaagagtaa

SEQ ID NO: 213044 - DNA, 774 bp, Klebsiella pneumoniae; identical to SEQ ID NO: 137379

SEQ ID NO: 213045 - DNA, 891 bp, Klebsiella pneumoniae
atggcgaccattgaattgcaaactaccgccgaactggcggagtcccgtcgcaagatgcaggccaaacgccgcatgaagaaccgtatcgctctggcgctgtcgatggcgaccatggcgtttggtttgttctggcttatctggatcctgatggcgacgataacccgcggtttcgacggcatgagtctggcgctgttcaccgaaatgacgccgccgccgaatacggcgggcggtggactggctaacgccctcgccggcagcggcctgctgatcctgtgggcaaccgtatttggtacgccgctgggtatcctcgccggaatttatctggcggagtatggccgcaagtcggtgctggcggaaatcatccgctttatcaacgacattctgctttccgcgccgtctatcgtggtgggtctgttcgtctacaccattgtggtggcgcagatgcagcacttctcgggctgggcgggcgttatcgcgctggcgctgctgcaggtgcctatcgttattcgtaccaccgaaaacatgctgaagctggtgccggatagcctgcgtgaagcggcctatgcgctggggacgccgaagtggaagatgatctcggcgatcaccctgaaagcctccgtctcagggattatgaccgggatcctgctggctattgcccgtatcgccggggaaacggcgccgctgctgttcaccgcgctgtccaaccagttctggagcaccgacatgatgcagccgattgccaacctgccggtgaccattttcaaatttgccatgagtccgtttgcggagtggcagcaactggcatgggccggggtattgattatcaccctgtgcgtcttgctgctgaacatcctggcgcgcgttatcttcgccaagaagaaacacggttaa

SEQ ID NO: 213046 - DNA, 960 bp, Klebsiella pneumoniae
atggctgcaaccaagcctgcatttacccctccggggaaaaagggtgacatgattttcagtgcgctggtaaaactggctgcgctgattgtgctattgatgctgggcggcatcatcgtttccctgatcatctcttcctggccgagcattcaaaagtttggctttgcctttttgtggaccaaagagtgggatgcgcctaacgagatcttcggcgcgctggtcccgatttacggaaccctggtcacctcttttatcgcgctgctgatcgccgttccggtgagcttcggcatcgcgctgtttctgacagaattgtcccccgcctggctcaagcgtccgctgggcattgcgattgagctgctggcggcaatcccgagcatcgtgtacggcatgtggggcctgtttattttcgccccgctgtttgcgacttacttccaggagccggtcggcaacgttctgtcgaccatcccgttcgtcggcgcgctgtttgccggcccggcgtttggtatcggtattctcgccgctggcgtcattctggccatcatgatcatcccttacatcgccgcggtcatgcgcgatgttttcgaacagaccccggtgatgatgaaagagtcggcctatggcatcggctgcaccacctgggaggtgatctggcgcattgtcttaccgttcaccaagaatggggtgatcggcggggtgatgctcggtctgggccgcgcgctgggtgaaaccatggcggtcacctttatcatcggcaacacctaccagctcgacagcatctcgttgtatatgccggggaacagtattacctccgcgctggctaatgagttcgccgaagcggaaaccggcctgcacgtggcggcgctgatggagctgggcctgatcctgttcgttatcacctttatcgttctggccgcgtcgaagtttatgattatgcgcctcgcgaagaatgagggggcacgctaa

SEQ ID NO: 213047 - DNA, 1041 bp, Klebsiella pneumoniae
atgaacgttatgcgtaccaccgtcgcaacagttgtcgccgcgaccttatcgatgagcgctttctctgccttcgcagcagcaagcctgactggcgcaggcgcaactttccctgcgccggtgtatgccaaatgggctgatacctatcagaaagaaaccggcaataaagtgaactaccagggtattggttcctctggtggcgttaagcagattattgccaacaccgttgatttcggtgcttctgatgctccgctggctgatgacaaactgacccaggaaggtctgttccagttccccaccgtgattggcggcgtggtactggcggttaacctgcctggcgtgaaatccggcgaactggtgctggatggcaaaaccctcggtgatatctacctgggtaaaattaaaaaatgggatgacgaagcgatcgctaagctcaacccgggcctgaagctgccgtcgcagaacatcgccgtggtccgccgcgccgatggttcaggtacctccttcgttttcaccagctacctgtccaaagtgaatgaagagtggaaatcgaaaatcggcgccggctctaccgtaaactggccaaccggtctgggcggtaaaggcaacgatggtatcgccgcctttgttcagcgtctgcctggctcgattggttacgtcgaatacgcttacgctaagcaaaacaacctggcctacaccaaactggtctctgccgacggcaagccggttagcccgactgaagacaacttcgctaacgccgcaaaaggcgttgactggagcaagtctttcgctcaggacctgaccaaccagaaaggcgagaatgcatggccgatcacctcaaccaccttcatcctggtgcataaggcgacgaacaagccggaacagaccgctgaagtgctgaagttcttcgactgggcgtataaaaacggcgggaaagaagcgaatgcgctggattacgcgacgctgccggaaagcgtggtagagcaggttcgcgcggcatggaaaaccaacgtcaaagacagcagcggtaaagcgctgtactaa

SEQ ID NO: 213048 - DNA, 1830 bp, Klebsiella pneumoniae
atgtgtggaattgttggcgcagtcgcgcagcgtgatattgctgaaatccttctcgaaggtttacgtcgtctggaataccgtggctatgactctgccggtctggcagtggtcgacagcgaaggtcatatgacccgcgtgcgtcgcctgggtaaagttcagatgctggctcaggcggtagaagagcaaccgttacacggtggtaccgggatcgcccatactcgttgggcgacgcacggcgaaccgtctgagagcaatgcgcatccgcatgtttctgaacacattgtggtggtccataacgggatcatcgaaaaccatgagccgctgcgcgccctgctgcagtctcgcggctatgtcttcgtcaccgagaccgataccgaagttattgcccatctggtgcactgggagctggaacaaggcggtaccttgcgtgaagccgtcctgcgcgctatcccgcagctgcgcggcgcttacggtacggtgatcatggatacccgtgacccgggaactctgctggcggcccgctccggtagcccgctggtaattggcctggggatgggtgaaaactttatcgcctccgaccagctggcattgctgccggttacccgccgcttcatcttcctcgaagaaggcgatatcgcggaagtgactcgccgttcggtggtgatttttgataagtccgctgcgcaagtgaagcgccaggagatcgaatccaatctgcagtatgacgctggcgataaaggtatctaccgccactatatgcagaaagagattttcgagcagccgaacgcgattaagaacaccctgaccgggcgcatcagccatggcgaagtggatctcagcgaactggggccgaacgccaatgaaatgctggctcaggttgaacatattcagatagttgcctgcgggacttcctataactccgggatggtttcccgctactggttcgaagcgttagccggcgtcccgtgcgatgtggaaatcgcctccgaattccgctatcgcaagtccgcagtgcgtcgcaatagcctgatgatcaccctctcccagtccggtgaaactgccgataccctggcggcgctgcgtctgtcgaaagagctgggctatctcggctcgctggccatctgcaacgtgccgggctcgtcgctggtgcgcgagtccgatctggcgctgatgaccaaagccggaacggaaatcggcgtggcctcgaccaaagcctttaccactcagctaaccgtgctgttgatgctggtggcgaaactggcgcgactgaaaggtcaggatgcgtctatcgagcatgatatcgtgcacggccttcaggctctgccgaaccgtatcgagcaaatgctctcccaggacaagcgtattgagcagctggcagagcgcttctctgataagcaccatgcgctgttccttggccgtggcgatcagtatccgatcgctatggaaggggcgctgaagctgaaagagatctcctacattcacgcggaagcctatgcggcgggcgagcttaagcacggcccactggcgctgattgatgcggaaatgccggtgatcgtggtggcgccgaacaacgaactgctggaaaaactgaaatccaacatcgaagaggttcgtgcccgcggcggtgaactatacgtcttcgcccacggtgaagccggcttcaacggtagcgataacatgcacatcattgagatgccgcatgtggaagagaccatcgcccctatcttctatacggttccgctgcagctgttggcttatcacgtcgcgctgatcaaaggcactgacgttgaccagccgcgtaacctggcgaaatcggtaacggttgagtaa

SEQ ID NO: 213049 - DNA, 1371 bp, Klebsiella pneumoniae
atgtcaaatagtgcgatgagcgtggttatccttgctgcaggcaaagggacccgcatgtattccgatcttcctaaggtgctgcataccctggccgggaagccaatggtgcagcatgtcattgatgccgctaacgatttaggcgcatgtgcggtacacctggtatacggccacggcggcgatctgctgcgtcagactctgcatgaagacaacctgaactgggtgctgcaggccgagcagctcggaaccgggcacgctatgcagcaggcggcgccattcttcaatgatgatgaagacatcctgatgctctatggcgacgtgccgctgatctccgttgagacgctacagcgcctgcgcgccgcgaaaccacagggtgggattggtctgttaacggtgaagctggatgacccaaccggctatggccgcattacccgtgaaaatggccaggtgacgggcatcgttgagcacaaagatgccagcgaggcccagcgccagatccaggaaatcaacaccgggatcctgatcgccggcggagcggatctaaagcgctggctggcgaaactcaccaataacaacgctcagggtgaatactacatcaccgatatcatcgccatggcgcaccaggaaggacaccagatcgtcgcagtgcatccgcagcgcctgagcgaagtcgaaggcgtcaacaaccgcctgcagcttgcgcgcctggagcgcgtctaccaggcggagcaggcggaaaagctgctgctggcgggcgtgatgctgcgcgatccggcgcgtttcgatctgcgcggtacgctgcagcacgggcgcgatgtagagatcgatactaacgttattctggaaggcaacgtggtgctgggcgatcgagtgaaaatcggcgccggctgcgtgatcaaaaacagcaccatcggcgatgactgcgaaattagcccctacagcgtggtggaagatgcccagctgcaggcggcctgcaccatcggtccatttgcccgtctgcgcccgggcgccgaactgctggcaggcgcccacgttggtaacttcgtggaaatgaaaaaagcgcgtctcgggaaaggctccaaggcgggtcatctgacctatctgggcgatgcggagattggcgataacgtcaatatcggcgcgggcaccatcacctgcaactacgatggtgcgaacaagcataaaacgattattggcgatgatgtctttgtcggctcggatacccagctggtggccccggtcacggtaggcaacggcgtcacgatcgccgccggcaccaccgtcacgcgcaatatcgccgataacgaactggtgttgagccgcgtaccgcaggtccacaaacagggctggcagcgtccggtgaagaagaaataa

SEQ ID NO: 213050 - DNA, 420 bp, Klebsiella pneumoniae; identical to SEQ ID NO: 138654

SEQ ID NO: 213051 - DNA, 1383 bp, Klebsiella pneumoniae
atggctactggaaagattgtccaggtaatcggcgccgtggtcgacgtcgagttccctcaggatgccgtaccacgcgtgtacgaagcccttgaggtacagaatggtaatgaagttctggtgctggaagttcagcagcagctgggcggcggtatcgtacgtaccatcgccatgggttcttctgatggtctgcgccgcggtctggatgtaaaagacctcgagcacccgatcgaagtcccggtaggtaaagcaacgctgggtcgtatcatgaacgtactgggtcaaccggttgacatgaaaggcgacatcggcgaagaagagcgttgggctatccaccgcgcggcaccgtcctatgaagagctgtccagctctcaggaactgctggaaaccggcatcaaagttatcgacctgatgtgtccgttcgcgaagggcggtaaagttggtctgttcggcggtgcgggtgtaggtaaaactgtaaacatgatggagctgatccgtaacatcgcgatcgagcactccggttactctgtgtttgcgggcgtaggtgagcgtactcgtgagggtaacgacttctaccacgaaatgaccgactccaacgttatcgataaagtatccctggtgtacggccagatgaacgagccgccgggaaaccgtctgcgcgttgcgctgaccggcctgaccatggctgagaaattccgtgacgaaggtcgtgacgtactgctgttcgtcgataacatctatcgttacaccctggccggtactgaagtatccgcgctgctgggtcgtatgccttcagcggtaggttatcagccgaccctggcggaagagatgggcgttctgcaggaacgtatcacctccaccaaaaccggttctatcacctccgtacaggcggtatacgtaccggcggatgacttaactgacccatccccagccactacctttgctcacttagatgcaaccgtagtactgagccgtcagatcgcatccctgggtatctacccggccgttgacccgctggattccaccagccgtcagctggatccgctggttgttggtcaggaacactacgacaccgcgcgtggcgttcagtccatcctgcagcgttatcaggaactgaaagacattatcgccatcctcggtatggacgaactgtctgaagaagacaaactggtggtagctcgcgcgcgtaagatccagcgcttcctgtcccagccgttcttcgtggcagaagtctttaccggttctccgggcaaatacgtggcgctgaaagacaccatccgtggctttaaaggcatcatggaaggcgaatacgatcacctgccagagcaggcgttctacatggtcggttccatcgacgaagccgtggaaaaagccaaaaaactttaa

SEQ ID NO: 213052 - DNA, 864 bp, Klebsiella pneumoniae
atggccggcgcaaaagagatacgtagtaagatcgcaagcgtccagaacacgcaaaagatcactaaagcgatggagatggtcgccgcttccaaaatgcgtaaatcgcaggagcgcatggcggccagccgtccttacgcagatactatgcgcaaagtgattggtcaccttgcgaacggtaatctggaatataagcacccttacctggaagaacgcgacgttaagcgcgtgggctacctggtggtgtcgaccgaccgtggtctgtgcggcggcttgaacattaacctgttcaagaaactgctggcggaaatgaaagcatggtccgataaaggcgttcagtgcgacctcgcaatgatcggctctaagggcgtttctttctttaactccgtgggcggcaacgtggttgcacaggtgaccggtatgggggataacccatccctgtccgaactgatcggcccggtaaaagtgatgttgcaggcctatgatgaaggccgtctggacaagctgtacgttgtcagcaacaaatttattaacaccatgtctcaggttccgacgatcactcagctgctgccgttaccggcatcagaagatgctgatctgaaacgtaaatcctgggattacctgtatgagcccgatccgaaagcgctgctggataccctcctgcgccgctacgtcgaatctcaggtttatcagggcgtggttgaaaacctggccagcgagcaggccgcccgtatggtggcgatgaaagccgcgaccgataatggcggcagcctgattaaagagctgcagttggtatacaacaaagctcgtcaggccagcattactcaggaactcaccgagatcgtctcgggggccgccgcggtttaa

SEQ ID NO: 213053 - DNA, 1542 bp, Klebsiella pneumoniae
atgcaactgaattccaccgaaatcagcgaactgatcaagcagcgcattgctcagttcaatgttgtgagcgaagctcataacgaaggtactattgtttctgtaagtgacggtgttatccgcatccacggccttgccgaatgtatgcagggcgagatgatctccctgccgggtaaccgttacgctatcgcactgaacctggagcgcgactccgtaggtgcggtggtaatgggtccgtacgctgacctcgccgaaggcatgaaggtgaaatgtactggccgtatcctggaagttccggtaggccgtggcctgctgggccgcgtggtgaacaccctgggcgcgccaattgatggtaaaggtccgctggaaaacgacggtttctccgccgttgaagcgatcgcgccgggcgtaatcgaacgtcagtccgtcgatcagccggtacagaccggttacaaatccgttgacgccatgatcccaatcggtcgtggtcagcgtgaactgatcatcggcgaccgtcagaccggtaaaactgcgctggctatcgatgccatcatcaaccagcgtgattccggcatcaagtgcgtctatgtcgctatcggtcagaaagcgtccaccatctctaacgtggtgcgtaaactggaagagcacggcgcgctggctaacaccatcgtagtggtagcgactgcatctgaatctgctgcactgcaatacctggcgccatacgctggttgcgcaatgggcgaatacttccgcgaccgcggtgaagatgcgctgatcgtttacgatgatctgtctaaacaggctgttgcttatcgccagatctccctgctgctccgtcgtccgcctggacgtgaagcgttcccgggcgacgtattctacctccactctcgtctgctggagcgtgctgcgcgtgttaacgccgaatacgttgaagccttcaccaaaggtgaagtgaaagggaaaaccggttctctgactgcgctgccgattatcgaaacgcaggcgggtgacgtttccgcattcgttccgaccaacgtaatctctattaccgatggtcagatcttcctggaaaccaacctgtttaacgccggtattcgtcctgcggttaacccgggtatctccgtatcccgtgttggtggtgcagcgcagaccaagatcatgaagaaactgtccggtggtatccgtaccgcgctggcgcagtatcgtgaactggcggcgttctcccagtttgcatccgaccttgacgatgcaacccgcaaacagctggaccacggtcagaaagtgaccgagctgctgaaacagaaacagtatgcgccgatgtccgtcgcgcagcagtctctggttctgttcgcagcagaacgtggttacctggctgatgtagaactggcgaaaatcggtagcttcgaagccgctctgctggcttacgtcgaccgtgattacgctccgctgatgcaagagattaaccagtccggtggctataacgacgaaatcgaaggcaagctgaaaggcatcctcgattccttcaaagcaacccagtcctggtaa

SEQ ID NO: 213054 - DNA, 534 bp, Klebsiella pneumoniae
atgtctgaatttgtaacggtagctcgcccctacgccaaagcagcttttgactttgccgtcgaacacaacagtgttgaacgctggcaggatatgctggcgtttgccgccgaagtgaccaaaaacgaccaaatggcagagcttctctccggtgctttggcgccggaaacgctctcagaagcgtttatcgctatctgcggcgagcaactcgacgaaaatggccagaacctgattaaggtgatggcggaaaataatcgtctgaaggtgctcccggacgttcttgagcaattcattcacctgcgcgcggccagtgaggccatcgcagaggtagaagtaatatctgccaaccaactgagtgatgaacagcttgccaggatcgtcagcgcgatggaaaaacgtctgtcacgcaaagttaagctgaattgcaaaatcgataagtctgttatggcaggtattatcatccgtgcgggtgatatggtcattgatggcagcgtacgcggccgtcttgagcgccttgcagacgtcttgcagtcttaa

SEQ ID NO: 213055 - DNA, 471 bp, Klebsiella pneumoniae
gtgaacatgaacgcaacaatcctcggccaggccatcgcgtttgttatcttcgtatggttctgcatgaaatacgtatggccgcctttaatggctgccatcgaaaaacgccagaaagagatttctgacggtttagcttctgcagaacgcgctaagaaagatttggaccttgcacaggccaacgcgaccgaccagctgaaaaaagcgaaagcggaagcccaggtaatcattgagcaggcgaacaagcgccgctctcagattctggacgaagctaaagctgaagcagaacaggaacgcaccaaaatcgttgcacaagcgcaggctgaaattgatgctgagcgtaaacgtgcacgcgaggagctgcgtaagcaggtcgctatcctggctgttgctggcgccgagaagatcatcgaacgttccgtggatgaagctgctaacagcgacatcgtggataaacttgtcgctgaactgtaa

SEQ ID NO: 213056 - DNA, 240 bp, Klebsiella pneumoniae
atggaaaacctgaatatggatctgctgtacatggctgccgctgtgatgatgggtctggcggcaatcggtgctgcgatcggtatcggcatcctcggaggtaaattcctggaaggcgcagcgcgtcagccggatctgatccctctgctgcgtactcagttctttatcgttatgggtctggtggatgctatcccgatgatcgctgtaggtctgggtctgtacgtgatgttcgccgtcgcgtag

SEQ ID NO: 213057 - DNA, 816 bp, Klebsiella pneumoniae
atggcttcagaaaatatgacgccgcaggattacataggacaccatctgaacaaccttcagttggacctgcgtacattctcgctggtggatccgcacaaccacacagccaccttctggacgctcaacattgactccatgttcttctcggtggttctcggtctgctgttccttgccatgttccgtagcgttgctaagaaagcgaccagcggcgtaccagggaaattccaaaccttcatcgaaatgatcatcggcttcgtccatggcagcgtcaaagacatgtaccatggcaagagcaaggttatcgcgccgctggcgctgaccgtgttcgtctgggtcttcctgatgaacctgatggacctgctgccaatcgacctgcttccttatatcggcgaacacattttcggcctgccagcactgcgcgtggttccgtctgccgacgtgaacatcaccctgtcgatggcgcttggcgtgttcatcctgattattttctacagcatcaaaatgaaaggcgttggtgggttcgttaaagaactgaccatgcagccgttcaatcactgggcgttcattcctgtcaacttaatccttgaaggggtaagcctgctgtccaaaccggtctctctcggtctgcgactgttcggcaacatgtatgccggtgagctgattttcattctgattgctggtctgttgccgtggtggtcacagtgggttctgaatgtgccttgggccattttccacatcctgattattacgctgcaagccttcatcttcatggttctgacgattgtctatctgtcgatggcatctgaagagcattga

SEQ ID NO: 213058 - DNA, 381 bp, Klebsiella pneumoniae; identical to SEQ ID NO: 139053

SEQ ID NO: 213059 - DNA, 624 bp, Klebsiella pneumoniae
gtgctcaacaaactttctcgtctgctggatgaagcgggtatttcgctcaccgatcaccagaaaaatcagctggtggcttacgtcggactgctcgataagtggaacaaagcctataacctgacctccgttcgcgatccgaatgagatgctggtgcgtcatattctcgacagcatcatcgtggcgccttatctgcagggctcgcgctttatcgatgttggtacgggcccggggttgccggggatcccgttggccatcgtatgtccggagtcacatttcaccctgctggacagccttggcaagcgcgtgcgcttcctgcgtcaggtgcagcacgagctgaagctggataacgtcaccccggtgcagagccgcgtggaagccttcccggccgagccgccgtttgatggcgtgataagccgcgctttcgcatcgcttaatgatatggtgagctggtgccatcatctgccggcagcgaatggtcacttctatgcgctcaaagggttagcgcaaaaagaagaaatggaaagtctgccggaagggtatgacattgtcgaggtgattgagctgcatgttcctcggttggaaggggagcggcacctggtggtgattaagccaaaatcgagttaa

SEQ ID NO: 213060 - DNA, 1890 bp, Klebsiella pneumoniae
atgttttatcaggatccttttgacgtcattatcattggcgggggtcatgcaggcactgaggccgcaatggccgcagcgcgtatgggtcaacaaaccctgcttttgacacacaatatcgacacgctggggcaaatgagttgcaacccggcgattggcggcattgggaaaggacacctggtaaaagaagtggatgcgctcggcggtttgatggccaaagcgatcgatcaggcgggtattcagtttaggatactaaacgccagcaaaggaccggcagtgcgcgccacccgcgcccaggctgaccgcgtgctttatcgtcaggcagtacgtaccgcgctggagaaccagccgaacctgatgatcttccagcaggcggttgaagatctgattgtcgaaaacgatcgcgtcgtgggcgccgtcacccagatgggcctcaaattccgcgctaaagcggtagtgctgactgtcgggaccttccttgacggcaaaatccatattggtctggacaactacagcggcggccgcgccggcgatccgccgtctatcccgctgtctcgtcgtctgcgtgaattgcctctgcgcgtaagtcgtctgaaaaccggtactccgccgcgtattgacgcgcgcaccatcgatttcagcgtgctggcgcagcagcatggcgataacccgatgccggtcttctcgttcatgggatccgcggatcagcatccgcgccaggtaccgtgctatatcacccacactaacgagaaaacccacgatgtgatccgcaataacctcgatcgcagtcctatgtacgccggagtgatcgaagggatcggacctcgctattgcccgtcgatcgaagacaaagtcatgcgctttgccgatcgcaaccagcatcagatcttcctcgagccggaaggactgacctcaaacgaaatttatccgaacggtatatccaccagcctgccctttgatgtgcaaatgcaaatcgtccgctcgatgcaggggatggagaatgcgcggatcgtccgtccaggctacgctattgagtacgatttcttcgacccgcgcgatctgaagccaacgcttgagagcaaatttattcagggtctgttcttcgccggccaaatcaacggtaccaccggttatgaagaggcggcggctcaggggctgctggccggacttaacgccgcccgcttctctgcggaaaaagagggctgggcgccgcgtcgcgatcaggcttacctcggcgtgctggtagatgacctctgcaccctgggtaccaaagaaccgtaccgcatgtttacttcccgcgctgaatatcgtctgatgctgcgcgaagacaacgccgatttgcgtttgaccgaacaggggcgcgagctgggtctggtagatgacgaacgctgggcgcgctacaacgagaagctggaaagcatcgaacgtgaacgccagcgtctgaaatccacctgggtgaatccgcaggcagagagcgccaacgaagtgaacgctcacctgaccgcgccgttgtcgcgtgaagccagcggcgaagatctgctgcgtcgtccggaaatgacctacgaacagctggttcaactctcgccattcaccccgggactggaagatcgtcaggcggctgaacaggtagagatccaggtgaagtatgagggctatatcgcgcgccagcaggatgagattgagaaacaacagcgcaatgagaataccttgctgccagcgaccctcgactaccgccaggtcactgggctgtctaacgaggtgattgccaaactgaacgaccataaaccgtcgtcgatagggcaggcgtcacgtatctccgggatcaccccggcggcgatctctattttgctggtttggctgaaaaagcaggggatgctgcgccgcagcgcctga

SEQ ID NO: 213061 - DNA, 441 bp, Klebsiella pneumoniae
atggcagacattacacttatcagcggcagcaccctgggcagtgcggaatatgtagcagagcatctggcggaaaagctggaagaagccggctatagcactgaaatccagcacggtccgctggtggacgatctgcaggcgcaagggatctggttaattatctcttccacccatggcgccggcgacgttcccgacaacctggttcccttctatgacgcgctgcaggagaagcaggccgatctttccgccgtgcgctttggcgctatagggatcggcagccgcgaatacgacaccttttgcggcgcgatcgataaattagaagcggcgctgaaggcctgcggggcaaaacagatcggtgagacgctgaagatcaacgtccttgaacacgaaattccggaggatccagcggaaatctggctgggatcctggaaaaatttgctctga

SEQ ID NO: 213062 - DNA, 459 bp, Klebsiella pneumoniae; identical to SEQ ID NO: 139049

SEQ ID NO: 213063 - DNA, 993 bp, Klebsiella pneumoniae
atgaaaaccgcatatatcgcaaaacaacgccagatcagtttcgttaaatcccacttttcccgtcagctggaagagaagcttggcctgattgaagtccaggcgccaatcttaagccgcgtgggcgatgggacgcaggataacttgtccggctgcgagaaagcggttcaggtaaaagtgaaaacactgcccgacgcccagttcgaagtggttcattcgctggcgaagtggaagcgtcaaaccctgggacaacacgacttcagcgcgggcgaagggctgtacacgcacatgaaagcccttcgccccgatgaagaccgtctgacgcctatccattccgtctatgttgaccagtgggactgggagcgcgtgatgggggatgaagagcgtcacgtcggcaccctgaaggcaaccgtcgaggcgatctacgccgggatcaaagccaccgagctggcggtcagccaggagtttggcctgacgccgttcctgccggaacagatccattttgttcacagccaggagctgctgagccgctatccggagcttgatgccaaaggtcgtgagcgggctattgccaaagagctgggcgccgtcttcttaattggtatcggcggcaaactagctgatggcaagcgccacgacgtgcgtgcgccggattatgatgactggagtactgaggtttctgaaggttttgccggcctgaacggcgatatcctggtgtggaacccggtgctggaggatgcgttcgagatctcctcgatggggatccgcgttgacgccgaggcgctaaagcgccagctggcgctgaccggcgatgaagatcgcctgaaactggagtggcaccaggcgctgctgcgcggcgagatgccgcagactatcggcggcggcattggccagtctcgtttgacgatgctgttgctgcagcttgaccatatcggtcaggtgcagtgcggcgtatggccggcgcaggttcgcgaaagcgtttccgcgctgctgtaa

SEQ ID NO: 213064 - DNA, 1449 bp, Klebsiella pneumoniae
atgacgctcgatatgctgaatgtcatgctggcagtcagcgaagagggaatgatcgaggagatgctgctggcgctgttggcctctcctcaactggcggtgttctttgaaaaatttccccgcctgaaaaacatcatcgcggcggatattccgcgctggcgggaagccgttcgcgcccgcttaaaagaagttaacatcccgccggatctggacgccgaagtgcaaacctatcagcaggctcagctgctctctacctcgcagtttatcgtccagctcccgcaaattctcggcaaactgcaccagctccagtccccttttgccgcccaggcgcagaagctggtggatgacaatgccacctttaccccggcgctgcatacgctgtttttacagcgctggcgcctgagcctggtggtgcaagccaccagccttaaccagcagctgctggacgaggagcgcgaccagttgctcagtgaggtccaggaacgaatgacgctcagcggtcagctcgatccggtgctggcggaaaatgataccgccgccggacgcctgtgggatatgagcgccggcgaactcaaacgaggcgactaccagctgatcgtgcgctatggcgattttcttaaccagcaaccggagctgctgcagctggcggaacagctggggcgttcaagggaagcgaaatccgtgccgaagaaagatgcgccgatggaaaccttccgcagcctggtacgcgagccggcaacggtgcctgaacaggtcgacggcctccagcagagcgacgacattctacgcctgctgccgccggagctggcgacgcttggcatcacggagctggagtttgaattttatcgcaagctggtggagaaacagctgctcacctaccggctacacggcgatgcctggcgcgagaaaattaccgaacgcccggtaacgcggcaggattttgatgagcaaccgcgcgggccgttcattgtctgcgtcgatacgtcaggatcgatgggcggttttaacgaacagtgcgctaaggccttttgtctggccctgatgcgcatcgcgctggccgataaccgtcgctgcttcattatgctgttttccagcgaagtagtgcattacgagttgaccagcgagagcggactggagcaggcgatccgtttcctgagccagcgttttcgcggcggcaccgatctggccagctgttttcgcgccattattgaacgtttgcaaaacccgcagtgggtggatgcggatgccgtggtgatctccgactttattgcccaacggttgccggatgaggtgattgctcaggtgggggagttacagcgtaagcatcagcaccgttttcacgcggtggcgatgtcggttcacggcaaacccggcatcatgcgcatcttcgatcatatctggcgctttgacaccgggctgcgtagccgcctgctgcgacgctggcggcgctaa

SEQ ID NO: 213065 - DNA, 1500 bp, Klebsiella pneumoniae
atggctcaaacacatttactggctgaaagaatttcccggctcagcgcggcactcgaaaaaggactctttgaacgcagccacgcgatacgcctctgcctgctggcggcgctcagcggcgagagcgtttttttgcttggtccaccggggatcgccaaaagcctgattgcccgccgcctcaaattcgccttccagcaggcgcgcgcttttgaatacctgatgacccgcttctccaccccggaagaggtttttgggccactgtccattcaggcgctgaaagatgaaggccgttacgaacgtttaaccgccggctacctgccggaagcggaaatcgtgtttctcgatgaaatatggaaagcaggtccggctatcctcaacaccctactgacggcgattaacgaacgtcacttccgcaatggcgcgcatgaagagaaaatcccaatgcgcctgctggtggccgcgtcgaacgaactcccggaagccgacagcagcctggaagcgctgtatgaccgaatgctgatccgtctatggcttgataaagtgcaggataaaggtaatttccgttcgatgctggtcagccagcaggatgaaaacagcaatccagtgcccagcgcgctgcaggtgagcgacgaggaatttacccaatggcagcagcagatcggcaatattaaactgccggacgcggtgtttgagctgatattccagctccgccagcagctggacgccctgccaaatgccccctacgtctcggatcgccgctggaaaaaggctattcgcctgctgcaggccagcgccttcttcagcggccgcgacagcatcgcgccgattgacctaatcctgctgaaagattgtctgtggcacaacgtcgaaagtatgaacctgatgtcgcagcagctggaaacgctcatgacctgtcacgcctggcaacagcaggcgatgctgacgcggttgggggcgattgtgcagcgacgcattcagatccaacaacagcaaagcgacaaaacggcgctgaaggtcacccgccttggcgggatgtttagccgcaaaccgcactatgaactgccggcggagatccaggggaccaccctgacgctgctgctgcagcagccgctcaaacttcacgatatggaagtgatccacattacttttgaacgcgaggcgttagccaactggctggaaaagggcggcgagatccgcggtaagctcaacgggatcggctttgctcaactactcaatatggatgtcgacaccagccagcatctggtcgtccgcgatgtgagcctgcagggctcacgcctcgcgctgcccggcagcgcagcgcaggagaatatgccggcggaaattcgccagcagctggaagcgctggatgatgagtggcaccagcaacacaaccgcttcagcgagcagcaaaagtgcctgtttatcccggtcgaatggctgggaagaatcgaagccagcctgcaggacgtcggcgcgcagattaaacaggcgaagcagccatga

SEQ ID NO: 213066 - DNA, 1869 bp, Klebsiella pneumoniae
atgagcactgataataaacaatcgttgccggcgttaacgctggcggccatcggcgtggtgtacggcgatatcggtaccagtccactgtataccctgcgcgaatgcctgtcaggtcagtttggctttggcgtagagcgcgatgccgtttttggctttttgtcgctgattttctggctgttaatctttaccgtatcgattaaatacatcaccttcgtgatgcgggcggataacgccggggaaggcgggatcttaacgctgatgtcgctggccggacgtaatacttcggccagaatgacctccgtgctggtgatcctcggccttatcggcggcagtttcttctatggcgaagtggtgattaccccggcgatttcggtaatgtcggcgatagaggggttagaaattatcgccccgcagctggatacctggattgtccctatctccattatcgtgctcaccctgctgtttgtgatccagaagcacgggactggcatggtcggcaagctgtttgcgccgattatgctgatctggttcctgttgctggcggtgctgggcgcgcgaagcatttacgctaatccggaagttctgcaggcgctgaacccctactgggctgtgcactttttcctgcaatacaagaccgtttcctttattgcgcttggcgcggtggtgctgtcgattaccggggtggaagcgctgtacgccgatatgggccacttcggcaaactgccgatccgcgttgcctggttctccgtcgtgctgccctcgttggtgctgaactattttggccagggcgcgctgctgctgaagcacccggaagcgattaaaaacccgttcttcctgctggcgcctgagtgggcgctgatcccgatgctgatcatcgccacgctggcgacggttatcgcctcccaggcagtgatttccggggtcttctccctgacccgtcaggcagtgcgtctgggctatctgtcgccgatgcgcattatccatacctcggaaatggagtccgggcagatttacattccgttcattaactggctgctgtacgtttctgtggtcatcgttatcgtcagctttgagcattcgtctaacctggcggcggcgtatggtatcgccgtaacgggcaccatggtgctgacctccattctgtcggcgaccgtggcgcgcaaaaactggcactggaacaagctgtttgtcggtctgatgctggtggccttcctgtgcattgatattccgctgttctcggcgaacctcgataagattgtctccggcggctggctaccgttgtccctggggatggtgatgtttacggtgatgacgacctggaagagcgagcgtttccgcctgctgcgccggatgcacgagcatggcaactcgctggaagcgatgatctcttcgctggagaagtcaccgccagtgcgtgtgccgggtactgcggtgtatatgtcccgcgccctgaacgtgatcccgtttgccctgctgcataacctgaagcacaacaaggtgctgcatgagcgagtgatcctcctgaccctgcgtaccgaagatgcgccttacgtgcataacgttcgccgggtgcagattgagcagctgtcaccgtctttctggcgggtggtggccagctacggctggcgggaaacgcctaacgttgaagaggtgttccaccgctgtggcctggaaggactcagctgccggatgatggagacctcgttctttatgtcgcatgagtcgctgattatcggcaaacggccatggtatctgcgcctgcgcggcaagctttatctgctgctgcagcgtaacgccctgcgggcgccggatcagtttgagatcccgccaaaccgggttatcgagctcggtacccaggtcgaaatctga

SEQ ID NO: 213067 - DNA, 420 bp, Klebsiella pneumoniae
atgaaaaaaggcaccgtacttaacgctgatatttccgcggtcatttcccgcctgggccacaccgatacgctggtggtctgcgatgccggattaccggttccccgcagcagcacgcgcattgatatggcgctgactcagggcgtaccttcatttatgcaggtgctggaagtggtgacgacggaaatgcaggttgaagcggctgtcatcgcggaagagattaaaacccataatccgcagctccacgcgacgttgctcactcacctcgagcagctgcagcagcaccagggaaataccattgaaattcgttacaccagccatgagcagttcaaaaaacaaaccgcagacagtcaggcggtaattcgcagcggggagtgttccccgtttgcgaatatcattctctgtgccggcgtcacgttctga

SEQ ID NO: 213068 - DNA, 1506 bp, Klebsiella pneumoniae
atggaagccttattgcaactgaaagggatcgacaaagcgttccctggcgtcaaggcgctctccggcgcggcgctgaatgtctatgccggccgggtgatggcgctggtaggggaaaatggcgccggcaaatccactatgatgaaggtgttgaccgggatctacacccgtgatgccggctctttgctgtggttaggcaaagagacgacctttaacggcccaaaatcctcccaggaagccgggatcggcattatccatcaggaactgaacctgatccctcagttgacgatcgccgagaacatcttccttggccgcgagttcgttaaccgttttggcaaaatcgactggaagcagatgtatgccgaagccgacaagctgttggcaaagctgaatctccgctttaccagccagaaactggtgggcgatctatcgattggcgatcagcaaatggtggagatcgccaaagtgctgagcttcgaatcgaaagtcatcattatggatgaaccgaccgatgcgctgaccgataccgaaaccgaatcgctgttccgcgtcatccgcgaactgaagtcgcaggggcgcggtatcgtctatatctcccaccgtatgaaagagatcttcgagatttgcgacgacgtgacggtctttcgtgacgggcagtttatcgccgagcgcgaggtctcgtcgctggatgaggaccgacttatcgagatgatggtcggccgtaagctggaagaccaatatccacacctcgataaggcgcccggcgcggtgcgcctgaaggtcgacaacctctgcggcccgggggtggataacgtgacctttaccctgcgccagggggagatcctcggcgttgccgggctgatgggcgccgggcggaccgaactgatgaaagtgctgtacggcgcgttgccgcgcagcagcggttccgtgacgctcgatggccgcgaagtggtgacccgttcgccgcaggatggtctggcgaacggcattgtctatatctccgaagaccgtaagcgcgatggtctggttctcgggatgtcggtaaaagaaaacatgtccctgacggcgctgcgctatttcagccgggcgggcggtagtcttaagcataaagatgaacagcaggcggtgagtgatttcatccgcctgtttaacgtgaaaacgccgtccatggagcaggcgatcggcctgctctccggcggcaaccagcaaaaggtcgccatcgcccgcgggctgatgacccggccgaaggtgctgatcctcgatgaaccgacccgcggcgtcgacgtcggggcgaagaaagagatctaccagctcatcaaccagttcaaagccgacggcctgagcatcattctggtctcctccgagatgccggaagtgttgggcatgagcgatcgcatcatagtgatgcacgaagggcatctcggcggtgaattcacacgcgagcaggccacccaggaagtattgatggctgccgctgtgggcaagcttaaccgtgtgaatcaggagtaa

SEQ ID NO: 213069 - DNA, 966 bp, Klebsiella pneumoniae
atgacaacccaggctgtttctggtcgccgctatttcacaaaagcgtggctgatggagcaaaaatcgctgattgccctgctggtgctgatcgcggtggtatcgaccatgagccccaacttttttaccgtcaataacctgttcaatattctgcagcaaacctccgttaacgccattatggcggtagggatgacgctggtcatactgacctcggggatcgatctgtccgtcggctccctgctggcgctcaccggtgcggtggcagcgtcgatcgttggcattgaggttaatgcgctggtggcggtcgcggctgccctcgcattaggtgcggcgatcggcgcagtcaccggggtgattgtagcgagaggccgcgtgcaggccttcatcgccaccctggtgatgatgctgctgctgcgcggcgtaaccatggtgtacaccaacggcagcccgatcaataccggctttagcgataatgccgatctgttcggctggtttggcatcgggcgtccgctggggatcccgacgccggtatggatcatggcgattgtcttcctggcggcctggtacatgctgcaccatactcgcctgggccgttatatttatgccctgggcggtaatgaagcggcgacgcgtctgtccgggattagcgtcaataaagttaaaattatcgtttacgccttgtgcggaatgctggcttcgctggccgggatcatcgaagtggcgcgtctctcctccgcgcagccgacggcggggacgggctatgagctggacgccattgcggcggtggtgctcggcggcaccagcctcgctggtggcaaaggacgcatcgtcggcacgctgattggtgcgctgatccttggcttcctgaataatggtcttaatcttttaggcgtttcttcctattaccagatgatcgttaaagcggtggtgattttgctggcggtactggtagataacaaaaagcagtaa

SEQ ID NO: 213070 - DNA, 891 bp, Klebsiella pneumoniae
atgaatatgaaaaaactggcgaccctggtctctgctgttgcgctaagtgcgaccgttagcgcgaacgcgatggccaaagacaccatcgctctggttatctctaccctcaacaacccgttcttcgtgtcgctgaaagacggcgcgcaaaaagaagctgacaagctgggctacaacctggtggtgctggattcccagaacaacccggcgaaagagctggcgaacgtccaggatttaacggtgcgcggcaccaagctgctgctgatcaaccccaccgactctgatgccgtcggcaacgccgtgaagatggcgaaccaggcgaaaatcccggtcatcactctcgaccgtcaggcgacaaaaggcgatgttgtgagccatatcgcctctgacaacgtgcagggtgggaaaatggctggcgattacatcgcgaaaaaagtgggtgaaagtgcaaaagtcattgagctgcagggcattgccggaacttctgcggctcgcgagcgtggcgaaggctttaaacaggccgtggcggcgcacaaattcaacgtcctggccagccagccggccgatttcgaccgcaccaaaggccttaacgtgatgcagaacctgctgaccgcacatcctgacgtccaggcagtgttcgcgcaaaatgatgaaatggcgctgggcgccctgcgcgcgctgcagaccgcaggcaagtccgatgtgatggtggttggatttgacggcactccggatggcgaaaaagcagtaaacagtggcaaactggcggcgaccgtcgcacagttgccggagcagatcggcgcgaaaggcgttgagactgctgataaggtactgaagggcgaaaaagtggaagctaactacccggttgagctgaagctggtcgttaagcagtaa

SEQ ID NO: 213071 - DNA, 933 bp, Klebsiella pneumoniae
atgatgaaagctgcaggcaaacttgtcgtccttggcagtatcaatgccgatcacattcttaaccttgacgctttcccgacgccgggcgaaaccgtcaccggccaccattatcaggtggcgttcggtggaaaaggggccaaccaggcggtggccgccgggcgcagcggagcggatatcgcgtttatcgcctgcaccggcgatgacgatatcggtgaacgcatccgtcgtcagctggcgagcgataaaatcgacgtggcccccgtgcgcgcggttgccggggaagcgaccggggtggcgttaattttcgttaacgccgaaggtgagaatgtcatcggtattcatgccggcgccaatgcggcgctttccgtctcccaggttgaggcggaaaaagagcgtatcgccagcgcacaggcgttgttgatgcagctggagtcgccgctggagagcgtcatagcggcggcgaaaatcgcccatcaccatcacaccaccgtggtgctgaaccccgcgccagcgcgtgaactaccggatgaactgctggcgctggtggatattattacccctaacgaaaccgaagcggaaaagctgaccggtattcgggttgagagtgacgaagatgcggcaaaagccgccaacgtgctgcatgccaaaggcattggtacggtgatgatcaccctcggcagccgcggcgtctggctcagtgccgaaggcgaaagccgccggatcctagggtttcgcgtacaggccattgatactatcgcggccggtgatacctttaacggcgcgctggtgaccgcgctgctggaagggaccgccctgccggaggcgattcgctttgcgcatgccgcagcggcgatcgccgtaacccgcaaaggtgctcagccgtccgtgccttggcgcacagagatcgatgaatttttagcgcaacaggggtaa

SEQ ID NO: 213072 - DNA, 984 bp, Klebsiella pneumoniae
atgaaagatgtggcccgcatcgcgggcgtttccacatcgacggtgtcacacgtcatcaataaggaccgctttgtcagcgaggcgattaccgccaaagttgacgctgcgatcaaaagcctcaactacgccccctctgcgctggcgcgtagcctcaagctcaatcaaacccgtaccatcggcatgctgatcaccgccagtaccaatccgttttattcggagctggtgcggggcgtggagcgtagctgctttgagcggggttatagcctcgtgctctgcaataccgaaggtgatgagcagcgaatgaatcgtaatctggagacgctaatgcaaaaacgcgtcgatggattactcctgctgtgcacggagacccatcagccctccccggaaatcatgcagcgctatccgtcggtaccgacggttatgatggactgggccccctttgatggcgatagcgatctgattcaggataactcgctgctcggcggcgatatggcgacccagtatctgattgaccaggggcattcacgcattgcctgtattgccggcccgctggataaaaccccggcgcgcctgcgtcttgaaggctatcatgccgcgatggcgcgctgcggcctgccggttgccgaaggatatgtggtgaccagtgattttgagtttggcggcgggtttagcgcgatgcagcagctgctggcgttgccgcagcgtccgcaggcggtgtttgtcggtaacgatgcgatggcggttggcgcttatcaggcgttataccaggccgggctgctgattccgcaggatatggcgctggtgggctacgatgatattgagctggcacgttatatgacgccgccattgaccaccattcaccagccaaaggatgagctgggggaactggccatcgacgtactgatccatcgcatggccgatccgcagcaaaaacagcagcgcgttcagttaacgccggagctggtggttcgcggttccgcttag

SEQ ID NO: 213073 - DNA, 1398 bp, Klebsiella pneumoniae
atgagcggaaaaaaagggcgcagcatggctggcctgccgtggatcgcggcgatggccttctttatgcaggcgctggatgccaccattcttaacaccgccctcccggctatcgcccacagtcttaatcgttctcccttagcgatgcagtcggccattatcagctatacgctgacggtggcgatgctgatcccggtcagcggctggctggccgatcgcttcggcacgcgccgggtctttatcatcgccgttagcctgttcaccctcggttccctcgcctgcgccctctccagttccttaacggaactggtcatttttcgcgtaattcaggggatcggtggggcgatgatgatgccggtggcgaggctggccctgctgcgtgcctacccccgcagcgaactgttgccggtcctgaactttgtcaccatgccgggattggtggggccgattctgggcccggtactcggcggggtatttgttacctgggccagctggcattggattttcctgataaacattccgatcggcgtaattggcattctgtacgcccgtaaatacatgccaaatttcacaacgccgcgccgacgcttcgatataggcggttttctgttatttggcttaagtctggtgttattttccagcggtattgaactgtttggggaaaaaatcgtggcgacatggcaggcgctggccgtgattgccgtcagtctgttactgctcgtggcctatgtgcgtcacgcgcgtcgccatccgacgccgcttatctcgctctctttatttaagacccatacgttctcggtcggcattgccggcaacctcgccacgcggttaggtaccggctgcgtaccgtttctgatgccgctgatgctgcaggttggtttcggctatccggccattatcgccggctgtatgatcgcccccaccgctatcggctcgattattgcgaaatccaccgttacccaggtgctgcgctggtttggctatcgtaagaccctggtggggatcaccgtgtttattggccttatgatcgcccagttctcgctgcagtcgccagagatgccgctgtggatgcttcttctgccgctgttcgtgctggggatggcgatgtccacgcagtttaccgccatgaataccattaccctggccgatctgaccgatgataatgccagcagcggcaacagcctgctggccgtcacccagcagctttccattagtctcggggtggccatcagcgctgcggtgctacgcttctatgaaggttttgataatgcaagcacggtacagcagtttcactacacctttataaccatgggcgtgataaccattatatcggcgctgatgtttatgctgttaagagcgaaggatggccgcaacctgattagcgagcggcataaacgctaa

SEQ ID NO: 213074 - DNA, 702 bp, Klebsiella pneumoniae
atgtctttaagcgcacagcaactggcggcacaaaagaacatctcctgggtactggccgaaaagctcgcccaaaaaatactgactggcgaatatcagccggaaagcattcttcccggcgaaatggagttgggggagcagttcggcgtaagccgtaccgccgtccgcgaagcggtgaagacgcttactgcaaaaggcatgctgctgccccgccctcgcattggcacccgggtgatgccgcgcagcagctggaatttccttgataaggaactgctctcctggtggctaacagaagataacttcgaagaggtggtaagccactttctcgtcatgcgcagcagcctggagccacaggcctgctttctcgccgccgccaacggcaccgccgggcaaaaagcgcagctcaatacattaatggaagagatgattgctctgaaacgccattttcagcgcgaacgctggatagaagtcgatatggcctggcatgagcatatctatgaaatgagcggtaatcctttcctcagctctttcgcctcgctgtttcattcggtctaccacacctacttcacgtcgattacgcaaaatgaagtggtgaagctcgatctccaccaggcgattgtcgatgccattcttaacagtgatgcgccgggggcgttgctcgcctgccaggcattgttgaacgccccacaccacgtaaatcaataa

SEQ ID NO: 213075 - DNA, 507 bp, Klebsiella pneumoniae
atgatcccattactggcgatcgccgcatggagcggtaccggaaaaacaacattattaaagcgtcttatccctgagctttgcgctctaggattacgcccgggactgataaagcacacccatcatgatatggacgtggataagccgggcaaagatagctatgaactgcgtaaggcgggcgctgcgcaaactattgtcgccagcgaacagcggtgggcattgatgaccgagacgccagagaagccggaattagatctcacgtggctggtcagtcgaatggatgccagcaaactggacctggttttagtggaggggtttaaacatgaacccgtgccgaagatcctgctttttcggcaaaacagcggccatcgtgtagaagagctggtaattgatgagcataccatcgccgtggccagcgatgtatcgatcgcgacctcacttccgctgctggatttaaatgatgtaccacagatcgcgacatttattgtgagttggttagagaggcaatag

SEQ ID NO: 213076 - DNA, 582 bp, Klebsiella pneumoniae; identical to SEQ ID NO: 137280

SEQ ID NO: 213077 - DNA, 270 bp, Klebsiella pneumoniae; identical to SEQ ID NO: 137279

SEQ ID NO: 213078 - DNA, 987 bp, Klebsiella pneumoniae
atgcacgataaggcttttacttttcagacgcttcgcccggataccattatcgatgggttattcgatctgggtatgcgggtggactccggtctcaccccgctaaacagctatgagaaccgcgtttatcagttccaggacgaagagcgccatcgctatgtggtaaagttctatcgtcctgagcgctggtccgcagaacagatccttgaagaacaccagtttgcgcttcagcttgtagaagatgaagtgcccgttgctgcgccgctcttatttaatgacagcacgcttcatcagcatcagggattctactttgccgttttcccaagccttggcggtcgtcagttcgaagcggataaccttgatcagatggaatgggttggccgctatctggggcgcctgcaccagacgggctgcaaacagcgctttactgcccgcccggaaattggcgtgcaggagtacctgctggaaccgcgtcaggtgtttgagcaggcgacgctgatcccctctggcctgaaggccgatttcctgaaggcgaccgataaactcattgctgccgtcatggagcaatggcacggccgcgggaacacgttgcgcctgcacggtgactgccatgccggtaatatcctctggcgcgacggaccactgtttgtcgacttagacgatgcgcgcaccggcccggcgattcaggatctgtggatgctgctcaacggcgataaggctgaacagcgtatgcagctggagactattgtcgaggcctatgaggaattcagcccctttaacagcgatgaaatcgcgctgattgaacctttacgcgctatgcgactggtttattatctggcgtggttgctcagacgctgggacgatcccgctttcccggtcaatttcccctggttaaccggggaggattactggcgggggcagacgtcgacttttcttgagcaggtgaaggttctacaggaacccccgcttcagttaacgccaatgtattaa

SEQ ID NO: 213079 - DNA, 624 bp, Klebsiella pneumoniae; identical to SEQ ID NO: 137277

SEQ ID NO: 213080 - DNA, 900 bp, Klebsiella pneumoniae
atgtcgagattactcgctgcgataacacttccgctgagtatcgccttaaccatcttagtcaccattatctgctctgtaccgatcatcgtcgccgggctgattaaactgctggtccccattccagcggtatggcgctctatatccgttttttgcaattttatgatgtactgctggtgcgaagggctggcgctgctgttgcatctcaatccctggctaaaatgggacgtccagggtctggaaggcctgaacaaaaagaactggtatctgctgatcagcaaccaccacagctgggcagacatcgtggtgctgtgcgtgctgttccgcaagcatattccgatgaataagtacttccttaaacaacagctggcgtgggtacccttcattggcctcgcctgctgggcgctggatatgccttttatgcgccgctactcgcgcagctatcttattcgtcacccggagcgccgcggtaaagatgtcgaaaccacccgccgttcgtgtgaaaaatttcgcgcgcatccgacgactatcgtcaattttgtggaaggctcgcgttttaccgaagaaaaaaagcgcgaaacgcgctctccttaccacaacctgttaccgccgaaagccgctggtatcgccatggcgctcaacgtactcggttcgcagttcgataaactgctgaacgtcacgctgtgctacccggataatcatacaagaccattttacgatatgttaagcggccgcctgacgcgcatcgtggtccgtatcaatctggtccctattggcgaagagctgcacggcgattacgttaacgataagaactttaagcgcggcttccagcgctggctgaatggcctatgggaagagaaagaccgtcagttgactgacatcatgagggacaaagaacggtag

SEQ ID NO: 213081 - DNA, 2793 bp, Klebsiella pneumoniae
atggttcagatcccagaaaaccctctcatcctcgttgatggctcctcctatctttatcgggcgtatcatgcgtttccgccgctgactaacagcgcaggggagcccaccggggctatgtacggcgtactgaatatgctgcgcagtttgatactgcagtatcaaccgactcatgccgtcgtggtctttgatgcgaaagggaaaaccttccgtgatgaattgttcgagcattacaaatctcaccgcccgccgatgccggacgatctgcgcgcgcagattgagccgttgcataagatggtgaaagcgatggggctgccgctgatggcagtcccgggcgtcgaagctgacgatgtgattggcaccctggcgcgggaagcggaaagggcaggtcgcccagtcctgatcagcaccggcgataaagacatggcccagctggtgacgccgggcatcaccctgatcaataccatgaccaacactatcctcggaccggatgaggtggttactaagtacggcgtcccgccggagctgattattgatttcctggcgctgatgggcgactcctcggataacattcccggcgtgccgggcgtgggcgaaaagaccgcccaggcgctgctgcaaggcctcggcggccttgatacgctgtatgcggaaccggagaagatcgctgaactgagcttccgcggcgcgaaaacgatggcggcgaagctcgagcagaacaaggacgtggcttatctctcttatcagctggcgaccatcaaaaccgacgtcgagctggagctcacctgcgaagagctggaggtgcagccgccggcggcagacgatctgctggcgctgttcagacagtatgaatttaagcgctggaccaccgacgttgaggccggaaaatggctgcaggctaaggggggcaaaccggctgcgaaacctgcagcgcctgcagcagcggcagaagcggaagaagaggttgaagccgctactgcactttcagcagagcattatgtcactatccttgatgaggctacgctgctcacctggatcgataagctgaagcaggcgccgctctttgcctttgatacggaaaccgacagcctggataacatctccgccaacatggttggtctttcattcgctgttgagccaggcgtggccgcctatgtcccggtagcgcatgattatcttgatgcgccggatcagatcccgcgcgagcgcgtgctggcgctgcttaaaccgctgctggaggatgagaaggtgctcaaggtcgggcaaaatctcaaatacgatcgcggcattttggctaattacgacattgagctgcgcgggattgcgttcgataccatgctcgagtcttacattctcgacagcgtggcgggccgccacgatatggacagtctttccgaccgctggctgaaacataaaaccattaccttcgaagagatcgctggcaagggtaagaatcagctcacctttaaccagattgcgctggaagaggctggtcgctacgcggcggaagatgccgacgttacgctccagctgcatctgaagatgtggccgaagctacagcagcatgaaggcccgctgaatatcttccagcatattgaaatgccgctggtgccggtgctgtctcgcgttgagcgcaacggcgttaaaatcgaccccgccgtgctgcatgcgcactcgcaggaaattgcccagcgcctggttgagctggagcagcgagcacatgagatcgccggggaagcgtttaatctctcctccaccaaacagctgcaaacgatcctgtttgaaaaacagggtatcaagccgctgaagaagacgccgggcggtgcgccgtccacctctgaagaggtgctggaagagctggcgctcgattatccgttgccgaaagtgattctggagtatcgtgggctggcgaagctgaagtcgacctataccgataagctgccgctgatgattaaccccaaaacgggccgcgtgcatacctcctatcatcaggcggtcaccgccaccggccgtttgtcgtctaccgatccaaacctgcaaaacattccggtgcgtaacgaagaagggcgccgtattcgccaggcgtttatcgcgccggaagattacgtcattgtctcggcggactactcgcaaatcgagctgcgcattatggcgcacctgtcgcgggataaaggcctgctgaccgccttcgcggaagggaaggatattcaccgggcgacggcggctgaagtatttggcttaccgctggacagcgtcagcagcgaacagcggcgcagtgcgaaagccatcaacttcggtctgatctacggcatgagcgcctttggcctggcccgccagctgaacatcccgcgtaaagaagcgcagaagtacatggatctttatttcgaacgttatccgggcgtcctggagtatatggagcgcacccgcgcacaggcgaaggagcaagggtatgttgaaacgctggatggccgtcgactctatttgccggatatcaagtccagcaatggcgctcgtcgtgccggcgcggagcgtgcggcgattaacgccccgatgcaggggacggctgcggatattatcaagcgggcgatgattgccgttgatgaatggctgcggagcgagaaacctcgcgtgcggatgatcatgcaggttcacgatgaactggtctttgaagtgcataaggatgagctcgatgccgtatcgaaaaagatccacgaactgatggagaacagcactacgctggcggtaccgttgctggtggaagtgggcagcggcgaaaactgggatcaagcgcactaa

SEQ ID NO: 213082 - DNA, 633 bp, Klebsiella pneumoniae
ttgaccaactggaattatcaactgacgcactttgtcactagcgcgccagatatccgccatcttcctgccgataccggtattgaagtggcgttcgccggccgctccaacgcgggaaaatccagcgcgctgaatacgctgactaatcagaagaacctggcgcgtacctccaaaaccccggggcgtacgcagctgattaacctgttcgaagtcgctgagggcaagcgccttgtcgacctgcccggctatggttatgcgcaagtacccgaagagatgaagatcaagtggcagcgcgcgctgggggaatacctggaaaaacgtctatgcctgaagggtctcgtggtgctgatggacatacgtcatccgcttaaagatctcgatcagcagatgatcgaatgggcggtagagagcgatattcaggtgctggtactgctcaccaaagccgataagctcgccagcggcgcgcgtaaagcgcaagtgaatatggtgcgtgaagcggtactggccttcaatggcgatgtccaggttgaacccttctcttcgctgaaaaaatctggcgtcgataagctgcgacagaagctggatagctggtttaacgaaatcccgccgcaagaagccgtcgaagacgccgagtaa

SEQ ID NO: 213083 - DNA, 507 bp, Klebsiella pneumoniae
atgaaaaaaccgacatccgccacccgtggcaaatccggccgcaagtcgcgtgaagagttaaatcaggaagctcgcgatcgcaaacggcagaagaaacatcgtggccacgcggcaggcagtcgcgcgaacggcggcgatgcggcttcagcgggtaaaaaacagcgtcaggcgcaagatccgcgcgtgggtagcaaaaaaccgatcccgctgggcgtgagcgaaagcagcgctccagcccccaagcagcataaaccaaagagcgagaaacctatgctttcaccgcaggctgagctggagttgctggagaatgatgagcgcctggacgcgctgctggaacgtctggaagagggcggcacccttaatgctgaagagcagagctgggtggacgccaaactggatcgcattgatgagctgatgcagcagctcggcctctcttacgatgatgaagatgaagaagaggaagagcgtcaggaagatatgatgcgtctgctgaagggtggaaactaa

SEQ ID NO: 213084 - DNA, 1374 bp, Klebsiella pneumoniae
atgtctgagcagataatcgactgggatctggccctgatccagaaatataactattccgggccgcgctatacctcgtatcccaccgcgctggagttttcaccgcaatttggcgcggcggaattcgatgccgctgtggcccgttacccacagcgtcccctgtcgctgtacgtgcatatcccgttttgccataagctgtgttatttctgcggctgcaataagatagtcacccgccagcagcataaggccgatcaatatctcgatgtccttgaacaggagatcatccaccgcgcgccgctgtttgccactcgccaggtgaagcaactgcactgggggggcggcacgccaacttatctcaataaggcgcaaatcagtcgcctgatggatctgttgcgcagccatttccatttcagcgcggaagccgagatctccatagaggtcgatccgcgtgagatcgaactggatgtcctcgatcatttacgcgctgagggtttcaaccgcctgagtatgggcgtacaggacttcaataaagaggttcagcgtctggttaaccgtgagcaggacgaagcgttcatctttgatttgctcaaccatgcgcgggagattggttttacctcgaccaatatcgacctcatttatggcctgccgaagcaaacgccggagagcttcgcctttaccctgcaaaaggtcgccgagctcaatcctgaccgcctgagcgtgtttaactatgcgcatctgcccacgctctttgccgctcagcggaagattaaagatgccgatctgccctccgctgagcagaagctggagatcctgcaggaaaccatcggctcgctgacgacggcaggctatcagtttatcggcatggaccatttcgcccgtcccgatgatgaattagcggtcgcgcaacgtcacggcgtactgcatcgtaatttccagggctacaccactcagggcgataccgatctgctggggatgggcgtttcggcgatcagcatgattggcgacagctacgcccagaaccaaaaagagctcaagcagtactaccagcaggtagcagagcaagggaacgccctgtggcgcgggatcgcgttaactcgcgatgattgtctgcgtcgcgacgtgattaaagcgttgatctgtaacttccagctggatatcgcggcggtcgaggcgcagtgggatgtggattttgcgtcttatttcgccgaggatctgaagctgctggcgccgctggcgcatgacgggctggtggctgtggatgataaggtcattcaggtgacggcgaaaggccgcctgctgatccgcaacatctgtatgtgctttgatgcctacctacggcaaaaggcccggatgcagcagttctcacgggttatttaa

SEQ ID NO: 213085 - DNA, 1410 bp, Klebsiella pneumoniae
atgcaacgagggatagcctggatcgttgatgacgatagctccatccgctgggtgcttgaacgcgcgctcaccggagccggcttgagctgcacaacgttcgaaagcggcaatgaggtgctagatgccctcaccaccaaaaccccggatgtactgctgtcagatatccgtatgcccggaatggatggtttggcgctgctcaaacagattaagcagcgccatccaatgcttccggtcatcataatgaccgcgcattccgatctggacgccgcggtcagcgcttatcagcagggcgcgtttgattatttgcccaaaccttttgatatcgatgaagccgtcgccctcgtcgaccgggcgataagccactatcaagagcagcagcagccgcgaaatgcgccgataagtagcccaactgccgacatcatcggcgaagcgccagctatgcaggatgtctttcgcattattggccgcctgtcgcgctcatccatcagcgtgctgatcaatggcgaatccggtaccggtaaagagcttgtcgcacatgccctgcatcgccatagtccacgctcaaaagcgccgtttatcgcgctgaatatggcggcgatccccaaggacctgattgagtccgagctgttcggccatgaaaaaggagcctttaccggcgccaataccgtccgtcagggtcgctttgaacaggctgacggcggtacgctgttcctggatgaaattggcgatatgccgcttgatgtccagactcgtctgctgcgcgtgctggcggatggtcagttttatcgcgtgggcggttacgcgccggtcaaggtcgatgtgcggatcatcgccgctacccaccagaacctggaacagcgcgtgcaggaggggaaatttcgtgaagatttgttccaccgcctgaacgtcatccgggtgcatttaccgccgctgcgcgagcgccgggaagatattccacgcctggcccgccattttctgcagatagccgcccgcgagctcggcgttgaagccaaacagctgcatccggaaacggagacagcgctgacccgcctggcgtggccaggcaacgtccgtcagctggaaaacacctgtcgctggctcaccgtcatggccgccggccaggaggtgctgacgcaggatctgccgagcgaactgtttgagaccacgattcctgatagcccaacgcagatgcagcctgacagctgggctacgctgctgggtcagtgggccgatcgggcgttgcgatccggtcatcaaaacctgctctcagaagcgcaacccgaaatggagcgcacgctgctaacgaccgccctgcgccatactcaggggcacaagcaggaggctgcgcgcctgctgggatggggacgtaataccctgacgcgtaagctaaaagagttgggtatggagtag

SEQ ID NO: 213086 - DNA, 1050 bp, Klebsiella pneumoniae
atggcaacaggcacactgcccgatgctgggcagatccttaactcccttatcaacagtattttactggtcgatgatgacctggcggtgcactttgccaaccctgcggcgcagcagctgctggcgcagagctcgcgcaagctgtttggcaccccattacctgagctgttgagctatttttcgttgaatatcgggctgatgcaggagagcctgcaggcgggccaggggtttaccgataacgaagtgacgctggttatcgatggccgttcgcacatcctgtcgttgaccgcccagcggctgccggaaggctttattctgctggaaatggcgccgatggataatcagcgccgcctgagccaggagcagctgcagcatgcgcagcaggtcgccgctcgcgacctcgtccgcggcctggcgcatgagataaaaaacccgttaggcggcctgcgcggcgcggcccagctgctcagcaaagcgctgcccgacccggcgctaacggaatataccaaagtgatcattgagcaggccgaccggttaagaaatctggtcgaccgcctgctcggaccacagcatccgggcatgcacgttaccgaaagcatccacaaagtcgccgaacgggtagttaaactggtttccatggagttgccggacaacgtgaagttgatccgcgattacgaccccagcctaccagagctaccccacgacccggatcaaattgaacaggtgttgctgaacatcgtccgtaatgcgctgcaggcgctggggccggaagggggcgaaattattcttcgcacccgcaccgctttccagctgacgctgcacggggtgcgttatcgcctcgccgcccgcatcgacgttgaagataatggcccgggtattccgccccatctccaggatacgctgttctatccgatggtcagcggccgcgaaggcggtaccggcctgggcttatctatcgcccgtagccttatcgatcagcactccggcaaaattgaattcaccagctggccgggtcataccgaattttcggtatacctgcctattcggaagtag

SEQ ID NO: 213087 - DNA, 1410 bp, Klebsiella pneumoniae
atgtccgctgaacacgttttgacgatgctgaacgagcacgaagtgaagtttgtcgatctgcgcttcaccgataccaaaggtaaagaacagcacgtcacgattccgtctcatcaggtaaatgccgaattcttcgaagaaggcaaaatgtttgatggctcctcgattggtggctggaaaggtatcaacgaatctgacatggtcctgatgccggacgcgtccaccgcggtcattgacccgttctacgaagaaccgaccctgatcatccgctgcgatatcctcgagccaggcaccctgcagggctatgaccgtgacccgcgctccatcgcgaaacgcgctgaagagtacctgcgcgccaccggcatcgctgataccgtcctgttcgggccagaaccagaattcttcctgttcgacgacatccgttttggcgcctctatctccggctcccatgtcgcgatcgatgacattgaaggtgcgtggaactcctccaccaaatacgaaggcggtaacaaaggtcaccgtccgggcgtgaaagggggttacttcccggttccgccagtagactcttctcaggacatccgttccaccatgtgtatgatcatggaagagatgggtctggttgttgaagcccatcaccatgaagtagcaaccgcaggtcagaacgaagtggcaacccgcttcaataccatgaccaaaaaagcggatgaaattcagatttacaaatacgttgttcacaacgtcgctcaccgctttggtaaaaccgcgacctttatgccgaaaccgatgttcggcgacaacggctccggcatgcactgccatatgtctctggcgaaaaacggtaccaacctgttctccggcgacaaatacgccggtctgtctgagcaggcgctgttctacatcggcggcgtaatcaaacacgctaaagccatcaacgccctggcgaacccgaccaccaactcctacaagcgtctggtcccgggttacgaagcgccggttatgctggcttactctgcccgtaaccgctctgcctctatccgtattccggtggtgacctctccgaaagcgcgtcgtatcgaagtgcgcttcccggacccggctgccaacccgtacctgtgctttgcggcgctgctgatggctggccttgatggtatcaagaacaaaatccatccgggcgaagcaatggataaaaacctgtatgacctgccgccggaagaagcgaaagagatcccgcaggttgccggttctctggaagaagccctgcaggccctggatgctgaccgcgagttcctgaccgctggcggcgtgttcaccaatgacgctatcgatgcctacatcgccctgcgtatggaagagaacgaccgcgtacgcatgactccgcatccggttgagttcgaactgtactacagcgtctaa

SEQ ID NO: 213088 - DNA, 1824 bp, Klebsiella pneumoniae
gtgatcgaaaatctgcgtaatatcgccatcatcgcgcacgttgaccatggtaaaactaccctggttgacaagctgctacagcaatccggtacgttcgacgcacgtactgaagcacaagaacgtgtgatggactccaacgatttggagaaagagcgtgggattaccatcctcgcgaaaaacaccgcaatcaaatggaatgattaccgtatcaacatcgttgataccccagggcacgccgacttcggaggtgaagttgagcgtgttatgtccatggttgactctgtgctgctggtggtagatgcctttgatggcccgatgccgcaaacgcgcttcgtgaccaaaaaagcttttgcccacggtctgaagccgatcgtggtcatcaacaaagttgaccgcccgggcgcgcgtccggactgggttgtcgatcaggtgttcgacctgttcgttaacctcgatgcgaccgacgaacagctggacttcccgatcgtttacgcgtccgcgctgaacggtatcgcgggtctggatcacgaagacatggctgacgacatgaccccgctgtaccaggcgattgtcgatcgcgtgccggcgccggacgttgatcttgacggtccgctgcagatgcagatctcccagctggactacaacaactacgttggtgttatcggcatcggccgcatcaagcgcggtaaagtgaagccgaaccagcaggtcactatcatcgatagcgaaggcaaaacccgtaacggtaaagtcggtaaagtgctgactcacctgggtctggagcgaattgagagcgacgtagctgaagctggcgacattatcgcgatcaccggtctgggcgagctgaacatctccgacaccatctgcgacccgcagaatgtcgaagcgctgccggccctgtccgttgatgagccgaccgtttccatgttcttcaacgtcaacacctctccgttctgcggtaaagaaggtaagttcgttacctctcgccagatcctggaccgtctgaataaagagctggtgcacaacgtggcgctgcgcgttgaagaaaccgaagacgctgatgcgttccgcgtttccggccgtggtgaactgcacctgtccgttctgattgaaaacatgcgtcgtgaaggtttcgagatggcggtttcccgtccgaaagttatcttccgtgaaatcgacggccgtaaacaagagccgttcgagaacgtgacgctggacgtcgaagagcagcatcagggttctgtcatgcaggcgctgggcgagcgtaaaggcgacctgaaaaacatgaatccggacggtaaaggccgcgtacgtctcgactacgtgatcccaagccgcggtctgatcggcttccgttcagagttcatgaccatgacctccggtaccggtctgctttactccaccttcagccactacgacgacgttcgtccgggcgaagtgggccagcgtaacaacggcgtactgatctccaacggtcagggtaaagcggtagcgttcgcgctgttcggtctgcaggatcgcggtaagctattcctcggccacggcgctgaagtttacgaaggccagatcatcggtattcacagccgttccaacgacctgacggtaaactgcctgaccggtaagaaactgaccaacatgcgtgcgtctggtactgacgaagccacggttctggttccgccggttaagatgaccctggagcaggctctggagttcatcgatgacgacgaactggtagaagttactccgacctctatccgtatccgtaaacgtcacctgaccgagaacgaccgtaaacgcgcgatgcgcggtgcaaaagaagagtaa

SEQ ID NO: 213089 - DNA, 600 bp, Klebsiella pneumoniae
atgctctatatctttgatttaggtaatgtgattgtcgacattgacttcaaccgggtattgggagcctggagcgatttaacccgcatcccgctggcgacgctgaagcagcatttcaccatgggtgaggctttccatcagcatgagcgcggcgagctcagcgatgaagactttgccgccgccatgtgccatgaaatgaatatgcccctcagctatgaacagtttgctcacggctggcaggcggtgtttgtcgcgctgcgcccggaggtgattaccatcatgcataaacttcgtgcccaggggcatcgggtggtggtgctctccaataccaatcgtctgcacaccacgttctggcccgatgaatacccggaagtgcgcgcggccgccgatcgcatttatctgtcgcaggagatgggattgcgtaagcctgaagcgcaaatttatctgcgagtactggaagaagaggggttttccgccgcggatacggtcttttttgatgataacgtcgataatatagcaggggccaaccggttggggatcaccagtatcctggtgactggtaaggagaccatccctgactatttcgcgaaacagctatgctaa

SEQ ID NO: 213090 - DNA, 861 bp, Klebsiella pneumoniae
atgctaaaaaccgttcatcaaaaattactccaccatacccggccgctgctggcgtggctaaagctgctgtggcggcgcattgatgaagatcatatgaccaccctggcggggaacctcgcctatgtgtcattactgtccctggtgccgctgattgccgtcgtgttcgcgctgtttgcggcctttcctatgttctccgaagtcagcgtgcagatccgtcattttatcttcgccaattttattccggcgaccggggatgtaatccagggatatatcgagcagttcgtggccaactccagccgcatgaccgccgtaggcgcctttggcctgatcgtcacctcgctgctgctgatgtactcgatcgacagcgcgctaaacaccatctggcgcagcacgcgcagccgccccaaagtttattcctttgccgtttactggatgatcctgaccctcggcccgctgctggcgggcgccagcctggcgatcagttcctatttgctgtcgctgcgctgggcaagcgacctggacggcgtaattgataatctgctccgcctatttccgctgatcctctcctgggcagcgttctggctgctctatagtattgtaccgactacccaggtacgtaaccgcgacgcggtgatcggggcgctggtggcggcgctgctgtttgaggcaggtaaaaaggcgtttgccctctatatcaccacctttccgtcctatcagctaatttatggggtgatttcggtggtgccgattttgttcgtctgggtgtactggacctggtgtatcgtcttgcttggcgctgaaattactgtcactctcggtgaataccgcaaacttgaaacagaagaaacagaacaaccatga

SEQ ID NO: 213091 - DNA, 438 bp, Klebsiella pneumoniae
atgattgcattaattcaacgcgtatcccgtgcaagcgttaccgtggcggacgaggtgacgggcgaaattggcccagggcttctggtgctgctgggcgtcgagaaagacgatgatgaacaaaaggcgaatcgcctttgtgaacgcgtgctgggctaccgcatcttcagcgatgcggaagggaaaatgaacctgaatgtccagcaggcgggcggcagcgtgctggtggtttcgcaatttacgctggcggccgataccgagcgggggatgcgaccgagcttctcgaaaggcgctgcccctgaccgcgctgaggcgctgtatgagtatttcgtcgcccgctgtcgccagcaggaaatgcacacccagaccggaagattcgctgcggatatgcaggtttctttggtcaatgatggtcccgtgaccttttggttgcaggtatga

SEQ ID NO: 213092 - DNA, 942 bp, Klebsiella pneumoniae
atgtatcaccttcgtgtaccgcaaacagcagaagagttagagagctactaccagttccgctgggagatgctgcgtaagccgctgcatcagcctaagggatcggaacgtgacgcctgggatgcgatggcgcatcatcagatggtagtggatgaagagggcaacctggttgccgtcggccggctatatatcaatgcggagaatgaagcctccatccgctttatggctgtgcatccctcggtgcaggataaagggctgggtacgctgatggcgatgaccctggagtccgtcgcgcgtcaggaaggggttaagcgggttacctgcagcgcgcgcgaagatgcggtggaatttttcgccaagctcggatttgtcaatcagggggagatcaccaccccgaccaccacgccgatccgtcattttctgatgatcaaaccggtcgcgtcgctggacgatattttgcaccgcggcgactggtgcgcacagctccagcaggcgtggtatcagcatattccgctgagtgaaaaaatgggcgtacgtattcagcagtacaccgggcagaaatttattaccaccatgccggaggcggggaaccagaatccgcaccatacgctgttcgccggcagcctgttttcgctcgctaccttaaccggatgggggcttatctggctgatgctgcgcgagcggcacctgggaggcaccattattctggcggatgcgcatatccgctacagccagcctattagcggccgccccagcgccatcgccgacctcggttctctgagcggcgatctcgaccgactggcgcgcgggcgtaaagcccgcgtgcaaatgcaggtggagctttttggcgacgataaacagggcgccgttttcgaggggatctacatcgtgttgccggcgaagccctttggctcgtacgaagagggcggcaacgaggaagagtaa

SEQ ID NO: 213093 - DNA, 918 bp, Klebsiella pneumoniae
atggcgctggaaaaagggattgcttcgctggttgaggcatttattgcggcaggtcgtccgtcatcacgcgatcagcatattgatgatcggagggccggctatatcgccagtgcggtactcgccggggagacggaaacgcgagtgcgggtggaggatatcaccctggagggtatgcacttccgcgtcgtttcaccgcccactgccgacggcctgctacccacgcttatctactaccacggcggctgttttgtcagcggcggctttgccacccatgacaatcaattgcgccagcttgcctggttcagtgggtgccgggtgatcgccgtgcagtatcgtctggccccggagtacccttttccggcggcgcacgatgatgcagaacgaggtgccacgattattcaccagcacgcaaaacagcttggcgtggatgtttcgcgcatcaccctggccggcgacagcgccggcgggcacctcgctctggtcacggccctgcgcctgaaagcgaaagcggcgtggcaacccgcgcaactgatcctgatttatccgatgcttgaccccaccgccagcatggcgagctacctcagcaatggcgatgactatgtgattacccgggacacgctactgagcggctacgaaatgtacctcgcctcgacgccggcaaaccatccggatgcctgtccgctctggcgcgaagattttaacgggctgccaccggtacacattctgacggcggagttcgatcctttacgtgatgagggcgaagtgctgtaccgaaggctgacggagcaaggggtggagagttcctgtcagcgctatctgggggtgatccacggcttctttcagctgggaggcgtcagcaacgccgcgcgtgatgccatgcgggatatcgcctggcgtgtggcatcgccaggacgataa

SEQ ID NO: 213094 - DNA, 249 bp, Klebsiella pneumoniae; identical to SEQ ID NO: 138969

SEQ ID NO: 213095 - DNA, 384 bp, Klebsiella pneumoniae; identical to SEQ ID NO: 138968

SEQ ID NO: 213096 - DNA, 930 bp, Klebsiella pneumoniae
atgagtattcgcataatcccgcaagacgagctgggttcgagcgagaaacgcacggcggaagcaattccgccgttactgttccccaggctgaaaaatctgtataaccgccgcgctgaacgcttgcgcgagctggccgctaataacccgctaggcgattacctgcgctttgccgcgctgattgcccatgcccaggaagtagtgctgtacgaccatccgctgcagatggatctcaccgcccgcattaaagcggccagcgaacagggcaagccgccgctggatatccacgtcctgccgcgcgacaagcactggcacaagctgttgcactcgctgattgccgagctgaagccggaaatgagcggcccggcgctggcggtcattgagaatctggaaaaagcctctgagcaggagctggagcagatggccagcgcgctgtttgtttccgatttcgcctccgtcagtagcgacaaagcgccgttcatctgggctgcgctgtcgctctactgggcgcagatggccagtctgatcccaggaaaagcgcgcgccgaatacggcgaacagcgccagttctgcccggtgtgcggctcgatgcctgtctccagcatcgtgcaaatcggcaccactcaggggctgcgctatctgcactgcaacctgtgcgaaactgagtggcacgtagtacgcgtcaagtgcagcaactgcgagcagagccgcgacctgcactactggtcgctggacaacgagcaggcggcggtgaaagccgaaagctgcggcgactgcggaacctacctgaagattatgtatcaggagaaggatccgaaagtcgaagccgtcgccgacgatttggcctccctggtgctcgacgcccgcatggaacaggagggcttcgccagaagctcaattaacccgttcatgttccccggcgaaggggagtaa

SEQ ID NO: 213097 - DNA, 636 bp, Klebsiella pneumoniae
atgaaaagacgtgacaccatcgtgcgctacacggcgccggaacgcatcaaccactgggtcaccgccttctgcttcgtcctggcggcggtgagcgggttaggctttttcttcccgtcctttaactggctgatgcatatcctcggcacgccgcagctggcgcgaattctccacccgttcgtcggggtggtgatgttcgcgtcgtttatcatcatgtttttccgttactggcatcacaacctaatcaatcgggatgatatcttttgggcgaagaatattcgtaagatcgtcgtcaacgaggaggtgggcgataccgggcgctataacttcggccagaaatgcgtattctgggcggcgattatcttcctggtactgctgctggtgagcggtgtgatcatctggcgtccgtattttgcgccggctttctcaatcccggtgatccgatttgcgctgatgctgcattcatttgccgcagtggcgttaattgtggttatcatggtgcatatctacgccgccctctgggtgaaaggcaccattaccgcgatggtggaaggctgggttaccaaaacgtgggcgaagaaacatcacccgcgctggtaccgagaggtccgccagaaacaggaaaagtcatctgaatga

SEQ ID NO: 213098 - DNA, 903 bp, Klebsiella pneumoniae
atggcttaccaatcgcaagatattattcgtcgttccgcgactaacggtttcacccccgcgcctcaggcgcgggaccaccagcaggaggtggcgaagcttatcgacgtcaccacctgtatcggctgcaaagcctgtcaggtggcctgctccgaatggaacgatattcgtgatgaagtcggtcacaatgtcggggtgtatgacaacccggcggacctgaccgccaagtcatggacggtcatgcgcttctcggaggtggaacaaaacgacaagctggaatggctcatccgcaaggatggctgcatgcactgcgcggacccgggctgcctgaaggcctgcccgtcagaaggcgcgatcattcagtacgccaacggtattgtcgacttccagtccgagcagtgcatcggctgcggctactgtatcgccggctgtccgttcgatgtaccgcgtctgaacccggaagacaaccgcgtctacaaatgtaccctgtgcgtagaccgcgtgaccgtcggccaggagcctgcctgcgtgaaaacctgtccgaccggcgcaatccactttggctccaaagaggatatgaaaacgctggccggcgaacgcgtggctgagctgaaaacccgcggttatgacaatgcgggcctgtacgatccggccggcgtcggtggcacccacgtcatgtacgtgctgcaccatgccgacaagccgaatctgtaccacggcctgccggaaaacccggagatcagccagaccgtcaagttctggaaaggcatctggaaaccgctggcggccgtcggcttcgccgcgaccttcgcagccagtatcttccactacgtcggcgtcggtccgaaccgcgcggaagaggaagaggacaatctgcatgaagagaaagacgaggtgcgcaaatga

SEQ ID NO: 213099 - DNA, 2415 bp, Klebsiella pneumoniae
atgaccaaccactgggttgatattaaaaacgccaacctggtcgtagtgatgggcggtaacgccgcagaagcgcatccggtggggttccgctgggcgatggaagccaaaattcataacggcgccaagctcatcgttatcgatccgcgctttacgcgtacggcgtcggtggctgatttctataccccgattcgttccggtaccgacattaccttcctgtcgggcgtgatcctgtatctgctgaataacgaaaaattcaaccgcgaatacaccgaagcctataccaacgccagcctgatcgtgcgtgaggactacagctttgatgatggtctgttcagcggctacgatgccgaaaaacgccagtatgacaaaaccagctggaactatgaactggatgaaaacggcttcgccaaacgcgataccacgctgcagcatccacgctgcgtctggaatctgctaaaacagcacgtttcccgttataccccggatgtggtcgaaaacatctgcggtacgccgaaggccgacttcctcaaagtctgtgaatacattgctgaaaccagcgcgccggataagaccgcatcgttcctgtacgctctcggctggacccagcactccatcggtgcgcagaatatccgcaccatggcgatgatccagctgctgctcggcaacatggggatggcgggcggcggcgtcaacgccctgcgcggccactccaatatccagggtctgaccgacctcggcctgctctccaccagcctgccaggctacatgtcgctgccgaacgaaaaacaggccgacctgcagacctacctgacggctaacacgccgaagccgctgctgaaagaccaggtcaactactggggcaactatccgaagttcttcgtctccatgatgaaagccttcttcggcgacaaagccaccgcggaaaacagctggggctatgactggctgccgaagtgggataagagctacgacgttctgcagtacttcgagatgatgaatcagggcaaagtgaatggctatatttgccagggctttaacccggtcgcctcgttcccgaacaaaaacaaggtcgtcgcttccctgtcgaagctgaagttcctcgtgactatcgacccgctcaataccgaaacgtccaccttctggcaaaaccatggtgagtcgaacgatgtcgatccggcgaaaatccagaccgaagtgttccgtctgccctccacctgcttcgccgaagagaatgggtctatcgtcaactccggccgctggctgcagtggcactggaaaggcgcggacgccccggggatcgccgtcaccgatggtgaaattctcgccggtatcttcactcgcctgcgtaagatgtatgccgaagagggtggcccggcgccggagccggtgctcaacatgacgtggaactactccacgccacacgagccggcatcggaagaagtggcgatggaaagcaacggtaaagcgctggcggatatcaccgacccggcaaccggcgcggtgatcgtcaagaaaggccaacagctgagctcctttgcgcagctgcgagatgatggcaccacctccagcggctgctggatcttcgccgggagctggacgccggaaggtaaccagatggcgcgccgcgataacgccgatccatccggtctcggcaataccctgggctgggcctgggcctggccgctcaaccgccgcatcctgtataaccgcgcctccgcggacccgcagggtaaaccgtgggatccgaagcgtcagttgctgaaatgggacggcgccaaatggggcggcgtggatattccggactacagcgccgccgcgcctggcagcgacgtcggtccgtttatcatgcagccggaagggatgggccgtctgttcgctatcgacaagatggcggaaggaccgttcccggaacactacgagccgtttgaaacgccgctcgggaccaacccgctgcacccgaacgtggtctctaacccggccgctcgcgtcttcaaaggcgatctcgagcagatgggtaaggccgagaagttcccgtacgtcggcaccacttaccgtctgaccgagcacttccactactggaccaagcatgcgctacttaacgccatcgcccagccggaacagttcgtggagatcggcgaaaaactggcgaataagctcggcatcggccacggcgataccgtgaaagtttcctccaaccgcggctatatcaaagccaaggcggtggtgaccaaacgtattcgcacgctgaaagttgacggtaaggatatcgataccatcggcattcctattcactggggctatgagggcgtggcgaaaaaaggctttattgccaataccctgacgccgttcgtcggtgatgcgaatacgcagacgccggagttcaaagctttccttgtgaacgtggaaaaggtgtaa

SEQ ID NO: 213100 - DNA, 588 bp, Klebsiella pneumoniae; identical to SEQ ID NO: 137891

SEQ ID NO: 213101 - DNA, 837 bp, Klebsiella pneumoniae
gtgaacaagaagcctctcgaacaaatcaaaaatgtgacgaatgtcacaggatatcgccaggtctccctctggaaacgcgaggatctgcaacaccctcagccagatgagttagcggaagaggtgcccgtcgcgctggtctacaacggtatctcccacgtggtgatgatggcctccccgaaagatttggagcaattcgccgtcggcttctccttatccgaagggattatcgagcaccggcgggagattttcggcatggacgtggtagcggtgtgcaacggccttgaggtgcagattgagctctccagccggcgttttatgggcctcaaagcccggcgtcgcgcgctggccgggcgcaccggctgcggcgtatgcggcgtcgagcagctcaatgatattggtaagccggtccagccgctgccgttcactcagtcgttcgatttagccaatctcgatcaggccctggcgcatcttaacgactttcaaccggttggccggctcaccggctgtactcacgcggccgcgtgggtccggttgacgggcgaactggcgggcgggtttgaagacgttggccggcatgtcgccctggataaattgttgggccggcgggcggaagtcggcgaggggtggcagcatggcgccgcgctggtctccagccgcgccagctatgaaatggtgcagaaggccgcgatgtgcggcgtcgagatcctgttcgcggtctcggcggccaccaccttagcagtggaagttgccgagcgctgcaatctgacgctggtgggcttttgcaagccgggtagggcgacagtttacacccatccgcagcgtttaattgcgggttaa

SEQ ID NO: 213102 - DNA, 213 bp, Klebsiella pneumoniae; identical to SEQ ID NO: 137889

SEQ ID NO: 213103 - DNA, 981 bp, Klebsiella pneumoniae
atgaaaattggtatcgttattagcggcggggatgtttctggaatgaataattttatattccagatagccaggcaggctaatgctgatatcacgctgtttaatggcggtattccagggctactggagaaaagtcatcaggatatggcgtggcgcgatctggttgattattcaattaccgcggtgccgatcattacctcggggcgaaccagtcgcaaactgcagcgcagtgaatatgaaagcattgctaaaaaacttaaatctctgcgtattgatgtgctcattatggccgggggggatggcagcctgcagtttctgaatacccttagtgaatttgagattaattgctttggtgtgggaatgactatcgataatgatgtgtatggcagtgattatacgattggtttttccacggcctgtgagcaaattattaaagaagtctctcgtttaagaaataccggaagagcgctgcccggtcgggtttttatggttgagatattaggaggctattgtggagaactaacgttgcagtccgccattaaatgtaatgcggatattgccctgatcccggaggcacagatgccgttggccgtgctcgcggaacggattacccggaagctgagtacgcagaatagcgtcgttatcctctgctcagaaggctataccaaagagtactctcccggctttcagggggcgattgataccatgattaaacagctggaaccacaaataggtgtccgtatccgtaaaacgatcgtcggctatggtttacgcagcggtgatccaacctgcgaagagatttatcagggcactattatggccagtgaagtggttcgctgtattcagtcaggtatgaaaaataaagccataataattaattccagtaacaaacctattccgattgatttagtcagtatgaaaaaacgtctggtcgatactgaaggacatcattataaacttgccaagcaactcaatattatttga

SEQ ID NO: 213104 - DNA, 315 bp, Klebsiella pneumoniae
atgctgaaaattttatgcgtatgtggctgcggcctcggttcaagctttgccattgaaatgacggcgaaggcagttttaaagaagctggaaattcccgctcatattgaacacaccaccgtttccgaagctggggcttttaaatcggatatgattctgacgcaaaaaacctttgccgacatcttaaccgccgatgccagtgaagaagaaattaaacgtgtcgtggtgttgaataaacttactgataaagaggagattgaaactaagatcgtcgcattcttaaaagaacgtcatctgaaggtggctgattatgaatag

SEQ ID NO: 213105 - DNA, 1368 bp, Klebsiella pneumoniae
atgaatagcttcgttgcgtttatcgttaaggatttactcggccaggcatccattcttattgcttttattgccatgcttggcctgatcctgcaaaagaaatcgccaggcaaaaccgcggaagggacatttaaaacgctgctcggtttcttaattatgatggccgggataaacatcattgtcgccacgctgaccttcctgaatgatatcttcacccagggatttggcatgaaaggctatattaccgatgtggccgccatcgccgggttagcgaatcgggaattaggttcggaggtggcgctgacgctgctggtgatctttgccgtcaatattattatcgcccggctgacgccgctgaaatatatttttctgaccggccaggcgctgctgtggatggcgacgatcggcgccgtgattggctataagtccgggctcaccggcgtaccgctgattttaaccgggggcatcttcggcggcgtgatggcggtgttaatgccggccctggcgcagccggtggtcaggcgcattatcgggtctgacgatgtggccctggggcacttctgtactatcggctatctggtgcaggctgcggtcgctaaagttgtcggaaaaggctctcgctccacggaagatctcgaactgcctgataactttaagtttctgcaggatacctatctggccatggcggtggtgatggtgccgatgtatctcatcccggctatcgcggcggggcctcagtacatcgcgcagttctccggcggcattaattacctgatgtatgccttcatgcagtccattcagtttgtcgccggggtctttgtcctctatagcggcgtgcgtttattactcaatgagctggtgccggcttttcgcggtatcgcgatgcgtattgtcccggatgcaaagcccgctctcgattgcccggtgctatttccctatgcaccgaatgcggtgattgttggatttctggcaacgactgtcggctcgattatcggcatgctggttttcccgatgttcggcctggcgatgattctccccgggctgttaaccaactttttcgccggcggtacggcaggggtatttggcaatgcgctgggcggacgtcgcggggcgatgatcggcggggtgattcacggcctgtttatcacattgctgccggccattctggtacccatgctggagagctacggctttacgggcgtcaccttcagcgattcagacgtcatcagctccggtctggtattaggccacgccttccagaataactggctctttgtcgccttgtttattgtgtttgtcgccgcactggcatggtttgtaaacggtaaatccgctaagccgaaaggggaaagtgttcatgagtctgtataa

SEQ ID NO: 213106 - DNA, 843 bp, Klebsiella pneumoniae
atgagtctgtataattttaatgagattttaaaaatcgctcaggaaagagattttaaagcgattggctcgtttaacttgcactgtattgagatgttaccggctttttttaaagccgcgcaaaacagccgcagcccattaatgatccaaatatcaaccggtaccgcagagtatctggggtatcggttactggtcgatgccgtgcgttcattagcagacagtgaaaatatcccgacctgcctgcatctcgatcactgctccgatattaaagccatcgagacggcaatgaatgcgggcttttcttcggtgatgtacgacgggtctcacttaagcctcgaggaaaatatcggtaacacgcggattgtggtggaaatggcccggccgcggaatattacggtagaaggtgagctgggggcgatcggcgggtcagaggatggaaaagcggtggctgccgaagatatctgttttactaccgtcgaagacgcgacgcgttttgtgaaggagacacaggtcgatatgctggccgtctccgtgggcactgtgcatggcctgtacaccggtaaagcgcagatacagcatgcgcggctgaaggcgataagcgaagcgacgggcgtgccgctggtgctgcatggcggcacaggtgtcagcgatgaggatatgcggctggccgtcaccgaagggattaataaagtgaacgtcggaacggaaatgaacgtgcagtgggtcgaccgctgtaaatcaacgtttgagaaaggaaaagtaaatgacagcgtacggaaatttttaattcccgccaaccaggcagttactgccgtattaatggaaaaaatggcgctatttaagtag

SEQ ID NO: 213107 - DNA, 270 bp, Klebsiella pneumoniae; identical to SEQ ID NO: 137884

SEQ ID NO: 213108 - DNA, 438 bp, Klebsiella pneumoniae; identical to SEQ ID NO: 137883

SEQ ID NO: 213109 - DNA, 594 bp, Klebsiella pneumoniae
atgaacagacatctgaccccaggctgcaaaacggccattttaatcaacggcattccggcgtcggggaagagcaccattacccgtttgctggcggagacctttagcctgccggtattgacgatcgacggcatcaaagagccgtttatggcgcgcctggcccctgtcgaccggccgatgaatcgccagctgggctgcgcggcgtatgaggtgatctggtcgattgtcggcgcatcgcctgccagcatggtctggttgatcgacgcctggttcggctttcagccgcgggagaccttgcagagactgctacagcaggcgggcgtggagcaggtgattgaggtctggaaccatatctctccggagctggccgtcgcgcgctatgcctcgcggctggcgacgcggccgccgggccaccccggagaagagtatttgccggagctggcccagctggccgggcgggcgcagcccatgtcgttaggacctgtactgacgatagaccagcggcacccgctgcaaatcgaaccggttattcagtggcttgaaggcacgatcgccggacagcacagcggttttacagattacgcttactcgtcctag

SEQ ID NO: 213110 - DNA, 324 bp, Klebsiella pneumoniae
atgggcaatatgacgctgtttatcgccggtatcgccatcctgtcgctgggaacctatctgatgcgtctcggcggcgcgaagctcggcaatcggctggcattttccgagcgctcgcaggcgctgctttccgatgcggcgacggtgctgcttttttccgtcgccctggccaccactttctatgagggcgcacatttcgccggtatggcgagcgttctgggcgttgctttcgctgtgttcctcgcctggcgcaaggtcccgctgatcggcgtgattatcgccgccgccgtggtgaccgcgctgctgcgcctggcgggtatgccctag

SEQ ID NO: 213111 - DNA, 690 bp, Klebsiella pneumoniae
atggaaattcgttcgatatggctaagtgatatgaaacaaactctctccagtctcagcggagacacgataaaatcgattgttttggtctgccttgccgtcggggtggtgggcatgtcctatgggtcgctggcggtggcttacggcttccctttatgggtgccgctcttgctttcggtgtcggtgctggcgggcgcctctgaatttatgtttatcggcattgtcgccagcggcggtagtccgctggccgccgccgccgccggcctgttagtcaatgcgcgtcatatcccgttcggggtgaccgtacgcgaactggttggtcggcgcgccttaagctttatcgggtgccacattatgaacgacgagagcgtggtctttggcttgtcgcagcccacccccgcgcagcgcaaagcggcctactggctgtgcggcgctggcgtcgcgctgatctggcccctcggtacgctaaccggcgcggccgtcggcaaactgctgccagcgccggaaaccatcgggcttgatgcggtcttcccggcgatcctgctggcgctggtgatcccggcctttaaaaaccgcactacgctgatccgcgccgccagcggcgccgcgctggcgcttgccgccgtaccgtttgtgcccaccgggctgccggtgctgctttcgctgttcggtttactgtcgaggaaaaaataa

SEQ ID NO: 213112 - DNA, 549 bp, Klebsiella pneumoniae; identical to SEQ ID NO: 137879

SEQ ID NO: 213113 - DNA, 996 bp, Klebsiella pneumoniae
atgtcgctgaaagccattgccaaacaacttgggatctccgtcacgaccgtcagccgggcgttgaacggctacgacgatgtgtcgcaggagacccgcgcccgggttgaggctgaagcgcagcgccggggctatcgccccaacactttcgcccgccgtctgaaaatgggcaccatcgatgccgttggtctcgtcttccctgtccgccccgcgccgctcaacaataacgtttttctcgagatggtcggggagatcagccatgagctggcgcgccatgacattgatttgttgctgatcgccgatgatgagcaggcggataaacatggctatatgcgcatggtgcagggccgtcgcgtcgatgcattaatcgtggcccatactctggatgacgatccgcggctggcgcagctgcaggcctccggctttccgtttctggcgctcggccgtagccgcctggcgcagccctacgcctggtttgatttcgataactatgccggcacctgccgcgccacccgccatctgattcaacagggccaccagcgtatcgctctgctgggcgagaacaacaatcaggcgtttattttgcaaaggcgtaacggctacctcgatgccctgcgcgaggcggggttatccgatgcatggctgcgtagcgtgccggcgacgcgccgcggcggctatcaggccacgctggagctgctgcgtctgcctgagccgcctaccgcgattatcaccgactgcaacacccatggcgatggcgccgcgatggcgctcgcccacctggggcgtttaaccggcgacaaccgcgtcgccctggtggtgtacgacgggctgccgcaggacagcatcattgagaccgatgtcgccgcggtgatccagtccacgcgccagggcgtgggaaggcagattgccgatatggtgcgtcgcttaatcgccggggaggatctcgccacgctgcaggtgctatggcagccggaatttatcccgggtgaaaccgcctga

SEQ ID NO: 213114 - DNA, 2124 bp, Klebsiella pneumoniae
atgtctgattcgctgattcacctgcaaagcgccggtgccgatgttgtgattaaaacccgccctttcgccgaaattgtctactggggaccgcatttaagccacttttcgccgcaggatgccgacagcctgacgcgcccggtcgccaacggtagactggatgtcgattcgccagtgaccttaatggcggagctgggccatggtctgtttggcgcgccgggcattgaaggccatcgtcaggggctggatgcctctccgctgttcaccaccagcgaagtgcggcacgagggccagacgctgaccctggtcagcgaagatccgcaggccggcctgcgcctgcagagcgagatcgcgttggatgccagcggcgtgctgagcgtgcgccatggcgtgaccaatctgcgcgccagcccatggcaggtggatcgcctggcggtcacgctgccggtcgccgaacgcgctcgcgaggtgatggctttccatggccgctggatccgcgagtttcagcctcaccgcctgacgcttgagcacgacagctttgtgctggagaaccgccgcgggcgcacctctcacgaacatttcccggccctgatcaccggcagccgcgcctttagcgagatgcagggtgaagtctggggcgtgcatctggcctggagcggtaaccatcgcctgcgggcggaggtgaaaaccgatggccgtcgctatctgcaggccgaggcgctctatctgccgggcgaaatggcgctggcggaaggggaaaccttgtggacgccgtacctgtatgccagctactcggcgaatgggctgaacggcatgagccagcagttccatcgttatctgcgcgaacggattattcgtttcccgggcaacaaaccgcgcccggtgcatctcaacacctgggaggggatctatttcgaccacgacccggactacatcatgcgtatggccgacgaagcggcggccctgggcgtcgagcgctttattatcgatgacggctggtttaaagggcgcaacgacgactgggcggcgcttggcgactggtatctcgatgagaaaaaatacccctacggcctgacgccggttatcgatcacgtgaagtctctgggtatggaattcggtatctgggtggagccggaaatgattaacccggattccgatctgtaccgggcgcacccggactgggtgctggcgctgccgggctataccccgctgaccggccgccatcagtttgtcctgaacctcaacattcccgaagcgtttgattatctgctggagcggatgagctggctgctgggcgagcatgcggtggactacgtgaagtgggatatgaaccgcgagctggtgcagcctgggcatcagggacgcgccgctgcggacgcgcaaacgcgccagttctaccgcctgctggatacgctggtggcccgtttcccgcacattgaatttgaatcctgctcctccggcggcggacggatcgattatgaagtcctcaaacgcagccatcgcttctgggcgtctgacaacaatgacgcccttgagcgcaacaccatccagcgcggcatgagctacttctttccacccgaggtaatgggcgcgcatattggcaatcgccactgtcatgccaccttccgccagcatagtatcgccttccgcggcctgacggcgctgttcggtcatatgggccttgagctggatccggtgagcgccgatgaagaagagcgcgccggataccgaaaatatgcggccctgcataaacagtggcgcgacgtgatccatcacggcgtgcagtggcgaatagatatgccggacgccaccacccttgcccatggcgtcgtcagcccggataaagcgcaggcgatcttcctcgttagccagctggcgatgccggactacaccctgatggcgcccctgcgcctggcgggcctggaggcgagcgcccgctatcaggtgacgctcctcgatcatccgaacattcagatcaccggtgagggcggccacaccatgcggaagctgccggcatggatgacgacgccgcagacggtgagcggtgagtggctgcagcaggcggggctggcgctacccatcctcgacccggaaagcgccattctgattggtctgcaacgcgtgtga

SEQ ID NO: 213115 - DNA, 1266 bp, Klebsiella pneumoniae
atgaacccgaccgtctgtacccacaaaaacaaccccaacttctggattttcgggctgttcttctttctctacttcttcatcatggccacctgctttccgtttctgccgatctggctgtcggacgtcatcggcctgaataaaaccgaaaccggcctcgttttctccagcctgtcgctgttcgccatctgtttccagccgatcctcggagtgatctctgacaagctggggctgaaaaaacacctgatgtggatcgtgaccgttctgctggtgctgattgctcccttcttcctttatgttttcgctccgctgctgaaaaccaatatctggctcggggcgctgagcggcggcgcctatatcggctttgcattctccgcaggcgccggcgcgatggaggcctatatcgaacgggtaagccgcaacagcgggtttgaatacggcaaggcgcgcacctttggctgcctgggatgggcgctgtgcgcgactaccgccggaatgctgttcagcattaatcccgaatgggtgttctggatggggtcagccgccgcgctgctgctggtggtgctggtggccatcgccaaaccgcaggccagtcagtccgcgcaggtgatggattcgctcggcgccaatcgcccggcgatcgatttaaaaacggcggtgcgcatgttccgccagcgtaagatgtggatgtttattctgtatgttatcggcgtggcctgcgtgtatgacgttttcgatcagcagttcgccaccttcttcaaatcgttcttcgcgaccccggaagcgggcacccgcgcctttggtttcgccaccaccgcgggagaaatatgtaacgccatcattatgttcagctcgccgtggattattaaccgtatcggagcgaagaataccctgctgatcgccgggatggtgatggcggcaagaatgattggctcttccttcgccaccaccgccgcggaagtcgtagcgttgaaaatgctccatgcgctggaggtgccgttcctgctggtgggcgcctttaaatacatcaccggcgtgtttgacgtccggctgtcggcgactatttatctggtgggcttccagttcgccaagcaggtggcggcgatcttcctctccgccttcgccggcaatatgtacgatcggatcggctttcaggatacctacatgatcctcggcggtattgccctgaccgtcaccttaatatccgcgtttacgttagcgggtaagacgaaaaccgagccgctgcgcgataatgcaatgaccgtttaa

SEQ ID NO: 213116 - DNA, 315 bp, Klebsiella pneumoniae; identical to SEQ ID NO: 138640

SEQ ID NO: 213117 - DNA, 1149 bp, Klebsiella pneumoniae
atgagttttatgttggcactacctaaaatcagcctccacggcgcaggcgcgatcggtgatatggtcaagctggtagcgggcaaacagtggggcaaggcgctgatcgtcaccgacggtcagctggtgaagctgggcctgctggacagcctgttcgccgcgctggatgaacagcagatggcttatcagctatttgacgaggtattccccaaccccaccgaagcgctggtgcagcaaggctatgcggcttaccaggcggcccgctgcgattacctgatcgccttcggcggcggtagcccgattgataccgccaaagcgataaaaatcctcaccgccaacccaggcccctccaccgcctactccggcgtcggcaaagtgaaaaacgctggcgtgccgctggtggccatcaataccaccgccggcacggcggcggagatgaccagcaacgcggtaattatcgatagcgagcggcaggtgaaagaggtgattatcgacccgaacctgatcccggatatcgccgtcgacgacgccagcgtgatgctcgacattccgccagccgttaccgccgccaccggcatggatgccctgacccacgccatcgaggcctttgtctccgttggcgcccatccgctgaccgacgccaacgccctcgaggccattcgtctgattaacctgtggctgccgaaagcggtagacgatgggcacgatctgcaggcccgcgagcagatggcctttggccagtatctggcgggcatggcgttcaacagcgccggtctcgggctggtacatgccctggcccatcagcctggcgccacccacaacctgccgcacggggtatgcaacgccatcctgctgccgatcatcgaaaactttaaccgcccgaacgcggtggcgcgctttgcccgcgtggcgcaggcgatgggcgtcgatactcgcggcatgagcgatgaagctgccagcatggaggccatcaatgccatccgcacgctgagcaaacgcgtagggatcccccagggttttagccagcttggcgtcagcaaagccgatatcgaaggctggctggataaagcgctggccgacccatgcgcgccgtgtaacccgcgccccgccagccgcgatgaggttcgcgagctctatctggaggccttatga

SEQ ID NO: 213118 - DNA, 1005 bp, Klebsiella pneumoniae
atgagcaaaatgatggtatctgaagagatgaaaaacgccccggccgcgccgtcgccgctgcgccgcctgctgtgctgggaagggtttttactggcggtcaccctggcggtatttatcggcaacgccgtggcttccccgtacttcctcaatatctggaacctgtcggacgccacctttacctttaccgagaaggcgatcgtcgtcctgccgatggcgatgctgattatcgcccgggaaatcgatctgtcggtagcctcgacgatggctctcagctcaacggtgatgggcttctgcgcggcagcggggatggacactccgctgctggtggtcatcggcctgggcgtaggtctgctgtgcggcctgttcaacggcttgctggtgacccgctttaacctgtcgtccattgtgatcaccatcggcaccatgagcctgtatcgcggcatcacctatatcctgttgggcgatcaggcactcaaccactatccggagagctttgcctggttcggccaggggtacgtgtggggggcgctctcttttgagtttgcgctgtttatcctcctcgcggccgccttcaccttcctgctgcataaaaccaactttggtcgccggacctacgccatcggcaataacccgaccggcgcctggttctccgggattaacgttaagcgtcataacctggtgctgttcgcgctggttgggctgatggccgggctggcggcggtcctgctgacctcacggctcggcagtacccgccccaccctggcgatgggctgggagctggcggttgtcaccatggcggtgctcggcggcgtcaatattctcggcggctccggcagcatgcccggggtgatcatcgccgcctttctgatggggctggtgaccttcggcctgagcctgctgaacgtccccggcatcgtgatgtcggtgattatcggcgccatgctgatcgtggtgatctccctgccgattattacccggcggatgatgcagcgaagacgatgttaa

SEQ ID NO: 213119 - DNA, 1008 bp, Klebsiella pneumoniae
atgatgggacacgcatggctgaaacatcgcgaagcgctgctggcggtggtcattattttgatgatcggcgccatcggcagccgggcgccgtcgttcgtttcaccgggcaatctggtggagatgtttaacgataccgccatccttatcatcctcgccctcggccagatgatggtgttgctcaccaaaggcattgatctgtcgatggccgccaacctggcgctgaccgggatgatcgtcgccctgcttaacgcccactatccgggtattccggtggtagcgctgctggcgctggcgactctgctgggcctgctgatgggagtaattaacggcctgctggtctggcgcctcggcattcccgccattgtggtgaccctgggcaccatgagcatttatcgcggcattatcttcctgctgactgacggcggctgggttaactcacatcagatgagcgctgattttctcagtctgccgcgcagccccctcctggggctgccgctactgagctggtgcgccatcgccgcgctgctgctggtgggttatttcctgcgctacagccgcaccggccgggccttatacaccgcgggcggcaacgcgacggcggcatactacaccggcattaacgccggaaaaatgcagttcgtcagcttctgtctctccggcgcgctggccggcttctgcggctatctgtggatctcgcgcttcgccgtcgcctatgtcgacgtcgccaacggttttgaactccaggtggtcgctgcctgcgtgatcggcggtatcagcaccatgggcggaagcggacgggtgctgggctgcctgtgcggcgcgctgttcctcggggtcatcaataacgccctgccggtgatcggcatctcgcccttctggcaaatggcgatttccggggcggtgatcgtcatggcggtgctgctcaacgagcgcggcaatcgcggtcacgggcggttaatcctgcgcaacgcggcgttagccagacagaaacaggcggtgaaatcatga

SEQ ID NO: 213120 - DNA, 1512 bp, Klebsiella pneumoniae
atgtcagcatcaacgccactgctgtcgctgaaggggatcaccaaaatttttcccggtgtgcgcgcccttgagaacgtgcagcttgatctctggcccggcaaagtgaccgccttaatcggcgaaaacggcgcggggaaatccacgctggtcaaagtgatgaccggtatttatcagcccgaagagggcgagatcctctataaagcgatccccattcatctgccaacgccggagtcggcgcataaggtagggatcaccgccattcaccaggaaaccgtgctgtttgacgaactctcggtcagcgaaaacattttcgtcggccagtatctgtataagggactgctgaaaacgctcgactggccggcgatgcaccgcagagccaacgagatcctcacccggctggaagtccagatcgacccgcgagccacgctgaaaaccctcagcatcgcccagcgtcacatggtggcgattgcccgggcgctggctttcgacgcccaggtggtgatcctcgatgagccgaccgccgcgctttcccagcatgaaatcctcgagttttatcacatcgttgagcgtctgaagcaggacggcaaagcgatcctgtttatctcgcataagttcgatgaaatcttcgagctggccgattattacaccatcctgcgcgatggggtgtacgtcagctccggggcgataagcgacatcaccgaagagcggatggtgtcgatgatggtgggccgggcgatcagccaaacctacccgaaagtcgactgcacacccggagaaacggtgctggaggtgaccgatctctgtcatcctaccgagtttgcccatatcagcttccgcctgcgcaagggagaaattctcggcttttacggcctggtgggcgccggacgcaccgagctgatgcaggcgctctccggtgtctcgcgcccctcctccggcgagatccgcctgaacggcagaaccatgcgctttcaccagcccgccgacgccatccgcgcgggcatcgtctgcgtgccggaagagcggcagaaacagggagcgatcatcgccctgcctatcgcccagaacatcagtttaccgcagctcagcaagctcaaccctaacggcgtcctgaacgacgcccgggaatggcggctggccgacgagtacgcctcgcgcctgcaggtaaaagccttcagctggcggcagccggtggagaccctctccggcggcaaccagcagaaagtggtgattggcaaatggctggcgacccagcccgaagtgatcattctcgatgagccgaccaaaggcatcgatatcggctcaaaggccgccgtgcatcagtttatgtccgagctggtcagccaggggctggcggtgattatggtgtcgtcagagctgccggaagtgatgggcatggccgaccggattatcgtaatgcacgaagggcagatggtcgccgagtaccgggccggggaagcgacggcggaaaccatcgttagcgccgctagcggcatcggccaggaggcggcatga

SEQ ID NO: 213121 - DNA, 987 bp, Klebsiella pneumoniae; identical to SEQ ID NO: 138645

SEQ ID NO: 213122 - DNA, 831 bp, Klebsiella pneumoniae
atgcagaccattatcgacgcctggttcgtccagggcatgatcaaagccacctccgacgcctggctgaaaggctgggacgaacgcaacggcggcaacctgacgctgcgtctggatgaagcggatatcgaaccttacgcggcggatttccacgccaaaccgcgctatatcgccctcagccagccgatgccaaccctggccaaccagccgtttatcgtcaccggctccggcaaattcttccgtaacgtccagctcgacccggccgctaacctcggcgtggtgaaggtcgacagcgacggcgcgggataccatatcctgtggggcctgacggaggatgccgtcccgacctccgagctgccggcacacttcctgtcgcacagcgagcgcatcaaactgaccggcggcaaagaccgggtgatcatgcactgccatgccaccaacctgatcgccctgacctatgttctggagaaccacagcgatcttttcacccgtaagctgtgggaaggtagcaccgaatgtctggtggtcttcccggatggcgtcggcattctgccgtggatggtgccgggcaccgatgaaatcggccaggcgaccgccgaaaccatgcaaaaacactcgcttgtgctgtggccgttccacggcgtcttcggcagcggccccacgctggatgagaccttcggcctgatcgataccgccgagaagtccgccgaagtgctggtgaaagtcttgtcgatgggcgggatgaagcagaccatcacccgcgacgagcttatcgcccttggcaaacgcttcaacgtgcagccgctgcagtccgctttagatctttatccataa

SEQ ID NO: 213123 - DNA, 1260 bp, Klebsiella pneumoniae
atgaccactcaacttgaacaagcctgggaaattgctaagcagcgctacgccgccgtcggcgtggatgtcgaggaggccctgcgccagctggaccgtctgcccgtctccatgcactgctggcagggtgacgacgtcgccggtttcgaaaacccggcgggaagcctgacaggcggcatccaggcgaccggcaactacccgggcaaagcgcgcaatgcagaagaactccgcgctgaccttgagcaggcgctgagcctgatcccggggccaaagcgtctcaatctgcacgctatttacctggaatccgacgcgccggtagcgcgcaatgagattaagccggagcactttaaaaactgggttacgtgggcgaaagccaacaaactggggctggatttcaacccctcctgcttctcgcatccgctgagcgccgacggctttaccctgtcgcacgccaacgatgagatccgccagttctggatcgaccactgcaaagccagccgccgcgtatccgcttattttggcgaacagctgggcacgccgtcggtgatgaatatctgggtgccggacggcatgaaggatataaccgttgaccgcttcgccccgcgccagcggctgctgaacgcccttgatgaggtgatcagcgagaagctcgacccggcgcaccatatcgacgccgtggagagcaagctgttcggcatcggcgccgaaagctacaccgtcggctccaacgagttctatatgggttacgccaccagccgtcagacggcgctgtgcctcgatgccggccacttccatccgacggaagtgatctccgacaagatctccgccgccatgctctacatcccgcgcctgctgctgcacgtcagccgcccggtgcgctgggacagcgaccacgtggtgctgctggatgatgaaacccaggccatcgccagcgaaatcattcgccataacctgtttgaccgcgtgcacatcggcctcgacttcttcgatgcctccatcaaccgcatcgcggcctgggtgattggcacccgcaatatgaaaaaagcgctgctgcgcgccctgctggaaccgaccgcccagctgcgccagctggagaacgacggcgattacaccgcccgcctggcgctgctcgaagagcaaaaatcgctgccgtggcaggccatctgggagatgtactgtcagcgtcacgacacgccggcgggcagccagtggctggacagcgtacgggcttatgagaatgcggttctgagccagcgcgggtaa

SEQ ID NO: 213124 - DNA, 1467 bp, Klebsiella pneumoniae
atgagtattcgtcattgtgtcgctgtcgatttaggcgcctccagcgggcgggtgatgctcgccagctatcagcccgggccgcgcgccctgacgctgcgcgaaattcatcgcttcaccaatagtctgcagaaagtagacggcttcgactgctgggatgtagatagcctggaaggcgagatccgccgcgggctggagaaagtgtgtgagcagggcattctgatagacagtatcggcatcgatacctggggggtagattatgtcctgctggataagcagggccagcgcgtcgggctgccgatctcctatcgtgacgaccgcacccagggcctgctgcgtcacgctgaagcgcagctgggccgggcggaaatctatcgccgcagcggcattcagtttttgccgtttaacacgctttatcagctgcgcgcgctggtggagcagcagccggagctggtcagtcaggctgcccatgccctgctgatccccgactatttcagcttccgcctgaccggcaatctgaactgggaatataccaacgccaccaccacccagctggtcaatattaacagcgatagctgggatgagacgctgctgaactggaccggcgcgccgttggcgtggttcggaaagccgacccaccccggcaatgtgataggccactggatctgcccgcagggtaaccgaattccggtagtcgctgtcgccagccacgacaccgccagcgcggtgatcgcctccccgctggccgaccgccatgccgcctatctctcctccggcacctggtcgctgatggggtttgaaagcctgacgccgtacacctgcgacgcggcgctgcaggccaatatcaccaacgaaggcggagccgaaggccgctatcgggtgctgaaaaatatcatgggcctgtggctgctgcagcgggtgctaaaagagcaaaacgtcagcgacctgcaggggctgatcgcccgcaccgccgcgctaccggcgtgccgcttcataattgactgcaacgatgaccgctttatcaacccggccagtatgagcgccgagatccaggccgcctgtcgcgacgccgggcagccggttcctgaaagcgatgccgaactggcgcgctgcattttcgacagcctggcgctgctctacgcccgggtgcttaacgagctggcggcgctgcgcggccaccccttcagccagctgcatatcgtcggcggcggctgtcagaacacgctgctcaaccagctgtgcgctgacgcctgcgggatcgccgtcgtggccggcccgatagaggcctccaccctcggcaatatcggcatccagttaatgaccctcgacgagctggccaatgtcgatgagtttcgtcaggtagtgcgcggcaacgcggcgctcaccacttttacccccaatcctgatagtgaaattgcccgtttcgtggcgcagtttcagccacaacagaccaaggagctttgcgcatga

SEQ ID NO: 213125 - DNA, 837 bp, Klebsiella pneumoniae; identical to SEQ ID NO: 138260

SEQ ID NO: 213126 - DNA, 846 bp, Klebsiella pneumoniae
gtggccggtctgattttacgtaaagaggagtttttcccttccgccacacaggcagtggcggtggcagaccgctacccgcaaaatgtctttgccgaacatacccatgagttctgcgagctggtgctggtgtggcgaggcaacgggctgcacgtccttaacgatcgtccctggcgcattacccgcggcgatctgttctacattcgcgccgaagataaacactcctatgcttccgttaacgatctggttctgcagaacatcatctattgcccggagcggctgcagctcaattttgactgggccggggcgatccctggcctcttcggtacgccgtggaagccccactggcgcatgggcagcacaggtatggcgcaggcgcgccaggtgattagccagcttgagcatgagtgcgcccggcgcgacgcgcagggaaatgcgatggccgaactgctttttgcccagctggcgctgacgttgcagcgccatcgctacgcgacggatgatcccgcggcgacgcagcgcgaagcgctgctggacaaactgctggccgcgctggcggccagcctcagccgcccctttgttctggagcgtttctgcgagcaggagggcggcagcgagcgggcgcttcgccagcagtttcgccagcaaaccgggatgaccatcaatcactatttacgccagctgcggatctgccatgcgcagtatctgctgcagcataccgagcgcttaatcggcgatatcgccatgcagtgcggctttgaggacagtaactacttttcggtggtttttagccgggaaatcggcatgtcgccggggcagtggcggcagcgcagtcgcgccgccgcctga

SEQ ID NO: 213127 - DNA, 1035 bp, Klebsiella pneumoniae
atgaaccacgcgattacgatgggtattttttggcatttgataggggccgccagtgccgcctgtttctatgccccgttcaagaaagtaaaacactggtcgtgggaaaccatgtggtcggtcggggggatcgtctcctggctgattctgccctgggccatcagcgccacgctgttacccgacttctgggcctactaccgctcttttagcgcctccacgctgctgccggtctttctgttcggcgccatgtggggcattggtaatatcaactatggcctgaccatgcgctatcttggcatgtcgatggggattggcatcgccattggcatcacgctgattgtcggcacgctgatgacgccgattattaacggtcagtttgcagtgctgatgcacacccagggcggtcaaatgacgctgctcggcgtgctggtggcggtgattggcgtcggcatcgtcacccgcgcaggccagctgaaagagcgcaaaatgggcatcaaagccgaagagttcaatctgaagaaagggcttctgctggcggtaatgtgcggtatcttctccgcagggatgtcgttcgcgatgaacgccgccaaaccgatgcatgatgccgccgcggcgctcggcgtcgacccgctgtacgcagcgctgccaagctacgtggtgattatgggcggcggggcgctggttaaccttggcttctgctttattcgtctggcgaaagtgaagaacctgtcagtcaaagccgatttctcgctggccaaaccgcttatcatcagcaaccttctgctctccgccctcggcggtctgatgtggtatctccagttcttcttctatgcctggggccacgccagcattccggcgcagtatgattatatgagctggatgctgcacatgagtttctacgtgctgtgcggcggtgtggtgggtctggtgctgaaggagtggaacaacgccggccgtcgtccggtgagcgtcctgagcctcggctgcgtggtgattatcatcgccgccaatatcgtcggtctgggaatggccagttaa

SEQ ID NO: 213128 - DNA, 621 bp, Klebsiella pneumoniae
atgagctataccctgccatccctgccttacgcttacgatgctctggaaccgcacttcgacaagcagacgatggagatccatcacactaaacaccaccagacctacgtgaacaatgccaacgccgcgctggaaagcctgccggagttcgctaacctgtccgctgaagagctgattaccaagctggatcagctgccggctgacaaaaaaaccgtactgcgtaacaacgccggcggccacgcgaaccacagcctgttctggaaaggcctgaaaaccggtaccaccctgcagggcgacctgaaagcggctatcgagcgcgatttcggttccgtggagaacttcaaagcggaattcgaaaaagccgctgctacccgtttcggctccggctgggcgtggctggtcctgaaaggtgataaactggccgttgtctccaccgccaaccaggattccccgctgatgggcgaagccatttccggcgcttccggcttcccgattatcggcctggacgtctgggaacacgcttactacctgaaattccagaaccgccgcccggactacatcaaagccttctgggacgtagtgaactgggacgaagctgcagcgcgttttgccgccaaaaaataa

SEQ ID NO: 213129 - DNA, 675 bp, Klebsiella pneumoniae
atgcattatccggtgaatgtctttgtcggcaaaatcagggactacgcgggcagtcgccccagcgcgatcgacaaaatccaggtcgacggagaattgcagctcggcgatctcggtctcgatggggaccagcaggcggagaagaaaatccacggcgggccggaccgcgcgctgtgtcattatccgcgcgaacactatgccgactggatccgtgacttcccccagcaggccgagcggttctgcgcgccggcgttcggcgaaaacctctccaccaccgggcttaccgagcaaaacgtttatatcggcgatatctttcgctggggcgaggcgctgatccaggtcacccagccgcgatcgccgtgcttcaagctcaactttcattttgcgatcaatgatatggcgcagctgatgcaaaacagcggaaaaaccggctggctgtaccgggtgattgccggagggcaagtttccagcgatgcgccgctcgagctggtttcccggctgagtgatgtcagcgttcatgaggccggggcgattgcctggcagatgccgtttgatgatgatcagtaccaccgcttattgtcggcagcgggcctgtctgttagctggagccgaacgatgcagaaacggcgtttaagcggcaagatagaggatagttcgcggagattatgggggaaataa

SEQ ID NO: 213130 - DNA, 1374 bp, Klebsiella pneumoniae
atgattggaagtttgactgcacgcatcttcgccatcttctggctcacgctggcgctggtgttgatgctggtgctgatgttgcccaaactggattcccggcagatgaccgagctgctggaaagcgagcagcgtcagggcatcatgatcgagcagcacgtcgaggccgagctggccaacgatccgccaaacgacctgatgtggtggcgtcgtttgtttcgcgccatcgataaatgggcgcctccgggacaacgcctgctgctggtgaccagcgaaggccgcgtgatcggcgcagaacgcaacgaaatgcagatcattcgtaactttatcggccaggccgataacgccgatcatccgcagaaaaaacgctatggccgcctggaaatggtgggcccgttttccgtccgggacggggaggataactatcagctctatctgattcgtcccgccagcacctcacaatccgactttatcaacctgctgtttgaccggccgctgctgctgctgatcgtcacgatgctggtcagcgccccgctgctgctgtggctggcgtggagcctggcgaaaccggcgcgtaagctgaaaaatgccgccgatgaagtcgcccagggcaacctgcgccagcatccggagctggaagccgggccgcaggagtttttagccgctggcgccagttttaaccagatggtgacggccctggagcggatgatgaccagccagcagcggctgctgtccgatatctcgcacgagctgcgcacgccgcttacgcgcctgcaattgggtaccgccctgctgcgtcgccgcagcggagagagcaaggagctggagcgtatcgaaaccgaagcgcaccggctggacagcatgatcaacgacctgctggtgatgtcgcgcaatcaggcgaaaaacgccctggtcagcgagacggtgaaagccaatcagctatggaacgaagtgttggacaatgcggcctttgaagctgagcagatggggaaatctttcaccgttgagtatccgccgggcccatggccgctgtacggtaaccctaatgcgctggaaagcgcgctggagaatatcgtgcgcaacgccctgcgctactcgcatacgaaaatttccgtcagcttctcggtggataaagacgggattacggttaacgtcgatgacgacggcccgggagtcagcccggaggatcgcgaacagattttccggccattctaccggaccgacgaggcgcgcgaccgcgagtccggcggcaccggcctggggctggcgattgtcgaaaccgctattcagcagcaccgcggctgggtgaaggccgacgacagcccgctgggtggtctgcgtttaacaatctggctgccgctgtataaacgaacctga

SEQ ID NO: 213131 - DNA, 699 bp, Klebsiella pneumoniae; identical to SEQ ID NO: 138266

SEQ ID NO: 213132 - DNA, 504 bp, Klebsiella pneumoniae
atgcgcaatgttatcgctgccgtcatggcctcaacgctggcgctaagtgcatatagccaggccgctgaagtcgttaccagcgttaactggctccccggagacgacgggggacagcgcggtagccaaagccatatgtttgacggcataagtttaaccgagcagcaacgtcagcagttacgggatcttatgcaacgggcacgccacgacaggctccccgttaatgttagcgaaatggagacaatgcatcgccttgtcaccgcagaaaattttgatgaaaacgctgtgcgcgctcaggcagaaaagatggcgcaggaacaggttgcccgccaggtcgagatggctaaggttcgcaaccagatgtaccacctgcttacgccagagcagcaagcggttttaaatgctaagcaccagcagcgtatggatcagttgcgtgaggttgcaaggatgcagaaaggctcagcgatgatgctttcgagtagtagcaacaccctgcaaccccagtaa

SEQ ID NO: 213133 - DNA, 903 bp, Klebsiella pneumoniae
atgaatcaatcttatggccggttggtcagtcgcgccgctatcgccgcgacggctatggcctccgcgttacttttgatcaaaatttttgcgtggtggtataccggttctgtcagtattctggctgcgctggtggattcgctggtggacattgccgcctcgctgaccaacctgctggtggttcgctattcgctacagcctgctgatgaagaacatacctttggtcatggcaaagcggagtcgctggcggcgctggcgcaaagcatgtttatctccggctcggcgctgttcctgtttctcaccggcattcagcacctggtgcgtccggagccgctgcaggccgccggcgtcggggtcgtcgtcacattgatcgccctcgttagtacgctggcgctggtgactttccagcgctgggtggtgcgaaaaacccagagccaggcggtgcgggcggatatgcttcattatcagtctgatgttatgatgaacggcgccattctggtggcgctgggcctctcctggtacggctggcatcgcgccgacgcgttgtttgccctggggattggcatctatattttatatagcgcgctgcggatgggctatgaggcggttcagtcactactcgaccgcgccttgcctgacgaggagcgtcaggacattatcaccatcgtgaccgcatggcccggcatccgcggggcgcacgatctacgaacgcggcagtcagggccgacccgctttattcagattcatttggaaatggaagataacctcccgctggtgcaagcccacgtgattgcagaccaggtggagcaggcgattctgcgccgtttcccggggtccgatgtcattatccatcaggatcccagctctgtggtgccagcggcgcagcagggcttttttgagcgttag

SEQ ID NO: 213134 - DNA, 963 bp, Klebsiella pneumoniae
atgattaagaaaatcggtgtgttgacaagtggcggtgatgcgccgggcatgaacgcagcaattcgtggcgttgtgcgcgcggcattaacggaaggtctggaagtttttggaatctatgacggttacctcggattgtatgaagaccgtatggttcagctcgaccgttacagcgtttccgacatgatcaaccgcggcggtaccttcctgggctccgctcgcttcccggaattccgcgaagaacacatccgcgctgtggctatcgaaaacatgaagaagcgcggcctggacgcgctggtggttatcggcggtgacggttcctatatgggggcgatgcgcctgaccgagatgggcttcccatgcatcggcctgccgggcactatcgacaacgatatcaaaggcactgactacaccatcggcttctttactgccctgagcaccgtggtggaagcgattgaccgtttgcgcgacacctcctcttcgcaccagcgtatctccgtggtggaagtgatgggccgttactgtggcgacctgaccctggcggcggcgattgccggcggctgtgagttcatcatggtgcctgaagtggaatatacccgtgacgatctggtggcagaaatcaaagccggtatcgcgaaagggaaaaaacacgctatcgtggccatcaccgagcacatgtgcgacgttgacgagctggcaagctacatcgagaaagagactggccgtgaaactcgcgccaccgtcctcggccacattcagcgcggcggttccccggttccttacgaccgcatcctggcttcccgcatgggcgcctatgcgattgagctgctgctgcagggccatggcggccgttgcgtcggcatccagaacgagaagctggtgcaccacgacataatcgatgccatcgagaacatgaagcgtccgttcaagaacgactggctggattgcgcgaagaaactgtactaa

SEQ ID NO: 213135 - DNA, 486 bp, Klebsiella pneumoniae
atgaaatacgatacttccgagctttgtgacatctaccaggaagatgtcaacgtcgtggaaccgctgttctctaactttggaggacggtcgtcgtttggtggacagatcattacggttaaatgtttcgaggataacgggttgctctacgatctgctcgagcagaatggccgtggtcatattctcctgatcgacggcggcggctcagtacgacgcgcgttaattgacgctgacctggcgcgtctggccgtccagaatgaatgggaagggttggtggtctatggcgcggtgcgccaggttgacgaccttgaggaactggacattggtattcaggcgctggcggcgattccggtcggcgcggctggcgaaggcatcggcgaaagcgacgtgcgcgtcaatttcggcggggtgactttcttctccggcgaccatctgtatgccgataacaccgggatgatcctgtcggaagacccgctggatatcgaataa

SEQ ID NO: 213136 - DNA, 921 bp, Klebsiella pneumoniae
atgactgatatcagccgttcacaggcgtggctggaaagcctgcgtcctaaaacgttaccgctggcatttgccgcgattattgttggcaccgtccttgcctgggagcagggccattttgatccctgggttgccctgctggcgctgatcactgccggcttgctgcaaattctttccaacctcgccaatgactacggcgacgcggttaaggggagcgataaaccggatcgcatcgggccgctgcgcgggatgcagaaaggggtgattaccccccagcagatgaagcgcgccctgatcgtcaccgtcgtactcatctgcctgtttggtctggcgctgctgtgcgccgcctggcagagcgtcggcgatttcatcggcttcctcgccctgggaggcctgtctatcgtggccgccatcacctacacggtgggcacccgtccgtatggatatattggtctgggtgatatctcagtactcgttttcttcggctggctgagcgtcctcggcagctggtatctgcaagcccataatgtggaagcggccatttttctgccggcgacagcctgcggtctgctggcgaccgccgtgctgaacatcaataatctgcgcgatatcgacagcgaccggcagaacgggaagaacaccctcgccgtgcgcctgggcccggtcaatgcccgccgctatcatgcctgcctgctgctcggcgccctgctgtgtctggcgctgtttaacctgctggcgctgcattcagcctggggctggctgtttattctcgccacgccgctgctggtgaaacaggcgcgctacgtcctgcgcgaatccgatccgctggcgatgcggccaatgctcgaaaagacggtcaaaggggctttactaaccaacctgctgtttgttatcggaattattgccagtaagctgatggcttaa

SEQ ID NO: 213137 - DNA, 1335 bp, Klebsiella pneumoniae
atgtctgaaatgaccccacgcgaaattgtcagcgaactggacaaacacattatcggtcaggacgccgccaagcgttctgttgctatcgccctgcgtaaccgctggcgtcggatgcagcttaacgaagagctgcgtcatgaagtcacgccgaaaaacattctgatgatcggcccaaccggcgtcggtaaaaccgaaatcgcccgtcgtctggcaaaactggctaacgcgccgtttatcaaagttgaagcgacgaagttcaccgaagtgggctatgtcggtaaagaagtggactccatcatccgcgatttgaccgatgcggcgatcaaaatggttcgcatgcagtccatcgataagaaccgttaccgcgcggaagagctggcggaagagcgcgtgcttgacgtgctgatcccaccggcgaagaacaactggggccagactgagccgtcgcaggaaccgtctgcagcgcgccaggcgttccgtaaaaaactgcgtgaaggccagctggacgataaagagattgaaatcgatctcgctgcggcgccgatgggcgttgaaatcatgtcccctccgggcatggaagagatgaccagccagctgcagtctatgttccagaacctcggcggccagaagcagaaaccgcgtaagctgaaaatcaaagacgcgatgaagctgctgattgaagaagaagcggccaaactagtcaatccggaagagctgaagcaggaagccatcgacgctgtagagcagcacggtatcgtctttatcgacgaaattgacaaaatctgtaagcgcggcggcaacacctccggcccggacgtctcccgcgaaggcgtacagcgcgacctgctgccgctggtggaaggctgcaccgtctccaccaaacatgggatggtcaagaccgaccacatcctgtttatcgcctccggcgcattccaggtggccagcccatccgatctgatcccggaactgcaggggcgtctgccgatccgcgttgagctgaaggcgctgaccacccacgacttcgagcgcatcctgaccgagccgaatgcctccatcaccgtgcagtacaaggcgctgatggcgaccgaaggggtgaacatcgaattcaccgaagacggcatcaagcgcatcgcccaggccgcatggcaggtaaacgaaaccaccgagaacatcggtgcgcgtcgcctgcacaccgtgctggagcgcctggtggaagatatctcctatgatgccagcgagatgaacggccagaccgtcactatcgatgccgaatatgtgagtaaacacctggatgttctggtggcagatgaagatctgagccgttttatcctataa

SEQ ID NO: 213138 - DNA, 531 bp, Klebsiella pneumoniae; identical to SEQ ID NO: 138305

SEQ ID NO: 213139 - DNA, 834 bp, Klebsiella pneumoniae
atggtggcgatcgcggcggctgtgctggtggcctttatcggtggcctctatttcattacgcatcataagaaagaagaagcggaagcgatgcaaaatcgccaggccgccggcaacggcttgccgcccaaaccggaagagcgctggcgctatattaaagagctggaaagccgccagcctggcgtccgcgcgccgaccgaaccgaccgccggtggcgaagtcatgaaaccggaacagctgctcgcccagatgcaggccgatatgcgccagcagccgacccagctgaccgaagtgccgtggaacgaacaaacgccggcgcagcgccagcagacgcttcagcgtcagcgtttagcgcagcaacagcagcaggcgcagcagcaacagtgggcgcagactcaggcgcagaccgtccaacagcagccgccgcgcgttcagcagccgaagccggttcagcagcaacaaccgaagcagaccgcgtcaaaccagcagccgtaccaggatctgctgcagacgccagcgcataccaataccacgcagccgcgtacccaggccgcggcgccggtaactcgggtggaagaagcgccgaaaaccaccgccgagaagaaagacgatcgtagctggatgatccagtgcggctcttttaaaggcgccgagcaggccgaaaccgtccgcgctcagctggctttcgaagggtttgcttcgcacattaccactaacaacggctggaaccgcgtggttattggcccgttgaaaggcaaagaaagcgccaacgagatgatcacccgcctgaagatggctggacacgcgaactgcattcgtctcgccgccaggggttga

SEQ ID NO: 213140 - DNA, 1029 bp, Klebsiella pneumoniae
gtgaagcccaaaaaacaagtggttgccgccaccatgaaagacgtcgccctcaaggcaaacgtttccacggcaaccgtgtcccgagcgttgatgaaccctgataaggtgtcgcaagccacccgtaaccgggtcgagcaggcggcgctggaagtcggctatttaccgcagtcgctcggacgcaatatgaagcgcaacgaatcgcggacgatcctcgtgatcgtcccggatatctgcgatcccttctttagtgaagtgatccgcggtattgaagtcactgccgccgagcacggctatctggtgttaatcggcgattgcgcccaccagaatcagaaagaaaaaacctttatcgaccttatcatcaccaagcagatcgacggcatggtgctgctcagctcgcgcctgccgtttgacgccagcgtggaagagcagcgcaatttgccgccaatggtcatgtcgaatgagtttgcgccggagctggagctgcccaccgtccatatcgataacctgacggcggcctttaacgcggtaaattatctccacgagctgggacatcagcgtatcggctgtatcgccggcccggaagatatgccgttgtgccattatcgcctgcagggttatgtgcaggcgctgcgccgcagcggtatcaccgtcgatccgcactatattgctcgcggcaactttaccttcgaagccggcgccaatgcgctggagcagctgctggcgcagccggtgccgcccacggcggtcttttgccatagcgatgtgatggcgctgggcgccttatcgctggcaaaacgtcgcggtctgaaagtgccggacgacctgtcaattgtcggcttcgataacatcgcgttgtctgaattttgcgatccgccgttgaccacggtttcacagccacggtttgatatcggccgtgaaggaatgctgctattactggagcaaatgcaggggcataacgtgaacagcggctcgcgtctgctcgattgcgaactgattgttcgcggcagtacgcaaaaaatcagacgataa

SEQ ID NO: 213141 - DNA, 2196 bp, Klebsiella pneumoniae
atgtccgtcgcccacgttgccctacccgttccgctaccgcgcacttttgactacctgctgcctgaaggcatggcggtcaaagcgggctgtcgggtgcgggtgccgttcggcaaacaggagcggatcggcattgtcgcggcggtgagcgagcgcagcgaactgccgctggatgagctaaaaccggtcgccgaagcgctggacaacgagccggtcttctccacgactgtctggcgactgctgatgtgggcggctgagtattaccatcacccgatcggcgatgtgctgttccatgcattacccgttatgctgcgccagggcaaacccgccagcgccacgccgctgtggtactggttcgccaccgagcaggggcaggttgtcgaccttaacggtctgaaacgctcccggaagcagcagcaggcgctggcggcgctgcgccagggcaaaatctggcgtcatcaggttggcgaactggaattcaatgaagcggcgctgcaggcgctgcgcggcaaagggctggcggaactggcctgcgaagcgcccgccctcaccgactggcgcagcgcgtattcggttgccggcgaacgcctgcgcctgaataccgagcaggccaccgccgtcggggcgatccacagcgccgccgatcgtttctccgcctggctgctggcgggtattaccggctccgggaaaacggaagtctatttgagcgtgctggagaatgtgctggcgcaggggcgccaggcgctggtgatggtgccggagatcggcctgacgccgcaaaccatcgcccgatttcgccagcgctttaacgcgccggtggaagtgctgcactccgggctcaatgacagcgaacgtctctcggcctggctgaaggcgaaaaatggcgaagcggccattgtgatcggcacccgctcctcgctgtttaccccatttaaagatctcggcgtcatcgtcatcgacgaagagcatgacagctcctacaagcagcaggaaggctggcgctaccatgcccgcgacctggcggtatggcgcgcccacagcgagcagatcccgataattctcggctcggcgacgccggcgctggagactctgcataacgtccgccagggtaaataccgccagttaaccttaagcaaacgcgcgggcaatgcgcgcccggcccagcagcacgtgctcgatctcaaagggcaaccgctgcaggcgggcctgtctcccgcgctgattagccgtatgcgccagcacctgcaagcggataaccaggtgatcctgtttcttaaccgccgcggctttgcgccagcgctgctgtgccacgattgcggctggatagcggaatgcccgcgctgcgacagttactatacgttgcaccaggcgcagcaccatctgcgctgccaccattgcgacagccagcgcccgatcccgcgccagtgtccttcctgcggctccacgcatctggtgccggtagggatcggcaccgagcagctggagcaggccctggcgccgctgttccctgaggtgcctatctcgcgtatcgaccgcgataccaccagccgcaaaggagcgctggaggagcatctcgccgccgtccatcgcggcggggcgcgtattctgattggcacccaaatgctggccaaagggcaccacttcccggacgtcactctcgtctccctactggatgtcgacggggcgctgttttccgctgatttccgctccgcagagcgtttcgctcagctttatacccaggtctccggacgagcgggccgggcaggaaaacagggcgaggtcattcttcaaacccaccatccggaacaccctctactgcagaccctgctgtataaaggctacgacgcctttgccgaacaggcgctggcagagcggcagacgatgcagctgccgccgtggaccagccatgtgctgattcgtgcggaagaccataacaaccagcaggcgccgctgtttttacaacagctgcgcaatctgctgcaggccagcccgctggccgacgaaaagctatgggtgctcggtccggttccggcgctggcgccaaagcgcggcggccgctggcgctggcaaatattgctgcagcatccttcgcgggtgcgtctgcaacatatcgttagcggtacgctggcgctgatcaatacgcttccggaggcgagaaaagtgaagtgggtgctggatgtcgatccgattgaaggataa

SEQ ID NO: 213142 - DNA, 213 bp, Klebsiella pneumoniae; identical to SEQ ID NO: 137916

SEQ ID NO: 213143 - DNA, 318 bp, Klebsiella pneumoniae; identical to SEQ ID NO: 137915

SEQ ID NO: 213144 - DNA, 1161 bp, Klebsiella pneumoniae
atgacgcgtaaacaggccaccatcgcagtgcgtagcggtttaaatgacgacgagcagtacggttgcgttgtcccgccgattcacctctccagtacctataacttcaccggctttaatgaaccgcgcgcccacgactactcccgtcgtggcaatccgacgcgcgatgtggtgcagcgcgccttagcggagctggagggcggcgccggcgcggtgctgaccaataccggaatgtcggcgatcctgctggtgacgacggtgttccttaaaccgggcgatctgctggtggcgccgcacgactgctacggcggcagctaccgtctgttcgacagcctggcgaagcgcggctgctatcgcgtccagtttgtcgatcaaagcgatgagcaggcgctgcgggcggcgctggcggaaaaaccgaagctggtgttggtggaaagcccaagtaatccattgctgcgggtggtggatattgcgaaaatctgtggtctggcgcgtgaggccggggcaattagcgtggtggacaacaccttcctgagcccggcgttgcaaaacccgctggcgctgggcgccgatctggtgctgcattcctgtaccaaatacctcaatggtcactccgatgtggtggccggggtggtgattgccaaagatccaacaactgtcaccgaactggcatggtgggcgaataatattggcgtcaccggcagcgccttcgacagctatctgctgttgcgcgggctgcggacgctgtctccacggatggaagtggcgcagcgaaatgccctggcgatcgttgagtatctgaaaacccagccgctggtgaaaaagctgtatcatccatcgctgccggaaaaccaggggcatgaaattgcggcgcgtcagcaaaaaggttttggcgcaatgttaagcttcgagcttgacggtgacgagcagacgctgcgccgttttctgagcgggctgtcgctgtttacactggcggaatcgctggggggcgttgaaagcctgatttcccatgcggcaacgatgacgcatgccggcatggcgcctgaagcgcgtgccgccgccggaatttcagaaacgctcctgcgtatatcgaccggtattgaagatggtgaagatttaattgccgacctggaaaatggcttccgggcagcaaacgaggaataa

SEQ ID NO: 213145 - DNA, 2433 bp, Klebsiella pneumoniae
atgagtgtgattgcgcaggcaggggcgaagggtcgtcagctgcacaaatttggtgggagtagtttagcggatgcgaaatgttacctgcgcgtcgcggggatcatgaaggagtattcgcaggcgggggatatgatggtcgtctccgccgctggcagcaccaccaaccagctgatcagctggcttaagcttagccagagcgatcgccttgctgcgcatcaggttcagcagtcgcttcgccgctatcacaccgagctgattggcggtctgctggagcctgcggcggcggatacgttgatagccgcctttatccacgaccttgagcgtctggctggtctgctggacggcggggtttccgaagcggtctatgcggaagtggtcggccatggggaagtgtggtccgcgcgcctgatggcggcggttctcaaccagctgggtatggaagccgcctggctggacgcgcgcgcgttcctgcgcgcggaacgcgccgcgcagccgcaggtggatgagggattatcttacccactgctgcagcagctgatggcgcagcatcctaacaaacgtctggtggtgaccggctttatctcccgcaaccaggccggcgaaaccgtcctgctgggccgtaacgggtctgactactctgccacccagatcggcgcgctggcgggcgcctcccgggtcactatctggagtgacgttgccggggtgtacagcgcggatccgcgcaaggtgaaagacgcctgcctgctgccgctgctgcgtctggacgaagccagcgagctggcgcgcctggccgcgccggtgctccatgcccgcacgctacagccggtttccgccagtgatatcgatctgcagttacgctgcagctacacgccggaacagggttccacgcgcattgagcgcgtgctggcctccggtaccggcgcacggattgtcaccagccatgacgacgtctgcctggtggagttccaggtgccggccggtcacgatttcaaactggcgcataaagagctggacgctctgctcaaacgcgcccagctgcgcccgttagccgttggcgtccatgccgaccgtaagctgctgcagttctgctatacctccgaggtggccgacagcgcgctgaaattgctcgatgaagccggtctgccgggcgagctgcgtctgcgtcagaagctggcgctggtggcgatggtgggcgcgggagtcacccgtaacccgctgcactgccaccgtttctggcagcagctcaaagggcagccggtggagttcacctggcagtctgaagaggggatcagcctggtggcggtgctacgcgccgggccgacggaaagcctgatccaggggctgcatcagtccttgtttcgcgccgaaaagcgtattggcctgatgctgttcggcaaagggaacattggttcccgctggctggagcttttcgcccgtgaacaaactacgctctcggcgcgtaccggtttcgagtttattctcgccggcgtagtcgacagtaaacgcagcctgctgaattacgacgggctggatgccagccgggcgctggctttcttcaacgatgaagcggtggagcaggatgaagagtcgctgttcctgtggatgcgcgcgcacccgtatgatgatttagtggtgctggacgtcaccgccagcgaacagctggccgaccagtatcttgattttgccagccatggcttccacgtcattagcgccaacaagctggcgggcgccagcagcagtgataaatatcgtcagatccacgacgcgtttgagaagacggggcgccactggctatataacgccaccgtgggcgccggcttgccggtgaaccatacggtgcgcgacctgatcgacagcggcgatactattctcggcctgagcggtatcttctcgggaacgctctcctggctgttcctgcagttcgatggcaccgtgccgttcaccgacctggtggatcaggcgtggcagcaggggctgaccgagccggatccgcgcgtcgatctgtccggtaaggatgtgatgcgtaagctggtgatcctcgcgcgggaagcgggctatgacatcgaaccggatcaggtgcgtgtggaatcactggtgccggcgcactgtgaagaggggtcggtcgatcacttctttgagaatggcgaagagttgaacgagcagatgctgcagcgtctggaagcggcccgcgagatgggactggtgctccgctacgtggcgcgctttgatgccaacggcaaagcacgcgtcggtgtggaagcggtacgcgaagagcacccgctggcggcgctgctgccgtgcgataacgtgtttgccatcgaaagccgctggtatcgcgataacccgctggtgatccgcgggccaggcgccgggcgcgatgtgaccgccggggcgatccagtcggatattaaccgcctggcgcagctgctgtaa

SEQ ID NO: 213146 - DNA, 1137 bp, Klebsiella pneumoniae
gtggatactctctttaccattaacgcctgtaaaacttttggctgccgcaatttaggtttaccgtctgcggctgagtatcatttcccgaattttcggctgggctacccggcgctctactgcgcagcctgcggcagctatccccccctgtttaacgaacgggaattccgcccctggctggcggcttatctgacggatcatgcccgccgctacggctatttttgcccggtatgctatcagcgggatattattcgctacggccgcaatccgcagggtacgcaacgccttcagtgccgccactgtaaaaaggtctggacgccaaaattcccacacatcgccccaattgaagccccacgacgtatttgcagcgtaccgttgatagcgctattccagggtaatgccgccgggcaaaagctctattttttattaagctttgatgccgtgcgcggtaatgttattcatcttacctctaatttcactcctttcgcggtaggcgaatcattacgctatcactggcgcggcggacaagccgacagggaggagactgacgatattattcaacgtatttctctcactgaaatgcgctttttacaacgcagtcagttcgatgaaatccagtacggcagcgcaatgcaaaagcgccatgcccgcggcaatatattgcgcccggttatcgccgcgcacggtcatttcaaactgctcagccagcggtttccagaggtgaaaacgcacgttattgcgcatgaatgctttttacgcggcgcggcgatcgttgcctgggcgccgctttttcgtcagcggcaaggcgatctatggtatgtggaagaagagataaggaacccagccagcccggctccgtggcagctacaggggaaaacccatcatggctggtggcaaaattcatggcagcgttggacgcaggaagagaatcagaaaatggtctgccggcttgccggcactgcagaagagaacgcctttctaccagaccttgcggccagccgacggtttacaatatggctgaaaaacagacccgcgtttgcgcagagcgccctgtattccgcagggcgcgtaacgcaaatagtggtctcactggttcaagagtataacgcgacgcttacagcagctgcgccaggcggttaa

SEQ ID NO: 213147 - DNA, 1557 bp, Klebsiella pneumoniae
atgaaactaaaaacaatgagcgcagcacttctgttaactttgcctttctgggcctgcgccaaagatgtcaccataatttataccaacgatcttcatgcccatgtcgaaccttataaagtgccatggattgcggatggtaaacgagatattggcggttgggcgaatatcacgacgatggtgaaacaggaaaaagcgaaaaataacgcgacctggttttttgatgccggagattatttttccgggccttacatcagtagcctgacgaagggcaaagcgataatcgatattatgaatacgatgtcctacgatgcggtgactatcggtaatcatgagttcgatcacggctgggataatacgttgcttcagcttagccaggcgacattcccgattgttcagggcaatattttttatcagaacagcgataaatcgttctgggataagccctataccattatcgaaaaagatggcgtgaaaattggcgtgattggcctgcacggcgtgtttgcttttaatgacaccgtttctgccgcgacgcgagtgggtatcgaagcgcgcgatgaggtgaaatggctacagcattatatcgatgaacttaacggtaaagtggatctgaccgtggccctgatccatgaaggcgtcccggcgcgtcagtcgagccaggggggaaccgatgtgcgtcgtgcgctggataaagatattcagactgcgggtcaggtgaaaagcctggacgttttaattaccggccatgctcacgttggcacaccggagcccattaaagtgggtaatacgttgatcctttctaccgatagcggcggcatcgatgtgggtaaactggtgctggattatcaggagaaaccgcaccaattcacggtgaagcactttgagctgaagacgctttatgccgatgagtggaagcctgatccgcagacaaaacaggtcatcgacggctggaataagcaacttgatcaactggtgcagcaggtcattacacaatcgcccgttgaactgacccgtgcgtatggcatctcttcgccgttgggcaatcttgccgctgacgccttgctgttggcagcaggtaggagtacgcagatggcgttaaccaactcgggcgggatccggaatgagatccccgccggggcggtgagcatgggcgccgttatcagcaccttcccatttcccaacgagctggtcaccatggatctaaccgggaagcagttgcgtagcctgatggagcatggcgccgggttgagcaacggcgtgctgcaggtctcccggggactggaaatgatgtatgacagcagcaaacctgtgggccagcgcgttgtgttattcaggctaaacggtaaaccgattgacgatacgacggtttaccatattgccaccaacagcttccttgcagatggcggcgatggttttgtcgcgtttaccgaggggcaggcgcgtaatacctccggcggctattacgtttcaaatgcggtcgtagactatttcaaagccgggcaaaagataacggatgagcagcttaacgggcagcgcgttgtcgatgtgaagaaataa

SEQ ID NO: 213148 - DNA, 372 bp, Klebsiella pneumoniae
atgtccagcgaacgttatatcatcggtcaggaaatgcttcagcgggtggatggtaagggcggggaagctgtcgtcgacagcctgcgggatatcgcccccgatttcgcccgctatctgattgagttccccttcggcgatatttacgccaggccagggctcgatttacgcagccgggaaatcgccaccatcgccgcgctcacggcgttgggtaacgccgagccacagctgaaagtacacattgccgcgggattaaacgtcggcctgacgcaagaggagattacggaagcgatcatgcagatggcagtctatgccggattcccggcggccctcaacggcctgtttgccgccagggcggtatttgcggcccactga

SEQ ID NO: 213149 - DNA, 909 bp, Klebsiella pneumoniae
atgacaacttcaagattacattctctggatattcgcctgctgcgcgcctttgccgtggtagcggaggaaaataacatcagccgggcggcgcagcggttatttatctcgcagccgccgctgacccgccatatccgccatctggaagcgcagctgggggtgacgctgtttcagcgccatagcaaaggcctgatcctgaccgacgcgggtaaagaggtgctggagatgattcaacctctgctggcgctccaggaacgcacgctggcggcattgagtgagctcgccgttcactcgccgcaggctctacgtctgggcgtgacgacggccttcgaacagggcattttcgccgccgttgaggctgcgctgagcgaacatacccgcgcgttgcatatcacccgccacgcctcaccggcgctggctcagcaggtacgcaaaggcaaactcgatgcggcgctggtcgcgctgccgctcaatactgaagggctgcacctgcacccattgccgtatcatgagccgctcattgcggcattaccggcctcctggccggaagccggcaggccagggctgacgttaagcgcgctcaatcatcggccgctgttctggtttaaacgcgagcgtaatcctggtttctttgactacacgcgccgcattttcgaccgggctggctatgccccgacgtatgtggaagagccggccgagcatgatgtgctgctggcgcgtattgcgcgcggggaaggcatgatcctgctgccggcgtccttttccgcgattcagcgtcagggggtggcgttctgcccggtggctgagggcgacgcgatgccgttaagccttggggtgatttatccgcctcaccaggcagagtccgtgcagcaatggctttctctgctggatggcattctggcgactggctag

SEQ ID NO: 213150 - DNA, 888 bp, Klebsiella pneumoniae
atgagcttttttcacgccaatcagcgggaagccctgaatcagagcctggcggaagtccagggccagattaatgtgtcttttgaattctttccgccgcgcaccagtgaaatggagcaaaccctgtggaaatccatcgatcgcctgagcagtctgaaaccgaagtttgtttcggtaacctatggcgcgaactctggcgagcgcgatcgcacccacagcatcatcaaaggcattaaagagcgaactggtctggaagcagcgccgcacctgacctgtatcgatgccagccgcgatgagttgcgcactatcgctcaggattactggaacaacggtatccgccatatcgtcgccctgcgcggcgacctgccgccgggcagcggtaaaccggatatgtacgccgccgatctggtgacgttgctgaaagaggtaggcgattttgatatctctgtcgccgcgtatccggaagtgcatccggaggcgaaaagcgcgcaggcggatttactgaacctgaaacgcaaagtagaagcaggggccaaccgcgcgatcacccagttcttcttcgatgtggaaagctacctgcgttttcgcgatcgctgcgtctcggcaggcatcgacgtggaaatcattcccggtatcctgccggtctccaactttaaacaggcgaaaaagtttgcggatatgaccaatgtccgtatcccggtgtggatgtcaaaaatgttcgaagggctggataacgacgccgaaacccgtcaactggtgggggcgaatatcgccatggacatggtgaagatcttaagccgggaaggggtcaaggatttccacttctacaccctgaaccgcgccgagatgagctacgccatctgccatacgctgggcgtacgcccggcctga

SEQ ID NO: 213151 - DNA, 882 bp, Klebsiella pneumoniae
atggcaaggaagagcgatccactggcgtttggcggtttggcgttattaacgctgatctggagctttagctggatcgcgatgaagcaagtgacgagctatatcggcgcttttgacttcacggcgctgcgctgtatttttggcgccgtggtgctatggatagtgatgttgatccgcggtaaagcgctcaagccgacgcctttcggctacaccctggcgatcgcgttattgcaaacctgcggcatggtcggtctggcacagtgggcgctaatgagcggtggcgccggtaaagtggcgatcctgagttataccatgccattctgggtagtggtgatggccgcgttattcttaggtgagcgcatgcggcgatggcagtatatcgccatcggggtggcatgcgtgggcctgatactcgtacttcagccttggcaactcgattttacctccctgaaaagcgccttgctggcgatcctctccggcgtgagctggggggcaggtgcgatcgtcgcgaagcgtatgtatacccggtatccgcaggttgatttgctggcactaacgacatggcagatgctatatgccgccgtagtaatgagcgtagtggcctggctcgtcccgcaacgagcggtagactggcagcccgacgttttctgggccctggcttacagcgcaatccttgcaacggcgctggcctggagtctgtggctttttgtactgcgtaatttaccggcaagtatagccggtctgagtacgctggccgtaccggtctgtggcgtgctattttcctggtggccactacatgaaaatccaggaaaggtggaaggttgtggcattgcgttgatagtactggcgttggcgatgatcagtatcaagagacgaggggcatag

SEQ ID NO: 213152 - DNA, 1104 bp, Klebsiella pneumoniae
atggatcgcattattcaatcaccaggcaaatatatccagggcgcaggcgccatcaagcgcctcggcgactatctgaaaccgctggccgagcgctggctggtggtcggtgataagttcgtcctggggtttgcggaagagatgctgcgtaaaagcctggccgacgctggcctggcggccgaaatcgcgccgtttggcggtgagtgttcgcataatgaaatcaaccgcctacgcgatatcgccggcaacgcgaagtgcaccgccgtgctggggatcggcggtggcaaaaccctggataccgcgaaagcgctggcccactttatgaatgtgccggtggcgatcgcccccaccatcgcctccaccgatgcgccgtgcagcgcgctgtcggtgatatacaccgacgaaggggaattcgacagctacctgatgctgccgcgcaaccccaacatggtcattgtcgatacgcagatcgttgccggcgcgccggcccgcctgctggccgccgggattggcgatgcgctggctacctggttcgaagcccgcgcctgctcccgtagcggcgccaccaccatggcgggcgggaagtgcacccaggcggcgctggcgctggccgagctatgctacaacaccttactcgaagagggtgaaaaagcgatgctggccgccgaacagcacgtggtcaccccggcgctggagcgggtggtggaagccaacacctatctgagcggcgtgggtttcgaaagcggtggtctcgcggcggcgcacgcgattcataacggcatgacggccatccctgacgcccatcactattatcacggggaaaaagtggcgttcggaaccctgacgcagctggtgctggaaaatgcgccggtggacgaaatagagaccgtcgccgcgctgtgccacagcgttgggctgccgatcaccctggcgcagctggatatcaaaggtgatatcccgaccaaaatgcgtctggtggcggaagccgcctgcgctgaaggcgaaaccattcacaatatgccgggcggcgttgattccgaccaggtctacgccgcgctgctggtggccgaccagtatggtcagcgcttcctgcaggaatgggaataa

SEQ ID NO: 213153 - DNA, 663 bp, Klebsiella pneumoniae
atggaactctatctggataccgccaacgtcgccgaagtggaacgcctggcccgcatctacccgctggccggggtaaccaccaacccgagcattatcgccgccggtaaagtcccggtctgggatgtgctgccgcgcctgcaaaaagccgtcggtccgaagggcaccctcttcgcgcagaccatgagccgcgacgcgcagggcatggtggaagaggccaaacgtctgagcaattccgtgccgggcattgtggtcaaaatcccggtcaccgccgaagggctcgccgctatcaaactgctgaagaaagaaggcatcccgacccttggcaccgccgtctacagcgcttcgcaaggcctgctggccgcgctggccggcgcaaagtacgtcgcgccttacgttaaccgcgtcgacgcccagggcggggacggcatccgcatggtgcaggagctgcaatccctgctggaaatgcatgcgcccgagagcaaagttctggcggcaagcttcaaaacgccacgccaggcgctggattgtctgctggctggctgcgaagcaatcacccttccactagatgtagcgcaacaaatgctcggcacccctgcggtagagtcagccatagagaagtttgaacaagactggaataacgcctttggcacgctgaatctgtaa

SEQ ID NO: 213154 - DNA, 987 bp, Klebsiella pneumoniae
atggcgacaaattgttacgatataacatatcttatctgggaggcaagagcgacaggcaagcgcttttaccgctggaataatgtccggtatgatgaaaagggtgatgcgctgaacggaagaatgatggacaacgatatcaatcaacttattgatgcattgctaaaaaagcagaccagcctcggccgggtttatttcgccggcgagacgcgctcgcctgctgagccggtggtgcaggtggattttccccgtctgaatatcctcctcgatgggcagttgcccgaccaggcgctcggcgataacgccccgctccttgaggcccatgacgtgctctatatccctggcgatagctggaactgcccgcagtggcaagcgccttgcctgctgttaagcatcctgttcgctaagcagcagctggagtgctcgctgcagcactggaatggcaaggcgataactgttgtcgacaagcggcaggcgctgcgccgcgggccgcgcgtcggatcatttctgctgcaggcgctcaatgaactccggatgcaaccgcaggagcagcaaaccgcccgcagcatcgtcgtcagcctgctcagccactgccatgatcttctcggcagccaggcgcaaacctcctcgcgcagccaggcgttgttcgaagcgatccgccaatatatggacatccattatgcggaaccgctgagccgggaatcggtggcccaggcgttctacctctctcccaactatctttcccatctgttccagaaatgtgggccaatgggcttcaatgaatatctaaaccatattcgtctcgaacaggcccgtatgctgctgaagggccacgatatgaaagtgaaagacatcgcccacgcctgcggcttcgccgacagcaactacttctgccgcctgttccgcaaaactacggaacgctcgccgtctgaataccgccgccagtaccatagccagctgacggaaaaagcatccccggtaaaaaactag

SEQ ID NO: 213155 - DNA, 651 bp, Klebsiella pneumoniae
atgaccagaaagatccccctgctggccttaggattcggcatggctttagccagcgcccaggcgttcgcccacggcaaccatagccatggcccggcgttaaccgaagtggagcgtcaggccagcgaaggcatttttgcggataaagatgtgcaggaccgcgcgctgagcgactgggagggcgtctggcagtcggtgaacccgtatctgctcaacggcgatctcgatccggtgctggagcagaaggcgaaaaagcccggcggcaagagcgtggaggagtatcgcgcctattataagaagggctacgccaccgatgtggagcagattggcattgaagatgacgtgattgagttccacgttggccagaccgtcaatagctgcaaataccgctattcaggctataaaattctgcattacgcctccggtaagaagggcgtgcgttatctgttcgagtgccagcagggcgatgccaacgcgccgaaatttgtgcaattcagcgaccatatcattgacccgcgtaaatcacagcatttccatattttcatgggcaatgaatcacaggaggcgttgctgaaagagatggataactggccgacctattatccgtatgcgctgcataaagaacagatcgttgatgagatgctgcaccactag

SEQ ID NO: 213156 - DNA, 2652 bp, Klebsiella pneumoniae
atgaacgaacaatattccgcattgcgtagtaatgtcagtatgctcggcaaggtgctgggcgataccatcaaggatgcattgggagaaaatattcttgatcgtgtcgaaactatccgtaagttgtccaaatcttcacgcgccggcaacgaagctaaccgccaggagctgctgaccacgctgcagaatttgtctaacgacgaactgctgccggtagcccgtgccttcagccagttcctgaatctggctaacaccgctgagcagtaccacagcatttcgccgaatggcgaagcggccagcaatccggaagtcattgcgcgtaccctgagaaagctcaaagaccaacccaatctcaacgaagagaccatcaaaaaagcggtggaatctctgtccctggagctggtgttaaccgcccacccgaccgagatcacccgccggacgctgatccataaaatggtggaagtgaacaactgcctcaagcagctggataacaaagatatcgcggactacgagcaccaccagctgatgcgccgtctgcgccagctgatcgcccagtcctggcataccgatgaaattcgtaagcaccgcccttccccggtcgatgaagccaaatggggcttcgcggtggtggaaaacagcctgtgggaaggggtgcctaactacctgcgcgagctgaacgaacagctggaagccaacctcggctatcagctgccggtggactttgtcccggtgcgtttcacttcgtggatgggcggcgaccgcgacggcaacccgaacgtgaccgccgatatcacccgccacgtgctgctgctcagccgctggaaagcgaccgacctgttcctcaaagacgtgcaggtgctgatctccgagctgtcgatggtggagtgtaccgacgagctgcgcgccctggctggcgccgagggcgctcaggaaccgtaccgttatctgatgaaaaaactgcgctctcagctgatggagacccaggcctggctggaagcgcgcctgaaaggccagaagctgccgaaaccggcgggactgatcactcagaacgagcagctgtgggagccgctgtacgcctgctataaatcgctgcaggcctgcggcatgggcattatcgccaacggcgagctgctcgacaccctgcgccgcgtgaagtctttcggcgtaccgctggtccgtattgatattcgtcaggaaagcacccgccataccgaagcgctgggtgaaatgacccgttacctcgggatcggcgactacgaaagctggtcggaagccgacaaacaggctttcctgatccgcgaactgaattccaaacgtccgctgctgccgcgccagtgggagccaagcgaagagacgcgtgaagttctcgacacctgcaaggtgatcgccgaggcgccgcgcggatcgatcgctgcctacgtgatctcgatggcgaaaacgccgtccgatgtgctggcggttcatctcctgctgaaagaagccgggattggctttgctctgccggtggccccgctgttcgaaacgctggatgacctcaacaacgccaacgacgtcatgacccagctgctgaatatcgactggtaccgcggctttatccagggcaagcagatggtcatgatcggctactctgactccgctaaagatgccggcgtgatggccgcctcctgggcgcagtaccaggcgcaggacgcgctgatcaaaacctgcgaaaaagccggtattgaactgacgctgttccacggtcgcggcggctctatcggccgcggcggcgcgccggcccacgccgcgctgctctcgcagccgccgggaagcctgaaaggcggcctgcgcgttaccgagcagggcgagatgatccgctttaagtacggcctgccggaagtcaccatcagcagcctgtcgctgtataccagcgccattctggaagccaacctgctgccgccgccggagccgaaagcagaatggcgcgacatcatggccgagctgtccgacgtgtcgtgcaagatgtatcgcggctacgtgcgtgaaaacaaagatttcgtcccttacttccgctctgcgaccccggagcaggagctgggcaaactgccgctgggttcgcgtccggcaaaacgtcgtccaaccggcggcgtcgagtcgctgcgcgccattccgtggatcttcgcctggacccagaaccgcctgatgctgccggcctggctgggcgctggcgctgcgctgcagaaggtggtcgaaggtggaaaacagagtgaactggaagccatgtgtcgcgactggccgttcttctctacccgcctcggcatgctggagatggtttactcgaaggccgacctgtggctggcggagtactacgatcagcgcctggtgaagccggagctgtgggcgctgggttccgagctgcgcaagctgctggctgccgatatcaacgtcgtgctggccatcgccaacgactcccatctgatggccgacctgccgtggatcgccgagtctatccagctgcgtaatatctataccgacccgctgaacgtcctgcaggcggaactgctgcaccgttcacgccaggctgaagaagagggcaaggacccggatccgcgcgttgaacaagcgctgatggtcaccatcgccggcgtcgccgccggtatgcgtaacaccggttaa

SEQ ID NO: 213157 - DNA, 1152 bp, Klebsiella pneumoniae
atgaaaaacaatttaccgccctttatcgagatctaccgcgcgttgatcgccacaccgtccatcagcgcgaccgaagaggctctcgatcagagcaatgagtctttaatcaatttgctggccggctggttccgcgatctcggcttcaacgtcgaggtacagccggtgccggatacgcgccataaattcaatctgctggccagcaccggacacggcgccggcggcctgctgctcgccgggcataccgataccgtgccgttcgatgatggccgctggacgcgcgacccgttcaccctcaccgaacacgataacaaactctacggcctcggcacggccgatatgaaaggctttttcgcctttattctcgacgccctgcgcgatgtcgacgtcaccacgctgaaaaaaccgctgtatattctggccaccgccgacgaagagaccagcatggctggcgcgcgctattttgccgaaaccacccagctgcgcccggactgcgccatcatcggcgagcccacctccctgcagccaatccgcgcccataaaggacatatgtccaacgcgatccgtattcagggccagtccggccactccagcgatccggcgcgcggggtcaacgcgatcgagctgatgcacgacgccatcggccggattatgcagttgcgcgatctgcttaaagagcgctatcacttcgaggcgtttacggtcccttacccaaccctcaacctgggcgctatccatggcggcgatgcctcaaaccgtatctgcgcctgctgtgaactgcatatggatatccgcccgctgccggggatgaccctaaacgatcttaatggtctgttgggcgaggcgctggccccggtcagcgaacgctggccgggccgcctgacgttctctgagctgcatccgccgatccccggctacgagtgcccgccggaccataagctggtgcaggtggtcgagaaactgcttggcgcgcagaccgacgtggtgaactactgcaccgaagcgccgtttatccagacgctgtgtccgacgctggttctcggcccgggctccatcaatcaggcccatcagcctgacgagtttctggagacgcgctttatcaagccgacgcgggagctgattagccaggtggtccaccacttctgctggcactaa

SEQ ID NO: 213158 - DNA, 1005 bp, Klebsiella pneumoniae
atgttaaatacgctgattgtgggtgccagtggttatgccggcgcagagctggtgacctatatcaatcgtcatccgcatatgaacataaccgctttgacggtctccgcgcaaagcaatgatgcgggaaaattaatttccgacctgcatccgcagctcaaaggcattgtcgatatgccgctgcagccgatgtccgatatcagcgaattcagcgctggcgtggacgtggtgtttctcgccaccgcgcacgaagtgagtcacgatctggcgccgcagttccttgccgccggctgcgtggtgttcgatctctccggtgccttccgcgttaacgatggggcgttctacgaaaaatattatggtttcactcatcagcatcccgagctgctcaaacaggcggtgtatggtctggcggagtggagcgcggatgcgcttaaagaagcgcagttaatcgcggtgcctggctgctacccgacggcggcgcagctgtcgctgaagccactgatcgatgccggtctgctggatctcaaccagtggccagtgatcaacgccaccagcggggtgagcggcgcgggacgcaaagccgcgatcggcaacagcttctgtgaagtcagcctgcagccgtacggcatatttaaccatcgtcatcagccggagattgccagccacctcggggcaaaggtaatttttaccccgcacctgggtaattttaaacgcggtattctggaaaccattacctgccgcctgaagccgggcgttggccatgcgcagatcgcggcggtttaccagcaggcttacgccgataaaccgctggtacgtttatatgataaaggcgtgcccgcagtgaaaagcgtcgaaggtctgccattctgtgatatcggttttgccgtgcaggacgatcatctcatcgtcgtcgcggcagaagataacctgctgaaaggcgccgcagcgcaggcggtgcagtgcgcgaatattcgtttcggcttcgctgagacgcagtctcttatttaa

SEQ ID NO: 213159 - DNA, 774 bp, Klebsiella pneumoniae
atgaacccattaattatcaaactcggcggcgtattactcgatagcgaagaagcgctggagcgtctgtttaccgcgctggtcaattaccgtgaagcgcaccagcgtccgctgattatcgtccacggcggcggctgcgtggtggatgagctgatgaagcagctcaatctgccggtgcagaagaaaaatggtctgcgggtgacgccggctgagcaaatcgacatcatcaccggcgcgctggcgggaaccgctaacaagacgctgctggcgtgggcgaaaaagcacggtctggcctctgtcggcctgttcctcggcgatggcgatagcgtgaaggtgacgcagctggatgctgagctgggccatgtcgggctggcgcagccgggctctccgacgctgatcaacaccctgctggcgggcggttacctgccggtggtgagctctatcggcgtgaccgatgagggccagctgatgaacgtcaatgctgaccaggcggcgacggcgctggcggctaccctgggggcggatctgatcctgttgtctgacgttagcggtatcctcgacggtaaagggcagcgcattgccgagatgaccgccgagaaagcggagcagctgatcgagcaggggattatcaccgacggcatgattgttaaagtgaatgcggcccttgacgccgcacgtgctctgggtcgtccggtggatatcgcctcctggcgtcacgccgagcagctgccggcgttatttaacggcacgccgatcggcacacgtattctggcttaa

SEQ ID NO: 213160 - DNA, 1374 bp, Klebsiella pneumoniae
atggcactttggggcgggcgttttacacaggcagcagatcaacggttcaaacagttcaacgactcgttgcgcttcgactatcgtctggcggagcaggatatcgttggctctgtcgcctggtcgaaagcgctggtaacggtcggcgttctgagtgccgctgaacagcagcagctggaagaagcgctgaacgtgctgctggaagaggtgcgcgccaatccgcagcaaatcctcgccagcgatgccgaagatattcacagctgggtggaaggcaagctgatcgataaagtgggccagctgggcaagaaactgcacaccgggcgcagccgtaacgaccaggtcgccaccgatcttaaactgtggtgcaaagataccgttgtcgaactgctctcggcgaaccgccagctgcagagcgcgctggtggagaccgcccagcagaatcaggacgcggtaatgccggggtacacccacctgcagcgcgcccagccggtgaccttcgcgcactggtgtctggcctacgttgaaatgctggcgcgtgacgaaagccgtctgcaggacgcgctgaagcgcctcgacgtcagcccgctgggctgcggcgcgctggcggggacggcgtatgagatcgaccgcgagcagctggccggctggctgggctttgcctccgccacccgtaacagcctcgacagcgtgtccgatcgcgatcatgtgctggagctgctttccgatgcggctatcggtatggtgcatctgtcgcgctttgcggaagatctgattttctttaactccggcgaggcgaacttcgtcgagctttccgaccgcgtgacctccggctcctcgctgatgccgcagaagaaaaacccggacgccctggagcttatccgtggcaaatgcggccgcgtgcagggtgcgctgaccggcatgatgatgacgctgaaaggactgccgctggcctacaacaaagacatgcaggaagataaagaggggcttttcgacgccctggatacctggctcgactgcctgcatatggcggccctggtgctggacggcattcaggtaaaacgcccgcgctgtgcggaagcggcgcagcagggctatgccaacgccactgagctggcggattatctggtggcgaaaggcgtaccgttccgcgaggcgcaccatattgtcggtgaagcggtagtggaagccattgcgcaagggaaaccgctggaagcgctgaccctggccgatctgcagaaattcagcccggtgattgcggacgatgtgtatccgatcttgtcgctgcagtcctgcctcgagaaacgcgcagcgaaaggcggcgtctcgccgcagcaggtagcccaggctatcaacgaggcgaaggctcgtttaagctaa

SEQ ID NO: 213161 - DNA, 918 bp, Klebsiella pneumoniae
atgaatattcgcgatcttgaatacctggtagcgctcgccgaacaccgccacttccggcgggcggctgactcatgccatgtgagccaaccgacgctcagcggacagatccgcaagctggaggatgagcttggcgtcatgctgctggagcgcaccagccgtaaggttctgtttacccaggcggggctgttgctggtggatcaggcgcgtaccgtgttacgcgaagtaaaagtgctcaaggaaatggcaagccaacaaggggaaaccatgtccgggccgctgcatatcggcctgatcccgacaattggcccgtacctgctgccgcacatcattccgatgctgcatcagaccttcccgaagctggaaatgtatctgcacgaagcgcagacccatcagctgctggctcagctcgacagcggtaagctcgactgcgccatcctggcgctggtcaaagagagcgaggcctttatcgaggtgccgctgttcgatgagccgatgatgctggctatctatgaagatcatccgtgggcgaaccgcgatcgggtgccgatgtcggatctggccggtgaaaagctgctgatgctggaggatggccactgtctgcgcgatcaggcgatgggcttctgctttgaagcgggggcggatgaggatacccacttccgcgcgaccagcctggaaacgctgcgcaatatggtggcggcaggcagcggcattaccctgctgccggcgctggcggtgccgcaggagagaaaacgcgatggcgtagtctacctgccgtgcattaagccagagccaagacgcaccatcggtctggtttatcgtccaggctccccgctgcgcagccgctatgaacatctggcggaggccatccgcggcacgatggatggccatttcgacaaggcgttaaaacaggcggtttaa

SEQ ID NO: 213162 - DNA, 1401 bp, Klebsiella pneumoniae; identical to SEQ ID NO: 135413

SEQ ID NO: 213163 - DNA, 636 bp, Klebsiella pneumoniae
gtgatgggcgtaagagcacaacaaaaagaaaaaacccgccgttcgctggtggaagcggcattcagtcaacttagcgctgagcggagtttcgccagcctgagcttgcgtgaagtggcccgggaagcagggatcgcgccgacgtccttttatcgtcattttcgcgacgtcgatgagctgggcctgacgatggtcgatgagagcggactgatgctgcgccagctgatgcgccaggcgcgccagcggatagccaaaggcggcagcgtgatccgcacctcggtctccacctttatggaatttatcggtaacaacccgaacgccttccgcctgctgctgcgcgagcgctcgggaacttctgcggcgtttcgcgccgccgtcgcacgcgagatccagcactttattgcggaactcgccgactatttagaactcgaaaaccatatgccgcgcgcctttaccgaagcgcaggctgaagctatggtcaccatcgtttttagcgctggcgcggaagcgctggatgtcggccctgagcagcgccggcagctggaggaacggttggtactgcagcttcgaatgatctcgaaaggcgcgtattactggtatcgccgtgaacaagaaaaaatgtcacatcattccgaataa

SEQ ID NO: 213164 - DNA, 360 bp, Klebsiella pneumoniae; identical to SEQ ID NO: 135411

SEQ ID NO: 213165 - DNA, 1101 bp, Klebsiella pneumoniae
atgacccccgaacaccttcctaccgaacaatacgaagcgcagctggcagaaaaagtcgtccgtttgcaaaccatgatggcgccttttgccgcgccggttccggaagtgtttcgttcgccggtcagccactaccgcatgcgcgccgagttccgtctgtggcacgatggcgacgatctgtaccatattattttcgatcagcagacccggtcgcggattcgcgttgacagcttcccggccgccagcgcgctgatcaatcagctgatgaccgccatgttggagggcgtacgcaacaatcccgtgctacgccagaagctgttccagattgactatctgaccaccctcagcaaccaggcggtcgtgtcgctgctgtatcataaaaagctggacgatgcctggcgtgagcaagcggaggcgctgcgtgacgccctgcgagcccaggggctcaatgtgcatctgattgggcgggcgaccaaaaccaaaatcgagctcgatcaagactatatagatgaacgcctgccggttggcgggcgggagatgatctaccgtcaggtggaaaacagctttacccaaccgaacgcggccatgaacattcagatgctggagtgggcactggatgtcaccaaaggggcgactggcgacctgctggaattgtactgcggcaacggtaacttctcgctggcgctggcacgtaatttcgatcgcgtattggccaccgaaatcgccaaaccgtcggtggcggcggcgcagtacaacatcgccgctaaccatatcgacaacgtgcagattatccgcatggcggcggaagagtttactcaggcgatgaacggggtgcggcagttcaaccggctgcagggtatcgatctgcatagctatcagtgcgaaaccatcttcgtcgatccaccgcgcagcgggctggacagcgagacggaaaaaatggtgcaggcctatccgcgtattttgtacatttcgtgcaacccggaaacgctgtgtcgcaatctggaaacgctaagccagacgcacaacgttacccggctggcgctgttcgaccagttcccgtatacccatcacatggagtgcggcgtcctgctgacccgcaaatag

SEQ ID NO: 213166 - DNA, 1839 bp, Klebsiella pneumoniae
atgattaaaaaagcttcgctgatgacggccttatccgtcacggcattttccggctgggcgcaggatagcaattcagatacgttagtggtgacagcaaaccgttttcaacaaccggtcaataccgtgctggcgccgaccgacattgtgacgcgcgatgatatcgaccgctggcagtccaaagatttaaacgatgtgatgcgtcgtcttcccggggttgatatttcccgcaacggcggcatggggcagagtgcttcgctgtatgtccgggggacggaggctcgccacgtgctggtgctgatcgacggtgtgccgatggcgcgtcctgggatctccaacggcgtagatatcagtcagatccctatctcactggtccagcgggtggaatacatccgcggcccgcgctccgcggtgtacggctccggagcgatcggcggggtggtgaacatcatcaccatgaccgacgctgagcgttcgcagatcaacgccggcgcgggtacgaacggctatcagtcctatgacggcgcctttaacaagcggtttggcgatacgttggttaccgctgctggcgcctatcagaccaccaaagggtttaacgtccagccgaattcctcttacagcggcgacagcgatcgcgacggctaccgcaataaaatgctgtggggcggggtacagcatcagttcgatgacaacttctcggggttcttccgcggctatggttattccgccaacgctgactatgaccagggtaactggggctacgcaggtggaaacgatgaagatcaatcctatacccaatcctgggataccggtctgcactaccactccggaatttactcctcccagctgattgctaactatcagcgcatcaaagattacaactacagcagcgacgctggccgctatgccgcgggcaccaccctggatgatatggaacagcgctatatccagtggggaaataatgttgtggtaggccatggggcagtgagcggcggcgttgactggaaacaagagaagctgaaatccagcggaacgaccagtaccgacgtgtataagcgtgacaccaccggtctttatctgacgggacagcagcagattgacagcgtgacgctggaagcttccggccgtgaggatcatgacgagcagtttggctggcacggtacctggcagacggccgcaggctgggaatttatcgacggttatcggacaacgctctcgtacggcacaggattcctcgccccctccctcgggcagcagtacggcgcagaacgctttggcatcgcctctaacccgaatctgaagccagaggagtcgaagcaatgggaagcgggccttgaagggttaacggggccggtcgactggcgcctctccgcgtatcgctatgagattcaaaacctcatcgattacgacaacaacgcctattacaacgtcaagtcggcaacgattaaggggctcgagtggacggggaatataaccaccgggccggtggagcaccatctgacgctgcagtatgttgaccctcgcgatgatgaaaccaataagatcctctatcgccgggcgaagcagcaggtgaaatacgagctgaacggccaggtctacgatctggggtgggatgtgacgtatcactacatcggcaagcgttacgattatgactacgacaactcgcgtaccgtcaatatgggtgggttgagcctctgggatgtcggtttatcgtatcccgtcacctcacacctgacagttcgtggtaaaatagccaacctgttcgataaagattacgagacagtttatggctaccaatctgcaggacgggaatacaccttgtctggcagctacaccttctga

SEQ ID NO: 213167 - DNA, 852 bp, Klebsiella pneumoniae
atggctaccaatctgcaggacgggaatacaccttgtctggcagctacaccttctgatccacgtcccaccgtgctggtgtttgattccggcgtcggtgggttgtcggtttataatgagattcggcagctgctgccgaatctgcattacatctatgctttcgataacgttgccttcccctatggcgagaagagcgaggagtttatcgttgagcgcgttgtggaaatcgtcaccgctgtccagcagcgttatcccctggcgctggcggtgatcgcctgcaataccgccagtaccgtctccctgcctgccctgcgtgaaaagttcgctttccccgtcgttggcgtggtgccggcgatcaagcccgccgcccgtttaacggcgaacggcattgttggcctgctggcgacgcgcggtaccgtaaagcgtccttatacccgtgagctgatcgaccgctttgccaatgaatgtcggattgaaatgctggggtcggcggagctggtggagctggcggaagcgaagctgcacggcgagcctgtgccgttagaagagctgcgccgtatcctgcgcccgtggctgcggatgcaggagccgccggatacggtggtgctgggctgcacccattttcctcttttacaggaggagctgcagcgcgttctgccggaaggcacgcggctgatcgattctggcgcggcgattgcccgtcgcaccgcctggctgttagagcatgaagcgccggatgcgaagtccagcgacgagaataaagcattctgcatggcgctgacggcagaaacagaacagcttttacccgttctgcgtcgctatggcttctcgacgctggaaaaattaccgctctaa

SEQ ID NO: 213168 - DNA, 843 bp, Klebsiella pneumoniae
atgaacagagccgccacgctgaccctcaacgcgcccctgctgatgctcgtcgctgcgctggcgctttcaacccccttcaccgccggcgccgcgccggcctttcttgattacgcccaacagcaaacccagcaatctcaggcgcaagaaaaaaacgatgccgcaagcgcaaaacaaacacaagaaagccgccagagcgcagataataaaaaaaccggtaccagcacctcacaattacaaaaaagaatcaccagccagcaggcggcgattgcacaaaaagataagcttatacagcaattaaaaaaacagcttgccgctacgccgcaaacggatactgccggagcgaatgagcaagcggcgttgaataagagaattaatgaattacaggtcgccttaagcgccgctactgcagaaaaagaggcattaataaaaaaagcaggcgttgtgcagaataataatctacagcaaagccaggccgcggcgcgtcagcagatccagcaattaacgacgcagattcagcaagccgaagctgaaaataaacgcctcagcgccagctttaccacgcttaataaagataaacacgcgctaatgacccaactggccgcaacggaaaaagagaaacaggccgctcttgagcaggtcaaagcgcttaacgctgacaaacagccgctgacgacccggctggccgccgcggaaaaagagaaacaggccgtcctcgagcaggttaaggcccttaacgccgataaacagtcgctgactattcgcctcgccgctgcggagaaggcgcagcaggccgctcttgaccaggctaaagcgcttaacgctgactgttgtggtcaaatttaa

SEQ ID NO: 213169 - DNA, 411 bp, Klebsiella pneumoniae
gtgaatatctcgctgactcttcgtgttatcccactcgccgcgctgttagtagccggctgtagcaatacctcttcccgccagccggttaaaccgatcgccacgccgctgacgacacagcagcaggcagagcaggagcgggcagccagcgaacaagcgcgcattgaatcctgtcgccaggcgctggattcgctaaaagaggttaacccacagcaagccactaaactcagcaatgactttaacgctttagtgcgcgcggcgtcacaatataatagcgtgcgcgagaaagtggcagatcctacccggcttggcattgactccatgtatcagtttaaatccatcaaactgtgcgccgatatccagaaaacgctgatcgatagcctggtacagcgtggtgaaagcaaacagccatga

SEQ ID NO: 213170 - DNA, 360 bp, Klebsiella pneumoniae
atggtagaaaaaatgaagacgcttttcagaacaatggtactcggcagcctgcttgctctctccgccaacagctacgcgctcagcgaatccgaagcggaagatatggctgatttaaccgcggtttttgtgtttctgaaaaacgactgtggctaccagaacctgcccaacacgcagatccgtcgcgcgctggtgttctttgcccaacagaaccagtgggacctgagcaactatgacagctacaacatgaaagcgcttggcgaagacagctatcgcgatcttagcggcattaacattccgacggcgaaaaaatgtaaagcgctggcccgcgattcgctcagcctgctggcttacgttaaataa

SEQ ID NO: 213171 - DNA, 1599 bp, Klebsiella pneumoniae
atgcaacgtagagacttcctcaaactgaccgccgcggtcggcatggccagcgcattgccgttatggagccgggcggtctttgccgccagtcgcccggctctgccgataccgtcgctgttagccgccgatgcgcgcaaccgcatcgcgctcaggatccaggcgggcaaaacgcggtttggcgccctgaatgtcactacctggggctacaacgggtcgctgctgggccctgcgctgcagttgacgcaggggaagaccgtcacggtggatattactaaccagctggcggaagagaccacgctgcactggcatggtctggaggtaccgggcgaggtcgacggggggccacagggggttatcgcgccgggcgccacccgcacggtaagcttcacgccaacgcagcgggcggcgacctgctggtttcatccgcatcagcatgggagcaccggccggcaggtggcgatggggctggccggcctggtgctgatcgaggatgaagagagcgggcgcctgctgctgcctaagcagtgggggatcgatgatgtgccggtgatcgtccaggataagaagttcaccgccgccggcgagatcgactatcagctggatgtgatgagcgccgccgtcggctggtttggcgatacgctactgaccaatggggccctctatcccgaacatgccgcgccgcgcggctggctgcgcctgcgcttgctgaacggctgtaatgcccgttccctcaattttgccaccagcgataagcgcccgctgtacgtagtggccagcgatggcggtctgttggccgagccggtcaaggtcgatgaattgccggtcttgatgggggaacgctttgaggtgctggtggacaccagcgacggtaaacctttcgatctggtgactctgccggtgagccagatgggcatggcgattgcgccttttgataaaccacagccggtactgcgcgtccagccgctggtcattcccgcctccggcaagctgctggatactctggccgctctcccggcgttaccgtccctgacggggctgacgcagcgtcagctccagctgtctatggatccgatgctcgaccggatgggcatgcaggcgctgatggagaagtatggcgaccaggcgatggccggaatggatcacggcatgatggggcatggcgacatgagcgacatggggaatatgcatcacggcgacatgagcatgaaccacggatccggcatggagcatggcatgtcgtcaggcaagggctttgatttccataacgccaaccgcatcaacggcaaagccttcgacatgaatgagccgatgtttgccgccgccagaggccagtatgagcgctgggtgatttcaggtaagggcgacatgatgttgcatccgttccatatccacggcacccagttccgtatcctcagcgaaaacggcaagccgccagcggcgcatcgtcgcggctggaaagacaccgttcgtgtggaaggggacgtgagtgaagtattagtgaagtttgatcatccggcgccgaaggagtttgcctatatggcacactgccacctgctggaacatgaagacaccgggatgatgttggggttcacggtttaa

SEQ ID NO: 213172 - DNA, 2391 bp, Klebsiella pneumoniae
atggctgaaacaaagtctcaacaatcaaggctcctggtgacgctgactgcgctatttgcagcgttctgcggcctctatctattaatcggcggggcatggctggtcgtgcttggcggctcctggtactaccctatcgccgggctggtgatgctgggcgtgaccgtaatgctgttccgcggcaagcgcgctgcgctgtggctgtacgccgcgctgctgctggcgaccatgatctggggcgtctgggaagttggtttcgacttctgggcgttgacgccgcgtagcgatatcctcgtcttctttggcatctggctgatcctaccctttgtctggcgtcgtctgccggtgccttccgctggcgccgttggcgcgctggtcgtcgccctgctgatcagcggcggcatgctgacctgggctggttttaacgacccgcaggaagtcaacggcaccctgagcgccgacgctacgccggccgcaccgatttccaccgtcgccgacggcgactggccggcctatggccgtaaccaggaaggccagcgcttctccccgctgaagcagattaacgccgataacgtgaagaacctgaaggaagcctgggtgttccgcaccggcgacctgaaacagccgaacgatccgggtgaaatcactaacgaagtgacgccgattaaagtcggcgatacgctcttcctgtgtaccgctcaccagcgcctgtttgcgctggacgccgccaccggtaaagagaagtggcattttgacccgcagctgaacgccgatccgtcgttccagcacgtcacctgccgcggtgtttcttatcacgaagcgaaagcggataacgcccctgccgacgttgtcgccgactgtccgcgccgcattatcctgccggtgaacgatggtcgcctgttcgcggtaaacgccgacaacggtaagctgtgcgaaacctttgctaataaaggtattctcaatctgcagaccaacatgccggtcaccacgccgggcatgtatgaacccacttcaccgccgatcatcaccgataaaaccatcgtgattgccggcgcggtcaccgataacttctctacccgcgagccgtcaggcgtgatccgcggctttgatgtgaataccggtaaactgctgtgggccttcgatccgggtgcgaaagatccgaacgccatcccgagcgatgaacatcacttcacgctcaactcgccgaactcatgggcgcctgccgcctacgacgctaagctggatctggtctatctgccgatgggcgtgaccactccggacatctggggcggcaaccgtacgccggagcaagagcgttatgccagctcgattgtggcactgaacgccaccaccggtaagctggcctggagctatcagaccgtccatcacgatctgtgggatatggacatgccttcccagccgacgctggctgatattgaggtcaacggcaaaaccgtaccggtcatctatgccccagcgaaaaccggcaacatcttcgtgctggatcgtcgtaacggcgagctggtggtcccggcgcctgaaaaaccggttccgcagggcgctgccaaaggtgattacgttaccaaaacccagcccttctccgatctgagcttccgtccgaagaaagatctgaccggcgcggacatgtggggcgccactatgttcgaccagctggtgtgccgcgtgatcttccaccagctgcgctatgaaggtatcttcaccccgccgtctgagcagggcacgctggtgttcccgggtaacctggggatgtttgaatggggcggtatctccgtcgatccgaaccgtcaggtggctatcgccaacccgatggcgctgcctttcgtctcaaaactgatcccgcgcgggccaggcaatccgatggagccgccgaaagatgcgaaaggctctggtacggagtccggcgtgcagccgcagtacggcgtcccgtacggcgtaacgctgaacccgttcctgtcgccgttcggcctgccgtgcaaacagccggcctgggggtatatctccgccctggatctgaaaaccaacgaagtggtatggaaaaaacgtatcggtactccgcaggacagcctgccgttcccgatgccggttaaactgccgtttaccatggggatgccgatgctgggcggtccgatctccacggccggtaacgtcctgttcatcggcgcgactgcagataactacctgcgcgcgtacaatatgagcaacggcgagaagctgtgggaagcccgtctgccagccggcggtcaggcgactccgatgacctacgaagtgaatggcaaacagtatgttgtcatctctgccggcggtcacggctcgttcggtaccaaaatgggcgattatattgtcgcctatgcgctcccggatgacgccaaataa

SEQ ID NO: 213173 - DNA, 537 bp, Klebsiella pneumoniae
atgaaacatactgtagaagtgatgatcccggaatccgagatcaaagcgcgtatcgcggaactgggtcgtcaaatcaacgaacattatcagaacagcggcagcgaaatggtgctggtggggctgctgcgcggctcgtttatgttcatggccgacctgtgccgtgaagtgcaggtgccgcatgaagtcgattttatgaccgcctccagctacggcagcggcatgtccaccactcgtgatgtgaaaatccttaaagatctggatgaagacatccgtggtaaagacgttctgatcgtggaagacatcatcgactccggcaataccctgtctaaagttcgcgaaatcctcagcctgcgcgagccgaaatcgctggccatttgtacgctacttgataaacccagccgccgcgaagtgaacgtcccggttgaatacgtcggtttcgcgattccggatgagttcgtggtgggctacggtatcgactatgctcagcgctaccgccatctgccgtatatcggcaaagtcaccctgctggacgagtaa

SEQ ID NO: 213174 - DNA, 663 bp, Klebsiella pneumoniae
atgaatgatatagatacactcatcagcaacaatgcactatggtcaaaaatgctggtggaagaggaccccggcttttttgagaaactgtcgcagacgcagaaaccgcgcttcctgtggattggctgttcggacagccgcgttcccgctgagcgactcaccggcctggagcctggcgaactgttcgtgcatcgtaacgtagcgaacctggtgatccacaccgatctcaattgtctgtcggtggtgcagtatgccgtcgatgtcctggaagtcgagcacattattatctgcggccactacggctgcggcggcgtgcaggcggcggtggagaacccggagctcgggcttatcgacaactggctgctgcatatccgcgatatctggtttaagcacagctcgctgctcggtgaaatgccagaggagcgccgtctggataccctttgtgaactgaacgtgatggaacaggtgtacaatctgggacattcgacgattatgcaatccgcgtggaagcgcggacagaaggtgaccatccacggctgggcttacgggattcacgacggactgctgcgcgatctggatgtcaccgctgtgagcagggaaaccctcgaacagcgctatcgccacgggatctccaacctcaagatcaagcacatcaatcacagatag

SEQ ID NO: 213175 - DNA, 927 bp, Klebsiella pneumoniae
atgaccattgctctggaattaaaacagctcaaaaaaacctatcccggcggggttcaggcgctgcgggggatcgacctgcaggtcgaagcgggggatttttatgccctgctgggcccgaacggggccggaaaatccacgaccatcggcatcatcagctcgctggtgaacaaaacctctggtcaggtcaatgtctttggctacgatctggagaaagacgtcgtcaatgccaagcgccagcttggcctggtgccgcaggagtttaacttcaacccgttcgaaaccgtgcagcagatcgtcgttaaccaggcgggctactacggcgttgagcgtaaagaagccctttcccgcagtgaaaagtatttaaaacagctcgacctgtgggaaaaacgcaacgaacgcgcgagaatgctctccggcgggatgaagcgccgtctgatgatcgcccgcgcgttgatgcatgagccgaagctgctgatcctcgacgaaccgaccgccggcgtcgatattgaactgcgtcgctcgatgtggggctttctcaaggatctcaacgatcgcggaaccaccattatcctgaccacccactatctcgaagaggccgaaatgctatgtcgcaacatcggcatcatccagcacggcgagctggtggaaaacacctcgatgaaagcgctgctgtcgaagctgaagtcagagacctttattcttgacctcgcgccaaaaagcccggtgccgaagctcgaaggctaccagtaccagctggtcgatacctcgacgctggaagtggaggttctgcgtgagcagggaattaacagcgtcttcgcgcagctgagcgcccagggggtgcaggtactgagtatgcgtaacaaagctaaccgtctggaagagctgtttgtcacgctggtgcatgagcgaaaaggagaatcagcatga

SEQ ID NO: 213176 - DNA, 768 bp, Klebsiella pneumoniae
atgcagctttattgggtcgcgctgaaaagcatctggaccaaagagatccaccgttttatgcgcatctgggtacagacgctggtgccgccggtgatcaccatgaccctgtatttcgtgatctttggcaacctgatcggctcgcgcattggtgagatgcatggttttacctatatgcagtttatcgtcccaggcctgatcatgatggcggtgatcactaatgcttacgccaacgtcgcctcatccttcttcagcgccaagtttcagcgcaatattgaagagctgctggtggcgccagtgccgacgcatgtgattattgccggctacgtgggcggcggggtagcgcgaggactgtgcgtaggtatcctggtgactgcggtgtcgctattctttgtgccgttccaggttcactcctggctgtttgtcgccctgacgctgctcctcaccgcggtgctgttctcgctggccgggctgctgaacgcggtgtttgccaagaccttcgatgacattagcctgatcccgacctttgtgctgacgccgctgacctatctcggcggggtgttctactcgctgaccctgctgccgccgttctggcaggggctgtcgcatctgaaccccatcgtctacatgatcagcggttttcgcttcggcttcctcggtatcaacgacgtcccgctggcgaccaccttcgccgtgctggtggtgttcattgtcgccttctatctgctgtgctggtcgttaattcagcgcggtcgcggcctgcgtagctga

SEQ ID NO: 213177 - DNA, 441 bp, Klebsiella pneumoniae
atgctcggatgggtcattacctgtcacgatgagctggcgcaggagatgctggatcgtcttgaacaaaagtttggtccgctggcccagtgccgggcggtcaattactggcgcaatctcagcagcaatatgttgagccggatgatgtgcgatgcgctgcatgccaccgactccggggacggggtcatttttctcactgacaaaaccggtgcggcgccttatcgggccgcggcgctgatgagtcacaaacatacccactgcgaagtgatctccggcgtcagctatccactccttgagcgaatgtatctcctgcgaggcacgttaagcagcgtggcgtttcgccaggcgatcgtcagcgcgggcgggccgatggtgagcagcctgtggcatcagcagcagaagaacaccccgttccggttgcgccatgatgcctggggaaattaa

SEQ ID NO: 213178 - DNA, 1254 bp, Klebsiella pneumoniae
atgcgtatgcttgcccgatttttgaccctgcttcttttcctgacctcactcagcgcctccgccagcctgcttagccagcagggcaaggctgtgcgctatatgcaaaccaccgaagacgcggtcatctgggcgcaggtgggaaaccatgtggtcagcgtcggcaatgttcgtgccgggcagatcctcgcagtcgtcccgacggcggctgactactatgagtttcgtttcggctttggcaccgggtttattgataaagggcatctcgagccggtgcagggcaagcagcgggtggaggaccgtctgggggatcttaataaaccgctgagtaaccaaaatttactcacctggaaagatacaccgctctatgacgctccctcggtaagcagcgcgccgttcggaacgctggccaacaatctgcgctatccgatcctcagcaagctgaaggaccggctcaatcagacctggtttcagatccgcattggcgaccgactggcgtgggtcagtagtctggacgcgcaggaggatcacggtattcccgtgctgacctatcaccatattctgcgcgatgaagagaacacccgttttcgtcatacgtcgaccaccacctcggttcgcgccttcacgaatcagatgacctggctgcgcgatcagggctataccacgctgaccctgtatcagctggaaggctatgtgcgtaataaaatcaatctcccggcgcgggcggtggcgatcactttcgatgatggcttgaaatcggtgaaccgctacgcctatccggtgctgaaacagtacggtttccatgccaccgcgtttattatctcctcgcgtattaagcgccatccgcagaagtgggatccgaaatccctgcagtttatgagcatttccgagctacgccagatccaggacgtctttgatattcagtcgcatactcacttcctgcatcgggttgacgccggccggcggccaattttattcagtcgcaattaccataatattctgtttgatttcgcccgctcgcgccgggcgctgagccagtttaatccgcacgttctctacctttcctatcccttcggcggctataacgctacggcggtgcaggcggcgaatgacgccgggtttcatatggcggtaacgacggtgcgtgggaaggtgaagccgggggacaatccgtttctgttaaagcggttatatatcttacgcacggattcgctggagacgatgtcgcggctgatcagtaaccagccgcaggggtaa

SEQ ID NO: 213179 - DNA, 381 bp, Klebsiella pneumoniae; identical to SEQ ID NO: 137239

SEQ ID NO: 213180 - DNA, 855 bp, Klebsiella pneumoniae
gtgctgattattgaatccgtactgctgctgcggcagcatatccgccgtctgcgtcaggaaggtaagcgtatcgcgttggtcccgacaatgggcaacctgcatgatggtcatatgaagctggttgatgaagccaaagccagtgcggacgtggtggtggtcagtattttcgtcaatccgatgcagtttgaccgcgtcgacgacctggcgcgctacccgcgcaccttacaggatgattgcgaaaagctgaacaaacgtcatgtcgactttgtcttcgcgccgacgccggcggaagtgtacccccagggtactgaaggccagacctacgtcgacgttccgggattatccaccatgctcgaaggcgccagccgcccgggccatttccgcggcgtgtcgaccatcgtcagtaagctgttcaaccttgttcaaccagacgtcgcctgcttcggcgagaaagacttccagcagttggcgctgatccgcaagatggtcgccgacatgggctacgacattgagatcatcggcgtgccgatcgtccgcgcgaaagatggcctggcgctgagttcgcgtaacggctacctgaccgccgaccagcgcaaaatcgcgcctggtctgtataaagtgctgagcgcggtggcggaaaagctggccgccggcgatcggcagctcgatgagatcatcgctatcgctgaacaggagctgaatgagaaaggcttccgcgccgacgacattcagatccgcgatgccgacaccctgcttgagctgaccgatgccagccagcgcgcggtgatcctgatggccgcctggctggggcaggctcgcctgatcgacaaccggatcgtcacgctcgctcagtag

SEQ ID NO: 213181 - DNA, 792 bp, Klebsiella pneumoniae
atgaaaccgaccaccattgccctgctgcagaaatgcaaacaggaaaagaagcgctttgccaccattaccgcctacgatcacagcttcgcgaagctgttcgccgatgaaggcataaatgtgctgctggtaggcgactcgctgggaatgacggtgcagggtcacgactccaccctgccggttaccgtggaagatatcgcctatcacacccgcgccgtccgccgcggcgcgccaaacagcctgctgcttgccgacctgccgttcatggcctatgccacccccgagcagacctttgcaaatgccgccatcgtgatgcgcgctggcgccaatatggtcaaactcgagggcggcgcctggctggccgacaccgtgaggatgctggcggagcgcgcggtgccggtttgcggccatcttggcctgacgccgcagtcggtgaacgtattcggtgggtataaagtgcagggtcgcggcgatgcggcgcagaccctgtttgaagacgcgttagcgctggaggcggcgggtgcgcagctgttggtactggagtgcgtgccggttgaactggcgaagcgcatcaccgacgctctgaccattccagtgatcggcatcggcgcgggcaacgtcaccgacgggcaaatcctcgtgatgcatgacgctttcggcattaccggcggccacattcctaaatttgccaagaatttccttgccgaagcgggcgacatccgcgccgcggtgcggcagtatattgccgaagtcgaatccggagtctatccgggcgaagaacacagtttccattaa

SEQ ID NO: 213182 - DNA, 480 bp, Klebsiella pneumoniae
atgactctggtctatatcgctcttggcagcaaccttgcttctccactggagcaggtgcaggcggctatccgcgccctgggcgaaattccgcacagccgcgtggtcgccgtctcttcgttctaccgcacgccgccgctgggcccgcaggatcagccggactatctcaacgccgccgttgcgctggaaaccgccctgccccccgagacgctgctcgatcatactcagcgcatcgaactgcagcaggggcgagtgcgcaaagccgaacgctgggggccgcgcacgctggacctcgatatcatgctgtttggcgatgctgtcattaacagcgagcgcctgaccgttccgcactacgatatgaaaaaccgcggctttatgctctggccgctgttcgagatcgccccggaccttcactttcctgacggcccggcgctgcgcgccgtgctggataatctcggcgcggaaaagcccgccagctggtaa

SEQ ID NO: 213183 - DNA, 1362 bp, Klebsiella pneumoniae
gtgctaagccgtgaggagcgcgaggcagaagccgccgtcgaaccaacgcctatgacggtgatcccgcgtgagcagcatgctatttcccgcaaagatatcagtgaaaacgccctcaaggtcatgtaccgcctcaacaaggcgggctacgaatcctggctggtcggcggcggcgtccgcgacctgctgcttggcaaaaagccaaaagattttgacgttaccaccaacgccacgccggatcaggtacgcaagctgttccgcaactgccgtctggttgggcgacgtttccgcctggcgcatgtgatgttcgggccggaaatcattgaggtcgccaccttccgtggccatcacgaagggcataccaccgatcgcgtcacctcccagcggggccagaacggcatgctgctgcgcgataacatcttcggctcgatcgaggaggatgcccagcgtcgcgacttcactatcaacagcctctattacagcgtggcggactttaccgttcgcgactacgtcggcggcatgaaggatctgcaggacggcgtgatccgtctgatcggcaacccggaaacccgctatcgcgaggatccagtgcgcatgctgcgcgcggtgcgctttgccgccaagctcaatatgaccatcagcccggaaacggctgaaccgctgccgcgcctggccgccctgctccacgatgtgccgccggcgcgtctgttcgaagaagtgctcaagctgctacaggccgggtatggctaccagacctacatgctgctgcgggaatacagcctgttccagccgctgttcccgaccatcacccgctactttaccgagcgcggcgacagcccgatggagcggatcatcagccaggtgctgaagaataccgatacccgcattcataacgatatgcgcgtcaatccggccttcctcttcgcggtgatgttttggtatccgctgctggagacggcgcaaaaaatcgctcaggagagcggcctggcgtactacgacgccttcgccctggcgatgaacgatgtgctggacgaagcctgccgtacgctggcgatccctaagcgcatcaccacccttattcgtgatatctggcagctgcagctgcgcatgtcccgtcgtcagggcaaacgcgcctggaagctgatggagcatccgaaattccgcgccgcctatgacctgctggagctacgcgccggcgccgagaacaaccacgaactgcagcgcctgaccaaatggtggggcgaattccaggtcgccgcgccgccggcgcaaaaagatatgctcaacgacctcggggacgatccggcgccgcgccgtcgtcaccgtcgtccgcgcaagcgcgcaccgcgccagggtagcgcatga

SEQ ID NO: 213184 - DNA, 882 bp, Klebsiella pneumoniae
atgactgactcacgctatatagggcgcttcgccccctccccctccggcgaactccacttcggctctctgatcgccgcgctcggcagctacctgcaagcccgcgcgaaccagggtatctggcgtgttcgtattgaagatatcgacccgccgcgcgaagtccccggcgccgccgataccatcctgcgccagcttgaccactacggtctgcactgggatggcgacgtgctgtggcagtcgcaacggcacgaagcctaccgcgaggcgctgacgtggctgggcgagcaagggctgagctattactgcacttgcacccgcgcgcggatccacgccgtgggcgggatctacgacggccactgccgcgacctcgggctgggggcggaaaacgccgcgctgcgcctgcgccaaacccgtccggtactgcagtttagcgaccgtctgcgcggcacgctcatcgccaatgagccgctggcgcgagaggattttattatccaccgtcgcgacgggctgttcgcctacaacctggcggtggtggtcgacgaccactttcaggggatcaccgagattgtccgcggcgcagacctgattgagccgacggtgcggcagatttcgctgtatcagcattttggctggcaggcgccggattacctccatctgccgctggctctcaatggcgacggcaataaactctctaaacaaaaccacgcgccggcgctgccggaaggcgatccgcgccccgaaatcgtccgggcgctccgctttctgaatcaggcgatccccgaggagtggcaggccctgagcatcgatgatttactcgcccaggccgtcgccaactggcagccggcgaaaatcgagcattctcaaatggctcccgctgagctatga

SEQ ID NO: 213185 - DNA, 456 bp, Klebsiella pneumoniae; identical to SEQ ID NO: 137245

SEQ ID NO: 213186 - DNA, 717 bp, Klebsiella pneumoniae
atgcagtttgatccgccgttgcagcccgccattttgcttaaacgttacaaacgatttcttgctgacgtggtcacccccgatggccgcgagctgacgctccactgcccgaataccggagcgatgaccggctgcgccgccccgggcgacaccgtctggtattccacctcggacaatgcgaagcgcaaatatgcccacacctgggaattaactgaaacccagcagggcgcagttatttgcgtcaatacgctgcgcgcgaattctttggcgaaagaggcgatttccgccggaataattcctgaactttcaggctataaccagctgaaaagcgaagtgaaatatggcgaagagaatagccgtatcgatattatgttacaggcagatgaccgacaaaactgctatattgaagtgaaatcggttacgttggcggagaaagaatacggttattttcccgatgcggtgaccacgcgcggtcagaagcatctgcgggaactgatggccgtcgcggcaaatggcgaccgcgcggtgattttatttgccgtcctgcattcggcaattgaccgtttttctcccgcgcatcatattgatgccagatacgcacagctgttaacagaagcccaggacaagggggtggaaattctcgcctggaaagcggaactttctacgacgaggatgactctgaataagccgatcgccgtggtgttaaaccccggtaaataa

SEQ ID NO: 213187 - DNA, 537 bp, Klebsiella pneumoniae
atgtctgagccgaaaaggctgttttttgcgcttgaactgccgtctgccgtccagaagcaaattgtccagtggcgggcaacgcacttccccgaagatgccggcaggcccgtcgcggcggataatcttcatctgacgctggcgtttctcggcgaggtgagcgcggaaaaacagcgggcgctggccgctctcgctggccggctgcgccagccgggctttaccctgacgctggacgatgccggacagtggctacgttcgcgagtggtatggctcggaacccgccagccgccgcgcggcctgctgcagctcgccagcatgttgcgcgctcaggcggcgcgcagcggctgctatcagagcccgcagccgtttcacccgcatattaccctgtggcgcgatgctcgccgggcggtgccgatcccggcccccggctttcgctggacatttccggtgaacgagttcgtgctctatgagtccagctttagccgggggcgcacgcgctacacggcgctggaacgttatccgtttgataaggaaagttga

SEQ ID NO: 213188 - DNA, 2430 bp, Klebsiella pneumoniae
gtgtcctcattgccggttgccgctgtccttccagaactgttatccgccctgcagcatgcgccgcaggttttgctcaacgcgccgaccggcgccgggaagtcgacctggctgccgctgcagatcctcgccgagggcaacatcgcgggacgcattatcctgctcgagccgaggcgcctggcggcgcgtaatgtcgcgcagcggctggctgaactgcttggcgaaaagccgggggagaccgtgggtttccgcatgcgcgccgaaacctgcgtcggaccgcagacccgcctggaggtggttacggaggggatcctgacgcgcatgatccagcgcgatccggagctgacgggcgtggggctggtgatcctcgatgagtttcacgagcgcagcctgcaggcggatctggccctggccctgctgctggacgtccagcaggggttacgtgacgatctcaagctgctgatcatgtcggcgaccctcgataacgatcgcctgcagcgtctgctgccggaggcgccggtggtggtctcggaggggcgcgcttatccggtggagcgtcgcttcagcccgctctccgcgcaccagcgttttgatgaggcggtggcggtagcggtggcggagctcctgcggcatgaacagggatcgatgctgctgtttctgcccggcgtcggcgagatccagcgcgttctggaacagctgacggagcgcgtggcggaggatgtcattctctgcccgctgtatggcgcgttgcccttaagcgaacagcgcaaagcgatcctcccggcgccggccgggaagcgcaaagtggtgctggccaccaatattgccgagaccagtttgaccatcgaggggatccgcctggtggtcgacagcgcccaggagcgggtcgcccgctttgacccgcgcaccggcctgacccggctggtgacgcagcgcatcagccaggcatcgatgatgcagcgtgccggacgcgccggtcgtctctccccggggatctgcctgcatttgctcggcaaagaacaggcggaacgggcggcggcgcagagcgagccggagatcctgcacagcgatctgtcggcgctgttgctggagctgctgcagtggggctgccacgatccggccgcgctggcctggctggatcagccgcccgcggtcaatctggccgccgcgcgccgcctgctggaggcgttgtcggcgctggacggcgagcggctgtcggcgtttggccgcaaaatggcagcgcttggcaacgagccgcggctggcggcgatgctggccgccgcgcagaccgatgacgaggcggtgacagcggcaaagctggcggcgatcctcgaggagccgccgcgcggcggactggtggatttgggggccgtcttttcccgtcagcaggccaactggcagcagcgatcgcagcagctgatgaagcgcctggcccgccgcggcggccagcccgatgccgggctaatggcggggctgctggcgtcggccttcgccgatcgcatcgcccgccgccgcggtcaggaggggcgctaccagctggcgaacggcatgggcgcgatgctggacgccgacgacgcgctgggccgtcatgaatggcttatcgctccgctgctgctgcagggcagcgcttcgccggatgcccgcatgctgttggctctgccagtggaaatcggcgagctgatcgccgcccgccctgaactggcgaaaagttccgacacggtggagtgggatgaagcgcaggggacgctgaaagcctggcggcggacggtgatcggccagttggtgatcaagacccagccgctggcgaagccctctgaggcagagctgcatcaggcgatgctcaacggtattcgtgagaaaggcctcggggtgctcaactggacgccagaggctgagcagctgcgcctgcggctgcactgtgcggcgcagtggctgccggaagaggcatggcccgcagtggatgacgcttcgctgctggcctcgctggagacatggctgctgccgcagatgaacggcgttcattccctgcggacgctgaaggcgctggatctgcgtcaggcgctacaggactggctgccatggccgctgcgccagaagctggatcgtgagctgccgacgcactataccgtgccgaccggcagccgcctggcgatccgataccatgcggagaacccgccagcgctggcggtgcgtatgcaggagatgttcggcgaggccacgacgccggtgatcgccgagggacgggtgccgctggtgctggagctgctgtcgcctgcccagcgtccgctgcagatcacctgcgatctgagcgccttctggcaagggagctaccgcgaggtgcagaaagagatgaagggacgctatccgaagcacgtctggccggacgatccggccaacgccgccccgacccgccgcagcaaaaaatactcgtag

SEQ ID NO: 213189 - DNA, 801 bp, Klebsiella pneumoniae
atgacgacactagccgcgttatcgctgcactttccctttgtctggtatggctttctactgctgttcggcctggcgctgggcagcttttacaatgtggtgatctatcgtctgccgcgcatgttgacccagaccgcggacgacgagcggataaccctcagcaccccgggctcttcctgcccgcagtgccgccagccgatcgcctggcgggacaatatcccgctgctcagtttcctctggctgggccgtcgcgcccgctgctgtcaggcgcccatcgcgtggagctatccgctgaccgagctggccaccggcctgctgtttatcctcgccggagctttgctagcgccgggcctgccgctggcgggcggcctggtgctgctctcgttcctgctgatactggcgaggattgacgcccggacccagctgctgcccgatcgcctgactctgcccctgctgtgggccgggctgctgttcaatcttaacgaggtgtacattgccctgccggatgcggtcgccggggcgatggccggttatctggcgctgtggtcggtctactggctgttccgcctgctgaccgggaaagaggcgctgggctatggcgattttaagctgctggcggcgctgggcgcctggtgcggctggcaggttctgccgcaggtgctgttgctcgcttcggccagcgggctggtgtggaccctgctgcaacgcctgtggacccggcagtcgctgcagcagccgctggccttcggcccctggctggcgctggccggcgggagtatttttctctggcagcagatggtctag

SEQ ID NO: 213190 - DNA, 747 bp, Klebsiella pneumoniae
atgaaggctaactggatcgcgggcggactgctgctggtcctctatctgttgtggctcaccgccacggctccggcgcgcctgctggcccccatgctgccgcccggcgtacaggtggggcagtttagcggcagcgtctggcgcggcgcggcgcaaccggtctactggcatggggaacggcttgaacgactggcgtggtcgctgaccctggcgggctggcaggtctctctcagcgatccccgcggcgtgatgggtcaggcccggctgtggggccttcgcgatctgcgcctacaggaggggcggctcaccgcccccgccagcctgctcagccgctggttgatgtcgactatgcccgtcaaggccgcgggggaggtcaccttcagcctgaccgaagggcggttcagcgacggacgctgccggcatatcatcgccggaggcgcgcagtggcggcaggcccgactgcactctccggtcggcagcctggagctggcccaggttaatggcaccttccgctgtacggtggacggcgccgtggcgctgactctccgtcaggactctcatcagctgagcctcagcggccaggggactctgtcgcccgatggccgctatctgtttcgcggcacgctacagccccggcaggggatgccgccgctgctggcgctgctggtcacgcgcccgacagcgaataacgccccgggcccgacgccgtggcagctgcagggaaaatggttaccacaggagcaaaaatga

SEQ ID NO: 213191 - DNA, 486 bp, Klebsiella pneumoniae
atggctaatctgcttatctggtggcggcagcgcacgccgtcggagcagcgcctgttgcttggtctgacagggctgctggcggcatgcgccttctggtatgggctgtggcagccctggcgagcccgcgaggcgcagtggcggcaaaccctggtgaaagagcaggccagcctgcgctggatgacggagcaggctccgcgcctgcagcagctcagccagcagcccgcgccggcggcaaaagaggcgctcaccgcgctggtgatgcgcgaggcggcgagccacggactgacggtcatccgcctgcagccgcagggaaaacgtctgcagatcacccttcagccctgcgctttccaggcgctgatcgactggctggacgctccggcgatgcgcggcgtcaacgcgatctcgctgtccgtgaccgggcagccgtcgcgacccggctgggtcacggtcaaccatctgctgctggagcgcgacgatgaaggctaa

SEQ ID NO: 213192 - DNA, 1164 bp, Klebsiella pneumoniae
atgctgatcgtgcgcctcgccgccgcgcaggcgccgctgcactggcaactcttcgcccccggcgagccgcaccacgaggccagcggccggtggccgactgacgacgccagccctttcccggcgctggctgagcagtacccggcctgggtgctgatcccggccagcgactgcgcgtttcactcgctcaacctaccggcgggcctgcgtaaaccgccgctgcaggtggccccgtttctgctggaagagcagctggcagacgatgtggaagccacccattttgctctgctccaccgccagcaggcccagtgcgagatcgtcgccgtacagcggcaaaaaatgcgcgactggctggcgcgctgcgaatcgctctccttacagcccctggcgttgacgcccgacgtgctggccctgccctggcaaccgccggcgtggagcgcggtgcaggtggacgagcagtggctgatccgccaccagccgtggggcggcatggcggcggaaaacgtctggctgacggagctgctgcagagcgaggcggaagagcacgtcatcgacagctattcgccgccgcccgcggcgccgggcgtctggcgggagcagcctgcgcagacattgctgacccttgccgcacgccatccggcagcgcagaaactcagtctgctgcagggggagttcgccgtccggcggcggtctgcgcaggcgagctggcgtccggcgcggtatgccgcgctggctctggcgttactggcaggggcaaacagcgtgctggaccatcgcgatctggcgcgtcaggccgaggcggcgcaacaggccagccgggccttctatcaccgctggtttccgacggagaaaaaggtgattaacccacgactgcagatgcagcagcacctgcaaaccctcacccgtcaggcgcagcatgcccccctcgtcgaccgcctcagcgccttgcaaaacatcctcagcgaaacgccggggatccgtctgcgagcgctgagctgggatgccgcgggcaatcgtctgcagctggatatcgccgcggtcacttcccgggcgctggagcagtttacccagcgggcgcagccgcggtttcgcgtccggccgggcgacatgatcacgaaaccggatggcattgagggacaactgacgctggaggaaaacgatggctaa

SEQ ID NO: 213193 - DNA, 987 bp, Klebsiella pneumoniae
gtgataaatcggcaacgcggcgtcgcgctcctgatggtgctgttcatcctcgccctgatgatgatcctcgccagcgccatgaccgagcgcaccgcggtcatgtatcagcataccgccgtgaccctcgataatttgcaggccagatggtacgccctggcggcggaaaatatggccgccgcgctgctgcaacgcgatgcgctggactcgcccagtcaaacgaacctggcgcaaacctgggcgcaggaggggcgccgctttaccctcgacgatggcgaaatccgcgccacgatccgcgacgggcacgcctgctttaacctcaatgccatcaaccatcgcacggatgaggctggcgacggaacgccctacccgaccgacgtcttcgttcggctgctggcgctgctcggcgagccgccgctgcgcgccagccagatcgccgccgcccttggcgactggacggacagcgacggccagccgcggctgaacggggcggaggacgaggtctatatggcgcaaaccccgggctatctcgccgccaaccagccgatgcaggatgtcagcgagttgcgcctgctggccgggatggacgccgcgctctatcagcgcctgctccccttcgtctgcgtccagccggatgacgcgctgcaggtcaatgtcaacaccctgcgcccctcccaggccgccctgctggtggccctctttcccggcgatctgacgctgcaggaggcgcaacagctgctgcacaaccgcccgcgaaccgggtggagcagcgtcgccgcctttctcgcgcagccgacgctgcagaaaaccgataccacgcttgcccgtccctggctgacggtgcacagcgcacgctttatcgcagcttttaccgtggtgactggcaatctccgctttcagctgtacagcgtcctgcaacaatcggggcgcacgtttaccgtcgtccagcggcgatatggactctctatggtggtcgatgaacaagattaa

SEQ ID NO: 213194 - DNA, 597 bp, Klebsiella pneumoniae
atgataacgaaaatacgcggtttcactctgatcgaaacgctgctggcgctggctatcctcgccgtcctcagcgccgccgccgtgatggtgctgcagaacgtcatccgcgccgatggcctgacccgcgagaaaagccagcagatcgcggccctccagcgcgcctttcgccagatagccgacgatgtcacccacatcattccccgtcgcgccagaaacagcgacacgtttttcttcgccggacgtttccagttgcagagcgacgactggggactggccttcagccgcagcggctggccaaacccgctggggatcctcccgcgctcggagatccagaacgtcagctaccgtctgcgccagcagcagtttgaacgtctgagcttcgatcaacaggatccgctgaccggcagccagccgacggtccgggtgctgctgcgcgaggtcacagcgtttcgcctgcggttttacgccgacgggcgctggcaggaaacctgggaccgcccgcagaggctgccgcaggggctggagatcaccctgacgctggcgaacagcggggagataacccgcctgtttttactcaccccgggaggcggccagtga

SEQ ID NO: 213195 - DNA, 366 bp, Klebsiella pneumoniae
atgaagcgtgaagccggaatgacgcttatcgaagtgatggtcgcgctggtgattttcgccctcgccggcctggcggtgatgcagtccaccctgcagcagacgcgccagctcgggcgtatggaagagaaaatcctcgccagctggctggcggataaccagctggtgcagctgcggctggagaaacgctggcctgccctcagctggtctgaaaccaccgtggaggccgccgggacgcgctggttcgttcgctggcagggagtggaaaccgcgctgccgcagctgcgggcgctggacgtggaggtccggcggcaaaaaagcgatcccgcgccgctggccaccctgcgcacctgggtgacgccgccatga

SEQ ID NO: 213196 - DNA, 516 bp, Klebsiella pneumoniae
gtgtctcagcgcggtttcaccctcctggagatgatgctggtcctgctgctgatcggcgtcagcgccagcatggtgctgctggcgtttccctccgcccgcacccaggaggccacacagatcctggcgcgctttcaggcgcaactggattttgtccgcgagcgcgggcagcaaaccggtcagctcttcggcattatcatccaccctgagcgctggcagtttatgcgcctgcagcctgccgacgatagcgccccggcggcggctgacgaccggtggggcaacgcgcagtggctgccgctgcaggccggacgcgtcaccacggcggaaaccctcccgcgggccaggctgacgctgcgctttcccgacggccaggcgtggacgccgggcgagcagcccgacgtgcttatttttcccggcggtgaagtcacgccgtttcagctgcggattgacgccgcgatgggcatcaacgtcgacgcccagggcgacagccagccgctggcggcgcgggagcagccatga

SEQ ID NO: 213197 - DNA, 423 bp, Klebsiella pneumoniae
atgcaacggcaacgcggtttcacgttactggaaattatggtggtgatcgtcattctcggcattctcgccagcctggtggtgcctaacctgatgggcaacaaggagaaagcggaccgccagaaagtcgtcagcgatctggtggcgctcgagggagcgctggacatgtataaactcgacaacagccgctaccccaacaccgagcagggactgcaggcgctggtgaccgctccggccgccgagccgcatgcccgcaactacccggaaggcggctatatccgccgtctgccgcaggacccgtggggaaatgagtatcagctgttaagcccgggtcagcatggcgccatcgacgtcttcagcgtcggcccggacgggatgcccgacaccaatgacgatatcggcaactggaccctcgggaagaaatag

SEQ ID NO: 213198 - DNA, 1215 bp, Klebsiella pneumoniae
atggccctgtttcgctatcaggcgctggacgcgcagggcaaaacccgccgcggccttcagcaggccgactccgcccgccacgcccgccagctgctgcgggacaagggctggctggcgctggaagtgacaactgccgacccggcgcggcgactgtgggccggcggatcccttacccggcgtaccagcgccggtgatttagccctgctcacccgccagctggcgactctggttgccgccgggatcccgctggaaaaggcgctcgatgccgtcgcccagcagtgcgaaaagccgtcgctaagaacgttaatggccggggtgcgcagcaaagtgctcgaaggccactcgctggcggaggcgatgcgcgcctatcccgcctgcttcgacgggctgttctacgccatggtggcggccggcgaaacctccggccatctcgacggcgtactgaaccggcttgctgactataccgagcagcgccagcagctccgcgcccgcctgctgcaggcgatgatctaccccatcgtactgacgctggtcgctatcagcgtgatcgccattctgctctccaccgtggtgccgaaagtcgttgagcagtttgtccatcttaaacaggccctgcccttctctacccggctgctaatgagcctgagcgacatcgtgcgcagcgcgggcccctggctggcgctgctgtcgttactggcgctgctggcgctgcgctatctgctgcgccagcccgcccggcggctcgcctgggaccgggcgctgctgcgcctgccggtcatcggccgcgtggcccgcagcgtcaacagcgcgcgctacgcccgcaccttaagcattctcaatgccagcgcggtgccgctgctgctgtcgatgcgcatcagcgccgacgtcctcagcaacgcctgggcgcgcagccagctggcggcggccagcgaatcggtacgcgaaggcgtcagtctgcatcgggcgctggaatccaccgccctgtttccgccgatgatgcgctacatgatcgccagcggcgaacagagcggagaactgaccgccatgctggagcgcgcggcggagaaccaggaccgggagctgagcgcgcagatccagatggccctcagcctgtttgagcctctgctggtggtcaccatggccggcatggtgctgtttatcgtgctggccatcctgcagccgatcctgcaactgaacacccttatgagtatgtaa

SEQ ID NO: 213199 - DNA, 1494 bp, Klebsiella pneumoniae
atgacgccagccgccgaacgccgtccgctgttgcccttcgcctgggcccgcgcgcaccatcttgtgctgctcagcgacggcgaatgctgcgaagcgctgtgccgccccgataccgccgcccgggcgctgctggaagcgcgccgcctggcggacggcccgatgcgcgtcagccgtctggcgccggacgcgttcgagaaagtgctggtgctcagctatcagcgtgattcggcggaggcgcaccgcatgatggccgacatcggcaacgagctcgacctctataccctcgccgaagagctgccggacaccgacgatctgctcgacagcgaggacgacgcgccgatcatccgcctgatcaacgccatgctcaccgaggccatcaaagaaaaagcctcggatattcatatcgaaacctacgagcgccatctgcagatccgctttcgcgtcgacggcgtgctgcgggaaattctgcgcccgcagcggcggctggccgccctgttaatttcgcgcatcaaggtgatggccagtctggacattgccgaaaagcgggtccctcaggatggccgcatggcgctgcgcatcggcgggcgagcaatcgacgtgcgcgtctccaccctgccctccagccacggcgaacgcgtcgtcctgcgtctgctggacaaaaacagcgtcaacctggatctgctgacgctgggcatgccgcccgccctgctcgatcgggtcgatgcgctgatcgcccgcccgcacggcatcatcctggtcaccggtccgaccggctccgggaaaagcacgacgctctacgccgccctcagccgcctcgacgcccgggagcgcaacatcatgaccattgaagatccggtggagtatgagctggagggcataggccagacccaggtcaacgccaaagtcgagatgaccttcgcccgcggcctgcgtgccatcctgcgccaggatccggacgtagtgttggtgggcgaaatccgcgatggcgaaaccgcccagatcgccgttcaggcctcgctgaccgggcacctggtgctgtcgaccctgcacaccaacagcgcgctgggcgccatttcccgtctacaggatatgggcgtggagccttttttactctccacctcgctgctggcggtgatgtcgcagcggctggtgcgccaactgtgcccgcactgccgtcagccctggcaggcggatgccaacaccgcccggcagatggcggtcccggtcggcgcgcggctgtggcagcccaaaggctgtccggagtgtaatttcatcggctatcgtgggcgtaccgggatccatgaactgctgctaatcgacgatcgcgtgcgcgccgccatccaccgcggcgagaacgagatcaccctgatccagcagctggggccagcctggcaaaccctgcgtcatgccggacgcgacaaagcgctggcggggatcaccagctgggaggaggtgatgcgggtcaccgaacagcaaacgacggaaagcgtctaa

SEQ ID NO: 213200 - DNA, 1974 bp, Klebsiella pneumoniae
atgaaaagcctgcgaaaaatgctgcctgcgctgctgatattaaccccgctgctattttctccggccgccgcggaggaattttccgccagttttaaaggcaccgatatccaggaatttatcaataccgtcagcaaaaacctgaataaaacggtgattatcgatcccagcgtacgcggtactatcaccgtgcgcagttacgatatgctcaatgaagaacaatattatcaattcttcctcagcgtgctggatgtatatggcttcgccgtgatcaatatgaataacggcgtgctaaaagtggtccgcgccaaagacgccaagacctcggccgtgccggtcgccagcgcggccgcgccgggcgaaggcgatgaagtggtcacccgggtggtgcccctgaccaacgtcgccgcccgcgatctcgccccgctgctccgccagctgaacgataacgctggcgccggcagcgtggtccattatgagccctccaacgtactgctgatgaccggccgcgcggcggttatcaaacgcctgctgaccattgtcgagcgcgtcgacaacgccggggatcgcagcgtggtgaccgtgcccctttcctgggcctccgccgcggaagtagtcaaactggttaccgagcttaataaagataccagcaagtcggcgctgccgggctcgatggtggcgaacgtggtggccgatgagcgcaccaacgcggtactggtgagcggcgaaccaaactcgcgccagcgcatcatcgccatgatcaaacagctcgaccgccagcaggcggtacagggtaacaccaaagtgatctacctgaagtacgccaaagccgccgatctggtggaggttctgaccgggatcagcagctcgctgcagagcgacaagcaaagcgccaggccagtggccgcgatcgacaaaaatattattatcaaagcccacggccagaccaacgccctgatcgtcaccgcggcgccggacgtgatgaacgatcttgagcgggtgatcgcccagctcgatatccgccgcccgcaggtgctggtggaggcgattattgccgaagtgcaggatgccgatggccttaatctcggtatccagtgggcaaacaaaaacgccggcatgacgcagttcaccaacagcggtttgccgatatcgacggctatcgccggcgccaaccagtacaacaaagacggtaccatcagcagctcgctggccagcgccctcggctcgtttaacggtatcgccgccggcttctatcaggggaactgggcgatgctgctcaccgccctctccagcagtaccaagaacgatattctggccacccccagcatcgtcaccctcgataacatgcaagccacttttaacgtcggccaggaagttccggtattaaccggctcgcaaaccacctcaggcgacaacatcttcaataccgtcgagcgcaaaaccgtcggcattaaactgaaggtgaagccgcagattaacgaaggcgatgcggtgctgctggagattgagcaggaggtatcgagcgttgccgactcggcctccagcaccagcagcgatctcggggcgaccttcaatacccggacggtgaataacgccgtgctggtcggcagcggcgaaacggtggtggttggcgggctgctggataaaaccgtcaccgataccgctgacaaagtgccgctgctcggggatattccggtgatcggcgccctgttccgctccgacagcaagaaagtgtcgaaacgcaacctgatgctgtttatccgcccgaccatcattcgcgatcgcgatgagtaccgccaggcttcttccggccagtacaccgccttcaacaatgcgcaaactaaacagcggggtaaagaaagcagcgaagcgtcgctcagcaacgacctgctgcacatctatccgcagcaggagacccaggccttccgccaggtcagcgccgccattgacgccttcaatctcggaggccgcccatga

SEQ ID NO: 213201 - DNA, 843 bp, Klebsiella pneumoniae
atgccagtttctgtgatgaggttaacaaatataaataaagggataattaaattattaccacaaattgtgacgctcatcatattaataaccgctatcccacagctggcgaaattaacctggcgcgtggtattccctgtgagtcctgaggatatttccgccctaccgttaaccatgcctccggcggcagatccggaattaaaaaatgtgcggcccgcatttaccctgtttggcctggcggtgaaaaatagccccacgccaacggatgctgccagtctcaatcaggtgccggtttccagcctgaagctacgcctggccgggctactcgccagcagcaacccggcgcgctccatcgctattatcgaaaagggaaatcagcaggttagccttagcacgggcgatcccctcccagggtatgatgcgcggatcgccgccattctgcctgaccggatcattgtcaactatcaggggcgcaaagaggccattttattatttaacgacagtcgcgcgccgtcgccgccgcccaccgccgcgggcaacccgcccctcgtgaagcgactccgcgaacagccgcaaaatatcctcacttatttatctatttcgccggtactcagcggcgacaaactgctgggttatcgactaaacccaggcaaagacgcctcgctgtttcgccagtccggcctgcaggcaaatgatttggcgattgccttaaatggcatcgatttacgcgaccaggagcaagcgcaacaggcgctgcagaatctggccgacatgaccgaaataacgctaaccgttgagcgggaaggccaacgacacgatattgctttcgcgctgggggatgaataa

SEQ ID NO: 213202 - DNA, 3309 bp, Klebsiella pneumoniae
atgctcagatatacctgtcatgccctatttcttggatcgttagtattattgagtggctgtgataacagctcttcctcttctacctctggctcaccgggttcaccaggcaatcctggcaacccaggcactcccggcacgcccgacccgcaggatgtcgtcgtccgcttaccggacgttgccgtcccaggcgaagcggtgcaggcttccgccaggcaggctgtcattcatctcgtcgatatcgccggcatcaccagcagcacgccggccgactatgcgacgaaaaacctctacttatggaacaacgaaacctgtgacgcgctgagcgcgccggtggcggactggaatgatgtcagcaccacgccgaccggcagcgacaaatatggcccttactgggtgatcccgctgactaaagagagcggatgcatcaacgttatcgtccgcgatggcaccaataagcttatcgacagcgacctgcgcgtctctttcagtgatttcaccgatcggacggtatcggtcatcgccggtaacagcgcgctctatgactcccgcgccgacgccttccgcgccgcctttggcgtggcgctggccgatgcgcactgggtcgataagactactctgctgtggccgggtggggaaaataaacccattgtgcgcctctattacagccacagcagtaaggtggccgccgacagtaacggcgaatttagcgataaatatgtcaagctgacccccaccaccgtcaaccagcaggtaagcatgcgcttcccgcatctcgccagctatccagcctttaaactgccggatgatgttaacgtcgatgaattgctgcagggcgagacggtggcgatagccgcggaaagcgatgggatcctgagctcagccacccaggtgcagaccgccggcgtgctggacgatacctatgccgccgccgccgaggcgctgagctatggcgcccagctaaccgatagcggcgtgaccttccgcgtctgggcgcccacggcgcagcaggtcgagctggtgatctatagcgcggacaagaaagtgatagccagtcacccgatgacccgcgacagcgcctccggcgcctggtcctggcaggggggaagcgacctgaagggcgccttctaccgctacgcgatgacggtctaccacccgcagtcgcgtaaagtcgagcagtacgaagtgaccgatccctacgcccacagtttgtcgaccaactcggagtacagccaggtggtcgatctcaacgacagcgcgctgaagccggaaggctgggacgggctgacgatgccgcacgcgcagaaaaccaaagccgacctggcgaaaatgacgatccacgaatcgcatattcgcgatctctccgcctgggatcaaaccgttcctgcggagctgcgcggtaagtatctggcgctcaccgcccaggaaagcaatatggtccagcatctgaaacagctgtcggcctcgggcgtgacccatattgagctgctgccggtcttcgatctggcgacggtcaatgagttcagcgacaaagtcgccgatattcagcagccgttcagccgcctgtgcgaggtcaatagcgcggtgaagagcagcgagttcgcgggctattgcgacagcggttcgacggttgaagaggtgctgactcagctgaagcagaacgacagcaaggataacccgcaggtgcaggcgttgaatacgctggtggcgcagaccgactcctataactggggctacgatccgttccactacacggtaccggaaggatcctacgccaccgatccggaaggcacggcgcgtattaaagagttccgcaccatgattcaggcgatcaagcaggatctgggaatgaacgtcattatggacgtggtgtacaaccacaccaacgccgccggcccgaccgatcgcacctcggtactggataagatcgtcccctggtactaccagcgtctgaacgaaaccaccggcagcgtggaatcggctacctgttgctccgactcggcgccagagcaccggatgttcgccaagcttatcgccgattcactggcggtatggaccaccgattataagatcgatggcttccgcttcgacctgatgggctaccacccgaaagcgcagatcctctcggcctgggaacgcattaaagcgctgaacccggatatctacttctttggcgaaggctgggattccaaccagagcgatcgctttgaaattgcctcgcaaatcaatctcaaaggcaccgggatcggcacgttctccgatcgtctgcgcgacgcagtgcgcggcggcgggccgttcgactccggtgacgcattacgccagaaccagggcgtgggcagcggggccggcgttctgccgaatgagctgaccaccctgagcgacgatcaggcgcgtcacctcgccgatctgacccgtctcggcatggccggtaaccttgcggactttgtgctgatcgacaaagacggcgcggtgaagagaggcagcgagattgattataacggcgcgccaggcggctatgcggctgatccgacggaagtcgtgaactatgtgtcaaaacacgataaccagacgctgtgggacatgatcagctataaagccgctcaggaggcggatctcgatacccgcgtccggatgcaggcggtgtcgctggcgacggtgatgctcggccaggggatcgcctttgaccagcagggctcggagctgctgcgctctaaatcctttacccgcgattcgtatgattccggcgactggtttaaccgcgtggactactccctgcaggacaacaactacaacgtcggtatgccgcgcagcagcgatgatggcagcaactatgacattatcgcccgggtgaaagacgcggtggctactccgggtgaaacggagctcaagcagatgaccgcgttttatcaggagctgaccgcgctgcgtaaatcgtctccgctgtttaccctcggcgacggcgcgacggtgatgaagcgcgtggacttccgcaatactggcgccgatcagcagacgggtctgctggtgatgaccatcgatgacgggatgcaggctggcgccagtctggacagccgtgtcgacggcatcgtggtggcgatcaacgccgcgccggaaagccggacgctgcaggacttcgccggcacatcgctccagctgagcgctattcagcaggcggcgggcgaccggtcgctggcgagcggcgtgcaggttgccgctgacggttcggtcacgctgccggcctggtcggttgccgttctcgagttgccgcagggcgagtcgcagggcgctggcctgccggtgagcagtaaataa

SEQ ID NO: 213203 - DNA, 558 bp, Klebsiella pneumoniae
gtgattgttcgtgatgacagtgaaagaggcatcccgccgctggtgacgcatcagccgccgtcctcgatggatgatgcgccggtgatccgcggacggatggtgcagatccccggctggattatcccgctgtacgccggattatttatcgcgctcggctggtttggcggcgagcagtggcgtcacccggcaccgccgcaaacgctgcccttgccggtggcgcatgcggcgcttctgccgttaaccgctgccggagaggccgcgccaaagacgccgccgccggcggcaaaagccagcgcgcccgcggcgccggaagtggacagcgatacgctgccgcctctacgctacagcgcccatgtctatgcctcgctaccggaaaagcgcagcattgtgttaaacggcaaagcgtggacggagggcgattcacccctgcccaatctggtggtggagcagatccagcaggatgtgacgatcttcagcttcaacggcacgacctttaccctcgcggcgctggaggactggccgggcggaaaaattgacgaggagccgaaagaggaataa

SEQ ID NO: 213204 - DNA, 2553 bp, Klebsiella pneumoniae
atggcgggagatgaccgcgagcctatcggacgtaagggaagaccctcacgtccgactaaacagaaagtcacccgtcgccgggtccgggaagaggactacgacgacgagtatgatgacgatgattatgaggatgagaaaccggtgccgagaaaagccaaaggcaaaggtggcaagcctcgtcggaagcgcagctggctgtggctgctggtcaagctggggattgtcttcgcggtgctgattgccgcctatggcgtctacctcgaccagaaaatccgcagccgcattgacggtaaagtctgggagctgccggccgcggtctatggccggatggtcaaccttgagccggacatgcagatcagcaaaaacgagatggtgcgtctgctcaacgccacgcagtatcgccaggtcagcgcgatgacgcgccccggcgaatataccgtgcaggctaacagcatcgagatgatccgtcgtccgttcgatttcccggacagtaaggaagggcaggtgcgcgcgcgtcttaccttcgacggcgaccatcttgagaccatcgagaatatggataataaccgccagttcggtttcttccgcctcgatccgcgtcttatcaccatgctgcagtcgccgaacggcgagcagcgcctgttcgtgaagcgcagcggcttccccgatctgctggtggataccctgctggcgaccgaagaccgccacttctatgagcacgatgggatcagtctctactccatcggccgcgcggtgctggcgaacctgacggcaggccgaacggtgcagggggcgagtaccctgacccaacagctggtgaaaaacctgttcctctccagcgaacgctcctactggcgtaaagccaacgaagcgtatatggcgctgatcgtcgacgcccgctacagcaaggatcgcatccttgagctgtatatgaacgaggtgtacctcggccagagcggcgataacgaaattcgcggcttcccgctggccagcctgtattacttcggccgtccggtggaagagctgagcctcgaccagcaggcgctgctggtggggatggtgaaaggggcgtcggtctataacccgtggcgtaacccgaaactggcccttgaacgacgcaatctggtgctgcgtctgctgcagcagcagcaggttatcgaccaggagctgtacgacatgctcagcgcccgtccgctgggcgtgcagccgcgcggcggggtgatttcaccgcagccggcgtttatgcagatggttcgtcaggaactgcaggcgaagctgggcgataaagtgaaagatctctccggcgtgaagatcttcaccactttcgactcggtggcgcaggatgcggcggaaaaagcggcctccgaagggatcccggttctgaagaaacagcgtaagctggcagacctggaaaccgctatggtggtggttgaccgcttcaccggcgaagtgcgggcgatggtcggcggcgcggagccgcagttcgccggttataaccgcgcgatgcaggcccgccgatcgattggttctctggccaagccggcgacctatctgaccgcgctgagtcagccgaatcagtatcgcctgaatacctggatcgccgatgcgccggtgacgattcgcctgtccaacggtcagacgtggtccccgcagaacgacgatcgtcgtttcagcggtcaggtgatgctggtcgatgccctgactcgctcgatgaacgtcccgacggttaacctcgggatggcgctgggcttgccggcggtagtcgatacctggactaaactgggggcgccgaagaatcagctcaacgcggtgccgtcgatgctgcttggcgcgctgaacctgacgccgattgaagtggcccaggccttccagaccatcgccagcggtgggaaccgtgcgccgctttccgcgctgcggtcagtgattgccgaagatggcactgtgctctaccagagctatccgcaggcggagcgcgcggtgcctgcccaggcggcctacatgacgctgtggactatgcagcaggtggtgcagcgcggtacggggcgtcagctgggggcgaagtatccgggcctgcatctggcggggaaaaccgggaccaccaacaataacgtcgatacctggttcgccggcatcgacggtagtcaggtgaccatcacctgggtgggtcgcgacaataaccagccgaccaaactgtacggcgccagcggcgcgatgtcgatttaccagcgctatctggcgaaccagacgccaacgccgctggtgctgacggtgccggaagacgtggttgatatgggcgtggacagcaacggcaacttcgtctgcagcggcggtatgcgttcgctgccggtctggaccacgcagccggatgcgctgtgccgtcagggcgaaatgatgcaacagcagcagttgcagcaacaggaagcgaaaaatccgtttaatcagtccgggcagcaaccgccgccgcagcagcaacagcagcaacagccgccgaagcagcaggaaaagagcgacggcgtcgcgggctggatcaaggatatgttcggcagtaactga

SEQ ID NO: 213205 - DNA, 2208 bp, Klebsiella pneumoniae
atggcgcgtccaaaaactgctcagccaaatcactcgctgcgtaaagtcgcagctgtagtagccacggcggttagcggcatgtctgtctacgcacaggcagcagaacaaccgaagcaagaagaaaccatcaccgtcgttgccgccccggccgcccaggaaagcgcctggggaccggcgccgactatcgcggcaaaacgctccgccacggcgaccaaaaccgataccccgattgaaaaaacgccgcagtctgtgtcggtggtgacgcgccaggagatggagatgcgccagccgacgacggtaaaagaggcgctctcctatacgcccagcgtcttctccactcgcggcagttcgaccacctatgacgtggtcaccattcgcggcttcaccacctcgacgaccgtcaacaccaaccagtatctggacggcatgaagctgcaggggaataactactctgaagtctccatggatccttacttcctcgagcgtgtggaagtgatgcgcgggccaacctcggtgctgtacggcaacagcaacccgggcggtatcgtcagcatggtcagcaagcgcccgactaccgagccgctgaaagaagtgcagtttaagatgggcaccgacaatctgtggcagaccgggtttgactttagcgacgccattgatgatgccggcgtttggtcgtatcgcctgaccggccttggccgcagtcaggatgcccagcagcagatggcgaaatcgactcgctacgcggtggcgccctcctttagctggcgtccggacgataaaaccgacttcaccttcctgagcaacttccagaatgacccggatgcgggctactacggctggctgccgcgcgaaggcaccgtggtgccgtattacgacgccaacggtaaggcgcacaagctgccgaccgatttcaacgaaggcgagtccgataataaaatctcccgccgccagaagatggtgggctacagcttctcccatcagttcgatgacacttttaccgtgcggcagaacctgcgctatgccgatgtgcatacgctctatcgttcggtatacggcaacggctatgtcgcgccgggctacatgaatcgcgcctacgtgcgctccgacgagcacctgaacaccttcaccgtcgatacccagctgcagtctgatttcgccaccggcgcggtcagccatacgctgctgaccggcgtggactactcgcggatgcgtaacgatgtggatgccgactacgggacggcggatcctatcagcatgagcaatccgcagtacggcaatccgaatattcaggtcaccttcccgtacgcggtcctcaaccggatggagcagaccggcctgtacgcgcaggatcagatggagtgggataaatgggtgatgaccctgggcggccgttacgattacgccacgacctcaacgttaacccgcgccaccaacagcctggcggagaatcacgaccagcagttcagctggcgcggcggcatcaactacctgttcgataacggcatctctccgtacttcagctacagcgaatcgtttgaaccggtatcgggttccaacagccgcggccagccgttcgatccgtcgcgcggtaagcagtatgaagccggcgtgaaatacgtgccgaaagatatgccggtggtggtcaccgcggcggtttatcagctgaccaaagacaagaacctgacggctgatccggctaaccaggcgttcagcatccagaccggcgagatccgctcccgcggccttgagctggaggcgaaggcggcggtgaacgctaatattaacgtcaccgcagcctacagctacaccgatgcggagtacactcacgatacggtgttcaacggcaaacgtccggcggaagtgccgcgtaacatggcctccctgtgggcggattataccttccacgaaaccgcgctgagcggtctgacgattggggccggggcgcgctatatcggttcaacggtcagctactacaaaaatgacaccagcaccggtaagaaaaatgatgcctttagtgtggccggttatgcgctgatggatgcgacggtgaaatacgatctggcgcgctttggcctgccgggatcgtcggtcggcgtcaacgtcaacaacctgttcgaccgcgaatatgtctccagttgctacagcgaatacgcctgctactggggcgccggacgtcaggtcgtcgccaccgccaccttccgttactaa

SEQ ID NO: 213206 - DNA, 798 bp, Klebsiella pneumoniae
atgcaggaacagactccgcacgcagaaaccaccttcgcgctggatcgcgtcactttccgtgtgcctggccgcacattgctccatccgctctcgctcaccttcccgaccggaaaagtcacaggcctgatcggccataatggctccggcaaatcgacgttactgaaaatgcttggccgtcatcagccgccctccgcaggcgaagtgctgctggacgggcagccgctggagagctggggcagcaaagcctttgcccgcaaagtggcctatctgccgcagcagctgccgccggccgaaggtatgacggtgcgcgagctggtggcgatcggccgctatccatggcacggcgcgctgggtcgctttggcgcagcggaccgtgagaaagtagaagaggcgattgcgctggtggggctgaagccgctcgctcatcgtctggtggacagcctctccggcggtgaacgccagcgggcgtggatcgccatgctggtggcgcaggacagtcgctgcctgctgctcgatgaacccacctcggcgctggatattgctcatcaagtcgatgttctggcgctggtgcatcgtctcagccagcagcgcggcctgacggtgatcgccgtcctgcacgatattaatatggcggcccgctattgcgactatctggtggccctgcgcggcggagaaatgattgctcaggggacgccggcggaactgatgcgcagcgacactctggaacagatctatggcatcccgatggggatcctgccacacccggccggtgcggcgccggtaagctttgtctattga

SEQ ID NO: 213207 - DNA, 891 bp, Klebsiella pneumoniae
atgatgaacccaactctgataacccgacgccgcctgctgatcgcgatggcgctctcgccgctgctgtggcagatgcgcggcgcgcaggcggccgacgtcgacccgcagcgcgtggtcgccctggagtggctgcccgcggagctgctgctggcgctcggcgtgacgccctatggcgtggccgatattcccaactatcgcttgtgggtgaacgaacccgcgctgcccgactcggtgatcgatgttggtctgcgtaccgaacccaaccttgaactgctgacgcagatgaaaccgtcgtttatcgtctggtcggcgggctacggcccgtcgccggagaagctggcgcgtatcgcgcccggccgcggtttcaccttcagcgacggcaaacggccgctggcgatggcccagcgttcgctactggaaatggccgatctgctgggcaaaacgcagcaggcgaagcgccatctggcggagttcgacgcgctgatggagagcctgcgtccgcgttttgccgggcgcggcgatcgtccgctgctgatgatctctctgctcgatccccggcacgtgctggtgtttggcgaaaactgcctgttccaggaggtgcttgatcgctttggtattaaaaacgcctggcacggcgaagcggcattctggggaagcgttagcgttggcatcgacaggctggcggcatttaacgaagccgatgtcatctgtttcgaccatggcaatgagcgagatatggctcaactgctggcgacgccgctatggcaggcgatgcccttcgtgcgcgcgggccgcttccagcgcgttccggcggtttggttctacggcgcgacgctgtcagcgatgcattttgcccgcgtgctggctgatgcccaggggagtccggcatga

SEQ ID NO: 213208 - DNA, 1983 bp, Klebsiella pneumoniae
atgaatacgcgtctctcgccgttagctattatcctgctggccgggctgctgggcgtcgccttcgcgctgagcatcgtcaacctcaatgtcgccttgccctatgcgcagtggcggcaggcgctgtggcagccggatgtcgatgatatcgcccaaatgctgtttcattacagtttgttaccgagactggctgttgcgctgctggtgggcgccgggctgggactggttggcgtcctgttccagcaggtgctgcgtaatccgctggcggaaccgaccactcttggcgtcgccaccggcgcgcagctggggataacggtcaccacgttatgggctattcccggcgtgctggcgtcgcaattcgccgcgctggccggggcctgtctggtgggcgcgctggtgtttggcgtctcgtggggcaagcgcctgtcgccggtaacgctgatcctggcggggctggtggtcagcctttactgtggcgcgcttaaccagctgatggtgattttccatcacgaccagctgcaaagcatgttcctgtggagcaccgggacgctgacgcagaccgactggagcgtggcgcagcgcctgtggccgcagctgcttggcggggcaatactcaccttgctgctgctgcggccgctgaccctgatggggctcgatgacggggtggcgcgtaacctcgggctggcgctgtccctggcgcgcctcggcgccctgacgctggcgatcgtcatcagcgcgctgctggtgaacgcggtagggattatcggctttatcggcctgttcgcgccgctgctggcgaaaatgcttggcgcccgtcggctgctggcgcggctgctgctggcggcgctgatcggcgcgctgctcctgtggctttccgatcaggtgatcctctggctgagccgggtatggcgggaagtctccaccggctcggtcaccgccctgattggcgcgccgctgctgctgtggctgctgccgcggttgcgcagcatcagcgccccggtgatgaacggcggcgataatgtgcagcctgagcgctatcatgtgcaatggtttgttctcgcaggcgtcgcgttgctgctgctggcggtgagcgtggcgctggcctttggtcgcgatgcccacggctggctgtgggcccacggcgatctgctggagcaactgctgccctggcgctggccgcgggtgctgtcggcgctgttcgccggggtcatgctggcggtcgccggctgtattatccagcgcctgaccggcaacccgatggccagcccggaagtgctgggcatcagctccggcgcggcttttggcgtggtgctgatgctgttcttcgtgcctggcgacgcctttggctggctgctgccggccggcagccttggcgcggcggccaccttgctgatcattatgcttgccgccgggcgcggcggcttctcgccgcatcggatgctgctggcggggatggcgctgagcaccgccttcactatgctgctgatgatgctgcaggccagcggcgatccgcgtatggcgcagatcctgacgtggatctcggggtcgacatatagcgcgacgccggagagggtggtgcgtagcggcgcggtaatgctggcgctgctggcgctggcgccgctctgtcgtcgctggttaaccatcctgccgctgggcggggaggcggcgcgagcggtgggcatggcgctgacgtcatcgcggattgttctgctgctgctggcggcctgcctgacggcggcggcgacgctgaccatcggcccgctgagctttgtcgggctgatggcgccgcatatcgcgcggatgatgggcttccggcgaaccctaccgcatatggtgatctccgggctgactggcgggctgctgctggtcttcgccgactggtgcggacggatgatgatgttcccgtatcagatcccggcggggctactgtcgacctttatcggcgcgccttactttatttatttgttgagaaagcagagtcgctaa

SEQ ID NO: 213209 - DNA, 1281 bp, Klebsiella pneumoniae
atgagcaaatctgaaaatctgtatcacgctgcgcgcgaactgatccccggcggcgttaactcgccggtgcgcgctttcaccggcgtcggcggcacaccgctgtttatcgaacgcgcggatggcgcttacctctatgacgtggatgggaaagcctatatcgattatgtcggttcctggggtccgatggtgctgggccacaaccacccggctatccgcaatgcggtgatcgaggcggcatcccgcggcctgagctttggcgcgccgaccgaaatggaagtgaaaatggcggccctggtgaccgagctggtgccgaccatggatatggtgcggatggtgaactccggtaccgaagccaccatgagcgccattcgcctggcgcgcggcttcaccggtcgcgacaaaatcattaagttcgaaggctgctaccacggccatgccgactgcctgctggtgaaagccggttccggcgcgttgaccctcggccagccgaactcgccgggcgtcccggccgatttcgccaaacataccctgacctgcacttataacgacctcgcctcggtgcgcgcggcgttcgagcagtatccgcaggagatcgcctgcatcatcgtcgagccggtggccggaaatatgaactgcattccgccgcagccggaattcctgccgggcctgcgcgccctgtgcgacgaatttggcgccctgctgattatcgacgaagtgatgaccggcttccgcgtggcgctggcaggcgctcaggcttactacggcgtggagccggatctgacctgtctggggaaaatcatcggcggcgggatgccggtaggcgccttcggcggccgccgtgaggtgatggacgccctggcgcccaccggtccggtctatcaggcgggcaccctatccggcaacccgatcgccatggcggctggcttcgcctgcctgaacgaagtggcgcagccgggggtccatgaaaccctgactgaactgactaaccagctggcgcaaggcctgctggatgcggcgcgtgacgccgggatcccgctggtggtcaataacgtcggcggcatgttcggcatcttctttaccgatgccgaaaccgtcacctgctatcaggacgtggtgaagtgcgacgttgaacgattcaagcgcttcttccatctgatgctggaggaaggcgtgtacctggcgccgtcagcgtttgaggccggctttatgtccgtggcccacagcgaagaagatatcgacaacaccatcgacgccgcgcgtcgggtatttgccaagctgtaa

SEQ ID NO: 213210 - DNA, 1512 bp, Klebsiella pneumoniae
atgtgccgcaagggcatttttttgacgacgcagcgcgccggggcggctaaaatgccgctctcttcatttgtattaccaataattgataacggcatgaaagcagaaactccctcttttgaagcacatcagtttgtgcgggtgcgtcgcggcgatgcggtgcgccgtctgattcaacgcgataaaacgccgctggcggtgctgtttatggcggcagtggtcggcacgctggcggggctagtgggcgtcgcctttgaaaagagcgtgaactgggtgcagaaccagcggatcggcgcgctggcgcaggtggcggaccactggtatctggtctggccgctggcgtttatcctgtcggcgctgctggcgatggtcggctattttctggtgcgtcgctttgcgccggaggccggcggctccgggattccggaaattgagggcgcgctggaggagctgcggccggtgcgctggtggcgcgtgctgccggtgaaattcgttggcggcatggggacccttggcgccgggatggtgctgggtcgtgaaggaccgatggtacagcttggcggcaacattgggcgcatggtgctggacgttttccgcatgcgcagtccggaagcgcggcatacgctgttggcgaccggtgcggcgtcggggctttcggcggcctttaatgcgccgctggccggtattctgtttatcatcgaagagatgcgcccgcagttccgctacaacctgatctccattaaagcagtgtttaccggcgtgatcatgtcgagcattgtgtttcgcattttcaacggcgaagcggcgatcattgaggtgggtaaactaagcaacgccccggtaaataccctatggctgtatctggtgctgggcatgctgtttggctgctttggcccgctgtttaattttctggtgctgcgcactcaggatctgttccagcgcatccacggcggcaacatcaaaaaatgggtgttgattggcggattaatcggcgggctctgcggtctgctggggctgatgcagccctccgcggtgggtggtggctttaacttgatccctatcgccgctgccggtaacttctccgtcggactgctgctgtttatctttatcgcccgcgtggtgaccacgctgatctgcttctcttccggcgcgccagggggcattttcgcgcctatgttggcgctcggcacgctgctgggcacggcgttcggcatggcggctattccgctgtttccggcctaccatctcgatgccggcaccttcgcgattgccggtatgggggcgctgctcgccgcctcggtgcgtgcgccgctgaccgggatcgtgctggtgcttgagatgaccgataactatcagctcattttgccaatgattattacctgccttggcgcaacactactggcgcaattcctcggcggtaagcctttgtattcgaccattctgcagcgtactctggcgaagcaggaagccgagcaggcggcaaaagcgcagcaggctccccgggagaatacttga

SEQ ID NO: 213211 - DNA, 345 bp, Klebsiella pneumoniae
atgagtgatgacgtagcgttgccgctggagtttaccgaagccgcagccaataaagtaaaacacctgattgcggatgaagataatccgaacctgaaactgcgcgtgtatatcaccggcggcggttgcagtggtttccagtatggcttcacctttgacgatcaggtgaacgaaggggatatgaccattgagaaacagggcgtcggcctggtggttgacccgatgagcctgcagtatctggtcggcggctcggtcgactataccgaagggctggaaggttcgcgctttatcgtgaccaatccgaacgcgaaaagcacctgcggctgcggctcctcgttcagcgtttaa

SEQ ID NO: 213212 - DNA, 624 bp, Klebsiella pneumoniae
atgcttgtctattggctggatattattggcacagctgtcttcgcgatctccggcgtactgctggccggaaaactgcgtatggacccattcggcgtgctggtgttaggggtagtgacggcggtaggcggcgggaccatccgcgacatggcgctggcgaatggcccggtattctgggtcaaagatcccaccgatctggtggtggcgatggtcaccagcatgctgaccatcctgctggtccgccagcctcgccggctgccgaaatggatcctgcccgttcttgatgccgtcggtctggcggtgtttgtcggcattggcgtcaataaagcttttctcgctggcagcggcccgctggtcgcggtgtgcatgggggtggtgaccggcgtcggcggcgggattattcgcgacgtgctggcgcgggaaattcctatgattctgcgtaccgaaatctacgccaccgcctgtatcgtcggcggtattgtccacgccacggcacacgacacctttcatctcccgctggagaattcggcaatgatggggatggtggtcaccctggtaattcgtctggcggctattcgctggcatctgaagctgccgacgtttgccctggacgataacggtcggtaa

SEQ ID NO: 213213 - DNA, 801 bp, Klebsiella pneumoniae
gtggctaagtcgctatccttcgcgcttgccgcgctgctgttactcgccccggcgtggctgctggccgcgccgcgggtgatcaccctctcccccgccaataccgaactggcctttgccgccgggatcacgccggtcggcgtcagcagctattccgattatccttcgcaggccaaaacgatcgaacaggttgccagctggcagggaatgaacctggaacgcatcgtggcgctcaagccagacgtggtgctggcctggcgcgggggcaatgccgaacgccaggttaaccagctgcagtctctgggtattcatgtcctgtgggtacagacctcgaccatagaagagatcatcgctaccctgcgtgagctggcgcagtggagcccgcagccggaaaaagcgcagcaggcggcgcaggcgatgcagcaggaatacgatgcgttgaaagcgcgctatgccaacgcgccgaagaaacgcgtcttcctgcagttcggctccgcaccgctgttcaccagcggccccggttcgattcaggatcaggtgctaaggctttgcggcggcgagaatatcttcgccaccagccgcgttccctggccgcaggtgagccgcgaacaggtgctggcccgccagccgcaggcgatcgtggtgaccggggatgccagccgcattgccgaagcgcagcgcttttggcaacatcagctcaccatttcgttgattgcgttacacagcgactggtttgaacgcgccggcccacgtattatcctcgccgccaaacaactttgtgcggcgcttgaccaggtaaaataa

SEQ ID NO: 213214 - DNA, 699 bp, Klebsiella pneumoniae
atgaaaattggcattattggcgctatggaagaggaagttacccttctgcgcgacaaaatcgaaaaccgccagaccatcaccattggcggaagcgaaatctataccggccaacttcacggcgttgacgtcgctctgctgaagtctggtatcggaaaagtagcggcggcgatgggcgcgaccctgctgctggagcgctgccagcctgacgtgatcattaataccggttctgccggcggcctggcgtcgacgctgaaggtcggcgatatcgtcgtctccgatgaagcgcgctaccacgacgccgacgtcaccgccttcggctatgaatacggccagctccctggctgcccggcgggttttaaggcggatgaaaaactggtggccgccgcagagagctgcattaaagcgttagatctcaacgccgttcgcggcctcatcgttagcggggatgccttcattaacggctctgtcggtctggcgaagatccgccataatttcccgcaggcgatcgccgtggaaatggaagcgaccgccatcgcccacgtctgccataactttaaggttcccttcgtggtagttcgcgctatttccgacgtggccgaccagcagtcccacctcagctttgaggagttccttgcggtcgccgccagacagtccaccctgatggtggagaatctggtacagaacctggcacgtggctaa

SEQ ID NO: 213215 - DNA, 1515 bp, Klebsiella pneumoniae
atggcaaagattgattttcgcaacaagataaactggcgtcgacgcttccgttcgccgccgcgggtggagacggagcgcgacatcctgcggatctttgaaagcgatcggggacggatcgtcaactcgccggcaatccgccgcctgcagcaaaaaactcaggtcttcccgctcgagcgcaacgcggcggtgcgcactcgcctgacccactcgctggaggtgcagcaggtggggcgctatatcgccaaagaggtgctgagccggctgaaagagcagaggctgctggaagagtatggcctggaagagctgaccgggccattcgagagcgtggtggagatggcctgcctgatgcacgatatcggcaatcccccgtttggccattttggcgaagcggcgattaacgactggttccgtcagcgcctggcgcccggcgatgcgctcgggcagccgctgatcgacgatcgctgcgaagtgcaggccttacgcctgcatgacggagagacatcgcttaatgcgctgcgccgtaaagtgcgccaggatctctgcagctttgagggcaacgcgcagggcattcgtctggtccatacgctaatgcgtatgaacctgacctgggcgcaggtgggatgtatcctgaaatatactcgtccggcgtggtggtctgaggagacgccggccagccacagttatttaatgaagaaacctggctattatttagccgaagaagagtatgtcgcgcgtttgcgtaaagaactggatctcgcgccttacaatcggtttccattaacctggattatggaggctgcggatgacatctcatattgcgtcgcggatctcgaggacgcggtggaaaaacgtatttttagcgcagaccagctctatcagcatctttacgacgcctggggcagtcatgaaaaaggctcgttattttcgcaggtagtagaaaatgcctgggagaaatcgcgagccaattatctgaagcagagcgcggaagatcagttttttatgtatttgcgggtgaatacgctgaataagctggtgccctacgcggcgcgccgatttattgacaacctgccggcaatcttcacgggggactttaatcatgcgttgctggaggacgacagcgattgcagtcagctactggagctctataaaaatgtggcgatgaaacaggtctttagccatccggatgttgagcagctggaattgcagggctaccgggtgatcagcggcctgttggatatctatcagccgctgctgaaattatcgctggaggatttcagcgaattagtagcgcaggagcgggtacgacgtttacccattgcctcccggctgtatcagaaactttcgacccgtcaccggctggcctatgttgaagcggtaaataaactggcgcgtacggcgcccgaatttgcgctgatggaatactattatcgctgccgtctgattcaggactatatcagcgggatgacggatttgtatgcgtgggatgaatatcggcgactcatggcggtggaatag

SEQ ID NO: 213216 - DNA, 1434 bp, Klebsiella pneumoniae
atgaaaaaaaccacgttagcaatgagtgcactggctctgagtttaggtctggcgttgtccccgctctctgcgagcgcggcagaaacggcatcttcggccactaatgcacagcagatgccaagcctggccccgatgctggagaaggtgatgccgtcggtggtgagcattaacgttgaaggtagcaccaccgttaataccccacggatgccacgtaacttccagcagttctttggcgataattcgccgttctgccaggatggttctcctttccagagttcgccgttttgccagggcggcggacagggcggtcagcctgacggcggccagcagcagaaatttatggcgctgggctccggcgtcatcattgatgccgccaaagggtatgtggtgaccaacaaccacgtcgtggacaacgccaccacgattaaggttcagctgagcgatggccgtaggtttgatgctaaagtcgtcggcaaagatccgcgctctgatatcgcgctgattcagattcaggatccaaaaaacctgacggcgattaagcttgccgactccgatgcgctgcgcgtcggtgattacaccgtggctatcggcaacccgttcggtctgggcgaaaccgtgacctccgggattgtctccgcgctgggccgtagcggcctcaacgtggaaaactacgaaaactttatccagaccgatgcggcgattaaccgcgggaactccggcggtgcgctggtgaacctcaacggcgagctgatcggtatcaacaccgccattctggcgccggacggcggcaacatcggtatcggttttgctatcccgagcaacatggtgaaaaacctgaccgagcagatggtgaaatatggccaggtgaaacgcggtgagctcggcattatgggcaccgaactgaactctgagctggcgaaagcgatgaaagtcgatgcccagcgcggggccttcgtcagccaggtaatgccaggttcggcggccgcgaaagcgggcattaaagccggcgatgtcatcacctccctcaacgggaaagcgatcagcagcttcgccgcgctgcgtgcccaggtcggcaccatgcctatcggcagcaaagttgagcttggtctgctgcgcgacggcaaaccggtgaccgtgaccgtcgaactgcagcagagcaaccagacccaggttgactccagcaccatcttcaacgggattgaaggggcggaaatgagcaataagggtcaggataagggcgtggtggtcaataatgtgaaagccggtaccccggcggcacagattggcctcaagaaaggcgacgtcatcgtcggggcgaatcagcagccggtgaaaaacatcgccgatctgcggaaaatcttcgacgccaaaccgtccgtactggcgctgaacattcagcgcggcgacgcctctatctatctgctgttgcagtaa

SEQ ID NO: 213217 - DNA, 1212 bp, Klebsiella pneumoniae
atgcagcgcgacgatgactcttttatgctggtgcccagcaaaggggaggactacatggctggctggcatcttgataccaaaatggcgcaggatattgtggcgcggaccatgcgcatcatcgataccaatatcaacgtgatggatgcccgcgggcggatcatcggcagcggcgatcgggaaaggattggtgaattgcacgaaggcgcgctgctggtcctctcccaggggcgggtggtggatatcgacgacgcggtcgctcgccatctgcacggggttcgccaggggattaacctgccgctgcgcctggagggggagatcgtcggggtgatcggcctgaccggcgagccggagtcgctgcgaaaatatggcgagctggtgtgcatgacagcagagatgatgctggagcagtcgcggctgatgcatctcctggcccaggacagccgtctgcgcgaagagctggtgatgaacctgattcaggcggaagagcataccccggcgctgaacgaatgggctcagcgtttaggcatcgatctcaatcagccgcgcgtggtggcgatgattgaggtagacagcggtcagctcggcgtggacagcgcgatggcggaactgcaacagttacagaacgcgctgaccacccccgatcgcaataatctggtggccattgtctcgctcacggaaatggtggtgctgaaaccggcgctgaacagctttggccgctgggacgctgacgatcacgtccggcgcgtcgagcagcttatcgccaggatgaaagagaatggccagctgcgctttcgcgtggcgctgggcaatttcttcaccggcccaggaagtatcgcccgctcttaccgtaccgcacggacgacgatgatggttggcaagcagcggatgccggagagccgcagttatttctatcaggatctaatgctgccggtgctgcttgacagcctgcgcggcggctggcaggccaatgagctggcccgtccgctggcgcgtttgaaggccatggacaacaacgggctgctgcggcggacgctgcaggcgtggtttcgccataacgtgcagccgctggcgacgtcaaaggcgctgtttattcatcgcaatacgctggagtaccggttgaaccgtatctcggagctgaccggcctggatctcggtagctttgacgacaggctgctgctgtatatcgcgctgcagctggacgaacaacgctaa

SEQ ID NO: 213218 - DNA, 387 bp, Klebsiella pneumoniae; identical to SEQ ID NO: 134973

SEQ ID NO: 213219 - DNA, 825 bp, Klebsiella pneumoniae
atgcagcagttacagaacgttattgagtccgctttcgagcgtcgcgccgacattacgccggctaatgtggataccgtgacccgcgaagcggttaaccaggttatcgcccttcttgattccggcgcgctgcgcgtcgctgagaagatcgacggtcagtgggtgacgcatcagtggctgaagaaggcggtactgctctctttccgtattaacgataaccaggttatcgatggtgcggaaagccgctacttcgataaagtgccgatgaaattcgctgactacgacgaagcgcgtttccagaaagaaggtttccgcgtggtgccgccggccgccgtgcgccagggcgcgttcatcgcccgcaacactgtgctgatgccgtcctacgttaacatcggcgcctacgttgacgaaggcaccatggttgatacctgggccaccgtcggctcctgcgcgcagatcggtaaaaacgtgcatctgtccggcggtgtcggtatcggtggcgtactggagccgctgcaggcgaacccgaccatcatcgaagataactgcttcatcggcgcgcgctctgaagtggttgaaggggtgattgtcgaagaaggctccgtcatctccatgggcgtttacctcggtcagagcaccaaaatctacgatcgcgaaaccggcgaagtcttctacggccgcgtaccggctggctcggtggtggtctcaggcaacctgccgtcgaaagatggtaaatacagcctgtactgcgcggtgatagtgaagaaagtcgatgccaaaacccgcggcaaggtcggcattaacgaactgctgcgcaccatcgactaa

SEQ ID NO: 213220 - DNA, 2664 bp, Klebsiella pneumoniae
atgagcaactcattacctgacacagcctcccctctcctgcccgtcccgccggaacacccggtgagttggccccagggcgatctgaactgtgccgcaatcaaggcgcacatcgataccttccagcactggctgggcgaggcgtttgactccggcatcgtcgcggagcagctcatcgcggcgcgcaccgaatttatcgaccagttgctgcagcgattatggatcgcctgcggttttgaatccgtcagcgacctggcgctggtcgccgtcggcggctatggccgtggcgaactgcacccgctctcagacgtcgatctgctgatcctcagtcgtaaaaaactgccggacgaccaggcgcaaaaagtcggcgaactgctcaccctgctgtgggacgtcaagctggaggtgggccacagcgtacgcaccctcgaagagtgcctgctggaaggtctctcggatctgaccgttgccaccaacttaatcgaatcgcgcctgctgatcggcgacgtcgcgctgttccttgaactgcaaaaacatatttttagcgacggcttctggccatcggaaaagttcttcgccgccaaggtcgaagagcagaacgtccgtcatcagcgctatcatggcaccagctataacctcgagccggacgtgaaaagcagccccggcggcttgcgcgatatccatacgctacagtgggtggctcgccgccatttcggcgccacctcaatggatgagatggtcggcttcggctttctgaccgaagccgagcgcaatgaactcaatgagtgtctgcatcagctgtggcgcatccgtttcgcgctgcatctcgaactcacgcgctatgacaaccgtctgcttttcgaccgccagctcagcgtggcccgccggctaggctatgaaggcgacggcaaccagccgattgagcatatgatgaaggacttcttccgcgttacccgccgggtgagcgagctgaatcagatgctgcttcagctgtttgaggaggctatcctcgccctgaccgaggatgaaaaaccacgcccgatcgatgatgatttccagctgcgcggcacccttatcgatctgcgtgacgacacgctgtttattcgcgaaccgcaggccattctgcgcatgttttatatcatggtgcgcaacagcaccatcaccggcatctactcaacgacgttgcgccatctgcgccacgcccgccgtcatctcacccagccgctgtgctatatcccggaggcgcgcacgctctttcttagtatgctgcgccatcagggagcggtaagtcgcgggctgctgccgatgcatcgccacagcgtactgtgggcctatatgccgcagtggtcgcatatcgtcggccagatgcagttcgacctgtttcacgcctacaccgtcgatgaacacaccgtccgggtgatgctcaagctggaaagctttgccaaagaagaaacccgcagccgccacccgctgtgcgtggagctgtggccgcgcttaacgcacccggagctgatcttaattgccgccctgttccacgacatcgccaaagggcgcggcggcgaccactcgatcctcggcgcgcaggatgtgctgaagtttgccgagctgcacgggctgaactcgcgcgaaacgcagctggtcgcctggctggtgcgtcaccacctgctgatgtcggtcaccgcccagcggcgcgatattcaggatccggaggtgattaagcagttcgccgaggaggtgcaaacggaaaatcgtctgcgctatctggtgtgtctgaccgtcgccgatatctgcgccaccaacgaaaccttgtggaacagctggaagcagagcctgctgcgtgaactctatttcgccaccgagaagcagctgcgtcgcggcatgcaaagcaccccggacatgcgcgaacgagtgcgtcaccatcagctgcaggcgctggccctgctgcggatggacaatattaatgaagaggcgctgcatcagatctggaaccgctgccgcgccaactatttcgtgcgacatacgccgacgcagctcgcctggcacgcccgcaacctgctgcgccacgatctgaataaaccgatgatcctgctgagctcgcaggccacccgcggcggtacggagatttttatctggagcccggatcgcccttacctgttcgccgcggtgtgtggcgaacttgaccgtcgcaacctcagcgtccacgacgcgcagatcttcaccacccgcgacggtatggcgatggatacctttatcgtccttgagcccgacggcagccccctttccgccgaccgccacgaggcgatccgccaggggctggagcagaccatcactcagcgcagctggcagcctccggccccgcgtcgtcaggcggcaaagctacgccatttttccgtggacaccgaggtgaatttcctgccgacccataccgaccgaaaatcgtttctggagctgatagcgctcgaccagcccgggctgctcgcccgcgttgggcaggtgttcgccgacctcgggatatcgcttcacggggcgcgaattacgacaattggtgagcgagtagaagatttatttataatcgccaccgccgaccggcgtgcccttaataatgagctgcaacaagaagtgcaacaacggttgacagcggccctcaatccaaacgataaagggtga

SEQ ID NO: 213221 - DNA, 795 bp, Klebsiella pneumoniae
atggctatctctattaagacatctgaagacatcgaaaaaatgcgcgttgccggccgtctggccgccgaagtgctggaaatgatcgaaccctacgtcaaaccgggcgtcagcaccggcgaactggaccgcatctgtaacgactatatcgttaacgagcagaaggccatttccgcctgcctcggctatcacggctatccgaaatccgtctgcatttcggtcaatgaagtggtctgtcacggtatccctgatgacggcaagctgctgaaagatggcgatatcgtgaatatcgacgtgaccgtcattaaagatgatttccatggcgatacctccaaaatgtttatcgtcggcaaaccgacgattctcggcgagcgcctgtgccgcatcactcaggaaagcctgtacctggcgctgagaatggtgaagccaggcatcaacctgcgcaccatcggcgcggcgatccagaaatttgtggaagccgaaggtttctcagtggttcgcgagtactgtggccacggcatcggccgcggcttccatgaagagcctcaggtactgcactacgattcgccggagaccaacgtcgtactcaaaccaggcatgaccttcaccatcgagccgatggtcaacgccggtaaaaaagagatccgcagcatgaaagacggctggacggtgaaaaccaaagaccggagcttgtctgcgcagtacgagcatactattgtggtgacagacaacggctgcgaaattctgacgctacgcaaggatgacaccatcccggcgataatctcgcacgatgaatga

SEQ ID NO: 213222 - DNA, 726 bp, Klebsiella pneumoniae
atggcaactgtttccatgcgcgacatgctcaaggctggtgttcacttcggtcaccagacccgttactggaacccgaaaatgaagcctttcatcttcggcgcgcgtaacaaagttcacatcatcaaccttgagaaaaccgtaccgatgttcaacgaagctctggctgaactgaataagatcgctgctcgtaaaggtaaaatccttttcgttggtactaagcgcgctgcaagcgaagcggtaaaagacgctgctctgagctgcgatcagttcttcgtgaaccatcgctggctgggcggtatgctgactaactggaaaaccgttcgtcagtccatcaaacgtctgaaagacctggaaactcagtcccaggacggtactttcgacaagctgaccaagaaagaagcgctgatgcgcactcgtgagctggacaagctggaaaacagcctgggcggtatcaaagatatgggcggcctgccggacgcactgttcgttatcgacgctgaccacgagcacatcgctatcaaagaagcaaacaacctgggcatcccggtatttgctatcgttgataccaactctgatccggacggcgtagacttcgttatcccgggtaacgacgatgcaatccgcgcagtaagcctgtacctgggcgctgttgctgctaccgttcgtgaaggtcgctctcaggacctggcttctcaggcggaagaaagcttcgtagaagctgaataa

SEQ ID NO: 213223 - DNA, 852 bp, Klebsiella pneumoniae
atggctgaaattaccgcttccctggtaaaagagctgcgcgaacgtactggcgcaggcatgatggattgcaaaaaagcgctgactgaagcgaatggcgacatcgagctggcaatcgaaaacatgcgtaaatccggcgcgatcaaagcggcgaagaaagcaggcaacgtggctgctgacggcgtgatcaaaaccaaaatcgaaggcaactacggttacattctggaagttaactgccagactgacttcgttgctaaagatggtggtttccaggcatttgccgacaaagtactggacgccgctgttgcaggtaaaatctccgacgttgaagttctgaaagcgcagttcgaagaagaacgtgttgcgctggttgctaaaatcggcgagaacatcaacatccgtcgtatcgctgttctggaaggcgacgttctgggcagctaccagcacggtgcgcgtatcggcgttctggttgccgctaaaggcgctgacgaagagctggttaagcagctggcaatgcacgttgctgcaagcaagccggaattcgttaagccggaagacgtgtctgctgaagtggtagagaaagagtaccaggttcagctggacatcgcgatgcagtccggtaagccgaaagaaatcgcagagaaaatggttgaaggccgcatgaagaaattcaccggcgaagtttctctgactggtcagcctttcgttatggagccgagcaaatctgttggccagctgctgaaagagcacaacgctgacgtgactggcttcatccgctttgaagtgggcgaaggcattgagaaagttgagactgactttgcagcagaagttgctgcgatgtccaagcagtcttaa

SEQ ID NO: 213224 - DNA, 726 bp, Klebsiella pneumoniae
atggctaccaatgcaaaacccgtctacaaacgtattctgctgaaattaagtggcgaagcgctgcagggctcagaaggcttcggtattgatgcaagcatacttgaccgcatggctcaggagatcaaagagctggttgagctgggtattcaggttggcgtagtaattggtggcggtaacctgttccgtggtgctggtctggcgaaagcgggtatgaaccgcgttgtgggcgaccacatgggcatgctggcaacggtcatgaacggcctcgcaatgcgtgatgcgctccaccgcgcctatgtgaacgctcgtctgatgtccgccattccgctgaacggcgtatgcgacaactacagctgggcagaggcgatcagcctgctgcgcaacaaccgcgtagtgatcctctccgctggtaccggcaacccgttctttaccaccgattccgcagcctgcctgcgcggtatcgaaattgaagccgatgtggtgctgaaagccaccaaggttgacggcgtattcaccgctgacccggcaaaagatccttctgccaccatgtacgatcagctgacctacagcgaagttctggaaaaagagctgaaagtcatggatctggcggccttcaccctggcgcgtgaccataaattaccgattcgcgtctttaacatgaacaaacctggcgccctgcgtcgcgtggtgatgggcgaaaaagaaggcacattgatcacggaataa

SEQ ID NO: 213225 - DNA, 558 bp, Klebsiella pneumoniae
gtgattagcgatatcagaaaagatgctgaaatccgcatggaaaaatgcgtcgaagcattcaaaaaccaaatcagcaaaattcgcacgggtcgtgcttctccgagcctgctggacgggattgttgttgaatactacggtactccgaccccgctgcgccagctggccagcgtcaccgtcgaagactcccgtaccctgaaaatcaacgtctttgaccgttctatgtccgcggccgttgaaaaagcgatcatggcgtcagacctcggtctgaacccaagctctgccggcagcgatattcgtgttccgctgccgccgctgaccgaagagcgtcgtaaagatctgaccaagatcgtgcgtggtgaagccgagcaggcgcgcgttgccgtgcgtaacgttcgccgtgacgccaacgataaagtcaaagcgctgctgaaagaaaaagagatcagcgaagatgacgatcgccgttctcaggacgacgtgcagaaaatgactgacgccgccatcaaaaaagttgacgcggcgctggcagacaaagaagcggaactgatgcagttctaa

SEQ ID NO: 213226 - DNA, 1203 bp, Klebsiella pneumoniae
atgaagcaattaaccgttctcggttcgaccggctccattggctgtagcacgctggacgtggtgcgccataaccctggtcgcttttccgtcgccgcgctggtcgcggggaaaaacgttgaccgtatggttgaacaatgcctggaatttaccccccgttacgcggtgatggacgatgcgcaaagcgctgagcggttgcgcacccgtctgcatgagcatggcagtcgcaccgaggtgctgagcggccagcaggcggcggcagaggtcgcggcgctggatgaggtcgatcaggtcatggcggcaatcgtcggcgcggcgggactggtgccgacgctggcggcgatccgcgccgggaaaacggtattgttagcgaataaagaatcgctggtgacctgcggtcgcttattcatggaggcggtgcaacagtcgggggcgcgattgctaccggtcgatagcgagcataacgctatttttcagagtatgccggagacaattcagcagcatctgggatacgctgatcttgcccggaatggcgtctcgtcaatcctgctgaccggctccggtgggcctttccgcgagacggccgtggctgaactggcggcgatgaccccggatcaggcctgccgtcatcccaactggtcgatggggcgcaagatctccgtcgattcggccacgatgatgaacaaaggcctggaatatattgaagcgcgctggctgtttaacgcctcggcccagcagatggaagtgctgatccatccgcagtcggtgatccactcgatggttcgctatcaggatggcagcgtgctggcccagcttggggagccggatatgcgcacgccgatcgcccataccatgggctggccgcagcgactgaattccggcgttaaaccgctggacttctgtcagttgagcaatctgagcttctccgcgccggactatacgcgatatccgtgcctgaagctggcgatggacgcgtttgacgtcggccaggccgcgaccacgacgctgaatgcggctaatgaagagtcggttgccgcgtttctgcatggcgatatccgctttaccgatattgcggcggttaacctggcggtgctggataagatggacctgcaggagccgcaaagcattgatgatgttctggttatcgacgccgaggcgcgcgcaatcgctcaccagcagctgcagcggttggttgcgcaggcgtaa

SEQ ID NO: 213227 - DNA, 777 bp, Klebsiella pneumoniae; identical to SEQ ID NO: 134964

SEQ ID NO: 213228 - DNA, 783 bp, Klebsiella pneumoniae
atgggctttgctatcgtcaccctggtggtctgtatgctcgccgcctgggagtggggacaactgagcggttttacctcgacgtcgcagcgggtttggctggcggtgctgtgcggccttctgctggcggcgatgctttttctgctgcctgaataccactatgacgttcatcaaccgatggttgaagggtcgctatgggcctcttttgcctggtggatcgtcgcgttactgctggtgctctcatacccggcgtcggcggcattctggcgccactctaaggtgctgcgcctcatcttcggcattctgaccatcgtcccgtttttctggggcatgctggcgctgcgcgcctggcactatgccgataaccactatagcggcgcgctgtggctgctgtacgtcatgatcctggtgtggggcgcggactctggcgcctatatgtttggtaaaatgtttggcaagcacaagctggcgccgaaggtctcaccgggtaaaacctggcagggcttttttggcggtttgctgaccgcggcagtgatttcctgggcctacggcgtgtgggcccatcttgacgtcacgccgacggtgctgctggtctgttcggtggtggcggccctggcttcggtgctgggcgacctgacggaaagtatgtttaagcgcgaggccggcattaaggatagcgggcacttgattcccggacatggtggtattctcgatcgtatcgacagcctgacggcggcggtaccggtcttcgcctgtctgctactgttggtcttcaggacgatttga

SEQ ID NO: 213229 - DNA, 1353 bp, Klebsiella pneumoniae
atgctgagcgtgctctggaatctggcggcttttatcattgcgcttggcgtactgattacggtgcatgagtttggccatttttgggtggcgcgccgctgcggtatccgggttgagcgtttttctatcggcttcggcaaagcgctgtggcggcggatggataagcagggcacagagttcgtcatcgccctgatcccactgggcggctacgtcaagatgctggatgagcgtgttgaagcggtggcgccggagatgcgtcactatgccttcaacaacaaaaccgtcggtcagcgtgcggcggtgattgccgccggccccatcgctaacttcattttcgctatctttgcttactggctggtctttatcatcggcgttcccggcgtgcggccggtggtgggtgaaataacgcccaattcggttgccgcgcaagcacaaattgcaaaaggaacggaacttaaagcgatagatggtatcgaaacgcctgattgggatgcggtgcgtctgcagctggtggccaaaatcggcaacccgcaaacaatagttaccgtcgcccctttcgggaccaatcagcgccaggataaaatcgtcgatctgcggcactggtcgtttgagccagacaagcaagatcccgtgacctcgctggggatccagccgcgcagcgcgcagattgatacggtgctggctgaggttcaggcgggatcggcagcccagaaagcgggtttgcaagcgggcgaccggatcgttaaagtcgatggtcaaccgttaacgcagtggatgacgtttgttaatctggtgcgcgataatccgggcaaagcgctggcgctggagattgaacggcaggggagtgtgctgccgttaaccctgacgccggatgcgaaaacggtgaaaggtaaggcggaagggttcgcaggggtggtgccaaaggtcatcccgctgcctgaagaatacaagacagtacgtcagtacggaccgtttgccgccatcgctgaagccacggataaaacctggcagctgatgtcgctgacggtcaggatgctgggtaaattgataaccggtgatgtcaaactgaacaacctcagtgggccgatctctatcgctcagggggctggaatgtcagcggagtttgggttgatttattatctgatgttcctggcgctgattagcgtgaacctcggaatcatcaacctgttccctctacccgtactggatgggggacatctgctgtttttagcgattgaaaagctgaagggcgggccggtatccgagcgagttcaagactttagttatcgcattggctcaatactgctggtgctgttaatggggcttgcacttttcaatgatttctctcggttataa

SEQ ID NO: 213230 - DNA, 2430 bp, Klebsiella pneumoniae
atggcgatgaaaaagttgctcatagcgtcgctgctgtttagcagcgcgactgtatacggtgctgaagggttcgtggtgaaggacattcatttcgaaggcttgcagcgtgtcgctgttggtgcggccctcctcagtatgccagtgcgtcctggcgatacggtgaccgacgatgatatcagtaacactattcgcgcgctgtttgccactggcaacttcgaggacgtccgcgtcctgcgcgatggtgataccctgctggtgcaggtgaaagagcgtccgacgatcgccagcatcaccttctccggcaacaagtcggtgaaagatgacatgctgaagcagaaccttgaggcctcaggcgttcgggtgggcgagtcgcttgaccgcacgaccatcgcggatatcgagaagggtcttgaagacttctactacagcgtcggtaaatacagcgccagcgtcaaagcagtcgttacgccgctgccgcgtaaccgtgtcgatttgaagctggtcttccaggaaggcgtctccgcaaaaattcaacagatcaacatcgtcggcaaccatgcgttttcgaccgatgagctgatctcccacttccagctgcgcgatgaggtgccgtggtggaacgtggtcggcgaccgtaaataccagaagcagaagctagcgggcgaccttgaaaccctgcgcagctactacctggatcgcggctatgcccgtttcaacatcgattctacccaggtcagcctgacgccggataagaaagggatctacatcaccgtcaacatcaccgaaggcgatcagtacaagttttccggagtgcaggtgacgggcaacctcgctggccattccgcggaaatcgaagcgctgactaaagttgagccaggcgaactgtacaacggcgcgaaagtgaccaggatggaaaacgacatcaagaaactgttgggtcgttatggttacgcctatccgcgcgtgcagtcgcagccggagatcaacgacagcgataaaaccgttaagctgcacgttaacgtcgacgcaggcaaccgttattacgtgcgtaaaattcgcttcgaaggcaacgacacctctaaagatgccgtactgcgccgcgaaatgcgccagatggaaggcgcatggctgggcagcgacctcgtcgatcagggtaaagaccgtctcaatcgtttaggtttctttgaaacggtggatactgatacccagcgcgtgccgggcaacccggaccaggtcgacgttgtctacaaggtgaaagagcgtaacaccggtagcttcaacttcggtatcggctacggcaccgagagcggcgtcagcttccaggcgggcgttcagcaggataactggttaggtactggctatgctgtcgggatcaacggtaccaaaaacgactaccagacctataccgagctgtcggtgaccaacccgtacttcaccgtagacggtgtaagcctcggcggtcgtgtcttctataatgactttgatgcaaacgatgcggatctgtctgactataccaacaaaagctatggtacagacattacgctgggcttcccggtcaatgaatacaacacgctgcgcgccggcgtcggttatgtgcataactccctgtccaatatgcagccgcaggtggcaatgtggcgttaccttaactcgatgggccagtatccggacaacaccaacgaccggaactcgttcagtgcgaatgacttcaccttcaactacggttggacctataacaagcttgaccgcggcttcttcccaacggaaggttcgcgcgtcaacctgaacggtaaggtgaccattccgggctcagacaacgagtactacaaagcgacgctggataccgcgacctacgtgccgatcgacaacgatcatcagtgggtagtactgggtcgtacgcgctttggttatggcgatggtatcggcggcaaagagatgccgttctatgagaacttctatgccggtggttccagcaccgtgcgtggcttccagtcgaacaccattggtccgaaggcggtgtacttcccgtcgagcagccgtcatgatggcgatagcggttataccaatgactgtaagagcaccgaatccgcaccgtgtaaatccgatgatgcggttggcggtaacgcgatggcggtggccagccttgagctgattaccccgacgccgtttattagtgacaaatatgcgaactcggtccggacttccgtcttctgggatatgggtaccgtatgggatactcactgggattcgagcgcgtacgctggttatccggattacagcgatccgagcaacatccgtatgtctgcgggtattgccgtgcagtggatgtcgccgttggggccgttggtcttctcctacgcccaaccgttcaaaaagtacgatggagacaaagccgaacagttccagtttaacattggtaaaacctggtaa

SEQ ID NO: 213231 - DNA, 486 bp, Klebsiella pneumoniae
gtgaaaaagtggttattagctgcaggtctgggtttggcaatggtaacttccgctcaggcggcagataaaattgccctggtgaacatgaacagcctgttccaacaggttgcccagaaaactggcgtttccaacacgctggaaaacgagttcaaaggccgcgctagcgaactgcagcgtatggaaggcgacctgcagtccaaaatgcagcgtctgcagtccatgaagccgggcgccgatcgtaccaaactggaaaaagacgtgatggcacagcgccagaccttctcccagaaagcgcaggcgtttgaacaggatcgcgcacgtcgttccaacgaagagcgtggcaaactggttacccgtatccagactgccgtacagagcgtagcgaaagatcagagcatcgatctggtggttgacgcgaatgccgttgcatataacagcagcgatgtaaaagacatcaccgctgatgtgctgaaacaggttaaataa

SEQ ID NO: 213232 - DNA, 1026 bp, Klebsiella pneumoniae
atgccttcaattcgactggctgatctcgcgcagcagttggatgcagaattacacggtgatggcgatatcgtcatcaccggcgttgcgtccatgcagagcgcgaaaacgggccaaatcactttcatggtcaaccctaagtaccgtgagcacctggccgcttgccaggcttctgccgttgtgatgacgcaggatgatttaccttttgcccatagcgccgcgctggtagtgcgtaacccctacctgacctacgcgcgcatggctcaaattcttgataccacgccgcagccggctcaggatatcgcgccgagcgcggtcatcgatccgtcggcgaagctgggtagcaacgttgccatcggcgccaacgcggttatcgaatccggcgtagtgctgggcgataacgtagttatcggcgcaggctgcttcgttgggaaaaatacgaaaataggcgccggctcgcgtttgtgggctaatgtgaccgtttaccatgagattgagatcggcgagaattgcctgattcagtccagcacggtgattggcgcggatggcttcggctacgctaacgatcgcggtaactgggtaaagatcccgcagttgggtcgcgtcattattggcgatcgcgtggagattggcgcctgcaccacgattgaccgtggtgcgctggacgataccgtgattggcaacggggttatcattgataaccagtgccagattgcgcataacgtggtgattggcgacaataccgcggtcgctggcggcgttatcatggcgggcagcctgaaaattggccgctactgcatgattggcggcgccagcgtgattaacggccatatggaaatctgcgataaggtcaccgtcacggggatggggatggtgatgcgtcctatcagcgaacctggcgtatattcctccggtattccgctgcagccgaacaaggcgtggcgtaaaaccgctgcgctggtgatgaatattgacgagatgagcaagcgcctgaaagcgattgagcgcaaggttaatcaacaagactaa

SEQ ID NO: 213233 - DNA, 456 bp, Klebsiella pneumoniae
ttgactactgacactcatactctgcacattgaagagattctggaacttctgcctcaccgttacccgttcctgctggtagaccgcgtgctggattttgaagaaggtcgttttctgcgcgcagtaaaaaatgtttctgtaaacgagccgtttttccaggggcacttccctggtaagccgattttgccgggcgtcctgattctggaagcaatggcgcaagccaccgggattctggcgttcaaaagcgtcggaaaactggaaccaggcgagctgtactacttcgcgggtatcgatgaagcacgcttcaaacgcccggtagtaccaggcgatcagatgattatggaagtcactttcgagaaaacccgccgcggcctgacccgtttcaaaggcgttgcgctggttgacggtaaagtggtttgcgaagcgacgatgatgtgtgcgcgtagccgggaggcctga

SEQ ID NO: 213234 - DNA, 789 bp, Klebsiella pneumoniae
gtgattgataaaaccgcttttgttcatcctaccgccattgtagaagagggcgccgtgattggcgctaacgttcacattggtccgttttgtattgttggcgctaacgtcgaaatcggcgaaggcaccgtgctgaagtctcacgttgtcgttaacggccacaccaaaatcggccgtgacaatgagatctatcagttcgcttccatcggcgaagttaaccaggatctgaaatatgctggcgaaccgacccgggtggaaattggcgatcgcaaccgcattcgcgaaagcgtcaccattcatcgcggcacagtacagggcggtggattaacaaaggtgggcaacgataacctgctgatgatcaacgcccacgtggcgcacgattgtacgcttggcgatcgctgcattctggccaataacgcgacgctcgcgggccatgtttcgctggatgattatgtcattatcggcggcatgacggcggtgcatcagttctgcgtcattggctcacacgttatggttggcggctgctccggcgtggcgcaggacgttccgccgttcgtcattgcccagggcaaccatgcgacgccgttcggcgttaacatcgaagggctgaaacgccgcggcttcagccgggaagcaatcaccgcgatccgcaacgcgtataaactgctgtaccgcagcggcaaaacgctggaagaagccaagccggaaatcgccgaactggctgctcagcatcctgaggttcagctgtttgtcgatttcttcgctcgttctacccgcggcttgattcgttaa

SEQ ID NO: 213235 - DNA, 1152 bp, Klebsiella pneumoniae
atggctgaacagcgtcccctgacgattgccctggtcgccggagaaacctccggcgatattctaggcgctggtctcatccgcgcgcttaaagcacgcatcccgaatgcgcgctttgtcggcgtggcggggccgctaatgcaggcggaagggtgcgaagcctggtatgaaatggaagagctggcggtgatgggcattgttgaagtgctcggtcgcctgcgtcgcttactccatattcgcgccgatttgacccgccgcttcggcgagctgcgtcccgatgtcttcgtcggcatcgacgcccctgactttaatatcaccctcgaaggaaatctgaaaaagcagggcatcaaaaccattcactacgtcagcccgtcggtctgggcctggcgacaaaaacgcgttttcaaaatcggcagatccaccgatctggtgctggcctttctgcctttcgaaaaagcgttttatgacaaatttaacgtcccctgccgctttattggccataccatggcggatgcgatgccgctggatcctgacaaaggcgctgcgcgcgaccggttagggatcccgcacagcgtgcgctgcctcgctctgctacccggcagccgcggcgcggaagtcgaaatgcttagcgccgacttcctgaaaaccgcgcagcttctgcgcgccacctatcccgatctgcaggtggtggtgccgctggttaatgctaaacggcgggagcagtttgagcgtattaaagctgagacggcgccggatatgatcgtgcatatgctggacggtcaggcgcgcgatgcaatgatcgccagcgacgccgcgctgctggcctccgggacggcagcgctggagtgtatgctggcgaaatgcccgatggtggttggctaccggatgaagccgttcaccttctggctggcgaagcggttggtaaaaaccgactacgtctcgttaccgaacctgctggccggtcgcgaactggttaaagagctgctgcaggatgagtgcgagccccaggcgctggcagccgctctgcagccgctgctggccgatggcaaaaccagccatgagatgcatgagacgttccgcgccctgcatcagcagatccgctgcaacgccgatgagcaggcggcggacgccgtactggagttagcaaaacaatga

SEQ ID NO: 213236 - DNA, 600 bp, Klebsiella pneumoniae
atgatggagttcgtctatccgcatacccatctggttgccggcgtcgatgaggtcgggcgtggccccctggttggcgcggtggtgaccgcggcggtgatcctcgatccggcgaagccgattgtgggtctgaatgattccaaaaaactcagcgagaagcgtcgtctggcgctgttcgatgagattaaagagaaagcgctgtgctggagcctggggcgcgccgagccgcacgaaatcgacgagctgaatattctgcatgccactatgctggcgatgcagcgcgccgtcgccggcctgagcattgttcctgagtttgtcctgatcgatggcaaccgctgtccgtcgctaccgatgccctcccaggcggtggtgaaaggcgacagccgggtggcagaaatcagcgcagcgtctattctggcaaaagtcactcgtgacgccgaaatggccacgctggacctcgcatttccccactacggatttgcccagcataaaggctatcccaccgctgttcacctgcagaagctgcaggaacacggcgcaacagagcatcaccggcgcagttttggcccggtgaagcgtgccctgggcctggcgtccaactaa

SEQ ID NO: 213237 - DNA, 3483 bp, Klebsiella pneumoniae
atggctgaaccacgtttcgtacacctgcgggtgcacagcgactattccatgatcgatgggctggcaaagaccgggccgctggtgaagaaggcggcctcgcttggcatgccagcgctggcgatcaccgatttcaccaacctctgcggactggtgaagttctacgggacgggacacggcgcggggattaagccgatcgtcggcgccgactttcacgtgcagtgcgacctgctcggcgacgaatttaccgagctgaccgtgctggcggcgaacaacaccggctaccagaacctgaccctgttgatttcccgtgcctatcagcgcggctacggcgccctggggccgtggatcgatcgcaactggctggtggaacatcaggaagggctgattctgctctccggcggccggaaaggtgacgtcggcgtcagcctgatccgcggcaatatgccgctggttgaacagtgcgtcgccttctacgaagagcatttcccggaccgctattttctggagctgatccgtaccggtcgacaggatgaagaggcctatctccacgccgccgtggcgctggcggaagcgcgcggtctgccggtggtggcgaccaacgatgtccgcttccttgaaaccggcgacttcgacgcccacgaaatccgcgttgccattcacgacggcttcacgctcgacgatccgaaacggccgcgtaactactcgccgcagcaatatatgcgcagtgaggaggagatgtgcgagctgttcgccgacatcccggaagcgctggcaaacagcgtagaaatcgccaagcgctgcaacgtcaccgtgcggcttggcgaatatttcctgccgcagttcccgaccggcgatatgaccacggaagatttcctggtcatgaaatcgaaagagggtctggaagagcgtctggcgtttctgtttccggatccggaagagcgcgcaaagcgtcgaccggagtacgacgaacgtctggacatcgagctgcaggttatcaaccagatggggttcccgggctacttcctgattgtgatggagtttatccagtggtcgaaggataacggcgtgccggttggcccgggacgcggttccggcgccggttcgctggtggcctatgctctgaagatcaccgatcttgacccgctggagttcgacctgctgttcgaacgtttccttaacccggaacgtgtctcgatgcccgacttcgacgtcgacttctgcatggagaaacgcgaccaggttatcgagcacgtggcggatatgtacggccgcgacgcggtatcgcagatcatcaccttcggtaccatggcggcgaaagcggtcatccgcgatgtcggtcgcgtgctgggtcacccgtacggatttgtcgatcgtatctccaagctggtgccgcccgatccgggcatgacgctggcgaaagcctttgaggccgagccgcagctgccggagatctacgaggcggacgaagaagtgaaagcgctgatcgacatggcgcgtaagctggaaggggtgacgcgaaacgccggtaaacatgccggtggggtagttatcgctccaaccaaaatcaccgatttcgcgccactgtattgcgatgagcaggggctgcatccggttacccagtttgataagaacgacgtggaatacgccgggctggtgaaattcgacttcctcggtctgcgtacgctcactatcattaactgggcgctggagatgatcaacaagcgccgtgagaagaacggcgaagggccgctggatatcgccgccatcccgctggatgacaagaaaagcttcgacatgctgcagcgctcggaaaccaccgcggtcttccagcttgaatcacgcggcatgaaagatctgattaaacgcctgcagccggactgcttcgaagatatgatcgcgctggtggctctgttccgcccgggcccgctgcagtcggggatggtagataactttatcgaccgtaagcatggccgcgaggagatctcttatccggacgtgcagtggcagcatgaaagcctgaaaccggtgctggagccaacctacggcatcatcctgtatcaggaacaggtcatgcagattgcccaggtgctgtccggatataccctcggcggcgcggacatgctgcgtcgtgcgatgggtaagaaaaagccggaggagatggccaagcagcgttctatctttgaggatggggcgaagaaaaacggcattgacggcgaactggcgatgaaaatcttcgacctggtggagaaattcgccggttacggatttaacaaatcgcactccgccgcctacgcgttggtctcctaccagacgctgtggcttaaggcgcactacccggccgagtttatggcggcagtgatgaccgccgatatggacaacaccgagaaggtggttggcctggtggatgagtgctggcgaatggggctaaaaatcctgcccccggatattaactccggcctgtaccatttccacgtcaacgacgatggcgagatcgtctatggcattggcgccatcaagggcgtcggcgaaggaccgatcgaagcgattattgaggcgcgcaacaatggcggctatttccgcgagctgttcgacctctgcgcgcgaaccgatattaaaaagctcaaccgtcgggtgctggaaaagctgattatgtccggggcgttcgatcgtctcggcccacatcgcgcggcgctgatgaattcgctgggcgatgcgttgaaagccgctgaccagcacgcgaaagccgaggccatcggccaggctgatatgttcggcgtgctggcggaagagcccgagcaaattgagcaatcctacgccagctgccagccatggcctgagcaggtggtgctggatggtgaaagggagaccctggggctatacctcaccggacacccgattaaccagtatctgaaggagattgagcgctacgtcggcggcgtgaggctcaaagacatgcatccgaccgaacgtgggaaagtcaccacggcggcggggctggtgattgcggcgcgggtaatggtcaccaagcgcggcaatcgtatcggcatctgtaccctggatgaccgttccgggcggctggaagtgatgttattcaccgacgcgctggataaatatcagcagttgctggaaaaagaccgcatacttatcgtcagcggacaggtcagctttgatgactttagcggggggcttaaaatgaccgcccgtgaagtcatggacattgacgaagcccgggaaaaatatgctcgcgggcttgctatctcgctgacggacaggcaaattgatgaccagcttttaaaccgactccgtcagtctctggaaccccaccgttcgggaaccattccagtgcacctctactatcagagggcggatgcacgcgcgcggttgcgtttcggcgcaacatggcgcgtctctccgagcgatcgtttacttaacgatctgcggggccttatcggctcggagcaggtggaactggagtttgactaa

SEQ ID NO: 213238 - DNA, 960 bp, Klebsiella pneumoniae
atgagtctgaatttcctagattttgaacagccgattgcagagctggaagcgaaaatcgattccctgactgcggtaagccgtcaggatgagaaactggatattaacatcgacgaagaagtgcatcgtctgcgtgagaaaagcgtagagctgacgcgcaaaatcttcgccgatctcggtgcatggcaggttgcgcaactggcgcgccacccgcgccgtccttacaccctggattatgtccgcctggcgttcgacgaatttgacgaactggccggtgaccgcgccttcgctgacgataaagcgattgtcggcggtatcgcgcgtcttgacggtcgtccggtgatgatcatcggccaccagaaaggtcgtgaaaccaaagagaaaattcgccgcaactttgggatgccggcgccggaaggctaccgcaaagcgctacgcctgatggagatggctgagcggtttaaaatgccgatcatcacctttatcgacaccccgggcgcctacccgggcgtcggcgcggaagagcgtggccagtcggaagcgatcgcccgcaacctgcgtgagatgtcgcgtctgagcgtgccggttatctgcaccgtaatcggtgaaggcggctccggcggcgcgctggcgatcggcgtgggcgacaaggtcaacatgctccagtacagcacctattcggtcatttcgccggaaggctgcgcctccattctgtggaagagcgcggataaagcgccgctggctgcggaagcgatgggcattatcgccccgcgtctgaaagagctgaagctgatcgattctatcgttctggaaccgctgggcggcgctcaccgcaacccggaagcgatggcagcgagcctgaaggcgcagctgctggcagacctggcagacctcgatctgctcagcgaagaagagctgctgaaccgccgctatcagcgtctgatgagctacggttacgcttaa

SEQ ID NO: 213239 - DNA, 2190 bp, Klebsiella pneumoniae
atgatgcttgacttaggtgaataccaggaggaaagcgtgaatatcatcgccatcatggggcctcacggcgtctaccacaaagacgagccgatcaaagaactggaagcggcgctgcagcgccagggcttccagaccatctggccgcaaaacagcgccgacctgctgcagtttatcgagcacaacccgcgcatctgcggggtgatcttcgactgggatgaatacagcgtcgatctgtgcagcgatatcaatcagctcaatgaataccttcctctgtacgcctttattaacgcccactcgacgatggatgtcagcagtcaggatttgcgcatgacgctgtggttcttcgaatatgcgctgggactctccgaagagatcgccacccgcattgggcagtacacccgcgagtacctggagaatatcactccgccgtttacccgcgcgctgttcaactatgtccaggagggaaaatataccttctgtacgccgggtcatatgggcggcagcgcctatcagaaaagcccggtgggctgcctgttctatgatttttttggcgggaatacgctgaaggcggatgtctcgatttcggtcaccgagctgggctccctgctggatcataccggcccgcacctggaggcggaggagtatatcgcgcgcgcctttggcgccgagcaaagctatatggtgaccaacggcacctcgacgtccaataaaattgtcggcatgtactcggcgcccgccggcagcaccctgctgattgaccgtaactgtcacaaatcgctggcccacctgctgatgatgagcgatgtggttcccctgtggctgaagccgacccgcaacgcgctggggatcctcggcggtatcccccggcgcgaatttacccgcgacagcattcagcagaaagtgcgcgacacgggcggggcgcagtggcccgtgcatgcggtgatcaccaactccacctacgatggtctgctctataacaccacctggcttaaggagacgctcgatgtcccgtcgatccatttcgattccgcctgggtgccctatacccatttccatccgatatatcaggggaaaagcggtatgagcggggagcggatccccgggaaagtcatcttcgagacgcagtcgacgcataagatgctggccgcgctgtcgcaggcctcgctgatccacattaaaggcaactatgatgaagagacctttaacgaagcctttatgatgcatacctctacgtcgccgagctaccccatcgtcgcgtcgattgagaccgcggcggcgatgctgcgcggcaactccggtaaacgtctgatccagcgctccattgagcgggcgctggacttccgcaaagaggtgcagcgactgcgcgaggagtcggacggctggttctttgatatctggcagccggaagccgtggataaagccgagtgctggccggtagcgccgggcgaggactggcacggtttcaaagatgccgatgcggatcatatgtatctcgatccggtgaaggtcaccattctgacgccgggcatggacgagcaggggaatatggatgaagaggggatcccggcggcgctggtggcgaagttcctcgacgagcggggcgtggtggtagagaaaacaggcccctacaatctgctgttcctgttcagtatcggcatcgataaaacccgggcgatggggctgctgcgcggcctgaccgagtttaaacgcgcctacgatctcaatctgcgggtgaaaaatatgctgccggatctgtacgccgaagatcccgacttctaccgcaacatgcggatccaggatctggcgcaggggatccaccgcttgatccgtcagcatcagctgccgcagctgatgctcagcgcctttgacgtcctgccggaaatgaaaatgacgccgcatcacgcctggcagcgccagatcaagggggaggtggaaactattgaactggagaacctggtggggcggatttcggccaacatgatcctcccttatccgccgggggttccgctgctgatgccgggagagatgatcaccgaggaaagccgggcggtgctcgattttctgctgatgctttgctctatcggccgtcattacccgggctttgagaccgatattcacggcgccaagcgcgatgaggacggtgtgtatcgggtacgagtcttaaaaaatgacgaaaggcttgcgcgttaa

SEQ ID NO: 213240 - DNA, 390 bp, Klebsiella pneumoniae
atgctgggtttgaaacgggttcaccatattgccatcattgcgaccgactacgcccgcagtaaagcgttctattgcgatattctggggtttacgctgcaaagtgagttttatcgcgccgagcgcgattcctggaaaggcgatctggcgctcaacggcgagtatgtgattgagttgttctcgttcccgtttccgccagcccgccccagtcgtccggaagcctgcgggctgcgtcatctggcctttagcgtggatgatatcgacgccgcggtagcccatctcaccgcgcatggcgtggagtgcgaagcgattcgtgtcgatccctttaccggtaaacgctttaccttctttagcgatccggacgacctgccgctggaaatatatcagcagtaa

SEQ ID NO: 213241 - DNA, 1314 bp, Klebsiella pneumoniae
atgttcgtggatatgacggctgatattgcgcatacgcttcatccccatcgccagctgctggtggccttcagcggcggtctggactcgacggttcttctgcatcagctggtgctgctgcgggaacaggatccctcgctgacgctgcgggcggtgcatgttcaccacggccttagcgcccacgcagacgactgggtggcgcattgtcggcagatttgccagcagtggcaggtgccgctggtggtgcatcgcgtgacgttagcccggggagggctgggcgtcgaggcccacgctcgtgcggcgcgctatcaggcctttcaggatacgctcaatgccggcgaggtgttagtgaccgcccagcaccaggacgatcagtgcgaaaccctgctgctggcgttaaaacgcggcagcggtcctaccggcctgtcggcgatggcgccatcctctgcctttgccggcagtcgactactgcgtcctctcctcaatgaaacccgcgaatcactacgccagtgggcgctcgcccatcagctgtcgtggatcgaagatgagagtaatcaggatgatacctatgaccgcaatttcctgcgcctgcgggtgatcccggtgctgcgcgagcgttggccgcactttagcgaggccgtcgcccgcagcgccagcctgtgcgccgagcaggaacaactgctggacgagatgttggcggcggagctggcgtcgctggtggccgaagatggctcgctggctatcgcgccgctggcgacgatgagtccgccgcgccgagcggcgctgctgcgtcgctggctcgccgggcagcaggcgccgatgcccgcccgcgaggtgcctgagcgcctctggcacgaggtggcgctggcgcgggaagatgccagcccctgtctgcggctgggggaatttaccgtccgccgttttcaacagcgtttgtactgggtgaagtatcttcccggtcagacggacagcgttcagcgctggcccgactggcgccagccgctgcggctggcggacggtctcggcgagctgacgctgcggcccggcggcaagttgcgcccgccgtcggcggatgagccggtcaccgtccgctttcgcgccagcggccacctgcatattgtcgggcgccatggcggacgcaagcttaagaagctctggcaggagctgggcgttgctccgtggcgacgagacaccacgccgctgctgttttacggcgaaacgccgattgccgcagcggacgatctgtttgtgaccacagaaggtgaagtgaaggacggggaaggggtcaggctgatgtggaggaaaacgggcgattaa

SEQ ID NO: 213242 - DNA, 261 bp, Klebsiella pneumoniae; identical to SEQ ID NO: 137438

SEQ ID NO: 213243 - DNA, 201 bp, Klebsiella pneumoniae; identical to SEQ ID NO: 137437

SEQ ID NO: 213244 - DNA, 546 bp, Klebsiella pneumoniae
atggcgctgaaagcgacaatatataaagctgcggtaaatgtagccgatctggatcgcaaccagtttctggatgctaacctgacgctggctcagcatccgtcagaaacccaggagcgcatgatgctgcgcctgctggcatggatcaaatatgccgatgaacggctacagtttacccgcggtctgtcgtcggatgacgagccggagctgtggctgcttaacgatcatctcggggtcgatctgtggatcgaactgggcctgccggatgagcggcggattaagaaagcctgctcacgggcgcaggcggtggcgctgtttgcctataatagccgggcagctgaaatctggtggcagcagaatcagagcaagcttgcggcgtacccgaagctgaccatctggtatcttgatgatgcgcaactggcactgcttagcgcctttgccgatcgtaccatgacgctgcaggccactctgcaggagggcagtatctggttatccgacgctcggaataatcttgaaattcagcttaccgcctggcaagcgtcggcatga

SEQ ID NO: 213245 - DNA, 414 bp, Klebsiella pneumoniae; identical to SEQ ID NO: 137435

SEQ ID NO: 213246 - DNA, 699 bp, Klebsiella pneumoniae
gtgaagaaaatcgtattctccgtgatagcggcctgttcgctgttcgcgctgtttggttgtaaccatcgcgccgagactgacacggtccagccagcggcgatggaagagctcaagccgatgcagcaaagctggcgaggcgtgctgccttgcgcggattgcgaaggtatcgacacctcgctgttcctggaaaaagacgggacctgggtgatgaatgagcactaccagggcgcccgtcgtgagccgtcatcctttgcctcgtacggcacctgggcacgtaccgcggataagctggtgctgaccaacagcaagggcgagaaatcttactttcgcgcgaaaggcgacaagctggagatgctcgaccgcaacggaagccccattcagtctcctctcaactataccctggagccagtgaaggccagcctgccgacgacgccgatggcgatgcgcggcatgtatttctatatggccgatgcggcaacctttaccgattgcgcgaccggtaaacgcgtcgcggtggcgaacaatgcccagcttgaacgggattatgccgccgcgcgcgggaccgatactcgcccggtactgctggtggtagaagggcactttactctcgaagcgaacccggataccggcgagatgatgaaaacgctgatgacggatcaagccggcaaatttattcccggtaaagactgcagccattga

SEQ ID NO: 213247 - DNA, 843 bp, Klebsiella pneumoniae
atgactgcacatctcctccgcagcggactgcttacttttgccctgctcctacttaccgcctgtaccttggacgtcggccgcagctcgccttccacatctgctgccgatgaccattcatcatcctgggctgttaccctccagcgtcaaagctcgattgccggcagcggactgcgcgaaatcgccgaaagcgacctgcgctccggcgacctgctgttctcctccagcctgggcgtcacatcgcttgggatccgcgccttcagcgcctcttccgtaagccacgtcgcgctgtatgttggcgaaggtcaggttgcggaagccaccggcgccggcgtacaagtgattacccttcagcaggcgctggcgcacagcgataaactctttgctctcagggtgcctgacctgacgccggaccaggcaacgacgatgaaaagttttgcctggcaggtcaaagacagcgggtataactatcgcggcattattcagtttatcccttatatggtcaccaaaccgctctgctcgctcaaccccttctcacgagactttcgccagcagtgcgtcagtggcctggctaaagcgcagctgggcgatgcggcaagcggcgacaagaaagcgtggttttgctcggagtttgtcagcgaggcctttgtccgagccgggcatccgctgacgctcgcgcaggcggcgtggatcagtccttccgatctgctgcacatgcgggaaggagacgtcgccacgtttaaacccgaaacgcagctccagtatgtcgggcatttgaaactgggagtttatcttcaggccggtaagctggtggggctgaacaaaccgaaggacggtgcggagtaa

SEQ ID NO: 213248 - DNA, 1719 bp, Klebsiella pneumoniae
atgcgtactagccaatatctgctctccactctgaaggagacacctgccgacgccgaggtaatcagccatcagctgatgctgcgcgccgggatgatccgcaagctggcctccgggttatacacctggctgccgaccggcgtgcgcgtcctgaaaaaagtcgaaaacatcgtgcgtgaagaaatgaacaacgccggtgcgatcgaggtgttaatgccggtcgttcagccatctgaactgtggcaggagagcgggcgctgggagcagtacggcccggaactgttgcgcattgccgatcgcggcgatcgtccgttcgtcctcggcccaacccacgaagaggtcattaccgatctgatccgcaacgagctgaactcctataaacagctgccgctgaacttctatcagatccagaccaaattccgcgacgaagtacgcccgcgtttcggggtgatgcgctcccgtgaattcctgatgaaagatgcctactctttccatacttcgcaggaatcgctgcaggaaacctacgacgcgatgtatgccgcttacagtaaaatcttcagccgtatggggctggatttccgcgcggtacaggctgacaccggttctatcggcggcagcgcctctcatgaattccaggtgctggcgcagagcggcgaagacgatgtgatcttctccgacagctccgactacgcggcaaacatcgagtttgcggaagccgttgcgccgaaagagccgcgcgcagccgccacccaggagatgaccctggtcgatacgccgaacgccaaaaccatcgctgagctggtggagcagttcaacctgccgatcgaaaaaaccgtgaaaactctgctggtgaaagcggttgaagatagcgcttccccgctggttgccctgctggtgcgcggcgatcacgagctgaacgaagtgaaagcggaaaaactgccgcaggtcgccagccccctgaccttcgccaccgaagaagagatccgcgccctggtgaacgccggtccgggctccctgggcccggtgaacatgccggttccggtgattatcgaccgtactgtagcggtgatgagcgatttcgccgctggcgccaatatcgatggcaaacactacttcggcatcaactgggaccgcgatgtcgcgacgccggaagtggccgacatccgtaacgtcgtcgccggcgacccgagcccggacggtaaaggtaccctgcttattaagcgcggtatcgaagtgggtcatatcttccagctggggacgaagtactccgaggcgatgaaagccgcggtccagggcgaagatgggcgtaaccagatcctgaccatgggctgctatggtatcggggtgactcgcgtggtagcggcggcgattgagcagaactttgacgatcgcggtatcgtctggccggatgcgattgcgccgttccaggtggcgatcctgccgatgaacatgcacaagtcttaccgtgtgcaggagctggcggagaaactgtacgccgagctgagcgcccagggtattgaagtgctgatggacgatcgtaaagagcgtccgggcgtgatgttcgccgatatggagctgatcggtatcccgcacaccatcgtgctgggagatcgtaacctcgacaacgatgatatcgaatacaagtatcgtcgcaacggtgagaagcagctgattaagaccggggatattgtggaatatctggttaaagcgataaaaggctaa

SEQ ID NO: 213249 - DNA, 708 bp, Klebsiella pneumoniae
atgagcgcatttcagttcgcgcaaataggcgtcatccgttcgccgtataaagagaagtttgccgttcctcgccagccaggcctggtgaaacacggcggcggagaactccatctggtcgcgccctataaccaggccgacgccgtgcgtggcctggagagcttcagccatctgtggatcctgtttgtgtttcatcagacaatggaaggcggttggcgtccgacggtgcgacctccccgactgggcggcaatgcgcggatgggcgtcttcgccacccgttcaacgtttcgccctaatcccatcggcatgtcgctcgttgagctcaagggcattcgctgtcagaaagatcaggtaatactggaactcggcagcctcgatctcgtcgacgggacgccggtggttgatatcaaaccgtatcttcctttcgccgaagccctgccggacgccagcgccagctatgcacagcaggcgccgctggcgggtatgaacgtcagctttacgccggaaatagacgcacagttactcacgctggaaaaacgctacccacatatcaaagcgtttatccgcgaggtgctggcgcaggatccgcgtccggcctaccgaaaagaggaacaagcgggaaaaacgtatgccgtctggctgctggatttcaacgtccgctggcgggtgactgcctccggttttgaagtctttgccctcgaagcgcgctaa

SEQ ID NO: 213250 - DNA, 408 bp, Klebsiella pneumoniae
atgcgtgctttaccgatctgtttgttagcactcatgttaagcggttgttccatgctaagcagatctcccgttgagcctgctcaaagcactgcaaccccgccggttaaatctgagccgagcaaaccgcgcgccacccgcccggccccagtacgtatttacaccgatgcgtcagagctggttggtaaaccgttccgcgatctgggtgaagtatctggcgagtcctgccaggcttcgaatcaggattctccgccgaatatccccaccgcgcgcaagcgcctgcaaattaatgccgcgcgtatgaaagctaatgccgtcctgcttcaccgctgcgaagtgaccagcggtacgccaggctgctaccgtcaggccgtttgcctgggttcagcgcttaacgtctcggcgcaatga

SEQ ID NO: 213251 - DNA, 816 bp, Klebsiella pneumoniae
atggcctttaatttcaaaacttttgcggcagtcggcgcgttaatcggttctctggcgctggtgggttgcggtcaggatgaaaaagatccgaatcatattaaagtcggcgttatcgtcggggcggaacagcaggtcgctgaagttgcgcagaaagtagcaaaagagaagtatggccttgacgtagaactggtgaccttcaacgattacgttctgccgaacgaagcgctgagcaaaggcgatatcgacgtgaacgccttccagcataaaccgtatctcgatcagcagattaaagaccgcggctataagctggtggctgtcggtaacaccttcgtctacccgatcgcgggttattcgaagaaaatcaaatcgctggacgaactgcagccgggctcgcagatcgccgtccctaacgatccgaccaacctcggtcgttctctgctgctgctgcagcaggtaggtctgattaaactgaaagacggcgtgggcctgctgccgacctcgctggacatcgtcgagaacccgaaaaacctgaagattgttgaactggaggcgccgcagctgccgcgttccctggacgatgcgcagattgcgctggccgttatcaacaccacttacgccagccagattggcctgaccccggcgaaagacggcatctttgttgaaggtaaagagtctccttacgtgaacctgattgtggcgcgtgaagacaataaagatgctgagaatgtgaaaaaattcgttcaggcttaccagagcgatgaagtttacgaagcagcaaacaagatctttaacggcggtgccgtgaaaggctggtaa

SEQ ID NO: 213252 - DNA, 654 bp, Klebsiella pneumoniae
atgtctgaggcaatgatgtggctgctgttgcgcggcgtatgggaaacgctggcaatgacttttgtctctggcttcttcggttttgtcctcggcctgccggtgggcgtgctgctgtacgtgacccgtccggggcaaatcgtcgccaatgccaaactgtaccgcacgctgtcggcgctggtgaatattttccgctccatcccgttcattatcctgctggtctggatgattccgtttacccgcgtgatcgtcggtacctctatcggcctgcaggcagcgattgtgccattaacagttggcgccgcgccgtttatcgcccgcatggtggagaacgccctgctggaaatccccaccggccttattgaagcctcccgcgcgatgggtgccacgccgctgcagatcgtgcgcaaagtcctgctacctgaagcactgccgggtctagtcaacgccgccaccatcacgctcatcacgctggtgggttattccgcaatgggcggcgcggtgggcgccggtggcctgggtcagattggttatcagtatggctatattggatataacgccaccgtgatgaataccgtactggtattgctggttgttctggtttatttaattcaattctctggcgatcgcatcgtccgggctgtgactcacaaataa

SEQ ID NO: 213253 - DNA, 1032 bp, Klebsiella pneumoniae
atgattaaactttccaatatcaccaaagtattccagcaggggaatcgcagcattcaggcgctgaataacgtcagcctgcatgtccctgccggacagatttacggcgtcatcggtgcctccggcgccggtaaaagtacgctgattcgctgcgtgaacctgctggagcgcccgaccgagggcagcgtacaggttgacggtcaggaactgactgccctgtcggagaaagagctaacccgcgctcgccgtcaaattggcatgattttccagcattttaacctgttggcctcgcggaccgttttcggcaacgtggcattacccctggagctggataacacgccgcaggctgaaatcaaacgccgtgtcacggagctgctggatcttgtcggcctgggtgataagcacgacagctacccggccaacctctccggcggccagaaacagcgcgtggcgattgcccgcgcgctggccagcaatcctaaagtattgctgtgcgatgaagccaccagcgccctggatccggccactacccgttccattctcgaactgctgaaagacattaaccgtcgcctgggactgaccatcctgttgatcacccatgaaatggacgtggttaaacgtatctgcgactgcgtggcggtcattagtaatggtcaactgatcgagcaggacaccgtgagcgaagtcttctcccatccgaagacgccgctggctcagcagtttattcagtccactctgcacctcgatattccggatgactatcaggcgcgcctgaaacctaccgccacagcggatagcgtaccgatgctgcgcatggaatttaccggccactccgtcgatgcgccgctgctctctgaaaccgcgcgtcgcttcaacgtgaataacaacattatcagcgcgcagatggattatgccggcggggtgaagttcggcatcatgctcaccgaaatgcacggtacacaggaagacactcaggcggccatcgcctggctgcaggaacatcatgtaaaagtagaggtattgggttatgtctga

SEQ ID NO: 213254 - DNA, 567 bp, Klebsiella pneumoniae; identical to SEQ ID NO: 137426

SEQ ID NO: 213255 - DNA, 1608 bp, Klebsiella pneumoniae
atgagtatttccttgaagaaatcagggatgctgaagcttggtctgagcctggtcgccatgaccgtcgccgccagcgtgcaagcgaaaaccctggtttattgttctgaaggctcgccggaaggatttaacccacagctcttcacctctggcaccacctatgatgccagctccgtaccgatctataaccgcctggtcgaatttaaaaccggtacgacggaagttattccaggacttgctgagaaatgggaagtcagtgcggatggcaaaacctatactttccacctccgtcagggtgtgaagtggcaggataataaagactttaaaccaacccgtgacctgaacgccgatgacgtggtgttctccttcgatcgccagaagaatactaataacccgtaccataaagtttctggcggcagctatgaatactttgaagggatgggcttaccggacctgattagcgaagtgaagaaagtggacgataataccgtccagttcgtcctgacccgtccggaagcgccgttcctcgctgatctggccatggacttcgcctccattctttcgaaagagtatgctgacaacatgctgaaagccggcacgccggaaaaagtggatctcaatcctatcggtaccggcccattccagctgctgcaataccagaaagattcccgcattctgtataaagccttcccgggctactggggtaccaagccgaagatcgatcgtctggtcttctccatcaccccggacgcttccgtgcgctatgccaagctgcagaaaaacgagtgccaggtgatgccgtacccgaacccggccgacatcgcgcgcatgaaggaagataagaacattaccctgctagaacagccgggtctgaacgttggttatctctcctttaacaccgagaagaaaccgctggacgacgtcaaagtacgtcaggcgctgacctacgcggtcaacaaagaagcgatcatcaaagcggtttaccagggcgcaggccaggcggcgaagaacctgatcccgccgaccatgtggggctataacgacgacgttaaggactacacctacgatccggagaaggcgaagcagctgctgaaagaagcgggcctggaaaaaggcttcaccatcgatctgtgggcgatgccggtacagcgtccgtacaacccgaacgcccgccgcatggcggagatgattcaggctgactgggccaagattggcgtccaggccaagatcgtcacctacgagtggggcgagtatctgaagcgggcgaaagcgggcgagcaccagagcgtgatgatgggctggaccggcgacaacggggatccggataacttcttcgcgaccctgttcagctgcgccgcggcgaaagacggctccaactactcgcgctggtgctataagccgtttgaagatcttattcagccggcccgcgctaccgacgaccacaacaagcgtattgaactgtacaaacaggctcaggtagtgatgcatgaccaggctccggcgctgatcattgctcactccaccgtctatgagccggtgcgtaaagaagtcaaaggctatgtggtggacccgctgggcaaacaccacttcgataacgtctctgtcgaataa

SEQ ID NO: 213256 - DNA, 1020 bp, Klebsiella pneumoniae
atgttgcagtttattctccgacgtctgggactagtcatcccgacatttatcggtatcacccttctcacctttgctttcgtccatatgatccccggcgatccggtgatgattatggcgggcgaacgtggtatttcccccgaacgtcacgcgcagctgctggccgaaatgggccttgataagccgctgtggcagcaatatgcccactatatctggggcgtgctgcacggcgatttaggcatctcgctgaaaagccgcattcccgtgtggcaggagtttgtcccgcgctttaaagccactcttgagctgggcgtctgcgcgatgatcttcgccgtcgccgtcggcattccggtgggcgtgctggctgcggtaaaacgcggctccatctttgaccacaccgcggtgggcctggcgctgaccggctactcaatgcctatcttctggtggggcatgatgctgattatgctggtttcggtacagctgaacctgacgccggtctccgggcgcatcagcgatacggtattccttgacgataccctgccgctgaccggctttatgctgatcgacaccgccatctggggcgagcagggcgactttattgacgccttaatgcatatgatcctgcccgctatcgtgctgggcaccatcccgctggcggtgatcgtgcgtatgacccgttcgtcgatgctggaagtgcttggcgaagactatatccgtaccgcgcgcgccaaaggcctgacccggatgcgggtgatcgtgatccacgcgctgcgtaacgcgatgctgccggtggtcacggtgattggtctgcaggtgggcaccctgctggcgggcgccatcctgaccgaaaccattttctcatggcctggtttaggtcgctggctgatcgacgcgctgcagcgtcgcgattatccggtggtgcagggcggggtgctgctggtggcgacgatgattatcctcgtcaacctgctggtcgacctgctgtacggcgtggtgaacccgcgtatccggcataagaagtaa

SEQ ID NO: 213257 - DNA, 903 bp, Klebsiella pneumoniae
atgtcacaagttactgaaaataaagttatcgctgcgccggtacccatgactccgctgcaggagttctggcactatttcaaacgcaacaaaggggcagtcgtcgggctggtatacgtggtggtgatgatcgtcatcgcggtattcgccaacttcctcgccccctataacccggcggatcagttccgtgattcgctgctggcgccgccgttctggcaggacggcggcagcatggcgcatctgctcggcaccgacgacgtgggccgcgatattctgtcgcgcctgatgtacggcgcccgcctgtcgctgctggtgggctgcctggtggtggttctgtcgctgatcctcggcgtggtgctcggcctggtggcgggctatttcggcggagtggtggactcaatcatcatgcgcgtcgtcgatattatgctggcgctgccgagtctgctgctggcgctggtgctggtggcaatcttcgggccctccatcgtcaacgcctcgctggcgctaaccttcgtggcgctcccgcactatgtgcgtctcacgcgcgctgcggtgctggtggaggtcaaccgtgactacgtgaccgcctcccgcgtagcgggcgccggcgcgatgcgccagatgttcgttaatattctgcctaactgtctcgcgccgctgatcgttcaggcgtcgctgggcttttccaacgccattctcgacatggcagcgctggggttcctcggcatgggcgcgcagccgccgacgccggagtggggcaccatgctttccgacgtgttgcagttcgcgcagagcgcctggtgggtagtcaccttcccgggcgtggcgatcctgctgacggtgctggcatttaacctgatgggtgacggtctgcgtgacgcgctcgatcccaaactgaagcagtaa

SEQ ID NO: 213258 - DNA, 984 bp, Klebsiella pneumoniae
atggcgttattgaatgtagataaattatcggtgcatttcggcgatgaaaacgcgccgttccgcgccgtagaccgcatcagctatagcgtgaagcagggtgaagtggtcggtatcgtcggggagtccggctccggtaaatccgtcagctcgctggcgattatggggctgattgactatcccggccgggtgatggcggataaactggaatttaacggccgcgatctgcagcgcatctctgaaaaagagcggcgccagctggtgggggcggaagtggcgatgatcttccaggatccaatgaccagcctcaacccgtgctttaccgtcggctaccagattatggaagcgattaaggtccatcagggtggtaataagcaaacccgccgccagcgggccatcgacctgctgaacctggtgggcattcccgatccggcctcgcggctggacgtctatccgcatcagctttccggcggcatgagccagcgcgtgatgatcgcgatggcgattgcctgtcggccaaaactactgattgccgatgaaccgaccaccgcgctggacgtgaccattcaggcgcaaatcattgagctactgctggatctgcagcagcaggagaatatggcgctggtgctgatcacccacgacctggcgttggtggcggaagccgcgcataaaattatcgttatgtacgcgggtcaggtggtggagaccggtgacgcgaaagatatcttccgcgcgccgcgccatccttatacccaggcgctgctgcgcgcgctgccggaattcgcccaggataaagcgcgtctggcctcgctgccgggcgtggtgccggggaaatatgaccgtcccaacggctgcctgcttaatccgcgctgcccctacgccacggataaatgccgtagcgaagagccggcgctcgcggatctgaccggcggccgccagtctaaatgtcactacccactcgatgatgccgggaggcctggattatga

SEQ ID NO: 213259 - DNA, 1014 bp, Klebsiella pneumoniae
atgagtacgcaaaaggccgccacgccacaaccgctgttgcaggccattgatctgaaaaaacactatccggtgaagaaggggttattcgccccggaacggctggtgaaggcgctggacggcgtctcctttacccttgagcgcggtaaaacgctggcggtagtgggggagtcgggctgcggcaaatcgaccctcggtcgtctgctgacgatgattgagatccccaccggcggcgagctctattatcaggggcaggatctgcttaagcacgacccgcaggcgcagaagctgcggcggcaaaaaatccagattgtgttccagaacccgtatggttcgctgaacccgcgtaaaaaagtggggcagattctggaggagccgctgctgattaacagcagcctgagcaaagagcagcggcgtgaaaaagcgctggcgatgatggcgaaagtgggcctgaaaaccgagcattacgatcgctacccgcatatgttctccggcggtcagcgtcagcgtatcgctattgctcgcgggctaatgctggatccagatgtggtgattgccgatgagccggtctccgcgctggacgtttcggtacgagctcaggtgctgaacctgatgatggatctgcagcaggatttagggctgtcctacgtgtttatctcccacgatctgtcggtcgttgagcacatcgccgatgaagtgatggtgatgtatctcggccgctgcgtggagaagggcaccaaagaccagatcttcaacaatccgcgtcatccgtacacccaggcgctgctgtcggcgacgccgcgtctgaacccagacgaccggcgcgagcgaatcaagctgaccggcgaactgccgagcccgctaaatccgccaccgggctgcgcctttaacgcgcgctgtcgccgtcgctttggcccctgcactcagctccagccgcagctgaaggattacggcggccagctggtggcctgctttgccgtcgaccaggatgagaatccgcaaaagtcccacgcctga

SEQ ID NO: 213260 - DNA, 540 bp, Klebsiella pneumoniae
atgaaccattatgatgatctgcagcgctttcaagaaaaatcgcggacgcaaaacctcaactttcaggatctttcttcgcaagccgccacgcgggaacacggcgactgggcgatcctcaatcagctaaatcccggcgccgagaaatcctcttctctggcgctgggaggctcggtctccgcgccgttgccgcagtcggtgcctgcggatctgttccgccaggtagaggcggccgtagcagcggcgccaacctctgatcctgttgtgtctgccgcttcggccgcgcctgctacttcccagccggtcgtggagaccgccgcagccgcaccggagccggtcaggcaggagcctgcgccgacccctgcgccttcaattccggcgtcggaaccggccatggcgccgccgccgagaatggccccccgacccgcgcccgccgccgagaactatgcccacctgttcgccgcgaaaagcgcggagccggtggcgaaaaataaagaccagcctttgaaatcacttctggaaaggatcgcgacatgccgttga

SEQ ID NO: 213261 - DNA, 792 bp, Klebsiella pneumoniae
ttgcgtctgttcaccgaaaggcggcgtagggaaaacgaccctggcggccatttagcctattcgctggcgcggacgggcagcaaagttctggcgctggattttgatgtccagaacgcgctgcgtttgcattttggcgtaccgctgaacgatgagcggggctatgtggcgaaggcgctggagctgcacgactggagccagtgcgtgttgagcgccggcagtaatattttcgtcctgccatatggcgaagtgagcgaggcgcagcgtcaggcgtttgatgagcaactgacccataatgaccatttcctccagcgcggtctgtccgcgctgcttaattatcccgggcttatcaccatcgccgatatgccccctggaccttcgcccgcgctaaaggcgctgacggggctggcggacctgcatcttatcccgctgctggcggataccgcctcgatgtcgaccctggcgcacgtagaaaagcagcgcctgaccggcgcggcgctgaatcataagcacgggcactatttcgtcattaaccaaagcgatagccgtcgccaggtcagccgggacgtcaccagcctgatggaagagaaactgggcgagcgactgcttggcgtgatccatcgtgatgaaagcgtggtggaggccaatgcctcgcagaagtcgatcctggactttaacgcttcctcggcagcggccttcgatattgaaatcatggctaaaaaaatatcttcgctgttgggtattcatattggcgatggcacggtgcacagccagccacgcatgtcagggcgttaa

SEQ ID NO: 213262 - DNA, 2112 bp, Klebsiella pneumoniae
atgaaaaaatctcttttttggttgctggcgctggtgctgtcacccgtcgccgtgctggtggtgatcacgccgatggacagccaaaagcagtatatttttggtctgttaagtatcggtattctctttctgatgggcttcagcaagcgccgcagcgtatcggtcattatggtcgtcacgtcgctgctgatgtccacccgttacatgtattttcgcctcacgcagaccctgcacttcaactcgtccattgaagctattctcggcatgggactctttctggcggaagtctatatctgggtgatgctactgcttaactatctgcagacggtctggccgctgaagcgcggcattgttccgctgccggatgatatgagtaagtggccgacggtcgatatctatattccgagctataacgaaccgctggaggtggtgcgcgataccgtcctggcggcacaatgcattgattatccaaaagataaaatgaaaatctatcttctggatgacggtaagcgcagcgagtttgccgtcttcgccgccgacgtcggcgtgggctatatcacccgcaatgacaacaagcacgccaaagcggggaaccttaaccatgcgctgaccctgactcagggggagcttatctgcgttttcgactgcgaccacgtcgccacgcgcgtcttcctgcaggccaccgtcggcggtttcctgaaagacccgatgctggctctggtgcagacgccgcactacttctattccccggacccgtttgaacgtaacctctccgtcggacgcaacattcccaacgaagggatgttgttctatggcccgattcagcaggggaacgacaactggaacgccacctttttctgcggctcctgcgcggtgatccgtcgcgaggcgctggcgcagatcggcggtttcgccgtcgaaacggtgaccgaagatgctcatacggcgctgaagtttcagcgtctggggtggaagtcggcctttctcgatatcccgctggccgcaggcctcgctactgaacgcctggtggtgcacgtcatccagcgtacccgctgggcgcgcgggatgacgcagattttccgcgtcgataatccgctgtttggccgcgggcttacttttcagcagcgcttgtgctatctcagcgccatgctctactaccagttcgcgctgcccagggtggtgtttgtcactgccccgctggcttacctgctgtttaacctcaatattatttactcgtcggcgagcctgattgtctcctatgccctgccgcacctgttcctcgctatttacgttggttcgcgaatgaacggccgctatcgctacagcttctggggggagatctacgatattgtgctggccttccacctggtgctgccgaccctggtgacgatgattttccccaaacgcggcaagtttaacgttaccgataagggggggctgctggacgtcggctacttcgatttcaccgtggtgcgcccgcacctggtggtggcctgcctgctggccctgggggtgatcgtcggcatcgtccgggcgattggccatgactattttggctcggatcccaacgttatcgccctcaacgtcgggtgggggatctacagtctgatcttcctgctggcggcgattgccgtggcgcgcgaaacgcggcaggtgcgaaaaaccattcgtatcgatgtcgatattccggtggtgatccattacgccagcggcatcgtctcgcgcagccataccgcggacctgtcgatgggcggctgccgcgtggtcgcgcctgataatcgccatctggaggatgacatcgaagagattgagctgatcctgcagtccggggctatctcgatcccggcccagctggtcacctctgacgagcgcttcctgcgcctcaagtttgatgaagatattccgctttcgcgccgccgtgaactggtgcgcgtggtgctggcccgcgcggatgcgcggattaatccgccgcgcccgcaggataacccgttccgctccttcttcaccattttacgctgcgtgttcgaactgttctggctgacgtggaaaacccgtcgcagccagcgcaatcgggcaacagtggcgaaaacggcgcaggaggatgggacgttatga

SEQ ID NO: 213263 - DNA, 2436 bp, Klebsiella pneumoniae
atgaagcgattaaccacgctggcgctgctggcagggatgctctctgcgcctgcgctacacagtgaagaaccgggctccggcgccgctgccccgctgagcttcccgcagctcaacgacgcggcggacagcgagcccggcgacgaacctccggctgcctcgccggaggagggcgcctctccggcagcccccgccaccgccggcgatgcggcggcgacggcccctgcgccggttatgccggacttacccccgccggtgagcggcacggccgcgccggaggtcattcctgtcgctccggtctggggaggcgatctgaatctggcgcagatggggatgccggacgggattatcctcagcggcggccagcgacagggtggggtcagctttaccctgcctgccgatcaggtggtgatccattcgcagctcagccttgccgttcgcgtatcgccggagatggcgagccgcaacgccaccctgcagctgatgctcaacggtcaaccgctcggcacgctgccgctgggcgccgatggcgaggatgtctcccattatcagctggatattccgcccgcgctgatggtctccagcaataacctgagcgtgaagatcaacgatggcgataccctgcagtgccagcgtgacattcatgatacgtcgcgggtgacggtgctgcccacgtcgcatttcagctgggaaagccagcagctgaacatcagcgacgacctgagccacttcccgcggcccttctttgacagcatgcagatgaccccggcggacattgcggtcgcctatggggccaagccgtcggcggacgtcttcagcgccgcggcgctgatctcctcctggctgggtatccaggcggactatcgcggcattgccttcagcgctctgcgcgaccgtctgccggaacgccacggcatcgtgattggccatccgggggagcaggtgggcggcatgatgctgccggaaaccgataagccgctgctgcgcatcatcgccaaccccgccaatccggcctataaactgctgctgattgtcggtaaaaacgatacggcgctgcgcatggccgcctggcggttaacccgcggcaactttgcgccgcaaaccgcgacgctggatgtcgaaccgcagaccatcccggttggcaaagcatatgatgccccgcgctggatccccaccgatcgtccggtcaagctcagcgagctgctgcgtaaggaccaaagcccgaccgtcagcggcgtctggcacgaacctttacgtatcgccttccgcgccgcgcccgatctctatctgtgggatggggagaccattccgctacaggttggctaccgcttcccgtcggaaagctggattaatgaggacaagtccttgctgagcgtcacgctcaatggcaccttcctcaacaacctgccgatgaacaagcaggggccgctggagaaagtctggcgctacctcgggggcgatgcgcgccaggagcgctttaccatcccgctggcgccttacctgatttacggcgataaccagctgtcgatgtacttcaatgtggtgccaaaggacgatgttccgtgttcggtgctgctgaataacaatatcaagagccggatcactgacgactcctggatcgatttgagcaagacgcgtcacttctcgctgttgcccaatctctcctactttgtcggcgcctcgttccccttctcgcggctggcggactattcgcagacgaccctcctgctgccggcggacccgtctgaaacccaggtggcgaccctgctgaatctggcggcacgctccgggaacgcgaccggcaccgcgctggcgaataaccgcgtcgtgctcgggatgcccaccggcgggggggatttgcagtcgctgcgtgaacgtgacgtgctggcggtcaccgctctcgatcagcaggcctttaaccagagcctgctggccgactcaccctatcgcccggtagataatgtgctgagcgtccgcgagccagacctgtggcaaaaagtccagcgccggctcaccggcgactggacttccgccagcctcgacgccgatcgctacttttcgtcgagcagcgcctggcgcgggttcatcagctatcgctcgccgtggaattccacccgcctggtggtggtggcgctggccagcaatgatgaccagctggcgcgactgaagaccgatctggaatcgccgcgcattaacgccgggatccgcggcgataccgcggtgatcaccagcgataacggggtgcgcagcttccaggtgagtacgccgttccccagcggtcagatgccgtggtacatgatggcggtctggtatgccagccagcactcaggtttcctggcggtgctggggctgattgccacctcgataatgggactggcgctgaccgcgatgtttaaacgtcacgcccgtaagcgtctgggttcgggggataaccaatga

SEQ ID NO: 213264 - DNA, 4053 bp, Klebsiella pneumoniae
atgaaaagaaagataataataacgatgaagacctcccgtcggcttaccacgttctgcctcaccggcgcgttgactctcgctgcctcgggcggcgcgctggcggcggggaacgacgcggcgctacaggcgctgttcgctcaggccaactactggcatgagaaatctcatgacgagctggcgatggagtccctgcagaaggtgctctcggtggatgccaacaacacccaggcgctgtatctgatggcgctctggtcgcagcagggcggcgatatgcaggcggcggcgcagtggcgcgcgcgtctggcgaaagcggcccctgacagcccgggactacaggatctggacaacgccaaaaagatgtcgcaggtgccgcagggccagctcagcctggcccgccagcaggcgcgcggaggcaatatccccggggcgctggcgacctggcgcagcatgttcaatggcaatacgccgcctgccgagctggcggcggaatattacctgaccatggccagcgacaaatcgctctatccgcaggctatcagcgagctgcgccagtacgtggcgcagcatccgcaggagaacgccccgcgggtggcgttgggcaaagcgttaacctggcgggaagagactcgccgggaagggatcgccctgctcgagccgatggccagcggcaataaagaggcggacagcggcttgcgccaggcgctgctctggctgggcccgcaggccggggatgagcagtattacgacacctggatgcagcggcatccccaggacagcgaagttcagaattactttcgcgaacggcgcagcggtcaggcgcgcggccagggctacgccaacctcaacagcggcaataccgccgccgcgaagcagcagtttgaagaggtattgcagactaacccccaggatgccgatgcgctggcgggcatgggctatatcgcccagcgcagcggcgactaccaggccgcgtcgcagtatctgagccgggccgcggacctcggcggcgacgcctcggcgacccgtcgtcagcaggcggccgatgcgctgttctacggccagctggcgcaggcccagcaggcctataagcagggcaatatcagccaggcgctggcgctctccgcgccgttggcgcagcagagcggggcgcagggcgcctcggcgaagctgttccgcgccgatgtgctgcggcacaacaaagatttgccccaggcggagcaaacgctgcgctcactgttaaatgacgatccgcagaacgcggcggcgcgggaaaacctctattacgtgctgcgcgagcagaataaatccgccgaggcgcaggcgatgctgcagacgctcccgcagagcctgcggcaaaaactgcagccgcgggtggtggccggtatgccgggcgatgccctgcgccgtcaggcccaggcgcaggtcagcagcggtaacccagccggcgccattgccaccctgcgcgaaggcgtcgcccgctatccggacgatccctggctgcgcctcgacctggcccggctgctgcaaaaatcgggtaacggcagcgaggcctcttcgctgatgtcggcggcctatcgccccggcgccagcaacagtgcgctgtatgccgccgccctgtttgccagcgaaaacggcgcctggcagcaggcgcagacgctgctggcgcgcgttcccggcggcagccagaccagcgatatgcgcgatttgcgccagcgggtgaactacaacctgcagttggtgacggccgaaaactacctggcgcagggcaataccatcgccgccagcaataccctgcgggcgatggcctccacgccgccaaaagccccggcggacgccggcaagctggcgcgtctgctggccgagagcggcgacctgaccaccgcggtctcgctggtgcgcaacaatatcagcagcggcgtatccggcaatgccggggattacgccgatcagatcgccgtcctgaatcaggccgggctaaccggcgaggcgcagaacctgatcagcaatccgcagctgcaggccagcagtacgccgacgcagctggcgagcattcgcaatggctatgtgatcaacgaagccgaccgcctgcgcgagcagggcaattacgctgcggcgtatgacaagctgatccgcgctatgcaaagcgatccgcaaaataccgatctgatgttcgccatggcgcggctgtaccagagcggcaaaatgaacaaagaggccggggtggtctatgactaccttatgacgcgcgatacgccgaaccaggatgcgcgcgccggggccatcgacgtggcgctgtcggcggggaacaacgatcgcgctgaacagctggccggcggtttgcgccaggataactccccggatcgcctgctgctgctggcgagagtggcggaggcccagggacatcatcagcaggcgatgacctatctgcgcagcgcccgcggcaaactgctgggcatgcaaagcaccaacagtagcgaaacgccgaccgtcggcggggtgctggcggcggataacccctttatcggcgtgtcgcaaacgtcggcgccgacgcggacggcctccgcctacgggcagtacatgccgtggcaggttgcccagtcggccgccgcgcctggttccacgctgccggggatccagcgcaccgatctgccggtggacaccgcccagacgcggatgctgcgtcaggtggacaccatgatggagtcgctgcaggagaaaaccggcagctggctgcaggggggaatggacgtgcgtggacgcgacggcgaatcgggcaccagcaagctgacggagctccggacgccgctgacctggtcatcctcgccgtttggcgactcgcgctttgactttaccgtcaccccggtgtcgttgaacgccgggaccgccagcggcgacgcctggcgtcgctacggcgccaacccgctggctaacgcggtctccaacatggtgagtaccgccaccagcgagcaggcggcgatcgcctcgatgaccgaggcggagcggacggcctatttcgccagcaatccaggggccgaggcgttaagcggcctcggcaccctgaacgcggcagatttcaatccgaccaccaacagcgggatggaaaacctggcgaagctcgggagctatgatgcggggcaggtggccagctatctctcttcgtccagccgcaagccgaacgttgaccagaccagcggctcgaccgattcgcagaaggccaacggcgtcgaactggcgctggcgttaagcggtgacgattaccgggtcgatatcggcagcacgccgttgggccaggatcttaataccgtagtcggcggggtgaaatggtcgcccaagctgaccaactatctgtcgctgatcctcaccggcgaacgccgctcgctaaccgacagcctgctttcctacgtgggtctgaaagacgcctattccgggaaaacctgggggcaggtgacgaaaaacggcggcaccctgcagctgagctatgacgacggcgacgcgggcttctatgtcggcggcggtggatacagctatctggggcagaacgtcgccagcaacaccagtatcaacgccaatgccggggtctatcttcgtccctaccatgacgaataccgccagctgcaggccgggttgagcatgagctatatggattactccaaaaacctcagctacttcacctatggtcaggggggctactttagtccgcaaaactacgtcagcgtatcgctgccggtcagtctgacggagaaatatgataactggaccatgaagctcggcggctcggtgggctatcagtcttacagtcaggataagagcgcctatttcccgaccaattcggagtggcagcagaccctggagacggcggtgagcaatgggtttgccaaggaagcctactactccgcgacctcgaagagcggcatagggtataccctgcgcgccggggcggattacaaggtcaacaaacaaatgaccctggggggtcagattggctatgacaccttcggggattataacgaaagcaccgccgggctctatattcgctatatgttaggagatcattga

SEQ ID NO: 213265 - DNA, 477 bp, Klebsiella pneumoniae; identical to SEQ ID NO: 136113

SEQ ID NO: 213266 - DNA, 1002 bp, Klebsiella pneumoniae
atgcccctgcgtgctttagtggcggtgatagtgacaacggtagtgatgctggtgcccagggcgtgggcggatacggcctgggagcgctataaggcccgttttatgatgccggatggtcgtatcattgataccgccaatggcaatgtgtcgcatacggaaggtcagggcttcgccatgctcctggcggtggcgaataacgatcgtccggcgttcgacaagctgtggcagtggacggacaacaccctgcgcaacaagtctaacgggttgttttactggcgctataacccggtggcgccggaccctatcgccgataaaaacaacgcctccgatggcgataccctgatcgcctgggcgctgctgcgcgcgcaaaagcagtggcaggataagcgctatgcgattgcctctgacgccatcaccgccgccctgctgaagtctacggtggtgactttcgccggtcgccaggtgatgctcccgggcgtgaaagggttcaacctcaatgatcacctgaaccttaacccttcctatttcatcttcccggcctggcgcgccttcgcggagcggacgcatctcaccgcctggcggacattgcagagcgacggacaggcgctgctggggcagatgggctgggggaaatcacatctacccagcgactgggtggcgctgcgggcggatggcaagatgctgccagccaaagagtggccgccgcggatgagtttcgatgcgatccgtatcccgctgtatctctcgtgggccgatccgcacagcgccttgctcgcgccctggaaggcctggatgcagagttacccgcgcctgcaaaccccggcgtggatcaacgtcagcaccaacgaggtggccccctggtatatggccggcggcctgttggcggtgcgcgatctgacgctgggtgaaccgcaggaggcgccgcagattgacgacaaggatgattattactctgccagcctcaagctgttggtctggctggcgaaacaggatcagcgctaa

SEQ ID NO: 213267 - DNA, 1680 bp, Klebsiella pneumoniae
atgacaaataaaaaaacgaccgcggcaccgcttccgctctggcagtactggcgcggccttggcggctggaacttctactttctggtcaagtttgccctgctgtgggccgggtatctcaatttccatccgatgctgaacctggtatttctcgcctttctgctggtgccgatcccgcgcgaaaagctacaccgtatccgccactggatcgctattccgctgggattcgcgctgttctggcacgatacctggctgcccgggccagagtcgatttttagccaggggtcgcaaatcgccggcttcagcgccagctatatctgggatctgattgtccgctttatcaactggagcatggttggcgccttctttgttttgctggtgctatggttgtttatcagccagtggctgcgcgtcaccgtgtttgtctcggcaatggtcgtctggctggcggtcagcccgctgctgccggcctttaccctatggccctccggtcagcccaccacggccgccgccacgaccgcacaggccaataccggggccaacgccgccgctggcgccgcgtccagccccgccaacagcgatattccgccgcagaccgagccgccgacctcagccaacctgaccaactggctgaacgctttctatgccgccgagcagaagcgcaagacgccgttcccggaccagctgccggcggatgcgcagccgtttgacctgctggtgatcaacatctgctccctctcctggtcggatattgaagccgccggtctgatggatcatccgctatggaagcactttgatattgtcttcaaaaactttaactccgcgacctcctacagcggcccggcggcggtgcgcctgctgcgcgccagctgcggccagctgtcgcatactaacctgtatcagccgtccggcgccgactgctacctgtttgaaaacctggcgaagctcggcttcaaccagcagctgatgctcggccataacggtctgttcggcgacttcctgaaagagctgcgttcgctgggcggtatgcagagtccgctgatggaccagaccggcctgccggtcagcctgcaggcgtttgacggctccccggtgtataaggatctggcggtcctcaaccgctggctgaagaccgaagaggccagcagcaatccgcggaacgccaccttctataacaccctgccgctgcatgacggcaaccacttcccgggacaaagcaaaaccgcagactacaaagtgcgggcgcagaagctgtttgatgacctggataacttcttcaccgagctggagaaatcggggcggaaagtgatggtggtggtggtgccggaacacggcggcgcgctgaagggcgataagatgcaggtatctggcctgcgcgatattccaagcccgtcgatcactaacgtcccgacggcggtgaaattcttcggcatgaaggcgccgcatgaaggggcgccgattatcatcgatcagcccagcagttatctggcggtgtcggagctggtggtgcgcgccctcgacggcaaaatgttcagcgaggacagcgtcaactggcagcagtatgtcgccaacctgccgcagagcgcggcggtgtccgagaacgccaacgccatcgtcatccagtatcagggcaagccttatgtccagctgaatggcggtagctgggtgccttatccgcaataa

SEQ ID NO: 213268 - DNA, 198 bp, Klebsiella pneumoniae; identical to SEQ ID NO: 136110

SEQ ID NO: 213269 - DNA, 1554 bp, Klebsiella pneumoniae
gtggataatgtatttactttgggtatttcatcattatgggatgaagtgtgccatatgccggtcggcggagtatggtggctcaacgtcgaccgttatgccgatgccgtcagcctgtttaatcagacgctggccgcgcaggcgaaaaacagccacgttgccgcgctggttatgggaaacaaacccaaggatatcatttccttagatcatactcacggtccggataatatcgcgctgttcaccctgccgaatcgcccgcaggcgctggaggaaatacaccgcgatttagtctgctccctcgaacctggcaattatttgtttattctgctatgcgctgaaaatgcctggcaaaatataaataatgaaaagttatgcgcctgggtagaaaagaccagccgctgggcgcaatatcaccgttgcgcgttcttagcgatcaattccgcgcaggatatcgatcggcagctgactcccttattacgtgagtaccgctccctttccggactggcaagtattcgttaccagggcgaccggcatatctttgatattgcctggtggggaagcgataagggtatcagcgcccaacagcagctgatggtgcaacatgatgacgccggctggcgattagcgcaggacgctgaaaccagcgtgcagccgcgcagcgacgaaaaagcgatcctcagccatgtgcgcgtgctggaaggcgccccgccgctgtcggaatactggacgctgtttgacaccaacgacgaggtcttcaacgccgggcgcaccgcgcaagcggcgacgatcctcttctccattacccaaaatacgcaaattgaacagctgggccgctatattcataccctgcgtcgccagcgcggtacggcgctgaaaatcatcgtccgtgaacaaaccccgagcctgcgcgcgaccgatgagcggctactgctcagcagcggcgccagcctggtgatccccagcagcgcatcgctctcccgctgcctgacgctaatcgaaagcgtacagaaccaaaagttctcccgccatatcccggaagattttgccaccctgctgacctggagccagccgttaaagctgcgcggctaccagaagtgggatgccttctgcgaagcggtgcacaacgtgatgaccaataccctgcttccacccgacagcaaaggcgtgatggtggccctgcgcccggcgccggggctgcgcgttgagcaggcgctgacgttatgcaaacctaaccggatgggcgacatcatgaccatcggcaataaccggctggtgctgtttttgtcgttttgccggatcaatgacctcgataccgcgctaaaccacattttcccgctgccgaccggcgatattttttctaaccgtatggtgtggtttgaggacaagcaaatcctctcggaaatcgtaatcatgcgcggcgtcgagccggcgcgctggaacacgccgctgcctctctcggtcggtaaaaacgagaccattaacgccacccacgatggacgccactggcgacgctaccccgaaccacaccggttaaccacccgcgaggagcaagcctga

SEQ ID NO: 213270 - DNA, 189 bp, Klebsiella pneumoniae; identical to SEQ ID NO: 136108

SEQ ID NO: 213271 - DNA, 732 bp, Klebsiella pneumoniae
atggctattctgggattacagggcgtgcgcgggggaactggcgtcacgtccattacggctgcactcgcctgggccctgcaattgctcggtgaaagcgtgctggcgatcgacgccagcccggataatatgctgcgctttttctttaataccgatatccatcatcaggacggctgggcgcgggcgctgctcgacggccgggactggcgtgacgcgggcttgcgctatacgcagcatatcgatctactgccgtttggccagctcagcgccggcgaaagagaaaatgtcgaccagctgcagcccaccctgggggcgatagcggaggcagtacagcagctacagggccagtaccgctggctgctgctggatctgccggcgggttattcgccgttgactcgcgagctgctgacgctttgcgatcgctcgctggtggtggttcatcccgacgccaatagccatatccgtctacaccagcagcccctcccggccaacggcgatattctgattaacgatctgcgggtcggcagccagctgcaggaagatctctaccagctgtggctggagagccagccgcgcatcctgccggtgacgattcaccgcgacgaggcgatggccgagtgcctggcggcgaaacaacctcttggggagtatcgtcaggattcgctggcggcggaagaggtgctgaccctggcgaactggtgcctgatccactattccgccgggagagcggcatga

SEQ ID NO: 213272 - DNA, 2619 bp, Klebsiella pneumoniae
atgatccgcctcagtacgctgctgctggccccgccggtgggggagcggctgcgtgcgcgctatgatgactatcggcagcacggcgcttcgtggctgtcggcgtcgcttggctgtctgtgggcgtcgctggtctgggcgctgatgccgctggagacgccgcgctggcaggcgattctggcccgccatgaaacctattttccccacataaatccgcatcgcccgcgtccgctggatccgctgcgctacctgctgcaatccctgtggttactgacgacgcgcgtgccggagccggagaaaaaggtcaactggcgttcgctggcggcgctggaaggggtgcacggtcgctatacgcagtggctggaaaaattgcctgagcagatgaacgcccggaccggccatctggataaacagaaagagctggcgcacctcaatcctaaactgcgccgggcgatccttgggggggtgaccttctgctcgctggtgctggcgctgatgtgtattacgcagccctttaacccgctgtcgcagtttatcttcctgatgctgctgtggggcgtggcgctgctggtgcgacgcatcccgggccgtttctcggcgctgatgctgatcgtgctgtcgctgacggtgtcgtgccgctatatctggtggcgctatacctcgacgctgaactggaacgacccggtaagtctggtgtgcgggatcattctgctgttcgcagagacctacgcctgggtggtgctggtgctgggctacttccaggtggtctggccgctgaatcgccagccggtgccgctgccggaggacatggatttgtggccaactgtggacatcttcgtccccacctataacgaagatctcaacgtggtgaaaaacaccatttacgcctcgcagggcatcgactggccgaaggacaagctgaacatctggatcctcgacgacggcggacgggaagcgtttcgccagtttgccaaagatgttggggtgcactatatcgcccgcaccagccacgaacacgccaaggccggcaacatcaataatgcgctgaaatatgccaaaggggagttcgtttcgatctttgactgcgaccatgtgccgacgcgctcgtttctgcagatgaccatgggctggttcctgaaagagaaagagctggcgatgatgcagaccccgcaccacttcttctcgcccgatccctttgagcgcaaccttggtcgttttcgcaaaacgccgaacgaagggacgctattctacggcctggtgcaggacgggaacgacatgtgggacgccaccttcttctgcggctcctgcgccgttatccgccgcggcccgctggatgaaattggcgggatagccgtcgaaacggtgaccgaagatgcccacacctcgctgcgtctgcaccggcggggatatacctccgcctatatgcgtattccgcaggcggcggggctggcgacggagagtttatccgcgcatatcggccagcgcatccgctgggcgcgcgggatggtgcagatattccgcctcgataatccgctgtttggcaaaggcctgaagctggtgcagcgcgtctgctacgccaacgccatgcttcactttctctccggtattccgcgcctcatcttcctcacggcgccgctggcctttttgctgctccatgcctatatcatttatgcgccagcgctgatgatcgcgctattcgtgttgccgcacatgatccacgccagcctgaccaactcgaagattcagggcaaatatcgccattcgttctggagtgaaatttacgagacggtgctggcctggtatatcgcgccgcccacttttgtggcgctgatcaacccgcataaaggcaagttcaacgtcaccgcgaagggcgggctggtggaagaggagtatgtcgactgggtgatctcccggccctatatctacctggtgctgctcaatctggtcggcgtcgcggtggggatctggcgcttcatgtacggcccggaaaatgaaatcctcaccgtctgggtgagtattgtctgggtattctacaacctgattattcttggcggcgcggtggcggtctcggttgaaagcaagcaggttcgccgttcgcaccgtgtcgaaatgagcatgccggcggctatcgcccgcgaagatggccacctgttctcctgcaccgtccacgactattccgacggcggactggggatcaaaattaacggcgacgcgcaggtgctggaaggccagaacgccaggctgctgctcaaacggggacagcaggagtatgccttcccggtcagggtcgcgcgggtcaacggcagcgaagtggggctccagctgctgccgttaaccaaccagcagcatatcgattttgtgcagtgtacgtttgcccgcgctgatacgtgggcgctttggcaggatagcttcccggaagataagccgatggaaagcctgctggatatcctcaagctgggctttcgtggctatcgtcacctggcggagttttcgccgccgtcggtgaaggtggttttccgcgcgctcacttcgctggtggcctggatagcgtcgtttgtaccccgacgccctgaacgcgccgcgccgacgctctccgcagacccggcaatggctcaacaatga

SEQ ID NO: 213273 - DNA, 2325 bp, Klebsiella pneumoniae
atgtgtgcagtagcggtgggcatgtgcagctggtatccactggcctcttacgcggcgccggccgcggtggcgaacgctgcccctggcgttcagccgcaggccgcgaccccggctgcgccgatcgtggtgggcgagccgacggcgaccctcgccgaaccgaccgctccggcggcggtggccgagaacgtgccgcagcgggaggtgaagctgagctttgccaccatcgcgccgccgcccggcagcatcgtgctgcgcggctcacggcctgacgcgtcggtcgaattcggcatgcgcagcgatgagctggtcgccaacgcgctgctcaatctggaatacaccccatcgccctcgctgctgcccgtgcagtcgcagttgaaggtctatcttaacgatgagctgatgggcgtcctgcccgtcactaaagagcagctggggaaaaagatccgcgcgcagctgccgattgacccgctgtacatcaccgacttcaaccgcgtacggctggagtttgtcggccactaccgcgacgtctgcgaaaacccggccagcagtacgctgtggctggacgtcggacgcgaaagctatctggatctcacctaccagtcgctgaaggtaaataacgatctgtcacacttcccggtgccgttctacgatccgcgcgataaccgcccgctgaagctgccgatgattttcccgggctcgccagcggtcacccagcagcaggcggcggcgatagtcgcctcctggttcggcagcaaggccggctggcgcggccagcagttcccggtctatttcaatgaactgccggatcgtaacgccattgtcttcgccaccaacgacaagcgtccggacttcctgcgcgatcatccgccggtcaaggcgccgaccatcgaaatgatcgacaacccgaacgatccctacgtcaagctgctggtgattttcggccgcgatgataacgacctgctgctggcggcgaaggggattgctcagggcaatattctgttccgcggcagcagcgtcaccgtggacggcatcaaaaccctgcagccgcgtcagccttacgacgcgccgaactgggtgcgcaccgaccgctcggtcaccttcgctgagctgaaaacctatgagcaacagctgcagtccagcggcctggtgccggatgccatcaccgtggcgcttaacctgccgccggatctctatctgctgcgggccaacggcatcgatatggatctgaaataccgctacaccatgccgccggtgaaggacagctcgcggatggatatcagcctcaacgaccagttcctgcagtcgttcagccttaacagctcccaggacgtgaacaaactgatcctgcgcctgccggtgctgcaggggctgctggacggcaaatcggaggtcaccatccccgcgctgcgtcttggggcggtcaaccagctgcgctttgacttccagtatatgaacccgatgcccggcggctccatcgacaactgtattaccttccagccggtgcagaaccatgtggtgattggcgacgattcgaccatcgacttctcgaagtattatcactttatcgccctgccggacctgcgcgtcttcgccaatgcgggcttcccttacagccgtatggcggacctttccgacacgctggtggtggtgccgaaggcgccgacccagggccaggtggcgacgctgctgcaggcgctggggggcatcggttcgcagaccggtctggcggcgattaatctgcaaatgaccgacgatggcaaccagatcaagaataaagacgcggatctgctgctgatcggcgcgatcccgtcgtcgctcaaggacgacaccaaaatcaacctgctggtcgaggcgaccaaaagctgggtgaaaatgccgatgcgccactatgacctggcgagcatttatcccgacgatgaggcccgcacgcccaatacccgcaccgacattacctcttccgggccgatggcggcggtgattggcttccagtcgccgtataacgatcagcgcagcgtggtggccctgctggccgacagcccgcgcggtaatgaactgctgaccaacgccctcaacgacagcggtaagcgggcagcgatgtttggctcggtggcggtgatccgcgaatccggcgtcaacagtctgcgggtgggggatatttactacgtgggtcatctgccctggttcgagcgcatctggttcgcgctctctaaccacccgatactgctggcgatcttcgctgccatcagcattgtgctgctggcatgggtgctgtggcgcatgctgcgcatcatcagccgccgccgtcttagcctggatgatgagtaa

SEQ ID NO: 213274 - DNA, 1110 bp, Klebsiella pneumoniae
atgatgaaagttctttgtggcgcggtgctctcggcgctgctgctggcggcgggccaggtgggcgccgcctgccagtggcccgcctgggagcagtttaaacaagcgtacgtcagccccgagggacgggtgattgaccccagcgatgcgcgcaaaatctccacctcggaaggacagagctatggcctgtttttcgccctggcggccaacgatcgcgcagggttcgacaaactgctgacctggacgcagaacaacctggcggaaggcgatctgaaacaacatttgccgggctggctgtggggcaaaaaggacgatgagcagtggaccctgctggacagcaactcggcgtccgactcggatctgtggatagcctgggcgctgctggaggcgggccgcctgtggcaacagccgcagtacaccgagaccggaaaagccctgctggcgcggattgtcgctgaagagacggtggcggtgccgggcctcggcacgatgctgctgccgggaaaagtcggttttgccgatgacagcggctggcggtttaaccccagctatcttccgccgcagctggccacctactttgtgcgttttggcgcgccgtggcccgctctgcgcgacagtaacctgcgcctgctgctggagaccgcgccgaaaggctttaccccggactgggtgcgctatgagaaagggaaaggctggcagctgaaaaccgaaaagccgccgatcggcagctatgacgcgattcgcgtctacttgtgggtgggcatgctccatgatggcgataagcagaaagcgcgtctgctgcaacgcttcgcgccgatggcggcgcagaccacggagcagggagtacccccggagaaagtgaatatcgccaccggcaaaaccagcggtcaggggccagtgggcttctccgcggcaatgctgccgtttttacaggacgacgaggcccggtcggtgcaacgccagcgcgtcgccgataactatcccggcgcggatgcctactacagcgcagttctgacgctgttcggccagggttgggatcaacaccgttttcgtttcacggcgagtggtgaattacaacctgactggaaccaggaatgcgcaagctctcactaa

SEQ ID NO: 213275 - DNA, 3477 bp, Klebsiella pneumoniae
atgcgcaagctctcactaagtttactcacgctgtccctcggcgttgcgctgctgccgttagcgcaggcggcgacgacgcctgcccaggagcatctgctggagcaggtccgcctcggcgaggccagcaatcgtgaagacctggtgcgccagtcgctgtaccgtctggagctgattgatcccaacaacccggagctgattgccgcgcggatgcgctatctgctgcgtcagggggatgccgccggggcgcaaaaagagctggaacgactgacgaagctggcgccggactccccggagctgaaggcgtcgcgcaatgagatgaaaagcaacaccggcgagggccgccaggcgctgcagcaggcgcgactgctgggcgtggccgggaaggtcgatgaagccatcgccgcctatgaaaaactgtacggcggggtgccggatgacgttgacgtcgccattgaatactggacgctggtggcgcgcctgccgtcccgccatagcgaaggcgtcagccagttgaaaaaactgaacgccagcgcgccgggcaacgtcagcctgctgacttcgctggcgaagcagatgttcgccgataacaaactgcaggaggggttcgcctatctggcggagatggcccgatcggcctcgggacgcggtatcgccgccgatatgtggttcagtgaggtgaaaagcatgccggtgagcaaggccagcgtgcaggcgttgcagcaatttcttctgcagtttcccaccggctcggtggcggcgaacgcccgcgttctgctcgaccaacagcaggcgcagctgcaggatccgactttccgcgcccgctcggaagggctggcggcggtcaagtccgggaataccacgcaggcggtcgcggatctgcagaaagccgttcaggccgacagccgcgacagcgacgcggtgggcgctctcggccaggcctattcccagcgcggcgaccgcgcgcgggcagtggcgcagctcagtaaagcgattgccatggaccctgacagcccgaaccgcggcaagtgggacagcctgctgcaaactaaccgctactggctgctgataaagcagggggataacgccctgaaagccggccagctttcgcaggcgcagaactattatgcccaggcgcagcgggtcgatcgcaccgacagctatgccgtgctggggctgggggatgtcgcggcggcgcgcaaagaggcggcggcggagcgctattaccagcaggcgttgcgcctggatcgcggcaataacctggcggtgcgcggcctggccaacctctatcgcgccgaatcgccggagaaagccagcgcctggatcgccggcctccctcccgctcagcggcgcagtatcgatgatattgagcgcagcctgactaacgaccggctggagaaacaggcgcaggctctggagagccagggcaactgggcgcaggcggcggaagttcagcgtcggcgcctggcgctggatccggacagcgtctggataacctaccgtctggcgcgggatctggtcagcgctggcgaacgccaggaggccgacgcgctgatgcggacgatggtcaaccgccagccgcaggacgccgaacgggtctacgcctcgggactctacctgtcggggaacgaccaggacgatctggctctggcgcaaatcgccgctctgccgcgcagcgcgtggacggataacattcgtgaactcgaagcgcgcctgcaaagcgaccgggtgctgcgccaggccaaccagctgcgcgacagcggcgacgaagcgcaggcgatcgccctcatcaaacggcaacccgcctcggtgcgctatgatctgacgctggccgactgggcgcagcagcgcggcgacagccagacggcgattgccgactatcagcgggtgctgcgtcaggaggccgacaacggcgatgcgcgcctcggccttgcggaagtctacctggccgagggcgataaaccggccgcccgggcgcaggtcatgcagctgaaaggcgcagagaccgaatccatgaacatgcagcggcgggtggcgctggcgcgagctggccttggcgataccgctgacgcgcaacggatttttaatcagattgtgccgcaggcgaaggcgcagccgccctcgatggagagcgcgctggtgctgcgcgatgctgcgcgctttgccacccagagcggggcgccgcagcaggcgctgacgcactaccgggaagcgatggtggcctccggcattacccccgcgcagccgcaggataacgatacttttacgcggctgacgcgcaacgacagccatgatgactggctgaagcgtgggatccgcagcgatgccgccgacctttatcgtcagcaggatctgaacgtcaccctggaacatgacttctggggttccagcggcaccggcggctattccgacctgaaggcgcataccaccatgctgcaggtggatgctccgctggcggatggccggatgttctttcgcaccgatctggtcaatatggatgccggcagcttttccacccacagcgacgggagctactcgcccagctggggcacctgcggggagatcgcctgtaccagcggcagtaaaaatcagaccgacagcggggccagcgtggcggtcggctggaagaatgacacctggagcggggatatcggcaccacgccgatgggcttcaatgtcgtcgatgtggtgggggggctgagctacagcagcgacgtcgggccggtggggtacacggtcaacgtccaccggcggcctatctccagctcgctgctctcctttggcgggcagaaggacagcagcagccataccggcgccacctggggcggcgtccgcgccgacggcggcggcctgagcctgagctacgatcgcggggaggctcacggcatctggtcctcgctgggcgccgactcgctgaccggtaaaaacgtggcggataactggcgcgtgcgctggatgaccgggtactactacaaggtcatcaacgagaataatcgtcgcgtcaccgtcggcctcaacaatatgatctggcactacgacaaagatctcagcggctacaccctcggccagggcggctattacagcccacaggagtatctctcgttcgccgtgccggtgacctggcgtcagcgcaccgagaactggtcctgggagctcggcgggtcggtgtcatggtcccattcgcgcacccagacgcaagcccgctatccgctgctgaacctgatcccgtccgactaccggcagcgcgccagcgagctgacggaggagggaagcagcagccatggattcggttacaccgccagagcgctggtggagcggcgggtgaccagcaactggttcgtcggcgccgcggtcgatattcagcaggcgaaggattacaccccgagccatgcgctgctttacgtccgctactcggcggccggctggcagggggatctggatatgccgccccagccgctggtgccctacgccgactggtag

SEQ ID NO: 213276 - DNA, 2007 bp, Klebsiella pneumoniae
ttgcgcgtcagccgttcacttacaatcaaacagatggcgatggtcgcgagcgtgtccatggcctttgtattggttttttgcactattttgctgtttcactttgtgcaacagagtcgctttaccacggccacgcagttagaaagtatcgcgcgatccgttcgcgaaccgctgtctgcggctattctgaaagccgatattccggaagcggaagccattttaagccgtatccagcctgctggcatcgtcagccgggcggatgtggtattgccgaaccagttccaggcgctgcggatgcgatttatccccgagcggccggtgccggtaaccgtcacccggctgtttgagctgccggtgcagatttcgctgcccatttattcgctggagcggccggccaacccgcagccgctggcctatctggtgctgcaggccgactcctatcgcatgtataaattcgtcatgagcgcccttgccacgttagtgactgcttacttacttctggtgctgatgctgacggtggcgctcacctggtgcatcaaccggctgatggttcgccctctgcggcgtatcgcccgcgagctgaacgatctctcccagcaggagcgtcttggccatcagctgaccctcccgcgcctgcaccatgacgacgagatcggtatgctggtgcgcagctataaccgcaaccagcagagcctggtccgccagcatgatgagctgtccatccagtcgacccgcttcccggtctccgagctgccgaataaagcctttttgctggcgatgctggagcagacggtggcccgcccgcagagcgccgcgctgatcgtcgtcgcctgtgaaaccctgcaggacgccgccggggtcctcaaggagagtcagcgcgaaatgctgctcctgacgctggtggagaagctgcgggccgcgatcccgccgcagatggtgctggctcaggtgagcgggtatgacttcgcgattctcgccgatggccttgccgaaccgtggcaggcggtgacgttaagtaagcaagtgctcactattattaatgagcgtttaccgctgcatgggctgcagctgcggccctacgccagcgtcgggatcgccatgttccacgccgggctcagcgccgagcagttttaccggcgcgcggtgtcggccgccgtcaccgcacgacgtaaaggcaaaaaccagatcgagttcttcgatcccgagcagatggaaaaggctcagcgccgcctgatggaagagcacgacattatgaccgcgctcgataaccagcagttcgcgatctggctgcagccgcaggtggcctgcgccagcggcgagatctgcggcgccgaggtactgctgcgccagcggcaggcggatggcagctggtcgctaccgccggcgctgattgagcgcattgagtcctgcgggctgattatcccggtcggctactgggtaatggaagaggcctgccgccagctggcggcctggcaaagccaggggattatgctgccgctgtcggttaatgtttcgctgctccagctgctggagcatgaccgcggcgaggagatgctgaagctgatcgcccgctaccgcatcgccccgggtaccctcatcctcgaggtgacggagagctgccggatggacgatccgcaggatgtgatggcccggttgcgcccgctgcgcgaggccggggtgcagattgcgctggatgattttggcatgggttatgccgggttgcaccagctacagcagatgaaggccctgccggtggatattctgaaaattgataaggtattcatcgatatgctgccggaggatgtcagcatggtgccggcgatgatccagctcgcgcgcggcctgtcgctgcgtatcgtggcggaaggggtggagaacgacgcccagcgccgctggttgcaagccgccggcgtcgaggtgctccagggccatctgttcggttgcgctttgccgcaggaggcattcagcgcgcgctatctctccccggttcgggaggatgaaaatttgtaa

SEQ ID NO: 213277 - DNA, 1287 bp, Klebsiella pneumoniae
atgaaaacctctatctttaaaagcctctatgtccaggtgctgacggccatagcgatcggtattctgctgggccatttttacccggaactgggcgcgcaaatgaaaccctttggcgacgccttcgttaagctgattaaaatggtgattgctccggttatcttctgtaccgtcgtgacggggatcgccgggatggaaagcatgaaagccgttggccgtaccggggcggtggcgttgctctatttcgaagttgtcagcaccatcgcgctgattatcggtctgattatcgtcaacgtggtgcagccgggcgccgggatgaacgtcgacccgtcgacgctcgatgcgaaagcggtggcggtgtacgctgagcaggctaaagatcaaggggtagtggcctttttactggatgtgatcccgggcagcgtcattggcgccttcgccagcggcaacattctgcaggttctgctgttcgccgtcctgtttggttttgccctgcaccgtctgggcagcaagggccagctgatcttcaacgtcattgaaagcttctcccaggttatcttcggcattatcaatatgatcatgcgcctggcgccgatcggcgccttcggagccatggcctttaccatcggtaaatatggcgtcggcaccctggtgcagctggggcagctgattatctgcttctatatcacttgtatcctgttcgtggtggtggtgctggggagcatcgcccgggccaccggcttcagcatcttcaaatttatccgctatatccgggaagagctgctgattgtgctggggacctcctcatcagaatcggcgctgccgagaatgctcgacaagatggagaagctgggctgccgcaaatcggtggtgggcttggtgatcccgaccggctattcgttcaacctcgatggcacctctatctatctgacgatggccgcagtctttatcgcccaggcgaccaacagccatatggatattttccatcagatcaccctgctggtggtgctgctgctctcctcgaaaggggcggcaggggtgaccggcagcggcttcatcgtgctggcggcgaccatctcggccgtcgggcatttaccggtggctggcctggcgctgatcctcggtatcgaccgctttatgtccgaagcccgcgcgctgactaacctggtgggtaacggcgttgccacggtggtggtggcgaaatgggtgaaagaactggatgccaaacagatggatgacgttctgaataaccgtgttccggcgaacaaaacgcacgaattatcctcttaa

SEQ ID NO: 213278 - DNA, 1503 bp, Klebsiella pneumoniae
atgcagggcacaacaattaaactcttaacgggcggtttgctgatggtagcggcggccggttatgtgcaggcagaagcgctccagcctgatccggcctggcaacaagggaccttagcgaatggtttatcgtggcaggtattggccacgccgcaacgtcccagcgaccgtatcgaagtccgtttgtccgtcaatattggctcgctgagcgaaagcactcagcagagcggtttcagccgctttattccccgcctggcgttgacgcaaagcggcagcctgccgacgatgcaggcgcgctctttatggcagcagagtattgacccgaagcgtcctctgccgccggccatcgtctcctacgattacacgatgtttaatctcagcctgcccaataaccgcaacgatctgttgaaagaggcgctgagctggctggcggacgccagcggtaaactggccattacgcctgaatcgatcaatcatgcgctgcagggcagcgacatggtggcgacctggccactggataccaaagagggttggtggcgctatcgcctgaaagggtccaccatgctgggccatgaccccgccgcgccgctgaagcagccgatcgatgtggcgcagctgaaagacttttatcaaaaatggtacacccccgacgccatgacgctgatcgtggtggggaatgtcgacagccgcagcgttgccgagcaaatcaataagacctttggcgatctgaagggcaagcgggaaacccccgcagcggtgccgaccttatcgccgctgcctaccgtgccggtcagcatcatgaccaacgcggtgcgtcaggacaaactgtccatcatgtgggatgcgccatggcagccgatccgcgactccgcggcgctgcagcgctactggcgtgacgatctcgcccgtgaagcgctgttctggcacgtgcagcagagtctgagcaaaaataacgtgaaggatattggccttggctttgactgccgggtgctatatcagcgcgcgcagtgcgccatcaacatcgattccccgggcgagcgcctgaacaacaacctgagcgtggtttcgcgcgagctggcgaaagtgcgggacaacgggctgcctcaggaggagtttgacgcgcttatcgctcagaaaagcctcgagctgcagaagctgtttgccacctatgcgcgcactgacaccgacattctgatgagccagcgcatgcgctccctgcagaatcaggtggtggacatcgcgccggagcagtaccagaagctgcgtcaggagttcctcaactccctgacggtggacatgctgaaccagtatctgcgccagcagctctcgcaggacatggcgctggtgctgcaacagccgaagggcgaaccggaatacaatatgaaggaactgcaggccacctgggaaaaactgatggcgccgaatccggcggccacggcggctagcggcagcgccgatacggttgacgcccacagcgaggccagcgacatcccgccggggcagtaa

SEQ ID NO: 213279 - DNA, 930 bp, Klebsiella pneumoniae
atgtctaaaaaaattgccgttattggcgaatgcatgattgagctgtcagagaaaaacggggccgttaaccgcggctttggcggcgataccttaaacacctcggtctatatcgcgcggcagacggatgccagcgcattgagcgtccactacgtcaccgccctgggaaccgatgcgttcagccagcagatgctcgacagctggcaacaggaaaacgtcaacaccgatcttatccagcggatggccgaccgcctgccggggttgtattacattgaaaccgatgacaccggcgagcgcaccttctactactggcgcaacgaggcggcggcaaagttctggctggagagcgatcgcgcggcggcgatttgcgaagagctggccactttcgactatctctatctgagcggcatcagtctcgccattctcagcccggccagccgcgacaagctgttcacgctgctgcgtgagtgccgcgccaacggcggcaaggtgatcttcgacaacaactatcgtccgcgcctgtgggccagccaggcggaaacgcagcaggtctatcaggaaatgctcgcctgcaccgatatcgcgtttctgaccctcgatgatgaagacgcgctgtggggagaaaaaccggttgctgaggtgatcgcccgcacccacgccgccggcgtggaagaggtggtggtgaagcgcggcgcggatgcctgcctggtctcggttagcgggcaaccgctgcgggaagtgccggccgtcaggctggccaaagagaaggtggtggataccaccgccgccggagactccttcagcgccggctacctggccgttcgcctgaccggcggcgatgccgaatccgccgccagacgcggacacctgaccgccagcacggtgatccagtatcgcggggcgatcatcccgcgggaagcgatgccgcagtaa

SEQ ID NO: 213280 - DNA, 2052 bp, Klebsiella pneumoniae
atgagcagaacccgtaaaacgttggttatcatcacaggaacgatactattgctgatcgttcttttctttatcgtgctggccacctttgactggaaccggctgaagccgacgatcaatcagaaagtgtccgccgaacttaaccgcccgttcgccatccgcggcgatctcggcgtggtctgggagcggcagccggacgagcgcggctggcgcagctggatcccgtggccccacgtacacgcggaggatatcgtgctgggcaacccgccggccattccccaggtgaccatgatccatctgccgcgggtggaggcgacccttgccccgctggcgctgctgagcaaaacggtgtacctgccgtggatcaagctggagcagcccgacgtacggttgatccgcctggcggaagacaacaataactggacctttcagctggcgggcgataagcgtacttcggacgacagcgcgccctccagctggtcctttcgcctcgataatattctctttgatcgcgggactatcgccattgacgacaagatcacccgcagcgatatcaccatcctcgtcgatcccctcggcaaaccgctgccgttcagcgaagtgaccggcacaaaggatcgccatagcgcggcgaaaccaggcgactatgtctttggtctgtcgctgaagggccgctacaagggccagccggtcaccggcaacgggaaaatcggcggcatgctggccctgcgcagcgcaagcgcccccttcccattgcagggcgacttccactccggtaacacccgggtagcgttcagcggcacggtcagcgacccgctcaacgtcggcggcattgacctgcggctaaaattcgccggcgactcgctgcgcgatctctatgacctgaccggcgtgctgctgccggagacgccgtcattctccaccgacggccgcctgcgcgccgactttacgcaaaaaaaccgcatgcgctttaactatcagaattttaacggccgaatcggcgatagcgacattcatggctccctgacctacaccaccggcaagccgcggccgaaactcagcggcgatatggagtcgaagcagctgcgtctggcggacctcgggccattaatcggcgtcgattccggcaaagggacgaagaaaagcgctgcgcgccaggcggatgaccggccgcagccggcgggtaaagtgctgccggcggaccgctttgaaaccgacaagtggcaggtgatggatgccgatgtgcgctttaagggccggagaattgagcacggcggcaccctgccgatcagcgatctgtcgacccatgtgattctggaggatggtgacctgcgcctgcagccggtgcgctttggcctggccaacgggtcgattgccggcagcgtacacctgcagggtgataaaaagccgctgcagggtgaggccaatctgcaggcgcgacgcctgaagctgaaggcgctgatgccaaacgtcgagatgatgcagaaaaccctcggcgagatgaatggcgacgtccagctgcgcggcagcggcaactcggtggcggccctgctcggcaacagcaacggtaacctgaagctgctgatgaacgacggactgatcagtcgcaacctgatggaaatcctcggtcttaacgtcggtaactacctgatcggccagatttttggcgatgaggaggttcgggtgaactgcgccgcggccaatatcgacgtaaccaacggcgtcgcccggccgcagatttttgccttcgatacagaaaacgcgctgatcaatgtgaccgggaccgccagcttcgcctccgagcagctggacctgaccatcgatccggaaagcaaaggctttcgggtgatcaccctgcgttccccgctgtatgtccggggcacctttaaatcgccgcaggcgggggtgaaggccgggccgctgattgtccgcggcgcggtagcggcggcgctggcaaccctggtgacgccggccgccgcgctgctggcgctgatctccccggcggagggcgatagcaaccagtgtcggaccattttgtcgcagatgaaaaagtag

SEQ ID NO: 213281 - DNA, 1323 bp, Klebsiella pneumoniae
atgcaagccacagccacaactctcgaaaacacgcaggaaaccgccccggtcaactcacgcaacaaggttgttgtcgcctcgctcattggcaccgccattgagtttttcgacttctacatctatgccaccgccgcggtcatcgtcttcccgcatatctttttcccgcagggcgatgccgctgcggccaccctgcagtcgctggccaccttcgccatcgccttcgtcgcccggccgatcggctccgcgctgtttggccacttcggcgatcgcgtcggccggaaggtcaccctcgtggcctcgctgttaaccatggggatctccaccgtggtgatcggcctgctgcccggctatgaaatcattggcattgtcgcgccgatgctgctggcgctggcgcgtttcggtcagggccttggcctcggcggggaatggggcggcgcagcgctgctggctacggaaaacgccccggcgcgcaagcgcgccctgtacggctccttcccgcagctgggcgcgccgatcggcttcttcttcgccaacggcaccttcctgctgctctcctggctgctgaccgaccagcagtttatggagtggggctggcgcgtgccgtttatcttctctgcggtgctggtgatcatcggtctgtatgttcgcgtctcgctgcatgagaccccggtcttcgccaaagtggcggcggcgaaaaaacaggtcaaaatcccgctgggtaccctgttgaccaaacacgtccgggtgacggtgctgggcaccttcatcatgctggccacttataccctgttctacatcatgaccgtctactcgatgaccttcagcaccggcgcggcgccgaatggcctgggtctgccgcgtaacgaagtgctgtggatgctgatgatggcggtgattggctttggcgtaatggtgcctgtcgccggcctgctggcggacgcttttggtcgtcgcaagagcatgattatcatcaccacgatgattattttgttcgccctgttcgcctttaaaccgctgctgggctccggcaatccgctgctggtcttcgccttcctgctgctgggcttaagcctgatgggactgacctttggcccgatgggcgcgctgctcccggagctgttcccgacggaagtgcgctacaccggcgcgtcgttctcctataacgtgtcgtcgatcctcggcgcttcggtcgcgccgtacattgccgcctggctgcagggtaactacggtctcgcggcggtcggcacctatctggcggcgatggcggcgctgacgctgatcgccctgctgctgacccacgagacccgccaccagtcgttgtga

SEQ ID NO: 213282 - DNA, 1032 bp, Klebsiella pneumoniae
atgacgccggaaaacgacgatcgacgcccgccacaggaaccggatacgcagccggagaaaagcaaaagcacgctcgaggccctcaatgacaccgccgtcgggcaaaaagccagccaggcgctgaagaccgtcaccggaacggcggccaaagtgcagcgcaacccggtgatcgcccatctgttgcgcgccgcagagcgcttcaatgaccggctcggcaatcagtttggggcggctatcacctatttctcgttcctgtcgatgatcccgatcctgatggtctcctttgccgccgccggcttcgtgctggcctggcacccaaccctgctgcaggacattttcgacaaaattctgcaaaacgtcagcgacccaacgctggcggcaacgttgaaaaacaccatcaacaccgcggtgcaacagcgcaccgccgtcggtctggtcggcctgctggtcgccctctattccggtattaactggatgggcaacctgcgcgaagcgatccgcgctcaatcgcgcgacgtctgggagcgccggccgcaggacgaggagaaaatctgggtcaagtacttccgcgatcttatctcgctgatcggtctgctggtggcgctgattattacgctgtccatcacctccgtcgccggctccgcccagcagatgattatctccgcgctgtatctcgacaacattgaatggctgaaacccgcctggcggctaatcggcctcgccatctcgatttttgccaactatctgctctttttctggattttctggcgcctgccgcgccatcgtccgcggcgcaaggccctgtttcgcggcacgcttatcgcggcgattggctttgaaatcataaaaatcgtcatgacctggacgctgccggcgctggtgaaatccccgtccggggcggcgttcggatcggtgctggggctgatggcctttttctatttcttcgcccgcctgacgctattctgcgccgcgtggatcgccaccgcggagtataaagacgaccggcggatgccgggcaaaacccaccgctga

SEQ ID NO: 213283 - DNA, 900 bp, Klebsiella pneumoniae
atggataaaattcatgcaatgcagttattcattcgcgtagcggacctggagagcttctcccgcgccgccgagaccctggcgctacctaagggaagcgtctcgcgacagattcaggccctggaaagccatcttggcgtgcggctcctgcaccgcaccacccgccgggtccagctcacccaggatgggatggtctactacgagcgggcgaaagatctgctgagcaacctcgacgaactggacggcatgttccagcacgatccggcgagcatcagcggccggctgcgggtggatatgccggtcggttttgctaaaaaaatggtgatcccgcatctgccgacttttttacagcagtatccgggcatcgaactggagctgagcagcagcgatcggctggtggacgtgatccgcgaggggtttgactgcgtggtgcgcgtcggcgcgctcaaagactcagggctgattgcccggccgctgggcaagctgacgcaaattaactgcgccagcccggactatctggcgcgttttggctatccgcaatccctggaggatctggcggatcatgccctgatccactacgccagcaccctcggggtccgtccccccggctttgaggtaatgatcgacggcgcggtgcgctgggtaaaaaccggcggcatattgacggtcaacagtacggaaacctatcaggcagcctgtatcgccgggctggggattattcaggtgccacgcaccggcgtgcgcgaggcgttacgcgccggcgacctgattgagatcctgccccagtaccgcgccgagccgctgccggtctcgctgatctacccgcaccggcgcaatctctcccgccgggtaaatctgtttatggagtggctgggcgggcttatgaaagcgtatgtcgattga

SEQ ID NO: 213284 - DNA, 759 bp, Klebsiella pneumoniae
atgacacaacgtatcgctttagtgaccggcggcagccgcggtctgggtaaaaacgccgcgttgaagctggcggcaaagggaaccgatattcttttgacctatcacagcaaccgccaggcggccctcgacgtggtggcggaaatagagcaaaaaggggtcaaagcggcagcattagcgctgaacgtcggcgattccacaacatttgacgcattcgccagcgaggtggcgcaggtgctggcgcagaagtggggacgcacaacctttgattatttactgaacaatgccgggatcggactcaacgcgcccttcgccgagaccagcgaagcgcagtttgacgagctgatgaatatccagttcaaagggccgtttttcctgacccagcgtctgctgcctctcctgcaggatggggggcgtatcctcaatgtctccagcggcctggcgcgctttgccctgccgggctatgcggcctacgccgcgatgaagggggcgatggaggttctgacccgctatcaggcgaaagagctgggcggacgggggatatcggtgaacatcatcgcgccgggggccattgagaccgactttggcggcggggaggtgcgcgataacgccgaggtgaatcggcatatcgccgcccagactgcgctggggcgcgttgggctgcctgatgatatcggcgacgccatcgccgccctgctcagcgatgagctggcgtggatgaacgcgcagcgtgtggaagtctcgggtgggatgttcctctga

SEQ ID NO: 213285 - DNA, 534 bp, Klebsiella pneumoniae
atgcctgaacttctgacgccgcgcctgcgctgctcaccgctgcagctggacgactggtcgttttttctttccctgcagcaggatccgcaggtcatgctctacgtcgccgatccccgaccgcaggcggccatccgcgaggcgttcgattcgcggctgccgccgtggacgcccggggatgaacactggctgtgcctggtggtgcgcgacaggctgacccataccccgctcggcctgaccggttaccagcatcatcagcgcgacattgccgaggttggctttctcttcgccccggcggcgcagggccggggctacggctacgaatcgctgcgcgcgctgtgcgactacgcctttaccaccggcggcgtccgccgcctgaccgccagcgtcaccgccggcaacgaggcgtctaagcagttactgctcaaagccggcttccggctggagggagagctgcgggaaaactactggctcaacggacgctggcacaacgactggctgttcggtcggctgcgtggggagggcgatgcgccgtag

SEQ ID NO: 213286 - DNA, 1653 bp, Klebsiella pneumoniae
atgttcagccagaaattacgccacgttgaagacgacgagttaaggatcgacatcgatccctgctacgaagccgatccgtacgaattaaagctggatgagatgatagacgctgaaccggagcctgaggtgatcgaggggcttccggcgtccgatgccctcaccccggcggatcgctatcttgagctgtttaccaacgtgcagaaatcacgcattttcgcggacagcaaaaccttccccgactgcgcgccgaaacacgatccgctggacatcctgcggaactaccgcaaggtcaaacgccagcccgacttcgatctgcggcagttcgttgaggacaacttctggctgccggagagccagagcgacatctatatctccgaccccagcctgaccctgaaagaacacatcgacaagctgtggccggtgctgacccgcgagcctcaggatcatatcccgtggtcatcgctactggcgctgccgcaggcctacatcgtgcccggcggtcgctttagcgaaacctattactgggactcttatttcaccatgctggggctggcggagagcggccgggaagatttgctgaaatgcatggccgataactttgcctggctgattgaaacctacggccacattccgaacggcaaccgcacctactacctcagccgctcgcagccgccggtgttcgccctgatggtcgaactctttgaagaggatggcgtgcgcggcgcgaagcgctatctggaccatctgaagatggagcacgccttctggatggacggcgccgagtcgttgatcccgcaccaggcgtatcgccacgtggtgcgtatgccggatggctccctgctcaatcgctactgggacgaccgtgacacgccgcgggatgagtcgtggcgcgaagacgtggagaccgcccgacactccgggcggcccgccaatgaagtgtaccgcgacctgcgggcgggcgccgcgtccggctgggactactccagccgctggctgcgggatatcacgcggctggccagcatccgcacgacgcagtttatccccatcgacctgaacgccttcctgttcaagctggagacgaccattgccaacctctccggcctgaagggcgatcgcgagacggaggcggccttccgccagaaggcccaggatcggcgggcggcggtcaaccgctatctgtgggatgatgagaacggctgtttccgcgattatgactggcgccgtgaacagctggcgctgttttccgcagccagtatcgtcaccctttacgtcggcctggcgacccacgaacaggcagaacgccttgccgatgcggtgcgggcccgcctgctcacccccggggggatcatggccaccgaatacgaaagcggtgagcagtgggataaacccaacggctgggcgccgctgcagtggatggcgatccagggatttaaacgttacggccaggatcctctgggagatgagattgcctggagctggctgcagacggtcaaccacttttacaagcagcatcacaagctgattgaaaaataccatattgccaccggcgtcccccatgagggcggcggcggggagtatcccctgcaggatggctttggctggaccaacggcgtggtgcgccgactgattggcctgtacggtgagccaacctag

SEQ ID NO: 213287 - DNA, 1194 bp, Klebsiella pneumoniae
atgtgtatagttgattccagcctgtttgccgaaaaggaacccgacatgttgaccccttttaccgttttgatgcctgcaaatattcgttttggccgtggtcaggccgagagcgccgccccctggctggcgcaacagggcggcccaatcctgctggtgcatggcgccagcccgcagcgggcggcgtttctccgccagcagctggagacgctgcagcttgcggtcacgacgctggcgataagtcgcgaaccctggcttagcgatatcgagcagggcgtccagctggcgcgcgagaaagggatcagagcggtggtcagcctcggcggcggcgcggtgattgacgccggtaaggcgattgcggcgctggtccccgccgccggcccggtgatcgactatctggaggtggtgggaacgggccgtcagctggaagccagtcccctgccgttcgtggcgatccccaccaccgctggcacgggcgcggaggccaccaaaaatgcggtgatcaacgttccggaacagcagcggaaagtgagcctgcgcgacgaccgaatgctgcctgacctggcgattgtcgacccggcgctaaccgacaacgcgccgcggagcatcaccctgagctccggcctcgacgccctgacccaggtgatcgagccctggctctgcagccgggccactcccttcaccgatgctctctgccagcaggcgatcccgcggggaattcgcgcgctaaaaatcctgatggaacaagagtgtccggccagccgcgacgagatggcctgggtcagcctgtgcggcggactggcgctggcgaacgccgggctgggggtgatccacggcctcgccggcccgctgggcggcctgagccgcgcctcgcacggcgccctatgcggcagtttgttgccgtttggcctggcgctcaatgagtcgcagatcaacgaccctggcctgcgccagcgcgttaacgatgtccgccgctggctggccgacgggctggacgtccctgtggatcgggtctgggacagtctgcgggaatggagccatcgcgctggccttggcaccctgcgcgacctcggcgtagcgcgcgatgcgctggaaccggcggcgctggccgccagcacctcctcatcgatgaaggccaacccggtcagcctgagcggcgaacagctgctggagatgctggaggcggcgtgggagtga

SEQ ID NO: 213288 - DNA, 624 bp, Klebsiella pneumoniae
atgctaacaattctgggtaaacgctcttcaatcaatgtacggaaagtgttgtggacctgcgaggaagccgggctggcgtaccagcaggaagattacggcagcggatttaagcccctggatacgcctgagtttcagcgtctgaatcctaacagcctggtgccggtgctactggacgatgacttcgtgctctgggagtcgaacagtatctgccgctatctggcgcgcaaagcggagcgctgggatctgctgcccgccgaaccgcagcccgccgccgaggtggagcactggatggactggcaggcgaccgagtttaacactgcctggcgccatgcttttatggggctggtgcgtaaagatccgcgctttcaggatccggtggcgattaaagagagtattgccgcctggacccactgcgtgcgcattgttgaagcgcagctgcagcgtaccggggcgtggatagccggcgagcgcttcaccctggccgatatcgtgctggggctgtcggtgcatcgctggaaaatgacccctttcgcccatccggagatgccagccgtggagcgctggtatatggcgctcaatcagcgcccggcgtttatgcgccatggcaataacggcgtggcctga

SEQ ID NO: 213289 - DNA, 1353 bp, Klebsiella pneumoniae
atgagcaaacattatgattacctcgccatcggcggcggtagcggcggtatcgcctcaattaaccgcgcggccatgtacggccagaagtgcgcgctgattgaagccaaagagctgggcggcacctgcgtcaacgtcggctgcgtgccgaaaaaggtgatgtggcatgcggcgcagatccgcgaagcgattcatctttacggcccggactacggtttcgataccaccatcaaccattttgactgggagaagctggtcgccagccgtagcgcctatatcgaccgtattcatacctcttacgacaacgtactgggtaagaataaagtcgacgtgatcaaaggcttcgcgcgctttgtcgatgcccacaccgtggaagtcaacggcgagatcatcaccgctgaccatatcctgatcgccaccggcggccggccgagccacccggatattccgggcgtcgaatacggtattgattccgacggtttcttcgaactgccggcgctgccgaagcgcgtggcggtggtcggcgcaggctatatcgccgttgagctggcgggggtgattaacggcctcggcgccgaaacccacctgttcgtgcgcaaacacgcgccgctgcgcagtttcgatccgctgatcgttgagaccctggtggaagtgatgaacgccgaaggcccgcagctgcataccaatgcgatcccgaaagcggtggtgaagaatgccgacggcagcctgacgctggagctggaagatggccgcagccagaccgttgactgcctgatctgggcgattggccgcgaaccggcgaccgacaacttcaatctggcggcaacgggcgttaaaaccaacgataaagggtacatcatcgttgataaattccagaacaccaacgtgccgggcatctacgcggtgggcgataataccggcgccgttgagctgacgccggtcgccgtggccgcaggccgtcgtctctccgaacgcctgtttaacaacaaaccggaagagcatctggactacagcaacatcccgaccgtggtcttcagccatccgccaatcggcaccgtcggcttaaccgagccgcaggcgcgcgagcagtacggcgacgacgccgtgaaggtctacaaatcttccttcaccgcgatgtataccgccgtgacctctcaccgtcagccgtgccgcatgaagctggtgtgcgtcggcccggaagagaagattgtcggcatccacggcatcggcttcgggatggatgagatgctgcagggctttgcggtggccctgaagatgggcgccaccaaaaaagacttcgacaacaccgtcgccattcacccgacggcggcagaagagttcgtcaccatgcgctaa

SEQ ID NO: 213290 - DNA, 843 bp, Klebsiella pneumoniae
atgctcagttatcgccacagctttcacgcaggcaaccacgccgacgtcctcaaacacaccgttcagagcctgatcattgaatcactgaaagagaaagaaaaaccgtttctctacctggacactcacgccggcgcgggccgctatcagctgagcggcgagcacgccgaacgtaccggcgagtatcttgaaggcatcgcccgcatctggcagcaggacgacctgccggcagagctggagccgtatatttcggtcgtagaacacttcaaccgtaacggccagctgcgctactacccgggctcgccgctgattgcccgccagctgctgcgcgagcaggacagcctgcagatgaccgagctgcacccgagcgacttcccgctgctgcgcgctgaattccagaaagacagccgcgcgcgcgtcgataaagccgatggctaccagcagctgaaagccaagctgccgccggtatcgcgccgcggtttgattctgatcgacccgccgtacgaaattaaaaccgactatcaggcggtggtcaccgggattaacgaaggctacaaacgcttcgccaccggcacctacgccctgtggtacccggtggtgctgcgcgcgcaaatcaaacgcatgatcaaagagttagaagccaccggcattcgcaaaatcctgcagattgagctagcggtgcgtccggacagcgaccagcgcggcatgaccgcctccgggatgatcgtcatcaacccgccgtggaagctggagcagcagatgaataacgtgctgccgtggctgcacagtaaactggttccgaccggcaccggccacgccaccgtcagctggatcgtaccggagtaa

SEQ ID NO: 213291 - DNA, 1272 bp, Klebsiella pneumoniae
atgaaaaggcaactctcgctgctggccgtcgcgctgctgctggcgcaaccggttctggctaaagacatcccgctgaacagggcggcggccctcgccaatagcgtgacgccggctgcctccagccaggcgtatgacgatcttgagcaacaggcgctggcgcagctacgccacgctctgcagggggatgccgccacgctgacccgcgatcggctggcgcacaccaaacaaaaccaaactcaggccgataccgcctggctgaaggccagcggctatgacttccagacccgggccaaccagcaggcgggcattgcgctgctgtcggcgttcagtaccctgccggagaccgtcgtgaagcagaatctggcgacagtgaccgccatcaatcgcgacgccgtgcagaccacgcgccgtcaggcgctggccgatgcggaaggcattagctacctctacttcctcagcgacgcgctggggccacgccttggcaaagcgtttctgaccgcctatgaccagggcgcgctggggaaagcggcagcgttgatcaaagcctcggaggtcagcaccggcgaggcgaaaaagcacttcaacaatccgcggccgtttctggtgcagggcaacaccattcacctggtgcctgacgatgtggtggtgaaagataaccagccctacaccgccgacggcggctcgttccccagcggccacaccaacaccggctataccgatgcgctgctgctggcggcgatgatcccggagcgctacgacgcgctggtggcgcgcggcgcccgctatggcttctcgcgcatcgtgctgggcgtccactacccgctggacgtgatcggctcgcgaatggtggccgagcgcaacgtggcccactatcttaacgatccgcactaccgggtattatttaacgaagcccgcgatcagctgcgcgccgcgctggcgaaggcctgcggcacatcgcttgccgagtgcgcgaagagcagcgtgaaagacgatccctggcgcgatccggcgatgcgtgatttctctcgcttcaccatgacctacgatctgccgcagcagaagggtccgcagccgcgtttacaggtgccggagggggcggaagtgctgctggaagatgccctgccgcatctgtcagctgcccagcgtcgggcgctgatggtcaacaccgcgctgccggcgggttacccgctatccggcgccacccccgaacagcaattctggcagcggctgaatctgtcggcggcctgggagatggcgcaaaaaaggcattaa

SEQ ID NO: 213292 - DNA, 2043 bp, Klebsiella pneumoniae
atgaccaatccattattgacgcctttctccctgccgcctttttctgcgatcaaaccagagcacgtggtccctgcggtcaccaaagcgctggaggattgccgggccgcggtggaaagcgcggtggcgcatggcgcgccgtatagctgggaaaatctttgccagccgctggcggaagtggacgatgtgctgggacgcatcttctcgcctgtcagccatctgaattcggttaaaaacagccctgaactgcgtgaggcctacgaacagacgctgccgctgctctccgagtacagcacctgggtcggccagcatgaaggcctgtataaagcctaccgcgacctgcgcgatggcgataactacgccacgctgaataccgcgcagaaaaaagcggttgataacgcgctgcgcgattttgaattatccgggattggcctgccgccggaggcgcagaaacgctacggtgaaatcgccgcgcgcctctctgagctgggcaaccagtacagcaacaacgtcctcgacgccaccatgggctggaacaagctggtgaccgatgtcgccgatctggccggcatgccggaaagcgcgctggccgccgctcaggctcaggcgcaggccaaagagcaggaagggtatctgctgaccctggatattccgagctatctgccggtgatgacctactgcgataaccaggcgctgcgcgaagagatgtatcgcgcctattccacccgcgcctccgatcagggcccgaacgccgggaaatgggataacagcccggtgatggcggagatcctcgccctgcgtcacgagctggcgcagctgttgggctttgacagctatgcgtataaatccctcgccaccaaaatggcgaaggatccgcagcaggtgctcgactttctcaccgacctggcaaaacgcgcccgtccgcagggcgaaaaagagctggcccagctgcgcgccttcgccaaagccgagtttggcgtcgatgagctgcagccgtgggacattgcctactacagcgaaaaacagaagcagcacctctacagcatcagtgatgagcagctgcgcccctatttcccggaaaacaaagccgttagcggcctgtttgaagtggttaagcgcatttacggtattaccgctaaagagcgtaccgatgtcgatgtgtggcatccggaagtgcgcttcttcgagctgtatgacgaacacaacgagctgcgcggcagcttctatctcgacctgtatgcccgcgaacataagcgcgggggggcgtggatggacgactgcgtcggccagatgcgtaaactggatggttccctgcagaagccggtcgcctacctgacctgtaacttcaaccgcccggtcaacggcaagccggcgctgttcacccatgacgaagtgatcaccctgttccacgagttcggccacggtctgcaccatatgctgacccgcatcgacaccgccggggtttccggcatcagcggggtgccgtgggatgcggtcgagctgccgagccagtttatggagaactggtgctgggagccggaagcgctggcgtttatctccggccattatgaaaccggtgaaccgctgccgcaggagctgctggagaaaatgctggcggcgaaaaactaccaggcggcgatgtttattctgcgccagctggagttcggcctgttcgatttccgcctgcatgcggagtacaaaccggagcagggggcgaaaatccttgagaccctggccgagattaaaaagcaggtcgccgtggtgccggggccgacctggggccgcttcccgcacgccttcagccacatcttcgctggcggctatgcggcaggttactacagctacctgtgggccgacgtgctggcggcagacgccttctcacgcttcgaagaagaggggattttcaaccgtgaaaccggtcagtcgttcctcgacaatatcctgagccgcggcggttccgaagagccgatggagctgttcaaacgcttccgcgggcgcgagccgcagctggacgcgatgctggagcattacgggatcaaaggctga

SEQ ID NO: 213293 - DNA, 753 bp, Klebsiella pneumoniae
gtgaagatctgcttaattgatgaaacaggcgccggtgacggcgccttatctgttttagccgcccgctgggggctggagcaggatgacgataacccgatggcgctggcgctgacgacggagcatctggagctacgcaagcgcgatgagcccaagcttggcggcatcttcgtcgatttcgtcggcggggcgatggcccaccggcgcaagtttggcggcggccgcggcgaagcggtggctaaagcggtgggtattaaaggcgattacctgccggatgtcgtcgatgcgacggccgggctgggacgcgatgcctttgtgctggcgtcagtcggctgtcgcgtgcggatgctggagcgtaatccggtggtcgccgcgctgctcgatgatggcctggcgcgcggctatgctgacgcggaaatcggcggctggctgcaggagcggctgcagctgatccacgcctccagcctgacggcgttaaccgatatcaccccgcgcccgcaggtggtgtacctcgatccgatgttcccgcataagcagaaaagcgcgctggtgaagaaagagatgcgcgtctttcagtcgctggtggggccggatttagacgccgatggcctgctggccccggcgcgccagctggcgaccaagcgggtggtggtgaagcgcccggattatgcgccgccgctggcggaagtcgccacgccgaatgcggtggtgaccaaagggcatcggtttgatatttacgccggtacgccggagtaa

SEQ ID NO: 213294 - DNA, 1473 bp, Klebsiella pneumoniae
atgaatacaactgcacctacgggcttgctgcagcaacctcgtccgttctttatgatcttctttgtggagctctgggaacgttttggctattacggcgttcaggggatcctggcggtcttctttgttaaacagctgggcttctctcaggaacaggcctttatcaccttcggcgccttcgcggcgctggtttacgggctgatctccatcggcggctacgtgggcgaccatttgctggggaccaaacgcacgctggtgctcggcgccattgtgctggctatcggctactttatgaccgggatgtcgctgctgaaaccgcagctgatctttatcgctctcggcaccatcgccgtcggcaacggtttgtttaaagccaacccggcgagcctgctctccaaatgctatccgccgaaggatgcccgtctcgacggggcatttaccctgttctatatgtcgataaacatcggttcgctgctgtcgctgtcgctggcgccggtgatcgccgaaaaatttggctacgcggtaacctataacctgtgcggcgcggggctgattatcgcgctgctggtctacttcgcctgccgcgggatggtgaaagatattggctccgagccggatcatcgccccctcagcctacgcaatctggcgctggtgctggccggtacggtggtaatgatttttctctgcgcctggctgatgcataacgtgatgatcgccaacctggtgctgattgttctgtcggtcgtggttattgcgttctttttccgtgaggcgtttcgcctcgataaaactggacgcaacaaaatgttcgtcgcctttattctgatgatcgaggcggtgctgttttacattctgtatgcccagatgccgacctcgctgaacttcttcgccatcaacaacgtccatcatgagatccttggctttaccatcaacccggtcagcttccaggcgctgaatcccttctgggtagtggtcgccagcccggtgctggcggcgatctacacccatctcggtcataagggtaaagacctgaccatgccggtgaaatttaccctcgggatgttcctctgcgcgctgggcttcctgaccgccgcggcggccgggatgtggttcgccgacgcccaggggttaacctcgccgtggtttattgtgctggtttatctgttccagagtctgggcgaactgttaatcagcgctctggggctggcgatggttgccgcgctggtgccgcagcatctgatgggctttattctggggatgtggtttctgacccaggccgccgctttcctgctgggcggctatgtggcgacctttaccgcggtgccggaaaacatcaccgacccgctgcagaccctgccggtctacaccaatgtgttcagtaaaattggcctggtgacgctgggcgtcacggtggtaatggcgctgatggtgccgtggctgaaccggatgattaataccccggccagcgccgaataa

SEQ ID NO: 213295 - DNA, 438 bp, Klebsiella pneumoniae
atggcttacaaacatattctgattgcagtagacctgtccccggagagtaaagtactggttgaaaaagccgtttctatggcccgcccgtataacgcgaaagtctccctgatccatgtggatgtgaattactccgacctctacaccgggctgattgacgttaacctcggcgacatgcaaaaacgcatctccgaagagacccatcacgcgctgaccgagctctcgaccaacgcaggctatcccatcaccgagaccctgagcggcagcggcgaccttggccaggtgctggtcgatgcgattaaaaaatacgatatggacctggtggtctgcggccatcatcaggacttctggagcaagctgatgtcctctgcccgccagctgattaacaccgttcatgtcgacatgctgatcgtcccgctgcgcgacgaagaagacgaataa

SEQ ID NO: 213296 - DNA, 336 bp, Klebsiella pneumoniae; identical to SEQ ID NO: 137486

SEQ ID NO: 213297 - DNA, 1497 bp, Klebsiella pneumoniae; identical to SEQ ID NO: 137485

SEQ ID NO: 213298 - DNA, 1149 bp, Klebsiella pneumoniae
atgttttgcgcagcgcaggcgggccagcttggctgccgcgtcctgctgctggataacggcaaaaagccggggcgaaaaattctgatgtccggcggcggccgctgcaactttaccaacatgtatgttgaaccggcggcctatttgagccaaaacccgcatttttgcaaatctgccctggcgcgctacacccagtgggactttatcgagctggtcggtaaatacggcatcgcctggcatgagaagaccctcggccagctgttttgcgatgattcggcggagcagatcgtcaatctgctgctcgcggaatgtgaaaagggcggcgtggagatccgtctgcgcagcgaaatcctcagcgtggagcgcgatgaacaaggctaccggctacaggtgaacggcgaaacgctggtgaccaaaaagctggtgatcgcctccggcggtctgtcgatgccggggctcggcgcctcgccgtttggctataaagtcgccgagcagttcggcctgaaggtgctgccgacccgcgcggggctggtgccgtttaccctccacaagccattgcttgagcagctgcaggtcctctccggcgtgtcggtgccgtcgaccattaccgccgagaacggcactctgtttcgcgaaaatctgctgttcacccaccgcggcctttccggaccggcggtgctgcaaatttccagctactggcagcccggcgagttcgtcaccgttaatctgctaccggactgcgatcttgatgacttccttaacgagcagcgcagcgcgcatcccaaccagagcctgaagaacaccctggcgatgcagctgccgaagcggctggtggagtgtctgcagcagctgggacagatacctgatgtgacgctcaagcaactgaacgttcgcgatcagcagacgctggtggagacgttaaccgcctggcgcgtgcagccgaacggcaccgaaggctaccggacggcggaggtgaccctcggcggcgtggacaccaacgaactctcgtcgcgtactatggaggcgcgtaaggcgccgggtctctactttatcggcgaagtgatggacgttaccggctggctcggggggtataacttccagtgggcgtggtcaagcgcctgggcctgcgcgcaggcgctggtggaagggtaa

SEQ ID NO: 213299 - DNA, 1014 bp, Klebsiella pneumoniae
atgtcttccattcaactctgcgccgcccatcaggcgacctctggcttcgacggcgatgcgatcgtccagtacatgcgtaccgattttattacgctgcaggaacatctcagcgttcatgaggcgcgcgaacactttatctcccagctggccagcgatgatattcccgggcaggtgtttgtcgtcgccggcaagaagctgcgtggcagcctgtcggtcaaaaagctactccaggaaacggatatcaaccagtctatccgccacctgatggacagctgcctgtttcgcgtcaaacctgacgatgagcgccagcaggtgattgccgagctcagcgagcgcggcctcgacctggtccccgtcgtcgataaaggcgagctggtcggctgcctgatggagaaggagatcgcccatctgctggaggatgacgtcaccgaagatgctcagctgcagggggcaacgctgccgctggaaaaaccgtacctcgagatcagcccctggacgctgtggaaaaaacgctcggtgtggctgctgctgctgttcgtggccgaagcctacaccagcagcgtactgcagcatttcgaagaagccctggaatcggccatcgcgctggccttctttattccgctgctcatcggcaccggcggcaacagcggaacgcagatcacctcgacgctggtgcgctcgatggcgctgggggaagtgcgactgcgcgatatggggcgggtgatccgcaaagaggtatcgacctcgtttctgattgccctgaccctgggcctggcgggctgcctgcgcgcctggatgatggggattggcatggaaatcacgctcatcgtcagcctgacgctggtgtgcattaccctgtggagcgcgattgtctcctcggtcattccgatggtgcttaagcggatcggcattgacccggcggtagtttccgcgccgtttatcgccacgctgattgatggcaccgggctaattatctatttcaaaatcgcccagtattttcttgggttgaactga

SEQ ID NO: 213300 - DNA, 399 bp, Klebsiella pneumoniae
atgcagcgcgtaaccctgacccttgatgatgacctgctggccgccctcgatgcgctcagcgcccgccgcggctaccacaaccgttcggaggcggtacgcgatattctgcgcgacgccctcaaccaggatcctccgtcgccggaatcacggcgcgggtatgccgtcctgtcgtacgtgtatgaacatgaaaaacgcgaactggcgagccggctggtggccacccagcatcatcatcacgatctctccgtcgccacgctgcatgtgcatatcagtcatgacgactgcctggagattgcggtgctgaaaggtgatatggccgaggtacagcattttgccgacgacgtgattgcccagcgcggcgtgcgccatgggcatttgcagtgtttagcggatgattaa

SEQ ID NO: 213301 - DNA, 792 bp, Klebsiella pneumoniae
atgaatttactcagcgtcaccggggtgagtcacgattatcctcaccacggcagagtcctgcacgagatacaactcgccatcgcccccggcgaaacggtggccctgctcggacgcagcggctgtgggaaaagcaccctggcgcggatgctggtgggtctggaaacgccgcagcacggcgatattgcctggcgcggcgcgccgctggccgccctgaagggcgaggccatcggcgccttccgccgcgatattcagctggtatttcaggatgccttcagcgcggtgaatccgcgcaaaacggtgcgcgagatcgtcagcgagccgctgcgccatctgttgtgcttgccgcgtgaggcgcgtgcgcggcgggtggaagagatgctgctggccgtcgacctcgcgccgtcgctgctcgataagcgcccggcgcagctcagcggcggacagctgcagcgcgtctgcctggcacgcgccctggcggtacggccgcagctgttgatccttgatgaagcggtttcaaatctcgatctgctgctgcaggcggagattatcgccctgctgaagcgtctgcaggcgcagtttgacaccgcctgcctgttcatcacccatgacctgcggctggtggagcgcttttgccagcgagtgctggtgatggagcacgggcgcatcgtcgaaaccgcaacggttagtctaccgctacgcctgcgctctcctgccggacaggcgctccagcaggcggtgctccccccttttcctgccactctgcttaacgaggccatgccatgcagcgcgtaa

SEQ ID NO: 213302 - DNA, 765 bp, Klebsiella pneumoniae
atgccgcagaagatccaactggaacagatctcgcttaccgctgaccgaccgctggtcagcgacgtctccttcaccctgcgccgcggccaggtgctggcgctgctcggcagcagtggttgcggaaaatcgctgacctgcgccgccgcgctgggcctgctgccgcccggcgtcaggcaaaccgccggccgggtgcttctcgacggcattccggtgcacggcgaacagctgcgcggggcgaccatcgccaccatcatgcagaacccgcgcagcgcctttaacccgctgcagaccatggccgcgcatgcccgggaaacctgccgggcagcgggtcgtgaaacgaatgacgccgtgctgctggcagcgatggaggaggtcggtctggacaatccgcgggcgctgctgaagcgctacccttttgaaatgagcgggggcatgctgcaacggatgatggtcgctctcgccctgctcagccgcgcgccctttatcatcgccgacgagccgacgaccgatctcgatgccatcgcccaggcgcgcatcctcgacctgctggcggatattgtcgccaggcgcggtctgggactgctgctggtgacgcatgacatgggcgtcgtggcgcggctggcgcatcacgtaacggtgatggagaacggtcgcctcgttgaacactgcgatgtgaatacgctatttagcgccccgcggcacccgctcagccagcgcctgctggccgcgcatctggcgttatacggtctggagaaaacaccatga

SEQ ID NO: 213303 - DNA, 834 bp, Klebsiella pneumoniae
atgagagggctacaaagttttcgctggccggtaaaactggccatgctggttatcgcgctgctggcggtcatcgccatcggcagcggctggtggctgccctgggatccagcggcgattgaccttcagcagcggctgctgccgccgggcgcagcgcactggctcggcaccgatcatctcggccgggatattttctcacgcctgctggccgccacccgcgtttcgctgggggcggtgatggcttgtctgctgctggtgctgctgatcggcctggcggtcggcggctgcgccggactgctgggcggccgcgccgaccgcggcctgatgcgcatcgccgaactgtttatgacttttccgacctcgatcctgtcgttttttatggtgggagtgctgggtaccgggctgaccaatgtgatcctcgccattgcgctgtcacactgggcctggtacgccagaatggtgcgtaacctggtggtttccctgcgccagcgcgaatttatcctcgccgcccgtctgagcggcgccagccagtggcggctgttcagcgaccatctggccggcgcggtgatcccctcgctgctggtgctcgcctcgctggatatcggccatatgatgcttcacgtagccggcatgtcgttcctcggtctcggcgtcagcgcgccgacggcggaatggggggtgatgatcaacgacgcccggcagtatatctggacccagccgctgcaaatggtctggccggggctggcgctgttcatcagcgtgatggcttttaacctgctgggcgacgcgctgcgcgatcgtctcgatccccacctgatcgcggagcatagccactga

SEQ ID NO: 213304 - DNA, 945 bp, Klebsiella pneumoniae
atgctacgctatattttacgccgcctgctgctgctgatcccgctgctgctcgccgcctccgccatcatctttctgctgctgcggctccgcgccggcgacccggcgctggattatttacgcctgtcgaacctgccgcccactgaagagatggttgcctcgacccgcgagctgctggggctcaaccagccgctggcaatgcagtatctgcactggctatggcgggcgctgcacctggatttcggtctctcctatgccacccagcgcccggtgctggacgacctgctgcacttcctgccggccaccctgctgctcaccggcgcggcgctggcgctgatcctcgtcacctccctgccgttgggcatctgggcggcgcgccatcgcgatcgcctgccggactatatcgtacggctgattgccttcctcggcgtctcaatgcccaacttctggctggcctttctgctggtgatgctcttttccgtgcatctgcagtggctcccggcgatggggtatggcgactggcagcacctgatattgcccgccgtctccatcgcctttatgtcgctggcgatcaacgcccgcctgctgcgcgccagcatgctggacgccgccagccagcgtcacgtgatatgggcgcggctgcgcggattgagcgcgcgccaggtggagcgccgacatatcctgcgcaatgccaccctgccggtggtgaccgccatgggcatgcacattggcgagctgatcggcggcaccatgattatcgaaaatatctttgcctggcccggggtcggccgctacgcagtttccgccattttcaatcgcgattacccggtgatccagtgctttaccctgatgatggtgacggtgttcgtgctggctaatctggcggtagatgtgcttaacgcggcgctcgacccgcgcctgcgccgccacgaggaggtgagcgcatga

SEQ ID NO: 213305 - DNA, 1569 bp, Klebsiella pneumoniae
ttgtctattatccgcctcaccctgctggcgctgctcgcctgcgtccctctgctggctcaggccgcgccgtaccagctcaccaccgcctggccggttaacgtcggcccgctgaatccccatctctatacgcccaaccagatgtttgcccaaagcatggtctatgaaccgctggtgaagtatcaggctgacggcagcgtacagccctggctggcaacccgctggcgtcactccgccgacggcaaaacctggtggttcaccctgcgcgacgatgtggccttctccaacggcgaaccgtttaatgcccaggccgcggcggccaattttcgggcggtgctggccaaccgccaacgccacgcctggcttgagctcgccaaccaaataaccgacgtgcgggccctcagcgccaccgagctgcagatcaccctgaaaagcgcctacgcccccttactgcaagagctggccctgccccgcccgttccgcttcatcgccccctcgcagtttatcgatggcggcaccgccaggggcattaaagccccgatcggcaccggcccgtggcggctggcaagctcgcagctcaatcagcgcgatgtgctggtgcgcaatgagcgctactggggtcgcaaacccgcgctacagcaaatcaccatcaaggtgatccctgacgccaccagccgggcggtggcgttcgaaaccggagaaatcgatatgctctacggcgatgaagggctgctgccgctggacaccttcgaacgctttcgccatcaccccggctacgtggctcgtctgtccgccccggcggagacggtaatgctggcgctaaacgccagccagggcccgacccgcgagcaggcggttcgtgaggcgctcaactacgccgtcgataaacagacccttgtcgatagcgtgttgtatggcacccagcaggttgccgacaccctgtttgccccctccgtcccttacgccccgcaggatctgacgccgcgccgttacgacccgacaaaagcccgcgccctgctggaacaggccggctggcagcagctggagggccagccctggcgacaaaaagccgggcaaccgttggcgattgagctggcgtttattggcaccgacgcgctggctaaatcgatggccgaaattattcaggccaatctgcggcaggtcggcgtgcaggtcaccctggtgggcgaggaggaaagcagcatttacgcgcgccagcgcgaaggccgcttcggcatgatcttcaatcgcacctggggcgcgccctacgatccgcatgcctttttaagctcgatgcgcgtcccgtcgcatgcggattaccaggcccagcgcggcctgccagacaaggcactgattgataaagagattagtgaagtgctgaccaccggggacgaggcgcagcggagaaaactgtaccatgatgtgctgacccgtctgcatcaggacgcggtgtatctgcccatcagctatgtctcgctgatgtcggtcgcgcgccaggaggtcggggagatcccgttcgccccggtgaccagcgagatccctttcgaccagattaccccggtaacgccataa

SEQ ID NO: 213306 - DNA, 861 bp, Klebsiella pneumoniae
atgcacaagacaaccctggagcagtgggcgttactcgaaaaggtagtggaattggggagctttgccagagcagcggaggagaccaatcgcagtcagtcatcggtaagctataacctcgcgctgctgcaggagcgcttaggcgtggcgctgctggcgccgtccggccggcgggcggtgctgacgccggctggcgaactactgctgaatcaggtcaagccgctgctgcaggccttcgcctacgtcgagacgcacgccgccactctgcgcaacggggcgcggacccgcctggatctggtggtcgacagtattttcccgcgccagcggctgttcgcgattttacgccagtttcagcagcgctatccgcagacccaggtcaggctcaccgaagtgctggaaaacctggatgacgagagcgcggcgcggacggaagccgatgtgatggtgttgacccgccgccaggatattaccggccgcggggagtggctgatgaatattgatttcatcgccgtcgcccaccgcgaccaccctctcgccgcgctggacggaccgctggaggatagcgcgctggcgccgtggccgctggtgcgcattgccgatcagggcggcgatagccaggcgccgcgagacgcctggaccttctccaccattgatgccgccattgatgcggtgatgtatcaggtcggcttcggctggctgccggaggagcgcattcgcccccatctcgaccagggcgtgctgaagcggctgcccctcagccatggcgcgcgccgcgcgacgccgctgcatctgatcgtcaagcgggacctggcgccgatcgacgaacaggtggccacgctgctggcgttgttccggacgccctga

SEQ ID NO: 213307 - DNA, 507 bp, Klebsiella pneumoniae; identical to SEQ ID NO: 137475

SEQ ID NO: 213308 - DNA, 1140 bp, Klebsiella pneumoniae
atgagcgattttttgcctttttcgcgcccgtcgatgggcgacgcagagctggctgcgctgcgtgaagttttagcgtcgggctggatcaccaccgggccgaagaatcaggcacttgaagcggcattctgccagctgaccggcaaccgtcatgcgattgccgtcagttcagcgaccggcgggatgcatgtgaccctgatggcgctgggtattggccccggcgatgaagtcattacgccgtcccagacctgggtctccactctcaatatgatctgcctgctgggcgccacgccggtgatgatcgatgtcgataacgacaatctgatgattacccctgcagcggtggaagcggcgatcacctcgcgtaccaaagcgataattcccgtgcattacgccggggcgccagccgacattgacgccattcgcgcggtgggcgagcgccatggcatttcggtgatcgaagacgccgcccatgcggccggtacccattataaaggccgccacgtgggctggcaggggaccgccattttctcgttccacgcgatcaaaaacatgacctgcgccgaaggcgggctgattgtcaccgatgacgacgagctggcctcccgcatccgtagcctgaaattccatggtctgggcgtggacgcttatgatcgccagacccacggccgcgcgccgcaggcggaggtgatcaccccgggcttcaagtacaaccttgccgatatcaatgccgctctggcgctggtccagctggaaaaactgagccacgccaatcagcgccggaccgagattgcccagcgctacctgcgcgagctggcggacacgccgtttaaaccgctgagcgtcccgacctgggatcaccagcacgcctggcatctgtttatcatccgcgtcgatgaggccgcgtgcggcatcagccgcgacgcgctgatggaaaagctgaaggcgatgggcatcggcaccggcctgcacttccgtgcggcccatacgcaaaaatattaccgcgagcgcttccctgaggtttccctgccgaataccgaatggaacagcgcccgcatctgctctctcccgttgttcccggatatgaccgatgacgatgtcactcgcgttatctccgcactgcgccagttgtcaggacgttga

SEQ ID NO: 213309 - DNA, 984 bp, Klebsiella pneumoniae
atgcttacttaccctcccgtgaagaaggtctcggtggttatcccggtttataacgaacaggatagcctgccggaactgcttcgtcgtacggatgccgcctgcgccaccctggggcggcaatatgaaattctgttgatcgacgatggcagcagcgacgattccgcgcgcatgctcaccgaagccgccgaggcggaaggcagccacgtcgtcgccgtgctgttaaaccgtaactacggccagcactcggcgatcatggccggcttcagccatgtaaccggcgatctgattattaccctcgacgccgacctgcaaaacccgccggaggagatcccgcggctggtggcgaaggctgatgaaggttacgacgtggtgggcaccgtccgccagaaccgtcaggacagcatcttccgtaaaaccgcgtcgaagatgatcaaccgcctgatccagcgcaccaccggcaaagcgatgggcgactacggctgcatgctgcgcgcttaccgccgccatatcatcgacgccatgctcaactgccatgagcgcagcacctttatcccgatcctggcgaataccttcgcccggcgcgcggtggagatcccggtgatgcacgccgagcgcgaattcggcgactccaaatacagctttatgcgcctgatcaacctgatgtacgacctggtgacctgtctgaccaccacgccgctgcgtctgctcagcattttcggcagcgtgattgccctgctgggcttcgccttcggcctgctgctggtggtgctgcgtctggcctttggcccgcagtgggcggcggaaggggtgtttatgctcttcgccgtgctgttcatgttcatcggcgcccagtttgtcggtatgggcctgctcggggagtatatcggccgcatctataacgacgtgcgcgcccgcccccgctactttattcaacgtgttgttcgccagccggaaacggcatctaaagaggaagatcgttcatga

SEQ ID NO: 213310 - DNA, 1986 bp, Klebsiella pneumoniae
atgaaagccgtagtcttcgcttatcacgatatgggctgcaccggtatccagtccctgctggacgccgggtatgatatcgctgctattttcacccacccggataaccctggcgaaaaccatttctttggctccgtggcgcgccttgccgccgagcagggtattccggtgtgggccccggaagacgtgaaccatccgctgtggattgagcgtatccgcgagatgaagccggacgtgctgttctccttctactatcgcaacctgctgggcgatgagatcctcaatctggcgccgaaaggggcgttcaacctgcacggttcgctgctgccaaaatatcgcggccgcgcgccgctgaactgggtgctggtcaatggcgaaagcgaaaccggcgtcaccctgcaccggatggtgaaccgcgcagacgctggcgatatcgtcgcccagcaggccgtggcgattggcgcggatgacgccgccctgacgctgcatcgtaagctgtgcgctgccgccactgagctgctgagccgggcgctgccggcgatcctcgccggcaccaccgatgagcgtccgcaggatcacagccaggcaacctatgtggggcgtcgtaccccggaagatggccggctggactgggagctgccggcgcagaccctgcacaatctggtgcgtgcggtctcggatccgtggccgggcgccttcggctacgccggagcgaacaagtttatcgtctggaaatcccgcgttcgccacgatttgccagcagctaaaccgggcaccgtgctctccattgctccgctgatcgtcgcgtgccaggacggggcgctggagattgtcaccggccagaccgaacgcggcgtgtacatgcagggcgctcagctggcgcaggcgctgggcctggtgtccggggcggtgatcagcagcaaaccggtggtggcgattaagcgtcgcacccgggtgctgatcctcggcgtcaacggctttatcggtaaccacctgaccgagcgcctgctgcaggacgacaactatgagatttacggtctggatatcggctccgacgccatcagccgttttctcgactgtccgcgtttccactttgtggaaggcgatatcagcattcactctgagtggatcgagtatcacattaagaaatgcgacgtggtgctgccgctggtggccatcgccacgcctatcgaatacacccgcaacccgctgcgcgtgttcgagctggatttcgaagagaacctgaaaatcatccgcgactgcgtgaaatacaataagcgcattatcttcccgtcgacctcggaagtgtacggcatgtgcaccgacaaaaactttgacgaagatagctccaacctggtggtggggccgatcaacaaacagcgctggatctactcggtctccaagcagctgctcgatcgcgtgatctgggcctatggcgataagaacggcctgaagttcacccttttccgtccgttcaactggatggggccgcgtctggataaccttaatgccgcgcgtatcggtagctcccgcgccatcactcagctgatcctcaacctggtggaagggtcgccgatcaagcttatcgaaggcggcaagcagaagcgctgcttcaccgacatcagcgacggtatcgaagcgctgttccgcatcatcgagaacaaagacggccgctgcgacgggcagatcattaacatcggcaacccggataacgaagcgagtatcaaagagctggccgaaatgctgctcgcctgcttcgaacgtcatccgctgcgcgatcgcttcccgccgttcgccggcttccgtgaagtggaaagcagcgattactacggaaagggctaccaggacgttgagcatcgtaagccgagcatccgcaacgccaaacgctgcctgaactgggagccgaaggtggagatggaagaaacggtcgaacacacgctggacttcttcctgcgcacggttgaactggtggacgataaaaatccatga

SEQ ID NO: 213311 - DNA, 903 bp, Klebsiella pneumoniae
atgaaacaggtcggcttacgcatagatgtcgatacctttcgcggcacgcgggacggcgttccgcggctgctggagctgctgggccggcatgggatccaggcaagcttcttcttcagcgtcgggccggacaatatggggcgccatctgtggcgcctgataaaaccgaagtttctgtggaagatgctgcgttccagagccgcctcgctgtacggctgggatattctgctggccggcaccgcctggccggggcgccgcatcggcgcagggaacgaagcggtgctccgcgccgccgccgaatctcatgaagtcggcctgcacgcctgggaccactacagctggcaggcgtggagcggcgtctggccgcaggaaaggctggcgctggaggttgagcgcggcctgctggagctcgagcgcatcatcggccggccggtgacctgctcggccgtcgccggctggcgcgccgatcagcgggtggttaaagccaaagaatccttcgattttctctacaacagcgactgtcgcggcacgcggccgtttctgccccagctcggcagcggcgtttccggtacggtgcagatcccggtcacgttgccgacctgggacgaggcggtgggcacggcggtggatatcgccggctttaaccgctacctgctggactgcatccatcgcgatgcgggcgtgccggtctataccattcacgctgaagtggaaggcattgcctacgccgatcagttcaatgaactactgaccatggcggcggaagaagaaattcagttttgcccactgagccagctgctgcccgctgactttagcgagctgccctcaggcaaagtggttcgtggtgaactggctggccgggaaggctggctcggacgtgaacaattactgacttcgggtgtttga

SEQ ID NO: 213312 - DNA, 1656 bp, Klebsiella pneumoniae
atgaaaagcattcgctatggcgtctctctgattgcgctgtttgcgctgtattatctgctgccgctcaatttccgtttgctctggcaacccgacgaaacccgctacgcggagatcagccgtgaaatgctggccaccggcgactgggtggtaccgcattttctcggcctgcgctacttcgaaaaaccgattgccggttactggatcaacagtatcggtcagtggctgtttggccataataacttcggcgtacgcttcgggtcggtcttcgccatcaccatgaccgccctgctggtggcctggctggcgtggcggatctttcgtgataagcgggtagctatcctgtcgccgattatcttcctcaccgcgatgctggtgtatgcgattggcacctatgcggtgctggacccgatgatcaccctgtggctggcgctggcgatgtgcagcttctggggcgcggcgcaggcgcacagccgcagcggcaaaatactgggctacgtgctgctgggcgtcgcctgcgggatgggggtgatgaccaagggcttcctggcgctggcggtgccggtggtgggcgttctgccgtgggtgatcgctcgtaaacgctggcgtgaagtgctgacctacggctggctggcggtaatcgtctgtacgctggtggtgctgccctgggggctggctatcgctcagcgcgagccggacttctggcgctacttcttctgggtcgagcatattcagcgttttgctgaaaaagacgcccagcacaaagcgccgttctggtactacatcccgttcctgatcgccggcagtctgccgtggctggccctgctgccgggggcgctaaagcgcggctggcttgagcgcgatgaggcccgcggcgcgctgtatctgttaggttgggtggcgatgccgttcctgttcttcagtatcgccaaaggcaaactgccgacctatattctgccgtgctttgcgccgctgtcgatcctgatggcccgctacgcgctggaggccgcaaagaccggcgcgaaagcgttgcgcatcaacgggatgatcaacctgggcgttggtttgctggggcttatcgccgtgctggtggtctcgccgtggggcttcatgcataagccggtgtggaccaagattgagctgtataaatgtctgctggcggcgatcgcttttgccgtctgggcgctgatgggctggctggcgatgaaagactctggccgccgctggagcctcgccgcgctctgtccgctcggcctggcgctgctggtgggcttcgccatcccggaccgggttatcgacagcaaacagccgcagttcctcgtggatatcgtcagcgaatccctgcagcccagccgttacgtcctgaccaacaacgttgggatcgccggcggcctggcctgggagctgaagcgaagcgatattattatgttcgacaaacagggtgagctgaagtacggtctcgactggccggatgctcagggaagctttgtcagccaggccggttttgccgactggctggccgcgcatcgtcagcaggggccggtctcgctggtgctgttgatggataaaggagagagtatgctcgacttaccgttaccgaaaccggataacgcctacgagctgggccgggtcgttttccttcagtacctgccgcaatga

SEQ ID NO: 213313 - DNA, 339 bp, Klebsiella pneumoniae; identical to SEQ ID NO: 135577

SEQ ID NO: 213314 - DNA, 381 bp, Klebsiella pneumoniae
atgggctttttctgggcattactcagcgtcggcctcgtcagcgccgcgcagttgctgctgcgcagcgccatggtggccttgccgccgctgaccgatattgtggcatttctccagcatctgctgcatttccagcccgggactttcggcctgtttttcggcctgctgggctacctgctgtcgatggtctgctggtactttgccctccatcgcctgccgctgtcgaaagcgtatgcgctactgagcctgagctatatcctcgtgtgggccgccgccatctggctgcccggctggcatgagccgttctactggcaatcgctgctgggcgtggcgatcatcgtcgccggcgtattgaccatcttctggccggtgaaacgccgctag

SEQ ID NO: 213315 - DNA, 1050 bp, Klebsiella pneumoniae
atgtcccctccgcaggctgataaagccgggcttcatattttacttaagctggcggcgctggtgattatcctcgccgggatccacgccgccgccgatatcctggtgcagctgctgctggcgctgtttttcgctattgttctcaacccgctggtcacctggttcattcgccgaggggtgcggcgtccgttcgccattaccctggtggtgacggctatgctggtgatgctcaccgcgctgctcggcgtgctggcggcgtcgctcaatgactttgtcgccatgctgcccgatttcaaccgcgccctgacgcgcaagatcctccagctccaggagtatctccccttccttaatctgcatatcaatccggagcggatgctgcggcgcatggattcagaacggctgatgacctgggccacgacgctgatgacccagctttccggggcgatggccagcatcgtgctgctggtgatgacggtgatctttatgctgtttgaggttcgccacctgccctacaaactgcgttttgccctcaataacccgcgcctgcatatcgcaggattgcaccgggcgctgaaaggcgtcacccattatctggcgctgaagacgctgattagcctgtggaccgggctgattgtctggctggggctgctggcgatgggggtacagttcgccctgatgtggggggtgctggcgtttttgctgaactatgtgccgaacattggctccgccatctccgctatcccccccatgctgcaggcgctgctgttcagcggcatctatgagtgcctgttggtaggggcgctgtttctggtggtgcatatggtgctgggcaacatggtggagccgcgcatgatgggccaccggctggggatgtcgaccctggtggtgttcctgtcgttgttggtctggggctggctgctggggccggtgggaatgctgctctcggtgccgttaaccagcgtctgtaaaatctggatggaaaccaccgtcgggggcagcaagctggcgatcctgctcggcccgggccgtcccaaaagccggctccccggctag

SEQ ID NO: 213316 - DNA, 1221 bp, Klebsiella pneumoniae
atgcccgaacccgtcgccgaaccggcgcttaatggactgcgcctcaatctgcggattgtctctgtcgttatctttaactttgccagctacctcaccatcggcctgccgctggcggtgctgcccggctatgttcatgatgtcatgggctttagcgctttctgggccgggctggtgattagcctgcaatatttcgccacgctgctcagccgcccgcatgccgggcgctatgccgacctgctggggcccaaaaagattgtcgtcttcggcctcggcggctgctttttgagcggtttgagctatctgctggccgcctggggcagcggctggccactgattagcctgctgctgttatgcctcggacgggtgatccttggtatcggccagagcttcgccggcacaggctcgacgctgtggggcgtcggcgtggtcggttcgctgcatatcgggcgggtgatctcgtggaacgggattgtgacctatggggcgatggcgatgggcgcgccgctcggcgtgctgtgctattcgcacattggcctcagcggtctggccggggtcattatggcggtagcgctggtggctatcctctgcgcgctgccccgcgcggcggtgaaggctgccaaaggcaaagcgatgtcgtttcgcgcggtgctcggccgggtctggccctacggcatggcgctggcgttggcctccgccggctttggggtgatcgccacctttatcacgctattttatgacgccaaaggttgggacggcgcggctttcgcgctgacattattcagctgcgcgttcgttggcgcgcggctgctgtttcccaacgccattaacctactcggcgggctgaacgtggcgatgctctgctttagcgtggaggcgatcggcctgctgctggtcggctttgccgatacgccgatgatggcgaaaatcggtactttccttaccggggctggcttttcgctggtctttccggcgctgggcgtggtggcggtgaaagcggtgccgcagcacaatcaggggtcggcgctggcgacctataccgtgtttatggatttgtcgttgggcgtcagcgggccgctggccggattgctgatggcgtggaccgggatctcgatgatttatctcgccgcggcggggctggtgatggcggcgctgctgttgggctggcggctaaaaaaacggcccccggttagcgaaccggaggccagcgcaccaggccagtaa

SEQ ID NO: 213317 - DNA, 558 bp, Klebsiella pneumoniae
atgcgcaatttggttaaatatgtcggtattggcctgctggtgatggggcttgccgcctgcgataacagcgattcaaaagcgccaaccgttggcgcagcagcggagagcaatgccagcggccaggcaatcagcctgctggatggcaagctgagcttcaccctgcctgcgggcatggccgaccagagcggcaaactgggtacccaggcgaacaatatgcacgtctactctgacgctaccggccagaaagcggtcatcgtcatcgtcggcgacagcaccaatgaagatctggcggtgctggcgaaacgcctggaagatcagcagcgcagccgcgacccgcagctgcaggtggtgagcaataaaccgctggagattaaaggccataccctgcagcagctggacagcattatctccgccaaggggcagaccgcctggtcttccgtgatcctcggcaaagtggatgacaagctgctgaccctgcaggtcaccctgccggcggataaccagcagcaggcgcagaccgaagcggaaagcatcatcaacaccctcaccatccagtaa

SEQ ID NO: 213318 - DNA, 666 bp, Klebsiella pneumoniae
atgaatccgtttactaccgtacagcgcaaaaaagcgctcgtctggctttcgctatttcatttgctggtcatcacctccagcaactatctggttcagctgccgatctccatctttggtttccataccacctggggcgcgtttagttttccgtttattttcctcgccaccgacctgacggtgcggatttttggcgccccgctggcgcgacgcatcattttcgcggtgatggtcccggcgctggccatctcttacggcatctccgcgctgttctacatgggcgaatggcagggctttgccgcgctgggcacctttaatctcttcgtcgcgcgcatcgccgtcgccagctttatggcctatgcgctggggcagatcctcgacgttcacgtctttaaccgcctgcggcagagccgccgctggtggttggcccctaccgcctcgacgctgttcggcaacatcagcgataccgtggcgtttttctttatcgctttctggcgcagcccggacccgtttatggccgcccactggggggaaatcgccctcgtcgactacagctttaaagtgcttatcagcatcattttcttcctgccgatgtacggcgtgctgttaaatatgctgttgaaaagactggcggataaatctgatttgtcggcattacagccgagttaa

SEQ ID NO: 213319 - DNA, 246 bp, Klebsiella pneumoniae; identical to SEQ ID NO: 135583

SEQ ID NO: 213320 - DNA, 2211 bp, Klebsiella pneumoniae
atgtcgactccagacgcgcaggataaaaaagttccacaattctcgtctttcaccatgcggccagcaaccgccccggcggagagctgctgtacagatcacgcctgcgccacagagtccgcccctgccgccgaagcgcttagcgacgcccgctatagctggcaagttgatggcatggactgcgccgcctgcgcccgcaaggtggaaaccgcggtccgtcaggtgcccggggtcagtcaggtccaggtgctgttcgccacagaaaagctgctggttaacgccgagggcgatgtccgcgctcaggttgagaacgcggtccgccaggcggggtatacgctgcgcgatgccgatgctcccgcagctaagcaaacccgagggtcgctgctgcgcgacaatctgccgttactgacgctggttatcatgatggccttgagctgggggctggagcaggccaaccaccctgccggtcagttggcctttattgccaccaccctggttggcctgtggccggttgcccgccaggcgctacgcctgatcaagagcgggagctggttcgccattgaaacgctgatgagcgtcgccgccatcggggcgctgtttatcggcgccaccgcggaggcggcgatggtgctgttgctgttcctgatcggcgagcgtctcgaaggctgggccgccagccgcgcacggcagggggtgagcgcgctgatggcgctgaagcccgacaccgccatccgtctgcgcaacggcgtgcgggaaaccgtcgcccagcgcgacctgcgtcccggagatgtgattgaagtggctgccggcgggcgtctgccggcggatggacaactgctgtcgccgtttgccagctttgatgaaagcgccctgaccggcgagtcggtgccggtggagcgtcaggccggggaacgggtagcggcgggcgccaccagcgtcgatcgcctggtgcagcttaccgtgatatccgaaccgggcgacagcgccatcgaccgcatcctgaagctgattgaagaggctgaggagcgtcgggcgccaatcgagcgcttcatcgaccgcttcagccggatctacaccccggccattatggtggtggccttgttggtcgccattgtcccgccgctgttcttcgccagcgcctggctaccgtggatttataaagggctgacgctgctgctgatcggctgtccgtgcgcgctggtcatctccacgccggcggccatcacctccggcctggcggtcgccgcccgccgcggggcgctaatcaaaggcggcgcggcgctggagcagctgggccaggtgcgccaggtggcgttcgataaaaccggcaccctgaccgtcggccagccgcaggtgacttcggttattgccacggccgaagttgacgacaacgcgctgctggcgctggcggcggcggtggagcaaggctccagccacccgctggcgcaggctatcgtccgtgaagcgcagcggcgtcagctgagcattccgcttgccagcggccagcgggcgctggcgggctctggtatcgaagccgaagtcaacggcagccgcatcctgatctgcgcagccagcaaagccgccccggcagagcatgaggcgcagatccagcagctggaaagcgccgggcaaacggtagtgctggtgatgcgcggcgagacgctgctcggcattctggcgctgcgcgataccctgcgcgacgacgcgcgtcaggcggtggatgctttgcatcagttgggcgttcagggggtgatccttaccggggataacccgcgcgccgcggcggccatcgccagcgaactggggctggaattccgcgccggtctgctaccggcggacaaggtcaacgcggtgatagcgctgaatgccgacgcgccgctggcgatggtcggggacggtatcaacgacgccccggcgatgaaagcggccaccatcggcatcgccatgggcagcggaaccgacgtggcgctggagacggccgacgccgcgctgacccataaccgtctgaccggcctggcgcagatgatttccctggcgcgcgccacccacgccaatatccgccagaacatcgcgattgccttagggctgaaggggattttcctcgtcaccaccctgctcggcctgaccggtctgtggctggcggtgctggcggataccggcgccaccgtgctggtaacggctaacgcgctgcggttattgcgtaagaagttgtag

SEQ ID NO: 213321 - DNA, 627 bp, Klebsiella pneumoniae
atgctttggtcatttattgctgtctgtttctccgcatggctttatgtcgatgcatcctatcgtgggccggcatggcgacgctgggtttttaaacctgtcaccctgattctgttgctgttactggcctggcaggcgccgatgttcaatgccatcagctatctggtgctggctggcctgtgcgcctcgctgctcggcgacgccctgaccctgctgccgcgccagcgggtgatgtacgcggtgggcgctttcttcctgtcacatctgctgtataccatctggttcgccagccagctgacgctgtcgttcttctggccgctgccgctggtgctgctggtattcggcgccctgctaatggcggtgatctggagtcggctggaagagatgaaaatgccggtgctgacctttatcggaatgacgctggtaatggtctggctggccggtgagctgtggtttgtccgccccaccaacaccgcgctgtccggtttcgccggcgcagccctgctgctgctgagcaatgccgtgtggctggtgagccactatcgtcgccgcttccgcgccgataacgccatcgccgccgcgttctactttgccggccacttcctgatcgtgcgcgcgctgtacctgtaa

SEQ ID NO: 213322 - DNA, 351 bp, Klebsiella pneumoniae
atgcccctcttttttgttctggtcgtcgcggtgattgtggtggcggcttcgtttcgctatgtccagcagcgccgtgagaaacaggcgaatgacgccgcgccgttgctacaaaagcgggttatcgtcagcaataaacgggaaaaagtgattaacgatcggcgctcgcggcagcagacggtgacgcctgcaggcagtgagatgcgctatgaagcgagctttcgccccgaaaacggtgggctggaggtggtgtttcgccttgacgcgccgcaatatcacgcgctgagcgtcggcgatcgtgggatgttgagttataagggcacagcgttcgtggcgtttacgcccgatccctga

SEQ ID NO: 213323 - DNA, 276 bp, Klebsiella pneumoniae
atgctgattaatttaggccgcctgctgatgctgtgcgtctgggcctttctgttattgaatctgtttcagcccttcccgaagccgctgaatatctttgtcaacgtcgcgctgattttcatgatcctgatgcacggtctgcagctgacgctgctcaaggcgacgcagccgaaagaggcgccgccgctgagccgctttgagcaaatccgcatttttattttcggcgtgtttgagctcgtggcctggcagaaaaaactgaaggcgacgctgaaaaaatag

SEQ ID NO: 213324 - DNA, 597 bp, Klebsiella pneumoniae
atgaaaaaaccaaaccacgcgggcagcggtcagatccgcatcatcggcgggcaatggcgcggccgtaaattaccggtgccggagagcccgggcctgcggccgaccaccgaccgggttcgcgaaaccctttttaactggctggcgccgtccattgttgacgcgcactgcctcgattgctttgccggcagcggcgcgctggggctggaagcgctgtcccgctatgcggccagcaccacgctgctggagatggagcgcggcgtagcccagcagctgcaaaaaaatctcgccaccctgaaagcggatcgcggcaaggtgatcaccaccaacaccctcagcttcctgagccagccggggaccccgcaccagatcgtgttcgtcgacccgccgttccgtcaggggctgctggaggagacgctacgtctgctggagacacaaggctggctggccgatgaggccctggtgtacgtcgaaagcgaagtcgaaaacggcttaccgccggtgccggctaactggcaattgtatcgtgaaaaagtggccggacaggtcgcctaccgtctttaccaacgtgaggcccaaggagagcaccatgctgattaa

SEQ ID NO: 213325 - DNA, 1524 bp, Klebsiella pneumoniae
atggcaaaagagaaaaaacgtggcttcttttcctggctgggctttggacagaaagaacaggcacaggaaaccgagacagagcaaaaagtagaagaacagcaagcggttgccgaagagataccggcggttgaaacccctgctgagccgagcgcgccgaaagcagacccggaggcgtttgccgaagacgtcgtcgaagtgaccgagacggtggtcgaaagcgaaaaagcgcacctcgcggagcctgccagcgcgcaggaagaagagtgggtggaaacgcctgctctgaccgaagaaacgcctgttgttgaaccggagcccgcggtcagcgaaccgcctgaacagcctgcggtggttgagccgctggcggaagaggttatcgccgaaccggtggtggcggaagccgtagcagagcagcctgtggaaggcatcgttgtccagccgcaggagacagaagcgcccgaagaggacgcgccgttaagcgatgaagagctggaagcgcaggcgctggcggccgaagcggcagaagaggcggcggtagtggtgccggcgcccgaggacgaggcgccgcttgaagcgctggctcaggagcaggaaaaaccgacaaaagaaggtttcttcgcccgcctcaaacgtagcctgctgaaaacgaagcaaaatctcggttccggatttatcagcctgttccgcggtaagaagatcgacgatgatctgtttgaagagctggaagaacagctgctgatcgccgacgtcggggtggaaaccacccgcaagatcattaccaacctgacggaaggcgccagccgtaagcagctgcgcgatgcggaagcgctgtacggcctgctgaaagaagagatgggcgagattctcgccaaagtagacgagccgctgaacgttgaaggcaaaacgccatttgttattctgatggtcggcgtgaacggtgtggggaaaaccactaccatcggcaagctggcgcgtcagtttgaacagcagggtaagtcggtgatgctggcggcgggggataccttccgtgcggcggcggtggaacagctgcaggtctggggccagcgtaataatatcccggtgatcgcccagcacaccggcgccgactccgcctcggtgattttcgacgccattcaggcggcgaaggcgcgtcatgttgacgtactgattgccgataccgccgggcgtttgcagaataaatcgcacctgatggaagagctgaagaagattgtccgggtaatgaaaaagctggacgtcgacgcgccgcacgaggtgatgttaaccattgacgccagcaccgggcagaatgctgttagccaggccaaactgttccatgaggcggtaggtttgaccgggatcaccctgaccaagctggacggcaccgccaaaggcggcgtgatcttctcggtggccgatcagttcggcattccgattcgctatattggcgtcggcgagcgtattgaggatctgcgtccgtttaatgcgggcgactttattgaggcactttttgcccgagaggattaa

SEQ ID NO: 213326 - DNA, 669 bp, Klebsiella pneumoniae
atgattcgctttgaacaagtcagcaaagcctatctcggtgggagacaagcgctgcagggggtgaccttccacctgcagccgggcgagatggcgtttctgaccggccattccggcgcagggaagagtaccctgctgaagcttatctgtggtatcgaacggcccagcgccgggaaaatcttcttcagcggtcatgaaatcagccgtctgaagagccgtgaggtgccgttcctgcgccgccagatcggtatgattttccaggaccaccatttgctgatggatcgtaccgtgtatgacaacgtggcgatcccgctgattatcgccggcgccagcggcgatgatattcgtcgtcgcgtctcggcggcgctggacaaggttggcctgctggacaaagcgaagaattttcccattcagctctccggcggtgaacagcagcgcgtgggaatcgctcgcgcggtggtcaacaagccggcggtgctgctggcggatgaaccgaccggcaacctcgacgaggcgctctcggaggggattttacgtctgtttgaagagtttaaccgcgtcggggtgacggtactgatggccacgcacgatctggggcttatctccagtcgtccgtaccgcgtgctgacgcttagcgacggccatctgcatggaggcattcggggtgaataa

SEQ ID NO: 213327 - DNA, 1056 bp, Klebsiella pneumoniae
gtgaataagcgcgacgcaatgaaccagattcgccagttcggcagcaagttcgatcgcctgcgcaacgccgcgggcggcggcggcggcgggcgcaatgcgccaaaacggccgaaagcggcgcctaacccggcctcgcgtaagagcaacgtattcaacgagcaggtgcgctatgcctggcacggcgcgctgcaggatctaaaaagcacgccgctggcgaccttcctgacggtaatggtcatcgccatttcgttgaccctgccaagcgtctgctacatggtctacaaaaacgtcagcagcgcggcgtcccagtattatccctcgccgcagatcaccgtttatctggaaaaaacgctggatgacgatgccgcggcgcgggtggtgggccagctgcaggcggagcagggcgtcgacaaggtaaactatttgtcccgtgacgaggcgctgggggaattccgtaactggtctggctttggcggcgccctggatatgctggaggagaacccgctgccggcggtcgccatcgtggtgccgaagctggatttccagagcaccgaggcgctgaataccctgcgcgatcgggtatcgcggatccagggtgtcgatgaagtgcggatggacgacagctggtttgcccgtctctcctcgctcaccgggctggtaggacgcgtgtcggcgatgatcggcgtgctgatggtggcggcggtgttcctggtgatcggcaacagcgtgcgcctgagcatcttcgcccgccgcgataccattaacgttcagaagcttatcggcgccaccgacggctttatcctgcgtccgttcctctacggcggagcgatgctgggcttttccggcgcgtttttatcgctgatcctgtcggagattctggtaatgcgcctctcgtcggcggtgaccgaagtggcgaaagtcttcggcacccagtttgagctgagcggcttaggcttcgacgagtgtctgttgatgttgatcgtctgctcgatgatcgggtgggtagccgcctggctggcgacagtgcaacatttacgtcactttactcccgattaa

SEQ ID NO: 213328 - DNA, 855 bp, Klebsiella pneumoniae; identical to SEQ ID NO: 135592

SEQ ID NO: 213329 - DNA, 1524 bp, Klebsiella pneumoniae
ttgcgttcgctggtgggtgacctggtgctggtccgtctgcaggaagagcgggatcctcttctgcacaaacgcttatataacgcgctgcgccgcgcgatcctcgacggttcgctggcaccgcaaagccgtctgccgccgtcgcgggacctggcgggcgaacttggcgtatcaagaaacaccatattaacaacttatgaacaattgctggcggaaggatatgtggtttcccgtcggggaagcggaacattcgttgcccaaaccgcccctgagagctcattgacggctaaaggtcagcaagaaaacagcagtatcgcagcaccgacggcgcatctttcacgccgaggccaacatctgctcggccaggtcagcgccagcccgcgccagtggggagcgtttatacccggcgtgccggacgttaacgcctttccccacccgctgttcagtaagatccaggcccgcatcagccgtcggcccaaaccggagcggctcagctatagctgcaacggcggcactccggaactgcagcaggcgctggtggattatctgcgcgtgtcgcgcggcgtccactgtcagtcagatcaaattcttatcaccgaggggatccaccaggcgatcgatctggtcacccgcatgctgtgtgataacggcgatctggcgtgggtggaggagccttcctactgggggatccgccacgtgctggcgatgaacgacgttcgggcagagcccctgaccgtcgatgccaacggcctgtgcccgccggagacggttgacgatgcgccgaggctgatcttcgttacgccttcccaccagtatccgctgggcgcggtgatgagccttgagcgccgccagcggctgctggcgctcgcccgtcagcaggggagctggatcgtcgaagatgattatgacagcgagtttcgcttttccggtcagccgatccccgccctgcagggtctggtcgccgacgccccggtggtctatatcggcaccttcagcaagacgctctatcccggcctgcgcctgggctacgtggtgatcccgcggccgctggtcagcgacctgaagcacgcccatgctgagctttaccgcggcggccattcgctgatccagatggcgctggcggagtttattaccgccggccactattcggcccatatccgccgtatgcggctgctctacagccgtcgccgcgcctttttaactgagcttatccagcagcactgtatgccgtacgccctgtctgacttcagcgataatgccgggctgcatttgatcctcaatttgcccgcagaggctgacgatgtggcgatcgccagagaggccaatgcgcggcacattctggtgcggccgctgtcgcgctactacctgacggcggcgcgcaagaaaggattactgatgggattcgccagccagcccgaagagcagatggcgtcggcgttcagcgtcttactcggctgcctgcagacgcactgcccgcagatgctcctgctccgggaggacgcagaaaaacaaaacgccccaacctga

SEQ ID NO: 213330 - DNA, 1266 bp, Klebsiella pneumoniae
gtgaaaagctcagaactgaatcaacgtcgccagcaggcgacgccgcgcggcgtaggcgtaatgtgtaactactttgtcgagaaggcggaaaacgccacgctgtgggatatcgaaggcaatgaggtgatcgatttcgccgccgggatcgccgtgttaaataccggtcaccgccatccgaaagtggtcgccgcggttgccgaccagctgcaggcgttcacccacaccgcctatcagattgtgccgtacgaaagctatgtttcgctggcggagcgtatcaacgatctggcgccaattgacgggccggcaaaaacggctttcttcaccaccggcgcggaagcggtcgagaacgcggtgaaaatcgcccgcgcttacaccggtcgtccggggctgattaccttcggcggcggtttccacggccgtacctttatgaccatggccctcaccggtaaggtcgcgccctacaaaatcggcttcgggccattcccgggctcggtgtatcacggcgtttaccccaatgcggcgcatggcgtgaccaccgcggatgcgctgaaaagcctggagcgcattttcaaagcggatattgcgccggaccaggtagcggccatcattctcgagccgatccagggggaaggcggctttaacgtcgcgccggccgattttatgcaggcgctgcgcgacctgtgcgatacccacggcattctgctgatcgccgatgaagtgcagaccggtttcgcccgcaccggcaagctgttcgctatgcagcactatgaggtgaaaccggatctgatgacgatggcgaaaagcctcgccggcggtttcccgctgtcgggcgttgtcggccgcgccgaggtgatggatgcgccagccccaggcgggctgggcggaacctatgccggtaacccgctggcggtggccgcggcgcacgcggtgctggatgtgattgccgaagagcagctgtgtcagcgcgctgaacagctgggtagccatctgcaggaagtgctcaaccaggcgcgcgctacctgcccggcgatcgtagatgtccgcggccgggggtcgatggtggcggtggagtttaacgatccgcaaacaggcgaaccgtcgccggaattcacccgccttgtgcaacagaaagcgcaggagaacggcctgctgctgctgagctgtggcgtctacggcaacgtgatccgcttcctgtatccgttgactatccccgacgcccagttctcgaaagcgctggatattctggcgcgcgtactgaagagctaa

SEQ ID NO: 213331 - DNA, 315 bp, Klebsiella pneumoniae; identical to SEQ ID NO: 139444

SEQ ID NO: 213332 - DNA, 567 bp, Klebsiella pneumoniae
atgtacgaaggttacgcaggactgatctttgatatggatggcaccattctcgataccgagccgacccatcggcaggcatggaacgaggtgttgggccgctacggtatgcgtttcgacgaacaggcgatggtcgcgctcaatggctcaccaacctggcgaatcgcccaggcgattatcgaactcaaccaggccgatctcgatccacatcgcctggcgcaggaaaaaacccaggccgtcaaagcgatgctgctggacagcgtacgcccgttgccgctgattgaggtggttaaggcatggcacggccgtcgcccgatgtcggtgggaaccggcagcgagagctccgtcgccgaagcgctgctggcgcacctggggctgcgtcattacttctccgcggtggtggcggccgatcatgtggtcaaccataaacccgcgcccgataccttcctgctgtgcgccgagcgcatgggcgtcgcgccggaaaaatgcgtcgtcttcgaagatgccgactttggtctgcaggcggcgaagcgcgcgggaatggacgcagttgacgtgcgtttgctgtga

SEQ ID NO: 213333 - DNA, 429 bp, Klebsiella pneumoniae; identical to SEQ ID NO: 139442

SEQ ID NO: 213334 - DNA, 1557 bp, Klebsiella pneumoniae
ttgatcccggacgtatcacaggcgctggcctggctggaaaaacatccgcaggctctgcagggtattcaacgtggtctggagcgggaaacgctgcgcgtgaacgcagacggcacccttgcaacgaccggtcaccctccggcgttaggctcagcgctaacgcataaatggattaccaccgattttgccgaagctttacttgagttcattacgccagtagatggcgatattgagcatatgctgacctttatgcgcgatgtccatcgctataccgcgcgtcagcttggcgacgagcggatgtggccgctgagcatgccatgctatatcgcccccggtcaggatattgagctggcgcagtacggcacctctaacgtggggcgcctgaaaacgctatatcgcgaggggctgaagaaccgctatggcgcgctgatgcagactatctccggcgtgcactataacttctccctaccgatggccttctggcaggcaaaatgtggtgtggaagatgccgagagtggtaaagaggccatttcggcgggctatttccgctcaattcgtaactactatcgctttggctgggtgatcccctatctgtttggcgcctcgccggcgatttgctcctcattcctgcaaggcaaaccgacaacgctgccctttgaggaaacgggcaacggcatgtattacctgccgtatgccacctcgctgcgcctcagcgaccttggttataccaataagtcgcaaagcaatctcggaattacgtttaacgatctgcacgagtatgtggcaggattgaagcgggcgattaaaacgccgtcggaagagtacgccaaaatcgggctgcagaaagacggcaagtatctgcagatcaacagcaacattctgcagattgaaaatgaactttatgcgccgatccgcccgaaacgcgtcacccgtcggggcgaaaccccgtccgatgcgctgttgcgcggtggtattgagtatatcgaagtgcgttcgctggatatcaatccgttctcgccgatcggcgttgacgcccagcaggtgcgtttcctcgacctgtttatggtctggtgcgcgctggccgacgcgccggagatgagcagcgatgagctgctgtgcacccgcaccaactggaatcgggttattctggaagggcgtaagccgggcttaacgctggggattggctgcgaaagcgcgcagttcccgctggctcaggtgggcaaagatctgttccgcgatttacgccgcgtggcgcagaccctggacagtatccacggtggccaggcatatcagcaggtctgcgacgagctgctggcctgctttgacgatccggaattaaccttctcagcccgcattctgcgttctatgattgaagaaggcattggcggtaccggccgtgcgcttgccgatcgttaccggacgcagctgcgcgaagagccgctggagatcctgagcgaagacgattttatcgccgagcgcgacgcgtcggtggcgcgacagaagaaagtggaagctgaagacagcgagccgtttgaggcgctgctggcgcggcacgcgtag

SEQ ID NO: 213335 - DNA, 516 bp, Klebsiella pneumoniae; identical to SEQ ID NO: 138019

SEQ ID NO: 213336 - DNA, 768 bp, Klebsiella pneumoniae
atgacgacgacgctttccttctcctttcagcaccgcccactggtgccctttgcccatgattatgcccacggtgaccaggaagactggcatcagcatgactgcgcccagctgctgcatatactaagcggcgtggtgcgagtcgcgacgccggtaggctactgggtggtgccgcccgggcgcggcgtctggctgccggcgggaacgccgcacgcgctgcgcatgaccggcaacgtggcggcgcgcaccctgtttatcgatccgctggcgcgcgccgatcttccggcgggctgccagatcgtacagatcacgccgctgctgcgggaactgatcgtgtcatccctggcgctggcggaacgctatgcccccgccagccgcgacgaaagaatttatgaactgatcctcgatgagatccgcgggatggcgatcctgccgtttggcctgccggagccgcaaagcgaaacgctgcgtcggctgtgccagcaggtacgcgaggcgccgggcgaggcctggagcagcggccaggcggcgaaggcgtgcagcatgagcgagcgaaccctaaaccgccattttcagcagcagactagcctgacgtggagcgagtgggtgcgccgggcgaagctaatggaagcgctggtgcgcctggcgcagggctactccgtgctgcgggtggcgctggagctgggctacggtagccacagcgccttcagcgccatgtttcgtcgggtgatgggcgtcgcccccagcgactattttcgtcccccggcctga

SEQ ID NO: 213337 - DNA, 1677 bp, Klebsiella pneumoniae
atgctgagccatcctgctgaaaagtaccgtccctatccgccgatcgccctgcctgaccgccgctggccagaccggcaaatcagtcacgccccgcgctggctctcgactgacctgcgcgacggcaaccaggcgctggcggagcccatggacagcgcccgcaaactgcagttctgggatctgctgctggagtgcggctttaaagagattgaagtcgccttcccttccgcctcacaaaccgatttcaactttgtccgccagctgattgacgaacagcgcatcccggaggatgtcaccatccaggtgctgacccaggcgcgagacccgctgatcctgcgcacctttgaggcgctgcgcggcgcccgccgggctaccgtccacctctacaatgccaccgcgccgctgttccgcgagctggttttcggcatggacaaggccgaggtgatcgccctcgcgacccgcgccacccggcttatccgtcagcagtgcgaacagcagccggagacccgctggcaatatgaatattcgcctgaaaccttctgcttcaccgagcccgagtttgcgcttgagatttgcgaagcggtggcggatgtctggcagccctgcgccgagcgaccgatgatcgtcaatctgccggcgacggtggaagtcaacacccccaacgtctatgccgatcagatcgagtatttttgccgccacttctcccgccgcagcgaggtctgcatcagcgtgcacccgcataacgatcgcggcaccggcgtcgccagcgccgagctggcggtgatggccggcgccgatcgggtagaaggctgcctgtttggcaacggcgaacgcaccggcaacgtctgtctggtgactttggcgatgaacctctacagccagggcatcgaccctgagcttcgcttcgagcagatgaaccgggtggtggaggtggtggaaaactgcaaccagatccccgttcacccgcgccacccgtgggcgggaagtctggcttacaccgccttctccggctcccatcaggatgcgatcaaaaaagggtttgatgcccgtcagcctggcgatccgtggcagatgccctacctgcccattgacccgcaggatataggctgcagctatgaggcggtgatccgcgtcaacagccagtcggggaagagcggcagcgcctggcttatcgaacaaaatcatggtctgaaactgccccgcgggctgcagcaggacttcagccagcacgttcagcaggccaccgatagcgacggcaaagagatgacccaccatgcgctgtggcagctgttccgcacgcgctacgggctgcaggcgcagccggcgctgacgctgctcgattatcagagcgccagccagcaggatggccagctttccctgcaggcaacgctgcgtcaccacggcgaaacccgacgcctgcagggccagggcaacggcctgctctccgccgcagccagcgggctcagcgcgctgtttcggcagccgtttatgatcaaggactatcatgagcatacgctcggcgcgcgcagcgacagccggtcggtggcctatatccgctgcgtttttccgcaaggagaaagctactggggcgtgggtatcgataatgacgtggcgcgcgcctcgctgcaggcgctgtgcaatgcgctcagcgccgccgatcaggccgggggacgaaaatag

SEQ ID NO: 213338 - DNA, 1539 bp, Klebsiella pneumoniae
atgcaacagcaaaaaccgctggaaggcgcgcagctggtcattatgaccattgcgctgtcgctcgcgacgttcatgcaggtgctggattccactatcgccaacgtggcgatcccgaccattgccggcaaccttggctcgtcgctgagccaggggacctgggtcatcacctcgttcggggtcgctaacgccatctccatcccgatcaccggctggctggccaagcgcgtcggcgaggtgaagctgttcctgtggtcaaccaccgctttcgccattgcctcctgggcctgcggcgtctccaacagcctgacgatgctgattttcttccgcgtcattcaggggatcgtcgccggaccgctgatcccgctgtcgcaaagtctgctgctcagcaactatcccccggcgaagcgctctatcgctctggcgctgtggtcaatgacggtgattgtcgcgcccatctgcggtccgatcctcggcggctatatcagcgataactatcactggggctggatcttctttatcaacgtgcccattggcgtggcggtggtgctgatgaccctgcagaccctgcgcaaccgggaaaccaaaaccgaacagcggcggatcgacggtgtcggtctggcgctgctgatcatcggtatcggtagcctgcaggtgatgctggaccggggtaaagagctggactggttctcctccaatgagattatcattctgaccatcgtggcggtggtggcgataagcttcctgatcgtctgggagctaaccgacgataacccgattgtcgatctgtcgctatttaagtcgcgcaacttcaccatcggctgcctctgtatcagtctggcctatatgctctacttcggcgccatcgtactgctgccgcagctgttgcaggaggtctacggctacaccgcgacctgggccggcctggcgtcggcgccggtgggggtgatcccggtcattctgtcgccgattatcggccgcttcgcgcataagctcgacatgcggcggctggtcaccttcagctttattatgtacgcggtctgcttctactggcgcgcctggaccttcgaaccggggatggactttggcgcctcggcgtggccacagtttatccagggcttcgcggtggcctgcttcttcatgccgttgaccaccatcaccctctccggcctgccgccggagcggctggcggcggcgtcgagcctgtcgaacttcacccgtacccttgccggctccatcgggacctcgatcaccaccaccctgtggaccaaccgcgaggcgctgcatcatgcgcagctcaccgaatcggtgaccccctttaaccccaacgcgcagcagatatacgatcagctgcagggcatgggaatgacgcagcagcaggcgtccggctggatagcgcagcagataaccaaccaggggctgattatctccgccaacgaaatcttctggatttctgcggctattttcatcctgctgttggggctggtgtggttcgccagaccaccgttcagcgccggcggaggcggcggcggcgcgcactaa

SEQ ID NO: 213339 - DNA, 1173 bp, Klebsiella pneumoniae
atgagtgcaaatgcggagagccaaaccccgcagcaaccaggcagcaaaaaaggaaagcgtaaaggcgcccttctgttgctgacattgctcttcattattattgccgtggcatatgggatttactggtttctggtactgcgtcactacgaagagaccgacgatgcctacgtggcagggaatcaggtacaaattatggctcaggtcgcgggcagcgtgaccaaagtctgggctgacaacacggactacgtgcagaaaggcgatccgctggtcactctcgatcggaccgatgcccaacaggcgtttgaaaaggctaagacccaactggccgccagcgtccgtcagacccgccagcagatgatcaacagcaagcagctgcaggcaaatatcgacgtcaaaaaaaccgccctcgcccaggcgcaggctgacctgaaccgccgcatcccgctgggcgccgcgaacctcattggccgcgaagagctgcagcacgcccgcgataccgtcgccagcgcacaggccgaactcgacgtggcaatccagcagtacaacgccaaccaggcgatcgtgctgggcaccaggctggaacagcagccggcggtgctccaggcggccactgaagtgcgtaacgcctggctggccctgcagcgtacgcagatcgtcagcccgattagcggctacgtttcccgtcgctcggtacagcctggcgcgcagatcggcaccaccacgccgctgatggcggtggtcccggcgaccaacctgtggatcgatgctaactttaaagagactcagctggcgcatatgcgtatcggccagccggccaccgtgatcagcgatatctatggcgatgacgtgaaatacaccggtaaagtggtcggtctggatatgggcaccggcagcgccttctctctgctgccggcgcagaatgctaccggcaactggatcaaagtggtacagcgtctgccggttcgtatcgagctggatgaaaaacaactagcggaacacccgctgcgcatcggcctctcgacgctggtggaagtcaacaccaccgatcgcgatggtgaaatgctggccagccaggtgcggagctccccggtttacgagagcaatgcccgtgaaatcgctctcgatccggttaataagctgatagacgagatcattcaggccaacgccggataa

SEQ ID NO: 213340 - DNA, 531 bp, Klebsiella pneumoniae
atggatagttcgtttactcccattgagcaaatgctcaagttccgcgccagccgccatgaagatttcccgtttcaggagatcctgttaactcgtctttgcatgcatatgcaaggtaagctgctggaaaatcgcaataaaatgctcaaagcgcagggaattaacgagacattatttatggcgctgattacgctggagtcacaggaaaaccacagcatccagccgtccgagctgagctgtgcgctgggctcgtcacgtaccaacgccacccgtatcgctgatgaactggaaaaacgcggctggattgagcgccgcgagagcgataacgatcgtcgctgtttgcatctgcaactgaccgaaaagggccatcagtttttgcgtgaagtcctgccgccgcagcataactgcctgcatcagctgtggtcttcacttagcaccagcgaaaaagatcagctcgaacacatcacccgcaaactcctgagccgccttgatcagatggaagaagaaggcgtgctagcggactctctacgctaa

SEQ ID NO: 213341 - DNA, 336 bp, Klebsiella pneumoniae
atgaacagtgaagtccttctgctcggggtgatagtcggcggcgtcaactatctctttcgctatcttcctctgcgtttgcgcgtcggccacgcccgtcctgcccgccgcggcccggtcagcgtgctgctggataccattggcatcgcctcgatttgcgcgctgttggtggtctccagcgtgccggagatcctcgccgatgcccatcgcctggcgccgacgctgaccggcttcctggtgctgggggccgccttctggaaaacccgcagcatcattgtcccgaccctgctgtcggcgtttgcctatggtctggcatggaaaatcaccaacgggctctaa

SEQ ID NO: 213342 - DNA, 747 bp, Klebsiella pneumoniae
atggaaaaccccgcgcccttaacctgtgccttacctgaacgcgtcgccaccgtcggcgaaggcgtcaaagacagtctccccatcgtcatcagctaccttccggtggcattcgccttcggactcaatgccacccggctgggcttcaccccgctggaaagcctgttcttctcctgcattatttacgccggcgccagccagtttgtgatcaccgccatgttggccgccggcagttcgctgtgggtcgccgccctgacggtgatggcgatggatgtccgccacgtgctgtatggcccctcattgcgcagccgcattcgctcagcgctggataaaaagaaaaccgccctctgggccttcggcctgaccgatgaggttttcgccgccgctaccgccaggctggttcgcgataaccgccgctggagcgaaaactggatgcttggtctcgcttttacctcgtgggcatcgtgggtgtgcggcacgctggccggcgcctggtccggcaacggcctgctggtggattatccagcggtggaagccgccctcggctttatgctgccggcgctgtttatgagcttcctgctggcctctttccagcgtcagcagtcactctgcgtcacggcggcgctggcgggcgcgctgggcggcattctgttattttccattccggcggcgatcctcgccggaattgtctgcgggtgtctgacggcgctgcttcaggccatgctcaaggggatgccggatgaacagtga

SEQ ID NO: 213343 - DNA, 999 bp, Klebsiella pneumoniae
atgcgacatagtacgatgttggccaccgccgcctttgccaccctgctcgccaccagcgccttcgccgccgacctgccgggtaaagggattacggtgaagcccgctcagagcactatctccgaagagagcttccagaccctgctggtcagtcgcgcgctggagaagctgggctacaccgtcgagaaacccagcgaagtggactataacgttgcctatacgtcgattgccgccggagataccacctttatcgccaccaactggcaaccgctgcacgatgacatgtacgccgcggcgggcggtgataacaaattctatcgcaaaggagtgtacgtctcaggcgctgcccagggctatttgatcgacaaaaaaaccgctgagcagtaccacatcacctccatcgatcagctcaaagatccgcagatcgccaaactgtttgataccaacaatgacggtaaagcggatctcaccggctgtaccccaggatggggctgcgaagcagtgattaaccatcagattgacgcctatggcctgagcaaaaccgtcacccataaccagggcaactacgcggcgatgatggccgacaccattgcccggtataaagaaggtaaaccggtgctctactatacctggacgccgtactgggttagcgacgtgctgaagcctggcaaggacgtcgtctggctgcaggtgccgttctcctccctgccgggcgagcagaaaaacatcgacaccaaactggccaacggcgccaactatggcttcccggtgaacaccatgcacatcgtcgctaacaaagcctgggcggagaaaaatccggccgccgccactctgtttagcgtcatgaagctgccgatcgccgacatcaacgccgagaatgcgatgatgcacgaaggccatgcttccgaagccgacattaacggccacgttgatggctggatcaaagcccaccagccgctgttcgacagctgggtgaaaaccgccctcgccgcgcagcagtaa

SEQ ID NO: 213344 - DNA, 1068 bp, Klebsiella pneumoniae
atggctgatcagaccaatccatggggcagcgccccgtcaaccgacagcgccgcgcaggctgccgacgcctggggtggtgcctctactgccgcgccggctaatggcggcggcgccgactggctgcacagcgccccggcgccgcagccggaacagttcaatatcatggatccgttccataagaccctgatcccgctcgacagctgggtgacccacgccatcgactggatcgtgctgcacttccgtccgctgttccaggggatccgcgtgccgatcgactacatcctcagcgccttccagcagctgctgttggggataccggcgccggtggcgattatcgtcttcgcgctaatcgcctggcagatctccagcctcggcatgggggtcgccactctggtatcgctgattgccatcggcgccatcggcgcgtggtcgcaagccatggtcactctggcgctggtcctcaccgccctgctgttctgcatggttatcggcttgccgctggggatctggctagcgcgcagcccgcgggcggcgaaaatcatccgcccgctgttggatgccatgcagaccacgccggcgttcgtctatctggtgccgatcgtgatgctgttcggcatcggcaacgtaccgggcgtggtggtgacgattatcttcgccctgccgccgatcgtccgtctgaccatcctcgggataaaccaggtgcctgcggatctgatcgaagcgtcgcgctcatttggcgccagcccgcgccagctgctgtttaaggtgcagctgccgctggccatgcccaccattatggccggggttaaccagaccctgatgctggccctgtcgatggtagtgatcgcctcgatgatcgccgtcggcggcctcggccagatggtgctgcgcggtatcggtcgcctggatatgggcctggcgaccgtcggcggggtggggatcgtgatcctggcgattattcttgaccgcctcacccaggccgtcggtcgcgacgcccgcagtcgcggcaaccgccgctggtacaccaccggcccgctggggcttatcactcgccctttctgtcgataa

SEQ ID NO: 213345 - DNA, 1203 bp, Klebsiella pneumoniae
atggcaattaaattagaaatcaaaaatctttataagatatttggcgagcatccacaccgtgctttcaaatatattgagaaaggactcaacaaagcgcaaatactggaaaaaacggggctgtcgcttggcgtcaaagacgccagtctggccattgaagaaggcgagatattcgtcatcatggggctctccggctcggggaaatccaccatggttcgccttctcaatcgcctgattgaacccacccgcggccaggtgctgattgacggggtcgatatcgccaaaatgtcggatgccgagctgcgcgaggtgcgtcgcaagaaaattgcgatggtttttcagtcctttgcgctgatgccgcacatgagcgtgctcgacaacacggcgtttggcatggcgcttgccggcgttcccgccgccgaacgagagcaaaaagcccgggaggcgctgcgtcaggtggggctggagaattatgcccacgcctggccggatgaactctccggcggcatgcgccagcgcgtcggtttagctcgcgccctggcgattaatcccgatattctgttaatggatgaagccttctctgcgctcgatccgctcattcgtaccgaaatgcaggatgagctcatcaaattacaggcgaagcatcaacgcactatcgtctttatttcccatgaccttgatgaagccatgcgaattggcgatcgtatcgccattatgcaaaatggcgaagtggtccaggtcggcactccggatgaaatattaaataatccggccaatgattatgtgcgcaccttcttccgcggcgtggatattagccaggtattcagcgcgaaagatattgcccgccgcagcccggttggcctgattcgtaaaacgcctggttttggcccccgttcggcgctgaaattattacaggatgaagaccgggaatatggctatgtcatagagcgcggtaatcgctttgtcgggattgtctcgattgattctctgaaaacagccctcagcgccgggcaggggatcgaggcggcgctgattgacgccccgctggcggtggaagcgcaaaccccgctcagcgatctgctctcccacgtcggccacgctccgtgcgccgtgccggtagtggatgaagaacaacaatatattggcatcatttccaaacggatgttgctccaggctttagatcgcgagggggtgaatcatggctga

SEQ ID NO: 213346 - DNA, 963 bp, Klebsiella pneumoniae
atgacccatttaacgcgcgtcagcgcaatcaactggaaccgcattgatgacgataaagatcttgaggtctggaaccgtctcaccagcaacttctggctgccggagaaagtgccgctgtcgaacgacattcccgcctggcaaaccctcagcgcggcggagcagcagttgaccattcgcgtctttaccggattgaccctgcttgacaccattcagaacaccgtcggcgccccggcgctaatggcggacgccttaaccccgcatgaggaggcggtgctgtcgaacatcagctttatggaggcggttcatgcccgctcttacagctccatcttttccacgctgtgccacagcaaggaggtggatgccgccttcgcctggagcgaaagctgcgatcccctgcagcgcaaggcgcagctgatgctgggttactatcaggccgacgagccgctgaagaaaaaaatcgccagcgtgttcctcgaatcctttctcttctactccggcttctggctgccgatgtacttctccagccggggaaagctgaccaacactgcggatctgatccgcctgatcattcgcgatgaagcggtgcatggctattacatcggctacaagtaccagaaaggactggagatcgtcagccccggcaagcgcgaagaattgaaaaatttcgccctcgatctgctgatggatctttacgacaacgaactggcctacagccgggagctgtacggcgagagcggctggttcgacgacgtcagcgctttcctgtgctacaacgccaacaaagcgctgatgaacctcggctacgaggcgctgttcccggcggagatggcggcggtcaatccggcaatcctcgcagcgctgtcgcccaacgccgacgaaaaccatgactttttctccggttccggctcctcctacgtgataggaaaaatggaagagaccgccgacgacgattgggacttttaa

SEQ ID NO: 213347 - DNA, 2142 bp, Klebsiella pneumoniae
ttggcaacgacaaccgcagaacgtataaccgccgccgtggattttcacgccctcaacgcgatgctgaatttgtacgacagcgagggccgcatcccgtttgaaaaagatcgccaggcggttgaggcctttatggcgacccaggttcagcccaacgccctcaccttccccagccaggaggataagctcagctggctcgtcagcgagggctattacgatccgcaggtgctggccggctatgaccgcgggtttgtgctggcgttgttcgcccatgcccggcgcgctccgtttcgctttcagaccttcctcggcgcctggaagttctataccagctatgcgctgaagacctttgacggcaagcactacctcgaggatttcgccgaacgcagcgtgatggtggccctgacgctggcccggggcgatgaacagcaggcgcggcagctgacggaggagatactcagcggccgctttcagcccgccacaccgaccttccttaacgctggcaaacagcagcgcggggagctgatctcctgcttcctgctgcgtattgaggataatatggagtccatcggccgggcggtgaactcggcgctacagctgtcgaagcgcggcggcggggtggcctttttactctccaacctgcgcgaggccggggcgccgatcaagcgcatcgaaaaccagtcttctggggtggtgccggtgatgaagatgctggaggacgccttctcctatgccaatcagctcggcgcccgccagggggcgggtgcggtctggctgcatgttcaccatcccgatattttacgctttcttgatacccggcgtgaaaatgccgatgagaaaatccgcatcaaaaccttgtcgctgggggtggtgatccctgatatcaccttccagctggcgaaagaagatgcgcagatggccctgttctcgccttatgacgtcgaacggctgtacggcaaacctttcgccgattgcgccatcggcgacctctatccgcagctggtggccgacgagcgggtccgcaaacgctggatccgcgcccgcgacctgttccagcgcctggcggagatccagtttgaatccggctacccgtacatcatgtttgaagacaccgtgaaccgcgccagtccggtggccgggcgggtcaccatgagcaatctgtgttcggagatcctgcaggtcagtacgccgtccgcctataatgaagacctcagctatgcgcatatcggggaagatatctcctgcaacctcggctcgctgaacatcgcccataccatggactcgccggatttcggccgcacaatcgccaccgcggtgcgcgccctgaccgccgtgtccgacatgagcgacattcagtcggttccctcggtggcggccggcaacgcggcctcccacgccatcggcctggggcagatgaatctgcacggttacctggcgcgggaaggcattgcctacggcagcccggaggggctggacttcaccaatatctacttctacaccgtgacctggcacgcgctgcacacctcgatgcagctggcccgcgagcgcggccagcgcttcgccggcttcgagcagtcgcgctacgccagcggggcgtacttcgacaaatatctgcaggaggagtggcagccgaaaaccgaacgggtgcgcacgctgttcgcccgcgccggcatctctctgcccgaccgggaaagctggcgccagctgcgcgacgatgtcatgcgctatggcatctacaatcgctatctgcaggcggtgccgcccaccggctcgatctcgtacatcaaccatgccacctccagcattcacccgatcgtctcgaagattgagatccgcaaagaggggaaaaccgggcgggtgtactaccccgcgccatttatgaataacgacaatctggccctctaccaggatgcgtatgagatagggccggagaagatcattgacacttacgccgaggcgacgcgccacgtcgaccaggggctgtcgctgaccctgttcttccccgataccgccaccacccgcgatatcaacaaggcgcaaatttacgcctggaagaaaggcatcaagacgctctactacatccgtctgcgccagctggcgctggaaggcactgaaattgaaggctgcgtgtcctgcgcgctgtaa

SEQ ID NO: 213348 - DNA, 411 bp, Klebsiella pneumoniae
atgagcctcatcgtctacttctccagccgttcggagaatacccatcgctttgtgcagcgcctggggctgccggcggtgcgcatcccgctgaacgagcgtgaacatctgcgggtagacgagccctatattctcatcgttcccagctatggcggcggcggcaccgccggcgcggtaccgcgtcaggcgatccgctttttaaacgacgtgcataaccgccagctgatccgcggagtgattgccgccggcaatcgcaactttggcgacggctgggggcgtgccggagatgtcatcgcgcaaaaatgcgccgtgccctatctctaccgcttcgagctgatgggaacccccgacgatatcaacaccgtgcgtaaaggagtcagcgaattttggcaacgacaaccgcagaacgtataa

SEQ ID NO: 213349 - DNA, 246 bp, Klebsiella pneumoniae; identical to SEQ ID NO: 137650

SEQ ID NO: 213350 - DNA, 432 bp, Klebsiella pneumoniae
atgaaccaattacgtcagccattcagtgaactgagcccggaagtctataaagggctggtacaggccagcatcgcgctggagaaaagcgagctgggcaacgccctggtagagctggtttatttacgcgtctcgcagatcaacggctgcgccttctgtcttgagaaacatagccaggcgctgcgcaaaggcggcatggcgcaaagcaaactggatgcccttgcgggctggcgggtaagcgcccactttactccggccgaacgcgcggcgctggcttgggccgagtcggtcaccgacattgccgccagccatgcggaagatgaggtttaccagccgctgcgcgaacattttaccccgcgtcagataagcgatctgaccttcgccgtcagtctgatgaacgcctttaaccgcctcgccgtggccatgcgcctgtag

SEQ ID NO: 213351 - DNA, 1353 bp, Klebsiella pneumoniae
atggaagcaattaacctcccgctttatcagcgtatcgcccgccagttgaaatcggcgattgaacgtggcgaactgaccccgggcagccgtttgcccgccagccgggtgtacgctcaggagcagggcgtctcccgggcgaccatcgaaaacgcctggggagagctggtcgcccagggatggctcgagcggcgtgggcaggcggggacctttgtcagcgagcggctcagcccgcgccagctggcgccggtaccgccagtgcaaccggccgcgccgacggagccgctgccgtttcagatggggctgccggcgctggatctctttccgcgcgggcagtgggcgcgggtgatggggcgtcggctgcggacgcagtcgcggttcgatcttgcacccggcgatcccggcggcgatccgcttctgcgccaggctatcgtcgattatctacgcctgtcgcgtagtatcgactgtcagccggatcaggtgttgatcaccggcagctatgccgcctccatgaaccttatcctgcgtaccctggcgcagccgggacagcatatgtggatggaagatccggggtatccctttatccggccggtcgtcgaggctgggcagctggcggtggatgcgattcccgtggacgacgaagggatggacgtcggctggggccagcgtcatcacccgcaggcgcgatttgccctgctcacaccagcccatcagagtccgctgggggtcgcgctgtcgcttccccgacgccgccagctgctggcgtgggccgcggagcgcgacgcgtggatcattgaggacgattacgatagcgagtttcgctatcacggcaaaccgctgccgccgctgaaaagccttgatgcgccgcagagggtcatctacgcgggcaccttcagtaagtcgatgttcccggcgctgcgcaccgcctggctggtggtgccgaccccgctggtggcgcgttttcaccagaccgcggagcgccaatcctgcaccgttcccaccctgtggcagcagacgctggcggattttatccagcagggacatttttggcgtcatttgaagaaaatgcgcgccagctatagccagcgtagacagtggctggagtcggctctgcaggcgcagggctttcaggtcacaccgcagctggggggaatacaactggttatgtcggtcagcggcgacgatcggctgctcgcgcggcgggcggttgtggccgggctggcggtgcaggcgctgagcgactggcggattcgccacgcgggcgaggggggattattgatgagttttaccaatatacgttcgccggcgatggctgacggacttgcccgacggctgagagaggcgattgcgatttga

SEQ ID NO: 213352 - DNA, 348 bp, Klebsiella pneumoniae; identical to SEQ ID NO: 137653

SEQ ID NO: 213353 - DNA, 363 bp, Klebsiella pneumoniae; identical to SEQ ID NO: 137654

SEQ ID NO: 213354 - DNA, 450 bp, Klebsiella pneumoniae
atgttctctgcgcactcccgcttgcggcatgcggttgcagacacctttgcgatggtggtttactgcaccgtcgtcaacatgatgatcgaaatttttctctctggtatgacgtttgagcagtcgttatcgtcgcgtctggtggcgatcccggtcaacattattattgccgtaccctatgggatttatcgcgatttcgccatgcgtcaggcccggcgcatcagcccagccaggtggatgaaaaatatggccgacgtgctggcctacgtcacctttcagtcgccggtgtatgtcgctattctgtggagcgtgggtgctgactggcaccagattgtcgccgcggtgagctcgaacctggcggtatcgatgatgatgggcgccgcctacggctacttcctcgactattgccgccgcctgttccgcgtagcgccctatcagcaggcgaaggcctga

SEQ ID NO: 213355 - DNA, 402 bp, Klebsiella pneumoniae
atgtcttcaatgttacacaaactgaataatatccgttcactgcgtgccctgtcccgtgaattctccattgacgtgcttgaagagatgctggaaaagctcaggatcgtcactgaagaaaaacgtacgcaacagcagcaggcagctcagcagcaggctgaatatcaggagaaagtgaatacctggcttgaactgatgcgcgccgacggtatttctcctgacgagctggtggccgatattcagccgccaaaggcgggaggcaaaaagcgtcaaccgcgcccggcgaaatatcgttataccgatcatactggcgcagagaaaacctggaccggacagggaagaatgccgaagccgattgccgaggctgtcgcccagggtaaatcgctggatagctttttaatttaa

SEQ ID NO: 213356 - DNA, 180 bp, Klebsiella pneumoniae
atgtttgctgtcggcgatctggtacaaccccgagcgggcggaccaaaactgaaagtggtggaagtgcaaggggagcaactggtggtggttcaggccgcacaggagcagggagagcgctattcgctgaagtcggacgaggtcacgccgtatcaggaagagggagacttcggcgtctgctaa

SEQ ID NO: 213357 - DNA, 903 bp, Klebsiella pneumoniae
atgaagtatatcattctgttgatcattgttattgctgtactgtatgtccattaccgcggacgggtgcgctatcgtttctggcggcagctctccgaccattccacatttaccgcgccgctgaatggatttatgtatttattttcccgcgtgccgaatacgccttatctgcggccggagatgtttcccgagctggcgatattgcagcaaaactggcaggttattcgcgacgaaggtctccaccttcagcagctggagcagattaaagcggccgataaatataacgatgccgggtttaactcatttttcaaaaccggctggaaacgcttttatctgaaatggtatgaggatgcccatccttccgccagccagctctgtccgcaaactaccgcgctgctgcgcgatatcccgtcggtgaaagcggccatgtttgccactctgccggacggtagccgtctgccgcgccatcgcgacccctacgccggctcgctacgctttcatctgggcctggcaacgccgaacgatgaccgctgctttattgaggtggatggccagcgttacagctggcgcgatggagaaggcgtgctgtttgatgagacctatatccactatgcggaaaataccagtggtgagaatcgcctgattctgttctgcgatattgaacggccgatgcgctaccgctgggcgcagaaagttaaccactggctgggacgtcatctgatgagcgccgcttcggcgcccaacgatatcggcgatcgcaccggcgggattaaccgggcgtttcgctatatttaccagatccgtattgttggtaaacggttgaaaaaatggaataagacggtctattacatcgtcaaatggctgctcttcggcggcattgcctggcttatctggagcgcgttttaa

SEQ ID NO: 213358 - DNA, 546 bp, Klebsiella pneumoniae
atgaccatcgccaccttaactcccgccgaggcccaggcgcagattgcccagggcgccagactgattgatatccgcgatgcggatgaatatgcgcgcgaacatatccccgatgccgagctggtgccgctcgccactctgaccagcggtgcgcccctcaatgcccgggccggagagacggtcatctttcactgccaggcgggttcccggacgcagaataatgcgattcgtctggccgcggccgccgcgccggcgcagacctgcctgctggcaggaggaattcaggcgtggaaagccgcggggttgccggtagtggaagattcatcgcagccgctgccgctgatgcgccaggtgcaaattgccgctggcgtcctgattttactgggggtgctgctgggctataccgttaacggcggctttttcctgctcagcggcgcggtcggcgccgggctcaccttcgccggcgtaaccggcttttgcggcatggcgcgtctgctggcgaccatgccgtggaaccggcgccagggggttaaaacgcgctccagataa

SEQ ID NO: 213359 - DNA, 300 bp, Klebsiella pneumoniae
atgaccacacctgaagacctgcaggcccgcgccggagaagccgccgcgctgatgaaagcgatgagcaatcctcaccgattgctgatcctgtgcatgctgtgcgatgcgcccagggccagcgccggcgaactcgcccgggctacagggctgagcccctccgccacctcgcaacacctcgcgcggatgcgtgacgaggggctgatcgacagcgagcgcgacgcccagcgtatccactatttcattactcaccctgcggtacagcaggtgatcaatacgctgaaaacgctctattgcccgtga

SEQ ID NO: 213360 - DNA, 606 bp, Klebsiella pneumoniae
atggctaacgttctggttttaaaatccagcattaatggcgaaacatccctgacaaatcagttgattaacgaatttctcgcggcgcgccaggcggcgggacacggcgatcggctcaccgaacacgatctcagcgccatggcgctgccaacgctggatcgccccctgttcgccgccctgcgcggggcagtggatccgcagcctgctatccgcgaggcggtcgccctctccgaccagcttatcgccgagttaaaggccagcgacctgctggtgatcggcgcgccgatgtataacctcaacgtcccgaccgatctaaaaaaatggttcgacctcgtggcgcgggcgcgggaaacctttcgctacaccgagagctggccgcaggggctggtggagggcgtccgggcggtggtcgtcagcagccgcggcggtattcaccagggagaaactaccgacgccgtcacgccctatctgcgcgcggtactggggctgatggggatccaggaggtggaatttatctatgccgaagggctggacaatcgcccgcatggtcgcgacgccgggatcgccagcgcccgggcgcagattgcccggctcgccgttcaggcctga

SEQ ID NO: 213361 - DNA, 909 bp, Klebsiella pneumoniae
gtgcgcgacgatctgaatgcgatcccggtatttgtcaccgtggtcgagagcggcaactttgccagcgcggcggcgatcctccatgtgacgcgttcggcggtgggaaaaaccattgcccggctggaagcgcgtctcggcgtggcgttattccagcgtaccacccgacggcaactgctgacggaagagggggagcaattctatctccagtgccgggaagcgctggagcgcatccgcgaggccgaagagacgctgcagcgcggcaaagatgaggtgcaggggcggctgcgggtgtcgctgccggtgctgtttggccagcgctgcgtggcaccgctgctgttccgcctcagccagcgctatccgttactgaagctcgagctccactacagcgaccggcaggtcaatctgctggaggaggggtttgatcttgcggtgcgtatcgggagcctggccgataccgggtcgctgcgggcccgggcgctgggagagcacggcatggtgctgtgcgcggcggcggagtacctgcgccagcagccagcgccgcagactattgccgggttgaacgagcaccgtaccctcggctatctgcacaacggccagctgcaaaaatggcaactgtatgacccgcagcagggcgaagtgcgcttcagtccgcagacgtggctgatacaggatgattttgccgccatcgcggcggcagtgcagcaggggatgggcatcgcctggctgccggactggctggtggcgcaggcgcttgccgatgggacattgcagcaggtgttggcgcccagcgctcaggtgcgtttcgccatccacgcggtatggccggaggggccgtggctgccgcaaaaaacgcgggcggcgatcgatgccctgcgggaagggctacctcttaccgcaacacctggttag

SEQ ID NO: 213362 - DNA, 1788 bp, Klebsiella pneumoniae
gtggcaggcaatccctttcttctcgcaccagaggttaatgcgaatcccctgctgagcgattcgtggtctcgctgccagcgctacgggctggatcccgccaccgaggattttccccgcctcggtgccggcgagctggcggaccggctcgccagccaccgaggcctgcagcagctggcgcagccggtggtggaagccctgtcgcgccaggtcgcagacctgcagtcggtggtgatcctttccgaccccgacggcctggtgctgcatactctcggcgatacccaggcgctgcaaaaggcccagcgcgtggcgctggctcccggcaatctgtggagtgaaagcgggcgcgggaccaacgccatcggcaccgcgctggcgattgacgatggctgcgagatcgatggccgtcagcactttcttacccgcaaccagaatctgtactgcgcggcgatgccgctccagcgaccggacggaagcatcgccggggtgctggatatctccggcccggcgaattttccccaccagcacacctttggctgggtaaaagcggcggcaaagcaaattgaatatctgtgggtgaaacagagtctgcatcctgagcagtggctgatgagcctgcaccggcaggtggacaaactcgacagcgtcgaggagctgctgctggtcttttccgacaacgtcctcaccgccggcaaccggctggcgatgcgcgagttcggcctgagcgcggcgcagtttggccagctcacctttgcctcgctttttccgacgctgacgcaaacggcggtcagcgtcccgctgccgctgaccacgccgcagggccgctaccactatcgcctgcgggagcccacccgccgccgggtggcggtaagcgccccgccggccatgcatctcccctttaccagtccgcgcgaaggcgaaaagctgctgcggctgctcaacgccggcatcgccctgtgcattgaaggagaaaccggcagcggcaaagagtatgtcagccgcacgttgcaccggcacagccgctggcgcagcggtaaatttgtcgccattaactgcgccgccattccggaatcgctgatcgaatccgagctcttcggctaccagccgggggcgtttaccggcgccagcaaaaatggctatatcggtaaaatccgcgaggctgacggcggggtgctgtttcttgatgagatcggcgatatgccgctggcgctgcagacccgcctcctgcgcgtcctgcaggagaaagaggtcgctccgctgggcgccagccgcagcgtgccggtgaatttcgccttgatctgcgccacccaccgcaacctgacccagcgggtcagcgccggagaattccgtgaagatctgctgtggcgcctccgggaatacgccctggcgctgcctccgctgcgcgagtggccggcgctggaaacctttatcgccaccctgtggcacgacctgggcggtgcttcacgccgggtgacgctttcaaacgcgctgctggttcacctcagccagctgccgtggccgggaaacgtacgccagctgcagagcgtcctgaaggtaatgctggctctcgccgatgagggcgacacgctgacgcccgacgcgctgccggaggcgtatcgcgccgcgcctgcgccgttgccgcgcgggggattgcaggcccatgatgagcagttgattgtcgataccctggccagggtcaacggcaacgtcagccgggcggcgcagatactgggtatcgcccgcagcacgttgtaccgccgtgccgcccgtgccggacggcctcgtcgctga

SEQ ID NO: 213363 - DNA, 1521 bp, Klebsiella pneumoniae
atgcgttatgcacatcctggccagcccggcgccgtggtttcatttaaatcggcttacggcaactttattgacggtagatttgtcgagccgctgagcggtgaattctttatgaatacttcgccggtcgacggctgcaacattgcgcagtttccccgctcggatgccagagacattgacttcgccctcgacgctgcccatcgcgcggcgccggcgtggggtaaaacctcagtgcaacagcgctccaggctgctgctgcaggtcgccgatcgtattgaacagcatctggaatatctggcggtggcggagagctgggacaatgggaaaccgatccgcgaaaccctgaatgctgacctgccgctggcggtggatcattttcgctacttcgccggctgcctgcgcgctcaggagggaagcaccgccgagattgacgaaaccacggtggcctatcatttccatgaaccgctgggggtggtcgggcagattatcccgtggaacttcccgctgctgatggccgcgtggaagctggccccggccctggcggcggggaactgcgtggtgctcaagccggcggaacagacgccgctaagcattaccctgctgctggagctgatcggcgatctgttcccggccggggtgcttaacgtggtgcagggtttcggcaaagaggcgggcgaggcgctggccaccagcaagcgtatcgccaagctggcgtttaccggctccacgccggtcgggcggcatattctcgcctgcgcggcggaaaatattatcccctgcaccgtcgagctgggggggaaatcgcccaacatctacttcgccgacgtgatggacggagaagaggaatttattgagaaggcggtggaggggctggtgctcggcttcttcaaccagggtgaggtctgtacctgcccgtcgcgggcgctgatccatgaatccatctatgagccctttatggcacgggtcatggagaaggtggcgcagatccgccgcggcgatccgttagataccgacaccatgatcggcgctcaggcttcccgccagcagttcgacaagatcctctcctatattcagattgcccgggaagagggtgggcaaattctgaccggaggcgagcgggcggctatcgcgccggcgctggataatggcttttatattcagcccacgctgattaaaggtcgcaacgatatgcgttccttccaggaggagatctttgggccggtgatcggggtgaccacctttaaggacgaagcggaagcgctggctatcgccaatgagacccagtttggtctcggcgccggggtgtggacgcgggataccaacctcgcctatcgcatgggtcgcggcattaaagccggtcgcgtgtggaccaactgctatcatgtctacccggcgcatgcggcgttcggcggctataaacagtccggcgtcgggcgggaaacgcacaagatggcgctggatgcctatcagcaaaccaaaaacctgctggtgagctacggcaccgcgccgctgggcctgttctga

SEQ ID NO: 213364 - DNA, 582 bp, Klebsiella pneumoniae
atgaaaaaacaacctcgctttataaccatcctcataggaacgctgctttctggcgtagccttgcaggctaccgcggccaacactatcaatcctgactcgggcaccagttcggaaggcgccggcgggcaggtcatcttcaatgggtcaatcaccgacagctcttgcaacgtcgatagtagttctaatggccagaaggttgatctgggcaaatgggccagcaactattttaccggcactggttttgaaaccaccaaaacccccttccatatcaaagtgaaagattgcccggccagcgtgactacggtcgccgtgctgtttgacggcgcgcgcgatcagtctgataactccctgctggccatcaacggcggcgccagcggcgtagcgattaagctgtatgagcacgatcggtcgacggctgtcagcctcggtaaaacgtcagccaaacagacggtcactccgggtaccagcggcggcaccggctctgccgacctcgagttttacgccgactatatctccaccgcggcgaccgtgacggcaggtaaagccgacggtacagctaatttcaatatgatttataattga

SEQ ID NO: 213365 - DNA, 663 bp, Klebsiella pneumoniae
atgatgaagaaaataattgccgttgcggcttttctgctgtgcaccacggcagcgcaggccggtattgtcatgggtggaacccgtgtgatttatcaggaagggaagcgtgaagccgctatttcagtcaccaatgccgatacccatacgccctatctggtgcagtcgtgggtggaaaattacgcggaaaacgataaggccagggtgcccttcattgtaacgccgcccttgttccgtctcgatccggagcaaaataacgttctgcggattaactttattggcgcctcgctgccccgcgaccgtgaatcggtcttctggctgaacgtcaaaagtatcgccccgacgcctcagggcgaggtgaataagctgcaggtgaatattaaatcgaaattcaaaatcttctatcgccccaacgacctggcgggcgacccggcaaaggcctggcagcagctgaagtttagccagtccggcggtcggctgacggtgataaatcccactccctacttcgtctctttttacgccgtcgaagtgggcgggcaaagcatcgacgatcccggcatggtggctcccttcggcgagaaaacgtggccggtgagcgggcacggcaccgtcaaatggcgggcgattaatgactacggcggcgtcagcgatttcgcccagcagtaa

SEQ ID NO: 213366 - DNA, 2556 bp, Klebsiella pneumoniae
atgaaaagaataacaacagccagggtgcgggagtatgccttgttgcccgttaccgccgggcgggcggtggcgctggcgacggtgccgacgatgatgttttgtctcagtccgttgagccgggcgctggccgacgactattttgacccggcggcgctggagtttgctgacccgcagcagcaaacctccgatctgcactacttcgccaaacccggcggccagcagccggggacttatcctgtcaccgtggtggttaatgaccaggagctggatcaggctgatatcacgtttgttgacgatggcgggcagctgcgcccggtgctgacgcccggtcagctggcggagtatggcgtcaacgtcagcgcgtttcccgcctttcaagcgctgcatgaaggcgaaaccttcacccggatcgagaagtttattcccgacgccagcagtcggttcagcttcgctaaccagcgcctgacgctgagtattccccaggcggcgatgaacgtgcaaagccgcggctatgtcgatccgtcgcgctgggacgatggcgtgccggccgcgtttgtcgattactatttttccggcgcgcaaataaagaacgccgacgaaggggagagcagccgctcaaactatctcaatttacgcagcggcctcaacctgggcgcctggcgactgcgcaacatctcctcaatgcagtatgaccagcagcgccggcactgggatacccagagcacctggctgcagcgcgatgtccgctcgctgaagagcttgctgcggatcggcgatacctataccaccggcgatgtgtttgacagcatacagtttcgcggcgtccagctgatgtctgacgatgaaatgctcccggacagccagcgcggctttgcccccaccattcgtggcgtggcgcacagcaatgccaaagtgaccgtctctcagcacgggtatgtgatctacgagacctttgtgtcgccgggggcgttcgccatcagcgatctctaccccacctcgcagagcggcgatctggaggtgaaggtgaccgagagcaatggcgcggtgcgtacctttacccagccctattccgcggtgccatatatgctgcgcgaagggcgcggcaaattcagtctcagcgtcggccgctaccactccgggggggagtcggtgcgctcgccggaatttctgcagggcactttgttctacggtttgacggcgggattcaccctctatggtggtacgcagctggcccgggactatcaggcgtgggcgctgggcctgggccgcggttttggcgagttcggatcgctgggaggggatgtcacccaggccgtcacccgtacgccgtcgggcaagcgctatacgggccattcgctgcgcgctcagtatcagaaaaattttgtcagctcgggcactgcgttcagcctcgccagctatcgctactcgtcaagcggctattacgattttgccgaagccagcgcccttgaaagcgcccaggggcaagtagacaaccggcgtcgccgggaagagctgtcggtgtcgcaaagccttggtggcctgggcagtctggcggtttccgcctggtcgcaggagtactggcatcggcagagtcgggatgagacggtgcaccttgggttctacagcgcctggaaagggatctcctggggcgtgggctattactacacccgcgccagcggccagcaaaaaaatgaccgctcctggtcattcaatatcaatattccgctgggtggtccgctgtccgacagcgcggtgagctacaacaccacctcggacagcaatggctatacctcgcagcagatgtcgctgtatggcgcggtgccgacgcggccaaatctgttctactcggttcagcaaggttatggcaaccagggacgaggcagcaacagcagcgcctccctggactaccacggcggcttcggcaacgcccagatcggctatcgccatgacgccgccagcaaccagttgacctggggaggcgccggctcggtggtcgcgcatccgcacggcgtcaccttcggccagacggtgggtgagagcttcgccatcgtccgggcgccgggggccgccggcgtggcggtgcaaaacggcaacaatgtgcacaccgactggcgcggctatgccgtggtgccctccctgaccgcctaccggaaaaatgtcattaccctcgatacggagtcgatggccgacgacaccgacgtcgaccagcaggggcagaccgtgatccccggcggcggcgcggtggtgatggccaactaccagacccacattggcaaccgggtgctgtttaccctgcgcaatgcccaggggccgctaccgtttggcgccagtgcgcggctggtcgaggaggaggagagcggcaatccgccgggcggcatggtggccgacggcggccaggtgtatctcagcggtgtgccgcaggagggaaccctggcggtgagttggatcgtcaacaaccagtcgcagagctgcacgctgcattttcatcttccggataacccacagcagagtctgaatacggtgaaaaccgtctccggactgtgccagacacgctga

SEQ ID NO: 213367 - DNA, 1095 bp, Klebsiella pneumoniae
atgaaatctgtttttcgtctacttcctttcctctttctgctggggctgagcgcctatcttcccggcgtgcgggctgaaacctgccgcgcaaatatcggccagaccacggtcaatattcctaatatcaagtatttacccacgctgccgatcaatacccagatgaccagcgcgatggcggataacggcagcgggatccctttttcctgcgacctgcagctgccgacggcgagcgccaaacgcatcgtctataagcagctgaaaaccggcggctcgccgatggtgattaacggacagcatgtctaccccagcgctatcgacggcattggttacgccctcagcttccagtgcgccggcggcccgatgcgtgccatcgatggcagccactccgccggcggcgagtcggtggtggtatgcgacagtgcgacgctcccggcgctgatgacgcagcagcaaaccacggtgaggattgcggtaaccttctataaaaccggaacggtgcaactggcggacgggacgcataccaactcgccgccgctgccgcaggtgggggagatgaccattgaacagcagaccagcgcaagcgccagctttgtcgccagcgcgccggtcagcatcgatatcgccgccctgaatgtggacattggcagcagcggcagctgccaggtagcgacatcgacgatccaggtcagtctgggtacggttaaccggggggagtttcatggcaaagggactaccggcggccaggcgaagcgcttttcgattccggtcttctgtccgacgccgaccgacgtgcgcatcggctttttcggcgtcagcgtggagagcgataccctggccctgagccaggccagcaacagcgccagcggcgtcggcgtgaagctgacctacggcaataaccccggtgcggcagtgcccgacggcaccagcgttaagatcaatgaggccagcaacttgccgatcctgaaaagggtgaccggcgccagcgccggtaccgccgaggcgatcaatttcaacgcccagtatgtgcagactgacgccacggtgggagccggtacggccaacagcatggtgactttcgccctggagtataactag

SEQ ID NO: 213368 - DNA, 1029 bp, Klebsiella pneumoniae
atgcgccgacttagcgatacgttatttctgacatggctttccgttctgttcatgctgagcgccttcccggcgcaggcgctgacctgcaagaccacctcgtccacgatcagcgaagtcgtgaatatcgagagcatcattaaagtctccagcagcgagcttattgccaataaaaagatatgggtctccagccctattaccgccaccttcagttgcgaagataccgataattttccgaacggtgaaagcgcctatttctggctggatccggaaaataaagccagcagcttgcccgactttatccaggtaggcattacttacaacggcatcgactatctgctacaaaataaaaaatcggtggagattggcccggcgacgctgtgtgataaaagcgggaatacctgtaagtccccggccattgggcagacattcagcctggtttaccaggtctatatcatctcgacgggccgcagagtgaccggggaaggtaaaatagacgataacctaaaattgtcgctttttcaggtagatggccaaggcggtctacgcaacggcaccgctggcgccaactataatcttttcattaccggcctgaaccgtatcagaacaatggcctgcgtccccacggtatctatttcgccaagcgaaattaactttggcgatattcctgccggtaacgcccgaccgggctactatgaaaaaacacgcccctttaccgtcacctatggtctggtcaagcagggtaacggcagtgattgcgggaccgaacctatgcttgctacgtttagcaccactaatacgatacaggagagcgccattattttgccgcagcccgacagcggcttcggcattgccatctcgccaaacgccagcatgcatccccttattgagatgaatgctccgattcactttacgctggcaacgggcgcgaccctcgcgagcacctatacggcggggctgctctggttgtcgagaacgccgaagctggggcctttttccgcgaccgccaaaatcaccgtgacctttgaataa

SEQ ID NO: 213369 - DNA, 2538 bp, Klebsiella pneumoniae
atggacgatagtaaattacgctattttgccagcgcatggttaatctccatcacgttaccggcagacagcgcggaacgctataatgcccagtttgtgaacggcatcgacccgctggcttttaatcagtttgtcgccagcgatggcgacgtcatgccgggcacctatgacgttaatatttacattaacgatctgctggtggatagccgccccgttcgcttctcagaggatagcgcacacggcgggttggccccctgcctgagcgcggcggaatatatccgctatggcgtcaagattgacgatgaccaccagccctgtttcgcgctgtcgcagacgatccgccaggcagagcaacagctggatatcgctaatcatcggctgatcatacatatccctcagcaatatattgagcactatcctcgcgactatgtttcccccatgcgctttgatgaaggtattaacgctgctttcgtcaactacagctattctaccgatgccaataatggcgacgggggcagccaccagtaccaatatctttcgctaaacagcgggatcaatattgcatcgtggcgattgcgcaataatgcctactggaataagttcagcggccaggcggataagtggcaaagcatcgccagttgggcggaaacgaacatcattccctggcgcagccggcttgtcgtcggccagaccagtaccgacaacagcgtcttcgatagcgtccagtttcgcggcgtacagcttggcaccgatgtcgaaatgcgccccagcagccagaccggcttcgcgccggtcattcgcggtgtggccaacagcaatgcccgggtggaagttcggcagaacaactatctgatttacagcgagaacgtcccagccggtccctttgagctaaatgatatcagcgccgttaaccgcagcggtgatttctacgtgaccgtcattgaagccgacggtagccagacgacctttactgtcgcctacaccaccctgccacagctggtgcgggcaggccaatggaattatcagctgtcggcgggtaagtatcatgacggcgctgacggctatgcccccgccctgatgcaaagctcgctctcttatggcctgaataataccttcacactatacggtggcgcccttgcagcggagaactatcgcgccggcgcctttggcgtcggtagcaatctgggggagattggcgccctctcagccgactatacgctggcgggaacgacgctggcgaatggccagcgcaagcagggagggagcgtgcgttttctgtatgctaaatcctttttatcaagcaagaccgactttcaaatcgcgggctaccgttactcaacggcaggttattatagcctcagcgatgcggttaacgagcgtcgacgctggcacaatggcctgtacgaaaatgattactggccctctgacgaagacgaaagctggctggcaagcgctccccaacactattacacgtcctggttttataataaaaagcatcgctttgatatttctgcccggcaaactctcggtaagaacagcgctttcttccttaacttcagccagcaaaattactggaatagctcaggaagcgatatctcgctgcaggcgggctttaacagcactatccataacgtgaactatggtctgtactatcagaatacgcgcagccacttcacccatgacgacaatagcatcacactgcgcgtttccatcccttttactctgcaagaaaaccgccggatcaataccgcatttaccctcgcccacagtaaatcgtctggcacgtccgggcaggctggggtaaacggcacgctgctcgatgatggtcgcctgagctgggccgtcaccagcgcctatgatgacaccagccatagcaccaacagcgccagcctgggttatctcggccagtacggtaatctgtataccggctacgcctacagcaaaagccatcgtcaggcgagtctgaatctgagcggcggcgtggtggcgcaccgcggcggcgttaccctctcgcaaccgctgggctcaagctttgcgctagtggaggccaaagacgctcagggggtagggatagagaatcagaccggcgtgcgcatcgatcccttcggctacgctgtcgtaccacaaagcgttccctatcgggtcaattctgtcgcgctcaaccctcaggacttcgatacctttcttgatgtccctaacgcggtagcggataccgtgcctacccgcggggcaatcacccgggtgcgctttgatacgttccggggatatagcgtgctgatccataccaccctcgccgacggcagctatccaccattgggcgcacagctctatcgcgccagtgggatcagcaatggtctggtcggcccgggaggagaagtttacgtcagcggagtcgattcaggcgaaaagctgcagatgaaatggggcgaaacgcaccagcaaagctgcgaaatcaccctgcccgaactgcgccaggagcctcagcaggcgacggcctggcgtgaattatccttaatctgcacagtaaccccctcgaggtaa

SEQ ID NO: 213370 - DNA, 669 bp, Klebsiella pneumoniae
atgaaaacgctgctggcagtgatcataggcgctttggcttttcagacccaggcggccattaccatcgatgcctcacgggttatttatttgggcaaagataaatcggccagtctgaaaattaacaaccgaagcagcaaaaactatatcgtccagacctggcttgatacgggtccggagacccccagcagcggcttacccattgtggccacgccgcccctggtcaaattacgccccgagcaatcggcacaactgcgctttatttactcaggaaccggtcttcctgccgacagggaaagtctgttttgggtgaatattcaggaggtccctcctgcgcctgaggaaaataacatcctgcagttcgcaattcgcactcgattaaaactattttatcgcccgcaaggaattgccacatcgctgcccaaagccgttgaaaatctgcagtggcagcaaagcgctaacacgttatcttttactaacaacagtccactgcatattacggttattaatgccgaggcgatcgacaacaaaggcaaaatctatcctctgaaaaactttatgttgctgccgtacagtcatcacgctgtcaatatcgccagcatgcagcgcttgcataaaatgaaatatattaatgattacggcgccgttgttgatattccaataaaaaaataa

SEQ ID NO: 213371 - DNA, 549 bp, Klebsiella pneumoniae
atgaaaatgaaatcactttgcctggcaatggcactcgtcggcttgacctcacactatgccgccgcggcggacggtacgctgtatttttcaggtacaattgtcaactcaagttgcaaactggcaagcggcaatgagaagggtctcattgaagttaagatgggcgctgttccgctgtctaaattaaaaaatgataccaatggcaccgggccagaagttggggtcaatattagcgtcaaagattgtgaagcgggcacgtactatattgtgctcgacggtgcttcagccaacgaggcgcctatcactaacgtactggctctcgatgcgggtaatcctacagctaaaaaagtcggcattaagctaaccgaccgcaataataccccggtcacgctcgataaacctttcgatcccaacgtcgacccgagtattacggtcaatgccgatggcaccggtaccttcaacctgaaagcctactactatacctgggataaagacaacgccgaagctggcgacggcaatgcgaccgccaggtttaccattatgcaggaataa

SEQ ID NO: 213372 - DNA, 702 bp, Klebsiella pneumoniae
atgatcctgcttatcatcttatttactcccctcctctccagcagtaatacttggttacagaagcagtgtataaggaaatacattatgattattatcatttccgccaataagttttttattaacggcatccggtctctggttaacatgaccatgagtgctcaacgtcggtatagtcaaacattgtttctggataatatttctgacgtgaatgataaaagtctaaccatagccagaaccattatcgtggactatagccacccggacattcaacaattagccgcactgctctatcgtaaaaaaaagatcattcatggcgatatcgtttttgtcgttaaaagtgagattcttgccgatccagtcgaaaacattatcataaactctatttcgacgatcgtgcttgattatatagatgttacccaacggctgcagaaatacttacagaatgcgtctgatcatcgctgtattaaagtgttcagaaaatcaattagctcgctggacagttgtgtcaatattaaacttacgaaacaggaggactctcttctcccctatatcatctcaggtttaaataataagaaaattgctcaggccaccgaccttagcaatatgatgatcagtcactatcggagaaacatctaccagaaactcaatgtccgcaatattgcaggcctgtatcatttcctccactccctggaggggggataa

SEQ ID NO: 213373 - DNA, 762 bp, Klebsiella pneumoniae
atgagactgacggtggggctggcgctgacgctggcgataatgacctgcggcgcccaggcgcgcgatatgcaatccatcgagcacagcggtgaactgaaggtgggcgtgccgggcgattacgcgccgctggcgtttcgcaatgccgccggcgaactgcagggctatgacgtggacatggctcgcgatctcgggcgcacgctcggcctcaaggtgagcttcgtctacaccagctggcccgcgctcgccgccgatctgcaggcggacaagtttgatattgcgatgggtggggttaccgagaccccggcgcgggcgcaagccttcgccctcagccatccggtggtggcgaacggaaaaatcgccttagccaactgccaggccgccccgcggctcggttcgctggaaaaaattgaccgtccggacgtgaaagtgatcgtcaaccctggcggcacaaaccagagttttgtcgatgaacacatcaagcaggcgcaaattattcgcgtgcagaacaatgtcgataacctgcaggcgctgcggcagaaaacggccgatatgatggtgaccgatctgattgaaggtgactattaccagagcaaagagcccggcgtgttctgcgttgctaacgaaacgccgttcgccggtaccgccagcaacaaggtgtatatgatgagtaaagataacccggcgctgctggagaaagtgaaccagtggctggatagccaggacaaagaggttctcaaacggaagtggaaaattcgcggttaa

SEQ ID NO: 213374 - DNA, 621 bp, Klebsiella pneumoniae
atgtctctgttacgaagcttgctattctttctcggcgcggcggtcgcggccgccctcgcggtactctgcctgtgggtggatattcgggtgtttggcaacgacatcccggaagtgtcgctcaccgaagtggtccaggagagcgtgctggccgttatcgtgctggttcatctgctgctggcgcggaaatatgcccacttgcgctatagcaatatcctcatcggcggcttctttctcgccatgctgatccgcgaactggatggcctgtttgatttactctcccacggcagctgggtgtggtttgccctgctggccaccgcggggtcgctgctgttgccgttgcgccatctgcgtcagaccctgtcgcagctggcggagtatacccgcaccccgtattacgggatgatgattagcggcctgctggcgattctggtcttctcgcggctgtttggcatgcacggcctgtggtacgccgtgctggaagagaactacgcccgggtggtaaaaaatacggtggaggaaggcagcgagtcgtttggctatatgctgtgtctgaccgccaccctcggctacgcctgctactttcgcggtctggcgcgacaggcgctgtcgccgcagcgctaa

SEQ ID NO: 213375 - DNA, 795 bp, Klebsiella pneumoniae
atgaagattgatttagcgggaaaagtcgcgctggtcaccgcctccacggcgggtattggcttcgccatcgccaaaggcctggcggagagcggcgcagagatcatcattaacgggcgcagcgagcagagcgtgaacgccgccatcgctcgtctgcaaaatgaggtgccgggcgcgaaggcgcgccccgccatcgccgacctcagcgacgccgacggcgcagcgcagctgctgcgggccgtgaccggtgtcgatattctggtcaataacgccggaatctatggcccgcaggatttctacgccaccgacgacgcgacctgggacaactactggcagaccaacgtcatgtccggcgtacgcctgtcgcgggggctgctcccggcgatggtcagtaaaggctgggggcgggtggtgtttatctcctcagaatcggcgcgcaatatcccggcggacatgatccactatggcgtcaccaagaccgcgcagctgtcgctggcccgcggcctggcgaaatatgtcgccggcagcggagtgaccgttaacagcgttctgccagggccaacgatttccgacggctttgccgaaatgctgaaagacgacgtggcgaaaaccggcaagtcgctggaggaacaggcgaaagcgtttgttatgacccatcgtccgagctcggtgatccagcgggcggcctcggtggcagaggtcgccaatatggtggtctacgtctgctcgccgcaggcgtcggccacctccggcgccgcgctgcgcgtcgatggcggcgtggtggatgatattctctga

SEQ ID NO: 213376 - DNA, 933 bp, Klebsiella pneumoniae
atgtctgatatcactatcgtggtggattgtaacgacgcggatttcgcccgcgatatctgcgccgccctgcagcagtttcccgacgtcacggcgcttctgccccatcaccaggcggtgcgcgacgcccagtacgccagctgctggttcccggacccgcagctgttgacccgttcgccggggctgaagctgatccaggccgcgtccgccggggtcgatcatctgccgcccgcgctgttcgccagcgagatcccgctgtgccgggtgatcgatgaagattttcgccacggcatgttcgaatatgctctgtggagcgtcctgtggtttcagcgccatttcgaccgggcgctggcccaccagcgaacccaaacctggaagctctatccccagcgcgccgccgccgacttccatatcggcattatgggtctgggcgaaattggcggctatatcgctgaccagctggcccgcctcggctatcgggtctccggctggtcgcgcagtgaaaagcagctgactggtgtcacctgctatcgcggcgaggaggcgctcgaccactttcttgggtcgcttgacgggctgattaacctcctgccgctcaccgcgcagacccgaggtatccttgccgcgccgctgttcaaccggctacccgccggagcggtgttgatcaattgcggccgcggggagcatatggtcaatgacgatgtgctggcggcgctggagagcggccagctcgccggggcggtgctcgacgtcttcccgcaggagccattgccggcggacgatccgctgtggcgccatccgcaggtggtcatcaccccgcatatggcctctgcggcccctgccgaggtgatcgcccgccagttgctggagaacattcagcgccagcgccgcgggctgccgctgaagaacctggtcaataagcacgccggttactga

SEQ ID NO: 213377 - DNA, 729 bp, Klebsiella pneumoniae
atggcaaccgagcaacacctgcgccagcagctggccgccgcctaccggctggcggcgctgttcggctgggaggataccctctacactcacttctccgtgcgcctgcccggcgacggcgagccgcgttttttaattaatcccttcggcatgatgtttgacgaagtcaccgccagcaacctgatcgtagtggatatgcagggtaaggtcgtagagggcgacgcgccggctaactcggcgggctttaccatccatagcgcggtgcatatggcccgggaagacgcccactgcgtgatccacacccatacgctgccggggatggcggtggccgcctgcgaggatggcctgctgcagctcaaccagatcagcaccgaattttaccagcgcgtcggctaccatccctatgaaggggtggcctttgacctcgacgaacgggcgcgcatccagcgctcgctggggaataatatcgccatgatcctgcagagccacggcctgctgtcggtgggccgcaccgtggctgacgcgttttacatcatgtactacctgaaccgcgcctgcgagatccagatggccgccgcccagctggcggccctcagcccgatccacaccatcgctccgcacctcagccagcacgcctgcgagcagctgatgggcgtggagcatgaacgtcaacaggtctggcaggcgtggctgcgccgtcttgaccgtctcgatacctcttacaaagactaa

SEQ ID NO: 213378 - DNA, 1521 bp, Klebsiella pneumoniae
atggcgttcgattggggatactttttttcattgtttagcattggggcattctggcaggcgtgcgtgaccgtcatcgtaatcagcaccttgtcctgggggatcggcctggtggtcggttttctgttagcctgcgcgaagctctcggcgccgcgctgggtcaagatccccgtcgaactctatatctggttttttcgcagcgtgccgctgatggtgctgctggtgtttgtctacaacctgccgcagctgtttccggtgacccagccgctgctcggggtgccgtttatcgccgggctggtgtcgatgaccgtcaccgaggcggcctatatggcggagatccaccgcggcgggctgctgtcggtggccaaggggcagagcgaggcgggccatgcgctgagcttcagctttatcggcatccagcggctgatcgtgatccctcaggcgtttcgcatctcgctgccgacgctgatcaatgaatacatcaccatcattaagctgagctcgattctgtcggtagtctccttacccgagctgctgctcaccggccagcgcttgtatgcgcagaatttccttgtgatggagaccctgctggcggtagcggtgtactacgtgatggtggttaccgtcttcacctggctgttccgggcgctggaaaatcgtctcgatattcagcgtaagcgtccgcaaaccctcagcgaggcggaatgccaggcgctgcgccagagcctgccggcgctgagcgaagagagcaacaccccggccgtcaatggcgcgccgccggcgctcgatctgcggggcattcgcaaatcctgggggcagcatgaggtgctgaaaggcatcgatctgcaggtggagaacggggaggtgatcagcatcatcggcccgtccggctccggcaaaaccaccctgatccgcaccatcaacgccctcgaaagccttgatggcggggagatcattctctacggcgaggactatcttaagggcggagctatcgtcgacaaacgccagatgcgcgccggggtgcggcgcatcggcatggtcttccagagcttcaacctgttcccccaccgcacggtgctcgacaacgtgatgctggccccgcgctatcaccagctgctggaccagccggtcgcccgcgagcaggccctggcgctgctcgaccgcgtcggcctgctggcccatgcccacaagtaccccggacagctctccggcggccagcagcagcgcgtggcgatcgcccgggcgctggcgctgaagccggacatcatgctgtttgacgaaccgacctcggcgctggatcccgagctggtaggcgaagtgctgaaggtcattcagtcgctggcccgcgaaggcatgaccatgctgattgtcactcacgagatggacttcgccctgtcgatttccgaccgcgtggtgctgatggagaacggcgtggtgcaggccgatatcgccccgcaggtgatccgcagcccgctggaggcgccttctctgcaacgaatccgtgaatttatgggagtacgctaa

SEQ ID NO: 213379 - DNA, 804 bp, Klebsiella pneumoniae
atgactagcaccctgaaaaaaatctcgcgccatgtcgcgcttaccctcgccgtcagcgcctgtttttcccctgtcacccaggcggcggaactgctgaccgagggcgtctttaaggtggggatggaggtcacctacccgccgtttgagtcctatgacagcaataacaatatcgtcggtctcgacccggagtttgccgcgctgatcgcccaacatctgcaggccaaaccgcagctgatcgacaccaagttcaccagcctgatcctcggcatcggcaagaaatatgacgcggtgatctccgggatgtacgtgacgccggagcgccagaaacaggccgacgccatcccttacgccctctccggcgcgtcgatcatcgccctgaagggcggcgcggtgcagccgaaaaccgaagatgagctgtgcggtgtgaaggtcggtctgcaggcgggcaccacctgggtgaccagcctgaaaaaacactccgatgagtggtgcctgaaaaacggcaaaccggccatcaccattcaggagttcccgacggcgccggaagcctcccaggcgctgctgtcgaagaacatcggcgcccagcttgagattgccccggcggcgcagatcattgtcgacaagagccgcggccgcctggcgataagctctacgcgcctggtctacccgctgccgctggggatctacgtcgccaaaggcaacaccgagctggcggaggcgatcaaggccaccctggccacgctgaaggccaacggccaatatgccgcgttgatcaaaaaatacaacttagaaagcatcgattaa

SEQ ID NO: 213380 - DNA, 1068 bp, Klebsiella pneumoniae
atgaccgccgtgaagcacgcttttactgaactcccgaccatcgatatccgcgatctggccggcgatgacctcgccaggcgtcaggcggtggccgacgccatcggccgcgcggcgcgcgaggtgggctttttctacatcaccggccacggtatcgacccggcgctgatcgccggcatccgcgaggcggcgaagcagatcttcgccctgccgatggaggagaagatgaactattacatcggccactccaaaagccataagggctacgttccggaaggagaagagatctacggctccggcaagccggaccataaagaggctttcgatatcggcttccaggcagcggatgaccatccgctggtgctcgccggtacgccgctgatcggcgccaacgagtggcccgatctgccggatttccgcgcgcgggtgctggcctactacgacgcggttttcgccctcggccaccgtctgttcgacgctttcgccctcgcgctcggcctgccggaagggtatttcaaaccgatggtgacctgcccgccggctaagctgcggctgatccattacccgttcgacgccagcgtcgaagatgttcccggaattggtgcacacaccgactatgagtgcttcaccctgctgctcgctgaccagcccggccttgaagttctcaatgaagaaagcgtgtggatcgatgcacctcccgtcaaaaacgccgcaggagaagaggcgttcgtgatcaatatcggcgacatgttggaagtgctcagcgctggcacatttgttgctacagcccaccgggtgcgcaaagtgccgcaggagcggtactccttcccgctgtttttcgcctgcgattaccacacgctgatccgcccgctgccgacctttctcgccgccggcgaagccggtgaatatcaggagctcagcatcggggagcatatgtggagccaggccctgcaaacctatcgctacctgcgcgaaaaggtcaatcgcggtgaacttcagctaccggagcgcgcgcgcggcaccaatacgtttggccatttgaaaaaacaggctcagcaaaaaaacccctaa

SEQ ID NO: 213381 - DNA, 864 bp, Klebsiella pneumoniae
atggagctgaaatgctttcgcaccctctggggagtgacgaccccctggccgcaaacgctggatgaactgcagcgcgtcggctgctgcggtatcgaagcccgcgtgccgttaacggtggccgagcggcggcagctcgccgaccgcctgcaggcgtcggggctggagtatatcgccattcttttcagcggcggcggggtgctccccgcccagcatgaaacgcccgagcagcatctggcgcgcctgcagtcccgcttcgccgaggccagcggcctcaacccgcgctttgtcaatctgctcgcgggcaacgatcgctggccgctggcgcagcaagtcgattttctcggcaaggcgcatgagctggccgccgggtttggtttgacctgcagctttgaaacccatcgcgccacctcgctgtacagcccgtggctcaccctggagatcattcagcagctcccccagctgcgctttaccgccgacatcagccactgggtggtggtcagcgagcgcctgctggatgaccccagcgatgacttcagcgcctttatcgaccgcgtgcatcacgtgcaggctcgggtgggctacgaccaggggccgcaggtgccgcacccggcggcgcctgagtatcagccggcgctggcttttgccgagcgcttctggcagcaaatctggcgttcgcagcgccagcgcggctacccgcagaccacgctgaccccggagtttggcgccgacggctatctgcaccatctgccgttcaccaacgttccggtggccgatctctggtcgctcaacgcctggatggccgcgcgccagcaggcccactttcagcagtttttatcgctcactgaacaggaaccgcagccatga

SEQ ID NO: 213382 - DNA, 951 bp, Klebsiella pneumoniae
atggataacctctttcaccaaccgcagggtggcaatgagatgccacgcttcgccggacgcgccacaatgatgcgcctgccgtttatcgaagatttacagggacttgacgcggcatttgtcggcattccgctggatatcggcacctcgcagcgctcgggcacgcgctacggaccacgctatattcgcgccgaatcggtgatgatccgtccgtacaatatggcgaccggcgccgcgccgttcgactcgctgtcggtggctgatatcggcgatgtgccgatcaatacctacagcctgctcaaatcggtgcaaattatcgaagattactacaccggtttgaatagttatccgctgatcccgctgaccctcggcggggaccacaccattaccctgccgatcctgcgggcgctgaccaaaaaacatggtccggtggggctcatccacgtcgacgcccatacagacaccaatgatgagatgttcggagagaaaatcgcccacggcaccaccttccgccgcgccgtagaggagggactgctcgacctcaaacgggtggtgcagattggccagcgcgcccagggctatgccgccggcgacttccagtggggcgttgaccagggatttcgcctggtgcaggcggagcagtgctggcatacctcgctggcgccgctgatggccgaagtccgccagcagatgggcgacgggccggtgtatctcagctttgatatcgacagcctcgatcccatctgggcgccgggaaccgggacgccggaagttggcggtctgagctccattcaggcgctggagatcgtccgcggctgccgcggcctgaacctgattggcgccgatctggtcgaggtctcgcccccctacgacgtgagcggtaatacctcccagctggcggccaacctgctgtacgagatgctctgcgtcctgcccggcgtgaagtacgcctga

SEQ ID NO: 213383 - DNA, 912 bp, Klebsiella pneumoniae
atgcatcacgacgccagcctcaatattcgccagctgcaggttttcgaggcggtggcccgcctggagagctacagccgggcccagcaggagctgggtatttcggtctccgccatcagcaatgccatgtcgcagctagagggacagctcggcttcaccctctgccagcgcgggcgcggcggcttttctctgaccgagaaaggtcagcagtttttacagcaggcgatccgcgtactgagcgaactcaatgagctggagcggcagtcggcgctgctcaaaggggagcacagcggcaccctgtgcatctcgacgctcgactccatcgagaccgaaacggcgctctcgctgccggtggttctgcgcagcttcagcgacaaatttccccatgtgcatatcaaactgattatccgcaccccggcggagcaactgaacggcgtgctgaacaaccatatcgacctggctatcggcagctacaactcgcaggtgcataacatcatcagcgagccgctgtaccgtgaacagcactggctctactgcagcgatctgcacccgatgttcttcagccgccagctcgataaagagcagatcagccagtgcccgctggtgacccgcagctactggaacaccagcgatctccgccgtcggggcttcagcaaagggagcgccaccgtcgagaccgtcgacgcccagctgctgctgatcctctcggggaaatatattggctatctgccggagcattacgcctggccgtggatcaaagagaaccgcctgcgggtgctgctgcccaacgagtttggctttcagtcgccgttctcggccatctgtaagcgcgggcgcagcaatgagccctacctgaaagcgttccgcgacctgctgaagaaaaacacggtggcgcggccgaagtggaattattaa

SEQ ID NO: 213384 - DNA, 480 bp, Klebsiella pneumoniae
atgttagattaccgcttcccgacagctttgcagatggttctcagcgtagcaatggcggagcagatgggtgaacgttcgacgagtgcgattctggcctacggcctggaagcgaacccgagctttatccgtaaactaatggttccgctaactcgtgacggcattatcgtctccacgcttggtcgcaacggctcaattcatcttggccgtccggcggacaagatcaccctgcgtgatatctatctttcggttatcgaagataaaaaactgtgggcgtcgcgtcctgacgtcccggcccgctgcgtggtcagcgccaacgcctgctggtacttcaaatcggttgccgatgaagcagagcaggcttcgttaaacgtcctcgctcgccataccgcggccagcgcgctggaggcggtcaaaaacgccgataccagcggctgcgacccggtgccggaaatgatcgcccgctttaaaaaagcgcattaa

SEQ ID NO: 213385 - DNA, 3153 bp, Klebsiella pneumoniae
atggacttttcccgcttttttatcgacaggccgattttcgccgcggtgctgtcgattttaatttttatcaccgggttaatcgctatcccactgctgccggtgagcgaatatccggatgtcgtcccgccgagcgtccaggtgcgcgcggagtatcccggcgccaacccgaaagtgattgccgagaccgtggcgacgccgctggaggaagcgatcaacggcgttgaaaacatgatgtacatgaaatcggtcgccggctccgacggcgtgctggtcaccaccgtcaccttccgcccgggtaccgacccggatcaggcgcaggttcaggtgcagaaccgcgtcgcgcaggccgaagcgcgtctgccggaggatgtacgccgtctggggatcaccacccagaagcagtctccgacgctgaccctggtggtgcatctgttctcccccggcgggaagtacgactcgctgtatatgcgcaactacgccacgctgaaagtgaaggatgagctggcgcgcctgcccggcgtcggccagatccagatttttggctccggtgaatatgcgatgcgcgtctggctggatcccaataaggtcgctgcccgcggtctgacggcctcggatgtggtgacggcgatgcaggagcaaaacgtccaggtgtctgccggacagcttggcgccgagccgctgccgcaggagagcgatttcctgatctccattaacgcccagggccgtctgcataccgaagaagagtttggcaatatcattctgaaaacggcgcaggatggctcgctggtccgcctgcgcgacgtggcgcgcatcgagatgggttccggtagctatgcgctgcgctcccagctcaacaataaggatgcggtcgggatcggtatcttccagtcacccggcgctaacgccatcgatctgtcgaacgcggtacgcgccaaaatggccgagctggccacccgcttcccggaagatatgcaatgggcggcgccgtacgacccgacggttttcgtccgcgactccatccgcgcggtggtgcagacgctgctggaggcggtagtgctggtggtgctggtagtgatcctgttcctgcagacctggcgcgcgtcgattatcccgttgatcgctgtgccggtatcggtggtgggtaccttcagcattctctatctgctgggcttctcgctgaataccctgagcctgttcgggctggtactggctatcggtatcgtggtggacgacgccatcgtggtggtggagaacgtcgagcgtaatatcgaagaggggcttgcgccgcttgccgcggcgcatcaggcgatgcgtgaggtctccgggccgattatcgccattgcgctggtgctgtgtgcggtgttcgtgccgatggcgtttctctccggggtcaccggccagttctacaaacagttcgcggtgaccatcgccatctcgacggtgatctcggccatcaactcgctgacgctctccccggcgctggcggccctgctgttaaagccgcacggcgcgaagaaagacctccctacccggctgatcgatcgcctgtttggctggattttccgtccgtttaaccgctttttcctgcgcagctcgaacggctatcagggactggtaggcaaaacgcttggacgccgtggcgcagtgtttgcggtgtacctgctgctgctctgcgccgctggggtgatgtttaaagtcgtccccggcgggtttattcccacccaggataagctgtatctcattggcggcgtgaagatgccggaagggtcgtcgctggcgcgcaccgacgcggtgatccgcaaaatgagcgagatcgggatgaataccgaaggggtcgactatgcggtcgctttcccggggcttaacgcgctgcagttcaccaacacgccgaataccgggacggtcttttttggcctgaaaccgttcgaccagcgcaaacacacggcggcggaaattaacgcggagatcaacgccaaaatcgcgcaaatccagcagggctttggcttttccatcctgccgccgccgattttaggtctgggtcagggttccggctactccctgtacatccaggatcgcggagggctgggctatggcgcgctgcaaagcgcggtgaatgcgatgtccggggcgattatgcagacgccggggatgcacttcccgatctcgacttaccaggctaacgtgccgcagctggacgtgcaggtcgatcgcgataaggcgaaagcgcagggggtatcgctaaccgatctgttcggtacgctgcagacctatctcggctcgtcttatgtcaatgactttaaccagttcgggcgtacctggcgcgtgatggcccaggctgacggaccataccgcgagagcgtggaagatatcgccaatctgcgcacccgcaataatcagggcgaaatggtaccgatcggcagtatggtgaatatcagtaccacctacgggccggatccggtgatccgctacaacggttatccggcggcggacctgattggcgatgccgatccgcgggtcctctcttcttcgcaggcgatgacgcatctggaagagctgtcgaagcagatcctgccgaatgggatgaatattgagtggacggatctcagcttccagcaggccacccagggcaacacggcgctgatcgtcttcccggtggcggtgctgctggcattcctcgtactggccgcgctgtatgaaagctggaccctgccgctggcggtgatccttatcgtaccgatgacgatgctctccgcgctgtttggcgtctggctgaccgggggcgataacaacgtcttcgtgcaggtgggtctggtggtcctgatgggcctggcctgtaaaaacgccattctgatcgtcgagtttgcccgcgagctggagatccaggggaaaggcatcatggaagcggcgctggaggcatgccgcctgcgtctgcgcccgatcgtgatgacctccatcgcctttatcgccgggaccattccgctgatcctcggccacggcgcgggggcggaagtccgcggcgtcaccgggatcacggtgttctccgggatgctgggcgtgacgctcttcggtctgttcctgacgccggtgttttacgtgacgctacggaaactggtgacccgcaggaagccggtccaggaggatctgcccgcctag

SEQ ID NO: 213386 - DNA, 1176 bp, Klebsiella pneumoniae
atgagcctgcaaaaaacctggggaaacattcacctgaccgcgctcggcgcgatgatgctctcctttctgctcgtcggctgcgacgacagcgtcgcacagaatgctgcgcctcccgccccgacggtcagcgccgctaaggtgctggtgaagtcgatcagtcagtgggatagttttaacggtcgcattgaagcggtggagagcgttcagcttcgccctcgcgtctcgggatacattgataaagtgaattacactgacggccaggaggtgaaaaagggccaggtgctgttcacgatagatgacagaacctatcgcgccgcgctggagcaggcgcaggcggcgttggcaagagccaaaacgcaggccagcctcgcgcaaagcgaggcgaaccgcaccgataaattagtccataccaacctcgtctcccgtgaagagtgggagcagcgccggtcagccgcggttcaggcgcaggccgacattcgcgccgcgcaggcggcggtggatgccgcgcagcttaacctcgacttcaccaaagtgaccgcccctattgacggccgcgccagccgggcgctgatcaccagcggtaacctggtcaccgcgggcgacaccgccagcgtgctcaccaccctggtctcgcaaaagacggtgtacgtctactttgacgtcgacgagtcaacctacctccactatcaaaacctcgcccgccgcgggcaaggcgcgtccagcgataatcaggcgctcccggtggagattggcctggtgggcgaggagggttacccccaccagggcaaagtggattttctcgataatcagttaacgccgagtaccggcaccatccgcatgcgtgcgctgctggataactcgcagcgtctgttcacgccggggctgtttgcccgcgtgcgtctgccgggcagcgcagagttcaaagccacgctgatcgacgacaaagcggtactgaccgatcaggatcgtaaatacgtctatatcgttgataaagatggtaaagcacagcgccgcgacattaccccagggcggctggcagacggtttacgcatcgttcagaaggggttgaatcctggggatagcgtcatcgtcgacggcttacaaaaagtgtttatgccgggtatgccggttaacgccaaaaccgttgccatgacctccagcgccacccttaactga

SEQ ID NO: 213387 - DNA, 366 bp, Klebsiella pneumoniae
atgatgaacaccggcgccatcattcaggatctgatcgactggatcgacaaccatcttgatagccgtctggatattgacaccgttgcccgacgagccggctattcgaagtggcacctgcagcggatcttcaaagaacataccgggcagcccctcggagaatatattcgggcgaaaaagctgcaaaagtcgatcgaacgcttggcccacagtaacgagccgatcctgaacgtggcgattgccctcggctttgactcccagcagtccttcaaccgcagcttcaagcgccagtacggccaggcgcccggcgtctggcgccggagtatcagccgctctgttgcgcagacatctcgtcagcgatccgcatga

SEQ ID NO: 213388 - DNA, 573 bp, Klebsiella pneumoniae
atgtccgttcagcctgtcgaaataagtaaggcctatcgtttattgcaggtcgggtccaccaccatgatttccgcaaaatatgatggcgtcgaaaatgtcatgtcagccgcctgggttgggctggcaggcgagcgaaaagtggtggcctatattggcacccaggctttcactcgtcagctggtggaaaagagcggctatttcgtggtgcagatccccgtagtcagccagatggcaaccgtcctctacgctggcgggcgcagctatgccgacgcgccggataaaaatgacaccatccccttcttttatcagccggaatttgatcttcctcttgtggcaggctgtgcgggctggctggtgtgcaaagtgatgccctacccggacattcagcagcaacacaatctgtatatgggcgatatcgtcgccgcctggagcgatgaccgggtattccgcaacggacattggatctttgatgatgcgccggacgagctacggaccgttcactatgtcgcaggcgggcagttctatgccatcggcaaaggcagcaaattcgatcatgggccgggtcaggactga

SEQ ID NO: 213389 - DNA, 885 bp, Klebsiella pneumoniae
gtggatcgtattcaggctatgcagatgtttatgcgcgtcgcggaggcaggaagcttcgtgcgtgccgcggaaaccctttccctgccggcctccactgtcaccagtaccattaaaaaccttgaaaaatacctgaaggtacggctgctgaaccggaccacaaggcgggtgagccttaccccggaagggatgcagtatctggcgcagtgccgggaaattctcgccctcatcgaacatagtgaatccaccctgagcgagtctgtcgcgcggcctcaggggcgcctgcgggttgatatgcccgcgggcatcgcgcatttcatcgtcatgccccatctgccggacttttaccggcgctatcccgatatctacctgatgatcggcgtcagcgatcgccaggtcgatctcattcaggaaggcgtcgactgcgtgatacgaacgggagagctgaacaactccagcctggtggcccgccctctgggccgctttcgctgggtcacctgcgcgtcaccggactatctcagggaatatggtgtgccgccgtcaccggaggcgctctctcagcaccgggctgtgcattatttctccggtcaggcgaggcgggccgatgagttccgcttcgttcgccatggcgagaccttttctgtacccgtcagcggcaacgccgcggtgaatgaaacggggctctatataaaaatgtgcctggcaggatttgggctggcgcagctggcggagaatatcgttgctgaccacctgcaggaggggagactggtggaagtgctgacggactggcagccgcccccggtacccgtcacattgctctatccgcaccagcgctttctctctcccgccgtgcgggcgtttgctgagtggatgagcgaggtggtttga

SEQ ID NO: 213390 - DNA, 801 bp, Klebsiella pneumoniae
atgcttaatacgctacccgatttacacagaagttttgcagagcaactgaagcttaaattacagtctgattcgcggatccactcccttctcgccggcggctcgtttatccatggcgggtttgatcaatactccgatctggatttcgtggtggtgatcgaccctctctattatgacgaaatcatggctcagcgtatggcgttcgccggaacgctcggccatctgctacatgctttcaccggggaacacgtcggtgagcctcgcctgctgatctgcctgtttggcccggaacttctgcatgtcgatctgaaatttatcaccctggacatgctcactcagcgcgttgaggagcctgccgtgctatttacccgtgataacgatgctctcaagcgacagctggcaaaattttgcgcgcactggccgaacatgacgccggagtggtttgagtcccgggcctggatctggctgcattatgccgtggttaaactgggcaggggggaactcttcgaagcgctggggatgctgtctttcttccgggaacaagtgttgggaccgatgctgtttcgtcgcgccaatctaccgcaacgcggcgttcgtcgaatagaagccctcggcattgatcccgatggcctgctgacttccactctggcaacacacgatcgtcactccgtcgggattgccattcgaagggctgctgacgcttatgtcaacctgcgggctgatgcgctgcctgacaatatcgcagacgatgcggcgcgtcgggcggtccttgccatgctggacgcgtattctcacaaggggtaa

SEQ ID NO: 213391 - DNA, 1551 bp, Klebsiella pneumoniae
atgaaaaaaataacggtcttagattcagatatcctatctaaaatgaagatgagagctgtcaaatcggcaatccgaaaattacagccagaaacatttattcgtcaatgtatggattataatctccagagatttaaagatagtctagacatgttgaaacatcacccttggattgtaaatctatgcatcaagtgggcagcatcaagcataggtgataaaagggccacaaaagttggtgatactcgcacactcaataaaattctacagcaaacatacgatgtaatgccttacatcccagttggtttgaaaagtgctgatagtattgatttcttctttagaaataatctatatcagcagctaatgtaccaaacttcatctactggtcactacattagcagagaagccttcatatttggaaggctcgatcctcatcataaattatcaagaaggttctttgaattaactaatttatcagttgaacgctttgtcatgttatcaattacattcaccttcttaatcagcagcaaaaaaaatgtaataaaagaagtaacagctgacatgtttagtatattgacaccatatataagccgagaagaaattttctattttttggattcattatcaattagttatgaagatcttcctgagttttgcaaaagaaaaaccacggaaaatccgttaaaagaatacttcttaccttcaccatttattgagaacccattaataaaatacaacgacaaatttttattactacatactcaactgactttagctagccttcaaacatttatctatgacttattaagaagagatgatcctgaaaagtttatggacagctttggctcaatatttgaaaatcttgtcaaggatatatttgatgaaagcaaaataagatacattgatgagcaatcacttaaaaaacatttgcctcaagaaaacaaagtggttgattttttaataccccatgaggcagcgaacatattcattgatgctaaaggggttgagatacatgagcggggcatggttactctcagtcatagtgaaatatcagggaggataaaaaactcagtattaaaaacaatcgaacaagcgcacgccgttaatagggaaatccttaactcacctaaattaataacagatttcaaaagtgaatcttatattttatgcataacgtataaaaacctcatgcttggaaatggcacctttttagaaaagtcatacgccactgatggagtttcaaaaatacggaaaaatcacgatgatgcatatcaaattccagatagtcatattttttgcattagcattgaagaatttgagtacctgatgtcatcttgtaaagagcatggtcgccaaccatatgaagttttaaggtatgccgttgaaatgaatagaacaccatcacaaactgtatttttattcattcagcacctcgaaaaattctttggtcaagttacaaagtcggaaatgattaggaaaacaggtttagatttacttgaacgaatgacagagaacattcccggacttaaacaaaatgtaaatttggttaatgagtaa

SEQ ID NO: 213392 - DNA, 1026 bp, Klebsiella pneumoniae
atgacgatcagaaagcagccgaacggaaagtggttatgcgagtgttatccgaacggacgtgacgggaagcgcgtgcgcaagcaatttgcgacaaagggcgaggctgtagcattcgaaaatttcaccatggatgaagtgaacaaaaaaccgtggctgggtgaaaaggaagatcggcggcgtttgtcagaattgattgagcagtggcactccctttacggccagacgctggcagaccctaagcgcctaatggcgaaattgaatattatctgcaatggcctgggcgatcccgtcgcctctgaattaaccgccagtgactttacaaaatatcgtgaagcacgattaaaaggtgaggttcgtaacgaagacggtgcgctaatgtcgccagtaaagccccgcacggtaaacctggaacagcgtaacttatcatccgtttttggcaccttgaaaaagttgggccactggtcagcccctaacccactagcagggctgccaacattcaaaatcgcagagggagaactagcgttcctggccccggacgaaattaaacgcctgcttgatgcctgtgctgactctcaaagctccagcttgctgatgattgcaaaaatatgcctggccaccggcgcacgctggagtgaggccgaaaaccttcagggccatcagttgtcaaaataccggatcacctataccaaaaccaaaggcaagaaaaaccgaaccgtaccgatatctcaggatctgtatgacgaactccccaaaatcagagggaagctattcacgccatgcagaaaagcctttgagcgtgcagtgaaacgcgcaggaatcgacttgccagagggtcaatgcacccatgtgttgcgtcatactttcgccagtcactttatgatgaatggcggaaacatactggtactgcgagatattctggggcattcagacattaaaatgacaatggtttatgctcatttttcaccagatcacctagaagatgctgtgacgaaaaaccctcttaataacttggtgtattggaaatga

SEQ ID NO: 213393 - DNA, 405 bp, Klebsiella pneumoniae
atgtaccctcaggcagacgaaaaaaataagtccaaaaacgagagtcagcccacagtacgccccctttctaagattgtcgtcccgccagtgaaacaggtaacgatagagggcggtacttttaatgaactggaggatatttatcttgatcaggggctgatttcaggtaaagcagaagactgtttgtacgtaaaaacgactgaaggggattacgttattgatacctctacaaaacagctcagtaacggaatctggcttatcgatattgatggaatgaaaagtatcgtgaagattgcccgcatcccagggaataaaattattgtccatcaagatgacacctcttttgaatgctctgtcgacgacgttgaggtaattggccgtgcagtaaaagtcattaagagcatttaa

SEQ ID NO: 213394 - DNA, 207 bp, Klebsiella pneumoniae
atggctacgcctgcagagttcgcggagtgggaaggtatttcccgtggctctgtataccaaaaaattcatcatggtcatcttgctaagtacatggttaaaaaagagaaaaataaaggtcgcgtaagcctgcgttacttaatgtacaaaaccgatcaggtccgtgagtctcttggtcattccaacttccgcgtcattgttggtcagtaa

SEQ ID NO: 213395 - DNA, 510 bp, Klebsiella pneumoniae
atgtttgattataagatttccaaacatccgcattttgatgaagcctgccgggctttcgcactgcgtcataacatggcgaaactggcagggcgtgccgggatgaatgttcagactctgcgcaataagcttaacccggaccagccgcaccaacttaccgcgccggagatctggctgcttactgatctgaccgaggattcagcgttggttgatggtttcctggctcagatccactgcctcccgtgcgtgccgttaaacgaagtcgcgcgcgaaaagatgccggaatatgttctaaaagctacggcagaaatcggccgcgtggctgccggcgctgtttccggcgaagcgcatacaacggcagggcgccgtcagattgttgatagcattaattcagttactcgactgatggcattaaccgcagtgacgttgcaggcgcgcctgcaggcaagcccggcaatggccagcaccattgatacagtcactggcctgggtgcctcgtttggtttgatctga

SEQ ID NO: 213396 - DNA, 339 bp, Klebsiella pneumoniae; identical to SEQ ID NO: 109073

SEQ ID NO: 213397 - DNA, 234 bp, Klebsiella pneumoniae
atgcgaaatatcgaaacccgttccaacaaaatcggcccggatgatgcaggtcttaaccagatactgacagaggcccgtatggaagaacgccgtgcacgtgctgcggcgatggctgcccgtcttgatagcatggcgtgtcacatcacatcgcgccagcttaatcacgttgaggcggcggagctgctgcgcgttgctgcggaaaacatccagaacgaagcgcaggagatccactga

SEQ ID NO: 213398 - DNA, 228 bp, Klebsiella pneumoniae
atggctgattctatggacctcgtacagcagcgcgttgaagaagaacgccagcggcacatccacaccgcccgcaataaagcgccgggcgtttcccgtgtcttgtgcattgactgcgacgcaccaataccgccagcccgccgccgtgctattcctggtgtgcagtgctgcatcacctgtcaggaaatcgcagagctgaaaggcaaacactacaatgggggtgctgtatga

SEQ ID NO: 213399 - DNA, 852 bp, Klebsiella pneumoniae
atgagcaccatcctgaaatgggcgggcaataaaaccgccatcatgcatgagctgaaaaagcacctgcctgcaggcccgcgactggttgaacctttcgcgggttcctgcgctgtgatgatggcgacagagtatcctcattatcttgtcgcggatattaaccctgacttaataaatctatatcgggagatagctacaaacgcatcagattttattgagcgtgccaaacacctgtttaaaattttcaatagtgcagatggttattatgatagccgggattcattcaatcaggataaagatcctgagtggcaagcgcctctctttttattcttaaatcgtcattgctatcgtggtctttgtcgttataacaaaaagggcgaatttaacgcgccttacggtcattataaaaaaccgtattttcctgaaaatgaaatccgcgcttttgctgaaaaagctacccgtgccacgtttatctgcgccagctatgacgaaactttggcgttattggtgcctggggatgttatttattgcgatccgccatatgacggtactttcagcaactatcacactgccggttttactcaggacgatcagtatcagctggcctctattcttgagcgccgggcatcagaaggccatccggtcattgtttcgaacagcgacacttctctgactcgttccctgtatcgaaatttcactcatgaccgcattaacgtaaagcgcagcatcggcgttgccgcgggcgaaggaaaaagtgctgacgaacttattgctgtactgaagccgggagtatgggctggctttgatctagctggcggccctgatcgctctgtcgtgcatgaggtgcgcgcgtga

SEQ ID NO: 213400 - DNA, 2385 bp, Klebsiella pneumoniae
gtgagtcatcacgaagttgaaaagcacggcggagcagaagattccgccgctgcttttgcctggaatttacctaaaaaggcgattaacccctatctggacccggcagaagtagcgccggtttctgcgctttcaaacctgattactctctatgctgcggataacgagcaggaacagctgcgccgcgaggctctgagtaatgaggtctgggaccgctatttcttcaatgaatcccgtgatcctgttcagcgggaaatggagcaggaccggctgatcagccgtgccaaaatggcccgcgagcagcagcggtttaatcccgatctggtgattctggcggacgtaagcgctgaaacatcacatatcagcaagccactgcttgagcgcattaaatatttcgagggcctgggcaagccgaaggcatattcccgctatctacgtgaaaccatcaggccgtgccttgaacgcctggagcgcgtgcgtaccagccaggtttctgcgtcattccgttttatggcgagccacgacgggctggagggcctgctggttctgcctgaaatgaaccaggatcaggttaagcggttatctaccttggtggcggcacacatgagcatgtgtctggatgctgcctgcggtgagctgttttcggatgaagacgttacgccggaagagatccgccggtcatgggaaagggtggcggctgaggccatgcgccttgatgttatcccgcctgctttcgagcagctgcgccgtaaaaagcaccgccgtaacccggtcccatacgaacttattccgggttcgcttgcccgtatgctctgtgctgactggtggtatcgcaagctgtggcagatgcggtgtgaatggcgggaagaacagctgcgcgccgtctgcctggttaacaaaaaggcgtccccgtatgtcagctatgaggccgtgatccataaacgcgaacagcgccgcaaatcgctggagttcttccgctcgcatgagctgaccaatgagcagggcgatacgctggatatggaagacgtggtaaacgccagcagcagcaatccggcgcaccggcgcaacgaaatgatggcctgcgttaaagggctggagctgatcgcagaaatgcgtggtgaatgcgccgtgttctataccatcacctgtccgtcacgctttcacgcaacgctcaataacggcaggccaaacccaaaatggaccagtgccacggtccggcagagcagcgattatctggtgcatatgttcgccgccttccgtaaggcgatgcacaaagccgggctgcgctggtatggcgtccgcgttgctgagccacaccatgacggcaccgtgcactggcacctgctttgcttcatgcgcaaaaaagaccgcaagtccatcactgcactgctgcgtaaatttgccatccgtgaggaccgcgaggagctgggcaacaataccggcccgcgttttaagtctgagctgatcaacccgcgcaagggtacgccgaccagctacatcgcgaagtacatcagtaagaacatcgacgggcgtggcctggctaacgaaatcagcaaagaaaccggcagatcactgcgggacaatgccgaacatgtcaatgcctgggcctcgctgcatcgcgtccagcaattccgcttttttggtattccggggcgtcaggcataccgtgagctgcgtttgctggcaggccaggccgcgcgacagcaggccgataaaaaagccggagcgccggtactggataacccgcgtctggatgccgtgctggcggcagccgatgccgggtgttttgccacctacatcatgaaacagggcggcgtactggttccgcgtaaacatcacctggtccgcacggcttatgaactcaatgacgagccatcagcctatggcgatcacggcatccgtatttatggcatctggtccccgattattgagggacggatttgcacgcatgcgatgaagtggaaaatggttcgtaaggccgttgacgttcaggaggcgccagccgaccagggcgcttgcgccccttggactcgtggcaataactgtccccctgtggaaaaaatgaactattttgagtcggatttatcaggtgaaaaacagctggaaccgctgccggacttcaatagtatgagccgaaaagagctacgggagctaaatgcgaggctgcgacaggtaagaccgaagcggcggaagggttacaaacaggaaattaacgatcggctgcgcctgcagcttgaacatgagttgaagtccagagggtttgacggcagcgagaatgagatcgatctactgctgcgtggtggcagcattccatcgggggccgggctgcggcttttttaccgcaatcagcggctgcaggaagatgacaaatggcggcagtggtactga

SEQ ID NO: 213401 - DNA, 189 bp, Klebsiella pneumoniae
atgcaggattaccttttggagtcgttgaaactccagcgtattgatttttttatcaagcttgtagcggatagtgagtgtagcgatgaagaaaagaggcttgccattcagtgggtttcagagctgacagacgagctcctggcaaaaatccgcagccatgaatgcaaccggtcaatggacatttccagttaa

SEQ ID NO: 213402 - DNA, 234 bp, Klebsiella pneumoniae
atgcgaattgaaataatgatcgataaagagcagaagattagccaggcaatactggacgctctggaagctgaactttaccgaaatctccagccgatctatccaaagaccgcgatccgtattcgaaaaggttcggcaaacggcgttgagctaagcggcttaaagctagatgaagacaaaaaacgagtgatggaaatcatgcagcaggtttgggaagacgacagctggctgcattaa

SEQ ID NO: 213403 - DNA, 684 bp, Klebsiella pneumoniae
atgaaaaaagttaaatggcttaagttaaacatacggcttgagtttgaaacagccgtcagacgtctttctcttgattcttttacagaggataaagggaaagggtttatttttgataaaatacgccatgattttgcaagtgggcgttttgtcgagcgtattgtttaccatgacaaaatatcaagctttgacggaagtgaaactaccgttgaaagaatcgagtatcgcactacaaattttagcgtggctgtagactctcttcctgtaatgcagatcactaacccccccagaactttaaagcctttttctcaggctttggtaaaaaatcttggcttaggtgttagcttggaagaaatagacataaaccctataaactggcttaatgaaatatcttcaagtgtaaatatcaatttaacacaacttgatatttcaagagttagagtctctgattatgccacggctaaaatgcaaattattggcagcagtgatcttaggaaatattataaagaggagttagagggtaaaaaaatacgaattgacagacttgtttgctctgttaattcattagagtattccggtaagctcaagatcaccaatagcggccttgcttatattgatgttagaaatgaaaatgagtttacgaaaatcgtttttgatacgttaaaaaaagtcacccttcaatcatag

SEQ ID NO: 213404 - DNA, 1080 bp, Klebsiella pneumoniae
atggctaaaaaactatatttcgcaactgacaaaaatatttatgatgcattgcatcataaaaggataaccgctgcaaaattgcatgaattattgttgaatagaggtgtgtttttatcaccagaactcgacaaggaaatactaattgaggaaatatccaaacttcctcacggatttaatgaattagaacacataaaaaaactggtcaaaacatatgacccaagagaaagcactactagtgtaagcttccaaacctcaacaaatcaggccgaattaataagtgcagctgaagcactaaagaaaacatgctcacctagtaaaggtcaaagcctgaatattgtagctaaaaaagatggctcacttacagtagaatacaactatgaagaaatagacctgtctaaaactgcattacgtcagatcgacaagcggaatgttataatagaacttcgccctgatactgacaaagttgaagtacgtatgcctcaaaaccccgaggcaaaaaaagttattgagagcctgcaaaacgagctatctaaaatcaagtccgagcctatcgagcgcttcgaaatctcactactagcaataactgaccctacattgagaagtcagttctttcaagaattaatgaatggcctacgtggttatgagactgatgacgtaacaaaagtcgaattaaatcgcagtactgatgccagtgaggatgaagacaaggaagaaactattgataccggatttgttaagaaagccgtcctgaatggtgaaggggtaaacagttcagctatattctctcaattacatgagaaaggttattatatcgggcgtattgcatggtcttcaaaaccaacaagtggaattggagatagaatcaacgtcgaagcattttttaaagactcagagaaatgctgtgactttgcctatcaaattaaagggataaacaatcaaaaagaagatggtttcaatgtaaccattcgcgcggcaacggcacaagagaaaaaacatattagtgaattaattgagtccgccgctgaaaatgcctataatataataataggatcagaggtgaacgaagatgaaaaaagttaa

SEQ ID NO: 213405 - DNA, 1002 bp, Klebsiella pneumoniae
atgggtggagagacttcggctatacaacgagtcgcgggtaagatttctgatgatattttctcagtattcaaatgggatcgtgccgctagagcggatatgaattgggattgttgccaagaggctcattctaagaaaacgcatccaagcgatgttgtatttttctacatagatccatatgaggaggaaatggtctatctcaacacagacctcaaaagctatgcagaaggtactattgggaaaaaaatagtcgagggagctttaacatcgcttgctttagctaccgaatgtgcaaatgtgagtgaagaatggcgattgaaatatgttcatgatgattctttaggttataacgtaagagggttattattcttatataaccatgataacttatatgacaaggacttttatgagaatattacgaaaaagttagaccactcatctataaattgccctccaaacatcaaactacatttacttgacccttataaaatatcagatttgataaacatatcttctgacataaccaaattaattggttcaggaaaacttcctcaacctgataagttcacatattattacccagatctttcactaacacgaataaaacaccctattaatcaggcaacacccgcaacaattgaattattaacatcaccatacattataataaagcatgaggcttttagttggctcagggataaaaatcctgaaggatatgttgtttattataatcaacctggggattcagtagacgaatttgtttacttctttgatatgttatcaacttatcagatactaaccgaaggtaaaccaatcgtattacgccattgttacattcatccaaatgaaaatgccattcatcactttgaaagagcgaaaaagaaatacagcacagactggctcttaggcgaggatgaaagactttttcttaaaatcgacttcgacaagacagacaaaattgttgttgaatataatcttgaaaaaatcggcatggagcaacgataa

SEQ ID NO: 213406 - DNA, 1044 bp, Klebsiella pneumoniae
atgactgagaataccgcacaggatgcgatgccacctgacgtacaacccaatgatgcagcgactacccaggcgttcagctttggcgatcccattccggttctagaccgccgcgaacttctggactacgtagaatgtgtgcaaatggaccgctggtatgagccgccggtgagctttgacgggctggcgcggacctatcgcgccgctgtacatcacagctcaccgattgccgttaagcgtgacattctcagcagtacctacatcccgcaccgcctgcttagccagcaggcttttacccgttttgtgcaggattacctggtatttggtaatgcctatctggaaaagcgcactaaccggctcggtggcgtactgtcactggagccgaccctggcgaaatacacgcggcgcggagttcacctcgacacctactggttcttgcaatacggcatgaccacccagccctatgaatttacgccgggaagcatttttcatctgctggagccagacattaaccaggaaatttacgggctgcccggctatctttcggccatcccgtcaaccctgctcaacgaatccgcaaccctgttccgccggaagtattatctcaacggcagccacgcaggatttatcatgtacatgaccgacgcggcgcagaaccaggaggacgtgaacaacatccgccatgcgatgaaaagcgccaaaggaccgggcaacttccgcaacctgtttatgtactcgcccaacggaaaaaaggacggcatccagatcatcccactgtcagaagtagcggcaaaggatgagtttctgaatatcaaaaacgtcagccgggatgacatgatggcagcgcaccgtgtccccccgcagatgatgggcattattcccaacaataccggcggttttggtgacgttgaaaaggccagtcgtgtctttgtccgcaacgagctgataccgttgcaaaagcgactgcaggagcttaatgactggctgggtgaggaagtgatacgtttcgaaccgtatatcttggatattcaaaaagaaaatcaataa

SEQ ID NO: 213407 - DNA, 1755 bp, Klebsiella pneumoniae
atgacccccgcagagctcgatccccgtcggcaggcactactgctgtattttcagggataccgcatagcccgcattgcagaaatgctgggcgagaaagccgcaaccgttcacagctggaaaaaacgcgataagtggggcagctatggtccgcttgaccagatgcagctcaccacggccgcgcggtactgccagctgatcatgaaggagcaaaaagaagggaaggattttaaggaaattgacctgctggcgcgccagtccgagcgccacgctcgcatcggaaaatttaacaacggcggcaacgaggccgatttaaacccgaacgtggaaaaccgcaaccgcggcccccgcaaaccacctgaaaaaaacctgttcagcgacaaacagatcgaaaagctggaagagattttccgcgctggcatgttcgaatatcagcgccactggtgggaagcagggataaagcatcgtatccgcaacgtgctgaagtcccgccaaatcggggcaacgtattactttgcgcgtgaggcactgatcgatgcgctggtgactggccgcaaccaaattttcctgtcagcaagtaaagctcaggcgcacgtgtttaagcagtacatcattgagtttgccaaagaggtcgatgtagagcttaaaggcgatccgatggtcctgccaaacggtgccacgctctattttctggggaccaatgcccgcaccgcgcagagctaccacggcaacctgtaccttgatgaatatttctggataccgaaattccaggagctgcgaaaagtcgcctcgggtatggcgctgcacaaaaagtggcggcaaacctatttttccaccccgtccagcctgacacacagcgcctatcccttctggtctggcgcgctgtataaccgtggtcgctcaaaaacggaccgtgtggatatcgaccttacccactcggcgctggcggctggcctgctttgtgctgatggtcagttccggcagattgtgacggtggaagatgccgtgcgcgggggctgtaacctgttcgacctcgaccagctgcgactggaatacagcccggacgaataccagaacctgctgatgtgtgaatttattgacgatctcgcgtccgtgttcccgctttccgacctgcaggcctgcatggtggacagctgggaggtctgggaagattttcatgcactggcgctgcgtccgtttggctggggcgaggtgtggatcggatatgaccctgcgaaaggcacccagaacggtgacagcgccgggtgcgtcgttatcgccccaccatccgttcccggcggcaagttccgcatactggagcgccaccagtggcggggaatggacttccgcgcccaggcagaagccatccgccagctaacactgcaatacaacgtgacctatatcggcattgactccaccggcgtcggtcacggcgtttatgagaacgtcaaaggctttttccctgccgtccgggagtttgtctataaccccaacgtcaaaaacgccctggtgctcaaggcatacgacatcatcagccaccgccgcattgagtttgacgccggtcataccgacatcgcgcagtcattcatggctatccgccgggccaccaccgccagcggcaaccgtccaacctatgaagccagccgcagcgaagaagccagccacgcagatctggcctgggcaacgatgcacgcactatttaatgaaccgctgcagggcgaagccgccaataccagcaacattgtggagattttttga

SEQ ID NO: 213408 - DNA, 834 bp, Klebsiella pneumoniae
atggcagttaaagcaaaacgcttccgcattggtgtggaaggggcaacaaccgacgggcgcaccattgagcgcgcctggctggagcagatggcggccagttataacccgcaggtctatacggcgctgattaatctggaacatatcaagggctacaccccggacagtccattccgccgtttcgggaccgtggataagctggaggctgaagaaattgcggatggcccgctgaaggggaaaatggccctgtatgcgtggatcaccccgtcagctgatctggtggcgtatacccgcaagctgcaaaagctgttcacctccatggaggtcaataccagttttgctgataccggcaaagcgtacctggttggcctggcagcgactgacgacccggcaagcctgggtacagaaatgctgcagtttagcgccagcgccaaaagcaacccgctggcaggacgcaagcagagcccggaaaacctctttaccgccgcagaagagacgctgatcgagtgggaagaggtccagggcgaaaaaacctccctctttgcccgcgtcaccgcgatgtttaccaaaaaagagcaaaccgatgatgcgcgtttttctgatgtgcatcgtgccgttgagctggtcgccaccgagcagcagaacctgagcgaacgcaccgagcaatccctgtccgcgcaggataagcgccttgctgcgctggaaacatccctgcaggagcagcagaccgcttttgcggaactggagcagcaactgcaacaggaagacagccgcaaagattatcgccagcgcgcgccgggcggtaacgcgccggcaggcaccctgaccaattgctga

SEQ ID NO: 213409 - DNA, 1053 bp, Klebsiella pneumoniae
atgaaaaagaaaacacgttttgcctttaacgcctacctgcagcagctggcgcgcctgaatggcgtagaagttgaggagctgtccagcaagttcaccgtggagccgtctgtgcagcagacgctggaagaccagatccagcagtccgccgcattcctgaccatgattaacatcattggggtgactgagcaatcaggccagctgctgggtctgggcgtcggtagcaccattgccgggacgactgacacgaccacgaaggaacgcgaaccaaccgatccgacggtcatggttgatgttgagtacaagtgcgagcagaccaactttgatacagtgctgacctacgcaaaacttgacctgtgggcgaaattccaggatttccaggtgcgcatccgtaacgccatcgtcaagcgccaggcgctggaccgcatcatgatcgggttcaacggtgtgaagcgtgccaaaacctcaaaccgtgtcgataacccgctgctgcaggacgttaataaaggctggctgcagaaagtccgcgaagatgcggcagattgcgtgatgggcagcaccacggcagaagatggcactaccaccgcagacccggtgaaggtaggcaagggcggtaaatatgccaacctggatgcactggtgatggatgccgttaatgagctgattgacccggttttccaggatgatgctgatctggtcgtgatctgtggtcgtgagctgctgtctgacaagtatttcccgctggtcaataaggagcaggaaaacagtgaaaagctggccgctgatctgattatcagtcagaaacgcatgggtggcctgcaggctgtccgcgccccgtcattcccggctaatgccgtgctgatcacccgtctggataacctgtccatctactggcaggaagatacccgccgccgttcggtcattgataacccgaaacgcgatcgcatcgaaaacttcgaatccgtcaacgaggcgtatgtggtggaggattaccgctgcgtggcactggtggaaaacatcagtattggcgatttcagcgccggagaaggggagtaa

SEQ ID NO: 213410 - DNA, 654 bp, Klebsiella pneumoniae
atgagcctgagtcccgcacggcagcaccgcctgcgcgttcaggctgaacaggccgcccgtcagggcggcagtgttcgccatgcgtcggggtatgacctgatgctgctgcagctggcggaggaccgccgccgcctcaagggggtgcagtccacagtgaaaaaggcacaaatcaaggtggagctgttacccaaatataccgcctgggcggatggtgttctggcagccggtggagcgcagcaggatgacgtgctgatgtttctgatggtctggcgtatcgatgccggtgattttgccggtggcctgcagattgccgcgcacgcgcttaagcatggttgggtgatgccgcaggcgctgggccgccgcaacgtgcagaccgttgttgctgaggagctggcagatcaggcggaggccgcgcagcgaatgaaagctgaattccctgctgacgtgctgctgcaggcgctttcgctgacggatgcgctggacatgccggaccagtcccgcgcccggctgcataaagctatcgccgccgtgatcagcgagtcccgccccgccgcagccctgaaccactacacgtttgcgctgcagctcgatccccgctgcggtgtgaaaaaagacaaagagcggctggagcgtcatttgcgtaacagccactaa

SEQ ID NO: 213411 - DNA, 465 bp, Klebsiella pneumoniae
atgagatttgttgcgccagaacaggcgccggaacaggcggaggtcatcaaaaacaccccattctggcccgatgtggatttgtcggattttcgcagcgtgatgcgaacggatggtacggtgacgtcgccgcgtctcgggcagcttatccggtctgctatgtcggaggtcaacgcggagctgtacgaattccgcaagcgccagcagtcgttggggtttcagaccctggcagacgtaccggcggaagcgctggacggcaaaagcgagcgcatccaccactaccataacgccgtgtattgctgggcgcgtgcgcaggtgaatgagcggtaccaggactacgacgccacggcatccggcgtcaagcgaggcgatgagctggcggaggccagcggcgatctgtggcgtgatgcccgctgggcaatcagccgggtgcaggatgcgccccactgtacggtggagctgatctga

SEQ ID NO: 213412 - DNA, 204 bp, Klebsiella pneumoniae; identical to SEQ ID NO: 179266

SEQ ID NO: 213413 - DNA, 216 bp, Klebsiella pneumoniae
atgacgcttgaacggatcagcgcctttattacgtactgcattgctgtactgctggcgtggatgggcgatttatcgcttaaagatgcctctacggtgggcggtgtgctgattggtctgctgatgctggcgatcaactggtactacaaacacaaaacctatcagctgctacgcggcgggaagataacccagggggaatatgaatccttcaatcgttaa

SEQ ID NO: 213414 - DNA, 510 bp, Klebsiella pneumoniae
atgaatccttcaatcgttaagcgctgccttgtcggggcggtgctggctatcgccgccacgctgcccggtttccagcagctccacacctccgttgaggggctaaaactgatagccgattacgagggatgccgcctgcagccgtaccagtgcgacgctggcgtgtggaccgacggcatcggtaacacgtcgggcgtggtgccggggaaaaccatcacagagcgacaggcggcggggaacttcatcaccaatgtattacgagttgaaaccgccctggcgcggtgtgtcctggtgaacgtgccgcagtacgtttatgacgccctggtgtcgctggcgttcaacgtcggcacgggcaatgcctgcagctcaaccatggtgaagtttatcaatcagaagcgctggcgcgatgcctgctatcagctgccgcgctgggtatatgtcaaaggcatatttaatcaggggctggataaccgccgggggcgggagctggcctggtgcttaaaaggagcgtaa

SEQ ID NO: 213415 - DNA, 384 bp, Klebsiella pneumoniae
atgaaaaagaaatttatcagtgggttgctttcggtgctgtacgcggcgctgatgattttaagtctctttgtccccaacggcatggcctcggcgctggtcaccgcattgacctgggtcgcctgtttgttggtctgggtggcggtgctgctttgcctggccgggtggtatgcgggcggcactcatcgggaagaggcaaagcaggcgcttacgcgctttttcagtacgccaggaaacaatgtgatcagatgggccaggcgttcactgcttgtgatttttctcgcctttacgggccacgttgtcaccctggcattttatctgctgacgctggtcgcgcttaaggttctgcgtgcgcaggttgttgatgcgcagccggtgacggtatga

SEQ ID NO: 213416 - DNA, 429 bp, Klebsiella pneumoniae
atgacgcgcgcgctggcggtaattcttgcgctcgtactggcggcgctgggctggcagtcatggcgactgaatgaggccagccgtaccatcgatcagcaaggcggggacctgaaaacggcgggcgacaaactggcaaaaacgaacagccagctgatcgccctgtccatcctgaccgaaaccaacaaccgggaacaggcgcggctttacgcggcggcagaaagtacaaacgcgctgctgcgaagccgtcagcgccggattgaggagctaaaacgtgaaaacgaggatttgcgccgctgggctggtactcctttgcctcctgacattatcaggatgcgcgaacgtccggccctcgccggaggtgcagcttaccgtgaatggttgtcccagggtgacgcagtgccgcctggaaaagtcagcggcacgcactaa

SEQ ID NO: 213417 - DNA, 423 bp, Klebsiella pneumoniae
gtgaacaaacctcagtccttacgcctcgccctgaataaaaccgtggcgtatgtccgggacaacccggacaagttgcatttattcgtggataacggagcggtggtggcgaccggcgcggcgtcgttgtcctgggagtatcgctatacccttaacgtggtgatcgtggatttcagcggcgatcagggattactgatggctcccgtgctggcctggctgatggagaatcagcccgatgctatccataacccggaactgcgtgaaaagctgtttacgtttgaggtcgatatcttgcgcaatgatatctgcgatatcagcctgaatctacagctgacagagcgcgttatcgtcagtgctgacggtgacgtgtccagcgtcgaagcggtgccggaaccggacgaaatgtgggcggtgcgccgtggctga

SEQ ID NO: 213418 - DNA, 447 bp, Klebsiella pneumoniae
gtggctgagctgcaggaagttgacgcctggttagaggcgctgctggcggggctggagcctgccgcacgtaagcgcatgatgcgggagctggcgcagcagctgcgccgcagccagcagaaaaatatcaggatgcagcgcaacccggacggtacggcatacgaaccacgacgggtaacggcgcgcacgaaaactggccgcatacgtcggcaaatgtttgccaaactccgcaccgcaaaatacctgaaagccgctgccagcccggactctgccagtgtcgaatttgagggcagggtacagcgaattgcccgcgttcatcattacggtctgcgtgaccgtgtgagccgcagagggccggaggtgcagtattcacagcgccggttactcggcatcaatgatgaagtggaggacattacgcgcgagacgttgctagactggattcaaaaatga

SEQ ID NO: 213419 - DNA, 867 bp, Klebsiella pneumoniae
atgactccttttggaatttatgggtatattttcactaaagaaatgacatttgatttaggaatattaactcctcgcttcaacaatcttcacgagatcaagaaagaaaaatgcaacggagagtcttatatacttacaggttttttcactcctaactcaagcgcaaataaaaatctctctcaagctctctttgatctttcagcaattctaagctttattgaacaaaaaaatgtaatcatagcccattcactcaaagagaatgaaagccctttaacattcggtgatgacttccccataactttagatataaaaaggaaacgtggcccaggacaaataataatggaagactgtttctctaaagatggaaggtcagcattcattaagcttgccattaacaaactcagtgaaaacaataagaccaatcaaaacccatttagaacagccttcttcaaatctatgctttcttttagagagaatataagctatgtagatgtaaactattacctatcgttctctgcacttgaatccctatgtagatatatacaaaatgattatgcaccttccagagctccgcaaataattacaacgactctacaaaactatggtttcaatgtatcaaaaaaagataacgctgtaccacaaagaaacatcatgcactattgcgcacttcgcaacgcattgtttcacaaaggcgattacattgcgctcgtcgaatataacaatcctgacagcattatatatttgaaggattactcatcctgtattagcctacttctctctttattgataatgaaacacataggatttgatgacaattatattaattgggactcatggattgacaggcaaccattcattagcaaaaaataa

SEQ ID NO: 213420 - DNA, 573 bp, Klebsiella pneumoniae
atgaatgctcaattaaccgaaatcatgcgccttatcaccaatctgatccgcaccggcattgtgaccgaggtggaccgggacggctggctttgccgggtgaaaactggcgacctcgaaaccaactggattaactggctgacctaccgcgccggtaaatcccgcacctggtggtgtccgtcgccgggggagcaggtggtgctgttcagcctgggcggcaatctggagacggcttttgcgcttccggccatttactccaacgcctgcccgccgccgtcagactctgaaagcgcggacgtgaccgaatacgaggatggcggctggttcgaatacgaccctgccaccgggcactggattatccggggcgttaaagccgtgctgattgagtcgtcacagctggtttcctgcaaaacaggggagcttgtgatcgaggccgacacgacccgtattaacagcaacgtgatcattaatggcgatgtgacccatgacggcggggaaatgacctcaaacggtatcgttgccgataagcataaacaccctggcgacagcggcggaacaacgggaggtccaatttga

SEQ ID NO: 213421 - DNA, 363 bp, Klebsiella pneumoniae
ttgacgctctatatcgggatgaaccgcgataccggcaaggccattacggaaacggatcacctgcgccagtccgtgcgggacattttgctgacgccgcagggtagccgccttgcccgtcgggagtatggctccctgctgtctgcgctgattgaccagccacaaaatcgggcgctgcgcctgcagatcatgtctgcggtgtacgtcgcgttgctgcgctgggagccgcggttgcagctcgacaccatcacgattaacagcagcaacatggaaggctcaatggtgattgagctggcaggccagcgtaatgacggtgtgcctgtgtccctttccgtatcgacaggagcagacaatggccgttattga

SEQ ID NO: 213422 - DNA, 909 bp, Klebsiella pneumoniae
atggccgttattgacctttcccagctgccgccaccgcaaatcgttgatgagccagattttgaaaccctgttgacagagcgtaaagcggagtttgtcgcgctctatccggcagaagagcaggaagccgtggcccgtactttaacgcttgagtcagagccgattgtaaaaacgctgcaggaaaacgtgtaccgggagctgctgctgcgccagcggattaacgaggcggcacgggctgtcatggtggcttattccggcagtgatgacctggataatttaggcgctaacaataacgtgcagcgccgggtgatcacccccgcagacgataccaccacgccacccactgaggcggaaatggaatcggacgcggattatcggcagcgcatcccggcggcctttgaggggatgagcgttgccgggccggttggcgcgtatgaatttcacgcgctgagcgccgatggccgtgtggcagatgcatcagcattcagcccggcaccggcggaagtcgtggtgactattctggcccgcgacggtgatggcactgcgccggatgacttgctgcaggtagttggtgttgcactgaatgatgaggccgtgcggcctgtagcggaccgggtgagcgtccgctctgctgagattgtccgctatgaaatcgatgcggttctgtatgtctatcccggcccggcaaaggaacccatcctcgctgccgcgaaagagcagggcactgcatacatcaatgagcagcgccgcctggggcgtgatgtgcggctgtctgcgatttatgccgctctgcatgttcagggcgtgcagcgggttgagctgatgcagcccctggctgacatggtgatagataaaacgcaggcgtcctattgcaccgattttaaagcagaaattggtggctctgatgaatag

SEQ ID NO: 213423 - DNA, 624 bp, Klebsiella pneumoniae
gtgcaggcctgttcaggtatcagtgatttaagcgtgccactgcgtgacctctggaacccgtggaaatgcccggtgaaattcctgccgtatctggcgtgggcgttttccgtcgaccgctgggaggaaacctggtcagagagggataagcgccaggcggtcagcgatgcgttctggatccaccaacgcaaggggacggtggcggcggttcgccgggtgattgaaaacctcggctacagcatgacgcttcaggaatggtgggaggtggccgaccccgccgggacattccgccttgagattgacctgaatgatatcggtattaccgagacgatgattaaggagctggagcggattattggcgatgcgcggccggtcagccgccacattgcccgcctgtcactgtcagcggggaccaccggtccggtgtataccggtgccgcatcgtgcagcggggaggtcatcagcgtgtatccgccggaatatacgccggatgaggccgcccgttatgacggcggcgggttccattccgggtcggtcacctataccgaaaaccagcggggagaagactcacatcgctatgacgggcgcacttttcacgatggccgtggcgtttacgcaggagaataa

SEQ ID NO: 213424 - DNA, 1950 bp, Klebsiella pneumoniae
atgagtgcaattaacgaacagacaaaatgggaagatgaggtttacctgctggcgcgcgaagaccgggtggagggcggcatttatggtccgtcaaacaaacaggcccggcagctggcgaaccgtacccgctatttaaaaaccgccgttgagtcgctgcaggactaccgggattacaccttcttcatgaccccggatgacccggacggcacccttgcggggcttgccggtacgccggaggggaaactctttcgcgtggtggtgcctgacagcgaggggcaactgctggcctttatctattaccagaagcgcaacggccaggcgaaccggctgaatgcactggcaagtcagcaggcgattacgtccctgcgccagcagctggagcaggacaccggctcagcgctggatggcctgaccgcgttgcagtccggtctccagtcgctgacggccgccctgatgcagctcggtcttgatgagatggccgcgcaggtgaccagcatggccgcttcacaaaaaagccagtcagaccagattcaggcgctgatgctggcgtttcagtccggtatgcgggcgctggctctggtggaggccacccccgaggaggtggaaagtcatcagctgagtaacctctatgccttccaggtgctggcccgtcagcttctcccgctcgacggcttcgacccctcagcggcaggcagtggcacgggaaaccgggaggcgcaggcgaaatatccgggcgtgtttgcctttggtgagccgcgcggtctgattcgcctggacgtgacctccgacagcggcgcaccgaccagcaaggacaacccggttaacggcaccttaaaggtggacgtcgacggggagatgttcacggcatacgtgtccttcaaggttcagggggcgtcgtcagcggggtacccgaaaaagaacatgaaattcgagctgtttgccgacgcggcgcataccgaaaatgtcagcctgaaaatcggggatgtggtgccgaaggataaatggattttcaaggcgaactggattgactcgacccacctgcgcaatgtgctctgctacaacctgtggcagaaggtgatggcgacccgcagcggctggccgcgccgggatattgataacagctacgtggggaagctgggggccagcgccattgataccggcgccatcggctgcccgaaggggtacgcctgcgtgctgtatatcaacggtgagttttacgggataggggattttctctacaactcgtcgcgcaaggattacaacatcgccaaaaacagcccggagcaaatcatgattatctgggacggggcgattaacatcccggcgctcacggataacggcacctgggtgatggactcaccttcgaaacccacggcggaaacggctgcctgcctcgaccgctggcgggacttcgcgcagtccgcgcaggacgcgtttaccgccgccgccggtacgcatctggataaaaacaacgtggtggatttctacgtcttcctcagctttatctgcgccccggactgcgtgcagaagaacaccacgtttatcacctgggacggcacgaaatggtttttcatgccctatgacctggataccacctttggtctgcattacgccgggacgtccattgcctatccgccagacctgaatctgtttgataacggcctcgccatgcaggtcaaccgcaccttctggaagaaagtccgtaccaccttccaggcggaaatgaatgcccgctatgcggaactgcgggataacggtctgttttcacagtgcggcgtgctggagctggcccgagacctgctgggacgctacaccccggaactgatgcaggctgaatatgaaaaatggccgaatgtgccctccctgagcatcaccagtctggaccagatgatggactggacccgacagcgtattgcatacctggacacttttttcagctaccaacagtaa

SEQ ID NO: 213425 - DNA, 1119 bp, Klebsiella pneumoniae
atgaccacgattttagtcaaagatgcgctgcgggcctccgttgaggcggcttcgggcggaaaacagacggtgctgtataccccgaagggacagccgacctttgtgaatattatcccgaaggtgagtatcgaaagcatgaacccggcgctggggatttccggcgtacatccggcctttaagcagggcgacagggaaatcccgtatctgtatgtcggaacctatcagggatgcgtgctgaacggcgaggtcctgagtctgcccaacgtggatgcgaatgcctgtaacgcaaccagcgccacccttttcccgttactgaaagcgatgggtagcacctggcacggcatgacgtcggtcgagtgggcgctgatgcaggcgatggccgtgaaaagccggtacagtcccctgggggccgatgtgtacggcaagtccgcgctggatgcgacccagaccggacgccgtatcgacggcaaagaggcgggcgatttgtcctcgcagtctccgcgcatttataccggctccggtccggtctcttatcgccaggacaaaaaatacaacggcatcagcgaccttgccggaaacgtctgggagcgtacctacggcgcgcgtgtggtgggtggcgaaatccagctctacgggaccggcaatgaggccgcgctcgccgcctccgctgtattcagtgcgcacggcgctgatgtgccgggctggtacgctatccatgcggtgaccggggcctttatcaccccgacgcacaccgggaacaccaccacggcggactatgtggccaccacccccaacagcgtgcgggcggtgacaaaaaccaccgggctggctgacaacgagttttatcacccggcctggggcgggaccttcgttcagccgcagaacacgctgccggaagcggtaaagaatcttctggagctgtatggcgtatggccgtccctgaccggtaaggcgattgtcccggcggggtccacggtcaactacaacgcgggcgcgacaagctgcatgcatccggtgcgcggtaagaacgatattttccagtttggctttgccaacaatatcgaggtgctgaattccgagatgggtctgcgcccggtgtattacgcgcccctgagttaa

SEQ ID NO: 213426 - DNA, 1074 bp, Klebsiella pneumoniae
atgagtaaaaaattcagcgccatactgaccgcgcagggggctgaacgcctggccgctgcggcggtgaagggtatccccctgggtatcactcacatggctgtcggcgacgggggcggcgtcctgccggtgccgtccccggaccagaccgccctgattaacgagcagtaccgcgcaccattaaaccggctggtcatcgccgaccaggcggcaaatgttatccgcgccgaaatgataatgccgccacaggccgggggcttctggatacgcgaggccgcactctttgacgagaccggcatctgcctggcggtggcgaacctgcccgaatcctacaagccgcttctggcggaagggtcgggacgtttccaggtgattaatatctggctgatggtgagtcagaccgccgatgtgcagatgattgcggacccgtcagtcatcctggcgacggtggaagaggtccgccgggcggggaacaacgccaaagattatgccgatgacattgtttccacgctggagaatgagacaagggaggccatcacctcagcggtcagcaccgccattcgtgatttctgggaagcggaaaaccccgtcggcacggtccggttttacagccagcatgttgatccgaatgagcgctacccgtggtcaacgtggacgtataccggtgagaacagaaccctccgggtggcaaaagcggacggttcgaacgtcggcgccaccggtggcagcgatacggtcacccttcagcgggcgaatcttcccgccgtgcagattgatgtaagcggggaaaccagcgagcagcctgagcagaagctgacgaccacgcgcggtggtattcaccatcatggtggtgtggccggtaaaaatgacccgtgggaaatcggcggggatgtgcggcagctctttaacccgaaagagccgggtgtgacggatgatgccggagagcacgaccacgaagtcacagtaccgccgcacaaacacacgaccagcggcaaaactgacaacctcggcgagggtaaatcgttcagcgtggtggaagctcacaccctgctgatgtgctggagccgcgttgcctga

SEQ ID NO: 213427 - DNA, 915 bp, Klebsiella pneumoniae
atgacctgcttattcgcaccttccttagatacgattgcgccgcaagaattagaaccaggtaaaaaggagctaattagcgcaatagaggagtgcgaaatattaaggcagtttgaagacggtagaaaactagtgatatatcgctgtaatactaaccgaacctcacctattattgatgagttagggcgcttacgcgaacgctgttatcgcgatattggtgccggaactggtaacgaccgagataacgatgtttttgatgaaagttattatcatatcattttgtgggatccttctgatgtggaaatcctgggagcatatcgtgttatgcccgttggcgagcagctggcccaacatggtgtaacaggcctctatagcaacagcttgtttaaataccatgataatgcctattcctgtttagagaagtgtgtggaaattggccgcggctttattcagaaaccttatcaaaaaagtaaggtgcttgattatttatggcaagggatatttgactttataaaaagatatccggactataaatacttgctgggtgtgctgaccattcctggaacttttcctgaaaaagtacagaaactcatcatcagtttctataatatatacttttcctcgacagctgatttttgtacgccgatagcattgttcactgccgaaaatgtacaggatgatactccattttgtggcgaagattttagagcagactggagcatgcttaatcacctgctgagagaagaaggttatgaacttccctggccttttaaacagagtgctaaatggttctccccgggcggatcgtcgattcttgcattcacaaaagattattcttttaattcgatagctgggttaaatctgagctctatagataaattgaatgaaagctacgttaagcattatttaagagattaa

SEQ ID NO: 213428 - DNA, 966 bp, Klebsiella pneumoniae
atgcgaaagccaataaatgtatttattatactgatatcggtgctgatactcaccgggtgtgataacaaaccagataacatgttatccggttattcacatggagaatttgtatacctttcatattctggtaatgaaaaaatagaacggatcttgatcaataaaggagataacgtcgccgcaggacaggagttagtgaagattgagtccttcgatgcgcaaaatattttcctgcgcgctgaggaaaaactatcagcagagagcgctctattacgaaatctggaatctggagaacggcctgaagagctggatattatacgttcgcagattaaaaaagcacaatcggcagaatcccaggtaaagcggcagcttgggcgatatcgtaatctttacgccaatcatgccatatcgcttgcggaatgggaggatatccgggatgaattaactcaaaaaggcgcacaggttgaagagttaattaatcaactcaaagcacggcaactccctgcccggcaggatgagattagcaagcagcgctcaatggtggccgcggcaaaactcgaacgggataaggcgctgtgggatgtccagcaaacgacgattgtttctccggtcaatgctaaagtcttcgatattatttatcgtgccggggagcgcccttctgctggtaaaccaataatcagtctgttacctcctgagaatataaaagtacgcttctttatacccgaagcgaagctcggtaaatttaaaatcggatctaaggtaaaacttatatgcgatggttgcgctgagcccattgctggcgttattaactatatcagccctgaggccgagtttacgcctccagttatttatagtacgaaacgtcgtgagaagctcatttttatggcggaggctatccctgcgctgcagcaggcagggcggatgaaaatcggccaaccgtttgatgtggagattattggcgatgaataa

SEQ ID NO: 213429 - DNA, 918 bp, Klebsiella pneumoniae
atgaataatctttgtattgatgtaaaaaatctcaataaacattttggcgagcatcacgtcgtaaaggatttctctttacaggtggcaaaaggcgagatctatggttttctcggtccgaacggtagcggaaaaacgacatcgattcgaatgatgtgtggtttgattacgccggattccggtgaaggtacttgtctgggtatggatatctttacgcagcgggaaaaaataaaaaaaaagataggctacatgacccagtatttctcaatgtggggaaatttaactattcgggaaaacttactttttattgcgcggttatatagcctcgatcggcgtagagatcgggttgaacgtgcgctttctgagttaggcctcactgcccgacagcaccagctggctaaggagctttctgggggctggaagcaaagaatggccctcgccgcctgtatgttgcatgaacctgttttgctatttctggatgagccgactgctggcgtggatcccaaggcgcggcgagagttctggcaaatgctgcaccagctctctgaccgggggatctcgatactggtgagcacgcattatatggatgaggctgagcgctgccataaggttgcctatctctcatatggtcggctgctggcgaatggcactattgcgtcgattatagcctcccagaatttgatcaccatgcgaaccagcggcgccggtctgacgctgcttgaaagccagctacagcgcttgccggatattgagcaaacggtcatttttggcaatcagctttatattacatccagagatgaagcgaagttaaaatccgcgctttttgcctttacgcaacagggttatgagttctgtaaggtggataccaatctggaagatgcatttacctacttgatgaaaaataattgtgaaaaaaattaa

SEQ ID NO: 213430 - DNA, 1095 bp, Klebsiella pneumoniae
gtggttattaaggaaattcacgagctacgccgtgataaagtcagcatcagtatggtgctcctgacacctctttttcagctgatcattcttggctatgccatcaatatggatccgcataatcttccgaccgccttactaaattatgataccgaacgcatgagtcaaatctttgtgacggaagcgcaaaataccgggtatttttcgatgattcctgtcgattcagaagaggcggcgcagaaagcctttgtgcggggggatgtcacttttatcgtgacgatccctgaggggtttacgcgcaagttactgcgtggagaaaagccacaactattaattcagggggatgccatcgatccgatcaccacggggaatgcgctcagcgcccttgtgcaggtggcgaagtcgatgtttcagcacgatttgccgggcgacatgcgtgtggtgcaaaaagaggatgatttcgagcttatcattcatcgcatgtttaaccctgaggggataacccagtttaatactattcccggtattatggggtctatactcagtacaacgttaatcctgatgaccgccctgtctattacccgcgagcgagaaaacggggcgttagaaaatttactggtctctccgttgtccgggcttgaggtcattattgggaaaataacgccttttgttatcattggtctgtttcaggcgacgttaatcctgattgccgccgttttgttgttcgatatcccccttcacggtagcgtcttcctactattttttgtgctgttaatttatgtctttctttgtctgtcaattggtatcggtatttctggcttagcacaaaaccagctgcaggcgctgcaaatgtcctctttttactttatcccttccattatgctgtccggctttattagcccctttattagtatgcctgactgggcgaaagccattggctcctgtttaccgctgacctacttcatccgcctggttaagggcattatgctgaaaggctattcagcaacggcattgttgcctgacctcttgccgctgataggcctggcggtgattgtcattggcgtggggttgaaatcttatcgtaaaacgctggactga

SEQ ID NO: 213431 - DNA, 717 bp, Klebsiella pneumoniae; identical to SEQ ID NO: 138179

SEQ ID NO: 213432 - DNA, 642 bp, Klebsiella pneumoniae
atgaagccgtatcagcgccagtttattgagtttgcgcttagcaagcaggttcttaagtttggcgaattcacgctgaaatccgggcgcaagagcccctatttcttcaacgccggcctgtttaacaccgggcgcgatctggctctgctgggccgtttttatgccgaggcgctggtggattccggaattgagtttgacctgctgtttggcccggcctacaaaggaatcccaatcgccaccaccaccgcggtggcgttagccgagcatcatgaccgcgatctgccttactgctttaaccgcaaagaggcaaaaacccatggcgaaggcggcaatctggtcggtagcccgctgcagggccgggtaatgctggtggatgacgtgatcaccgccggtacggcgattcgcgaatccatggagattatccaggcccagggcgcgcagctggcgggcgttctgatctccctggatcgtcaggaacgcggccgcggcgagatctccgccattcaggaagtggagcgggattacggctgccaggttatctcaatcatcactctgaaagagctgattacttatctggaagagaaacccgagatggcggaacacctggcgtcagttcgcgcctatcgtgaagcctacggcgtctaa

SEQ ID NO: 213433 - DNA, 597 bp, Klebsiella pneumoniae
atggcagaaaagcaaactgcgaaacggaatcgtcgcgaagaaatacttcaatctctggcgctgatgctggaatccagcgatggtagtcagcgtattaccaccgcgaaactggcggcttccgtcggcgtctctgaagccgcgctgtatcgccattttcccagcaaaacccgcatgtttgacagcctgatcgagttcattgaagacagtctgattacgcgcatcaatttgattttgaaagatgaaaaggacaccaccgcgcgcctgcgcctgatcgttctgttgattcttggctttggcgagcgtaatcctgggctgacgcgtatcctcaccgggcacgcgctgatgttcgaacaggaccggcttcagggtcgcatcaaccagctttttgagcgcatcgaagcgcagctacgccaggtgatgcgcgagaaaaaaatgcgcgaaggcgaaggctacaccctcgacgaaaccctgctggccagccagctgctggctttctgcgagggcatgctgtcgcgctttgtgcgcagcgagttcaaatatcgtccgacggatgatttcgacgcccgctggccgctggttgccgcacagctgcagtaa

SEQ ID NO: 213434 - DNA, 459 bp, Klebsiella pneumoniae
atgatgaaaaaaatcgacgttaagattctggacccgcgtgtcggccagcaatttccgctgccgacctatgccacctccggctccgccggacttgacctgcgagcctgtctcgacgacgccgtagagctggcgccgggcgcaaccacgctgttgccgaccggccttgcgattcatatcgccgatccctctctggcggcggtgatcctgccgcgctccggcctgggtcataagcatggcgtagtcctgggcaacctggtgggccttatcgactccgattaccaggggcagctgatggtgtccgtctggaaccgcggtcagcagagctttattatcgagccgggcgaacgtatcgcacagatggtctttgtgccggtcgttcaggcggaatttaacctggtggaatccttcgatgccaccgaccgcggcgaaggcggcttcggtcactcagggcgtaaataa

SEQ ID NO: 213435 - DNA, 1218 bp, Klebsiella pneumoniae
atgatgactctggcgggtaaaaaaatcgtcctgggcgtcagcggcggcatcgcggcgtataaaaccccggaactggtgcgccggctgcgtgaacgcggcgcggaagtgcgtgtcgcgatgacggaggcggcaaaagcgttcatcaccccactcagcctgcaggcggtatccggctatccggtttccgacagcctgctcgatccggcggcggaagcggcaatgggccatattgagctcggtaaatgggccgacctggtgatcctcgccccagcgaccgccgatttaatcgctcgcgtggcggccggcatggccaacgatctggtgtcgacgatctgtcttgccactccatccccggttgccgtggtgcccgccatgaaccagcagatgtatcgcgcgcaggccacccagcataatctgcagacgctcgctactcgcgggctgctgctatggggaccagacagcggtagccaggcctgcggcgacgtcggcccggggagaatgctcgatccgctaactatcgtagacatggccgcgcagcatttcgcctcccctgtcaaagatttgcaacatctcaacctcatgattaccgcgggcccgacccgtgagccattggatccggtgcgttatatcaccaaccacagctctggcaagatgggcttcgcgattgccgccgccgcagcgcagcggggcgcgaacgtgaccttgatcagcgggccggtatcgctaccgaccccgccgtttgtgcagcgcattgatgtcactaccgcgctggagatggaagcggccgtccaggctggcgcccagcagcagcacatttttattggctgcgccgcagtagcggattaccgcgccgccgtcatcgccgaagataaaataaaaaaacaaggtgatgaattaacaataaaaatggttaaaaacccggatatagtggccggggtcgcggcgctaaaatcacatcgcccctacgtcgttgggtttgccgccgaaacgaattatgtggaagaatatgcgcggcaaaaacgtgcccgcaagaacctcgacctgatttgcgccaacgatgtttcccagcctaatcagggctttaacagcgacagcaacgcactacaccttttctggcaggatggggaaaagcgcttaccacttgagcgcaaggaactcctgggccaattattactcgacgagatcgtgacccgttatgatgaaaaaaatcgacgttaa

SEQ ID NO: 213436 - DNA, 666 bp, Klebsiella pneumoniae; identical to SEQ ID NO: 138173

SEQ ID NO: 213437 - DNA, 237 bp, Klebsiella pneumoniae
atgtcccgagtctgccaagttactggcaagcgtccggtgaccggtaacaaccgttcccacgcactgaacgcgactaaacgccgtttcctgccgaacctgcactctcaccgtttctgggttgagagcgagaagcgttttgtcaccctgcgcgtatctgctaaaggtatgcgtgtaatcgataagaaaggcatcgatacagttctggctgaactgcgtgcccgtggcgaaaagtactaa

SEQ ID NO: 213438 - DNA, 168 bp, Klebsiella pneumoniae
atggctaaaggtattcgtgagaaaatcaagctggtttcttccgctggtactggtcacttctacaccaccacgaagaacaaacgtaccaaaccggaaaaaatggaactgaaaaagtacgatccggttgtacgtcagcacgttatctacaaagaagctaaaatcaaataa

SEQ ID NO: 213439 - DNA, 810 bp, Klebsiella pneumoniae
atgcctgaattaccagaggttgaaaccagccgtcgcggcatcgagccgcacctggttggcgcaaccattctgcacgccgtcgtgcgcaacggacggctgcgctggccggtttccgaagagatttatcgcctgagcgacgttccggttctcagcgtgcgtcgccgcgccaaatacctgcttctggagctgtcggacggctggatcatcgtccatcttgggatgtcggggagcctgcgcatcctgagcgaagagctgcctgctgaaaaacacgatcacgttgacctggtcatgagtaacggcaaggtgctgcgctacaccgatccacgccgctttggcgcctggttgtggaccagaacgctggaaggccatccggtactggctcatcttggcccggagccgctcagcgacgcgttcaacgccgactatctccagcaaaaatgcgcgaagaagaaaaccgcgatcaaaccctggctgatggataacaagctggtggtgggcgtggggaatatctacgccagtgaatcgctgttctccgccgggatccatcctgaccggctggcgtcctcgctgtcgcgggaagagtgtgagcagctggtgaaggtgattaagctggtcctgctgcgttcgatagagcagggcggcaccacgttaaaggatttcctgcaaagcgatggcaagccgggctatttcgcccaggagctacaggtctatggccgcaagggcgaaccctgccggatctgcggcacgccggtcgtcgggaccaaacatgcccagcgggcgaccttttattgccgtcagtgccagaagtag

SEQ ID NO: 213440 - DNA, 480 bp, Klebsiella pneumoniae
atgagcacaaaagcgatctatccgggtaccttcgaccccatcaccaacggtcatatcgatattgtcacccgcgcggcaagtatgttcgataaagtggtgctggctatcgccgccagcccgagtaaaaagccgatgttcagccttgatgagcgcattgcgctggcagagcaggcgacggcccacctggtgaacgtggaggttatcggcttcagtgatttgatggccaatttcgcgcgcgcgcagcaggccaatatcctgatccgcggcctgcgggcggtggcggatttcgagtatgagatgcagctggcccatatgaaccgccacctgatgcccacccttgagagcgtgtttctgatgccgtgcaaagagtggtcgtttatctcttcctcactggtgaaggaagtggcgcgccaccagggcgacgtttctcactttctgccagctaatgtgcatcaggcgctgttgaataagctgaagtaa

SEQ ID NO: 213441 - DNA, 777 bp, Klebsiella pneumoniae
atgtcgaaccggctttccgtggtgatgatcgctaaaaacgccgccgacctgctgccggattgtctgggctccgttagctgggcggatgaaattatcgtcctcgactccggcagcaccgacaacaccgttgagctggcccgcggcctcggcgcccaggtctatacccataccgactggcgaggctatggcattcagcgccagcgcgcgcaggattacgccaccggcgactgggtgttgatgatcgataccgatgagcgcgtcacgccagaactcaggcaggctattcttaaggtactggacgccccccagcgcggcgccatctacagcatcgcccgccgtaactattttctcggacgctttatgcgccacagcggttggtatcccgatcgcgtcctgcgcctgtacgaacgcgcccgttaccgctataacgataatctggtccatgaatcgctggatagcctgggcgctgaggttattccgctgaccggcgatctcctgcacctgacctgccgcgacttcgctggcttccagcaaaaacagctggcgtatgccgccgcgtgggcgcttgagcgtcaccagaagggcaagaagacctcgatggcagggattttcagccatacgctgggcgcgttcctcaagacgttgctattgcgcggtggggtgctggacggtaaacagggatggttactggcgatggtcaacgcgcagtatacgtttacgaaatataccgagctgtgggcgctgagccacggctactcggagaaagagtcatcatga

SEQ ID NO: 213442 - DNA, 1275 bp, Klebsiella pneumoniae
ttggaattgctttataccaccctactttaccttattcagccgctggtgtggctgcggctgctgctgcgcagtcgtaaggctcctgcctatcgcaaacgctgggcggaacgctatggcttctgtcagaacaaggtagagccggatggcattctgctgcactccgtttccgtcggcgagaccttagccgccattccgctggtccgcgccctgcgccatcgctacccttctctgccgatcaccgtcaccaccatgacgccgaccggctccgagcgcgccatgtcggcgtttggcaaagatgttcatcacgtctatctgccctacgatctgcccggcgccatgaaccgcttcctgaacaccgttcagccgaagctggtgatcgttatggagaccgagctgtggccgaatatggtggccgcgctgcataagcgtaagatcccgctggtgatcgccaacgcgcgcctgtccgaacgttccgccaaaggctatgccaaactgggcggctttatgcgccgcctgttgagccgcattacgcttatcgccgcgcagaatgaagaagatggtaaccgcttcctctccctggggctgaagcgcaaccagctggcggtcaccggcagcctgaaattcgatatctccgtcacgccagagctggcggcccgggcggtgacgctgcgtcggcaatgggcaccacaccgcaaggtctggattgccaccagcacccacgacggtgaagaacaaatcatcctccaggcgcataaaaaactgctggaggctttcccgaacctgctgctgatccttgttccccgccatccggagcgcttccctgacgcccgtgagatggtacaaaaggctgggatgagctttactctgcgcagcacgggcgagatcccctcctccagtacccaggtagtcattggcgataccatgggcgagctgatgctgctctacggcattgccgacctcgccttcgtcggcggcagcctggtggagcgcggcggccataacccgctagagccggcggcgcacgccattccggtgctgatgggtccgcataccttcaacttcaaagatatctgcgccaagctgcagcaggacgatggcctgatcaccgttaccgatgccgattcgctggtcagggaggtgtccacgctcctgaccgatgaagattaccgtctgtggtatggccgtcacgcggtggaagtgctgcatcagaaccagggcgcgctgtcgcgtctgctacagttactgcaaccttacctgccgcagcggagtcattaa

SEQ ID NO: 213443 - DNA, 990 bp, Klebsiella pneumoniae
atgagtcaaacgcctttattgagcatcgtggctgccgtctacaacggtgagaaatttctagcgcaattctttgagtgcattgaacagcagcagctggacagctatgaactgatcctggtgaacgatggttcgacagacaacagcctggcggtgatcgccgaatggcaggagcggctgcagaacgtccaggtgctggagcaggaaaaccagggcgtctcggtcgcgcgcaataccggcctcgccgccgccagcggcaaatatctcgcgtttccggatatcgacgacaaactctatccgggcatgtatcgcacgctgctggagatggccgagaaagaacatctcgatatcgccacctgcaacggcacctatgtgtacgaaaagcgccgcgagagccacccgatcttcccactggatcgcctgccctcgacgggtgtgctgccgggccatgtctggcttaagcaggccctggactcgcggaagtttctgcacgtcacctggcttaatatttatcgtcacgactttatccgccagcatcacttccatttcgagcctggcctgcgccatcaggatatcccatggaccacagaagccctgctggccgcggagcgcgtgcagtacaccagtcagcagttctatgattactacattcactctgagtcggtgtcgcataagccggacaacgacgacacgctgatgcgttcggcgcgccactatatgaagattctggagatgctggaggcgattaaccagcgctacccggataaagtacgccatatcgccgcctgtcgctggcagatcgccaaagaaggcctggggatcatccataccttcgatagcatgaaagatgagtccaaaaagcatgttattattaacgaattcttcgaccgcggtatctggcggttaatctggaaaaacgcctgtactttccgtttacgctggcgcctgggacgccgttatctgcgtattaagcgttatcgccacgcgggatag

SEQ ID NO: 213444 - DNA, 1095 bp, Klebsiella pneumoniae
atgcgcatcttatttgtgattgacggtttacccggcggcggcgcggaaaaagtggtcctgaccctggcggcacagttcctgcgcgacggcgatcgggtgtcgctcatttcgctgcgcgatgtctgcgagtacccattgcccgaggggctcgactaccaggtagttgccgatcgctgccgtaaaccgtggcgcaagctgaccgagctgtcccgccgcgcccgccagctggatgccgcagtcgtgcgggccgaacagcaggggcaatttgaccttgtgctctccaacctgcacaaaaccgaccgcatcgtcgcccgcagccgggcgctgcgcgagcgtaacgtctggttctgtctgcacggcgtattctctgcctcctatctcgggcaccgcaccggctttgaccgctggatgaagcagcagaaaattaagcgaatttatcagggtcgcaacgtggtgacggtttccgacgcggtggggcgagatctggtggaagagtttgccctgcgcccggcacagctgaaaaccatctacaatcccttcgatatcgccgccctgcgcgccgaggcggaagccgatagcgagcgcccggacggtgactacctgattcacgtcggtcgcttccatccgggcaaacgccatgaccgcctgcttgaagcctatgcgcagagcggcatcgacgcaccactggtgctgctaggccagggaaaaccggagcaagagcagcgcctgcgccagctggcaaaaacgctgcacattgacgatcgggtgtggttcaaaggctttcagaaaaaccccttaccgtggatcaaaggcgcacggatgctggttttgagctccgatagcgaaggattcggcaatgtggtggtggaggcgctgctgttacatactcctgtcgccagcacccgctgccccggcggcgtcaccgagatcctcaccggcgaacttgcccgcggtctggcggatctgaccagtccggcgctggctcagacgatgcaaagcatttaccataacccgccggccatcgacgatgccgcgctggaaaaattcagcgtcgtatccatttgtcagcagtaccgtcagctgcagcgcacctga

SEQ ID NO: 213445 - DNA, 1128 bp, Klebsiella pneumoniae
atgagtaaattcaggctggctctggtgcggcagaagtaccgcccggacggcggcgcagaacggtttgtctcccgcgcgctggaagccctcgacagcagtcatctgcaactgaacgtcatcacccgcgaatggcaggggccggtgaaaccggactggcagatccatatctgtaacccacgtaaatgggggcgcatcagccgcgagcgcggctttgccaacgccgcgcgcgcgctctggcagcgcgagtccttcgacctggtgcagagccatgaacgtattcccggctgcgatctctaccgcgctggcgatggcgttcatcgccgctggctgcagcagcgctcgcgcattttaccggcctggaaaagccgcctgctgttcgccgaccgttaccaccgctacgtcatgcaggcggaacgcgagatgtatgaagactcacacctgcgcggggtgatctgcaacgccgagatgatcaagcgcgagattatcgaagactttggcctgccggcggagaagatccacgttatttacaacgccattgacaaccagcgcttcctgccgccagacgaagagacctttgccgccttacgcgccaaatggcagctgccgctgcaggcgacctgcctgatctacgtcggctccggctttgaacgtaaagggctggcggcggcgatccgcgccatcgctcccaccgatcgctacctgctggtggtcggcaaagataaggatcagccgcgctatcaggcgctggcgaagagcctgaactgtgaagcgcgggtgcgcttcttcggcatgcagtcggagacattgcccttctatcaaatggccgatggtctgctgctgcccaccctctacgatccgttccccaacgtcatcctcgaggcaatggcctgcggtctgccggtgatcaccactaccggctgcggcggggcggagtttatcgtcgacggccacaatggttacgtctgcgacgctctggatatcccggcgctacagcaggcggtaatggccctgcccgcgcgcgcgctgggctccgcgcaaggcggtcacgcccgcgagcgcattatggcctgcaccagcgagcgactctcaacccagctgctttctctttatcaggatctggtgaaataa

SEQ ID NO: 213446 - DNA, 1077 bp, Klebsiella pneumoniae
atgacgcctgaaaccctctcccgcggcccgttgaacccggcgcggatcctggtcattaagctgcgccatcatggcgacatgctgctgatcaccccgcttattcacgcgctgaaacagcagtaccccgccgccagcgtggatgtcctgttgtatgaagagacccgggatatgctcgcagccaaccccgatatccaccatatttatggtctcgatcgccgctggaaaaagcagggaaaaaggtatcagctgaagatgcaatggcagctcattcagacgctgcgccagcagcggtacgatatggtgcttaacctggccgaccagtggccgagcgcggttatcagcaaactgaccggcgccgcgacgcggattggttttgattttccgaagcgccgccacccggtctggcgctattgccacaccgcgctggcctccacccaacagcacaaccagctgcatacggtacagcagaatctctctattctcgctccgctcggtctccagttgaacgaagcgccggcgcggatgggctacagcgaagcagactgggccgccagccgcgccctgctgccggaggacttccgggaacactacatcgtcatccagccgacgtcgcgctggttctttaaatgctggcgcgaagatcggatgagcgccctgatcaacgcgctgtccgccgaaggatacgcggtggtgctcacctccggccccgatgctagagagaagaagatggtggataccatcatcgccggctgcccgcaggcgcgactacactctttagccggccagttaacgctgcgccagctggcggcggtgatcgatcatgcccggttgtttatcggcgtcgactcggtgccgatgcatatggctgcagcccttggcactccgctggtcgccctgttcggcccctcgaagctgaccttctggcgtccgtggcaggcgaaaggcgaggtgatctgggccggcgacttcggtccgctgcccgatccggacgctatcaacaccaacaccgacgaacgttatcttgatttaattcctaccgacgccgtgatcgcggcggcgaaaaaggtactggcatga

SEQ ID NO: 213447 - DNA, 963 bp, Klebsiella pneumoniae
gtgcacaatcccgcatttctcattacgattgatacagagggcgataacctctggcaaaaacatgacagcatcaccaccgagaatgcgcgttatcttccgcgttttcagcagctttgcgaaaagtatggctttaaaccggtctatttgaccaactatgaaatggccatcgaccccttttatatcgaattcgccagagacgtgattgcccgcggcaccgcggaagtcggcatgcatctgcatgcgtggaacagcccgccgaccgagccgctgactgcagatgactggcgccataagccttatcttattgaatacagcgacgctatgatgcgtgagaaggtcgactatatgacgcgtctgctggaggataccttccagaccaaaatggttagccatcgcgccgggcgctgggcttttgacgagcgctatgcgcgtctgctggtggaatacgggtatcaggtggattgctcggtgaccccgcgggtgaactggaagaccgccaagggggcgccgcagggcgatggcgggaccgattatcgccgctttccgcagcatgcctatttcctcgatgaaaatgacatcagccgcgagggccactcgccgctgctggaagtgccgatgagcatccagtacaagcactcagcgtggatgaacagcgtgaagcagggctacgaccgcctgcgcggcaaagtgcgatccccctccgtacactggctgcgaccgatgggcggcaatgtggagacgatgaaaaaagtcgtcgaacaaacgttgacgcagggcaatgactacgtggaatatatgctccactcttcagagtatatgcccggcggcagccccacgttccagaatgaacgggatattgagcgtttatacgctgacctcgaagccttttttagctggctggcgccgcaggtgaagggcatgacgctggcagaatattaccagcggaaaattacacagcgctaa

SEQ ID NO: 213448 - DNA, 1080 bp, Klebsiella pneumoniae
atgcgtatccttaaacaattaacgcggaaaaagaatgcttttttccgcggcattaaatttaatttaattaactatcgatacagaaataagccggcgcgtaaagccttcgacccagcggctgtgcgccgcgtgctgctattgcgtctggatgataaagtcggtgatatggtggtcacgaccggctgcgccagaatactggccgaacggggatatcaggtttcggtgttaaccggaccaatatgcagcgaaatattagcaggctcagaattcattcagcaagtatatttatatcggcctcgcatgtccttaaatacgttgcgggcggcgggttttgatgcggttatcgattttgatgacgtgaccagctatgaacgctttaaattactcgccgatttacgggcgaccagcgtgattggttttaataaagagccctataaactttacgatcactcaatcgctttttttgacggcaacagccatatttccctgcgctataagcaggtggtgaagctgtttggcatcgttgacgaccgcccgtatcactatcatctccccggctgccgccatgagcgggagaaagtggcccgcttgctttctcaggccggagaggtcgaactgcgtatcgccattaacccttttaccgcctccgaggataaagacttctgtcgtcaccaggtggcgaccctggtcgagcggctacatgctctgccttaccgggtctgtatcgtgatggtggggcgcagtgaaaaaatccgccagctggggctggatatggcgctgtacatcgccgacagcaccatcaactccgccgtagaagtgatccgcagctgtgatttagtcattacgccggacacctcgatcgtgcatattgcccgggctttcgataagccgatggtggcggtctataacaaacgcaaactcaagaataccgggctgcccggctatcacatctgggcgccgggctatgacaaggcgaagcagatagtctgtgaagaagcgaatgtcgccgatgtggcgattgagtcggtgtggcccgtgattaaagagcaggccgaccggctggtcgccgcccgcagttga

SEQ ID NO: 213449 - DNA, 1170 bp, Klebsiella pneumoniae
atgagtactttaaaagtgagtaacttcgccagacagggttactcgattgtctttcctttgtttttatttttcagcgcgattttttgcatgtccacccggaccaataatctgctgcatttatcgatcctgctgctattgctgtcgctggtacgccaggaaaaccgccaggcgctggccggggtgttacgcgagcagtggcagacctggacgctgctggcggctttctttatctattacgccctcagtaatgtgtggggccatacgccgcagcatattgactcgccgatcacccacggcgtgtatctgaccgggtatctgttgctgatgacgatgctgctcagggacggacgaacccgccgactggcgatgctggcggtggtcggtgggatcaccgtgctctccctgtggacgctgattatcgaccatacgctggttctcaccgaacgagcggtctcccccgagaaccccggaccaacgaacgttatcgaccttgccggttactgcggcatcggcattttaatttgcggcatgctactgaaagaaaaagccagccactggctctatctgccggtggtcatcatgctggtgatgctgctgctcacccaaagccgcgggccgatcatcgccctggtgctggcggtcggctgtacgctgcacctgcacgtcttcacccgccgcaacctgctgatcgccgcggcgctggccgtgctggtagcgctgcttttggtcatgacgccggtgggcgacatgctgctcgcccgtttcgaggagctgggcacccaaagcgggctgcgcctgagcatctggcaccatacgctgtcggagatggccagccagccgtggctggggcgcggtttcagctatgaactggatttcatcaactacagcggcgagcacatcaccaccacccacagtgtgtatatgggcgccctgctgaaaggcggcatcgtggggttactgctgctgttggcgatcattgcctgcgggctatggcaggcgtggcgcaagcgccataccgacagccgctacagtctggcgatcctgttttacgcgctggtgtttatggcctcgcaggggatgtttatcatcagcaatccccgggaaacctgggtgctgttctggctgccgctgggcattgcgctcagcaaagggttggcggaaaaacgctaa

SEQ ID NO: 213450 - DNA, 909 bp, Klebsiella pneumoniae
atgggatccctgtttaagcagatctaccgctatacgcgccctcgcgcgtatcgccacaatgaaaatctgtggccttttacccgtattacgcgcgcgccaagcggcgaaatcagcgcgttacgctataaagggaaaacggtgccgctggtcagcctgagcgcgctgaaaaacagtatgcagggcgaagtcctgctgaccgccaccggcccctcaacccgcaatatcgatttttccctgttgtcgaaaacgatcccggtgatgggcgtcaatggcgcctggcatcttgccgaccggctgcacttttcactctataccatcgtcgacatggaatttttcgataagaagccggacattatccgcgccattgtcagccagccggatattttgctgttcaccaccatgcacgggatcgccaaaatcgtcgatcgctatggggacgcgctgcgctgccgtttggcgttgattgaggacggttgctataagatttaccagccgaaagtcgccagcgaagcgataaagcgcacttaccagcagaatgcggcgatgtgctttcatcctcagcgcccggatatctgttttagcaccgatattcgccagggcatctttgatgccggcacggtggtctactgggcgctgcaaattctcgcctggctgggcttcaatactatcctggtgagcggcctggatatgaccaactttaaccagccgcgattctacgaaacacaacaagaaaaattgccttcttacctggcaacaaaagtggataccctcgtcatgccctcctttgcgcatgccgcgcaggtactgcagcaacgccagattcgggtgattaatttttccccagaaagcgctgtgccggatactatcttcgaaaaggttgcgtttaatgagtactttaaaagtgagtaa

SEQ ID NO: 213451 - DNA, 972 bp, Klebsiella pneumoniae
atgcgggtattgatcgttaaaacctcctccatgggcgacgtgctgcacacgctgcccgcgctaaccgacgccgcgcaggctatccccggcatccgcttcgactgggtggttgaagagggtttcgcgcagatcccctcctggcatgaaagcgtcgagcgggttatcccggtggcgatccgccgctggcgcaaagcctggttttccgcgccgatcaaagccgagcgtcaagcctttcgcgaggccgttcaggcggtaaagtatgacgccatcatcgatgcccaagggctggtaaaaagcgccgcgctggttactcgcctggcgcacggcgtcaagcacggtatggactggcaaacggcccgcgagccgctggcgagcctgttttacaaccgccgccaccatatcgcgaaacagcagcacgcggtggagcgtacccgtgagctgttcgccaaaagccttggctacgcgaaaccccagacccagggggattacgccattgcgcgccatttcctgcagcacgaggctagcgctgccgcgccctatctggtgtttctgcacgccaccacccgcgacgataagcactggccggaaacccgctggcaggagcttctcgatctgctggccgacagcggcgtccacattaagctgccgtggggggccccgcacgaagaggcgcgggcgaagcggctggcggaaggccgggagtatgtcgaagtgctgccgcgcatgagccttgagcaggtggcgcaggttctggccggcgcccgggccgtcgtctcggtcgataccgggctgagccatctgaccgccgcgctggataaaccgaactttacgctctacggcccgaccgacccggggctgattggcggatacggtaaaaaccagcatatcgtgcggccggaaaacagcgccagcaccggcgatattgcggccagccggattcatcttctcctgcaaaatcaggggctgctctga

SEQ ID NO: 213452 - DNA, 1020 bp, Klebsiella pneumoniae
atgatgatgtcgcaaagtctttatcgtacgctcagggcgcgctatccccaggcgattatcgacgtgatggcgccagcctggtgccgtccgttgctttcgcgcatgccggaagtgaacgaagcgatcccgatgccgctgggtcacggcgcgctggctatcggcgaacgccgcaagctcggccacagcctgcgcgagcgtcgctacgatcgcgcttacgtgctgccgaactcgtttaaatcggcattagtccctttctttgccaatatcccgctgcgcaccggctggcgcggcgagatgcgctacggcctgctcaacgacgcccgagtgctggacaaagacgcctggccgctgatggtggaacgctacgtggcgctggcctacgacaacggcgtgatgcgctgcgccaaagatctgccgcagccgctgctgtggccgcagctgcaggtcaacgaaggggaaaagtcgcaggcctgcagcgcctttaacctgtccaacgatcggccgatcgtcggcttctgccccggcgcggagttcggcccggccaaacgctggccgcactatcattatgctgcgctggcgaaaaagcttatcgacgatggctatcagattgcgcttttcggctcggcgaaagataacgaggccggcaaagagatcatcgccgccctcagcagcgagcagcaggcctggtgccgtaatctggcgggtgaaacccagctggagcaggcggtcattctgatcgccgcctgtaaagctgtagtgactaacgattcggggctgatgcacgtcgccgcagcgctggaccgcccgctggtggcgctgtatggcccgagcagtccggactttaccccgccgctgtcgcataaagcgcgggttatccgtctgattaccggctaccacaaggtgcgcaaaggcgatgccgccgaaggctatcatcagagcctgatcgacatcaccccagaacgcgtcctgcaagagctgaacgaactgttagcggaaaaaaccgagcacgaggaagcgtaa

SEQ ID NO: 213453 - DNA, 933 bp, Klebsiella pneumoniae
atgatcatcgttaccggcggcgcaggctttatcggcagcaacatcgttaaagcgctgaatgacaaaggcatcaccgacattctggttgtcgacaatctgaaagacggcaccaagtttgtaaacctggttgacctgaacatcgctgactacatggataaagaagactttctgatccagattatggcgggtgaagagttcggtgaaatcgaagcaatcttccacgaaggcgcgtgctcttccactaccgagtgggatggcaagtacatgatggacaacaactatcagtactccaaagagctgctgcactactgcctggagcgcgaaatcccgttcctgtacgcctcctccgcggccacctatggcggacgcaccagcgacttcatcgagtcccgcgagtacgaacagccgctgaacgtttacggctactccaaattcctgttcgacgaatacgtccgccagatcctgccggaagccaattcgcagatcgtcggcttccgctactttaacgtctacgggccgcgcgaaggccacaaaggcagcatggcgagcgtcgctttccacctcaatacccagctgaataatggcgaaagcccgaaactgtttgaaggcagcgacggcttcaagcgcgacttcgtctacgtgggcgacgtggctgacgtcaacctgtggttctgggaaaacggcgtttccggcatctttaacctcggcaccggccgtgcggaatccttccaggccgtcgccgatgcgaccctggcgtaccacaaaaaaggcagcatcgagtacatcccgttcccggacaaactgaaaggccgctaccaggcgttcactcaggcggatctgactaacctgcgcaaagcgggctatgacaaaccgttcaaaaccgttgccgaaggcgtaacggaatatatggcctggctaaaccgcgacgcgtaa

SEQ ID NO: 213454 - DNA, 1194 bp, Klebsiella pneumoniae
atgcgtggtgatttctacaaacagttaactagcaatctggagaccgctcgggccgaagggttgttcaaagaagagcgcatcatcacctcggcgcagcaggcggacattaccgtcggcgacagccacgtgattaacttctgcgccaataactatctgggtctggcgaaccacccggaactgattgccgcggcgaaatccggcatggacagccacggtttcgggatggcctcggtacgcttcatctgcggcacccaggatacgcataagcagctggagaagaagctggccgatttcctcggtatggaagacgcgatcctctactcctcctgcttcgacgccaacggcggcctgtttgaaacgctgctcggcccggaagacgccattatctccgacgccctgaaccatgcctcgatcatcgacggcgtgcgtctgtgtaaagcgaagcgcttccgctatgccaacaacgatatgcaagagctggaggcgcgtctgaaagaagctcgcgaggccggcgcgcgtcacgtgctgatcgccaccgacggcgtgttctcgatggatggcgtgatcgccaacctgcaaggcgtttgcgacctggcggataaatacgatgcgctggtgatggtcgatgactcccacgccgtcggcttcgtcggcgaaaacggccgcggctcccacgaatactgcgatgtgatggggcgcgtcgatatcatcaccggcacgttgggtaaagcgctgggcggcgcctccggcggctacaccgccgcgcgcaaagaggtggttgagtggctgcgccagcgctcccgtccgtatctgttctccaactctctggcgccggccatcgtggccgcctccatcaaagtgctggagatggttgaagagggggcagacctgcgcgatcgcctgtgggctaacgcgcgtctgttccgcgaaaaaatgaccgcggcaggcttcacgctggccggcgccgaccacgccatcattccggtgatgctgggcgaggcggtggtggcgcagaactttgcccgcgagctgcagaaagaagggatctatgtcaccggcttcttctatccggtggtaccgaaaggccaggcgcgtattcgcacccagatgtcggcggcgcatactcctgaacaaattgagcgtgcggtggaagcctttacccgcatcggcaaacaactgggcgtcatcgcctaa

SEQ ID NO: 213455 - DNA, 1026 bp, Klebsiella pneumoniae
atgaaagcgttatccaaactgaaagcggaagaaggcatctggatgaccgacgtaccggaaccggaagtcggccataacgatctgctgattaaaatccgcaagaccgccatttgcgggaccgacgtgcacatctacaactgggatgagtggtcgcagaagaccattccggtgccgatggtggtcggtcacgaatatgtcggcgaagtggtggggattggtcaggaagtgcgcggctttaagattggcgaccgcgtctccggcgaagggcatatcacctgcggccactgccgtaactgccgcgcgggccgcacccatctgtgccgcaacaccatcggcgtgggcgtcaaccgcccgggctgctttgctgagtatctggtgatcccggcctttaacgcctttaaaatccccgacaatatctctgatgacctggcgtctatcttcgacccgttcggcaacgcggtgcacaccgcgctctccttcgatctggtcggggaagacgtgctggtttccggtgccggtccgatcggcgtgatggcggcggcggtagcgaaacacgtcggcgcgcgtaacgtggtgatcaccgacgtcaacgagtaccgtcttgagctggcgcgcaaaatgggcgttacccgcgcggtgaacgtggccaaagagaaccttaatgacgtgatggccgagctggggatgaccgaaggtttcgatgtgggtctggagatgtccggcgcgccgccggcgtttcgcagcatgcttgataccatgaaccacggcggccgtatcgcgatgctgggtatcccgccgtcggatatgtccatcgactggaccaaggtcatcttcaaagggctgtttatcaaaggtatctatggtcgcgaaatgttcgaaacctggtacaagatggcggcgctgatccagtctggtctggatctctcaccgatcatcacccaccgcttcggcattgatgacttccagaaaggttttgacgcgatgcgctccggccagtccggtaaagtggttttgagctgggactaa

SEQ ID NO: 213456 - DNA, 789 bp, Klebsiella pneumoniae
atgcttaaactctccgtatgcttactgacctgtaactctgcgcgcctgctgatggaggtgctgccgcctctgctgaaggtggccgatgaatgtatcgtcgtcgactccggcagtaccgacgaaaccgtcgctatttgtcagcagtttggtctcaccgtccatcaccatgcctataaagcccacggcgcgcagatgaactatgccatcgggctggccagccatgactgggtgctgtgcatggacagcgacgaaattcttgataatgacgtggtgacggccattcaggcgctaaaagcgggggaggagcctgacccgacctgcgcctggcgtctgccgcgctactggtttgtgctaggcaaacaggtacggacgatctaccccatttcctcaccggattatccggtgcgcctctttaaccgccagcaggcgcggtttaacgatcggccggtggatgaccaggtggtcggacacgcgagctccgtcaggctgccgggcttcgttcgccacgataccttttattcgctgcatgaagtgtttaataagctgaacagctataccacccggctggtgaagtaccagcagatcaaaccttcgctgacgcgggggatcgtcagcgccattggcgctttctttaagtggtatctgtttagcggggcgtggcgctatggcaaggtcggcgtggtgaccggcctgtacgcgacgttttacagctttctgaaatattttaaggcgtggtacgcccacgaagataaccaggcgcccgtcgcgcaaaagcgaacggacccctga

SEQ ID NO: 213457 - DNA, 948 bp, Klebsiella pneumoniae
ttgcttcaatttcgcgcaattgctcttgccgtagccggttcgctggctctggcggcgccagcgttcgctggcaaactctccatcgttattgacgattttggctaccgcccgcagaccgagaatcaggtgctggcgctgccggcaactatctccgtcgccgtgctgccgaacgcgccgcacgcccgggaaatggccactaaagcgcataatcagggccatgaagtgctcatccatctgccaatggcgccgctcagcaaacagccgctggaaaaagacaccctgcgtcccgaaatgagcagcgaggagatcgagcgcattattcgcgaggcttacggcaaagtcccttacgccgtcgggctgaataaccatatgggcagcgcgatgacctccaacctgtttggcatgcagaaggtgatgcaggccctggagcgctacaatctctattttctcgacagcgtcaccatcggcaacacccaggccatgcgcgccgcgcagggtaccggcgtgaaggtgattaagcgcaaagtgtttctcgacgatacgcagaatgaagccgatatccgcaaccagttcaatcgcgccatcgccctggcgcggcgcaacggttcggcgatagccattggccatccgcatccgacgacggtgcgggtgctgcagcagatggtctataacctgccgccggatatcacgctggtgcgcccgagcagcctgctgaacgagccgcaggtcgacaactcgacgccaaactacgcccagccgcctgcgcaacaaacgcagcagaagccgcgtaatccgttccatggcgtgaagtcttgcaaaccgaagcgcccgctggagcctgtgaacgccagccgcttcttcactatcctcagcgatagcatcagccagagcgcgctgatccagtactatcgcctcaaatggcagggctgggacaaccccggcaactag

SEQ ID NO: 213458 - DNA, 1257 bp, Klebsiella pneumoniae
atgtattcaactacatggatcgcagcggcagttcgatccgtcctttacgccagcgcgctcagcgctggcgtattgctgtgcgcgtcatctgcgcatgccgacgatcgcgatcagctaaagtccatccaggccgacatcgccgccaggcagcgggcgattaagcaacagcagcagcagcgcgcaagcctgctcgcccagctcaaagcgcaggaagaggcgatcgccgccgcggcccgcaaactgcgcgaaacccaggatagcctgaaccagctcaataagcagattgacgagatgaacgccgctctcgcgaagctggagcgccagcgcgcgtctcaggagcggaacctcgccgcgcagctcgatgccgctttccgccaggggccgcataccggcatccagatggtgctcagcggtgaagagggccagcgcaatcagcggatgcaggtctatttcagctatttcaaccaggcccgccaggagactatcgcggagttgaagaaaacgcgcgaagagatggcggtgcaaaagtcgatgctcgaagaaaaacagagccagcagcaaacgctggtctacgagcaaaaggcccagcaggcgaagctggagcaggcgcgtaacgaacggaaaaagaccctttccggcctggagtcttccattcagcagggtcagcaacaattaagtgaattacgggctaacgaatcgcgcctacgcggtcgtatcgcccaggcggaggctgccgccaaagcccgcgccgatcgggaagcacgcgacgcgcaggcggtgcgcgaccgccagcaggaagcatcgcgcaaaggcactacctataaaccaacggaaagcgagcgttcgctgatgtcacgcaccggcgggctgggctcgccgcgcggtcaggcgttctggccggttcgcggtccgctccttcatcgatatggcgaacagctgcaaggtgaactacgttggaaagggatggttatcgccgcgtctgaaggcaccgaagtcagagccattgccgatggtcgggtcattctggccgactggctgcagggctatggtctggtggtggtggtcgaacatggcaaaggcgacatgagcctgtatggctataaccaaagcgcgctggtcagcgttggcacccaggtgcgtgccggccagcctatcgcgctcgtaggcagcagcggcggtcagggccgtccgtcgctctatttcgaaattcgccgccagggtcaggcggtcaatccacagccgtggttgggaagataa

SEQ ID NO: 213459 - DNA, 1545 bp, Klebsiella pneumoniae
atgtcggtttctaaaaaacctatggtactggtgattctggatggctacggctatcgcgaagaccaacaggataacgccatttatagcgctaaaacgccggtaatggacgcgctgtgggccaaacgtccacataccctgatcgatgcatccggcctcgaagtcggcctgccggaccgtcagatggggaactccgaagtaggccacgtcaacctgggcgccggtcgtatcgtctatcaggacctgacccgtctcgatgtggaaattaaagaacgcaccttcttcgccaacccggtactgaccgccgcggtcgataaagcggttgccgccggcaaagcagtacatatcatgggcctgatgtcgccaggcggcgtccacagccacgaagatcacatcatggcgatggtggagctggcggcagagcgcggcgctgagaagatctacctgcacgccttcctcgacggccgtgatacgccgccgcgcagtgcggaaaaaacgctggcgacattcgaagccaaatttgccgcgctgggcaaaggtcgcatcgcgtcgctcatcggccgctattacgccatggaccgcgacaaccgctgggatcgcgtggaacaagcttatgatctgctgaccctggccaaaggcgaattccaggccgataccgccgtcgcgggtctgcaggccgcctacgcccgtgacgaaaacgacgaattcgtgaaagccaccgttatccgcgccgccggccaggccgatgccgcgatggaagacggcgacgcgctgatcttcatgaacttccgtgccgaccgcgcgcgtgaaatcacccgcgccttcgtcaacgccgacttcgacggctttgcgcgtaagaaagtggttaatctcgatttcgtgatgctcaccgaatacgccgccgacatcaaagtcgcctgcgcctacccgcccgcctcgctggccaataccttcggcgagtggatggcgaagcacgataaaacccagctgcgtatctccgaaactgaaaaatacgctcacgtcaccttcttcttcaacggcggcgtagaagagccgtttaaaggcgaagagcggatcctgattaactcgccgaaagtggcgacctacgatctgcagccggaaatgagctccgccgagctgaccgagaaactggtcgccgccatcaaaggcggaaaatacgataccatcatctgtaactacccgaacggcgatatggttggccataccggggtgatggaagctgccgtaaaagcggttgaagcgctggatcgctgcatcgaccaggtggctcaggcggtggaatccgttggcggccagctgctgatcaccgccgaccacggcaacgccgagcagatgcgcgacccggccaccggccaggcgcacaccgcccataccaatctgccggttccgctgatctacgtcggtaataaagcggtcaaagcggtcaacggcggcaaactttccgacatcgccccgaccatgctgtcgctgatgggaatggaaatcccgcaagagatgactggcaagccgctgttcatcgtggaataa

SEQ ID NO: 213460 - DNA, 432 bp, Klebsiella pneumoniae; identical to SEQ ID NO: 139519

SEQ ID NO: 213461 - DNA, 252 bp, Klebsiella pneumoniae; identical to SEQ ID NO: 139518

SEQ ID NO: 213462 - DNA, 468 bp, Klebsiella pneumoniae
atgtcagaacaaaacagcaccgaaatgaccttccagatccagcgtatctataccaaagatatctcttttgaagcgccgaacgcgccgcaagttttccagaaagactggcagccggaagttaaacttgatctggataccgcctccacccagctggctgaaggcgtttatgaagtggtgctgcgtgtgaccgtgaccgctgcgctgggcgaagaaaccgcgttcctctgtgaagtacagcagggcggtattttctccatcgacggcatcgaaggcacccagatggcgcactgcctcggcgcatactgcccgaacattctgttcccgtacgcgcgcgagtgcatcaccagcctggtttcccgcggcaccttcccgcaacttaaccttgcgccagtgaacttcgacgcgctgttcatgaactatctgcagcagcaggctggcgaaggtgctgaacaacatcaggatgcctga

SEQ ID NO: 213463 - DNA, 1020 bp, Klebsiella pneumoniae
atgaacgcacttaatgctgcaatgactgtgatcggtgccggctcttacggcaccgctcttgccatcaccctggcaagaaatggccaccacgttgtgctgtggggccatgacccgaaacatatcgcgacgctgcaacacgatcgctgcaacgccgcgttccttcccgatgtgcctttcccggatacgctgcatcttgagagcgacctggccaccgcgctggccgccagccgcgacatccttgtcgtggtgccgagccatgtattcggtcaggtgttacgccagattaaaccgctgatgcgttccgacgcgcggctggtgtgggccaccaaaggcctggaggccgaaaccggccgtctgctgcaggacgtggcgcgtgaagcgctgggcgatgatattccgctggcggtgatctcggggccaaccttcgccaaagagctggccgccggcctgccgacggcgatttcgctggcggccacggatccgcagtttgcggaagaccttcagcgcctactgcactgcggcaaaagcttccgcgtctacatcaacccggactttatcggcgtgcagctcggcggcgcggtgaaaaacgtcattgccatcggggcaggtatgtcggatggcatcggcttcggcgccaatgcgcgtacggcgctgattacccgtgggctggtggaaatgtcccgcctcggcgcggcgctgggcgccgatccggaaacctttatgggcatggccggcctcggtgacctggtgctcacctgcaccgacaaccagtcccgtaaccgtcgcttcggcatgatgctcggccagggtatggacgtgcagagcgcccaggacaagattggccaggtggttgaaggctaccgcaataccaaggaagttcgcgttctggcacagcgtttaggtgtcgaaatgccaataaccgaggaaatttatcaggtattgtattgcggaaaaattgcgcgcgaggcagcattgaccttattgggtcgcgcccgcaaggacgagcgcagcagcaattag

SEQ ID NO: 213464 - DNA, 822 bp, Klebsiella pneumoniae
atgccgtgtgaagaactggatatcgtctggaataatattaaagccgaagcccgggctttggctgactgtgagccgatgctcgccagtttttaccacgcaacgctactcaagcatgaaaatctcggcagcgcgctgagctatatgctggccaacaagctggcttccccgattatgccggcgatcgccattcgcgaagtggtggaagaggcctacgccgccgatccggaaatgatcgcctccgccgcctgcgatattcaggcggtgcgcacgcgcgacccggcggtggataaatactccacgccgttgctctatctgaagggtttccatgccttgcaagcctatcgtatcggccactggctgtggactcaggggcgacgcgcgctggcgattttcctgcaaaatcaggtctccgtctctttccaggtggatatccacccggcggcgaaaatcggccgcgggatcatgctcgaccatgccaccggcattgtggtcggcgaaacggcggtgattgaagatgacgtctctattctgcagtcggtcaccctcggcgggaccggtaaaaccagcggcgaccgtcatccgaaaattcgcgaaggcgtaatgattggcgccggggcgaagatcctcggcaatattgaagtcgggcgtggcgcgaagattggcgccggttcggtggtattgcagccggttccgccgcacaccaccgcggcgggcgtaccggcgcgtatcgtcggcaagccggagagcgacaagccggcgatggatatggatcagcatttcaatggcatccaccacaccttcgagtacggcgatgggatttga

SEQ ID NO: 213465 - DNA, 474 bp, Klebsiella pneumoniae
atgctgaacatcgtgttattcgaaccagagatcccgccgaacaccgggaatattatccgcctgtgcgccaacacgggcttcagtctgcatatcattgagccgatgggcttcacctgggacgataaacgcctgagacgcgccggactggactatcacgagttcactgccgtgcagcgccatgcggattacgcggcgtttgtcgccagcgcgcagccgcagcgtctgttcgccctgaccaccaaaggcacgcctgcgcacagcgcagtgagctatcaggacggcgatttcttgatgtttggcccggaaacccgcggtctgccggccagcatcctcgatgccctgccgccggagcagaaaatccgtattccgatgatgccggacagccgcagtatgaacctgtcaaacgcggtgtcggtggtggtgtatgaagcctggcgccagctggggtatcctggcgcggtcttgcgcagctaa

SEQ ID NO: 213466 - DNA, 1185 bp, Klebsiella pneumoniae
atgattatttccgccgccagcgactatcgcgccgccgcacagcgtatcctgccgccgtttctgttccactatattgacggcggcgcctacgccgaacataccctgcgccgcaacgtcgaggacctttccgatgtagccttgcgccagcgtattttgcgcaatatgtcggacctgagtctggaaacgacgttattcaacgagaagctggcgatgccgacggcgttggcgccggtcgggctgtgcgggatgtacgcccgccgcggcgaagtgcaggccgccggcgcggcggacgacaaaggcattccgttcaccctctctaccgtttccgtctgcccgatcgaagaggtcgccccgaccatcaagcgcccgatgtggttccagctgtatgtcctgcgcgaccgcggctttatgcgcaatgcgctggagcgcgccaaagccgccggctgctcgacgctggtctttaccgtcgatatgccgactcccggcgcccgctaccgcgacgcccattccggcatgagcggcccgaacgccgccctgcgccgctactggcaggccgtcacccatccgcagtgggcgtgggacgtcggccttaacggtcgcccgcacgatctgggcaatatctccgcctatctcggcaaaccgaccgggcttgaggattacattggctggctggcgaataacttcgatccgtcgatttcatggaaagacctggagtggatccgcgatttctgggacggtccgatggtgatcaaagggatcctcgatccggaggacgcccgcgacgcggtgcgcttcggcgctgacggcattgtcgtctccaaccacggcggccgccagctcgatggcgtgctctcctcggcccgcgccctgccggcaattgccgacgcggtgaaaggcgacatcactattctcgcagacagcggcatccgcaacgggctcgacgtggtgcggatgatcgccctgggcgccgacagcgtactgctgggccgcgcttacctgtacgccctggcgacccacggtaagcagggcgtggcgaatctgctgaacctcatcgagaaagagatgaaagtggcgatgaccctcaccggggcgaaaagtatccgtgaaatcagccgtgattcgctggtgcagaacgccgaagcgctgcagaccttcgatgcgctgaagcagaataacgccgcgtaa

SEQ ID NO: 213467 - DNA, 774 bp, Klebsiella pneumoniae
gtgatagtgatgcctaaacgcctggccgacgacgtggcgcgtcgcgtccgggcgctgattgaagaacaacagctggaggcgggcatgcgactgcccgccgagcgccagctcgccgcccagctcggcgtctcacgcaattccctgcgcgaagcgctggcgatgctggtcaatgaaggggtgctgttgagccgtcgcggcggcggcaccttcgtccgctttcagcatgagccgtggtcagagcaaaacatcgtccagccgctgaagacgctgctggccgatgacccggactacagcttcgatatcctcgaagctcgccacgccatcgaagccagcaccgcgtggcacgcggcgatgcgcgccaccgacgccgataaagaaaaaattcgtctgtgctttgaagcgacccagagtgaagacccggatatcgcctcgcaggcggatgtccgctttcacctggcgatcgccgaagcctcgcataacgtggtgctcctgcaaaccatgcgcggctttttcgacctgctgcactcctccgttaagcagagccgccagcgcatgtatcaggtgccgccggtgtttgcccgcctgaccgaacagcaccaggccgtcatggaggcgattgtcgccggcgacgccgaggcggcgcgccaggcgatgatgggccacttaggctttgtccacgccaccatcaaacgttttgatgaagaccaggcccgccaggcgcgaattacccgcctgcccggtgaccacaatgaaaattccagggagaactcgtga

SEQ ID NO: 213468 - DNA, 1656 bp, Klebsiella pneumoniae
atgaatctctggcaacaaaactacgatcccgccggtaatatctggctatccagtcttatcgcatcgctaccgattctgtttttcttttttgcgctgattaagctcaaactgaaaggctacatcgctgccacctggaccgtcgcaatcgcgctggtcgttgccttactgttctataaaatgccggtggaccgcgccttagcctcggtggtctacggcttcttctacggcctgtggcctatcgcgtggattattatcgccgcggtcttcgtctataaaatctcggtgaagaccggacagttcgacatcatccgctcatcgattctgtcgattacgccggaccagcgcctgcagatgctgatcgtcggcttctcgttcggcgcctttctcgaaggggcggcgggtttcggcgcaccggtggcgattaccgccgcgctgctggttggtctcgggtttaacccgctgtatgcggctggcctgtgcctgatcgtcaacaccgcgccggtggccttcggcgcgatgggcatcccgattctggtcgccggccaggtgaccggtatcgatagcttcgccatcggccagatggtgggccgccagctgccgttcctgaccattatcgtgctgttctggatcatggcgattatggacggctggcgcggcattaaagagacctggccggcggtgatagtcgcaggcggttcgttcgctattgcccagtacctcagctctaacttccttggcccggagctgccggatatcatctcgtcgctggtctccctggtctgtctgaccctgttcctcaaacgctggcagccggtacgcatcttccgcttcggcgatctcggcgcctcgcaggtggatatgacgctggcccgcacacgctacacggcgggacaagtgatccgcgcctggtcgccgttcctgttcctgaccgccaccgtgaccctgtggagcgtgccgccattcaaagcgctgttcgctcctggcggcgcgatgtatgacttcgttatcaatatttcggtaccattcctcgacaaaatggttgcccgtatgccgccggtggttagcgccgcgacgccctacgccgcggtgtataaattcgactggctgtcggcaaccggcaccgccattctgttcgccgccctgctgtccatcgtctggctgcgcatgaagccgaaagatgcgctgaccaccttcgccgggacgctgaaggatctggcgctgccgatctactctatcggcatggtgctggcgttcgcctttatctctaactattccgggctgtcgtcgaccctggccctggcgctggcccataccggccacgcgtttaccttcttctcgccgttccttggctggctgggggtattcctgaccggttcggacacctcgtctaacgccctgttcgccgcgctgcaggcaacggcggcgcagcagattggcgtctccgatattctgctggtcgcggccaataccaccggcggcgttaccggcaagatgatttccccgcagtcgatcgccatcgcctgcgccgcggtaggcctggtgggcaaagagtcggatctgttccgctttaccgtcaaacatagcctgatcttcacctgcatggtggggctgatcaccacgctgcaggcctacgttttaacctggatgatcccgtga

SEQ ID NO: 213469 - DNA, 363 bp, Klebsiella pneumoniae
atgaaagaagtcgaaaagaatgaaatcaagcgtctgagcgatcgtctcgacgccatccgccaccagcaggccgagctgtcgctggtggaagccgccgataaatatgctgaactggaaaaagaaaaagccactctggaaacggagattgaacgtctgcgttccgtccagagccagaagctgagcaaagaggcgcagaaactgatgagcctgccgttccgccgcgcgattaccaaaaaagagcaggccgatatgggcaagctgaagaaaagcgttcgcggcttggtggttgtccatccgatgaccgccctgggccgggaaatgggtctgaaagagatgaccggtttcgcccgcagcgaattttga

SEQ ID NO: 213470 - DNA, 225 bp, Klebsiella pneumoniae; identical to SEQ ID NO: 138359

SEQ ID NO: 213471 - DNA, 597 bp, Klebsiella pneumoniae
atgcacaacctggcgcggccgacgtcgcgcccattacgactcctgtcagatatgcaggcaatgatggaagaaacacaagcatttgaaaaccgtgtgcttgagcgtctgaatgctggcaaaaccgtacgaagcttcctgatcgccaccgtcgagctgttaacggaagcggtcaatattctggtgcttcaggtgttccgtaaagacgactacgcggtgaaatacgccgtcgagcccttgctggagggcagcgggccgctcggcgatctctctgtacgcctgaagctgatttatggccttggggtgataagtcgtgccgaatatgaagacgctgagctgctgatggccctgcgcgaagagcttaaccacgacggcaatgagtacagctttaccgacgacgaaattatcggtccgttcggcgagctgcactgcgtcgccgccctgccgccaacgccgcaatttgatgacagcgatgccgaactgctggcaatgcagaaactgcgttaccagcagatggtgcgctcaacgatggtgctgtccctgactgagctgatttcacgaatcagcttaaaaaaagcctttcagaaatcaacgctctga

SEQ ID NO: 213472 - DNA, 1149 bp, Klebsiella pneumoniae
atgaaagcattacattttggcgcaggtaatatcggacgtggctttatcggtaaattgctggccgacgcgggcatcgaactgacgtttgccgatgtcaatcagaccgtacttgatgccctgaatgcccgtcatagctatcaggttcacgtcgtcggtgagaatgagcaggtggacaccgtctccggcgtcaatgccgtcagcagcatcggcgatgaggttgtggacctgatcgctgaagtggatctggtcaccaccgccgtcggtcccgtcgtgctcgagcgcatcgcgccagcgatcgccaaagggctggcgcagcgcaaagcgcagggcaccgaacgccccctgaacatcatcgcctgcgaaaatatggtgcgcggcaccacgcagttaaaaggccacgtgtttaacgcgctggcggaagaagataaagcgtgggtggaagcgcatatcggctttgtcgactctgccgttgaccgtattgtgccgccatcggcttccgccactcatgacccgctggaagtcaccgtggaaacctttagcgaatggattgtcgataagactcagttcaagggcgcgctgccgactatcccgggaatggaattaactgataacctgatggcatttgtcgaacgcaagctcttcaccttgaacaccgggcatgctataaccgcctacctcggaaaactggcgggccatcagacgattcgcgacgcgatcctcgaccagaaaattcgtgccgtcgtgcagggcgcgatggaagagagcggcgcggtgctgatcaaacgttacgcctttgacccgcagaagcacgcggcttatatccagaaaatacttggccgtttcgagaacccgtacctgaaagacgatgttgagcgcgttggccgtcagccgctgcgcaaactgagcgctggcgaccgtttaattaagccgctgctgggtacactggaatacgggctgccgcaccgcaacctggtgaaagggattgcggcggcgatgcatttccgtagcgaagacgatccgcaggcgcaggagctggcggcactgatcgccgacaaggggccgcaggccgcgctggcgcagatttccggcctggatgccgcaagtgatgtcgtcgcggaggccgttaacgactacaacgcggaaaaatga

SEQ ID NO: 213473 - DNA, 1908 bp, Klebsiella pneumoniae
atgtcatccgatatcaagatcaaagtgcaaagctttggtcgtttcctcagcaatatggtgatgccgaatatcggcgcgtttatcgcgtggggtatcatcaccgcgcttttcattccgacagggtggttgccaaacgaaacgctggcgaagctggtcggtccgatgatcacctacctgctgccgctgctgatcggttacaccggcggtaaattagtcggcggcgaacgtggtggcgtggtcggggcgatcaccaccatgggcgttatcgtcggcgcggatatgccgatgttcctcggctcaatgattgccggcccgctgggcggctactgcatcaagaagttcgataactgggtagacggtaagatcaaatccggttttgaaatgctggtgaataacttctccgccggcatcatcgggatgatcctcgccattctggccttcctcggcattggcccggcggtcgaagttctgtcgaaaattctggcggctggcgttaactttatggtggcgcacgacatgctaccgctggcgtctatcttcgtcgaaccggcaaaaatcctgttccttaacaacgccatcaaccacggtatcttctcgccgctgggtattcagcagtcccacgagctgggtaaatccatcttcttcctgattgaagctaacccgggtccagggatgggcgttctgctggcgtacatgttctttggccgcggcagcgcaaaacagtctgcaggcggggctgctatcatccacttcctgggtggtatccatgaaatctacttcccgtacgtactgatgaacccgcgcctgatcctggccgttatcctcggcgggatgaccggtgtcttcaccctgactatcctcaatggcggtctggtttccccggcttccccaggctctatcctggcggtactggcgatgacgccgaaaggcgcctacttcgctaacatcgccgcgattatcgcagcgatggcggtctccttcgtggtctctgcggttctgctcaagaccagcaaagttaaagaagaagacgatatcgaagccgcaacgcgtcgtatgcatgacatgaaagcggaatccaaaggcgccagcccgctggcggccggtaatgtcaccaacgacctgagccatgtgcgtaaaatcatcgtcgcctgcgacgccgggatgggttccagcgctatgggcgccggggtactgcgcaagaaagtgcaggatgccgggctgagcaacatctcggtcaccaacagcgcaatcaataacctgccgccggatgttgacctggtcatcacccaccgcgaccttaccgagcgcgccatgcgccaggtgccgcaggcgcagcatatttcgctgaccaacttcctcgacagcggtctgtacaccagcctgaccgagcgcctggtcgcggcccagcgccacatcgacaacgaagtcaaagtcaccgatagcctgaaagacagctttgacgatactaacaacaacctgttccagctgggcgcggataacatcttcctcggtcgcaaagcagccaccaaagaagaagcgattcgcttcgccggtgagcagctggtgaaaggcggttacgttgagccggaatatgtgcaggcgatgctggaccgcgaaaaactgacctcgacctatctcggcgagtccattgcggtaccgcacggcaccatcgaagcgaaggaccgcgtgctgaaaaccggcgtcgtcttctgccagtacccggaaggcgtgcgcttcggtgaagaagaagatgaagtcgcgcgtctggtcatcggcatcgccgctcgtaataacgagcacattcaggttatcaccagtctgactaacgccctggatgacgaaaccgtgattgagcgcctggcgaaaaccaccagcgtcgacgaagttctggcactgttaaataaataa

SEQ ID NO: 213474 - DNA, 369 bp, Klebsiella pneumoniae
atgtttctcaattattttgcgctgggcgttctgatcttcgtttttctggtcattttttatgggattatcattattcacgatattccttatttgatcgccaaaaaacgcaaccaccctcattccgatgctattcatgtcgccggatgggtcagtctttttactctccacgtcatctggccgtttttatggatttgggccacgttgtaccagcctgagcgcggctggggcatgcagcataaggcgaatacggcccctgacgaacctgaaaaagagaccgatatacaacagcttcgccaacgactgagcgaccttgaacaccaggtggcggccatccagcggccgcagtccacctctgcggcggagaaataa

SEQ ID NO: 213475 - DNA, 1137 bp, Klebsiella pneumoniae
atggatctgttgataattttgacctacgtggccatcgcctggtcgatatttaaaatcttcaaaataccggtaaataaatggacggtacctaccgcggcgctggggggcgtatttattgttagcgcgcttattttattaatgaactataaccacccttacacctttctggcgcaaaaggcggtgatatctattcctattacgccgcaggttaccggagtggttaacagcgtcaccgacaaagcgaatcagcgcgtcaaaaagggtgaggtgctttttactattgacccggcgcgctatcaggcgcgggtcgaccgtctgcaggccgacctggtgacggcgctgcacagtattaacaccctcaaagcgcagctctctgaagcccaggccaacaccacccgcgtgtcggcggaacgcgatcgcttatacaaggactatcagcgctacctgaaagggagccaggcgcgggtgaacccgttctcggaaagcgacatcgataacgccaggcagaattaccttgcccaggacgcgctggtcaaggcgtcggtggcggagcaggcgcagatccagagccagctggacagcatgatcaacggcgagcagtcgcaagtggccagcctgcgcgcccagctggcggaggcgaaatataatctcgatcagaccaccgtgcgggcgccaagcgatgggtatatcacccaggtgctgatccgtccggggacctatgccgcctcgctgccgctgcgtccggtgatggtgtttatccccgagcaaaaacggctgatcgtcgcccagtttcggcaaaattccctgttaaggctggagaaaggcgacgacgcggaagcggtgtttaacgccctgcccggacaggtattccacggcaaactggtgagcattttaccggtggtgccggggggaacctatcaggcgcagggggcgttgcagtcgctgaccgtgacgccgggcagcgatggcgtgctggcgaccattgagctcgatccgaatgccgaaatcgatgcactacccgatggcatctatgcgcaggtggcggtctactccgaccatttcgcccacgtttcggtgatgcgtaaagtgctgctgcggatgaccagctggatgcactacctctatctcgaccattaa

SEQ ID NO: 213476 - DNA, 609 bp, Klebsiella pneumoniae
atgaaactgatcggcagctacaccagtccctttgtgcgcaaaatatcggtgatcctgctggaaaagcgcatcccttttgagtttgtcaacgaatccccctacagcgaaagcaacggtgtggcgcgctataacccgctgggcaaggtaccggcgctggtgacggacgacggtgagtgctggtttgactccccggtcatcgcccagtatctggagctgctgggcgtggcgccgccgatgatccccgccgaccccagagccgctctcaggatgcgccagcttgaggcgctggcagatggggtgatggaggccgcccaggcgctggtgcgcgaaaaagctcgccctgcggcccaacagtcagagcaagagctgctccgccagcgggagaaagtggcgcgcggcctcgacaggctggaagcctgcgcggcggacggaacgctacgcggtgacgaggtcaatctggcgaccatctctacggcctgcgccattgcctacctgaactttcgccgggtggcgccgggctggtgcgccacccggccgcagttggtgaagttggtggatgcgctgttccagcgcgccagctttgcgcgcaccgaaccgccgcggacttga

SEQ ID NO: 213477 - DNA, 1389 bp, Klebsiella pneumoniae
atgactaccgaaattcgtgcgctttatacccggcttccggccattgaccgcttactccgcgaccccgctttttcctccctgctggcgcagcacggccattcgcaggtggtgacgcagctgcgccagatgctggacgaggcgcgggaacagatccgccagtgtcagacactgcctgactggagccatgactggctgcacgcctgtgagcagcggctcaccgccggccagcggagcgccctgcgtccggtgtttaatctcaccggtacggtattgcataccaatctggggcgcgccatccaggcggagtcggccgtggaggcggttgccagcgcgatgcgcgcgccggtgacgctcgaatatgatctcgacgacgccgggcgcggccatcgcgatcgcgccattgccgatctgctgtgccagatcaccggcgcggaagatgcctgtatcgtgaacaacaacgcggcggccgttctgctgatgctggcggccaccgccagcggccgcgaagtggtggtttcccgcggcgaactggtggagatcggcggcgcatttcgcattcctgatgtgatgcgtcaggcgggttgtcagctgcacgaagtgggtaccaccaaccgcacccatgccaaagattatcgccaggcggtgaatgacaataccgcgctgctgatgaaggtccacaccagcaactacagcattgagggctttaccaaagccgtcgacgaagcggagctggcggccattggtcgcgaactggatgttccggtggtagccgacctgggcagcgggtcgctggtggatctcagtcagtatggcctgccaaaggagccgatgccgcaggagatgatcgccgccggggtgagcctggtcagtttctccggcgacaagctgctcggtggcccgcaggccgggattatcgtcggcaaacgcgcgctgattgcccagctgcaaagccacccgctgaagcgggccctgcgcgccgataaaatgaccctcgcggcgctggaggctacgctgcgcctctatcagcacccggaggcgctgagggagaaattgccgacgctgcgcctgctcacccgtccggcggaggagatccgccggctggctgaacgcctgcagcctgacctggcggcacactatgctgattttgccgtcagcgtggcagcctgccagtcgcagattggcagcggctcgttacccgtcgaccgcctgcccagcgcggcgttgacctttaccccgcatgacggccgcggtagccggctggaggcgctggcggcccgctggcgcgcgctgccgtgtccggtgattggccgcatttatgacggtcggctctggctggacctgcgctgtctggaagatgaaacccgctttatggagatgttgttacgatga

SEQ ID NO: 213478 - DNA, 1842 bp, Klebsiella pneumoniae
atgattattgccaccgctggacatgttgaccacggcaaaacgacgctgctgcaggcgataaccggcgtgaatgccgatcgtttgccggaagagaaagcgcggggaatgacgatcgatctcggctatgcctactggccgcagccggacgggcgggtgctgggatttattgacgttcccgggcacgaaaagtttttgtccaacatgctggcgggggtggggggtattgaccatgcgctgctggtggtggcctgcgatgacggggtgatggcgcaaacccgcgaacacctggcgatcctgcagttgaccggaaagccgacgctgaccgtggcgctgaccaaaacggaccgcgtggcggccgccagggtggcggaggttcaggctgaggtcgagcagaccctgggcgagctgggctttgacgccgtcgctttctttcccaccgcggcggcggaaaacatcggtattgcggaactgcgcagccatctgctgcagcttgcggagcgcccccgcccgcagcagcagcggtttcgcctggcgctggatcgcgcttttaccgtcaaaggcgcggggctggtggtcaccgggacggcgctctccggcgaagtacgggtcggggataccctgtggcttaccggcgtcaacacgccgatgcgcgtccgcggcctgcatgcccagaatcaagcggttgagcaggcgcacgccggacagcgcattgcgctgaatattgtcggcgatgcgcaaaaagaggccgtgcaccgcggcgactggctgctctcctcaccaccgccggagccagcagaacgggtgattgtcgagctgcagtgccatacgccgctcagccagtggcagccgctgcatattcaccatgctgccagccacattaccggccgggtgtcgcttcttgagggcaacctggcggagctggtgctggatactccgctgtggctggcggataacgaccggctggtgctccgcgatatctctgctcgcttgacgctggcgggcgcacgggtggtgacgctggatcctccgcgtcgcggcaaacgtaaaccggaatatctgcagtggctgcacgccctggcagcggtcggcgctgacgatgcgcaggcgctggagttacatctgcagcgggatgccgtccggcttgagcacttcgcctgggcgcggcagctcagcgaagccggaatggcggccctgatccagcgaccggactatctgcaggccggacagcgcctgcttagcgcgccgcttgccgcccgctggcagcgaaaattgctggatgcccttgcgcgctaccatgagcagcatcgagacgagccgggccctggccgggagcgcctgcgccgcatcgcgctgccgatggaagatgaagcgctggtgctgctgctgattgagcagatgcgcgagagcggcttagtccacagccatcacggctggctgcatttgccggagcataaagccgggtttaccgacgagcagcaggcggtctggcataaggtggagactctgttcggcgacgatccgtggtgggtgcgcgatcttgcgcgcgaagtccatgttgaagagtcactgatgcgcgcggtgctgcgccaggcggcgcagcaggggatgattactgcgatcgtcaaggatcgttactaccgcaacgatcgcattgtgcagttcgcccagcgggtgcgcgagctggatcggctgcgcggttcaacctgcgcggcggatttccgcgataccttaaacgtagggcggaagctggcgatccagatcctggagtatttcgatcggattggcttcacccgccgtcgcggcaacgatcatatcctgcgcgataaggcattgttccggtaa

SEQ ID NO: 213479 - DNA, 486 bp, Klebsiella pneumoniae
atgaaccagtttcttattgccaatgcccagcggtgcatcggctgtcgtacctgcgaagtggcctgcgcggtggcgcaccagcaggcgcaggatgtcgccgccctgtcgacgaaccatttcgcgccgcgtatccgggtggtgaaaagcggtgacatatcgacggcgatggcctgtcggcagtgcgaggatgcgccctgcgccagcgtttgcccacagggggcgattcagcgcgacaatgacgtctggtgggtcgaccagcggcgctgcatcggctgcaaaagctgcatggtggcctgcccgtacggcgcgatgaccgttacggtaatgaaccagcaggcgcaggcgttgaaatgcgatctatgccatcaccgcgccgaaggaccggcctgcgtggccgcctgcccgacgcaggcgctgcgggtgatggttcccgcagagctggaagcgctatgcgcgcaaaaacgccagcggctggcgctggcatga

SEQ ID NO: 213480 - DNA, 1257 bp, Klebsiella pneumoniae
atgacattttcccttttcggcgacaaattcacccgtcattcaggcatcacccgcttgatggaagaccttaatgacggtctgcgcacgccgggcgctattatgctgggcggcggcaaccccgctcagatcccggaaatgaatgactacttccagcagctgctggccgacatgctggataatggcaaagcccttgatgcgctttgtaattatgatggtccacagggcaaaagcgagctgctggctctgctggcgaatatgctgcgcgacgagctgggctgggagatcgaaccacagaatattgcgctaacaaacggcagtcagagcgcatttttctacttatttaatctgtttgcaggccgtcgggcagatggcaccacccgtaaggtactgttcccactgacgccggaatatatcggctacgccgatgccggtctggaagaggatctgttcgttgccacccggccgaacatcgaactgctgccggaaggccagtttaagtaccatgttgattttgagcatctgcaggtgacggaagagaccgggatgatctgcgtctcgcgccccaccaacccgaccggcaacgtcatcactgatgaagagctgatcaaactggatgcgctggcgaatcagcacggggtcccgctggtgattgataacgcctacggcgtgccgttcccgggcattatctttagcgacgcccgaccgctgtggaatccgaacatcgtgctgtgtatgagcctgtccaagctgggcctgccgggcagccgctgcgggattatcatcgccaacgaaaaaatcatcaccgccatcagcaacatgaacggcattatcagcctcgcccctggcggcatcgggccggcaatgatgtgcgaaatgattaaacgacaggatctgctgcgcctgtcagagacggtgatcaagcccttctattaccagcgggtgcaggaaaccatcgccattattcgccgctatctgccggaggagcgctgccttattcacaaaccggagggggcaatcttcctctggctgtggtttaaggatctgccgatctccaccgagctgctgtatcagcggctgaaaaagcgcggcgtgctgatggtgccgggggattacttcttccctggtctggataaaccgtggccgcacacccaccagtgtatgcgcatgaactatgtaccggacccgcaaaaaatcgaagccggagtgaaaatcctcgccgaagaggtagaatttgcctggcgcgaacaggaagcatag

SEQ ID NO: 213481 - DNA, 2034 bp, Klebsiella pneumoniae
atgaaactcgctgcgcttgccacgttattcgtgcctgggatggcctttgccgcctggactaccaccgactttcctgcttttaccgaagaagggaccggccgattcatcagccagaaagtggttgagaagggtacacgtcccctgcagctaaattttgaccagcagtgctggcagccttccggcggcattaagctcaaccagatgctgtccatggagccctgtcgcggcacaccgccgcaatggcgcatcttccgccagggtctgtataccctggaggtggatacccgttccggcacgccaacgatgatgatttcgctggaggaaaaagagaccagcgccgcggcgccgcagatccgccagtgtccgaagtgggacggaaaacctctgaccatcgacgtcagcaaaaccttcgccgagggcagcaaggtccgcgatttctacagcggcaatgtcgcgaccgtcagcggcggcaaaatcaccctgcagcccgccttcggcagcaatggcctgctgctgcttgagcgcgccgagacggccgccccggcgccgtttgactggcacaatgccaccgtctacttcgtcctgaccgatcgcttcgtaaacggtaacccggccaacgacaacagctatggtcgccataaagacggcatgcaggagatcggcaccttccacggcggcgacctgcagggattaaccagcaagctggattatctgcagcagatgggagttaacgccctgtggatcagctccccgctcgagcagatccacggctgggtcggcggcggcacgaagggcgatttccctcactacgcttatcacggctattacacccaggactggtcgaaactggacgccaacatggggaccgaagcggatctccgccgactggtggatgaagcgcataagcgcggaatacgtattctgttcgacgtggtgatgaaccatgccggctacgctaccctggccgacatgcaggagttccagttcggctccctgtatctgcaaggagatgagctgaaaaaaactctcggcgagcgctggacggactggaagccgggcgcgggacagacctggcacagctttaacgactatatcaacttcagcgacaaagccgggtgggagaaatggtggggtaagaagtggatccgcaccgatatcggcgattacgacaatccgggctatgacgatctcaccatgtcgctggccttcctgccggacctgaaaaccgaatcgaaggaggtctcaggcctgccgaacttctatagccataaaccagacaccgcagcgaaagcgatcccgggctatacgccgcgcgactatctgacacactggctgagccagtgggtacgtgactacggcatcgatggcttccgcgtcgataccgccaaacatgtggagatggacgcctggcagcagttaaaaacccaggccaccgccgcgctggcggagtggaagaaagccaatccggataaagcgctggatgcggcgccgttctggatgactggcgaagcctggggacatggagtgatgcagagcgattattatcgccacggttttgatgcgatgatcaatttcgactaccaggaccaggcggcgaaagcggcgacctgtatggccaatattgacctcacctggcagcaaatggcggacaagctgcagagctttaacgtcctgagctacctctcctcgcacgatacgcggctgttccgcgaaggcggcaccaccgcggcggagctactgctgctggcccctggcgccgtgcagattttctatggcgacgaatcatcgcgcccgttcggccccaccggctcggacccgctgcagggtacccgctcggagatgaactggcaggatgtcaacggcaaggcggcccgcagcgttacccactggcagaagatcggccagttccgcgctcgccatccggcaatcggcatgggcaaacagacaacgctgtcgatgtcgcgtggttacgggttcgtgcgtgagagcggtgaagacaaagtgatggtcatctgggccggccagcagcagtaa

SEQ ID NO: 213482 - DNA, 564 bp, Klebsiella pneumoniae
atgccttatattaccaagcagaatcaggcgattactgcggatcgtaactggcttatttccaagcagtacgatgctcgctggtcaccgactgagaaggtgcgcctgaaggatatcgcttcccgttataaggtgaagtggtcaggcaatacgcgtcatgtgccctggaacgcgctgcttgagcgtgtcgacattattccgaacagcatggtggcgaccatggcggcggcggaaagtggctggggtacctccaggctggcgcgcgagaataacaacctgttcggcatgaagtgcggcgccggtcgctgccgcggcgcgatgaaaggttactcgcagtttgagtcggtagagcagtcggtgcaggcttacgtaacaaacctgaacacccacccggcctattcttctttccgcaagtcgcgcctgcagctgcgcaaggcggatcaggaagtaaccgccagcaccatgattcataagctgaaggggtattcgaccaaagggtcgagctacaacaactatctcttcgcgatgtatcaggacaatcagcggctcatcgccgcccatctgtaa

SEQ ID NO: 213483 - DNA, 1179 bp, Klebsiella pneumoniae
atgtttgaaaagcgtcaccgtattacgctgttatttaacgccaacaaagcttatgaccgccaggtagttgaaggtgtcggcgagtatctgcaggcctcccagttggagtgggatatctttattgaagaggactttcgggcacgcatcgaaaacatcaaagagtggttgggcgatggcgtcatcgccgactatgacgatcccgaaatcgaaaagctgctggccgatgtccacgtgcccatcgtcggcgtcggcggatcttatcatcagccagagcagtacccgccggtccactatatcgccaccgacaacgccgcgctggtggaaagcgcttttctccatttaaaggaaaaaggggtgcaccgcttcgcgttttacggactccccgcctccagcggtaaacgctgggcggtagagcgcgagtatgccttctgccagctggtcgcgaaggagaagtatcgcggcgtggtctaccaggggctggagacagcgccggagaactggcagcacgcgcaaaaccggctcgccgactggctgcaaaccctgccgccgcaaaccggcatcatcgccgtcaccgacgcccgtgcccgccacgtcctgcaggcctgcgagctgctgcatatcccggtgccagagaaactgtgcgttatcggcatcgataacgaggagctaacccgctatctctctcgcgtcgccctctcctctgtcgcccagggcacccgccagatgggttatcaggcggcaaaattactccaccggctgttgaataacgaggccctcccgctgcagcgccagctgatcccgccgatgcgcgtcgttgagcgacgctccaccgactaccggtcgttaaacgatccctccgtgatacaggcgatgcattacattcgcaacaatgcctgcaaaggcatcaaggtggaacaggtgctcgacgccgtgggcatctctcgctctaatctggaaaaacgcttcaaagaggaggtcggggagaccatccacacggtgatccacagcgaaaaactggaaaaggcgcgcagcctgctggtgtccactagtctgtcgatcaatgagatttcgcagatgtgcggctatccgtcgctgcaatatttctattcggtgtttaagaaggagtacgacgtgacgccgaaggagtaccgcgatcggcacagcgaggtgatgctgtag

SEQ ID NO: 213484 - DNA, 1182 bp, Klebsiella pneumoniae
atgtcgaagaacacgtcgtctgaaatcaaactcaccccaaccgcccccgcggccctgccggcgctaaaagggctgaatctccaggtcttcgtgatgatcgccgccatcgtcgtcattatgctgtttttcacctgggttaccgatggcgcctacctgagcgcacgcaatatctccaacctgctgcggcagacggccatcaccggcatcctcgccgtcggcatggtgtttgtgattatttcggcagaaatcgacttgtccgttggctcgatgatggggctgctgggcggcgctgcggcgatctttgacgtctggctcggctggccgctgccgctcaccattctggtgacgctggtgatgggcctgctgctcggcgcgtggaacggatggtgggtagcctatcgcaaggtgccctcgtttatcgtcacccttgccgggatgctggcgtttcgcggcattctgatcggcatcaccaacgggaccaccgtctcgcccaccagtccggcgatgtcgcagatcggccaaagctacctgccagacggcatcggcttcggcatcggcgttgtcggcatggcggtgtttatcgtctggcagtggcgcgggcggatgcgccggcaggcgttaggtctggcgacctcgtcctccaccgccgccgtcggccgccaggccattaccgcggtgattgtgctgggcgcaatctggctgctcaatgactatcgcggcgtaccgaccccggtgctgatcctcgccgccctgctgctggcgggcctgtttatggccacccgcaccgcctttggtcgccgcatctacgccatcggcggcaacctggaggcggcccgtctgtccgggattaacgtcgagcgtaccaagctggcggtgtttgccattaacggcctgatggtcgccattgccgggctaatcctcagctcacggctcggcgcggggtcgccttcggcgggcaatatcgccgaactggacgccatcgccgcctgcgtcatcggcggcaccagcctggcgggcggcatcggcagcgtcgccggggcggtaatgggggcgtttattatgtcggccctggataacggcatgagcatgatggacgtcgccaccttctggcaatatatcgttaaaggcgccattttgctgctggcggtgtggatggactctgccaccaagcggcgcgcataa

SEQ ID NO: 213485 - DNA, 1542 bp, Klebsiella pneumoniae
atgacctggctactcgaaatgaagaacatcaccaaaaccttcggcgctgttaaagccgtggataacgtcagcctgcgcctgaacgcaggcgaggtggtctcgttatgcggtgaaaatgggtcggggaaatcgacgctgatgaaggtgctgtgcggtatctatccgcacggaagctatgagggcgagattatttttgccggcgaaacgctgcaggcaaaccatattcgcgataccgaacgcaaaggcatcgccattattcatcaggagctggcgctggtgaaacatctcaccgtgctggagaatattttcctcggcgccgagatatcccgccatggtctgctggattatgaaaccatgacgctgcgctgtcagaagctgttggcgcaggtcaatctgcccatttcccccgatacccgcgtcggcgacctcggccttggtcagcagcagttggtggagatcgccaaggcgctgaataaacaggttcgcctgctgatcctcgacgaaccgaccgcctccttaaccgaacaagaaaccgcgacgctgctggcgatcgttcgcgatctgcaaaaccacgatatcgcctgcatctatatctcgcataagctcaatgaggtcaaagcgatctccgatacgatctgcgtgatccgcgacggccagcacatcggcacccgcgatgccagcggcatgagcgaagacgatatcatcaccatgatggtcggccgcgagctcaccgcgctctatcccagcgagccgcacgcccacggcgaggagatcctgcgggttgaacatttaaccgcctggcacccggtaaaccgccatattaaacgggtcaatgacgtctcattttccctgcgtcgcggagaaatcctcggcatcgccgggctggtcggcgccggacgtaccgaggcggtacagtgcctgttcggcgtctggccggggcgctggcaaggggagatctttattgatggccagccggtgagcatctctaactgccagcaggccattgcccacggcatcgccatggtgccggaagaccgcaaaaaagacggcatcgtgccggtgatggcggtgggcaaaaacattaccctcgcggcgctcaaccagttcaccggcgcaatgagtagcctggacgacgccgccgagcagcactgcattcagcagtccattcagcgtttgaaaattaaaacctcctcgccggagttggcgattggccgtctgagcggcggcaaccagcaaaaggcgattctggcgcgctgtctgctgctcaatccgcgcattctgatcctcgacgaacccacccgtggcatcgatatcggggcgaagtatgaaatttataaactgattaaccagctggtgcagcagggcatcgcggtcattgtcatttcatccgaactgcccgaggtgctcggtctcagcgatcgggtgctggtcatgcacgaaggcagactaaaagccaatttggttaatcaacatctgacccaggaacaggtgatggaagccgcgctgaggagcgaacgccatgtcgaagaacacgtcgtctga

SEQ ID NO: 213486 - DNA, 996 bp, Klebsiella pneumoniae
atgaagataaagaacctttgccttacgctttgcgccagctccctcctgctcgccagcatggcggggatggcgaaagaagtgaagattggcatggccatcgacgatctgcgtctggagcgctggcagaaagaccgtgatattttcgtcaataaagcggaatccttaggcgccaaagtttttgtccagtccgctaatggcaatgaagaaacgcagatgtcgcaaattgaaaacatgatcaaccgcggcgtcgatgtgttagtcattattccttataacggccaggtactcagtaacgttattaaagaagccaagcaggaaggtattaaagtcctggcctatgaccgtatgattaataatgccgacattgatttctatatatctttcgataatgaaaaagttggtgaaatgcaggcgcaaagtctggtcgacaaagtgccgcagggtaattatttcctgatgggcggttcgccggtggataataacgctaaactgttccgcgccggacagatgaaggttctcaagccgtatgtcgatgatggcaaaattaagattgtcggcgatcagtgggttgacggctggctgccggagaacgcgctgaaaataatggaaaacgcgctaacggcgaataataacaagatcgatgccgtggtcgcctccaatgacgccaccgccggcggcgccatccaggccttaaccgcccaggggctggccggcaaagtggcgatctccggtcaggatgccgacctggcgggcgtgaagcgcattatttccggtacccagacgatgaccgtctataaaccgattaccaccctggccaccaacgccgctgaaatcgccgttgagctgggtaacgataagcagccgaaggccgataccacgctgaataacggcttaaaagacgtcccttcgcgcctgttaacgccaattgaggtaaataaagagaatatcgacgccacggtgattaaagacggtttccataaaaagagtgaactgtaa

SEQ ID NO: 213487 - DNA, 1323 bp, Klebsiella pneumoniae
atgcagacctatttcgatcaactcgatcgcgttcgttacgaaggcccgaaatccactaacccgctggctttccgtcattacaacccggatgaactggtgctgggcaaacggatggaagatcatctgcgttttgcggcctgttactggcacaccttctgctggaatggcgccgatatgtttggcgtgggctcctttgatcgtccctggcagcagcctggcgacgccctggagatggccaaacgcaaagccgatgtggcgttcgaattcttccataaactcaacgtgccttactactgcttccacgacgttgacgtctcgccggaaggcgcttcgctcaaggagtacagcaataacttcgcccggatggtcgaggtgctggctgagaaacagcagcagagcggcgtgaagcttctgtgggggaccgcaaactgctttaccaacccgcgctacggcgccggcgcggccaccaacccggatccggaagtatttagctgggcggccacccaggtggtcaccgccatgaatgccacccatcaactgggcggtgaaaactatgtgctgtggggcggtcgcgagggctatgaaaccctgctgaataccgacctgcgccaggagcgtgagcagattggccgctttatgcagctggtggtggagcataagcataaaatcggctttaaaggcacgctgctgattgagcccaaaccgcaggagccgaccaagcatcagtatgactatgatgcctctaccgtttacggcttcctcaaacagtttggtctggaaaaagagattaaactgaatattgaagctaaccatgccacgctcgccggccattcgttccatcatgaaattgcgacggccattgcgctggggctgttcggctccgttgacgccaaccgcggcgatccgcagctgggctgggataccgaccagttcccgaacagcgtcgaagagaacgcgctggtgatgtatgaaatcctcaaagcgggcggcttcaccaccggcgggctcaactttgatgcgaaagtgcgccggcagagcaccgacaaatacgatctgttctatggtcatattggcgcgatggataccatggcgctatcgctgaaggtcgcggcgcggatgattgaggacggcgaactggataagcgcgtggccagacgctacgccggctggaacggtgagctggggcagcagatccttaacgggcagatgaccctgagcgatattgcccagtatgccgctcagcatcagctggcgccgcagcatcgcagcggccagcaggaacaactggaaaacctggtcaaccattatctgtttgacaagtaa

SEQ ID NO: 213488 - DNA, 1455 bp, Klebsiella pneumoniae
atgtatatcggcatcgatctggggacgtcgggcgtcaaagccattctgctcaatgagcagggtgaggtagtggcatcgcataccgaaaaactcaccgtctcgcgtccgcatccgctgtggtcggagcaagatcccgaacagtggtggctggcgacggacacggcgatgaaagccctgggcgcgcagcatagcctgcgcgacgtgaaggcgctgggcattgccgggcagatgcacggcgccaccctactggataaatcgttacaggtgttgcgtccggccattttatggaatgacggccgctgcgccgaagagtgccagctgctggaagacaaagtcagcgcttcccggcagatcaccggcaacctgatgatgccgggctttacggcgccgaagctcttatgggtacagcgccacgaggcggcagtgttcagccaggtcgataaagtgctgctgcccaaggattatctgcgcctgcgcatgaccggcgagctcgccagcgatatgtctgacgccgccggcacgatgtggctggacgtcgcccggcgcgactggagcgacgagatgctcgccgcctgcgatctcagtcgggatgcgatgccggcgctgttcgaaggcagcgacgtcaccgggcaactgcgacctgaggtggcgcaggcgtggaatatgccgccggcgctggtggtgggcggcgggggcgacaacgccgcgggcgcggtcggggtcggcatggccgatgccggtcaggcgatgctgtcgctgggtacgtcaggcgtctacttcgccgtcagtgaagggtttcttagcaaacccgaaagcgcggtgcacagcttctgccatgccctgccgggccgctggcatttgatgtcggtgatgctcagcgcggcctcctgtctggactgggcggcaaaattaaccggtctcgccagcgtgccggcgctgatcgcggcggcgcagacggcggatgaaagcgccggtccggtgtggttcctgccctatctgtctggcgaacgcacgccgcacaacaacccgcaggctaagggcgtcttttttggcctgacgcatcagcatgggccggcagagctggcgcgggcggtgctggagggggtgggctatgcgctggcggatggtatggacgtggtgcacgcctgcggcatcaagccgcagagcatcacgcttatcggcggcggggcgcgcagcgcttactggcggcaaatgctggcggatatcagcggcctgcagctcgattaccgtaccgggggcgatgtcggcccggcgctgggggcggccaggctggcgcagctggcggttcacgacgaggcagaccgccccgggctgctgaagccgctgccgcttgaacaagcccatcgcccggacgatcgccgtgtggcccactatgcgccgcagcgggaaaccttccgccagatttatcagcaactgaaaccgctgatgtcttag

SEQ ID NO: 213489 - DNA, 372 bp, Klebsiella pneumoniae
atgatcacaaaacgcaatattgccagggggatgatggcgacaggatcgctggtttatctgctcggtatctggcggacctgcccgctgttcagcggcaaagggtattttctcggcgtgctggtgatggggatgtttgctgttctcgcccatcagcgcgccagtcagtggcaggaacaggacgacggttttattgccttatgccggctggtgctgctgctatcggtcggcctgctgctggtcggcgcctggtatgtaccggcagactggcatgaaaaagccgtctatatcgcggcatggtttgtctgcttatatggcgcatcggcaacccccgaacggacccgcatcgcccgcgcgatgcaaaaaacggaataa

SEQ ID NO: 213490 - DNA, 447 bp, Klebsiella pneumoniae
atgatggaaaacaagcacgcgacgtattctcctgcgtttcatttgatctcctggattgccctgatcggcggcatcgtcacctatctggtggggctgtggaatgccgatatgcagttgaatgagaaaggctattattttgccgtcctggtactggggctgtttgccgcggcatcttatcaaaagacggtgcgcgataagtatgaagccattccgaccaccgcgctgtactacaccacctgtctggtggtcttcgttatcgctgtaggtctgctggttatcggactgtggaatgccactctgctgctcagcgagaaagggttctatgggctggcgtattttttgagcctgtttggcgctgttgcggtacagaaaaacgtgcgtgatgtctgggacccgacgcgcttacgggaacctctcagcgtgacggaagaggggcctgagacgtaa

SEQ ID NO: 213491 - DNA, 996 bp, Klebsiella pneumoniae
atgcaagaaaagatacactggatcaccaacctgcgcggcatcgcctgcatgatggtggtgatgatccacagcaccagctggtatatcactcacccccatgcgattaccctgctgcaatgggatatcgccaatctgctcaattccgcctcccgcgtcagcgtgccgctgttttttatgatctcgggctacctcttttttggggaacgcagcgcccagccgcgccatttctggcggattggcctgtgcattgcgttctatagcgcgctatctctgctgtatatcacgctgtttacccatatcaacgtcgagctgtcgttaaagaatttgctgcagaagcctgtcttctaccacctgtggtttttctttgctatcgccgtcatctacctgctctcgccgctgattcaggttaagtccaccagtagcacaatgctgctggcgctgatggcgatcctcggcattctggccaaccccaatatggtcagcgttaaagccgtcgggattgagtggctgccagtcaacctctatatcaacggcgacaccttctactacgtgctctacggcgtgctgggcagagccattggcaccctggacaccgataaaaaatggctaacaccgctctgcgccgcgctgttcatcgccgccgtgtgggtcatttcccgcggcacgctgcatgagctgcgctggcgcggagacttcggcgacacctggtatctctactgcggaccggcggtgtttgtttgcgcggtcaccctgctgacgctggccaaaaactggcttaacgcgcgtcccctgcccggtatcgcctgcattgcgcgacattcgctggggatctacggctttcatgccctgatagtgcatgcgctgcgcgccagccatctggagctatcccgctggccgctgctggatattgtgtggatatttagcgccgccctgctcggcagcctgctgctgtcaggcctggtgcagcggattgatagccgccggctggtcagctaa

SEQ ID NO: 213492 - DNA, 303 bp, Klebsiella pneumoniae; identical to SEQ ID NO: 139421

SEQ ID NO: 213493 - DNA, 912 bp, Klebsiella pneumoniae
atgcaaaagtttgataccaggaccttccagggcctgatcctgaccttacaggattactgggctcgtcagggctgcaccattgttcaaccactggacatggaagtcggcgccggcacctctcacccgatgacctgcctgcgcgcgttaggaccggagccgatggcgaccgcctacgtgcagccttcccgtcgtccaaccgatggccgctatggcgaaaacccgaaccgtttacagcactactatcagttccaggtggtgattaaaccctctccggacaacatccaggagctgtacctcgggtcgctgaaagagctgggtatggacccgactatccacgacattcgctttgtcgaagacaactgggaaaacccgacgctgggcgcctggggtctgggctgggaagtgtggctcaacggcatggaagtgacgcagttcacctacttccagcaggtcggcggcctcgagtgtaagccggtgaccggcgagatcacctacggtctggagcgtctggcgatgtacatccagggtgtggacagcgtctatgacctggtctggagcgatggcccgttggggaaaaccacctacggcgacgtgttccaccagaacgaagtggagcagtccacctataacttcgaatatgccgacgtcgacttcctgttcacctgcttcgaacagtatgagaaagaggcccagcagctgctggcgctggagaccccgctgccgctgccggcctacgagcgtattctgaaagcggctcacagcttcaacctgctggatgcgcgtaaagccatctccgtcaccgagcgtcagcgctatatcctgcgcattcgcaccctgactaaagcagtggcggaagcgtactacgcttcccgtgaagcgctcggcttcccgatgtgcaacaagaataaataa

SEQ ID NO: 213494 - DNA, 2070 bp, Klebsiella pneumoniae
atgtctgagaatacttttctggtggaaatcggcactgaagagctgccaccaaaagcgctgcgcagcctggcggaatcttttgctgcgaatgtgaccgcggagctggataacgctggccttgcgcacggtaaagtggaatggtttgccgccccgcgtcgtctggcgctgaaggtggccaacctggcggcggcgcaagccgatcgcgaagtggaaaaacgcggcccggctattgcccaggcgttcgatgccgaaggcaagccaagcaaagcggccgaaggctgggcgcgcggctgcggtatcaccgtcgatcaggccgaacgtctgaccacggacaaaggcgagtggttgctgtatcgcgcccatgtgaagggcgaaagcaccgaagcgctgctgccgaacatgattgccagctcgctggcgaagctaccgatcccgaaactgatgcgctggggcgcgtctgacgtccacttcgtgcgtccggtacacacggtgactttgctgctgggtgacaaagtgatcccggccactatcctcggtattccgtccgatcgcgtgattcgcggccatcgctttatgggcgagccggagttcaccatcgaccatgccgaccagtacccgcagatcctgctggagcgcggtaaagtcatcgccgattacgaacagcgtaaagccaaaatcaaagctgatgcgcaagaggcggcgcgtaagatcggcggtcaagccgatctgagcgaaagcctgctggaagaggtcacctcgctggtggaatggccggtggtgctgacggcgaagttcgaagaaaaattcctcgcggtgccgtctgaagcgctggtttacaccatgaagggcgaccagaagtacttcccggtctacgacaacgccggcaaactgctgccgaactttatcttcgtggccaacatcgagtccaaagatccgcagcagatcatctccggtaacgagaaggtggtccgtccgcgtctggccgatgccgagttcttcttcaataccgaccgtaaaaaacgtctggaagataacctgccgcgtctggaaaccgtgctgttccagcagcagctgggcaccctgcgcgacaagaccgatcgcatccaggcgctggcgggctggattgccgaacagattggcgctgacgtgaaccacgcaacccgcgcgggcctgctgtccaagtgcgacctgatgaccaacatggtcttcgagttcaccgacacccagggcgtgatggggatgcactacgcgcgccatgacggcgaagcggaagacgtggccgtggcgctgaacgagcagtatcagccgcgatttgctggcgacgcgctgccgtctaatccggtggcctgcgcggtagcgattgccgataagatggacaccctggcgggtatctttggtatcggtcagcatccgaaaggcgataaagacccgtttgcgctgcgtcgcgccgcgctgggcgtgctgcgtatcatcgttgagaagaacctggatctcgatctgcagacgctgaccgaagaagcggttcgtctgtacggtgagaagctgaccaacgccaacgtggttgatgatgtgatcgactttatgctgggccgcttccgtgcctggtatcaggacgaaggctacggcgtcgacacgatccaggcggtactggcgcgtcgtccaacccgcccggcggatttcgatgcgcgtatgaaggcggtatcgcacttccgtactctggaagagtcctccgcgctggcggcggcaaacaaacgtgtctctaacatcctcgcgaaatccgatgagacgctgaacgacatcgttcacgcttcggtgctgaaagaagcggcggaaattaagctggcgggtaatctggtggtgctgcgcgacaagctgcagccgtatttcgccgcaggccgttatcaggatgcgctgatcgagctggccgcgctgcgcgagccggtggatgagttcttcgagaacgtgatggttaacgctgaagacaaagatgttcgcatcaaccgtctgacgctgctgtccaaactgcgtgaactgttcctgcaggtggcggatatttctctgctgcagtaa

SEQ ID NO: 213495 - DNA, 213 bp, Klebsiella pneumoniae
atgcatgaacaccataagagtagcctcttacttgttgaaaatcaacactggaggcgtggaatgccgcaaaagtatctgttgtttggcttagtagtgatttgcttcactattttattattgacctggatggttcgtgattcgctatgtgaattacagcgcaggcagggaaatattgagctggtggcattcttagcctgtgatattaaacagtaa

SEQ ID NO: 213496 - DNA, 1620 bp, Klebsiella pneumoniae
atggctcattgcgcccacatccccgcttttgttttacatcaggtcacctgtcagtttgcgacgggacagaccctgtttggtccgctcagcgtctcgctggaaccgtccctttgcggcctggtcggccggaacggcgtcggcaagactcgtctgctgcgtctgctggcgggccttgattctcctgccggcggccatattgagcgcgccgccgccgttgcctgggtagcgcagcagccgacgctcacgccggagaccaccctcgctacgctgctgggctatgcgtcggtttttgccgccttgtctcgccttgaacagggccaagggctggccgacgatttcgatctgttagatggtcactgggatctcaccgatcgcctgagtttagcgttccgtgaagccgatctcccgccgttctctgccgatcgccccgcgttttcactcagcggcggcgagcggatgaaggctctgctgtgcggcgccttcgtctcgggcgccgattatctgctgctggatgagcctaccaaccatctggaccgccaggggcgggagtggctctatcaccaactggaaagctggcagggcggggctctgatcgccagccacgaccgcgagctgctgacgcggatgccgaggattattgagctgacgccgacggcgctgcgcagctacggcggcaactatgatgaatatcagcgccagcgtatggcggagcagcaggctgcgcgcgcggcgctggagcatgccgtgaccgaccgacggcgcacccgcgcgcgaatgcaaaaggagcatgacgccgcccagcggcgctcggctcagacgctgcgtaccgttgatacgctaaatatcgcctccttcgagcgcgtgaagtacaaaggcgcggcaaaagagcgcccgggagcgctgcgccgtcagcatcgtgaacagaacagcagtctgaatgccgccgtgcagcaggcgcgggagcgggttgaggaagagaccccagtgatgtttaccctgccgggtagcgaagtggccgccggcaagcaggttctggtggtggagtcattgcagctcgaccatgcgccggctgcgccgctgaactggcgtatcgatggtccgatgcgcatcgcgctaaaggggccaaacggctgtggcaaaaccactttgctgaaaacgctgttggggctggagcaggccgcgtcaggcgatgttcggctttcggtgagcgccgcttacctcgatcaacatctgacgcagctggatttatccctgtcggtaatggcgcacctgagcctggaagataccccactggatgagggcctcctgcgcacccgcctggcgcagctccagctgggcgcggataaggtcactctgccgctgtcggcgctcagcggcggcgagcgcctgaaagcggcgctggcgtgcgtgctctggcgacgcgagcctgcccagctgcttttgttggatgagccaaccaaccatctcgatttagcatcgacgcaggctattgaaagcgcgctggcggcgtttcccggcgcgatgctggtggtgtcgcatgatgaggcgtttttacaaggtctgaagctgacccatagtctggcgtggcgggagacgagctggcacttttccctgctttga

SEQ ID NO: 213497 - DNA, 213 bp, Klebsiella pneumoniae
atgtccggtaaaatgactggtatcgtaaaatggttcaacgctgacaaaggcttcggcttcatcactcctgacgatggctctaaagacgtgttcgtacacttctctgctatccagaacgatggctacaaatccctggacgaaggtcagaaagtatccttcaccatcgaaagcggcgctaaaggcccggcagctggcaacgtaacttctctgtaa

SEQ ID NO: 213498 - DNA, 291 bp, Klebsiella pneumoniae
atggaatataaagatcccgtgtttgaactgctgagcagcctggaacacatcgtttttaaggatgataatcagaaacttacctcaaaccgtaagtccactgtatttagtgaatttgaacagctgcgtaaaggcactggacttaagattgacgactttgccaacgtcatgggcgtgagcgtcgccatggtaagagagtgggagtcgagacgggtcagaccgtctcccaccgagctgaaattgatgcgcctgattcaggccaatccacagctttcacgacaattactcgattaa

SEQ ID NO: 213499 - DNA, 1356 bp, Klebsiella pneumoniae
atgactaagacaaccatcgacattcaggcctttatcaacgagcaccccttcacccgctaccagtggatgatccttgcgctctgctttatcaccgtcgcgatggacgggttcgataccgcaattatcgggttcatcgcctccgacctggtgcaagagtggggcgtggaaaaatcggccctcggcccggtgatgagcgccgcgctggtgggcctggcggtcggcgccttaaccgcagggccgctggctgaccgcatcggccgcaaaaaagtgctgatcatgtcgatcgtggtgttcggcggattcagcctgctcaccgccttcgccaccagccttaatcagctgacgctgctgcgcttcctgaccggtctgggccttggcgcggcgatgccgaatgccgcaacgctaatgagtgaatatgcgccggagcgccgtcgggcgctgctggtgaacctgatgtttgtcggctttccgatgggatcttcgctgggcggctttttatccgcctggatgatcccgcactatggctggcagagcgtgctggtgctgggcggcgtgatgcccctcctgctggcggtggcattaatattcctgctgccagagtccgtccgctatctggtagtgaagcagcacccggcgcagcgcattgctgctatcctgcgccatatcgcgccgctgccgaagacagtggaatttgtactacgcgaagcaggccaggtgaaagagaaatccgcgatcggcgtcattttctctcctcgctacgcggtgggtaccgtgatgctgtgcctgacctactttatgggcctgctgattttctatctgctgaccagctggctgccgctgctcatccgtgaaaccggcgcctcgatgagtcaggcctcaattatcaccgccctgttcccgctcggcggcgggattggcgtgctgatcctcggcgccctgatggacaagatcaaccccaataaagtggtggccgtcggctggctgctgaccggcgtttttgtctgcctggtgggtttctccaccagcagcctggcgctaatgggagtgatggtctttatcgccggcagcattatgaacggcgcgcagtcgtcgatgccggcgctggcggctggcttctatccgacgcaggggcgcgccaccggcgtcgcctggatgctgggtatcggccgcttcggcggcatcctcggcgcgttcagcggcgccttcctgatgcaggctcagctctcctttgagaccattttcaccctgctggccatcccggcgttcctgtcagcctttgcgctgctgatcaagtaccgggtcagtaaatccgtgccggcgacgacagatgaggcgagaagcctgcagaaagcctaa

SEQ ID NO: 213500 - DNA, 711 bp, Klebsiella pneumoniae
atggcgacaggaaagtcctgctctcgctggtttgcggctatggcggccttattgatggtggttagcctgagtgggtgttttgataaagagggcgatcagcgcaaagcgtttatcgacttcctgcagaatacggcgatgcgtagcggtgaacgtctgccgacgctgaccgccgatcagaaaaaacagtttgggccttttgtctctgactacgcggtgatctacggttactcgcagcaggtgagccaggcgatggacgctggtctgcgcccggtggtggacagcgtcaatgcgatccgcgtcccgcaggattatatgacccagcgtgagccgctgcgtcaggcgaacggcgcgctgggcgtgctcagccagcagctgcagaatgcgaaaatgcaggccgatgccgcgcatggcgcgctgaagcaggctgacgatctcaagccggtcttcgatcaggtttacgccaaggtggtgacggcgccagccgacgcgctgcagccgctgatcccggccgcgcagatctttacccagcagctggttcaggttggggattttgtcgctcagcaggggacgcaggtgagctttgtcgccaacggcattcagttcccaacctcccagcaggccagccagtacaatgcgctgattgggccgctggcggcgcagcatcaggcgtttaatcaggcatggacggcggcggtgaacgccacccgttaa

SEQ ID NO: 213501 - DNA, 972 bp, Klebsiella pneumoniae
atgaagccgtctgtcattctctataaaacgcttcccgacgacctgctacagcatctggaggagcacttttccgtcactcaggtgaaaaacctgcggccggagaccgtttcgcagcacgctgaggccttcgcccaggctgaaggcctgctgggctccagcgaaaaggttgacgccgcgctgctggagaagatgccgaagctgcgtgcgacctccaccgtttccgttggctatgacaacttcgacgtcgaggcgctgaacgcccgccgggtgctgctgatgcataccccgaccgtgctgaccgagaccgtcgccgatacggtcatggcgctggtgctgagtaccgcgcgccgggtggtggaagtggcggagcgcgtcaaagcgggtgaatggacgaagagcattggtccggactggttcggcacggatgttcaccataaaaccttaggcatcgtcggcatgggccgcatcggtatggcgctggcgcagcgcgcccacttcgggttcggcatgccaatcctgtataacgcgcgtcgccagcatccgcaggcggaagaacgcttcaatgcccgctattgcgatctcgataccctgctgcaggaggctgactttgtctgcctgatcctgcccctgagcgaagagactcaccatctgttcggtcaggcgcagtttgcaaaaatgaaatcttccgccatcttcattaacgccgggcgtggcccggtagtggacgagcaggcgctgatcgccgccctgcagaacggtgagatccacgctgccggtctcgatgtgttcgaacacgaaccgctggccaaggactcaccgctgctgagcctgccgaacgtcgtcgcgctgccgcatatcggctccgccacccatgagacgcgctacaatatggcggcctgcgcggtggacaacctgatcgacgccctgaacggcaacgtagagaaaaactgcgtcaatccgcaggtaaaataa

SEQ ID NO: 213502 - DNA, 1281 bp, Klebsiella pneumoniae
atgaatagctcaacaaatgcaacgaaacgctggtggtacatcatgcctatcgtgtttatcacgtatagcctggcgtacctcgaccgcgccaacttcagcttcgcctccgcggcaggcattaccgaagacctgggcatcaccaaggggatctcctcccttctgggggcgctgttcttcctcggctacttcttcttccagatccccggcgctatctatgcggagcgccgcagcgttcgcaaactgatctttatctgcctgatcctgtggggcggttgcgcctccctgaccggtattgtgcataatatcccggcgctggcggcgatccgctttatcctcggcgtcgtcgaagccgcggtgatgccggcgatgcttatctatatcagcaactggttcaccaaatcagagcgctctcgcgccaacaccttcctgatcctcggtaacccggtgacggtcctgtggatgtcggtagtctccggctacctgattcaggccttcggctggcgggaaatgttcatcatcgaaggggtgccggcggtgatctgggccttctgctggtgggtgctggtgaaagataagccgtcgcaggtgtcctggctggcggagagtgaaaaagcggcgctgcaggaacaactggatcgtgaacagcaaggcatcaaagcggtgcgtaactatggcgaagccttccgctcccgcaacgtgatcctgctctgcgcgcagtattttgcctggagtatcggcgtatacggctttgtactgtggctgccgtcgattatccgcagcggcggtgaaaatatggggatggtggaagtgggctggctctcttctgtcccgtacctggcggccaccatcgccatgatcgtcgtctcctgggcctcggataaactgcaaaaccgtaagctgttcgtctggccgctgctgctgattggcggactggccttcatcggttcctgggcggtcggcgccaaccacttctgggtctcctacaccctgctggtggtggccggggcggcaatgtatgcgccttacggccccttcttcgccattattccggaaatgctgccgcgcaacgtcgccgggggcgccatggcgctgatcaacagcatgggcgccctgggctccttctgcggctcgtggtttgtcggctacctgaacggcgccaccggcagccccgcagcgtcctatatttttatgggggtagcgcttttcgcctcagtatggctgactttgattgttaagcctgctaataatcaaaaccttccacttggcgctcatcacgcctga

SEQ ID NO: 213503 - DNA, 936 bp, Klebsiella pneumoniae
gtggaaaatttagatgtcatcaccatcggcgaagctatggccatgtttgtcgccaccgaaaccggggatctggccgaggtggagcatttcatgaaacgtgtcgccggcgccgagctgaacgtcgccaccggcctggcgcgcctgggtctgaaagtcggctgggtgagccgcgtcggcaacgacagctttggccgcttcgtactgcaatcgctggcgaaagaggggatcgatagccacgctgtggccatcgacaaccgcttcgctaccggtttccagatgaaatcgaaagtcgaaaatggaaccgatcccattgtggagtatttccgcaaaggatccgcagccagccatctttcgccggacgattttcgcgccgactacttcaccagcgcccgccatctgcacctgagcggcgtcgcggcggccctttctgagagctcttacgcgttgctggagcatgcggcgaaggtaatgaaagccgaaggaaaaaccctctctttcgaccccaatctgcgcccggtgctgtggaaaagcgaagccgagatggtggagaaactcaaccgtctcgccttccaggctgactgggttttgccaggcttaaaagagggcgtgattcttaccggccagcagaccccggaagggattgccgatttctatctctcccgcggcgtcaaggcggtagtcattaaaaccggctgcgacggcgcctggttcaagagcgccagcggcgaacagggaacggtcgatgccattaaagtcgataacgtcgtcgataccgtcggcgccggcgacggctttgccgtcggggtgattagcgccctgctggaaggcaaaaccctgcttcaggcggtgaaccgcggcaataaaatcggttcgctggcgattcaggtccagggcgacagcgaggggctgcccactcgcgacgcgctgggcgagtaa

SEQ ID NO: 213504 - DNA, 750 bp, Klebsiella pneumoniae
atggccagaaaaattattgtcgttaccgctgcgtatggtaatgaccatgttaaatccttaggcgggcaggccgccgtcctgccgtttatcgccaacgccggcgcggacggcgtcgaaatccgccgcgagctgtgcagcgcggaagagctcaacgctctgccctcgctggcggccaccattgagcgccacggcctgctggcctgctactccgcgccgcaggcgctgttcaccgacaacggcgagcttaacccggatctcccgacgctgctcgcggaagcgcaaaccctgaacgctctgtggctgaagctctcccttggccatttcctccacaatcagcagttggatgaactgcgcgatatcctcagcgacagcggcatggcgttggtggtagagaatgaccagaccgactgcggccagctggcgccgatgcagcgcttcaaagccgcctgccgggtccatcagctgccgatcaccttaacgtttgatatgggcaactggctgtgggttggcgattcgccggaagaggcggcacgtcatcttgcgccggcggtcagctatattcatgttaaagcggcggagcctcatcatgagaaattccgcgctgtaccgccggatcaggccgccgaacgctggctggccctgctcgataatcttcccgccgacgcgccgcgtggaatcgagtttccgctgactggccatgacctgacggccgtgacccgccgctacgtcaacctgttacgcgaggattaa

SEQ ID NO: 213505 - DNA, 1017 bp, Klebsiella pneumoniae
atggcgaaagcggcgcgtgcaactatcagcgatgtggcgaaagccgcaaagaccggcaaaaccagcatttcacgttatcttaacggcgagaagcatctgctttccgacgacctgttatcacgtattgaaaaagccattgccgaactcgactaccgccccagcctgatggcccgcggcctcaagcacggccggacccgcctcatcggcctgatcatcgccgatatcaccaacccctactcggtcaacgtcatgagcggcattgaagcagcctgccgggaaaagggcttcaccctgctggtgtgtaataccaataacgagctcgatcaggagctgcactacctggacctgctgcgcagctaccaggtggagggtattgtcgtcaacgcagtcggtatgcgggaggatggcctgaaccgcctgcagcagtcggccctgccgatggtgctgattgaccgtaaaatccccgacttcgcctgcgatgtggtcgggcttgataacgcccaggccgccaccaccgccaccgaacatctggtggaaaaaggattcgaggccatcctgtttctcagcgaaccgctgggctcggtgaatacccgtcgcgagcgcctgagcgcctttcgcgccacgcttgcccgccaccacggcgtggtggccgaaaacgccgaggtgcagcttaacgacggcgcgatgctggacaacgtcctgcgtcagttccatgcccgccaccgcgggatgcgcaaagcggtcatctccgccaacggcgcgctgacgctgcaggtagcccgcgccctgaagcgcgtcggcctgatctgggggagcgatatcggcctgctgggcttcgacgaactggagtgggcggagctggccggcgtcggtattaccaccctcaaacagccgacgtggcagatcggctacgcggcggtcgaacaggttattcggcgcattgccggcactaacgaccccatccgcgaacgggtattttccggcgagcttatcgtccgcggatcaacctcccgttaa

SEQ ID NO: 213506 - DNA, 663 bp, Klebsiella pneumoniae
atgaaaaaacgcgtacttatgattgcggcgctggtcagcggcactctggccatttctggctgcaccaccaacccctataccggtgaacgtgaagcaggcaaatccggtattggcgcaggtattggctccttagtgggcgctggcgtcggcgcgctctcctcttccaaacatgaccgcggcaaaggcgcgctgattggcgcagcggccggcgcggcgctcggcggcggcattggttactacatggacgtgcaggaagcgaagctgcgcgacaaaatgcagggaaccggggtcagcgtgacgcgaaatggcgacaatatcgtgctgaacatgccgaataacgtcaccttcgacagcaatagcgccaacctgaagccggccggcgccaacaccctgaccggcgtggccatggtgctgaaagagtatgagaaaaccgctgttaacgtggtcggctacaccgacagcaccggcagcaaggatctgaatatgcgtctgtcgcaacagcgtgcggacagcgtcgccagcgcgctcatcacccagggcgtggcggccaatcgcattcgcaccaccggcatgggcccggcaaacccgatcgccagcaacagcacggcggaaggcaaagcgcagaaccgtcgcgtggaaatcaccctcagcccgctgcagtaa

SEQ ID NO: 213507 - DNA, 2331 bp, Klebsiella pneumoniae
ttgccaacctcatctgcaaccaaaaccatcttaaccgccgcccactggggaccgatgctggtggaaacggacggggaaaacgtcctctcttcccgcggcgcgctggcgacaccgtttgccaactcgctgcaaacggcagtgcgcgatcaggtgcacagcaaaacccgcgtgcgctatccaatggtgcgtaaaggcttccttgcttcaccggacaagccccagggggtccgcggtcaggatgaattcgtgcgggtgagctgggagcaggcgctggatctgatcgatgcccagcatcggcggatccgcgacagctacggtccggcctccatttttgccggctcctacggctggcgctctaacggcgtattgcataaggcggcgacgctgctgcagcgctatatgagcctggcgggcggctataccggccatcttggcgattactccaccggcgcggcgcaggcgatcatgccttatgtcgttggcggcaatgaggtgtatcagcagcagaccagttggccgctggtgctcgagcacagcgaagtggtggtgctgtggagcgccaacccgctgaacacgctgaaaattgcctggaatgcctccgacgagcaagggatcccgtggtttgatcggctgcgccagagcggtaagcggctgatctgcatcgatccgatgcgatcggaaaccgtcgatttctttggcgattcgatggagtggatcgcgccgcatatgggcaccgacgtcgcgctgatgctggggatcgcccatacgctggtggaaaatgactggcaggatgatgcgtttcttacccgctgcaccagcggctacgatatttttgcccgctatctgaccggcgaaagcgacggcgtagcgaaaaccgctgagtgggcagcagcgatctgcggcgttaaagcagataaaatccgcgaactggcgcaacttttccacgaaaataccactatgctgatggccggctggggcatgcagcgtcagcagtatggcgagcagaaacactggatgctggtcactctggccgccatgctgggacagatcggcacccccggtggcgggtttggtctttcctatcattttgccaacggcggcaacccgacccgccgcgcggcggtgctgggctcgatgcaggggagcgtggccggaggcgtggacgcggtggagaagatcccggtcgcacgaattgtcgaggcgctggagaatccgggggcggagtatcagcacaacggcatggcgcggcgctttcccgatattcgctttatctggtgggccggcggcgccaactttactcatcatcaggacaccaaccgactgattcaggcgtggcagaaaccggagcttatcgtcatttccgaatgcttctggaccgccgccgcgcgccatgccgatatcgtcctgccggcgaccacctcgtttgagcgcaacgatctgaccatgaccggggactacagtaaccagcatctggtgccgatgaagcaggtggttgctccgcgagatgaagcgcgcgacgatttcgcggtctttgccgacctcagcgaacgctgggaggcgggtggccgcgaacgcttcaccgaagggaagagtgatttgcagtggctggagactttctatcagatggccgcccggcgcggcgcccagcagcaggtgacgctgccgccatttgccgaattctggcaggctaaccagctgattgagatgccggaggagccggagaatgcccgttttgcgcgtttcgccgccttccgcgccgatccccaggccaacccgctgaaaacggcgagcggtaaaatagagatccactcgccgaccatcgccgcttttggttacgccgactgtccgccgcatccgatgtggctggagcccgacgagtggcatggcaacgcagaggcggggcagctgcagctgctgtcggcccatccggcccaccgtctgcacagtcaactgaaccacaccgcgctgcgcgagcgctatgccgtcgccgggcgcgaaccggtgactattcatccgcaggatgcgcaggcgcgcgggattgtcgatggcgatttggtgcgggtatggaacgcccgcggtcaggtgctggccggcgccgtggtgacggaggggatccgcccgggggtgatttgcctgcatgaaggagcgtggcccgacctggatccgcaggtcggcatctgcaaaaacggggcggtgaacgtcttaaccaaagatattccgacatcccggctgggcaacggctgtgccgggaacaccgccctggcgtggctggagaaatataccggcccggcgctgccgcttacggcatttgatccgccggccaacgcataa

SEQ ID NO: 213508 - DNA, 441 bp, Klebsiella pneumoniae
atgatccgcaagtgggacactgaagataccgcgccgctgctggcgctgtggctggacagcacgattcatgcccatccttttatcagcgaaagctactggcgcgacagcgtcgcggtagtacgggatgtctatcttcccgccgccagcacctgggtctgggagcaggatggcgagttaaaaggctttgtcagcgtgctggactcccgtttcgtcggcgcgctgtttgtcgcgccgggcgccacccgccagggcattggccgggcgctgctggatgaaatcaaacagcactacgcctggctgagccttgaggtttatcagaagaacgaatcggcggtcagtttctaccatgcgcagggcttccggattgaagactgcgcatggcaggacgatactcagcacccgacgtggattatgcgttggccggcggatcaaatgccgtaa

SEQ ID NO: 213509 - DNA, 582 bp, Klebsiella pneumoniae
atgcagcgttgcggatgggtgagtcaggatccgttatacatcgagtatcacgataccgaatggggtgtggcgcaaaaagagggtcgccagctgtttgaaatgatctgccttgagggccagcaggccggtttatcgtggatcacggtgttaaaaaaacggcagaactaccgccaggcttttcaccagttcgatccggtgcgcgtggcggcgatgggtgatgacgatatcgagcgactcctgcaggataccggcatcattcgccatcggggaaaaatccaggccattatcggcaacgcccgcgcctatctggcgatggaagaaaatggcgagtcgttcactgattttgtctggtccttcgtcgacaatgcgccacaggtgacccgcgctgcgacgctggcggaaattcccaccacgacgccggcctccgatgcgctgtcgaaggcattgaaaaaacgcggctttaagtttgtcggctcgacaatctgttattcctttatgcaggcctgtgggctggtcaacgaccatgtcaccggctgcttctgtcaccctggaggtcaggatgatccgcaagtgggacactga

SEQ ID NO: 213510 - DNA, 645 bp, Klebsiella pneumoniae
atgataataaagaaatgcaatggcctccgggggttcttgatcccggcgagcgtatccgtctgggtgtcatgtgtctctggagcgaatgcctggcaacaggaatatatcgctatcgatacaaaaagtaatacgtcggaacgctatacatgggatagcgatcaccaaccacgttatgaagatattctcgccgagcggatgaagtcctctgagacgcccggggggctggcgttaaaccaggggctggcgccgccggacagcggccgcggcctgagcattggctggaattatccgctggcaaacggcgtaacctccgggccggtggccagcctgcgcagcgacgtcaccgcgccgacggtgagaagcgcaggcgaggcgggctacgttaacacgctcggctggcgcatggattatcaggcgctgtggggcgtgcatccctgggcgcaggtgagctataaccagtcgctcgccagcgatgtctgggcgccgatgtcccgtgccagggagggaggctggagcgatgtcaccctgggcgctgatatgcggttgggatcccacgtggcggcatgggcaacgctgtcgcaggcggataacctgccgtcaggggaaaatacgctctatttgatgggggtcagcgccaatttttaa

SEQ ID NO: 213511 - DNA, 1206 bp, Klebsiella pneumoniae
atgaacgctgcaaaccgtcaatcgacccgctggctgacactgatcggcaccatcatcacccaattcgctctcggttcggtttatacctggagcctgtttaacagttcgctgtctgacaaactgggcgagccggtcagtcaggtggctttttcctttggtctgctgagcctcgggctggcactctcttcgtcggtcgccggcaagctgcaggagcgctttggcgtgaagcgcgtcaccatggcctccgggatcctgctcggcctgggcttcttcctgaccgcgcactccagcagcctgatgatgctgtggctgagcgcgggcgtgctggtggggctggcggacggcgccggttacctgctgaccctgtcgaactgcgtgaaatggttcccggagcgtaaagggttgatctccgccttctccattggctcctatggtctcggcagcctggggttcaaattcattgattcccacctgctggccaccgttggcctggaaaaaaccttcgttatctggggcgctatcgtgctggtgatgatcgtctttggcgcgaccctgatgaaagatgcgccaaatcacccggcagccaccgcggccaacggcgtcgtggaaaacgacttcaccctcgccgaatcgatgcgtaaaccgcagtactggatgctggcggtgatgttcctgacggcctgcatgagcggtctgtacgtaattggcgtagcgaaagatattgcccagggaatggtccacctggatgtcgccacggcggccaacgcggtaacggttatctcgattgcgaacctcagcggtcgcctggtgttaggtatcctgtctgataaaatctcccgcattcgcgtgattaccatcggtcaggtcgtgtcgctggtggggatggccgcgctgctgttcgccccgctgaatgccttgaccttcttcgccgccatcgcctgcgtcgcctttaacttcggcggcaccattaccgtcttcccgtcgctggtgagtgagttctttggtctgaacaatctggcgaaaaactatggcgtgatttatctgggcttcggtatcggcagcatctgcggctctctcatcgcttcgctgttcggcggtttctacgtgaccttctgcgtgatcttcgccctgctgatcctctcgctggcgttatccaccaccattcgtcagccgaaaagcacggtatataacgaggcgcacgcctga

SEQ ID NO: 213512 - DNA, 1674 bp, Klebsiella pneumoniae
atgaaatatattagaacgatgacgcagcagaagcttagtttttggctggcgctgtacatcggctggtttatgaacgtcgccgtttttttccggcgtttcgatggttatgctcaagagttcactttctggaaagggctttccggtgttgttgaactggttgccacggtatttgtcaccttcttcctgttacgtcttctgtcgctgttcggccgccgtatctggcgcattctggcgacgctgattgtcctgttttccgccgcggcgagttactacatgacgttcctcaatgtggtgattggctacgggatcatcgcttcggtgatgaccaccgatatcgacctgtcgaaagaggtcatcggctggcacctgatcctctggctggtggcggtgagcgcgccgccgttgctgttcatctggagcaaccgctgccgccatacgctgctgcgccagctgcgcaccccgggccagcgggttaaaaacgtgctgatcgtggtgctggccggactgattgtctggggacccatccgcctgctagagctgcgccagcatgatgtggagcgccattcggaagtggatatgccgagctatggcggggtgatcgccaactcttacctgccgtcgaactggttgtcggcgctgggtctgtacgcctgggcgcaggtggatgaatcctcagacaacaaatcgctgattaacccggcgaagaagttcacctacgtcgcgccggaaggtctggatgatacctacgtggtgtttatcattggcgaaacgacccgctgggaccatatgggcatcctcggctatagccgcaataccacgccagagctggagaaagagaagaatctcgtcgccttccgcggttactcgtgcgataccgctaccaaactgtcgttacgctgcatgtttgtgcgcgagggcggggcggaagataacccacagcggacgctcaaagagcagaatgtctttgccgtgctgcatcagctgggcttcagcggcaatctgtacgccatgcagagcgagatgtggttctacagcaacacgatggccaacaatatcgcctaccgcgagcagattggcgccgagccgcgcaaccgcggtaagagcgttgacgatatgctgctggtggatgagatgaagcgcggtatggcgcagggcaacgcctccggtaagcatctgatcattctccacaccaaaggctcccactttaactacacccaacgctacccgcgcagcttcgcccagtggaaaccggagtgcgtcggcgtcgacaacaagtgctcgaaagcggaactgatcaattcctacgacaatagcgtgacctatgtcgatcactttatcgtcagcgtcctcgaccagctgcgggataagaaagcgattgtgttctatgccgccgaccacggggagtcgattaacgagcgtgaacacctgcacggtacgccgcgcaagatggcgccgccggagcagttccgcgtgccgatgatggtgtggatgtcggataagtacctggaaaatcccgatcacgccgccgcgtttgcccatctgcagcagcaggctgcgatgaaggtgccgcgccgtcacgtcgagctgtacgacaccattatgggctgcctcggctatacctcgccggatggcgggatcaatgagaacaacaactggtgccggtggaaaaagtaa

SEQ ID NO: 213513 - DNA, 1395 bp, Klebsiella pneumoniae
atgaaggtgataaaggggttggtcctactgtgcctgatgatgctcgcgggctgccagtctgaggaagagaccagccagttcctgctggcctgtaaatacgatgcgccagcgacgatcgcagccatgctggataacggcattgatgtggatggtcaggataaaaccggcttaagcggcctgatggtcgctgctgcggaaaatcgacgcgatgtggtggaattgctgcttaagcgtcgggcgaagccgaacctccagacgcgccagggcgtcacggcgctgatgctggcggcggcgcgtggcagcgataccgcgattatcggcgatcttctccaggcgggagcgtcggtgaatcagacctccatcgacaagagtacggcattgatgtccgccatctccgacggcggggacatcagaaacgactatcagcatattctggcgatgaaaaagcccgatgcgcctgtcgaagaggagagtacgctggacaagatagttggcgcaacggcggcgaaatcgctggcgacgggcaatcgcgcgctgatgaccgaagacatggcgttacaactggcgcccggcgcgtttaagaagaacgtcgacgagatagtggcgctgctcctcaagcacggcgcggacgtgaaggctgtcaacgcgtccggggaatcggcctttttcctcgctgtcgatcacgcgcgatcggcggaaaccatcacgacgttggccaacgccggggcggacaccagcctggcggataaatccggcaccacaccgctgatgctggcggcggcgggggatgatcccgatctggtgctggcgctgtcggcctccggggtggaagtggatcagccgaaccgtgaaggactcacggcgctgcaggtggcggcgggtcagggggcgcctgcggtgatcgcggcgctggcgcagcgcggcgcaaaggtggaccagctttccgccaacgatctcagcccgctgatgctggcggtcaaaatgaataataaagccaatgtcgaggcgctgcttgcggctggcgccagcgtcaacctcagcaataaggccggctatacggcgattggctacagccgggccggcgaggttcgccagctgctgctggcacagcatgccgagctgaaggggcaggccgcgcatatggcgcaaagcgaactgcagttttgtgctaatgcctttgctgacaagctggcatacagcgacatcgcccgggcggtgaataacgatacccgcccggatattatgcgtcatcagcaatcctgcccggagctgggggagctgacgatgctactgggagagtttacattcaccccggcgggcgcaacctatctcggcgagccggtgacatgtaaggtatccgagtatcgcaaaacgtttgaggtcaactgccgctaa

SEQ ID NO: 213514 - DNA, 156 bp, Klebsiella pneumoniae
atgatgtccctctgggatgcgctccggatgaatatgatgatctcatatcaggaacttgttcgcaccttccttagcagtggcataaatcagcatcgcctgatgtttctggttctatgcgaattcacagtgtgctcattgattcgtaattcactctga

SEQ ID NO: 213515 - DNA, 609 bp, Klebsiella pneumoniae
atgaaaaaggttcttctctctgcagcaatggcaaccgcgttttttggcatgactgctgcccatgcagctgataccactgttggcggcggccaggttaatttcttcggtaaagttaccgatgtatcctgtactgtttccgttaacggccagggcagcgatgcgaacgtttacctgtctccggtaaccctgactgaagttaaagcggcagcagcggatacttacctgaaaccgaaatctttcaccattgacgtctctaactgccaggctgctgatggcactaaacaggatgacgtaagcaaactgggcgtgaactggaccggcggtaacctgctggctggcgcaaccagcaaacaacagggctacctggcgaacaccgaagcttccggtgctcagaacatccagctggtgctgtctactgacaacgctaccgcgctgaccaacaaaatcatcccgggtgacagcactcagccgaaagcgaaaggcgacgcttccgctgtagctgatggcgcgcgtttcacctactacgtaggctacgccaccagcgcgccgaccacggtaaccaccggtgtggttaacagctacgcgacttacgaaattacttaccagtaa

SEQ ID NO: 213516 - DNA, 702 bp, Klebsiella pneumoniae
atgaagcgtattgccctttttttctgtttcatttttagttttgcggcccatgccaacaatattattgttaacggtacccgctttatttatccaggaaatgaaaaagaaataacggtacagctttcaaataacgccgaccgtccggcgctggcgcaggcctggctggataacggcgatgccgatgccacaccggataccattaccaccccgtttattatcaccccgccgatttcgcgcgttgacgccaagagcggccagacgctgcgtattaagctcggcagcagcgccggtctggcgaaagataaagagacgctgtggtggctgaatctgctggaaattccgccggtggtggccaatcagaaaaatgaaggccagaacgtgctgcagctggcgatccgttcgcgctttaaatttatttatcgtcctgccggactgggcaaccgcgatgcggcggccgagaagctgaccctgaccgccagcggcagtagtctcgccatcaacaacccgacgccgttctacattaccgtcagccgtatttcccgcgacggcggtaaagccctgaacagcaaaaccgtgatgctggcgccgcagtccagccagacggtggcgctctcctccgccgtcaaccgcggcgaaaccctgaccgttaacaacattaatgactatggcgccgatgtcgcagtgaaagtggccgttaaataa

SEQ ID NO: 213517 - DNA, 2487 bp, Klebsiella pneumoniae
atgaagcagaggtcattctgcccgggaagattaagcaccgcgatcgccatcgcgctgtgctgctttccgccattttccagcggacaggaaaacccgggaacggtatatcagtttaacgacggctttattgtcggcagtcgcgaaaaggtcgatctgtcgcgcttttcgaccagcgcgattaccgaaggcacttactcccttgacgtctacaccaacgacgagtggaaagggcgctacgatttacgcatcgcgcgcgataaagatggtcggctgggcgtctgctacaccaaagcgatgctggcccaatatggcatcgcggcggaaaagctcaatccgcagctgagcgagcaggagggctactgcggtagcctcaaatcctggcgcaacgaagaaaacgtcaaagacaacctggtccagtcctccctgcggttgaacatttcggtaccgcagatctatgaagatcaacgcctgaaaaactatgtcagcccggagttctgggacaaaggtattaccgcgctcaatcttggctggatggcgaacgcctggaacagccatacctcttcggtaggcgggtcggataacagcagcgcctatctgggcgtcaacgccggactgtcgtgggacggctggctgctgaagcacatcggcaacctgaactggcagcagcagcagggtaaagcgcactggaacagcaaccagacctatctccagcgccctatcccacagctcaactccatcgtcagcggcgggcagattttcaccaatggtgaatttttcgacaccatcggtctgcgcggggttaatctttccaccgatgacaatatgttcccggacggcatgcgctcgtatgctccggaaattcgcggcgtggcgcagagcaacgccctcgtcaccgtgcgccagggcagcaatattatctatcagaccaccgttccgcccggaccgtttaccctgcaggatgtctatccttccggctatggcagcgatcttgaggtctcggtgaaagaagcggatggctcggtagaagtgtttagcgtgccttacgcctccgtcgcccagctgctgcgcccgggcatgacccgctacgcgctctccgccggtaaagtggacgacagcgcgctgcgcaacaagccgatgctctatcaggcgacctggcagcacgggatcaacaacctgttgaccggctacaccggggtcaccggttttgacgactatcaggccttcctggtggggaccgggatgaacaccggcatcggcgcgctctcttttgacgtcacccattcgcggttgaagagcgatgcccatgatgactcgggtcagagctatcgcgcgacctttaaccgcatgtttaccgatacccagaccagcatcgtgttggcggcgtatcgctactcgacgaaaggttattacaacctcaacgacgcgctgtacgccgtcgatcaggaaaaaaatagtcgcagcaactacaccctgtggcggcaaaaaaacggcatgaccttcacggtgaaccagaacctgccggacggctggggcgggttttatctcagcggccgtatctccgattactggaaccgctccgggaccgagaagcagtatcaggtcagctacaacaattcatttggtcgtctctcctggtcggcgagcgcgcagcgcgtctatacgccagacagctccggtcatcgtcgcgacgatcgtatttcactcaacttcagctacccgctgtggtttggcgataaccgcaccgccaacctgacgtcgaacacctcgttcaataactcgcgctttgccagctcgcagattggtatcaacggttcgctggacagtgaaaacaaccttaactacggcgtgtcgaccaccaccgccaccggcggtcagcatgatgtggcgctcaacggcagctaccgtacgccatggaccaccctcaacggcagctacagccagggcgaaggctatcgtcagagcggcattggcgccagcgggacgatgatcgcccacagcggcggcgtggtgctctcaccggaaagcggctcgacgatggccctgattgaagccaaagacgcggccggggcgatgcttccgggatcgccgggcacccgtgtggacagcaatggttacgccatcctgccgtatctgcgcccgtaccggattaacgccgtggaaatcgacccgaaaggcagccatgacgacgtggccttcgatcgcaccgtggcgcaggttgtgccgtgggaaggcagcgtggttaaggtcgcgttcggcactaaggtgcagaacaacctcaccctgcaggcgcgccaggcgaaccacgagccgttgccgtttgcggcaagtattttctcccccgacggcaaggagatcggcgttgtcggccagggcagcatgatgtttatcagcgatgcgaacgccaaacgcgcgattgtgaagtggagcggcgggcagtgttcggtggatctgggacagcaaacaacaaaggatagcgtatgtcgctga

SEQ ID NO: 213518 - DNA, 996 bp, Klebsiella pneumoniae
atgtcgctgaggaaattactaacgctttttatcgtcttaatggcgctgggaaccacctcgtcctgggcctcctgtacgcgtctctcatcgccaacggtgatgctggacatggtggtgggcagggtggtggtgcccccggatctgccggtgggctcggtgatccttacccgcgactggacgatgagcgctcccggcggggcaagctatcgctgtacttccggcaccaaccgctttgcggcgaagatcgtgtcgccaggggccacggaccttggaaataaaatctactccaccaacgtgccgggaatcggcatgcgtttcagccgcggcggcgcaacggtaaatatcgtctatcccgacgtcttttcgtcccgggtatataacaccaccaactattccctcgaagggtcgcgctttacgctgcagattatcaaaaccgcggcaaccaccggcagcggcaccctggcggcgggtaagtacacctcctacgactgggagagcggcggtaacccgatcctcgaaacctatctgagcgccaacgccatcaccgtggtctcgccctcctgttcggtgctgagcgggaaaaatatgaatgtcgatgtgggttccatccggcgcaccgacctgaaaggggtcggcaccaccgccggcgggaaggattttaatatcgacctgcagtgcagcggcggcctgagtgaaacgggatatgccaacattagcacctcgttctccggtaccctggccaccagcactaccgctaccatgggcgccttgctgaatgaaaaagccggcagcgggatggcgaaaggcattggcatccaggtgctgaaggatggctccccgctgcagtttaataagaaatacaccgtcggccgcttgaataatcaggagacccgctacatcaccataccgctgcacgcgcgtttttatcagtatggcccgacgaccagcaccggcgaggtggagtcgcatatgatctttaacctgacgtacgattaa

SEQ ID NO: 213519 - DNA, 636 bp, Klebsiella pneumoniae
atgaagggattgccgaaaaacactatcgcgtggctgctattttgcggcagcctcgccgccccctcggcgtggggttttgagaccaattacgatcgcggacgggtcgattttgccgggcgggtgacggatatttcctgtagcgtcgcgctaaacggcggccagcatgccggcagcggtaatgtctggctggcgccggtcagcctggcggaagtccacgatcgcggggccggggcgtttatgaaaccgcagccgtttaccctggcactgtcaaactgccagctgcgccatgatggtggggcagcctcgcaggatgaggtgcgtcgggtcagcgtgcgctgggtcgatggttttttactgacggcggtcggtaacgaaaacgccgggtatctggccaataccttgccggatggagcgcagaatatttatctggccctatcgactaacgataataatactctggataagagtaataaaattgtcccggcggacccgcagcaaaatcaggtgcgtttgcaggaaagcgcggtcagcggcggcctgttcacctattacgttggctatgtttcgccaacgccgaaaagcgccaccagcgggccgattaccagctgggcaacgtgggaattagtttataattaa

SEQ ID NO: 213520 - DNA, 717 bp, Klebsiella pneumoniae
atgaacactaaaatattcgaagacaacattttatctcgtaatgatatcgctgtacgctacgtctttcagaaaatgttttccccacaaggtactctggtcgcggtggaatgcttaagccgctttgataatctttctatttcccccgaagattttttccgccatgctaccgccgccgttcgtgaacgtattttcctcgaacaactggcactgattgaaaagcataaagcctggtttttacgtaaccatatttccgcaacaattaacgttgatgaccatatcctgaacctgttgcgccagaaggatataaaagccaaagtcgccgccctgacctgcgtccatttcgaggtaaccgaaaacgccgagaatctgctgcataattctcttgccgcctggcagagcccacaggatacctcactgtggctcgacgacttcggctccggctacgcgggaattaacgctattcgcggttatcactttgactatgtgaaaattgataaggattttttctggcacctgatgcgcaaagagtccggccgccagctgatggatgcgctggtgacctttttatcgcgcaaccatcataatgtgattattgaaggtgtcgaaagcgaagcccataaagaatggctgcagggaatggagtggtttgctatccagggacattactggcgggaagtcagtattgaacaactggtcgccgatgatattgccatgtaa

SEQ ID NO: 213521 - DNA, 573 bp, Klebsiella pneumoniae
ttgctgtacaccaatgacaatctcattggtcactcaatctatcactaccttattgatagccatgaaaatgccacccgactgagttatgccgatgtcatccatgagaaacatctgccactggcccagacgattattttcaatttaattaataaggatatttctgccatcagaatcgtcgatctgctgaatgcgctccgcctttccctgctgcgctgccagcagccggtgctaatggtgaaaagcgacattgtcgggctgtgcagagagttgataaactttgacaacgctatgattattagtgagaaatctccgctaactcttttttcatctatcgtccagcgcgccaaaggcgtcagcgaactgccgccgcgaggattgcgcaaacagctttcaccacgggagtgtcagatcctcgaactgctcattgccaacaataataataagcgtattgccgccctgctcggcattgctcataaaacggttcatagccaccgcatccatatcatgcaaaaactgggtattgataactcccgcactatgaatcagcgtattgccgctctccatcaatgctaa

SEQ ID NO: 213522 - DNA, 705 bp, Klebsiella pneumoniae
atgacagagggaacgataaagaccagtaagtatgaaattattgctattttcagagaggagttgcgcaaacgtactgaaattgaaatattttttaacaacaccagtatcataacccaactgacgcgcgtggactttgccgagtttcatattcagacccatcgcaaaatcccgtccgggcataaaattcgctttctcctgcatagcgattcagggaaaatagagtttaatgcggccctgacaaaacatgacaatagcggtgtcgataaaggtatccgctacgctttttcattgcctgaatgcctgcaggtagtgcagcgtcgccgcgatccccgctttcgtttacgccatgagcatgacttttattgccgcggccgccataaaaacggcgaaaactatcttttcgatatcaaagacatttcagatggcggttgcgcattgatgaccaaaacgccgaatcttaaattcctcagccacaacgccttactgaaaaacgccgtactgatgcttgcagaatatggcgagatcaccatcgacctggtggtcaaaaatgtcattgttatcaccctggataacgctaatgaagagagtgagagctactatcagatatcctgccagtttaagttccgccatctcgatgaccagcgcagaatagagaagatactgctggacctgatcttagaagccaagcgcaaaaagagaatctga

SEQ ID NO: 213523 - DNA, 879 bp, Klebsiella pneumoniae
atgtccagtgtcaccttatccggtcgcggcacgctcggcgatcgccaggtctatcgcttaggttacggcgcgatgcagctggccggccccggtgtcttcggcccgcccaaagatcctgaagaagcggtgcgcgtactacaggccgccgtcgaggccgggataaaccatatcgatacctctgatttctacggtccacatgtcaccaatcagttgatccgcaaagcgctccacccctaccctgacgatctgtgcattgtcaccaaggtcagcgcccgccgtgacgagaaaggcaactggctaccggccatgtcgcccgccgaactgacccaggccgttgaagacaatttgcgtcacctggggcttgaggtactggaagtggttaatctgcgcagtatgctgagcccgcacggcccggtggagggttcgctggaggcgccactcgccaccctgctggaactgaaagagcgaggattaatccgccatatcggcctcagcaacgtgacggcaaagcaggtcgcggatgcgcagaaaatgacgcccatcgtctgcgtgcaaaatctttataacgttgcccatcgcgccgacgacgcgctggtggatgcgctggccgcccagcacatcgcctgggtgccctttttcccgctgggcggttttacgccgttgcaggcgcaggagttgaacgaggtcgcggcttcgcttgaggcgacgccgatgcaggtcgccctcgcctggctgctccagcgagcgccaaatattctgctgatccccggcacctcctcccgcacgcacctcgcggaaaatattgccgctgccgagctggtcctgcccgcggaagcgctgcgcaccctcgataatatcgccaccgccgcgcgccgctga

SEQ ID NO: 213524 - DNA, 1230 bp, Klebsiella pneumoniae
atgtctaaaatttggtctaaagaagaaactctatggagttttgccttatatggcactgcagtaggcgctgggacgctatttctaccgatccagctgggttcggctggcgcgattgtgctgttcatcaccgcgctggtcgcctggccgctcacttactggccccacaaagcgctgagccagtttattctctcggccaatatcgcgccgggaaccgggatcaccggcgcagttaatcactactatggtaagaaaattggcaacctgatcaccggcctctatttccttgccttctttgtggtggtgctcatctacgccgtggccatcaccaactcgctggccgaacaggtggcgcatcgcacgccgatgaccccagggctgcgtgcgctgctgagtctgggggtcgtgctggtcctcaacctgatctttctcatgggacggcaggtcaccatcaaggtgatgggctttctggtcttcccgcttatcgcctgtttcctgtttctctccctctatttaatccgcgactggcatccggagcatctcaccagccagatgcagttcagcccgcagacgctccaccaggtctggatctctattcccgtgatggttttcgcttttagccatacgccgatcatctcgacttttgctatcgatcagcaggagaaacacggcgacctggccatgggtaaatgcaaaaaaatcatgaaggtggcctacaccatcatctgcgccagcgtgctgttttttgtcttcagttgtctgctggcgatcccggcaacctatatagagaccgcccgcgatcagggggtgactatcctctccgccctgtcgatggtgccaggcgcgccgggatggctggcggtgaccggcatcatcgtcgccgtcgtcgctatgtcgaagtcgtttctcggaacctacttcggagtgattgagggcgccagcgaaatcgtcaaaagctcgctgggcctgctgggcgtgcgtaagagccgcgctttcaaccgcgcgatgtcgatcctgctggtctccgccttcacttttgcggtgtgctttatcaacccgaatgcgatctcaatgatctacgctatcagcggaccgcttatcgccatgatcctgtttattatgcccacgctgtcgacatggctcattccggcgctgaagccgtaccgctcggtgggtaacgccattacgctggtggttggcctgctctgcgtgtcggtgatgttcttcggctaa

SEQ ID NO: 213525 - DNA, 462 bp, Klebsiella pneumoniae
atgcaacagaccccacatcagcgcaagacgctcaccgaacgcgttatccacgccatcaccttcgaaggactggcgacgctgatcctcgcccctaccgccgcctggctgatgcagcgctcggtagtggagatgggcggactgagcattctgctcgccaccctggcgatggtatggaacattatctataacgcggcgttcgatcgcctgtggccggtctcccgcttcccccgccagctgaaagtacgcgccctgcacgcgctcggtttcgaaaccggattcgtcatcattggcgtcaccatggtggcgatcgtgctgggcgtctcgctgctgcaggcgtttatgctggagatcggttttatgcttttcttcctgccctacaccatggcctttaactgggtatgggacaccctgcgcgagcgcgttattcgtcaccgccgcccgcgccagacggcgcgcggttaa

SEQ ID NO: 213526 - DNA, 870 bp, Klebsiella pneumoniae
atgcgttattcaccggaagccttaaccgcctttgtcgaggcggtcgacagcggatcgttctccgccgccgcccgccgcctgcggaaaagtcagtcgacgatcagtaccgccatcgccaatctggaggccgatctcggcgtaatcctctttgacagggcaacgcggcaaccgacgctgaccccgcagggggagcaggtgctgagctatgtcaaagcgattcttgccgccagcgagcggctggacgaactggctgtgtcgctgtccggcgagacggagccgcggctgaccttcgtgctctccgatactctgcacccggacgtgctggaagatctgctggtgcagtttgaccgccgctttcctcataccgagtttgagtgtttgattggcgaagacgaggatgtgatcgatctcctgcaaaaatcccgcgcccaggtggggctgattgaggcgagggagcgctaccccaccgatatcggcagcacccgcctgccgctgcagacggcgatgggcatttatgtagcccctggccatccgctggcggcgcagggtaaggtcgcctgggatgagctgcgcagctggcgcgagctgcgtttgagcacctttctggccagcgccaccgaacctgccgcaggccaggtctggtcggcgccaaactacctgctgctgctcagcatggcggcgcaggggttcggctggtgcattctgcccagcgcgctggtggcggagtttgcgccgcagggcgggctggtggcgctcgatatccccggctggccgcgggcaatttcagtcgatctgctgtggaataagaaagcgccgccgggagcggccggcagctggctgcgtcagcatctgcagcggcgtgaacgttaa

SEQ ID NO: 213527 - DNA, 1179 bp, Klebsiella pneumoniae
atgaaggatgtcgtgatcgtcggcgcgctgcgaacgccgattggctgctttcagggcgcattatcgcgccattcagccgtcgagctggggagcgtggtggtgaaggcgctggtggagaaaacgggaatcgatccgcacagcgtggatgaggtgatcctcggccaggtgctgaccgcggggaccggacaaaatccggcgcgtcagtccgctattcgcggtgggctgcctaacaccgtatcggctatcaccattaacgatgtctgcggttccggcctgaaggctctgcacctcgctacccaggcgatccagtgcggggaagcggacgtggtgatcgctggcggccaggagaatatgagccgcgctccgcatgtgcttaccgacagccgcaccggcgcccagctgggcaacagccagctgattgacagtctggtgcatgatgggctgtgggatgctttcaacgattatcatatgggcgtcacggcggaaaacctggcccgggaatttggcatcagtcgcgagctgcaggacgcctgggcgctcagctcacagcataaggcgcgcaaggcgattgattccggtcgctttcgcgatgagatcgtcccggttgtcaccgagcataacggcgcggcgcgcaccgtggataccgatgaacaaccgcgggtggatgccagcgcggaagggctggccagcctgcagcccaccttcgatcgccttggatcggtaaccgccggcaacgcctcaagcatcaatgacggcgcggcggcggtaatgatgatgagcgaggctaaagcgctggagctggggctgccgatccttgcgcggatccgcgccttcgccagcgtcggcgtcgatccggcgctgatgggcattgccccggtgcatgccacccgtcgctgtctggagcgggccggctggcggctggacgacgtcgatctgatcgaagccaatgaggcctttgccgctcaggcgatctcggttggccgggtactggagtgggatgagcgccgggtcaacgtcaacggcggcgcgatcgccctcggccaccccatcggcgcctccggctgccggattctggtgtcgctggtgcatgaaatgatcaagcgcgatgcccgcaaaggtctggcgacgctgtgcattggcggcggtcagggcgtggcgctggcggtagaacgcgcatag

SEQ ID NO: 213528 - DNA, 696 bp, Klebsiella pneumoniae
atgttaaaacgatctctggttctcgccgccctctgcggtatgtcttttgcggcaaccgcggtaacgatagatttacgtcatgaatttattgatggcggaaagagtgataaaagtaatgctgaccgcgtctccgtttctcaccgctttgccaacggcttaggctttaccgtcgaggccaaatggcgttcgggtggcgacaacggttcgcaaccctattcggacgtggtgggcaatggtcatgaagacaccatcagctggcgctggaaagcaacgtcgaactttttcctcacccccgggtttaccattgagagcaacgacagccgctccatctacaagccgcacctgcacgcgcagtacagcttcgacaacggcttctatgtcgccgctcgctatcgctatgaatacacccgctatccgaacaacgccggcaaagatgatgacaaagttaaccgcggcgacgcgtgggccggatttgtcctcggcgactggcgtacagagctgaactatgtctatgcccgcagctcggaaggggtcagccgcaacgacaataaaccctactcgcaggaatataacgtgaaggtggcctataagctggataataactggtcgccgtatggcgaaattggcaacgtcggggtcaatgaccgcagcgatcgccagacccgcttccgcgttggggtggcttactcgttctga

SEQ ID NO: 213529 - DNA, 1176 bp, Klebsiella pneumoniae
atggctaaaggcatgcgggtcaaactgaattatcacgtcagccacgatccggataccggggcggaagtcacccgcttaacccccccggaggtcacctgtcatcgcaactacttctatcagaagtgcttttttaacgatggcagccatttactgttcgccggcgagtttgacggccactggaactactatctgctgaatatcgccagcgccgaggccgtccagctaaccgaaggcgccggggataacaccttcggcggcttcctctccccggacgataagtcgctttattacgtgaaaaatgaccgtatcctgctggaagtcaacctgaccaccctcgccgagcgcgaagtttatcgcgttagcgatgactgggtagggtatggcacctgggtggcaaacagcgattgcagcaaactggtgggcattgagattgccaaaagcgactggacgccactcaacgactggcagattttccatgatttcttccataaaggaccgcactgccgcctgctgcgcgtcgacctgcgcagcggtgagagccaggtgatccatgaggaaaaaatctggctgggacacccgatctatcgtcccttcgacgaccataccgtcgccttctgccatgaagggccgcacgatctggtggacgcccgcatgtggctggtcaacgaggatggcagccatgttcgcaaagtcaaagcgcatgctccaggcgaaagctgtactcatgaattttgggtgccggacggttcggcgctgatctacgtctcctatctgaaaggccagcagggacggacgatctatcgctttgatcccgaaagcggcgtcaacgaggccctgatgacgatgccggcctgctcgcatctgatgagcaatttcgatggcacgctgctggtaggcgatggctcaggtacaccggtggatgtcaaggataccggcggctactccattgataacgatccctggctgtatgtctttaacgtggcggaaaagcgctacttccgcgtcgcgcgccatgatacctcgtgggcgacggtggccaacagccgccaggtaacgcacccgcacccctcatttaccccggacgatagcgccattctgttcagctccgataaagacggtaaaccggccatctatatcgcgaaattacccgcgcacccgtcaatgctgagcgcctga

SEQ ID NO: 213530 - DNA, 762 bp, Klebsiella pneumoniae
atgattcttgatgcattctccctgcagggaaaagtggccgtcgtgagcggatgcgataccggtttaggtcaggggatggccctcgggctggcggaagcgggctgcgatattgtcggtatcaatatcgtcgaaccggtggagactatcgagcgagtaaccgcgctgggacgccgttttcttagcctgaccgccgacctgcgccagatcgacggtattcctcagcttctggagcgggcggtggcggagttcggccatattgatattctggtcaacaatgccggcctgattcgccgcgaggacgcgctggcgttcagcgaaaaagactgggacgacgtgatgaacctcaacatcaagagcgtattttttatgtcccaggcggcggcgaaacactttatcgcccagggcagcggcgggaagatcattaacatcgcctccatgctgtcgttccagggggggatccgcgtgccgtcgtataccgcatccaaaagcgcggtgatgggcgtcacccgcctgctggccaacgagtgggccaaacacaacatcaacgtcaacgccatcgccccggggtatatggcgaccaacaacacccagcagctgcgcgccgacgagcagcgtagcagcgaaatcctcgatcgcattcccgccgggcgctgggggctaccggccgatctgatggggccagtcgtgttccttgcctcctcagcctccgattacatcaatggctacacggtggcggtggacggcggctggctggcgcgctaa

SEQ ID NO: 213531 - DNA, 1422 bp, Klebsiella pneumoniae
atgacttcaatcagtaacgactctacattatcgccgcggacgcaacgtgatacccggcggatgaactggtttgtttccatcgccgcggcggtggcgggcttgctctttggcctggatatcggcgtgatatccggagcgttgccctttataaccgaccatttcaccttatccagccagcttcaggagtgggtggttagcagcatgatgttgggggcggcgataggcgcgctgtttaacggctggctgtcgttccgccttggtcgtaaatacagcctgatggcgggggccgtactctttgtggccggctctatcggatccgcttttgccgccagcgtggaggtgctgctggtggcccgcgtggtgttgggcgtggcagtcgggattgcctcttataccgcgccgctgtacctctccgagatggccagcgagaacgtgcgcgggaaaatgatcagtatgtatcagctgatggtcacccttggcattgtgctggcgtttctttccgataccgcctttagctacagcggtaactggcgcgccatgctgggcgtgctggcgctgccggcggtgatcctgatcattctggtcgtctttttgccgaacagcccgcgctggctggcggagaagggacgccatatcgaagcggaagaagtgctgcggatgctgcgcgatacctcggaaaaggcgcgcgacgagcttaacgagatccgtgagagcctcaagctgaagcagggcggttgggcgttgtttaaggtcaatcgtaacgtgcgccgggcggtgttcctgggcatgctgctgcaggcgatgcagcaattcaccggcatgaacatcatcatgtactatgcgccgcgtatctttaaaatggcgggctttaccactactgaacagcagatgatcgccaccctggtggtgggcctgacctttatgtttgccacctttattgcggtgttcacagtggataaagcgggccgcaagccagcgctgaaaatcggctttagcgtgatggcgctgggcactctggtgctgggctactgcctgatgcagttcgacaatggcaccgcatccagcggcctctcctggctctccgtcggcatgaccatgatgtgtattgccgggtatgcgatgagcgcggcgccggtagtgtggatcctctgctccgagatccagccgctaaaatgccgcgacttcggtatcacctgctcgaccaccaccaactgggtgtcgaacatgatcatcggcgccactttcctgacgctgcttgacgcgattggcgccgccggcaccttctggctctacacggcgctcaacgtggcctttatcggcatcaccttctggctgatcccggaaaccaagaatgtcaccctcgagcacattgagcgcaacctgatggcgggcgagaagctgcgcaacatcggtaatcgttaa

SEQ ID NO: 213532 - DNA, 996 bp, Klebsiella pneumoniae
atggcgtccctgaaagatgtagcaaaactggcgaatgtatctctgatgaccgtctcacgggcgctgaacaccccggagcggctgaagcctgagacactggcccgcgtgcaggccgccatcgccgaaaccaactacgtccccgacctgtcggcgaagaagatccgcggggcgcgcgccacccccagcaccatcggcgtgctggcgctggataccgtgaccacgcccttttcggtggagatcaccttatcgatcgaagagacggcccgcgcccacggctggaacagctttgtggtcaatatgttttctgacgatcgtccggaagcggtggtcgacctgctcctctcccatcgtccggacggcattatctttaccaccatgggcctgcgccaggtaccgctgccggaaaaactgctgactctgccctgcgtgctggccaactgcgaaagcctcagccagccggtggccagctatatcccggacgatgaacaggggcagtacgatgcggtgaaagccctgcttgccgctggctatcgtcgtccgctgtgcctgcacttacccgccagccagccggcgacgatccgccgccgccgggggctggagcgcgcctgccgggaggccggtatcgaaccggaccatctgagccattcgtatatgggccagggcgatgagcattaccacgatatcccggcggtggtgctggcgcatatccgcgagggtaaacctggctttgactcagtgatctgcggcaacgatcgcatcgcgtttatggtctatcagacgctgctgggccaggggttacgcattccacaggacgtggcggtagtgggatacgacaacatggtgggcattggcgatctgtttctaccgccgctctccacagtgcaactgccgcattatgacatcgggcgcctgagcgccctgcatatcattcacggcgacaaccatcgggagacgcgcaaagtcgccagcccgtggttgccgcgcgcctcacattaa

SEQ ID NO: 213533 - DNA, 1242 bp, Klebsiella pneumoniae
atgatgaaagcgcctcactcacacagctacccgttgctcagtgccttactgtttttctttttcgtgacctggtcgtcatccggctccttgctctctatctggcttcaccaggaggttgggctgaaggcaggcgataccggtattatctatgccgtactgtcggtttccgcgctgtttgcgcaagtttgctatggatttatccaggacaagctggggctgcgcaaacatctgctctggtatatcaccgcgctgctgatcctctctggtccggcgtatctgctgttcggccacctgctgaaaatcaacgtcctgttgggcagcatttttggcgggatctatatcggtttgacctttaacggcggcatcggcgtgctggaatcttacaccgagagggtggcgcgtcagagccagtttgaattcggcagggcgcggatgtggggctcgctgggctgggcggtggccaccttcttcgccggcctgctgtttaacatcaatccgcagctaaacttcctcgtcgccagctgttccgggctggtgttctttatcctgttggcgcggctgcgggtctcctcggcgccgcatgcgatgcaggaggcggtatcgggcggtaaggtgaccctcgaagatgcgctgcgcctgctgacgctgccgcgcttttgggcgctggtcttcttcgtcatcggcacctgcatttacggcgtctatgaccagcagttcccggtctatttctcatcgcagttcgcgaccctgcaggaaggcaatgagatgtatggctacctcaactccttccaggtgttcctcgaggcggccggcatgttctgcgcgccgtggctggtgaaccgcatcggcgccaaaaacggtctgattttcgccggcatggtgatggcgatgcgcatggtggcctccggtctggtggaggggccgctgctgatctccatcaccaaactgctgcacgcggtggagttgccgatactgctggtggctatctttaagtacaacagcctcaacttcgataaacgtctctcctccaccctctatctggtgggcttcgcctgcaccagctcgattatcgccagcgtattgtcgccgctggcgggctacagctatgaaaaatatggcttcgcccagtcctacctgatcatgggcctgctggtgttctgcaccacctttatttccatcttcttgttgcgctccggcaaatcctccgccgatccgctggtgtcgcaacctaccgctatctga

SEQ ID NO: 213534 - DNA, 1437 bp, Klebsiella pneumoniae
atgatgacttacacaatctcccgggctgaacaggtactccagacacaacgccaggcgcttaatctgcgctggtatccgcactatcacctggcggcccgcgccgggtggatcaacgacccaaacggtctggtgtggtttgacggctggtaccatgccttttatcaacatcacccgtactccacccagtggggaccgatgcactgggggcacgcgcgcagtaaggatctggtgcactgggagcatttgccggtagccctggcgccggagggcccggaggataaagacggctgcttttccggctcggcggtggtcgatggcgataccctggcgctgatttacaccgggcataagttccacggcgatcctggcgacgaagccaatctgtatcaggtgcagtgtctggccaccagccgcgacgggatccactttgagcgccaggggatggtggtcgacaccccgccgggtatgcaccacttccgtgacccgaaggtctggcgtgaaggagactgctggtacatgatcgtcggcgcgcgcgaaggcgataccggccaggtgcggctgtaccgttcagccgatctgcgccagtggcaggacgcgggggtgctggatgaagcggaaagcaccatgggctatatgtgggagtgcccggacttcttcaccctcaacggcaaacgcgttctgatgttttccccacaggggatgcaggccgcggggttcagcaaccgcaatctgttccagagcggctatctgatcggcgagtggcagccaggccagcgttttattcgccatggcgaattccgggagatggataacggccacgatttctatgccccgcaaagcttctccacccccgatggccggcggatcgtgattggctggctggatatgtgggaatcgccgctgccggagcagcaggacggctgggcgggcatgctctccctgccgcgcgagctgagcctgagcgcggatgaccgcctgcagatgcgcccggcgaaagaagtggagagcctgcgcggcgcctggttcccgtggccggtcagcaccctgaacaaccagcagacgacgatggtcgacaactgcgaggcgatggaggtgaatctgcgctgggactgcgcccgcagcagcgccgagcagtatggtctgcgctttggcgatggcctgcgcatctacatggatgcccaacagcagcgtctggtgctggaacggcattatccgcagtatggcctgtgcgggacgcgcagcgtgccgttgaccgccggggcggatctcaacctgcgaatatttttcgatagctcttcggtggaggtttttgtcaatgacggcgaagcctgcctgagcagccgtatctatccgcaggctccccgccgtgaattagcgttatttgcctggagcggcgcggcggcattaaccgaagccggcgcctggcagctcgaataa

SEQ ID NO: 213535 - DNA, 1344 bp, Klebsiella pneumoniae
atgaataaaatctgggtcgggtgttttctgacgtctctgtatctgccatccgttatggcgcaggcgccgttatcgctggaggagcgactggcgcaaatggagcagcggctaaaggcgacggaggcgcgcgccgccagcgcagaggcggaaattaagacgctgaaaggccagcagcaggccgcgacggtcgcccgcgcggcgcctgcttcgccgcgtttgcagctaaatgacaatggcgaattaaaattttatggcgacgtcgaatttaacctcgatggcgccagtcgcaccggcagcctgacgtcggtcaaaaccagcgcgaataaaagctgggcgcccggcgataaagagcgctgggatattaacggtcgtattctgctgggtttcgatggcagacggaatggcgccgacgggcaatatgccggattcagcgtgcagcctctggcggatatggatggcaaaatgaatcttgatgatgcggtatttttcttcggccagcaggatgactggaaaataaaaataggccgctttgaagcctgggatatgttcccgctgaatcaggatacctttattgaatattcaggtaataccgccaacgatctctattccgatggctatggctatatttacatgatgaaagaggggcgcgggcgcagcagcagcggcggtaaccttctgtttagcaaaacggtggataactggtatttcgaagttaacaccctggtggaggacggcagttcgctgtttgtcgatcagaactatcatggtaacgcgctggaaaaccgcaaaaatgtggtgtacgtgcggccggtggcggcatggcagtccggcgtctggtcggcggccgcggcgatagagagcaatctcgtcaacaatgcttacggctatcagagccagagcggacgctgggtcgaccagtcaaaccgcaccggctacgggctgaccatgagctggaacaccctgaaaagcgatccgcaggatggggcggtggtcaatctgagtaccgccctgctggacgcggcggacgaaaccgacttcagcgccgggatcaacgccctttggcatcgcgtggagctgggctatatctatgcgcacaataaaatcgaccagttcaatatggccggggtgaccagcgaatgcgatggcgattgcgctatcctggcgccggggcgctatgacatccataccttgcacacctcctggcagttgccgaatatcatggcgatgccgaacttcaatatttaccttggcgcctatgcctcgtggctcgattccacggcagcgaagagcgggaatcccgatgaacgctacggcgcccgggtgcgctttaaatatttcttctga

SEQ ID NO: 213536 - DNA, 1287 bp, Klebsiella pneumoniae
atgaaaaacgtgctgataagcgccaccctctccgccaccctgggccttagcgccttctcttcgctagcgcaggatgtcgacctgcgtatgtcctggtgggggggcaacggccgccatcaggtcaccctcaaggcgctggaggaattccacaaacaaaacccagacatcaacgtcaaagcagaatacaccggctgggacggccatctttcacgcctgaccacccagattgccggcggtaccgagcctgacgtgatgcagaccaactggaactggctgccgatcttttcgaaaaatggcgatggcttttacgatctgaataccctgaaagacgagatcgacctcagccagttcgacgccaaagaactgcagtccaccacggtcaacggcaagcttaacggtattccaatttccgtcaccgcccgcgtcttctactttaacgacgaagcatggaaaaaggcgggcatccccttcccgaaaacctgggatgaactcatggcggcgggaaaaactttcgaaagcaagctcgggaaacagtactacccggtggtgctcgaacaccaggacgtgctggccctgctcaactcttatatggtgcaaaaatacaatcagccggccatcgatgagaaagggcgaaaattctcctacagcaaagcgcagtgggcggatttcttcggtatgtataagaagcttatcgacagccatgtgatgccggacacccgctactatgcctccttcggcaagagcaacatgtacgaaatgaagccgtggatccagggcgaatggggcgggacctacatgtggaactccaccatcaacaaatattccgataacctgaagccgccggcgaagctggtgctgggggaatacccgatgctgccgggcgccaccgatgccggactgttcttcaagcccgcgcaaatgttatcgattggcaaatcgacgaaaaacccgcaggcggcggcgaaagtgattaacttcctgctgaacagcaaagaaggggtggatattcttggactggagcgcggcgtgccgctgagtaaagcggcggtcacctacctgaccgaggatggggtaatcaaagccgacgatccggcggtgtccggcctgaagctggcgcaatccctgcccaccgctctgccggtctccccgtacttcgacgatccgcagatcgtcgcccagttcggcaccaccctgcagtacatcgactacggtaaaaagtcggtggaagaagcggccgaggacttccagcgccagaccgaccgcattctgcgccgcgcgatgcgctaa

SEQ ID NO: 213537 - DNA, 1128 bp, Klebsiella pneumoniae
atggctgaagtgattttcaacaaactggaaaaagtctactccaacgggtttaaagcggtgcatggtatcgacctgaagattgccgatggcgaatttatggtgatcgtcggcccctccggctgcgccaaatcgaccaccctgcgcatgctggcgggcctggagaccatcagcggcggcgaggtgcggattggggacaaaatcgtcaacaacctggcgcctaaatcccgtggcatcgcgatggtgttccagaactacgccctctatccgcatatgacggtgcgcgaaaacctcgcctttggcctcaaactaagcaagctgccgaaggcgcaaatcgacagacaggtggaagaagcggcgaaaattctcgaactggaagaactgctcgatcgcctgccgcgccagctctccggcggccaggcgcagcgcgtggcggtgggccgggcgatcgtcaaaaaaccggacgtcttcctgttcgacgaaccgctctccaaccttgacgccaagctgcgcgcctcgatgcggatccgcatttccgatctgcataagcagttgaaaaaatctggcaaaccggcgaccaccgtctacgtcacccacgatcagacggaagcgatgaccatgggcgaccgcatctgcgtgatgaagctcggccacattatgcaggttgataccccggacaatctctaccaccagccgaaaaatatgtttgtcgccgggtttatcggcgcgccggagatgaatattcgtcccagccagctggttgagcacggtggtcgcctgtatttgacgctgggcgatcagcggctgccgctcaacgatcggctgcaaagcaaagttgaaacccataagaatcagcaggtgttctttggcgtgcgcccggagtttgtctctctctccgatgaaccgtttgccgaaggttcctgcgcgggtgaaatggtacgcgtagaaaacatgggacatgaattctttgtttatctcagggttgctgattatgagctgaccgcccgcgtgccgtcggacgatgcgaagccgatgattgccaagggactgaatcgcaaagtctatttcacctttgatctcaacaagtgtcacatctttgacgccaaaaccgaacagaacctctctctgtga

SEQ ID NO: 213538 - DNA, 903 bp, Klebsiella pneumoniae
atggctgatattcaacagatggcgccggtgatgagcgacgccgatcgtgaggtcgcccgtacgctgcgccgggaaaaggtgagccgggtggtgcgctacgtcgtgctgatattcgtcggcctgctgatgctctacccgctggcgtggatgttctccgcctcgttcaagccgaaccatgagatcttcaccaccctcgggctgtggcctgcccacgccacctgggacgggtttatcaacggctggaagaccggcaccgaataccatttcggccactatatgctgaacacctttaagtatgtgatcccgaaagtggtgttaacgatcatttcctccaccatcgtggcgtacggcttcgcacgctttgagatcccgtggaagaagttctggttcgcaacgcttatcaccaccatgttgctgccgagcaccgtcctgctgatcccgcagtacctgatgttccgcgaaatggggatgctgaacagctatctgccgctgtacttgccgctggccttcgccacccagggattcttcgtcttcatgctgatccagtttctgcgcggcgtgccgcgcgatatggaagaggcggcgcagatcgacggctgcaactccatccaggtgctgtggtatgtggtggtgccgatcctcaagccggccattatctcggtggcgctgttccagtttatgtggtcgatgaacgactttatcggtccgctgatctacgtctacagcgtcgataagtatcccatcgcgctggcgctaaaaatgtctatcgacgtcacggaaggcgcgccgtggaacgaaattctggcaatggcgagcatctccattctgccgtccatcattgtcttcttcctggctcaacgctacttcgtgcagggcgtgaccagcagcggaatcaaaggttaa

SEQ ID NO: 213539 - DNA, 891 bp, Klebsiella pneumoniae
atgaatgaaaacaagctgctgggattggcatggatatcgccctatatcatcgggctgatcgtctttaccgcttttccctttgtttcatctttctttctcagttttaccgagtacgacttgatgagcccgccggtatttaacggcatcgaaaactatcgctatatgttgaccgaggatagcctgttctggaaatcgatgggggtgacctttgcctacgtctttttaaccatccccttaaaactggctttcgccctcggcattgcttttgtgctcaatttcaaactgcgcggcatcggctttttccgcaccgcctattacatcccgtcgatcctcggcagctcggtggcgattgccgtgctgtggcgcgccctgttcgccattgacggcctgctgaacagttttctcgccgtctttggcatcgatgccatcaactggctgggggaaccctccctggcgctgatgtcggtcaccctgctgcgcgtctggcagtttggctccgcgatggtcatcttcctcgccgcgctgcagaacgttccgcagtcgcagtatgaggcggcaatgattgacggcgcctcaaagtggcagatgttcatgaaggtcaccgtgccgctgatcaccccggtgattttcttcaactttattatgcagaccacccaggcgttccaggagtttaccggcccgtacgtgataaccggcggcggtccgacctattacacctacctgttctcactctatatctacgataccgcctttaagtacttcgacatgggctatggcgccgcgctggcgtgggtgctgttcctcgtcgtggcggtctttgcgtcgatcgcctttaagtcatcgaaatactgggtcttctactccgccgataagggaggcaaaaatggctga

SEQ ID NO: 213540 - DNA, 327 bp, Klebsiella pneumoniae
atgtttatttttcataaagacaccacccttgaagacctcggcaatggcgtaacccgccgcattctggcccacgacggcaaaatgatggccgtggaggtgaattttgccgccggcgccgtcggcccgatgcataaccatcctcacgaacagctcacctatgtgctttccggcgagtttgagttcaccatcggcgaggagacgcgcgtcgtcagcgccggcgatacgttgtataagcggccggggattatgcacggttgcgtctgcctgcagcccggcacgctgctcgatacctttactcccattcgcgaagattttcttgaaggctaa

SEQ ID NO: 213541 - DNA, 714 bp, Klebsiella pneumoniae
atgaaaaccattggcctgttaggcggcatgagctgggagtccacgatcccctattatcggttgatcaatgagggcgttaaggcgcgactgggcggcctgcactctgccagcctggtgctgcacagcgtcgattttcacgacatcgaagcctgccagtccgccggcgactgggatcgcgccggggagatccttgctgaggccgcggtcgggctgcagcaggcgggggccgaaggcattgtcctgtgcaccaacaccatgcataaagtcgcagatgccatcgccgcccgctgccaggttcccttcctgcatattgccgatgccaccggacgggcgattgccgccaaaggtcagcgccgggtcgcgctgctgggcacccgctataccatggagcagaccttttaccgcggtcgtctgcaggagcagtttgccatcgagacgctgatccctgaggctgacgatcgggcgcagatcaatcagatcatcttcgacgaactttgtctcggcaccttcagcgaggcgtcgcgggattattatctgcagacgatcgccgccctggcggagcagggggcggaaggggttattttcggctgtacggagattggcctgctggtgcctgccgagctcagcccgctgccggtctttgacaccgcggcgatccacgcggaagacgcggtcaactttatgctctctgcaggaccgacgccagcggcgtga

SEQ ID NO: 213542 - DNA, 927 bp, Klebsiella pneumoniae
atgccagccgtcaatttgcgtcatatcgaaatctttcacgcggtgatgaccaccggcaacctgaccgaagcggcgcggatgctgcacacctcgcaacccacggtcagccgcgagctggcgcgctttgagaaggtgctcggcctgcagctgtttgagcggacccgcggtcgcctgcagccgacggtgcagggcctgcgtttgtttgaggaggttcagcgctcctggtatggcctggaccgtatcgtcagcgccgccgagagcctgcgcgagttccgccagggcgagctgtcgatcgcctgtctgccggtgttttcccagtcctttctgccgctgctgttgccgccgtttctcgctcgctacccggaggtcagcctgcagatcgtcccccaggagtcgccgctgctggaggagtggctctccgcccagcgccatgaccttggcctgacggagaccctgcatacccccgcgggcaccgaacgcaccccgctgctgacgctgaatgaagtctgcgtgctgcccgccggccatccgctggcggcgcaggcgacgctgacccccgccgattttcagggcgaaaactacatcagcctgtcgcgcaccgacagctatcgccagctgctcgacgccctgttccttgagcatcaggttaaacggcggatggtggtcgaaacccacagcgcggcctcgatctgcgccatggtgcgcgccggcgccgggatctcggtggtgaatccgttaaccgccctggactatgccgatagcggcgtggtggtgcgccgcttcagcgtcgaggtgccgtttaccgtcagcctgatccgccctctccaccgcccgcgctcggcgctggtcgacgcctttgttgcccacctgcagcagagtctgccgcagatcctcacgccgctggcgtcggtcctgcagagagcataa

SEQ ID NO: 213543 - DNA, 1263 bp, Klebsiella pneumoniae
atgccacactcgctttacgccaccgatactgacctgaccgcagacaacctgctgcgcctgcccgcggaatttggctgtccggtctgggtctatgatgcgcagattattcgccgccagattgcccagctcagccagttcgacgtggtgcgttttgcgcaaaaagcctgctctaacattcatattctgcgtctgatgcgtgagcagggggtgaaggtggactcggtgtcgctgggggagatcgagcgggcgctggcggcaggctacgatccgcagcagaatcccgaggatatcgtcttcaccgccgatctgatcgacgacgccaccctcgatcgggtgaaggcgttacagatcccggtgaacgccggctcgatcgacatgctgagccagctgggcgaggtgtcgccgggccatcgcgtctggctgcgcgtcaacccgggctttggccacggccacagccagaaaaccaataccggcggtgagaatagcaagcatggcatctggtacagccacctgccggcggcgctggaagtgatgcgtcgctatcagctgcagctggtcgggatccatatgcatatcggctctggcgttgactatggtcacctggagcaggtgtgcggcgcgatggtgcgccaggtcgtcgactttggccaggatctgcaggccatctccgccggcggcggtctgtcgattccttaccgcgaaggtgaagaggccatcgacaccgcccactattatggcctgtggaaccgcgcccgggagcagatcgcggcccatctggggcacccggtgaaactggagattgagccaggacgcttcctggtggccgagtccggcgtgctggtgtcgcaggtgcgcagtgtgaaagagatgggcagccgtcacttcgtgctgattgacgccggctttaacgacctgatgcgcccggcaatgtacggtagctatcaccatatcaccgctctggcgggggatggccgggatctcagcgccgcgccgcaggtcgaaaccgtggtggccgggccgctgtgcgaatccggggatgtctttacccagcaggaggggggcaaagtcgagacccgcctgctgccggcggtggcgcctggggattatctggtgctccatgacaccggcgcctacggggcttcgatgtcgtccaactataacagccgtccgctgctgccggaggtgctgtttgatggcggtaaggcgcggctgatccgccgtcgccagaccatccaggagctgctggccttagagcttatttaa

SEQ ID NO: 213544 - DNA, 1011 bp, Klebsiella pneumoniae
atggctacaatgctggatgtctcaattcgcgcaggcgtctcgaaagcgacggtttcccgcgtgttgaacggcacaggtcaggtgaaagagagcacccgccaacaggtctttaaagcgatggaagagctgggctaccggcccaatttccttgcccgctcgctggccaatcagaccagcaatagtatcgggctggtcgtctccacctttgacggcttttactttggccgtctgctgcagcaggcgtcacgccagaccgaagcctggggaaagcagcttatcgtcaccgacggccatgatacgccggagcgcgaagaggaagcggtgcagatgctcgccgaccggcagtgcgatgcgatcatcctctatacccggcacatgagcgagaaggcgatcatgtcgctgattaactcgatcgccatgccgctggtggtgattaaccgcgatgtggcgcaggcccgcgaacgctgcgtgttcttcgaacagcaggaagccgccttccaggccgtggagtatctgattacccagggccaccgcgatatcgcctgcatcaccgtcccgatgcatacccctaccggccaggctcgcctgcagggctaccgcaacgcgctgataaaacatggtattgagtgggatccgagccgggtgaagtatggggactcgacgatgactcgcggctacgaactgtgccgggaactgctggacgagaaagcccgcttcagcgcgctgttttcctgtaacgatgatatggcgctgggggcgtcaaaggcgctgcatcaggcggggctgcgtattccacaggatgtgtcgctgtttggcttcgacgatgcgccaagcgcgaaatggctggagccggggctgtcgacggtttatctgccgatcgacaacatgatcactacggctatcgaccaggcgatcaagcttgccaatcagcagccgatagaaacgatcccgccgtttaccggcacgctggtgcttcgcgagtcggtgacgacgggacctttttttaaataa

SEQ ID NO: 213545 - DNA, 1338 bp, Klebsiella pneumoniae
atggcattacaggacaaactgatcgacgcgctggggcgtttcgcgacgacattcaacagctatcgctacattatggcgatcaaatcggcgtttattaccctgatgccggtgatcatcgtcggggccttttcggtgctgatctccaatatggtgctggatccgaagaatgggctcgccagcttttcctcgctctcctttcttgcggcgctgaagccgatcaccagcgcgcttaactacgctacgctcaacttcctcaatatcggcgccgtgtttctgatcggtattgagctggggcggatcaacggcatcaaaagcctgtttcccggcctgttggcggtgatctgctttatctgcgtcacgccgaccacggtagagatgatggtcgatggccagatgcacgtggtgaaagatgtcctgctgcgccagttttccgatacccgcagtctgttccttgggatgttcatcgccattctgtcagtggagatttactgctggctggaggggcgcaagggactgaagatcaaaatgccggataccgtgccgccgaacgtctctgcctctttttccgcgctgatcccggcgatcatcaccaccaccgcgatcgccacctttggttttctctttcaccagctgacgggaatgtatctctacgatgcggtctaccaggtggtgcagcagccgctggagcgggtggtgcagagcctgccggggatcctgctgctgatgttcgtcgcccagctgttctgggtgatcggcattcacggcaaccagatgatcaagccgatccgcgagccgctgctgctgggagcgatcaccgtcaatatgagcgcttttgagcaggggaaagaggtaccgaacatcatcacgatgcccttctgggatgtctacatgagcatcggcggctcggggctgaccatcggcctgctgattgcggtgatgatcgccaccaggcgcaaagagatgaaagagatcgccaagctgtcgataggcccggggctgttcaatattaacgagccggtgatcttcgggatgccgatcatgcttaacccgatcctcgccatcccgtttatcatcaccccgctggtgaccggcagcatcggctatttcgccaccctgaccggcttcgccggcaaggcggtggtgatggtcccctggaccacgccgccgctgatcaacgcctggctctccaccgccggctcgatgggggcggtggtgacccagcttatctgcatcgtcgtcgcggtgcttatctatctgcctttcgtcaaaatcgtctcccgccgtgccgatgccgcgcagcgtcaggtagacaatcaacaaaccgccaaccctgtctga

SEQ ID NO: 213546 - DNA, 1428 bp, Klebsiella pneumoniae
atgactaccgtacggatgaccattcccgatgattttatccttggcgcggcggcttccgcctggcagaccgaaggctggagcgggaaaaaaccagggcaggactcctggcccgatctctggtacaaaaacgatcgccacgtctggcataacggctatggcccggcggtggccaccgattttatcaaccgctttcaggaagatgtgcagctgatgaagctggctgggctgacccactaccgcacctcaatcaactggtcgcgctttctgaccgactatgaaaacgtcacggtggatgaggagtatgcggcctattatgaccagctgttcgatgcgctgctggctaacggcatcacgccgatgatctgccttgagcattatgaattgcccggctatctgctggaaaagtatggcggctgggggtcgaaaacggtggttgagctgtttgtgcgctacgcggagaaggtgtttgcccgctaccacccgaaggtgacgcgctggtttacctttaatgagccaattgtggtgcagacccgggtctatctggatgctctgcgctggccctatgagcagaacaccagcacctggatgcagtggaactatcataaggtgctggcgaccgccagcgtcgtgaagcggtttcgcgagctcggctatcccgggaccgtcggctgcatcctcaatccggaggtgacctacccacgctcacgcgccccccatgacctgcgcgcggcggagatctacgatctgttctacaaccgcatgttcctcgacccgctggtgcacggcgtctggccgccggagcttctcgcgctgcttgagcagcatcaggtgacgtgggagaccagcgaggaggatctggcggttatccgcgagcacaccgtcgatgagctggggattaatctttactacccgcaccgggtcaaagccccgtcgcgggcctggcatccgcacaccccgttccatccggcctggtattatgagccgtttgagctgcccggccggcggatgaacgcctcccgcggctgggaaatctacccgcaaatcatctttgatatggcgatgcggataaaaaatgactatagcaacatcccgtggttcgtggcggagagcgggatgggggtggaaaacgaaggccagttccgtaaccgcgaaggcgtcatcgatgacagctaccgcattcgttttatcagcgaacatctgtggcacaccctgcgcgcccgcgaggcaggggccaactgccagggctatatgctgtgggcgtttaccgacaacgtatcgccgatgaacgcctttaaaaaccgctacgggcttatcgaaatcgatctgcaaaaccatcgcgcccggcgacccaaagcctcggcgcactggtttcgtcaactgggcgaacggcgtgaactggtgctggatatcgatgatgaataccgctag

SEQ ID NO: 213547 - DNA, 774 bp, Klebsiella pneumoniae
gtggaaaaagcgatagttccgccggaaaagaagccctatcaggagattggtgatgacctgcgcgcccagatcgcgcaggggcgctacccggtcgggtcgcgtttgccgccggaacgccatattgccgaaacctatggcgtcagccggaccatcgtgcgcgaagcgctgctgatgctggagctgcaggggacggtggatattcgtcagggatccggggtgtatgtcatgcgcattccccacgagaacgacagcgaagaggagcagctgctcagcagcgacgtcggcccgtttgaaattctccaggcgcgccagctgctggagagcaacatcgccgcctttgccgcgaaaatggccacccgcgccgatatcgacaatctaaagcggattattgaacaggagcagcgggcaatcgctctcaacgacaccgcgcaggataacgctcgtctgttccatctggtgctcgccggggcgacgcagaaccagatgctgttggcgacggtagagcggatctggctgcagatggacagcagcccgctgtggcagcagttcaatgtgcatattgccagccgcgcctggcggctgaaatggctcggcgaccggcagaccctgctcgccgcgctgcggcgtcgcgatgtgatgggcgcctggcaggcgatgtggcagcatctggaaaacgtcaaaaacagcctgctggagctgtccgatgaggacgcccccgactttgacggctatctgttcgactcagtgccgatttttcaggggaagctggtatga

SEQ ID NO: 213548 - DNA, 480 bp, Klebsiella pneumoniae
atgacgatcctgccgctgtacgctgcgccgcagtacgccccgcaggtgaccgactggctgtggcaggcctttggcggcgagacgctgccgcggcaattcttcgccagcattgtgcagcatagccagacggcggaggcgctgccgttgacctttattgccgtggaaggcgagcagttgctcggcacgattggcctctggcgctgcgatttgatcagccgccaggatctgtttccctggctggcggcgctgtacgtcgcgcccgccgcccgcggtcaggggctggccggaaaactgcagcggcatgtgatcgattatgcccgccgcgcgggctttcgggagctctatctctactccgcctgccgggatttctatgaacgcttcggctggcgctacatcggcgaggggctggattacccggccaccgccgtgcacctctatcgctatgacttatcgccttcctgcggggcgaccaccgagtga

SEQ ID NO: 213549 - DNA, 1017 bp, Klebsiella pneumoniae
atggcgactattaaggatgtagcccgactcgcaggagtctccgtcgctaccgtctcccgcgtcatcaacaactctcccaaagccagcgaagcttcgcgtcagtccgtgggcgcggcgatggaaaccctgaactatcaccccaacgcgaacgcccgggcgctggcccagcagtcaacggaaaccgtcggcctggtggtgggcgatgtctccgaccccttcttcggcgcgatggtcaaagccgtcgaacaggtggcctaccgcaccggcaattttttgctgattggcaatggctaccacaacgtgcagaaggagcgccaggcgatagagcagctgatccgccatcgctgcgcggcgctggtggtgcacgccaaaatgatcccagatgaggaattggcggggttaatgaaacagatccccggcatggtgctgatcaaccgcatcctgcccggatatgaaacccgctgcgtcgcgctggacgaccgctacggcgcctggctggcgacccgccatttgatccagcaggggcacacgcgtatcggctatctgtgctcaaaccatgatatctccgatgcggaagatcggctgcaggggtactacgcggcgctggaggagagcggcctgccgtgcaacgaccggctggtcacgtttgccgagccggatgaaagcggcggcgaacaggcgatgaccgaactgcttggccgcggccgccactttagcgccgtcgcctgctataacgactcgatggccgccggcgcgatgggggtgctgaatgacaatggcatcgacgttccgcgggagatttcgctgattggcttcgacgatgtcctgatttcgcgctatgtccgcccgcggttgactaccgtccgctatccgatcgtcacgatggcgacccaggcggccgagctggctttagccctggcggagcagcggccggcgccggagatcacccatctgttcagcccgacgctggtccgtcgtcactcggtggtcgccccgcaggaaggcgataagtcatag

SEQ ID NO: 213550 - DNA, 2160 bp, Klebsiella pneumoniae
atgcttttgggatttttcagactgctgttcaaggggttataccgggtcagactgaccggcgacacgcaggctttataccagcaaaaggtcttaatcaccccgaaccacgtctctttcctcgacggcattctgctggcgctgtttttgccggtccgaccggtttttgcggtctatacctcaatcagccagcgctggtttatgcgcgcgctgacgccgattatcgattttgtgccgctggacccgaccaagccgatgtcgatcaaacatctggtgcgcctgattgagcaggggcggccggtggttattttcccggaagggcgaatttcggtcagcggctcgctgatgaaaatttatgacggcgccgcctttgtcgccgccaaatcgcaggcgaccattgtgccgctgcgtattgaaggcgccgaactgacgcccttcagccggctgaaggggctggtgaaacgtcgcctgttcccgcgtattcagctgcatctcctgccgcccacccatctgccgatgcccgaggcgccgcgcgcccgcgaccggcgcaaaatcgccggggagatgctgcatcagatcatgatggaagcccggatggcggtgcgcccgcgggaaaccctgtatgagtcgctgctggcggcgcaggaccgcttcggcgcgcgcaaaccctgcgtggaggatatcaacttccagccggatacctatcgcaagctgctaaccaaaaccctgtttgtcgcccgcattctggaaaaatacagccagccgggcgagaagatcggcctgatgctgcctaacgccggcatcagcgcggcggtgattttcggcgctatcgcccgcgggcgtattccggcgatgatgaactataccgccggggtgaaagggctcagcagcgcgatagccgccgcggagctcaacaccattttcacctcgcgcaccttcctcgataaaggcaaactctggcacctgccggagcagctgacccaggtgcgctgggtattcctggaagatcttaaaggcgatatcaccctcgctgacaaactgtggatttttgctcatctgctggcgccgcgtctggcgcaggttaagcagcagccggaagacgcggcgatgatcctcttcacctccggttccgagggcaatccgaaaggggtggtgcacagccataagagtctgctgtccaacgtcgagcagatcaaaactatcgccgactttaccgccaatgaccgctttatgtcggcgctgccgctgttccactcttttggcctcaccgtcggcctgctgacgccgctgcttaccggggcggaagtgtttctctatcccagcccgctgcactatcgcgtggtgccggagctggtctacgatcgcaactgtacggtgctgttcggcacttcgaccttcctcgccaactatgcccgtttcgccaatccgtacgatttctaccgcctgcgctacgtggtcgccggggcggagaagctgcaggagagcaccaaacagctgtggcaggataaattcggcctgcgcattctcgaaggctatggcgtgaccgagtgcgcgcctgtggtctcgattaacgtgccgatggcggcgaaggtcggcaccgtgggccgcatcctgccggggatggacgcccgcctgctggcgatgccaggcattgatcaaggggggcggctgcagctgaaagggccgaacatcatgaaaggctacctgcgggtggaaaaccccggcgtgctggaagcgcctgcggcggaaaaccagcacggcgagatggaagcgggctggtatgacaccggggatatcgttaccttcgacgagcagggctatgtccgcattcagggccgcgcgaagcgcttcgccaaaatcgccggcgagatgatctccctcgagatggtggagcaggtggccctcggcgcgtcgccggacaaaatgcacgccacggcgattaaacaggacgccagcaaaggcgaggcgctggtgctgtttaccaccgataatgaactgactcgtgaagccctgctgcgctacgcccgccagcacggcgtaccggagctggcggtgccgcgagatatacgctggctgaaacagctaccggtgctcggcagcggcaagccagactatgtcaccctgaaaaatatggtcgacgaggcggaaacaacccatgagtga

SEQ ID NO: 213551 - DNA, 1194 bp, Klebsiella pneumoniae
atgagtgagtcagtacatactaacccttcgctgtactcgaaagggatgctggcggtgatctgcgcccagttcctgtcggccttcggcgacaatgcgcttctcttcgccaccctggcgctgatgaagcagctctattatccggagtggagccagccggtcctgcagatgttgtttgtgggcgcttacatcctctttgccccctttgtcggtcagttcgccgatagctttgccaaaggccgggtgatgatggtggccaacggcctgaaactgctcggcgccggctgcatctgcttcggcgtcaatccgtttatcggctatacgctggtggggattggcgccgccgcctattcgccggccaagtatggcattctcggcgaactcaccaccggcgataagttagtgaaggctaacggactgatggagtcctcgaccatcgcggcgatcctgctgggctccatggccggcgggatcctcgccgactggcacgtgctggcggcgctgatcgtctgcgcgctggtctacggcggggcggtagtggctaacctgtggatacccaggctgccggcagcgcgtccggggcagtcgtggcgttttaagccaatgacgcacagcttcttcagcgcctgccggacgctgtggcgcaacggcgaaacccgcttttcgctgatgggcaccagcctgttctggggcgctggcgtgaccctgcgtttcctgctggtgatctgggtgccggtggcgctgggcattaccagcaacgccatgcccacctatcttaatgcgatggtggcggtggggattgtgctgggtgccggggcggcggcgaagctggtgaccctggagacggtgtcgcgctgtatgccggccgggattttgatcggtatcgcggtgatagcctttgcggtgcagcagtcgctgctgccggcgttcggtctgctgctgctgctcggggtgttcggcgggttctttatcgtaccgctgaacgcgctgctgcaggagcgtgggaaacattcggtcggggcaggtaacgccattgcggtacagaacctcggtgagaacgtggcgatgctgctgatgctggggctctattccctggcggtgagcgtgggcgttccaccggtcgccgtggggataggctttggcgcggtattcgccgtggccattgccgcgctgtgggtctgggggcggcgtaaataa

SEQ ID NO: 213552 - DNA, 1041 bp, Klebsiella pneumoniae
atgcagtatcaccgtatcccacacagttctcttgaaatcagcaccctcgggctgggaaccatgacttttggcgaacagaatagcgaggccgatgcccaccagcagctcgattacgcggttgccaacggcatcaacctgatcgatgtcgctgaaatgtacccggtcccgccgcgcccggaaacccaggggctgactgaaacctacgtcggcaactggctggcgaaacgcggcaatcgcgaaaagctggtgctcgcctcgaaagtcagcgggcccgcgcgcaataacgacagcagcattcggcccaatcacgtcctggaccgcaaaaatatccgcgaggcgctgcacgccagcctgaagcggctgcagaccgattatctcgatttatatcaggttcactggccgcagcggccaaccaactgctttggcaagctgggctatacctgggccgacgccgcgcccgccgtgacgctgctggataccctcgaagcgctgaccgagttccagcgcgccgggaagatccgctacatcggtgtgtcgaacgaaaccgccttcggcgtgatgcgttatctgcacctggcggataagcacgacctcccgcggatcgtgactattcagaatccttacagcctgctgaaccgcagctttgaagtcggcctcgcggaagtgagtcagttcgaaggcgtggagctgctggcctactcttgtctggctttcggcacactgaccggcaagtatctcaacggtgcgaagccggcaggggcgcgcaatacgctgttcagccgctttacgcgctacagcagcgagcagtcgcagaaagcggtagcggcctatgtggatatcgccaaacgccacggcctcgatccggcgcaaatggcgctggcctttgtgcgtcggcagccgtttgtcgccagcaccctgctgggggcgacgaccatgacgcagctgcaggccaacgtggaaagtttgcagcttgagctaagcgaagaggtattagcggagattgaggcggtgcatcaggtttatacctacccggcgccgtaa

SEQ ID NO: 213553 - DNA, 219 bp, Klebsiella pneumoniae; identical to SEQ ID NO: 134704

SEQ ID NO: 213554 - DNA, 714 bp, Klebsiella pneumoniae
atgttatttgcatggataaccgatcctaacgcctggctggcgctgggcacattgacgctgctggagatcgtgctcgggatcgacaatattattttcctctctctggtcgtggctaagctccccaccgcccagcgcgcccatgcgcgccggatcggtttgatgggcgcgatggtcatgcgtctggcgctgctggcctcaatcgcctgggtcgttaagctgaccaacccgctctttaccgttttcggtcaggagatctcgtttcgcgatctgatcttgctgctcggcgggctattccttatctggaaagccagtaaagagatccatgaatctatcgaaggtgaagaggaggggctgaagaccaacgtccactccttcctcggcgccatcgtgcagatcatgctgctggatatcatctttagcctcgattcagtgatcaccgccgtcggcctgtcggatcatctgttcatcatgatggcggcagtggtgatcgcggtgggggtgatgatgttcgccgcgcgacccatcggcgattttgttgaccgtcatccttcggtgaaaatgctggcgctgtcgtttctgatcctcgtcggctttaccctgatgctggaaagcttcgacgtccatgtgccgaagggatacatctatttcgccatgttcttctctatcgcggtggagagccttaacctgctgcgtaataagaaaaacccgctgtaa

SEQ ID NO: 213555 - DNA, 696 bp, Klebsiella pneumoniae
atgcccgctatcgctccgctcgcctcaccgccgcaaagtcaggaacagctgctggcccaggcccgccagctggccggctattcgctgggcgagctggcggcgctggcggggatccccattccgcgcgatctgaagcgcgataaaggctggacgggcattctgctggagctgtggctgggcgccagcgcaggcagtaaacccgagcaggatttcgccgcgctgggggtcgagctcaaaacgatccccatcgacagccggggacgcccgctggagaccaccttcgtctgcgtcgccccgttaaccggcaatagcggcgtcacctgggagagcagccatgtacggcataagctgcagcgcgtcctgtggatcccggtggagggtgaacgcaccatcccgctggcggcgcggcgcgtcggcgcaccgctgctgtggagcccggacgaagacgaggagcgccagctgcgcatggactgggaagagctgatggatctcattgttctcggtgaggtcgagcgcattaccgcccgccacggcgaggtgctgcagttaagaccgaaagccgccaacagcaaggcgctgaccgaagccatcggcgcccgcggggagacaatcctcacgctgccgcgcggtttctatctgaaaaagaattttaccgccgctctgcttgcccgccatttcttgttacaacacgattaa

SEQ ID NO: 213556 - DNA, 531 bp, Klebsiella pneumoniae; identical to SEQ ID NO: 134701

SEQ ID NO: 213557 - DNA, 2247 bp, Klebsiella pneumoniae
atgctcactcggttgcgagaaatagtcgagaaggtcgcgagcgcgccgcgtttaaacgaggcgctggatattctggtgacggatgtctgccaggcgatggagacggaagtctgctcggtttacctggctgacaatgaccgacgctgctattacctgatggccacccgcgggttaaaaaaacctcgcgggcgcaccgttgcgctggcgttcgatgaaggcctggtggggctggttggccgcctggcggaacccatcaacctcgccgatgcgcaaaaacaccccagcttcaaatatatccccgccgtcaaagaggaccgcttccgcgccttccttggcgtgccgatcattcagcgccgccagctgctgggcgtgctggtggtccagcagcgcgagctgcgtcagtttgatgaaagcgaagagtctttcctcgtcaccctcgccacccagatggcggcgatcctctcccagtcccagctgaacgccctgttcggccagtatcgtcaaacgcgcattcgcgctctgccggcctcttccggggtggcgatcgccgagggctggatggacgtcagcctgccgctgatggagcaggtgtatgaagcctcgacgctggacaccgcctcggaacgcgaacgcctgaccggtgcgctggaagaggcggccaacgagtttcgtcgctacagcaaacgctacgctgccggggcgcaaaaagagacggcggcgatcttcgatctctactcgcacctgctctctgacgcccgcctgcgtcgcgagctgtttgccgaagttgacaaaggcgccgtcgccgagtgggccgtcaaaaagatcattgagaagttcgccgaacagtttgccgcgctgagcgacggctatttgaaagagcgggccggcgatctgcgtaccctgggccagcgtctgctgttccatctcgacgacagtattcaggggcccaacacctggccggcgcgcattatcctcgtggcggacgagctgtcggccaccaccctcgccgaagtgccgcaggatcgcctggccggcgtggtggtgcgcgatggcgccgccaactcccatgccgctattatggtgcgggccctcggcatcccaacggtgatgggcgccgatattcagccctcgctgctgcatggccatacgctgattgtcgatggctatcgcggtgaactgctggtggatcctgaacctgtcctgttgcaggagtatcagcgccttatcagcgaagagaacgaactcagccgcctggcggaggacgatctccagcgcgcgtcggagctgaaaagcggcgagcgggtgaaagtcatgctcaacgccggcttaagcccggagcacgaagagaagctcggcagctttgttgacggcattggcctctaccgcaccgaaattccctttatgctgcagagcggcttcccctcagaagaggagcaggtcgcccagtatcagggcatgctgcagatgtttaacagcaaaccggtgaccctgcgtaccctggacatcggcgcggataaacagctgccgtatatgccgatcagcgaagagaacccgtgcctcggctggcgcgggatccgcatcaccctcgatcagccggagatctttttgatccaggtgcgggcgatgctgcgcgccaacgccgccaccggcaacctcagcattttgctgccgatggtgaccagtctggaggaggtggatgaggcccgtcggctgatcgatcgcgccagccgggaagtggaagagatgatcggctacgccatcccacgtccgcgcctgggggtgatgctggaggtcccgtcgatggtctttatgctgccgcagctggccagccggatcgattttatctcggtagggacgaacgacctgacccagtacctgctggccgtcgaccgcaacaatacccgggtcgccagcatgtatgacagcctgcatcctgcggtattgcgtgcgctggcgatgatcgcccatgacgcggagcgctttggcatcgatctgcgcctgtgcggcgagatggcgggcgacccgatgtgcgtgacgatccttatcggcctcggttaccgccatctgtcgatgaacggccgctcggtggcgagggtgaagtatctgctgcgccgcattgatatcgaagaggcgcaggagctgtcgcgtcgcagcctcgatgcgcagatgaccgccgaggtgcgccatcaggtggcggcctttatggagcgtcgcggtctcggcggcctgatccgcggcgggcggtag

SEQ ID NO: 213558 - DNA, 876 bp, Klebsiella pneumoniae
atgaatagtggctacctgcattttccggagttcgatccggtcattttttctctaggcccggtctccctccactggtacggtttgatgtacctggtgggctttgtctttgcgatgtggctggccacccgtcgggcgaatcgtccgggcagcggctggacgaaaaatgaagtggaaaacctgctctacgcgggcttcctcggcgtcttcctgggcggccgtatcggctacgtgctgttttacaacctgccggtatttcttgccgatccgctgtatctgttccgcgtctgggacggcggcatgtcgttccacggcggcctgatcggcgtgatcctggtgatgattatcttcgccagacgcaccaaacgcaccttcttccaggtctccgattttatcgcgccgctgatcccgtttggtcttggcgccgggcgtctgggcaactttatcaacggcgagctgtggggccgcgtagacccgagcttccactacacgatgattttcccgggctcccgtgccgaagacctggcgctgctgccgacgcatccggaatggcaatcgctgttcgatacctacggcgcgctgccgcgtcacgcgtcgcagctgtacgagctggcgctggaaggcgtggtactgttcctgatcctcaacctgtttatccgtaaaccgcgccctaccggctccgtttccggtctgttcctgattggctacggcctgttccgcatcatcgtggaattcttccgccagcccgacgcccagttcaccggcggctgggtgcagtacatcagcatggggcagattctttcgatcccgatggtgcttgcgggtatcattatgatggtttgggcttaccgccaccgtccgcagcaacagaattcttga

SEQ ID NO: 213559 - DNA, 795 bp, Klebsiella pneumoniae
atgaaacagtatcttgatttgatgcagaaagtgctcaccgagggcacgccaaaaaatgaccgcaccggcactggcacgatctccattttcggccatcagatgcgttttaacctgcaggaaggcttcccgctggtgaccaccaagcgctgtcatttacgctccatcatccatgaactgctgtggttcctgcagggcgacaccaacatcgcctatctgcacgagaacaacgtcaccatctgggacgagtgggcggatgagaatggcgacctggggccggtctacggcaaacagtggcgttcctggcctgcgccggacggccgccatatcgaccagatcagcacggtgatgaaccagctgaaaaacgacccggactcccgccggatcatcgtctcggcatggaacgtcggcgagctggataaaatggcgctggcgccgtgccacgccttcttccagttctacgtcgccgacggcaagctctcctgccagctgtatcagcgttcctgcgatgtgttcctcggcctgccgttcaatatcgccagctatgcgctgctggtgcatatggtggcgcagcagtgcgatctgcaggtcggtgatttcgtctggaccggcggagacacccatctgtacagcaaccatcttgagcagaccaacctgcagctaagccgcgaaccgcgtccgctgccgaagctggtcatcaaacgcaagccggcgtcgatcttcgactaccgctttgaagacttcgagattgaaggttacgatccgcacccgggcattaaagcgccggtggcgatttaa

SEQ ID NO: 213560 - DNA, 552 bp, Klebsiella pneumoniae
atgcaaagcttttttgcgtatctggccgggaaagctattttccgtcgtcgcgccagagccaatcgccgcggcatactcgacgccatgaacagagaacatggctacaccctgatggaaaccctggtaacgctgacactgatgatgatcctcagcgtcggcggcctgtacggctggcagcgctggcagcagcagcaacgactgtggcaaaccgccgtccaggtgcgggattttctgctctttctgcgcgatgacgccaacgcctacaaccgggaccgcgtgcttcgcgtcggccaggacgaagtgggctggtgcctgagcgcggagggggaggggcctgactgcgcctcggggacatccttcacgctgcgcccgcgctggccggggatcactctggctggcgttacgcctggtctggggttttatggtctgcgcagcaccgcctgggcggggaatctgcggctgcagagcgcggccggcagctggagcattgtgatctcacactgggggcggattcgtttatgccgcagcgacagcgcaggagggtgtcagtga

SEQ ID NO: 213561 - DNA, 558 bp, Klebsiella pneumoniae
gtgagccgccgcggattttccctggcggaggcgcttatcgccatggccattggctcgctgctgctgatgggggcctgccgctttctgcctgccctgcagcgtcatattctgcgccagggcgaacagctggccctggagaacgagctgtggcagcgtgtgcatgccgtgggaaaacatctgcagcgcgccgggtactgccggggagcgtgcggcggagccgggctggagctagccgctggcggggagtgtctgattgtgcgctgggatgcgaacagcaacgggagatgggaaacttcccccgcggcagcggcggagagcaccggctttcgcctgcgcgacggcgcgctggagaccctgcgcggggccagcgactgccgcggcggcggatgggagaaaatcaccaacccggccgccatcgtggtgacgcgcttctcggtacaacgtcaggtcaccccgggcttcgcgccggagctgagcgtgacgctggcggcgcgctccgcgcaacagacgggcctgacgagcgaggttgagcagcgggtgacggggtataacctgtga

SEQ ID NO: 213562 - DNA, 408 bp, Klebsiella pneumoniae
gtgatccgccagcgtggaatgtcgtcgctgctgatggtgctcctgttgctgaccctcggcagcctgttactcgaggggcttaacctgcagcagcgggtgctgctggcgcaaaccgccagcgaaacgcaggcgatccgcgatacggcgatagcccattccgcgctgcagtggggaaaacagcaggtctggtcggcgcaggtggcgctggcctgccgggagcaggcgccgcagggctggcgcgcctgtctgcgtatcttcggcgacggttcactggtgctcagcagcgccagcggcgaggtgcaggtctggcagtccggcgaggtgcgcggcgggcaggtgcgtttttccgcccacggctggagcgatttttgcccgctcagagaggcgagcttatgtcaaatgccctga

SEQ ID NO: 213563 - DNA, 324 bp, Klebsiella pneumoniae; identical to SEQ ID NO: 135551

SEQ ID NO: 213564 - DNA, 3378 bp, Klebsiella pneumoniae
atgttaagggtataccactcaaaccggctggatgttctcgaggcgttgatggagtttatcgtcgagcgccagcggctggatgacccttttcaggccgaaatggtgctggtgcagagtaccggcatggcgcagtggctgcagatgaccctggccgcgcgctttgggattgccgccaatatcgagttcccgctgccggcgagctttatctgggatatgttcgtgcgcgtcctgaaagatattccgggcgaaagcgccttcagcaagcagagcatgagctggaagctgatgaccctcctgccgcagcacctggaggaagacgattttatcctgctgcgccagtatctgagtgatgacggcgacaagcgcaagctgtttcagctggccgcccgggtggcggacctctatgaccagtacctcgtctatcgcccggagtggctgatgcgctgggaggccggccagcgggtggaaggtctcggcgatgcccagcagtggcaggcgccgctgtggcaggcgctggtgagctacaccgccgagctggggcagccgcagtggcaccgcgccaatctctaccagcgctttatcagtaccctggaaaaagcggacgaaccgcccgccgggctgccgtcgcgcgtcttcatctgcgggatttccgcgctgccgccggtctatcttcaggcgctgcaggcgctgggtaagcatgtcgatgtctacgtattgtttaccaacccctgccgctactactggggagacattaaggatccggcgttcctggcgaagctgctgtcgcgccagcggcgccatcaccgcgaggcgcgcgcgctacccctgtttcgcgacaccgagcaggcgccggggttgtttaatgacgccggggaacaggatgtcggcaacccgttgctcgcctcctgggggaaactggggcgcgactatatctacctgctggcggggctggagcgctatgaggagctggacgcttttgtcgacatcgcccccgataacctgttgcataacctgcagtcggatatccttgaactacgcaacgcggcggtggccgggcagagcgcagaggcattcgcccacagtcgcgacaaacgtccgctgacgctggatgaccgcagtctgagcattcacgtctgccacagtccgcagcgcgaagtggaggttctgcacgataggctactggcgatgctggaggcggatccgacgctcacgccgcgggatatcatcgtcatggtggcggatatcgacagctacagcccctatatacaggcggtgtttggcgccgccagcggcgatcgctggctgccgtgggcgatctccgaccgtcgcgcccgagagtcgcacccggtgctgcaggcgtttattacgctgctctcactgccggacagccgcttcgccagtgaagatgtgctggcgctgctggacgtcccggtgctggcggcgcgctttaatatcacggaagaagggctgcgctacctgcgccagtgggtgaacgagtccggcgtccgctggggaatggatgacgacaacgtccgtgagctggacctgccggcgaccgggcagcatacctggcggttcggcctcacccgcatgctgttgggctacgcgatggacagccgcgagggagaatggcagtcggtgctgccgtatgacgaatccagcggtttgatcgccgagctggtgggcaacctcgcgtcgctgctgatgcagcttaatctgtggcgacgcggcctggcccagcagcggccgctggcggagtggctgccggtctgtcgcgatctgctgaatgactttttcctgccggacagtgagaccgaagcggcgctggcgctgattgagcagcagtggctggcggttattgatagcggtctggaggcgcagtatggcgagcaggtgccgctgacgctgctgcgcgatgagctggcccagcgcctcgatcagcagcggatcagccagcgctttcttgccggcccggtcaatatctgtaccctgatgccgatgcgttcgatcccctttaaggtggtgtgcctgctggggatgaatgacggggtttatccgcgcacgctaccgccgctgggctttgatttaatgagccagaagccgcagcgcggcgaccgcagccggcgcgatgatgaccgctatctgttcctcgaagcgctgatgtccgccgagcagacgctgtatatcagctatatcggccgttcgatccaggacaacagcgagcgttttccttcggtgctggtgcaggagctggtggattatatcggccagagccactgtctcgccggtgacgaagagcttgactgcgacgccagcgaagcgcgggttaaagcccatatcacccatctgcatacgcgcatgccgttcgacgttgccaatttccaggaagacgagaacaagagctacgctcgtgaatggctggcggccgccggccagcagggagaggcgcatagcgattttatacagccgctcaccgcgccgccgattgacagcctgccgttcgatcagcttctgcgcttctggcagcacccggtacgcgcgttctttcagcagcgtttgcgggtcaatttccgcgccgaagaggacgatattccagacgacgagccgttcactcttgaagggctgagccgttatcaactgaatcagcaactgctcaatacgcttattgaggagcaggacgtctcggctatgttccgccgctttcgcgccgccggcgagctgccgtatggcgcctttggcgagctggtctgggagacgcagcgcctggagatgcaggcgctggccgagcgggtgatggccgagcgccagcaggcgcagagcatggagatcgatctgcagtgcggcggcgtgaacctgaccggctggctgcagcaggtgcagccggacggtctgctgcgctggcggccttcgctgctgagcgtctcccaggggatgcaactttggctggaacaccttgtctactgctccagcggcggcaccggcgagagccggctgtttgtgcggaaagagggagagtggcgctttccggcgctggcgcccgccgaggcgcaggcgtaccttaacgagctggtggatggctatttgctggggatgtcgcagccgctgctgctgctgccggaaagcggtggcgcctggctgaaagcctgttacgacgccgaaaaggatgtcatcttaatggacgaagagacgcagcagaaagcgcggagcaaattcctgcagacctacgaagggaacatggtggtcagcggggagggcgccgatatctggtatcaacgcctgtggcgttcgctggagccggcgcattacgaagaaatcattgcccagacgcagcgttatctgttaccgctatatcgttaccatcggtccacacaaatttaa

SEQ ID NO: 213565 - DNA, 2886 bp, Klebsiella pneumoniae
atgccccgcagtttatggttcaaggtttttgttgtgctggccgccctctgggcgccgtttagtcaggccgacaccggatggcagccgattcaggagacgatccgcaaaagcgaaaaagatacgcgtcagtatcaggcgatccgccttgataacgacatggtcgtgctgctggtttccgatccgcaggcggtgaaatcgctgtcggcgctggtggtgccggtgggatccctgcaggatccggcagatcatcaggggctggcgcattttctggaacatatgacgctgatggggtcgcaaaaatatccccagcctgacagccttgcagagtttcttaagctgcacggcggcagccataacgccagtaccgcgccctaccgcaccgcgttttatcttgaagtggaaaatgatgcgctggacggggccgtagatcgcctggccgacgccatcgccgcgccgctgctggataaaaaatatgccgaccgcgaacgtaacgcggtcaacgccgagctgacgatggcccggacgcgagacgggatgcgcatggcccaggtcagcgcggagaccatcaacccggctcacccggcggcccacttctcgggtggcaacctcgagacgctcagcgataagcccggcagcccggtgcttgatgcgctgcacaccttccgcgatagctggtactccgccaatctgatgaaagcggtgatctacagcaacaagccgttgccggcgctggcgcgcatggctgcggacacctttggccgcgtgccgaatcgtcagatcagcaggccggaaattaccgtcccggtggtcacggatgcgcaaaaaggcatcattattcactatgtgccggcgatgccgcgtaaagtgctgcgcgtcgagtttcgcatcgacaacaacagcgatcgcttccgcagcaaaaccgatgagctggtcacctatcttatcggcaaccgcagcccgggcacgctctctgactggttgcaaaaacagggtctggcggaaggtatccgcgccgattccgatccggtggtaaacggcaacagcggcgtactggcgatctcagccaccctcaccgacaaaggcctggcgcaccgcgatgaagtgacggcggccattttcagctacctcgacctcctgcgtactcagggcatcgacaaacgctatttcgacgaactggcgcatgtgctggcgctggatttccgctatccgtcgatcaaccgcgacatggactacgtggaatggctggcggacaccatgatccgggtgccggtcgagcatgcgctggacgtggtgaatattgccgaccagtacgacccgcaggcgatcaaagaccggctggcgatgatgaccccgcagaacgcccgtatctggtatatcagcccccaggagccgcataacaagacggcctactttgtcgatgcgccgtatcaggtggataagattagcgagcagacgttcgctgactggcagcacaaatcgcaggccatccagctgcggctgccggcgctcaacccctatattccggatgacttcacccttatcaaaagcgataaagcctggccgcatccgcagctgatcctggatgaaccgacgctgcgggtggtgtatgccccgagccagtattttgccagcgagccgaaggcggacatctccctggtgctgcgtaaccctcaggcgatggacagcgctcgccggcaggtgatgtttgccctcaacgattatctcgccggcatcgccctcgaccagctcagtaaccaggcggcggtcggcggcatttcgttctctaccggcgctaataacggattaatggtcaatgccaacggctatacccagcatcttccggcgctgttcagcgatctgttgcagggatacttcagctatacgccgaccgaggagcagctggagcaggccaaatcctggtatgcgcagatgatggattccgccgagaaaggcaaagcctacgatcaggcgattatgccgatccagatggtctcgcaggtgccgtacttccagcgcgaagtgcgccgggcgctgctgccctccattacccttaaagaggtgctcaactaccgcgccaacctgaaaaccagggggcgtcctgaactgatggtgataggcaatatgaccgccgatgccgccacgacgctggcccgccagatccagcagcagctgggcgctgacggcaacgaatggtgccgcaataaagacgtggtggtgaatcggcagcagctggcgatcttcaataaagcgggcaacagcaccgactccgcgctggccgcggtgtttgcgccgcccaacgtggatgagttcagtagcaccgccgccagcaccctgctggggcagatcattcagccgtggttctacaaccagctgcgtactgaagagcagctcggctacgcggtctttgccttcccgatgaacgtggggcgccagtggggcatgggcttcctgctgcagagtagcgataagcagccggccttcctctggcagcggttccaggccttcttccccaccgcggaggcgaagctgcgggcgatgaagccggaagagtttgctcagctccagcaggcggtgataagccagatgctgcaggcgccgcagacgctgggcgatgaagcctcgaaactgagcaaagatttcgatcgcggtaatatgcgttttgattcacgtgataaagtagtggctcagattaaactgctgacgccgcaaaaacttgccgacttcttccatcagacggtggtggatccgcagggcatgacgatcttgtcccagatttccggtagccagaatggcaaagcggactatgcccagccgaaaggcggcaaagtgtgggaaaacgtcagcgcattgcagcaatccttacccctgatgcgagagaatgaatga

SEQ ID NO: 213566 - DNA, 3537 bp, Klebsiella pneumoniae
atgaccgacaccgctgagtctttggatcccctgcgcttgcccctgatcggcgagcgcctgatagaagcctctgcgggcaccggaaaaacctttaccatcgccgcgctgtatctgcggctgctgttggggctgggcggtgaggccgcctatccccgcgccatcagcgttgaagaactgctggtggtgacctttaccgaggcggcgaccgaagagctgcgcggccgtatccgcagcaacatccacgaactgcgcatcgcctgcctgcgcggcgaatccgacaatccgctctacagcgcgttgttggcggagatcgccgataaagacgacgccgcgaagacgctgctgctggctgaacggcagatggacgaggcggcggtattcaccatccacggcttttgccaacggatgctgagccttaacgccttcgagtcgggcatgctgttcgagcaacagctgatcgaggatgaatcccgcctgcgctatcaggcctgcgccgatttctggcgccgccactgctatcccctgacccgcgatatcgcggcggtgatccacgacgtctggaaagggccgcgcgatctgctgaagtcccttgaccgctggctgcagggcgaagcgccgcagcttaagtcgccgccagcccctaacgagacgctggccgaacgccatcagcagatcatcgcccgcattgactcgctcaagcagcagtggcgcgagcaggtgggcgagatcgaaggcgtgctggaaaattccggccttgaccggcggaagtttaatcgcggcaaccagggcaagtggatggagaaagtgaacgcctgggcgcaggaagagacgttaagctaccaactgcccgacgcgctggagaaatttgcccagtcgtttctgctcgagcgcaccaaagccggtggcgaaccgccggtgcatcccctgtttagcgccgtagagtcgttgctggcctcctcgctgacgctcaccgatctggtgctggcgagagcgatggtcgagatccgcgatgcggtcgcccgcgaaaagcgccgccgcggcgagctggggtttgacgatatgctcagccggcttgacgaggcgctgcgcggcgacagcggcgagacgctggccagcgccattcgccagcgttttccggtggcgatgatcgatgaatttcaggacaccgaccctcagcagtaccggatttttcgccgcatctggcgccggcagccggagacggctctgctgctgatcggcgatcccaagcaggccatctacgcctttcgcggcgccgatatctttacctatatgaaagcgcgcggcgacgttgccgcgcactacaccctcgataccaactggcgctcctcgccgggcatggtgggcagcgtcaatcggctgttcagcctcagcgataaccccttcatgttccacgagatcccgttcctgccggtgaaggcggcggcgaagaacaaggggctgcgctttaccgttgacgcggcggacgtaccggcgatgaacgtctggctgatgcccggcgacactgtcgggtctggcgattatcagacctttatggcgcagctctgcgccacgcagatccgcgactggctgagcgccggtcagcgggggcgcgcgctgctgtggcgcggggaaacctcgcgcccggtacaggcttcggatattaccgtgctggtgcgcaaccggctggaggcggcgcaggtgcgtgaagcgctgcagacgctgggcattccctcagtctacctctccaaccgcgacagcgtttttgagacgcttgaggcccaggagctgctctggctattgcaggcggtgctggccccggagcgggaaaataccctgcgcagcgcgctggcgacgtcgatgtttggcctgaccgcgctggatattgaaaacctgaaccaggatgagcaggcgtgggacgcgctggtggaagagtttagcgaataccgccagatttggcggcagcgcggagtgatgccgatgctgcgggcgttgatgacagcccgacatatagccgagaatctactggcgacacgcggcggcgagcggcgcttaaccgacattctgcacatcagcgaactgctgcaggaggcggccagccagctggaaagcgagcatgccctggtgcgctggctggcgcagcatatcgccgagccggacagcaacgccgccagccagcagatgcgtctcgaaagcgataagcacctggtgcaaattgtcaccattcacaagtcaaaagggctggaataccccctggtctggctgccgtttatcgcccggtttcgtaaacaggaccaggcgttttaccacgatcgcgagacgttcgcggcggtgctggatctgggccaggatgaggccagcctcgagctggcggaggcggaacgactggcggaagatctgcgcctgctgtacgtggccctgacccgcgcggtctggcactgcagcctcggcgtggcgccgctcagcagccggaaatccggcaacagcgatttccacctcagcgcgctgggacggctgctgcaggcgggcgaagccatggacgccgccgggctggctgcgcggctggcggacttctgtcatggcgatattgcattacagattccgggcgaactggatctcaccccgtggcaggcgcccgcggcgaccatcccgcgattgtcggcgcgcgagctgcagcgccgcatcgccgacgactggcgggtgaccagttactccggactgcagcagcatggtttcagcggcgggcaggatttgctgccgcgtctggatgttgatgccgccggcgtcggcgaagtcgtggaagagccgcagctgactccgcaccagttcccgcgcggcgccgcgccggggaccttcctgcacagcctgtttgaggagctggacttcacccagccggtgccggaagggtggatggcggagaagctgcagctgagcgggtttgacgcgcagtgggcgccggtgctgaccgactggctggggggcgtgctgaagacccgcctgccggggccggatatcgcgctcaatcagcttgcggcgcgggataaacaggtggagatggcattttacctgcccatcgcccagctgctgacggcggagcgccttgacgcgcttatccgccagtacgatcccctctctgccgacacgccgccgctggatttccgccaggtgcgcggcatgctgaagggctttatcgatctggtcttccgtcacgaaggccgttattacctgctggattacaaatccaactggctgggggaagatcgcgaggcctacacccggccggcgatggagcaggcgatgcgtgcccaccgctacgatctacagtatcagctgtatagcctggcgctgcaccgctatctgcgccaccggctggccgattatgactatgaccgccacttcggcggcgtgatttatcttttcctgcgcggcatggacgggcaggagggggggcaggggatcttcaccacccggccggtgcgaccgctgattgacggtctggatcagctttttgccggagaaactcaggaggaggcctcatga

SEQ ID NO: 213567 - DNA, 1845 bp, Klebsiella pneumoniae
atgactttcgaacaactactgctggcggcggtggagcagcgtctgctgcggccgctggacgtccagtttgccctgatggtggcgcaaaacgacccgccggcggtcaagctggcggcggccttgctgagccgggatgccggcgaggggcacgtctgtctgccgctctcgcggttgagcggcgacgaggcgctgagcggtaaagcgggggagatccgcgatcggctgctggccgaagccggcgcgccggaggactggcccgggctactgctcgcttcgtcggcggtgagctgcggcgatgctccggcgccgatgattttgtgcggcgaccggctctatctgaatcggatgtggcgcaacgagctgaccgtcgcccgcttcttcaatgaagccaaccgggtgctggagatggatgaggcccggctggcgtcaaccctgaatgccctgttccctgccaccggcgaaaccgactggcaaaaagtggccgcggcggtggcgctgacccgccgcatctcagtgatctccggcggtcccgggaccgggaagaccaccaccgtggcgaagcttctggcggcgctgatccagatcgaagacagcccgcgctgtcgtattcgcctggcggcgccaaccgggaaagcggcggcgcgtctgaccgaatcgctgggcgcggcgctgagaaaattgccgctgaccgacgcgcagaaagcgttgattcccaccgaggccagcacgctgcatcgtctgctgggcgcccagccaggcagccagcggatgcgctatcacgccggcaacccgctgcatctggacgtgctggtggtggatgaagcctcgatgatcgacctgccgatgatgtcgcggcttatcgacgcgctgccggcccacgggcgggtgattttcctcggcgatcgcgaccagctggcctccgtagaagcgggggcggtgctgggggatatctgcgcctgggcgagttcgggctataccgccgcgcgggcgcaggagctgacccggctgaccggttcgccggtgccggcgggcgagggggctatcgcgggcgcgctgagagacagtttgtgcctgctgcaaaagagctatcgcttcggcagtcactccggcatcgggagcctggcgcgggcggtgaacgctggcgcgcgcgcggaggtgaaggccacgctgcgccagccgtttgacgatatcgcgcttcatcccctcagcacgaccgaagagtacgaagccatgctcggcgcggctcagcagggctatgagcgctacctgcagctgcgccgcgagcgggccgaaccgcaggccatgctggccgctttcagcgaattccagctgctgtgcgcgctgcgcgaggggccgtacggcgtgagcggcgtcaatgagcggctggagcagcggctcaaccgccagcgggcgatcgccctgccgcgccactctcgctggtatgatggccgaccgatcatgatatcgcgcaacgacagcgcgctggggctgtttaacggcgatatcggcatcgccctggagcgcaacggcgagctgcgggtgtggttcctgatgcccgacggcgccatcaagtcggtgcagccgagccgtctgccggagcatgataccgcctgggcgatgaccgtgcataaatcgcagggctcggagttcgaacacgcggcgctgatcctgccggcgcgcagcgtcccgctggtgacccgcgaactggtctacacggcgatcacccgcgcgaaacggcggttgtcgctctatgccgacgagcaggtgctctcccaggccattgtgacgcgcaccgaacggcgcagcggcctggcggagattttcgccgggcgcgaagccccctga

SEQ ID NO: 213568 - DNA, 321 bp, Klebsiella pneumoniae; identical to SEQ ID NO: 135546

SEQ ID NO: 213569 - DNA, 1332 bp, Klebsiella pneumoniae
atggtgaaggaacgtcgcactgaactggtagaaggattccgccattctgttccctatattaatgcccatcggggaaaaacgtttgtcatcatgctgggcggcgaagccattgagcatgaaaatttctcaaatattgtcaatgacataggattattgcatagcctgggcattcgcctggtggtggtctatggcgcccgcccgcagattgacgctaacctcgccgagcaccatcacgagccggtctatcacaagcagacgcgagtgactgacgccaaaacgctggagctggttaagcaggcggcggggatgctgcagctggagatcaccgcccgtctgtcgatgagcctcaacaacaccccgctgcagggggcccatatcaacgttgtcagcggcaactttatcattgcccagccgctgggcgtcgatgacggcgtcgattattgccacagcggacgcattcgccgcattgacgaagaggcgattcatcgtcagctcgacagcggcgccattgtgctgatggggccggtcgcggtgtcggtcaccggcgagagctttaacctgacttcggaagagatagctacccagctggccatcaagctgaaggcggagaaaatgatcggcttctgttcgtcgcaaggggtttacaaccaggccggggaaattgtctccgaactgttccctaatgaggcgcaagcccgcgtcgaagagctggaagcagacgaagactataactccggcaccgtgcgcttcctgcgcggggcggtgaaggcctgccgcagcggcgtacggcgctgccacctgatcagctatcaggaaaatggcgcgctgctgcaggagctgttttcacgcgacggcatcggcacccagatcgtcatggagagcgcggagcagatccgtcgggcgaccatcaatgatatcggcggtattcttgagctgataagcccgctcgagcagcagggcattctggtacgccgttcccgcgaacagctggagatggagatcgacaaattcaccattattcagcgcgataacaccaccatcgcctgcgccgccctctatcctttcccggaagagaagatcggcgaaatggcctgcgtggcggtgcatccggattaccggagctcgtcgcggggagaggtgctgctggagcgtattgccgctcaggccaggcagatgggactgagcaaactgttcgtgttaaccacccgcagcatccactggttccaggagcgcggcttcacgccggtggatatcgacctgctgccggagagtaaaaagcagatgtataactatcagcgccggtcgaaggtgctgatggccgacctcgcttaa

SEQ ID NO: 213570 - DNA, 1254 bp, Klebsiella pneumoniae
atgtcgggaaacaactcaggattaagccgtcgccgtctgttgcagggcgcgggcgccatgtggttaatgagcgtgagccctgtcgggttggccgccgccgcgcgggtggtcgccgttcgcgtctggccagcatcgacctacacgcgtgtcacggtagaatcgaatcatgtgctgaaataccggcagtttgccctcagtaatccggaacgagtggtagtggatctggaaggggttaacctgaactctgtgctgaaaggcatggggggccagatccgcgctgacgatccctttattaagtccgcccgggtgggccagtttgatccgcaaaccgtgcgcatggtcttcgaactcaagcagaacgttaagccgcagctgtttgccctcgcgccggtggccggctttaaagagcgtctggtgatggatctctaccccgccaacgctaccgatgttcaggatccgctgctggcgctgctcgaggattacaacaaaggcaatctggagcggcaggtgccgccggcgcaaagcgggccgcagccgggcaaagccgggcgcgaccggccgattgtcatcatgctcgatcccgggcacggcggcgaagactccggcgccgtggggaagtatcgcacccgcgaaaaagacgtggtgctacagatcgcccgtcgcctgcgggcgctgatcgacaaagaaggcaatatgaaggcctatatgacccgcaacgaagacgtgtttatcccgttgaaagtgcgtgtcgccaaggcgcagaagcagcgcgccgacctgttcgtgtcgattcacgccgacgcctttaccagccgccagcccagcggctcttcggtgtttgccctctccaccaagggggccaccagtaccgcggcaaaatatctcgcccagacgcagaacgcctcggatctgatcggtggggtcagcaagagcggcgaccgctatgtcgaccacaccatgttcgatatggtgcagtctctcaccatcgccgacagcctcaaattcggaaaggcggtgctggagaaaatgggcaatatcaataatttgcacaagaatcgggtagagcaggcgggctttgcggtactgaaggcgcctgatatcccctccattctggtggagacggcgtttatcagtaacgtggaagaagagcggaaactgaaaacggccaaattccagcaggaggtggccgagtcgatcctcgccgggattaaagcctacttcgccgacggcgcgacgctggcccgccgcggataa

SEQ ID NO: 213571 - DNA, 1077 bp, Klebsiella pneumoniae
atggccttactgaaaagcgcccatggcggcaatatccgcgaggccgccgccctgctgggcatagcccccggcgagctgctggattttagcgccaacatcaatccgctggggatgcctgcctcgctcaggcaggcgatcgttgacaacccgggctgcgccgaacgctaccctgacgtcgagtatcaacagctgcatcaggcgctggctgcccaccatcagttgccgacggcgcatatcctcgccggcaacggcgaaactgaatcgatcttcaccctcgtccacggccttaagccgcggcgggcgatgatcgtcattcccggtttcgcggagtaccggcgggcgctgcagacggtggactgcgaggtggtggagtatgccctgcgggagcgcgatggctggcagctgaccgacgcgatcctcgatgccctgactccggcgctggactgcctgtttctctgcaccccgaacaaccccaccggcctgctgccggagcggggcctgctggaagccattgcgcagcgctgccgagcgctgaacatcagcctgatcctcgatgaggccttcctcgactttatccccgaccagccggggtttattcctctgctggcgcagcatccgcacgtctgggttttgcgatcgctgaccaaattttatgccattccggggctgcgtctcggctacctgctgaacgctgatgcccaggcggtggcccgactgcgcgcgcgacaaatgccgtggtccatcaacgcctatgccgccctggccggggaaattattctccaggatcgggcgtatcagcgggccacctggcagtggctgcaggaggagggagcacgtttctatgcgcagctgcaggagatggccgggctgaccgtatggcccgggcgtgctaactacctgttcttgcgctgcgacagacccgattttgacctgcaatatgccctgctgcgccagcatgtgctgatccgcagctgcgccaactacccggggctggatagccgctatttccgcgtggcgatccgcagcgccgaggaaaacgaccagctgctggtggcgttgcgccgggtgctggcctga

SEQ ID NO: 213572 - DNA, 903 bp, Klebsiella pneumoniae
atgcgccctggcgaaggtaagcggaaaggtgaaaacgtggctgttgcacaatgtcccgcctcgtgcggagaacttatccagggctggatcctcggcagcgaaaagctggtctcctgtccggtggactggtacagcaccgtcgaggtcgagaccggagtaccgcgaaaagacgagcggccgctgtcgcgggcgatggtcgaccagctgctggcccactggggctaccccccagcgctgagccagcagatccgcatcaccctgcactcaacgatcccagtggccaaagggatggccagcagcaccgccgatatcgctgccaccgccgtcgccaccgcccatcatctgggccatctactggatgagccgacgctggcgcgcctgtgcgtcgcgctggagcctaccgacagcaccctgtttcgccagctgacgctgttcgaccataataccgccgccacgcaaatcgcctgtccccctccgccggcgctcgacctgttagtgctggagagcccgctgacactgcgcaccaccgactatcaccagctgccgcgcgagccgggcctgttggcaaacgcctcccggctgcagctggcgtgggagaaagttcaacaggcctgccactgcggcagcccgcagctgctgggcgaagcagcaaccatcagcgccattgccagccagcagctgttgcctaagccggggtttgacgcgctgctggacctggtggaaagcgcagggctctatggtctcaacgtggcgcacagcggcagcgtcgtcggcctgctgctggaccgccgtcggcatgacgtcgaatttctgcaatggcggctggcagacagcgacatcgccgcccactggccgcagcagcatctgttggcgatggtgcccgggggcgtcatcctgcagtag

SEQ ID NO: 213573 - DNA, 1215 bp, Klebsiella pneumoniae
atgacctataaaatcatggcgattaacgccggcagctcctccctgaagtttcagctgcttaacatgccgcagggggcgttgctctgtcaggggttgatcgaacgtatcggcctgcccgaggcccgcttcacgctgaaaacgtcggcacagaaatggcaggagacgctgcccatcgccgatcaccatgaggcagtgaccctgctgctggaggcgctgaccggccgcgggatcctgagcagcctgcaggagatcgacggcgttggccaccgcgtcgcccacggcggcgaacgcttcaaagacgccgcgctggtctgcgacgataccctgcgggagatcgagcgcctggcggagctggcgccgttgcataacccggtcaatgcgctgggcatacgtctctttcgccagctgttacccgcggtaccggcggtggcggtttttgataccgcctttcaccagaccctggcgccggaggcctggctctatcccctcccctggcgctattacgccgagctgggcattcgccgctacggttttcacggtaccagccatcactatgtcagcagcgcgctggcggaaaagctgggcgtaccgctgagcgccctgcgggtagtaagctgccatctgggcaatggctgtagcgtctgcgccatcaaaggcgggcaatcggtgaatacctcaatgggctttactccccagtccggggtgatgatgggcacccgcagcggcgatatcgacccgtcgattcttccctggctggtggagaaagaagggaaatccgcccagcagctcagccagctgctgaataatgaatccgggctgctgggcgtctccggcgtgtcctctgattaccgcgacgtcgaacaggcagccgacgccggcaacgaacgggcggctctggcgctgtcgctgtttgccgaacgcattcgcgcgactatcggcagctatatcatgcagatgggaggtctggacgcgctgatctttaccggcggcataggcgagaattccgcccgggcgcgggcggcgatctgccgcaatttgcattttctcggcctcgcgctggacgacgagaaaaaccagcggagcgcgacctttattcaggcggataatgcgctggtcaaagtggcggtgatcaacaccaatgaagagcttatgattgcccgcgacgtcatgcgtcttgcattgccgcaggcgcgcgagctggcggtgtcggcataa

SEQ ID NO: 213574 - DNA, 441 bp, Klebsiella pneumoniae; identical to SEQ ID NO: 135540

SEQ ID NO: 213575 - DNA, 351 bp, Klebsiella pneumoniae
atggaaccgcaaacccctaccgaacgcatgatccaggagtatgtcccgggcaaacaggttactctggcgcatctcattgccaatcctggcaaagatctgttcaaaaagctgggtctgccggacgcggtctccgccatcggcattcttaccattacccccagtgaagcatcgattatcgcctgcgacatcgctaccaagtccggcgcggtggagatcggttttctcgatcgcttcaccggcgcggtggtgttgaccggcgatgtctccgccgtggagtacgcgctcaggcaggtcacccgcaccctcggtgagctgatgcgcttcaccgcttgcccaattacccggacctga

SEQ ID NO: 213576 - DNA, 555 bp, Klebsiella pneumoniae
atgacccaggctatcggaattttagaactgaccagcatcgccagggggatggagctgggcgacgtcatgctgaaaagcgcgaacgtacagctcctgctctgcagaaccctttgccccgggaaattcctgctgatgctcggcggcgacgtcggcgccgtgcagcaggcaatcgccgccggcaccgcgcgcgccggggagatgctggtggacagcctggtgctggccaacattcaccccagcgtactaccggcgatcagcggtctcaacgtggtcgggcagcggcaggcggcggggatcgtcgaaacctggagcgtggcggcgtgcatcagcgccgccgaccgcgcggtgaaagcggccaacgtcaccctggtgcgggtccatatggcgtttggtatcggcggcaaatgctacatggtggtggcgggtgatatcgccgatgtcgacaacgccgtcacggtggccagcgacagcgcaggcgagaaaggattactggttcaccgggcagtgatcccgcgaccgcacgatgcgctgtggcaacagctgatggagggataa

SEQ ID NO: 213577 - DNA, 1353 bp, Klebsiella pneumoniae
atgagtgaagcgatagtgccactatcaagcattgatgcagcggagatccgcgaacgcgttcgggccgctggcgtcgtaggagccggtggcgcaggctttccgacccacatcaaactgcaggcccgggtggacaccgtgctggtgaacgccgccgaatgcgaaccgatgctgaaggttgaccaacagctgatggctcagcaggctgaccgactgattcgcggcctgggttacgcgatgaccgccactggcgcccgggaagggatcattgccctgaaggcgaaatatgctccggcgattgcggcattaaccccacgactcccggaatgggcccggctgcatattctgcctgacgtctatccggccggggatgaggtgctcactatctggctggcgacgggacgccgcgtaccacctgccgcgctgccggtcagcgtcggcgtggtggtcaataacgtgcagacggtgctcaatatcgccagagccgtggaacagggctatccggtaactcgccggacgttgaccgtcaatggcgccgtcgcccgtccactgacgctggccgtaccactgggtatatcgctgcgcgaggtgctggatctggccggcggcgcgacggttgacgatccggggtttatcaacggcggtccgatgatgggctcgcttattacctccctcgagacaccggtcaccaaaaccaccggcggcctgctggtgctcccgggcaaccatcctttgatccagcgacggcggcaggatgaacgaacgctgctcgccatcgcccgcaccgtctgtgaacagtgccgtttatgcacagatttatgcccccggcacctgatcggccatgagctttcccctcatctgctggtgcgggcggtgaactatcgccaggcggccaccccgtcgctgctgctcagcgccctgacctgttcggagtgcaacgtttgcgagagcgtcgcctgcccggtgggtatttcccccatgcgcatcaaccgtctgctgaaacgtgagctgagggcgaaaaacctgcgctacgacggaccgctgcgtccggcggacgagatggcgaagcaccgcctggtgccggtcaagcggctcatcagcaaactgggacttgatccctggtatcaggaagcgccgctgacggcggtggaaccggaggtggcctgcgtcaccctgcccctgcgccagcatatcggcatcagcgccgtgccctgcgtcgcgccgggagagcgggtaacgcgcggccaggtgctggcggatatccccgccgacgccctcggcgcgccggtgcacgccagtattgacggcctggtctccaccatcacggagcaggccattacgcttgtaagaggttaa

SEQ ID NO: 213578 - DNA, 1113 bp, Klebsiella pneumoniae
atgcataccttttctctgcaaacgcgcctctacagcggcccgggcagcctggccgcgctgcagcgctttagccatcagcacatctggatcgtctgcgacggcttcctggcgcgctcgccgctgcttgaccgactgcgcgccgcgctgcccgccagcaaccgcgtcagcgtgttcagcgatattacaccggatccgaccattcacaccgtggcgaaagggatagcgcagatgcaggccctgcgtccgcaggtggtgatcggcttcggcggcggctcggcgatggatgccgccaaggctatcgtctggttcagccagcagggcggtctgcctgtcgacacctgcgtggcgatccccaccaccagcggtaccggttcggaagtgaccagcgcctgcgtcatcagcgacccggaaaaagggatcaagtacccgctgttccatgaggcgctctgtcccgacatggcgatcatcgacccgacgctggtggttagcgtaccgcccaccatcacagcccataccgggctggacgcgctgacccacgccctggaggcatgggtctcgccgcaggccaccgattttaccgatgcgctggcggaaaaggccgtaaggctggtgtttcgcgccctgcccgttgcgattcgtcagggcgactgcattgcgacccgcagcaaaatgcacaatgcatcaaccctcgccggtatggcctttagccaggctggccttgggctcaatcatgcgatcgcccatcagcttggcggccagtttcacctcccccatggcctggccaatgcgctgctgctgaccgcggtgatccgcttcaatgccggcgagccacgagcggctaagcgctatgcacgcctggccagggcctgccgcttctgcccgcccgaagctggcgaacaggaggctttccaggcgctgcttaccgcggtggaaacgctgaaacagcagtgcgccattcccaccctcaagggcgcgctgcaggaaaagtatccccttttcttatcgcgaattcccgccatggtgccggccgcgctggccgacgccaccctgcgcaccaacccgcgtccggtcgatggcgcggccatcgcgcaactgctggagagcctgcaatga

SEQ ID NO: 213579 - DNA, 1389 bp, Klebsiella pneumoniae
atgaatacagcagaactggaaacccttatccgcaccatcctcagtgaaaagctcgcgccgacgccccctgcccctcagcaagagcagggcattttctgcgatgtcggcagcgccatcgacgccgctcatcaggcttttctccgctatcagcagtgtccgctaaaaacccgcagcgccattatcagcgccctgcgggagacgctggcccccgagctggcgacgctggcggaagagagcgccacggaaaccggcatgggcaacaaagaagataaatatctgaaaaataaagccgctcttgaaaacacgccgggcatagaggatctcactaccagcgccctcaccggcgatggcgggatggtgctgtttgagtactcgccgttcggggttattggcgccgtggcgcccagcaccaacccaacggaaaccattatcaacaacagtatcagcatgctggcggcgggtaacagcgtctatttcagcccccatcccggcgcgaaaaaggtctcgttgaagcttatcgccaggatcgaagagatcgcctaccgctgcagcgggatccgtaacctggtggtgaccgttgccgagccgacctttgaagccacccagcaaatgatgtcccacccgctgattgccgttctggctatcaccggcggccctggcattgtggcgatgggcatgaaaagcggtaaaaaagtgatcggcgctggcgccggcaatccgccgtgcatcgttgatgaaaccgccgatctcgtcaaagccgccgaagatattatcagcggcgccgccttcgattacaacctgccctgtatcgccgaaaaaagcctgatcgtcgtcgcctccgtcgctgaccgcctgatccagcagatgcaggattttgacgcgctgctgttgagccgacaggaggccgataccctgcgtaccgtctgcctgcccgacggcgcggcgaataaaaaactggtcggtaaaagcccggctgcgctgctggcggcggcgggtctcgccgttccgcctcgcccccctcgcctgctgatagccgaggtggaggcgaacgacccctgggtgacctgcgagcagctgatgccggtgctgccgatcgtcagggtcgccgactttgacagcgccctggcgctggccctgcgcgtagaggagggtctgcaccacaccgccattatgcactcgcagaatgtctcgcggctcaatctggcggcacgcaccctgcagacctccatttttgtcaaaaatggcccgtcttacgcgggaatcggcgtcggcggcgaagggtttaccaccttcaccatcgccacgccaaccggagaaggcaccacctccgcgcggacgttcgcccgcctgcggcgctgcgtgttgaccaacggtttttccattcgctaa

SEQ ID NO: 213580 - DNA, 1017 bp, Klebsiella pneumoniae
gtggctatctatacccgaaccggcgatgccggcagtacatcactctttaccggccagcgggtcagcaagacgcatccgcgcgtcgaagcctacggcaccctggatgaactgaacgccatgctgagcctgtgcgtctgcgccgtcgctgaagaggaacagcgcaccctgctcgaagccctgcagcagcacattttttggttcagcgcggagctcgccagcgacagcgaacagccatcaccgggtaagcgctatatcagcagcgaagagattgccctgctggagcagaccatcgatcgcgagatggcccgcgtgccggcgctgcaccagtttgtattgcccggacgctgtgaagccgccagccgtctgcacctggcccgcaccgttgccagacgggaggagcgccggctggtcgagctgggggcagaggttactatccgtcagatgctgctgcgttatctgaaccgcttatctgactgcctgtatgccctggcgcgcagcgaggatcatgccgctcaccagcgccgccttgtgacggagatcgcggcccgctatctggccgccagcgggtcgcctgcgcccgacgcgcccaaagcccaggccgggtcgctctcctttcacgagctgcatcagctcatccgtcaggccattgaacacgcccgccagctgcaggtgccggtggtggtcagcatcgttgacgcacacggcaccgaaaccgtgacctggcgaatgcccgatgcgctgctggtcagcagcgagctggcgccgaaaaaagcctggaccgccgtcgccatgaaaaccgccacccacgagctcgcgacgaccgtacagccaggcgctgcgctgtacggtctggagagccatctgcagggcaaagtcgtcacctttggcggcggatatccgctgtggcgcgatggccagctaatagccggcctcggcattagcggcggcagcgtcgagcaggatatggctattgcacaggctgccatggcggccattaacgtgagaactcatcaatga

SEQ ID NO: 213581 - DNA, 276 bp, Klebsiella pneumoniae; identical to SEQ ID NO: 135532

SEQ ID NO: 213582 - DNA, 492 bp, Klebsiella pneumoniae
atgaaccacgcgatgctgcagcgtatcgtcgaagaggtcgccgcccgtctgcgccatcgcgccctcagcacggccacgctcagcgtggcccagctcggcgaagcggatatccgcagcctgctgtgccagcacgcttcgctgcgcatcgtgcaggtggatttaccgctgctggagcagcttgccggccagcgtgcgctggcggcagccggttgcgcactgcatgaggcgatggcctggggcgttcgggtacagctaacgctgcttcccgcccagctccccgcgctggcggtaaaaaaactcgcccgcttgccgctgacgttcagcgacccgcttggccagcccgtcaggcttcacgccgcgtcggtgctcacctatgccgacgtagcccgtttcagtggcggctatctggtgctgcgccgccgccccattatcaccgccctcgcccgcgaagcggccgtcgcgcggcatgttcaattgattaagcaggagtga

SEQ ID NO: 213583 - DNA, 633 bp, Klebsiella pneumoniae
atggataaacaacagctggcttcgacagtcaacaaagtgctggatgagatgcgccagcgtcccattccaatcggtatctccagtcgccatatccatttagcggcggctgactatgccaggctttttcccgcgcagcccatccagccgaaaaaagcgctgctgcagccgggacaatatgctgcagagcagacggtgaccctggttggccccaaagggcgattaaacaacgtgcgcctgctcggccctttgcgccagaccagccaggtggaaatctcacgcaccgacgcccggatcctcggtatcgccgcgccgctgcgcatgtccggcaatctgcagggcacgccggggatccgcctgataagcccctttgccgaactggagttgagcggcgggacgattgttgcccagcgacatattcatatgtcgccacttgatgcgttgatcctgcgcgtctcccatggcgatagcgtcgcggtggcgatcgaaggcagcgacaggcggcttatcttcgacaacgtggcggtccgcgttgccccggatatgcgtcttgagatgcacatcgatactgacgaggccaatgcggcaggcgctgacgctgcgcaagcctgggcaacgctggtgacgaagccatga

SEQ ID NO: 213584 - DNA, 447 bp, Klebsiella pneumoniae
gtgaagcaatcactgggattacttgaggtcagcggtctggccctggccatcacctgcgccgacgctatggcgaaagcggccgccatcacgctgctcgccctggaaaagaccaacggttccggctggatggtggtgaagatcgccggtgatgtggcctctgtccaggcggcggtgatgaccggggccgaactcgccgaacggcagcaggggctggtagcgcagaaggttatcgccaggcccggggaaggcctgctgccggcccgcgtccaggcgccttcaccagcgcctgacgtcgccgtgacggaggagaacacggccctcacagacgccccctcccactctacggagcgggtgacctgcaacctgtgcctggacccacactgcccacgacaaaaaggcgatccccgctcgcagtgcctgcacgccggtaaacgaggtgacgcgtaa

SEQ ID NO: 213585 - DNA, 276 bp, Klebsiella pneumoniae
atgaataacgcactaggactggttgaaacgaaaggcctggttggcgccattgaagccgctgatgcaatggtgaaatccgccaacgtgcagttgattggttacgaaaaaattggctccgggctgattaccgtgatggtccgcggagacgtcggcgcggtcaaagccgccgttgacgccggcagcgcggcggccagcgtggtcggcgaggtcaagtccagccatgtgatcccgcgcccgcatagcgatgttgaggccattctgccgaaatccgtctga

SEQ ID NO: 213586 - DNA, 351 bp, Klebsiella pneumoniae
atggagagtagcgtagtcgcccccgccatcgtcattgccgtcactgacgaatgcagcgaacagtggcgcgatgtcctgctgggcattgaagaggaaggcattccttttgttctgcagccgcagaccggcggcgatcttatccatcacgcctggcaggcggcgcagcgttcgccgctgcaggtaggcatcgcctgcgaccgggaacggctcatcgtgcactacaaaaatttacccgcatcaactccgttgttttcgctgatgtatcaccagaacaggctggcccggcgaaacactggcaacaatgcggctcgtctcgtcaaagggatcccatttcgggatcgccatgcttaa

SEQ ID NO: 213587 - DNA, 1833 bp, Klebsiella pneumoniae
atgcgctatatcgctggcattgatattggcaactcctcgacagaagtcgccctggcgacggtcgatgacgcaggtgtgctgaacattcgccacagcgcgttggctgaaaccacgggtataaaaggcacattacgaaatgtgttcggtatccaggaggcgctaacgcaggcggcaaaagcggccggcattcagctcagcgatatttcgcttattcgcattaacgaagccacgccggtcattggcgatgtggcgatggaaaccatcacggaaaccatcatcaccgagtccaccatgatcggccataacccgaagacacccggcggcgtcggactgggggtcggcatcaccatcacaccagaggcgctgctgtcctgctccgcggacactccctatattctggtggtctcctcggcctttgactttgccgatgtcgccgcgatggtcaatgcggcaacggcagcgggctatcagataaccggcattattttgcagcaggatgacggcgtgctggtcaataaccggctacagcaaccgctaccggtgatcgacgaagttcagcatatcgaccggattccacttggcatgctggcggccgtcgaggtcgctttacccggtaagatcatcgaaacgctctccaacccctacggtattgcgaccgttttcgatctcaacgccgaggagacccaaaatatcgtgccaatggcgcgggcgctgattggcaaccgctcggccgtggtggtgaaaaccccctccggcgacgtcaaggcccgcgctattccggcaggtaatctgctgctcatcgctcaggggcgcagcgtacaggttgatgtggccgccggggcggaagccatcatgaaagcggttgacggctgcggcaaactggacaacgtcgcgggagaagcgggcaccaatatcggcggcatgcttgagcacgtgcgccagaccatggcggagcttaccaataagccagctcaggagatccgcattcaggatctgctggccgttgatacggcggtgccagtcagcgtgaccggcggtcttgcgggagagttctcgctggagcaggcggtgggtatcgcctcgatggtcaagtcggatcgcctgcagatggccctcatcgcccgtgaaattgagcacaaactgcagattgcggttcaggtgggcggcgccgaagcggaggcggccattcttggggcgctcaccactcccggcaccacgcgcccgctggcgatcctcgatctgggcgccgggtcgaccgacgcctccattatcaatgcgcagggagagatcagcgccactcacctggccggcgccggcgatatggtcacgatgatcatcgcccgcgagctggggcttgaggaccgctacctggcggaagagatcaaaaaatatccgctggctaaagtcgaaagcctgtttcatctgcgtcatgaagacggcagcgtccagttttttccgtcggccttaccaccgacggtatttgcccgcgtctgcgtggtgaaaccggatgaactggttcccctgcccggcgatctgccgctggagaaagtgcgcgccattcgccgtagcgccaaatcacgcgtctttatcaccaacgccctgcgagcgttacgccaggtgagccctaccggcaacattcgcgacatcccgttcgtggtgctggtgggcggctcgtccctcgatttcgagatcccccagctggtcaccgacgcgctggcgcactaccggctggttgccgggcgcggcaacatccgcggctgtgaaggcccacgcaatgcggtcgccagcggattactcctttcctggcaaaaaggaggcacacatggagagtag

SEQ ID NO: 213588 - DNA, 525 bp, Klebsiella pneumoniae
atgaataccgacgcaattgaatccatggtacgcgacgtgctgagccggatgaacagcctacaggacgggataacgcccgcgccagccgcgccaacaaacgacaccgttcgccagccaaaagttagcgactacccgttagcgacccgccatccggagtgggtcaaaaccgctaccaataaaacgctcgatgacctgacgctggagaacgtattaagcgatcgcgttacggcgcaggacatgcgcatcactccggaaacgctgcgtatgcaggcggcgatcgcccaggatgccggacgcgatcggctggcgatgaactttgagcgggccgcagagctcaccgcggttcccgacgaccgaatccttgagatctacaacgccctgcgcccataccgttccacccaggcggagctactggcgatcgctgatgatctcgagcatcgctaccaggcacgactctgtgccgcctttgttcgggaagcggccgggctgtacatcgagcgtaagaaactcaaaggcgacgattaa

SEQ ID NO: 213589 - DNA, 690 bp, Klebsiella pneumoniae
atggaaattaacgaaacgctgctgcgccagattatcgaagaggtgctggtggagatgaaatcaggcgcagataagccggtctcctttagcgcgcctgcggcttctgtcgcctctgccgcgccggtcgccgttgcgcctgtgtccggcgacagcttcctgacggaaatcggcgaagccaaacccggcacgcagcaggatgaagtcattattgccgtcgggccagcgtttggtctggcgcaaaccgccaatatcgtcggcattccgcataaaaatattctgcgcgaagtgatcgccggcattgaggaagaaggcatcaaagcccgggtgatccgctgctttaagtcttctgacgtcgccttcgtggcagtggaaggcaaccgcctgagcggttccggcatctcgatcggtattcagtcgaaaggcaccaccgtcatccaccagcgcggcctgccgccgctttccaacctggaactcttcccgcaggcgccgctgctgacgctggaaacctaccgtcagattggcaaaaacgccgcgcgctacgccaaacgcgagtcgccgcagccggtgccgacgcttaacgatcagatggctcgtcccaaataccaggcgaagtcggccattttgcacattaaagagaccaaatacgtggtgacgggcaaaaacccgcaggaactgcgcgtggcgctttaa

SEQ ID NO: 213590 - DNA, 1665 bp, Klebsiella pneumoniae
atgagatcgaaaagatttgaagcactggcgaaacgccctgtgaatcaggatggtttcgttaaggagtggattgaagagggctttatcgcgatggaaagccctaacgatcccaaaccttctatccgcatcgtcaacggcgcggtgaccgaactcgacggtaaaccggttgagcagttcgacctgattgaccactttatcgcgcgctacggcattaatctcgcccgggccgaagaagtgatggccatggattcggttaagctcgccaacatgctctgcgacccgaacgttaaacgcagcgacatcgtgccgctcactaccgcgatgaccccggcgaaaatcgtggaagtggtgtcgcatatgaacgtggtcgagatgatgatggcgatgcaaaaaatgcgcgcccgccgcacgccgtcccagcaggcgcatgtcactaatatcaaagataatccggtacagattgccgccgacgccgctgaaggcgcatggcgcggctttgacgaacaggagaccaccgtcgccgtggcgcgctacgcgccgttcaacgccatcgccctgctggtgggttcacaggttggccgccccggcgtcctcacccagtgttcgctggaagaagccaccgagctgaaactgggcatgctgggccacacctgctatgccgaaaccatttcggtatacggtacggaaccggtgtttaccgatggcgatgacactccatggtcgaaaggcttcctcgcctcctcctacgcctcgcgcggcctgaaaatgcgctttacctccggttccggttctgaagtacagatgggctatgccgaaggcaaatcgatgctttatctcgaagcgcgctgcatctacatcaccaaagccgccggggtgcaaggcctgcagaatggctccgtcagctgtatcggcgtaccgtccgccgtgccgtccgggatccgcgccgtactggcggaaaacctgatctgctcagcgctggatctggagtgcgcctccagcaacgatcaaacctttacccactcggatatgcggcgtaccgcgcgtctgctgatgcagttcctgccaggcaccgacttcatctcctccggttactcggcggtgccgaactacgacaacatgttcgccggttccaacgaagatgccgaagacttcgatgactacaacgtgatccagcgcgacctgaaggtcgatggcggcctgcggccggtgcgtgaagaggacgtgatcgccattcgcaacaaagccgcccgcgcgctgcaggcggtatttgccggcatgggtttgccgcctattacggatgaagaagtagaagccgccacctacgcccacggttcaaaagatatgcctgagcgcaatatcgtcgaggacatcaagtttgctcaggagatcatcaacaagaaccgcaacggcctggaggtggtgaaagccctggcgaaaggcggcttccccgatgtcgcccaggacatgctcaatattcagaaagccaagctcaccggcgactacctgcatacctccgccatcattgttggcgagggccaggtgctctcggccgtgaacgacgtgaacgattatgccggtccggcaacaggctaccgcctgcaaggcgagcgctgggaagagattaaaaatatcccgggcgcgctcgatcccaatgaacttggctaa

SEQ ID NO: 213591 - DNA, 813 bp, Klebsiella pneumoniae
atgagcagcaatgagctggttgaacagatcatggcgcaagtcatagcccgtgtagcgacgccagagcagcaggcgcttcccgataccccccatcccacaggagagacggctatggcagagaaaagctgcagcttaacggaatttgtcgggaccgccattggcgacaccctcgggctggtcatcgccaacgtggatgccgcgttgctggaggcgatgaagctcgaaaaacgctatcgctctatcggcatcctcggcgcccgcaccggcgccgggccgcacatcatggccgccgatgaagcggtcaaagccaccaacaccgaagtggtcagcattgagcttcctcgcgacaccaaaggcggcgccggccatggctcgctgattgtgctgggcgggaatgatgtttccgacgtcaaacgcgggattgaggtcgcgctgaaagagctggaccgtaccttcggcgatgtctacggcaacgaagcgggtcatattgagctgcagtataccgctcgcgccagttatgccctggaaaaagcgttcggcgccccactgggccgcgcctgcggcattatcgtcggcgccccggcgtccgttggcgtgctgatggccgataccgcgctgaaatcagccaacgtcgaggtggtggcttacagctcaccggcccacggcaccagtttcagcaacgaagccattctggtgatttccggcgactctggcgcggtgcgccaggcggtgatctccgcccgggaaatcggcaaaaccgtactggcgacgctgggcgccgaaccgaaaaacgatcgcccctcctacatttaa

SEQ ID NO: 213592 - DNA, 285 bp, Klebsiella pneumoniae
atgcaacaagaagcattaggaatggtagaaaccaaaggcttaaccgcagccatagaggccgctgacgcaatggttaagtcggccaacgttttattagttggctatgaaaggatcggttcaggcctggtgaccgtcatcgtgcgtggcgacgtgggggcagttaaagccgccaccgacgccggtgccgccgcagcccgccacgtgggcgaagtgaaagccgtacacgtcattccccgcccccataccgatgttgaaaaaatcttaccgaaggggaatagccaatga

SEQ ID NO: 213593 - DNA, 810 bp, Klebsiella pneumoniae
atgaatggttctttacgcgcgcaatgtatcgccgagtttttaggcaccgggctgtttctgttttttggtatctgctgcctgagcgccctgaaactgaccggcgccagcctggggctgtgggagatctgtattatctggggactgggtatttctctggcggtgtacctgacggccggcatttcggggggacatctgaaccctgcggtcaccgtcgccctgtggctgtttgcctgcttcccgggcagaaaagtggtgccctatatcgtggctcaggtcgccggcgcgtttggcggcgccgtgctggcctggatactttacagcaccctgtttacgcaatttgaaacggtgcatcatatggtgcgcggcagcctggaaagcctgcagctggccagtatattcagcacttacccggcgcctgagctcagcatctggcatgcggcgctggtggaggtggtgatcacctcgatgctgatggggatgatcatggcgctcaccgatgatggcaacggcgtacccaagggcccactggcgccgctgttgattggcattctggtggcggtgatcggcgcctcgaccgggccgcttaccggcttcgcgatgaatccggcacgcgattttggcccgaaattgttcacctggttcgccgggtggggcaatatcgccatgaccgggggaagagatattccctattttatcgtgcccattatcgcaccgttgttaggggcctgcctcggcgccgcaatttatcgttttcttatcgccaataatctgccctgtcatacctgcgtggaggaagaaaatacgcgttag

SEQ ID NO: 213594 - DNA, 471 bp, Klebsiella pneumoniae
atggatatttcgacagtgcttaatgttaaaaacatcaagttaaatatgaccgccagaaccaaagaagaggtgatagaagaactcaccgatttacttatccaggatggcgccgtcaccaataaggaagactttattcgtgatgtctggttacgtgaggagctaggctctaccggctttgaaaaccatatcgctattccacatggtaaatcttccggtgtttcccgtaccgcattagccatcggacgcacgcaacatgccattccctgggagaccatggatggcagcgatgtccgctgtgttattttatttgcggtttgcctggtggatcagaatgccacccatattcgcctgttggcacaagtgtctgggtcactggcggatgaagacattatcgctaaattacttgttgaatctgatccacataaaatcattgcgcttttcaattcagaaactgaaaacgccgatgcttaa

SEQ ID NO: 213595 - DNA, 681 bp, Klebsiella pneumoniae
atgagcgctaaattttcaccgtcactgatgtgcatggatttaacgcagttcaaagagcagatcacggcaatgaataaaaaagcggatttttaccatgttgatataatggatggcaattacgtccgcaatatcacactgtctcccttttttattgagaatctgaaaaaaattactactgtgcccattgatgttcatctgatggtgaatcatccggaagatatcattcccatgtgtctcgaggccggcgccgatatcatcagctttcatcccgagacggcgaataacaaaatattccgcctgctgaatcagatcaaggatgcgggcaaaaagtgcggggtggtgctgaacccggcgacaccggcagaaagcattgccgaatatgcgcatctgctggataaagtgacggtcatgtcggttgaccctggctatgccggacaaaagtttattcctgagtcgctgaacaagattagaaagctcatcaacatgcgcaaaaataatggctataactatctgacggaaattgatggctcttgcaatgagaaaaccttcggtcagattgctgaatccggggtagatgtctttatcgtcggcacatcgggtctgttttcgctccatgaggatgtcagccaggcgtgggacagaatgatcgagatcttccagcgggaaactgtcgctgcataa

SEQ ID NO: 213596 - DNA, 1263 bp, Klebsiella pneumoniae
atgcttcattttcttatttatgatgtgctaggaacaccggcgatactggttggtttattttcactgatcggtctgctgttgcaaaaaaaaggaatttcagacgttatttcaggcacgctgaaaaccatcatgggttttgtcatattgaccgccggcgccggtattatagcctatacgttaaccatctttagccagttatttgaacattctttccatattcagggcgtggtgcccaacactgatgccatggccgctctggcgcagaagaattacggcacggaaaccgccaccattatggtattgggcatgctgatcaatatcgccctggcgcgtctaacgccattaaagtacatctttctgaccggacatcatacgctttatatggctgcgatgctggcggttatcctgtctgtagggggcttgtcagggggatgggtggtggccatcggggcggttattctcggtgcgatgatggtcatctccccggctatcttgcagccgtttacccgtaaaataaccaacaccgacgatctggcgctcgggcattttggatctattggctacctgctgtccgcgctggtgggcaaaattattggtaaaggcagtccctcgattgaagagatcaaagtacctaagtcgctcaatttccttcgcgactcatcggtggccatctctctcaccatgatgattctgtttctggtgctggtgctcgttgcgggcaaatcctttgtcgaggagaccctgagcgctggtcagaactttattatcttcgccattattcagtccctcacgtttgctgcaggagtttatatcatcctcgccggggttcggatggtgattgccgagatcgtcccggcgtttaaagggattgcggacaaactggttaaagacgcgaagccggcgctggactgtccgacggtgtttcccttcgctccgaatgccgtcatcgtcggcttcctcgcaagctttgtcgcagggctggtcagtatgttcctctgcccgctgttcggcttgagcgtcatcgtcccgggcctggttccccactttttctgcggggccacggcgggggtttacggcaacattaccggcggacgtcgcggggcggtggtaggggcttttgctcacggtctgctcatttcgttcctgcctgccattctcttgcccatgatgggggatatgggactgggctccacaacctttggagacgcagactttggcattgtcggcatcgtgctgggtcatatcatcgcaatgtttaactaa

SEQ ID NO: 213597 - DNA, 267 bp, Klebsiella pneumoniae
atgaaaaaagtgcttatcgtgtgcggtaatggtttaggcagcagcttcatcgttgaaatgaatgtcaaaaagatccttgccgaaatgaataaagaagctgaagtcgcacataccgatctgacgtcggcaaaaagcgaaaatgccgatcttattctcagcgcgaaagacattgcagaacatcttagcagtcactctgcaaaggtcgttggattaagtaatttacttgataacaataaaattaaagaaattttagcagaaaacatttaa

SEQ ID NO: 213598 - DNA, 438 bp, Klebsiella pneumoniae
atgatcagagactggttaaccccggataaaattaaagtcattaactcaatagatagctgggaaaatgccgttcgacttgcagcagaacccttgctgatgcaagggtatatagccgggtcgtatattgaggcgattttgcaaagccataaagaacttgggccctattacgtattagctcccggcttggcgatgcctcatgcccgtcctgaacagggggtattaagaaatggattatcgcttcttcatattaaagaaggggtgtcgttcggctcgacagagaacgatccggtatacgtggtaatcatactatgcgctcgttccggaaatgaacatatcacgatgattggtgaactggctgaaatctttagcgatcagcaaaagttacaccgattgttaaataccgatgatagcaaggcgattcaggccgttattgactga

SEQ ID NO: 213599 - DNA, 1059 bp, Klebsiella pneumoniae
gtgattttggtgaagagtttagacgcggacggtagcccgaaagaaaaacgacgtaaaggaacgggtaagataaccctgaccgaggtggctgagtttgtcggtgtgagcgccatgaccgtctcgcgagcgctgagaatgcctgaaaaagtgaatcctgagcttcgcgatcgcatcgatgcggccgtcagtcaactcggctatgtccctaatctgcaggcacgtaatctggcgtcggtccattccgatcttattctcgccgtcgttcccaccttctcttcgccgggttttttgccggtctctgaagcgctgcaaaaagtgctgaccgaacgcggatataccatgatgtttatggaatccgggcatgacggtcaaagtgaacaaaagacgtttgaaaaaatgctcgcctataacccggcggccattattcagttcaatatcgataccattgagagctgcacccagttgctggccaacgtggatgttcctattctggaaattggcgcgctaaatacccaccctgtgggtatgtgcatcggcgtggattacggtaaggccgtaaaacagatcgtgactcatctggccgacgcctcattaaaaaacatcgcactgctctgtaccccggctaataacacaatgtttcgccagttgctgagcggttggaatacggcgatgctcgctctgaaccgctccccgcaccgggtggtaaccacgcatttgccatccaccatcgccacaggcgtcaatatattcaaggatatgatgattacctggggcgatctggatgcgttaatttgcacgtcggatgaaatggcctgtggatgtatgatggcctgccacagtgccggcattaaggtgcccaataccgtagccattgcgagtttaggcggaggagtgttatcgacagtctgttcccctgccctgacaaccgttgagtttccctggcatgacattggggtgaaagccggtaaagcccttctcgaactgcttaacgataagcctggtgaaaagttcattgaaattccgtcagtgctcaaagtccgggccagtaccgcggcatga

SEQ ID NO: 213600 - DNA, 1299 bp, Klebsiella pneumoniae
atgcgtttcacggaagcctgcttactgaaaacggagaacaacatgacgacactcagcgaaccgttggttaccccgaaatatggcaagtggcgccagctggtgctgggcctgatctgtatggccgccatctccagtccgcaatatgtctggacgctgttgacaaaacccctggccgccaaacttggcgtcggtctgccagaattgcaggtcaccttctcgctgctgatcatcctgcagaccttcttttccccttttcaggggcggttagtggaaaaatttggcccacggcggctgatcgctattggcacagtgatggcgggaatgagctgggtgctttccgcgcaggtgaatggcctggcaacgctctggctggtttatggctgcatgggcggcctcgggaccgggatcgtctacatcggcgttgtcggcctgatggtcaaatggttcccacagcagcggggatttgccgccggcgcggtggcggcgggctacgggatgggggccatcataaccactttccccatctccctgtcgctgaccactaacggccttgaacacacgatgacgactttcgggatccttttcgccctcgtcggcttcctcgccagtcaggggctgaagctgccgctgcccgctgtctcccagcccgtcagtcagacggtggtgcagagcagcagatcgtttacttcccgggaaatgctgcgccagccgctgttctggctgatgttcgccatgatggcgatgatgtcgacttccgggctgatggtcacttcgcagatggcggtgttcgccgaggatttcggcattagccaggcggtggtgtttggcatggcggcgctgccgctggcgttaacgatagaccgctttaccaacggcttaacccggccgctgtttgggtttatttccgaccgcttcggccgcgagcaaaccatgtttatcgcctttgcgctggagggggtagcgatgatgctctggctggcgtgccgggaagatccgctgctgtttgtcctgctctccggggtggtgttctttggctggggggagatcttctcgctcttcccgtcgacgctcaccgatacgttcggcagcgagcatgccgccagcaactatggctggctgtatatttcgcagggcatcgggtcaatctttggcggtccgctggcggcactgctctatcagcacactcacggctggcatgtggtcttcagctgcgcgattggccttgattttgtcaccgccgccctcgcgctgtgggtgctaaaaccgtggcgcgcgcgctttatccgccagcatagctaa

SEQ ID NO: 213601 - DNA, 537 bp, Klebsiella pneumoniae
atgaaattacccctgaccacgccccggctgctgctgcgccggttcagaacggaagatctgccgtctttcagccattatcgcaatctgccggaggtggcccgctttcagagctggacccactacggcatgacagaggcgacagccttctatgaacaacagcgttcgcaggcctttgctgaggatgagagctggttccagcttgccgtagagatccaggccaacggtgcgctggcgggagatgtggggatccacttcttagatcaaggcagacaagccgagctggggatgaccttttcccctgcgtatcaacatcaggggtatgcccgggaagccatgcgggcggtgatggccttactctttgaacagttagcccaccaccggctgacagcggtggttgatacccgcaataccggcgcgatcaaactcctggaagggctgggctttcgtcgcgaggcgcattaccggcagaatatcttttttaaaggcgagtggggcgatgagtacctgtacgcgctgttgcgtagcgaatatcagtga

SEQ ID NO: 213602 - DNA, 579 bp, Klebsiella pneumoniae
atgaagccaaaacaagcggacattctccgccacgccagcacgctgtttaatcgcgaaggatatcagtcgcccagcatcgagcggattgctgaacatgctggcatctccaaaatgaccttctaccgctattacgccgataaagaggcgctcattctggctatcctcaagcagaaagagagcgaatttatgcaggatttggcgcagatcaccgcggataaagccagcgcgcgggaaaagctgttcgccgtgttcgactactaccatcgctggtttacctgcgaaacgttccacggctgcatgtttacccgcgcgctgtttgaatatggcgcgtcatcgccggcgatccgggagcaatgctaccgatttaagtcgctcctctggcagttcttccgcgatatcctcctgcaggtgttaaaaccagagcctgccgagcgggtcgccatgatgatggtgatgctcatcgatggcgctatcgccgcccagcaggccgagtccgccgaatgccgggagatcccgccagggatgaccgcctggagcgcggccaaagcgcttatttactcagaaggcggtacgctgtga

SEQ ID NO: 213603 - DNA, 1101 bp, Klebsiella pneumoniae
atgcgtaacacagataatggggtgattggaagcgaccagaccgcggtgatgaccaggctggcgctggatgagttaattgaccagcttctgcacagcaacgcgctgtcgctgaagctgacggccaacccgctggtggccgacagagcctggcatctcactgagaatacctgcatccgcgccttctccgctgacgatccacaggccaaaaagcgtgcgcaccacgcgctgttcattctttatcagtcctggcttgccgacccgctctcgccagcggctgccaatcagtttcatccgctgctttccgggatcagaaattacatcgagtctgagtggctgcgggcggaaagcaaacgcttccaccaccagagaccaatgcttaacgccggcaatatcgtcgacgaactgcgcgccttatgccagcagcacccggcgtctcatcatccgctgttcgatttccttgccagcgaggcctctgcggcgcaaatcgactatttcttcaaaagcgacagcgccctcaatctgcttttcttcgatctggtggcgatggggctggtgggctcgctgccggaaacccgcgctgagattgcgcaaaatctgtgggatgagataggccagggcagcaccgagatcacccacgttaatctgtataaggatttactgaagcggcggaatatcgctttgccggacaatcattttgcccatttgtacgagtggcaggggctggccgggtataacgcctttatgctgggcggcgttaaccgtcagcattattacaaatcgctgggggtcatggcgatgaccgagctgctcgacccgccgcagtatgaaaaactggtggcgggctgtcggcggattgggctttccgagcgcgacgtgcattactatgccgaacatatcacggtcgacatcggtcatgcggacggctggctgaacaatgtgattgtgccgattggcaaaaaacatccggcggcgatggaggaggtcttctttggcgccgcgctgcgtctgcaaacctgcaacgattactatgatggtctgctggcggccctgcagtcgctgggcggcagcttatcatctcacagcgtaccgccttctgagtaa

SEQ ID NO: 213604 - DNA, 915 bp, Klebsiella pneumoniae
atgccttatctgttactgacgctggcggctctgttctggggcgggaattatgttgtcgggcacgtgctggtgcagggcgtggatccgatcctgatgaccgaagcgcgctgggcgctgacggcgctgctgctgggcctgctctaccgacggcaaatcgccggcagtcgccgcctgctgcgggcaaacgcgccagcggtggtggtgctaaccctctgcggccaggtcagtttcccgctcacgctctatattggcctgcaaaccacctccgcgctcaacgccgccatctatatgtccgccacgccaagtatggtgctgttgattaaccgactgtttttccgcgatccggtatcagggcgtaactggcttggagtggcttttagcaccctcggcgtgatgatcctcttatttcagggaaatccgctgcacgccgcctctctgcacacctttgccatcggcgacctgtgggcgatggggtcggcgctgagctgggcgctctactgttcgctgttacgtctgaaggaccgccgaatcccggcgaatggctttgtcgccgtcagctcgctgctcggcgccctgatcctggtgccaatcgtcatcttctggctgatgcgccacccggcgcaggactgggcagcctggcgcgagccgtttttcctcagcggcctggcgtatctggtaattttcccatcgtggctggcatacctgttctggaacaaaggtatcgccaccattggcgccacgcggggcgaaatttacacccacatcatccccctctccggcggggtgttgagcatcctgttcctgcatacccagccgcatgcctggcatctgtttagcgcgctgttcatcatggtggggattgggatctgctcgctggagaaacgccaggcggcgtctattcgtctgcgtgactaa

SEQ ID NO: 213605 - DNA, 1233 bp, Klebsiella pneumoniae
atgcacggctggacctcacgacagcgtaatgcggcgatagccagttttttaagctggacgctcgatgctttcgactttttcctgttagtttttttactgagcgatatcgcccactcgtttcatgtcgaccttgaggaggtcactctggcgattctgctgactctggccgtgcggcccgtcggcgcgctaattttcggcagggcggcggagaagtttggtcgcaaaccaatcctgatgctcaacattgtgttcttctcggcttttgagctgctctccgccgccgcgccgtcgttgatgctgtttttcctgctgcgggtgctgtacggcgtggcgatgggcgggatctggggcgtggcctcttcgctggcgatggagacgatccccgaccgctcgcgcggcctgatgtccggcctgttccaggcgggataccccttcggctatttgctggcggccgtcgcctacgggctgctgtttgaacaactcggctggcgcgggatgtttgtcattggcgccgcgccggtgcttctgctgccgtttatctatttctgcgtcgaggagtctccggtttggcaggcggccaggcagaataaagagagtacggccctgctgccggtactgcgtagccactggaagctgtgcctgtacctggtggtgctgatggcggctttcaacttcttctctcacgggacgcaggatctttacccggtctttttgaaagttcagcacggcttcgagcctaaaacggtcagcatcatcgcggtctgctataacatcgcctcgatcattggtggagtgttcttcggttcgctgtcggagaagattggccgacgcaaagcgattatgatcgccgccatgctggcgctgccggtcattccactgtgggctttcgccagcggctcgctggcgctgggggcgggggcgttcctgatgcagtttatggtccagggggcctggggggtgatccccacctggctcaatgaactggtcccggccaacacccgggcggtgctgcccggcttcgtctaccagctgggtaatttgctggcttcggtgaatgccactctccaggcatcaatcgcccagcatcatgggcataactacggcctggcaatggccctggtggccgggacggtggcgattgtcattaccgtcctgaccttttttggtcgcgaaggccgggtgatccaatccgcaggagcgggacatcaccagccgctctccaccagccgttaa

SEQ ID NO: 213606 - DNA, 1608 bp, Klebsiella pneumoniae
atgaagagaattgccatcgtcggcgtggggccgacggggatttacaccttttatgaactggtgaagcgcggtgagccgctggccatcaccttgtttgaaaaagaggcgcaggccggggtgggtatgccctacagtgacgataataccgcggcgcaaatgctggccaatattgccagcattgagatcccccccatcgacctgacctacctgcaatggctgcagcagcaaagcgatgactggctgtcagcgcgcgggcttgaacggcacgccctgcatgagcgccagtttctgccgcgggtgatcctcggcgaatactatcgcgaccgttttctgtacctcgttgagcgggcccgggacgtcggctttgtgattagcgtttgtgaatcctgtgaagtcacggatattgcggttcagcccaccgggatcgccatccacaccgatagtgcagcagacccggtaattgtcgacctggtggcgattgccaccggccatctgtggcctgaagaagagcgcgccagccgacagtacttccccagcccgtggaccggcctgatggaggcccgcattgccccctgccgggtggggatccttgggacttcattaagcgcgattgatgccgccgtggcggtagtggcccgccacggcgttttccataccgaggacgacaaaacgacccatttttccctccatccaggcagcgaagcgctggagatcaccctgatgtcacgccacggcgtgctgccggaggccgatttttactgcccgatcccgtgggagccgctggagattgccactcccgccgccctcgaagcggccattgcggagggtagcgacgctctgttagatcggatttttgagctgatcgttaaagagctggaatatgctgcccccgactggagcgaggcgatcgggcttcgtcagctgacgcctgacagtatcgccgacgcctggtttgctgaccgcctcacccacgacccctttcagtgggcgcagcgcaatctgcaggaggtggagcgcaataagcgcgaacaccacacggtgccctggcgctatgccattctgcgcctgcatgaggcgattgaaaccgtggtgccgcagttcaacgacgcggacagccgtcgcttccgccagggcctcgcccgggtatttatcgataactacgccgccattccgccggagtccatacgtcggctgctggccctgcaccgggctggcattctgcggatcctgacgctgggcgaagattatgagctgcagcgggagcctgaccggacgctgattgttcatcatcgtcagcgctgcgaattcgatgtctttatcgatgcccgcggacaaaaagcgctgaaaacccaggatctgcccttcccttcactgcgccagcagctgctggtctgcggcgacgacattccggacgtcggtgatgactacacgctgcaggcgccggagacagtgcgcggccgggtcgccttcggcgcccttccctggctgatgcacgatcgcccctttgtgcaggggctgacggccagcgccgagattggcagcgcaatggcccgcgccgtgtcgcagcaggccgccggccgacggcgccgtctctggtatatcgaatag

SEQ ID NO: 213607 - DNA, 1101 bp, Klebsiella pneumoniae
atgagtcatctttttagcgcgacgcgaattggtcaactcacccttgataaccgtatcgttatcgccccgatgtgtcagtactccgccgacgagggtaaggcgacctcctggcaccggatccatcttggccaactggctttctccggcgccggcctgttaattctggaagccacggcggtagagcctgcggggcgtatctccccgggggatctggggctgtgggatgatgaaaccgaaaacgccctgcgcggcgtagtcgaagatattcgggcctggtcgccgatccgtctggggatccagctgggtcatgccggacgcaaggcatcctgcgccgccccctggcagggaggccatcagctggcgctcaacgatggtggctggcagaccgtcgccccttccgccgtggcgtttcacgatggcgatcgcgcccccgctgaactgagccatgccgatctggcgcgcatcaaagcggccttcgtcgccagcgcgctgcgcgcccagcggctgggctttgagctgattgaactgcacgccgcccacggctatctgctgcaccagtttctctcgccgctcagcaaccagcgccgcgacgagtacggcggttcgctggagaaccgaatgcgctatccgctggaagtctttaaggcgatccgcgaggcagtgggcaacaccatggcggtgggcgtcaggctgtcggctaccgactgggtcgaaggcggctgggactgcgagcagtccattaagtttagccagcagctggaaacgctgggcagtgactatattcacgtctccagcggcggtttgtcgccgcagcaggcgatcaccgttgggccgggataccagttgcctttcgcccgcgatattcgccagcaggtagccatcccggtgattggcgtggggctgatcaccgacccgcagcaggcggaagcggcgctggagaatggcgatgccgacctgatcgccctcgcccgcgcggtactctacgatccgcactggccgtggcacgctgcggccagccttggcgcccaggtccgtgtgccgtcgcagtatttgcgctcggagccgcacggcctgaaaggcaccctgctgccaaaccgttga

SEQ ID NO: 213608 - DNA, 534 bp, Klebsiella pneumoniae
atgcaacgaatcacaaagctggataacgacttaacctgtaagggaatgctgatgaaactctggaataaaacactactcgcttccgccctgtgcctgaccctgtttggctgcgacgatgcgtcgaaagttgataacaaactggataaggctaaagataatgcggagcagatgaaggatgccgcggcggataaagcgcaggcaattaaacaggatgcggataagcaaatcgatacgctgaaaagccaggctgacgccgaggccgatcgcctgaaggatcaggccagcgccatcaaggccgaggcggacaagaaggcggacgccatcgcccagcaggcgaaagcccaggccgatgcggtgaagcagaacgcaaagcaggaaagtgaccgcatagtcaaagaggcgggtcagatcaaagacaacgccatcggtgacgccaatcagctctcggctgaagcggcgagcaaaaccaaagccatccaggacagtatcgcgaaggataaacagaacgccgcgccgcctgccgcacagcagtaa

SEQ ID NO: 213609 - DNA, 897 bp, Klebsiella pneumoniae
atgcaaatgaatctgtttgaaaatattaaaatttttattgaaatcgtcgatgccggcagctttgcccaggcggcggaaaatttgcagatccaccgaccggcggtgaccaaagcactgcagcagctggagcaggagagcggggtccggctgctgcagcgcaccacccggcgtctgtatcttacgccggagggggaagagttttatcgtcgcagcaaaccgttgctctcccaggccgacgatctgctggagtcgttcgcgccggaccggccgatccgcggtcagctgcgcgttgatatgccgatcgcctttgcccggctgctggtgatcccgcatctgccggatttttatcaggcccatccggaggtggagattgtcctcagcagctccgacgtacgccgggatatgctgcgcgatggtctggattgcctgctgcgggtgggggatcttgaggatggcgactatgtggcgcgttcactgggggaggtggcgttaaccacctgcgccagtccgggctatctggcgcgctatggggcgcccgcgacgctggaggacctgcagtcgcatctggcggtgaactgggtgaacagcagcagccggcagattatgccctggcgattccagaccccggagggcatcaggcagatcgccattcccggtaaactggtgctggacaactctgaagtctttactgctgccgggctggcggggctggggatgctgcaggggatgcgtttctttttgcaaccttatatcgacagcgggcaactggtggaagttttgccggactttccggcgccgcgtcgaccgttgtcgctgctctatccgcaccggcatctctcgcataaggttcgggtctttgccgactggctgcaggggctggtggcgaccctggactga

SEQ ID NO: 213610 - DNA, 978 bp, Klebsiella pneumoniae
atgcaacctaaccgcgtcgcccgcattctgggtattgaaaaaccggtggtccaggggcccctctcctggctaaccgatgctcgtctggtggcggccgtcggcaacgccggtgggcttggcgtgctgggcccgaacgccggactgacggcggcaaccgccgtctccaccccggaggccaccgccgagaaaatgcgcgaagagatccgcaaaaccaaacagctgacggagaaaccctttggcgtcaacctgatcccgacggcggaaaatgacatctggacgccggcgatcctcccggtgatcaaagaggaaggggttaaggtggtggtctacaccggctacggcgacggttcgttaaaaccggcgctgttcgacgaactgaaagccgccgggatcaccattatctatcgtgacatcaacccgacgccggagaacagccgccgcgcggagcaggccggagcggatattattgtcgccaccggctttgacgaaggcggcacgctgccgggtaccgccctcgggaccttcaccatcgtcccgctgatcgttgacgcggtacagcgggtgccggtgatggccgccggagggatcaccgacgcccggggcgcgcgcgccgttcatgccctgggggcggagggcgtcttcgccggttcggtatttatcagcaccatcgaaagccgggttcccgactcggtgaaagcgaaaattgtggccgccaacggtctggatctgcgcctgttccgtactctgccggactactaccgcgcgctgcccggcaaactgagcgacacactggtggccatggatcgtgccggcgcctcaaaagccgagctggcccaggcgatgggcgggctgcgcgggatgcggctgggcatgctggaggggaataccgatgagggatatatctcggtgggcgcggggatcggcaacatccatgccatcacctccgtcgccgaggtggtcaaccagctggcggtgtaa

SEQ ID NO: 213611 - DNA, 1260 bp, Klebsiella pneumoniae
atgagtgataccgtccgccagctggcggagagagaggcggccgccagccgggtgatggcgcgcgccgaccagctggccgccctcagcgaaaccgccgacgccctgacccgggtctatctgtcgccggagcatctgcaggccaaccagctggtgggccagtggatgcaggccgccggcatgatggtatggcaggacagcgtcggcaacatctgcggtcgctatgaaggcgtgcaggagggcgcgccggcggtgctgctgggctctcatctcgacaccgtgcgcaacgccgggcgctacgacggcatgctcggcgtactggcggcgattgaggtggtccagcgtctgcaccagcaggggcgacggctggcgaaggcaatcgagatcgtcggctttggcgatgaagagggcacccgctttggcatcaccctgctcggcagtcgcggcgtcaccggcacctggcctgaaagctggctgtcacagtgcgataccgacggggtgagcgtcgcccaggcgctggtgaatgccggactcgatccggcgaggatcgcccacgcggcccgtcacccgcgggatatcgccgcctatctggaactgcatatcgagcaggggccgtgcctggagcaggcggggctggcgctcggcgtggtggaggcgattaacggcgccagacggctgaactgccgttttaccggcgaagctggccatgccggcacggtgccgatgcttcatcgcaaggacgccctcgccgcggcggcggaatggatggtgcaggtggaaaacctgacccgccagcgcggcggtaacctggtggcgacggtcggcaccctgcgctgtgcgccgggcgcggtaaacgtgataccgggcgaggtgcagttgacgctggatattcgcggcccgcaggatgcgccgctgacggcgctgctggatgagctgctggggcaggcgcaggccattgtcgggcgtcgccagctgagtttcgtcgccgaggagtattatcgcatcgccgccaccgcctgcgaccgtcacctgcaggcggtgctgagcgaggcggtgacggcggtgcaggggcgttccctgacgctgccgagcggcgcagggcatgacgccatcgccatcgccgagcgctggccatcggccatgctgtttgtgcgttgcctggggggcgtcagccatcacccggcggagtcggtcaccgccgccgacgtcgggctggctatcgacgcgttctcccgggcggtagagaaggtggctgacgcctga

SEQ ID NO: 213612 - DNA, 1242 bp, Klebsiella pneumoniae
atggatatcactcagttttcgcaaattaacccgccgcagcgcctgctgatgggaccggggccgatcaacgtcgacccgcgcgtgctgcgcgccatggcgagccagctggtgggtcagtacgatccggcgatgacccactacatgaatgaagtgatggcgttgtaccgcggcgtgtttcgcaccgaaaaccgctggacgatgctggtggacggcacctcccgcgccggtatcgaagcgattctggtgtcggcgatccggccgggcgacaaggtgctggtgccggtgttcggccggtttggtcatctgctgtgcgagattgcgcgccgctgccgggcagaagtacacaccatcgaggtgccgtggggggaagtctttaccccggaccaggttgaagacgcgatcaagcgcgtgcgcccgcgcctgctgctcaccgtgcagggcgatacctcgaccaccatgctgcagccgctggcggagctgggagagatttgtcgtcgccacgatgtgctgttctataccgacgccaccgcgtcgctcggcggcaacctgctggaaaccgacgcctggcagctggacgcggtgtccgccgggatgcagaagtgcctgggcggcccctccggcacctcgcccatcaccctcagcccacggatggaagaggtcatccgccgccgccgctgcattgagcaggggatccgcaccgatgcccaccacgatggcgtcgacgagatgatctactccaactatttcgatctcggcatggtgatggattactgggggccggagcgccttaaccaccataccgaagcgacctcggcgctgttcgccgcccgggagtgcgcgcgcctgatccttcaggagggactcgacaacggcatcgcccgccacaagctgcacggcgatgcgctgctgaaagggatccaggcgatggggctcgagacctttggcgacctgcggcacaaaatgaataacgtgctgggggtggtgatccccaacgggatcaacggcgatcaggtgcggaagctgatgctggaagatttcggcattgagattggcacctcgttcggcccgctgcacggtaaagtctggcgcattggcaccatgggctataacgcacgtaaagactgtgtgatgcagacgctcagcgcgctggaggcggtgctgaactacctcaagttcaccaccacccagggcgcggcgatgcaggcggcctgggatcactaccgcaacgaggccaccctatga

SEQ ID NO: 213613 - DNA, 738 bp, Klebsiella pneumoniae
atgcctctcatcaccattaatcagatgcagaagtactacggcgacaaccatgtgctgaagggcgtcgatctggatatcgacatgggggaagtaatctcgatcatcggccgcagcggctcgggcaaaagcaccctgctgcgctgcatcaatggtcttgaggggtaccaggaggggagcatcaagctcgggggcatgaccatcaccgaccgcgattcccaggcccgggagatcagccgctccatcggcatggtgtttcagaacttcaatctctttccgcacatgacggcgctggagaacgtcatgctggccccgcggcgggtgctgaagaagtctcaggccgaatgtcgcgagctggcgcagcggatgctggagaaggtcggtcttggcgatcgtctggattactatccagccaacctctccggcggccagcagcagcgcgtggccatcgcccgggcgctggcgatgtcgccaaaagttttactctgtgacgaaatcacttcggcgcttgacccggaactggtgggcgaagtgctgaaagtactggagcagctggcggcggaaggcatgacgctgatcctcgtcacccatgaaatgaattttgcccgcgaagtgggcgaccgcgtggtgtttatgcatcaggggcgcgtctgggagcagggcgacagcaaaacgctgttcgccagtccgcagacaaccgaactgaaacagtttatctcctcggtgcgcggtcttaactaa

SEQ ID NO: 213614 - DNA, 660 bp, Klebsiella pneumoniae
atgatgaccacctttaccgactgggacattatccgcaacctgctgctggccggtcgctggacggtgctgctgtcgctggtcgcgttcaccggcggggcgctggtgaccttaccgctgctgctgctgcgcctgaccggcggacggcaggtgaaacggctgatccgcggctacgtcgaactgtttcaggggacgccgctgctgatgcagctgtttctggcatttttcggcgtggcgctgttcggcatcgacgtctcggcatggaccgcggcgtcggtggctctgacgctttataccagcgcctttctgctggatatctggttcggcagcattcgcgcgctgccgaaaggccagtgggaagcctcgcgctgtctcgggctgagcttcggccagaccctgtaccgggtggtggcgccgcaggcgctgcgcatcgccatcgcgccgacggtggggttcgccgtgcaggtgatcaaaggcacggcgctggcatcgattattggctttgtggagctgaccaaggcaggaaccatgctgaccaacgtcacttaccagccgtttaaagtgtttgccctggtggcgctgggctatttcattctgtgctatccgctgtcccgctacagccgttatctggagaacaaattcaatgcctctcatcaccattaa

SEQ ID NO: 213615 - DNA, 666 bp, Klebsiella pneumoniae
atgacggagcaacttcatttttctgagctctggccgcactggccggagctgctggccggtctgtgggtgacggtgcaactgacggtgctggcgacgatcggcggactggcgattgggatcctcggggcggcaatccgcagcggccgcccgggcgtcctcagccggatctggggcggatatgtggaaatcatccgtaacacgccgttcgtggtgcagctcttttttatcgtttttggtttaccaaacctgggactgaagatgaccgccggcgaagcggcgctgctggcgatggtggttaaccttggggcttacagcaccgagatcgtgcgcgccggcatccaggtgacgccgaaaggccagtgggaggccggacgcgtgctcgggctcagccggacgcaaacattcgttcgcgtggtgctgcccccggcgctgcagcggatttatccggcgctggttagccagtgcatcatcgtgatgctcggctcgtcggtggtgtcgcaggtctcctatgaggagctgaccttcgccgccaacctgatccagtcgcggacgtttttgagctttgaggtctatctggtgaccactgggatctacttagcgttatcgatagcgatgcgccagctgctgatggcggcggggcgtaaatggctggaggtgcaggcatga

SEQ ID NO: 213616 - DNA, 786 bp, Klebsiella pneumoniae
atgaagaaactgttgatcgcactggccggggccgcttgtctcctttcgtctgtttctgccgcgcaggctgaccagctccaggatattgaaaaacgcggcgtcatccgcattgccgtgccccaggattttccgccgttcggctcggtggggactgacctgcagccgcaggggtatgacatcgatatggcgcgctatctggcgaagtcgatgaagctcaagctgcagctggtcccggtgaccagcgccaaccgcgtgccgtatctgcagaccgataaggtggacctggtgatctccagcctcggcaaaaacgccgagcgagagaaagtgatcgatttcagccgcgcctacgccccgttcttcctcggggtgtttggcccgaaaggggcggagctgaaggacgcggccgcgctgagcggtaaaagcgtcggcgtgacccgtggggcggtggaagatatggtgctgaccagcgtggcgccgcaggcggcgcagattaagcgctacgaggacaataacaccacgctgtcggcctatctgtcgggccaggtgcagtatgtcgccaccggtaacctagtggtggcggccatctcccggcagaacgctgacaaagcgccggtgccgagctttatgctgaaggactcgccgtgctttatcgggctgaaaaagaacgaaccggcgctgaaggcgaaagtggataccctgatcgagcagggcattaaggacggcaccctcaacggtttgtctgagaagtggctgaaagcgccgctgcctgccagcctcggcgcgtaa

SEQ ID NO: 213617 - DNA, 840 bp, Klebsiella pneumoniae
atgcaacaactcgatgaacgactgaaagggcaatacgcctcgctgtcgccgcaggaacagcgggtggcggatttcatctttgaccactttaatgacctgataagctacaacagcgccgagctggcgcagctgagcggtgtatcgaaagccaccgtcagccggctgttcaagcgcctgggctatgacaaatataaggacatgcgtgatgaactgcgcaccctgcgccagagcgggatgccgctgactgatcagcgcgacgcggtgcagggtaacacgctgctggcgcgtcattataagcaggagatggcgaacctcacccaatgggtcaatgcccttgacgcgcgccagttcgccgaggcgctgacggcgatggtggccgcgcgccgtattgtggtgattggcatgcgcaatgcctatccggcggcgctgcacctgcgccagcagctgctgcaggctcgcggtcaggtgctggtgctgccccagcctgggcagagcctcagcgaagagctggtcgatctgaccgccgatgacctggtggtggtgatggcatttcgccggcggccgcggatcgtccgcccgctcctgcagcagctgcagcgcgatggtgtgccggtcctgttaatgtgcgagccgcaggcccacagtctgttcccgctctcccgctggcagctctgcgcgccgctggacagcgtctcggcttacgacagctatgcctcggtcaacagcctgatcaatctgctggccaatgcctttctgcacgaaacgctcgatagcggtcgtccgcgcatccacgatatcgctacgctttaccagcaactggacgagctggaacaacggtga

SEQ ID NO: 213618 - DNA, 1587 bp, Klebsiella pneumoniae
atgcacagtagcaacgtttcgacccacggcatggcggtcgctccccaccacctcgccagccagagcgcgctggccatcctgcgcgagggcggcagcgccattgaagcgatggtggctgccgcggcggccatcgccgtcgtctacccccacatgaacggcctgggtggggatggtttctggctgatcgtgccgcctgagggagaccccatcgccattgacgccagcggtgcggccgggtcgctggccaccctcgcggcctatgccgggcagcggcatatcccccaccgggggccgcaggccgcgctgaccgtcgccggcaccgtcagcggctgggacgaggcgctgcggatttcacgggacttaaccggccgcgcgctgccggtggcgcgcctgctggccgatgcgatcggttatgccgaagacggcattccggtcaccgcctcgcaggcccacgccaccgccagcaaactggaagagctgcgccatcagccgggcttcagcgaaacctggctggtcgcgggcgaggccccgcggcccggcagccgcttccgccagcccgccctcgccggtaccctgcgcatgctggccagcgacggtctcgacagtttctatcgcggtccgctggctgaacgtctcgcccaggggatggccgcgctggggatgcctgtcacactcggcgacctgcaggcccaccgcgcccggcgtccggcgccgctgacgctccagcaccagcagggaacgctgtggaacctcgccccacccacgcaggggctggtgtcgctggcgatccttggcattaccgaccgtctgaagatggcggatgccgacgaggcgcaaacggtgcaccgtatcgtcgaagccaccaagcgggcgtttgccctgcgcgatgcgcatatcaccgatccgcgccatctggatgtggatgtacagcagttgctcaccccggaagccctgcagccgctggccgacagcatcgacgacgccagcgcttacccctggggcggcggtaaaggcccgggcgataccgtctggatgggcgtcgtggataacagcggactggcagtgtcgtttattcagagtatctatcacgagttcggcagcggcgtggtgatcccggacaccgggatcgtctggcaaaaccgcggggcggccttcagcctcgatccgcagcatctcctggcgctggcccctggcaaacagccattccacaccctcaaccctgccgccgcgcgcctgaacgatggccgggtgatggtctatggctcgatgggcggcgacggtcagccacagacccaggcggcgctgtttacccgctatatcctgcagggggcgccgctgcaggagagcatctcacggccacgctggctgctgggccgcacctgggggcagtcctcggagtcactgaagctggagggacgctttgcccccgcctgcatcgcgcgtctgcgcgagctggggcacgaggtggaagtgctggccgatttcagcgaggcgatgggccacgccggggccattgtccgccatcccaatggcctgcttgaaggggctaccgatccacgcagcaacggcgccgccgccggatactaa

SEQ ID NO: 213619 - DNA, 186 bp, Klebsiella pneumoniae
atgaccacacagccagactggagcgagtatctgacgcagatgacccacctgttacgcctggagctggaggcgccgcgccgtgaggagctggagcgccagttttcccgcatcgccgccatggcgcagccgctgatggactatcccctcgggccgcgcgacgacattgcgggggtgtataaagcatga

SEQ ID NO: 213620 - DNA, 1398 bp, Klebsiella pneumoniae
atgacacttcaccatttcaccatcgccgagatccagcgtgcgctgcacgatggcgaactgagcgcccgggagatcgcctgccagacgctggacgatatcgcccgcgttaatccgcagatcaacgcctggaccgaggtcaccgcccagcgcatgctggcggaggccgacagcatcgatgccctgcgccgggaaaaacgccccttgccgccgctggcgggcattccctacgcggtgaaaaatctgtttgatgtcgccgggcacaccaccctcgccggggcggagctgctgagcggccggccgccggccgccagcgacagctgggcggtgcgccagctgcacagcgccggcgccctgctcagcgggatgctcaatatggatgcctacgcctatggcttcaccaccgaaaacagccactatggcgcgacgcgcaacccgcacgatctgtcgcggatcgccggcggatcctccggcggttcggccgcagcggtggccgccgggctggtccatttcagcctcggcagcgacaccaacggctcgatccgcgtccccgcgtcgctgtgcgggatctttggcctgaaacccactttcggccgcctctcccgctccggcagccatccgtttgtcgccagtctggatcatattggtccctttgcccgccgggtggccgacctcgccgcggtgtatgacgccctgcaggggcgcgacccggccgatgactttcaggccgataaagccagcgagcgcaccggcaacctgctggatcgggagctggagggtctgcgctgcgcgcggctggggggctatttcaccacctggtgcgatgacgacgcccgggcggccgtggatcgggtcgcccacgcgctgggcgccgacagcgagctgcagttcgcggatgccgccctggcacgctcggcggcttttatcatcagcgccagcgaaggcggcaatcaatatctgccggatcttcgccagtcgcccgagcgctttgaaccccactcccgcgagcggctgctggccggggcgatgatcccctcggcgtggtatctgcaggcccagcgcttccgccgtcatgcccgtcaggcgatgaaatccctgttcagtcaggccgacgtgctgattgccccggccaccccatgcagcgctacgccaattggcgccgaggagatggtgattaacggccagccgctgccggtgcgcgccagcatgggtatgctgacccagccgatctccttcctcgggctgccggtggtgaccgtgcccctgcgtaccgccagcggcaagccgattggcctgcagctgatagccgcgccgtttaacgaacaagcctgtcttcgcgccgcgcgagcgctggaagcgatgggcgttaccgatgcccgagtggcggagagtgcagcatga

SEQ ID NO: 213621 - DNA, 387 bp, Klebsiella pneumoniae
atgatcaatctggacaatgtagaccgcccggcgatcctcgccgaggtgacggcggcgttttatcagtatgaagaggcgctggtcagcaataacatcgaggcgctggacgcgttgttctggcatgacccgcgcaccgtgcggctgggggccggcgaaaatctgtatggcattgaggcgatccgcgcctttcgcgccgcccgccccgccgccggtctggcccgcgacctgcgccataccaccatcaccacctttggcgcggacatggcggtatgcagcaccgagtttacccgcgaaggcagcgcgcgccttgggcgtcagcagcaaacgtgggtgcgctttccctacggctggcggattgtcgccgcccaggtcagtctgatggactga

SEQ ID NO: 213622 - DNA, 423 bp, Klebsiella pneumoniae
atggtgttaatcagggctgctgaatcaaaagatatccccgcgctgaaaacgctatttctgcagctgggctatcagacggagacggcgatcttagcgcaacgcatcactgaaccccaaagtatgatgcatacgctggtggctgaagcagaaaacaccgtgtgtggcgtggtcgttatcaattttatcttaccggtacatgagaaccgattgtgggcattaatttccgcgctggtgatagaggaatcgtcacggggttcagggataggccagcagcttctccatgccgcagagcgcctcgcccgcgataaacaatgcgctcatattgagctttcaagcagtgaaaaaagaatcagagcgcatcaattttatgaaaataacggctataaggaagtccgcaaacgcttcgttaaacatttgtcttaa

SEQ ID NO: 213623 - DNA, 1119 bp, Klebsiella pneumoniae
atgaagcaggtgggtattgttggctggcggggcatggttggctcagtattgttgcagcgcatgatcgaagaaaatgatttcgacgatatttcagcgcatttttttagtacctccagtgcgggtgccgctggtccggttattaaaggtaaaagcgacaaactgaaagatgcgaattcccttagcgccctcgccgaaatggatattattataacctgtcagggcggggattataccaaagccatctatcctgcgttaactaactctggctggcaagggtactggattgacgccgcttcggcgctgcggatggatgacaacgcctgcattattctcgacccggtcaaccgcgataatatcgatcgcgcggtgaaagcgggaatgaaactgtttgtcggcggcaactgctccatcacgctgagcctgatggggctggccgggctgatcaaggctgacctgattgaatggatgagcgtgatgacctatcagtctgcctccggggcgggcgccaaacaggtgcgggaattcatcgcgcaaagcgcgtatatcagtcagcatttatctgcggatgaactgacggcatcaggttccgtgctgcctttagtcaataaagtgagtgagttgattaatagcgccggcatgccggtggagaattttggcgtcccgctgatgggcagcatcattccgtggatcgacagcgatcttggcgatggaaacagccgcgaagaatggaagggcgaggcggaaaccaataaaattcttggccttgcatccggcaccatcccggtcaatggcttatgcattcgggtcggcgtaatccgctgccacagcgctgccattacccttaaactgaaacgtgaggtcagcgaagcggaatttgctgagttagtcacccattcccatccgtgggtaaactatatccccaataataagcaagagagtgtcagtaaattgaccccggctgctattagtggttcgttgcaggtaggaattggccgctacaagaagatgtcgctaaataatgaacccgtctactcggtgttaacggttggcgatcagctattgtggggcgcggcggaacccctgcgccgcatgttaaatatcctgctgggcaaaatatag

SEQ ID NO: 213624 - DNA, 558 bp, Klebsiella pneumoniae
atgaaaaatgaaccgctttgccacgctccctgccccatcgcccgcagcctgggccgcatcggcgacagctggagcatcatgatcttgcgcgacgcctttgcgggctttacccgcttcgacgaatttcagaaaagcagcaacgtcgcgcccaatattctgtcgcgccgcctgaaggcgctggtcgacgacggcctgctggagaaggtgtgctacagcagcacgccgccgcgctacgaataccacctcaccccgcggggccgcgatttccgcatggtgctgctggcgctggcggaatggggtaaccgccacttcgctcccgaaggccgtcagatgcagctggtggaaaccgccacccagcgccgggtggatccgatcatggtggataaagcgaccggggaagagattatcccgggtaaatacgccatggtgccgggccccgccgcctcgccgctgatgcaatatcgtcatgaatatctgctgcgcaaacgcgaaggcgatagcgggcaaaaattccagcctgaaccctacagagatgccaaccatgaagctggccagtaa

SEQ ID NO: 213625 - DNA, 1041 bp, Klebsiella pneumoniae
atgaagctggccagtaagaaaagcgtcctcgtcctggcggccctctccgccgtgctggcggcagcgagctacggcgcgtactggtggcaaaccggacgttttctgcagaccaccgatgacgcctatgttggcggcgacattagcgccatctccagcaaagtctccggctatatccagcagctggcggtgcaggacaatatggcggtgaaaaaaggtgacttgttgatccgtattgacgaccgcgattatcgcgccgccctcgcgaaagccgccggagaagtggcggcgcagcaggccgcgctggccgatatccaggctacccgccagctacagcaggcgaccattgccggctctgcggcctcgttactggccgccacggcggcaaccgaaaaactggctaacgacaaccgacgctataacgccctggccgcgtcgagcgcgatttccgcacagatccgcgataacgcctccgccgattatcgccgggcgcatgccgagcaggagaaagccaaagcggataaaaccgtggccgaacgtcagctggcggtgctggatgctcgccagcagcaaaccctggctgccctggcgcaggcccaggctaacctcgagatggccaggctgaacctcagctataccgacattcgcgcgccgttcgatggggtgattggcaaccgccgcgcgtggtccggctccttcgtcagcagcggcacgcagctgctctccctggtgcccgcgcacggcctgtggattgacgccaacttcaaggaaaaccagctggcgcatatgcgcgccggccaggcggtgaccatcgtcgccgatgtactgccgaaccatacctttaagggccatgtcgccagcctggcgccggcgaccggctcacgcttcagcattctgccggcggagaacgcgaccgggaatttcactaaaatcgtgcagcgggtgccggtccgcattgcgctggaaggtgacggggcaaagcttgacgtcctgcgcccgggactgtcggtgatcgtcaccgtgaacgaaaagagccctcgatga

SEQ ID NO: 213626 - DNA, 1563 bp, Klebsiella pneumoniae
atgagcaccgctcaggcgctgtccgccccgcaaagtctgtcgatgccgacggcgaagaaaatctttgccttcgccagcatgtgcgtggggatgtttatcgcccttatcgacatccagattgtctccgcctcgctgcgggatatcggcggtggcctgtcggcgggcgacgatgagaccgtctgggtacaaaccagctacctgatagccgagatcattattatcccgctttccggctggctggcccgggtcatgtcgacccgctggctgtttgccgcctccgcggcgggcttcacactgatgagcctgctgtgcggctgggcgtggaacatccagagtatgatcgccttccgcgccctgcaggggctggcgggcgggtcgatgatccccctggtgttcaccaccgctttcgccttttttcagggcaaacagcgggtcattgccgcggcgacaatcggcggcctggcctccctcgccccgacgctgggcccgacggtgggcggctggatcaccgaaaactacaactggcactggctgttctttatcaacgttgttccggggatttacatcgcggtggcagtgccgctgctggtgaaagtagacatcgccgaccccactctgctgcgcggcgccgactatctcagtattctgctgctggccgtgtccctcggctgcctggaatataccctcgaagaaggtcctcgctggggctggtttgatgacgcgaccctgacgaccaccgcctgggtcgccctgctctgcggcgtggcttttgttatccgcaccctccgccatccgcagccggtgatggatctgcgggccctgcaggaccgaactttcagcctcggctgctatttctcgtttatggccggcgtcggcatcttcgccaccatctatttaactccgctgtatctcggtagcgtgcgcggtttcagcgcgctggagatcggcctggcggtattttccaccggcttgttccaggtcatgtctattccgttttattcgtggctcgccaaccgcgttgacctgcgctggctgctgatggccgggctgatcggttttgcggtgtcgatgtacagcttcgtcccgataacccatgactggggggcggaccagttgcttctcccgcaggcttttcgcggactggcgcagcagtttgccgtcgcgccaacggtgaccctgacgctgggcagcctgccgcccgcgcgcctgaagttggcctccgggctgtttaatctgatgcgcaacctcgggggcgccatcggcatcgccctgtgcggcacggtgcttaacgacagaaccaatttgcactacagccgcctggcggaccatctgaataacgccaacctggcaatgagcgattttgttcagcgcagcgcagcaaacttcgccacgcaggggatctcgccggatgccgcgcagacggcggcgctgaaaaatctttccgcgctggcgctgcgggaggcgcgaacccaggccttttccgatgctttctacctcatcatgatgggttttttgcttgccgcgatgctggttcccttgatgaaaaagccgccggcacactga

SEQ ID NO: 213627 - DNA, 1275 bp, Klebsiella pneumoniae
atgggcgtttccgttaaacgcattgtcgtcaccgggatggggattgtcagcccgctgggctgcggcgtacagcacgtctggcagtcgctgctggcaggaaagtcagggatcacccgactcagcgagcagctggtcgcggatattccctgcaaagtggccggccaggtgccgtccattgaaagcgatccgctgcacggcttcgacccgctggcgaccatcccggcgaaagagcgcaaaaagatggatcgctttatcgagtttgcgctggtcgccgcccgtgaagcgctgacccaggccggctggtcgccagcatctgcggccgaacaggaacgtaccgccacggtgatcgccaccgggatcggcggcttcagcgagatcgccaatgcggtacataccaccgatgaacgcgggccgcgtcgcctctcgccgttcactatcccctcttttctggccaacctggccgccgggcatgtgtctatcgctcacggcttccggggccccatcggcgcgccggtcaccgcctgcgcagcgggtgcacaggccattggcgatgcggcgcggatgatccgcagcggcgaggcggatattgccctctgcggcggcgcggaagcggcaattcatcgcgttagcctggccgggtttgccgcggcaagggcgctctccagcgcctccaacgaccagccggaagccgcttcccgcccctttgaccgcgaccgcgatggatttgtgatgggagaaggcgcggggcttatcgtgatcgagtcgctggagcacgcgctggcgcgcggcgccacgccgctggccgagctggtcggctacggcaccagcgcagatgcttatcacctgaccgctggcccggaagacgggaacggcgcacgtcgggccatggagaccgctattcgccaggccggggtgaccgtcgacgagattgaccatatcaacgcccacgccacctcaacgcaggtaggtgataaaggtgagctggcggcgattaaaacgctgtttggcgcgcatccggtcgccattacctcgacgaaatccgccaccggccatctgttaggcgcggccggcgggatcgaggccatcttcaccattcaggccctgcgcgatcaggtggtgccgccgacgctgaacctgcatcaccccgatgaagaggcggcaggtctcaatctggtggcgctgcaggcccgcccgcagaaaatgcgttatgcgctgtcgaacggttttggctttggcggcgttaacgccagcctgctgctgaaacgctgggaataa

SEQ ID NO: 213628 - DNA, 492 bp, Klebsiella pneumoniae
atgactattatcatgattctgctcgccgtcgccggtggcgccatgctgagtatccaggcggctatcaatggccagctgggcagcaaggttggcgtattcaaaagcgcattcctgacattttctgtcggcgccctggtgacggggctgctgatctttttcttcgaacccaaacacaccctgacgctgatggacgtgcctaaatggcaactgctgggcgcaatgtttggtgtgccttatatcgttattatggtactggccgtccagcgtattggcgcggcagttgctacggtcgctgtcatttttggtcagttaaccatgagcatgctgatcgataacttcggctggctgggcaatgcgtcgattccattctcgctgagccgaatcggcgccattgtctgcctgggtatcgcgctgttcttcatttactccagcagcagggcaaaagctgccacggcgaaaatcccccgccagccatcgccgggggggagctga

SEQ ID NO: 213629 - DNA, 435 bp, Klebsiella pneumoniae
atgcagctaatattgatttttatcgtcattgccggaggcatgggactgtccatagaggcaggattgctcggaccattgggtggggaggtcggtgacctctgggcgaccttcagcatattcggcgtgggcgcggcgctgacctttctgctgatgctttttttcagcccgcgcaacagtccgtcgttctttgcgcaaccagcatggcagctgcttggcggcgtgcttgggccgatttacgtcatcatcctgaccgtagtaacgccggcaatcggcatcgccatgactatgatcggcatcctggcaggccaggtgttcaagagcctgattattgatcacttcggtctgctcggtacgtcgcgccggaaaattgacagtaaacgtatcattgcgctgattttcatcattgcagcgctggttatggttgcacaggggtaa

SEQ ID NO: 213630 - DNA, 936 bp, Klebsiella pneumoniae
atgaatgagcttgggaacatcagtattcgcgccctgctgatttttatagacgtctatgagacgcagaatttctctgtggtggcccggcgggaagggatatcggcctctcaggtatcgcgggtcatccatcagatggaggatgtgctcggccagcagcttttttaccgcaatacccgggcgataatcccgacggaaagcggccatctttttatccgctatgcgcgagcgatgactggcagcatggaggaggcgcggcgggaactcaacgagagaacgcttgagccttccggaatggtccgcataaacgcacccgtattctttggacagcgccatgtcgcacccgcgttaccgggcctgacggagcgatatccgaagctcagcattgagcttacgctgactgatgattacatcgatccgcaccgtgagccggctgacgtgattttccggattggcgtactgacggattccgcatttcatgcgcgcgtgtttggccagcagtgctatcatcttgccgcgtcaccggattatatccgccggcacggcatgctgggatcgcccgaagagctcgcccggcataaatgcctggtctaccgcggttcgtcaggaccaaaccaatggctgctgcgccggcacggtgaggaatgggtgcactaccctgtctcacccctgatgtcatcgaataatgctgaaaccctgctgattgccgcactcggagggatggggattgtgctgtttcctgactggctgattggagaccggctaaagagcggcgaacttatcgaactgctgccggagctggataggtccataaaaacggagccacagcatatcgcggcaatctatccgaatgcccgccaccctccgctgaacgtgcgggcgattatcgattactacatcgacgcgttcggttcaccgctttactggcagtctgaataa

SEQ ID NO: 213631 - DNA, 411 bp, Klebsiella pneumoniae
atggttgaggttgaggaaataaaaaagaagtatcccggcgcagatgcctggcaaatgggtgacagtcctgaactggctaacgagcttgctgacctgatcaaaaaagggatcaaaacggcctcttgcggatcttttgcctcttaccagcaggaaaaaactgccccgagaattgggagttatcacattattcttgatggccagaatgttccagtttgcgtgatcagactgatttcgatgcagctggttcgtttttgtgatgtgactgaagcattcgcccgcaaagaaggtgaaggcgatttaagccttgaatactggaagaaagagcatcagagatttttcagctccgaaggtcatttttctgaggatgtggagttgatcgcagaagaatttgaagtggttgaggtgctgtga

SEQ ID NO: 213632 - DNA, 900 bp, Klebsiella pneumoniae
atgctatcttacatgctatctcaatatgccaggctacctgtgcctcaatttaccctacgttcatggctaaaacaatggttgtcagagcaggaatcgaggtgtacagacagaagtttctcggcgcgatttccctggagagaaactggattatgtcaggaatattttttacaacgaaaactcaaaattgatggaaagcaatttcttactggcccccgttatcagggaggaaatattaacaaaccttttattgatattgtaggtatggattctgacctaaatcatactgcattagaactcattagtaaggaatggtcacaactcagagctcagtatgtccgcattcttgtacccggccagtccttcccgcagggtattcccgaccagtatatatacgccacctctttttctgaaccccctgaattcaatgataaatctcttactttgcaagtggcgacatacgaagattttgactggtgttgtcaggctctgggcgatgcctataagcatacatggcagacagttcgcgaactgtctgcaaacaatttggtagcagttgatgacgaagagttgtgtgaccatatttctgagagagaagtatatattatctatgaaaacgacgttcgcgccgggttgctaatatgccagaaaggaaacatcgcttttctgcgaggatatcgtattactgacaaagtaatacttcctgtttttcgtggtcgatcattgtcagcccgagcgcaacgcctgctgtaccgattattaactcattccgattctgaactatctttgtatatgggcacaattattccggagaatatcccctcgatgaaaactgcagaaagagcgggacgaacttgcatcctaagttatcaatttctacccatctgcagaacccacgactaa

SEQ ID NO: 213633 - DNA, 774 bp, Klebsiella pneumoniae
atgccaggtagtatagataaagcgccaagacatgatgaggccacaggctggtccagtactgcgataagctatcaacgcggcgaggcagatcctccccatcatcatgttgaggggcagctactcttcgccaccagaggggttatgctggtgcaaacagagagcgaccgttgggtgatccctcctcagcgggcattatggttaccgcctctgcatatccatagttaccatctgctttcacaaaccgatctcagagcgatctatttcagcagtagccttatcgcagaatgtacgagctttacaaagagtcagcaggtgcatgtgataacggctacgccgttagtcaaagaacttatcgcagggctgttcagtgaggactacgccagaccgattcaacggaagatagctttgttgcttctggaaattctcagcgaggctccacctttaacgatggcgcttcccatgccgaatgatgagcgattatttagcgcggccagatcgctactggtcactcagcgctgggaagcatcgctgagcgagctggcttttatgtcggccatgtcggaacggaccttttcccgcttgtttatgaaggatacaggctttagttttagaacatggaagcagagagccagaatttgcgcttcgttggatcttcttgcgaacggcgttccaatcaaacaggtcgcttaccagcttggtttctcatgcccggcggcctttaccgctgcttttcgctgcattttgggggcaacgccgcgcgattatgtgccttaa

SEQ ID NO: 213634 - DNA, 726 bp, Klebsiella pneumoniae
atgcgcgtacactttatcgtacatgaaagttttgaagccccgggcgcatatgcaacctgggcaataaaccagggtcatgatgtaacttactcacgcgtctatgcaggcgatcggctacctgctgacgccgaaggcatggattttcttatcgttatgggcggtccgcaagatccggacacaacgcttgaagcgtgcccgcactttaatgctaaagcggaacagacgctgattgcttctgcggttaaaaccggtaaggcggtgatcggtatttgcctgggttcacagctaatcggtgaagcgctgggcgcaccgttctctcatagcccggaaaaagagattggtaaattcccgatcacattgaccgaagacggcaggaaggatgagattttctctcactttgggaaaacactggcagtgggtcattggcataacgatatgccgggtttgacgccagaggccaaaattattgcttacagcgaaggctgtccgcggcagatcgttgcctattcagaccgcgtctttggtttccagtgccacatggagctcacattggacgttgtagagcggctgatcgctcattctgagaaagacctgagccgtgcagcagaatatcgtttcgttgacacgcctgaagcgctccgggcgcacgattatagcgaaatgaaccaagtactttttggctttttggataagctggaggcacgttacaaagcagcgcaagcataa

SEQ ID NO: 213635 - DNA, 309 bp, Klebsiella pneumoniae
atgctgtacgccgttacactgacttacctgacacaacccgatgcaatttctgctcatcttgacgcacataagcaatggctggtcaggggttttaaagaaggcaaaatcctttttgctggccccctcagcaatcatgccggcggctacatactttttaaaggagacaatgcaagtgaaattcaacactgtcttcaggatgaccccttcatcatgcataacattgccgatgcagaaataatggttattgagccagcgctatgtgcgcagggattccctgagaaatgggcagagaaagcccgtttcatttga

SEQ ID NO: 213636 - DNA, 636 bp, Klebsiella pneumoniae
atgaaaattctccatcttgattccagcatcaaccatgagttttcagtaacccgccagttgtcggctgaaatagtaaggcaactggtggcaaccggtcaggagcatcagctgacttatcgggatcttgttaaagacgaaatcagtcatctgaccggggagatcgcttcaggtttcaggtctgtatcggaacggccgattgctacaccccttctggcatctgagcagcaaatatcagacgctctggtctcggagtttcttgaaagcgagatgattgttgtcggcgcgccaatgtacaacttttctgtatccagccagctgaaggcctggatggacagaattgctcagccagggaaaaccttcagctataccccagctgggcccgttggacttgcggggggcaaaaaagtcatcatcgcctcagcgcggggcggtttttatgccggtacgggactggaagatatggattttcaggaacagttcctgcgcaagtttctgggcttcctgggcatctcgtgtgttgaatttgtccgtgctgaaggtgtgtcgaaaggtgaggacgtaaaactcagagaaatttcccgtgctttgtctttaattccacaggccattaatgcgatttttgccgctaaggaatga

SEQ ID NO: 213637 - DNA, 762 bp, Klebsiella pneumoniae
atgtcacgcgcgctgataaaaggagcatttgccttgtgtcttctattcatgaatagcccgttgcttatggcacaggaagaggggataaaaaatatcgtgctggttcacggtgcctttgctgatggctcgtgctggtcagccgtcatctccctgctgcaggagaggggataccacgtttcggctgttcagaatcctctgacgtcattacgagacgatgtaactgcaactgagcgtgtgcttgagcgccagaagggtaacgttctgctcgtggggcattcatgggcaggagccgtgatcactcaggctggcaatgcgagcaacgtcaggggactggtctatttatccgctcttgttcctgacagcaatcaatccgtatctgacgcactggcgcgatttcatgcacccatgacagggatggaagccgataagaacggccttatctggcttgatgagccagagttttttcaccaggttatggccaatgagctaagcatcaaaaagagccggcagctcgctgctgtgcagcagcctgtcgccgctaccgcctttcaggaaaaagtgaaggaagccgcctggcgaaagaaaccgtcctggtatctcatcacagaaaacgacaacgcgctgaatccgtcagtacaggcccgttttgcccatgaggctggggcgcacatcacgcgaattcactcagaccacctgtccatgatttctcatcccgaagaggttgccgcattgattgttaacgcggcgcagagcatccactga

SEQ ID NO: 213638 - DNA, 1035 bp, Klebsiella pneumoniae
atgcgaaatcagacattcttcatgacggggttaaacatgcgcgttgcgttacttgctcttccgggcagcatgcgttcggcgcttgcggggctggctgatatgttctggctggcgaatcaggtggtcaggatgaaccctacggtaaatcctgagttatccagagatgttcctttattcgacgtcaggacgattaccgctgatggtcagccggtcagggatgttcagggacgcagtattgaaagtgatggcgcatttagtggacctgatacctttggggtgattattgccagcggtatgcagctggatgagcatagatttcccgttgacagagccgctgtatcaaatgcagccgagtggctgaaagtgaagtatttaaagggaagctgtattgcctcagtctgtgcaggcagttttgtactgggagaagcgggtttactcaacggacgggtctgcaccacaacgtggtggttatatcccactttcgctgaacgctatccactggcaaaacctgtatggggaaaaaccctggccgagcaggacaatgttgtcactgcgggtggaccactttcatgggttgatctggtcatatacctagttcgcaaatacgcaggtaatgagctggcaaagttaacagctgacatggccgttgctgacagccagcctctgtcacagcaaatttatgcgcccgcaggttttctcaattcaaggcatcctttgctgactaaagcagagagcctgcttcgttatcaaaatcctgcaatgacggttgagcaacttgctgcagctctgaatatgaccacccggacgctaaaccgtaaaatgaaactactcgtccaggaaagcccaaaagacttcattacccgagttcgtattgaaacggcatccgtgctgctggaaagcccaggaaaaactatttctcagatcgcaagtgcatgcggatacggcgatgaaacagcgttcaggcgtgcctttagcaccataatggggatgtcccctggaagtttcagaaagcgtcttttaataaagcgcccttga

SEQ ID NO: 213639 - DNA, 660 bp, Klebsiella pneumoniae
gtggggagcatttcaaacaacagcatatgtggcccttcaatgatgcaagtaatactggttcgacacgcggaaacagagtggaatgtaaaaggtattattcagggacacagtgatagcgccttgacgctccgtggggagcgtcaaacagcagcattgctggcagcgtttgtagcgagtgattaccgggtagaatgtgtttacgcttctccgcttggccgggcctggcaaatgggacagcgcctggcggagagttttcattgttcactgatagctgaaccagcgctgaaagaacaggcttttggtcagtttgaaggtatgacaaccatagagctcctgcagaataatccagacgccgcagaagcgttattcaaccttgatgcagagtattgtccgccagagggtgagtctctctcacatgcttcgcagcgaattatgcattttttaaccaatctggaaaaaaaacgtcatcatcgaacaatatgtattgtgtctcacggacaggtcattcagggtgtgcttgcgatgctaaaaagtggtgctgtggatgattttcaccggtatgcacaacccaacgcgagttactccgtgttcgaactgattaatggaagatgtaccgccctaaaatgggggatcgcgacgcatttacgtcacctggattaa

SEQ ID NO: 213640 - DNA, 225 bp, Klebsiella pneumoniae
gtgaaccatttaatctttgaaaaagtcatcatcatcttcattctcgtcctgtgggtattcgatacattcagaaccaggaaaagaaaacgttttgatcctgccattgaagcggctgatgccagagaacgttatcaatggcgttatttcagatggggttttcggatcatacaagtggtagcgggagtgtatatcttcgtacagctgattcaggtattaataagatag

SEQ ID NO: 213641 - DNA, 768 bp, Klebsiella pneumoniae
gtgcgcaacgtaaaaattgacgaggtcgatcggctcgatcgcgaagtggtggcgttaggtaatgactatgcgcaagggtttatcctgcccccgcaccagcatcgccgcgcacagctgctgtatggcgcgaccggactgatgtatgtcactacgcaggacggagaatgggtggttcctccgcaacacgctgtctggatcccccctgaaaccgtgcacgccgtcagatttgcgggggtgaccacgcgcagcttgtatattgagccagattgtgtggccgcttgcattaaacaccggcgttgcgaagtgatcagcgtctcgccgctgttgcgccagctactgctggaggctgtagatttaccaccgttgtacgacagcccacgcgatcgcatgctgatacagttgatgttgctggaactggccgccatgccggtccgcgaatttgatattccgttgccgcagcatccggcgctgctggcgctttgtcaggcttttttgcttaaccccactatccatgatcctgcggcgcgctgggccggggcgctgtttatgagtcccagtacctttcgtcgccatttcctgaagcagctgggcctgtcattttccgcctggcgacagcgagcctgcgtggtgagcgccctggcatggttgatagcaggcaaaccggtgaacgaagtggccttatcccttggatacgacaatgcgtcctctttcgccaccatgttccgccgcgtgaccgggcaaccgccgtcgttttatcacccagcctga

SEQ ID NO: 213642 - DNA, 768 bp, Klebsiella pneumoniae
atggcaggctttactaccggtattaccacggtgctgttcggcttcgggggcggctttgtggtggtgccctttgtctatcaactgatgctccgccagccggaactcacggaaaacgctatgcacgtcgcggtggctacctcaacggcggtgatgatatttaacgccggctggatcagctatcgtaactggcgggcgggcaagcttgccgcacagacgctgtttccgttgatatggtttattgccattggggcagtagtaggctcctgtctggcggggttatttagcgagaatatcgttcgcgcgctgtttattctctatatgctggcaaccatcagcgattgtttgttgcgcaagggatttttcacgggcagcgctcggcgtcggctgtcactgccaatggtcaccggcggcggtgtggttatcggtacgattgccgcattgctgggcgtgggcggcagcgtcatgacggtgcccctgctacggcgacacgggtatgcgatgcaggagtgcgttagcgcatccaacccgctttctttgcccgtggcgctatgcggcgctgtgacctatgccatcattggctggcacaccattccgttgagcggatttctgggttttatcagcctgaaaattctaggcctgctcgtcctgaccggctgggccgggatagcgtttagccgccgggctatccctgcggtaccggatgtatggtatgcacgtatctatgtcctgctactgttcctggtgctcctcgccatgctgattcaataa

SEQ ID NO: 213643 - DNA, 933 bp, Klebsiella pneumoniae
atggttgagaaccaggaacactatcctcgcgatctgcgaggttatgcagggcagccgccgcacgcgcgctggccgggcggggcgcggatcgcggtgcagttcgtcctcaactatgaggaaggcgcggagaatcacgtcctgcatggcgatgcgggttcggaacagttcctgtcagatatcatcggcgccgccagctatccggcgcgtcatatgtcgatggactcgctctatgagtacggcagtcgggccgggttctggcgcatccatcgcgaattcagccagcgagggctgccgctgacggttttcggcgtggcgatggcgctggcgcgtcatccggagattgtggcggcgatcaaggcggcggattacgatgtggtcagccacggctggcgctggatccactatcagcacatggatatcgccgaggagcgcgagcatctgcacaaagcggtgcaggtgctgacagacctgttcggcaagccgcccaccggctggtataccggccgcgacagtcccaacacccgccagctggtggtggagcacggcggctttgactatgacagtgattattacggtgatgatttacctttctggagcgaagtggcctgcagcgacggcagccagcggccgcacctgatcgtgccttataccctcgacgccaacgacatgcgctttgccaccgcccaggggttcaacaccgcggagcagttttatacctatctgaaagacagctttgacgtgctgtacgccgagggagaaaccgcgccgaagatgatgtccgtggggatgcactgccgactgcttgggcgtccggggcgtttccgcgcgctgcagcgattcctcgactatatccagcagcacgacaaggtgtgggtctgcacccggcagcagatcgccgaccactggcgcgaggttcatccgtatcgcgggtag

SEQ ID NO: 213644 - DNA, 744 bp, Klebsiella pneumoniae
atgtcttctgtttgtatacaagtgatcaaccccaacaccagcctggcgatgaccgaaacgataggcgccgccgcgcgcgcggtcgccgcgccgggcaccgagatccttgcggtctctccccgcgccggcgtgccgtcaattgagggccattttgacgaagccatcgcagcggtcggtgtgctggagcagatcaaggccggacgcgagcagggggtggatggacatgtgatcgcctgcttcggcgacccggggctgctggcagcgcgcgaactggcccaggggccggtgatcggcattgcggaagcggcgatgcatatggcgacgatggtcgccacccgtttctccattgtgaccacgctgccgcgcacgctgatcatcgcccgtcatttactgcaccagtacggatttcatcaacactgcgcggcgctgcacgccattgatttgccggtactggcgctggaagacggcagtggcctggcgcaggagaaagtgcgcgagcgctgcattcgcgcgctgaaagaggatggcagcggggcgatagtccttggctgcggcgggatggcgaccctggcgcaggagctgacccgcgagctgcgggtgccggtgatcgatggcgtcagcgcggcggtgaagatggtggagtcgctggtcgcgctgggcctggcgaccagcaagcacggggacttagcgttcccggagaaaaaggcgttaagcgggcaatttcagtcgttaaatccattttaa

SEQ ID NO: 213645 - DNA, 717 bp, Klebsiella pneumoniae
atgaataatgaacatcgtctccaggccgcgccagcgctgcaggataaggacgaaagcatttaccaggcgctgatgacggctatcgtcgaacatcagctgccgccgggcagcaaactgccggaagaggcgctggcggaagtgttcgccgtgagccgcaccggcatcagaaaagtgctgcaacgactcgccgctgtgcaactggtcacattaacgcccaaacgtggtgcacacgtcaccagcccgagtgtggaagagtcccaggcgatctttcgcacccgggcgctgcttgaggtcgcgaatctgcccgatgtgatcgcgcgctgtcagccgccgcatctggcggcgctggagaacattattcagcgtgagcagcaggctcatgaggcgcacgacggcccggcggccatccgccactccgctgactttcacattcagctgcaggctatctccggcaacccggtgctcactgagatggtgacccgcctcagccagcgctcctcgttagtgattgccgcctggggcgcaccctggcgccagggctgtcgctgcgacgatcaccagcagctggtcggtttgctgcgggataaagccctgcagccgctcagcgaggcgctgatgcaccattttgatcatattgtcgccagcctgtgcttcgagcgcgatggcgtcagcctgcccgatttttcccggctgttcgccggtcacaaggagtcgtga

SEQ ID NO: 213646 - DNA, 1497 bp, Klebsiella pneumoniae
atgccacattcatcccacacgcagcagacgaagactcacgaggcggccgccggctacagtccgcggctttgtaatgacgatctggcgcccacccgcgaccagaactggagctggtacaatatcttttcgttctggatgtcggacgtgcacagcatgggcggctacgtggtggcggcaagcttttttacgcttgggctggccagctggcaggttttgctctgcctgctggtgggcatctgtattgtgcagctgtgcgctaacctggtggcgaagcccagccagatggccggggtgccttacgcggtgatctgtcgtcaggcgttcggtgtcttcggcgccaatatccccgcggtgatccgcgggctaatcgccttcgcctggtacggtattcaaacctatctggcggcgaacgccctgatgctggtcctgctcaagttctggccctccctttcctcgctgaccagcagcagtttcctcgggctgtcgacccttggctggctctgcttcgccaccatgtggctgctgcaggcgatggtgttctggcacggcatgaacgccatcaagcgttttatcgatatcgccggtccggcggtgtatgtggtgatgttggccctggccggctggattgtatacaagaccggtctggatgggatctcctttaccctcgccagcaaatccctcagcgctggcgagcagacctggcagatgatcaccgccacggcgctggtcgtctcttacttctccgggccgctgctcaacttcggcgacttttcccgctacggcaaaagcatgggcgagatccgccgcggcaaccgctgggggctgccgttcaacttcctgctgttctcggtggtcaccgtggtgatagtctccggcacccagtcgctgttcggcaaaatgatcaccgacccgattgaaaccgtcagccgcgttgggaacgatctggcggtggccatcggcctgctgaccatgatcaccgccactatcggcatcaatatcgtggctaactttgtctcgccggccttcgatttttccaactgcgcgccgcagaaaatcagcttccgcgccggcgggatgatcgctgcggtgggctcgatactcctgacgccgtggaacctgtttaactcaccggagctgatccactataccctcgacgtgctgggtgcctttattggcccgctgtttggcatcctgatcgccgacttctatctgatcaaacgcggccgggtgtcggtggacgacctgtttgacgatacgccgaagggtaaatactggtaccgcaacggctttaacccgaaagccattgccgccctgctgccgtcggtgggcctgggactgattatcagctttattccggccctgcatgaagtggcgaacttcagctggtttatcggcgtcttcctcggcgcgaccacctaccgctggctggctcgcgacgagcgcgaagtgcaggcgaaagccgccttccgctccggcgcggtggcgcaaaaagagtaa

SEQ ID NO: 213647 - DNA, 1311 bp, Klebsiella pneumoniae
atgatggattaccagaccgcggtgcgcggtgcattttttgatatcgccggcgtggcggagaccccggatgaggtggccgcccacgcccgctatctcgatgatggcctgttgttcttgcaggacggaaaaattgtcgcgctgctgccatggcaggagggtgaagcctttctgcatccgctgaagggctatgttgacctgcggggcaagctgctgttgccggggttcgtcgatgcccacgtccactatccgcagaccgagatgatcggcgcctttggcgaacagctgctggagtggcttaccacttacaccttcccggtggagagccagtttgccgatgcggagtatgcccaggagatagcgcagttttttgtaaatcaattgataagccatggcaccaccaccgcgctggtgttttgtaccctgcatccggcctcggtggaggcgttattcagcgaagcgctgcgcctcaatatgcgcctgatcgccgggaaagtgatgatggatcgccatgtgcccgactacctgtgcgaaaccgccggggagagctacgagcagacccgggggctgatccgccgctggcatcagcgtggcaggctggggtatgccattaccccgcgctttgctcccacctcgacgccggcgttgctggaggcggtgcagcgcctgcgggccgagtttcccgacacctggctgcagacacatctcagtgaaaaccgcgaggagatcgcctgggttaaacagctgtggccggagcatgcgcactatctggatgtctatcatcactatcaactcaccggcgagcgcagtgtatttgctcacgggatccatcttgatgatgccgagtggcagtgcctgcatgacaccggttccgcagtcgccttctgtccgacctcgaatctgtttctcggcagcgggttgtttcgcctgcccgcctgctggcagcaccaggtgcggatgggtatcggcagcgacgtcggggccgggaccaccttcagcatgctgcggacgctgggcgaggcctacaaggtaggacaactgcagagctatcgcctgcgcgccagcgaggccttctatcacgccaccctcggcggcgcgcgcgccctgcggctggaagagaagattggcaattttcagccgggcaaagaggccgactttgtggtgattgacccggcggtcactccgctgcagcgtctgcggatgggccgctgccatgatatttatgagcagctgttcgtactgatgaccctgggtgatgagcgcaatatcagcgagacgtgggtgaacggcgagcgggtgtggtgtcaggattga

SEQ ID NO: 213648 - DNA, 1140 bp, Klebsiella pneumoniae
atgtcgctcaatgagatgcgtaacggtatttattccacctgtccggaaacgcaactgcagcactaccttcgctatctcgacaccatgagcgagatattcgaagtctggacgttacccaccgccaatgggttgcagtcggtgtattgcaaaaccaccctgattgataccgaagactgtggttgcttgctgctgtttgaagccgtgaagctgctggcgcaaaatcagtcgattcataccggctcccgccgctaccagcggcgtaacaatggctttttcgctcgcttttttatgaccaataccgcgccgatgctgttgatcgaccctcataaagatggccggattgtcgatgccaatattgccgcgctacgtttttatcattattccgatgaggaaatgcgcaccaaacatacctggcaaataaataccctaggccgggacgtcatccccattatgaataatattgccagtctgcctggcggtcataagccgcttaattttacgcatattctggctgacggctcgctacgtcatgtccaaacttatgccgggccggtggtgctgtataatattcgactgatgctatgcatcattcacgatatcaccgaagaagtgcatctgaaaaaagagctggaattttccgccgcccacgatccgttaaccggcttgcttaatcgccgggagtttcatcgtctggttgaggcgccaacttttatcccccggggttattgtctgctgttaatcgatatcgatcatttcaagagcattaatgatattcacggccatcaaaaaggcgatgaggtcctgctggtgctctctcgtattctggaaacgtcggtcgaccgcgaagataaaatttatcgctggggtggagaagagtttctgctttttttgccccattcgccgatcggccgcgcgctgatactggcggaggggatccgccaggcggttagcgaataccagacgctgtcggtgaccgtcagcatcggcgtggctgaacatcatgacggcgaaacggttgaacaactgttttcccgcgtcgataaagcgctgtatgcggcaaaaaatgatgggcgtaatcgggtgacgcgcatgccttttgacagctctgagcgacggcgcagtagagatggcgccgcctga

SEQ ID NO: 213649 - DNA, 1041 bp, Klebsiella pneumoniae
ttgaaaaaaatcgccactaaaatcacccttgccgacattgcgcgtgaagcgcgcgtcggcgtagccaccgttgaccgggtgctcaataagcgcgcggcggtgaaagagtccacggcgctgcgcgtgctggaggccgcccgccggctgggttttaccctcgagcagccccactatcgcctggctgccggcaaagcgccggtcacgatcagaatgggctttatcctgctgcaggagagccactccttctacctgccgttggcccgggcgctgaagcgcgaggctgccccatggctaccggcgggccaggcgccggtgatactgcattttgccatcgatgcggtggaagcgatggctcaggccattcaccgactcagcgatgaagtggaggtgctcggcctggtggcgctggatcacccgctgattcgccacgcggtggcccgggccgccgcccgcggcgtgcgcgtgttcaccctgctttccgatctatcggtcccccagcgcagcgggtatatcggcctcgataatcataaagccgggcgcacagccgcctggtttatcgagcgcttatgccgggggaatggcgaaattggcattatcattggcgataatcgttttacctgccaggaaagctgtgagatcagctttcgctcctgcctgcgagaacagggcaaggggcaacagatccttgagccggttcgcagtcatgaacgggcggatatcgccaggaccgtgacggaacagatgctgactcagtacccggccctgcaggcgatctacgccccctgcggcggcgtcgaagggatcgtcgacgcgctgcgcgacagcggccgtcagcaggagatcgctctggtctgccacggtccgctcagcgacagtgaactggccctgatcgatggcaccatcgacatcatgcttaaccaccggctggatgagtttgccgccgttacgctgcgcgccatggcggacgctgcttcacgcccccatagcgaggtgatttcactccctcagcctttcgatatcatcaccaaagaaaatatgtaa

SEQ ID NO: 213650 - DNA, 924 bp, Klebsiella pneumoniae
atgatacatcctatcgctaacgccccctgcagctggggcgtcgatgacccgaaaaaacctaacctccctgcctgggctaccgtgcttaaggaggcggcgcaggctggctatcgcagcattgagctcggcccctggggttatctccccaccgatccggccagcctgcgtgcggcgctggagcagcatcagctgtcgctggtcgccggcacgatctttgacgatctggtgagcgaggcccatttccccaccctggtggcgctgacccatcaaatctgccgcaatctgtcgcaggtagccgctgccgaaccgatcccgggccgccctttccagccgccctatctggtgattatcgacttcggcaaccccgaacgggcgcgctttgccgggcgcggcgcgctggctccgcgcctcaatgacaaagactggcagcgcatgatggagcacattatcgcccttagcaccctcgcctggcaggagtacggtgtgcgggcggttatccatccgcacgccgggggcagcattgaattcgcggatgagatcgagcggctggccaacgatatcccgcaccacgtcgccgggttgtgtctggacaccggacatctctattacgccgggatggatccgctcgactggctggatcgctattaccaccgcctggactatctgcacttcaaggatgtcgacccgcaggtttatcagcgcgctatccatgaaggtatcgacttcttcactgcctgcgccgaaggggtgatgtgcccgctcggcagcggcgccattgactatccggctatcaaagactttcttgcccgccgggggtatcagggctggataacccttgaacaagagcgcgacccgcgccatgccgcaggcagcctgcaggcggtcacggaaagtctgcgctatctgcgcgacgtcggattctga

SEQ ID NO: 213651 - DNA, 1173 bp, Klebsiella pneumoniae
atgattaacggtttaaaacctctcgaccgcaccctgcgctggggcatggtcggcggcggcgacggcagccagatcggctatattcaccgttctgcagcgctgcgcgataacaccttcacgctgctggccggcgcctttgatattgatgccgagcgcggacgccagttcggccaacggctgggggtggatcccgaccgctgttacgccgactatcaaagcctgttccgcggcgagtctgcccggcctgacggcattcaggcggtgtcagttgccacgccaaataacacccactatgccatgtgccgggccgcgctggaggccgggctgcacgtggtgtgcgaaaagccgctgtgcttcagcagcgaggaagctgacgagctggtggcgctcagccagcggcggcgcaagatcatcggggtgacctacggctatgccggccaccagctgatcctgcaggcccggcagatgatcgccgacgggctgctgggcgatatccgtatcgttaatatgcagtttgcccacggttttcacgcccagccggtggaacaggaaaacgccagtacccgctggcgggtcgatccccgcttcgtcggccccagctatgtgctgggcgacctggccacccatccgctgtttctggtcgaaaccatggccccgcagctgaagatcacccggctgatgtgcgccagacaaagcttcgtcaaaagccgcgcgccgctggaagataacgcccatgtactgatggagtatgacaacggggccatcggctcactgtggagctccgccgtcaactgcggttcgatgcacgggcaaaaggtgcgaatcatcggtgaaaaagccagtctcgaatggtgggatgaacagcccaaccagctacgctacgaaatccagggcgaacccgtgcgcatcctcgagcgcggtatggactatctcgatccgctggcgcgtcaggatgatcgcatcggcggcggccatcccgagggactgtttgaggcatggtcgaatctctatcgccgcttcgccatcgccatggatgccgccgaccgtcgcgacgaggcgctgctggccgacttctggtacccggacgcccgcgccggggcgttcggcgtccgctgggtggaaaactgcgtgcgttctgccgacaacggcgcctgctgggtcgacttccgctaa

SEQ ID NO: 213652 - DNA, 1107 bp, Klebsiella pneumoniae
atgcgtaaagccttctggctattattcgcgctggcgctgccggcgctggcgcaggatccggtgctacccgccgtgacggcgatccatacggcgcccaccctcggtgagctgccgccgccggagtcgctgcgaccgtgctgcgcttttggttacgacctgcacgtgcgcgcggcgggcattccgatcccgatgtaccagatcggtaatgtgttgactctgggtacgctgggtaagcaccattacaacgacagcgcgttcggtgcggtgaaaaatctgctggggctcagcgaggagcagaacgggcttatctatacccgccgcggcgggtttattgatatcgcccatgtgcgcgatacggcggacaacaccttttatctgttcaatcgtattgcgccgacgctgggccaggcggggcggatcttctacagtgaagaactgggcgtgcgccgcgtgcagctgaatgcctttacgccgccggcgggcgtcaggcagcgctatcagctggcggcctggctcgccgggcatctggccttcgaaatcgcccagtggcatgagatcgcccagtggtatggcttccagtcggtccccgggttttccgaagagatttccgctttttcgcccgaggatctctactccaatttactgggcgccaggctggcgattaatgtcatcctcagcggccacggcggttcgctggaggattataaccaggccatggatgcggcgctgaaacaagtgctgacccggctgctggtggcgacgcgcggagagacggaagcgatgtttcagcagatcgacggcgactggtggaacagtcaccggcgggtgccggataagtttctggtactgaagcgtaactacgatctacaggaaaaccggctgccgacgccggtcccattcgaaaccatgccgccgtatcgcctgaccatgccggagcaggtcgggggattccgcttacgcgacctcggcgaactgcagatctatccagggcacgatatgcaggcattgccggttcccgcgcaatactatggcgccggagcgttccaggggctggcggaccgcgcccatgaggcggataaaacccagctggcgcggacagaaaaatag

SEQ ID NO: 213653 - DNA, 267 bp, Klebsiella pneumoniae
gtgcaggtgtgtgaacaggcaatggcggtaatgctggcaaaattgccgacccgtcccttcgctggcatgacccagatcaggttcaaagggttcggcttgcgccatctcagccctcacgggacacccctcggtagcgctatgttatacgacattcaccttttgaatacaatcaccgcgccaccttgccgcaggatgatggtaatgggggatagccagcgcttttccgcgcgcaatagtttcgttgtcggcgctgaataccgtttttaa

SEQ ID NO: 213654 - DNA, 696 bp, Klebsiella pneumoniae
gtgatcgttcccgcttttagccaaggtctttacggccgtttacgccagctggccgccgctgactggcagcgctatgtggcgcatcctttcgtccagcaacttgcctctgggacgctggcggaaaacgcctttcgtcgctatctgatccaggattatctgtttctgattcactttgcccgcagctacgcgctgctggtgagtaaactgcgcacgctgccggagatgcgggccgcggccgcctcgatgaatgccatcctcaacgaactgccgctgcacgtcggctactgtgcccagtgggggattagcgaaccggagatggccgcccaacctgaagcccccgaaaccctcaactatacccgctatgtgctggatattggccactcgggtgacgcgctggatctgctggtcgccctgatgccctgcgtcgcgggctacgccgaaatcggtctcggcctgctgcaacatcccgccacccgactggacgataacccctacgcctcatggatccgcaactatggcgatgaaggctatctgcagggcgtcagcgccgcgctggcgctgttggaaacggtgtggcagcagcgcgggagcgaggcgcgaatcactgagctgagcgagattttcaccaccgccacccgccttgaggcgcagttctggcagatgggcctcaacgccgcggcggagacccgggcgtga

SEQ ID NO: 213655 - DNA, 729 bp, Klebsiella pneumoniae
gtgacggcgccgggtatcgaggtccgtggcctgagcctgcatgtcggcgaccgtcggctgttcgacaacctgtcgtttacggtccccggcgggcagtgggtgtcgctgctcggcgccagcggcgccggcaaaaccagcctgctgcgggtgatggccggtctggcgcccgccacctgcggagaagtggtcgccagcgatgggcaaccgattcagggccgtctggcgtggatggggcagaaagatctgctctacccctggctgagcgttagggacaacgtcgccctcggcgcgcggctgcgcggtgaaaaagtcgatcgtgcccgggtcgccgccctgcttgaacaggttgagctttcatcctgcgccgacgcccgcccggcgactctctccggcggcatgcgtcagcgcgccgcgctggcgcgcacgctgtatgaggatcgccccatcgtgctgatggatgagcctttctcggcgctggataccctcacccgtacgcggattcagaccctggcggccaccctgctggccggtcgcacggtggtgcttatcacccacgatccgcaggaggcctgccggttgagccaccgcctgctggtcctctcggcggccgacggcgacattgatgatagccatcacctcgccggcacacctccgcgcgcgccggacgcgcccgatctcctgatcggccaggccgccctgctgcagcagctgatgagggcccaaccatga

SEQ ID NO: 213656 - DNA, 696 bp, Klebsiella pneumoniae
atgctcctctggggtctggccagccgcagcggcattccccattttcttttaccgtccccgctggcggtcgccgaggcgctatgggttaatcgcgcctatctcggctggcatacgcttatcacgctcagtgagatcctgagcggcctggcgctgggcgtgacgctcggcgtcaccctggcgctgggcatgatcctctccccccgtctgcagcgctggctgatgccgctggtgctcaccagtcaggcgatcccggtctttgccctcgccccgctgctggtgctgtggctgggctttggcatgagcgccaaagtggcgatggcggtgctggtgattttctttccggtgacttctgccttctttgatggcttgcggcgggtcaaccaggagtatctcgatctggcgcgcagcatgaatgcctccttcggcgctcaactgcgacatgtccgcctgatggccgccctgccggcgctgggctctggcctgcgcatggcggcggcggtggcgcccattggcgcgatcatcggcgaatgggtcggctccgccgaggggctgggctacgtcatgctcaacgccaatgcgcgactgcaaaccgatatctgcttcgccgcgctgtttattttagtactactgaccctcctgctgtggctggcggtagataccctgctacaccggctgatcgactggtcgccggaataa

SEQ ID NO: 213657 - DNA, 936 bp, Klebsiella pneumoniae
atgaaaaagtcgctattcgccggggcaaccttgaccgccctgttcagcggccacgcgctggccaatgaaccgctgacgctggtgctggactggtacattaatcccgaccatgcgccgattatggtggccgagcagatcggcgcctttaaggcccaggggctggacgtcaggattatccccccttccgatcccgcgctgcctccgcgcatggtggccgcccgtcaagcggatctggccatcacctaccagccgcaggtgcacttctttgctgacgaagggttaccgttggtgcgtgtagggactctgattaattcgccgctgaatacggttatcgccctggataagcagatcaaaaccccggcagatctgcaaggcaagaaggtgggctactcggtcagcggcattgagcaggccaccctggcgaccatggcgcaacatgcagggatcgatccggccagcatcaaactggtgaacgtcaatttccagctgaccagcgccctgctggccggccaggtggacgcggttatcggcggctatcgtaatatagaagcgcaggagctgaagctgcagggcaaaacgccggtagtgatgaacgtcgaagattacggcgtgccggcctatgacgagctggtgattgtcgcccatcgcgacgcaattcaagaggcgaagatccgtaaattcctcaccgccctgcaggcgggagtgggctatctgcgcgcccatccgcagaagagctgggaggcgttcgccgccgcccacccggagcttaggaccgaactcaaccaccaggcgtggttgcaaaccgtgcccctgttcgccaccgatccggcagcgcttgataaagcgcgctacgagacttacgaacagtttttatataacaataagttggtgaaaaaagttacacctttaacaaattatgcggtggaactgcattga

SEQ ID NO: 213658 - DNA, 1383 bp, Klebsiella pneumoniae
atgacggataaagtccgtattgatactttacgtgccgatttattagacgcaaacaacgaaacctttttggcccgtcaggccgaattcgaatcgaatgtcaggagttacccgcgtaagctgccgctggctatcactaaagccgaaggcgtgtggctgacggatgcggataacaaacagtacctggactgcctcgcgggcgccggtactctcgctctgggccacaaccaccctgatgtattgcagagcatccaaagtgtcattaccagcggcttgccgttacatactctcgatcttaccaccccgttaaaagatcgcttctccgaatacctgctctcttgcctgccgggcgaagggaaagaatattgcctgcagttcaccggcccgtccggcgctgacgccgtggaagccgcgctgaagctggcgaaaaaatacaccggtcgtaccgcggtgatcagcttctccggcggctatcacgggatgacccacggcgcgctgtccgtcaccggcaacctgtcgccgaaagcggcggttaacggcatgatgccggaagtccagttcatgccttacccgcacctgtatcgttgcccgctgggcatcggcggcgaagccggcgtgaaagccctgacctactacttcgaaaacctgatcaacgacgtggagagcggcgtccgtaaaccggcggcggtgatccttgaagccgttcagggcgaaggcggtgtgaacccggcgccggtcgagtggctgcagcgcatccgcaaagtgaccgaagagcacggcattctgctgatcgtcgatgaagtgcaggccggctttgcccgtaccggtaaattcttcgccttcgagcacgccggtattcagccggacatcatcgtgatgtcgaaagcggttggcggcgggctgccgctggcggtgctgggcattaaaaagcagttcgacgcctgggaaccgggtcaccacaccggcaccttccgcggcaaccagctggcgatggccaccggcctgaccaccctgcgtcatctgcgcgacaacaagatcgccgacaaagtcgccgcccagggcgagtggctgaaaggtaaactggccgagctgcagaaacgctacccggtgattggccacgttcgcggtctcggtctgatgatcggtatcgaaatcgtcaagccgaacgaagcgcaggatcacatgggctgctacccggctgacggcgaactctctgccctgctgcagaagaaatgcttcgaagcgggcctgatcctcgagcgtggcggtcgtcacggctgcgtgctgcgcctgctgccgtccctgctgatcagcgacgcggagctggacgtgttcctcgacaaatttgaacaggccctgctggccgccggcgtaaaaccggtctga

SEQ ID NO: 213659 - DNA, 1473 bp, Klebsiella pneumoniae
atgtccacattgaatccgattcttgctggttcagcgcagagcgttgaagcctatcagcaggttatcgagcagaccagccaggccgttgtgcagtggctgaagcaacctgagatgtatcaggggaaaagcgttgacgagctgcgtgagcgtatctccctagaatttaacgaacagggtttgggtaaccaggcggcgattgatcgtgcgatcgagtacttcctgaaagacagcctgtcggtgcatcacccgcagtgcgtggcgcacctgcactgcccgagcctggtgattagccaggcggcggaagtgctgattaacgccaccaaccagagcatggactcctgggatcagagcccgtcggcaaccattatcgagatgaagctgatcgaatggctgcgcgcccgggtcggttttccggcgggcgacgccggcgtcttcaccagcggcggcacccagagcaacctgatgggcctaatgctggcgcgcgacgccttcttcgcccgtcaggggcactccatccagcaggatgggctgccgggggatatccgcaagtacaaagtcttgtgctcggaaaacgcccacttctcggtgcagaagaacatggcgctgatgggcctcggctaccgctcggtaacgctggtgaaaaccgacgaattcgcgcggatggacgtgtccgacctgcaggcgaagattgcgcaagcgcaggctaacggcgagcagatcatggcgatcgtcgccaccgccggcaccaccgacgcgggcgctatcgacccgctgcgcgacatcgccggtatcgctgcggaacatcagatctggctgcacgttgacgcagcctggggcggcgccctgctgctgtctgagcagtatcgcgactaccttgacggtctggagctggtggattccgttaccctggacttccataagcagttcttccagaccatcagctgcggcgcattcctgctgaaggacgcgcgccattacgagctgatgcgttatcaggcggcctatctgaactccgagttcgatgaagaacacggcgtaccgaacctggtgtctaagtcgctgcagaccacccgtcgcttcgatgcgctgaagctgtggatgggtctggaagcgctgggccagaaacagtatgcggcgatcatcgatcacggcgtcacgatggcgaaaaacgtggcggagtacgtgaagtcgcagccgacgctggagctggtgatgcagccgcagctggcgagcgtgctgttccgttcccgtccggcgcagatggccgggagcgacgcggcggctatcgcgctgctcaaccagcgcgtcggcgacgccctgctggcctccggccgcgctaacgtcggcgtaaccgaacacaacggcgttacctgcctgaagctgaccctgctgaatccggtggtgacgctggatgacgtgaaggttctgctgaacctggtggagcgcaccgctcaggaactgctggcgcaataa

SEQ ID NO: 213660 - DNA, 882 bp, Klebsiella pneumoniae
atggagaaacgcttaccagggctggatctcgacgccctgcgcagctttgtgaccggcatggagtgcggcagtttcgcccaggcagcgctgcgcctgtcgcgttccacctccgcggtcagcgcccagcttaaaaagctggagagccagtgcggtgcggcgctggtggttaagcaaggccgacatcttgcgctgacggcagaaggcgaaaagctgatgagctacgccagacgcctgctggcgctcaatgatgaaaccctgcgcgcgctgcagggtgagcggctcaccggcgagatccaccttggtatgcaggaagattttggcgaatcgctgatgccggggatcctcgggcaatttaaacggcatcatccgcaggtgcggatagtcgccagggtggatcgcaatgggccgctgcgccaggcgctggcggaagaggcgctggatctggcgctgctgtggcaaaccgaagatcagggtcccgggctgggcctctgcccgctggcgtggattgcgcattctgacctggatattcgcgctctgctggtctccggcgagccgctgccgctggtgatgttcgacagcccgtgcctgatgcgctcccgcgccattgcctgtctcgatgccgcggggatcccctggcaggtggtgttcgtcagccacagcctgagcggcatttgggcagcggtgcaggccgggctgggcctgacgatacgcacccgcatcggcatgccaggcaacctgcgccccgcaggaggactgctgccagcgccaggaagtctggccgtcagcctgcgacaaaccccgcgtgaggaacaccattccgccgccgtggcgctgctcggcgaactgatgaccgaggccctgcagggatggctcgacaggtga

SEQ ID NO: 213661 - DNA, 1191 bp, Klebsiella pneumoniae
atgtcgatattaattgcatttttgggcggtatgttaaccctgctgagcccctgtacgctgccggtgatcccgctgctgttcgccagcgtccggggccgccgggggcagctggcgatcatgctggcaggaatggcgctgatgttcggcgctgtctcctggctggtgacggtcgccagcggctgggtggtgaatctgaccctcgcaggccgcggtctggcgctggcgttcttcgccctggtcgggctgagtctactatcgcaacgcgtcgcgcaacggctaacttcacccctggtagcgttggggaatcagcttaacgacgccagttctcgccagcgcggctggatcggttctctgctggccgggctggcggtgggcctgctgtgggcgccgtgcgccgggccggtattgggggcgatactttgcctgggctttgtgcatccggggcaggcgactaccggcggcttgctgctggcctacggcagcggcggggcgctgatgttattcctgctggggtggtgcggggcggcgttgatcgccagattgcgtcgcggacaggcgttcggcgaacggctgcgccggttggcagggggggcaatgctggcctcggtggcgctgatcgccagcggcggcgatcgctatctgcaaagcgctggtggactgagccaggcgctggagcagcggctggccgcccgtctgccgcagccggagcaaaagaccagcctccagccgatcgccgcgccgcagcccagtagcgcgatgccctctctggcggggggcagcgcatggatcaacagcccggcgttaactccggagcgtctgaagggcaaagtggtgctggtggatttctggactcgggagtgtatcaactgtcagcataccctgccttacgtgcgcgactgggcgaacaaataccgcgcggcgggcctggtggtgattggcgttcataccccggaatatccctgggagcgttcgttgcccctgctgcgccaggcggtgaaggactggcggataacctatccggtggtggcggataatgagtacgccatctggaacgccttcggcaatcagtactggccggcgcattacattttcgacgctcgcggacagctgcgttataccgcattcggcgaaggggattatgcccgccaggagcaggtgatccagcagctgctgcaggagagcaaagcctga

SEQ ID NO: 213662 - DNA, 1344 bp, Klebsiella pneumoniae
atgaggttctggcccgcctcgctgcagtcgaggctgatggcgctgctgtttctggcgctgctgctggcgaataccttaaccctgtcgctgctgttttatgagcgtatgagcagcgctcgcagcgtgatgctgggcaatctggcttccgatgtcgccaccagcgtggcgatccttgaccgcctgccggccgctgagcgcccacaatggctgccgaagctggcgcgcggcaattatcgctatctgctggacgccggggagcgcggcgattacccggacaactggcgcgcccgagacgcagcgcgctccctgcaggaggcgctgagcgcgcagtatccggtaagtattgtggcgatccccggcccgcggcagcatattcaggcccatattacccttcacgacggcgcgccgttgaccctcgacctgtggccgaaactaccggccatcgcccgctggctgccggtggtgctgatcgctcagtttgtcctcctgctggcctgcgcctggtacgcggttcgccaggtattgctgcccatctcccgctttacccacgcggtaaatgccctggagccggccagcgacacggcgggaactatggccgagcaggggccggaggaggtgcgtcgcgccgctcgcgcgtttaacgcgatgcaggcgcgcatccacgatcatctgcaggagcgagcgcggatccttgccgccatctcccacgatctgcaaaccccgataacccgaatgaagctgcgggtggagatggccgaccagccggaactgcgcgataagctactgcaggatctcgacaatatgacccgtctggtgcgggagggcatcgccttcgcccgcacctcgcagccgcttgaggaggcgcgacagcggctgaatctcgatgcgtttctcgacaccatcgtctgcgattatgccgatgtctgccggccggtccagttttgtcccgaagagaccgccggggtggtgtggatcccgccgcaggctctgcgccgggtgatgaccaatcttatcgataacgccttgaaattcggtacgacggccacggtaaccctgacccgtgacgccgtgggagatatcacccttcatgtgctggatgaggggccggggatcccggaggccgcgctgcaggcggtgctgcagccgttttatcgcctggaggactcgcgcaatcgcgataccggcggcaccggcctggggctggcgatcgccgcgcagctggtcagccagatggacggcgcgctgcgcctggccaaccgcccgcagggcggcctggacgccagcgttcgccttgccgcggcgggattgtatcctgctgtatctccgggaaagacggataactaa

SEQ ID NO: 213663 - DNA, 741 bp, Klebsiella pneumoniae
ttggagcgtattgaccacatcctggtcgtcgacgacgaccgcgacatccgggaactgattgtcgactatctggaaaaatcgggatatcgcgccagcggcgcggcgaacggaaaagccatgtggtcggtactcaaaaaccatcaaattgacctgattgtgctggatattatgatgccgggcgaggatggcttaacgctctgtcgccagctgcgcgccaacccgcagcaggatatcccggtgctgatgctcaccgcccgcaccgatgacagcgaccggatcctcggcctggaaatgggggctgacgattatctgattaagccctttgtggcccgcgaactgctggcgcgcatcaaagccattttacgccgcacccgggcgctgccgcccaacctgcagatcaccgaggcgggcaggctgatcgtctttggcgactggctgctcgataccgccgcccgtcatctgctggacgacagcggcgccatcgtcgccctcagcggggcggagtatcggctgctgcgggtgtttctcgaccatccccagcgggtgctgaaccgcgatcagctgctcaatctgacccagggacgcgacgcggaactgtttgagcggtcaattgacctgctggtgagccgactgcgccagcggctacgggaggatgctcgcgagccggcctacattaaaacggtgcgcagcgaaggctatgtgctgtcggtaccggtctccattcgcgagaggcatgaatga

SEQ ID NO: 213664 - DNA, 993 bp, Klebsiella pneumoniae
atgaacagattatccctgatccgctataccagcgccgtggcgctggggttctccaccctgtggtccgccgccgtttgcgccgctgaagacgcgggggcgttcgacaagatccagcagatccgcgccggcgacctgaatattggctacgtggatatcggcccacgcgacggccagccggtgatcctgctgcacggctggccctacgacattcagagctatgcccaggtggcgccggctctagcgcagaagggttaccgggtgatcgtgccgtatctgcgtggctacggcacgacccgtttcctctccgccagcacgccgcgtaacggtcagccggcggcgatggcggccgatattgtccatctgatggacgcccttaacatcaggcaggcggatctggccggttttgactggggcgcgcgcacggcggatatcgtcgccgcgctgtggccgcagcgggtgaaatccctggtctcggtgagcgggtatctgatcagcagtcagcagattggcgaaaaaccgctgccgccgcaggctgagctgtcgtggtggtatcaattctattttgccaccccgcgtggggaggccggttaccggcaaaacacccacgactttgcgaaatttatctggcatcaggcgtcgccgcagtggcaattcagcgatgcgacctttgccaaaaccgcccgggcgttggataacccggaccatgtggcgatcaccatcagcaactaccgctggcgcctggggctggagaaaggggaagcgaagtatgccggctatgaacaacagctggcggcgctaccgccgataaccgtgcccaccatcaccctggaaggggctaataacggcgcgccgcatccggctcccgccagctaccgtgccaaatttaccggtaaatatgagcaccgggatctgccgggagcggtgggccataacccgccgcaggaggatccgacggcgtttgtgcaggcggtggtggacgccgatcgtttgtaa

SEQ ID NO: 213665 - DNA, 1020 bp, Klebsiella pneumoniae
atggcgatttttgatggtcacaatgacctgctgctgaatctctggcttcaccatcgcgaggatccggtgagcgccttctttgccgggatagagaacggccatctcgactatccgcgcatgctgcaaggcggatttgccggcgggctattcgcgctattcgtgccaccgcaggaatatattgcccgtatgacgccgcaatacgccagccaacgatgggatccgatcgatatcctctggcagcaactggccatcctgaagcaacttatcgcccactccgctggacgcttgagattgtgtctgagcgcggcggatatcgagcgctgccgcgaggataaggtactggcgatggtggcgcatattgagggtgccggaggttttgatggcgagggccgcgacctgcaggccttttatgccgccggggtccgcagcattggtccgttctggaatattgcgaaccgcttcggcagcggcgttaacggttcgtttcccggtagcccggacactgggcctggactgactgcgtcaggtatcgatctgattaagcaggccaatgccttgaagatgcagattgacgtgtctcatatgaatgaaaaagcgttctgggataccgcccatcactcaacgtcaccgctggtggccacccactccaatgcccacgccctgtgcccgcagccgcgcaatctgaccgaccagcaactgcgggcgatccgcgacagcggcggcgtggtgggcgtcaatttcggcaatgctttcctgcgcgccgacggccggcgcgatagcgacacgcccttaaccaccattgtccggcatatcgactatcttattaacataatgggtgaggatcatgtggctcttggctcggattttgacggcatcaccctgccggacgagctgggcgatgtggccggcttaccgcggcttatcaatacgttgcgcgctagcggctatgatcaattggtgctggataagctgctgtggcgtaactggctacgagtattaaaaaatgtttggcaacaatag

SEQ ID NO: 213666 - DNA, 927 bp, Klebsiella pneumoniae
atgttcattaaagtcctcggttccgccgccggcggcggtttcccgcaatggaactgcaactgcgccaactgtcagggtctgcgcgatggcaccattcaggctgccccccgcacccagtcgtcaattatcgtcagcgacaacggtaaagagtgggtgctgtgcaacgcctcgccggatatcagccagcagattgcccatacccccgagttaaataaagccggcgtactgcgcggaacgcatatcgggggcattattctcaccgacagccagatcgaccacaccaccgggttgctgagcctgcgggaaggctgcccacatcaggtctggtgcaccccggaggttcatgaggatctctccaccggcttcccggtgtttaccatgctgcggcactggaacggcggcctggtgcatcatcccatcgctccgcagcagccttttaccgttgacgcctgtcctgatttgcagtttaccgcggtgcctatcgccagcaacgcgccgccctattcgccgtatcgcgaccggccgctgccgggtcataacgtggcgctgtttatcgaaaaccgccgcaacgggcagacgctgttctatgccccggggctgggtgagccggatgaaacccttctgccctggctgcaaaaagcggactgtctgctgatcgatggcaccgtctggcaggatgatgagctgcaggccgccggcgtcgggcgcaataccggccgcgatatgggccacctggcgctcggcgatgagcacgggatgatggccctgctggcctccctgccggcaaaacgcaaaattctcattcatattaataacaccaacccgatccttaacgagcagtctccccagcgccaggcgctaacgcaacaggggatcgaagtgagctgggacgggatggcaatcacccttcaggataccgcatgctga

SEQ ID NO: 213667 - DNA, 756 bp, Klebsiella pneumoniae
atgctgatcactgacacgctgtcgccgcaggcctttgaagaggctctgcgggctaaaggcgccttctaccatattcaccacccttaccacatcgccatgcataacggcgacgcgacccgcgagcaaattcagggttgggtggcgaaccggttttattaccagaccactattccgctgaaagacgcggcgattatggccaactgcccggatgcgcaaacccggcgcaaatgggtgcagcggatcctcgaccacgacggcagccacggcgaggacggcgggattgaagcctggctgcggctgggggaagcggtcggtttgagccgcgacgatctgctcagcgagcgtcacgtgctgcccggcgtgcgattcgcagtggatgcctatcttaatttcgctcgtcgcgcctgctggcaggaggcggcctgcagctccctgaccgagctgttcgccccgcagatccatcagtcgcgcctcgacagctggccgcagcattatccatggatcaaagaggaaggctacttttacttccgcagtcgtctgagccaggccaatcgcgacgttgagcatggcctggcgctggccaaggcctactgcgacagcgctgaaaaacagaaccggatgctggagatcctgcagtttaagctcgacattctgtggtcgatgctcgatgccatgaccatggcctatgccctgcagcgcccgccctatcacacggtcaccgacaaggcggcctggcacacgacccgactggtgtaa

SEQ ID NO: 213668 - DNA, 279 bp, Klebsiella pneumoniae
atgcagaaaacgtccatcgttgcctttcgtcgcggctaccgactgcagtgggaagccgcccaggagagccatgtgatcctctatccggagggtatggccaaactcaatgagaccgccgcggcgatcctcgagctggtcgatggccggcgcgacgtcgcggcgattatcgccatgcttaatgaacgtttcccggaagccggcggcgtcgatgacgacgtcatcgagttcctgaagatcgcctgtcaacagaagtggatcacctgccgtgaaccagagtaa

SEQ ID NO: 213669 - DNA, 1143 bp, Klebsiella pneumoniae
gtgaaccagagtaaacccaccgtcaatccgccgctgtggctgctggcggagctgacctaccgctgcccgctgcagtgtccctactgttccaatccgctggacttcgcccggcaggataaggagctgaccaccgaacaatggatcgaggtctttcgccaggcgcgggcgatgggcagcgttcagctgggcttttccggcggcgagccgctgacccgtaaagatctgccggagctgatccgcgccgcgcgcgacctcgggttctataccaacctgatcacctccgggatagggctgacggagagcaaactggacgccttcagcgaggccgggctggaccatatccagattagcttccaggccagcgatgaagtgctcaacgccgcgctggccggcaacaaaaaagccttccagcagaagctgaccatggccaaagccgtgaaagcgcgcgactacccgatggtgctcaacttcgttctccaccggcacaacatcgaccagctcgataaaattatcgagctgtgcattgagctggaagccgatgacgttgagctggccacctgccagttctacgggtgggcgtttcttaatcgcgaagggctgctgccgacccgggaacagatcgcccgcgccgagcaggtggtcgctgactaccggcagaaaatggccgccagcggcaacctcaccaacctgctgttcgtcacctcggactattacgaagagcggccgaaaggctgcatgggcggctggggatcgattttcctcagcgtcaccccggaaggcaccgccctgccttgccacagcgcgcgccagctgccggtggcatttccgtcggtgctggagcagagtctggaatcgatctggtatgactcattcggcttcaatcgctaccgcgggtatgactggatgccggagccgtgccgctcctgtgatgaaaaagagaaggacttcggcggctgccgctgccaggcctttatgctgaccggcagcgccgataacgccgacccggtgtgcagcaaatccccgcatcatcacaaaatcctcgaggccaggcgcgaagcggcctgcagcgacataaaagtcagccagctgcagttccgcaaccgtacccgctcgcagctgatctaccaaacccgggacctgtaa

SEQ ID NO: 213670 - DNA, 2286 bp, Klebsiella pneumoniae
atgacgctggcgacccgcaccgtcattttgccgggcggcctgcaggccaccctggtccatcagccgcaggcggatcgcgcggctgccctggcgcgggtcgccgccggcagccaccacgaaccgtcgcgcttccctgggctggcgcacctgctggaacacctgctgttttacggcggagagcgctacccggatgatgaccgactgatgggctgggtgcagcgccagggcggaagcgtgaatgccaccaccctggctcgccatagcgcgttctttttcgaggttgccgccgatgctctggctgatggcgtcgcgcgtctacaggagatgctgcaggccccgctgctgctcagggaagatattcagcgcgaagtggcggtgattgacgccgagtaccgcctgatccagcagcatgagccatcgcgccgggaagccgcggtgcgccacgccgccagcgcgcccgcggcgtttcgccgctttcaggtaggcagcgccgacgcgctggcgggcgatctcgctgcgctgcaggccgccttaggcgattttcaccgcacccattacgtcgcccggcgaatgcagctctggctgcagggaccgcagtcgctggaggcgctcggcgagctggcggcccgtttcgccgccgggcttgccgcaggcgagcctccgccgccggcgccgccgctgcgcctgggcgagttcactgcactgcagctggcggtctccagccagcccgcgctgtggcgctgcccgctgatcgctttaagtgacaacgtcacgttactgcgcgagtttttgctggatgaagcccccggcagcctgatggccagcctgcgccagcgccggctggccggggatgtggcgctgaactggctgtatcaggatcggtacctcggctggctggcgctggtcttcgccagcgaccggccggaagaggtcgaccggcagataacccactggctgcaggcgctacagcaaacgacgcctgagcagcagcaacactactatcagctatcccgccgccgctttcaggcgctgtcgcctctcgatcagctgcgccagcgggcattcggctttgcccccggcgcgccgcccgccgggttcgccgatttttgcgccgccctgcaggccgccccgtcggtcagcctggcctgtcaaaccgtttccccatgggagcctgttgccacccagggctttagcctgccgcttagccgctggcgccgccgccctgagtctgacccggcgctggcgttcgctttctatccgcaggccgctggcgatctcgttgccaaatgcccggagaaagccgcgccgctgctccatctcccgttaccggaagagccgccgaggctcctgctgcgaccgcccttctactgctcgcccgatcaggccgaaggactggcgcgtggggaacagctgcgcccactgcttgccgccctgcgccatgccgggggacacggcgagtggcatctgttcgacggcagctggcagttgaccctccagctgccggagccaggccgacggccggaagcgatcctgcaggccatcctgcggcagctcgcgctcccggtcgcctcgctgaccccaccgccggaaagtatcgctatccgtcatctcatggctcaactccccgaacggctgggtacatccgggcatcagaaaggttggctggcggccctggccggcggcagcgcagaagatgcgcagtgggtagcgcgtcagctgagcctgattaccgccccggttaatccgccgatgcccgctccggcaccctgccgccgcggcgtcgaacgtctggtttatccgggaggcgatacggcgctgctggtcttcattccgctgccggatggcgcctcgctggcggccctgcggctgctggcgcagcattgtgagccgctatttttccagcgcctgcgggtggagcagcagattggctatgtggtgagctgccgctatcagcgggtcgccgatcgcgacgggctgctgatggcgctccagtccccggatcgccgcgccggggaattgctgcgctgtggtaaagactttctgcgccagctggcccccatggatgaggcgaccttcagaccgctacagcagcgcctggccgctcagaaccgcgccagcaggccgccagaggcgcgggcgctgtccgccctgcgtcaggagtatggattaccagagctaacgccgcaggcggttgacgcgctgcgcgttgcagaggtggccgatctggcacgcgaaatgacccgccggcgtcgccgctggcaggtgctattcacgacaggggattaa

SEQ ID NO: 213671 - DNA, 738 bp, Klebsiella pneumoniae
gtgacacgtaaccgattactgctggtccagaccggcacgccgccgacggccattcgccaggcgcatggcgatctgccgcgctggtttcgcacgctgctggcgccgtggcagacgcagctcaccacggtgcgggtgtttgaagatgaaccgctgccgacgccggataaccagaccatagcggtgctaaccggctcgtgggcgatggtgaccgatcgtctggcgtggagcgaacggaccgccgactggatccggcaggcggtggctatcgacatgccgctgttcggcgtttgctatggtcatcagctgatggcccatgccctggggggcgaggtggcgtatcatcctggcgggcgggaaagcggcagccaaaccattacgctgtcgccatggggtgtcgatgatccgctgctgagcggcctgccggctacatttcctgcgcatctgagccatttgcaaaccgtgactcgtctgccggaaggggccacggtgctggccgcgtccgcccacgatccccaccagattgtgcgctatgggccgcacgcggtttctacgcaatttcacccggaatttaccgcgccgatagcccgttcgctgatccgccaccgggaggcggtgctgcaggcggaaggtattgacgcgcagcggttacacgacgaggtgcaggagagcccgcagggcgcggcgatccttacgcgcttcgtcagcgcctttctgaccccggatgtccccggccattaa

SEQ ID NO: 213672 - DNA, 303 bp, Klebsiella pneumoniae
atgattgaattagaagatgcggtaatggaaattatcgttaatgcgggacagtcacgctcattatgttttgaagcgctgcatgcggcccgaaccggaaatatcgacgaagcgcgtttactcttaaacgaggccgacggctacgcccgccgggcgcatcagatgcagacccagctcatcgggcaggatgccggtgaagcgcgtcagcccatgacgctgattatggtacatgcccaggatcatttgatgaattcgctgctggcccgcgagttctcagaagaattaatccatctgtaccagcgttaa

SEQ ID NO: 213673 - DNA, 1323 bp, Klebsiella pneumoniae
atgagttctctgtatcagtccatgattgccgtgatcgagcaatctattactccgctggcaggacgccttgggcagcagaaatacgttatcgctatccgcgatggcttcactgccgccttgccgtttatgatcatcggctctttcatgctggtatttatctttccgccgttttcacccgataccaccaacggctttgcccgcggctggcttgatttctcccagcactaccgcgaacagctgatgctgccgtttaacctcagcatgggcgtgatgaccttctttatctcggtcggcattggcgccagcctcggtcgtcagtttcagctcgatccggtgatgtccggtctgctggcgtttatggctttcctgctggtcgccgcaccctatgccgatggcaaaatttccactcagtatctgtccggtcagggcattttcaccgcgctgatcaccgccatctactccacccgcgtttacgcgtggctgaagcaaaacaacattacgattcgtctgccgaaagaggtccccaccggcgtcgcccgttcgtttgaaatcctgatcccggtgctggtggttattgcgactctgcatccgctgaatctgtttatcgaagcgcagaccgggatgatcctgccgcaggcgatcatgcatctgctggagccgctggtttccgcctccgactcgctgccggcgattttgctctctgttctgatgtgccagattttctggttcgccggtatccacggctcgctgattgttaccggcattatgaacccgttctggatggccaacctgtcggcaaaccaggcggcgctggcggctggcacggtactgccgcacgtctacctgcaaggcttctgggatcactatctgctgattggcggcgtcggttctaccctgccgctggccttcctgctgctgcgtagccgggccacccatctgcgcaccatcggcaagatgggcatcgtgccgagcttctttaatatcaacgagccgattctgttcggggcgccgatcatcatgaacccgatgatgtttatccccttcgtctgcgtaccgatggtcaacgcggtgctggcttacggcgcgacgcgtcttggctggctgagccaggtggtgtcgctgacgccgtggactacgccggccccaattggcgcgtcgtgggcggctaactggaccctgagcccggtggtgatgtgtctcatctgcatggtgatgtcggcggtcatttatctgccgttcctgcgcgcttatgaacgttccttaatgaaaaccgaagttgagaaagccaaaaatagcgttccggtagcagaaaccgttagctaa

SEQ ID NO: 213674 - DNA, 315 bp, Klebsiella pneumoniae
atgtacaagattatgctgtgctgctctgtcgggatgtccaccagtctgctggtcagaaagatggttgaggcggcgaatgaacgtgacctgccggtgcagattgacgcctatggcgtttccgaatttgacatgcagtttccgcagtatcaggtggtgttgcttggcccccaggtgaaatacatgttgaaaaccctgtctgacaaagcggcttccctgaacattcccgttcagcccatcgatacgatggactacggtatgcagcggggagacaacgtcctgaattatgctctgtcgctgatcccagcggcgcactga

SEQ ID NO: 213675 - DNA, 945 bp, Klebsiella pneumoniae
atgatgtcgacaatcaatgatgtttcacgacttgccggggtttccaaagccacggtgtcgcgagtgttgagcggctcacgtggcgtgaaggaagccagtcgtcaggcggtgctgcaggcggcggaagcgctcaattaccggccaaacatgatagcccagtcgttgctcagccagtccaccggctgcatcggcgtcatctgcgcccaggacaacatcaaccaaaccaccagctatctctacgccctggaaaaacagctcagccagcaccagaaacacctgctgctgcgcttcgccaacaccagccacggcgtgatgaactctctggaggagttgacctgcgggctgtgcgataacgtgctaatcatcggcgcgcgttttcctctgaatattaaccgcccggacgtggtgctggtggactgcctcgatagcgaaggcgacaacagtattcagttcgatcatgctttcgccgccgaaaccgcctgtcactatctgattagccaggggagacggcagattgcgctgattcatccgcagagcagcggctttgccgaccaggtgctgctgggctacaagcacgcgctggaaaaaaactttttgccgtttaatcgcaacctggtgtttctggataatacctcgccgtcggtggcggtgcaggagctggtcaataacgccacgacgctgaactttaacgcgctgctggtgagcgatgaacagcaggcgcagcgcgtggtgccgcagctgcaggcgtttaaccgcgccgttccgcaaaatgtcatggtgtttagcctcgccggatcgttacagctgcccggtatcccgactatcccggcgattgaatattccatggacgcgatggcatcgcggatcgtcaactggctgaccgagaaaacggacaacccgggcggcagcccgctgcgcggcgatttaattattccgaagcactaa

SEQ ID NO: 213676 - DNA, 1371 bp, Klebsiella pneumoniae
atgaatcacacgaacgttgtcgatgtgaaagcgtggatagatacccgcccggtctcgcgctttcaatggaacgtgctgctgctctgtttcatcatcattatgctggatgggtatgacgccgcggtgatgggctttgtcgccccggcgctcatcgaagactggggcatcagccgggccgaaatggggccgattcttggggcggccatgttcggcgtcgccattggcgccctggtagcgggtccgctttctgaccgctacggccgaaagcgaattttactctggtcggtggcgctgtttgcgctgttcagcctggccggcgccgtggcgcaaagcccgacgcagttggcgctgatgcgttttctcaccggccttggccttggcgccgtaatgcccaactgcgtcacgctggtggcggaatatatgccggagcggcgtaaaggggtgatgatcaccctgatgtacagcggttttaacgtgggttccggcctcggcggctttatcgccgccggtttgttatcgcattacagctggcactcggcgctggtttttggcggcgtgctgccgctcgtggtgctcccctttatgatcgtgatgttgccagagtcggcgatgaacatggtggcgcgccgactaccgggcgagcagatcgccagggcgcttaaccggcttgggggccagtttacggctgaaaccgttttccagctgaatgcgccgcccatcacgcggagcagcaaagtggcgcagctgttccggcatggctatgcccgcggcacgatagcgctgtggttaacctattttatggggctgttcgtgatttacctgctgaacggctggctgccaaccattctccgctccggcggcctgtcgctgcagcaggcggcgatgatgaccggcttgttccagctcggcggcccgctgggcgggatccttgtcggtatgctgatggatcgcgcttcggcgaaagccgtgattgcggcaacctatttcctcggctgtctgtgcctgttgtcccagggggtgatggatttcggttcggcggcgctgtcggtgctgatttttatcagcgggatgtgcattaacggcgcgcagaacggtctgcaggcctattcgcccgcctattatcaaaccgagatccgcgctaccggcgtcagctggatgcatggtatcggccgtaccggggctatcctcagctccacgctgggcgggatgctgatgctggccgtgccgggacactcgtcgatctttttggtgcttgcgctgccggcctgcctggcggggatctgtattttgttgcaccgtatgaatcacgctaagcctcgactcacagaggcagaacttgacgctttgtcatcccccctcgaacaccgataa

SEQ ID NO: 213677 - DNA, 1263 bp, Klebsiella pneumoniae
atggctaacattctcggcggtatcgccgtctctcataccccgactatcggcttcgcggtcgatcatcataaacagcaggatccggcgtgggcgccgatcttccagagcttcgaaccgctgcagcgctggctggaggagaaaaaaccggatgcgctggtatacatctttaatgaccatgtgaccgcctttttcttcgatcactattcgacttttacgctgggaatcgatagtcaatatgacgttgccgatgagggaggcggaccgcgctgcctgccgccggtccagggcaacgcggcgctctcaaggcacattggcgccagcctgatggccgacgagtttgatatgtcgttctttatggataaaaagctcgaccacggccttttctcgccgctttcggcgctgttgccctgggatgaagcgcaggggtggccgacggcggtgatcccgttacagatcggcgtgctgcaatttccggtaccaagcgcgcgccgttgttacaaactcggccaggcgctgcgccgggcgattgaaagcttcccggaagatatcaatgtggcgattgtcgcgaccggcgggctctcgcatcaggttcatggcgagcgctgcggatttaataatcccgactgggatgcccagtttgttgatatgctggttaatgacccggaaaagcttaccgaaatgacccttggcgaatatgccgagctgggggggatggaggggtccgaagtaatcatgtggctggtgatgcgcggcgcgctatcagccaatgtcaccgaaacctggcgcgactattacctgccctcgatgaccggtatcgccacgctgatccttgagaacaatgcgcgcctgccccccgtcgataccctgacgcgccatcgccagcatatggcgcagcagctggccggggtggagaaactgccgggaacctatccttttacccacgagcgcagcctgaatggcttgcggcttaaccgtttcctgcatcggctgattgagcctgcctggcgtgaacgttttctgcagtcgcctcagtcgctttatgccgaagccggactgagtgaggaggaacagcagttgctcaacgcgcgcgactggcggggattaattcaatatggcgccagcttcttcctgctggagaaaatgggcgcggtggtcggcgtatccaacctgcatatttacgccgcgatgcgcgggcagacgctggaggcgtttcagcaaacgcgcaaccagcaggtaacctattcggtggcgggtaaacgttaa

SEQ ID NO: 213678 - DNA, 1227 bp, Klebsiella pneumoniae
atgctaaagagaaagcacgataaaattataaatatcatgcagctgcgctttttctgtcaggtcgcgctgcgcggtagcgtctcacgcgcggccgatgacttattccgcacgcagtcagcgataacccgggctattcgcgatcttgaagccgcgttgaacgtcacgctgttcgaacgccattacagcggcatggtgcccaccgagtatggtaagtgcatcctgccgcgcgcccggcgggcgattgacgacctgcaggccattccggcgctgctgcagaagcaccatacccgcagcagcggcccgctggcggacgccggctggctgttcaatacccgccgcttagccatttttattcagctctatcacgtcaaccatacccaaaccgtcgcgcaacagttggggatcactcagccggcggtcagtgccgcgcttaaggtcctggaaaaaggagcggattcggcgctatttcgccggacgccagagggggtgcgtcccacgcctgccgcggagctactctatcccccggtgagcagagcgctcaacgagctggaaaacatctggagcgatctcgctgcccgtcgcggggtgctggagggcaccgtgcgcattggcgccctgccgctgagccggacccggctactgccctccgccatcgccgcctttctggcccagcacccgggcatcaccctcatgaccaatgaaagcccgtatgagtcgctggtcgccgatatgcgggcaggtaatatcgattttattatcggcgccctgcgccaggatgaagatcttccggacctctgtagcgaagcgttattcgaagaggatatgttgattttactgcgtaataaccacccgctgctgcgccatccggacccgcgcagccagctggcgacagcgcaatgggtgctgccgcgcgccaacgcgccggcgcgcaatttgctggataaggcgtttgtcaccctggggctgccgctgccccagccgacggtggagaccggggatgcggcgatggtgcgaggattgctgcagggctccgacatgctggcggcggtctccgccagccagatgcgttttgaaactgacaatgggctgctcagcgtgttgccggttcccctgcccgataccacccggcgtatcgggctgacgtttcgcgccggcagcctgccctccccggcgacgcaggcgctgttgcgttttatttatcagcaggttcaggacggggccgtttaa

SEQ ID NO: 213679 - DNA, 741 bp, Klebsiella pneumoniae
atgtctcatccggttagcgaaaaaagtgcccttgtcgtcagcgcccactcggccgatttcgtctggcgcgcgggcggtgcgatagcgctgcatgccctgcagggctatcaggtccatgtggtctgtttatcctttggcgagcgcggcgagtccgccaaactgtggcgtaaaggcaacatgaccgaggaggcggtgaagcaggtgcgtcgcgaagaggcgcaggccgccgccgcgatcctgggcgccagcgtcgaattctttgatatcggtgactatccgctgcgcgccgataaagagacgctatttcgtctggcggatgtgtatcgccgtatccagccccactttgtcctgacgcactccctgcacgatccctataactacgatcatccgctggcctcccatctggcgcaggaagcacggattatcgcccaggcagagggctatcgccccggtgagaaaattgtcgctgctcccccggtttactgtttcgaaccgcaccagccggagcagtgcaactggaaacccgatgtgttactggacatcaccgccgtctgggagaaaaagtatcaggccattcagtgcatgcagggtcaggagcatctgtgggaatactacacccgcgtggcgctgcagcgcggggtgcaggccaagcgcaatatcggcatcacggccgcgcgcgatatcgttcacggcgaagccttccagagcatcttcccccgcgtaacggagaacctggcatga

SEQ ID NO: 213680 - DNA, 714 bp, Klebsiella pneumoniae
atgaacctgataaataaaaaaggccttgtgatccgccatctgccgcgtcatgacgaggcggttttgcgccgctgtgaggcggccggggtggcgacgctccatgaagcctgggatcgtcaggggctgatggggccggcaatccgtccgattcagcagggcgtcagccgggcgggcaacgcggtaaccgtgctggtgacgcctggcgacaactggatgtttcatgtggcggtcgagcagtgccgcgccggcgatattctggtggtggccccgacctcgccgtgcggcgatggcttcttcggcgatctactggcgacgtctctccaatcgcgcggcgtggtcgggctggtgggcgatatcggcattcgtgattcgcaaacgttgcgggaaatgggattcgccgtctggtcccgtcaggtttatgcccaggggacggtgaaagagagcctcggttcggttaacgtcccggtgatatgcgcaggtcagcttgtacagccgggcgatgtcgtagtggccgacgacgatggcgtcgtggtgctgcctcacgcccgggtccgtgatgtgctccataaagcggaagcccgcatgagcaatgagcttgcgaagcgtgagcggatgcgcaatggcgagctggggctggatatttacgctatgcgtccgcgtctggcggaaaagggcctgcggtattacgaccgcgcagacgaggtggaggaataa

SEQ ID NO: 213681 - DNA, 1086 bp, Klebsiella pneumoniae
atggcgcaacgcggaatcccctgtctatggatgcgtggcggcacctctaaagcggcctgttttctggccgacgatctgcctgccgatccggtgcgacgtgatgcggtgctgctggcggtgatgggctcgcctgatccccggcaaattgacgggatcggcggcgccgatccgctgaccagcaaagtggcgattatccgccgctccgcacggcctgacgccgatgtggactatctgtttgcccaggtgaacgtggcggcggctaccgtggattatggccaaaactgcggcaatattctcgccgccgttggccctttcgccatcgagcgcggtctggttcgctacgatgcgccgctcactcgggtgcgtatttttatggagaacacggggcaactggcggtggcagagatcccctgcgatgccgacggggtcgactacgtcggcgagagtcgtatcgatggcgtgccgggcagcgccagcccgatcctgctccattttcttgatgtcgccggctccagctgcggggccctgctgccgaccggccgggttcgtgatcgttttgacggcgtcgaggtgacctgcatcgataacggtatgccggtgatcctgctgcgcgcgtgcgacctcggttgcaccggctatgagacgcgcgaacagctggataatgacgacgcgcttaaacgtcgcctggagtcgattcgcctgcaggccgggccgctgatgcagcttggcgacgtcagccagcgcacggtgcccaagatgaccctgatcgccgagccgcgacacggcggcgccatcagcagccgcacctttatcccccaccgctgccacgcgtcgatcggcgtatttggcgcggtgagcgtggccagcgcttgtctgctccccggctctgtcgcgcagggcctggcgcaggtagcgccaggcgatacgccgctgctcagcgtcgagcatccgacaggcgaatttagcgtgacgcttcagcttgatgctgacggcgccctggctggctgcggcctgttacgcacagcgcgactgctgtttgctggcgaggtttttattccggcccgcgtctggccgcgtgaggagtga

SEQ ID NO: 213682 - DNA, 864 bp, Klebsiella pneumoniae
atgacaatcgcgtttattggttttggcgaggcgggtggcattctggcggcggatctggcccgtgagcatgcggtgaccatgtgggattgcaagctcaatggcccggagcgagaggcaatgctcaggaaagcccgtgattcgcgcgttcaggtgggaaattcgctggcgcaggcgctggagggggccacgctggttttttctactgtgaccgccggtgaggcgctaaaggtggcgcagcaggcggccgcgctgctgcagccgggacaatatttcctcgatctcaactccgtggcgccggagacgaaacggcaggcggctgaacattttctgccgggcgcctacatcgatgtcgcggtgatggcgccggtaccgccggcccgattgcagacaccgttattgatcggcgggccgcaggcggaggcgatcgcgccgcgtctgcaggggctggggctgaatgcccgctatggcgccagtacggtgggccaggtgtcggcgataaaaatgtgccgtagcgtgatgatcaaaggtcttgaagcgcttaccacagaatgcctgttcgcggctcgtgaatacggcgttgaggaggaggtgcttagctccttgcatcatagtttcccctctctgggctggacaggcgcgttccccgactatctgatcagccgggtggcggaacatggcattcggcgcagcgaagagatggaagaggtggtgaaaaccctgcgtgacgtggggagcgccgggataatgagcgaggcgatcgcgaaaagccagcgccagctgccggagcagatggccgcccgtagcctgagctacaggcagcttacgccgtttgactggaaaacgctggtcgcgaggctgaaataa

SEQ ID NO: 213683 - DNA, 291 bp, Klebsiella pneumoniae
atgaaagcatgttggatggtatgcctggtcaccgccctgagcgccacgtcggcgtgggccgaatcaccgctgcaaagcctgcagttcgagcagcaaaaacagcaggtgctcaaagcggtgaaggaaaaatgcgcgccagcaagccacctcagcgacaacgattttgccaataaagtgctggcgaccgacggtaacaagaacgcggtccgcgaagcaacgctggcgaaggagcgcaataaccagaaaagctaccaagccgcaatcgacaaaatcgtctgtccggccaaatag

SEQ ID NO: 213684 - DNA, 903 bp, Klebsiella pneumoniae
atgggctccagcaaaaaagggatgctgaacgtactgattgccgccgtgctgtggggcagttccggggtgtgtgcgcaatttattatgcaggaaagccagatgtcgtcgccgtttctgaccatgacgcgtctgctgttcgccgggctgatcctgctgatgctcggctttgttcacggcgaccgcattttccgcgtgctgcaaaaccgccgcgacgccctcagcctgctgtttttctcgctgtttggcgcgctaaccgtgcagttcacctttctgatgaccattgaaaagtccaatgccgccacggccacggtgctgcagtttctgtcgccgacgatcatcgtcgcctggttcgccctcgcccgcaaagcgcgtcccactccgctggtgctgggggctatctgcacctcgctggcgggcacctttctgctggtgacccacggcaacccaacgacgctgtcgatttcgccggcggcgctgttctgggggatcgcctcggcgtttgccgccgccttttataccacctatccttcaacgctgattgcccgctacgggacgctgcccatcgtcggctggagcatgctgttcggcggcgcgatgctattgccgttttacggcggccagggcaccgattttgtggttaacggcagcctgctgttagcttttttctacctggtggtgatcggtacttcgctgaccttcagcctctatctcaacggcgcgcagaagattggcggcgcaaaggccgggatcctaagctgcgccgaaccgctgagcagcgccctgctgtcgctcctgctgctggggatcaccttcacgctgccggactggctgggcactctgctgatcctcgcgtcggtggtgctgatcgccatcgactcgcggcggcgggtgagagccgcctga

SEQ ID NO: 213685 - DNA, 1434 bp, Klebsiella pneumoniae
atggcaaaaataacgaaagagatgatagcgcggatcctcgcccacgtgggcggcgccgcaaacgtcgcgcaggcgggcaactgcatgacgcgcctgcgcttgaccctgcgcgatgaaagtctggccgacagcgccgccatccgccagattgacggcgtgatgggggtgatcgtcagcgacgagcagttccaggtggtgctcggccccggcaaggcgcaaaccgccgccgaaatgatgaacggcctgctggaggcagcgcccgccgccgcgccgacgctggccgacgtcgcggcggagaaaaagcaggcgctgaagggcaagcagaccagcgcggtgcagaagtttctcgccaaattcgccaccatctttacgccgctgatccccggctttatcgccgttgggctgctgctgggcttcgccaccctggcggaacaggttttcgtactggagaacgcccatccgaacgccagcctggtggcgctgattggctatatgaaggtcttcagcaaagggatgttcacctttctgagtatcctgattggctataacgcgcagaaggcgttcggcggctccggcgtgaacggcgcgattatcgcctcgctgttcgtgctgggctacaacccggaggcaaccagcggcttctacgccggcatttccaccttcttcggccatggcatcgatccgcgcggcaatatcatcggcgtactgatcgccgctatccttggcgcgtgggttgaacgccaggtgcggcgggtgatgccggccaacctcgatatgatcctcacttcggcggtgacgctgctgatcatgggcgcggtgacctttacggtgatcatgccgattggcggctggttgtttaccggcatgtcgtggctgttcctgcatcttaacggcaacccgtttggctcggcggtgctggccggcctgttcctgctggcggtgatgttcggcgtccatcaggggtttgtcccggtctattttgcgctggtggacgcccagggctttaactcgctgttcccgatcctggcgatggccggggccgggcaggtgggggcggcgctggcgctgttctggcgggcgaagcgcgattcgctgctgcgaacccagattaaaggggcgattattccgggcttcctcgggattggcgagccgctgatctacggcgtcaccctgccgcggatgaagccgtttgtcaccgcctgcctcggcggcgcctgcggcgggttcttcgtcggactgatcgcctggctggggctgccggtcggcctgaacacggtgttcggtccgtccggtctggtggcgctgccgctgatgacctccggcagcggaatttacgccgggatggcggtctacgccggcgggctggcggtctcctacctgtgcggttttgtcctcacctggctgttcggcagtaaaaatgtcgatttaagctag

SEQ ID NO: 213686 - DNA, 903 bp, Klebsiella pneumoniae
atgagtatcgacctgagcaaactgctgaccgagcgacgtaacgccaacagcgccaacattgacaccctctccaccctcgagatgctgacggtgataaaccaggaagaccagcaggtagcccaggcgataacgccctatctgccgcagattgccgaggtggtggataaggtcgcggcagcgctgcaggccggtggccgcttgatttacattggcgcgggtacctcagggcgtctggggatcctcgatgccagcgaatgcccaccgaccttcggcacccgcccggagcaggtggtggggatcatcgccggcggacataaagcgattctcagcgccgtggaaaacgtggaagacaacaaagcgcagggggcgatggatctgcagaacctgaacttcagcaaccgcgatgtgctggtggggctggcggccagcggacgcacgccgtacgtcattggcgccatggaatacgcccatagtcagaatgcctttgtcgccatcgtcagctgtaacccgcatggcgaaatggcccagctggcggacgtggcgatcaccccggtggtcggcccggaagtggtcactggctctacccgcctgaaagccggcaccgcgcagaagctggtgctgaacatgatctccaccggggcgatgatccgcgtcggcaaggtgtacagcaacctgatggtcgacgtcgaagcgaccaacgccaagctgattgagcgccaggtctctatcgtgatggaggctaccgactgcgatcgcgccaccgcccagaaggcgctggaggcctgcggccgccactgtaaaacggcgatcgtgatggtgctggcggacttaagcgccgcagaggcgcagtcgctgctggcgaaaaacaacggctatatccgcaaggcgctcagcaacacctga

SEQ ID NO: 213687 - DNA, 1164 bp, Klebsiella pneumoniae
atggcacgtgtttccctctcctgggcgctgatcctcggcctgctgtcgggtatcggcccgctgtgcacggatttttatctgccggcgctgccggagatcactcagcagctgcaggccaccagcacccagacccagctgtcgttgaccgccgcgctgattggtctcggcctgggtcagctgtttttcggcccgctgagcgaccgcattggccgcctgaaaccgctggcgctgtctctgctgctgtttatcttctcttcggcgatgtgcgccctgacccgcgatatcaacatgctgattgtctggcgctttttacaaggctttgccggcgccggcggctcggtgctgtcgcgatccatcgcccgcgataaataccagggcaccctgctgacccagtttttcgccctgctgatgaccgtgaacggcattgcgccggtgctgtccccggtgctgggcggctacgttatcaccgccttcgactggcgaattctcttctggacgatggccgccattggcggcgtgctgctggtgatgagcctggcgatcctgcgggaaacgcgcccggccacagcggcgcatgccagccgccaacggcccggccagccggtgctgaaaaatcgccgctttctgcgcttctgcctgatccaggcctttatgatggccgggctgttctcctacatcggctcttcttccttcgtgatgcagagcgaatacggcatgagcgccatgcagttcagtctgctgttcggtctgaacggtatcgggctgatcatcgccgcgatgatcttttcccgtctggcgcgccgctttagcgccgaaagcctgctgcgcggcggcctgacgctggcggtgagctgtgcggcgatcatgctgctgtttgcctggctgcatctgccggtgctggcgctggtcggcctgttctttaccgtgtcgctgatgagcggcatcagcaccgtcgccggcgcggaggcgatgagcgcggtcgacgccgcgcagtccgggaccgcgtccgcgctgatgggcaccctgatgtttgtcttcggcggcatcgccgcgccgctggcgggtctcggcggcgaaacaatgctgaaaatgagcctcgcgatggccatctgctacctgctggcgctgctgctgggcctcagcaaaccgcgcgacgcacgctaa

SEQ ID NO: 213688 - DNA, 1365 bp, Klebsiella pneumoniae
atgtttcgtttaagttttatgtttatcgcgctcctgaccgcgggctgcgtctcgcttgacccgcattatgatcgcccggccgcgccggtgccggccaccctgcccggggcgcacggcgaatcgacggcggtggtcggcgactggcagaaagtggtcaatgacgcgcggctgaaaaaagtggtcagcatcgcgcttaacagcaaccgcgatgtgcaaaaggcgctggccgatatcgaggccgcgcgcgcccagtatggcgaaacgcgggcatcgctgtttcccaccgttgatgccgaactgagccacacccgcagcaaaacggtggccagcggcctgagttccgcttcgcaggccgacggcgcggtctccagcttcgaactggacttgttcggcaagaaccagagcctgtcgcgcgcggcgcgcgaaacctggcttgccagcgaattcaccgcgcagaatacccggctgacgatgattgccgatttgaccaccgcctgggtgacgctggcgacggataacagcaatctggcgctggcgcagcagaccatggacagcgcggcaaactcgcgcaacatcgtcgcccgccagatggcggttggcaccgcctcagccggcgatgtaagctcggcggaaagcgtctatcagcaggcgcgcgccagcgtcaccagctatcgcacgctggtggcgcaggataaaaacgccattaacctgctggcgggggaaaccgtgccggagagcctgctgcccggcactctcgagagtctcggggataacagcatcgcgctggtgccggcgggcgtgtcgtcgtcggtgctgctgcgtcggccggacattcaggaagcggagcacaatttgaagagcgccaatgccgatatcggcgcggcgcgggcgaacttcttcccgtcgatttccctgaccgccagcgccggggtcggcagcgactcgctgtcgtcgctgttcagccacgggatgcaggtgtggtcgttcgccccctccatcagcctgccgctgttcaccggcggcagcaacctgtcgcagctgcgctatgcggaagcggagaaaaaggggctgatcgccacctacgagaaatcgattcagagcgcgtttaaggacgttgccgatgcgctggcgcgccgggaaacgctgagcgaagagcttgatgctcagcggcagtatgtcgccgccgagcagacatcgctggatatcgccatgaagagctatcaggccggggtcggcgattatctgtcggtgctcaccgctcagcgcacgctgtggtcggcgaaaacgacgctgctgtccctgcagcagaccgacctcaataaccggatcaccctctggcagtcgctgggcggcggcgccagttaa

SEQ ID NO: 213689 - DNA, 3108 bp, Klebsiella pneumoniae
atgttctcccgtttcttcgtgcgtcgcccggtctttgcctgggtgatcgccattctgattatgctcgccggggtgctggcgatccgcacgctgccggtaggccagtacccggacgtcgccccgccggcggtgaaaatctccgccacctataccggggcgtccgccgaaaccctggagaacagcgtcacccaggtcatcgagcagcagctcaccggcctcgaccatctgctctacttcagctccaccagcagctccgacggctcggtcagcatcaccgtcacctttgagcaggggaccgacccggacaccgcccaggtgcaggtgcaaaacaaagtgcagcaggcggaatcgcggctgccgagcgaagtccagcagtccggcgtaacggtggaaaaatcgcagagcagctttctgctgatcctcgcggtgtatgacaaaaccaaccgcgccaccagctccgatatctccgactggctggtcagcaatatgcaggacccgctggcgcgcgtggagggcgtcggcagcctgcaggtattcggcgccgaatacgcgatgcgcgtctggatggacccgaccaaactcgcctcctactcgctgatgccttccgacgttcagtcggcgattgaggcgcagaacgtgcaggtttccgccggtaaaatcggcgcgctaccgtcgtccaatgcccagcaattaaccgccaccgtgcgcgcgcagtcccggctgcaaacccctgaccagttcaaagcgatcatcgtgaaaagccaggccgacggctcggtggtgcgcctgagcgatgtcgcgcgggtggagatgggtagcgaggattacaccgccaccgccaatctgaacggccacccggccgccgggatcgcggtgatgatggcccccggcgccaacgcgctggacaccgcgacgctggtgaaaagcaaaatcgccgaattccagcgtcagatgccgcagggttacgatattgcctatccgaaggacagcaccgagttcatcaaaatctcggtcgaggacgtgattcagaccctgttcgaagcgattatcctcgtcgtctgcgtgatgtatctgttcctgcagaacttccgcgcgacgctcattccggcggtggcggtgccggtggtgctgcttggcaccttcggcgtgctggcgctgttcggctactcgattaacaccctgacgctgttcgccatggtgctagcgatcggcctgctggtggatgacgccatcgtggtggtggagaacgtggagcgcattatgcgcgacgaagggctccccgctcgcgaagccaccgaaaaatcgatgggcgaaatctccggcgcgctggtggcgattgccctggtgctgtcggcggtgttcctgccgatggccttcttcggcggttcgaccggggtcatctatcgccagttctcggtaaccattatctcggcgatgatgctgtcggtggtggtagcgctgaccctcaccccggcgctgtgcggcgcgctgctcagccactccaaaccgcacaccaaagggttcttcggcgcctttaaccgcctgtgggggcgcacggaggcaggctaccagcgccgggtgctcggcggcctgcgccggggcgcagtgatgatgggcgcttacgcgctgatttgcggggcgatggcgctggcgatgtggaagctgccgggcagcttcctgccggtggaggaccagggggagatcatggtccagtacaccctgcccgccggggcgacggcggtgcgtaccgccgaggtgcgccgccaggtgaccgactggttcctcaccaaagagaaagccaataccgatgtcattttcaccgtcgacggcttcagctttagcggcagcgggcagaacgccgggatggccttcgtgtcgctgaaaaactggtcgcagcgcaaaggggacgacaacaccgcccaggccatcgccctgcgcgccaccaaagagctggggacgatccgcgacgccaccctcttcgccatgaccccgccgtcggtagacggtctcgggcagagcaacggcttcaccttcgaactgatggccagcggcggtaccgaccgtgacagcctgatgaagctgcgcagccagctgctggcggcggccaaccagagcagcgaactgcagtcggtgcgcgctaacgacctgccgcagatgccgcagctgcaggtggatatcgataacaacaaagccgtctcgctggggctgtcgctgagcgacgtgaccgatacgctctccagcgcctggggcggtacctacgtgaatgactttatcgatcgcggccgggtgaagaaggtctatatccagggcgaaagcgacgcgcgcgcggtgccgtcggacctcggcaaatggttcgttcgcggcagcgataacagcatgacgccgttctccgccttcgccaccacccactggcaatacggcccggaaagcctggtgcgctacaacggctccgccgcctttgagatccagggcgaaaacgccgccggcttcagctccggcgcggcgatggacaagatggaaaagctggccgacagcctgccggcgggctccacctgggcgtggagcggcatttcgctgcaggaaaagctggccagcggccaggcgatgagcctgtacgccatctcgattctggtggtgttcctgtgcctggcggcgctgtatgagagctggtcggtgccgttctcggtgatcatggtcatcccgctcggcctgcttggcgcggcgctggcggcgacgctgcgcggcttaagcaacgacgtctacttccaggtggcgctgctgaccaccatcggcctgtcgtcgaaaaacgccatcctgatcgtggagttcgctgaatccgccgtggatgaggggtattcgctctcccgggcggcgatccgcgccgcgcagactcgtctgcgcccgattgtcatgacctcgctggcgtttatcgccggggtgctgccgctggccatcgccaccggcgccggagccaacagccgcgtggcgatcggcaccgggattatcggcggcaccctgacggccaccctgctggcggtgttcttcgtaccgctgttcttcgtgctggtgaaacgtctcttcacccgccaacgtccttctcaggagtaa

SEQ ID NO: 213690 - DNA, 1125 bp, Klebsiella pneumoniae
atgaaatacatcatagctcccatcgcgacagcattatttctccttagcggatgcgataatgcgcagacatctgctccgcagcaacccacgccggaagtgggcgtggtcaccctgcaaagccagccggtgccggtagtcagccagctcaccggccgcaccaccgcctcgctcagcgccgaagttcgcccgcaggtgggcggcatcatccagaaacgcctgtttaccgaaggcgatatggtgaaggccgggcaggccctttaccagatcgatccctccagctatcgcgcgacctggaacgaagcggcggcggcgctgaaacaggcccaggcgctggtggcctccgattgccagaaggcccagcgctacgcgtcgctggtcagggataacggcgtttcccgccaggatgctgacgacgccgcctccacctgcgcccaggacaaggccagcgtggaatcgaagaaagcggcgctggagagcgcgcgcattaacctgaactggaccaccgtcaccgcgccgattgccgggcgcatcggcatctcgtcggttacgccgggggcgctggtctccgccgatcaggataccgcgctggcgacgatccgcgggctcgacaccatgtatgttgatctgacgcgatccagcgtcgatctcctgcgtttacgcaagcaaagcctggccagcaacagcgacaccctcagcgtgacgttaaccctggaagatggcagtacctatcccgaaaaagggcgtctggcgctcaccgaagtcgccgtcgatgaatctaccggctcggtgaccctgcgcgctatcttccccaacccgcagcacgtcctgctgccggggatgttcgtccgcgcgcgcatcgatgaaggcatcatgaacgacgcgatcctcgccccgcagcaggggatcacccgcgatgccaaaggcgacgccacggcgctggtggtcgatgccgccaacaaagttgagcagcgtaccgtggaaaccggcgacacctacggcgataaatggctggtgctgagcggcctgaaagcgggcgacaagctgattgtcgaaggcaccggtaaagtggcccccggacagacagtgaaggccgtcgccgtcaacaataacggaggcaacgcctga

SEQ ID NO: 213691 - DNA, 417 bp, Klebsiella pneumoniae
atgacactaatcattacaaaaagcattaatcccaacgatcaacaagaattattttccggtctgcggcagtataatcagcagtatctcgatgcggcgcagtttggcgatctggggatttactcgcgcgatgcgcaaggggtaatgcagggcgggctgattgccaaacgcaagggcaactggctgtgcattgagtatctgtgggttagcgagacgacgcgcgggcgcgggctggggagcgaactgatgcaggaggcggaacagcaggcgcaggcgcaaggctgcagccatctgctggtggatacctttagcttccaggcgctgccgttttatcagaaattaggctatcagctgcagatgtcgctgcccgacttcccgcacgcaggcatgcagcgccactatttgtcgaaggcgctgtaa

SEQ ID NO: 213692 - DNA, 648 bp, Klebsiella pneumoniae
atgacagcacaaaaggatcaggatgctccccgccgcccgggtcggccgcgcggtaaaaaaccgggtaccgccaaccgcgaacagttgatggacatcgccctgacgctgtttgcccgcgacggggcgggccgcgtatcgttgaacgccatcgccaaagaggccggggtgacgccggcgatgctgcattactacttcagctcgcgggatgcgctggtgactcagctgattgaggagcgctttatgccgctgcgcaatcacatcagccgcatctttgtcgatcatccacaggacccggtgctggcgctgacgatgatggtcgagacgctggggcatatggcggagaaaaacgcctggttcgcgccgctgtggatgcaggagatcatcggcgagatgccgattctgcgccagcatatggatgcccgcttcggcgaggagcgttttcaggtgatgctggggacggtgcgtcgctggcagcaggaaggcaagatcaatccggcgctggcgccggagctgctgtttaccacggtgattagcctggtgctggtgccgttttcgcgcatccacagcgatccgcgtttacaggcggtcaaccgccagaccatcgtcagccacgcgctggcgttgatgggccacggcgtcgggggttaa

SEQ ID NO: 213693 - DNA, 1494 bp, Klebsiella pneumoniae
atgacttctcaagttgctaacccaccggtgcagtcgatacgcctgctgttcagcgcattgctgctggtgatgctgctttcagcgctggatcagaccattgtctccaccgcgctgccgacgattgtcggcgaactgggcgggctggacaagctttcctgggtggtcaccgcctatatcctcagctccaccatcgcggtgccgctgtacggtaaatttggcgatctgttcggccgcaaaattgtgctgcaggtggcgattgggctgtttctcgtcggctccgcgctctgcgggctggcgcagaatatgacccagctggtgctgatgcgcggcctgcaggggctcggcggcggcggcctgatggtgatcagcatggcggcggtcgccgacgtcatcccgcccgccaaccgcggccgctatcaggggctgttcggcggcgttttcggcctggcgacggtgatcggcccgctgatcggcggttttctggtgcagcacgcctcctggcgctggatcttctatatcaacctgccgctcggcctgttcgcgctgctggtgatcggcgcggtattccacagcagcaataaacgcagccagcatcagattgactggctgggggcgatttatctcagcatggcgctgctgtgcatcatcctgtttacctcggaaggaggcagcgtccatgcgtggaatgacccgcagctgtggtgcattctggccttcggcatcgtggggatcatcggctttatttacgaagaacggatggccgccgagccgattattccgctggcgctgttccgcaaccgcagcttcctactgtgcagcctgatcggcttcgtcatcggcatgtcgctgttcgggtcagtcaccttcctgccgctctatctgcaggtggtgaaggaggcgacgcccaccgaagccgggctgcagctgatccctctgatgggcggcctgctgctgacctcgattatcagcgggcggattatcagccgtaccggtaaatatcgcctgtttccgatcctcggcaccctgctcggcgtgaccggcatggtactgctgacccgcatcaccattcactcgccgctgtggcagctgtacctgtttaccggcgtgctgggagcgggtctggggctggtgatgcaggtgctggtcctggcggtgcagaatgcgatgccggcgcagatgtacggcgtcgccacctccggcgcgaccctgttccgctcgattggcggctccatcggcgtggcgctgtttggcgcggtgttcacgcacgtgctgcagagcaacctgcaacaactgctgccggaaggcgcggtgctgccgccgggaatgaatccggtggcggtccagcacctgcccgcggatatccgcctcgactacctcgacgccttcggcgcggcgatccacgcggcgtttctgatggcggccggcattatggcggtggcgtttgtcctctcatggctgttaaaggaggcgccgctgaagaccgcgacgcattaa

SEQ ID NO: 213694 - DNA, 915 bp, Klebsiella pneumoniae
atggatcgattaagcgcgatggcgctgttggtgaaagtgaccgagctggggagcatgtcggcggcggcgcgggcgctgaatatgccgttgaccaccgtcagccgccatattggcgaactggagagcgcgctgggcgtacgcctgctggcgcgaaccacccgcaaactgacgctcaccgacgccggggtcgattatgttgccgccgcgcggcggatccttgaggaggtggaaaacgccgaacgccaggcgacgggcgaatatcaggaaccgaagggcgagctggtgatctccgcgccgacgatgtttggacgccagcacgttcttccggtaatcagtgaatttatcgcccgctacccgctaattcgcgtccgtttgctgctcagcgatcgcaatgccgacctggtgagcgaccatgtcgatctggcggtgcggattggcgacctggcggacagcagcatggtggccacccgcctcggcaccatgcggattgtggcctgcgcccatccggcgctgctggcgaaatacggcgagccgcagcggccgcgcgatctggcggcgctgccgatcatccgcattgaatcgccgatgccctatcgcggctggcgctttcgcgccgctgagcgcgaggaccagctgattaacctgccgccggtgctatccgttaccacgccggagagcgccgccgatgccgcgcggctgggggtgggggtggcccgcttactgcattatcaggcgctggatggcctgcgccacggggagctccgtctgctgctggaaaacgtcgagccggatccggcgccggtccatttgctgtataccgctcgggatctggcgccgcttaagctgcgcaaatttatcgattttgccgcaccggcgctgcgtcaggcactgctgcgcatcgccggggccgcttaa

SEQ ID NO: 213695 - DNA, 627 bp, Klebsiella pneumoniae
atggcagcaacctttctcgatatcgctatcaccccggacgtgatggatgtgcagcatgaaatgggcagcgactcgctgtggcaaacgccgcgcagtcgccgccaggccgaccgcttcggcgacagcgaagcggggatgatcgccacccgcgacagcttttatctggcgacggtgtcgcagagcggctggccctacattcagcatcgcggcggcccgccggggtttctgcatctgctggatgacaccaccctggcgatggccgatttcggtggtaaccgccagtacattactaccggcaatctgcgcggcagcgaccgggcctgcctgtttttgatggattatccgcgccgtgccaggctgaaaatctacgccaccgtcgaggtcctggcggcagaggaccacccgcagctgctggcgcaggtggcgccggccaactatcgcgcccgcattgaacgtctgtttctttttcatttgcaggcgtttgactggaactgcccgcagcacattacgccgcgctacagcgcgcagcaggtggcggagtacagccagaacctgcagcaacgtattcatgacctggagcaggagaatcagcgcctgcagcagcaattagcccgtagaggagagtaa

SEQ ID NO: 213696 - DNA, 471 bp, Klebsiella pneumoniae
atgaccgaacaacgtcctccgttaccgccgtttacccgcgacagcgctatccagaaggtccgcgccgcggaagatggctggaacagccgcgatgcggaaaaagtcgccctggcctacaccgtggatagcgaatggcgcaaccgcagcgaatttgtccacggtcgggggcaaattgttgagttcctgcagcgaaaatggcgcaaggagcagcaataccggctgattaaggagctgtgggcatggcaggagaatcgcattgccgtgcgcttcgcctatgagtggtgcgacgacagcggcaactggtttcgctcgtatggcaatgagaactgggagtttgataagcatggactgatgcagacgcgctacgcctgcatcaacgatctgccaattagcgaaagcgagcgcctgttccactggccgcaggggcgccgcccggacgatcatccggggctcagcgatctggggctgtaa

SEQ ID NO: 213697 - DNA, 537 bp, Klebsiella pneumoniae
atgagccgtttagcagatatccgtgaacaagacgccaccggcaaagccgccgatattttcgccgggatcaaaaaagcgatgggcaaagtgccgaacgcctacctgaccatcggcggccactcgccggcggcgctgcagcaggcgctggcgcacaatgcgatgctccataaaggcagcctcagcgcccagcagctggaagcgattaatctgtcggtcagcgaagccaccggctgtgactactgcctggccgcgcacaccctgatggcgaaaaaagctggcttcagcagcgagcagatccacgccctgcgccgcggggagtatgcggaagagacgcagcttgatgcgctggtgaaattcgcgcagaccctggtgaccaccaccggtacgctgccggaagccgacgtcgccgcgctgcgcaacgccggttttagcgaccagcaggtgattgagattatcagcgccatcagcgccatcctgttcaccaacatggtgaaccgggttaacgacacggtagtcgacttcccgaaagccgattaa

SEQ ID NO: 213698 - DNA, 906 bp, Klebsiella pneumoniae
atggacagtctcagtcatctgctggcgctgctggcgccgcgctgcgaagtgaacctgcactgtcgcttcggcggccgctggcaggccgggcaccagcaaatgcgcagcggcgtggtgccctggcacgtggtgctgcgcggcgaggggcggctcaacgtcggcggccagacccatcacctgcgcgcgggagatgtcgtcctcctgccccacggttcgccgcacctgatggagagcctggtggagtggggccaggtgctgccggtggcgcaccggtttaacggcacggtgacggaaatgcgcgccggcccggcggagggggcgctggagatgctgtgcggcgaattctattttggtccgcacgtcagctggctgttcagtgaagcatcgacgctgatccatctccataccgatgcgcgtgaagactgcccggagctggacgcgctgcttaatatactggtgcgcgagagcctggcgcagcgtcccggcggcagcgctatcgtgcgcagcctcggcgatacgctgctggtgctcctgctgcgcatgctgcttggcgagcaacagccgcccggcgggctgctgcgcctgatgagcgatgaacgcctgatgccggcggtgctggcggtgatggcgaccccggagcaaccgtggacgctggagagtatggccgcccgcgcgtttttatcacgggccacctttgcccgtcattttgcccgcgtctatcacctgacgccgcaggcgtggctgtcgcagttgcgaatggcgctggccgcccggctgctgcgcctggagcgtcagaccaacctcgaggtcattgccgaacgctgcggctttcagtcgcaggcttccttctcgaagcgcttcaaaatgcgctatggcgtgacgccgggcgagtggcgacggggctag

SEQ ID NO: 213699 - DNA, 810 bp, Klebsiella pneumoniae
atgagattacgtttacaggccgccgccgcggtaatgctggcgggtctggcgctggtcggctgcgaccaaaagggtaatgaagcgaagcacattaaggtcggtgtgattaacggcgccgagcaggatgtggcggaagtggcgaagaaggtggccaaagagaagtacggtctggaggtcgagctggtggggttcagcggctcactgctgcccaacgagtcgaccaacgccggggatctggacgccaacgtcttccagcatcggcctttccttgagcaggacaacaaagcgcataattatcatctggtggcggtcgggaataccttcgtcttcccgatggccggctattcgcgcaagatcaagtcagtcgccgaactgaaagacggcgcgacgatcgctatccccaacgatccgaccaacctcgggcgggcgctactgctgctgcaaaaagagaagctgattaccctcaaagccgggaccggcctgctgccgacggcggtggatatcaccgacaacccgcgtaacctgaagatcatggagctggaaggggcgcaactgccgcgcgtactcgacgatcccaaagtcgacgtggctatcatcagcaccacctacctgcagcaaaccgggctgtcgccggttcgtgacggcatctttatcgaagataaaaactcgccctacgtgaacatcatcgtgacccgggaagacaataaagacgcgcaaaacgtgaaggagtttatgcagtcgtaccagtcgccggaggtggcgaaggcggcagagactatcttcaacggcggcgcggtgcctggctggtaa

SEQ ID NO: 213700 - DNA, 855 bp, Klebsiella pneumoniae
atggtacgccaacggcaggctgacctgctgctgattgccgcgacggtgattgccgcctgcggctggatattttcccgcgaggcgatcgccggcatgccggtgttcgcgtttcttgggctgcgttttttcttcgccgcgctgcttctgctgccgttctgccgcggttttcgcccgcaaaagcagcactggccaaaactcatcatcagcggactctggtttgcgctcaacctctgcctgtggatctattcggtctccacgacggcgtcgctcggcgaaggggcgtttatcatgagcctgtcgatgatgttcgtcccgctgaccgcatgggtgatgatgaaggtgcgcccgccgcgcgcctggtgggagtgcctgccgattgcggtggttggcctggggctgctcagtctgcatatgccgatagccttccaccccagccagggctggtttttgctgacggcgctggtgcagtcgatctggttctgttacaccagccgctgcgcgcgtgaagtaccgctgatccccctgaccaccgtgcagctggcgatcaccggtatcgtcgggttgaccatctccgctgccgttgaacgctgggaccagccgatgaccctgccgactctcggctggttggtggccagcattgtcatcgctaccagcctgcgcttcggtctgcagatgaaggggcagaagtacgcggcggtggccagcgcggcgatcatcatggtgcttgaaccgctgctgacggtcattgccgccgcgctgtggtacggcgaacagctgccgctgcagaagattataggcggcgtgctgatcctcgtggcccagctgtggttccgctggcggatgcttaagccgtaa

SEQ ID NO: 213701 - DNA, 561 bp, Klebsiella pneumoniae
atgaaaaagaaactgaccgccgccgatatgcacgacccgcaggtcatcgccgagacgccgtggttcagcatgcgtaaggtgggtattgatgtcgcccccggcgagcgccgcgacttttattccattcattacccgcgcccggcggtggggattgtggccatccaggatgagaaggtgctgctgattcgccactaccgctacctgatcgataaggtggtgtgggcgatcccttctggcggcgtcgatgaagaggaagacccggcggtcgccgcgctgcgcgagctgcgggaagagaccggatggcaggcgcaacgcgttgaggagatcattcgctttaacccctcctacggcagcagcgatcagctgtttatcacctggctggccaccggtttacgctgggtggggatggatgcagatcaggatgaggtgatggagaccggctggtttaccttcgacgagataaaccagctgatcgcccgcggcgagatgccggacgggctgtcgctggtgccgctgctgcagctgatggcgcagcggcgaagcggctcgcttacggcttaa

SEQ ID NO: 213702 - DNA, 780 bp, Klebsiella pneumoniae
atgaacatcacccacatccgtaatgcgacccagattattcactacgccgggaaaagatttctcatcgatccgatgctggcggacaaaggcgcctggccgggttttccgggcaccgcgcgcagcgaactgcgcaatccgctggttgagctgccgttttcccgcgataaaattgtcgacgttgacgcggtgatcgtcacccacacccatgacgatcactgggacgcggcggcgatcgccgcgatcccgaaaaccctgccggtgttcgcccagcatgaggccgacgccgcgctgctgcgcagccagggatttcaggatctgcgcctgctgtcggcagacagcgaatttgccggcgtgcgcctgcagaaaaccacctccggccaacacggcagcgaccggacctacgcggtgccggcgatggctgaacgcctgggcgaggcctgcggcgtggtgtttcgccatccgcaggagaagacgctgtggctggtgggggatactatctggcgcgatgacattgcagccgacctgctgaagctgcgcccggacgtggtggtcctcaacgccggctacgcccacgtcatcggctttggcccgattatcatgggcaaggaagatctcctgaacgtgcacttcaccctaccggaagcaaaaatcatggctatccacctcgaggcggtcaaccactgcctggtgagccgggaagagatgcgccagtatgcgctggataatcagattgccgatgtggtttctattccgcaggatggagaaaccgtcgtttattaa

SEQ ID NO: 213703 - DNA, 954 bp, Klebsiella pneumoniae
atgaaactcaccgacgtggcgattgtcgctgtagagggctttagcccgtttcactacgccgtcccctgcatgctgtttggcgattcggtttcggaaatcaaacgctttaatctgcacatttgcgccgagcggccggggctgctgagcgcccgcgatggttttgcgctgtacgccaccggcgattatgccgcgctggaacaggcggatatcgtggtggtgccttactggggcgaggtcgatcgacgtccgccgcaggcgctgcttgatagcctggtgcgggcccgggataacggcgcggagattgtcggcctgtgcctcggcgcgttcgtcctcggctacgccgggctgctggacggcaggcgagcggcgactcactgggagttcgagcaggatttccagcgccggtttccgcaggtgcagctggatatcaacgccctgtacgtcgacgaccagcggatcattacttcggcgggcaccgcggcggcgctggactgttgcctctacatcatccgccagcgtttcggcagcctcgcggccaaccagatcgcccggcggatgattgtttcgccgcaccgcgagggcggccaggcgcagtttatcgcccagccggtgccgaaaaacacccgcgatgcgcgaatcaactgcctgctggattatctgcagcagcatattgccgagccgcacagtctcgattcgctggcccgggtggtggcgatgagccgccgtaccctgacccgccacttcgcccgggcaaccgggatgagcattaccgactggctgaccgccgaacgtctgcgccgcagccaggctctgcttgaggcgggcgatctgccggtcgagcaggtggcggaggcggtgggctatctttcagcggtcacctggcgccagcagtttaaagcgcgctttggcgtcagcccgacggaatggcggcgtacctttcgtcgcggcgcttag

SEQ ID NO: 213704 - DNA, 1050 bp, Klebsiella pneumoniae
atgctgatcaacgctattggtacctactccgccagccagccgctggaatcaatggccatcacccgccgcgacccggggccgcaggatgtacagatcgccatcgcttactgcggcgtctgccactccgatctccaccaggcgcgatcggaatgggcaggaacgctgtatccctgcgtgccggggcatgaaattgtgggtcgggtgaccgcggtcggcaacgccgtctcgcgctacgccgtcggcgatctggtgggcgtcggctgtatggtcgatagctgtcaacagtgcgaagagtgcgccgaggggctggaaaactactgcgaccacatggtgctgacctataacgggccgacccaggacgcgccgggacacacgcttggcggttattcacagcagatagtggtcaatgaacgctacgtgctgcggataacccatcccgaagcgcagctggccgccgtcgcgccgctgctgtgcgccgggatcacgacatactcgccgctgcgccactggcacgtcgggccgggtaaaaaagtcggcgtggtcggcatcggcggcctcgggcatatggggatcaagttggcccacgccatgggggcccacgtggtggcttttaccacctccgaatccaagcgtaatgcggccagagcgctgggcgccgatgacgtagtggtgtcgcgcaatgaagacgaaatggcggcccacgtcaaaagcttcgatttcatcctcaacaccgtggcggcgccgcacaatctcgatgccttcaccacgctgctgaaacgtgatggcaccatgacgctggttggcgccccggccacgccgcatccgtcgccggaagtgttcaatctgatcttccgccgccggtcgattgccggctcgatgatcggcggtattccggaaactcaggagatgctcgacttctgcgccgaacacggcatcgtcgccgatatcgaattgatccgcggcgatgagatcaacgaagcctgggaaagaatggtcaagggtgacgtgaaataccgcttcgtgatcgacagtgcgaccctcgccggctaa

SEQ ID NO: 213705 - DNA, 699 bp, Klebsiella pneumoniae
atgtcgatccctgcagccagcctctctactgaccaggcgttaccgtctttttactacggaagacagacaaagccgttattcgcggtggaatccctgttatctgcgttcctgcccgccagctcaccctttgcgctgccgcgatcgacctattatcgttttccgccgacccaggctgaatccggattaattctgctcgaagaggggattgcctcgctatgccatgcggaaaacaacatggtgatatcaacgatatttgccccttcgctattgggattaatcgatggttacggcgtctttaacggtattccggaaaaacaccactgctctctgtttgctgagacagatttgcgcggacgctggataggacaccaggccgcggtcgagatcctcaatgcgcaaaacctgtggcaggagatggcccatgttctggcgcagcggctgatggtgttgagcatgcgttcgcaggagatggtgggggtggattcttatccgatggtgcgaaccctgctaacagagctggcggactacccggaggagtatcgtcgccaaattaatgcgttaagctttatacagcgccgcaccaacctgtcgcgcagccgtgttatgtcgattctggcagagctgcgcaaaggtggttacattacggtccatcgcggggtgctggaaaagataacccgcacgcttcccgcccacttttaa

SEQ ID NO: 213706 - DNA, 291 bp, Klebsiella pneumoniae
atgatatcgcttatcgccgtgctcaaggcgaaaccgggccaaacggacgccctgcgtcaggccctgcaggcgctgctcctgccgacgagacaggagccgggcaacctcgactatgccctgtttcagctgcgcgacgcgccggacaccttctatatgcgcgaggcgtggcagggacaggacgccctcgatgcccatgtcgcgatgccctattttcaggcgtttatgacgcagatggagtctctgctggctgagccgctgcggctggactttctgacgccggttgagccttag

SEQ ID NO: 213707 - DNA, 1008 bp, Klebsiella pneumoniae
atgaaagctatcgccattactcaagccgccgctgacggcaacaacatcccttctttaaccgagatcgacctgccgatccccaccgcccacgggcgtgatctactggtcgctgtgaaggctatctcggtcaatccggtagacaccaaagtgcgcgccggctttcagggcgacacgccgcgggtgctgggctgggacgccgttggcgtggtgcagtccgtcggtgaggaagtgacgctgttcgcgcccggggacgaggtctggtacgccggcgcgctgggccgggccggcagcaacagtgaatatcagctggtggatgagcgcctggtggcgcacaaaccgcgcaccctcgataatgcctccgccgccgcgctgccgctgacggcgatcaccgcctgggagctgctgtttcaccgtctcggcgttgaggaaggcggcaatgcgggcgacacgctgctaatcgtcggcgcggcgggcggcgtggggtctatcctgacccagctggccagtaaactgaccgccatgacggtgatcggcaccgcctcgcgtcccgagagccagcagtgggtccgcgaggcgggcgcgcaccatgtgatcgatcacagcaagccgctcgccgacgagctggcgcgcattggtatcacgtcggtaacccatgtcgccagcctgaccaataccgagcagcacttcaacgcgctgatcgacgccctcgccccgcagggcaagctggcgctgattgatgacccggagaccctggacgtggtgccgctgaaagcgaaaagcctgtccctgcactgggaatttatgttcacccgttcaatgtttgagacggatgatatgatcgcccagcatcagctgctcacccgcgtggcggcgctgatcgacaaccacactatcaaaaccacccttggcgaacactacggcgccatcaccgccgccaatctgcagaaagcgcatcgccagctggaaaccggacgcgccgtcggcaagatcgtgctggaggggttttaa

SEQ ID NO: 213708 - DNA, 468 bp, Klebsiella pneumoniae; identical to SEQ ID NO: 136492

SEQ ID NO: 213709 - DNA, 1395 bp, Klebsiella pneumoniae
atgaaagatcacattttgtccgtcaaagagaaaattggttatggcatgggtgatgccgccagccacattatttttgataacgtcatgttgtacatgatgtttttttacaccgatatttttggtatccccgccggctttgtcggcaccatgttcctgctggcgcgcgcgctggacgcgatttccgacccgtgtatgggtctgcttgccgaccgtacccgcagccgctggggtaagttccgcccatggatcctcttcggcgctatcccgttcggcctcgtctgcgtgctggcctacagctcgccggatttaagccacaacggcaagctgatctacgccgccgtgacctacacgctgctgaccctgctctacaccgtggtgaatatcccttactgcgcgctgggcggcgtgatcaccgacaacccgacgcagcgcatttcgctgcagtcctggcgcttcgtgctggcgacggcggggggcatgctctccaccgtgctgatgatgccgctggtcaactttatcggcggcgaagacaaagcgctcggcttccaggggggcatcgcggtgctgtcggtgattgccttcctgatgctggccttctgcttctttaccaccaaagagcgtgtcgaagcgccgccgagcagtacctcgatgcgtgaagacctgcgcgatatctggcgcaatgaccagtggcgggtggtcggcgtgctcaccatcctcaatatcctcgcggtctgcgttcgcggcggcgcgatgatgtattacaccacctggatcatgggctcggcggcgctgttcaccgccttcctcacgacctactgcgtcggcaacctgattggctcggcgctggcgaaaccgctgaccgactggaaatgcaaagtcagcgtcttctggtggaccaacgccctcctggcggtgctcagcgtggcgatgttcttcgtaccgatggacgccgaaatcaccatgtttgtctttatcttcgtcattggcgtactgcaccagctggtgacgccaatccagtgggtaatgatgtccgacaccgtcgactacggcgaatggtgtaacggcaaacgcctgaccggcatcagcttcgccggtaccctgtttgtgctcaagttagggctggcgctgggcggcgcgctgatcggctggatgctggccggcggcggctatgacgccgccgctaaaacccagaacagcgccaccctcaccatcattatcgccttgttcaccctcgttccggcggtgtgctacctgctgagcgcggtgatcgccaaacgctactacacgctgaaaacgccgttcctgaaaaaaatgatggccgagctggccgagggcgcgcgtcgcaacgaacaagatttcaccgccgccccgatcgacaaagaatggcaaaactaa

SEQ ID NO: 213710 - DNA, 2319 bp, Klebsiella pneumoniae
atgaaaatcagtgatggaaactggctcattcaaccagggctcaacctgatccaacccgtacaggtttacgaggtggagcagcaggggaatgaaatggtggtctatgccgcgccgcgcgatgtccgcgaacgcgcctggcagctggatacgccattgttcaccctgcgctttttctcgccgcaggaagggataatcggcgtgcgtatggagcacttccagggcgcgctggataacggcccgcactatccgctgaacgtgcagaaagacgtccatgtcgaaatagaaaatacggccgggttcgccgagctgaaaagcggcagcctcagcgtgcgggtgactaaaggcgaattctgggcgctggattttctgcgcgacggcctgcgtatcaccggtagccagctaaaaaacaacggctacgtgcaggatagtaagacccagcgcaactacatgtttgagcgcctcgacctcggcgtcggcgaaaccgtctacggcctcggcgagcgctttaccgccctggtgcgcaacggccagacggtagaaacctggaacgaggacggcggcaccagcaccgagcaatcctacaaaaatatcccgttctatctgaccaaccgcggctacggcgtgctggtcaaccatccgcagcgcgtctccttcgaggtgggctcggagaaagtctctaaagtccagttcagcgttgaaggcgaatacctcgagtacttcgtcatcgacggcccgacgccgaaagcggtgcttaaccgctatacgcagttcaccggccgcccggcgctgccgccggcatggtcgtttggtctgtggctgacgacctcgttcaccactaactatgacgaagcgacggtgaatagctttatcgacggcatggctgagcgccatctgccgctgcacgtcttccacttcgactgcttctggatgaaggccttccagtggtgcgattttgaatgggatccgctaactttcccggacccggaagggatgatcaagcgcctgaaggcgaaagggctgaaggtctgcgtgtggatcaacccgtacatcggtcagcgctcgccggtgttcaaagagctgaaagagaagggttatctgctgaagcgtccggacggttcgctgtggcagtgggataagtggcagccggggctggcgatttatgacttcaccaatccggaagcccgccagtggtacgctgacaaactaaaaggcctggtggcgatgggggtcgattgcttcaagaccgactttggcgagcgtatcccgaccgacgtccagtggtttgacggttccgatccgcagaaaatgcacaaccactacgccttcatctataacgagctggtgtggaaggtgctgaaagagaccgtcggcgagcaggaggcggtgctgttcgcccgctccgcctcggtgggcgcgcagcagttcccggtgcactggggcggcgactgctacgccaactacgaatcgatggcggaaagcctgcgcggcgggctgtcgatcggcatgtccggcttcggtttctggagtcacgatatcggcggtttcgaaaacaccgcgccggcccacgtctacaagcgctggtgcgccttcggcctgctctccagccacagccggctgcacggcagcaaatcctatcgggtgccatgggcctacgatgacgagtcctgcgacgtggtgcgccacttcacgcagctgaaatgccgcatgatgccgtatctctatcgtcaggcggcgctggccaacgagtgcggcacgccgatgctgcgcgcgatgatgctcgagtttccggacgatccggcctgcgactatctcgaccgccagtatatgctgggcgattcggtcctggtggcgccggtgttctccgaggccggcgaagtgcagttttatctgccggaagggcactggacgcatctgtggcataacgatgaattgccgggtagccgctggcataagcagcatcacgatgcgctgagcctgccggtctacgttcgcgacaacagcctgctggcgctgggcaacaatgaccagaagccggattacgcctggcatgagggcaccgccttccagctgttccaccttgaggatggacgcgaggcacgctgtgacgttccggcggcagacggctcgacgatcttcaccctgaaggccaggcgccagggcaacgccatcgctgtgagcggcgaaggcgaggcccgcggctggacgctgtgcctgcgcaatatcccgcaggtcgcgggcgtgcagggcggtacgcagaccggtagcgaactgggcgtggtggtgagcgccgagggcaatacgctgacgattacgttgtaa

SEQ ID NO: 213711 - DNA, 723 bp, Klebsiella pneumoniae
atggacgtagaaaatatctttcgtgacgtgaagctaagcaaaacggaaatgaccgtgctgcgctttattcagaacgacccggagcagtgtatccgccagggagttcgcgctgtggccgaacagtgctacagcaacccctcttccctggtccggctggcaaagaaactgaagttcagcggctggctggagctggtttactttatcaagttcaatatcaccatgccgaagctcgatgtcaccaacgatatcgactacatgagcgttcagccggaagaagcgctgacgccgctgctggcaagccttaaacagcagcgcatcctgatccacggcagcggcttttcacagctgatcgcccagtatatttacaacaagtttctcgtcaccggcgtgaatgccagcctggcgctgtggcccgattacgaaatcctcgaacagaaaaacgccgcctgcttcgactccatctggatcatttctaaatccgggcgcagcagctcggcgctcaactggattaaggccctggaggggaaggagattaatctggtctgctttaccggcgactaccaaagcccgctggcgcaggccgcggatacggcgtttattattcacgacccgcagaagttcgatgatgatatttactggagcaacccgtttttcggctactgcatcttaggctttgagcgactattgaagatgtggtttaccagcctacgtagcaatagttag

SEQ ID NO: 213712 - DNA, 1380 bp, Klebsiella pneumoniae
atgaaattaaccgtattaggcgggggcggcgttcgctctgcatttttagcgaaatctctggcctataacgctcaccgcattggtttaacagaagtcgtttttctcgataactctgctgataatctggcgatatttggcgaaattgcccgctatgtatttaataccattcgcccggatattcagtttagtaccaccaccgacccggtcgcagcgctgcaggacgccaactatatcattaccaccctgcgggttggcggcgatgaaagccgcattcgcgacgaacgtattgcgcttgagcataacactctcggccaggagaccaccggcgccggcggtttcgcgatggccatgcgctcgatcccggcgatccttcgctattgccggctgatcgaagaacatgccgccgaagacgccattctgtttaactttaccaacccgtcaggtctggtgacggaagcgattattaagtccggctttaagcgccgggtctatgggatctgcgatgccccctccgagctgattcgtgaactgccggcgatccttggctgtgaggagcgcgacctcagcgtggaatgctatgggctgaaccatttctcctggtttacccacttcaccgtccgtggggaagaagtgaccgaacggctgatcgccagcccggaactgtaccagaagacggcgatgcagtacttctccccggagctggtacggctttgcgataatcaactcctcaatgaatatctctattattactactatcgcgacgaggcgctgaaggcgattcagggggccggcgagacgcgcggagagcagatcgcccgcatcaatcaggagatgcgcgaggcgctgcgcaccgtggatgccagaacgcaaccggaggccgccttcaccatctggatgcagcattacctacgccgggaaaacagctatatgcagaacgaatcccggcaggagaaattccacacccgcgaaccgctgacgctgcgccagtttatcgaagagccggacaccggcggctatgccggagtggcgctggatatcttggaagcggtgaacagcaccaccaccaagcggatcgtggtgtcgatccagaatcacgacacgctcgattttttacgcccggacgacgtgatcgagatcagctgcgacctgagccgggatggcctcaagccggtgacgccggtgaaggtaccgacggcgcagaagaatatgattgcctgcgtgaaggagtatgagcggctggcggtggcggcgatcctgcagcaggataaatcgctggcggtgcgggcgctgatggcgcacccgctgatcggttcctattcgctggcgaaaaccctggtcgaagcctatcttgacgatgagcagttcgccgcctggcggtaa

SEQ ID NO: 213713 - DNA, 1560 bp, Klebsiella pneumoniae
atgcctgaaatacgtcagcgtattctggagaatatgcaaaaattctcccgggccatgatcggcgccgtattgttcttgccggtcattggcttaattctggccctcagttcagtattaactaatccgacattaattgctgaaaccagtttcttacatcagcttgggcaaatgctcggcgacaccttttggcctttatttggcaacctcggcttattattttgcgtcggcataagctatggcctggcaaaggataaaaaaaccgaagtcgcactggtttcagtgatgtgctttattatgtttcttggcgccaaccactcctggctggaacacacccatggactcgccgaaaaaattaacggtgaatattatggcaccgggcaaacccagctgctgggctttgtggtggtggatatgggcgttttcctgggcattattctcggctgcacgattgcgtgggtgcacaataaagtctctgccattgagctgcctggcgcgctgtcgatgtacggcggcgccaagctgacgctggtggcgatgacgccggtggttatcttctacgccatcgcctttacctggatttggccctttatgacccacggcatctccgccctcaccggttttatgaaaaatgccggggtcgccggggtcttcgtctatggtttctttgaaaaattccttatccccaccggcctgcaccatttcgtctggtcccccttccagctcacccagattggcggcacgctgaacgtggatggtcaggtggtctccggcacccaggccatattcctcgcctatatgcgccatcccgacctgacgccggtcatgaacgacgcattacgtttttcgcagcaagggatgaccactatctttggcctggcgggcgcctcgctggcgttctaccacaccgcgaaaccggagaagaaagcgatggcgaaggcgattctgctaccggcgattatcacctcgatgctgaccggcatcaccgagccgattgagttcaccttcttatttgtctcaccgctgctgtgggtgatccacgcgacgttaaccgccgcctcgcaggccatttgcgacatattcaccgtacgtccctggggagcatcgggcctgatcgagtttctgatctataacctgccgctgccggtctccttaacgcgctggccgggctatgtccttatcggtatcggccagttcgccgtctactacgtgattttccgcaccctggtggtgaagctgaacctgaaaacgccgggccgggaagatgacgagaacgtgaagctctacagcaaagcagagtaccgccagaaagtcgcgcaaccgcagtcggtcaccgatgacattatccgcggcctcgggggcaaggagaatattctctccgtcgataattgttttactcgcctgcgcgtggccgtgcgcgatatggcgcgggttgatgacacgcaattaaaaaataccggcgccaacggcgtcgtacgcaatcgaaatgaagttcaggttatttatggcgtcaaagtgggacaggtacgttcccgggttgataactggttagcagaaaattaa

SEQ ID NO: 213714 - DNA, 1716 bp, Klebsiella pneumoniae
atgaaatttcttggaaagctgattctctggctgctagtcgctctgctgctcgtcattattggcgcgtggttcctgctgcaaacccactggggcgcccgccaggccagcgcctggctcagcaatggcaccggctggcaggtctccttcgatgagatggagcacgatttctcctccccccatcatgtgcagttgcgaaacgtcacctttggtcgggaaggcaagcctgccactttggtggcaaaaacggtcgacattggcttcagcacccgccagtttagcgatccgctgcatgcggatgagatagtccttaacgacggcactctgaatctgtcaccccactctgcagacctgccgttcgctgccgaccggctgatgttgcgcaatatggctttcaacagcccggaaaccggctgggcgctcagcgcgcagcgcgtcaccggcggcgtcagcccatggacgccggaggcgggcaatgtgctggggaaaacggcgcagatccagatgagcgcgggctcgatgacgctcaatggcgtcgaagccagcaacgttctgattcagggtaagattgatcagggcgaggtcaccctctccaccctcggcgccgatgtcgcccgcggcaccttaaccggcaatgccaaacgcagcgccgatggcagctggcgggtggataacctccagctcaacgagattcgactgcagagccccgcctcgctggccgagtttttcgcgccgttaaccacggtcccctctctgcagattggccgcctggacatcaccgacgcccgcctgcagggaccggactgggcggtaaccgacctcgacctgagcctgcgcaacctgacccttagccacggcggctggcagagcgaggacggcacgctgtcgatgaacgccagcgaatttatctacggttcgctgcatcttttcgacccgatcctcaatgccgaattctctccccagggcattgcgctgcgccagttctcctcgcgctgggagggcggcatggtgcgcacctccggcaactggctgcgcgccgggaacgccctggtgctcgacgataccgctttcgccggactggagtacacgctgccggcgaactggaaacagctgtggatgacgccgctgccagcctggctgcaaagcctgacgctgaaaaaattcagcgccagccgcaatctgatcatcgatgtggaccctgctttcccgtggcaaattaccgccctcgatggctatggcggcgagctacagctggtgaaaaacggcagctggggagtatggaacggcagcgcgacgctgaacgccgcggcggcgactttcaaccggatcgacgtgcgccgcccatcactcaaactgaacgccacagcctcgacggtcaatatcactgagcttagcgccttcaccgagcgcggcattttgcaggccaccgccgcggtatcccaactgccgcagcgccaggtcaatctgagcttcagcggccgcggcgtgccgctgaatattctgcaggcctggggctggccgtcgctacctataagcggggatggcaatctccagctgaccgccagcggcagcgtgcaggccgatgccccgctcaaaccgacggtcaacgggcagctcagcgccgtgaatatggagaaacagcaggtggcgcaaatcatgcgcaacggcgaggtcagccccgcccccgccgcgccagcgcccgctcccgtcaccccatag

SEQ ID NO: 213715 - DNA, 1392 bp, Klebsiella pneumoniae
atgtccgttaacaccgcagagtcagaaaatgcgcaaccggttgcgcataaaccagccagcgaattaatctaccgcctcgaagatcgcccgccgctaccgcaaaccctgttcgccgccttccagcacctgctggcgatgtttgtcgcggtgatcaccccggcgctgttaatctgccaggctctcggtctcccggcgcaagatacccaacatatcatcagcatgtcgctgttcgcctccggcgtcgcctctattattcagatcaaagcctggggcccggtcggctccggactgctctccatccagggcaccagcttcaactttgtcgccccgctgatcatgggcggtaccgccttgaaaaccggcggcgccgacgtccccaccatgatggccgccctcttcggcaccctgatgctggccagctgcaccgaaatggtcctctcccggatcctgcacctggcgcgccgtatcattaccccgctggtttccggcgtggtggtgatgattatcggcctgtcgctgattcaggtcggactgacctccatcggcggcggctacgcggcgatggctgaccacacctttggtgcgccgaaaaatctgctgctggcgggtatcgtgctggcgctgattattatcctcaaccgccagcgcaacccgtacctgcgcatcgcctcgctagtgattgccatggctgccggttatctggcggcgtggttcctcgatatgctgccagccaacaccgccccgaccaacagcagcctcatcaccgtcccgacgccgctctattatggcctcggcatcgactggagtctgctgctgcccctgatgctggtgtttatgatcacctccctggaaaccatcggcgatatcaccgccacctccgacgtctccgaacagccggtctcgggtccgctgtatatgaagcgcctgaaaggcggcgtgctggctaacggcctgaactccttcgtttccgcggtcttcaacaccttcccgaactcctgcttcggccagaacaacggcgtgatccaactgaccggggtcgccagccgctacgtcggctttgtggtcgccctgatgctgatcgtcctcggcctgttcccggcggtgagcggctttgtccagcatatccctgagccagtgctcggcggcgccacgctggtgatgttcggcaccatcgccgcgtccggcgtgcgcatcgtctcccgtgaaccgctgaaccgtcgagcgatcctgattatcgctctgtcgctggcggtaggcctcggcgtgtcgcagcagccgctgatcctgcagttcgccccggactggctgaaaaacctgctttcctccgggattgccgccggcggtatcacggcgattgttctgaatttaattttcccgccagaaaaggcgtga

SEQ ID NO: 213716 - DNA, 1203 bp, Klebsiella pneumoniae
atgtttcatctcgataccttatcgacgctcgttgccgcaacgctcgtgctgttactcggcagaaaactcgtacaaaccgttcccttccttaagaaatacactattcctgaacccgttgccggcggtctgctggtggcgctggcgctgctggcgctgaaaaaaagcatggatatcgaaattgatttcgatatgagtctgaaagatccgctgatgctggcgttcttcgccaccatcggtcttaacgccaacctcgccagcctgcgggccggcggcaaggtgctgggcactttcctgatcgtggtggttggcctgctgctgctgcagaacgccctcggtatcggcatggcgacgctgctggggctggatccgctaatgggtctgctggccgggtcgattaccttatccggcggccacggcaccggggcggcgtggagtaagctgttcgttgagcgctacggttttgccaacgccaccgaggtggcgatggcctgcgcgactttcggcctggtgctgggcggcctgatcggcggcccggtggcgcgttatctggtgaagcactcttcctcaccggacgggacaccggacgatcaggtggcgccaaccgcctttgaaaagccggacgtggggcgggtgatcacctcgctggtgctgatcgaaagtatcgccctgatcgccatctgtctgacgctgggcaaggtggttgcgcaactgctggcggggagcgtcttcgagctgccgaccttcgtctgcgtgctgtttatcggcgtgatcctcagcaacagcctggcgctggcggggttgtatcgggtgttcgatcgcgcggtatcggtgttgggcaacgtcagcctgtcgctgttcctcgccatggcgctgatgagcctcaagctgtgggagttggcctcgctggcgctgccgatgattattatcctggcggtgcaggcgctggcgatggcgctgtatgcggtgttcgtcacctatcggatgatgggcaaaaactacgatgccgcggtgctggcagccgggcattgcgggtttggcctgggggcaacgccgacggcgatcgccaatatgcaggcgattaccgaccgtttcgggccatcgcatatggccttcctggtagtgccgatggtgggggcgttctttatcgatatcgtcaacgcgctggtgattaagctgtacctgctgctgccgatgtttggttga

SEQ ID NO: 213717 - DNA, 1512 bp, Klebsiella pneumoniae
atgaccgacaaaaaatatatcgttgcgcttgaccagggcactaccagctcccgggccgttgtgatggatcatgatgccaatatcgtcagcgtctcccagcgagaatttgaacaaatttatcctaagccaggctgggtcgaacacgacccgatggaaatctgggcttcccaaagctcgacgctggtcgaagcgctggccaaagcggatatcaactccgatcagatcgcggccatcggcatcaccaatcagcgtgagaccgtggtggtgtgggagcgagagaccggtaaacccatctacaacgctatcgtctggcagtgccgccgtaccgcggagatctgcgagcagctcaagcgtgacgggatggaagagtatatccgcaaggccacaggcctggtggtggacccgtacttctccggcaccaaggtgaaatggatcctcgaccatgtcgaaggttcccgtgagcgtgcgaagcgcggcgagctgctgttcggcaccgttgacacctggcttatctggaagatgacccagggccgcgtgcacgtcaccgactacaccaacgcctcgcgtaccatgctgttcaacattcacgacctcgactgggacgacaagatgctcgacgcgctggacattccgcgcgccatgctgccggaagtgcgcaagtcttccgaagtgtacggccagaccaacatcggtggtaaaggcgggacccgtattcctatcgccgggatcgccggtgaccagcaggcggccctgttcggccagctgtgcgtcaaagaagggatggcgaaaaacacctacggcaccggctgctttatgctgatgaataccggcgaaaaagcggtcacctccacccacggtctgctgaccaccatcgcctgcggcccgcgcggcgaggtgaactacgctctggaaggggcggtgtttatggccggcgcgtctattcagtggctgcgcgacgagatgaagctcatcagcgatgccttcgactccgagtacttcgccaccaaagtgaaggataccaacggcgtatacgtggtacccgcgttcaccggtcttggcgcaccgtactgggacccgtatgcccgcggcgcgattttcggcctcacccgcggcgtgaactccaaccacattatccgtgcgacgctggagtccatcgcctttcagacccgcgacgtgctggaagcgatgcaggctgactccggcattcgtctgcacgccctgcgcgtagacggcggcgcggtggctaacaacttcctgatgcagttccagtccgatatcctcggcacccgtgtcgagcgtccggaagtacgcgaagtgacggcgctgggcgcggcctatctggccggtctggcggtcggtttctggcagaatctggatgaactgcaggagaaagcggtgattgagcgcgaattccgcccggggattgaaactactgagcgtaactatcgttacagcggctggaagaaagcggtgaaacgcgcgttagcgtgggaagagcacgacgaagcgtaa

SEQ ID NO: 213718 - DNA, 852 bp, Klebsiella pneumoniae
atgagccaaacatcaaccttaaaaggccagtgcatcgcagagttcctcggtaccgggttgttgatctttttcggcgttgggtgcgtggctgcgctcaaggtcgcgggagccagcttcggacaatgggaaatcagcatcatctggggtctgggcgtcgccatggcgatctacctgaccgccggggtctccggtgcgcaccttaacccagcggtgactatcgcgctgtggctgttcgcctgcttcgaaggccgcaaagtggttccttttattatttcgcaattcgctggcgccttttgcgctgcggcattagtttacgggctttactacaatcttttcctcgattatgaaaccacccaccatatgattcgcggcagcgtggaaagcctcgatctggccggcattttctccacttacccgaacccgcacatcaattttgtgcaggccttcgcggtagagatggtgattaccgctatcctgatgggcgtcatcctggcgctgaccgacgatggcaacggcataccgcgcggcccgctggcccctctgctgattggcctgctgattgcggtgattggcgcctccatgggaccgctgaccggcttcgccatgaacccggcgcgtgacatcggcccgaaagccttcgcctggctggcggggtggggtgacgtcgccttcaccggcggcaaagatattccttatttcctggtgccgctgtgcgcaccggtggtcggcgcggcgctgggcgcattcagctatcgtaagctgattggccgtcacctgccttgcgacacctgcgtggaggaagagcaacagagcccctcctcttccaccgctcaacataaagcttcgctgtaa

SEQ ID NO: 213719 - DNA, 240 bp, Klebsiella pneumoniae; identical to SEQ ID NO: 135001

SEQ ID NO: 213720 - DNA, 990 bp, Klebsiella pneumoniae
atgaataagtggggcgtagggttaactctgttgctggcatccgccagcgttctggcaaaagacattcagctattaaacgtatcttatgatccaacgcgcgagctgtacgaacagtacaacaaagcgtttagcgcacactggaagcaggagaccggcgacaacgtggtgatccgccagtcgcatggtggctctggcaaacaggcgacctcggtgattaacggtattgaagcggatgtggtcacgctggcgctggcctacgatgtcgacgctattgccgaacgcggccgcatcgataaaaactggctgaaacgcctgccggataactctgcgccgtatacctccaccatcgtgttcctcgtccgcaagggcaatccgaaacagatccatgactggaacgatctgatcaaaccgggcgtgtcggtcattaccccgaacccgaaaagctccggcggcgcccgctggaactacctggcggcctggggctatgccctgcatcagaatcacggcgaccaggcgaaagcccaggaattcgtcaaggcgctgtataaaaacgtggaagtgctggactccggcgcgcgcggttcgaccaataccttcgtagaacgcggcatcggcgacgtactgatcgcctgggaaaacgaagcgctgctggcgaccaacgaactgggcaaagacaagtttgaaatcgtgaccccaagtgagtcgattctggctgagccgaccgtctcggtggtcgacaaagtggtggataagaaaggcacgcgccaggtggcggaagcgtacctgaagtatctctactcgccggaaggccaggagattgcggcgaagaacttctaccgcccgcgcgatccgaatgtggcgaagaaatatgctaacgaattcccgaaactgaagctgtttaccatcgatcaggagttcggcggctggacgaaagcgcagaaagagcacttctccaacggcggcaccttcgaccagattagccagcgttaa

SEQ ID NO: 213721 - DNA, 765 bp, Klebsiella pneumoniae
atgagaagagtaagatactttttgctggcgctgctggtggcgatcctcgcggcgctggcgggcggctactactggctgcactctggcaacccggacgcattacgcaagattgtcctgcagcagtgcgtaccccatcagcaacagcagcaaaacccgtcgccgtgcgcggaagtgaacctcaagggcggctatgtgctgtttaaagaccgtaacggcccgctgcagtatttgctgatgccgacctaccgcatcaacggcaccgaaagcccgctgctgctggatccgttgacgccgaactttttctggcaggcctggcaggggcgtgaaatcatgagccagcgccacggcgcgccggttcctgataacgcggtatcgctggcgatcaactcgcgcagtggacgtacgcaaaaccatttccatattcatatctcctgcctgcgccccgatgtgcgcgtgcagttagataaggatgccgcagcgatcagcagccgctggctgccgttaccgggcgggcttcagggccacgaatacctggcgcgccgggtgacggaggcggagctggcccagcgtagcccgttcctgatgctggcggaagaggtgccggaggcgcgccagcatatgggacgcttcgcgctggcaatggcgcaacagagcgacggctcgctggtgctgctggcgacggagcgtaacctgctgaccctgaaccgggcttcagcggaagaaattcaggatcatcgctgcgccatccttaacgcaaaccactag

SEQ ID NO: 213722 - DNA, 1305 bp, Klebsiella pneumoniae
atgtcgctctggcttacccacccgctgttccttccttcattgattgtcggcgtcaccatcgtgctctgggcgacgtcgctgctgccggaatttatcaccgcgctgctgttcttcgcagcggcaatgatggcgaaaatcgctccgccggaggtgatcttcggcggctttgcctcttcggcgttctggctggtgttcagcggctttgtgctcggcatcgccatccgtaaaaccggactggcggaccgggcggcgcaggcgctgtcggccaggctcaccgactcctggccgcggatggtcgccagcgtggtactcctgagctacgccctggcgttcgtgatgccctccaacatggggcgcatcgcgctgctgatgccgatcgtggcggcgatggcccgccgcgcgggcattgccgacggcagccgcggctggttcggcctggcgctggcggtggggttcggcacctttcagctgtcagcgacgattttgcccgccaacgtgccgaatctggtgatgagtggcgcggcggaaggctcgtacggtatccatctgaattatgttccctatttactgctgcatacgccggtgcttggctggctgaaaggggcggtgctggtggcgctgatttgctggctttttcccggcaagccgcatccaccgcgcgacctggcgccgctgccgccgatgagccgcgacgagaaacgtctggcgtggctgctggcggtggtcctctcgctatgggtgaccgagagctggcacggcgtcggcccggcgtggaccggcctggcggcggctgtgatcacgctgctgccgcgggtgggctttatcaacggcgaggagtttgccagcggggtgaatatgcgcacctgcatttacgtcgccgggattctggggctagcgatcgccgtcacccaaaccgggattggcggcgcagtgggcaatgcgctgctgcaggtgatgcccctggataaagacaatcctttcaccagctttctcgccctgaccgggataaccagcgcgctgaactttattatgaccgccaacggcgtgccggcgctgtataccacctttgcccagagctttgccgacgccaccggttttccgctgctaagcgtgattatgattcaggtgctgggctattccacgccgctgctgccctatcaggcgtcgccgatcgtggtggcgatggggttaggcaaggtcccggcgagggcggggatgcaactgtgtctggcgctggcggcggtgagttatctgattttactgccgctggactacgcctggtatcagctgttggggaaactgtaa

SEQ ID NO: 213723 - DNA, 768 bp, Klebsiella pneumoniae
atgcgacatcctttagtgatgggtaactggaaactgaacggcagccgccacatggtaaacgaactggttgcgaacctgcgtaccgagctggctggcgtaagcggctgtgcagttgccatcgccccgccggaaatgtatctggacctggctaagcgcgcggcagaaggcagccacattcacctgggcgcgcagaacgttgacgtgaacctgtccggcgcattcaccggtgaaacctccgccgaaatgctgaaagatatcggcgcgcagtacatcatcatcggccactccgagcgtcgtacctaccacaaagaatccgacgagctgatcgcgaagaaattcgccgtgctgaaagagcagggtctgaccccggttctgtgcatcggtgaaaccgaagccgaaaacgaagcgggcaaaacggaagaagtttgcgcacgtcagatcgacgccgtgctgaaaacccagggcgctgccgctttcgaaggcgtggttatcgcttacgaaccagtatgggctatcggtaccggcaaatcagcgaccccggctcaggcgcaggcggtgcacaaattcatccgtgaccacattgctaaagctgacgccaaaatcgctgagcaagtgatcatccagtacggcggttccgttaacgctggcaacgccgcagagctgttcacccagccggacatcgacggcgcgctggttggcggcgcctccctgaaagctgacgctttcgcggtgatcgttaaagcagcagaagcagcgaaaaaagcgtaa

SEQ ID NO: 213724 - DNA, 603 bp, Klebsiella pneumoniae; identical to SEQ ID NO: 135007

SEQ ID NO: 213725 - DNA, 429 bp, Klebsiella pneumoniae
atgaccctacagcagtggttattctcaattaaagggcgcattggccgccgcgatttctggatctggattgccatctggctggtgaccatgagcgccttgtttaccctggcaggcagcaatctgctcaacctgcagacggcggcgtttattatcgtctgcctgctgtggccgacggcggcggtggtggtcaagcgactgcacgatcgcggcaaatccgggctgtgggcgctgctgatggttctggcgtggatgctgctggcggggaactgggcgatgttgccgcaggtctggcagtggggcgtcgggcgctttgtgccaacgctgattatcgtcatgatgctgatcgacctgggggcgtttgtcggcacccagggcgagaataagttcggcaaggagacccaggacgtgcgctggaaagcggacgcctga

SEQ ID NO: 213726 - DNA, 747 bp, Klebsiella pneumoniae
atggcggactgggttagcggcaaagtgacaaaagtggagtactggacggacgccttgttcagtttatacgtgcgggcgcctgttcatccgtttaccgccgggcaatttaccaagctcgggctggaaatcgacggcgaacgcgtgcagcgcgcctactcctacgtcaacgcccccggcaatcccgacctcgagttctatttggtcaccgtcccggaaggcaagctgagcccgcgtctggcgtcgctgaagccgggcgatgaagtcctggtggtgagtgaagcggcaggtttcttcgtcctcgaggaggtaccggattgcgataccctgtggatgctggcgaccggcactgcgctggggccgtacctgtcaattttgcaggaaggcaaggaccttgagcgctttaataacctggtgctggtccacgccgtccgctacgccgcggacctgagctatctgccgctaatgcgcgaactggagcagcgctatgccggcaaactccgtattcagacggtggtcagccgcgaaaccgtggaaggctcgctgaccggccgggtgccgtttctgattgaaaccggcgcgctggaagaggccgtcggcctgccgatgaccaccgacaccagccatgtgatgctgtgcggcaacccgcaaatggtgcgcgatacccaacagctgttaaaagagacccggcagatgaccaaacatctgcgtcgccggccgggccatatgacggcggagcactactggtaa

SEQ ID NO: 213727 - DNA, 1011 bp, Klebsiella pneumoniae
atgaaacgagaactggccatcgaattttcgcgtgtcaccgaagccgccgcgctggcgggctataaatggctgggccgcggcgataagaataccgccgacggcgcagcggttaacgccatgcgcattatgcttaacctcgtcaatatcgacggcaccatcgtcatcggcgagggcgaaatcgatgaagcgccgatgctttatatcggcgaaaaagtgggtaccggcaagggcgatgcggtagatatcgccgtcgatcccatcgaaggcacccgcatgacggcgatgggccaggccaacgccctggcggtgatggcggtcggcgataagggctgcttcctcaacgcgccggatatgtatatggaaaagctgatcgtcggcccgggcgctaaaggcgctatcgatctcaatctgccgctggaagagaacctgcacaatatcgcccgcgccctgaacaagccgctgggcgagctgaccgtcaccgtgctggcgaaaccgcgccacgacgcggtcattgcccagctgcagcagctgggcgtgcgcgtgttcgctattcccgatggcgacgtcgcggcctctattctcacctgcatgccggatagcgaagtcgacgtactgtacggcatcggcggcgcgccggaaggggtggtttccgccgcggtgatccgcgccctcgacggggatatgcaggggcgcctgctggctcgccaccacgtgaagggcgataacgaagagaaccgccgcatcggtgaaaatgagctggcgcgctgcaaaaccatgggcattgaagcgggcaaagtgctgcgtctggatgaaatggcgcgcagcgataacgtcgtcttctccgccaccgggatcaccaaaggcgatctgctggacggcatcacccgcaagggcaacatggccaccaccgagacgctgctgatccgcggcaagtcgcgcactatccgtcgtatccagtcgattcattacctcgaccgtaaagatccagacatccagcagcacatcctgtaa

SEQ ID NO: 213728 - DNA, 2082 bp, Klebsiella pneumoniae
atgtcaggccgcctgttagatgccgttccgctcagttcactcaccggtgtgggcgctgcgcagagcagcaaactggcgaagattggcctgcatacggtacaggatctgctgctgcacctgcctttacgctacgaagatcgcacccatctttacccgatagccgagctgcttcccggagtttatgccaccgtggaaggtgaagtgctcaacagcaatatcaccttcggcggccggcggatgatgacctgccagatcagcgatggcaccggcatcctcaccatgcgctttttcaacttcaacgcggcgatgaaaaacagcctcgcgaccggtcgtcgggtgctggcctacggtgaagccaaacgcgggaagtacggcgccgagatgatccacccggaatatcgcgtccagggcgatatgagcaccccggagctgcaggaaacgttaaccccagtctatccgaccaccgaaggcatcaagcaggcgaccctgcgcaagctcaccgatcaggcgcttgagctcctggaaacctgcgcgattagcgaactcctgccgccggagctggcgcaggggatgatgagcctgccggaggcgctgcgtacgctgcaccgcccgcctccctccttgcaacttagcgagctggaaagcggcaagcacccggcgcagcagcgtctgattctggaagagctgctggcgcataacctcagcatgctggcgctgcgggcaggcgcccagcgctatcacgccctgccgctcggcgccaacgataccctgaaaaaccaactgctggcctccctgccctttaagcccaccggcgcgcaggcgcgggttaccgccgagattgaacacgatatggcgctggacgtgccgatgatgcgcctggtgcagggcgacgttggctccggtaaaacgctggtcgctgccctggccgccttgcgcgctatcgtccacggcaaacaggtggcgctgatggcgcccaccgaactgcttgccgagcagcatgccaataacttccgcaactggttcgaaccgctgggtattgaagtcggctggctggcgggcaaacagaaaggcaaagcccgccaggcgcagcaggaggctatcgccagcggcgaggtgcagatgattgtcggcacccacgccatcttccaggagcaggtgcagtttaacggcctggcgctggtgattattgacgaacagcaccgcttcggcgtgcatcagcggctggcgctgtgggagaaaggtcagcagcagggattccacccgcatcagctgatcatgaccgccacgccgatcccccgcaccctggcgatgaccgcctacgccgatctggacacctcgattatcgacgagctgccgccaggccgaactccggtgaccaccgtcgccatccccgacacccggcgcagcgatattatcgaccgcgtgcgcaacgcctgtacccatgaaggtcgccaggcctattgggtctgtacgctgattgaagagtccgatctgctggaagcccaggcggcggaagccacctgggaagagctcaaactggcgctgccggagctcaatatcggcctcgtccacgggcggatgaaaccggcggagaagcaggcggtgatgcaggccttcaagcagggcgagatgcatctgctggtagccaccacggtgattgaagtcggtgtcgacgtgcctaactcaagcctgatgattatcgaaaacccggaacgtctgggtctggcgcagctgcaccagctcagagggcgcgtcgggcgcggcgcggtcgcttcccactgcgtgctactctataaatcgccgctctccaaaacggcgcagaaacgtctgcaggtcctgcgcgacagcaacgatggtttcgtcattgcccagaaagacctcgaaattcgcggtcccggcgagctgctcggcacccgccagaccggcaacgccgaatttaaagtggcggacttactgcgcgatcaggcgatgatccccgatgtccagcgcattgctcgccacattcatgaacgctatccgctgcaggcccaggcgcttatcgagcgctggatgccggaaaccgaacgctattccaacgcgtag

SEQ ID NO: 213729 - DNA, 690 bp, Klebsiella pneumoniae
atgaactcaaagcgctacgagcgtatctgcgagatgctcgccaggcgtcagcctgacctgacggtctgcatggagcaggtccataagcctcataacgtctctgcggtcatccggaccgcagatgccgttggcgtacacgaagtgcatgccgtctggccgagcagccggatgcgtaccatggcctccgccgccgcgggcagcaacagctgggtgcaggttaaaacccaccgcactatcgcagatgccgtcagccacctgaaaggccagggcatgcaaattctcgccactcacctttccgacaaagccatcgattttcgtgaaatcgactatacgcgtccaacctgcatcctgatgggccaggagaaaaccggcatcacccaggaagcgctggcgctggccgatcaggacatcattatcccgatgatcggcatggtgcagtcgctgaacgtctccgtcgcctcggcgctgatcctctacgaggcgcagcgccagcggcagaatgccgggatgtaccaacgcgccaacagcatgctgccgccacaagagcagcagcgcctgctgttcgaaggcggctatccggtgctggcccgcgtcgccagacaaaaaggtctgccttacccccacgttaacgagcagggcgaagtggaagccgatgccgcgtggtgggccaccatgcaggctgcgaggtaa

SEQ ID NO: 213730 - DNA, 2121 bp, Klebsiella pneumoniae
ttgtatctgtttgaaagcctgaatcagctgattcaaaactacctgccggaagaccagattaagcgtctgcggcaggcgtatctcgttgcacgtgacgctcacgagggtcagacacgttcaagcggtgaaccctatatcacgcacccggtcgcggtagcctgcattctggccgagatgaagctcgactatgaaacgctgatggccgcgctgctgcatgatgtgattgaagatacccccgccacctaccaggacatggaacagctttttggtaaaagcgtcgccgagctggtagagggggtgtcgaaacttgataagctcaagttccgcgataagaaagaggcgcaggccgaaaactttcgcaaaatgatcatggcgatggtgcaggacatccgcgtcatcctcatcaagcttgccgaccgcacccacaacatgcgtactctgggctcgctgcgcccggataaacgccgccgcatcgcccgcgaaaccctggaaatttacagcccgctggcgcaccgtttaggcatccatcacatcaaaaccgagctcgaagagctgggctttgaagcactgtaccctaatcgctaccgcgtcattaaagaggtggtcaaagcggcgcgcggcaaccgtaaggagatgattcaaaagatcctctccgaaatcgaagggcgtttgcaggaagcagggatcccctgccgcgtcagcggtcgcgagaagcatctatactccatctactgtaaaatggtgctcaaagagcaacgttttcactcgatcatggatatctacgccttccgcgttatcgtccatgatgccgatatctgctatcgcgtgctcggccagatgcacagcctctacaaaccgcgtccgggtcgttttaaagactacatcgccattccgaaagctaacggctatcagtctttgcacacctcgatgatcggcccccacggcgtcccggtcgaggtacaaattcgtaccgaagacatggaccagatggcggagatgggggtagcggcgcactgggcttataaagagcacggcggcgaaagcagcaccaccgcgcaaatccgcgctcagcgctggatgcaaagcctgctggagctgcagcagagcgccggtagctcgtttgaatttatcgagagcgtaaaatccgatctgttccccgatgagatttacgttttcaccccggaagggcgcattgtcgaactgcctgccggcgccacgccggtggacttcgcctacgcggtgcataccgatatcggtcatgcctgcgtcggcgcgcgcgtcgaccgtcagccctatccgctgtcgcagccgctctccagcggtcagactgtcgaaattatcaccgcgccgggcgctcgcccgaacgccgcctggctgaactttgtcgtcagctcgaaagcgcgcgccaagatccgtcagctgctgaaaaaccttaagcgcgacgattcggtcagccttggccgtcgtctgctcaatcacgcgctgggcggaagccgcaaactcgccgagatcccaccggagaatatccagcgcgaactcgatcgcatgaagctggcctcgcttgacgatctgctggcggaaatcggtctgggcaacgcgatgagcgtcgtggtggcaaaaaacctgcagcagggcgaagccgctgcggcgccggtgccggctaacgcgtcgaaccacggtcatctgccaatcaaaggcgccgatggcgtgttgatcaccttcgccaagtgctgtcgcccgatcccaggtgacccgattatcgcccacgtcagtccgggtaaagggttggttatccaccatgaatcctgtcgtaacattcgcggctaccagaaagagccggagaaatttatggcggttgagtgggataaagagaccgctcaggagttcatcaccgaaatcaaggtggacatgtttaaccaccagggcgcgctggctaacctgacggcggcgatcaacaccgcgtcttccaatatccagagcctgaatacggaagagaaagatggccgcgtatacagcgcctttatccgcctgaccgcgcgcgaccgcgtgcatctggcgaatatcatgcgcaaaatccgcatcatgccggacgtgattaaagtcacccgtaaccgaaactag

SEQ ID NO: 213731 - DNA, 276 bp, Klebsiella pneumoniae; identical to SEQ ID NO: 135014

SEQ ID NO: 213732 - DNA, 624 bp, Klebsiella pneumoniae; identical to SEQ ID NO: 135015

SEQ ID NO: 213733 - DNA, 1677 bp, Klebsiella pneumoniae
atgcgtaaaggagggtggtggctggcgttagggatgttctctgccagcgcgctggcgacgtgtccggactggccgccggccagaggaaggcaggagacatcacgccttcatcagcaaattgtcgcctggaaagaggcttactggcggcagggcgccagcggagtgagcgatgacgtttacgaccagctcaccctgcgcctggcgcagtggcgacaatgctttccgggcgcgacgcctgaggatgacgatctgcctccgcccaccggcgatgcgcgtcatccggtggcccataccggcgtgcgcaagctggcggatgaggacagcgttgcccgctggatgaaaaataaatccgacctgtggatacagcctaaagtggacggcgtggcggtgactctcgtttatcgccaggggcgtctggttcaggccattagccgcggcgatggtctgcgcggtgaggcatggaccgcccgagcccggcagatcccagcgctggagaaagtgatgaccggtgaactggccgacagcgtactgcagggggagctgtttctgcgccggggcggccatgttcagcagcaggctggggggatgaacgcgcgggcgaaagtcgccgggttgatgatgcgagccgacgcggcggcggcgctcagtcaactggacgtttttatctgggcctggccagacggcccgtcggatatgcgccgtcgacagcagctgctgacgcaggcggggtttaagtacagcgggcaatatacccacccggtgtcgagcatcgagcaggtggcgcagtggcgccagcgctggtatcgctcgccgctgcccttcgtcagcgacggtgtgattgtgcgcgaaggacgcgagccgccagggcgagtctggtcgcccggaaagggcgagtggctggctgcctggaaatatcctccggcatcgcgggtgatgcaggtacgggcgatccgtttcagtaccggccgcagcggcagactcaacgtggtggccgagcttgagccccagcggctggatgataaacgcgtgcagcgggttaacgttggctctgtgtcccgctggcagatgctggatattggggttggcgatcagctgcagatcagtctggcagggcagggtattcctcgggtcgacgccgtcgtctggcggacggccgagcgccataaaccgacgccgccgccggcgaaatttaatgcgctaacctgctatttcgccacccctgagtgcagcgaacagtttctttccaggctgatctggttgtcatcaaagtccgccctgaatgtcgatggcgtgggggaaaatttatggcgcgtcattcagcagcaaaacccgatgacgcatatcttttcctggctggcgcttaccgttgagcagctgcaggcggtgccagggatttccgccgcccgcgggcagcacctctggcatcagtttgatcttgttcgcaaacgaccttttatccgctgggtgctggcgatggggatcccggtgccgcagggggcgctggcgcagctcgaaagcgagaactggcatttgctggcggcaaaaagtgaagcgcaatggcgcacgctgccgggcgtgggggagatcagagcccgccagctggtggctttcctgcaccatccggacgtggtggcgctggcgcaatggcttagcgggcagcgcatccccggattttaa

SEQ ID NO: 213734 - DNA, 618 bp, Klebsiella pneumoniae
atgctgcttcatgttctgtatttaatcggtatcaccgcggaagccatgaccggcgcactggctgccgggcgccggcggatggatacgtttggcgtcattattatcgccacagcgaccgcgctgggcgggggttccgttcgcgatatcctgctggggcactatcctcttggttgggtgaagcatcccgaatatgtcatcattgtcgccgtcgccgccgttctcacgaccattgccgctccggtgatgccgcaccttcgtcggctgtttctggtgctggacgcgctggggctaatcgtgttttccatcatcggcgcgcagatcgccctggacatgggcgaaggcccggttatcgcctctattgccgccgtgatcaccggtgtcttcggcggcgtactgcgcgatatgttctgcaaacgcattccgctggtcttccagaaagagctgtatgccgggatctcctttgccgcagccgtactctatattgctctgcaacattacgtcagcagccacgatgtggtggtgctggctacactgctgttcggctttaccgcccgcatgctggcgctacgctggaaactggggctaccggtcttccactacacccatgacgcccactaa

SEQ ID NO: 213735 - DNA, 1251 bp, Klebsiella pneumoniae
atgagcgtcgccgccgggaataaaaatcatctgatccgcctgatagccgtggtattaaccgggattctggccggtctgtccggcatggttttggcactaattttacacgcgattcagcacctggcttttggttacagttacgggcagatcgtcggttcggtgtcatttttacagggcgtcacggagtcgtcctggccacgccgcatcgtggcaatcgtggccggcggcgccgtcgccggatttggctggtggctgcttggtcgctatgggcagaggcgggtttccattgcggcggcggtggccaacccctgcgtacccatgcccgcgggcaccacgacgatccacgcgctgctgcagatcgtcacagtagcgctgggctccccgcttggccgcgaagtggcgccctgggaaatgggcgcgctgggggcggggatggtggcgcgtaagctgcgcctgctggaagatgaaacccgcacgctgattgcctgtggggcgggcgcgggtctggcggcggtctataacgtcccgctggccggggcgttgttcagccttgaggtcatgctgctgtcgtttagctgggaaaaaacgctggcggcgatgatgacctcggcgattgccgcctggacggccaccctggggttaggggatgaatcgcaataccattttgtttccagcgcacttccgcacacctttctctggtgggcgattctggcgggcccgattcttggcaccggcgcctggctctttcgcaaagcgaccagcgcggcgcgttcacgcgcgcgaagtaactggcagatgccggtgttctgtctgctggggttttctcttcttgccatcctgagtctttatttccccgagcttccgggcaatggcaagggtccaatgcagctggcgctcagcgatgggctgcctctctccatggtcgctgtcctgttagtattgaagatggtggtgattctggcggtgctgcgcggcggcgcggagggtggattgttaaccccagggctggcggtgggcggattggtcagcctgctgctctgcgcgctctggcagctcggcttccctggcggtgataaaagcagcttcgctgtggtgggggcggccgcgtttctcgccgcctccatgcagatgccgttgaccgcagtggcgctggtgatggagtttacccacatggatcacagctatctggctccggcgctgctgtgcgcggcaggggcgtttttaacctgccgggtgctggataaaaaatag

SEQ ID NO: 213736 - DNA, 1059 bp, Klebsiella pneumoniae; identical to SEQ ID NO: 135019

SEQ ID NO: 213737 - DNA, 747 bp, Klebsiella pneumoniae
atggactttaatgcacttcaccagcaaaaccaacctttgttgcttgccaatgtctgggatgccagcagcgctcaggctgctcagcaggctggttatcaggcgctgggatcctccagcgctgctatcgccgcaatgttagggtatgaagatggcgaagagatgagttttgacgagctgttttatgtcgtctcacgcatcaaaaccgttagcgaactgccgttaagcgtcgatttagaggcgggctacggcgcgacaaccagccacatcattgacaatatccggcgtctagcgcatctcggcgtgagtggaataaatctcgaggatagtcatgtggtggatggtacgcgtcgtcttgacgatgcggagcgctttgccgtcaaactgcaggaaataacccgcgcctgtcccggtctgtttgttaatgtccgcaccgatacctttcttctcaacgtacaagatgcgctggttcaaacgctctatcgcggtcaactctacgccaaacacggcgcatgcggtttttttgtgccttgcgtcacccgcgcggaggatattaccgccatcgttcaccacgtgcctttacccttaaacgtaatgtgtatgcctgagctggctgacttcagcaccttatcgacactgggcgtaaaacgaatttcgatgggcaattttatttatgctgcgacgcaggccagactgaaagacttattatgtcaggtgcaaacccaacactctttctcaggtgttttttga

SEQ ID NO: 213738 - DNA, 864 bp, Klebsiella pneumoniae
atgatccgcagtatgaccgcctatgcccgccgtgaaatcaagggtgactggggtagcgccgcatgggagctgcgctcggtaaaccagcgctatctggaaacgtacttccgcctgccggagcagttccgtagtctggagcccgtggtacgcgagcgcattcgcgcccgcctgactcgcggtaaagtcgaatgcaccttgcgttttgaacaagatcccagcgctcagggtgaactcatcctcaacgaaaagctggctaaacagctggtaaacgctgccaactgggtgaaaatgcagagcgatgaaggggaaatcaacccggttgatatcctgcgctggccgggcgtgatggccgccaaagagcaggatctcgacgccatcgccgccgacattctggccgctcttgacggcgcgctggacgacttcatcgtcgcccgcgaaacggaaggccaggccctgaaagcgcttatcgagcagcggcttgaaggcgtgagcggcgaagtggcgaaagttcgcgctcatatgccggaaattctccagtggcagcgcgagcgcctggtcgccaagctggaagatgcggaagtacagctggaaaataaccgccttgagcaagagctggtgctgatggcgcagcgtatcgacgttgccgaagaactggaccgtctcgaagcgcacgttaaagagacctataacattctgaagaagaaagaagctgtgggtcgccgtctcgactttatgatgcaggagttcaaccgtgaatcgaacaccctggcgtcaaaatcgattaacgccgaggtgaccaactccgcgattgagctgaaggtactcatcgagcaaatgcgcgagcaaatccagaatatcgagtaa

SEQ ID NO: 213739 - DNA, 837 bp, Klebsiella pneumoniae
atggacgctatctttgacagagtcgtaagggaattttttccaaatacaaccatacctttttggaaaaaatggctgttcaggacggcatttggcaataaggtattttctcgcttaatatataacgagcgacttgttaataaaaatggggtcgagtgggttaatgcagttgttgaactccttgagttgaaatgtgaaagcgaacaccaccaatttaacaacatacctgagcatggggctacggttgttatttcaaatcatccgacggttatcgatggacttagcttaatacatacggtctcccgagtcaggaatgatataaaaataatagccaatcacgttttgccaattatattcccccaggtatcggaacttaccattggaattgagaatatggccggtaagatgagccataaaaaattccgcgagatgaacgatcacctgcgaaaaggaggcgtattgattatatgtcctgcgggtaagctggctaactggtctctttccgggttacaggagcataagtggaaccccggttttttacagcttgctatgagaaataatgcagcattggtaccaattcatattacgggagcaaacagtaagatttattatcttactgcaacattctggcggcaactgtcgaatatgatggttattcgtgaagctctccgccatcatggcaagaccatgaaaatcaatataggacagcaaatagccttatcctcgtttaaagaatacaataaagatctttctgccgcggcaaatgtatgtttgacgcacctccagagtatagcgaagaatggcccggctatgttagggaaggtgcgaacaagttcctga

SEQ ID NO: 213740 - DNA, 534 bp, Klebsiella pneumoniae
gtgaaaactttaattctcttctccacccgcgacgggcagacccgtgaaatcgcttcgtttctcgcctctgagcttaaagagctgggcatcgatgcggacaccctgaacctgaaccgtaccgatgtcgtcgaatggcatcactacgatcgggtggtcattggcgcgtcgattcgctatgggcactttcatccggcggtggaccgctttgtgaaaaagcatctggcagcattgcaggcgctgccgggggcattcttttcggttaacctggtggcgcgtaaacccgagaagcgcacgccgcagaccaacagctatacgcgtaagtttctgctgaactcgccgtggcagccgcagagctgcgcggtatttgccggcgcgctgcgctacccgcgctacagctggtacgatcggtttatgatccgcctgattatgaaaatgaccgggggtgaaacggatacccgcaaagaagtggtctataccgactggcaacaggtatcccggtttgctcgggaaatcgcacaaatggcgcgcaaatag

SEQ ID NO: 213741 - DNA, 1452 bp, Klebsiella pneumoniae
atgcattttcgcgccataacccgaatcgttggactgctggtcatcttgttttcggggacgatgatcgtcccgggattagtggccctgatatatcgcgatggcgcgggacgggccttcactcaaaccttctttgtcgctctggcgatcggctccatgctgtggtggccgaaccgtaagcaaaaaggcgaactgaaatctcgtgaagggtttctgatcgtggtgctgttctggaccgtgctggggagcgtgggggccttgccctttatcttctccgaacagccgaacctgacggtgacggatgccttcttcgagtcattttccggcctgacgacgaccggggcgaccactctggtggggctggactcgcttccgcacgctatcctcttttatcgccagatgctgcagtggttcggcggcatggggatcattgtgctggcggtagcgattctgcctatcctcggcgtcggggggatgcagctctaccgcgcggaaatgcccggcccgctgaaggataacaagatgcgtccgcgtattgccgagacggcgaagacattgtggctcatctatgtgttactcacgatcgcctgcgcattggcgctctggtttgccggtatgccggcgttcgatgcgatcgggcacagtttcgccaccatcgccatcggcggtttctcgactcacgatgccagcgtcggctatttcaacagcccgatgatcaactccatcattgccatcttcctgctgatctccggctgtaactacggtctgcatttttcgttgttgagcggacgcagcctgaaggtgtactggcgcgaccccgaatttaggatgttcattggcgtccagttgacgctggtcatcgtctgtacgctggtgctatggcttcataacgtgtacggctcggtgttgacgacgctgaaccaggcgtttttccaggtggtgtcgatggcgaccaccgcggggttcaccaccgatagcattgcacgctggccgctgttccttccggtgctgttgctgtgctccgcatttatcggcggctgcgctggctccacgggcggtggattaaaagtgatccgtatcctgttgctgttcaagcagggcaaccgtgagctgaagcgtttggtgcacccgaatgcggtgtatagcattaaattaggtaaccgcgcgctgccggaacgtattctggaagcggtatggggattcttctccgcctatgcgctggtctttatcattagtatgctggcgattatcgccaccggggtggatgacttctctgctttcgcctccgtggtggcgacattgaacaacctcgggcctgggctcggcgtcgtcgcggataactttgccaccatgaacccggtcgcgaaatggatcctgattgctaatatgctgtttggtcgtctggaagtgttcaccttactggtgctctttacccccactttctggcgcgaataa

SEQ ID NO: 213742 - DNA, 615 bp, Klebsiella pneumoniae
atggagagctggttaatcccggcggcgccggttaccgtcgttgaggagattaaaaaaagccgttttatcacgctgttggcgcataccgacggcgtggcggcggcaaaagcttttgtcgagtccgtcagagcggatcaccctgatgcccgccaccactgcgtggcgtgggtcgcggggccgcctgatgattcgcaacagctggggttttcagacgatggcgaaccggcgggaacggcgggtaaaccgatgctggcacagctgatgggaagcggcgtcggcgagataaccgctgtcgtcgtgcgttactacggtggtatcctgctgggcaccggtggtctggttaaggcctatggcggcggggtgcatcaggcgctggcgcagctgacgacgctgcgcaagacgccgttaacggcatatactttgcagtgtgagtatgggcaactggccggcgtcgaagcgctgctcgcccaattctccggaaacgtcgttgaaagcgaatatctggcgtcagttcggctgcgcgtggcgcttccccaggccgaagtggcggctttttcagcaagactggctgattttagtcgtggttcattgcaattactgaagattaacgaataa

SEQ ID NO: 213743 - DNA, 1332 bp, Klebsiella pneumoniae
atggaatccctggccgcgctctataaaaatcatattgttaccctacaagaacgtacccgcgacgtcctggcccgttttcaaatggatgctctgctgattcactccggcgagctggttaacgtcttccttgatgaccatccgtacccgttcaaggtcaatccgcagttcaaagcctgggtgcctgtgactcaggtgcctaactgctggctgctggtggacggtgtgaataaaccgaagctgtggttctatctgccggtagattactggcataacgttgagccgttgccgacctctttctggaccgaagagatagacgtgatcgcgctaccgaaggccgatggcatcggcagccagctgcctgccgctcgcggtaatattggctatatcggcccggtgcctgagcgcgcgctgggcctgggtatcgccgcggataagatcaacccgaaaggggttatcgactacctgcattactaccgggcttacaaaaccgattacgagctggcctgcatgcgtgaagcgcagaagtcggcggtgaatggtcatcgtgcggcctacgaagctttccagtcggggatgagcgaattcgatatcaaccaggcctatctcaccgccaccggccatcgtgataccgacgtgccttacagcaatattgtcgcgctgaatgagcatgcctccgtcctgcactacaccaaactggaccatcgtgccccggcggagatgcgcagtttcctgctcgacgccggtgcggaatataacggctatgccgcagatctgacgcgcacctgggcggcgcacggcgataacgactttgcccatctgatcaaagacgttaacgatgagcagcaggcgctgattagtaccatgaaggccggtaccagttacattgattaccatatccagttccatcagcgtatcgcgaagctgttgcgtaaacaccagttggttaccgacatgagcgaagaggcgatggtggagaatgacctgaccgggccgtttatgccgcacgggattggccatccgctgggtctgcaggtgcatgatgtcgctggctttatgcaggatgacaccggtacgcatctggcggcgccgtcgaaatacccgtatctgcgctgcacccgtattatcgagccgcggatggtgttaactattgaacccggcatctacttcatcgagtcgttactggcgccgtggcgtgaaggcccgttcagcaagcactttaactggcaaaaaattgacgccatgaagccgttcggtgggatccgtatcgaagataacgtggtgattcacgaaaacagtatcgaaaatatgacgcgcgatctgaagctggcctga

SEQ ID NO: 213744 - DNA, 2190 bp, Klebsiella pneumoniae
atgctctacaaaggcgacaccctgtacctcgactggctggaagatggcatcgccgaactggtgttcgatgccccaggttcggtcaacaagcttgataccgcaaccgtagccagcctcggtcatgcgctggacgtactggaaaaacaaagcgatctcaaaggtctgctgctgcgctctgaaaaagcggcatttatcgtcggcgcggatatcaccgaattcctctcgctgttcctggtccctgaggagcagttaagccagtggctgcattttgctaacagcgtcttcaatcgtctggaagatctccccgtccccactatctctgccgtcaatggctatgcgctgggcggcggttgcgaatgcgtgctggcgaccgattaccgcctggcgacgccggacctgcgcattgggctgccggaaaccaagctcggcattatgccgggcttcggcggttccgtgcgtctgccgcgcctgctcggcgccgatagcgcgctggaaattattgccgccgggaaagacgtcggcgccgatcaagcactgaaaatcggcctggtggatggcgtggtcgctgcggaaaaactacgcgacggcgcgctggcgatcctacgtcaggccatgaatggcgacctggactggaaagcgaaacgtcagccgaagctggagccgctgaagctcagcaaaattgaagccgccatgagcttcacgattgccaaaggcatggtcgcgcaaaccgccgggaagcattacccggcgccgatcaccgcggtcaaaaccattgaagccgccgcgcgtcttggtcgtgaagaagccctggtgctggaaaataaaagctttgtcccgctggcccataccaatgaggcccgcgcgctggttggtatcttcctgaacgaccagtacgtcaaagcgaaagcgaaaaagctgaccaaagatgtcgagacgccgaagcatgctgccgtcctgggcgctggcattatgggcggcggtatcgcttaccagtcggcctggaagggcgtgccggtggtgatgaaagacatcagcgacaaatcgctgacccttggcatgaccgaagcggcgaagctgctgaataaacagctggaacgcggcaaaatcgacggtctgaagctggccggagtgataagcaccattcagccaaccctggaatacagcggttttgatcgcgtcgacgtggttgttgaagcggtggtcgaaaacccgaaagtgaagaaagccgtactagcggaaaccgagtcaaaagtgcgcccggataccgtgctggcgtccaacacctcaacgatccccatcagcgagctggccagcgttctgcagcgcccggaaaacttctgcggtatgcacttctttaacccggtgcatcgcatgccgctggttgaagtgatccgcggcgaaaaaacctcggataataccattgccaaagtggtggcctgggccagcaaaatgggcaaaacgccgatcgtggtgaatgattgtcccggcttcttcgtcaaccgggtactgttcccctacttcgccggcttcagccagctgctgcgcgacggagcggacttccgcaaagtcgacaaagtgatggagaaacagtttggctggccgatgggcccggcttatctactggacgtggtcggcatcgataccgcgcaccatgctcaggcggtcatggcggcgggcttcccgcagcggatgcagaaagattatcgcgacgccatcgacgccctgtttgacgccaaccgtttcggccagaagaacggcctcggcttctggcgctataaagacgacagcaaaggtaagccgaagaaagaagaagatgctgccgtcgacagcctgctggccgacgtcagccagtcgaagcgcgatttcagcgatgaagagattatcgcccgcatgatgatcccgatggttaacgaagtcgtccgctgcctggaagaaggcattatcgccagcccggcggaagcggatatggcgctggtatacggcctgggcttccctccgttccacggcggcgcattccgctggctggacaccatcggcagcgcgaagtatctcgatatagcgcagcaataccagcaccttggcccgctgtatgaagtgccagccggtctgcgtgacaaagcgcgccataacgaagcgtattatccccaggtagagccagcccgtccggttggcgctctgaaaacggcttaa

SEQ ID NO: 213745 - DNA, 1164 bp, Klebsiella pneumoniae
atggaacaggttgtcattgtcgatgcaattcgcaccccgatgggccgttcgaagggcggcgcatttcgccacgtgcgcgcggaagacctctccgcgcacctgatgcgtagcctgctgtcgcgcaatccgtcgcttgaggcaagcgcgatagacgatatctactggggttgcgtgcagcaaaccctcgagcagggttttaacatcgcccgaaacgcggcgctgctggcggagatcccgcattcggtaccagcaaatacggtcaaccgtctgtgcggttcttccatgcaggcgctgcacgatgcggcccgtatgatcatgaccggcgatgccagcgtctgcctgattggcggcgtcgagcacatgggccatgtgccaatgagccatggcgtcgatttccatccgggcctcagccgcaacgtggcaaaggcggcagggatgatggggctgactgcggagatgctggcgcgtctgcacggtattagccgcgagatgcaggatcagttcgccgcgcgctctcacgctcgtgcctgggccgcaacccagtccggcgcattcaaagcggagattatccccaccggcggccacgatgccgatggcgtactcaagtcctttaactatgacgaggtgatccgcccggaaaccaccgtcgagacgctgtccacgcttaaaccggcgtttgacccggtgaccggtacggtaacggcgggtacctcttccgccctttccgatggcgcagcggcgatgctgctgatgagcgaaagccgcgctcgcgagctggggctgaagccgcgcgctcgcgtccgttcaatggcggtggtcggctgcgacccgtccattatgggttatggcccggttccggcctcaaagctggcgctgaaaaaagcgggcttatccaccagcaatatcgacgtttttgaaatgaatgaagcatttgccgcgcagatcctaccgtgtattaaagatctgggcttaatggagcagatcgatgagaagatcaacctcaacggcggggcgatcgcgctcggtcatccgctgggctgttccggggcgcgtattagcaccacgctgatcaaccagatggagcgcaaagacgctcagttcggcctcgccaccatgtgtatcggcctgggacaagggatcgctaccgtgtttgagcgggtttaa

SEQ ID NO: 213746 - DNA, 702 bp, Klebsiella pneumoniae
atgacaaccttaagctgtaaagtgacctcggtggaggcgattaccgataccgtatatcgtgttcgattagtgccggaagcggcattttccttccgtgccggccagtatctgatggtggtaatggatgagcgcgacaagcgcccgttctccatggcttccacgccggcggaacaggaatttatcgagctgcatatcggcgcctcggagctcaatctgtacgcgatggcggtcatggatcgcattctgaaagagcgtgaaattgaggttgatattccgcatggcgaagcgtggctgcgcgatgacgaagatcgcccgctgattctgatcgccggcggtaccggattctcttatgtgcgttctattctgttaagcgcgctggcgcgtaacccggatcgcgatatcgccatttattggggcggtcgcgaggctaagcatctgtacgatctggccgagctggaagcgttaagcatcaagcatccgaatctgcgcatcgagccggtggttgaacagccggaagaagggtggcgtggtcgctcaggtacggtactcaccgccgtgctgcaggattacggtacgctggccgagcatgacatctacattgctggtcgttttgagatggccaagatcgctcgcgacctgttctgtaatgagcgcggcgcgcgtgaagatcgcctgtttggcgatgcgtttgcgtttatctga

SEQ ID NO: 213747 - DNA, 1476 bp, Klebsiella pneumoniae
atgaaatatcacgatcttcgcgactttctgacactcctggaacaacagggcgaactaaaacgtatcactctgccggtcgatcctcacctggaaatcaccgaaattgccgaccggactctgcgcgccggcggcccggcgctgctgtttgagaatccgaaaggctataccatgccggtgctgtgcaatctgttcggcacgccgcgtcgcgtggcgttggggatggggcaggaggatgtcagttcgctgcgcgaggtgggtaaactgttggcctttctgaaagaacctgagccgccaaaaggcttccgcgacctgtttgataagctgccgcagttcaagcaagtgctgaatatgccgaccaaacgcctgcgtggcgccccctgtcagcaaaaaatcatccagggcgatgatgtcgatctgaataaaatcccgattatgacctgctggccggaagatgccgcgccgctgatcacctgggggttgacggtaacccgcgggccgcacaaagagcggcagaacctgggaatttatcgccagcagctgatcggcaaaaacaaactgattatgcgctggctgtctcatcgcggcggcgcgctggatttccaggagtggtgcgcggcgcgtccgggcgaacgcttcccggtttccgtggcgcttggcgccgatccggcaaccattcttggcgcggtgacgccggtgcccgatcccctgtcggaatatgcctttgcaggcctgctgcgcggcaccaagaccgaagtggttaagtgcgtctccaatgaccttgaagtgccggccagcgcggaaattgtgctagaaggctacattgaggccggtgaaatggcgccggaaggcccgtatggcgaccacaccggttactacaatgaagtagaccagttcccggtgtttacggtaacccatattacccagcgtgaagacgcgatttatcattctacctataccggccgaccgcccgatgagccagcggtgctgggcgtggcgctgaatgaagtcttcgtcccgatcctgcaaaagcagttcccggaaatcgttgatttctatctgccgccggaagggtgctcctatcgcctggcggtggtgaccatgaaaaaacagtacgcgggacatgccaagcgcgtaatgatgggcgtctggtcgttcctgcgccagtttatgtacaccaagttcgtgattgtctgcgatgacgacgtcaatgcacgcgactggaacgatgtgatttgggcgatcactacccgtatggacccggctcgtgatacggtactggtagagaatacgccaattgattatctggattttgcctcgccggtttccggcctgggttcaaaaatggggctggatgccaccaataaatggcctggcgaaacccagcgtgaatggggtcgcccaatcaaaaaagatcctgccgttacggcgcgtattgacgccatctgggatgaactggccatctttaaacaacagtaa

SEQ ID NO: 213748 - DNA, 489 bp, Klebsiella pneumoniae; identical to SEQ ID NO: 135791

SEQ ID NO: 213749 - DNA, 792 bp, Klebsiella pneumoniae
atgtttgatatcggcgttaatctgaccagttcgcagttttcccgcgatcatgatgaggtagtggcgcgcgccctggcggcgggggttaacggcatgctgctgaccggcacaaatttggcggagagccagcaggcgcagaaactggcgagccgctattccggctgctggtccacggcgggggttcatccccatgacggtagcagctggacgccagcggtcgccgaggcgatttataccctcgccggcgagccgcaggtggtggcgataggcgagtgcggtctggattttaaccggaatttttccacgccgcacgagcaggaggtagcgttcagcgcccagttggcgctggccgctgagctgtcgatgccggtgtttttgcactgccgcgacgcccacgatcggtttctgacgctgcttaaaccctggcttgagaagatcccgggcgcggtgctgcactgctttaccggcagccgcagcgaggtgcaggaatgcctggatctgggcctgtttatcggtattaccggttgggtatgcgatgagcggcggggactggagctgcgcgagctgctgccggcgatcccggcggaacgtctgctgctggagaccgatgcgccttatctgctgccgcgcgacctcaagccgaaaccggcctcgcggcgtaacgagcccgcgtatttgccgcatatcctggccagcgtcgcggcctggcgcggcgaggaggcgcaatggctggaggcgcaaacggacgcaaacgtcagggcgctgtttggcgttgacattaacggcgtttag

SEQ ID NO: 213750 - DNA, 780 bp, Klebsiella pneumoniae
atgggcgtagacgatacacaaccgctaatttcgcatctgattgagctgcgcaagcgtctgctcaacagcatcattgctattctggtgatcttcctggcgctggtctatttcgccaatgatatctaccagctggtctcggccccgcttatcagtaagatgcctgtgggcgcgacgatgatcgccaccgatgtcgcttcacctttctttacgccgataaagttgaccttcatggtgtcggtgatcctgtcggtgccgattattctttaccaggtatgggccttcgtcgcgccggcgttgtataagcacgaacgccggctggtggtgcctttactggtatccagtaccctgctgttctatatcggcatggctttcgcctattttgtcgtgtttccgctggcgttcggcttcctgacccatgcggcgccggaaggggtgctggtctcgaccgatattcgcagctatctcgacttcgtgatggcgctgtttatggcattcggggtctcctttgaggtgccggtcgccattgtgttgctctgctggatgggcgttaccacgccggaagacttgcgtaaaaaaaggccgtatgtgctggtgggtgccttcgtggtgggcatgctgctgacgccgccggacgtattctcgcagacactgctggccattccgatgtactgtctgtttgaagtcggggtgttctttgcccgcttctacaccgggaagcgcctgacgcgcgatgacgacgccgcggccgaagctgaagccgcagagcacagagaagagtaa

SEQ ID NO: 213751 - DNA, 537 bp, Klebsiella pneumoniae; identical to SEQ ID NO: 135794

SEQ ID NO: 213752 - DNA, 252 bp, Klebsiella pneumoniae; identical to SEQ ID NO: 135795

SEQ ID NO: 213753 - DNA, 1641 bp, Klebsiella pneumoniae
atgacgccaggagaattacggcgcctgtatttcatcatccacacctttttgagctacgggctcgatgagctcatccccaaaatgcggatcacgctgccgctgcgtatctggcggcggatgctgttctggatgccaaaccgccatcaggatcagcctcttggcgcccgccttcggctggcgctccaggagctggggccggtgtggataaaattcggccagatgctttccacccgccgggatctctttccgccgcatattgccgatcagctagcgctgttgcaggaccgcgtggcgccctttgaagggaagctcgcgcagcagcagatagagaaagcgatgggggggctgccggtcgagacctggtttgatgatttctccgttgagccgttagcctcggcgtccatcgcccaggtgcataccgcgcgtctgaaggagaatggcaaagaggtggtgatcaaggttatccgcccggatattttgccgatcattaaagcggacatgaagctcatctaccgcctggcgcgctgggtaccgcgtctgctgcctgacggtcgtcgtctgcgcccgcaggaggtagttcgtgaatatgaaaaaacgctgctggatgagctgaacctgctgcgggaatccgccaacgctattcagctgcggcgtaatttcgaagacagcccgatgctgtacgtgccggaggtgtaccccgactactgcagcgaaagcatgatggtaatggagcgcatttacggtatcccggtgtccgatgtggaggcgctggaggcccagggcaccaatatgcagctgctggcggagcggggcgtgcaggtcttcttcacccaggtgttccgcgacagcttcttccatgccgatatgcatcctggcaacatattcgtcagctacgagcatccggaagatccgcagtatatcggcatcgactgcggtattgtcggctcactgaacaaagaagataagcgctatctggcggaaaactttatcgcctttttcaaccgcgattatcgtaaagttgccgagctgcacgtcgattccggttgggttccgcccgataccaacgttgaagagtttgagttcgcgatccgcacggtctgcgagccgatctttgagaagccgctggcggagatctccttcggccacgtgctgcttaatctgttcaataccgcgcggcgtttcaatatggaagtccagccgcagctcgttttactacagaagacattactttacgtagaaggggtaggccggcagctctatcctcagttagacttgtggaaaacggcgaagcctttcctcgagtcgtggatcaaagatcaggtcggcattccggcgctggtgcgcgcgtttaaagacaaagcgccgttctggatcgaaagaatgccggaaatacctgagctggtgtatcagagcctgcagcagagcaaacagctgcagaccagcgtcgatactattgtgcgggatatgcgtgtgcgtcatgtgcgccagggccaatcccgttacctgtttggtataggcgcggttttattgctcagtggtacgctgctctttatccatcgccctgagtggggaatgatgcccggttggctgatggccggcggtgtggtgacctggcttattggctggcggaaaacccactga

SEQ ID NO: 213754 - DNA, 606 bp, Klebsiella pneumoniae
atgcctttcacacccctggttaccgctggcattgaaacggcgctgaatactttcctctggcgcgacaaagcgcttaaacccgctcgccagcgcctgctgggcaaggtattgcgggtccagctgcaggatttcgccacgcccgtggtgctggtattcagcgaacgccaggttgacgtcctgagcgcctgggacggagaggccgattgcaccgtgattacccggctcagcgtgctgccaaaactgcgcaatcgtcagcagctcacggcgcttattcgcagcggtgatctggaagtgcagggcgatctgcaggtggtgcagaatatggtctccctgtgcgacctggcagagtttgatcccgctgaactgctggcgccctataccggcgatattgtggccgaaggcgtcggtaaagtcctgcgcggcggcgctcagtttctgctgaagggcgcagagcgccagcagcgctatgtcgcggaagcgatcactgaagagtggcgcctggcgccggggccgctggagctggcctggtttgctgaagagacaacggctattgagcgcgcgctggccgcactggaaaaacggctggaaacgctggagggcaaatga

SEQ ID NO: 213755 - DNA, 756 bp, Klebsiella pneumoniae
atggttgaggattcacaagaaacgacgcactttggctttcagacggtcgctaaagagcagaaagcagatatggtggcgcatgtattccattctgtcgccgcaaaatatgatgtgatgaacgacctgatgtcgtttgggatccatcgtttgtggaagcgtttcaccatcgactgcagcggcgtacgtcgcgggcagaccgtgctggatctggctggtggtaccggtgatttgacggccaagttctcccgcctggtaggggaaaccggccgcgtcatgcttgctgatatcaatgattctatgctcaaaatgggccgcgaaaagctgcgcaatatcggcatcgtaggcaacgttgagtatgttcaggccaacgcggaagccctgccttttgctgataatacctttgactgcatcaccatctctttcggtctgcgtaacgtgaccgacaaagagaaagcgctgcgttcgatgtatcgcgtgctgaagccgggcggacgtctgctggtgctggagttttctaaacccattatcgaaccgctgagcaaagcctacgacgcttactccttccatatcctgccgaaggtgggcgagctggtggcaaaagatggcgacagctatcgctacctggcggaatctattcgtatgcatccggaccaggaaaccctgaaagggatgatgcaggatgcgggcttcgaaaacgtggattactacaacctgacggcgggtatcgttgctttgcatcgcggttacaagttctga

SEQ ID NO: 213756 - DNA, 1449 bp, Klebsiella pneumoniae
gtggatctctccattattatcagcgcggttatcgcactggcagccgggttaatggtcggctggctggcgaccaaagcgcgcgccgatcaaattcgggccgatctcatcgaggaacggcgagagttggatattgagctgagcgccgcccgccagcaactggcgcaggaggcccactggcgtgaggagtgtgagctgctgaacaacgagctgcgcagcctacgggatatcaatacctcgctcgaggccgatctccgtgaggtcaccacccggctcgaatccacccagctgcatgcggaagataagatccgccagatgatgaacagcgagcagcgccttagcgagcagtttgaaaacctcgccaaccgtattttcgaacacagcaaccggcgggtcgatgagcaaaaccgccagagcctgcatggcctgctgacgccgctacgcgaacagctggacgggttccgccgccaggtgcaggagagctttggccaggaggcgcgtgaaagacataccctggcgcatgagatccgcaatctgcagcagttgaacgcgcagatggcacaggaggcgctgaacctgaccaaagctctgaagggggataacaaaactcagggcaactggggggaagtggtcttaacccgcgtgctggaggcctccggcctgcgcgaaggctatgagtaccagactcaggtcagtattgagaccgacaaccgctcgcggatgcagccggacgttatcgtgcgcctgccgcagggtaaggacgtggtgatcgacgccaaaatgaccctggtcgcctatgagcgctatttcaacgccgaagacgactacacccgcgaagtcgcgctgcaggaacaccttgcctcggtgcgtaaccatattcgcctgctgggacgcaaggattatcaacagctgcctggcctgcgctcgctcgactatgtgctgatgtttattcccgttgagccggcgttcctgctggccatcgatcgccagcctgagctcatcagcgaggcgttgcaaaataatattatgctggttagcccgacgacgctgctggtagccctgcgcactatcgccaatctgtggcgctatgagcaccagagtcgtaacgcgcaaaagattgccgagcgggcggggcgcctttacgacaaaatgcgcctgtttgtggatgatatgtccgccatcggccagagcctggataaggcgcaagagagctatcgccaggcgatgaaaaagctcgcttccgggcgtggcaatctgctggcccaggcggaggcctttcgcggcctgggcgtggaggtcaagcgcgggattaatcctgatttagtcgaacaagctacggctcaggacgagcaatatcgtctcgaagatgaggataacctgccggaaaatgacgcattttcacccgactctgccgagacggtgcgtagccgggaggcggctccgccacgctga

SEQ ID NO: 213757 - DNA, 762 bp, Klebsiella pneumoniae
atgtccaagtctgatgtttttcatctcggcctcaccaagaacgatttacaaggggctacgctggctatcgtccctggcgatccggagcgtgtggaaaagatcgccgcgctgatggataagccggttaaactggcatctcaccgcgaatttacctcctggcgcgcggagctggacggcaaaccagtgatcgtctgctctaccggcatcggcggcccgtcgacttccatcgccgtggaagagctggcgcagctgggggtgcgtaccttcctgcgtatcggcaccacaggtgcgattcaaccgcacatcaacgttggcgatgtgttggtgactaccgcctccgttcgtctggacggcgccagcctgcacttcgcgccgatggaattcccggccgtcgcagacttcgcctgcaccaccgcgctggtggaagcggcgaaatcaatcggcgccaccacccatatcggcgtaaccgcttcctcggataccttctacccgggccaggagcgttacgacaccttctccggccgcgtcgtgagccgcttcaagggctcaatggaagagtggcaggcaatgggcgtgatgaactatgaaatggaatccgccacgctgctgaccatgtgcgccagccagggcctgcgcgccgggatggtggctggggttatcgtgaaccgtacccagcaagagatccctaacgccgaaaccatgaagcaaaccgaaagccacgcggtgaaaatcgtcgtggaagcggcgcgtcgtctgctgtaa

SEQ ID NO: 213758 - DNA, 813 bp, Klebsiella pneumoniae
atgaccaccaccaagcaacctggattcgcacctgcagcttcaccacacgccgcaaccgccgttcatacgccggaagagcatattatcgccggagagacgtcgattccctctcagggtgaaaacatgccggcctaccacgcccgcccgaaaaatgccgacggtccgctgccgatcgttatcgtggtacaggaaattttcggcgtgcatgaacatattcgcgatctttgtcgccgcctggcacaggaaggctatctggctatcgcgcctgaattgtacttccgtcagggcgatccgaatgagtaccacgatatcccgaccctgttcaaagagctggtcagcaaggtgccggacgcgcaggtgctggcggatctcgaccacgtcgccagctgggcggcgcgccacggcggcgatgcccatcgtctgctgatcaccggcttctgctggggcggacgcattacctggctgtatgccgcgcataacccgcagcttaaagcggcagtggcctggtacggtaagctggtgggagaaaaatcactgaattcgccgaagcacccggtagatatcgccgtcgatctcaacgccccggtgcttggtctgtacggcgctaaagacgccagcattccgcaggacaccgtcgagactatgcgtcaggcgctgcgggcagccaacgccacggcggaaatcgtggtctatcccgaagccgatcatgcctttaacgccgactatcgcgccagctatcatgaagagtcagccaaagacggctggcagcggatgctcgcctggtttgctcagtatggcggtaaaaaagggtaa

SEQ ID NO: 213759 - DNA, 2265 bp, Klebsiella pneumoniae
atgacaattattaaccacaccctcggttttcctcgcgttggcctgcgccgcgagctgaaaaaagcgcaagagagctactgggcgggcaacgccactcgcgaggaactgctggcggtaggccgtgagctgcgcgcccgtcactgggaacagcagaaacaggcgggcgttgatctgctgccggtgggggatttcgcctggtacgaccatgttctgactaccagcctgctgcttggcaacgtgccggctcgtcatcagaacaaagacggatccatcgacatcgataccctgttccgcattggccgcggccgcgcgccgactggcgaaccggccgccgctgcggaaatgaccaaatggtttaacaccaactatcactatatggtgccggagttcgtgaagggccagcagttcaaactgagctggacccaactgctggatgaagtagacgaagcgctggcgctgggccacaagatcaagcccgtgctgctggggccggtaacctatctgtggctgggtaaagtgaaaggtgaaccgtttgaccgcctgaccctgctgaatgccatcctgccggtttaccagcaggtgctggccgaactggcgaagcgcggcatcgattgggtgcagattgatgaaccggcgctggtgctggagctgccgccagcgtggctggaggcctttcaaccggcttatgacgccctgcagggccaggtgaagctgctgctgactacctattttgaaggcgttagcgacaatctcgcgaccattgctgcgctaccggtccaggggctgcacgtcgatctggtgcacggcaaagatgatgttgccgaactgcacaaccgcctgccggccgactggctgctgtccgcgggcttgatcaatgggcgtaacgtctggcgcgccgatctcaccgaaaagtatgcgcaaattaaagacctcgtcggtaagcgcgagctatgggtcgcgtcatcctgctctctgctacatagcccgatcgatctgagcgtggagacgcgccttgatgcggaagtgaagagctggtttgccttcgcgctgcagaaatgcggtgagctggcgctgctgcgcgatgcgctgaacagcggcgatacggcggcgattaccgagtggagcgcgccaatccaggcccgtcgccattcgacccgcgtgcacaacgcggaggtggaaaaacggctggcggcgatcactgctcaggacagccagcgcgccagcccctatgaggttcgcgcgcaggcacagcgccagcgctttaacctgccgaaatggccgaccaccaccatcgggtcattcccgcaaacgaccgagatccgcggcctgcgcctggacttcaaaaagggtaaccttgacgccagtcattatcggacggggattgcggaacatattaagcaggcgatcgtcgagcaggagcggttaggtttagacgtactggtgcacggggaggccgagcggaacgacatggtggaatacttcggcgaacatctggacggttttatcttcacgcaaaacggctgggtgcagagctatggttcccgctgcgtgaagccgccggtggtgatcggcgacgtcagccgtccgcaggcgatcaccgtcgactgggcgaagtacgcgcagtccctgaccgacaagccggtgaaagggatgctcactggaccggtgaccattctgtgctggtccttcccgcgggaggatgtcagccgtgaaaccatcgcgaaacagattgcgctggccctgcgtgatgaagtggcggatctggaggcggcggggatcggcatcatccagattgatgagccggcgctgcgcgaagggttaccgctgaagcgcagcgactgggatgcctatctgcagtggggtgtggaagccttccgccttaatgctgcggtcgccaaagacgacacgcagatccatactcacatgtgctattgcgagttcaatgacatcatggactccattgccgcgctggacgctgacgtgatcaccattgaaacctcgcggtccgatatggagctgctggagtcgttcgaagcgttcgagtaccccaatgagatcgggccgggagtatatgatattcactcgccaaacgtgccgagcgtggagtggatcgaagcgctgctgaagaaagccgcgcagcgtatcccggtggagcgactgtgggttaacccggactgcggcctgaaaactcgcggctggccggaaacccgcgccgcgctggcgaatatggtgcaagcggcgcgaaatctgcgccagtccgcctaa

SEQ ID NO: 213760 - DNA, 954 bp, Klebsiella pneumoniae
atgatcgaaattaaacatctgaaaacgctgcaagcgttgcggaacagcggttcactggcgggtgcggcagcggccctgcaccagacccagtccgccttgtctcaccagttcagcgatctggaacagcgccttggctttcgtctctttgtgcgtaagagccagccgctgcgttttacgcctcagggggaaatcctcttacagctggccaaccaggtgctgccgcagatcgctcgcgccctgcaggactgtaacgaaccacagcagacccggctgaggctggctatcgaatgtcacagctgtattcagtggctgacgccggcgctggagaatttccgcgcccgctggccacatgtggaggtcgacttccattccggcgtcaccttcgacccacagcctgcgctgcagcagggtgaactggatctggtgatgacctccgatattctgccgcgcagcggcctgcactactcgccgatgtttgattttgaggtgcgtctggtgctggcgcccgagcatccgttagctatgaagacgctggttaccccggaggatctggccgcggaaacgctgttgatttatcccgtgcaacgcgggcgcctcgatatctggcgccacttcctgcagccggccggcatcagcccgcagctgaaaagcgtcgataacacgctgttgttgatccagatggtggctgcccggatgggcatcgccgcgctgccgcactgggtggtggaaagctttgaacgccagggcctggtggtcaccaaaaccctgggtgaggggttatggagccggttgtacgcggccgttcgcgatggcgaacagcgtcaaccggtcaccgaagcgtttattcgctctgcgcggaaccacgcctgcgatcatctgccgtttgtccggagtgcggagcgacccagcggcgatggacccacagcgaggccaggatcaccaacgctccgctaa

SEQ ID NO: 213761 - DNA, 900 bp, Klebsiella pneumoniae; identical to SEQ ID NO: 135804

SEQ ID NO: 213762 - DNA, 801 bp, Klebsiella pneumoniae
atgtaccaggttgttgcgtctgatttagacggcacgctgctttcccccgatcatttcctgaccccgtatgccaaagagacgctgaagctgcttaccgcccgtgggatcaatttcgtcttcgccaccggccgtcactacatcgacgtcgggcaaatccgcgataatctcggcatccggtcgtacatgatcacctctaacggcgcccgcgttcacgatagcgatggtcagcaaatctttgcccataacctcgatcgcgatattgccgccgacctgtttgagatcgtgcgtaacgacccgaaaatcgtcactaacgtttatcgggaagacgagtggtatatgaaccgccatcgtccggaagagatgcgcttcttcaaggaggcggtgtttaactacaagctgtatgagccgggcgaactggatccgcaggggatcagcaaagtattctttacctgcgaggatcatgagcatctgctgccgctggagcaggcgatgaacgcccgctggggcgatcgggtgaacgtcagcttctccaccttaacctgcctggaagttatggcgggtggggtatcgaaggggcatgcgctggaggcggtggcgaagatgctcggctacactctttccgattgcatcgccttcggcgacggtatgaacgacgctgagatgctgtcgatggctggcaaaggctgcatcatggccaacgcccaccagcggctgaaggatctgcatccggaactggaagtgatcggcagtaacgccgacgatgctgtcccgaactacctgcgtaagctatacctcgactga

SEQ ID NO: 213763 - DNA, 993 bp, Klebsiella pneumoniae
atgtttgggcagaaaaaggactgggaaacacgagaaaacgcgtttgcggcctttagcatggggccgctgacggatttctggcgacagcgcgaagaagctgaatttaaaggcgtcgacgatgtaccggtacgctttgtccgcttttgcgcgcaacataacgatcgtctggtgttgatttgccccgggcgcattgaaagctacgtgaagtatgctgaagtggcctacgatctctttcactgcggctttgacgtgatgatcattgaccatcgcgggcagggacgctcgggccgcctgctctcagatacccaccgcggacacgtggttaacttcagcgactatgttgatgacctggccgcgctctggcagcagcaggtggttcccggacactggcgaaaacggtttatccttgcccattctatgggcggagcgattgccacgctttttctgcaacgttaccgggcgcattgcgatgcaatagcgctctgcgcgccgatgttcgggattatcattcggctgccggactggatggtgcgccatattctcgactgggctgagggccatcagcgcattcgcgaagagtatgccatcggcaccgggcgctggcgggcgctgccttttgccgttaacgtgctgacgcacagtcggcaacgctatcgtcgcaacctgcgcttctatgccgatgagccgcggctgcaggtcggcggtccgacctggcactgggtgcgtgagggcatgctggccggcgacgaagtgctggcgaatgtggaaaaagataccgccccgacgctgcttttacaggcggaggaggagcgggtggtcgataatctgatgcacgaccgctattgcgaattacgggccgctgccggccatccttgtgagggcggtaaaccgctcgtcattgaaggggcatatcatgagatcctttttgaaaaggacgctatgcgctcagtcgcgctcaatgccatcgtcgagtttttcaatcgacatacttaa

SEQ ID NO: 213764 - DNA, 621 bp, Klebsiella pneumoniae
atgaccattgagtggtggttcgcctacctgctgacatcaattattctcagcctgtcgccgggttccggagcgattaataccatgaccacttccattaaccacggataccgcggcgcggcggcgtcgattgccggtttgcagaccgggctggccattcatatcgtgctggttggcgttggtctcggcactctcttctcccgctcggtgctggcctttgaggtgctaaaatgggccggcgccgcctacctgatctggctgggtatccagcaatggcgggcggcaggggcgatcgacctgaatacgctggcgaaggcgcagacgcgcggcaaactgtttcagcgcgcggtgttcgtaaatctcaccaatcccaaaagcattgtttttctggccgccctgtttccgcagtttatcctgccgcaccagccgcaggtgatgcaatatctcgttctgggcgtcaccaccatcgtcgtcgatatcattgtgatgattggctatgcgaccctggcgcagcgcatttccgcatggatcaaagggccaaagcagatgaaggcgttgaacaaagtctttggttcactgtttatgctggtcggggcgctgctcgcctccgcccgccatgcctga

SEQ ID NO: 213765 - DNA, 909 bp, Klebsiella pneumoniae
atggcggaaacggcgacccctcatgatgcagtatttaaaacttttctctcacgggtagagacggcgcgcgattttatcgagctccacctgcctccgtcgttaacacagatctgcaaactggacaccctgcgtctggaatccggcagctttctcgaagacgatctcagaccttactacagcgatatcctttattcgctggaaaccacccgcggtgcgggctatgtccatgttctgatcgagcaccagagcgcacccgataagctgatggcctttcgcttaatgcgctatgccatcgccgccatgcagcggcacctggagagcggccataaaacgctgcctctggttatccctattctcttctatcagggacgacgcagcccctatccctggtcgatgcgctggctggataattttgccgatcctgagaccgccagccagctgtatagcggggcgtttccgctggtcgatatcacggtgatccccgacgacgacatcatgcagcaccgcagcatggcagccctgacgctggtgcaaaagcacatccgccagcgcgatatggcgcaattgctggataagttgacccaactcttaatgctggagcagatgagcggacaacaaatcaccgtattggtaaactatatggctcaggcaggggatgccgaagatactcggacactcttgtacgggctggcacagcgcgtgccgcagcatggaggattactgatgacgctggcggaaacatggcttgcagaaggtatggagaaaggcgtacagcagggcataaaagaaggtaaacaccaggctctggtgcaggttgccgaagcgatgcgcagtcgcggtattgatgaccaggcgattatggaaatgaccggtctgtctgaagacgagctgcagcggcttcgccactga

SEQ ID NO: 213766 - DNA, 621 bp, Klebsiella pneumoniae
atgctgatgcttttcctcaccgtggcgctggtgcatatcattgcgctgatgagcccggggccggactttttctttgtctcacaaacggccatcagccgctcgcgcagagaggcgatgatgggtgtgctggggatcacctgcggcgtcatggtctgggcgggagtggcgctgctcggcctgaacctgatcctcgcccggatggcgtggctgcataacattataatggtcggcgggggcctgtatctatgctggatgggctaccagatgctgcgtggcgcgctgaaaaaagagaaggtggcctcggcggagccgcaggtggagctggcccgcagcggacgcagcttcgtgaagggattgctgaccaatctggcgaatccgaaagcgattatctacttcggctcggtgttttcgctgttcgtgggtgacagcgtcggcgccggcgcgcgctggggcattttcctgctgattatcgttgagacgctggcctggtttatggtggttgccagcctgttcgccctgccggggatgcgccgcggctatcagcggatggcgaagtggatcgacggtatcgccggtacgctgtttgcgggcttcggcatccacctgattatctcgcgttaa

SEQ ID NO: 213767 - DNA, 1827 bp, Klebsiella pneumoniae
gtggcacaggcggaagtattgaatcaggaatcgctggctaagcaggttttacaagagaccttcggctaccagcagttccgtcctggccaggaaacgattatcgagacggcgctcgaaggccgggactgcctggtggtcatgccgaccggtggcggcaagtcgctgtgctatcaggtgccggcgctggtcatgggcggtctgacggtcgtggtctcaccgctgatctcgctgatgaaggaccaggtcgatcagctgctggccaacggcgtggcggcggcttgtctgaactcgacgcaaagccgcgagcagcagcaggaggtgatggccggctgccgcagcgggcaggttcgtctgctgtatatcgcgccggaacggctgatgctggataactttcttgagcatctggcgaactggaacctggcgatgctggcggtagacgaggcgcactgtatctcgcagtggggccatgacttccgtccggaatatgccgcgctgggccagctgcgtcagcggatgccgcagatcccgtttatggcgttgaccgccaccgccgatgataccacccgccgcgatatcgtccgcctgctggggcttaacgatccgctgattcaggtcagcagcttcgaccggccaaacatccgctatatgctgatggagaaattcaagccgctcgaccagctgatgcgctacgttcaggatcagcgcggcaaatcgggcattatctactgcaacagccgttcgaaagtggaagacaccgccgccaggctgcaaagccgcggtattagcgcggcggcttaccatgccggtctggaaaacgacgtgcgcgccgaggtgcaggagaaattccagcgcgacgatctgcagatcgtggtggcgacggtggccttcgggatgggcattaacaagccgaacgtccgctttgtggtgcattttgatattccgcgcaatattgaatcctactatcaggagaccggccgcgccgggcgtgatggtctgccggcggaagcgatgctgttttacgatccggcggatatggcgtggctgcgccgctgtctggaagaaaaacccgccgggccgctacaggatatcgaacggcataagctgaatgcgatgggggcgtttgccgaagcgcagacctgtcgccgtctggtgctgctgaactattttggcgaagggcgtcaggagccgtgcggcaactgcgatatctgtcttgacccgccaaagcagtacgatggcttaatggatgcgcgcaaggcgctttcaacgatttaccgggtcaatcaacgtttcgggatgggttacgtggtggaggtcctgcgcggggccaacaaccagcgcatccgagagatgggccacgataagctgccggtttacggtatcggccgggagcaaagtcacgagcactgggtgagcgtgatccgccagctgatccaccttgggctggtgacgcagaatatcgcccagcactccgcgctgcagctgaccgaagccgcgcgaccggtgctgcgtggcgaagtgccgctgcagctcgccgtgccgcgtatcgtggcgctgaagccaaaggcgatgcagaaatcctttggcggcaattacgaccgtaaactgttcgccaagctgcgcaaattacgtaaagcgatcgccgacgaagagaacatcccgccatatgtggtcttcaacgacgcgacgcttatcgagatggccgaacaatcgccgctgaccgccggcgaaatgctcagcgtcaacggcgtggggacacgcaagctcgagcgtttcgggaagccgtttatggcgctgatccgggcgcatgttgatggcgacgatgagtag

SEQ ID NO: 213768 - DNA, 861 bp, Klebsiella pneumoniae
atgcgtatctctttggcctgcctggtggcgctgtgcgcgctaccggccggtgttatggcgcaggacgcgtcggtacacgacaaaccggcagtgcgcggcagcattatcgccaacctgctccaggaccatgataatcctttcctgctctacccttatgagagcaactatctgctctatacgtggaccagcgacctcaataaagaggcgatccgcagctatgactgggccgaaaatgcccgtaaagatgaagtgaagtttcagctaagcctggcgttcccgctgtggcgcggtatcctgggcgataattcgctgctgggcgcgtcctatacccagaaatcctggtggcagctctctaacagcaaagagtcggcgccgtttcgcgaaaccaattatgaaccccagctgtttttgggctttgcgaccgactaccagtttgccggctggacgctgcgcgatatcgagatggggtataaccacgactcgaatgggcgttccgaccccacctcgcgcagctggaatcggctttatgcccgcctgatggcgcaaaacggtaactggctggtggaagtgaagccctggtatgtggtgggcaacaccgatgataacccggatatcaccaaatatatgggctattaccggctgaaggtgggctaccagctgggagaggcgatcctcagcgcgcaggggcaatacaactggaacaccggctacggcggggcggaacttggcgtgagctatcccattaccaaacatgttcgcgcctatacgcagatctacagcggctatggcgagtcgcttatcgactataactttaaccaaacgcgcgtcggcgtcgggctaatgctcaacgatctgttttaa

SEQ ID NO: 213769 - DNA, 465 bp, Klebsiella pneumoniae
atgtctgaacttactgccgaagcagccctgaaactggtaggggagattttcgtctatcacatgccgtttaaccgcgccctcggtctcgaactggaacgctacgaaaaagcgtttgcccagcttagctttaataatcagccgatgatggtcggcaactgggcgcaaagcattctgcatggcggggtgatcgcctccgcgctggacgttgccgctggcctggtctgcgtcggcagtacccttacccgccatgacaccatcaacgaagaagagttgcgccagcggctttcccgtatgggaaccatcgacctgcgcgtggactacctgcgtccgggccgcggcgaacgttttaccgccaccagcaccctgctgcgcgccggcaataaagtggcggttgcccgcgtggaactgcataacgaagctcaggtctatattgccagcgcaacggccacctatatggtgggttga

SEQ ID NO: 213770 - DNA, 894 bp, Klebsiella pneumoniae
atggatgcgaaacagacgcggttggggatcattctggccctcgccgcctactttatctggggtatcgcgccagcgtacttcaaacttatctactatgttcccgccgatgaaattctgacccatcgcgtgatctggtctttcttcttcatggtggcgctcatcagcgtcagccgccagtggccacaggtgaaaaagctgctgaaaacgccgcgcaagatcttcctgctggcgctctcggcagtgctggtcggcggtaactggctgttgttcatctgggcggtgaataaccaccatatgctggaagccagcctcggctactttatcaacccgctggtgaatattttgttggggatgattttcctcggcgaacgctttcgtcgtctgcagtggctggcggtgatcctcgccttttgcggcgtgctggtccagctgtggacctttggttcgctgccgataatcggtcttgggctggctttcagttttgccttttacggcctggtgcgaaagaaaattgctgtcgatgcgcaaaccggcatgctggtggaaacgctgtggctgctgccggtggcggcaatctggttgttcggcatcaccgacagcccgaccagccatatgggcgagaacccctggtcgctcaatctgctgctgatggccgcgggcgtggtgaccaccatccctttgctgtgctttaccggggcggcaacgcgtctgcggctctccacgctgggctttttccagtacatcggcccaacgctgatgttcctgctggcggtgacgttctacggcgaagtgccgggcaaggataaaatggtgacctttggctttatctgggtcgcgctggcggtgtttatcgtcgatgcgctgtatacccagcgccggttgcgcagaggctaa

SEQ ID NO: 213771 - DNA, 951 bp, Klebsiella pneumoniae
atgctgagcgcatttcaactggaaaacaatcgtttaacgcgcctggaagccgatgagatcaaacacctcgccagctcggtgtgggtcgatctggtcgagcctgacgacgatgagcgaagccgcgtgcagacggaactgggtcaaaacctggcgacgcgcccggaactggaagatatcgaagcctccgcgcgtttctttgaagatgaagacgggttacacatccactcgttcttcttttttgaagatgccgacgatcacgccggcaactctaccgtggcgtttaccatccgcgaaggccgcctgttcacgctgcgcgagcgcgaactacccgctttccgcctctaccgtatgcgcgtgcgtaaccagacgctggtcgacggcaacgcctacgaactgctgctcgacctgttcgagaccaaaatcgagcagctggcggatgaaattgaaaacatctacagcgacctggaaaagctgagccgcgtcattatggaaggccatcagggcgacgagtacgacgaagcgctgtcgacgctggcggaactggaagatatcggctggaaggtgcgactctgtctgatggatacccagcgcgcgctgaacttcctcgtgcgcaaggcgcgcctgccggcgggccagctggagcaggcgcgggagatcctgcgcgatatcgaatctctgctgccgcacaacgaatcgctgttccagaaggtgaacttcctgatgcaggcggcgatgggttttatcaatatcgagcagaaccgcatcatcaagatcttctcggtggtctcggtggtattcctgccgccaactctggtggcctccagttacgggatgaactttgaatttatgcccgaactacactggagctttggttatccgggagccatcgtgtttatgatgctggccggcctggcgccatatctctacttcaagcgcaaaaactggttgtaa

SEQ ID NO: 213772 - DNA, 2163 bp, Klebsiella pneumoniae
atggacgtttcttacctgctcgacagccttaatgacaaacagcgtgaagccgtagcggcctcgcgcaccaatatgctggttctggcaggggcgggcagtggtaagacgcgcgttctggtgcaccgtatcgcctggctgctgagcgtggagaactgttccccgtattccattatggcggtgacctttaccaacaaagcggcggcggagatgcgtcaccgtatcggccagctgatgggcaccacccagggcggcatgtgggtgggcaccttccacggcctggcgcaccgtttgctgcgcgcgcaccatctggatgccaacctgccgcaggacttccaaatcctcgacagcgaagaccagctgcgtctgctgaagcgtctgattaaggcgatgaacctcgatgagaaacagtggccgccgcgccaggcaatgtggtacatcaacagccagaaagatgaaggactgcgcccgcatcatattcagagctacggcaacccggtcgagcagacctggcagaaggtctatcaggcctatcaggaagcctgcgaccgcgccgggctggtggacttcgccgagctgctgctgcgcgcccacgagctgtggctgaacaaaccgcatatcctgcagcactaccgcgagcgcttcaccaatatcctcgtcgatgaattccaggataccaacaacattcagtacgcctggatccgcctgctggcgggcgataccggcaaggtgatgatcgtcggcgatgacgatcagtctatctatggatggcgcggcgcgcaggtcgagaacattcagcgcttccttaacgacttccccggcgcggaaaccatccgcctggagcagaactatcgctcgaccagcaatattctcagcgctgccaacgccctgattgaaaacaacaacgggcgcctgggcaaaaagctgtggaccgacggcgccgacggcgagccgatttcgctgtactgcgccttcaacgatctcgacgaagcgcgctttgtggtgaaccgaattaaaacctggcaggagaacggcggtgcgctggagcaatgcgccattctctatcgcagtaacgcccagtcgcgcgtgctggaagaggccctcctgcaggccagtatgccgtaccgtatctacggcggcatgcgcttcttcgagcgtcaggaaatcaaagacgcgctctcttacctgcgccttatcgccaaccgcaacgacgacgcggcctttgagcgcgtagtcaatacgccgacccgcggcattggcgaccgcacgctggacgtggtgcgccagacgtcgcgtgatcgccagctgacgctatggcaggccagtcgcgagctattgaaagaaaaagcgctggccggtcgcgccgccagcgccctgcagcgctttatggagctgattgacgcgctggcgcaggagaccaccgatatgccgctgcacgttcagaccgatcgggtgattaaagactccggcctgcgcgcgatgtacgagcaggagaaaggcgagaagggccagacccgtattgaaaacttagaggagctggtgacggcgacgcgccagttcagctacaacgaagaagatgaagatctgatgccgctgcaggcgtttctctcccacgccgcgctggaagcgggcgaggggcaggcggacacctggcaggacgcggttcagctgatgaccctgcactcggcgaaagggctggagttcccgcaggtgttcatcgtcggcgtcgaagaagggatgttcccgagccagatggccctagatgaaggcggccgcctggaggaggagcgtcgcctggcctacgtcggcgtaacgcgcgccatgcagaagctgacgctgacctatgcggaaacccgccgtctgtacgggaaagaggtttatcaccgcccgtcgcgctttatcggcgagctgccgcaggagtgcgtagaagaagtgcgtctgcgagccacggtgagccgcccggtaaaccatcagcgactgggcgcgccgattgccgagagcgataccggctacaagttaggccagcgcgtacggcatccgaagtttggcgaaggcactattgtcaacctcgaaggcagcggcgagcacagccgactgcaggtggcttttcagggccagggaatcaaatggctggtggcggcttacgcccggctggaggcagtgtaa

SEQ ID NO: 213773 - DNA, 717 bp, Klebsiella pneumoniae
atgcgtttttaccgacctctgggccagatttccgcgctgacgtttgacctggacgataccctttacgataaccgcccggtgattgaccggacgatgcacgagtcgctggcctttgtgcgcagctaccatccttcgctcagccagttcgacgcccatgagcttaatcagctgcgtcagacgctgctggctgctgaacctgagatttatcatgacgtgaccgtctggcgccaccgtgcgctggagttaggtatgcgtaatgccgggctctccgccgaagcggcgaaagcgggggccgatgcggcgatggaacacttcgcccactggcgcagccgcgtcgatgtcccgcaggaaacgcacgatacgctggcgaagctggcgaagaagtggccgctggtggcgattaccaatggcaacgcccgcccggaactgttcggtctgagcgactatttccgcttcgtgctgcgcgccgggccggatggccgctccaagccgtttgccgacatgtaccaccttgcggcggagcgtctgaatgtgccgctcgggcagattctgcacgtcggcgatgatctgaccaccgacgtggccggcgctattcgctgtgggatgcaggcctgctggatcaaaccgcaaggcgcggacctgatgcacaccgcggacagccgcctgctgccgcatattgaaatttcacggttggcatctctgacctcgctgatataa

SEQ ID NO: 213774 - DNA, 903 bp, Klebsiella pneumoniae
atgaccgattctcctctcttctccgccgtcgcccgctttcttcgccatcttggcgttgaacgccagctcagcccgatcacgttactgaattaccagcgacagctggacgcgctgatcgccctggcggatgaggcgggcctgaaaagctggtcgcagtgcgatgccgctcaggtgcgaagctttgcggtgcgtagtcgccgcgcggggttaggcccggcaagcctggcgcttcgcctgtcggcgctgcgcagtttcttcgactggctggtcggtcagggcgagctcagcgccaatccggcgaaggggattgccgcgccgaaaattccccgccacctgccaaaaaatattgacgtcgatgacgtcaatcgactgctggatatcgatctcaacgatccgctggcggtgcgcgatcgggcgatgctggaggtgatgtacggcgcgggattgcgtttgtccgaactggtcaacctggatatcaaacacctcgatctcgaaagcggtgaggtctgggtgatgggcaaaggcagcaaggagcgtcgtttgccgatcggtcgcaacgcggtggcatggattgagcactggctggatttgcgcggcctgttcggtaccgacgacgacgcgctgtttttgtcgaagctgggcaaacgtatttcggcgcgcaacgtacagaagcgattcgccgagtggggcattaagcaggggctgaacagccatgtgcacccgcacaagctgcgccactcctttgccacccatatgctggagtcgagcggcgatctgcgcggcgtgcaggagctgctggggcatgctaacctctccaccacccaaatctatacccatcttgattttcaacaccttgcctcggtgtacgatgccgcgcatccgcgcgctaaacgggggaaataa

SEQ ID NO: 213775 - DNA, 708 bp, Klebsiella pneumoniae
atgaaaccaatcggggaagaacagcaggaggttgccagcgcgttgaacgatcgcgcagtggtggactatctgttgcaacatcctgaattttttattcgtaatgccgcccaggtcgaacatctccgcgtcccgcatccggtacgcggtacgatttcgctggtggagtggcacatgatgcgggcgcgtaaccatattcatgtgctggaagaaaatatgtcgctgctgatggagcaggcggtcgctaatgaaagcctgttccagcgcctgctgcagctgcaaacgcggctggcggcggcggagagccttgacgatatgctcaaccgccttcaccgctgggcacgcgagctggggctggcgggcgccacggtgcgcctgtttcctgactgctggcgcctcggcgcgccctcgaagtttacccatctggcattaaaccggcaggcgtttgagccgatccgtattcaacgtctgggccaggcgcgccactatcttggaccgctgaacggcccggagctgctggtggtgctgccggaggcgaaggccattgggtctgtggcgatatcgctgctggggggcgataatgccccgggggtgatgctcttcagcagccgcgatgcgcagcattatcagccagggcaggggacgcagctgttgcaggagattgcccagatgctgcccggcctgctggagcgctggattgaacgcgcatga

SEQ ID NO: 213776 - DNA, 825 bp, Klebsiella pneumoniae
atgcagttctctaaaatgcatggccttggcaacgattttatggtcgttgacgcggtaacgcagaatgtttttttctcgccggagctgattcgccgcctggcggatcgccaccttggcgtcgggttcgatcagctattggtcgtcgaaccgccctacgatccggatctggatttccactaccggatctttaacgccgacggcagcgaagtgtcgcagtgcggcaacggcgcgcgctgttttgcccgcttcgtccggctgaaaggcctgaccaataaacgtgatatccgcgtgagtacggccaacgggcgtatggtattaagcgtaacggaagacgatctggtgcgggtgaacatgggcgagcccaacttcgagccgtcccaggtgccgttccgcgccaacaaagcggaaaagacctatatcatgcgtgccgccgagcagacagtattgtgcggcgtggtgtccatgggaaatccgcactgcgtcatccaggttgatgatgtggatacggcagcggtggaaactctcggcccggtgatggaaagccatgagcgttttccggagcgcgccaatatcggctttatgcaggtggtcggtcggtctcatatccgtctgcgcgtctacgaacgcggcgcgggggaaacccaggcctgcggcagcggcgcctgcgccgcggtggcggtggggatccagcaggggctgctggcggaaacggtacgcgtggaattacccggcggtcgtcttgatatcgcctggaaaggcccgggccagccgctgtttatgaccggcccggcggcccatgtctatgatggatttattcatttatga

SEQ ID NO: 213777 - DNA, 225 bp, Klebsiella pneumoniae
atgaatcacgggcaactatcaatgaaaaacgtttttcctacgcttgccgttttgtttgcgatcttcagcctgaccggctgcggtctgaaagggcctctctatttcccaccggcggacaaaaccgcgccgccgccgaccaaaccggttaaccctggcattcagagcgcaacgccggatcgtaacgatcgtggcgataccggtggtccgagccaggtcaattactaa

SEQ ID NO: 213778 - DNA, 321 bp, Klebsiella pneumoniae
atgaacgacagtgaattccatcgcctggccgatagcctgtggatgaccatcgaagaacgtctggacgactgggacggcgatagcgacatcgactgcgaaatcaacggcggcgtgctgaccatcagctttgaaaacggcagcaaaatcattattaaccgtcaggagccgctgcaccaggtgtggctggccaccaaacagggcggctatcacttcgatctcaaaggcgacgagtggatctgcgatcgcagcggcgaaaccttctgggatctgctggagcaggcggcgagccagcaggccggtgagacggtgaaattccgttaa

SEQ ID NO: 213779 - DNA, 2631 bp, Klebsiella pneumoniae
atggtgacggtttttgttgaaatactgaaatcctccgtactattgtacctcgggtttttgaacatcaggcgatatgtcttgtacctctatattgagacactgaaacagagactggatgccatcaaccaattgcgcgtggatcgcgcgcttgctgccatgggacccgctttccagcaggtttacagtctactgccaacgttattacattatcatcacccgctgatgccgggttaccttgacggtaacgttccccgtggcatttgcctctacacgcctgatgaaacccaacgccactatcttgaggaactggaactgcatcgcggtatgcagactcaggagccgccgaaaggcgagctgccgatcaccggcgtctactcgatgggcagtacttcctccgtcggccagagctgctcttccgatcttgatatctgggtatgtcaccaggcctggctggatagcgaagagcgtcagctgctgcagcgaaaatgcagcctgcttgagagctgggctgcctcgctcggcgtggaagtcagcttcttcctgatcgacgaaaaccgtttccgtcataacgaaagcggtagcctcggcggcgaagactgcggttcgacccagcatatcctgttgcttgatgagttctaccgcaccgcggtgcgcctcgccggcaagcgtattctgtggaatatggtgccgtgcgatgaagaagagcattacgatgattacgtgatggggctgtatgcccagggcgtgctgacgcctaacgaatggctcgatctcggcggcctcagttcgctgtcggcggaagagtacttcggcgccagcctgtggcagctgtataaaagtatcgactccccctataaagcggtgctgaaaacgctgctgctggaagcctactcctgggaataccccaataaccgcctgttagcgaaagatatcaaacagcgtctgcacgacggggagattgtctccttcggcctcgacccgtactgcatgatgctggagcgcgtgaccacctatctgcaggccatcgaagatgaaacccgcctcgatctggtgcgccgctgcttctacctgaaagtttgtgaaaaactcagccgcgaacgcgcctgcgtcggctggcgtcgcgaagtcgtcagccagttggtgaatgcctggggctgggacgaaaagcgtctgatgatgctcgacaaccgcgccaactggaaaatcgatgaagtgcgcaaggcgcacaacgaactgctcgacgccatgatgcagagctatcgtaatctgatccgcttcgcgcggcgcaataaccttagcgtctccgccagcccgcaggatattggcgtgctgacccgtaagctgtatgcggcctttgaagcgctgccggggaaagtgacgctggtaaacccgcaaatttcgccggatctgtcggaaccgaacctgacctttatccacgtgccgccgggccgcgccaaccgtaccggttggtatctgtacaaccgcgcgccggacatggaatcgatcatcagccatcagccgctggaatataaccgttatcttaataagctggtggcctgggcctggtttaacggcctgctgacctcacgcacccgcctgtttattaagggcaacggcatcgtcgatctggcgaagctgcaggagatggtggccgacgtgtcgcaccacttcccgctgcgcctgccggcgccgacgccaaaggcgctgtacagcccgtgcgaaatccgccacctggcgattatcgtcaacctcgaatatgacccaaccgcggccttccgtaaccaggtggtgcacttcgatttccgtaagctggatgttttcagcttcggcgaagagcaaaaatgcctgatcggcagcgtcgacctgctgtatcgcaactcgtggaacgaagtgcgtacgctgcactttaacggcgaacaggcgatgatcgaggcgctgaaaacgatcctcggcaaaatgcaccaggacgccgcgccgccggacagcgtggaggtgttctgctatagccagcacctgcgcggcctgatccgcacccgcgtgcagcagatgatctccgaatgtatcgaactgcgtctctccagtacccgccaggataccgggcgcttcaaagcgctgcgcgtctccggccagacgtgggggctgttcttcgagcggcttaacgtttcggtgcagaagctggaaaacgccattgagttctacggcgctatctcgcacaacaagctgcacgggctgtcggtgcaggtggaaaccaatcacgttaagctgccggcggtggtggatggcttcgccagcgaagggattattcagttcttctttgaagacgcggataacaacgacagcggttttaacatctatattcttgatgagagcaaccgcgccgaggtctatcatcactgcgagggcagtaaagaggagctggtgcgcgacgtcagccgcttctattcgtcatcgcacgatcgtttcacctacggctccagctttatcaacttcaacctgccgcagttctatcagattgtcgaggtagacgggcgcacccaggtgatccctttccgcactcaggcgattgccgccgcgatacccaccagccaggacgttaccgcctcgccggtgctgcagcagcgctactcgtag

SEQ ID NO: 213780 - DNA, 957 bp, Klebsiella pneumoniae
atgacggtaacaagcatgttagacaaagttttgaaaattgccacacggcaaagcccgcttgcgctatggcaggcgcagtatgttaaagcgcgcctggaacaagcgcatcccggactgaaggtcgagctggtgccgatggtcacgcgcggggatgtcatccttgatactccgctggcaaaggtggggggcaaaggcttatttgtgaaagagttagagctcgccatgctcgaagggcgcgccgatatcgccgtccattcgatgaaagatgtgccggtggaattcccggagggcctggggctggtgactatctgcgagcgcgacgatccgcgcgacgcgtttgtctccaatcgctatgcctcgattgacgaactgccggccggcagcgtcgttggcacgtcaagtttacgccgtcagtgccagctggccgccacccgtccggacctggcgatccgctctctgcgcggtaacgtcggtacccggctgagtaagctggataacggcgagtacgacgccatcatcctcgccgccgccggcctgaagcgcctgcagctggaagcgcgtattcgccagccgctgtcgcctgagcaatctctgccggcggtcggccagggcgcggtcggcatcgaatgccgtcttgatgatgcatggacccgggggctgttagcgcctctcaaccatacggaaacggcggtgcgcgtgcgcgccgagcgggcgatgaacacccgcctcgaaggcggctgccaggtgccgatcggcagctatgcggaactgaaggacggggaactgtggctgcgggcgctggttggcgctccggatggttcacagctggtgcgcggcgaacgacgcgggccagcggaacaggcggaagccctcggcatctcgctggcggaagagcttctggataatggcgcccgcgagattctcgcggcggtttatgatggagaagccccgcgatga

SEQ ID NO: 213781 - DNA, 741 bp, Klebsiella pneumoniae
atgagcatcctggtcactcgtccactaccgcaaggagaagcgctggtcagccgtctgcgggccatgggacgcgtggcctggagctttccgctgatagaatttacgcccggcagggagcttcccgcgctgggcgatgcgcttgcccgactggggcccgacgatctgctatttgcgctatcccagcatgcggtggaattcgcccatgcccgtctgcagcagcagggcctgccctggcccacttctccgcgctattttgccattggccgcacgacggcgctggccctgcatacggtcagtgggcagcatatccattatccgttagatcgggaaattagcgaagtcttgctacaattacctgaattacaaaacattgccgggaaaaatgcgctgatcctacgcggcaatggcgggcgggaactcttaggcgcgacgctgaccgagcgcggcgccagggtcacattttgtgaatgttatcaacgtagtgcaaaacattacgatggcgcagaagaagcgatgcgctggcaatctcgcggagtcaccacgctggtggtcaccagcggcgagatgctgcagcagctatggtcgttaataccgcaatggtatcgcgaacagtggctcctgcactgccgcgttgtcgttgtcagcgaacgtctggcccttcaggcccgggaactgggctggcaggagattcaggttgccgatagcgccgacaacgatgcgctgctacgcgcattacaataa

SEQ ID NO: 213782 - DNA, 1182 bp, Klebsiella pneumoniae
atgacggaacaacaaaatcaatccgccgtggttgaagagaccagggaggccgtggagaccacaccacagccagagaatactgagaagaagaaggcaggcaataaaaccagcctggcgctcagcgcgatcgctatcgccattgcgatagccgccggcatcggcctgtatggcctgaacaaacaacaggccacgcggcaaaacgcaactacctctgaattagcaagccaggtcgcggcgctgcaaaaagcgcaggaaaatcaaaaaagtgaactggaaggtgttatcaaacagcaggccgaccagctaaacgaagccaaacaccagcaggagacgctggccaaacagttggatgagctgcagcaaaaagtggcggtgatttccggtagcgatgccaaaacctggctgctggcccaggccgacttcctcgtcaagctggcgggacgtaagctgtggagcgatcaggatgtcaccaccgccgccgcgctgctgaaaagcgctgacgccagcctcgccgacatgaacgacccaagcctcatcggcgcccgccgggcgatcaccgacgacatcgccaccctctccgcggtaagccaggtggactacgacggcatgatcctcaaggttaatcagctggcgaaccaaatcgataacctgcggctggccgataataacgatgacgattcgccgatggacgctgatagcgatgagctttccagctctatcagcgaatggcgcgtcaacctgcagaaaagctggcagaactttatggacagctttatcaccgtgcgccgccgcgatgaaacggcggtcccgctgctggcgccgaatcaggatatctatctgcgggaaaatattcgctctcgcctgctggtcgccgcgcaggcagttccgcgccatcaggaagagacctggaaacagtcgctggataacgtctcgacctgggtacgcgcctattatgataccgatgacgccaccaccaaagccttcctcgacgaggtggataagctcagtcagcaaagcattaccatgacggtgccggaaacgctgcagagccaggcgttgctggaaaaactgatgcagacccgagtgcgcaacctgatggcgcagcctgccgttaccgcgggcggcgcgccttcgcccgcacctgctgcgccggccgcccccgctgcgccgcaaggagagtaa

SEQ ID NO: 213783 - DNA, 1197 bp, Klebsiella pneumoniae
atgctgaaaattcttttactcttcgcgctgttgatcgccgggatcgtgcttggcccgatgatcgccgggcatcagggctacgtcctgatccagaccgataattacaatatcgagaccagcgtgaccgggctggtgatcatcctgatcctcgccatggtggtgctgttcgccattgaatggctgctgcgccgcattttccgcaccggggcgcatacgcgcggctggtttgtcggccgtaaacgccgtcgcgcgcgtaagcaaaccgagcaggcgctgcttaagctggcggaaggtgattaccagcaggttgagaagctgatggcgaaaaatgccgatcacgccgaacagccggtggtgaactatctgctggcggcggaagcggcccagcagcgcggcgatgaagcgcgggccaaccagcatctggagcgcgccaccgagctggcgggcgatgacctgatcccggtggaaatcactcgcgttcgcctgcagctggcgcgtaatgaaaatcacgccgcgcgccatggcatcgataagctgctggaaattaccccgcgtcatccggaagtgctgcgcctcgccgaacaggcatacacccgcaccggcgcctggcagtcgctgctggacatcattccgtcgatggcgaaagctaacgtcggcgatgaagcgcaccgtgcggcgctggaacagctggcctgggttggcctgatggataaagcgctggccgatggcggcagcgaaggactacgcgaatggtggcgcaaccagagccgtaaaacgcgggcgctggtgccgctgcaggtggcgatggccgagcgcctcatcgagagcgacgatcacgataccgcgcagcaaattatcattgatggtctgaagaaacagtatgatgaccgtctggtgatgccgatcccgcgtctgaagaccaataacccggaacagctggagaaagtgctgcgccagcagatcaaagccgttggcgaccgtccgctgctgtggagcaccctgggccagtcgctgatgcggcacggcgaatggcaggaggccagcatcgccttccgcgccgcgcttaagcagcgtccggatgcctttgattacgcctggctggcggatgtcctggaccgcctgcatcagccggaagaagccgccgctatgcgccgagatggactgctgctgacgctgcagaataatcctcagccataa

SEQ ID NO: 213784 - DNA, 1386 bp, Klebsiella pneumoniae
atgactgagaaaaaagcggagctccagcgtggactggaggcccggcatattgaactgatcgcccttggcgggacgattggcgtggggttgtttatgggggcggccagtaccttgaaatgggctgggccttccgtgctgctggcgtacattatcgctggcctgttcgtctttttcattatgcgctcaatgggcgaaatgctgttccttgagcctgtcacaggctccttcgcggtgtatgcgcatcgctatatgagccccttcttcggctatctgaccgcgtggtcctactggtttatgtggatggcggtggggatctcggagattaccgccatcggggtctatgtgcagttctggttcccggagatggcgcagtggatcccggcgttgattgccgtggggctggtggcgttggctaacctcgcggcggtccggctatacggtgaaatcgagttctggttcgccatgataaaagtgaccaccattatcgtgatgatcgtcgtgggtctgggcgtcattttcttcggctttggcaacggcggccactccatcggttttggtaatctcaccgaacatggtggtttctttgccggcggctggaagggcttcctgacggcgctgtgtatcgtggtcgcgtcctatcagggggtggagctcatcggcattaccgcaggtgaagcgaaaaacccgcaggtgacgctgcgcagcgcggtgggcaaagtgctgtggcggatcctgattttctacgtcggcgcgatttttgttatcgtcactatcttcccgtgggatcaaatcggctccaacggcagcccgttcgtactgacgtttgccaaaatcggtattaccgcggcggcgggaattatcaacttcgtggtgctgacggcagcgctttccggctgcaacagcggaatgtacagctgcggacgtatgctgtacgccctggcgaagaaccgtcagctgccggcggcgatcggtaaggtatcgcgcaacggcgttccgtccgtcggtgtggcgctgtcgattctgatcctgctggtgggctcctgcctgaattacattattcctaatccgcagcgggtgttcgtctatgtctatagcgccagcgtcctgccggggatggtgccctggtttgtgatcctgattagtcagctgcgtttccgtcgcgtgcatcaggcggcgattgccagccatccgttccgttcgctgctgtttccgtgggccaactatttcacgatggccttcctgatctgcgtgctggtcgggatgggactgaatgatgaaacccgcatgtcgctcttcgtcggcattatttttctggccgccgtcaccctgatttataaggtgtttggcctcggaagacaggggcaagtcaataatacggctgaataa

SEQ ID NO: 213785 - DNA, 741 bp, Klebsiella pneumoniae
atgactgggaccatttccgcgccgttgtacctgttaagagggctgcagcttataggctggcgcgatatgccgcacgctctggattatttgtttgccgatggcgttctccgcgaggggacgctggtggccattaatgctgagaaaatgctggccgcagaggataacccggaggtacgggcgctgattgaggcggcggagtttaaatatgccgatggcatcagcgtggtgcgttcgctgcgcaaaaaatacccgcaggcccaggtatcccgcgtcgccggggccgatctctgggaagcgttaatgcagcgcgccggcgctgaagggacaccggtgtttttggttggtggtaaacctgaggtcctggcgcagacagaatccaggctgcgtcagcgctggcaggtgaacatcgtcggcagccaggacggttatttcacccctgagcaacgccaggcattgttcgaacgcattcgcgacagcggggcgaaaatcgtcaccgtcgcgatggggtcgccgcgccaggagatctttatgcgcgactgccggcgcctgtatccgcacgcgctgtatatgggcgtcggcggcacttacgatgtttttaccgggcacgtccatcgggcgccgaagttctggcaggatctggggctggagtggttctatcgcctgcttttgcagccgagccgtatcaaaagacagttccgtctgctgcgctatttacgttggcattattccggtaagctctga

SEQ ID NO: 213786 - DNA, 1347 bp, Klebsiella pneumoniae
atgacgttaatgcaatttagcgggctgctggtggtctggctgctgtcgacgctgttcatcgtcaccgccacctggtttgagttccgtcgggtacgctttaacttcaacgtttttttctcgttgctgtttctgctgacctttttcttcggcttcccgctgaccagtattctggtgttccgctttgacgtcagcgtggcgccgccggagattttgctgcagacgctgctgatcgcggtgtgcttctacgcagtctactacgtgacctataaaacgcggctgcgttcggcatcgcgtgaggttgcgcatcgcccgctgtttaccatgaaccgggtggaaacccatctggcgtggggcattttgatggggctggcgctgctgtgcgtcggcatcttcttcgcccacaacggtttcctgctgtttaagctcaactcctacagccagattttctctgctgaagtgtccggcgtggcgttgaagcgcttcttttacttctttattccggcgatgctggtggtctattttctgcgccaggattataaggcatggatcttcttcctcgtcagcacggtggcctttggtttgctgacctacgccatcgtcggcgggacccgcgccaatatcatcatcgccttcgccatctttctgttcatcggtattattcgcggctggatcagcctgtggatgctggcggcggcgggtgtgctgggtattgtcggcatgttctggctggcgctgaagcgctacgggatgaacgtcagcggcgacgaagcgttttataccttcctctatctcacacgcgataccttctcaccgtgggagaacctggcgctgctgctgcagaactacgacaagatcgatttccagggtctggcgccgatgatccgcgacttctacgtctttatccccagctggatgtggcacggtcgcccgacgatggtgctcaataccgccaactactttacctgggaagtattaaacaaccattcggggctggcgatttcgccgacgctgattggctcgctggtggtgatgggcggcgtctggttcgtaccgctgggcgccgtggcggtagggttgattattaaatggttcgactggctgtatgagctgggcaaccgggagagcaatcgctataaagcggctatcctgcacagtttctgtttcggcgctatcttcaacatgatagtgctggcgcgcgaggggctggattcgttcggctcccgcgtggtgtttttcctcgtgatctttggtatctgcttgctggcggcgaaactgctgtactggttcctggatagcgtgggactgattcataagcgcgtaaaaccgctttcgcaaccgcaagtctga

SEQ ID NO: 213787 - DNA, 1077 bp, Klebsiella pneumoniae
atgacagcactgatacatgtactgggatcggatatcccgcatcataaccagaccgtactgcggttctttaacgacgaactggccgccgacccgcaggccaggagatttatgatcgtcggtgatgaggccagcgtgcgtgatgggtatccggcgctggatgtcacctgctatccggggaagaaatcgctggcgcaggcagtgattgctaccgcgaaagccaaccgccagcagcgctttttcttccacggccagttcaataccgggctgtggctggcgctgttgagcggcggcatccgcccgtcgcagtttaactggcatatctggggggcggatctgtatgaaaattctgccagcctgaagtttcgcctgttctatccgctgcgccgtatggcgcaggggcgggtagggcgcgttttcgccacccgcggcgatctcagctggttcgctaaccgccatccgcgcgtcccgggcgagctgctctacttcccgacccgtatggatccggcgctgaataccctggccgataacgctccgcgcggtgataccctgactattctggtcggcaactccggggatcgcagcaatgaacatattgccgcgctgaaggcaatccatcagcagtttggcgatacggtaaacgtcatcgtgccgatgggctatccagcgaaaaacgacgcctatatcaatgaggttcgcgaggcgggggcggcgctgtttagcggtgagcatctgcagatcctcagcgagaagctggagtttcatgattatctggcgctgctgcgccgctgcgatctgggctattttctgtttgcccgccagcaggggatcggcaccctgtgtctgctgattcaggcgggcatcccctgcgtgctcaatcgggaaaacccgttctggcaggatatggccgagcagcatgtgccggtgctgttcaccagcgacgcgctggacgtcagcgtggtgcgcgaagcgcagcgtcagctggcgagcgtggataaatccgctatcgccttcttccggccgaactatctgacgggctggcggcgggcgctacggttagcggcggaggggcaggcatga

SEQ ID NO: 213788 - DNA, 1251 bp, Klebsiella pneumoniae
atgtcgttagcaaaagcctcactgtggacggcggcatcgacgctggtcaaaatcggcgccggtctgctggtcgtcaagctgctggccgtctcgtttgggccggcgggcgttggccaggccggtaacttccggcaactggtcaccgtactcggcgtgctggccggggccgggatatttaatggcgtcacgaagctggtggcgcagcatcacgacgatcccccgcgcctgaagcaggtggtgggcacctcgtcggcgatggtgcttggcttttccaccctgctggcgctggtatttttactggcggcggcgccgataagccaggggctgttcggccatacgcactatcaggggctggtacgcctggtggcgctggtgcagatggggatcgcctgggcgaatttcctgctggcgctgatgaaaggctttcgcgatgcggcgggtaacgccttctcgctgattgccgggagcctgatcggcgtggcggcttactatgcttgctacgtgttgggaggctatcagggcgcgctgctggggctggcgttagttccagcgctggtggtggtcccggcgggtattatgctctggcggcggggtaatatcccgctgagcgccctgcgtccgcgctgggataacggtctggcgggacagctatcgaaatttaccctgatggcgctgataacctcggtgaccctgccggtagcctatgtgatgatgcgtaatctgctggcggcgcattacggctgggaggcggtcgggatctggcagggggtgagcagcatctccgatgcctacctgcagtttattaccgcctcgtttagcgtctatctgctgccgacgctgtcgcggctgagcgccaaaacggatatcacccgcgagatagtcaagtcgctgaaattcgtcctgccggcagtagcggcggcgagcctgacggtctggctgctgcgcgattttgccatctggctgctgttttccgatcgctttaccgcgatgcgtgacctgtttgcctggcagctggtgggcgacgttttaaaagtaggcgcttacgtctatggctatctggtgatcgccaaagcgtcgctgcgtttttatattctgacggaaatcagccagttcgcactgctgaccgcattctcacactggcttataccggcgcacggcgcggttggcgcggcgcaggcatatatggccacttatattgtttatttcgccctttgtagtggcgtgtttttactctggcgtaaacgggcatga

SEQ ID NO: 213789 - DNA, 1131 bp, Klebsiella pneumoniae
atgatcccatttaacgcgccgccggtggttggaaccgagcttgattacatgcagtctgcgatgaacagcggcaagctgtgcggcgacggcggctttacgcgccgctgccagcagtggatggagcagcgatttggcacggcaaaagcgctactgaccccttcctgcacggcttcgctggagatggccgcgctgctgctggatatccagccgggcgacgaagtgattatgcccagctatacctttgtctccaccgccaacgcctttgtgctgcgcggggcgaaaatcgtcttcgttgatatccgtcgcgatacgatgaatatcgacgaaacgctcatcgaagccgccatcaccgataaaacccgggcgattgtcccggtgcattatgccggcgtagcctgcgagatggacaccatcatggccatcgccgacaaatacaacctgtttgtggtggaagacgccgcacagggggtgatgtccacctacaaggggcgcgcgctgggcaccatcggccatatcggctgcttcagcttccatgaaaccaaaaactacaccgccggcggtgagggcggggcgacgctgatcaacgatcgcacgctggtggaacgcgcggagattattcgcgaaaaaggcaccaaccgcagccagttctttcgcggcctggtggataaatatacctggcgggacattggctccagctatctgatgtccgacctgcaggccgcctatctgtgggcgcagctggaagcggcggagcgcatcaaccagcagcgcctggccctgtggcagaactactatgatgcgctgctgccgctggcgcgcgccgggcgtatcgaactgccgacggttccggccgactgcgggcaaaacgcgcacatgttctacattaagctgcgcgatatcgaggatcgcagcagactgatcgcctggctgaaagaggcggagatcctcgcggtattccattacattcccctgcacagctgcccggcaggcgaacagttcggcgaattccgcggtgaagaccgctacaccactcaggagagcgagcgtctggtacgcctgccgctgttttacaatctgtctgtggtgaaccagcggacggtgattaactcgctgctgagctacttctcctga

SEQ ID NO: 213790 - DNA, 675 bp, Klebsiella pneumoniae
gtgcccgtccgcgccagtattgaccccctggagtgggagaaccgcttctttgccgtgaacagcgcgatcgtgcgctttgacgagcacgcgccgcggctgacgcctgaggcgctggcggggtggtcgcgagtgcaggcgaagatcgccgccagcgacaccgtccggctggacgcgctgcagcggctgggttttcagctggtggaaggtgaggtcgatctggcgctgccggtgggcagccctgcagatgccggcgcagacgtcgccgtggaagcggatattgcgccgctgcgcgagcaggcggcgcaggcatttgccatgagccgctttcgcgcgccctggtacgctgccgacgccagcggccgcttctatgcccagtggattgaaaatgcggtgcgcggcaccttcgatcatcagtgcctgatttaccgccatcctgagggcgatattcgcgcctttgtctccctgcggcagatcactgcgaccgaagcgcgtatcggcctgctggccggacgcggcgccggggcgcagttgatgcaggcggcgcggtactgggccgcctcgcgcggactttctacactgcgggtggcgacccagatgggcaacaccgccgcgcttaaacgttatattctcagcggtgctaacgtggaaagcaccgcctactggctatacaggtga

SEQ ID NO: 213791 - DNA, 882 bp, Klebsiella pneumoniae
atgaaaggtattattctggcaggcggttccggaacgcggctacatcccatcacccgcggcgtatcgaagcagctgttgccgatctacgataagccgatgatctactacccgctgtcggtattaatgctggccgggatccgtgagatcctgattatcaccacgccggacgacctacgtgatttccagcgcctgctcggcgatggctcagagtttggcattgcgctgcactatgccgtacagccgacgccggatggtttagcccaggcgtttatcatcggagaagcctttcttaacggcgaaccggcgtgtctggtgttaggcgacaatatcttcttcggccaaagctttagcccgaagctgcgcagcgtcgctgcccgcacggaaggggcgacgatttttggctatcaggtgatggatcctgagcgctttggcgtggtggagtttgatgataacttccgtgcgctatcgctggaagagaagccgaagcagccgaagtcgaactgggcggtcaccggtctctatttctacgatggcaaggtgacggagtatgccaaacgggtcaagccatccgagcgcggcgagctggaaatcacctccatcaaccagatgtatctggaggatggcgcattgaccgtcgaactgcttggacgcggctttgcctggctggacaccggcacccacgatagcctgatcgaggccagcatgttcgtgcagaccgtcgagaagcgccagggctttaaaatcgcctgtctggaagagatcggctggcgtaacggctggctggacgacgacggcgtcaaacgtgcggcgaagcggctggaaaaaaccggctacggccaatatctgctggatctgctccgtgcccgtccgcgccagtattga

SEQ ID NO: 213792 - DNA, 1068 bp, Klebsiella pneumoniae
gtgagaaccattctggtcaccggcggcgcgggcttcattggttcggcggtagtgcgggagattatccagcacaccgccgatcgcgtggtggtggtggataaactgacctacgccggcaatttaatgtcgctggcgccggtggcgcaggatgcgcgtttcgcctttgaacaggtggatatctgcgaccgcgccgagctggatcgcatttttcgtcagcatcaaccggatacggtgatgcacctggcggcggaaagccatgtcgatcgttcgattgacggcccggcggcgtttatcgagaccaatatcgtgggcacctatacgctgctggaggcggcccgtagctggtggaataccctggctacggcgcaaaaatcggcgtttcgcttccatcacatctccaccgatgaagtgtatggcgatctgcacggcagcgatgatttctttaccgagaccacgccctatgcgccaagcagcccctattcggcttcgaaagccagcagcgaccacctggtgcgcgcctggctgcgaacctatggcctgccgacgcttatcaccaactgctcaaataactacggcccgtatcactttcccgagaagctgatcccgctgacgatccttaacgcgctggcgggcaagccgctgccggtgtatggcaatggacaacagatccgcgactggctgtacgtggaagatcacgccagagcgctgtatctggtggcgacccgcggcgaaccgggcgaaacttacaatatcggcggtcataacgaacggaaaaatatcgaggtggtggaaaccatttgtcagctgctggaagagctggcgccggataagccgcagggcgtggcgcactatcgcgatctgatcgccttcgttgccgatcgtccgggccacgatctgcgctatgccattgatgcctcgaagattgcccgcgagctgggctggacgccggcagagactttcacctccggtatgcgtaagaccgtggcgtggtatctggcgaacgaggcctggtggcgtcaggttcaggacggaagctatcagggcgagcgtcttgggctgcaaagctaa

SEQ ID NO: 213793 - DNA, 1263 bp, Klebsiella pneumoniae
atgagtttttctaccatttcagtgattggccttggctatatcgggctgccaaccgctgccgcgttcgcctcccggcagaagcgggtggtcggcgttgatgttaatcaacatgccgtggagaccattaaccgtggagagattcatatcgtggagccggatctggcgagcgtggtgaagaccgcggtcgagcaggggtatttaagcgccaccaccaccccggtggaggcggatgcttacctgattgccgtgccgacgccgtttaaagatcgccacgagccggatatggtgtttgtcgagtcggccgccaaatctattgcgccgacgttaaagaaaggctcgctggtgatcctcgagtccacttcgccggtcgggtcgaccgaacagatggccgagtggctggcggagatgcgcccggatcttagcttcccccagcaggtgggtgaagcggcggacgtgaatatcgcctactgcccggagcgggtattgcccggtcaggtgatggtcgagctgattaaaaacgaccgcgttatcggcggcatgtcgccggtctgctccgctcgcgccagcgagctgtataaaatcttccttgaaggcgaatgcgtggtgaccaactcgcgcaccgccgagatgtgcaagctgacggaaaacagcttccgcgacgtcaacatcgcttttgccaacgagctgtcgctgatttgcgccgaccaggggattaacgtctgggagctgatccgcctggcgaaccgccatccgcgcgtcaatatcctgcagccgggcccgggtgttggcggccactgtatcgccgtcgacccatggtttatcgtggcgcaaaacccgcagcaggcgcgtctgatccgcaccgctcgcgaggtcaacgaccacaagccggaatgggttatcgaacaggtgaaagcgcaggtggcggactgcctgaatgccaccaacaagcgggccagcgaactgacgatcgcctgttttggcctcgcttttaaaccgaatattgacgacctgcgcgaaagtccggcgatggaaattgccgcgcagattgcccgctggcacagcggcacgacccaggtggttgagcccaacattcacgcgctgccgaagaaactcgatggactgtgtacgctggcgacccttgaggcggcgctggccagcgccgatgtgctggtgatgctggtcgatcacaatgaatttaaagccgttagcggcgatagcgtcacccaggcgtttatcgttgacaccaaaggagtgtggcggtga

SEQ ID NO: 213794 - DNA, 1086 bp, Klebsiella pneumoniae
atggcgcctctggtccatgcgctggcaaaggatcctcattttgaggcgaaagtatgcgtgaccgcgcagcatcgggagatgctcgatcaggtgttgaaacttttctctattgtcccggactacgatctcaacatcatgaagccggggcaggggctgaccgagatcacctgtcgcatccttgaagggctgaagccggtgctggagtcgtttaaacccgacgtggtgctggtgcatggcgataccaccaccaccatggcggcgagcctggcggcgttttaccagcggataccggtgggtcacgtagaggccggcctgcgcaccggcgatttaagttcgccgtggccggaagaaggcaaccgtacgttgaccggccatctggcgacataccatttcgcccccacggaaacctcgcggcagaacctgctgcgggaaaatattgccgacagtcggatcacggttaccgggaatacggtcattgacgccctgttctgggtgcgggatcgggtgctgggtgatgaagcgctacgggagaccctgctgcagcgctatcctttcatcagccacggtaaaaagatgattctggttaccggccaccggcgggaaagctttgggctcggttttgaacagatctgccaggcgctggccgagatagcccatacccaccctgaggtgcagattgtctatccggttcacctgaatcctaatgtcagcgagccggtgaatcgtattcttggtcatattgacaatgtgatgttgattgaaccgcaggattacctgccgttcgtctggctgatggatcgcgcctggctgatcctgaccgattccggcggcattcaggaagaggccccctcgctgggtaagccggtgctggtcatgcgcgatatgaccgaacgtccggaagcggtggccgccggcaccgtgtgtctggtgggcaccgacagccagcgcatcgtcgcggaagtgacgcgactgctggaggatgatgctgcataccaggcgatgagccgcgcgcataatccctatggcgatggcgaagcatgtcgtcgcattttgtctgcacttaaaaataatcaggtaacgctatga

SEQ ID NO: 213795 - DNA, 1017 bp, Klebsiella pneumoniae
gtgaacgttgagaacgagctggatattcgcgggctgtttcgcgctttatgggcaggaaaaggctggatagtcggcggcgccgtactcttcgccgccatcgtgctggtgtacaccttctttgctcgccaggagtggagcgccacggcgatcaccgatcggcctactgtcaatatgttggggggatactattcccaacagcagttcttacgcaatctggacattaaagccgacctcgcctcggtcgaccagccttccgccatggatgaagcgtataaagagttcatcatgcagctggcctcctgggatacccggcgcgatttctggctgcaaacggactactacaagcagcgtcagtcgggtaatgcccgcgctgatgcggcgatgctggatgacctgattaacaatatccagtttatgccaggcgatgcggccaagagcattaacgacagcgtcaaactgaccgccgagaccgggcaggatgccaataatctgttgcgtcagtatgtggccttcgccagccagcgggcggcaggccatcttaacgacgaacttaaaggcgcctgggcggcgcggacggtgcagatgaaggcgcaggtgaagcgccaggaagaggtggccgaggccatcttcaaccgccggacgcacagcgtggagcaggcgctgaaggtggctcagcagcacaatatttcacgtagcgaaacggatgttcctgccgatcagttgccggattcagagctatttttattgggcaggccgatgctgcaggccaggctggaaaacctgcaggccgtcgggccggaatatgacctcgattacgaccagaaccgcgccatgctgagcacgttgaacgtcggtccaacgttagatccgcgttttcagacttaccggtatttgcggacgccggaagaacctgtaaaacgcgatagcccgcgccgtgtatttctgatggtgatgtgggggattgtgggtgcgctcatcggcgcaggcgtggcgttatcgcgtcgtcgtgtcctgtga

SEQ ID NO: 213796 - DNA, 1104 bp, Klebsiella pneumoniae
gtgaatttactcactgctattactgaattaatcagtattttcttattcacgaccctctttatttttgtcgcgcggaaagtggcaaaaaagatcgggttagtggataaacccaactatcgcaaacggcatcaggggttgattccgttggtcggtggtatctcagtttatgcaggtatctgtttcactttcgccatcgccgattattatattcctcacgcctcgctgtatctggcctgcgcgggggtattggtgctggttggcgcgcttgacgatcgcttcgacatcagcgtgaaaattcgcgcggtcattcaggccgcgatcgccgtgattatgatgatggcagggaatctgcatctgagtagtttgggctttatttttggctcgtgggaactggtgctggggcccttcggcttcttcctgacgctgtttgccgtctgggccgctatcaatgcgttcaacatggtcgatggtatcgacggcctgctcggcggactgtcatcggtctcttttgcggcgaccgggattatcctttggtttgatggtcagtacagcctggcgatgtggtgtttcgcgatgatcgccgccattctgccctatattcttctcaatcttggcgccctcggccgccgctataaagtctttatgggtgacgccggcagcacgatgattggcttcaccatcatctggatcctgctggaaaccacgcaaggtaaaacgcatcccattagcccggtgaccgcgctgtggattatcgctatcccgttgatggacatggtggcgattatgtatcgccgcctgcgcaaaggcatgagtcctttctcaccggaccgtcagcatattcatcatttgatcatgcgcgccgggtttacttcccgccaggcgtttgtcctgattaccctggccgccgccctgctggcgctggttggcgtcgtggcggaatacacccgcattgtgccggaatgggtgatgttaattctctttttggtagccttctttctttatggctactgtattaagcgcgcctggaaagtggcgcgcctggttaagcgcatcagacgcagaattcggcgacacagcggcaataatccgaaactaaccaagtag

SEQ ID NO: 213797 - DNA, 1260 bp, Klebsiella pneumoniae
atgaatcttaccgaattaaagaatacgccggtttctgagctgattactctcggcgaaaatatggggctggaaaacctggctcgtatgcgtaagcaggatattatttttgccatcctcaagcagcattcgaagagtggcgaagatatctttggcgacggcgtactggagatactgcaggatggatttggattcctccgctccgcagacagctcctacctcgccggccctgacgacatctacgtatcccccagccaaatccgccgtttcaacctccgcactggtgacaccatttccggtaagattcgtcctccgaaagagggtgaacgttactttgcgctgctgaaagttaacgaagttaactacgacaagccggaaaacgcgcgtaacaagatcctgttcgagaacttaacgccgctgcacgcgaactctcgcctgcgtatggagcgtggtaacggttctaccgaagacttaaccgctcgcgtactggatctggcctccccgattggccgcggccagcgtggtctgatcgtcgcgccgccgaaggccggtaaaaccatgctgctgcagaatatcgcgcagagcatcgcatacaaccacccggactgtgtcctgatggtactgctgatcgacgaacgtccggaagaagtgaccgagatgcagcgtctggtgaaaggtgaagtggttgcttccacctttgacgagccggcatcccgtcacgtgcaggttgccgagatggttattgagaaagcgaaacgtctggttgaacacaagaaagacgttatcatcctgctcgactctattacccgtctggcgcgtgcctacaacaccgtggttccggcttccggtaaagtgttgaccggtggtgtggacgccaacgccctgcaccgtccgaagcgtttctttggtgcggcacgtaacgtcgaggagggcggtagcctgaccatcatcgccacggcgctgatcgacaccggttccaaaatggacgaagttatctacgaagagtttaaaggcaccggtaacatggaactgcacctctctcgtaagattgctgaaaaacgcgtcttcccggctatcgactacaaccgttccggtacccgtaaagaagagctgcttaccactcaggaagagctgcagaaaatgtggatcctgcgcaaaattatccatccgatgggtgagattgatgcgatggaattcctcatcaataagctggcaatgaccaagacgaatgatgacttcttcgatatgatgaagcgctcgtaa

SEQ ID NO: 213798 - DNA, 330 bp, Klebsiella pneumoniae; identical to SEQ ID NO: 136749

SEQ ID NO: 213799 - DNA, 1266 bp, Klebsiella pneumoniae
atgagcaaaacacatttaacagaacagaagttttccgacttcgccctgcacccggcagtcattgaagcccttgaaaagaaagggtttcataattgcacacccattcaggccctcgcccttccgctgacgctggaaggccgcgatgtcgccgggcaggcgcaaaccggtaccggtaaaacgatggcgttcctgacgtcaacgtttcattatcttctctctcacccggctatcgccgatcgccaggttaaccaaccgcgcgcgctgattatggcgccgacgcgtgaactggcggtacagatccacgccgacgctgagccactggcgcaggccaccggtctgaagctgggtctggcttacggcggcgacggctacgataagcagttgaaagtgctggaaagcggcgtcgatattctgatcggcaccactggtcgtctgatcgattacgcgaagcagaaccacattaacctcggcgccattcaggttgtcgtgctggacgaagccgatcgcatgtacgatctcggctttattaaagatatccgctggctgttccgccgcatgccgccggccactcagcgcctgaacatgctgttctccgcgaccctttcttatcgcgtccgcgaactggcgttcgaacaaatgaataacgccgagtacgttgaagtcgagccggaacagaaaacgggccaccgtattaaagaagagctcttctacccgtccaacgaagaaaaaatgcgcctgctgcagacgctgctggaagaagagtggcccgatcgcgccatcgttttcgccaataccaagcaccgttgcgaagatatctggggccatctcgccgccgacggccatcgcgtaggtctgctgaccggcgacgtggcgcagaaaaaacgtctgcgcattctcgaagaatttacccgtggcgacctcgatattctggtcgcgaccgatgttgccgctcgtggtttgcacattccggccgtgacccacgtctttaactacgatctgccggacgactgcgaagattacgttcaccgcatcggccgtaccggtcgcgctggcgccagcggtcactccattagcctcgcctgcgaagagtatgcgctgaatctgccggcgatcgaaacctatattggtcactcaattccggtcagtaagtacaacccggacgcgctgatgaccgacctgcctaagccgctgcgtctgacccgtgcgcgcccaggcaacggcccgcgccgtaacggtccaccgcgcaatcgtcgtcgttcaggttaa

SEQ ID NO: 213800 - DNA, 1509 bp, Klebsiella pneumoniae
atgaagagtatgagctccacctcgctatatgccgccattgatttgggctccaatagtttccatatgttggtggtgcgcgaggtggcgggcagcatccagacgctgagccgcattaagcgtaaggttcgactggccgccggcctgaatagcgacaacaccctctccgcagaagcgatggaacggggctggcagtgcttacgcctgtttgccgagcgcctgcaggatattccgccgacgcaaatccgcgtcgtggccaccgccacgctgcgtcttgccgtcaatgcgggggagtttctggcgaaagcgcaggagatcctcggcactccagtgcaagtgatcagcggcgaagaagaagcgcgcctgatttaccagggtgtcgcccacaccaccggcggcgccgatcagcgcctggtggtcgatatcggcggcgccagcaccgagctggtgaccgggaccggcgcacaaacaacctcgctgtttagcctgtcgatgggctgtgtcacctggcttgaacgctattttgccgaccgtagtctgacgaaagagaatttcgatctcgccgaagcggctgcgcgcgaggtgctactgcccgtcgccgatgtgctgcgctatcacggatggaaagtgtgcgttggcgcctccggcaccgttcaggctctgcaggaaattatgatggcgcaggggatggatgaacgaatcaccctcgccaaactccagcagcttaaacagcgcgctatccagtgcggacgtctggaagagctggagatcgaaggcttaacccttgagcgggcgctggtgtttcctagcgggctggcgatcctgatcgctatcttcagcgaactgaatattcagtgtatgaccctcgcgggcggcgcgttacgcgaaggcctggtgtacggcatgctgcatctctccgttgagcaggacatccgcagccgcacgctgcgtaatattcagcgtcgttttatgatcgacacagaacaggcccagcgcgtcggcggccttgccagtcatctgctcagtcagttggatggcagctgggagctggatccgctaagccgtgatttactccttagcgcctgtgcgctgcatgagattgggctgagcgtggattttaagcgcgcgccgcagcacgccgcctatctggtcaataacctcgacctgccgggctttaccccggcgcagaagaagctgattgccacgctgctccttaaccagactaacgctatcgacctctcttcgcttcatcaacagaatgccgtcccaccgcgggtggctgagcatctgtgtcgtctgctgcgactggctatcctgtttgccagccggcggcgcgacgatctgttgcccgccattcagctgaccgctcaagacgaacaactgacgctgatattgccgggaaactggctggatgaacatccgctgggtcgggagatggtcgatcaggagtgtcagtggcaaagctacgtccactggatacttcgggtcgccagcggcgatacgctgaaataa

SEQ ID NO: 213801 - DNA, 927 bp, Klebsiella pneumoniae
atgcgggaagaactggatttcaaatcgctacgctttttctctgcgctctaccgcttgggcaatgtttccccagcggctgacgcgctcgatatcagccagcccaccggcagccttttgctgaaaaaactacgagatcattttgctgacccgctgtttgtccgggtcgggcagcggatgatcccgacgccgcgagcggacgcgatcgcccccaccatctcgactcttctccagcttgccgataacgatttagcggtcaaacctgaatttcttccccagcagagccagcgtaattttacgatcggtatgaccgatatcagccaaatgacgctgctgcctttattgcaaattgcgctccagcagcaggcggcggacgggatcacctttacggtacagaatctggatgagcagaccctcaacgccctcgaatccgggaaatgcgatctcgcgatcggctatctgacgcagcttccggaaagcgtctaccagcaacatctcttcgatcaatcatatgtctgcctggctgcggaaaaccatcctcgcattcgcgcacagctccgcgccgaagactggcgccaggaaaagcatctggcgatccgcgtggaggggactgcccatggcgatatggataagctgcttgatgagcaccacatgccccggcgcattgcgctaacgttaccaagttttttaggtaccggtgagctggtggccgaaagcgatatgattgccgtcgtcccggaacaggtggcgcggcatatcacccggcgctatccctgccgcagctggccgctgccttttcccctcgccaaaatcgccatccgtcaggtctggcatcagcggctgcaccgcgatcccggacatatctggctacgctcgctgatcgctacgcttgccgatcccgcacagcagagtacttctattaaaatctaa

SEQ ID NO: 213802 - DNA, 459 bp, Klebsiella pneumoniae
atgggcattgctgaatccgtcaccctgccgaaattcacccgcaagctggaaaactaccgcggcggcggtatgcccggttcagtcggtattgatctggggctggatgatggcgcgctggatacggaaatgaccatcggcggcactgaggcgcttctgtttaaacagatgggcaaagccacggtggacggcgtgcagctgcgctttaccgggtctattcagcgtgacgacaccggcgaagttcaggccgttgagctggtcgtccgtgggcgccacaaagaggtggattccggcgagtggaaaaccggcgagagcaattccaccaaggtcagcagcgttaactgttacgcgaagctgaccattaacggtgaagtgctctatgaggtcgatgcgatcaacatgattgaagttgttgatggtgttgacctgatggaagaacaccgtaacgccatcggtctgtaa

SEQ ID NO: 213803 - DNA, 300 bp, Klebsiella pneumoniae
atgagtgagaaaacagaagcaacggtgaaactggatagcccgattaagcgtggtgataccacgattacggaaattatgctgcgtaagccgcaatccggcgcgctgcgcggtacgcgactgcaggcggtgatggagatggacgtggcctcaatgatgaccgtgatcccccgcatctccacgccaacgctgaccccgcaggaaatggcggacctcgacccggcagacctggccgcgatgtctgtcgaggtggtcctttttttgttgccgaagtcggcacttgccgatttgccgacagcctga

SEQ ID NO: 213804 - DNA, 2628 bp, Klebsiella pneumoniae
atgagtgataaaaacctgcgcctgcaggtggttctgaatgcggttgataaactcacccgccctttaaaaaatgcgctggctggctcgaaggagctggcctccggcatccggcagacccgtgatcagcttaaacggcttaacgacgcggggagccagttaaaatcttttgatcaactctcacagagtctgaaccggaccagcaacgagctggaccaggcgcggctgcgtgcgcagatgatgacgcgcgaactggcagcgctcgaatcccccacgaaaaaacagacgcaggcgcttgaggcgcaatggcgcgccgtatcacgcctggaacaaaagcagcagcaggaaacgcggcagatggcggcaaccagggcggagctgtaccgccttggcatctctgcgggcggcggtgcccgtgaaacagcccgcattacccgcgaaactgatcgctataaccagcagctggcagagcaggagcggcgcttgcgggacgtgggcgagcgccagcgcaagctgaatgcgatcagggccaaagctgacaagatgcgcgacgtgcgtaacaacctggcggggaacggtgccgggatgatggccgccggggtgacaacgggcgcgacgctgctggcgcctattcgcgcctactcggaatcagagaacgccgcaaaccagctggcaggctcaatgatggggccgggcggaaaggtggcgcctgagttcatgaaactaaacaaactggcaatagccctgggtgaccggctgcccggcaccacggcagactttcagaacatgatgaccatgttacgtcgtcaggggatgtcagcgcaggttatcctgggcgggctgggtgagtcggcggcttaccttggcgtgcagctgcagatggcgccgacggaggctgcagagtttgccgcaaaattgcaggacgccacgcagaccaccgaaaaagacatgatgagcctgatggatcttatccagcgtggtttttatgcgggcgtagaccccgggaatatgctgcagggtttcgcaaatatcagcagcgctatggacattatcaagcagaagggcctggatgctgcaaaaaccttcagtccgcttctcgtcatggccgatcaggcggggatggctggagagtcagcgggtaatgcctaccgtaaaatttttcaggccacgctggatgcgaaaaatattaagggcataaacgacgggctgaaaggaaagggcatcaagttcgatttctccgacgggaaaggcggatttggtggtctggaaaagatgtacgcgcagttagaaaagcttgaaaaactaaatcctgaaacgaaatttgcaacgatgaaagccctgtttggtaatgataatgaggtgctaaaagcgctgaataccatgatgtcaaaaggcatggcgggctatcgtgaaaccgtcgctaaactggagagccaggcaactctgcgcgagcgcgtcgaggcgtccctgaataccttaggcaacaaatgggaagccgctggcggctcttttactaacgccatggcaagcatcggagaaaccgtcgctccagtgctgaaaaatatagcggactggctgggtaatctggcgtccgcgctggatggttttgtgaagcgtcatccgcaactgacggcggcgctatttaaaattgcggccgtatttgccgtggtagctaccgcagcgggtgtggtgtcactggccctggcatccattttgggtcctatggcggtactgcgggtaagtgctggcattctccagctgatatttgcttctgcgtttggtctggtcacaagagtaattggcggtgcaggccaggcggtcatctggttaggccggttgatgatggctaaccccattctggcgatagttggcctgattgcgatgggagccatctatatctggcagaactgggaaacgctggggccgaagtttaaagcactctgggatgccatcacgtcaggggtgtcagtagcctggactgtgattaagcagaccataagcagcaaatgggatgaaattctgagtgatgttgccgcgctggccgcaaagtttaaagcagtgggcggggcgatcattgacggcatcctgagcggtatcaatgagaagtgggaaacgcttaagagcaagctggcatcggtcaaaagctatctgccggactggatgaccggcggggacaaatcgccaggcgcacctcagcagaaagggccgagcggatttttcgcggggatgtatgacggcggcggctatattccacacgggaaggtgggcattgctggcgagaatggcccggagctgattaacggcccggcctatgtgaccagccgcaggagaacggccgcgctggcgtccgtagtcgccggaatgatggggggagcaatgccagcagaggccgccccgcttcatcccatgagtctgccggcagcttcataccgtcctgtaactgataagctagcaggcagccagcctgtattccagtttgaaacccatgcgcaaattattatccaggctctgcccggtcagagtgcgcaggatattgcgcaggaagttgcacggcagcttgatgcgcgcgagcgacgcatgaaggcgaaggcccgcagcaatttcagtgatcaaggggggtacgattcatga

SEQ ID NO: 213805 - DNA, 486 bp, Klebsiella pneumoniae
atgatgatggtcctgggcttatttgtgtttcagctgcgcacggttccctatcagcaactgcagtatcagcggaactggcgccatgtgaccaacaaccgcgttaatcgccgtccgacaacgcaatttttggggccagataacgatcagctgacgctctccggcgtcctcatgccggaagtgaccggcggccggttgtcgttgctggcgctggagctgatggcagagcaggggaaggcgtggcccctgattgaaggcagcggcacgatttacggcatgtatgtgattgagggactgaatcagactaaaacggagtttttccgcgacggtatgccgcgcaggattgagttcaccctgtcgctaaaacgcgtggatgaatccctgtccgatatgttcggtgatctcagtgcgcaactgaataatctgcagggaacggaaacatctgccttaagcgatatcagtaaaacggtgggagggctgctgtcgtga

SEQ ID NO: 213806 - DNA, 1101 bp, Klebsiella pneumoniae
gtgaatttcagctctgaactgcttaacaaaggcaacaaaactccggcattcagcatcagtattgaaggcagggatatcaccactgtgctggacaaccgcctgatggggctgacgctgacggataaccggggatttgaagcggaccagcttgatctggagctggacgacgccgatggaaaaatcgtgctgccgcgccgtggtgcggtcattacgctggcgctgggctggaaggggcagccgcttttcccgaaaggggcattcacggtggacgagattgaacacactggcgcaccggaccgcctgactatccgggcgcgaagtgctgattttcgggaaaccctgaatacccgccgtgaaaaatcgtggcataacaccaccatcggggaagtggtgaaggaaatagccgcgcggcacaagctgaagatggcactgggtaaagagctgtcggataagcccgtggagcatatagaccagactaatgagagtgacggcagttttctgatgcgactggcgcgacagtacggtgccatcgcgtcggtgaaaaatggcaatctgttattcatccggcaggggcagggcaaaagcgccactggtaaaccactgccagtgatcactatcacacgcaaggacggcgacagtcaccgctttaccctggcagatcgcggagcctacacgggcgtaattgccagctggttgcatacccgtgaacctgcgaagaaagaaagcaccacggtgaagcgtaagcgcagaactaagaagcagaagaaagagccggaagcgaagcagggcgattacctggtgggtacggatgaaaatgtgctggtacttaatcgcacttatgccaaccggagcaacgccgaacgagcggcgaaaatgcagtgggaacgcctgcaacgcggcgttgcgtcattctcgctacaactggcggaagggcgggcagatctctacacggaaatgccagtgaaagtcagtggctttaaacagccgatagatgatgcggaatggactattaccaccctgacgcatactgtcagcccggataacggttttacgaccagtctggagcttgaagtgaagattgatgatttcgaaatggaatga

SEQ ID NO: 213807 - DNA, 219 bp, Klebsiella pneumoniae; identical to SEQ ID NO: 10578

SEQ ID NO: 213808 - DNA, 1686 bp, Klebsiella pneumoniae
gtgaatataaacgtcgcagatttgttaaacgggaattacatcctgttattattcgttgtacttgcattaggactatgcctgggaaaactgcgtctcggctcagtacaacttggtaattccattggcgttttagtcgtttctctattattaggccagcagcatttcgcgattaacaccgatgcccttaatctcggctttatgctgtttattttttgcgttggcgtagaagccgggcccaactttttttctatttttttccgcgacgggaaaaactacctgatgctggcgctggtgatggtcggcagcgcgatgctgatcgccatggtgctgggtaaagtgttcggctgggatatcgggctcaccgccggtatgctggcaggcgccatgacctccaccccggtgctggtgggcgcgggcgacaccctgcgccatttcggcctgcccagcgatcagctggcgcagtcgcttgaccatctgagcctcggctatgccctgacctatctggttggtctggtgagcctgatcgtcggcgcccgctatatgcccaagctgcagcatcaggatctgcagaccagcgcccagcaaatcgcccgcgagcgcggcctcgataccgattccaaacgtaaagtctacctgccggtgatccgcgcctaccgcgtcggcccggagctggtggcctgggcggatggcaaaaatctgcgcgaactgggtatttaccgccagaccggctgctatattgaacgcattcgtcgcaacggcattctggccaacccggacggcgacgcggtgctgcagatgggtgacgatattgcgctggtgggctacccggacgcccacgcccgcctcgacccgagcttccgcaacggtaaagaggtgttcgaccgcgatctgctcgacatgcgcatcgtcactgaagagatagtggtcaaaaaccacaacgccgtcggccgccgcctggcgcagctcaagcttaccgaccacggctgcttcttaaaccgggttattcgcagccagatcgagatgcctatcgacgataacgtcgtactgaacaaaggcgacgtgctgcaggtcagcggcgacgcccgccgcgtaaaaaccgtggccgaccgcatcggctttatctccattcacagccaggtgaccgatctgctggccttctgcgccttctttatcgttggcctgatgatcggcatgatcaccttccagttcagctccttcagcttcggcatcggcaacgccgccggcctgctgttcgccggcatcatgcttggcttcctgcgcgccaaccacccaaccttcggctatatcccgcagggggcgctgaacatggtgaaagagtttggtctgatggtgtttatggccggagtcggtctcagcgccggggccgggatcaataacgggctgggcgccgtcggcggccagatgctggcggcagggcttatcgtcagcctggtgccggtggtgatctgcttcctgttcggcgcctacgtgctgcgcatgaaccgggcgatgctgttcggcgccatgatgggagcccgcacctgcgccccggcgatggagatcatcagcgataccgcgcgcagcaacattcccgcgctcggctacgcaggcacctacgccatcgccaacgtgctgcttacccttgccgggacgctcatcgtgatcatctggccagggctacaataa

SEQ ID NO: 213809 - DNA, 384 bp, Klebsiella pneumoniae
gtgaaatctgagcgtagttgggccggcattatctgtggcttcgttctgttcattgtggtgtgcttatcgttgttgttacatatgaaaggggcatttcgcgccagcggcaacccggagctgggcctgctcttctttttgctgccaggggcggcggcgagctgtctctctcctggacggcgggtgctgcgtcctttgctcggcgcgatactggcggcgccggtctgcatggtgacgatgcggctgttcttcgtgacccaccggacgttctggcaggagatggcgtgggtgttgagcgccgtgttctggtgcgcgcttggggcattgtgctttttgtttatctgcgcctggcttgatacctggcgcagtcattcatcgagcaaataa

SEQ ID NO: 213810 - DNA, 264 bp, Klebsiella pneumoniae; identical to SEQ ID NO: 136308

SEQ ID NO: 213811 - DNA, 288 bp, Klebsiella pneumoniae
atgcgaaaatttgccccattgccgaaaagcattctgctggttgagatcctcgggatggggctgttaaccctcgcctggctctcccttaaccagtatgtccagctgcctgcgcccattgccagcccgaccgcggcgctggtgatgctctttgccgggatcgtgctgatgatccccgccgccctcgtcgttatgtggcgggtggcgcagatcgtggccccgcagttaacgcactctcctaagcctgaatccttgtctgacagagaaaaacgaaatgacgccgaccattga

SEQ ID NO: 213812 - DNA, 159 bp, Klebsiella pneumoniae
atgacgccgaccattgagctgctgcgcagccaccgttctatccgccacttcaccgatgcccccgtgagcggacgaacagcgcgcggcgattatcgccagcgcgcaagcggcatctacctcgagttttttacagtgcacctccatcatccgtattactga

SEQ ID NO: 213813 - DNA, 330 bp, Klebsiella pneumoniae
ttgcgcaacagcattgaggccgtcacagagctgctggagctgccgcagcacgtcctgccgctgttcggtctttgccttggctggccggcggataacccggacatcaagccgcggatgccggcggccatgctggtgcatgagaaccgctatcagccgctggataacgcgctgctggcggagtatgacgaacagctggcgcactattatctgtcgcgcggcagcaacgcccgccgcgatacctggagcgaccatatccggcgcactatcgtgaaagagagtcgtccgtttattcttgactatctgcataagcaggggtgggcaacgcgctga

SEQ ID NO: 213814 - DNA, 903 bp, Klebsiella pneumoniae
atgaaaattgccatattatcccgggatggaacgctttattcatgtcggcgcctgcgcgaagcagcgcaacagcgcggtcatcagatcgagatcctcgatccgctttcctgttatatgaacgtcagcccggtggcctcgtcgatccactacaaagggcgtcagctgccgcactttgatgcggtgatcccgcgcattggctcggcgatcacctactatggcaccgcggccctgcgccagtttgagctcctgggaagctatccgctgaatgagtcggtcgccatcacccgcgctcgcgataagctgcgctcgctgcagctgctggcgcgccagggcatcgatctgccattgaccggcatcgctcactccccggatgacaccagcgatctgatcgccatggtgggcggcgcgccgctggtggtgaagctggtggagggcacccaggggatcggcgtggtgctggcggagacccgccaggcggcggagagcgtgatcgacgcctttcgcggactgaacgctcatattctggtgcaggaatacattgccgaagcgaaagggtgcgatatccgctgcctggtggtcggcaatgaggtggtggcggcgatcgagcggcgggcgaaagagggggatttccgctctaacctgcaccgcggcggcatggccacggtggcgcagattagcgacgaggagcgggccattgccatcaaggcaacgcaaactctcgggctggacgccgccggtgtcgatattttacgcgccgcccgcgggccgctggtgatggaggtgaatgcctcgccggggctggaaggggtggaaaccaccaccggcgtggatgtcgccggcaagatgatcgcctggatcgagcgccaggcgacgccggaattctgtttgaaaataggcggctaa

SEQ ID NO: 213815 - DNA, 480 bp, Klebsiella pneumoniae
atggattcactggtcgttccaggtctggatacgctacgtcgctggctggacgagatcggcatcagcttttttgagtgcgattcctgtcaggcattgcacctgccgcatatgcagaatttcgacggtatttttgatgccaaaattgacctggtggacaacgtggtgctcttttccgccctggcggaggtgaagccgtctgccctgctggcgctgtcggcggatctctcggccatcaacgccagctcgttaaccgtgaaggcgtttatcgacattcaggacgataatttgcccaagctggtggtttgccagtcgctgtctatcggcccaggggtgaccatggagcagttcgcctggttcttccgccaaagcgaagagcagatctcgatggtaatcctcgaagccggcgcaaatcagctgctgtacaaaggcgaagaagaagagcctgcggcggaaaacgtgcaataccattttcttcactaa

SEQ ID NO: 213816 - DNA, 1113 bp, Klebsiella pneumoniae
atgaccgcctttggtaaaaaatggttaacaggtctggttacgggtgcgctgatggccgtctctgccggttcgctcgccgccgaacaaaaaaccctgcatgtttataactggtctgattatatcgcgccggacacggtagcgaatttcgaaaaagagaccgggattaaagtggtgtatgacgtttttgattccaacgaagtgctggaaggcaaattaatggcgggtagcaccggtttcgacctggtggtgccgtcggcaagcttcctcgaacgccagctggcggcgggcgtgttccagccgctggataaaagtaagctgcccaactggaagaaccttgaccccgaagtgctgaagctggtcgccaagcatgacccggagaataaatacgccatgccttacctgtgggcgacgacgggcattggctacaacgtggataaggtgaaagccgttctcggcaaagatgcgccggtggacagctgggatctggtgctgaagccggagaacctcgaaaaactgaaaagctgcggcgtctccttcctcgacgcgccggaagagatttttgccaccgtgctgaactacctcggcaaagatccgaacagcagcaaagcggatgattacaccggcccggcgaccgatctgctgctgaagctgcggccgaacattcgctacttccactcttcgcaatatattaacgaccttgccaatggcgacatctgcgtggcgatcggctgggcaggggacgtctggcaggcggccaaccgcgcgaaagaggcgaagaacggcgtcaatgtctcctactttattccgaaggaaggcgcgctggcgttctttgacgtctttgccatgccggccgacgcgaagaataaagatgaagcctatcagttccttaactatctgatgcgtccggacgtcatcgccaaaatcagcgaccaggtgttctacgccaacggcaacaaggcttccacaccgctggtcagcgagactatccgtaacaacccggcgatttatccgccagcggatgtgttcgccaaactgttcacgctgaaggtgcaggatccgaagattgaccgcgtgcgcacccgcgcgtggaccaaagtgaagagcggcaaataa

SEQ ID NO: 213817 - DNA, 1167 bp, Klebsiella pneumoniae
atggtgatcgtttttttgccggagagcacccgattgaacgacgtaatgccccgcccacaggcgaaagcccccaaagcgctgaccccgctactggaaatccgtaacttaaccaagtcgtttgatggccagcatgcggtcgacgacgtcagtctcactatctacaaaggcgaaatttttgctctgctgggcgcgtcaggctgcgggaaatcgacgctgctacgcatgctggcgggctttgaacaaccgaccgccgggcaaattatgctcgacggcgtggatctggcgcgcgtgccgccctatcagcggcctattaatatgatgttccagtcctatgccctgtttccccatatgaccgttgagcagaatattgccttcggcctgaagcaggaccgcctgcctaaggcggaaatcaccgcccgggtgcaggagatgctggccctggtacatatgcaggagtttgccaaacgtaagccgcaccaactctcaggcggccagcggcagcgcgtcgcgttggcgcgcagcctggcgaaacggcccaagctgctgctgcttgatgaaccgatgggggcgctggataaaaagctgcgcgatcgcatgcagctcgaggtggtggatattcttgagcgcgttggcgtgacctgcgtgatggtaacccacgatcaggaagaggcgatgaccatggcgggccgtatcgccatcatgaatcgcggcaagtttgtgcagattggcgaaccggaagagatttacgagcacccgaccacccgctacagcgccgagtttatcggctcggtgaacgtctttgaagggctggtgaaggagcgtctggaagacggtctggtgctaagctcgccggggctgatgcatccgctgaaggtcgaccccgacgcctctgtggtggacaacgtgccggtctgggtggcgctgcgtccggagaagatcatgctgtgcgatgaaccgccggcggacggctacaattttgccgtcggcgaggtgattcatatcgcctatctgggggatctctctatctatcatgtgcgcctgcaaagcgggcagatgatcagcgcccagctgcagaatgaacaccgccatcggaaagggacgcccacctggggcgatgaggtgcgtttatgctgggatgctgacagctgcgttgtgctgacggtgtga

SEQ ID NO: 213818 - DNA, 954 bp, Klebsiella pneumoniae
atgaataccgttgaatccccgtcaggggcgaaaaaaccgggcggcttcgcgctgtgggcggcgcgcctgcagatggcgcatggccgcaagctggtgattgcgctgccctatctgtggctgatcctgttgtttatgctaccgttcctgatcgtgttcaagataagtcttgccgagatggcgcgggcgatccctccctacaccgagctgatggagtgggcggacggccagctgacgctgacgcttaactttgccaacttcctacagttgactgacgatccgctctattttgaagcttatctccagtcgctgcaggtggcgggtatctcgacgatctgctgcctgctgctgggctatccgctggcctgggcggtggcgcacagcaagccgtcgacgcgtaatattctgctgctgttggtgatcctcccgtcgtggacctcgtttttgatccgcgtctatgcctggatggggctgctgaagagcaacggggtgttgaataacttcctgctgtggttaggggttatcgatcagccgctggagatcctgcacaccaacctggcggtgtacatcggtatcgtgtatgcctatctgccgtttatggtgctgcctatctacaccgcgctgacccgcatcgactattcgctggtggaggcctcgctggatctcggcgcccggccgctgaagaccttcttccaggtgatcgtcccgctcaccaaaggcggcattatcgccggctccatgctggtgtttatcccggcggtcggcgagttcgtgatcccggaactgctgggcgggccggacagcatcatgattggccgcgtgctgtggcaggagttctttaacaaccgcgactggccggtcgcctcggcggtggcgattgtcatgctgctgttgctgatcgtgccgatcatgtggttccacaagcaccagcaaaaacagatgggagagcagggatga

SEQ ID NO: 213819 - DNA, 846 bp, Klebsiella pneumoniae
atgaacgacttgccggtagtacgctcgccgtggcgcattctgatcctcgtgctcgggttcaccttcctctacgccccgatgctgatgctggtgatctactcgttcaacagctcgaagctggtaacggtctgggccggatggtcgacgcgctggtatagcgaactgttccacgatgatgcgatgatgagcgcggtaggattgagcctgaccatcgccgcctgcgcggcgacggcggcggcgatcctcggtaccatcgccgcggtggtgatggtgcgctttgggcgttttcgcggctccaacggcttcgcgtttatgatcaccgcgccgctggtcatgccggacgtgatcaccggtctctcgctgctgctgctgttcgtggcgctgggacatgccatcggctggccgtcggaccgcggcatgttgaccatctggctggcgcatgtcaccttctgtaccgcctacgtggcggtggtgatctcctcgcgcctgcgcgagctggaccactccattgaagaggcggcgatggatcttggcgccgcgccgctgaaggtcttcttcgtcatcacgctgccgatgattatgccggcggtgatctccggctggctgctggccttcacgctgtcgctggatgacctggtgatcgccagctttgtctccggtcccggggccacgaccttgccgatgctggtcttctccagcgtgcgcatgggggtcaacccggagatcaacgccctggcgacgctcatcctcggcgtggtcggtattgttggttttatcgcctggtatttgatggcccgcgcagaaaagcagcgagtgcgcgatatccagcgtgcaagacaaggctga

SEQ ID NO: 213820 - DNA, 489 bp, Klebsiella pneumoniae
atggaagacattacgttgggattgtttacgaaaactcgctcatcgcatgcccgccttaacgtccctgcgctggtgcaggtggcggcctttgctattattttgattcgtggcctggatctgctgatgatccttaatctgttgggcctgcaggggctgaacgaattcatacaccgcagcgttcagacctggaacctgacgctggtcttcctcggcagcctggcgctggtgtttatcgagatctggtgcgccttctcgctggtgaaagggcgcaactgggcgcgctggatctatctgctgacgcagattatcgctgccggctacctgtgggcggcgtcgctgggctacgggtatccggagctgttcagcattcccggggaatcaaaacgagagattttccactcgctggtgatgcaaaaactgccggatctgctggttctgacgctgctgttcgtgccggcgaactgccgtcgctttttccgcctgcaataa

SEQ ID NO: 213821 - DNA, 1128 bp, Klebsiella pneumoniae
atgcattgcgcactctacgacgccggccgctgccgctcctgtcaatggctggagcggccggtcccgcaacagctcgccgataaaatggccgatctgcgcacgctgctggcggcgatcccggtcgcagcctggggcgagccggtcagcgggccggaggcggctttccgtaacaaggctaaaatggtggtcagcggcagcgttgagcgtccgctgctggggatgctgcaccgcgatggcactccggtggacctcaccgactgcccgctctatcccgccgagtttgccccggtttttgctgccctgaagccctttatcgcccgcgccgggttaacaccttacaacgtcgcgcgcaaacgcggggagctgaaatatctgctgctgaccgccagccagcagggggagatgatgctgcgcttcgtgctgcgctcagaggccaaggtggctcagctgcgcgccgcgctgccgtggctacaggcacagctgccgcagctcagcgtgatcacggcgaatatccagccggtgcatatggcaatcatggaaggtgagcaggagatcttcttcaccgaacagcaggcgctgggggaggtctttaatggggtgccgctgtggatccgcccgcaaagcttctttcagaccaatccggcggtagccagccggctgtacgccacggcccgcgactgggtgcgcgcgctgccggtccagcatatgtgggatctgttttgcggcgttgggggatttggcctgcactgcgcgacgccgacgatgcgcctgaccggtatcgagatcgccccggaagccatcgcctgcgccagacagtcagccgcgcagctggggctcagcaatctgcattttcaggcgctggactccacgcagttcgccactcacgaagcggatgccccgcagctggtgctggttaacccgccgcgccgcggtattggcgctgaactatgcgactatttaagccgcatggcgccgccctatattatctattccagctgtaacgcccgcaccatggcgaccgatatcgctcgtcttagcggctatcgcgttgagcgggtccagctgtttgatatgttccctcacaccgcccactacgaagtgctgaccctgctggtccgcgaagtttaa

SEQ ID NO: 213822 - DNA, 717 bp, Klebsiella pneumoniae
atggccaaaaccattctgctggtggaagatgacgaggatatagccacgctgctgcggctcaatcttcaggatgagggctatcagatcgtccatgaagccgacggcggccaggccctcgcccggctggagacgcaggtctgggatgcggtgatcctcgatttgatgctgcccggcgtcgatggtctggagatctgccggcgtatccgccagatgacccgctacctgccggtgattatcatcagcgctcgcaccagtgaaatgcaccgcgtgctgggcctggagatgggcgccgacgactatctggcgaagcccttttcactgctggagcttatcgcccgcgtcaaagcgctgtttcgtcgccaggaggcgatggggcagaatctgctgatggacgccgggcgcctgtcctgccatggcctgagcatcgacccgctgtcgcgcgaagtgaagctgcgcggcgagacggtggacctcacgccgcgtgaattcgacctgctgtattacttcgcccgccaccccggggaagtgttttcccgcctggcgctgctggagcaggtctggggatatcagcacgagggctatgagcataccgtcaatacccatatcaaccgcctgcgcagtaaaatcgaacgtgacccggccgagccggacatcattcttaccgtctggggaaaaggctataagttcgccccggtgacgcaagaggccgccccgtga

SEQ ID NO: 213823 - DNA, 1473 bp, Klebsiella pneumoniae
gtgatccgccgcctgagcctcagccagcggctggcgctggtggtggtttccctgctgatgctatgcgcggtggcggtatgcgccgtccagttacacagcagcgcgcagtatggcaacgccatggtgcagcgtctgtcgtccgggctggctcaacagattgtcgcccgcgagccgttgctggacgcccacggcgaggtcaaccggcaaaccctgaagtcgctgtttgaccgactgatgacctttaatcccagcgtggagctctatctgctgtcgccggatggcgacctgctggccgatgcggcgccgccgggccatatccagcgccagcgtatcgacatggcgccggtgcaggcttttctcaccggcagtgcgtcgccggtgtatggcgacgatccgcgcagtcccgacggacgaaaagtcttcagcgccgccccgctgcgcgtcgacggccaactgcgcggctacctgtatatcattttgcagggggagacgtttaatcagctggcggccgacgcctggcaaaaaacgctgtggagcattgttctgtggacgctgctgctggtggccctgtttggcctgctggcaggggggctggcatggttctgggtcacccggccggtccgcctgctcaccgcccaggtggcggcgagcggccaggacagcatcagcgccatcaaaaccctggcggcccgcaggccggagccccggcctggtaacgaggtggcggtgctcgagaaccgctttattgaccttgcccggcagattgccgatcagtgggatcggctggccgacagcgatcgccagcgccgtgaatttgtggccaatatctctcacgatttgcgcacgccgctgacttcgctgctggggtatctggaaacgctgaccctgaaggatgaatggctgaccgccgaggagcgcaggcagtatctcaccatcgccctgcgccagggcaacaaagtgcgccatctttcgcagcagctgtttgagctggcgcgactggagcatggaggcattaagccgcagcgcgagcgtttcgcgatgggggagctgatttccgacgtggcgcagaagtttgaattaactgcccgcacgcgcgaggtgaacctgcatattgatgtaccgggaccgctgccgctgattaacgccgatgtgtcgatgattgagagggtggtgaccaatctgctcgataacgcgatgcggcatactcccgtcggcggggagatccgtctggcggtctggcaggagaatcaacagcttcaggtcgaagtggcagacaacggagcgggcgtcgatgccgcgctgcgcgacgatctgttccagcggccgtcggcgttgtctacccaggcatcgcgggaggatcgcggtgggttagggttgctgattgtgaaacgaatgctggagctgcacgggggcgatatcagactggtggagtcggtaagcggggcgcggttcaggttcttcgtgccactttga

SEQ ID NO: 213824 - DNA, 732 bp, Klebsiella pneumoniae
atgaaaaagttagttctggctgcattgctcacctctttcgcgttcggcgccgctgccgcggaaaaaatcagctttggcgtctccgcaacctatccgccgtttgaatcgatggacgctaataaccagattgtcggctttgatatcgatctggcccacgcgctgtgcaaacaaatgcaggcagaatgtacctttaccaaccacgcgtttgacagcctgatcccggcgctgaagttcaagaaatatgatgcggtgatttccggaatggatattacgccggagcggagcaagcaggtggccttcaccgacccgtactacgccaactcggcgctggtgatcgccaaaaaagatgcgttccattctttcgatgacctgaaaggcaaacggatcggcatggaaaacggcaccacccaccagaaatatctgcaggataagcatcctgaggtgaagaccgtcgcctatgacagctaccagaatgcgattatcgatttgaaaaatggccgtatcgacggcgtgttcggcgacaccgcggtggtcaacgaatggctgaaaactaacccgcagctgggggcagccacgccgaaagtgaccgacccgcaatacttcggcaccggactcggcattgccgtgcgcccggataacaaggcgctgctggagaaactgaacgccgcgctgaaagcgattaaggccgacggtacctaccagaaaattagcaaccagtggttcccggagtaa

SEQ ID NO: 213825 - DNA, 669 bp, Klebsiella pneumoniae
atgctcgactatttacccgaactgctgaaaggactgcataccagcctgacgctgaccgtggcgtcgattatcgtggcgctgatcctgtcgctgatcttcaccattatcctgaccctgaagacgccggggctggtatggatggtgcgcggctatatcaccttgtttaccggtacgccgctgctggtgcagatcttcctgatctactacggcccgggacagtttccttcgctgcaggattatccgtggctgtggcatcttatctccgagccgtggctgtgcgccctgatcgctctgtcgctcaacagcgccgcctacaccactcagctattttatggcgccatccgggcgatccccgacgggcaatggcagtcctgcagcgcgctggggatgagtaaaaaggataccctggcgatcctgctgccgtacgcctttaagcgtgcgctatcgtcctattccaacgaagtggtgctggttttcaagagtacctctctggcctacaccatcacgctgatggaagtgatgggccacggccagctgctgtatggacgcacctacgacgtgatggtgttcggcgccgccgggattatctatctcatcgttaatggactgctgacgctgctgatgcgcctggtggaacgcaaagcgctggccttcgagcgacgtagctag

SEQ ID NO: 213826 - DNA, 717 bp, Klebsiella pneumoniae; identical to SEQ ID NO: 137902

SEQ ID NO: 213827 - DNA, 753 bp, Klebsiella pneumoniae
atgtttttcggggaaatgacgatgaaaaaagtactgattgccgccctgctcgcaggcatgagcctctccgcttccgccgcgcagaccattcgtttcgccaccgaggcctcttatcctccgtttgagctggtggacgccaacaaccagatcgtcggtttcgatgtcgatctggcgaacgcgttgtgtaaagagatcgacgccacctgtaccttcaccaatcaggcctttgacagcctgatcccgggactgaaattccgccgtttcgacgcggtcatggccgggatggacatcacgccggagcgtgaaaagcaggtgctgttctctaccccgtattatgacaactcggcgctgttcgtcggccagcagggtaagttcaccagcattgaccagctgaagggcaaaaaagtgggcgtgcagaacggcaccacccaccagaaattcatcaccgataaacatccagaaatcactaccgtgccttacgacagctaccagaatgcgaagctggacctgcagaacggtcgtatcgacgcggtctttggtgacaccgccgtggtgaccgaatggctgaagagcaatccgaagctggcggccgtgggcgataaagtgaccgacaaagcctatttcggcaccgggctgggcattgccgtacgtcagggcaacaccgacctgcagcagaaatttaacgctgcgctggaaaaagtgaagaaagacggcacttaccagaccatctataacaaatggttccagaagtaa

SEQ ID NO: 213828 - DNA, 729 bp, Klebsiella pneumoniae
atgagtattaaactaaacggcattaattgcttctacggcgcacaccaggcgctgttcgacatcacgctggattgcccgcagggggaaacgctggtgctgctcggccccagcggtgccgggaagagctcgctgctgcgcgtactcaacctgctggagatgccgcggtccggttcgttatccatcgccggtaaccaattcgacttcaccagagcgccgtccgataaagcgattcgcgagctgcgtcagaacgtcggcatggtctttcagcaatacaacctgtggccgcacctgacggtacagcagaacctgatcgaggccccctgccgcgtactggggttaagcaaggatcaggcgctggctcgcgcagagaagctgctggagcgcctgcgtctgaagccgtacagcgatcgttacccgctgcatttatccggcggccagcagcagcgggtggctatcgcccgcgcgctgatgatggagccgcaggttctgctgttcgatgagcctaccgcggcgctcgacccggaaatcactgcccagatcgtcagcatcattcgcgagctggctgaaaccggcatcacccaggttatcgtcacccacgaagttgaagtggcgcgcaagacggccagccgggtggtgtatatggaaaatggccatatcgtcgagcaaggggatgcctcctgcttcacgcatccgcaaactgacgcgtttaaaaactatctttcacattga

SEQ ID NO: 213829 - DNA, 516 bp, Klebsiella pneumoniae
atgcgctacaaactttttgctgtacttctcccttgcgcgctggcgctcagcgcctgtacgaccgtcaccccggcctataaagataatggcacccgcagcggcccctgcgtcgaaggcggccctgacgacgtagcgcaaaaattctacgacacccagatccagaatcgtactcaggatccggcggcgctgcgcccctatctgagcgacggcctggcgcagttactcaatgacgcccgccaggatcccgccaacagcaaattactgcaggctaatccgttctccagcagcagcaccccggcagacagcgccgtggtcgccagcgcctccaccatcccgaaccgcgatgcgcgcaatattccgctgcgcgtcgatctgaaacagggcacccagagctggaaagatgaagtgctgatgatccaggaaggccagtgctgggccgtcgatgacgttcgctatctcggcaacaacagccatgcgccagccgggacgctgcgacagagtctggagaaacgctga

SEQ ID NO: 213830 - DNA, 165 bp, Klebsiella pneumoniae
atgacgccccccttgttcatttgtttttttaatcagctcttcacgggcatcgttggatgcggtttgaccagtagaggaaatggcgccgattttggtatattgcgtatggactttatcaaaagctgttttgttaaaatttctgcggagacggcattggccgcttaa

SEQ ID NO: 213831 - DNA, 1140 bp, Klebsiella pneumoniae
atgttaacaaataagcgagagcgcgcccggcagcagcgagccgcgttgtgggccaccagagataatgtccagcgccatgcgctgtccatgagtatgccctggctggcctttgtcaatatcgcttttgcgttaatgattttcttccgcaattttatctttacctattttgataagaggctactgacgcaccgggcggttattccttatatcgaagcggcgttgattgcggttattatcatttcggccattttagtgattattgccctcacgccgcgactggcgcagggacgatatacgttgaatatcatcaccgggctgctgctggcgctcagtctgtgctggtccctgagtaattattgttttatttttttctggaccttgccctttgcctggccgctgctggtgatattaatgactaccggcctcaccgcgctgtatcaccattggcccggcataaccgcttttatgctgccgctgtgggtgaccgccttgctggcgggaatacagctccactatcacaccgagatccgctttttgatcctctgggccatttttaccgcgattttgctgtatggccgacgtattttgcagcgctggtatgacgaagcctgggatacccaccaggagaatatgcagcttattcagcggctggaaagtatcgccaaccaggatgccttaaccggaaccgctaaccgtcgggcgctcaatgcttacctggcggcgatctggcagcaaaaaacgccgctggcgctgatgatgatcgatgtcgattattttaagcgctataacgatcgctatggccatcaggctggtgatgagtgcttatcttctgtcgcgcaggtgcttaaaatggcggtccgggcggagggcgatctggtggctcgctacggcggcgaagagtttgtcgtcgtgttgcccggggtgtccttagcgcatgccaccgctattgccgagcgcattcagcagaagatccgcgaggcaggcctaccgcacgccgcttcggcggtggcgtcggaggtcaccgtgagtatcgggatcgtcgcctccgatggcacggtcccgatagagacgctgatcgcccgggcggacagggcgctgtatcaggcgaaaaataaaggacgtaatcaatggtcttattaa

SEQ ID NO: 213832 - DNA, 831 bp, Klebsiella pneumoniae
atgaaacggatgatgcggatcgtgctgctggcgctgctgctaaccggctgcgctggggaaaagggcattatcgatcgcgacggataccagctggacacccgtcatccggcgcaggctgcctatccgcgaataaaggtgttagtgatccactatacggctgacaattttgatgtctcgctggccacgttgaccgataaagaggtcagctcccactatttaattcctgaacagcccccgcgttatcagcataaaccgcggatctggcagctggtgccggaagaggatttagcctggcacgccggggtaagctattggcgcggcagtacgcgcattaacgatacctccattggcattgagctggagaaccgcggctggcagaagacggcgggcgtcaaaagttttaccccctttcatccggaacagattgcggctctgatcccgctggcgcgcgatatcatcgcccgctaccacatcgcgccgcagaatgtggtcgcccatgcggatatcgccccgcagcgcaaagacgatccggggccgttattcccctggcaacagctggcgcagcaggggatcggcgcctggcctgacgagcagcgggtggccttttatctcaacgggcggccggccagcgagccagtggaccccgaaatcgtactggatttgctctcgcgctatggctatcaggtgacgtcggagatgacccccgcgcagaagaagcgggtgattatcgccttccagatgcacttccgtccgcagcgctgggatggggtagcggatgcgcaaaccgaagcgatagccgaggcgctgttagaaaaatatggccagggttag

SEQ ID NO: 213833 - DNA, 1014 bp, Klebsiella pneumoniae
atgaaggtactggttaccggtgcgaccagcggattaggccgcaacgcagtggaatatctgcgcaacaagggcatcagcgtgcgagcgaccgggcgcaacgaagcgatgggcaagcttctgagcaaaatgggggcggaattcatcccggcagatttaaccgagctggtctcttcgcaggctaaagtgatgctcgccggtatcgataccctatggcactgctccagctttacctcgccatggggcactcagcaggctttcgatctcgctaacgtccgcgccacccgtcgtctgggcgaatggtcagtggcatggggagtgcgcaatttcgtccatatctcttcgccatcgctctattttgattatcaccatcatcgtgatatccaggaagatttccgtccacaccgcttcgccaacgagtttgcccgcagcaaggcggccagcgaggaggtgatcaacctgctggcgcaggccaacccgcatacccgttttaccattctgcggccgcagagcctgtttgggccgcacgacaaagtctttatcccccggctggcgcaaatgatgcagcattatggcagcgtcctgctcccgcgcggcggcagcgcgctggtcgacatgacctattatgaaaacgccgtacatgcgatgtggctggcgagccagccggcctgcgatcatcttccctccgcccgcgcgtggaatatcagcaacggcgaaccgcgcaccttgcggagcatcgtgcagaaattgatcgacgagctcggtatcaaatgccggatccgctcagttccctatccgatgctggatattatcgcccgcagcatggagcgctttggcgataaaaccgccaaagaacccgcgtttacccactacggcgtctccaagcttaactttgattttacgctcgatatcacccgcgcgcaggacgagctgggctatcagccggtggtgacgcttgacgacggcatcgtgcgcaccgccgcctggcttcgcgaccacggtaaactacaccgctaa

SEQ ID NO: 213834 - DNA, 1443 bp, Klebsiella pneumoniae
gtgtcgcaatcagttctggtgctcggcgccagcggctatattggccagcatttggtgcgcgcattaagcgcgcggggctatccggtgctggcggcggcacgccatatcgaccgattgcaaaaactcgctttgcccggcgttacctgccggtcagtcgatctcaatcagccgcaggacctgcctgcgctactcaccggtatcgataccctttattatctggtccacggcatgggcgaaggcggtgattttatcgcccatgagcggcgggtggcgacgtatgtgcgcgatgccctgcgtcagtcatcagtgcgccaggtgatatttctcagttcgctgcaggccccggcgcaggagcagtccgaccatctgcgcgctcgtcagattaccggcgatctcctgcgtgagtcgggcgtgccggtgaccgagctgcgggccgggattatcgtcggcgccggctccgccgccttcgaggtgatgcgcgacatggtttataacctgccggtgctaacccctccgcgctgggtacgttcgcgtaccacccctgtcgcgctggaaaacctgctcgttgacctggttgagctgctgaatcatccctccgatgcgcaccgcgtcttcgaagccgccggtccggaggtgttaagctatcagcagcagttcattcgctttatggccgtcagcggtaaacatcgcccgctcattcccattcccctgccgacgcgctggatctcggtgtggttcctcaatgtcatcacctcggtgccgccgaccatcgccaaggcgctgattcaggggctgaagcacgatctaatcgctgacgatcgggcgctgcgggcgctgatcccgcaaacgctgatccccttcgatcaggcggttcgccgcacgctgaaagaagaagagcagttagtaaactccagcgactggggctacgacgctcaggctttcgcccgctggcgaccagagtacggctactatccgaagcaggcaggttgcaccgtcgccactcaggcaagccgccaggccctgtggcaggtcgttaaccaaatcggcggggaagaggggtattttttcggcaatctgctgtggaaaacccgcggcgcgatggatctgctggtcggccaccggctggccaaagggcggccgcagcgcgcttatctgcaaaccggcgatacggtcgacagctggaaggtaattatcgtggaggaagaaaaacagctcaccctgctattcggtatgaaagcgcccgggctgggccgattaagctttaccattaacgataaaggcgatcgtcgtgaactggacgtgcgcgcctggtggcacccgcacggtatgccaggcctgatctactggctgctgatgatcccggcgcacctgtttattttccgcggtatggcgcaacgcatcgcccggctggccgaacaaatctcaggcagagtcgaaggataa

SEQ ID NO: 213835 - DNA, 1002 bp, Klebsiella pneumoniae
gtgatcgatttacgcagtgataccgttacccgtcccgggcgcgccatgctggaggccatgatggccgccccggtcggggacgatgtgtatggcgacgaccctaccgtcaatgaactgcagcgctatgccgccgacctggccggcaaagaagcggcgctatttctacccaccggcacccaggccaatctcgttggcctgctcagccattgccagcgcggcgaagagtatatcgtcggccagggggcgcataactatctgtacgaagccggcggcgcggcggtcctcggcagtattcagccgcagccgatcgacgccgcggcggatggttcgctgccgctggataaagtggcggcgaaaatcaaacccgacgatatccattttgcccccacccgcctgctgagcctggaaaacacccataacggtaaggtgctgccgcgcgactatctgcaggaagcctgggcgtttacccgccagcgcaatctggcgctgcacgtcgacggcgcgcgcatctttaacgccgtggtggcctacggctgcgagttacgcgatatcgcccaatactgcgactccttcaccatctgcctgtcaaaggggcttggcgctccggtaggctcgctgctgctcggcagcgaggcgtacattcgccgcgccgtccgctggcggaaaatggtcggtggcgggatgcgccaggcgggcatcctggccgccgccgggctgtacgcgctgaaaaataacgtgcagcgcctgcaggaggatcatgacaacgccgcgtggatggcggagcagctgcgcgctatcggcgccgacgtcacccgtaacgataccaacatgctgttcgttcgcgtcggcgaagagcaggccccggcgctcggcaagtttatgcaggcgcagggggtattgattaacgcctcgcctgttgtccgtctggtcactcacctggatgtcaaccgtcagcagctgagcgaggtggtcgcccactggcaggcttttttacaacgctaa

SEQ ID NO: 213836 - DNA, 1719 bp, Klebsiella pneumoniae
atgaaacagaccgtggcggcatacattgccaaaacgctggaacaggccggcgtgaaacgtatctggggcgtcaccggagattccctcaatggattgagcgatagccttaaccgcatgggcaccatcgactggatgcccacccggcacgaagaggtcgccgctttcgccgctggcgcggaagcgcagctgaccggcgagctggcggtctgcgccggctcctgcggaccgggcaacctgcatctgattaacggtttgtttgactgtcatcgcaaccatgtcccggtgctggccatcgccgcccacatcccatccagcgaaatcggcagcggctattttcaggaaacccatcctcaggagctgttccgcgagtgcagccattactgcgaactggtctccacgccggaacagatcccgcaggtgctggcagtggcgatgcgtaaggcagtgattaaccgcggcgtctcggtggtggtgctacccggcgatgtggcactgaaggccgccccggaaagcgccagcagccactggtatcatgcgccgctgccgacggtcaccccggcggaagaagagttgcgcaagctggtgcagcttattcgctactccagcaatatcgcgctcatgtgcggcagcggttgcgccggcgcccaccaggaactggtggagttcgcagccaaaattaaagcccccatcgtccacgccctgcgcggcaaagagcacgtggagtacgacaacccgtacgatgtgggcatgaccgggctgattggcttcgcttctggcttccacaccatgatgaacgccgataccctgatcctgctgggtacccagttcccctatcgcgccttctacccaaccgacgcgaaaattatccagatcgacatcaaccccggcagcatcggcgcacacagtaaggtcgacatggcgctggtgggcgatattaaatcgacgctgaaggcgctgctgccgctgctggaagagaaaaccgatcgccacttcctcgataaggcgctggagcactatcgcgacgcgcgaaaagggctcgacgatctggctaaacccagcgataaagccattcacccgcaatatctggcgcagcagatcagtcattttgccgatgaagatgccattttcacctgtgatgtcggcaccccgaccgtctgggcggcacgctatctcaaaatgaatggtaaacgccgcctgctgggctcgttcaaccacggctcaatggccaacgccatgccgcaggccatcggcgccaaggccactgcgccggagcggcaggtagtggccatgtgcggcgacggcgggttcagcatgctgatgggcgattttctgtcgctggcgcagatgaagctgccggtgaagattgtcatctttaacaacagcgtgctgggcttcgtggcgatggaaatgaaggccgggggctatctcaccgacggtacggagctccacgataccaacttcgcccgcatcgccgaggcctgtggtatcaaaggtatacgcgttgaaaaagcctccgaggtggatgaagcgctgcagaccgccttccgcaccgacggtccggtgctggtcgacgtcgtcgtcgccaaagaggaactggcgatcccgccgcagatcaagctggagcaggccaaaggctttagcctgtatatgctgcgggcgatcatcagcgggcgcggcgatgaggtcatcgaactggcgaaaaccaactggctcaggtaa

SEQ ID NO: 213837 - DNA, 435 bp, Klebsiella pneumoniae
atggttaaaggattgttaaacacagtaaatcgcaggctgtcacatgatgacgccggtaaactcttgttacgacttgccgtcggcggcttaatgcttttccatggaatccataagctgatagatggtgtggatggcattagcgggatgctggcggcgcagggattgcccgggtttatcgcctacggtgtgctggtgggggaagtggtcgctccctgcttgttaattctcggcgtcctgacccgcccggcggcgttggtgctggcgttcaccatggtggtggcgtggctgatggtcggcttagataagacgtttgcgcttgatgcggtgggagcgtgggccattgagaatctggtctatttctttgttggcgcactggcgattgcgctactcggcgcggggcgttattcgctggccggtcagtcggcctggcggtaa

SEQ ID NO: 213838 - DNA, 969 bp, Klebsiella pneumoniae
atgactatgccaacctcccagtgcccgtggcggatgcaggttcaccacattcaccaggaaaccccggacgtgtggaccctttcgctgctgtgccacgattactatccgtaccgcgctggccagtacgctctggttagcgtgcgtaactcggcggaaacgctgcgcgcctataccctctcctcgacgccgggggtcagcgaatacattacgctgaccgttcgccgtattgacgagggtacgggttcgcagtggttgacccgcgaggtcaaacgcggcgattacctttggctgtccgatgcgatgggcgagtttacctgcgacgataaagcggaagataaattcctgctgctggccgccggttgcggcgtgacaccgatcatggcgatgcgccgctggctggctaagtatcgaccgcaggccgacgtacaggtgatttataacgtgcgttcgccggaagatgtaatctttgccgaagagtggcgcaactacccggtcaccctggtagcggagcacaatgcgacgcatggttttgtcgccggccgtctgacccgggagctgctgcagagcgtgccggatttagccagccgcaccgtgatgacctgcggcccggcgccttatatggagaaggtcgagcaggatgttgccgccctgggcgtcacccgcttctttaaggaaaaattcttcaccccggtggctgaggccgccaccagcgggctgaaatttactaaactgcagccggcgcgcgagttttacgcgccggtgggcaccacgctgctcgacgcgctggagagcaataaagtgccggtgaccgtcgcctgccgcgccggcgtctgcggctgctgcaaaaccaaagtggtttccgggaagtacagcgtcaccagcaccatgacgctgaccgacgccgaaatcgccgacggctatgtgctggcctgctcctgtcatccgcagagcgatctggttctcgcctga

SEQ ID NO: 213839 - DNA, 1653 bp, Klebsiella pneumoniae
atgttttgtgtgcaatgtgaacaaaccattcgtaccccagccggcaacggctgctcttacgcgcaggggatgtgcggtaaaacagcggaaacctcggacctgcaggatctgctgattgcgtcactgcaaggcctgtccgcctgggcgcttaaagcgcgcgaatatggcattatcgatcatcaggtcgacagctttgccccccgcgccttcttctccaccctgactaacgttaacttcgattccccgcgcatcgtcggctacgcccgccaggcaattgccctgcgtgaggcgctgaaagcgcaatgcctggcgatcgatgccagcgccgcggtcgacagcccggtcgccgacctgcagctggtcagcgacgatctgggcgacctgcagcgtcaggcggcggactataccccgaataaagataaagccgccatcggcgaaaatattctcggtctgcgcctgctgtgcctgtacggtctgaagggtgcggcggcctatatggagcacgcccacgtgctcggccagtacgacaacgctatctatgcccagtaccataaaatcatggcatggctgggcacctggcctgcggatatgaatgcgctgctcgaatgttcgatggaaatcggccagatgaacttcaaagtgatgagcatcctcgacgccggtgaaacgaccaaatacggccatccgacgccgactcaggtcaacgttaaagcaaccgaagggaagtgcatcctgatctccggccacgatctgaaggatctgtgtaacctgctggagcagacggaaggcaccggcgtcaacgtctatactcatggcgaaatgctgccggctcacggctatccggagctgcgtaaattcaaacatctgattggcaactacggcagcggctggcaaaaccagcaggtggagttcgcccgcttcccgggccccatcgtgatgacctctaactgcatcatcgacccgaccgtcggcgcctacgacgatcgcatctggactcgcagcatcgtcggctggccgggtgtgaaccatctggaaggtgaagacttctccccggtcattgcccaggcgcagcagatggcgggcttcccgtacagcgaaatcccgcatctgatcaccgtcggctttggccgtcagaccctgcttggcgcggcggatacgctgatcgatctggtcagtcgtgaaaaactgcgccatatcttcctcgtcggcggctgcgacggcgcccgcggggagcgtaactacttcaccgatttcgccaccagcgtgccggatgactgcctgatcctgaccctggcctgtggtaaataccgcttcaacaaactggactttggcgatatcgaagggctgccgcgcctggtcgacgccgggcagtgtaatgacgcttactcggcgattattctggcggtcacgctggcggagaaactgggctgtggcgtcaacgatctgccgctgtcgctggtgctctcctggttcgaacagaaagcgatcgtcatcctgctgacgctgctgtcgctgggtgtgaaaaacatcgtcaccggtccgacggcacctggtttcttcacaccggatctgctggcggtcctcaatgagaagtttggtctgcgttccgtgaccaccgtggaacaagatatgcagcagctgctgagcgcttaa

SEQ ID NO: 213840 - DNA, 900 bp, Klebsiella pneumoniae
atgttttcgggactctttattattctgttgccgctggtcgtcggctatttactgcctcttcgtcactcctccgcgctaaagctgataaaccgcatgctcagctggattgtctatgtaatccttttttttatgggtatcagcctggcgttcctcgacaatctggccagcaacctgctggcaatattgcattacgccgcggtgagcgtggttatcattttactgtgtaatatcgccgcactgctgtggctggaaagtaaaatgccatggcgcagtcagcatcgtcaggagaaattaccctcgcgcctggccatggccctggaatcgctgcagctgtgcggtgtggtcgtgctcggttttctgctcggtctgaccagactgccttttttacagcacgcgacagaagccagcgaatatacgttgatttttctcctgttcctcgttggtatccaattacgcaataatggaatgagtctgcgacaaatagtccttaaccgccggggaatgatcgtcgccgtggtggttacggccagttcattactcggcgggatacttaacgcctttattctcggtctgccgttaaagaccggtctggcaatggccagcggtttcggctggtattcgctctccggtattttactcaccgaatcctttggcccggtcatcggtagcgcggcgttctttaacgatctctgtcgcgagctgctggccatcatgttaattccgggccttattcgccgcagccgctccacggcgctggggctgtgcggcgccacctcgatggacttcaccttaccggtactgcagcgttccggcggcgtcgaaatcgtccctgccgccatcgtgcacggttttctgcttagtttgctggtcccgatcctgatcgccttttttaccgcctga

SEQ ID NO: 213841 - DNA, 696 bp, Klebsiella pneumoniae
atgttcagaaaattagcagccgaatgcttcggcaccttctggcttgtatttggcggctgcggtagcgccgtgctcgccgcggctttccccgagctgggtattggttttgccggcgtcgcgctggcatttggcttaacggtattaaccatggcgtttgcggtcggccatatttccggggggcatttcaacccggcggtcaccttaggcctgtgggccggcggccgttttccggcaaaagaggtcattggctatattatcgctcaggtggtcggcggaattattgccgcggcggtgctgtacgtggttgccagcggtaaagccggctttgatgccgccgccagcggctttgcctccaacggctatggcgaacactccccgggcggcttctccatgctgtcggctatcgtcattgaaattgtcctgacctgcggcttcctgctggttattcatggcgcgaccgataaacatgcgccggcgggctttgcccccatcgccatcggcctggcgctgaccctcatccatttgatcagcattccagtcaccaatacctcggtcaacccggcgcgcagcaccgcggtggcaattttccagggcggctgggcgctgcagcagctgtggctgttctgggtcatgccaatcgtcggtgggatcctcggcggcgtgctgtatcgcaccctgctggaaaaacgcgattaa

SEQ ID NO: 213842 - DNA, 1659 bp, Klebsiella pneumoniae
atgcttcttgagcgcgtagaaatcgtcggttttcgcggtatcaatcgtttgtcgttgatgctggagcaaaataacgtcctgatcggggagaacgcgtgggggaagtccagtctgcttgatgcgctgaccctgcttttgtcgccggagttcgatctttatcactttattcgcgatgatttctggtttcccccgggcgacatccaggggcgcgaacaccatttgcatattatcctgaccttacgcgaaacggagccaggccgccatcgggtccggcgtttccgtccgcttcagcgctgctgggtgccttgcgatgacgggtatcaccgggtgttctatcgcctggagggcgagctcgccgaagatgacagcgtgatgaccctgcggagctttatcgatggtgaaggcgaagcgttggtgctggaggagattgatgagctggcccgacacctggtgcgtttgatgccggtgctgcgcctgcgcgatgcgcgctttatgcgccgcatccataacgggacggtaccgcactcgccgcagatagagatcaccgcccgtcagctggattttctctcccgcgaactggtcagccatccgcaaaatttatcggacggtcagatccgtcaggggctatcggccatggtgcaactgcttgagcattactttgccgagcaaagcagcgctcagacgcggcatcgcctgatgcggcggcgctcccatgatgaacagcgcagttggcgttatctggatattatcaaccggatgatcgacaagcccggcgggcgcagccatcgggtgatcctgctggggctgtttgccaccctcctgcaggcgaaagggacggtgcgcctcgatcgcgacgcgcgaccgctgctgttgattgaagatcccgagacccgtctgcatccgatcatgctttccgtcgcctggcacctgctgaatttgttgccgctgcagcgtgtgaccaccaccaactccggagagctgctgtccctgacgccggtagagcaggtctgccggctggtgcgtgagtcgacgcgggtatcggcgtggcggttggggccgggcggaatgaatgccgaagagagccggcgcattgcttttcacatccgcttcaatcgcgcctcatcgctcttcgcccgctgctggctgctggtggagggagagacggaaacctgggttatcaacgaactggcccggcagtgcggtcatcattttgatgctgaaggggttaaggtgatcgaattcgcccagtccggcctgaagccattgatcaagtttgcccgccggatggggatccagtggcacgtgctggtggacggcgatgaggcggggaaaaaatatgccgcgacggtacgaggtctgcttaataacgatcgcgagctggagcgcgaccatctgaccagtctgccggcgctggatatggaacactttatgtatcgtcagggatttgatgacgtttatcatcgggtggcgcagatcccggataatgtcccgatgaatatgcggcgggtgatcaccaaagccatccatcgctcatccaagccggacctggcgattgaggtggcgatggaggccggccgccgtggcgtggacgctgtgccgacgctgctgaagaaaatgttctcacgggtgctgtggctagcccgcggtcgtgccgattaa

SEQ ID NO: 213843 - DNA, 1116 bp, Klebsiella pneumoniae
atgaaagtgaagggaaaacgcaggaccgtctggtggctgttggcgatcgttgtgctggggctggctatctggggatggcggatcctcaatgcgccgctgccgaactaccagacgctggtagttcgcaaaggggatctccagcagagcgtgctggccaccggcaaactggatgccctgcgaaaagttgacgtcggcgcccaggtcagcggacagctgaaaacgctgcacgtcaatattggcgataaggttaaaaaggatcagttgctgggggttatcgatccggagcaggcgcaaaaccagattaaagaggtggaagcgacgctcatggagctgcgcgcccagctcaatcaggcgcgcgcggagagcaaactggcgcaagtgactctggcccgtcagcagcagctggcgcagcgccagctggtctcgcggcaggaccttgataccgcggccaccgatttggcggtgaaacaggcgcagatcggcactattgaagcgcaaataaagcgtaaccaggcgacgctcgatacggcgaagaccaacctcgattacacgcggatcctggcgccgatggccggcgaagtgacgcaaattaccaccctgcagggacagacagtgatcgccgcccagcaggcgcctaacattctgacgctggcggatctcagcaccatgctggttaaagcgcaggtctctgaagcggatgtcatccacctcagaccggggcaaaaagcgtggtttaccgtgctgggcgacccgcttacccgttatgaaggtaaactgaaagacattctgccgacgccggaaaaagtgaatgacgccatcttctattatgcccgcttcgaggtaccgaacccgcaggggatcctgcgcctcgacatgaccgcgcaggtgcacattcagctggctgaggtgaagaacgtgattactatcccgctgagcgccctgggcgacgcggtaggcgataaccgctaccacgttcgactgttgcgcaccggtgaggtcaaagagcgtgaggttatcattggcgcccgcaatgataccgacgtcgcagtggtgcaaggtctggaagagggcgacgaagtgatcgtcggcgagagcgcgagcggggcggcaaaatga

SEQ ID NO: 213844 - DNA, 1941 bp, Klebsiella pneumoniae
atgacggcgctgcttgagctgcgagatatacgtcgcagctatccttccggcgacggcagcgttgaggtcctgaaggggatcaccctcagcatccatgcgggtgagatggtggcgatcgtcggggcctccggctcgggaaaatcgacgctgatgaatatccttggctgcctcgacaaacccaccagcggcacctatcgggtggcgggaaccgatatcgcgcagctggatggcgatgcgctggcccgtctgcggcgggaacactttggctttatctttcaacgctaccatctgctgtcccatctgaccgccgcgcagaatgtcgaagtgccggcggtgtatgccggcagtgaacggcgcgcgcgcctggcgcgcgctcatgagctgctggtgcggctggggctgggcgagcgcgccgactatcaaccgtcacagttgtctggcggtcagcagcagcgggtcagtatcgcccgcgccctgatgaatggcggggaggtgatcctcgctgatgaaccgaccggcgcgctggacagccattccggcgaagaggtaatggcgatcctgcaccagctaaaagcgcaggggcacacggtcatcattgtgacccacgatccgcaggtcgccgctcaggcggagcggatcgtcgagatccgcgatggcgagatcgtccgcaacccgcccgccagccgccagggcggcggactgcgcgcccgtccgcaggcggagccttcggcgtggcgtcagtttaccagcggctttcgcgaagcgctggtgatggcctggcgagcgatggcggcgaataaaatgcgtaccctgctgaccatgctcggcattattatcggtattgcctcggtggtgtcgatcgtggtggtgggggatgccgccaagcagatggtgctggcggatattcgcgccatcggcaccaataccattgatgtgtatcctggtaaggattttggcgacgacgacccgcgctatcagcaggcgctgaagtatgacgatttgctggcgatccagaagcagccgtgggtgcgctccgccacgccggcggtttcaaaaagcctgcgcctgcgcgccaacaatattgacgttgccgccagtgcggagggggtcggtccacagtattttaatgtctacggcatgacctttagcgaaggcaataccttcaatgaactgcagctcaacagtcgggcacaggtggtagtgctcgacagcaatacccgtcggcagctgtttcccaataaagcgaaagtggtgggagaggtgattctggtgggcaatatgccggccacggtgattggcgttgcggatgaaaaacagtcgatgttcggcagcagcaaaattctccgcgtctggttgccctacaccaccatggcgggaagagtaatgggccagtcgtggctgaactccatcactgtgcgcgttcatgaaggctacgacagtgaaaccgcagagaaacagctgctgcgtctgctggagctgcggcatggtaaaaaagatgtattcacctggaatatggacagcgtcttgaaaaccgccgaaaggaccacacataccttacagctgttcctgacattggtggcggtgattgccctggtggtcggcgggattggcgtaatgaatattatgctggtgtcggtgaccgaacgaacccgggagatcggcatccgcatggcggttggcgcccgggccagcgatgtgctgcagcagtttctcattgaagcggtgctggtttgcctggtcggtggcgcgctgggcgtagcattgtcgctgatgatcgcctttattttacagctgtttctccccggctgggagattggtttttctccgctggcgctgctgacggcgtttctctgttcgacgctgaccggggtgctgtttggttggctgcctgcgcgcaacgcggcgcggctcgatccggtggatgccctggcgcgagaatag

SEQ ID NO: 213845 - DNA, 222 bp, Klebsiella pneumoniae
atggaaatgggtactgttaagtggttcaacaatgccaaagggttcggttttatctgccctgagggcggcggcgaagacattttcgcccattactccaccatccagatggatggttacagaacgctaaaagccggacaagccgttcggtttgatgttcaccaggggccaaaaggcaatcacgccagcgtgatcgtccctgtggaagcggaaacggctgcataa

SEQ ID NO: 213846 - DNA, 318 bp, Klebsiella pneumoniae; identical to SEQ ID NO: 137668

SEQ ID NO: 213847 - DNA, 2280 bp, Klebsiella pneumoniae
atgctcaatcaagaactggaactcagtttaaatatggctttcgccagagcgcgcgagcaccgtcatgagtttatgaccgtcgagcacttgctgctggctctgctaagcaacccctcggcccgtgaggccctggaagcgtgttcagtggacctggtggcattgcgtcaggaacttgaagccttcatcgaacaaaccacacccgttctgccagccacggaagaagagcgcgacacccagccgacgctaagcttccagcgtgtgctgcagcgcgccgtcttccacgtacaatcttctggccgcagcgaagtgaccggcgccaacgtgctggtggcgattttcagcgagcaggagtcgcaggccgcctacctgctgcgtaaacatgaagtgagccgtcttgatgtggtgaacttcatttctcatggtacacgcaaagacgagccgagccagtcttccgataacagcggaagccagcctggcaatgaagagcaagccggcggggaggaacgtatggaaaacttcaccaccaacctcaatcagcttgctcgcgtcggcggcattgatcccctgatcggccgtgaaaaagagctggagcgcgcgattcaggtcctgtgccgtcggcggaaaaataacccgctgctggtgggggaatccggcgtcggtaaaaccgcgatcgccgaaggccttgcctggcgtattgtgcagggcgatgtgccggaagtgatggccgactgcactatctactcgctcgacattggctctttgctggcagggaccaaatatcgtggcgattttgaaaaacgcttcaaagcgttgctcaaacagctggagcaggataccaacagcatcctgtttattgatgaaatccacaccattatcggtgcgggggcggcgtctggcggccaggtcgatgctgctaacctgatcaaaccgctgctttccagcggcaagatccgggtgatcggctccaccacttaccaggagttcagcaacatctttgaaaaagatcgtgcgctggcccgccgtttccagaagatcgatattaccgaaccgtcggtggaagagacggtccagattatcaacggcctgaagccgaagtacgaagcgcaccatgatgtgcgttataccgccaaagcggtgcgtgcggcggtagaactggcggtgaaatacattaacgatcgtcatctgccggataaggcgattgacgtcattgacgaagcgggcgcgcgggcgcgcttaatgccggtcagcaagcgtaagaaaacggttaacgtggcggatatcgaatcagtggtggcgcgcattgcgcggatccctgagaagagcgtctcccgcagcgatcgcgacacgctgaaaaacctgggcgaccgtctgaaaatgctggtctttggacaggataaagccatcgaggcgctgaccgaggctattaaaatggcgcgcgccgggctgggccatgagcacaagccggtgggatcgttcctgttcgccgggccgaccggggtcgggaaaaccgaagtgaccgtccagctggcgaaggcgttgggtattgagctgctgcgctttgacatgtccgaatatatggaacgtcataccgtcagccgtttgatcggggcgcctccaggctacgtcggcttcgatcagggcgggctgctgaccgatgcggtgattaaacatccgcacgcggtattgctgcttgatgagatcgaaaaagcgcatccggacgtgttcaacctgctgctgcaggtgatggataacgggacgctgaccgataataacggccgtaaagcggacttccgcaacgtggtgctggtgatgaccaccaacgccggggtgcgggaaaccgagcgtaaatcgattggccttattcagcaggacaacagtccggatgcgatggatgagatcaaaaagatctttacgccggagttccgtaaccgcctcgacaacatcatctggttcgatcatttgtctaccacggtgatccatcaggttgtcgacaagtttatcgtcgagctgcaggtccagctggaccagaaaggcgtctccctggaagtgagtcaggaagcgcgcgactggctggcgacgaaaggctacgatcgggcgatgggggcacgtccaatgggacgcgtcattcaggacaacctgaaaaaaccgctggcgaacgagctgctgtttggctcgctggtcgacggtggtcaggtcactgtctctctggacagcgacaaaaatacgctgacttacgacttccagagcgcgccgaagcacaaaccggaagcggcccactaa

SEQ ID NO: 213848 - DNA, 219 bp, Klebsiella pneumoniae; identical to SEQ ID NO: 137666

SEQ ID NO: 213849 - DNA, 702 bp, Klebsiella pneumoniae; identical to SEQ ID NO: 137665

SEQ ID NO: 213850 - DNA, 1722 bp, Klebsiella pneumoniae
atgcgcgcacttttaccctatctggcgctctataaacgccataaatggatgctgctgcttggcgtcgtgctggccattgtgaccctgctggccagcatcggcctgctgacactctccggctggttcctctccgcctcagcggtggtgggcgtcgccgggatctacagttttaactatatgctgcctgccgcgggcgttcgcggcgcggcaattatccgtaccgccgggcgctactttgagcgcctggtcagccacgacgctacctttcgcgtgctgcagcacctgcgcgttttcaccttcagcaaactgctccccctctctccggcggggctggcgcgctttcgccagggtgagctgctcaaccgggtggtagccgacgttgacaccctggatcatctctacctgcgggtcatttcgccgctggtcggcgcgctggtggtgattgtggtcgtcacctgcggattaagtctgctcgacgtcaccctcgcgctgacgctcggcggtatcatgctggcgaccctgctggttatgccgccgctgttctatcgcgcaggtaagccagccggcgaaagtatgacgcagctgcgcggccagtatcgccaacagctcaccgcctggctgcagggtcaggcggagctgatggtatttaacgccagcgaccgctaccgcgcacaaatggaaaagaccgagctcagctggcaggatgcacagcggcgccaggccgagctgaccgcgctttcgcaggcggtaatgctgttaatcggtggcatcgccgtggtggccatgctctggctggcctcagacggcgtcggcggcaatagtcagcccggggcgctgatcgcgctattcgtattctgcgcgctggcggcttttgaagccctggcgccagtcactggcgctttccagcatttaggccaggtgatggcctccgcgcggcggatctcgcagattaccgaccagcagccggaggtcacctttgtcgaagatgaagccagtccgccagcgcaggtggccctaacgcttcgggaggtcaccttccgctatcctcagcagccctcccctgccctggagaatatttccctgcagattgccgccggagagcacatcgccattcttggccggaccggctgcggaaaatcgacgctgttgcagttgcttacccgcgcctgggacccgtcacagggagagattctgctcaacaatcagccgctctccggcctcagcgaagccactctgcggcaggcaatgagcgtagtgccgcagcgcgtgcacctgttcagcgccaccctgcgcgacaacctgctgctggcggcgcctgaagcggatgacgctcatctcagcgctacccttgagaaggtgggcctcgaaaaactgctgcaagatggtggtcttaacggctggctgggcgaaggcgggcgtcagctctccggcggcgaactgcgccgactggccattgcccgcgcgctgctccacgatgcgccgctgatgctgctcgatgaaccgacagaaggtctggatgcggccaccgaaagccagatcctgcatctgttggcagatgtcatgcgcgacaaaaccgtgctgatggtgacccatcgcctgcggggcctggcgggttttaatcagataatagtcatggacaacggccagataattgagcaaggtagtcacgcggagctgctcgctaaacagggccggtacttccagtttaaacagcgtctgtag

SEQ ID NO: 213851 - DNA, 1767 bp, Klebsiella pneumoniae
atgaataaaacccgtcaacaagagttaacccgctggttaaaacagcaaagcattatctcccgtcgctggttgatgatttcccgcctgcttggcgtggcgagcggtctgctgatcgtggcgcaggcctggttcctggcgcggatcctgcaccggatggtgatggagaatattccagcgaccgccctgctgctgccgctcacgctgctggtgctgatctttgtactacgcgcctgggtggtctggctgcgtgagcgggtcggctttcaggccgggcagcatattcgctatgaaattcgccgccaggttcttgaccgcctccagcaggcaggcccggcgtggatccagggcaaaccggccggcagctgggcaacgcttattcttgagcaaatcgacgacatgcacgactattatgcccgctacctgccccagatgacgctggcggcctgcgtaccgctgctgatcgttattactatttttccgattaactgggccgccgcgctaatccttctcggcaccgccccgctgatcccgcttttcatggcgctggtcgggatgggcgccgccgacgccaaccggcgtaacttccaggcgctggcccgcctcagcggccacttcctcgaccgcctgcgcggcatggaaaccctgcgtatttttcatcgcggtcaggcagaaaccgataatattcgcgacgcctcgcaggattttcgccaacgcaccatggaagtcctgcgtctggccttcctctcctccggggttctggagtttttcacctccctctccattgcgctggtagcggtgtattttggcttttcttaccttggcgagctgaacttcggccactatggcgcgggcgtcacgctgatggcgggattcctgacgctgatcctcgccccggaatttttccagccgttacgtgacctgggtaccttctaccatgccaaagctcaggccgtgggcgccgcagacagcctgaaaacgtttatggaaacgccgctgacccaggtagagcgtggcgagaaaacgttaaatgacaacgatctgattagcgtggaagcgcgcgacctggtgatcaaatctccggaaggtaaagttctggcggggccgcttaattttgcgctgcccgccggcgctcgcgtggtgctggtcggccagagcggatccgggaaaagctctttgctgaatacactgctcggctttctgccctatgaggggtcgctgatggtcaacggcgtagagctgcgcgagctggacgctgagcgctggcgccgcctgctgagctgggtaggacagaatccgcagttgcctgccgccacgctgcgggaaaacgtgctgctggcgtggcccgaagctagcgaagcacagcttaggctggcgctggacaaggcctgggtcagcgagtttatcgccctgctgccgcaggggatccataccgccgtaggcgatcaggcggggcgtctgtcggtaggccaggcgcagcgtatcgcggtcgcccgcgcgctgttggtgccgtgccgcctgctgctgctggatgaacctgccgccagccttgacgcccatagcgaacagcgagtcatgcaggccctgacccacgcctccagtgagcaaaccacgctgctggtcacccatcagcttgaggggctggccgactgggacgacgtctgggtgatgcaggacggacagattatcgaacaaggcgactacgccacgctggcccgtgctggtggggtcttctcggcgctgctggcccatcgtcaggaggagatttaa

SEQ ID NO: 213852 - DNA, 996 bp, Klebsiella pneumoniae
atgtatgccaattattatggggatctcatgggcacagccaaacacagtaaactgcttatccttggttctggacctgcgggatacaccgcggcggtctatgccgcacgcgccaacctgcagccggtgctgatcaccgggatggaaaaaggcggtcagctgaccaccacgacggaagtggaaaactggccaggcgatccgaacgatctcaccggtccgctgctgatggagcgcatgcacgagcatgccgcaaaatttgaaaccgagatcattttcgaccatatcagccgcgtcgatttgcaaaaccgcccgttccgtctgacaggcgacagcggcgagtacacctgtgacgcgctgatcatcgccaccggcgcttccgcccgttacctgggcctgccttccgaagaagccttcaaaggccgcggcgtttccgcgtgcgctacctgcgacggattcttctatcgcaaccagaaagtggcggtgatcggcggcggcaacaccgcagtggaagaggctctgtatctgtcgaatatcgcctctgaggtacacctgatccaccgtcgcgattccttccgtgcggaaaaaatcctcatcaaacgcctgatggataaagtggcaagcggcaacatcgtgctgcataccgatcgtaccctcgaagaggtgaccggcgaccagatgggcgtcagcggcctgcgcctgcgcgataccaaaaacagcgacaatgtcgagtccctggaagtggctggtttatttgtcgccatcggccacagcccgaacaccgccatctttgagggccagctggagctggagaacggctacatcaaagtgcagtccggtatccacggcaatgcgacccagaccagcatcccgggcgtgttcgccgccggcgatgtcatggaccatatctatcgtcaggccatcacttctgcgggcaccggctgcatggcggcgctggacgcggagcgttacctcgacggtttggctgacgcttgcaaataa

SEQ ID NO: 213853 - DNA, 495 bp, Klebsiella pneumoniae
atggtagatagcaagaagcgccctggcaaagatctcgaccgcattgatcgtaacatcctgaatgaattgcaaaaagatgggcgaatttctaacgtcgagctttctaaacgggtgggactttctccgacgccttgccttgagcgtgtgcgtcgtcttgaaagacagggttttattcagggctatacggcgctgctcaacccgcattatctggatgcatcacttctggtatttgttgagattactctgaatcgtggcgcaccggatgtgtttgagcaatttaacgccgcagtacaaaaacttgaagaaattcaagagtgtcatctggtttccggtgatttcgactatctgttgaaaacccgtgtaccggatatgtcagcgtatcgtaaattactgggcgagaccttgctgcgcctgccgggcgttaacgacacccctacctacgtggtaatggaagaagtcaagcaaagtaatcgtctggttattaagacgcgctaa

SEQ ID NO: 213854 - DNA, 4110 bp, Klebsiella pneumoniae
ttgagccaggaatacaccgaagacaaagaagtcaaactaaccaaactcagcagcgggcgccgactccttgaggcgatgctcatcctttgctccctcttcgccatctggctgatggcggcactactgagctttaacccctcggaccccagctggtcgcaaacggcatggcatgagcctattcataatttaggcggcgcccccggtgcgtggcttgccgataccctctttttcatttttggcgtcatggcctacaccatcccggtgatcatcatcggcggatgctggtttgcctggcggcatcaggaaaacgacgaatacattgattattttgccgtttcccttcgcctcatcggtgcgttagccctgatcctgacctcctgtggtctggcggcgattaacgccgatgatatctggtacttcgcctccggcggggtgatcggcagcctgctgagcaccacgctgcaacccctgctgcacagcagcggcggcaccatcgccctgttgtgtatctgggcggccgggctgacgctgttcaccggctggtcgtgggtcagcattgcggaaaagctgggcggcggcatcctgtccgttctcacctttgccagcaaccgtacccgtcgggatgatacctgggtcgatgaaggcgaatacgaagacgacgaggaagagtacgacgacgaagaggcggccaggccgcaggaatcgcgtcgcgcccgtatcttacgcagcgcgctggcgcggcgtaagcgtctggccgagaagtttaccaaccctatggggcgtaaaaccgacgctgcgcttttctccggcaaacggatggatgacggcgaagaggtggtgcaatacagcgccagcggggcgcctgttgccgccgacgatgtactgttttccggcgccagcgccgcgcgtcccgcagaggatgatgtgctgttctccggcgccagcgccgtgcgcccgggcgatttcgacccttacgatccgttgttgaatggccacagtatcgctgagccggtaagcgcagcggcggcggctactgccgcgccgcaggcgtgggcagaatcaccggtgggccatcacggcgctgcgccagcttatcagccggaagccagctatccgccgcagcaggcctatcagcctgaacccgctccgttccagcaggctgcttatcagccgccagcggggcaaaccgcaccgcaggcgtatcagcctgagccagcgccgtatcaacagccggtttacgatccgcgtgccggtcaacctgcgccgcaggcctatcagcctgagccagcgccgtatcagcagccggcttacgatccgtatgccggtcaacctgcgccgcaggcctatcagcctgagccagcgccgtatcagcagccggcttacgatccctatgccggtcagcctgcgcctcagacctatcagcagccggcttacgatccgaatgccggtcagctcgcgccgcagacctatcagcagccggcttacgatccgaatgccggccagcccgcgccgcagccgtatcagccggagccagcggcgtatcagccgcaaagcgcgccagttcccccaccggagccagagcccgaggtcgtgcaggaggaagtgaaacgtccgccgctctattatttcgaggaagtggaagagaagcgggcgcgcgaacgcgagctgttggcctcctggtatcagccaattcctgagccggaaagtccgattgccactaaaccgctgacgccgccgaccactgcgtccaaaccgccagtggagacaaccgtagtctctgcggtagcggctggggtgcatcaggctaccgccgccagcggcggcgcggcggcagcaacctcgtccactgccgcatccgctgcggctacgccattgttcagcccggcgtccagcggcccacgggttcaggtgaaagagggcatcggtccaaaactaccgcggcccaatcgcgtgcgtgttcctacgcgtcgggaactggcctcctacggcatcaagctaccgtcgcagcgggaggcggaacagcgcgcgcggcaggcggagcgcgatccgcattatgatgatgagctgctctcggatgaggaagcggatgctatggagcaggatgaactggctcgccagttcgccgccacccagcagcagcgctacggtcatcgctgggaagacgataacgcgactgatgacgatgaggccgacgccgccgcggaagcggagctggcgcgtcagtttgccgctacccagcagcagcggtacgctaccgagcagccgccgggcgccaacccgttctcgccggcagattatgaattctcgccgatgaaaacgttggtcaatgacggcccgagcgaaccgctgtttacgccgacgccggaagtccagccgcagcagccggcccagcgctatcaacaaccggcggccgctccgcagcagggttatcaacctgcgcagcatcagccgatacaccatcagcctgtgccgccgcagccgcagtcctatccgactgcgtcgcagcccgtgcagccgcaacaaccggttgcccctcaggggcatcagcctgccgcccctgcgccgcaggagagcctgatccacccgctgctgatgcgcaatggcgatagtcgaccgctgcaaaagccgaccacgccactgccgtcgctggatctgcttaccccgccgccgagtgaagtcgagccggtggatacctttgctctcgagcagatggcacgcctggtggaagcgcgactcgccgatttccgcattaaagcggatgtggtgaactactcaccggggccggtgatcacccgcttcgaactgaatctggcgcctggcgttaaggccgcacggatctctaacctgtcacgggacctggcgcgatcgctgtcaacggtcgccgtgcgcgtggtggaggtgatcccgggcaaaccgtatgtcgggcttgagctgccgaataaaaaacgccagaccgtctacctgcgtgaagtgctcgacaacgccaagttccgtgataacccatctccgctcaccgtggtgttgggtaaagacatcgctggcgatccggtagtagccgatctggcgaaaatgccgcatctgctggtggccggtaccaccggttccggtaagtctgttggcgtcaacgccatgatcctcagcatgctctacaaggcgcagccggaagatgtgcgtttcattatgatcgacccgaaaatgctcgagctgtcggtctacgaaggaattccgcacctgctgacggaagtagtcaccgacatgaaagacgccgccaatgcgctgcgctggagcgtcaatgagatggagcgccgctacaagctgatgtcggcgctgggcgtgcgtaacctcgcgggctacaacgagaagatcgccgaagccgcgcgcatgggacgtccgatcccggatccgtactggaagcctggcgacagcatggacgccgtacatccggtgctggaaaaactgccgtacatcgtggtgctggtggatgaattcgccgatctgatgatgaccgtcggcaaaaaggtggaagagctgatcgctcgcctggcgcagaaagcgcgcgcggcggggatccacctggtgctggcgacacagcgtccgtcggtagatgttattaccggcctgattaaggccaacatcccgacgcgcatcgcctttaccgtgtcgagtaaaattgactcacgtaccattctcgatcagggcggcgcggaatcgctgctgggtatgggggatatgctttactccgggccgaactctaccacgccggtgcgtgtccacggggcgtttgtgcgcgaccaggaagtccacgccgtggttcaggactggaaagcccgcggtcgcccgcaatatgtggatggcattacctccgacagcgaaagcgaaggcggcggtggcggcttcgacggcggggaagagctggatccgttgttcgatcaggcagtcaactttgtgaccgagaagcgcaaagcgtcgatttccggggttcagcgtcagttccgcatcggctataaccgtgccgcgcgtattatcgaacagatggaagcgcagggtatcgtcagcgagcagggccataacggtaaccgcgaagtgctggcgccgccgccctttgaatga

SEQ ID NO: 213855 - DNA, 612 bp, Klebsiella pneumoniae; identical to SEQ ID NO: 137746

SEQ ID NO: 213856 - DNA, 1344 bp, Klebsiella pneumoniae
gtgagcaatctgtcgctcgatttttccgacaacgcgtttcaacctctggccgctcgcatgcggccagaaaatttagcgcagtatattggccagcagcacctgctggcgccgggtaaacccctgccgcgggccattgaggccgggcacctgcattcgatgatcctctgggggccgccgggtaccggcaagaccactctggcggaagtgattgcccgctacgccagcgccgatgtcgaacggatctcagcggtaacctccggggtgaaagagattcgcgaggctattgagcgcgcgcggcaaaatcgcaacgccggccggcggaccatcctgtttgttgacgaagtgcatcgctttaataaaagccagcaggatgcctttctgccgcatattgaagacggcaccattacttttattggcgcgaccaccgaaaacccctcctttgagcttaactcggcgctgctctcccgcgctcgcgtctacttactgaaatcgctcaccaccgacgatatcgagcgggtgcttgaccaggcgatgaacgataaaacccgcggctacggcggccaggatatcattttgccggatgagacccgcagggccattgccgagctagtgaacggcgacgcgcggcgagcgctgaataccctggaaatgatggccgatatggccgaaagcgatgactcgggcaagcgggtgctgaaggcggaactgctgaccgagatcgccggcgagcgtagcgcgcgctttgataataaaggcgaccggttctacgatttgatttctgctctgcataagtcggtgcgcggaagcgcgccggatgcggcactttactggtacgcgcggatcatcaccgccggcggcgatccgctgtacgttgcccgccgctgtctggcgattgcctcggaagatgtcggcaacgccgacccgcgggcgatgcaggtcgctatttcggcgtgggattgctttacccgcgtcgggccggcggaaggcgaacgggcgattgcccaggccatcgtctatctggcctgcgcgccgaagagcaacgcggtgtacaccgccttcaaagcggcgctggccgacgcgcgggatcgtcctgactacgacgttccggttcatctgcgcaatgcgccgacgaagctgatgaaagagatgggctacggccaggagtatcgttacgctcatgacgaacccaacgcctacgccgccggcgagcagtacttcccgcaggaaatggcgcaaacgcgctattatcacccgacaaaccgggggcttgagggcaaaattggcgaaaagctcgcctggctcgctgaacaggatcaaaatagcccgataaaacgctaccgctaa

SEQ ID NO: 213857 - DNA, 1293 bp, Klebsiella pneumoniae
atgctcgatcccaatctgctgcgtaccgagccagacgcagtcgcagaaaaactggcacgccggggctttaagctggatgtagataaacttcgcgcgcttgaagagcgtcgtaaagttctgcaggtgcaaacggaaaacctgcaggcggagcgtaactcccgatcgaaatccattggccaggcgaaagcgcgcggggaagacatcgagccattacgcctggaagttaacaagcttggcgaacaactggatgctgcaaaatccgagctggaaacgctgctggcggaaattcgcgatatcgcgctggcgatcccgaatattcctcatgatgatgtgccggttggtcgcgatgaaaacgacaacgttgaagttagccgctggggtacgccgcgtcagttcgattttgaggtgcgcgatcatgtgacgctgggtgaaatgcacggggggctggattttgccgccgccgttaagctcaccggctcgcgcttcgtggtgatgaaagggcagctggcccgtctgcaccgcgccctggcgcagttcatgctggatctgcacaccgaacagcatggctacagcgaaaactatgtcccgtacctggtaaaccaggacaccctgtatggcactggccagctgccgaaattcgccggcgacctgttccatacccgtccgctggaagaagaggctgacagcagcaactacgcgctgatcccgacggcggaagtgccgctgaccaacctggtgcgcgatgaaatcatcgacgaagacgatctgccgatcaaaatgaccgcccatacgccgtgcttccgctctgaagccggttcctatggccgcgacacccgcggtctgatccgtatgcaccagttcgataaagttgaaatggtgcagatcgtccgcccggaagactctatggccgcgctggaagagatgaccggtcacgccgagaaagtgctgcagctgctgggcctgccgtaccgtaaggtcgcgctgtgcaccggcgatatgggcttcagcgcctgcaaaacctatgacctcgaagtatgggttccggcgcaaaacacttatcgtgagatctcctcctgctccaacgtctgggatttccaggcgcgtcgtatgcaggctcgctgccgcagcaagtccgataagaagacccgtctcgttcataccctgaatggttctggcctggcagtaggtcgtacgctggtggcgctgatggaaaactatcagcaggctgatggccgtatcgagatcccggaagtgctgcgcccgtatatgcgcggcctcgaatatatcggctaa

SEQ ID NO: 213858 - DNA, 2439 bp, Klebsiella pneumoniae
atgaaaattaaagcccctgatgctttactggctgctgaggtaagccgccgtggtctgatgaaaaccacggcaataggcggcctggcgctggccagcaacgcactaacgttaccttttacccgactgtcgcatgctgccgatacgccggcgcccgccagtgagaaggtggtctggagcgcctgcaccgtcaactgcggtagccgttgcccgctgcgcatgcacgtggtggatggcgcgattaaatacgtcgaaaccgataataccggtgatgataactatgacggtttgcaccaggtccgcgcctgcctgcgtgggcgttcaatgcgccgccgggtctataatccggaccgtctgaagtacccgatgaagcgcgttggtaaacgcggtgagggcaagttcgagcaaatcagctgggaagaggcgttggataccatcgccagcaatatgcagcggctgattaaagagtacggcaacgaatccatctatctgaactacggcaccggcacgctcggcgggacgctgacccgctcctggccgccggggaaaacgctgattgcccgtctgatgaactgctgcggtggctatctcaaccattatggcgactattcatcagcgcagattgctgccggtctgaattacacctacggcggctgggcggacggcaacagcccatcggatattgaaaacagtcagctggtggtgctgttcggcaataaccccggcgaaacgcggatgagcggcggcggggtgacgtactaccttgaacaggcgcggcagaaatccaatgcccggatgataatcatcgatccgcgctataccgacaccggcgccgggcgtgaagatgaatggatcccgattcgtcctgggaccgatgcggcactggtttcgggcctcgcgtgggtgatgatcaccgagaatctggtcgaccagcctttcctcgataaatactgcgtgggatacgacgagaaaacgctgcccgccggtgcgccagccaatggtcattacaaagcttacattcttggccagggcattgacggtatcgccaaaacgccggagtgggcctcgacaattaccggtattccgcgcgaacgcattgttaaactggcgcgcgaaattgccaccgccaaaccggcctatattagccagggctggggtccgcagcgtcacgccaacggagagatcgccacccgcgccatctcaatgctcgccattctgacgggtaacgtcgggatcaacggcggcaatagcggggcgcgcgagggctcgtatagtctgccttttgagcgtatgccgacgctggagaatccggttgagaccagtatctcgatgtttatgtggaccgatgcgattgagcgcggcccggaaatgaccgctctgcgcgacggcgtacgcggtaaagataagctcgacgtgccgatcaaaatgatctggaactatgcgggcaactgtctgattaaccagcattctgagatcaaccggacccacgaaatcctgcaggacgacaagaaatgcgagatgattgtggtcattgactgccatatgacctcctcggcgaaatacgctgatattctgctgccggactgtaccgcctccgagcagatggatttcgcgctggatgcctcctgcggcaacatgtcctacgttatctttgccgatcaggccatcaagccgcgctttgaatgcaaaaccatctatgagatgaccagcgaactggcaaagcgtctgggcgtcgaagagcagtttaccgagggccgtacccaggaaggctggatgcgctatctgtatgagcagtcgcgcaaagcgattcccgacctgccggatttcgacaccttccgtcagcagggcatctataagcagcgcgatccgcaaggtcatcatgtggcctacaaagccttccgtgaggatccgcaggctaatccgctgacaacgccttcgggcaagatcgaaatttactcgcaggatctggcgaaaatcgcggccacctgggagttgccggaaggggatgttatcgatccgctgccgatctacaccccgggtttcgaaaactacaacgatccgctgacagcgaaatacccgctacagctcaccggcttccactataaatctcgcgtccactcgacctacggcaacgtcgatgtgctgaaggccgcctgtcggcaggagatgtggattaacccgatcgacgcccgcaagcgcggcattgccaacggcgatcgtattcgcatcttcaacgatcggggtgaagtgcatatcgaagcgaaggtgacgccgcgcatgatgccgggcgtcgtcgcgctgggggaaggggcctggtacaacccggacgcctcgcgtgtggatcaggcgggcagcatcaacgtgctgaccacccagcgtccgtcgccgctggcgaagggaaacccgtcgcataccaaccttgttcaggttgagaagctgtaa

SEQ ID NO: 213859 - DNA, 426 bp, Klebsiella pneumoniae
gtgattgtgcgccagttaatgcagcagttcagcgacccgatgagtgcccgttcactgcttcagtcgcagcagaactccgacgaggcgctcagtattaaacgcgatgctgacccgacgtttgatttttgcggctatctggaggcactgccggagccggacgggatgtatatggggaacgcgaacatcatcccgcgccagccgcgcctgtatctgtatcacgcctatctggtctacatggaggcccacggctacaggaacgcactcagcctgaccatgttcggcaaggggctctcagccatgctgaaagagtacggactgaattatgagaagcgccgcacaaatcagggtatgcagaccaatctcgctctcagggaggaaagcaacgccgactggctgccgaagtgtgatgaacccaccgcttcataa

SEQ ID NO: 213860 - DNA, 660 bp, Klebsiella pneumoniae
atgatagctcttatgcaagcacttcagttgaaagtgataaccggcgatcaatacgccagcctgatgagtttgtacatggatgtggatgatttttccttcggcatggtcgtccttgaaaaaagcacaggtgatatcatgtacgatatgtacacacccccgatggttcaagtaagacacaagccggtcgtctatgatttaggttcgtctggagggggatttgctgctgaatgcatctactatactgaaaagaaactcaggaaaaagagacgtcacaaagggttttcagcatcatcagttaggtgtaaagtctcaagtgctgtacaatatgcatacaggcgagacccgttttctggcggaaaagtgtatagagcaatctggagtcgcaacggaatcgagttcaataacatccccttggttaatgattttgccaagaatcgatactgtttaaacttaaaagaaacattaaagataattcacaacaggtacttagagataatgaatatgagacagaatgcccagctcaatccggcagcctcgctctctaaagcgggacagccgcagaagaaaccagatgatcagactccaaaggcaaatggagataatggtcagcagatgactatgtcaagggttatcaactatgcccggcttttttctgactaa

SEQ ID NO: 213861 - DNA, 2766 bp, Klebsiella pneumoniae
atgaagccattggatttagaaggtcgtcaatcaccctcactggtctccgggccattgcggctgacgcgaggcttgccgctaatcctgaccaaattcgtcccgcctcgctcctcaatacaattgctggagcgcccccggcttcttcagcttcttaatcccgttcagcagtgccggctgggcgtcgtctgcgccggcgctggatttggcaaaaccacgctgttggcgcaatggcatcagcagatggtcgcccagggggaacgtatcgcctggctgagcctcgatgaggatgatgatgacgtatggcagtttattccttatctgctgcaagcattgcgtccactctatgctgactgggacgccgatttctggcgtgacatggaagaacagaagctctccagctccgagcaactgctggccgggctcattaaccagctacactactgcccgcatgacgtatacctgatcatcgacgacttccacgtgattaacgatcgtggggtctatgaagccgtggggtatttaatcaagcatgcgcctgccgccttgcatctgatcattggcagccgtttccacccgaatcttgcgctgagccagctgcaggcccaggaccaactggtggagatctatgatcgagacctgcaattcacgctcgaagaaacaaaacactattttagccgcacggttgcgctacccctcagcaaccaccatgcacagcggctacagtccgtgacagagggctggattgcagggatgaagatcgcttcattgtccgcagaattacagcatgatcccgagcatctgttgcgcaatatgcatggaggaacacggtccattgcccgctatctgaaagaggtggtactggatccgctgccggaagaggttctcgatttcctggtaaaaacgtccttcctcagtcggttaaatgccgaattatgcaacgcagtgacaggacgagatgatagtaaagcgatgctgacatggattgagcgacacaacctttttttgtcagcccttgacgaacaaggctactggttccgctaccatcctctgttgcaggaaaatcttcggaccatgctgcagcagaacaacgatattgatcgcaaacagctacatgaattagccagtcattggttcgtcgaacagaagctgtggtctgaagcggtacgccatgcgctcagcgcaggcaagccggtgcatagccccgtacaggacggcgcaagcgctcagtcactggcggaagaaggggatatcgataccctgatttcatggatgcatcatttaccgcccagtaccgatccttcgcgcattgacctgcaaattaatctggcctgggcactggcgcattatttccactttgatgagtcgaggcagctgcttgataacctcgatcagatggtacttcatcatcgtgaggatttaacccgcagcacctggtgtaaattgcgcgttgtgcgggcaatttgcgaagcctttgcggaaaacatcccggagagtctggctatcgttcagccgttgctggccgaagtgccctgcggcgacacctgggttgatggtctgatatgcaatattctcagctattgccatgttgttaaccagcgctatcacgacgcgctggaggttcaacagcatatgccctctccggaaagtcctttagataatctgtttgtttcggtttatcgcgcgtttattattgcccagtgccatctttgtcagggcgatctgggaaaagccgggtggtatgcagagaaaacgttgcgccaggctgaatgttataccggtacccagtcgaccagtggcgcgacgctggcgccgctgctggcggagatagcctatgaatgtcagaggggtgactcgcccgagcatctgccagccgaccggctcgaattcatcgaccgattcagtccacccgacgcgctgagtcgttgctatacctatctcgcgcgtcaggccttagataacgatatgccctatgaggccgagcgattgctggagcatgcgcagcgtcttgcggtgtctcgcggctggcaacggctccaggccatgttgttagccgagcaggtgagggtgcgactgcagcgcggcaatgtcaccggcgcagagcaactgcagcgacagcttgaacaaatggccgccagcttcagaatggatgccgaacatccctgccaacgcgccatcgttatgtctgcatcccttagccgcagccggcttcttctcgccagaggccaggcaccgcaagcctgcgttttactggctgagatggtctccgatcaggaaagccggggggacaggttaaccgcagcgcgtctgcgtacgctctggtcattggccttgtggaacagtggcaaaacggccgctgcgcgcacgacatttcagccagtcgtgcagctggctgaacaacagcatctcacgggcctctttcttgacgctggcgataccttgcaacctttgcttgccggtatgaatgaaacctcttcggcttgcaaagagaaagggggagtgcatgaaccctgggccgacaagcgcgcgcctgcagacggaacaccgtttaatagtggaagccccgatattcctggcgagctcagcgagcgtgagtttcagatattacagctaattgctgaaggtcagatgaacaaagaaatcgctcgctccctcgctatttctgccgagacggtcaaatggcatatcaaaaacatctacgcgaagcttaaagtgaatagtcgcactcaagcgatgagcagggcgctggagatgaaattactggattaa

SEQ ID NO: 213862 - DNA, 960 bp, Klebsiella pneumoniae
atgctcagcaaacaggcgttattgcaggcttaccgcaagatgcgggagatcagaacatttgaagagcggttgcatcaggaaaataccagcggtgatattccgggcttcattcacctttacaccggtgaggaggccatcgcggtgggggtctgcgaaaatttaacgagcgcagattttattggttcaacacaccgtggacatggccactgtattgctaaaggttgcgacattcacggcatgatggccgaaatattcggtaaggacagcgggttatgtcgcggtaagggcgggtcgatgcacattgccgatctgtcgaaaggaatgctgggggcgaacgctatcgttgggggagcccctcccctggccatcggcgccgcgctaacggcaaagacgctaaaaaccggcaacgtcggtgtctcttttacgggcgatggtggttctaatcagggcctggtctttgaagccatcaatatggccgtcgtgctccagcttccagccgtctttattttcgagaataacggttacggcgaagggaccggccatgactacgccgtgggtgggcgtgatatcgcccggcgcgccgctggcttcggcctgccggcagtgaccgtcgatggcaccgatttctttgccgtttatgaggcaacctcagaggcggtcaagcgtgcgcgagaaggcggtggcccaagcgtcattgaggccaaagccttccgctggcatggtcattttgagggcgatcccgcgctatatcgtgcggaaggtgaagtgcaacgcctgcgtgaacaacatgatccgctgaagattttcaccgctaaggtcaagcaacatatcacccaggaagaactggcggcgattgacgaggaagtagaagccctggtcaacgatgccgtattgaaggcccgcgccgctgcctacccggctccggaagacctgctgacagacgtgtacgtctcatactga

SEQ ID NO: 213863 - DNA, 1020 bp, Klebsiella pneumoniae
atgacaataaaaacctatcgtgaagcggtcaaggaagccctggctcaggaaatggaacgcgatgaacgcgtggtgctcatcggtgaagacttgcgtggcggtcatggcggaaatgcgcccgaagaggctaaaatagaagcctttggcggtgtgctgggtgtcactaaagggctgtggacgcagttcggctccgatcgggtgatcgacacgcccattaccgagtcggccatcatcggtatggcggccggcgccgcagcgacgggtttgcggccggtcgcggaattgatgttcatggatttttttggcgtgagccacgatgcactgtacaaccaggcggctaagttccgctacatgtttggtggcaaagccagagctccgctggtgatgcgagggatgatcggcgcggggttttctgccgcagcccagcattcacagtcaccctataatatctttgccaccacgcctggactgaaggtggtggtgccctcgacgccttatgacgtcaagggtctgttaatccagtccattcgcgacgacgacccggtggtattctgcgagcataaaatgctgtacgacctcaagggcgaggtaccggacgagatctataccatcccgctaggtgtagccaactacactcgcgaaggggaggacgtcaccatcattgcgttgtcggcaatggtacataaagcaaaccaggtggcggacaaactggccagagaggggatctcggtcgaggtggtcgacccgcgaaccatttcgccgctggatgaggaaggtattctggaatcggtggcgtccacggggcgggtcgtgattgtcgacgaatccgctgcacgcttcggttttgctcatgatgtcgcggcgctgattgcgtcccaggcattccatttcctcaaagcgcccgttctgctggtgacgccgccacacacgccggtcccgttctcccctgctctcgaaaaactctggatccctggcgttgaacgtatcgaagccgccgtccgtcaagtgctggaggattaa

SEQ ID NO: 213864 - DNA, 1536 bp, Klebsiella pneumoniae
atgagcgaaatcaagacgcttgaaatgccaaagtgggggctttccatggaggaaggcttgctcgctcgatgggcaatccaggagggtgacgatttcaccagagggcaggaaatatgtgagattgaaaccagtaaaatcgtcaatgtgctggaggccccctttgccggtacgttacgtcggatactcgcccgcgagggtgagacgcttcaggtaggcgccgtgctggccctggcggctgacgcgtcggtcagcgatgctgaactggacgaatttgttgcccgcctggcgacggcgaaacccgcagccccaggcccggaggctgccgcgccggacgtagcggcacaggcaggcgctaagccagcttccgttgtttcgccgccatccaacagccccgagccccctgttgggcagaccgtcatccccgtcagtctgcaaggtgtgaccgatgtgactcaggttaatgccacgccccatgcgttacgactgtctgcccgctggggtgtcgacctgaaaaaagtccgcggcagcgggcgcggggatcgtatctctgtttctgatctggaaagcgcgatcgttgccgccggcggtcgcctggcctctccgacgccccccgttcgtcgcagcaaagcgccccgctcgcatgccgatgacagccaggtatcggccaccccgctggcgcgccgcctggccggcaaactgggtatcaacttgcatgactgccgaagcagcggttcacgcggtcgggtaagtcgcgatgatgtgctggccgcggcgttgttactcgacgagcacccgcagaccagtcctgtgcaggagagtgccccggccccctttgagagcatcccgatgtccggtatgcggcgggctatcgcttctcgcctgcaaacgtccaagcaacagtctccccatttccgtttgagcgtcgatctcgatctggagcgactgttagcgttacgtcaggacattaaccgcgaagtacccggcgtcaagatttcggtgaatgacctgctggtgaaggcctgcgccctggcgctggtggccgtgcctgacgtcaatatccagtttgatgaagcggcacaaagtatccgccgctttacggatgccgacatttcggtggccgttgcgctgcctgccgggctaattacccctattgttcgctcggcgaaccggaaatcgattagcgacatatcgaacgaaattcactcgctggtgaccagagccaaagcgggcacgctgaagccggaagagttccagggcgggacctttagcctgtcaaatctggggatgctcggcgtccggcagtttgacgccatcatcaatccaccgcaaagcgcaatcctcgccattggcgccggcgaggtccgggcggtagtacgcgacgggcaaatcgtcgcgcgacagcaaatgacggtatcgctatcctgcgatcaccgggtcatcgatggcgcggcaggtgcggcttttctccgggaactcaagcgactgattgaaaccccgaccttgatgtttatccaggagacgagctatgcacgataa

SEQ ID NO: 213865 - DNA, 1398 bp, Klebsiella pneumoniae
atgcacgataaatacgatgtgctgatcatcggcgggggtcctgggggatacgttgccgccatccgtgccggccagctagggcttcgtaccgtattagtggaaaaacaacatctgggcggcatctgcctgaactggggatgcattccaaccaaggcgctgctgcatggcgctgaggttgcgcacactatcacccatgccagtcagctgggcatcagcgtgggcgaggtgaacgtcgatctgcagaaactggtgcagtttagccgtaccgtatcgcaacagctcaccgctggggttgcgtacctgttgaagaaaaatggcgtgagggtgattgatggcaccgcgcggctgcgcggcaaggggcaaatcacggtcgaggatgcccgaggggaggcgcgcgattaccgggccgatcacgtgatcctggcaaccggcgcccgaccacgcgcattgccaggcatagcgccagatggcgaacatatctggacctatttcgaggcgctgcggcctaagcttttacccaagtcgctcttaatcatcggttcaggggcgattggcgtcgagttcgccagcctttataacgatctgggctgtaaagtgacgctggtcgagctagcgtcgcagattttgccagtggaagatgccgaggtgtctgcagcagtgcgtaagtcattcgaaaaacgcggtattcagatccatacccagaccctggtgacgcaagtacagctcaccgataccggggtgcgctgcacactaaacaacaccggcggcgaatattctgaggatgtcgaacgtgtgctgctggcggtcggcgtacagccgaatattgaagatctggggctggaaacgctgggcgttgagttagaccgcggttttatcaagacggacgcggcttgtcgcactaacgtatttgggctttatgccatcggcgatgtagccggcccgccgtgtctggcgcacaaggccagccacgaaggcgtgctctgcgttgagaccctggccggtgtcgaaggcgcccaccctctcgatcgcgactatgtgcctggttgcacttatgcccggccccaggttgccagtctgggcctgacggaatcgacggccctggcaaggggacggcccatcaggatcggtaagttctcttatcagagcaatggtaaggcgctggccagcggcgagacagagggttttgtgaagacgattttcgatgctgaaaccggcgagttgctgggcgcgcatatggttggcgcacaggtcacggaacagatccagggctttggcatcgcccgtcacctggaggccacagacgaaagcctcctgtcgatgatctttgcgcatccgacactttccgaagcgatgcatgagtcaatcctcgcggcctgcgaccaaccgttgcatcaataa

SEQ ID NO: 213866 - DNA, 252 bp, Klebsiella pneumoniae
atgacacagcacgaaaggttttgccaggcctgcggaatgccgatgtccgcacccgatgcgcaaggggccagcgataaatattgcgcgtattgcagcgacagcgacggtaatttgaaatcctgggaagaggccgtatccggtctggcggcttttctcgacgcctggcaaaaggtgggcgtagcggaatcacggaaacgggcaaaacgttacctgacggcgatgcctgcctgggcgcacaaagcggacgagtaa

SEQ ID NO: 213867 - DNA, 792 bp, Klebsiella pneumoniae
atgtctaaagaacgtcgtctctcaagaatattcgcaaaagacggtaaatccgtgaccttagcgctggatggctactatttttccacgaaaacaaatggtattgataatacgataaatcagctccctgctctggtggaacacggcctggattgcgcgctcgtcacgtacggcatgttgaagaattatcgggaagcattgaacagcgttcccgttgtgttacgcgtcgacagcacggtcagtatctttgacaataccgttcccgatactacccccgttttttccgtcgaagatgcgcttaaagtcgctgccgagggcgtggtctgcatgaccttccccggcgccttcaatgaagaaaaaacccacattatggcgatgcaactcgcacaggcagcggatcgctggaatgtaccgctgattgtcgaatcgctcccgtatggttatcccgtcaccagcgatgactctaacaatccggccatcatcgctgcatcggcccgcgcagcggtggagctgggcgcggacgtcatcaaaacgcgttttaccggttcaccagaggaccgactgatcgttgaagctgctggcgtgccggtgcttgccttaggagggccaaaaaccggcatcgacggttacttcaaatttgttcagcactgtatgcagatgggtgcgaaaggcgtggctgtgggacgaaacattacccaggatccgcagccggcgaaagtggtagcaggtctgaatgccatcatccatgaaaacgcaacagcggaagatgcatacagcctctacatggctaaataa

SEQ ID NO: 213868 - DNA, 552 bp, Klebsiella pneumoniae
atgatttcaaataacaccatcatcccttccatcaggaagtataaatactttgagaaagcattatcctgccagtcagaatatgtgctgctatccgaagcgaatatcggcaatctgcagtcgctgattggcaaatgccatcaaagcggtaagaaggtcctcgttcaccttgaattactgggcggctttaaaccggatcaggcggggatcaatctgctgaaaaattattacaaggttgatggtgttatttcttccaatctctccgcgctacgctacgccaaaaaagagggattgctgaccgtatatcgggttttacttatcgattcgcgatcgcttgatcagtcgctcgatattgttaaacacagtccaccggacgcaattgaaatcttacctgctgaatatgcctgccagtgtctggagttgattagccgaaatttgaaaggctttgatgtggtattcatcgccggaggctttgttaagcgcaaataccttgtagataaaatattccatgccggatttaaagggataaccaccagcgagcccggcttatggtaa

SEQ ID NO: 213869 - DNA, 1539 bp, Klebsiella pneumoniae
atgaaagatgaatacgtcatgggcatcgacaatggtggaaccgtcaccaaggcagccatctatgaccgtaaaggacaggtgctcgccatcgcctcaaaatccacgcagatgctgacaccccgggaattccacacagagcgcagtatcgatgagctgtgggccgcgaatgtcgaagtgattaaaaaagcgattgagcaatcaggtatcgacgccagccagataaaaggagtggccgtcaccggtcatggtaacggtctgtatctggtcgacgaagaaggtcacccggtgcgtaacggcattatatccaccgatagccgggcaaaagagtacgttgagagatggcaacgctcaccagaattccttaccgacattttgccaaaaacgatgcagtccatctgggccggacaacctgtcgccctgctggcatggctgaaggatttcgagcccgagacgctgcaaaaagcgcgttatatttttatggtcaaggacctgatccgtttttacctgaccggagaggcttttcttgagctgaccgatatctcagggaccaacctgatcaacgtacgtgactgcaagtatgacgatgaactactggcatggtgggaacttgatgaactgcgggacaaattgccccccatcaaacgctcaacagaatgctgcggaaaaatcactgacgacgtggcccgtctgaccggtttatgcgcaggtacgccggtttctggcggggtgtttgatatctcggcctcttccattgcctcggggattaacagtctcgataagatggcgatcgtcaccggcacctggagcataaacgaatacgttaccgaccacccggttattgataaagatctgtttatgacctccatttatcccattgaaggtaaatggctcatcaccgaggccagccccacctccgcgagcaacctggagtggtttattaacaactttatggagagcgatcggaaaacctccgccgaacaaggatcgtcggtctatgacctgtgtaataagctggtttcatcaacgacgccggatgaaagccacctgctgttctttccgttcgtgtttggctctaacaccattcccgatgcctcggccggctttatcggtgtcaacagcttccataaaaaagcccattttctgcgggcgatttatgagggcgtggccttcagccatctctaccacaccgagcgcttacgcaatattaacccgaagctaagccacactattcgtattgctggcggcgtcacgaactccccggtctggctgcagatattcgccgatatcttccaggccacgctggaaatcgttgacgtcaaagagcacgggaccttgggtaccgcgatgaccgccgccgttatggtgggctggtttgcggaggtatttgctgcctcaaacgatatggtccatgtctcacgcaccgtctcccctaatccggaaaaccaccgggtctaccagaccaaataccagctttataaaaacctgttatcagaaatgcagtcgccgtggaaaagctgcagtaactacatcgcgcactaa

SEQ ID NO: 213870 - DNA, 762 bp, Klebsiella pneumoniae
atggatctgaatttaacgaatcgtacggccatcgtgacaggcggcgcaaccggcctggggagagagtttgttctttctctcgccaaagaaggcgtcaatatctgctttacctatatgcgtgaggaagagcatcccgaacggctgatcgaaacggtgaagaccagcgcgaacgtagagatcatcgcggtcaaaaccgatctctctgacgagcagagccgggaaaatctgtttgccacctgtatcgacagactgggcaaagccgacattctggtgaataacgccgggatctggctgagcggctacgtcaccgagatcagcccgcaggactgggatctggtgatgaatgtcaatctgaaagccatcttccatctcagccagctgtttgtaaatcactgcctgcagcatgaccagatgggcagcattctgaatattacctcgcaggctgcgttccacggctccacgacaggacatgcgcactacgcggcaagtaaggccggcctggtcgcctttgctatctcactggcgcgggaagtcgccaaacaaaaaatcaatgtgaacaatatcgccgtcgggatcatggatactgcgatgatccgtaagaacattgagcaaaaccctgactcttacgtcagtcgtattccggtgggccgcgtggcccagccgcaagaaattgccgacatcggtgtcttcatggtttctcctaagaccagctatatgacgggagcaactctggacgttaccggcggtatgttgatgcgttaa

SEQ ID NO: 213871 - DNA, 996 bp, Klebsiella pneumoniae
atgaaatgtctggcaattgccgatctgtttatcaatgcagcgatgatggaatcaggactgaaagcgctcagggataacgggattgaagtagaagtacgcgagtggtcacatgactccgttgagaaacttcaggaagataatctgcgggttgaacaggaaggagcagaagccgtggccttaccggaagcgctgcttcagggaacggatgatattgacatcctgatcactcagtttgccccggtcaatactgcggtgttcgataaactaccaaagctgaaatatgtaggcgtgctccgcggtggcgtggaaaacgtgaatcttcaggtggcgaacgcccggggcgttgaggtgatgaacaccccggggcgtaacgctcgcagcgtcgccgaattcacggtcggcatgatcctggcggaaatgcgcaatatcgcccgttcacacgatgccctgcgtgacaaatactggcgtaaagacagtccgaaccatcaggcgatcccggagcttggcggaaaagtcgtggggctggttggcctcggtcatattgcccaactggtcgcgggatttctcagcggctttggcacggagattatcttttacgataagtacgttgcaggccatgaacgttatgagaaagtcgattctctggacgaactggtacaacgcgccgacgttatctcgttacatgctcgcctgacgccggaaaccgaaaatctgattaacgcacaccatttcgcgcttatgaagcgcagtgccatcattgttaacacggcacgctccgggttaatcaatgaaaaagagatgattgatgcgctcagatccgggcaaatcatgggcgccgcgcttgatacctttgatgacgagccgcttccagacgacagtgcattctatactctgaataacgtgaccattacgccgcatattgccgggagtaccattgacgcattcagtaattcgcccaaactcttcgctgagatccttttaaagaaactcagttaa

SEQ ID NO: 213872 - DNA, 1263 bp, Klebsiella pneumoniae
atggatattatcaacagcattattagtctgggggcatcagtaatgatgccagtaatattctttattatcgcgctttgctttggcgttaaaatcggtacggcatttaaagcagggatgctggtaggcattggttttgaaggggtggggctggtgattggcctgctgctgacaaacctgggcccggcatcgcaggcgatggttgagcgtatcggcctgcagttaacggtcgttgataccggttggcctaccgcatcgaccattggctggggttcgccgctgatgctgcccgtcgtggtgggctttatcgtcatcaacctggccatgcttctgttgaaattaaccaaaacggtgaatatcgatatttttaactactggattttcctgatcatggggtctgtggtctatgccggaacgggaaattactggctttcggtcggtattacattcgctatttttgtgttgacgctattggcggcagatttaacggcgccgtatttacaaaaaaactataatcttaaagggatatcattcccccatcttacctgtatagcttacgtgccgtttggcattgcctgtaattacatcattgaaaagaccccgcttatcaataaaatcaatttcgatccggaaagtattaataaaaaattcggcgtttttggcgagcctcttactctggggttcgtactgggactgctgttggccttcctggcgggatatgacgtttccgcggccgtttcactggccattaaggtttcagccgccatgctgctgctgcctaaaatgattgaaattctggtgcagggattgttgattgtccgtgatgccgctgaagcaaaactgaaggctaaattcccggggcgcgatttttacatcgggatggatacggcgttactgatcggtgaaccttcggtactggcgaccggtctgctgttaatccctatggctgtggtgctgtctatcattctgcccggcaaccgcgtactgccctttgtcgatctggcttccttaatgttcctgctggcaatggtcacgccgttctgtaaacgaaatatgttccgcatgttcataaccggaaccctgatcgtgacctgcatcctgtatgtcgggacggacatttcgcaagaatacactcaggcggcggtgaactcgcatattccggtgccggaagggatggccgagatcaccaatatcgtcggcggcgccacgacgcctgtcggctggctggccgtcaaatttggcgagttttttagcgccacacattag

SEQ ID NO: 213873 - DNA, 639 bp, Klebsiella pneumoniae
atgctgaccatctggggccgaaaaacctcctctaacgtgcaggcgctgatgtggtgtgttggcgagcttgggttggactatctccggttcgacgtggggcatcgctatggcggtaccgacagcgaggcgttttatcagctcaatcccaatcgtacggtaccagtgctgcaggatgacgaaaatccgccgctgtgggaaaccggcgcgatccttcgctatttagccagtcgctacgccgacgacgccttctggccgggcgaactgctggctcgtactgaggttgatcgctgggccgagtggtcaaagcagaatatcgccctcggctttacgacgccggtgttctggcgcgtggtgcgcacgcctgccgccgagcgggatccgcaggccatcgccgcggcggtgacggccctggagcaaaagctggcgattgccgaggcacgtctcgccgggagtcgctatctggtgggcgatacgttcaccctggccgatatccagtttggtcatgtgctgtaccgctactttgcaatcgatatcccccgtcgtcccctcccccaccttgcggcgtattatgcacggctaacctcacggcccgcctttcgccagcacgtcatggtcagctacgacgaactgaaggtctga

SEQ ID NO: 213874 - DNA, 750 bp, Klebsiella pneumoniae
atgatcgatatccctcgcatttttaccatcagtgaaagcgagcaccgtatccataacccttttaccccggaaaagtacgccacgctgggacgggcgctgcgaatggcgccgggcaccaccattctcgacctcggcagcggctccggcgagatgctctgtagctgggcgcgcgatcatcagatcgtcggcaccggcgtagacatgagcctgctgttcagtcagcaggcggccgcccgggcagaggagctcggggtaagcgaccgggtaacctttgtgcaccaggatgccagcggatatgtcgccagccagccgtgcgatgttgccgcctgcgtgggggccacgtggatcggcggcggggtggcaggcacaatcgagctgctgaagcagagccttaccccaggcggcatgttgcttatcggcgagccatggtggcgcaaacgtccggccacggcagaagaggcgattgcctgcggcgcgcagtcacccgatgacttcctgacgctaccggcgctggtcgcccactttggcgaactgggctatgacgtggtggagatggtgctggccgaccaggagggctgggatcgttatgaagcggcgaaatggctgacaatgcgccgctggctggaggccaatccgcacgatgacttcgcaccggaggttcgccagcagttgaccactgcgccgctacaccacgtcacctggacccgggaatatctcggctggggcgtgtttgtcctgatggcgcgttaa

SEQ ID NO: 213875 - DNA, 258 bp, Klebsiella pneumoniae
atgaatttatcccgtcaggaacaacggaccttacacgttctcgccaaaggtggccgtattgcgcacgtccgcgatacctccggccgcattaccgccgttgaatgttacacccgcgaagggctgttgctgagcgactgcacccttgcggtcttcaaaaagctcaaaaccaaaaagctgattaagtcggtgaacggccagccgtaccggatcaacacgaccggtttgaataacgttcgcgcgcaagcggacaaccgctga

SEQ ID NO: 213876 - DNA, 978 bp, Klebsiella pneumoniae
atgaacgccctgaccgcagtaaaaccgacacccgcgccggtagcccagcaataccctggcttttctttcaccccttccgcccagtcgccgcgcctgctggagctcaccttttccgccgaaacgaccacgcaattcctgcagcaggtcgcgcagtggccggtgcaggcgctggagtacaaatctttcttacgcttccaggtcggcaagatcctcgacgatctgtgtggcaatcagctgcagccgttgctgatcaaaacattgctcgatcgcgcggaaggcgcgctgcttatcaacggcgaagggatcgatcacgtcagccaggccgaggagatggtcaagctggccaccgccgtcgcccacctgattggtcgttccaacttcgacgccatgagcggtcagtattacgcccgcttcgtggtgaaaaatgtcgataactcagacagctacctgcgccaaccgcaccgggtgatggagctgcacaacgacggcacctacgtcgaagagcaaaccgactacgtattaatgatgaagatcgacgagcagaacatgcagggcggcaattccctgctgctgcatctcgacgactgggagcatctcgacgaatttttccgcgacccgctggctcgccgcccaatgcgctgggccgcgccgccgagcaaaaacgtcagcaaggatgttttccacccggtgttcgacgtcgattcgctgggccgcccggtaatgcgctatatcgaccagttcgtccagccgaaagatttcgaagaaggcacctggctgagccgcctctccgacgcgctggagaccagcaaaaacatcctttccataccggtgccggtgggcaaatttctgctcattaacaacctgttctggctgcacggccgcgaccgctttacgccgcacccggacctgcgccgcgagctgatgcgccagcgcggctactttgcgtattccacgaatcattaccagactcatcaataa

SEQ ID NO: 213877 - DNA, 1269 bp, Klebsiella pneumoniae
atgtatgatttcgtgattatcggcggcggcatcatcggcatgtcgaccgccatgcagttaattgagatttacccggacgcccgcattgcgctgctggaaaaagaggccggcccggcctgccatcagactggccacaacagcggcgtgatccacgccggggtgtattacacgcccggcagcctcaaggcgcagttttgcctcgccggcaaccgcgccaccaaggccttttgcgagcagaacggcatccgctatgacgtctgcggcaaaatgctggtcgccacctcaccgctggagatggagcggatgcgcgccctgtgggatcgcaccgccgccaatggcctgcagcgcgagtggctaagcgccggggagctacgcgagcgcgaaccgaacattaccgggctcggcgggatcttcgtcccttccagtggcatcgtcagctaccgcgaagtggcggcggcaatggcgaagaacttcgaagcgaaaggcggaacgatcgtctacaacgccgaagtcagcgccctgaaagaacatgccagcggcgtggtgatccgcacccgccagggcggagaatatgaggcctcgacgctgatcgcctgttcgggcttgatggccgatcggctggtaaaaatgctcggcgtcgaccccggatttatcatttgtccgttccgcggcgagtatttccagctggcaccgcagcacaaccagatcgtcaaccatttgatctatccgatccccgatccggcgatgccgttcctcggcgtccacctgacccgcatgatcgacggcagcgtcaccgtcggccccaacgccgtgctggctctgaagcgcgaaggctaccgcaagcgcgatatctcgctggccgataccctggagatcctcacctcgcccggcatccgccgggtactgcaaaacaacctgcgctccggactgggcgaaatgaagaattcgctgtgcagaagcggctatctgcggctggtgcaaaaatactgcccgagcctgacgctgagcgatttacgcccgtggccggccggcgtgcgggcgcaggccgtgtcgccgcagggcaagctgatcgacgattttctcttcgttaccaccgcgcgttcgatacatacctgcaatgcgccatcgccagcggccacctccgctatcccgatcggcgcgcatatcgtcagcaaggtgcagagcctgctggccagccagagcaatcccggacgcacgctgcgtgcggcacgtagcgtggagacactacacgccgcttttacccgttaa

SEQ ID NO: 213878 - DNA, 1449 bp, Klebsiella pneumoniae
atgcaactcaacgatatgacactgtttcgccagcaggcgctgatcgatggccagtggcgcgatgcgcccaacggcgacgtgattgcggtcaccaacccggccaacggcgagcagctcggcagcgtgccgaaaatgggcgccgatgaaacccgcgaagcgattgaagccgccaatcgcgccctacccgcctggcgcgccctgaccgccaaagagcgggcgaacattctgcgccgctggttcgatcttatgatggagaatcaggacgatctcgctcgcctgatgaccctcgagcagggaaaaccgttggcggaagccaaaggcgaaatcagctacgccgcctcctttattgagtggttcgccgaagaaggtaagcgcatctacggcgacaccattcccggccaccaggccgacaagcgcctgctggtgattaagcagcccatcggcgttaccgccgccatcacgccgtggaacttcccggcggcgatgatcacccgcaaagcgggcccggcgctggccgccggctgcaccatggtcctgaaaccggccagccagacgccgttttccgcgctggcgctggccgaactggcgaatcgcgccgggatccccgccggagtgttcaacgtggtcaccggctccgccggcgcggtcggcggcgaactgaccagcaacccgctggtgcgcaagctctcctttaccggctctaccgagattggccgccagctgatggagcagtgcgcgaaagacatcaaaaaagtctccctggagctgggcggcaacgcgccgtttatcgtctttgacgatgccgacctcgataaagccgtcgagggggcgctggcgtcgaagttccgcaacgccgggcagacctgcgtctgcgccaaccgcctgtacgtccaggacggggtgtatgaccgtttcgccgagaagctgcagcaggcggtggaaaaactgcgcattggcgacggcctgcaggacggcgtcaccaccggcccgctgatcgacgagaaagccgtggccaaagttgaagaacacattgccgatgccatcgccaaaggcgcgaaggtggtcaccggcggcaaaccgcacgccctgggtggcaacttcttccagccgaccatcctggtcaacgttcccgacagcgccaaagtggcgaaagaggagaccttcggcccgctggccccgctgttccgctttaaagatgaagccgacgtcattgcccaggccaacgataccgagttcggtctcgccgcctatttctacgcccgcgatctgagccgcgtcttccgcgtcggcgaagcgctggagtacggcatcatcggcatcaataccggcattatctccaccgaagtcgcgccgttcggcggcgttaaggcctccggcctcggccgcgaagggtcgaagtacggcatcgaagattacttagaaatcaaatatatgtgcattggcctttaa

SEQ ID NO: 213879 - DNA, 1284 bp, Klebsiella pneumoniae
atgaacagcaataaagcaatgatggcgcgtcgcagcgacgcggtcccgcgcggcgtcggccagatccaccctatcttcgccgaacgcgcggagaactgccgggtgtgggacgtggaaggccgggaatatctcgattttgccggcggtatcgcggtgctcaataccggccacctgcatccgcaggttgtcgccgccgtcgaagaccagctgaaaaagctgtcgcatacctgcttccaggtgctggcctatgagccttatctggcgctgtgcgaaaagatgaatcaaaaggtgcccggtgatttcgccaagaaaaccctgctggtcaccaccgggtcggaagcggtggagaacgcggtgaagatcgcccgcgcggcaaccgggcgcagcggcgctatcgccttcaccggcgcctatcacggccgcacccattacaccctgtcgctgaccggcaaagtgaatccttactccgccggtatgggcttaatgccgggccatgtctatcgcgccctctacccatgcgcgctgcacggcgtcagtgatgacgaggcgatcgccagcatccatcgcatcttcaaaaacgatgccgcgccggaagatatcgccgccatcattattgagccggtgcagggtgaaggcgggttctatgccgcctccccggcctttatgcagcgcctgcgcgccctgtgcgacgagcacggcattatgctcatcgccgatgaggtccagagcggcgcgggccgcaccggtaccctgttcgccatggagcagatgggcgtcgcggcggatatcaccaccttcgccaaatccatcgccggcggtttcccgctggcgggcgtcaccggccgcgcggaggtgatggacgccatcgcccccggcggactgggcggcacctacgccggcaaccccatcgcctgcgccgccgccctggcggtattacagattttcgagcaggagaatctgctggaaaaagccaaccagctcggcgacaccctgcgccagggcctgctggcgatcgctgaagatcatccggagatcggcgacgtgcgcggtctgggggcgatgatcgccattgagctgtttgaagagggcgaccgcagcaggccgaacgccaggctgacggcggatatcgtcgcccgcgcccgcgacaaaggcctgatcctgctctcctgcgggccgtactacaacgtgctgcgcatcctggtgccgctgaccatcgaagaggcgcagatcgagcaggggctcaagatcatcgccgactgctttagcgaggcgaaacaggcatag

SEQ ID NO: 213880 - DNA, 1401 bp, Klebsiella pneumoniae
atggggcaactgtcgcaatcacaggatttaggggcggggctgaagtcgcgccacgtcacgatgttatctatcgccggggtgatcggcgcgagtttatttgtcggatccagcgtcgccattgccgaggcaggcccggcggtgctgctggcctatctgtttgccgggctgctggtggtgatgattatgcgtatgctggccgaaatggcggtcgccacgccggataccggctccttttccacctacgccgataaagccatcggccgctgggcggggtataccatcggctggctgtactggtggttctgggtcctggttattccgctggaagccaatatcgcggcgattattctgcattcgtgggtgccgggcgtcccggtgtggttgttctccctggtcatcactctcgccctcaccggcagtaacctgctgagcgtcaagaactacggcgaattcgagttctggctggcgctgtgcaaagtgatcgctattctggcgtttatcgtactgggcgcggtcgccattaccggcttttatccctatgccgaagtgagcggcatttcgcgtctgtgggatcacggcggctttatgcctaacggcttcggcgcggtgctgagcgcgatgctgatcaccatgttctcgtttatgggcgcggagatcgtcaccattgccgccgccgaatcggataccccggataaacatatcgtgcgcgccaccaactcggtgatctggcgtatctctattttttatctgtgctcgatctttatcgtcgtcgccctcatcccatggaatatgccggggctgaagagcatcggctcctaccgctcggtgctcgagctgctgcatattccctatgccaagctgattatggacggcgtgatcctcctgtcggtcaccagctgtctgaactcggcgctgtataccgcctcgcggatgctctactccctgagccgtcgcggcgatgcgccggccattatgggccggaccaaccgcagcaaaacgccatacgtggcggtgctgctctctaccggcgcggcgttcctcaccgtagtggtgaactactatgcccccgccaaggtgtttaaatttctcatcgacagctccggcgccatcgccctgctggtctatctggtgattgccgtttcacaactgcggatgcgcaaaatccttcaggcgcaaggcggcgaaatccgtctgagaatgtggctctatccgtacctgacctggctggtgatcgcctttatcaccttcgtgctggtggtgatgctgttccgtccggcacagcagctggaggtgatctctaccggcctgttagctctgggaattatttgtacggtaccgattatgtcacgctggaaaaagctggtattgtggcaaaaactgccgctgcaaaatacgcgttaa

SEQ ID NO: 213881 - DNA, 693 bp, Klebsiella pneumoniae
atgaccgccattccccaggcgacggccattgacgggtaccgttggttaaaaaacgacatcatctgcggggtttaccaccccgatgagaagctgcggatgagcctgctgacgtcgcgctatggcctgggggtcggtccgctgcgcgaggcgctttcgcaactggtggccgagcggctggtaacggtggtcaatcagaaaggctatcgggtggcgcccatgtcggaacaggagcttctcgatatcttcgacgcgcgcgccaacatggaggccatgctggtgcgtctcgccattgaacgcggcggcgacgagtgggaagccgagctgctggcccgcgcccatctgctcaacaagctggagtcgtgcgaagcgagtgagcacctactcgatgaatgggaccagcgccatcaggcgtttcacaccgccatcgtcgccggctgcggttcgcagtatctgctgcagatgcgcgaacggctgttcgatctggcggcgcgctaccgcttcatctggctgcgcaccaccgtgctgtcggtggagatgctggaagataagcatgtccagcatcagaccctggtggacgctattctggcgcgcgacgccgaacaggccagcgcgctgatgcgtgagcacttactgactccgatcccgattattcaacaggcgatggctggcaagctgtcgccgcaggcagggtga

SEQ ID NO: 213882 - DNA, 399 bp, Klebsiella pneumoniae
atgacgttaccgagtggacacctgaaaagtaagttgatcaagaaattcacggcgctggggccttacattcgcgaagagcagtgccatgacaaccgtttctttttcgattgcctggcagtttgcgtcaatgttaagcccgcaccggagaagcgtgaattctggggctggtggatggaaatggaagcacaggagtcacgtttcacctatagctaccagtttggcctgttcaataaggaaggatcatggcaggcggtcgacattgacgacccggaagtgagcgacaggctggaaaaaacgctgcgcgagtttcacgagcgcgcagcagcgctgctgaccacctttaatctgaagctggaaccggccgacgatttcagcgagccggttcgcctgcgagcctga

SEQ ID NO: 213883 - DNA, 1245 bp, Klebsiella pneumoniae
atgtcacaggctaacctcagcgaaacgctgtttaaacctcgcttcaaacatcccgaaacttctacgctggtgcgtcggttttctgccggaaaaccccaggcgatgcagtcggcgctgagcggcaatcacgtcgatcactggtaccgtctgatcaaccgtttgatgtggatctggcgcggcgtaactccgcaggagatcctcgatgtgcaagcgcgcattgtgatgagcgaggccgaacgaaccgatcctgagctgttcgataccgtcatcggctatcgcggcggcaactggatcttcgagtgggcgaaagaagccatgcagtggcagcaaaaggccgggcaggaagccgatcctttgctgagcggccgccactggctgcatgcctcgaacctgtatagcattgccgcttatccgcatattaaaggcgatgagctggcggaacaggcgcaggctttagccaaccgggcgtatgaagaagccgcccagcggctgccgggctcgctgcgcgagctggagttcaccatccctggcggctcgccgataaccgggtttttgcatatgccgaaaggcgaggggccgtttccgacggtgctgatgtgcggggggctggactcgctgcagaccgattattacaacctgtatgagaactacttctcaccgctcggcattgccatgctgaccattgatatgccctccatcggcttctcgtcaaaatggacgctaaatcaggacaccagcctgctgcatcagcacgcgctgcgccatctggaaaatgtgccgtggattgaccatacccgggtcgccgctttcggcttccgctttggcgccaatatcgcggtgcgtctgggctatctggagccgcagcggctgaaggctgtagcctgtctgggcccggtcgttcatggtctgctggtggatcccctgcatcaggggcgcgtgccggagatgtatcttgacgtgctggcttcgcggctgggcatgcatgacgcctccgatgaagcgctacgcgtggagctcaaccgctattcgttaaaaacccagggactgctggggcgccgttgcccgacgccgatgctctccggcttctggaaggacgatccgttcagccccgaagaggagtcgcggttaatcacctcgtcatctgccgatggcaaactgctggagatcccgtttaacccggtgtatcgcaattttgatcacgcattgcgacagatcgcccgctggatcaatcatagatttggttaa

SEQ ID NO: 213884 - DNA, 459 bp, Klebsiella pneumoniae
atgagcgaaaaatacgtcgtcacctgggacatgttgcagattcacgcccgcaaactggccagccgtctgctgccggttgagcaatggaaaggcattattgccgttagccgcggcggactggtaccgggagccttactggcgcgtgaactgggcattcgtcatgttgataccgtatgcatctccagctacgaccatgataaccagcgcgagctgaaagtgctgaaacgtgcggaaggcgatggcgaaggctttatcgtcatcgacgatctggtggataccggcggtaccgccgtggcgatccgcgaaatgtatcccaaagcgcactttgtcaccattttcgccaagccggcaggccgcccgctggtggacgattacgttgtggatattccgcaggatacctggattgaacagccgtgggatatgggcgtggtgtttgtaccgcctatcgcaggtcgttaa

SEQ ID NO: 213885 - DNA, 1458 bp, Klebsiella pneumoniae
gtgtctgaactgtctcaactatccccgcagccgctttgggatatttttgccaagatttgctccatcccgcacccgtcctatcacgaagaacagctcgccgagcatattatgggttgggcaaaagaaaaaggcttacatgcggaacgcgaccaggttggcaacattctgattcgtaaaggcgcgactgccggtatggaaaaccgtaagccggtagcgctgcaggcgcacctcgatatggtgccgcagaaaaataacgacaccgtccacgacttcgttaaagatccgatccagccgtacattgacggcgaatgggtgaaagcgcgcggcaccacgctgggcgcggacaacggtatcggaatggcgtccgcactggcggtactggccgatgatagcgtcgctcacggcccgctggaagtgctgctgaccatgaccgaagaagccggtatggacggcgcgttcggtctgcaggccaactggctacaggccgatatcctgatcaacaccgactccgaagaagaaggcgaaatctatatgggttgcgccggcgggatcgatttcacctctaacctggcgctgacccgcgaagcgattcccgccgggttccagagctttaaagtcaccttaaaagggctgaaaggcggccactccggcggtgatatccaccttggtctgggtaatgccaacaagctgctgtcgcgcttcctcgccggccacgccgatgagctggatctgcgtctggtcgatttcaacggcggcacgttgcgcaacgccatcccgcgtgaagcttacgctactgtcgccgtcgccgcggataaagccgatgcgctgaaagcgctggtgaatacttaccaggcgctgctgaaaaacgagctggaggccaaagagaagaacctggtggtgctcgtggaagcggtcgataacgacaaagcggcgctgactcaggcttcccgcgacactttcatccgtctgctgaacgccacgccgaacggggttatccgcaactctgacgtggcgaaaggcgtagtggaaacttcgctgaacgtcggcgtcgtcaccatgaccgatgacaacgtacagatccactgcctgatccgctcgctgatcgacagcggcaaagactacgtggtcagcatgctggattctctgggtaagctggcgggggcgaaaaccgaagccaaaggcgcttaccctggctggcaaccggacgccaattcgccggtgatgcacctggtacgcgagacttaccagcgtctgttcaacaagacgccgaacatccagatcattcacgccggtctggaatgcggtctgttcaaaaaaccgtatccggagatggacatggtctccatcgggccaaccattaccggtccgcactccccggatgagcaggtccatatcgagagcgtcggtcaatactggacgctgctgaccgagctgctgaaagccattccggctaaataa

SEQ ID NO: 213886 - DNA, 453 bp, Klebsiella pneumoniae
atgcatattcgtgcttaccgcgacagcgatttgccactgctctgccagatctttctgcgcgcggtgcgggaaaccgccagtcgggactataccccggggcagatcgcggcctgggcgcaggtggatgagacgcgctggcgacaaaagctggccgactcaatcggcctggtggccgtggtcaacagccagccggttggctttatcaccgccatcgggacgcatatcgatttgctgttcgtctcgccggatcgtgcccgccagggtatcggcggcgcgcttatcgaggcgctctgcgttcagtatccagcgcaaatcctgacggtggacgccagcattaccgcaaagccctgttttacggctcatggttttaaggtggtggctgagcaacgggtggcggcgcgcggggagtggtttattaattaccggatggaaaaacgcgtggcgctaaggtga

SEQ ID NO: 213887 - DNA, 1056 bp, Klebsiella pneumoniae
atgcgtaaaattatccatgtcgatatggactgtttctttgcggcggtggagatgcgcgacaacccagcgttgcgcgatattcccctcgcgataggcggcagtcgggtacaacgtggcgtgattagtaccgcgaactatcctgcgcgtaagtttggcgtgcgcagcgccatgccgacggcgacggcgctcaagctgtgcccgcacctcacgctgcttcctggccgctttgatgcctacaaagaagcctcgaaccatatccgcgaaattttctcccgctatacctcgcgcattgagccgctgtcgctggatgaagcctatcttgacgtcagcgacagcgagcattgtcacgggtcagccaccctgatagcccaggagatccgccagaccatcgaacgggagctgcgcctcaccgcctcggcgggggtggcgccggtgaagtttctcgctaaaatcgcttcagatatgaataaacccaacggccagttcgttatcgctccccatcaggtggcagagtttgtgcgggcgctgccgctggcgaaaatacccggcgtcgggaaggtatcggcagcgaagctggaaaatatgggcctgcgaacctgtggcgatgtgcagaacagcgatctggccatgctgcttaagcgcttcggtaaattcgggcgtattctgtgggagcgcagccacgggattgatgagcgggaaattcataacgatcggcagcgtaaatcggtgggcgtggagcgcaccttagcggaagatatacatgaatggccggagtgcgaagcgattatcgaaaacctctatcccgagctggagaggcgactggcgaaggtcaaacctgatctgctgatcgcccgccagggcattaaactgaaattcaatgatttccagctgaccacccaggagcacgtctggccgcggctgaacaaagaggatctgatcgccaccgcgcacaaagcctgggatgagcgccgcggcggacggggcgtgcgcctggttgggctccacgtgacgttgctcgatccgcagctggaaaggcagcttttattagggatttag

SEQ ID NO: 213888 - DNA, 861 bp, Klebsiella pneumoniae
atgaagaaaatacttaccgcgctttgcctgctggccaccgccggcgcctgggccgctccacagctgatagcccaccgcggcggcaccggcgatgcgccggaaaataccctgccggccattaagctggcgctggagaataacgccgaagccatctgggtcacggtgcagttaagccgcgacggcgtaccggtgctctaccggtcaagcgatctttccgcattgaccaatagcgagggcaaagtttccagtttgaccgccgccgagctggcgaaagtcgacgccggctggaaatggggggatgacagccacccgtggcgcggtaagcaggccaccattccgaccttgcaaagcgttttacagcaatggccgcacacttttttctatatcgatatcaaatctccggatgccgatcccaccgtgatgggccagcgcctgcttgaagtgttaaaaaccaccgatagcctcgatcgcgtgcgggtctattccaccgaagaccgctatatcgccgccctgccgccagccatccctcgctttgtcactcgcagtgaaacccgcaccaggcttgccaatatttcgctcagtcatcagtgccagccagcgagtcaacgcgatggtgagcagtggtatggcctggagctgaagcgcaaagtcgaggtggtggagaaattcacccttggcgaagggatctccccggcgacgctcacctgggataaagaggcaatggattgcttccgctcgcaggataaagcgcacattatcttcttcggcatcaacagtgcggaagactaccgcacggcgatagaactgggcgccgacggggtgatggtggattctccggcgcaggcgaaaagctggcagtaa

SEQ ID NO: 213889 - DNA, 216 bp, Klebsiella pneumoniae
atgctgacggtatttatcgcgacctttgtgatttttgcgctggtgatcctcggcatgtcgctgggctacctggtgaagcgcaagagcatccagggcagctgcggtgggatctccgcgctggggctggagaaagtctgcgattgtccggaaccgtgcgacgcgcgtaaaaagcgcctcgcccgcgaggcgcagcgtcagcagcggcgtattttgtaa

SEQ ID NO: 213890 - DNA, 1224 bp, Klebsiella pneumoniae
atggaaattattcttggcgtcgtgatgttcacgctgattgtgctggtgctgtcggggcttatcctggcagcgcgctcaaagctggtgaacgcgggcgacgtggttattgagatcaataacgaagcggataaacagatccgcaccccggcgggtgacaaactgctgaacacgctgtccagcaacgggatcttcgtctcctccgcctgcggcggcggcggctcctgcggccagtgtcgggtaactgttaaagagggcggcggggatatcctgccgaccgagctttcgcatattaccaagcgggatgccaaagccggttgccgtctggcctgtcaggtggcggtgaagcagaacatgaagattgaactgccggaagagattttcggcgtcaaaaaatgggagtgtgaagttatctctaacgataacaaagccactttcattaaagagctcaagctgcggatcccggagggggaggtggtgccgtttcgcgccgggggctatattcagattgaatgcccgccgcataaagtggcctatgcagattttgatgttcccgatgaataccgttcagactgggataagttcaacctgtttcgctatgtctctgaggtgaaagagccgaccctgcgcgcctactcaatggctaactatccggaagagaagggcatcattatgctcaacgtgcgcatcgcgacgccgccgccgaaggtcccggatgcgccgccggggatcatgtcatcctatatctggtcgctgaagccgggcgataaggtgacgatttccgggccgtttggcgagttctttgctaaagaaaccgacgccgagatggtgtttatcggcggcggcgccgggatggcgccgatgcgttcgcatattttcgaccagctcaagcgcttgcacagcacgcgcaaaatcagcttctggtacggcgcccgttcgctgcgcgaaatgttctacgatgaggagtttgaacagctggcgcgcgacaatccaaactttaccttccacgtcgcgctctccgatccgctgccggaagataactggaccgggcataccggctttatccataacgttctgtacgagaactatctacgcgatcacccggcgccggaagactgcgagttttacatgtgtgggccgccggtaatgaacgccgcggtaattaagatgctcaaagatctgggcgtcgaggacgagaatattctcctcgacgactttggaggctga

SEQ ID NO: 213891 - DNA, 597 bp, Klebsiella pneumoniae
atggctcattacatcagcctgtttgtccgcgcggtgttcgttgagaacatggcgctggccttcttcctcgggatgtgcacctttcttgcggtgtcgaaaaaggtctccaccgccttcggcctcggcgtcgcggtgacggtagtgctggggcttgccgtgccaatcaataacctggtctataacctggtgctgcgcgacagcgcgctggttgagggggtggatctcagctttcttaacttcatcacctttatcggagtgatcgccgcgctggtgcagatcctcgagatgatcctcgataagtattttccggcactgtacaacgcgctgggcatcttcctgccgctgattgcggttaactgtgcgattttcggcggcgtgtcgttcatggtgcagcgcgattacaacttcccggagtccatcgtctacggcttcggctccggcattggctggatgctggcgatcgtggcgatggcggggatccgcgaaaaaatgaagtacgccaacgtgcccgccggtttgcgcgggttagggatcacctttatcaccaccggactaatggcgctgggctttatgtccttctccggcgtgcagctataa

SEQ ID NO: 213892 - DNA, 639 bp, Klebsiella pneumoniae
atggctgaacagagcgatatgaaagaggtgaagcgcgtgctggtggggccgctcatcgccaataaccccatcgccctgcaggtgctgggcgtctgctccgcactggcggtaaccaccaaactggaaaccgccttcgtgatgaccattgcggtgaccctggtgacggcgttctccagcatgtttatctcgatgatccgccaccatattcccaatagcgtgcgcatcatcgtgcagatggcgatcatcgcctcgctggtgatcgtggtggatcagctgctgcgggctttcgcctatgagacctccaaacagctgtcggtattcgtcgggcttatcatcaccaactgcatcgtgatgggccgcgccgaagcctacgccatgaagtcgccgccgctggcgagctttatggatggtattggcaacggtctcggctatggcgcgatcctgattatcgtcggcttcctgcgcgagcttatcggtagcggcaagctgttcggtatcacggtgctggaaacggtgcagaacggcggctggtatcagccgaacggcctgttcctgctggcgccgagcgcgttcttcattatcggtttgctgatctgggccctgcgtagctggaagcctgagcagcaggaaaaggagtaa

SEQ ID NO: 213893 - DNA, 795 bp, Klebsiella pneumoniae
gtggctgagaagaaaagtaacgatagcatcggcaaaacgctgctggtggtgctggtgctttgtctggtctgctccatcgtggtggcgggctcggccgtggggctgaaatcccgccagcaggcgcagcaggcgttggataagcagcgcaatatcctggcagtgtcagggctgatgcaccccggtatggatgcggatgcggtagcggacaccttcgcggcgcgcattaccccgcgactggtgaatctggccaccggcgaactgctggagaaagacccgggtaaatttaatcaggcccaggcgctgaaggatccgcagcagagtatggccctggatgccagtcaggatccggctggtataaagcgacgcagtaatctggcggaaatttacctggtgcgcgacgcgcagcagaagattgagcaggtggtgctgcccatttatggcaacggcctgtggtcgatgatgtatgcctttgtggcgctggacgtcgatggccgcacggtaaaaggcattacttactacgatcagggcgaaacgccggggctgggcggcgaggtggaaaaccccaactggcgccagcagtttgtcggcaagcaggtgctggatgacaacggtatgccggcgctgaaggtggtgaaaggcggcgcgcgcgcgggcgatctccacgcggttgacggtttatccggcgccacgctgacgtccaatggcgtgcagcatagctttgatttctggatgggcgaactgggctttggtccgttcctgaaaaaggttcgtgagggagagctgaataatggctga

SEQ ID NO: 213894 - DNA, 1239 bp, Klebsiella pneumoniae
atgggcttaaagcacctgattgagaaacttgagccgcatttcacgcatggcggcaagctggaaaaatattacccgctgtatgaggcggcggcgaccatcttctacacgccgggccaggtaacccgcggcgcggcgcacgtgcgcgacgccatcgacctgaagcggatgatgatcctcgtgtggtttgccgtattcccggcgatgttctggggcatgtacaacgttgggctgcagaccattccggcgctgcacaagctatacggcgccgaacagctgcagcaggcgatcgccaacaactggcactacagcgtcgcccagtggttaggggtgagcttcagtgccgacgccggctggctgagcatgatgaccctgggcgcggtatttttcctgcctatctacctcaccgtctttatcgtcggcggcttctgggaggtgctgttcgcgattgtgcgcaagcatgagattaacgaaggttttttcgttacctctattctcttcgcgctgattgtgccgcccacgctgccgctgtggcaggcggcgctggggatctccttcggcgtggtgatcgccaaagagattttcggcggcaccgggcgcaacttcctcaacccggcgctggcggggcgcgcgttcctgttcttcgcctatccggcgcagatttccggcgacctcgtatggaccgcggcggacggtttctccggcgccacgccgctctcccagtgggccagcggcggcggtgaagcgctggtgaacgtggcgactggcgtgccggtgagctggatggacgccttcctcggcaatattcccggctcaataggcgaagtgtcaacgctgatgatcttcatcggcggggcgatcatcctctttggccgcgtcgcgtcctggcgcatcgtcgccggggtaatgatcggcatgatcgccaccgccaccctgtttaacgttatcggctccgacaccaacccgatgttcgctatgccatggtactggcatctggtgctcggcggtttcgccttcgggatgatgtttatggcgacggacccggtatccgcctcgtttaccgataaagggaaatggagttacggcgtgctgatcggcgtgatgtgcgtgctgatccgcgtggtgaacccggcttatccggaagggatgatgctggcgatcctcttcgccaacctcttcgcaccgctgttcgattatctggtggtgcaggccaatattaagcggaggaagtcgcgtggctga

SEQ ID NO: 213895 - DNA, 1344 bp, Klebsiella pneumoniae
atgattaaaatcacgaaagggctggatttgcccatagctggcatgccattacagcagatttctcccgcgccagcggtgaagcgcgtcgcgctactcggcgaagagtacgttggcatgcgccccgcgatggcggttaaagaaggcgatcgggtcaaaaaaggtcagatcctgttcgaagataaaaagatccctggcgtctgctttaccgccccggcgagcgggatcgtcagcgcgatccaccgcggcgaacggcgcgtgttgcagtcggtggtgattgatatcgagggcaatgacgcggtggcgtttacccgttacgccgcggacgcgctggccgaactgccgcgcgacaccgtacagcagcagctgctggcgtcgggccaatggacggcgctgcgtacccgaccgttcagcaaaacgccgctcccggggagcacgcccgccgctatctttgttaacgccatggacaccaatccgctggcggcggagccgcagccgattattctggccgaacgtgccgccttcgacgccggtcttaccgtgctcacgcgcttgaccgacgggaaagtgcacgtctgccagcccagcggcggcaagctgggcggtcatcctctcggccaggtctgtttcaatcagttcagcgggccgcacccggcggggctgccgggaacgcatattcactttctggagccggtgagcctgaataagcaggtctggcacctcaattatcaggacgcgatcgccattggtaagcttttcctcgacggggagctctactgcgaacggataattgcgctcggcggcccgcaggtaacatctccgcggctggtcaaaacgacgctcggcgccagcctggaggatctgctggcaggtgagttgcaggagggggaaaacagggtcatttccggctcggtgcttagcggcgcccgcgcccatggccctcacgccttcctggggcgcttccatctgcaggtgagcgtggtcaaagaagggcgggaaaaagagctcttcggctgggtgatgccgggcaaagagaaattctcgattacccgcaccacgctgggccatttcttcaagcgcaagcgctttcatttttccaccgataccaacggcggcgagcgggcgatggtgccgatcggcaactacgagcgggtgatgcctctggatatcctgccgaccatactgctgcgcgatctgctggccggagacaccgacagcgctcaggcgctgggctgtctggagctggatgaagaagatctggcgctgtgcacctatgtttgccctggaaagtatgaatatggcccggcgctgcgcagcgtgttaacccggattgagcaggaaggataa

SEQ ID NO: 213896 - DNA, 741 bp, Klebsiella pneumoniae
atgcgcaaaatcgcattatttattgcgatgcttctgttgccgtgcgtgtcatttgccgggctgctcagcagcaacagcccgacaacgccggtaagcaaagaatataagcagcaattaatgggttcaccggtttacattgagatctttaaagaagagcgcatgctcgacctttacgtcaaaatgggtgagacctaccagctcctcgacagctaccggatctgcaactactccggtggcctcggtccgaaacagcgccagggcgatttcaagagtccggaagggttctataacgtcacccgcagccagctcaaacccgacagccgcttctataaagcgattaacatcggcttcccgaacgcctacgatcgcgcccatggttatgaagggaaatacctgatgatccacggcgactgcgtctcagtcggctgctacgccatgaccgacagcggtatcgatgagatcttccagttcgtgaccggcgccttagtcttcggccagccaagcgtgcaggtgagtatctatccgttccgcatgaccaacgccaacatggaacgccacaaatactcctactacgcggatttctggaaacagctcaagccaggctatgactatttccagcagacccacaaaccgccggtcgtatcagtgaccgacggccgctatgtggtgagcaagccgctcagccacgaggttgtccagccgcagctggcctcaaactacacgctccccgagacaaaataa

SEQ ID NO: 213897 - DNA, 768 bp, Klebsiella pneumoniae
atgtgcgaactgctcgggatgagcgccaatgtgccaaccgatatctgttttagctttaccgggctggtgcagcgcggcggcgggacggggccgcataaagacggctggggcatcaccttctatgaaggtaaaggctgtcgcacattcaaggatccccagccgagctttcagtcgccgatcgcgaaactggttcaggattaccccattaagtcctgttccgtcgtcgcccatattcgtcaggccaaccgcgggagggtggccctggagaacacccatcccttcacccgcgaactgtgggggcgcaactggacctatgcgcacaatgggcagctaaaaggctataagtcgctgaaaaccggtaattttcatccggtaggtgaaaccgacagtgaaaaagcgttttgctggctgctgcaccgtttaaccgagcgctatccgcgcacgccgggcaatatgctgggcgttttcaagtatatcgccaccctcgcgggtgaactacgtgagaaaggggtgttcaacatgctgctgtcggacgggcgctacgtaatggcgttctgctcgaccaatctgcactggatcacccggcgagcgccgttcggcgtggcaaaactgctggaccaggatgtggagatcgactttcaacgcgagaccacacccaacgatgtggtcacggttatcgccacgcagccgctgacggccaatgaaacctggcataagatcatgccaggcgagtgggcgttattttgtctcggggagcgtgtagtttga

SEQ ID NO: 213898 - DNA, 582 bp, Klebsiella pneumoniae
atgtaccaggatcttattcgtaacgaactgaacgaagccgcggaaacgctggctaactttctgcaggacgaagccaatatccatgctatccagcgtgccgctgtcctgctggcggatagctttaaggcgggtgggaaagtgctgtcctgcggtaacggcggttcccattgcgatgcgatgcattttgcggaagagctgaccggacgttatcgcgaaaaccgcccgggttacccggccatcgcgatctccgacgtcagccacctctcctgcgtgagcaatgattttggctatgagtatgtgttctcccgctacgttgaatccgttggccgcgcaggcgatgtgctgctcggtatctccacgtctggcaactccggcaacgtgattaaggccattgaggccgcgcgggcgcaggggatgaaagtgatcaccctgaccggtaaagacggcggtaaaatggccggtagcgctgatgtggaaattcgcgtgccgcactttggctacgccgaccgcatccaggagatccatatcaaagtgatccacattctgattatgctgatcgaaaaagagatggcgaaaggctaa

SEQ ID NO: 213899 - DNA, 2445 bp, Klebsiella pneumoniae
atgatgattttgagtattgttgcaaccgtcgttttactcggcgcgctcttctatcaccgggtcagcctgctgctcagcagcgtgattttgctcgcctggaccgcggcgctcggcgcggccggagtgtggaatatctggctgctgctgccgctggcgatcatactgttgccgtttaactttgcgcctatgcgtaaatccatgatttccgcaccggcgtttcgcacattccgcaaggtgatgccgccgatgtcgcgcacggaaaaagaagccatcgacgccggcaccacctggtgggaaggcgatctgtttcgcggcaatcctgactggcaaaagttacataactatccgcagccgcggctgaccgccgaagagcaagctttcctcgacggcccagttgaagaagcctgccggatggctaacgacttcgccatcacccacgaaatggccgatttgccgccggagctgtgggcctatctgaaagagcaccgcttcttcgcgatgatcattaagaaagagtatggcggacttgagttctccgcttacgctcaggcacgagtactgcagaaactctctggcgtctccggcatcctggcgatcaccgtcggcgtcccgaactcgctgggtccgggcgaactgctgcagcattacggtaccgaagaacagaagaatcattatctgccgcgtctggcacgcggcctggaaatcccttgcttcgctctcaccagcccggaagcgggctctgatgccggcgccatcccggataccggcgtggtgtgcatgggcgactggcagggtcaacaggtgctggggatgcgcctgacctggaacaaacgttatatcacgctggcgcctatcgccaccgtgctggggctggctttcaaactctctgacccggatcgtttgctgggcggagaagaagagctgggtatcacctgcgcgctgatccccacctccaccccgggcgtggaaatcggccgtcgccacttcccgctgaatgtgccgttccagaacggtccaacccgcggcaaagatatcttcgtgcctatcgattacatcatcggcggcccaagcatggccggtcagggctggcgcatgttggttgaatgtctatcggtcggccgcggtattactctgccgtccaacgccaccggtggtctgaaatccgttgccatggcgactggcgcttacgcccatattcgccgccagttcaaaatctccatcggcaaaatggaagggattgaagaggcgctggcgcgtatcgccggtaacgcctatgtgatggacgctgcggcgtcgctgatcacctacggcatcatgctcggcgagaaacctgcagtgctgtccgctatcgtgaaatatcactgcacccaccgcggccagcgctccattatcgacgcgatggatattaccggcgggaaaggcattatgctgggcgaaggcaacttcctcgcccgggcctatcagggcgcgcctatcgccatcaccgtggaaggcgcaaacattttgacccgcagcatgatgatcttcggtcagggggcgattcgctgccatccgtacgtactggaggagatggccgccgcgcagaataatgacctgaacgcctatgacaagctgctgttcaaacatatcggccatgtcggcagtaataaagtgcggagtttctggctgggcctgaccggcgggcgcaccagcagcgcgccgactcgtgacgccacccgtcgctactatcagcaaatgaatcgtctgagcgccaacctggcactgctgtcagacgtctcaatggcggtgctcggcggcagcctcaagcgacgcgaacgtatctccgcccgtctgggggatgtgttaagccagctgtacctggcctcggcggtgctgaaacgctatgacgatgaaggacgcaatgaagccgatctgccgctggttcactggggggtacaggacgcgctgcaccaggccgagcaagccattgacgatctgttggacaatttcccgaaccgtctggtggcaggcgtaatgcgcctggtcatcttcccgaccggccgtcatcatcatgcgccatcggataggctggaccaccaggtcgccaaaattctgcaggtgcccagcgccacgcgctcccgcatcggccgcggtcagtatctgacgccgagcgagcataacccggtaggcctgctggaagaggccctgctggaagtgatggcggccgatcctatccaccagcggatctgcaaagagttgggtaaaaatctgccgttcacccgtctggatgagctggcccacaacgcgctggccaaaggattaatcagtcaggatgaggccgccattcttacccgtgcagagcatagccgtctgcgcagcattaacgtcgacgactttgcgccagaggagctggcgacaaagccggtaaagctgccggaaaaagttcgtaaagttgaagctgcataa

SEQ ID NO: 213900 - DNA, 771 bp, Klebsiella pneumoniae
gtgcctggcctgaaaatttcgctgttgcaacaaccgctggtctggatggacggccctgccaacctgcgccattttgatcgccaactggaaggaatcaccgggcgcgatgtgattgttttaccagagatgtttaccaccggctttgccatggaagcggcaaaacagtctttacccgaggccgacgtggtggagtggatgcatgcccgggccgcgcaatcccaggcgctgattgccggcagcgctgcgctgcaaactgaacacggcgctgttaaccgcttcctgctggtcgagcctgacggtacggtgcaccattatgataaacggcacctgttccgtatggccgatgaacatcatcactatgaggccggaaaccagcgcgtggtctttgaatggcgtggatggcggatcctgccgctggtctgttacgacctgcgctttccggtatggtcgcgtaatcagaacgactatgatttggcgctgtatgtcgccaactggccggcgccgcgctcgctgcactggcagtcgctgctgatcgcccgcgcgattgaaaaccaggcctatgtcgccggctgtaaccgggttggcactgacggcaacggccatcattaccgcggcgatagtcggattatcaatccccagggggagattatcgccaccgccgatccgcatcaggccactcgtcttgatgccgagctgtcgctgagcgcccttcaggaatatcgtgaaaaattccccgcctggcgcgatgccgatcctttcacgatcggctaa

SEQ ID NO: 213901 - DNA, 591 bp, Klebsiella pneumoniae
gtgacacctaccctgattagcgcctttttaacttacactttgatcaccgccctgacacccgggcccaacaatatcctggcgctgagcagcgtcacttcccatggtctacgccgcagcctgcgggtgctggccgggatgagcgtcgggtttattatcactatgttgatttgcgcggctttaaccttttcgctggttgaactcgactcacgctttaccctggtattgggatggattggcgcggcgtacatcctgtggctggcctggcagattgccaaaagcaaaccggcgacagggatgccgagtgtagaaccggtaggcttttgggcaagtctggggctgcagttcgtcaacgttaaaattattctgtatggcatcaccgcgctttctacctttgttctgcccgttactcgcgagcctgtttggcttatcagcgtgagtctgctgctggcggcgattggcgcgctgggaaatctgtgctgggcgctggcggggcatctgtttcagcgcctgtttttgctgtacgggcggcaactgaactggatgctggcagcgttattggtctactgtgctgtgcggatcgtggtggaataa

SEQ ID NO: 213902 - DNA, 882 bp, Klebsiella pneumoniae
atggatctgcgacgcttcatcaccttcaaaactgttgtcgaagaaggttcctttctgcgcgcagcgcagaaactatgctgcactcagtccaccgtgacttttcatatccagcagctggagcaggagcttgccatcccgctgtttgagaaaatcggccggcggatgtgtctcaccgccgccggtaagaaggtcctgccgcatgtctacgacctgactaaagtgatggcctcgattcgtcaggcggcacgccaggacgatgagcccggcggcgaacttcgcgtcgccactggcgaaacgctgctggcgtataaaatgccgcgggtgctgcagcgttttaagcaacgcgctccgaaagtgcgcctgtcgctgcagtcgctcaactgctacagcatccgcgatgcgctgcttgccgacgaggtcgatttgggggtgttttaccgggtgggtaacgatgacgcgctcacgataatggagcttggccagcagtcgctgacgctggtcgcatcggtcgagcaggcgccggtagacttcatgcgcccgcggcagcatatcccgctgagctttatcatcaacgaaccccagtgcgtgttccggcagatttttgaaagcaccctgcgccaacgcgaaattactctggagaacaccattgagctgtggagtattgagagtatcaagcagtgcgtggcgggaaatctgggagtgagttttctgccacgctttgcggtggaggacgagctcaagcgcgggacgctggttgagctgccattcagcgagacgccgttgacgatccatgcgctctgcgcccaccatgccgggaaggctatcagtccggcgatgcgggtatttatgcagtgcatgcaggaggaacaagaggtgcgctga

SEQ ID NO: 213903 - DNA, 741 bp, Klebsiella pneumoniae
atgaccgctatgagcactgcaattacgcgccagattgttctcgataccgaaaccaccggtatgaaccagatcggggcacactacgaaggacacaagatcattgagatcggcgccgtggaggtgatcaaccgccgcctgaccggtaacaattttcacgtctatctgaagcccgatcggctggtggatcctgaagcattcggcgtacacgggatcgccgatgagttcctgctggataaacctacctttgccgacgtggctgatgagtttatggattacatccgcggcgcggagctggtgatccataacgcctcgttcgatatcggctttatggattatgaattcagtaagctaaaccgcggcatcggaaaaaccgagaccttttgtaaaatcaccgacagtttggcgctggcgcggaaaatgtttccaggcaagcgcaacagcctcgatgcgctatgttcgcgttacgaaatagacaacagcaagcgtacgctgcacggggcgttgctcgatgcccagatccttgccgatgtctatttgatgatgaccggcggccagacttcgatggcgttctctatggaaggcgaaagccagcagcaggcgggagagatgggaattcagcgcgtcgtccgcgccggcagtcagttacgcgtggtttatgcctcagatgaagaactggcgaaccatgaatcccgcctcgacctggtacaaaagaaaggcggaagctgcctgtggcgtgcctga

SEQ ID NO: 213904 - DNA, 468 bp, Klebsiella pneumoniae
atgctcaaacaggtagaaattttcaccgacggctcttgcctgggtaatccaggacctggcggctacggcgccatcatgcgctaccgccagcacgaaaaaaccttcagcgctggctaccgtctgaccaccaataaccgcatggaactgatggcggcaattgttgccctggaagcgttaaaagagcattgcgaagtggtgctcagcactgacagccagtatgttcgtcaggggatcacccagtggatccacaactggaaaaagcgcggctggaaaacggcagagaaaaagccggtgaaaaatgtcgacctctggcagcggctggacgccgcgcttggccagcataaaattaaatgggaatgggtaaagggccatgccggccatcctgaaaatgaacgctgcgacgagctggcgcgcgcggcggcctcccaccccacactggacgatgtcggctacctgcctgagagttaa

SEQ ID NO: 213905 - DNA, 723 bp, Klebsiella pneumoniae; identical to SEQ ID NO: 135447

SEQ ID NO: 213906 - DNA, 756 bp, Klebsiella pneumoniae
atgaatcttatcagtattcccgcgtttcaggacaactacatctgggttctcagtgagaataacggccgctgcatcatcgtagatccaggcgaagccgcgccggttctggcggccatcaaggaaaaccagtggcagcccgaggctattttattgacccatcatcatcaggatcacgtcggcggcgtaaaacaattacgtgaaaaattcccttctatagtggtttacgggccggcggaaacccaggataaaggcgtcattcaggtggtaggcgatggcgatcggctgtcaattctcgggcacgatttttccattttctctacgccaggtcacacattaggacatatctgttactacagcgaaccttatctgttctgtggcgatacgatgttttccggcggctgcggaaggctgttcgaaggtacagcagagcagatgtatcaatcatttatgaaaattaatgcccttcctgaagaaaccctcatatgttgcgcacatgaatatacgttagcgaatatgaagtttgcattgagtatcctgccagatgatagggacataaacgattactatcataaagttaatgagttacgtgcaaaaaaacaaaaaacactacccgtaactctgaaaaatgagcggcgtataaatttatttttacgcgtaaatgatattgatttaattgacaaaattaacaaagaaacaaatttgcaacactctgtggcgcgatttgcatggttaaggtcaaagaaagatgacttctga

SEQ ID NO: 213907 - DNA, 1155 bp, Klebsiella pneumoniae
atgggaataccggataatccccggattcgcgaacagaaacagaagtacttaagaaataagagctatctccacgatgtaactttacgggcagagccgtatatgtactggatagccgggcaggttaagaaacgtaacatgccaatggaactggtattactacccatagtggagagcgcttttgacccacacgcgacgtctggcgccaatgccgcaggcatttggcagatcattccgagcacagggcgcaattatggtttaaaacagacccgcagttacgatgcgcgtcgtgatgtcgtcgcgtctactaccgcggcgctggacatgatgcaacgtctgaacaaaatgttcgacggcgactggttgttaacggtcgcagcctataacagcggcgaaggccgggtcatgaaggcagtaaaagcgaaccgttcgcgtggcaaacccaccgatttctggtcgctgtctctgccgcatgaaacgaaaatctacgtcccgaaaatgctggcattgagcgacattctcaaaaacagcaaacgttacggcgtaaagctgcctacggctgatgaaagccgtgcgctggcgcgcgttcgcctcgacagtccggttgatatttctcagctcgcggacatggccggtatgccggtcagcaagctgaagacgttcaatgcgggcgtaaaagggtcaacgctgggcgcgagcgggccaaagtacgtcatggtgccgcagaagcacgccgcacagctgcgtgaatcgctggcctctggcgacattgccgccgtgcagccgacgcagctcgcggacaatacgccgctgaccagccgtagctataaggtgcgttctggcgacaccatttccgggatagcttcccgtcttggtgtgacgacccgcgatctgcagcagtggaataacctgcgcggctctggattaaaggttgggcagaatctggttattggcgcaggcagcagcgcccagcgtctggcgaacaacagcgatagcatcacctatcgcgttcgtaaaggcgattcgctgtcgagcatcgccaaacgtcacggcgttaatattcgcgacgtgatgcgctggaacagcgataccgacaacctgcgccctggcgatcagctaacgttgtttgtgaaaaacagcgatcgaccagagtcctga

SEQ ID NO: 213908 - DNA, 771 bp, Klebsiella pneumoniae
atgacaacacgctctcaccatgacaacgtcgaaaagcagttcggctcccaggccagcgcctatctgaccagcgccgtacacgcctctggtcgcgatctgcagcggctggcggaacggctggctgattttcctcaggcgaaagtgctggatatgggctgcggggcagggcacgccagctttaccgcggcgggacaggttgccgaggtgaccgcctatgatttatcgagccagatgctggaggtcgttgccgccgcggcaaaggagaaaggttttagcaatatcgtgacccagcaggggtacgccgaaacgctgccgttcgctgatgccagctttgatgtggtgattagccgctactctgctcaccactggcatgacgttggccaggcgctgcgtgaggtgaaacgtgttctcaagccgggcggggtgattatcgtgatggacgtgatgtcgccgggtcatccggtacgtgatgtctggctgcagacggtggaagccctgcgcgacacctcgcatgtgcgtaattattccagcggcgagtggttgacgctggcgactgaagcggggctggtggttaaccagttgttgaccgatcgcctgccgctggagttcagttcatgggtggcgcggatgcgcactcctgagccgctggtggaggcgattcgcttatatcagcagagcgcttcggcggaggtcaaagcgtacttcgagttacaggaggacggatcgtttaccagcgataccattctgttcgaagcgcataaagcggtttaa

SEQ ID NO: 213909 - DNA, 807 bp, Klebsiella pneumoniae
atgcccaaattgcgaaagaacacctacgccatgcgctatgtcgccggacaacctgcggagagaatattgcctccgggggcgtttgcgggcgtaagtccggtttatcccgccggcacgccgttaagcagcgatgagaagatccgcgtgctggtatggaatatcttcaagcagcagcgcgcagagtggcagtcggtcctcaaaaatttcggcaaagatgcgcatttggtcctgttgcaggaggcgcaaaccaccccagaactggtccggttcgcgacttcaaactatctggccgccgatcaggtgccggcgctggtattgccgcagcatccttccggcgtaatgacgctggcctccgcgcaccccatctattgctgtccgctgcgcgagcgcgagcctattttgcgattgccgaaatcggcgttagtgaccgtttatccgctgccggatgcgcggttgttgatggtagtcaatatccatgccgtcaactttagccttggcgtcgacgtctacagcaaacagctgctgccaattggcgatcagatcgcccatcacagcgggccggtgatcatggccggcgacttcaatgcctggagccggccgcggatgaatgcgctgtaccgctttgcgcgtgagatgtcgttacgcgaagttcgtttctcagacgatcagcgccgccgcgcgtttggtcgtcccctcgattttgtgttctaccgtgggttaagcgtgcacgatgcttccgtgctggtgacccgcgcctccgaccacaacccgctactagtcgaattcagtcccggcaagcctgattaa

SEQ ID NO: 213910 - DNA, 1191 bp, Klebsiella pneumoniae
atgccactggcgctatttgccttaaccatcggtgccttcgcaattggcaccactgaatttgtgattgtcggcctggtcccgaccattgctcagcaactctctatctccctgccttcggcgggactgctggtctctatctacgcgctgggcgtggcgatcggcgccccggtactgacggcgttgaccgggcgtatgccgcgtaaacagctgctgctggcgttgatggtcctgtttacggcgggtaatgtgctggcctggcaggccccgggctatgaaacgctgatcctggcgcgactgctgaccggcctggcacacggcgtgttcttctctattggctcgacaattgctaccagcctggtggcaaaagagaaagcggcctcggccattgccattatgttcggcggcctgacggtcgcgctggtaaccggggtaccgttcgggactttcatcggccagcattttggctggcgggaaaccttcctcgcggtatcgattctgggcgtcattgcccttatcagcagcctgattctggtaccgaataatattccgggccgcgccagcgccagcctgcgcgatcagatgaaagtattaactcatcctcgcctgctgatgatctacaccattaccgcgctgggctacggcggcgtgtttaccgcctttaccttccttgcgccgatgatgcaggagctggccggtttcagtccgtcagcggtgagctggatcctgctgggctatggtgtctcggtggctataggtaacgtgtggggcggcaaactggccgataagcatggcgccgtctccgcgctgaagtttatcttcgccgcgctggtggtgctgctgctggtcttccagttgaccgccagcgttcactatgccgcgctggcaacggtactggtgatgggcatcttcgccttcggcaacgtgccgggtttgcaggtgtatgtggtgcaaaaagcagagcagtacacgcctggcgccgtcgacgtcgcttccggcctgaatattgccgcctttaacgtcggcattgctctggggtccatcgtcggcggacagacggtcgagcggtacggtctggcgcagacgccgtggattggcgcgatgattgtgctggtcgctttgctgttggtggtcctgagcggacgtttagataaattgccacgccgttcggcagcgctttctcccgaaggctaa

SEQ ID NO: 213911 - DNA, 906 bp, Klebsiella pneumoniae
atgagagccacatcagaggagatcgccatctttgtggcggtggtggaaagcgggagtttcagccgggcggccgagcagctcggacaggccaactccgccgtcagccgggcggtcaaaaagctggaatcaaagctaggcgtaagcctgctcaatcggaccacccgccagctcagcctgacagaagaaggcgagcgctattttcgccgtatgcaggtggtcttgcaggaaatggcggcggcagagaacgatctgctggagacgcgcacgacgccgcggggcctgctgcgggtagatgccgcgacgccggtgatgctgcattttctcatgccgctggtgaagccatttcgcgagcgctacccggaaatgacgctgtcgctcgtctcgtctgagacgtttatcaatctgattgaacggaaagtggatgtggccattcgggccgggaccttaacggattccagcctgcgcgcccgaccgctgtttaccagctatcgtaagatcgtcgcctcgcccgactatgtcgcgcgctacggtatgccgcagcatccatccgatctgaaacagcatcactgcctcggcttcaccgagccggtatcgctgaatacctggccggtctcctgttgcgatggccagctgttagagatcgaagcggcggtgtcatccaatagcggcgaaacgctcaagcagctgtgcctgaccggcaacggtattgcctgcctgtcggattacatggtggataaagagattgccagcggagagtttgtcgagctactggcggataagcgcttaccggtggaaatgcctttcagtgccgtctattacagcgaccgggcggtcagcactcgcatcagggcatttattgattttctgagcgaccacgtaaaacagctcccgaaggagctgtcgtaa

SEQ ID NO: 213912 - DNA, 804 bp, Klebsiella pneumoniae
atggcaatccctgcatttggtcttggcaccttccgtctgaaagatgatgttgttatcgcatccgtaaaaaccgcgctggagctgggctatcgtgctatcgacaccgcgcaaatctatgacaacgaagccgcggtgggtcaggctatcgccgaaagcggcgtgccgcgtgatgagctgttcatcactaccaaaatctggatcgagaacctgagcaaagacaaactcatcgccagcctgcaagaaagtctgcagaagctgcgcacggactatgttgacctgacgctcatccactggccggcaccgaacgatgcggttgccgttgaagagtttatggcagccttgatggaagcgaagaagctgggtctgacccgtcagattggtatctccaacttcactattccactgatggagcgcgcgattgccgccgttggcgctgaaaacattgcgaccaaccagattgaactctcgccgtatctgcaaaaccgtaaagtcgtcgactgggcacgtgagcacggcatccacatcacctcttacatgacgctggcttatggtaaggcgctgaaagatgaagtgattgcccgtatcgcggcgaaacataatgcgactccggcgcaggttatcctggcatgggcgatgggcgaggggtacgcggtgatcccgtcctcgacgaagcgtgataacctggccagcaacctgaaggcgctggatctgcagttggatgatgaagatcgacaggcgatcgctgcgctggattgcaacgatcggctggtgagcccggaaggtctggcgccgcagtgggattaa

SEQ ID NO: 213913 - DNA, 372 bp, Klebsiella pneumoniae
atgattactgtaataggttcaaataaaggcggtgcttcaaagagcacaaccgctacaaacattgcaattgctttagcattacgcggaaaggatgtttgccttttggatgcggatcttcagtcatctgcggcaaagtggcatgcttctcgtgaggaagccgacctgctacctcgcattacccttatccagaaatatggcaacatcagccagactttgcgccagctcgatgaaaagtttgatcacgtaattgtagatgtggcaggtcgcaatagccgcgaactcgctaatgctggggctgtggctgatataataattgctccgcacttgtgctcacagttcgatctggacactttggaagagcttgacgtatag

SEQ ID NO: 213914 - DNA, 519 bp, Klebsiella pneumoniae
atgtacgtaaaacccacagatgttttatcccccagaggccatgtagaggtgctggatgtgctttacgatgcgggcgaatgggacgtgtccgtcgcccgcattaactaccgggacgaactgaaccagcccttcagcgaatgtaccggcatacgctggaatggtaatctggatgagggtagtaaaggtatgccgctgtcgcggggatatcccgtgtggtttgtaatccccaaggagtttgccgcgtgcattcaggctagagcactggagctcaacaccgataatattcctgcagtcattgccgaaattaaaatgaaagtcgagtctgagcgcgcatcgaaccctaacacttacatgttggaatacaaaacagcgcgtcagctgtcagaaactgacgtcgatgcgatactgggcggtctgaaagacgtcgggatttttgaggctttcacggaaggcgcccatacgatcgatatcaacggtgttcacaccctgatgctgatgtttccggccaaaagaaaatag

SEQ ID NO: 213915 - DNA, 588 bp, Klebsiella pneumoniae
atgtcacgagtttttgcttactgtcgggtctccacgcttgaacagacaacggaaaatcagcgcagggaaattgaagcagccggttttaccgttaaaccacagcgcctgattgaggaacaaattagtggttcggtagcggccagcgaacggcccggttttgccaggttacttgaccgcatggaaaatgacgatgtgctgatagtgaccaaacttgatcgtctgggtcgtgacgcaatggacgtgcgaaagaccgtagagcagctggcagcgtccggtattcgtgtacactgcctcgcgctgggtggcgtggacctcaccagcgcggccggaaagatgaccatgcaggtcatttcggcggtagcggagtttgagaaggacctgctgattgagcgcacacattccggcctggcaagggccagagcagccgggaaacggtttggtcggccaccggcgctgaataacgaacagcgacagaccgcgcttgagcagctgaaggcaggggccagtatcagcgccgttgcccgccagcttggaacctcacgacaaaccatcatgcgcctgcgtgacgatgcggtgagctcggagtga

SEQ ID NO: 213916 - DNA, 954 bp, Klebsiella pneumoniae
atgtcaggcagaaaaggaaagggcgggaagtcaccggttccccatgacgggctgtttaaaaccttcctgacccatacagataccgcccgggattttctggccctgcatctgccggcagagttactgcagctgtgtgacctgaccaccctgcagctggagtcaggctcctttattgaggaaaacctgcgaacctattttgccgacgtgctgtactccctgaagaccaccgagggtgagggatacatttatacgctcattgagcatcagagcagtccggacaggcatatggcgttcagactcatgcggtactcaattgccgccatgcagaaacacctggacgccggccatgagcagctgccgctggttattccgctgctgttttcccacggccgtggcagcccctggccctggacgctgaactggacggagctgtttgccagcccggaaacagcacgaaaactgtataccggtgattttcccctcattgatgttggcgccatcgatgacgatgaaatcatgaagcaccgccggatggccctgctggaactgatgctgaagcacgcacaaacccgcgacctggctgagctgaccgaacatctggtcaccctgctgattgcgggttacactaccgatgagcagctggtcactgtgatgaactggatgctgcagacgggagacacggccagacccgaggcattcctgcaggaactggcccgccggtcaccgcaacacgaggagattttaatgactattgcacaacgcctggaacagaaggcccgtgaagaaggtatccagcttggcgaacagcgcggcatcgagaaaggacgctctgaaggcgagcgcgaagcgaccctgagaattgcccgcacgatgctgcagagcggcatcgaccgcaatacagtgatggccatgaccggtctgactgaagaagatctacagcgcatcacccactga

SEQ ID NO: 213917 - DNA, 801 bp, Klebsiella pneumoniae
gtggttgtctgcctgctgccggtaacgttcggcaacggcagcaacaacgccaggatcgctgtcatggctgcggtgtatggggttgtacgccggaaccgccgaaatttccgtgatggggttgtaagcggcaagccgccaaaattttgtatatcatggtgtagtgaacgaggtgcagccaacttaaatagaaagaggacagccccccgcgctggtgatgatatgagaaatatggaaaaaacgggtcacctggcatggtgcgcacttatcgccctgctgactgccagggaagatggcctggtggcgtcggagtcgcaggaaaacctgtttatcacccgctggtttgcgcaggtgaaaaaacagcgtcgcttttctcgtgacgtggccaccgatgttgactggatactcaaccagggccgtacgctcggcgttcgcgcgcggctgcgccataagctggattatctctggcgtagctgcaccggcgaactgtctgagcagaacgacctttttcgcctgacctacgcgctggaactggcgaagcagtacgactgggggtatcacgtcctcagcgacagtgagtggagcggtcgaaataagattctgccatcggcatcggtgaacagtatttgtctgctgaaaagcgcgctggatattggttttaatgatgacgggacgcaggtgctacctgtgccggcaagaattggcggccgcgccgaggggcttaatgcgctgctgaaaagctgtggctgggaggccgtcagcaacgacgatcactggaaactggtgaccatcagcgctggttga

SEQ ID NO: 213918 - DNA, 906 bp, Klebsiella pneumoniae
atgttgctgaccgactacattgacagcgtgtacggaacggcgcgcggaaaccgggcgcgctttctgaaggacaacccggatatccttccccaggagctgagccgctggcttaaagctggcctgaaaatcagacctgagaccggagaaatctacaaacccgtatcacgtcgcgtcaggataccgtcagcggttgccgccggagctggcgtctttctctctgatgacctgcgtgaacgtgtcgcatcgctggccaccgcacagaacgtgaccactgatgccatgctgaatgccctggtggagcgcgaggagctgtgccgtaaactgtcccttcagacggagaatagtgacgccgtgccggaacagcagattgccggcattgtcagccggtacttttcagcactgtctgagcgcagtgaaaccggtgcctggcacagggtgctggaggggctggtccgggaactgacggagtctggcctgctgtcattccataccggtaatattgccgagagccgccggctgaacattccccgcaccgcgtattactggtacggcggttttgtcgcaaagcgggtggccatgatgctgggctgctacgatatctacctgtggaacgaaatgatgcggccggacagcgacgtggtctttgtgggcgatgcgcgcaacgtggtggcctgctacttcatctgccagcagatgtgccgcctgctgaaagccgtgaggctgaactggcgtaagcaacaggggacatggggaagccgggcagagctggatgaggctgcgcaccggtacacgcagcggctggcggaggggataatggataatggtatttatattggtggcgacgagcagaactcttaccgactgtacgattatgcggaaaaacattacgcctgggccatgcgctga

SEQ ID NO: 213919 - DNA, 1020 bp, Klebsiella pneumoniae; identical to SEQ ID NO: 138913

SEQ ID NO: 213920 - DNA, 255 bp, Klebsiella pneumoniae; identical to SEQ ID NO: 138912

SEQ ID NO: 213921 - DNA, 558 bp, Klebsiella pneumoniae; identical to SEQ ID NO: 138911

SEQ ID NO: 213922 - DNA, 309 bp, Klebsiella pneumoniae; identical to SEQ ID NO: 138910

SEQ ID NO: 213923 - DNA, 651 bp, Klebsiella pneumoniae
atggcgaaaatactaatgatggcaggcagtaccattgttgtgctgagtctgctggggtttctggttttgcttctgaaaggacgggccgtaacgaagacatctccggtcctgatgtcactgaaagccctggggattcgcccctcagaggccgaacagcgattgtgtcgccagcgggtctgggtgggaaatgacacgctgatgacaccacgggaacaacacttttaccgggcactgctgaggcataccagccgtaagcgctggctgttatgcccgcaggtccgggtggcggatattgccacactcgctccccacatccggccacgttcccggacctggtggcaactcttccgcatggcgtctcagtggcactgcgacgtggtcatcgttgatatccgcacctttgctatcgttggcgcgattgaacttgatgacgcctcacatctgaaaaaacagcgtatccggcgcgatatcctgctggaagaggttctgaggcaggcgggtatcccgctgctgcgtgaccgggactcagagaaactggtcaggagagtcagtgagtttctgaaataccgtgaagctgaaaccgacgaaatatctgcatccggcacagctttaccgacagcgcatactgaacgcagggaggacgaaaaatga

SEQ ID NO: 213924 - DNA, 624 bp, Klebsiella pneumoniae
atgttgcggtattttattctgcgccctgagcagcagctattctgttatttatacggtatcgcgctggcgctggtcctgatggttttattttctcctgcatcccgggcaggcggattttatctggttgcgttatctgtcgcgctgttgtgggccggcctggccctgtacacccggcacaccgaccggatgagaagaccggaggtctcaccgcaggtcggtatccgtgacggtattcaggtggtggccatactgccgcgccatgaaaaggcccgtctggaatgggaaattctgcaggatgctgacgtgtatcgccgtcagatggttgcccttctggacctggctcaacggtgcgtcagccgggggctgatatacgcgccggcggtgatgctggctggtctgtgctttcttgcctggggatttccgcaggatgctgttcgggtcttcagcgctctgcgggaaatgcccgccacagagcttgtgcatcagactggttttgtcctgcgctacgtcctgctgatttccgtcatgtcggctctgattgccgatgttctggccgggagaggattgccgaacgcctttcgccgcgcattgctggacaggctgccggcagaggcgaaggaataa

SEQ ID NO: 213925 - DNA, 267 bp, Klebsiella pneumoniae
atggttaaagatgaaatgacagatgagtctgctttacctgagtctgaacaggcacggagaatgataaggcgtgcggtactgcggatggtgggttcgggccagcttcactccagggacgatgtgattcgctacctgataaaggaaggtggctttgacattctgagtgtgaccgacaccagtgttactctgtgtgcgccggatgagccggaagagacgctgacgctgacggggtgggtattttcatcatcattcaggctggctgactga

SEQ ID NO: 213926 - DNA, 348 bp, Klebsiella pneumoniae
atggattttgaagtacgtaaacaaaaggctctggcgataatggtcaggcataatatgtttaaatgtaattacgcaccgcctctgatacgttttctgtggtggctgggtgtaaaaattcccccgctgccgtttgcttcgttctggcaggttttcgggttgatggcaggcagtttctccgtaatgtacgggctgttgatgtatcttatggtctggcgtccacaggggatgagtcctctgttcgcttgtgcggtcagtcttatcacgagcgtgttatttggcttgacgatggcttttttttacctgtggctacgaagagtgcataaattacctgactggaaagacctgtaa

SEQ ID NO: 213927 - DNA, 594 bp, Klebsiella pneumoniae
atggcagaagaaaaacgccctgtactgagcctcaaacgaaagcctgcggcggaaagcacgggaacggatgtcacaagcgcaccgggcgtcgttcgccgcaaaaaagtcgtggtggtctcgacgccgcccgcctggaaggtcaagaaagagaagctggagcaggcgaaaaaggctgccgaagccgctgcacgccaggcagcagaagaagcggtgaaagcagcaaagactccgcctcctgtacgttatcttcagctgctgccgccggagcaggctatcatgaccctgaaggcgttctggccgcagctgtttgagggtaacgccccgcgcctgctggcaaccgggatgcgtgaacagctgtttgcggacattacagagcgtgacctgccgttatcgcataagcaggtgattaagtgcctgaaaagcctgacccgttctgcaggttatctgtcccggatgcgggaaggcgcttcccgctatgacctgcaggggaatgcggtggccaccgtcactactgaagaagcgaggtatgccggtgagcgcatgatgaaggagcttctgcgtactgagcgcatgcgaagccagtcgtctggctga

SEQ ID NO: 213928 - DNA, 726 bp, Klebsiella pneumoniae
atgacaacatacacaatgcgttttagtgcggcagaccgctggctgcaggctctcctgacctggacgcccgggcagacggatatcatcaaaacggtggcgctgcttctgatggtcactgaccacaccggactcctgttggcgcacaacaacgagcttatgcgtctcctgggccggggctgctttccgctgttcggtctggtctgggggatgaatctggcccggcacgcggatatccgccagtcgcagttgaacagcctctggggctgggcgctcgttgcgcaggtatcgttcatgcttatcgggtacccgtggtacacgggtaatatcctgtttgtctttgccgtcaccggtcaggcgctgcggtggttcagcctgccatcctggtattgcaccctcccggcagtcggacttctgataacctggatgccgctgtctgccggcagttacggcatgacgggtgtggggatgctcatcgccagctggctgctctgccgcgcacagcatgcgacggaacggctgagttatggtgcgctgtgggccatcatggtgttactgatgaatatcaatgatgtcagtgagtcggtggccgggctggccatcgcgctgctcgtattaatggtgtgctcatcggtcggaggggagattaaacggttctggccacggcatttctttgtgatgttctatgccgtgcatctggcggtgctgggtattgtcgtctcaatgtaa

SEQ ID NO: 213929 - DNA, 5262 bp, Klebsiella pneumoniae
atgatgtcgattggctccgtcaagtcggccgggagtgccggtaattactatacagacaaagacaattactacgtcatcggcagcatggaggagcgctggcagggcaaaggggcggaagcgctgggtctggacggaaaagcggtcgacaaggccgtgttcaccgaactactgaaagggaagctgccggacggcagcgacctgacccgcatgcaggacggagagaacaaacatcgcccgggctatgacctgacgttctcggcgcctaaaagtgtctcgatgctggccatgctgggtggcgataagcgccttgttgatgcccataaccaggcggtgacggaagccgtgaaacaactggagaccctgactgcgacccgtgtcatggcggacggtaaaagcgaaaccgtactgaccggcaatctgattgtggcgaaattcaaccacgatacgaaccgcaatcaggagccgcagctgcacacccatgccgtcgtaatcaatgccacgcagaacggggacaagtggcagtctctcggcaccgatacggttggtaaaacgggctttatcgagaatgtgtacgctaaccagacagccttcgggaaactctaccgggaggcactgaaacccctggtggaaaagctcggatatgaaaccgaagtcgtgggtaagcacggcatgtgggagatgaaggatgtcccggttgaggcgttttcctcgcgcagccgggaagtcagagaagccgccggacccgatgcgtcgctcaaatcccgggatgtggcggcgctcgatacccgcaggtcaaaggaagccatcgacccggccgagaagatggtcgagtggatgaatacgctgaaggagaccggctttgacatccgtggctaccgtgaggcggctgatgcgcgggcagaagagattgcccgcgcacccgtagcgccggagaagaccgacgggccggatatcacggatgtggtgacccgggccattgccggtctcagcgaccgcaaggtgcagtttacgtatgccgatgtgctggcgcgcacggttggccagctggaggcaaagccgggggtgtttgaactggcgcggacgggcatcgatgcggcgattgaacgggagcagcttatcccgctcgaccgggagaaaggcctgttcacctcaaacattcacgtccttgatgagctctccgtgaaagcgctcagccaggaaattcagcggcagaaccacgtctccgtcacgcccgacgcgtcggtggtgcgcgaggctcccttcagcgatgcggtcagcgtcctggcgcaggaccgtccggcgatggggattgtcgccggtcagggcggcgcggcaggccagcgggagcgggtggccgagctgacgctgatggcccgggagcaggggcgcgacgtgcatatcctcgccgccgataatcgctcccgggaatttcttgccggggatgcgcgactggccggagaaaccgtcacaggcaaatctgccctgcaggacgggacggcgtttatcccgggcgggaccttaattgtcgaccaggcggagaagctgagcctgaaggagacgatttccctgctcgatggcgccatgcgccataacgtacaggtcctgctctccgacagcggcaagcgcagcggaaccgggagcgcgctgacggtcctgaaagacagcggcgtgaacacctacaggtggcagggcggcaagcaggcgacggcagacatcatcagcgagccggacaaaagtgcgcgttacagccggctggctcaggagttcgccgtcagcgtgcgtgaagggcaggagagcgtggcgcaaatcagcggcacgcgtgagcagaatgtcctgaataacgttatccgcgacaccctcaaaaatgagggggcgctcggcagccgggacatgatggtgaccgcgctgacgccggtgtggctggacagcaagagccggggcgtgcgggactactaccgcgagggcatggtgatggagcggtgggacccggagacccggaagcatgaccgctttgtcattgaccgtgtgacggccagcagcaacatgctgaccctgaaagaccgtgagggagagcgtctggacctgaaagtctccgccgtcgacagccagtggacgctgtttcgcacgaataagctgccggtggcagagggcgaacgtctggcggtactcgggaaaatccccgacacgcgactgaagggcggggaaagtgtcacggtgctgaaagcggaggccgggcagctgacggttcagcgtcccggacagaaaaccacccagacgcttcctgtcggcagcagcccgttcgacgggattaaggtcggccacggctgggtggagagtcccggccggtcggtcagcgaaacggcgaccgtctttgcctcggtgacacaacgtgagctggataacgccacgctgaaccagctggcgcagagcgggagccatatccggctgtactccgcgcaggacgcggcccgcaccacagagaaactggcgcggcacaccgcgttcagcgtggtctcagagcagctgaaggtccgctcgggagaagcagacctggaggcggccatcgcacagcagaaagccggactgcataccccggcagagcaggcgattcacctttccgtgccgctgctggagagcaacagcctgacctttacccgcccgcagttgctggccacggcgctggaaacaggcggcggcaaagtcccgatgaaggacatagaggcaaccattcaggcgcagattaaggcaggcagtctgctgaatgtgccggtggcctccggccacggcaatgacctgctgatttcccgccagacctgggatgcggagaaaagcgtcctgacgcgggtgctggaaggtaaggatgcggtggcaccgctgatgggccgggtgccgggcagcctcatgacagacctgaccgccggacagcgtgcggcaacccggatgatactcgagaccccggaccggttcactgtggttcagggctatgccggggtggggaaaaccacgcagttcaaagctgtgatgagcgccatcagcctgctgccggaagagacgcgcccgcgcgtcattggtctggggccgacacaccgcgccgtgggcgagatgcagagcgccggcgtcgacgcgcagacgaccgcctcattccttcacgacacgcagctgcagcagcgcaacggccagacgccggatttcagcaacacgctgttcctgctcgatgagagctcgatggtcgggctggcagacaccgcgaaagcgctctccctgattgcggccgggggaggccgtgccgtactcagcggcgataccgaccagctgcagtccatcgcgccgggccagccgttccgtctgatgcaacagcgcagcgcggctgatgtggccatcatgaaagaaatcgtgcgccaggtgcctgagctgagaccggcggtctacagcctgattgaccgggatatcagccgtgcgctgtccactattgagcaggtcacgcctgagcaggtgcccagaaaggacggcgcctgggtacctgaaaactcggtcacagaattcacgccggcacaggagaaagcgatacaggatgcgttgaaggagggtaaggaaataccgcctggcacgccagtgtcccttcatgatgcgattgtgaaggactacaccgggcgcaccccggcggcgcaggcgagtacgctcatcatcacgcatctgaacgcagaccgccgggcgctcaacgggctcatccatgatgcgcgtgtacagaatggcgaggtcagtaaagaggaggtgaccctgtcggtactggtcacgagcaatatccgtgacggtgagctgcgtaagctgtccacctggtcagagcatcagggggcagtggctcttctggataacacctaccagcggattgagagcgtcgataaggagaaccagctcatcacccttaaggacaatgagggtaacattcgtcttctctctccccgggaggcctcagcggagggcgtcacgctctatcgcccggagcacatcaccgtctcacagggtgaccggatgcgcttcagcaaaagcgacccggagcggggttacgtcgccaacagcgtgtgggaggtgaaaacggtctcgggtgacagtgtcacgctgtctgacggtaaaaccacccgcacactgaacccgaaggccgatgaagcgcagcgccacatcgaccttgcctacgccatcaccgcccacggcgcgcagggggccagcgaacctttcgccatcgcactcgaaggcgtggaagggcgccggaaagcgctggtcagctttgagtcggcctacgtggcgctgtcgcgcatgaaacagcacgcgcaggtctacaccgataaccgggagggatggaccacggcggtcagccgttctcaggaaaaggccagcgcgcatgatgtgctcgaaccgcagaacacccgggcggtgaagaatgccggtcagctctatggtcgtgcacagccgctggatgaaaccgccgcaggccgggccgccctgcaacagtcaggtctggccagaggccgctctccgggtaaattcatctcacccggtaaaaaatacccgcagccacatgtggccctgccggcattcgataaaaacggcaaagaggccggtatctggctcagtccgctgacggacagggacgggcggctggaggctatcgggggcgaggggcggattatgggggatgaaacggcccggtttgtggcgttgcagaacagccgcaacggcgaaagtctgctggcggggaatatgggcgaaggcgtgagaacagcccgcgacaaccccgacagcggggtgatagttcgccttgccggcgacgaccgcccctggaacccggaggccatcaccggcgggcgcatctgggctgaccccctgccgaatacaccgctccctgataccggtactgacatcccgctcccgccggaagtgctggcacagcgggctgcagaagaggcgcagcgccgggaaatggaaaaacaggcggaacaggctgcccgggaagtcgccggagaggagaagaaagcgggcgagccaggcgatcggataaaagaggttatcggggacgtgattcgtggtctggagcgtgaccgcccgggcgaagagaaaacaccgctgacggatgaccctcagacccgacgccaggaggccgcgatacagcaggtcgcctcagagagtctgcagcgtgaacgtctgcaggagatggagcgggacatggtgcgggacctgaaccgggagaaaaccctcggcggcgactga

SEQ ID NO: 213930 - DNA, 2301 bp, Klebsiella pneumoniae
atgagcttcaatgccaaagatatgacgcagggcggtcagattgccaatatgcgctttcgcatgtttggccagattgccaatattatattttacgtgctgtttattttattctgggtgctgtgcgggttgatgctgatgtaccggctcagctggcagacctttgtgaacggctgcgtgtactggtggtgtacgacgcttggtcccatgcgcgatattattcgctcccagcccgtatacaccattcaatattacggccagtcgctggaatatacctcagaacaaatcctggccgataaatacactatctggtgcggtgagcagctatggaccagttttgtgtttgcggccgtcgtttccctcgttatctgtatcgtgacgttctttgttgccagctgggtgctgggccgtcaggggaaacagcagagtgaggatgagaataccggcgggcgccagctttccgacaagcccaaagaagtggcccgccagatgaagcgtgatggtatggcctcggacattaaaattggcgacctgccgatactgctgaactctgaaatccagaacttctgcctgcacggtaccgtgggctccggtaaatctgaagtgatacgccgcctgctgaactacgtgcgcgcccggggcgatatggccatcatctacgaccgctcctgtgagtttgtcaaaagctactacgacccgtcgctcgataaaatccttaacccgctggattcgcgctgtgcggcctgggatttgtggaaagagtgcctgacgctgccggacttcgataacgtttcgaacacccttatcccgatgggcaccaaagaggacccgttctggcagggttcagggcgcaccatctttgccgaaggcgcgtatctgatgcgcgaagacaaggaccgcagctacgagaagctggttgataccatgctctccatcaaaatcgacaagctgcgcgcctatctgcagaacacaccggcggctaacctggtggaagaaaaaattgagaaaaccgccatcagtatccgtgcggtgctgaccaactacgtcaaggccatccgctatctgcagggcattgagaagaatggcgagccgttcactatccgggactggatgcgcggtgtgcgtgaggacaggcccaatggctggctgttcatctcctccaatgcagacacgcatgcttccctgaagcccgttatctcgatgtggctgtcgattgccatccggggtctgctggctatgggggagaaccgcaaccggcgcgtgtggatttttgctgatgagcttcccacgctgcacaagctgccggacctggtcgaaatcctgccggaagcgcgtaagttcggcggctgctatgtgtttggtattcagtcctacgcccagctggaagacatctatggcgtgaaacccgccgccacgctctttgacgtgatgaacacccgggccttcttccgttctcccagcagggaaatagcggagtttgccgccggtgagattggtgagaaggaaatcctcaaggccagcgaacagtactcctacggtgcagacccggtgcgtgacggggtatcgaccgggaaagaaaaagagcgtgaaacgctggtcagctattccgatattcagacactccctgatttgtcctgttacgtcacgctgcccgggccgtatccggccgtgaagctggccctgaagtacaagccgcgtccgaaaattgctgaggggtttattcagcgcactctcgatacgcgtgtggacaccagactcagtgcgctcctggaggcgcgggaagccgaaggcagtctggcgagagcgctgttcacgccggatgcgccggagcctgaacagcgtgatgcagacagcaagacatcgcccggacagccagtgccggaaagcgctccggtctcacctgtacccgtgaagcccgtgtcgacagctgaaacgctgtctgcacagtcatccgttaaggcacaaggagcgccacaggctaaagtcgcgaccgtaccgttaacccgcccggcaccggcagcgactcctgctgctgccagtgcgacagcgtcctctgcagctgcgacggcggccacgaccggcggcaccgaacaggagttggctcagcagcctgcagagcagggacaggagatgatgccggctggcatgaatgaggacggtgaaatcgaagacatgcaggcgtatgacgcctggctggctgatgagcagacgcagcgcgagatgcagcggcgtgaagaggtcaacattaaccacagccaccgccgcgatgagcaggatgatattgagattggagggaatttctga

SEQ ID NO: 213931 - DNA, 531 bp, Klebsiella pneumoniae
atgatgatgaataataaaacgcttattaaagaagtggatgagttaaaagatgtgctttcaaagggcgatgccgaaataccgtctttttgggtatgcatgtggcccggtctttgtctggtaatatggaatattttttgcgcattaattagtgtgcgatcagagtattatgatgtcaaatacatattctgggttttgatatttcctggtgctgttggtctgattcttctgctcggggtggcgaacgctcgttctctatttttatcagttccaaagtccttcagggaaaagtcagtaatatatcgttttttttcaaaaaaacttcttgcttatgcttttgcatacatgatgataatcatggcactggctatttataatagatttttttatgactccccatttccttatgcattcatggttcttttgacaacgattttttttggttttgttatgaatttagattttggaaggtatcaattgtcactgctgacatcagtattaagcgctctcaaaggtaatgtggtggaaaattga

SEQ ID NO: 213932 - DNA, 2880 bp, Klebsiella pneumoniae
atgacgccacttgaaatctacaccatcgccgggggcgactggctgcggggcaacctgaatgccatcgcggcgttcatggggaccgccacctggtcgtccattgagaaaatgtgcatcgcgttttcggtgctgattgtggccgtcagctggataaaaaaacacagcgtgatggaccttatcggctgggtgttctccctgaccctcgtctcgatgctggttgtcgtccgtacacctgtacagataatcgactacagcaacgtggcgcaggtctacaaagtggataacgtcccggttggcctggccattccggcgtcgctgaccacgcgtgtgggtaatgccctggtacagagctacgagatgattttctccctgcccgacagtgtcacctacagtaagaccgggatgctatttggcggaaacctggtggcgaaaagcaccgattttgtttcgcagaaccccgaaatcaccaccctgttctccgactatgtccagaactgcgtgatgggcgatatctttctcaacggtaaatacacccttgaggagctgatgaactcctctgacccgtacacgctgatattttcaaagcccagtccgctgcgtcaggtacccaatcacgactataagtttcttgaaaagccggaactgggctcggcctttatcagttgccaggtggcagcgacacagcttaaacaacggctggcgctcgactcccagactggcgggaagacctggagctactatgcgcgccagctgttcggtggcaaacccaatccggaccttctgttcagccagatgataggcgacagctacggatacttctataacgccagccagagtgccgggcagattatccgccagaacgtcaccatgaatgcgctgcgtaacggtctccagagctacgcgtcccgcagcggcgacacggcaagcctggtgaacatcgccaacaccacgtcgctggaaaaacaacgactggcccaggccacgatgggacatcaggcactgcgctcactgccgatgatgcaggcggtcatcatgggcatcatgattgggatgttcccgattatgattatggcagcaatgttcaatatgatgacgctgcaggtcctgaaaggatacatgtttgctctgatatggctgcagtcctggccactgctgtatgccatcctgaacagcgcaatggcgtattacgccagacaaaacggtgtgccggtggtgctgtctgaactctctcaggtgcagctgaaaaactcagatattgcgaccaccgccgggtatatctcgatgatgataccgccgctcagctgggcgatgataaaaagtatgggggcagggttctccagtgcttacagccactttgcctcctcgggactcagttcgacgtcccaggcctcatccagcgtcgtggacggcaattactcttttgccaatatgcaaatggagaacgtcagcggctacagctggggtaccaacagttcgaccagcttcggtcagatgtcgcggcagctggggaacggtggcacggagacgcagaccggggacgggacgactatctgggatgcgcgcagttctaagctaccggttgatatcaatgtcagccggcaactggccagtgccaatcaacagatggcccgcgagacagatgtgcaggcacagagtgccctgcatggctacaacagcagcgtgacgagcgcctggaacagcctgaaacagtttggcacaaatatgggtaccagtgcatcgacgacgagtggggccgataatactgagtcttcacaggattcaatggccagaagtaaaatgtggaatgcggttgtttctaatgcgaaggccaataacatcagcaatgaagagtcattcaatcagttgatggaagattcttccaaaagagctcagtcattcgatgcgcacgtatcaggtaaactcagttcgggagatcagctattcggtaagctgggtaaatggggtactggactatcagctgaagtcggtgctaaaggcagtgcaggttggactcataactcaggagatacggatagtatcggatcttcaggtaggcagtcacatgacagccgtcatgataccagcagtcaggcggcaaaagacttcaaggaagcatcggattactttaccagccgtaaaactagtacatcgggtaataggacagataacaatgccagctcacgcgttgaccagtttgcggcatcgctgtcgagcgcgaaaaacagctatgaccagtacacaagcagccggactcgtagccatgaatatagtgagatggcatcccgtacagagagcatgagcggccagatgaacgagaacctgactcagcagtttgctcactttgtccaacagcgttctccgcagaatgcagaagtcattctgaccaacacaagttcaccagaagtcgctgcgcaacgtgaggcactggcgcgtgaattcgtcaaagcgcaggttgaaccaaaagttgatggtgcttatcaacagggccgcgaaagcatcggtcagaacatgtccggtgtatcaggtggtagtgaccgtggttcggtaatggccgactacggacataatgccggcaatatcgaagctatgacacgagatgcggggattaaggataatgtgggtcagaaagtggatgggatgatagcgcagaataatcaacagcatcaagaaacccagcaggggatagagcgtgatggcaatgagattagaaaacagaattctgatctcgaaaaacatcataatacagagggaaataagttcgaaaatgaatataatgaaagagccagcgtagtgaaatccttacccggagctgactcaccacgtgagctagaggcaaaggcagccaaaattcaaaaggattacattgatgggaaaaggtga

SEQ ID NO: 213933 - DNA, 1371 bp, Klebsiella pneumoniae
atgggcgacattaaaagggccgcgctggcgggcggttttttgctggggttgtctctcccggccgccgccgatgtgaacggcgatatgaataacttcttcaacaagctggggttcgcgtccaataccagtcagccacaggtctggcagggacaggcagcgggctatgcctccggcggttcgctgtatgcccggacgcaggtgaaaaccatccagctggtcagcatgaccctgccggatatcaacgccggctgcggcggcatcgatgcgtacctgggctcattcagcttcattaacagcgagcagctgcagcgcttcggcaaacaaatcatgtccaacgcggcaggctacttctttgaccttgccctgcagaccacggtacccgaaatcaaaacggccaaagacttcctccagaagatggccagcgacatcaacagtatgaacctcagttcctgtcaggccgcacagggtattgtgggcggactctttccccgtactcaggtggcgcagcagaaggtctgccaggacattgccggtgaaagcaatatctttgccgactgggccgcatcgcgtcagggctgttcggtaggcgggcagatgggcaaggtgcaggataaagccagcgataaggacaaggagcgggtgatgaagaacatcaacatcatgtggaacgccctgtccaaaaaccggctttttgacggcaataaagaactgaaagagtttgttatgacgctgaccgggacgctgattttcggtgagaacagtgaaatcaccccgctgccggcgcgtaccacagaccaggacctgattaaagccatgatggaaggggggacggctaaaatctaccactgcaatgattcagagaagtgcctgaaggtggtggcagatgcgacggtcaccattgccgccgacaaggcgcttaagagccagatttcgacacttctgagcagcattcagagcaaggcggtaatggaccaggccctgacggagcaggagaagggctttatctccagcaccaccatcccggtgttcaaatacattgtcgacccgcagatgctgggtatttcaaacacgctgatttatcagctcacggactatatcggctacgacattctcctgcagtacatccaggagttgatacagcaggcccgggccatgattgccacaggcaactatccgcagtcgacaatggatttaattctggaaaacctgaatcaggcaagcgtacagattgccgccttccaggcgcgtgttcaggtccagcaggatgcgatgctggttgttgaccggcagatgagctatatgcgccagcaggtgtccgcccgcatgatgacccgctaccagaacaactaccatttcggagggagcctctga

SEQ ID NO: 213934 - DNA, 576 bp, Klebsiella pneumoniae
gtgaaaaacagcctgaagaacacaactaaaacagccgcaacggtgaccctgctcctggccctttccggcatggcgcaggcgggcacactcgatgaggtgaggtcgctctgggacccgcagggtatctccggcgctttatctgcctcccggcaggatggcgctccgcgcgcggtgacgccggtttctcagccccgctggttccggctcagcaacggcaggcaggtggacctgcgggactggaaagtggtgttgtttatgcaggggaagtgcccgtactgccataagtttgacccggtcctgaagcagctggccacgcagtacggcttctctgtcttcccctataccattgacggacagggcgatgaggcctttcccgaggcgctgccggtaccgcctgaggtgatgcagacctttttcccgaacatcccggtggccacgccgaccacgtttctggtcaacgtgaatacgctggcggcttacccggttctgcagggcgccacggatgcgcagggctttatggcacgagtcgatacggtatttcagatgatgggggaggcagggaatgggcgacattaa

SEQ ID NO: 213935 - DNA, 240 bp, Klebsiella pneumoniae
atgcgaaagattcgttttcccgatttagacattaccgggatgtgggtgctggccgtgggcgtatttttccacctcatcgcccggctcgtcagaaagcagcctgagctggccatccaggctggagaaatcttcgggctgggcatggtggtgttcggcggataccgcattctcaacgccctcattgctgaagccgaaaaggaggagaaggcccgtgaaaaacagcctgaagaacacaactaa

SEQ ID NO: 213936 - DNA, 753 bp, Klebsiella pneumoniae
atgcgaacaatacatgccgccatgctggcggggtgcctttgctgcgccctgatgccggctttcgccaaagacgcgggctggcagtggtacaacgaaagactgaaatcccgggatactgacaagccaccggttccggctacaccgccactgcaaatggatattctccagaagcaggctctcctgcagcaggcgacgaagaaagcgctggcggaagccattatgtacccctcagtaccggcctttgtgaagtacttccgtctgcagaactactggacgcagcaggccggcctgttctcgatgagcgcgaagaaagccatgctggcgcacccggaactcgattacaacctgcagtacagccactacaacggcacggtaaaaaaccagctggccgccgattatgccgaacagcgccgggctatctccaccctcgcgcagcattttggcgtgatgttcttttaccggggccgcgaagccattgacggccagctggtccaggtgattcagaacttccgagaaacctacggcctgagcgtgatacctgtgtcggtcgacggcgttattaaccccatgctgcccgacagccggactgaccagggacaggccgcacaactcggcgtgaagtacttccccgcgatgatgctggtcgacccgaaaagcggccaggtgaagccgctcagttatggattcatcagccaggacgacctggcgaaacagttcctctatgtctccagcgactttaaacccaatttttaa

SEQ ID NO: 213937 - DNA, 327 bp, Klebsiella pneumoniae
atggaagagagaaaatcgtatggaatggtggtgctgtttgtcagcgtgtttgttgtttttctggtgagcattatgtcgtacagcctgtggcgggacagacaggttaacgcatttatgaccaccaaccgggcctgggggatccagtgcgacactgtttctcaggccgcgtgggtggtcagggacggggagcgggtggaccttcagataaatcatctgcctctgtactgcagcggttaccgctttgaagcccgtgatgatgcaggaaagatacagcgccagctcgataaatacagtgtctatcagcatctgtcacgccagtcgcaataa

SEQ ID NO: 213938 - DNA, 228 bp, Klebsiella pneumoniae; identical to SEQ ID NO: 101340

SEQ ID NO: 213939 - DNA, 282 bp, Klebsiella pneumoniae; identical to SEQ ID NO: 139567

SEQ ID NO: 213940 - DNA, 1956 bp, Klebsiella pneumoniae
atgaagacggttatttccgtgctgaccgcgcatttttttgtcctgggcaccttcatctggctggcatcccccgcctgcgctgacagtggaggcgactataaagccggctcggattttgcgaaacaggtgcagggcaatggtctgaactcactgaaaaatttcagtggtgagcaaaacctgccggggtataccgccaacccggatcagacaaaatactacggcggcgtcactgccagcggagacagctccctgaaaagcgattcagccctggagttcagccagggggataccggcaaaacgattacggagtcgttcacgaaccggccaccggatcagatatctcaggatgcgccgtttattcaggccgcaaaggataccgaatcccgtgccgacagcattgtcggtgataccggacagtcctgtaccgcccaggttgtgaaccgaagcgagttcacaaaccatacctgcgaacgtgatctgcaggtggaaaatttttgcacacgggaagcgaccctgaaggataacgccaccacgcagaaagttaaccgaacctatcagcaggtggtgacgctgaattatgcccggagtacccggcaatggagtggcaacctgacgatcccgaccagtggtcgtcttctgaatgcctcggtggatggtgagcctctggtgatcccctggattgaagaatgcgacgccgaagggaaggtgcgggatagctgcaagagtgccgtcagtgaaaacctgaccctctttgagcgaacgttccccattgatgtgatcagctggccacgatcagaatcgatatgttcaggcggccagaacacgcattgtacgaaatatacctatgacgggaaggggaagattcatcagtcgtttggtgtggacaaagtggtcactgcagggcagaactttgctgtaagcaaaatatcacgaaccgtatcatcggccagccagaaacccgtacaggtcacggtcaccctggtgatggaggaaaccgaaaccgtctacgcgcctgaagtcgtctgggttgaaagctgtccgttcagtaaggatgaagggacaaaaacgggcgaggaatgtatcagcccgggaggaacgcgaaccatcaccctcggaggcagggattactcgttcacggaagcctgctggaaatataaggacacctggctcacgcagccggcggactatggctcctgtgaaagcctgatgaaaaatacggcctgcaccctgtcatcccgccagtgtgccttctccggcgaagacggaacctgcctgcatgagtatgcgacatattcctgtgaaaccaggacgagcgggaaacagatggtttgtggcggggatgtgttctgcctcgatggggagtgtgacaaagccacgtccgggaagagcaacgactttggccaggccgtgtctgagctggcagcgctggcggctgcagggaaggatgtcgcggcactgaacggggtggatgtcagggccttcacgggaaaagcgaaatactgcaaaaaattcgcggctggcttcagtaactgctgcaaagacggcggctggggccaggatgtggggctggcacgctgcagcagcgaggaaaaggcgctggccaaagcgaaaaaagacaagctgacggtcagtatcggggagttctgctctaaaaaggttctgggtatttgcctggagaaaaaaaggagctattgccagttcgactcaaaactggcgcagatcgttcagcagcagggcagaaacggccagcttcatatcggttttggcggcgccagcagtcctgactgtcggggcattaccgtcgcggaactccaggggattgattttaacgagctggatttcacaaacttcatggaggatttaatcaataaccagaaaatcccggataacagcgaactgaccgaaaaaacaaaagcgcgtattaaagaacttctcacgcagtcttcagcaaagtaa

SEQ ID NO: 213941 - DNA, 639 bp, Klebsiella pneumoniae
atgaaattaatgaatctgtttatggtcatgcttttgctgaccggacgagcagtgttggctgaaacttcctctgttacagacatggaatggctgaagcagcaggagaacctcagcgaacaactgcgccagcatccggataaacagctgcagcaggagcttgaggcgcaaatcagccgcaatcctctgcccaaatctgaccgccagtttatcgataatctggtcagccagcagaaagcggcgaatcaggaaaaaccggcagaaggggcgctgtactttgtctccttctcgatacctgaagaggggctgaagcggatgctgcacgaaacccggcagtatggcattccggcgacactgcgcgggctcgtcaataacgacatgaggaccaccaccgacgcggtgctgcagctggtgaaagacggcgtcaccgacggggtgcagatcgacccgacactatatacgcagtacggcatccggagtgtgccgtctctggtggtacggtgtcaggccggatatgacgtggtacgcggtaacattcacgtcaaacaggcgctggagaaagtggcacaaaccggtgactgcgcacaggtggcccggcagatgcttgatgcgccctcaaatgccgccgggagccagccatga

SEQ ID NO: 213942 - DNA, 993 bp, Klebsiella pneumoniae
gtgaaaaccctgacgcttttcctgagtgccctgatgttgtgggggtacagcctcagtgcggctgctgacccctcctgtgagggccggtttgttaacccgatcaccgatgtgtgctggcgctgcatcttccctctgtcgctcggcagcgtgcaggttggtaaaggcgatctgcctgataccagcaatcccggtaatcccctgcagctgtgtccggcgccgccaccgctttttgttcgccccggtctggccatcgggtactgggagccgatggccatgacggacgtcagccgttcgccaggttgcatggtcaatctggggggcttcagtatcaatctcggcaagaccggcatgggaaccgcgagaaaggacgataagcaggtgaacggcgccttctatcacgttcactggtacaagtacccgctgacgtactggctgaacatcatcacgtcggcaggctgtctggaaggcggagacatggatattgcctatctgtccgagattgacccgacctgggtggacagcagcctcaccaccatcctgaatccggaagccatcctgtttgccaaccccatcgcgcagggcgcctgcgcagcggatgcgctggccagtgcattccatatgccgctggatgtgctcttctggtgtggtggaagccacggctcactttacccgtttaacggccaggtcagtaatgaatccagcccgctgcagtcgtcggtactggtcagtgaacgtatggccttcaagcttcaccggcagggacaaattatggagagtatcgggaaggacaaggcggtctgttacgaatatccctccccgatcatcccgaaagaacgctggcgctatcagatggtgaacatgtatccggacagtggtcagtgccatccgcttggacgcagcgtgatgcgctgggaggccggcaaaaatccacccaactcccgcaagaactatggctatctgatgtggcgtaaacgcaattgtgtctttctctga

SEQ ID NO: 213943 - DNA, 627 bp, Klebsiella pneumoniae; identical to SEQ ID NO: 207927

SEQ ID NO: 213944 - DNA, 390 bp, Klebsiella pneumoniae; identical to SEQ ID NO: 207928

SEQ ID NO: 213945 - DNA, 2640 bp, Klebsiella pneumoniae
atgagtaataacattatcgatgccgtcacccaggctgtgaattcactggtgtcagcactgaagctgcccgacgaatccgcgaaagccaatgacacgctgggcagcatgaatttcccccagttcagccgtattctgccctataaggattatgattccgcgaccggtctgtttattaataacaaaaccgtcggttttatgtttgaggcgcgtcctttacccggtgcggataaaagtatcgtcgccacactggagcatttactgcgcagcaaacttccccggggcgtcccggtcagttttcatctggtctccagcaaactggtcggcaatgacatcgactatggtctgcgtgaattccgctggagcggtaaacaggctaaaaagtttaatgccatcacccgcgcctactatctccgggcggcggaaacacaatttcccctgccggacaatctggatttgcccctgacgctgcgaaactaccgcgtgtacatctcctgctgcgtgccccggaagaagaactccaccacgcaaatcgtggagctggagaatcagattaaagtgttacgggcatcgctcggcggggcttacatcccgacgcgtatcctcgatgcggccgggatggtcgaactgatgcgggagctgattaacccggatccgcatgagatgtaccgggtgccgtacaagctggacccgtatcaggacctgaactatcagtgcgtggatgacagctttgacatgcaggtcactgccggtcatctgaaaattggccgcctggggcgggacgggaaagagtgcgtgacccgggtgacgaactatcacctggagtgtgacccggaaatcgcctttctctggaccgctgcggacaactacgccaacctgctgaacccggagctctccatctcctgcccctttgtcatcacactgacgctgatggtggaggaccaggtgaagacccagaacgaagccaacctgaaattcatggacgtggagaagaaaagcaaaacctcctacgcgaagtactttccgaacgtgataaaggaaatgcaggagtggggcgatatccgccagcgactggcgaccaaccagacctctctggtgtcctacttctttaacatcaccacgtataccgccgataacgcagaggcctctctcgctaccgagcagcaggtgctcaacagttaccgtaagggtggcttccagcttatcccggcccgctatcatcacctgcgtaattttctggccatgatgccgttcaaatgcggcgaaggcctgttcaaagagctgcaggcggcaggtgtggtgaagcgggcggagacgttccaggtggccaaccttctgccgattgtcgctgacagtccgctggcgccggcaggactcctggcgcccacctaccgtaaccagctggcgttcatcgacctgttctacgagggaatgaacaataccaatttcaacatggcggtctgcggcacctccggggcgggcaaaaccggtctgattcagcccctcattcgtagcgtgctcgactccggcgggtttgcctgggtgttcgacatgggcgacggctacaagtccctgtgtgaaaacatgggcggcgtgtatctcgacggcgactcgctgaagtttaatccgttcgccaatattctcgacgacgctaactttgacctgtccgccgagcgtatccgcgaccagatgtcggtgatggccagtcccaacggcaacctggatgaagtgcacgaaggtcttctcctgcaggcggtccgggcggcctggctgagtaagcgcaacaaggcgcgtatcgatgatgtggtggcctttctccggagcgagaaagacagtgaggaatacgccgactcaccgggggtgcgcagccgtcttgatgacatgattatcctgctcgaccagtacacggtgaacgggctgtacggggagtacttcaactctgatgagccgtccctgcacgacgatgcccggatggtggtccttgagctgggcgggctggagtcgcgccagtccctgctggtcgcggtgatgttctcgctgattatctatatcgaaaaccggatgtaccagtctccccgcagcctgaaaaaactcaacgttatcgatgaaggctggcgactgctggacttcaaaaacgaaaaggtggggacctttatcgagaagggctaccggacggcgcgccggcataccggggcctatatcaccatcacccagaatatcgtggatttcgactccccgaccgcatcgagcgctgcacgcgctgcctgggggaactcctcgtacaaggccattctgaaacagtcagcgaaggaatttgccaagtataaccagctgtacccggatcagttcagcaagctggagaaagacatgattaacggcttcggttctgccaaagagcagtggttctcctcttttatgctgcaggtggaagcgaactgctcctggcaccgcctgttcgtcgacccgctcagccgggcgatgtactcctcaaaaggcccggattttgagtacatgaaagcgcgtcgggaagagggggtcgatatccacgatgcggtgtacggcctcgcgtgtcgcaactttaaagaagaaatggctgaacttgaatcccgaataccggtgaatgacatggaggataaacagtga

SEQ ID NO: 213946 - DNA, 393 bp, Klebsiella pneumoniae; identical to SEQ ID NO: 139382

SEQ ID NO: 213947 - DNA, 291 bp, Klebsiella pneumoniae; identical to SEQ ID NO: 139383

SEQ ID NO: 213948 - DNA, 405 bp, Klebsiella pneumoniae; identical to SEQ ID NO: 203623

SEQ ID NO: 213949 - DNA, 225 bp, Klebsiella pneumoniae
atgcataccttcatttttctggtgctgatgacaccggctagtgccggtggtatctggagtatcacacctatgcccaatacggatgtgtgcctcaaaatgctgcgtgcagtcgaagcgcgtggaggcaacagaaggttcggaagtaatacgggtgagtgcattgaagttaaaacgcgagaacccctgaacagtacgatggaaacgctgaacggaggcagtcaatga

SEQ ID NO: 213950 - DNA, 300 bp, Klebsiella pneumoniae
atgagtgaattattcaaatggggtctcgcgctggtcattactgtggtcgggtatgctctgttgttatcttctgacagccacgctgtacccgaggcgcaggctcatcactggattaatgactgccggttactggagtcgaatattgacagggggtttctctcttccgcgcaaaaccggcttcagtgtggtgacgttattgaaaatgtcagcaaggctgattatgacagggcgataaatggcgataagcaaataaaaaccatcgcagaattaattgaagaactgttcggcgttaatttataa

SEQ ID NO: 213951 - DNA, 414 bp, Klebsiella pneumoniae
atgactgaggcttttaaatatacctggctgcttctgaaagaagagccggtatacataccactgattttcatgattacgggtactggagttatttctgttttttttgttctgaaggatttcaggtcatggtggagtaaactaatcctcctggtaattgatgtcttattttgtttgtttatatttattgctgcacttgaacctgagtctacttataaaaatattcaacaaagaaaagaaaatatttcctttacgcttaaaaactgcaagatctccgcatttgaagcacaacaggcaggattattcgggacaacaaaagatgcctggtcctgccctgatgggataacccgctaccttcctgttaagtacagaccagaggctggttcgtctgaaaaaatgcagagtgaattgcattga

SEQ ID NO: 213952 - DNA, 204 bp, Klebsiella pneumoniae; identical to SEQ ID NO: 179588

SEQ ID NO: 213953 - DNA, 564 bp, Klebsiella pneumoniae
atgaaggaattaatactgttaattcctctgggcagcgctttgcttttaaccgggtgcgcgggcacagagacggaattcgaatgtaatgccacgacatcggatacctgtatgacgatggagcaggcgaatgagaaagcgaaggcccgggaggaaagcgccgcaaagccggctgcggccgggttgcctcgactggctgacggcaacttccgcacgctgtcgcaggtatcgtacccgctgccgccgcaaccgaccctctctgcaaccggcacaactccagtgtcaacggtggcagtgaaaccggcaggcatgctgagcgcgccgccagtacacccggtgcaaaacgccagcaatcggaccgcgccgctcactgccacgccggtcagtcagacatttcgttcacctgtaacgctgccgggcaattatccccggccactcaggaagggagaacagacggcctccctctggatagcgccgtatatcgatgctgaagacgtctatcaccagcccaccacggtgttatttgtggtgacgccatcggcatggggtcagccccgaattaactaa

SEQ ID NO: 213954 - DNA, 435 bp, Klebsiella pneumoniae; identical to SEQ ID NO: 100988

SEQ ID NO: 213955 - DNA, 1422 bp, Klebsiella pneumoniae
atggcgaactttaacacgctgattaagcgcaagcagtacctctggctggggctcattctggtgggcggcgctgctgccgttggtggcggcctctatctgtcagagctgaacctgaactctgatgaagaggcccctgctcagggcgaacccgcaccggacatgaccggggtggtcgacagcagcttcaacagcaaagtggagcagcatgccaccaccgagatgcaggccacggcggcagacctgaacaagcgatttgcctccctgcagggggaagtggacctgctcagtaaggcgcgctcggctgaccagatacgtatcgacaaactcagcaatgagaatgcggccatgcaggaacagctgaaggcgctgggcgtgagacccgctgtctctggtggcgaacccgcgccgacaccgccgtctccacctcctggcccggaaggcgagccgcagcctgccagttatccgccgcagtcaggcgcagcggtaccgcctccgacggcattttatccgggcaatggtgtgacactaccgccacaggtcagctaccagtctgtgccggttccgaaccagatacagcgtaaaacgttcaactacaacaggggtaaaaaaggccgggagctgccttacattccatccggcagctttgcgaagagcatcctgattgaaggggctgatgcgaatgcttctgtcacgggtaacgaatccacggtgccgatgcagctgcgtgtggtggggcgtgtcgagatgccgaacagcaaaacgtatgacctgaccggctgctttgtcggtcttgaagcctggggggatgtttccagtgagcgcgccatcgttcgtacccggaacatcagctgtatcaaaggcgataaaaccatcgaccagccgatagccgggcacgtctctttcatgggcaagaacggggtgaaaggggaagtcgtgatgcgtaacggcaaaatcctcggctgggcctggggtgctggctttgttgacggaattggtcaggggatggaacgggcgtcacagccgtccgtgggtctcggggctacggcgacggtcggtgccggcgacgttctgaaaatggggattggcggcggggcatccaaagccgcacagaccctgagtgagtattacatcaaacgcgctgaacagtatcacccggtcatcccgattggtgccggtaacgaagtcacggtggtgttccaggacggtttccagctgaaaaccattgaagagctggaagcggaaaagaacgggcaacaacaggcgcagaaccaggcacaacctgaacaacccgagagcaggtcacagcaatccggcgggaacctcaatggttttaataccgatgagatgctgaagaaactgggcaagcttgacccgcgcgagttctcgccaggggctgcatctcagggagaaaacaatggttaa

SEQ ID NO: 213956 - DNA, 741 bp, Klebsiella pneumoniae
atgaaaaaaattaatccgttatttatttcaggttgcctgttatttatggtgccagccatgtccgccaccctcagcgggacgctggccccgaccgtagtgcctctgacgaacggcgggcaggctaatatcgcggtgagcaacaccgacccgaacctttttactgtacccggggaccgtatcaccgcgattaacagcctggatggcggactgaccaaccaggagcagaccgacagcggtggcgccattctggccaccgtcagtaaaaagccgttcacctttatcgtggaaactgagcgcggcctgaacttctccatccgtgccgtgccgcgcgcaggcgtcgggagaaccattcagctggtcagtgaactgtcgggcacgccgggcccggcaaaagcctgggaagagtcaaacccgtatgagtctgtgctggtctctctgaaccgcgccgtgcgccagggcagcgttccaggtgactatcaggctgtcccggtcacgtcagaaacgctggcggtgccagccggtctgcgtgccacggcagagaaagtctggacagggcatcacctgaaggtcgtccgttacagtctggataatgtctcgctgtcgcctcgtatggtgcgtgagagcgatttctggcagcccggcacgcgcgccgtcatgttcagtacgcctgcaggaccgctgaccgccggtggccggatgcaggtctgggtgaccacctcagatgcaggagggaaccgctga

SEQ ID NO: 213957 - DNA, 567 bp, Klebsiella pneumoniae
atggaacatggtgccaggcaagataccacgcgtgttatcgccgtggggtttatctgtctggggacgctttttaccctcagtcttgcgacaaatatcattcagggcattaataactaccgccttcagacagaacaaaaagtggcggtgacgccgatgttattcagtgcgccgtttgcggtttcacagaatcaggccgacgcctcttatattgaacagctgggtctgagttttattgcgcttcgccttaacgtcacaccggaaacggttgatgcccagcatcagcagttactccggtatgtattacccgcctcgcagaacagtcttaaggtccagctggctgaagatgcgaaacgaataaaagaaaataatgttaacgccaccttttatatgacgtctgtccgcgcctggcctgcggagaaccgcgttgatatcaggggggagctgaaaacatggattggtgattcgaaaccctacagcgaaattaaaagttatgtcattcagttcagtcgtgtcgacggcgtcagctggctggcgcgtttcggagaaataaataatgaaaaaaattaa

SEQ ID NO: 213958 - DNA, 306 bp, Klebsiella pneumoniae
atgacgggagacgaattaaagaaataccgtttcccggaaacactgactaaccagtcccgctggtttggtttatatctcgatgaacttatcccggccgtgatttgtctcggctggggtttctggaccagcaagttcatatttggtatggctgcagcggcactggttttctggggtatcaagaaactgaaaaaagggcggggcagctcctggctacgcgatctgatttactggtatctgccaacgtcccttcttaaaggtttctttcatgatgttccggactcctgtttccggcagtggattaaataa

SEQ ID NO: 213959 - DNA, 366 bp, Klebsiella pneumoniae
atgaatgctgtattaagtgttcaggacactgctgtctctgaagaaactaagccgtcttttctgtcccgcgttttcaataaaaagaaagctctgaaagtcgctaaagttgcgctgccggttgcagctgtggcggcgttcttcccggaagttgcgatggccaccaccacgactgacctgatgaagtccggtgataccacggtcaagggtaccttcggtaagtcttccagcgtggtcaagtgggtggtactggcagaagttatcgcaggtggcatcatgtacatgatgaccaagaacgtaaaattcctgttcggcttcgccattatttccacctttatcaccatcggtatgtcggtcgccggttactga

SEQ ID NO: 213960 - DNA, 159 bp, Klebsiella pneumoniae; identical to SEQ ID NO: 183189

SEQ ID NO: 213961 - DNA, 687 bp, Klebsiella pneumoniae; identical to SEQ ID NO: 183188

SEQ ID NO: 213962 - DNA, 396 bp, Klebsiella pneumoniae; identical to SEQ ID NO: 183187

SEQ ID NO: 213963 - DNA, 495 bp, Klebsiella pneumoniae
ttgagaaaaaaactggcgtttgctgccctgttattaatatccacgcctgcatgggccacggattgttttgatatggcgggacgggattaccggattgatccggatctgctccgggctatttcatggcaggaatcgaaatgggtggtggatgctgtcggtaaaaatccgggaacaggatacggtgccggactgatgcagatcgattcgcagcaccatgcccggttatcggagttcggtattaaaccggaacatcttctgacggatgcctgcctgaatatttacactggcgcgtattatctggcgctggcgtttaagaagtggggcgtcagctgggaggcagtcggtgcctacaacgcgggattccgcagaacggacaggcaggacatgcgacgactggcatatgcgagaaaaattgaggctatctaccgggccatcaaggcaaataaaaatgccggacaatcccgggctgttaaaaacgaaagacctcatgaatga

SEQ ID NO: 213964 - DNA, 543 bp, Klebsiella pneumoniae
atgcacacaattaacgtcaacaccaacgtcaacaccgccactcgtgaatcagacgaacaatttaaaactgacaaatatctgcgttatgccgttaccgatggcgatgagcgtctggattttatcccggcactcttttttacgccgtcagccgataatatggcggcgagctggttacgccagcattcggattacgatggcggattctggtcttactggattattccgcagggtgtcggcgggaatattaccccgaaccgtcttcagttcatcaccacgcagaccgggtacattgcgccggaaggaaagcagtcttaccggatgcgcatccccggcaattattttgacggtgacgtcagcgccgatgcagcaggaattattgccacgctgacgataatgaactggctgtcatggcaggtggcggatatggggccggaatatgcccgcgtctgtaaacatctggtatcccgtcaggatgcactgaaagactatatcagcattattcatcatcccgaacggcatttaatctggcgggcgatagactaa

SEQ ID NO: 213965 - DNA, 231 bp, Klebsiella pneumoniae; identical to SEQ ID NO: 203619

SEQ ID NO: 213966 - DNA, 348 bp, Klebsiella pneumoniae; identical to SEQ ID NO: 203618

SEQ ID NO: 213967 - DNA, 339 bp, Klebsiella pneumoniae; identical to SEQ ID NO: 207937

SEQ ID NO: 213968 - DNA, 876 bp, Klebsiella pneumoniae
atgaatcacaccaccacacaggctgtcagcgtcgacattaccccccacagcggcgcgggagaggtcatcccgtctttgcccgttgagcgcattgtggcgcagcgaaacagcggagtgacggcgtttctggaggcgataaggctgctacgcgaggcgcagacattcatttttgaagcatccgggcgcgggtggatctccggcatgaccgacatcatcgaacgcagtctgtcagccgaccgcagcgccacacgggaagccgttttaaaacgcagtatctgccgttatgccgatcgcgacatctggacgcgcctgatgaatgacacgggtatgtttacgctgatgagcgaggcgcagcgcaaggcgtgggacacgcagctctacagcgacgactgccccgaaatcaccctcgacaacgtgatcgccacgttccgggcgcttaacgccagcaagggagaaacgtttgagcagggcgtgattgacgtgttccgcaacctctcatgggactataaaacgcataacccgtgcctgctgggaaaaaaaattatcattgatggtgtcctggacaatcatcgcgggctgtatttttccgtgcgcacgtatgcacagaaccggatcgatgaccttgcccgcccgttctggttactcgacggaaagaccattcccgacaaccgcgtctccgagggggcaaacctgagcgcgtttatcagccagggcggcgcggcgagtgtgggcgaggtgttcacgtgtgagtatttcacggtacgcacatacaaaaaaggctccgcgcacgtcacctttacccggcccgacctggtggagaaggtgaacgatattatcgcgcggcactatccgggggcgctgccgccggtggtctga

SEQ ID NO: 213969 - DNA, 231 bp, Klebsiella pneumoniae
atgacacctgtcattcttccaccttccgcagaggctgtaaagccccgccgtcattcccgcatcccccgcgtcgatattcccgcgccggaaattgaccccacgctcagggcattcgggcggcatatcgcaaaaagcatacgcaaggggcgtggtgttcacatccccgcgatgaaaaacgccgattttggtcaggtgctccgcaccctcgaactgacacgcgcatttaactaa

SEQ ID NO: 213970 - DNA, 228 bp, Klebsiella pneumoniae
atgcagacacaggcgatgcgtgtttatcagatcacatttaccggacgcgacgcaaaaggcgttattccgatgtttacccgcgtgaaagccatgaccggaaagggcgcaattaaggcgtttattgagcgttacaaacctgttcagggctggtttctgggcgatcccgaagacattaccgacaacgtgcaaaaggaggcagaagaagcagagagcaaaacgcagagatga

SEQ ID NO: 213971 - DNA, 324 bp, Klebsiella pneumoniae
atgaaatggcgttactctctgcgctggaaattaccatcaccgtgtcccggtccgcatgaactggcatccgaagtggtggaggccggacagcctgcgcctgaatccattatgtcgcgctgggtggcgggcgccgggtatgcggtgtgcgtggattttcccgatgagcggcagattaagcgctggagtgatgagcgcaaagccgctgcgcgtcgaaggaatcttgagcgtcgggtcaacaggatggcgcacctgtttgctgaggaactgattgagagggagcttgaggggcgaccagactatttccggggaaaatctcagacctga

SEQ ID NO: 213972 - DNA, 729 bp, Klebsiella pneumoniae
gtgaacgcatcaacaacgtctctggtgaccctgaagccagcccggcaggcagcgctgcaggcggtcctgtcggtggaggaatcccgccgtctcggtgcgcgtctgcccgccatgccacacgtgcgcaccttcctgcgtctgctgaccgggaacagccgcatgaacacgaccgtggcacagcgcattcccggcctcaactgggacccgaagcatcgcctgagcagcctcaaacaggtggaggaggcgctcgacgcactgattgccagccacggggagtgctgcccgctgccgctgccggtggacgttcaggctgaactgttcccggaggtgctgcacacccggactgaacgccggttgcagcgcagaaacatcgcgttcacccgcaggatgcgccgggaagaacggacgctggcgcatcactggcggctgcggcagaacctgctggggcaggccgtcacggagctgaactttcagtccccggagacggtcagcaactggtaccgccggtgggccgaagagtttgacgcgcgcgagctggagcctgctttctggcactggcggtcgcggtttgcctcgctggcctccctggactggctgcgtgacgctggtgagccgctgtacggggtcattcatgaaatcggcttcattgtgcgtgacaccccggaggctgtccgtcaggcggagcgctggcaggtcccgaacaaactgacggaccggaggcggggatga

SEQ ID NO: 213973 - DNA, 432 bp, Klebsiella pneumoniae; identical to SEQ ID NO: 179494

SEQ ID NO: 213974 - DNA, 2001 bp, Klebsiella pneumoniae
atgtcagtgaccgagtctaaagcaaaaacccccgcgaaaaccagcaaaaaagtggtaaaacctgccgaatccgccgccctgaaagccgcgcttgaggccgcacagattgagatggtgccgctgtcggcgctggtcaaatccccgctgaacgtccgcaccatcccgtatccgccggagagcgtccgggaaatggctgactccattctcgcggtcggcctcattcagaatctggtggttcacacgctgccggacggcctgtcgggcgtcgcagcgggcggtcgtcgtctggcggccctgcagcttttacaacgcgagcagcgcatcgatgccgggcatcaggtcatcgtgaagcgtgtcagcgacgaactggcagtagtggcttcgatggtcgagaacaacaaccgggtggcgatgcacccggcagagcaaatcagcggtttccgcacgctgtctgagcagggcaagaccccggcgcaaatcggggaccagctggggtacagttcgcgccacgtccagcgcatgctgaagctcgccagccttgccccggaactgattgccctgctggcagagaacacgctcgatgtggagcagtgtcaggcgctcagtctggaaagtgacccggcgcgtcaggtggagatttaccagcgcgtgaaggcgcagcacagctacgctccggctcacatgctgaaacgcgccatcacggacaccgaaatatcggttcgcgacgcccgatttatgtttgtcgggcgcgaagcgtatgaggccgcagggggcgaagtgcgcgaggacctgttcagcgcgcaggagggcgacggaacggcagacggggtactggtcgggcgtctggtgcaggagaagctggagtccgccgcgctggctgttgaaatgcaggagggctggtcatggtcactggcacgggaaggggcggtgcggaattacggtgacgaccgcgagcattatctggtcctgccggagccggagggtgaactcagcgctgacgagcagcggcgtctcgatgaactgtacgccacgcaggaagccacggcgacgtatgaagatgaagccgccattcaggtgctgattgacgagattgaagaggcagcatcgatccgggcatggacaccggagcagaaagcggcctgtggcgtggtggtcagtctgagtgacggcgagctttgcatccagcgcggtgtgcagaagaaggtgcaggcggcggtcgctgacgcgcaggaaagtaccgtctctcaggcttccatccatgtggtcgccagcagcaccccggatgtggcagagggtatcagcgtaccgcttctgaaaaaaatgtcgtccgagagaacgctggcggtgcaggcggaactggtgcggcagccacagaaagccgtggccttgatggtctggcggctgtgcagttgcgtgttccactactgtatcaccacccggcacccgttcgtgatgaatctcggggttcaccacagcagtctgaccagtgaagccccgaccggagaaaacggtcaggcatggcagtcgctgatgcaggagaaagcccgtctggaagccatgctgccggagggctggaagaacgatttcaccaccttttttgccctcgacggacagaccctgatgtcgctgatggtcttctgtactgcctgttccgtggatggcgtccagacccgcgaacacggacataccagccgcagtgacctcgacggtgtcgaggcagcgctcgggttccatctccgtaactggtggcagccaacagcggataacttcctcgggttactcagcaagaatcagattgtggcggcgctgaaagatgccggactgaccggggccgcctcggatgctgaaaaaatgaagaaaggcgatgccgccagtcacgccgaacagtggctctccgggacccgatgggtgccgggatggatgcagtccccggatgccgcaacgccggaagaagcagacaccacgcctgacactgacgaacccacctcacacgctgcctga

SEQ ID NO: 213975 - DNA, 249 bp, Klebsiella pneumoniae
atgaatcacaacgttaaacctccgctgggatccctgtcagatggcacgtttacccgcgagcaggccagagcggtcgcggcgcagtatcagaatgtggcgattgaggatgaccaggggacgcattttcgcctcgtcgtccgtcatcaggatgacggcagcatggtctggcgtgtctggaattttgaaccgggcggtgagttcctgatgaaccgttatatccgggactacggagtacgcaaaacgcagtaa

SEQ ID NO: 213976 - DNA, 558 bp, Klebsiella pneumoniae
atggcagcacgtggcgttaataaagtcattctggtcggacatctgggacaggacccggacgtgcgttatatgcccaacggcggcgcagtggcaagcctgacgctggccacgtccgaaacatggcgtgataagcagacgggagagatgcgcgaaaacaccgaatggcaccgtgttgtcatgttcggcaagctcgcggaagtggcgggagaatacctgcgtaaaggcgcgcaggtctacatcgagggccagatgcgtacccgtagctggcaggacgataccggcgccacgcgctacgtcaccgaggtgctggtcgggcagagcggcaccatgcagatgctcggcggtcgtcgtggaaatggtgagcctgagagcgccgcgccgcagcagcccgcgcagccgcagagttcagccgctccggcacaatctgctgacgctccggctaaatccccgaaagcgaagggcggtaaaaaaggccgtcagagcgccgccccgtctcagcttcctcctcagccgttcccggatgattacccgctgaccgatgacgatgcgcccttttaa

SEQ ID NO: 213977 - DNA, 321 bp, Klebsiella pneumoniae
gtgcgtatgtctgctttatttgctatcacgtgtttgttgagcgcgtttaatcttgtatttatgccattccatcccgtcatgatgttatgggctttcggcctctctgtcgccttcgttattgtcaatataattgcagacagactgcgtctgtggtccggtattgcatggggaatggctgccgccgtcatcgtcgcttttatgcttaacagtgcagaacccgatgaagaaaaccgggtactcatcagtacattcgcctgtctcgcctcagcatggtatgccggggttcagttcagaaaagagaagagagagtctctgtcctga

SEQ ID NO: 213978 - DNA, 264 bp, Klebsiella pneumoniae
atgtcaaagtggaatatcgcctctttttcaaaggaggagcaggataaagttgccgtcgataaggtggctgctgctgttgcctggcaggagcgcatgaacaagcccgtcgtgccggaacttgttgaacgggaacagcctgaacacctgcgcgaatatttccatgaacggctccgcgtacatcgactgaacagtcagcagctgccgcgcgctaatgcgcccgaataccagaagcccgaagacggtggcagtgagagtaagccttaa

SEQ ID NO: 213979 - DNA, 444 bp, Klebsiella pneumoniae
atgaatgacgtacttgatgaaattgaccgggcgatcctcacctgcctgactcaggatgccagagtttcgctcaaggtcctgagcgcgcgagtggggctgacctcgccgagcaccgccgagcgggtgaagcgcctggaggagcggggcgttattcagggctatggggcgcgggtaaatctcgccgcgctgggctatagcctgcaggcgctggtgcgggtccgtccgctgcctgggctgctgcagaaggtggataaatatatccaggcgatgccggaatgtattgaaagtgacaaggtgaccggggaagattgttttgtgatgcgtctcgtggtgcgcgatattgcccagctggataccctgctggacggtctggcggagtatgcgcagtgtaacacctcggtggtgaaaagctcgccggtaaaaaggcggttgccaccgctgtga

SEQ ID NO: 213980 - DNA, 897 bp, Klebsiella pneumoniae
atgcaacttacccgcggcgtctggcagatgagcctggcaatgataatctccggctcgatcggcgcgttcgtgctgctctctggtttgccggtggctgatgtggtgttctggcgctgcctgattggcgcgctaaccctgctggtgtttatcgtgttaagccgccagcccttcagccggctaacgcgtttcactctcgctctggcggtgattggcggcgcggcgctggtcgtcaactggctgctgctgtttgccgcctattcacggatctcaatcggtatggccaccgtggtctataacacccagccgtttatgctggtactgatggggatggtgctgggggaacgggtcagcgccgtgaaatggggatggttactgctggcctttggcggcctagtgatcctgctgtcgagcgagctgacgcctgcacacgaagaggggcttaccaccggcgtgttgctggcgctgggcgcggcattcttctatgccctgaccgccatcatcgcacgcaaactgcatccgctccccgcgcagcatatcgccttcattcaggttctcgtcggcgtcgtgatgctgctgccgctggtgcatgcccccgaattgacggccagcttcccctggcgctatctgctgatcctcggcatcgtccataccgggatcatgtatcagcttttatatagcgcgatacagaaactgccgacgcccgttaccggttcgctctcctttatttatccgctggtggcgatggtggttgactatctggtcttccaccatgcgttatccgcggtgcaattgctcggtgggatgcttattctgtttgccgccgcagggaataatctcggctggggcgaaaaaaaaccccgccgcggcggggtcagtgagcagtcgcgggccagttag

SEQ ID NO: 213981 - DNA, 678 bp, Klebsiella pneumoniae
atgcacttcctgaatatgttcttctttgacatttatccgtacattgcgggttcggtgttcctgattggcagctggttgcgctatgactatggccagtacacctggcgcgccgcctccagccagatgctggaccgtaaggggatgaacctggcgtcgaacctgttccatatcggcatcctgggtattttcgccggccacttcctcggcatgctgaccccgcactggatgtatgagtccttcctgccgatcgacgtcaagcagaagatggcgatgatcgccggcggcgcctgcggcgtgatgaccctggtgggcgggttactgctgctcaagcgtcgtctgctcagcccgcgcgttcgcgccaccaccaccggagcggatattctaatcctctcgttgctgatggtgcagtgtgcgctcggcctgctgacgatcccgttctccgctcagcatatggacggcagtgaaatgatgaaactggtcggctgggcgcagtcggtggtgacgttccacggcggcgcgtcacagcatctggatggcgtggcgtttattttccgcgttcacctggtgctgggcatgaccctgttcctgctgttcccgttctcccgtctggttcatatctggagcgcgccggtcgaatacctgacgcgcaaataccagattgtccgcgcccgtcgctaa

SEQ ID NO: 213982 - DNA, 711 bp, Klebsiella pneumoniae
atgattgaactcgtgattgtatcgcgtctgctcgaatatcctgacgctgccttatggcagcatcagcaggagatgttcgaggcgctcgcgtcatcagagaaactcagcaaagaggatgcccacgcgctgggcgttttcctgcgcgatttagtggctcaggatccgctggacgcccaggcggcctatagcgaactgtttgaccgcggccgggccacctcgctgctgctgtttgaacatgtccacggcgaatcccgcgatcgcgggcaggcgatggtggatctcatggcgcagtacgagcgccacggcctgctgctggatagccatgagctgccggatcatctgccgctatatctggagtatctggcgcagctgccggaagaggaagcgcttggcggcctgcgggacgtcgcgccgatcctcggtctgctcagcgcgcgcctgcagcagcgcgaaagtcgctatgcggtgctgttcgagctgttgctgaagctggccaatactcaggtcgacagccagaaggtggcggagaagattgccgacgaagcgcgcgacgatacgccgcaggcgctggacgccgtctgggaagaagaacaggtcaaattctttgccgaccagggctgcggcgagtcggaaatttccgctcaccagcgtcgttttgccggagccgtggccccgcaatatctgaatatctctaacggaggacagcaataa

SEQ ID NO: 213983 - DNA, 1536 bp, Klebsiella pneumoniae
atgaaaattcgttcacaagtcggcatggtgctgaatctcgataagtgcatcggctgccacacctgctcggtgacctgtaaaaacgtctggaccagccgggaagggatggaatacgcctggttcaacaacgtggaaagtaagccgggcgtcggtttcccgaacgactgggaaaaccaggaaaaatggaagggcggctggatccgcaaaatcaacggtaaactgcagccgcgcatgggcaatcgcgcgatgctgttgggtaaaatcttcgccaacccgcatctgccgggcatcgatgattactacgagccgtttgattatgactaccagaatctgcataacgcgccggagagcaaacatcagccgatcgcccgtccgcgctcgctgatcaccggccagcggatggacaagatcaccagcggtccgaactgggaagagatcctcggcggcgagtttgaaaaacgcgccaaagatcagaacttcgacaacatgcagaaggcgatgtacggccagttcgaaaacaccttcatgatgtatctgccgcgcctgtgcgagcactgcctgaacccggcctgcgtcgcgacctgcccgagcggcgccatctataagcgtgaagaagacggcatcgtattgatcgaccaggacaagtgccgcggctggcggatgtgtatcaccggctgtccgtacaagaagatctatttcaactggaagagcgggaaatccgagaaatgcatcttctgctacccgcgtattgaatccgggatgccgacggtgtgctccgaaacctgcgtgggccgtatccgctatctcggcgtcctgctatacgacgcggacgcgattgaaaacgccgccagcaccgagaacgagaaagatctgtatcagcgtcagctggacgtgttcctcgatcccaacgatccgaaagtgatcgagcaggcgctgaaagatggcgtaccgcagggggtcattgaagctgcgcagcagtcgccggtttacaaaatggcgatggactggaagctggccctgccgctgcacccggaatatcgcaccttgccaatggtctggtacgtgccgccgctgtcgccgattcagtccgccgccgatgcgggtgaactgggtagcaacgggatcctgccggacgtggaaagcctgcgtattccggtgcaatatctggcgaacctgctgaccgcgggcgatacccagccggtgctgctggcgctgaaacgaatgctggcgatgcgccactataagcgtgcggaaaccgttgacggcgtcgtcgatacccgtgcgctggaagaggtggggctgagcgaagcgcaggcccaggaaatgtatcgctatctggcgatcgccaactacgaagatcgtttcgtggtgccgagcagccatcgtgaacaggcgcgagaagcgtttccggagaaaaacggctgcggctttagctttggcgatggctgccacggctctgacagtcagttcaacctgttcaacagccgtcgcatcgacgccatcgacgtgaccagcaaaacggagccgcacgcatga

SEQ ID NO: 213984 - DNA, 3744 bp, Klebsiella pneumoniae
atgagtaaattcctggaccggtttcgctacttcaaacagaagggtgaaacctttgccgatgggcacggccagcttctaaacaccaaccgggactgggaggatggataccgtcaacgttggcagcatgacaaaattgtgcgttccactcacggtgtcaactgcaccggctcatgcagctggaagatttatgtcaaaaacggtctggtgacctgggaaacgcagcagactgactacccgcgcacccgcccggacctgccgaaccacgaaccacgcggttgcccgcgcggcgccagctactcctggtacctgtacagcgctaaccgcctgaaatacccgctgatgcgtaaacgcctcatgaagatgtggcgggaagcgaaagttcagcatagcgatccggttgaggcatgggcgtcgattatcgaagacgccgacaaagctaaaagcttcaaacaggcccgcggtcgcggcggttttgtacgttcctcctggcaggaagtgaatgagctgattgccgcctccaacgtctataccgtcaaaacctacggtccggaccgcgtggctggcttctcgccgatcccggcgatgtcgatggtctcctacgcgtccggcgcccgttatctgtcgctgatcggcggcacctgcctgagcttctacgactggtactgcgacctgccgccggcttcgccgatgacctggggcgagcagaccgatgtgccggaatccgccgactggtataactccagctatattatcgcctggggctccaacgtgccgcagacccgcaccccggatgcgcacttctttaccgaagtccgctataaagggaccaaaaccgtagccatcactccggactacgccgaaatcgccaaactctgcgatctgtggctggcgccgaagcagggtaccgatgccgcgatggcgctggcgatgggccatgtgatgctgcgtgaattccacctcgataagccgagccagtatttcaccgactatgtgcgccgctataccgacatgccgatgctggtgatgctcgaggagcgcgacggttattatgccgccggccgtacgctgcgcgcatccgacctcgtggattcccttggtcaggagaacaatccggaatggaaaaccgtcgcctttgacgagaagggcgacatgaccgtaccgaacggctccctcggattccgctggggcgacaaaggcaaatggaacctcgaacagcgcgacggtaaaactggcgaagagattgagctacgtctgagcctgctgggcagccatgatgaagtggcgaacgtcggcttcccgtacttcggcggcgaaggttctgagcacttcaacaaagtcgatctggaaaacattctgctgcacaaactgccggctaaacgcctgcagctggccgacggctctaccgccctggtcaccaccgtgtatgacctgaccatggctaactacggcctggagcgcggtctgaacgatgacaactgcgccgccggctacgatgaagtgaaagcctacaccccggcgtgggcggagaagatcaccggcgtctcccgcgcgcatatcatccgtaccgcccgtgaatttgccgataacgccgataaaactcacggtcgttcgatgattatcgtcggggcgggcctcaaccactggttccacctcgacatgaactaccgcggcctgatcaatatgctgatcttctgcggctgcgtcggtcagagcggcggcggttgggcgcactatgtgggccaggaaaaactgcgtccgcagaccggctggcagccgctggcgttcgcccttgactggcagcgtccggcacgtcacatgaatagtacctcgtacttctataaccactccagccagtggcgctatgaaacggtgaccgcgcaggaactgctgtcgccgatggcggataaatcccgttacagcggccacctgatcgactttaacgtgcgcgcagagcggatgggctggctgccgtcggcgccgcagcttggcgtcaacccgctgcgtatcgctgacgaagcgaaaaaagccggcatgaccccggtggattacaccgtgaagtcgctgaaagagggctcgattcgctttgcggccgagcagccggaaaatggcaaaaaccacccgcgtaacctgtttatctggcgttccaacctgctgggctcctccggtaaaggccatgaatacatgctcaagtacctgctgggtaccgagaacggcattcagggcaaagacctgggcaagcagggcggcgtgaagccggaagaagtcgaatggcgggataacggcctcgacggcaaactggatctggtggtgaccctcgatttccgtctgtcgagcacctgtctctactccgacatcgtgctgccgaccgccacctggtacgaaaaagacgacatgaatacctcggatatgcatccgtttattcacccgctgtcggccgccgttgatccagcctgggaatcgaagagcgactgggagatctataaaggtatcgcgaagaaattctctgaagtgtgcgtgggccacctcggtaaagaaaccgacgtggtgaccctgccgatccagcacgactccgccgcggaaatggcgcagccgctggatgtcaaagactggaaaaaaggcgaatgcgatctcatccccgggaaaaccgcgccgcatattattccggttgagcgtgattacccggcgacttacgaacgtttcacctcgatcggcccgctgctggaaaccatcggtaacggcgggaaaggcatcgcctggaacacccagagcgagatggatctgctgcgtaagctcaactacaccaaggcggaaggcccggcgaaaggccagccgaagctggaaacggccatcgacgccgcggaaatgatcctcaccctggccccggaaaccaacggtcaggtggcggtgaaagcgtggcaagcgctgagcgaatttaccggccgcgaccatgcgcatctggcgctgaacaaagaagacgagaagatccgcttccgcgacattcaggcgcagccgcggaagattatctccagcccgacctggtctggcctggaagacgagcatgtctcctacaacgccggttacaccaacgttcacgagctgatcccgtggcgcacgctgtccggacgtcagtcgctgtatcaggatcaccagtggatgcgcgacttcggcgaaagcctgctggtctatcggccgccgattgacacccgttcggtgaaagcggtgatgggcgagaagtccaacggcaacccggagaaggcgctgaacttcctgaccccgcaccagaaatggggtatccactcgacctacagcgataacctgctgatgctgaccctatcgcgcggtgggccgattgtctggatgagcgaagcggatgcgaaagatctgggtatcgaagataacgactggatcgaagtcttcaacgccaacggagccctgacggcgcgtgcggtggtgagtcagcgcgttccagccgggatgaccatgatgtatcacgcgcaggaacgtatcgtgaacctgccgggctctgaaatcaccggtcagcgcggggggatccataactccgtcacccgtattacgccgaaaccgacccacatgatcggcggctacggccacctggcctatggctttaactactacggcaccgtcggctccaaccgcgatgagtttgtggtggtacgtaagatgaagaacattaactggttagacggcgaaggcaacgaccaggtacaggagagcgtaaaatga

SEQ ID NO: 213985 - DNA, 1389 bp, Klebsiella pneumoniae
atgagtcaatcttccctcccggagaaggctaaccgctcggtcataaccgactggcggcctgaagatcctgaattctggcaacagcgcggccatcgtgtggcaagccgcaatttatggatctccgttccctgtctgttactggcgttctgcgtttggatgttgttcagcgcggttgccgttaacctcaacaaagtaggctttcagtttacaaccgatcagctgtttatgctgaccgcgctgccggcgctgtcaggcgccttattacgcgtgccttacgcctttatggtgccgctgttcggcggccgtcgctggacggcattcagcaccgggatcatgattgtgccatgcgtctggctgggcttcgcggtccaggatacctctacgccgtttagcatcttcgtgattatctctctgctgtgcggcttcgccggagccaactttgcctccagtatggctaacatcagcttcttcttcccgaaagcgaagcagggcggggcgctcggcgttaacggcggacttggcaatatgggcgtcagcgtgatgcagctggtcgcgccgctggtggtctcgatctctatctttgccgtttttggcggtaacggtagcgagcaaccggacggctcgatgctgtatctggaaaacgccgcgtggatctgggtacctttcctgattattttcactctggcggcgtggttctttatgaacgacctgtcggcttcgaaagcgtcgctgagcgagcagttgccggtacttaagcgcctgcatctgtggattatggcgatgctctatctcgcgaccttcggctcctttatcggcttttccgccgggttcgcgatgctgtcaaaaactcagttcccggatgtgcagatcctgcattacgccttcttcggcccgttcattggcgcgctggcgcgttcgatgggcggggcgatctccgaccgcctcggtgggacccgcgtaacgctggtcaactttgtggtgatggctgtcttctgcgcgctgctgttcctgaccctgccgaccaacggccagggcggtaactttatcgccttcttcgcggtgtttatggtgctgttcctgaccgccgggctggggagcgcctccaccttccagatgatctccgtgatcttccgtaagctgactatggaccgcgtgaaggcccagggcggcagcgaagcgcaggcgatgcgcgaggcggcgaccgataccgcggcggcgctgggctttatctccgccattggcgctatcggcggcttctttattccgaaagcgttcggtatctcgctggatctgaccggctcgccggccggggcgatgaaagtgttcctcgtgttctatattgcctgcgtggtgatcacctgggcggtatacggtcgtaagcgtcagtaa

SEQ ID NO: 213986 - DNA, 1779 bp, Klebsiella pneumoniae
atgttaaaacgtctttttaccccgctgacgctggtcaatcaactggcgttaatcgtgctgctcgccacgattattggcgtcgccggcatggcgatctccgcgcgcctggtgaacggcgtgcagggcagcgcgcacgccattaacaaggccggttcattgcgtatgcaaagctaccggctgctggcggcgatcccgctgaatgaaaacgatcaaaaactggtggcggacatgaccgccaccgtcttcagcccggagctgcaaaattccgcccgccgcgacggccaggaaatccagcttaaagccctgcagcagtactggcagctggcgctggcccccggcatgcagcgcgcagtcaatcaggcggaagtggcccaggatgtcgccgactttgtcgatcgtatcgaccagttggtcaccgcattcgaccacaccaccgagcagcgtatcgaacgggtggtctggatccatcgcatcctcgccattggtatggcgctgctgctgatcttcactatcatctggctacgcgcccgtctgctgcggccgtggaaacagctactgagcatggcgcgcgcggtgagtcagcgtgatttcacccagcgggcgcacatcagcggccgcaacgaaatggcgaccctgggcatggcgctgaataacatgtcggaagagctggcggaaagctacgccgtgctcgagcggcgggtgcaggagaagactgccggactggagcagaagaacgagatcctcgctttcttatggcaggccaaccgccggctgcactccagcgccccgctctgcgaacgtatttcgccggtactgaatggcctgcaggggctgacgctgctgcgcgatatcgaggtacgggtttacgacctggaagacgaagataatcaccaggagtttacctgccactcggatgatgactgtgatgataaaggctgctacctctgtccacgcaatctgccgccgctgccggatgggggaacaacgctgaagtggcggctgtcagatgcgcatagtcagtacggcatcctgctggcgacgctgccggttggccgccatctcagccacgatcagcagcagctggtggataccctggtggaacagctgaccagcaccctggcgctggaccgccatcaggagaagcagcagcagctgatcgtcatggaagaacgggccactatcgcccgcgagctgcacgactccatcgcccagtcgctatcctgtatgaagatgcaggttagctgtctgcagatgcaaggcgacgccttgccgacggaaagccgccagctgctggggcagatccgtaacgaactgaatacctcgtgggcccagctgcgggagctgttaaccaccttccgcctgcagttgaccgagccggggctgcgcccggcgctggaggccagctgtcaggagtacagcgcccacttcggctttacggtgcagcttgattaccagctcccgccgcgctttgtgccctcgcatcaggcgatccacctgctgcagatcgctcgcgaagcgttgagcaacgctctgaagcatgccagcgcgaccgaagtgaccgtgacggtgtcacaacgcgataatcaggttcgtctggtggtagcggataacggccgcggcgtaccggaccacgccgaacggagtaaccattacggtttaattattatgcgggatcgcgcccagagcttgcgcggtgactgtcaggtacgacgccgggaaaccggtggaaccgaagtgatcgtcacgtttatcccggaaaaaacgttttccatccaataa

SEQ ID NO: 213987 - DNA, 651 bp, Klebsiella pneumoniae
atgagtcaacaggaacgggcaactatccttctcattgacgaccatccgatgctgcgcaccggcgtgaaacagttgatcagcatggcgccggacatccaggtgattggcgaggccagcaatggcgcgcaaggtattgagctggccgagtcgctggatcctgacctgatcctgctggacctcaatatgccgggcatgaacggtctggagacgctggataagctgcgtgagaaatccctttctggccgggtagtggtcttcagcgtctccaaccatgaagaggacgttgtcaccgccctgaagcgcggcgccgatggctatttgttgaaggacatggaaccggaagatctgctgaaagcgctgcagcaggcggccgccggagagatggtattaagcgaagcgttaacgccggtgctggccgccagcctgcgcgccaaccgcgccacctccgatcgcgacatcagccagctgaccccgcgcgagcgcgacattctcaagctgatagcccagggactgccgaacaaaatgatcgcccgtcgcctggatatcaccgaaagcaccgtcaaagtacacgtgaagcacatgctgaagaaaatgaagctcaaatcccgcgtggaagcggcggtatgggtccaccaggagcgaatcttctaa

SEQ ID NO: 213988 - DNA, 1383 bp, Klebsiella pneumoniae
atgcctgtgtcgttccgtttgttgccaacgttgacctttctcctgctgttgccgggcgttcccgtctgggcgctgaccgccagcgacaccacccgccctgcgcaagcgcaagatccgctgcccgatatggggattgctccccaggttgatgacgacgcccggcactttgccgaagtggcgaagaagtttggcgaggccagcatgagcgacaatggtctgacggcgggtgaacaggcgcagctgtttgccatcagtaaaatcggcaatgaagtgagtcatcagctggagagttggctctcgccgtggggcaacgccaatgtcgacctgctggtcgataaagaggggaaattcaccggcagtaaagggagctggttcgtgccgttgcaggataacgaccgttatctgacctggaaccagtactcggtgacccggcgcgagcacgatctggtgggcaacatcgggcttggccagcgttggcgggttggcggttggctgctgggctataactcgttttacgataaagtgctgagcgaaagcctggcgcgcggcagcgttggcgccgaagcgtggggagaatatctccgcctgtcggcaaactattaccatccgctgggcgactggcagctacgcgataatcagactcaggagcagcggatggccgcagggtatgacgtcaccgcccaggcgcggctgccgttctaccagcacatcaacaccagcgtcagcgtcgaacagtatttcggcgatagcgtcgatctgtttcactccggcaccggctaccataatccggtggccgtctccgttgggctcaattacaccccggtcccgctggtcacggtgaccgctaagcataagcagggggaaaatggcgtcagccagaacaatgtgggcctgaagctaaactaccgctttggcgtaccccttaagcagcagcttgcggcagacgaggtggcgatcagcaactcgctgcgcgggagccgcttcgatagtccggagcgggataatctgccggtggtggagtatcgtcagcgcaaaaatctgacggtctatctggccacgccgccctgggatctgcagtccggggagacagtgcagttgaagctgcagatccatagtctgcatggcatcaaggcgctgcactggcagggagacacccaggccctcagcctgacgccgccggtagatgccagcagccccgatggctggagcatcattatgccggtgtggaacagtgaaccgggcgccgcgaaccgctggcgcctgtcggtggtggtggaggataaacaggggcagcgcgtctcctccaatgagatcgccctggcgctgaccgagccgctggtcaagtttaccacgccaggcgtctcctggacggactcgccttag

SEQ ID NO: 213989 - DNA, 2601 bp, Klebsiella pneumoniae
atgaagaccatccgaacaacctgcccctactgcggcgtaggctgcggggtgctggcgagcgtggacgacgcggggcaggtgagcgtgcgcggcgacgatcagcacccggcgaacctcggccgtctgtgcgtcaaaggggccgccttaggggagaccacgggcctggcggggcggctgctgacgccggaggtcgacggccagcaggtagcctggcctcaggcgctggcggaaaccgctgcgcgcctgagacagatcatcgaccagcacggaccgcaagcggtggccttttacgcctccggccagctgttaaccgaggattactatgccgccaataagctgatgaaagggtttatcggcgcggcgaacatcgataccaattcacggctgtgcatgtcgtcagcggtcactggctacaagcgggcctttggcgccgacgtggtgccctgcagctacgatgatgtggaaaacagcgatctggtggtgctggtcggctcgaacgccgcctgggcgcatccggtgctgttccagcggctggcgcaggcgaagcgggataatccccgattgcggatcgtggcgatcgacccccgacgcaccgctacctgcgagatcgccgaccgccatctggcgctggccccaggaagcgacggcgggttgtttgcggggctgcttaacgccctggctgaggcaggagcctgcgtcgatggctttcgcgacggcccgcaggcgctggccgccgcccgcggctgggacgtggcgagggtggcggccttttgcggtctgcctgccgatgaggtggcgggattctatcgcgagttcatcgccgccccgcgggcgatcaccctctacaccatgggaatcaatcaatccgccagcggcagcgacaaatgtaacgccatcatcaacgtccatctggccagcgggaagtatggccgccgcggatgcggccccttttcgctgaccggtcaacccaacgccatgggcggccgcgaagtcggcgggctggcgacgatgctggcggcacacatggattttgtgccagacgatctgcagcggctggcccgcttctgggggacggaacggctggcgcagacccccgggctgaccgccgtggagctgtttgccgccattggccgcggcgaggtcaaagcggtctggatcatgggtaccaacccggtggtgtcgctccctgacagccacgcggtgagccaggcgctggccgcctgtccgctggtgatcgtctcggatgtcgccgcccagaccgataccggacgtttcgcccacatccgctttccagcgctggcctggggcgagaagaatggcacggtcaccaactcggagcggcggatctcccgtcagcgcagctttctgccgccgccgggggaggcgaaagcggactggtggatcatcgccagagtgggccaggctctggggtatcgcgaggcgtttgcctggcagcatccgcatgacgtcttccgcgagcatgcggcgctgtccggtttcgaaaacgacggccagcgggcgtttgatatcggcgcgctggcggatctcagccgtgaggcgtgggacaccatgccgccggtgcgctggccggtcagccgcagcgaggtcgcctgggatatcacgcgcggctggcatggcgatggcaggctgcggatggtgccggtgacgcctcaaccgacccgggcgacaaccgatgccttttatccgctgatcctcaacagcgggcggatccgcgatcagtggcacaccatgacccgtaccggcgcagtgccgcggctgatgcagcatatcgcggagccaatggtggaggtggcgccgcaggatgccgttcgctatcagcttcccgctgacgggctggcgcggatctggtcgcggcatggggtgatggtggcgaaagtggcgatcagcgaagggcagcgccccggctcgctgtttgttccgatgcactggaacaaccagtttgcccgtcaggggcgggtgaataacctgctggccgccgtcacggacccgtattccggccagccggaaagtaaacaggcggcggtggcgattgccgcctggcaaccggcctggcacagcgagcttttttgccgcgaaccgctaccatttcctgcggcctggcactggcggcggcgggcgacgccaggcgtgctgcactactcgctggccggggaggcatctgcccgacagtggctcagcgcgtggtgcgcccggcgcggctggcagttacaggtggctgacggcggcgcggtgtggaacctgctggcctggcatcagggaaggctgatgctcggctggtggagcgatgcgcgcgagccggcggtggattgcgcatggataagcgctgcctttgccgcgccgccgtccgatgctgcccaacgacatgccttgcttagcggccgaccgggcgccgccgtcgcgccgcgggggcggatcgtctgcagctgctttggggtgggggaatggtcaattaacgaggccatcgccagcggctgcgccagcgtcggggcgctgggtgggaagctgaaatgcgggaccaactgcggctcttgcgtgccggagctcaacgcgctgctggcggcgcaacgaacccgggcgtaa

SEQ ID NO: 213990 - DNA, 4068 bp, Klebsiella pneumoniae
atgacgcggcgactggtggtgatcggtaacggcatggcggccacccggctggtgcagcggctggttgagcgcgaccccgcgcggtttgccattaccgtcgtcggcgacgagccgcacccggcctataaccgcattcagctctcgccgctgctggcaggtgaaaaaacggcggcgcagatcccgttgctgccggcggagtggtatacccggcacggggtgtgcctgcggtctggcgaggcggtcgatgaagtcgatattcagcaacggcggctgcgcatcgcggaaacctggctgccgtgggatgaactggtgttcgccaccggttcgcggccctttatcccgccgctgccgggcattgatcgtccgcaggttatgcccttccgcaccctggcggacgtggaacgtattctggcgatacccggcccggcggtggtgattggcggcggggtgctgggggtggaagcggcggcggcgctgcgtcgtcacggcggagaggtcactcttctgcatcgcggcagcggattaatggcgccgctgaccgacgcttttgccgccgatgagctcaggcagcagcttgaagcgcgcggcattcgctgcgtgctggagtgccgcatcgccgccatcgacgccgatggcgtgcggctggcggacgggcgcgtattccgcgccgccagagtggtgctggctaccggcgtgcagcccgacagccgtctggcggcgcagtccggcgtgctgtgccagcgggggatcgtggtcgaccgtcagatggcctcctcgctgccggggatcagcgccatcggcgaatgttgcgaaattgacggccagacctgggggctggtggctccctgcctgcgtcaggccgaggtgctggcggatcgcctgtgcggcgcccccggcgagggctttgtctggcaggacgccgggacccgcctgaaggtcaccggcattgaactctttagcgctggcgagcagcaggccggcgaacaggatgacatttataccagctgggaccccatcgaccgccactatcgccgcctgctgctgcgcgatggccgcctgcgcggcgtgctgctgatgggcgactgcaccgccgccgccgcgctcaccgcgcgcctggaaagcgatgagcctgccaccgtggactggctttttgacccctcttcaacgcagccgcaggctgcaggaataatgacgatgacgaaacctgtattagtgctggtgggacatggcatggtcggccaccattttctcgaacaatgcgtgagccgcaatctgcatcagcaatatcgaatcgtggtgtttggcgaagagcgttaccccgcctacgaccgggtacacctctccgagtattttgccggacgcagcgccgagtcgctgtcgctggcggccggggatttctttattgaacacggtattgaactccgcctcggcgaggcggtggcgaccatcgaccgcgacgcacggctggtacgggacgccgaggggcatgaaatccactgggataaactggtgctggcgaccggctcgtatccctttgttccgccaatccccggtaacgatctcgcggggtgctttgtctaccgcactcttgacgatctcgaccgtatcgccgcccatgccgccgcggcgaagagcggggtggttatcggcggcgggctgctcgggctggaggcggccaacgccctgaaacagctggggctggagacgcaggtggtggagtttgccccgaacctgatggccgtccagctggataacggcggggcggcgatgctccgggagaagatcgtcgccctcggcgtgggggtgcataccagcaaagcgaccaccgccatcgtgcgcgaggccgacggcctgcggctgaactttgccgacggcggcgcgttgcggaccgacatggtggtcttctcggcggggatccgcccgcaggacgcgctggcccgcggctgcgcgctgcaggtgggcgaacgcgggggaattcacatcgacggccagtgccgtacctctgacccggacgtgctggcgataggcgaatgcgccctgtgggacaataaaatttacggtctggtggcgccgggctatcagatggcgcgcatcgccgcggccactctcgcaggagaggacgcctgctttagcggcgccgacatgagcaccaaactgaagctgctgggggtcgacgtggcctcgtttggcgatgcgcaggggcgcacgccgggctgtcagagctatcaatggaccgacggtccgcagcagatttacaaaaaaatcgtcgtcagtcaggacggcaaagccctgcttggcggcgtgctggtgggggatgccagcgactatgccacgctgctgcagatgatgctgaaccgcatggcgctgccgccgcgtccggagagtctgatcctgcccgcgctggagggagccgcgccgaaggcgctcggcgtcgcggcgctgccggacagcgcgccgatctgctcctgccataacgtcagcaaaggcgatatctgccaggcggtgaacaatggggcgggggatatgtcggcgataaaaagctgcaccagagcggctaccggctgcggcggctgcagcgcgctggtgaaacaggtgatggagtatcagctggcggagcagggcgtcgaagtgaaaaaagacgtctgcgaacatttcccgtggtcgcgccaggagatctaccacctggtgcgggttaaccatatccataccttcgagcagttgattagccgctacggccaggggcacggctgcgatgtctgcaaaccgctggtggcctcggtgctggcctcctgctggaacgagtacctgctgaagccggcgcacctgccgctgcaggataccaacgaccgctatttcgccaatatccagaaggacgggagctattcggtggtgccgcggatggcggcaggggaagtgacgccggacggactgatcgccatcgggcagatcgccaaacgttaccagctctacagcaaagtgaccggcggccagcgcatcgacctgtttggcgcgcggctggaacagctgccggctatctggcgcgagctggccgacgccgggtttgaaaccggccacgcctacggcaagtcgctgcgcacggtgaaatcctgcgtcggctcaacctggtgtcgctacggcgtgcaagactccaccgggctcgcggtacggctcgagcatcgctataaagggctacgcgccccgcacaaaatcaagatggcggtctccggctgcacccgcgaatgcgctgaagcccaggggaaagatatcggggtgattgccaccgacaaaggctggaatctgtacgtctgcggcaacggcgggatgaaaccgcgtcacgccgacctgtttgccagcgatctcgacgaagcgacgctgatccgcagcatcgatcgtctgctgatgttctatatccgtaccgccgatcgcctgcagcgaaccagcacctggatggataacctggagggcggcgtcgcctatctgcggcaggtggtgctggaggatagtcttggcattggcgaggagctggagcaggagatggcccggatcgtcgacagctaccagtgcgagtggcagaccaccctcaacgatccgcagcgtctggcgctgttccgctccttcgttaatagcgaccagcccgacgaggctgtgcagcgccgcgatctgcgcggtcagccgcagccgctgctgactgagacgttgcccgaaggcgaactcccatcccgaccgtggcaggcggtatgcgaccttgacgccattccggcgcaggcggggatcggcgcccgcttaggggagcggcagattgccctgttccgcttcggcgagcgggtctacgccctcgacaaccgcgagccgggcagcacggccaacgtgctgtcgcgtgggctgttaggggacgtcggcggcgagccggtggtgatctccccgctgtacaaacagcggatacgcctgcgcgacggctggccgtgcgacggcagtgaacaggcggtacgcgcctggccggtgaaagtggaaaacggcaaagtgtgggtgggcaaccagcagctgctggcccgcgcggaggcctcctga

SEQ ID NO: 213991 - DNA, 789 bp, Klebsiella pneumoniae
atgaaaccattaattcaggtgcaggccgtcagccaacgcttcaacaccgccagcggcgagttcctggcgctgcagaatgtctccttcgatatcgtcgaaggggagaccattagcctgatcggccactcgggttgcggaaaatcgaccctgctaaacctgatcgccgggatcaccacccctaccgagggcggactactgtgtgataaccgggaaatcgccggtcccgggccggagcgggcggtggttttccagaaccactcgctgctgccgtggctgagctgtttcgacaatgtggcgctggcggtggatcaggtgttccgtcgcaccatgagcaagagtgagcgccgggagtggatcgaacacaacctggcgcgcgtacagatgggtcatgcgctgcacaaacgtcccggggagatctccggcggcatgaagcagcgggtgggtatcgcccgggcgctggcgatgaagccgaaagtgctgctgcttgatgagcccttcggcgccctggatgcgctgacccgcgcccacctccaggacacggtgatgcatatccagcaggagctcaataccaccatcgtcatgatcacccacgacgttgatgaagcggtgctgctctcggatcgggtgctgatgatgaccaacggtccggcggcgacggtcggcgagatcctcgcggtcgatctgccgcgtccgcgccaccgcgttcagctggcggacgacagccggtatcaccatctgcgccagcagatcctccatttcctgtatgaaaaacagccgaaagcggcgtaa

SEQ ID NO: 213992 - DNA, 885 bp, Klebsiella pneumoniae
atgaagcaggcacaacgtaagcaaccggtcgtcagcgtggacaacgcgcctggcgaagtgattatcctgccgccggtgcaggtccggcgcaccacgccgaccgtcacgcgctggctgcgtgagctcacccagcgcctgctgcccccgctgttggggctgggtgtgctgctgctggcctggcagctggcggcgatgcatagcaaaggctttcccacgccgctgagcacgctggactcggcgctgaccctgtttgccgatccgttctatcaggacgggcccaatgacatgggcatcggctggaacgtgctggcctccctgcagcgcgtggcggtgggcttcggcctggcggcgctggcgggcattccgctggggtttttgatcggccgttcgctgttcttcgcccgcatgtttaatccgctaattgctctgctgcgcccggtcagcccgctggcctggctgccaattggcctgctgctgttccagaaggcggagccggcttccagctggaccatttttatctgctccatctggccgatggtgatcaacaccgcggagggtgtgcggcggatcccgcaggactatctcaacgtcgcccgcgtcctccagctctcggagtggacggtgatgcgcaaaatcctctttccggcggtgctgccggcggtgcttaccggcgtgcgcctctccatcggcatcgcctggctggtgatcgtggcggcggaaatgcttaccggcgggctggggatcggcttctggatctggaacgagtggaacaacctcaatgtggaaaacatcatcatcgccatcgtcattatcggcgtcgtcggcctgctgctggagcagggcctgatgctgctcgctcgccgctttagctggcaggaaaaataa

SEQ ID NO: 213993 - DNA, 1257 bp, Klebsiella pneumoniae
atgggcgacaaattttcaatttcccggcggcgcttgctgcaggcaggggccgcgctgggcggcgcgatgctgctgccgggcgtgatgcaggccgcctgggccggcggctcggacaaaccggagcaaacccgcgtgcgggtcggatttattccgctgaccgattgcgcgccgctggccatcgccgcggcgaaggggtttgaccaaaaatatggcatcaccctggtggcgagtaaggaagccagctgggcggcggtgcgcgacaagctggtggccggcgagctggacgcggcgcatattctctatggcctgctgtacggcctcgaactggggatcgccagcaagccgcaggcgatggccaatctgatgaccctcaaccgcaatggccaggcgattaccctctccagcgagctgcaggagaaaggggtgaccgacctcggcgggctgaagcggctgatcgaccgcagcgcgccgggcagttacaccttcgcccatacctttcctaccggcacccatgccatgtggctttactactggctggcgagcgtcggcatcgatcccttcaacgatgtgcgcaccgtcgtggtgccgccgccgcagatggtgatgaacatgcgcatcggcaatatgagcggcttttgtgtcggcgagccgtggaacgcccgcgctattaacgaccgtatcggcttcaccgcggccacttcccaggatatctggcccgagcatccggaaaaggtgctgggcacccgtcgcgactgggtggaacgcaacccgaacaccgcccgcgcgctggtggcggccctgatggaggcgcagcgctggatcgccgcctcgccggagaacacccgggagacggcccgcctgctcgccagacgcggctggctcaataccaaggagcaatacctcaccggccggatgcttggagagtatgacaacggccttggccgccgctggcaggatgcccatccgatgcgcttctgggccgggggcgaggtgagtttcccgtggctgtcggacgggatgtggttcctcacccagttccgccgctgggggttgctgaagcaggctccggattacctcgcggtggcgtcgcgcattaaccgcatcgatgtctggcaggctgccgcccaggcggtaggagggatcagcgcgccggcagccaggatgcgcagcagcacactaatggacgggacggtctggaacgggtccgacccggaaggctacgcccgccatttctctattcaacgtaagggggcatga

SEQ ID NO: 213994 - DNA, 1182 bp, Klebsiella pneumoniae
atgaataatacgactggtcatgcgcacgatgcgacggcctggctgcagctggcgcgtcgcctgcaaaaacaacagcttcagcagtttagccaactgggggaactggccagccagctcagcgcgctggtgcatatgctgcagtgtgagcgcggggcgtcaaatatctatctttgctcgggcggcttgctgtatacagcggagtgtcgggcgggaggggcgctggttgacgagcggctagccctgttttatgccagcctcgaacgggcgcgcgcggtagccggcagcgcgctgtgctggcgtatcgccagagcggttgacgagctggcgcagctcccggcgctacgcgcgcagatcggccgccggcaaattgccgctgaagccgcgacggagcagttcagccgcgtcatccgccatctgctgaacatcgccccgcagctcaatgacagcattgacgatccgccggtggctggtcggatggtcgccctgtacagctttatgcagggaaaagagctggtgggccaggagcgcgcgctgggagcattgggctttacccgcggcgagttcagcgacagcctgcgccagcagctggtggaccgtattgacggtcagcagccctgcttcgacagctttcaggcgctgggcagcccggcgaccgtccagttgttcagaacccagtgccacgccggtctggatattgaacagctgcggcggatcgcctgtacccgccagccggctgccgacggcggggaaacggcgctgcgctggtttggcctgcaaacccaacggcttgagcaattgcgcgaagtggaagagcaactgatcgacgatctgctggatgccaccgacgcgctgttagcagacgacgcgcctggctggcaggccggagaggaagacgattgcgtgacgccacggctcgataaacagctactgccgctggtgcgccagcaggcctatgagttgcagcagctctccagccagctggcctcgctgaaagacgcgctcgaagagcgcaagctgatcgaaaaagcgaaaagtctgctgatgacgcaccagggaatgcaggaggagcaggcctggcagacgctgcgcaagatggccatggacaaaaatcagcgcatggttgagatagcccgcgcgctgctgatggtgaaggcgatttggccgctaacaccaaaggagtag

SEQ ID NO: 213995 - DNA, 354 bp, Klebsiella pneumoniae; identical to SEQ ID NO: 138919

SEQ ID NO: 213996 - DNA, 243 bp, Klebsiella pneumoniae
atggcgatggttaaagcaagtttgacgttatttggtggtgacacgctggtggtgcggtgctcagagcgctgccatattcatctgatgagcgcgaaggtcccgggcgacagtcatgcggatattctgagcgtgcaggatcgggacagcgcctatctgacggtgccctacagcggcacctggaacgtgcttatcgacagtcacagccagtcgctggagcactccatcagctacgtgccggcctga

SEQ ID NO: 213997 - DNA, 681 bp, Klebsiella pneumoniae
gtgttaactcgtgatttcttaatgaatgcggattgtaagacagcgtttggcgctattgaggaatcgctactctggtcggcagaacaacgtgcagcctcgctggcggcgacgctggcctgccgcccggatgatggctcagtatggatctttggctacggttcgcttatctggaacccggcgctcaattatcgcgagtcctgcaccggcacgctgccgggctggcaccgcgcgttttgcctgcggttgaccgccgggcgcggtagtgcctgccagccgggacgcatgctggctctcaaagagggcggccgaaccaccggcgtcgcctatcgtctgcctgacgacacgctggaggaggagctgaccctgctgtggaagcgggagatgatcaccggctgctatctgcccacctggtgcaagctggagctggacgacggacggacggtgaatgccctggtgtttattatggatccgcgccatccactgtttgaaccggataccagtgcccaggttatcgccccgctgatcgcccgggccagcgggccgctcggcaccaacgcccagtatctgttttcgcttgagcaggcgctgcgcaagctgggcatgcacgatgccagtctcgatgacctggtggccagcgtccgcgcgctgttgggcgagagtccgacgccgggcctggcctga

SEQ ID NO: 213998 - DNA, 231 bp, Klebsiella pneumoniae
atgccctatcgcagtaaacaagaactccccgacagcgttcagcatgtactgcctgcccatgcgcaggaaatttataaagaagcgtttaacagcgcctgggatcaatataaagataaagacgagcggcgcgatgacgccagccgcgaagagacggcgcacaaagtcgcctgggcggcggtgaagaatagctatgagaaaggcgatgatgataagtggcataagaaaaaataa

SEQ ID NO: 213999 - DNA, 1101 bp, Klebsiella pneumoniae
atgacccatgcacatgaggcggtaaaaacccgccataaggagtcttccctcgtctttccggtgctggcgctggcggtgctgtttttctggggcagcagccagtcactgccagtggttatcgcgatcaatatcctcgcgctggtcggcattttgagcagcgccttcagcgtggtccgccacgccgacgtcctcgcccaccgcctgggcgaaccctatggctccctgattttaagcctgtcggtggttatccttgaggtcagtttgatctctgccttaatggccaccggcgacgccgcgccgaccttgatgcgggataccctctactccattattatgatcgtcaccggcggtctggtcggtttctctctgctgctgggcgggcgtaaattcgccacccaatatatgaatctgttcggcattaagcagtatcttatcgccctgtttccgctagcgattatcgtgctggtctttccgatggcactgccgggcgcgaacttcagcaccgggcaatcgctgctggtggcggtaatttcggcggccatgtacggcgttttcctgcttattcagaccaaaacccatcagagcctgtttgtttatgagcatgaagacgacagcgacgatgacgacccgcaccacggtaaaccgtccgcccatagcagcgggtggcataccgcctggctgctggtgcacctggtggcagtgatcgcggttaccaaaatgaacgctaacccgctggaaacgctgttgaccagcatgaatgccccggtggcctttaccggcttcctggtggctctgctgatcctgtcgccggaaggccttggcgccctgaaagcggtgctcaacaatcaggtacagcgggcgatgaatctgtttttcggctctgtgctggccaccatctcgctgacggtcccggtggtcaccctcatcgccttcctgaccggcaatgagctgcgctttggccttggcgccccggagatggtggtgatggtcgcctcgctggtgctgtgccatatctccttctccaccggacgcaccaatgtgctgaacggcgcggcccacatggcgctgttcgccgcctatctgatgaccattttcgcctga

SEQ ID NO: 214000 - DNA, 855 bp, Klebsiella pneumoniae
atgaaacaaaaagtggttagcattggtgatatcaacgtagcgaacgacctgccgttcgtgctgttcggcgggatgaacgtgctggagtcgcgcgacctggcgatgcgtatctgcgaacattatgtcaccgttacgcagaagcttggtattccctacgtcttcaaagcctcctttgataaagccaaccgttcctccatccactcctatcgtgggccgggtctggaagaagggatgaagattttccaggagctgaagcagacctttggcgtgaaaatcatcaccgacgttcatgaagccagccaggcgcagccggtagctgacgtggtggacgtgatccagcttccggctttcctcgcgcgccagactgacctggtggaagcgatggcgaagaccggggcggtgatcaacgtcaagaagccgcagttcgtcagcccgggtcagatgggcaacatcgtcgataagtttatcgaagggggtaacgacaaagtaatcctctgcgaccgcggcgctaacttcggttacgacaacctggtcgtggatatgctcggcttcggcgtgatgaagaaagcctccaacaactcgccggtcattttcgacgtcacccacgcgctgcagtgccgcgacccgtttggcgcagcctccggcggtcgtcgtgcgcaggtgagcgagctggcccgcgccggtatggcggtaggtatcgccggtctgtttattgaagcgcatccggatccggaccacgcgaaatgcgacggcccgtccgcgctgccgctggataaactggagccgttcctcaaacagatgaaagcgattgacgatctggtgaaaagcttcgacgagctggataccagcaagtaa

SEQ ID NO: 214001 - DNA, 813 bp, Klebsiella pneumoniae
atggggtcattagcggatttcgaatttaacaaagcgccattgtgtgatggcatggtcctcatttctgaacaggtccgcgacgattttccgtcgcgttttgtcgaggaagagctgcagcgattgctgcgcctcgcgcaggaggagattgcgccgtcgtgggaccaggagcgccaaatagaacgattgctggagctgttttatgacgagtggggctttggcgcctcgcagggcgtgtatcgtctttccgacgcgctatggctggataaagtgctggttaaccgccaggggagcgcggtgtcgttaggcgcgatcctgctgtggatcgcccagcgcctggcgctgccggtggtgccggtgatcttcccaacccagatgctgctgcgtgcggacccggaaaccagcgaagagatgtggctgattaatccgtttaacggcgagaccctcgacgagcataccctggaggtatggctgaagggcaacatcgggccggtggcggaactgtttaatgaagatctcgacgaagcggataacgccgaggtgatccgcaagctgctggacaccctgaagtcggcgctgatggaagagcggcagatggagctggccctgcgcgccagcgaagcgctgctgcagtttaatccggaagatccgtatgagatccgcgaccgcgggctgatatacgcccagctggactgcgatcacgtggcgctgttggatctgagctatttcgttgagcagtgcccggaggatccgatcagcgagatgatccgcgcgcagatcaacacgatttcgcataaacaaattacattgcattag

SEQ ID NO: 214002 - DNA, 393 bp, Klebsiella pneumoniae
atgaacttattcacggctgtcctctacctgcacattgccacagtggcggtgtcggtaggattgttcgttttacgttactggtggatgtatcaccagagcccgctgctgaaccagcggtgggtgcgaattgcgccgcactgcagcgatacgctgctgtttctcagcggcgcagggttaatggcgataacgcactacctgccgttcacagatgacggcgcatggctgactgaaaagctgtttggcgttatcatttacatcgcattaggttttatcgcgttgggccgtcgtcgtccgcgcagccagcagagccgctttatcgcgttcctgctggcgctggtggtgttgtttatcatcattcaactcgccatcacaagaataccgatactggggtag

SEQ ID NO: 214003 - DNA, 849 bp, Klebsiella pneumoniae
atgacctttcaggcctggctgcagcaggcgatcgcccgcctggcggagagcgacagcccgagacgcgacgccgagatcttgctgggacacattaccggccgggcgcgaacctggattttggccttcggtgaaacgacgctctctgctgacgaggcggcgaggctggaggcgctcctggtgcgacgccagcgcggggaacctattgctcatctggtcgggcagcgcgagttttggtcgctgccgctgttcgtctccccggcgacgctgatcccccgcccggataccgaatgtctggtagagcaggcgctggcgcgtctgccaaccgcgccgtgccgtattctcgacctcggcaccgggaccggcgccattgccctggcgctggccagcgaacgtccggactgtgaggtcaccgcggtggacgtgatgccggacgccgtggcgctggcgttgcgcaatgccgaacatctgggcatcgctaacgtgacgataagtcaaagcgactggtttagcgcgctggacgggcagcgcttcgccacgatcgtcagcaatcccccctatatcgacgccgccgacccgcatctcgccgaaggcgatgtgcgctttgagccgttgacggcgctggtcgcaggcgaccaggggctggccgatctggcgcatatcatccgcgagggacggcagtatctgcagcccggcggttggatgctgctggagcatggctggactcagggcgaggcggttcgcgcgctgttccgcgaagcgggctatctggacgtcgcgacctgtcgcgactatggcgacaatgagcgtctgaccctcggacgtttacccgacatggagaatgttggctga

SEQ ID NO: 214004 - DNA, 1083 bp, Klebsiella pneumoniae
atgaagtcttctattgttgccaaactggaagcgttgtacgagcgccatgaagaagtgcaggcgctgctcggcgatgccgcgacgattgccgatcaggataaattccgcgcgctgtcgcgggagtatgctcaactgagcgatgtggcgcgctgctataccgactggcgtcaggtgcaggaggatattgaaaccgcgcagatgatgctcgacgatccggaaatgcgcgaaatggcgcaggaagagctgcgtgacgccaaagaaaaaggcgaccagctggagcaacagctgcaggttctcctcctgccgaaagatcctgatgacgagcgtaacgccttcgtggaagtgcgcgccgggaccggcggcgacgaagcggcgctgtttgccggcgatctgttccgcatgtacacccgttacgcagaatcgcgccgctggcaggtagagatcctcagcgccaacgaaggtgagcacggcggctttaaagaggtgatcgccaagatcagcggcgacggcgtttacggtcggctgaaatttgaatccggcggccatcgcgtgcagcgtgtgccggccaccgaatcgcaggggcggatccacacctccgcctgtacggtggcggtgatgccggagctgccggaagccgaaatgccggacattaacccggcagatctgcgcatcgataccttccgttcctccggggcaggcggtcagcacgttaacaccaccgactcggctatccgcattacccacctgcccaccggcatcgtggtggagtgccaggacgagcgttctcagcataaaaacaaagccaaggcgctgtcggtgctgggcgcgcgcatccgcgccgccgaagtggccaaacgtcagcaggcggaagcctccacgcgccgcaacctgctgggcagcggcgaccgcagcgaccgcaatcgcacctataacttcccgcagggccgcgtgaccgaccaccgcatcaacctgacgctctaccgtctggatgaggcgatggagggcaaactcgacatgctgattgagccgattgtccaggaacatcaggccgatcagctggcggcgctgtccgagcaggaatga

SEQ ID NO: 214005 - DNA, 1257 bp, Klebsiella pneumoniae
atgacccttttagctcttggcatcaatcacaaaacagctccggtcgccctgcgagaacgcgtcacgttttcgccggaaacgctcgataaggcgctggagagcttgctggctcagccgatggtgcagggtggggtggtgctgtcgacctgcaaccgcacggaactctatctcagcgtcgaagagcaggataacctgcaggaagcgctgatccgctggctgtgcaactaccacggcctcaacgaagaagacctgcgaaaaagcctttactggcatcaggataatgacgccgtcagccatctgatgcgcgtcgccagcggcctcgattcgctggtgctgggcgagccgcagatcctcggccaggtgaaaaaagccttcgccgactccagccgcggccatcttaacgtcagcgagctggagcggatgttccagaaatccttttcagtggctaagcgcgtgcgtaccgaaaccgatatcggcgccagcgcggtctctgtggctttcgccgcctgtaccctggcgcggcaaatctttgaatcgctctccagcgtcaccgtgttactggtcggcgccggtgaaaccattgagctggtagcgcgccatcttcgcgaacatcacgtgcgcaaaatggtgatcgccaaccgcacccgtgaacgcgcccaggcgctggcggaggaagtgggcgccgaggtgatagccctcagcgatatcgacgaacggctgaaagaggccgacatcattatcagctccaccgccagcccgctgccgatcatcggcaaaggcatggtggagcgtgcgcttaaggcgcggcgtaaccagccgatgctgctggtggatatcgccgtcccgcgcgacgttgaaccagaggtcggcaaactggctaacgcctacctctacagcgtcgacgatttgcaaaacatcattcagcataacctggcgcagcgtaaggctgccgcggtgcaggcggaatcgatcgtcgagcaggaaaccagcgaatttatggcctggctgcgcgcgcagagcgccagcgagaccattcgcgaataccgttctcagtctgagcaggtccgtgaggagctgacggcgaaagcgctggccgcgctggagcagggcggtgatgcccaggaaattatgcaggatctggcgcgcaagcttactaaccgcctgatccacgcgccaaccaaatctcttcagcaggccgcccgtgacggggacgacgaacgtctgcatattctgcgcaacagcctcgggctggaatag

SEQ ID NO: 214006 - DNA, 612 bp, Klebsiella pneumoniae
atgaatcgactgttccgcctgctgccgctggccagcctcgtcctcaccgcctgttctcttcatacgccgcaagggcctggcaaaagcccggattcgccgcagtggcgtcagcaccagcaggctgtccgcagcctcaatcagttccagacccgcggggcgtttgcctatctttccgatgagcaaaaagtctatgcccgcttcttctggcagcaaaccggccaggaccgctatcgcctgctgcttaccaacccgctgggcagcaccgagctgtcgctgaccgcgcagccgggcagcgtgcagctgatcgataacaaaggccagacctataccgccactgatgccgaagagatgattggccgtctgaccgggatgccgatcccgttgaacagcctgcgccagtggatcatcggcctgccgggcgacgccaccgactattcgctggacgatcggtaccgtctgcgtgaactgaactatacgcaaaacggcaaaacctggcacgtgacctacggcggctacaccagcgatacccagccagccctgccgtccaatgtcgagctgaacaatggcgctcagcgcatcaagctgaagatggataactggatcgtgaaatga

SEQ ID NO: 214007 - DNA, 852 bp, Klebsiella pneumoniae
atgatgacccgctggccctctcctgcaaaactgaatctgtttttatatatcaccggccagcgggccgatggttaccataccctgcaaacgctgtttcagtttctcgattacggcgatacgttgaccatcgaaccgcgtactgacggccaactgcgcctgctgacgccggtggccggcgtgccggacgaggagaatctgatcgttcgcgccgcgcgtctgctgatgcatgccgccagcgaaagcgatcgcctgccggcgggcagcggcgccgatatcagtatcgataagcgcctgccgatgggcggcggcctgggcggtggctcctccaatgctgccaccgtgctggtggcgctcaaccatctgtggggctgcggtctctcggaagatgagctggcgactcttggccttcagctgggggccgatgtgccggttttcgtgcgcggccatgccgccttcgccgagggggtgggtgaaatactgacgctggtagaacccgaggaaaaatggtacctggtggcccacccgggggtcagtattccgacgccgatcatttttcgcgatccggagctaccacgaaataccccgcgccggtcaattaatacgttattaaattgtgaattcagcaacgattgcgagcttatcgcaagaaaacgttttcgcgaggttgatgccgcgctttcctggctgttagaatatgcgccgtcacgcctgaccggcacaggggcctgtgtgtttgctgaatttaacaccgaatccgctgcccgtcaggtgctggacactgccccggcatggctaaatggctttgtggcgcgcggagttaacctttcgccgctcaagcaggccctgctctga

SEQ ID NO: 214008 - DNA, 948 bp, Klebsiella pneumoniae
gtgcctgatatgaagctttttgctggtaacgccaccccggaactagcacaacgtattgccaaccgcctgtacacttctcttggcgacgccgctgtaggtcgttttagcgacggcgaagtcagcgtacaaatcaatgaaaacgtacgcggtggtgatattttcatcatccagtccacttgtgctcccaccaatgacaacctgatggaactggttgttatggttgatgctctgcgtcgtgcttcggcaggtcgtatcaccgccgttatcccttacttcggttatgctcgtcaggaccgtcgtgttcgttctgctcgtgtgccaatcaccgcgaaagtggtggcggattttctgtccagcgtcggcgttgaccgcgtgctgaccgttgacctgcacgcagaacagatccagggcttcttcgatgtgccagtcgataacgtgttcggcagcccaatcctgctggaagatatgctgcagctgaacctggacaacccgattgtggtttctccggacatcggcggcgtcgtgcgtgcccgcgctatcgctaaactgctgaatgataccgatatggctatcatcgacaagcgccgtcctcgcgccaacgtctcccaggtgatgcacatcatcggcgacgttgccggtcgtgactgcgtgatggtcgacgatatgatcgacaccggcggcaccctgtgtaaagcggcagaagcgctgaaagagcgtggcgcgaaacgcgtattcgcttacgcgacgcacccaatcttctccggcaacgctatccagaacatcaaaaactctgtcattgatgaatttgtcgtctgcgataccattccgctggcaccagaaattaaagcgctggataaagtgcgtactctgacgctctccggtatgctggctgaagctattcgccgtatcagcaatgaagaatctatctctgctatgttcgaacattaa

SEQ ID NO: 214009 - DNA, 1653 bp, Klebsiella pneumoniae
atgcctttccgcgccctcatcgacgcttgttggaaagaaaagtacaccaccacccgcttcacgcgtgacctgatcgccgggatcaccgtcgggatcattgcgattccgctggcgatggcgctggcgattggcagcggcgtgccgccgcagtacggcctctatacctcagcggtggcagggattgtgatcgccttgaccggcgggtcacgctttagcgtttccgggccgaccgccgcctttgtggtgatcctctatccggtctcccagcagtttggtctggcgggactgctggtggcaaccctgatgtcggggatctttttaatcctctttggcctggcgcgctttggccgcctgatcgaatacatcccgctgtcagtcaccctcggcttcacctcggggatcggtatcaccatcggcaccatgcagattaaagatttcctcggcctgcagatgccccatgtgccggagcattatctgcagaaagtggcggcgctggcgatggccctaccgaccattaacgttggcgatgccgccatcggcgtcgttactcttggcattctgatcctctggccgcggctgggtatccgcctgccgggccacctcccggcgctgctggccggctgcgcggtcatgctggtggtcaacttgctcggcggcgatgtcgcgacgatcggctcgcagttccattatcagctggcggacggcactcagggcaatggcattccgcagctgctgccgcagctggtattgccctgggatatgccgggctcaaactttaccctgagctgggcctcgctgcaggctctgctgcctgccgcgttctcaatggcgatgctcggcgccattgaatctctgctgtgcgcggtggtgcttgatggcatgaccggcaccaagcacaaagccaatagcgagctgattggccaggggctgggcaacattgtcgcgccgttcttcggcgggatcactgccaccgcggcgattgcccgctcggcggcgaacgtccgcgccggcgccacatcgccggttgccgccgtgatccacgccctgctggtgatcctggcgctgctgatcctcgccccactgctctcctggctgccgctgtcggcgatggccgccctgctgctgatggtggcatggaatatgagcgaggcgcataaagtcatcaatctgctgcgccacgcgccgaaggacgacatcgtggtgatgctgatgtgcatgtcgctaacggtgctgtttgacatggtgatcgctatcagcgtcgggatcgtgctggcttcgctgttgtttatgcgccgtatcgcacgcatgactcatctggcgccggtcaacgtcgaagtgccagacgatgtgctggtgctgcgggtaattgggccgctgttctttgccgccgccgaaggcttgttcaacgatctggagacccggatcgccggcaagcgcatcgtggtgctgaaatgggacgcggtgccggttctcgacgccggtggcctggatgccttccagcgctttgtgaacaagctgccggaaggctgtgaattgcgcgtatctaacctcgagtttcagccgctacgcacgctagcgcgcgccggcgtcaagccgctgcccggacgcctgagcttctaccccgatcgtcaggccgcgctggctgacctgtga

SEQ ID NO: 214010 - DNA, 1047 bp, Klebsiella pneumoniae
atgttaattcaggtgggagagctggcgaagcgtgccggactgacggtacgtacgctgcatcattatgaacagacggggctgttaacgccttcggccagaagcgaggcgggctatcggctctataacctgtccgcggttcagcgcctgcatatgataaaggcgctggcgcaggccgggctaacgctcgccacaatcaaggactatctcgatcggcaaacgctgtcgctgcccgagctgctgacgcagcagatagatacgctcaacgcccagctacgcgatgttggcaggctgcgcgaccgactattggtgctgcgcgaggcgctggcgagcggcaatgaacccgatctggagtcctggctacagacgctggagttaatgaaaatgtacgatcgttggtttagtcaacaggagttagccgcgctgccgtttgcggcacaggatgaacagcgggcgcaggcgtggcgcgagctaacggaggaggtgcagacgctgatggcgagcggctgcccgacggacagtccgcaggcgatgcgtctggcgacgcgctggatggagcgcctggagcaggatacggccgggcgtccggagtttctgacccgcctgaacgagatgcatgccgccgagccgcagatggttgaacagaccggcgtcacgccggcaatcatcgcctatatcaccgaggcctttgccgaaagcaaactggccatctgggcgcggtaccttgacgaagaagagatggcgttcacccgccagcactattttgaccggctacaggagtggcctgcgctggtggcgaagctgcatcaggcgtgccgggagggcgtagcgccggactcggcgtcgggtcaggcgctggcccgggcgtggcttgaactgtttcagtcctacgccggtacccggccgcagacgttgcagaagtttcgtcgggcaatggagcaggagccgcatttgatgaagggcacctggatgacgccggcggtgctgagctggctgcagcaggcgaccggatccttgatgcggcaggcgcagggacctgccgccgggtga

SEQ ID NO: 214011 - DNA, 276 bp, Klebsiella pneumoniae
atgaaacgcaaaaacgcttcgttactcggtaacgtactcatggggttagggttggtggtgatggttgtgggggtaggttactccattctgaaccagcttccgcagcttaacctgccacagttctttgcgcatggcgcaatcctaagcatctttgttggcgcagtgctctggctggccggtgcccgtattggcggccacgagcaggtcagcgaccgctactggtgggtgcgccactacgataaacgctgccgtcgtaaccagcatcgtcacagctaa

SEQ ID NO: 214012 - DNA, 585 bp, Klebsiella pneumoniae
gtgaccattaaactgattgtcggcctggccaaccccggtgcggaatatgccgctacccggcacaacgctggcgcctggtatgtggatttactggcggatcgccatcgtgcgccgctgcgcgaagagagcaaattcttcggctacacctcgcgcatcaacctggcgggcgaggacgtccgcctgctggtccccactacctttatgaacctcagcggtaaagccgtggccgcgatggcgaccttttatcgcatcaacccggatgaaattctggtcgcccatgacgagctggatttaccgccgggcgtggcgaaatttaagcttggcggtggccatggcggccacaatggcctgaaggatatcatcagtaagctcggcaataacccgaactttcaccgtttacgcgtcggaatcggccatccgggcgacaaaaacaaggttgtcggctttgtgcttggcaaaccaccggccagcgagcagaaactgatcgatgacgctgtcgacgaagcggcgcgctgtaccgaaatcttgttaaaggacgggctgaccaaagcgaccaaccgtttgcacgcctttaaggcgcaataa

SEQ ID NO: 214013 - DNA, 1092 bp, Klebsiella pneumoniae; identical to SEQ ID NO: 137145

SEQ ID NO: 214014 - DNA, 210 bp, Klebsiella pneumoniae
atgcagcatatcgggcgttcttcgtcctcgcggggccagcaggagatcagcctgtcgctgaccaatgccgccagcggcatctcggtggagcttcatcacccggcctctggggaaagcgccaccccggcttttattgaggctgagttaaagaaaattgtgcagatcgttgatggctacgaggcggcagaagatacccatattgtggagtag

SEQ ID NO: 214015 - DNA, 915 bp, Klebsiella pneumoniae
atgaagcactgtaaaatcatcctgttagtaggccttctggccagttccgcttcggcattagcagagaagatcggcgtctcaatggcctacttcgatcaaaactttctcactattatccgccagtccattgagaaagaagctcaagcccgccacgtcgacgtacagtttgaagacgcccgcggcgacaccggacgccaggccgatcaggtgcagagcttcatcgcctccggcgtggacgcgatcatcgtcgacccggtggactccgccagcaccccgcagctgacgaagatggcgcagcaggccaaaatgccgctggtgtatgtgaaccggacgccgggggataaaacgttaccgcccggcgtggtgtttgtcggttcggacgagcgggagtctggcacattgcagatggaggcgctggcgaagctggcgaactacaaaggcaacgtcgccatcatgatcggcaatctcaccgacgccggcgcgctgcagcgcaccaaagatgtggagcaggtggtggccaagtatccggcaatgaaagtggtgcagaaacagccggccaactattcccgcagcgagggcatggatctgatgcagaactggacgggcaacggagaagcgattgatattgtggcggcgaacaacgatgagatggcgattggcgcggcgatggcgctggagaaaagccagaagaagctgctgatcggcgggatcgacgccaccccggacgggctgaaagccctggccagcgataagattcaggtgacggttttccaggacgccgtcggtcagggcaaaacggccttagcggtagcgctgaagctgattaaaggagaaaaggtcgagtctcatgtctggatcccgtttgagttagtgaccaaagaaaacatgcagacctatgtggaaaagagtcattaa

SEQ ID NO: 214016 - DNA, 1416 bp, Klebsiella pneumoniae
atgatgacaacacaccacgaccgtcactataaagccggtggcgacccgcgcacgctggctgattttatggccctgcgtgcggaaatgaacaagctcagccacccggcgcggccggatattaactggccgtatgccgagcagcttgcccgcgggctgttggagcatcacggcgcggacctgcagactgtcgcctggtataccctggcccgcgcccggctgggcggggtggcagggatcaatgaggggctgacgctgatggagtcgctgctggttcgtcaggggaaaaacctgtggccacaggcgctcccggcccggacagagatcttccgcaccctgagcaagcggctgcggcaggtgatccgtaccctgaatcttaccccagaggatgttgattcgcttgagcaggctgaacgttcgctgcaaagcttcgacgcagtgctccagcgccttgagatcgctcctgaaaaccagctgagcgacctgcgggcgctactgcacagcacggcaactcgcttcgagagcctcgaccctgcgccagcgcttcccaccgcgccgccggtggcggtgtctgacgcggaacttcccggcactctggtcagcgaagaggatgcggcgaaggctgagccagtgccagacctaaaacgtagaccaaaggctgagccgctggctccgccttcacctgcaaagcggcccgcgccggtggcggcgtctactccggcagccgcgccgcgctggaagccgtttatcgccgggatggttaccatgctggcggtaacgggtatcgccgtcggcggatggctggcgctgcgtcagtccgacttgccgcccatttcggtcacccaaaatgccggaccgataccgggcctgccggcgacaacgcccccggggccggttgatctgccacagacgcagcgccagcttggcgagcttgcccgcctggcgccggactgggcggtcagctacggcgaccagctggtccaccaggccctgatccgctggccggatcaggcgcaaccgctggcgcagcagtggcggcagcagctgagtgctggcgcattgcccgcggaaaaccttaccggctggtcggagggcatgcagcaactgcagcggctcgccgaccagctcaatgccctcgacgagcagaaggggaagtacctgacggtgagcgaactgaaaaccgcagtatttgccatcacgcagtcgtttaaccgcgctgttccgctggaggagcagctgcgccagctggccgcgcttcccgttgatcaaccctggccagccgcgcggggaagcctcgcggagctgcatctgcaacagctgatagtggagtatgccctgctgaagcgaaaacagccggcgtcgccgaccgctgcgctccccgcaaccggtgagccctcggtgagtgaggcggtgaaataa

SEQ ID NO: 214017 - DNA, 444 bp, Klebsiella pneumoniae
atgcctcgtccctccctgtatgacatcctgtacggcaatttcgccggcgggcttgacctgaatactgtcagcgaaacggatcaggtcatcctgtcggtgctcgataacatgcagcgcatcctcaactgtcgggccggaacgctggcgcatctgccggactacggcctgccggatatgaccgctatcctccaggggatgccagcgtcggcgcaccagctgatgagcacgttgtcggcggtgttgctgaaatacgaaccgcgcctgcagcggatcgcggtggtgatgctcgatcagcatgcgcccggcgaactgcgctatgccattgatgcggagctgaaggatattggcctggtgcgttacggcacggagtttatgcccgagggcagggtgttgatccgccacctcaaacgtcagcagtaccttgacgcccgctccgccctctaa

SEQ ID NO: 214018 - DNA, 537 bp, Klebsiella pneumoniae
atggcgattaccgcagttaaaccctccgccaggttgctggcattcctcatggttaccctcttaaccggctgcggcctgacgcagaccgtgaaagacggcgccgtttccgtgacccagtccattttttacccccaggtgaaaaccctgcatctggatcttcgcgcccgggaaggcgtgaataacaacgccaaaggcgcctccctggcgacggtggtgcgtatttatcagctgaaggaccggcaagcgttcgacactactgactacccgtcgctgtttgccggcgatggccaggcgctgcaggcggaccgggtggcggaaaaagatgttcgcctgcgtccgggcgaatcggtgaccgtcgatatgcccatggaaaccagcgcgcagtttgtggcggtggcggccatgtttatcgatccagacctgacgcaaaacagctggcggctggtactcacccgggacgaacttgatccggcgaggccgcgcattatcgaagccagccaaaatcaactgacgctgcacccgtttaaggagaagtga

SEQ ID NO: 214019 - DNA, 1047 bp, Klebsiella pneumoniae
atggcgcagctccggcctcagttgccgtacatgaatttttaccgcttctgccagttgctggagaagaaccatccgaaggcgccgatcatcggcagcggctggctagtaggtgatgaacccatacgctttcgcccgcatccggggatgggctttccggctggcgaaatccgtggaatggacgatcctgaaccgccccgttcgccggcggttcgcgtgacttttatgggactctacggcgtggaatccccgctgccgacccactatagcgatgacattgcgcaacggcgggaaggcgtcgaggccaccgaggatttcctcgatatctttaaccatcggctgatcgcccagtattaccgtatctggcgcaaatattcctacccggcaacctttcgggcgggcggcacggacaacatctcgcagtatctgctgggcctggcggggctgggtataccgggatgtgccgccgttgccgcagcgccgctgtcgcgatttctggcgctgctgccggtgatgatgctgccggggagatccggggaaggcatggaggcgctggtggcgctcctggccccggggacccgggcgacggtgtaccaccacgatccctgccggatccccttgtcgcagccgttaacgatgagcgtccgtcagccggttagcctgcaacataggccagtgatgggaacccacgccacggatgtgaacggtcaggtattgctgcagctggccacggaaaagcctgatgaggttcgcggctggctgcccggcggcgaactgttcagcgacctgatggcgcttctacacgtctggctcggatctcatcttgacgtgcggctgcagctttgcgtcgcccgccatttactgccggatgcgcaactttgctgccagcaggagcatgccgtccagctcggccgtaccgctgtgctgcgtcctctggatgcgcagaaacaggctgacgacagagtcacgatttatctggggcgctatcagcgcgtccgggaaaatatccaccgcagggagagcgatgaagatggcgattaccgcagttaa

SEQ ID NO: 214020 - DNA, 1764 bp, Klebsiella pneumoniae
atggacgatttaaccctgcgatattttgacgctgaaatgcgctacctgcgcgaggcggcaaaagcgttcgcgcaggctcaccccgatcgggcggcgatgctggatctcgataaagccggtacgccggacccttacgttgagcgcctgtttgaaggctttgccttttccgtaggtcgcttgcgcgaaaaaattgatgatgatctgccggagctgaccgaggggctggtcagcatgctgtggccgcactatttgcgcactattccatcgctatcgatcgtggcgctgaccccaacgctgccggcgatgaagatggcggaaacggtgcccgccgggtttgagattagctcccgcccactggggccgaaaaataccgtgtgccggtaccgaaccacccgcgatctgacgcttaacccgctggcgatagaggaggcgatgatgacggcggagccggacgggcgttcggccctgcgactacgattcgcctgtagcgaactggctgactggtcgcagaccgatctccgccgcctggcgctgtacctgggggaagacgccgttaccggcagcgccctccatctgtggctgacccgacgccaggccgcgctgtacctgcgtctgccgggtcagacagagcgggtaagcctcgacggctatttttccccggggggattcagcgaggaggatcgtttatggccgaagggggagagcgctttcagcggctatcagctgctgctcgagtatttcacctttcgcgaaaaatttatgttcgtgcagctaaatggcctggaaaacatcaccctgccggcggggatatcgcatttcacgcttgaggtggtgttcagcgaggtctggcaaagtgatttacccgtcagcgcaagcagcctgcgcctgcactgtgtgccggtgattaacctgtttacccttgaggccgatccgttgaccatcagcgggctggagagcgaatacctcctgcgtccgaagcgcctgcaggacgggcataccgaaatctattctgttgacagcgtgaccggctccgggcgcaccggggaggcacgctatgtgcctttcacccgctttcgtcaccagggcgggatgatgcgtcgccatgcgccggagcgctactaccacacccgcgtaaaacggggcgtaaccggcatgcacgatacctggcttatcctcggcggacagcaatgggaggctgaccgggagctggcgcgggaaacggtctccttgcgcatcaccggcactaacggccagctgccgcgccgggcgctacagagcacgctgctggatcgctgtgagtcgatatcagccacgccgcttaccgtccgcaatctctgtaagcccacgctgccggcctatcccccggcggaagaccgctaccactggcgggtcatgagccatctgggcacccgttttctcaacatgatgagcagcgccgaggtgctgcgcggcacgctgtcgctctacaactggcgggaggatgagctcaataatcgccgtctggacgccattctggcggtcagccatcaccgaattcagcgtttcgagcagggcttcctgctgcgcgggctggatattgaagtgacgctcgacggtagcggatttaccggtgcgggcgatgtccacctgtttggcgacatgctcaaccgctttttcgcactgtatgccgatatgaatcagttcaaccagctgacgctcattgttcaacctgaagggaaatgtatccggtggaaagagaatcacagtctgcgcctgcccggctga

SEQ ID NO: 214021 - DNA, 3411 bp, Klebsiella pneumoniae
atgaatataccgggtaatggcctgggccggtttggcctggccgggcttacgttggccgggatggctgcaatatggtgggggatcacccgctatggcggcatgctgaatatcaatacgcggggcgagcaggtactggcgtttgtcctggtctgtctggcgttggtatttgttttttaccttcctgcaatgtcccgccgtgtgaaggagagtttatatcgccggcagtcgcagcaggccagcgtcttacccggcgaagaagggcgcgtggcgctgacacctccccatcatattacggtgggggaaattcgccagactctacgctatcagtatggacgcgcctggtcctgcaaagtccgtattctgctgataattggctcagtcagagacgtagaacaactgaccccaaagctcacgcaggaactctggcaggaagatcagggtacattattgctgtggggtggagaccctggggcagcggtagataacgcctggttcacagcgctgcgtaaactgcgttatcgcccggctgatggtatggtgtgggtaacatcgggctttgacggcgttttgacaacgatgaacagaacgaagcccaggctcacgccagatgaaatggacagtgtgtctcactctctaaagctacgcttcgaagctcttggctggaaactacccctatacgtctggtcgctgtatgaggggggcaacgaaaaaaatggacgtatcactcagcctgtaggctgcctgttacctgcaggttgtacgccgcaaatagttgccgaacagttcactgccctggcgtcgttactgatagagcagggcatccagcagatatgcgggcaaccacagcacaattttttactcgcgctggccgatcagttgacccgtaaaccggaaacggtgacggagccgttatcggtattgcttaatccttaccgcccgcagccgctggccggggtggtatttagtgaggcgtcagtagaggctggtcgcagtgtccgtcatcactggggacgggataaccgctgggaaaccataccagactcagtgctgtggttgccagccggtctacgtccgcgcaaacagggagtcaactggatgcgtgggatgagcgtggccgccgccgccctgatgttactctgggccgcctcaatgacagtctcttttatcgccaaccgccacctggtggcgatcgcacaggagcaggtgcggctggcctcagcggagaaacagccgctggccgtacgcctgcatgcgctctccgcgttacagaaaacgctttctcaactggaataccgctcgcagcacggcgcgccgtggtacctccgcgctggcctcagtcagaacgatgacctgctggcggcgctgtttccgcgctacggggagatggcgcaaccgctgctgcgcgatgcggcggcgcatcatctggaagagcagctcaccgccttcgtgcagctgccgccggacagcccactgcgtgagaagatgacgaagaccgcttacggacaactgaaacaatatctgatgttgacccgcccggaaaaaatggacgccgcgtggttcgccactacgcgaatgctggactggccgcagcgctcaggcatcgccgacgccgtctggcagggcagcggcccttcgctgctggcattttatgccgccagtctggcgtcgcatccgcagtggcgtctgcctgtcgatgacggtctggtcagccaggtgcgcacacggttaattcgacagatgggccagcgcaacagtgagtccacgctttaccagaagatgctcgcgcaggtggcgaatcagtatgccgatatgcgcctggcggatatgactgccgacaccgatgcttcgcgtctgttcagcactgatgaggtggtgccgggaatgtttacccgtcaggcctgggagcaggccgtgcagccggccattgagaaagtggtcgcggaacgccgcgatgaaatggactgggtgctgagtgatacgaagcagactgcggcgcagtcgacgttgccggaagctctgcgagccaggctggcggagcgttatttcgctgattttagcggcgcctggctggatttcctcaacagtctgcgctggcagcgcgcggcaaccctctccgatgctatcgaccagctgaccctgatggccgatgtgcgccagtcgccgctggtggcgctgatgaacaccctgagcgtgcaggggcgaaccggccagaccggggaagccatcgccgattcgctggtcaaatcggccaggcagctgttcaaccgtgacaacccgcccgtcatcgatcaacggtccggcgcgcgcggtcctctggatgccaccttcgggcccgtactggcgctgctggacaatcgcgacggcgggacgcccaccagccgtcttagcctgcagaccttcctgacccgcgtcacccaggtgcgtctgcgcctgcagcaggtcaccaacgccaccgacccgcaggcgatgacccgcctgcttgcgcagacggtattccagggcaaggccgtggatttaaccgaaacgcgcgactacggcagcctggtggcggcggggctgggccaggagtggagtggatttgggcagacgctgtttgttcgcccaatggaacaggcctggcagcaggtgctgaccccggcggcggaaagcctcaacgcccagtggcgcagcgcagtggtggaggactggaatagcgcttttggcggtcgctacccctttaaaaataccagcagtgaagtctctctgccgctgctggcaaaatacctcaacagcgagaccgggcgcatcgcccgctttctgcagacccggctgaacggcgtgctgcataaagaggggagccgctggatggcggacagtatcaatgctcaggggctgacgtttaacccggcctttctgcaggcgatgaataccctgagccatctctccgacgtcgcgttcgccaacggcgaagcgggattgcattttgcgcttcgccccggcacggcggacggcgtgatgcagacggagctggtcatcgacagtcagaaacttgtctatatgaaccagatgccggtctggcggcggttcagctggcccgctgacaccgaagcgccgggcgccagtctgagctggatcagtacccgggcgggcacccgccagtatggcgatttcccgggcgcctggggctggatccgtctgctggataaggcggtggtcagcgcttatcccggaacgagcagcagctggagcctgagctggaaagcgccggatggtctgttgctgaactacacgctgcgtaccgaggcgggggaaggaccgctggcgctgctggtgctgcgaaactttacgctaccggagacgatattcagcgtgcgcgcgtctgctgaacgtgttccgctgaccgacgatatacccggcgaagagggatactga

SEQ ID NO: 214022 - DNA, 1158 bp, Klebsiella pneumoniae
atgggctgggtacgaacaaaagcattgaccatggagcagccatcggctccttcactgacccgatggctgtttgccggtgtactgatggcgattatcggtgtcctgctctttatcctccatgcttccggcaccgtaaaaattctctcagtgataaatatctggtgggtatccctgatgcctgcaggatgctggttgctgattttttgtctgcgttgctacctgtgggacagggatctgaaagcgcatcagttcttgctgaaagaggcggaatacggacagcagaggtgggaagactgggccgggcgctggctggccgttctgggcagtgcagtgctgttgccggatcatatttctgcggcgcattgggggagtgagcggcctcagcaatacggacttacccgcaggattaattaccttccggtagaagagcccgtgcagttgagtgcgatgcatgcgctactgaccagtatagaagagcgcgtgcagtgcctgccggaagagctaccgctgtatgtcaccctgatcacggataatccctcgcctgagctgaccagcagtttcagtaatctctggaaagaacacattcctggccgtgccgtgcctgatgatattaccgttaccggctcattctcactgtcggaagtggaggagcgcctgaagcagcctgtactgacggtcaatttactcctggtcatccagctcaacggtggtacagcatactccgacgggctggccgtgctgctgctgaccagcgatgatgtggcgcaaaaataccatctgccgcactcatcacggctgttacgtcctatgcccttagatatgacgaactttgaagacgatatcaccctgtttctggaaacccagactgtcgcctgccatacgccctccgttatcggggacgcaaaaaaatggacggaaagaagcgccgcgcttatcacgcagggcggcaaaatgcataccccatggaaagctgaagatatcgcgctgctggaaaaatggtgcggtattccgggacccgcagcgccctggctcctgaccgcgctggcagccgatctggtcagcctccgtaaacagcccctgctggcgttattttccagcgaacaggaacattttatcagtaccatcaccccagggagtgaagatgaatataccgggtaa

SEQ ID NO: 214023 - DNA, 267 bp, Klebsiella pneumoniae; identical to SEQ ID NO: 138787

SEQ ID NO: 214024 - DNA, 201 bp, Klebsiella pneumoniae
atggtttacgttgaagcaaaaattgttatgactgcttataggggggaagagatatataccttacctatacctcatcaaaatagttctgtcggatttacctataacaatgatttattttcagaaaccgtgactttttatccactggagcgagaaaaggagattcatattgcgcttgataaaaagcgacttggtggcaaatga

SEQ ID NO: 214025 - DNA, 1032 bp, Klebsiella pneumoniae
atgagaactttaaacttcaacggtaaaatttcgactctggaaccactgactgtaacagtaaaaaatgcggtctcaacttccggccatcgcttgcctcgtaacggtggattcaatgcagccccgtactttccaggcaccagcattcggggaactcttcgtcatgctgcgcataaggtcattgtcgatcgtgtgggccttaatgcagacggaaaatcacctttcgacctggcagaacatttcatgctggcccagggggtggatatcaatggtgaagccgaaaccttcgcgccaggtgaaatcaatgctggtgctgaactacgtagcaaaaacccgttaatcagcttgtttggtcgttggggattaagcggcaaagttggtatagggaatgctatcccggatggtgataaccagtgggggatgtttggtggtggtgcccgctcaattatgtttcagcgtgacgaaagtctgatggagtttcttgagacagaccaggttgatcgtcttgaacgcctgctcgaggaacaggctgaggcaagtgtggatatctctcagatcaaaacagagcaggatgcactcaaaaaggcgatgaagtcggctgataaagacaccaaagctgagcttcaaatcaaagtacgggagctcgatgaaaaaattcaggcccgcaaagatcagaagcaggaatctcgcgagtcaattcgccgcccgattgacccgtatgaagcgtttatcaccggcgcagaactcagccatcgcatgagtattaaaaatgcgactgatgaggaagcagggcttttcatttctgcattaatccgctttgcagccgaaccacgttttggcggtcatgcgaatcataactgcggtctggtggaggctcactggacagttacgacctggaagccgggtgaactggtaccagttacacttggagaaatcgtcatcacaccgaatggtgttgagattaccgggggcgagttgtttgctatggtaaaggcattcaatgaaaatcaatcttttgatttcactgcctgctaa

SEQ ID NO: 214026 - DNA, 708 bp, Klebsiella pneumoniae
gtgttaaattttaaaccgtatcgggtcatcatgtcttctctgacaccggtggtcatcagtgggatagccccatcgctggacggcattctgtatgaagcactgtctcaggcgatacccagtaacgagccaggagtcgtattggctcgtcttaaggaaatacttctattcaacgatgaactgggtgttttccatgcttcatctctacgttttggcataacgcccgaacaggggattggggcgacaacaagcgtacgttgcgattatctcagtcccgaaaaactgagcactgcaatgttctctcctcgtatccacaggggggtgtttacgcgtgtcctcctgaccgggggccccacgaagagaaggatgacaacccgtccagcttattctgcaccctatttaacgtttgattttgtcggctcttctgaggctgtagaaatactgcttaaccatgcccatgttggcgttggttatgactatttctctgcagctaatggagagtttaacaatgtgacaattcttcctctcgatatcgacacgagtatatccaacgagggtatggcattgcgtccggtacctgttaattcgggtctgaatggtatcaaaggagtatcaccacttattcctccctatttcgttggtgaaaagctaaacattgtccacccagcaccagttcgtactcaattgatttcttctttattgcgaggctaa

SEQ ID NO: 214027 - DNA, 1875 bp, Klebsiella pneumoniae
atgaatacctcagcggtatttgagactgccggattgtcgttacgtcaggtccaacaggattatatcgaggctgcagctggtgcactgactcaggatcataaagttgcactgattagtgctgagacaggtgtaggaaaaacgctgggctatctggtaccggcgcttctgattctgatgaaaaaccctgaggcaaaatttgtgatagccacgaattctcatgccctgatgcaccagatattcagaagcgatcgtcctctccttgaacagatagctgaacaatgcggcataaaagttactttttcccggcttatgggtaaagctaattacgtatcccaggagaaagtacgtggactgttactcatggacgagtttaccgatccggatacgattaaggtccttgaaacactcgctaattggtcaaaacctctggttgagtttgaagatgagtatggtgaactgccagcgctgatcactccagagatggtcacctactccatctgggatgatatacaggacattgatgatattcgccggaatgctctcagtgctaactttattgttacgacccatgcgatggtaatggtcgactgtatgtgtcatcaccgcatcctcggtgacaaagaaaatatgtacctcattattgatgaggcagacatttttgtagatatgcttgaggtctggaaacagcggcgcttcaacctcagagagttgaccagtgcgttcaatgaacatattccacgtaatggcgtgcatgtcatcgaccagttaatgaacgacgtgactgcgatagcgggcgatctgcatttttgtagtacgcccgcagcagttgccttgtttgacaatagctttaaggccttatcaaaggtagggcggaaaattaaaaatgaagcggcccggaaagctttctttgactgtatctacagctgggaaatgctcggattatccgggggacaaaagggcgtaggcgtttccaataaacgtcgtgaaccagccctgatcgctgtaaacccgtttatcgggatgaatgtgggcagatactgcactcagtggcgtagtgcgttactgacgtcggctacgctctctattaccagtaccccagagaccggaatggagtggttatgtaaagctctggggttaaccagcgatacgatttcaatcaggaaaatattctccccagacgtctatggctcaatgaagctgaccatcgccggtgctgattttccaaaggtgttcaatgacccgaaagaacagatattttcaggtcaatggttaaaggcagtagttgaacaattgtcctgtattcaggggccagctctggtattaactgccagtcattatgaaacccggatgattgccaatcagctgggtgaggtctcgcaaccagtttatattcagaaagcaggtcaggccctgtcagaaattattaaacagtatcaggagaaaccagggattcttatttctgccggtgcttctgttggtgtgagcccacgaggcgagaatggggaacagattttccaggatttaatcatcacccggatacctttcttacctccggacagaatgaaggctgaaagcctttatgggtatctgacggaacgaggctatagccgtacctttgaggcagttaaccgtaacatctacctggaaaatttgcggaaagttattcgcaaagcaaagcagtctgtagggcgggggattcgtagtgaaaatgataccgtcaggataattatcctcgatccgcgtttcccggaaccgactgacctttcgtctaaacatcggtcgcttgaacacattattcccgttcgatttcgtcgtgcatatcgttcgtgtgaaattttatctccggcgtattgtgaagaggatatccagtgttaa

SEQ ID NO: 214028 - DNA, 567 bp, Klebsiella pneumoniae
atgatttactacgataatgcgtttcggttgcgtatccgtcacacaagtgtttaccagatccaccagcacctggattttttcatgcaggaacgtaagggagagaagctgccgtactcttttaaaatttttcccggtaccggggatgattcgttactcctggtccgcacagccacagctctggagttgccaggggagaaaaaaagagagcttattctctctgagggccatgaaatcaagttcattacgtcaatggccatctttcataaaggaacaaagtcagaaggccgtggccgacgccagtttgctccatctgatgaggctagttatcagttggccctcaccaaattagcgaaggctggttttaaacccggtcaaatcgccgtcagtggcccgaaaatcgtccatatcgacaaaggcaacgctggacgtggttttacgctacccgtattcacggtacagggtaccgccataatcagcaatcaacaggaagctgaagtgggaatcgtttatggcgtcggccctaaacgcgtatttggttgcggtttcatgcatctggcggggcagtag

SEQ ID NO: 214029 - DNA, 792 bp, Klebsiella pneumoniae
ttgaatcatcctgtagagtcagtgtatagcgctctgacgagtattttattgccctatatgggtgagcctgtgcctgtgcaacgaaattgctcatgctgcggcagagcgccctcagagttcgacggggtaggcttcgagctggtcaacgcctacagggaacgtgttgtgcattgccgcccttgccagacattttttgtttctgctccagagctgatgggcgtggagaaccccaaaaaaccaacaaccggccagaaatttggcatgtggtctggtgttggggctgttattaacgttgaagacaattcttcggttcttttagcccctcagggagtggtcaataaactacctgagcattttttcgatcacgtagaagtcatcacggccaccagcggccagcacctggaatacctgtttaacaccgaactgaaattcccgctgatttatattcaaaacttcggcgtgaaaacctacgagcttgttcgctcactgcgggtcagtctgagtgccgacgcaatttatacctgtgccgatcaactactgacccggcagaacgaagtcctttacatgctggatttaaagaaggctaaagaactccatcaggaaataaaaaactactccaggaaagagatggacatctttatcagaacagtaaccttgctggcctattcgcggataactcctgaagctgcctcgaatgagtttaagaaaaacaacctcattccgttactgctgcttctgccgactgatccccatcaacgcctgagcattttgcacctcttgaaaaaggtataa

SEQ ID NO: 214030 - DNA, 414 bp, Klebsiella pneumoniae
ttgaaattcaataacaatcaaaatgaaaaatgtctcaataaggtgttgagttatttttcagaaaaagatactaaccttattgtcgttataatagggccttccgggtcagggaaaacccttctggcgaagcgtgcaatatttgatggtttatttatttcaccagatgagccgatagctggtgataaatttattcagagtttatcaaataaagatatcatcgttgatgatgttgtcctttttgatatgcggaatgtgttgaaatacgttcttcattcacttgcctcgggaagaaaagtgattttgaccgggcggccggaagatgagtctttttatcagaagcttctgttaaatttgcccaaggaaatttcaccattatttattaagctggcgggtgaaaattccttgtatctgtga

SEQ ID NO: 214031 - DNA, 489 bp, Klebsiella pneumoniae
atgaatcttgataaaaacttacctgctttagtaatgaaaaatgttgaggataacattggggttattaccaaatatctcaagcaaacagaagataacgctcttgtatttattattggagaaacagggtctggtaaatcctgtttggctgaacttgagtttccggatgctctatacccgactgctcaacaatttgacgaatgtgatcacatttcggaaatgttcacaggttttgatgtagtgattgatgacattttccgttttgatgctgacaaagtcctggagtgtattctggctgtgcatgcttctggccataaggttctggtcaccggacaaccgtcagaccatgaattgtgcattggtttaatgtcacgcttgccagtgggttatcgtactatgtacgtgactctgatggaccatcaagacctgcaagagatgtctgtcgatggcaaggacaagggtaattcggaaacaaaaaccgtcctgcattag

SEQ ID NO: 214032 - DNA, 165 bp, Klebsiella pneumoniae
atgccagccagtccggaagcaaatgttgtcagtaaagaaaagtccttaaacaaaacactgtatacaatcaatattgtgagcagcgaaaaaattaatattgctatattacttgttaaaaatgacgcgcccccatcaaataaagaagcaatagtagtttcactctga

SEQ ID NO: 214033 - DNA, 408 bp, Klebsiella pneumoniae
atgaaaggtatcaatcaatccaatggtaaccatttaaagtttctgtatggagtgacctctacagatcgtcttattcagcacgaacatgccgataaattcattgatagctgcattacaaatattggcagcattcataaaatgtccctgacttgttatcgggctggtggaccattaactgagttggtgcttttttacggttcggacaagacattctcaatcaccattggcgttggcgatgtagatgtttccatggttaatgaagatgatatccgaattagtcacaaacaaatcactttgcctgatacgaccgatacattaatactcgttactcgcattgcaagacgtagtgggctgaagccgatgttacctgaagcagaacaattcagcacggttttagattttgtttga

SEQ ID NO: 214034 - DNA, 396 bp, Klebsiella pneumoniae
atggcatttataaagggttctcttttttttattattatggtgctattggtctacggagccacgggattaaacgccaaagaatcaattgtgtttgctgtatttggatttgggatttcagcgatattatgttccttcgtaggcattatgattgtgttggttgtgactatgtgtttgtttgcattcgaagaacttggcgcgttgcctagattatttggtgcccagataattttaattgctttgtggaaccttatatttaccgtggttttgccggatgaaaaagcacgcaccatactcggttttgatctctacaatatttcatcgtatttgctttacggtatgaccgtccttttaggtataggctcggtggcaatgctttttaacaaaaataactcctga

SEQ ID NO: 214035 - DNA, 1242 bp, Klebsiella pneumoniae
atgactactgcaacaatggcaactccagctaaaaccaaaatcgaaaatgtttctctgcgtaccttcttagaaaaaaatggtatcggtggtcgtctgggcaatggtcttgttatggacccgacgcatctgaacatcatccctggcttcaacacccgtaccgcaggcctgggtgaggcttactgggaactcccggaagttaaggaccacctggcgcgtctggcgcagcaatatgccgatagccctctggaaatggcccctatggttgtccaggttcgtgatggccaggttgtcattcgtcagggacactgccgtcaccgtgcaatccctctggctaataaaattcgcgaagaacggggtgagggcccggttgataaaattcgtgttgacgagttccgtggctctgacagtaaagcagaactttttaaccttaaaggaaacgatcaacttccggtctcgatcgttgcacaggcagaatcactgcatcgcttgcacaacgacagtgaagagcctatgagcattgaagagattgccaaggaccgtaaaatctccgttactcatgttcgtaaattgctcaaagttcacaccgcgcctgaagcgttaaaaggtctgatcgtaaaaggtgttgtagcatactacgcagcactcgacgtgatggagaaatacccggataactgtgtcgccatcattcaggaagcgtttgataagtttggcaaagctaccgacaaaaccattggtcaggtcattcttgctaagcgtacaggtgaaaacgacaccaatggtgaatctgatggcaacgtgacaaccattacaacgactgaagcaggtaacggatccaatagcgcccccggcgcggctggtggtgtcattgatggctctgcaggcaatgatgttggagttgcgggtggcggttcagaagatggggaaggcggtgaaaaatccgaaccgacacgggccccggcggcgaaacgcgaacctaaacaaaatatcaaatctcagccgtcggtgttcgacgtgctgccgaaaaaaatctcaaaggagattgtagataactctcttgatgttattaaccgtatcgttgccgaagcgaaagaaattccctttatggaagacggtaccgaggttctcgctaaagcccagtatcaactgacgttaacctatgaagagtttttgcagctgactgcagccaaagacagctacgataaacatctggaaaaaatccagaaaaaaaactctgagcaataa

SEQ ID NO: 214036 - DNA, 165 bp, Klebsiella pneumoniae; identical to SEQ ID NO: 23280

SEQ ID NO: 214037 - DNA, 456 bp, Klebsiella pneumoniae
atgaacattcaggattctttagaaattcttcttcgctggctcgaagataatgttgaaatggaaagcgatattttattttgcgataacgtagactccgctgccatgatacccgccgttcaggcagctatcgcgttagcggaaaatgcaaaacacggcaccgctaatgctgatgggccagtatctgtcctcgataacgacagtcagacaaccagtgggatagacgaccagggcaacagcattgatggaggcaaagcattacagatagccgatcacgagcgcaagttagtggcggttacccatggacaggtcattaaagacgctctgaacgccacctctgactttctggatacggattgcgtcatggaccgcctcgggatatcgtacgaggacgctgagcttcgttcttccggcgcgatggagctgcataatgcgcttatcgagtggtcacaagattga

SEQ ID NO: 214038 - DNA, 609 bp, Klebsiella pneumoniae
atgggaactcttttttacgatctccctgttacggacggtaaatccggatcgtggacattggatacattcaccatctcccaggagaaagcgcatgtgctctctctcagggccgacgtaacaggcaatcagaatgaatacattccacctggtaagtatcgtcgtctctcaaataatggcgaagtcgtcatgtccaatacaccgatggaagttaacacgtgcatggaatttattgagcgggcaacggggcgtgtgcttatcaacgggcttggcctggggatggttctccatgtcattttgcaaaaaaaggaagtgacccacgtaaccgttattgaaaaagagcaagacgttatcaaccttgtcgctccggcctttatagatgataagcgtgtggacattatctgtgcagatgccatgacgtaccaaccacccgcaggggttacttatgatgtatgctggcatgatatatggacgtatttttcagcggaaaatcttcaagcgatggagaaccttgagagaaagtacctttttctttgcaagtggcaggcatcctggggaatgcaggaatgcttgaatgcatttattaattccaggcatcaatctgacgcctga

SEQ ID NO: 214039 - DNA, 450 bp, Klebsiella pneumoniae
atggtaacggaaaaggagttgattgaatttgaccttctcagaaaggtcggcagtcgctggaaataccgttattccatcggcgcaaattatctctttgccagcagtaaagaaagtgctgtcgaacaagcaacacaagcattcaggaaagctcggccaagtgagcttttaacccgtgacgaacggtatgagaaagcaaatcaggaggaaatcaggttgtcagacgttcgctggaaacacctcagcctcgacgatttgtacgcgctcctgaaccggatgaatggcgataagacaacgctacaggacgcatcctcccgcgagttcacaggaaatggtggacggcgtacgtcagctgccgtggctgctcagggagcccgtgatacggccatcatgtgcggctgtcttgaacgttacattgtgtggcggcggcaaaagacacatttcagcgactga

SEQ ID NO: 214040 - DNA, 636 bp, Klebsiella pneumoniae
atggcccgggagttaaaaaaacgacgtcaggccgaaacttctacgccagttgaggatgattacctggcgaacatgctctggtatgcggaagaatcggtttgtcaccccgacccaaattatcaatgcgagtttggccgtctggctgcgcctggtgttattgccgccgttatccgcgaactcctgcagcatcgcgggtttgcgaaaaataataggccggtggtatacacatcccgcactgagcttcagtgcgaagatggttttgggggaatctggcctgaacccatattagacggttctgatatagcactctatctctatgcctctccatctcctgaacgcgaccagatccgccgtgaccacgccgagtggtctcaggatacattcggcgatgttggcccgactggcccgctgaagcatctcagtctcgaggcgctggaaaccgcagaagcgcccggtaactatgctgaatgggctgatatgcaatttttactctgggatgcccaacgccgcgccggtatcactgacgagcagattacccgggcgatgatcgaaaagctgaaagtgaacaaatcccggaactggcctgaccctgaagatggagaaccacgctttcatattcacacacaggcggaatag

SEQ ID NO: 214041 - DNA, 525 bp, Klebsiella pneumoniae
atgaaacagaatttaaatcacctgaaaccgggtctctatgctgtctggtatttcgattgctgggatgttgatggtgatctgtattataccctcgcgacccaggacgccaaccaactctggcgtgaagagggaacaggcctcgatatgttgcgacaccaaggcgatacatttttaaaagcttgggcgctggatgatgcctcaaatctgctggcacagagcaacaataacctccagctcacccagcaaagtctaaaaccgggcctctatgcaatccactatttcgacaacggggatcctggcaacgaaccgacgcatatcctcgttacactggatgataatcagaaatggtacaaccatgaaaatggacgggaaatgtttatgtctgaaggcgatatggtgttaaaagcctgggcactggatgatgcctcaaatctgctggctaagacggttgaccccagccagctggtggacatcattcaaaaaaatgagattcaacaacgctttctagcagacctggatatttaa

SEQ ID NO: 214042 - DNA, 288 bp, Klebsiella pneumoniae
atggaccaggatgacgttttatcaaaaatatccagtgaaaatacaacagctcatgagctgttaagcgaagctatgccaaacgcagcctcacgattctaccggaccgcaaaaaacctctcccgacttctggacgaggtccgcgagcacttcccggatgcttcgtattatgcggcgtctggaagtttatgcctgctgcttggggaaagtcataataaacatgaccagccgcagcaggagttactagctcatacggcaccggacctaagagtggagggcggagactggtaa

SEQ ID NO: 214043 - DNA, 162 bp, Klebsiella pneumoniae
atgaaagtcactgtaaaatcaatgaaagcattacttgccagcaccggaaaaaaaatgaagttaacgggcagtaataaaaacggggaccgcttctatgttgtgacagggtggagcggtgaatacaccattcggggcatcgcccggcaactgggattggtgtga

SEQ ID NO: 214044 - DNA, 207 bp, Klebsiella pneumoniae; identical to SEQ ID NO: 95455

SEQ ID NO: 214045 - DNA, 198 bp, Klebsiella pneumoniae
atgatgctctccatcgaagaaatgggcaagcgagcagcactgctaaaatggaagcgccagtttgggccattcgaaaaatgccctgagtgttatggtcttctatccggttgtatgttatgcggtggtaacggcagggtgattcaggaagatattgatgcctggaataaccccattgcgaagatgaggcgacagatatga

SEQ ID NO: 214046 - DNA, 888 bp, Klebsiella pneumoniae
atgactgatatcaccgaactggcgaaagcggcagaaaaatatcgctccacccttgaggctcatcgtaacaacccgcgtgacggtgtggcactgaatgcctgggatgatgctaccagcaaatttatggagctggtcgacaatgacgagctcaatatcatttcggggttgctagaggcgctggagaaggcgaaggggatggaaacctactggaaaactcaatgccgtgggataacagaccactgcgaggagttgcaggcgcgcatcgccgaactggagtcccacaccgtgaagccgcctgttcacccgaccgtagccagtgagaagttagacgacgaaacgctacaggaactaatcgagtttcgccgtactacgtttgagtaccactcaaaagaagggaataaggtacagacaatcatccacggtgtaacgctcgcggccctgcgcgaactccaggaacgccgcaaggccgacagcgagccggtggcagaagtggtttcaatttatggcgaccccgaagcctttggggagcgagagattagaccgcttgtcggcattcagcaaatgccatacgggacgaagctctatcgccacgcgcagccagcgccggtagtcagcacagacttgtttcataccgcagcatcagcaattgaagacctgcttaccactaaagacagggcgggtgcaggtgtgtggttcgacttgccattcaggctccgctcggcggctaacgcacagccagcgccggtagtgccggagaaatgcccagcagaaattcgcgacctgatagattcgcattctgatgcgcttttcaacgacgatgatgcacaagagatctggaacgcctgccgcgccgccatgctcgcacccgccccgcaggaggttaaatga

SEQ ID NO: 214047 - DNA, 522 bp, Klebsiella pneumoniae
atggcgataaaaaacagaatacgtgaagctgaaattttccgtgcccgtacgggtgagtacccaatcgatatgtacattcagtggattaaaagcggagcgctgaattttggtgctgaatatcagcgggactatgtctggggccatcaagagcagcaaacctttttgctcgtccttatttcaggatttcctattggcagtgtagcgctggctaaagcaccagactgggatatttgtgacggcccgtacattgaggttgttgatgggaaacaacgactcacaactttaaaacttttcatcaacaacgaaattcccattgttattggtggagaggaaatttactggtctgagtttagcagaagcgagcaattagcgtttggtcggccaacactaagcgcagtaattcttgatgatgcgaccgaaaaagaccggatagcgtatttcgttgcggtcaactttaccggtgtacctcaaagcgaagaacaccgccaaaaagttctgaaattgcaggagcgtgcagcatga

SEQ ID NO: 214048 - DNA, 504 bp, Klebsiella pneumoniae
atgaaagaccacgaaattcgaacactggtgaacaaactgcatgagatagctatccagtttcacggctcccagcagttaagagagcagatagctcatacagttagctccgaaattaccagacaggagaacgatatagggactaacgaaccaatgttctacgtgaaaggtgatgcagcaatccgtttgctaaaaggtgaaactcgctatgcgacaatcactacagaaccaaagccaggagacgtattacccctatatatcagacagcaatcagcgcagaccgcaagagcgccaaaaggtaaaagacttcgtatcgctgaagaccggtacgctgcatacttcccgcaggaaagaccgcttgacggggcgcagctcatcgcctgggatgaaaacgggaacctgttaggaatcggtttcggccgctatacgcgagaatctgggatagtgatagtcgtaggtggccaaaaatacgattcgaatcacatcatacattgggattgccagtag

SEQ ID NO: 214049 - DNA, 975 bp, Klebsiella pneumoniae
atgacaacagaaaccttaagtaaagagtggttacagcatcaaatttcagcaattgaaggcgctggcatcactgacagcaacacattggcagctttcaagctggcgctggccgcgatgagtagcaagccggtagtgccggatgaggtcgagcgtgttgccgctgtattagagcttatcggtagctttgaggctactgatattgatagcgacacagtagatttacgttttgagatcgatgatgtcgacactggctctgacgtatccattactgaatatgccgcacgcggttccgctattatccgcatgctgactggcatctcatcggaattaccagatggttacgttctggaggcgctgaagaacacgcaaaccgagaatgaactggcacgaggccagttattcatagcccagcgaacgctattaaatcagcagcgaaagattgcagagctggagtcccgcaccgtgcagctgccgaaacctaaagactctgacccgggatggaaaatagatccggaatttatcagcaaagttcagaacgagatagggtacgatgaccaatgcgaatgctgggagggtacaccttccatggaggtagtagaggccgttttactggccgccgctggcatcaaggtgaatttcgaaggagagcagaatacgcagccgctgagtgaagcagaacgggcagggccacaggaacgccgcaaagccgagagggacaccgagccttatggtttcacagatggtgaccgtcgcgggatgatttacaaacctgagcatgccgatcggctgagcgagccggtgccggtctatcgccacgcgcagccagcgtcggttgcgccggatgcattgattaaagctgtagatttttataagcaggttaagcgtgaaaatccgccagttgaaacgggatcctataaagatgccgttgagtgggtactgaaagaagcctgccgagctgtcaaaaaggatgaatga

SEQ ID NO: 214050 - DNA, 498 bp, Klebsiella pneumoniae
atgaaattatccaaattctttgagctgataactgccatatgggcaaacagactcaaccagcgccgcgatcctgaagtcacgatcatcatccactctccgggaagtgtcggagttacaccagcagtagaagttgagtccatcgaggccgggttcgactggaatgccggtcaggtgttgatttacccggcacagccattgaccacgcttacgccagaccaggtagcagacattaccaccagcgtgcgcaaaggccagtcctggcatgcctatgaggcttacaagaagcataaagccgaaatggataccgccgcgattgagtattcgaaagtagcaggacagcgtgatgaattattgacagcccttgaagcactttctgctgcttgtgacactggcgaacgtgaccgggatggaaagcaaagcggagtaattattcctgacaaacatgctgtatgggctgcgcgtgaagccatcgcccgcgtcaaaggtggtatagtatga

SEQ ID NO: 214051 - DNA, 219 bp, Klebsiella pneumoniae
gtggccactcacattcgtaattttagctggaaccgggtaaagctttcgacgctcacatacgaccagttagaacagctaaaaaagaaagtcgaagaagaacacgcctgtaataatgggatcttcctttatgacaaagcggggttgaaaaaacttgatgctttgagctgggctgtatatcacaaaatgaaagcagacaaaaagtccggccaggtcagttga

SEQ ID NO: 214052 - DNA, 237 bp, Klebsiella pneumoniae
atgtttaaccaaactgaaaagtcaattgcccagattgcggaatatattccccgtgcctgtcgcgatatgaagttaaaagaagccaaggcccggcttgctacaaaaatcgctctttatattaatgacggcagtgatgccgaggtgcttaatgcaaccttcgctcgtgcacttaacagccacacccgggaggatttcttttctaacgtatctgcatctattgattataaggagtcatga

SEQ ID NO: 214053 - DNA, 315 bp, Klebsiella pneumoniae
atggggatagcaaatggatgtagttcagtacagcaagatgttcctgcaaccgataatgacgttcgacatgaagtaattgtcaccggctgtgtgacaaaatacggaagagggattcatttctgtaataatgagctcctaagtggtgctaatcataatctctggttcccattgagcactgaggaagactggttttccggaattgagcgtgtgctgatgatgaatggcctggcggagaatgtcgtcaaactcagtcctcttaatgacggggaagattatcacgactggaaagtgacgtataaccgccggaacgtctga

SEQ ID NO: 214054 - DNA, 321 bp, Klebsiella pneumoniae
atggctattgtaattaaagaacgttataccaccgctgtgatcagcacagcgcacattgctaaagatgacgtcgagttattaactgatgccagttataatcctcgttctgagagtggtcgtaactggattcacgcaaatgagtatggctacatcattcggataacttgtgaaaatcccggatggaaacaacttttacgtgatgatggtatatcctggcctacaatcgaaaatatcgaaaaagtaattgccgctgggtacgaatgtgttcattttgatcgtgacgcagatattgtggatgaacttaatacgtgggagtggtaa

SEQ ID NO: 214055 - DNA, 870 bp, Klebsiella pneumoniae
atgtccatcgaaaatacattgattgatgaattaaacacatcagaaaacacaggagatattattccttctgctcctattgatttaattattgctcaacgtacagctggtattgcagcgtttatggaagggttagagaaacttcgagaagcagaacagctgtttgcagctgctgctgaaaaggattggttctcagggctggatgagattgtggcgtccggtaggcgttgccgtaaagaaaatgaaatagaggctgtacgacgccgggtggctcgttgtgttgatagcagtatctggacacgcctgatgacccagacagggatgtttacgtttatgagtagtgaccaacatgataaatggactgaccagttatacggcgaagaatgccctgaagtcaccctggacaatgtcatgagtacgtttcagcatcttcatgcctcaaagaatgaaacgtttgttacaggtattattgatgttttccgtaagctgtcctgggactacaaaacaaataatccttgccgtctgggcaagaaaactatcctcgaaggtgttttatccataaatgtctctcgaacccgatacgcttcggtcagaactaatgcgcagaactggattaacgatctcgcccgtgctttctgcctcatcgacaagaaaaacgtgccagattcacgtatagcagaagggagccagtacagggattatatcaacttaaacagttatacgttaaacggtgtgtttacctgtgagtggttcactattaaatctttctggaaaggttccgctcatgtgacattcactcgtccagacctcgttgacaaaattaatgagattgtggctacccgataccctgacgctctaccatccagggtctga

SEQ ID NO: 214056 - DNA, 582 bp, Klebsiella pneumoniae
atgtatctgcatcttgttccaacgctataccacaccatttcaaataaatgtcgacttgaatcagtgacgatcccggaactggagtttgagattaaaggtgatgccctttcatgcggaagaccgtttcctaataaacggcttactgtgggtatgcataaaaatcgtaaagccatggttggcttacttcttgagtatgaaaagaaagtaagtcattttacaacgcagtataaatggtacataggagagattggttttattcagcacaatattaaaactatagtgatggattctgaatttgacattatttcacaatatataggcttaaatattggtcttgatgaatttaaaccaaggctccatccttcttatcacaaagtcgcaccggttaaaatacaaccaacgatggaatcatatcgaaccggcgaagcggttaatactttgcagcatgatgtatgggagaataatgttttattgtccagaacggaaacattgctcttgaatactttggagtctgacaggctttccagatatagttttttaaccgacaggcttccccagccagactctgcaatttgcatttga

SEQ ID NO: 214057 - DNA, 294 bp, Klebsiella pneumoniae; identical to SEQ ID NO: 185853

SEQ ID NO: 214058 - DNA, 582 bp, Klebsiella pneumoniae; identical to SEQ ID NO: 185854

SEQ ID NO: 214059 - DNA, 480 bp, Klebsiella pneumoniae
atgagtaacatgaccgtgtcgttttacagcaaaaagcatcatgacaccgtagcaagcgctattaaggcccgtgcaacatcatcaattgagctgctctgttctcctacgctgaatcagcttctggatctgacaaattcaatctgccagtgcgcaggtattgaaaatcaggttggcatttttgttgccgactcagacactgacgaatccgctcccggtgaacaggtatctaataaccatgctgtctggctatataaccagaaacggcatagtgctgcccgtgatgcgatagttaagaaagacattacggaagtgaagattgatgagccgctgacgcttaatgagcttatggcgatcatcgatgtggtcatccgttgtgcaggtattgatgatgacgtagtcggtattgccgagccgatgatgacggttattgatactggacattccgggcaatctacagctcaggaattgatgctgcattaa

SEQ ID NO: 214060 - DNA, 204 bp, Klebsiella pneumoniae
atgaaaaacattaaacgcgaagcattactggtacccatcatcgggttgttgatcctctcctatcacatgggctatttcctttccgactggccattctggcaggtatacgcgatcctggcgctggcctactttgctggccgttttggactgaaaaaaagggcgtcgaaagaggaacctgaggaaggcaaaacagccggccagtaa

SEQ ID NO: 214061 - DNA, 531 bp, Klebsiella pneumoniae
atgaaaacctctattccaccgattctgtatggaagaaatatatccgatatttcggagaagcattttgccccatggttttgtcatgacgatcaataccctgctttggtactggcttcaacgaaaatagtcccggattcaccttccctggactggtttcttggcgaagaacaatgcggagggcacagttgtaaccagtttccggcagcggtattaccattgcagatcatgcctcaaaaacatgggacgctggagctcattgccgatgaggaatttgagccacgctcgctcgattattttaacagcgcatgcgacgaggaacagaagcgagtacggctgaattatcagtcattcgtaatttctcacggtttaacctgctcggatgaaaatgctctcctgctgacacagacgctataccccctagatgcgactgatgccaatctcagggccttaaccacagaacagatcaatctcagaagcctgaatgtcgccactgggctggtcctttttgtagtgggggtgaactgcgactag

SEQ ID NO: 214062 - DNA, 1089 bp, Klebsiella pneumoniae
atgactgtgaacaagaaaacggatgtaattaacaatgaaatcaaagaacaagcagcattctcattcgatgtcgtaggtggcacgggcaaagttactaactttacccctggtaacaatggtaccgttcaacctgttgctttgttgcggcttggggtatttgtaccggcccctccgggagtagcaaagaaaagtctcccggaaggggttgttacgatggatgtgtcccgcgatttacagcatatgcagatcgcatcaagtgaaggatacaaagaaatatcgctatccagcccccgtctggacatggggacagatttccgtgtatggcttggtatagtccgttcaatacatgaccacggccattactcaggaaggattaagcttcctttcagcaccttccttaaaaattgtgggtttgacccctcaaggtcgaataagcccatgaaacaacgtatcgatgcttcgatgattaaactgaaaatggtcacttttcagtttagaaatgaagattcaaccctcactaccggtctcattaactgggcacggtacaacttaaaaaccaatgagattgagatagagggagatcctcggattcaggagctctatcagattgactataaggtatatctgcgccttaaggcccttgataatctgcaaaggaaagaaagcgcgcaggccttgtatacataccttgccagcttacccaaagatcctgcaccgatctcgatgaaacgttttcgcgaccgtttacggctaacgtcaccagtagcctctcagaacatgatcattcgccggtcgttgaaggagcttgagcaaatcgggtacttgcaatacagagaagagaagattggtcggtcaataaagttccacatacttaaacgtagcccctctttgggtgccaaaaagagcatcctggtcccggctgaacaaaacccagcagctgacgatgcactgatacataaacttaaaatgctgaaggccgcaggttactcagaagcggagattgctggcgttctggatgctctcgataagttgcagagggaaggaaaggcggctcccgaagtcgaggatgctgattttgaggagctttaa

SEQ ID NO: 214063 - DNA, 1389 bp, Klebsiella pneumoniae
atgaataaaacaaaaatctcaattccattctttattgtagtggtggtttctggctgtgcagaaacacaagagccagggatagtagcacaagagtgggcaaaaaatacccggcagttaaacatattccctttattcccacccagagaaagattttatcctggggatgtgtatattttcccttttgtctctccaaaaatgacagaaaaagttccatcgaagttctatactataaaaccgatcagatttaccaggtttgatgtttcggacattttggaaaaagaacaaacaattccaacgatgccgcaaaccaaggactgggaaagcttgggtagtgctgaatcaagggctggcgcttttgttagttatccttctactgactccagacaaaatggggtgattgcctttcctggatactcatttgcttctgtgagtgatgtaagtttaggccttggtacagtaacaagcgcaatcgcgcaaacattttctttcgctagtagttcaaaacgaaatatcaccttcagtgtaccgtacgcagaagtcattagtatggacattagctcctccatggataagttcttattatataaggcaagcgtggataaaaatgagacttcaaaattgcaatatcttgaaggacaaatgcaactcctgatagataacttactcgatggctcaaaaaataaatacggaatatcgcctggcattgttttcgttacagatgtgtactacgcccgttcaataaatgtaaccataacttctgctaatggggtcagcgcttcagaatctgcaacgctggcaaaactaaccactttaacaactaaaagacaaacactagtagataaattaaatgaattaaaatctcaaaacaaaacattatcaccaaaaccagcaagtaatggagcagctacacctgaccaaactaaaacggaacaagactcttcagttggggctgtttcaagtaatataaacacagctgagatagattcgttagcaagtgaaatcaacgcattagatatacagttaaaaactttatctcaatccattctacctgatacattaggtttcactggttctattacccgagcatcgggtaatagtgtaacattgaaacaagtttttaaataccctgtagctattggttataatggcatcactatgccagtgcaaagtttcatcaagatgaagataaatattatcccatatcaggaaaatactcttaacacagaaaccaacagagtcgggacaaatgtagcaaccactaaaatcaaagtaactacagattggactgaattattaaagaataatattacatctccaaatttgattacaacacctctgaatcaagttagatatgggtcagaagaaggattaggtatactagagaaataa

SEQ ID NO: 214064 - DNA, 3381 bp, Klebsiella pneumoniae
atgcctgacattatcccgcaccaacaacagccggaacgtcttcataaatttcactccctcaagggagggcaatactggcgcgcaaaaaacgatattcctgagcaatgtattgaacaggatgaagtgttgctgattgagtcgctccgctgggttgataatgcactccatactgtgatcctccgcacccatccgtcaaaatacggcaaagactttgttttcaaatttaccgatgctgctggccgtagctgccgcaccacgaaatcgtttaaagagcatcgatttctgtttaatgactttctggataaatttgaatttgcagatgatgggcaggatatccggagccaggaactgcttgcagctcaaaaccgggttagccagctgactcagcaaatgaccgaaaccatgtctgatcctgaagctctgcgtacggaactcctcggcagggttgaagcaaagaaagccagttcatcgacgccaggcgatgacaaaaagcaacttcctatggttatggagctgtcttcatcaactgagatagcgtctcttggcacagctctgtcatcaggtatcgatgaagccaaaatagcacagctccagcaggctgttgagttcagacatgaaatcgcacaggcacaaatcgactggattaaagaaaagaataatgcgatttcgagagccgtcatggctattactccctatctggaagagtcggctgccgcccagcttgccattgccgaagaaagtcgcgaaacgctgaataaactgatggacggtataaagtcccttgacctctacatcgggaaagatgtggtggtgaacactatcagggagggggaatcagcaccgccacacattcccttgacgttcgtacagcgtaagctggccgtcgatgaggaaacggctgtttttctcgatataggagaatggtttgattttgaaaagttgccactttttttccatgcattaaacaaccatccagggctggtggagcagatcttcccgtcgcagcgctgcgtggtatgtatgaccactacccgtcgctatattgattatcaggaccgttgggctaactgggagctcaatgcaaaaaaccagacggtctttctgatggttcgggacggcgaacggctgttccaggtttactctggagtagagtctcacctcggcgctcatacacttttcccaaccaccgatgaacagggaaatatctttcgaggcattgacggttcgcaggttacgttcaatgacgtgtcatacaccgacaagcttaaagcccatgagatggttgctctgcattattaccggtttcttatcctgtgctgcgggctcgaccaccggctaaagctgtttggtgagttctacgaccctcaggaccgcttaagtttcgtctctatggcgttccaggagaagtattgtcgattcatttatgatcatgatggtactggccttctggacgatcctgatgcgaaagtgcgcccctctattgaggagtatataacccaggccaatagccatttgcgctcaggttcaagagtgttttgcgagtggagaactgtttgtacaccaaatactgcgccgggtgttgtgaaagtcgatactggtaccagttaccgatcctattattttactgccgatttcatcaatgatgatggaatggcagtggcctttacccgcaacaatgagatttgcgtggaggttccggtcaaaaaagatatctaccgccgcactcgggctaatgatgtacgtgaatttaatgcgaaagtatctctcactaattttcagcgtgatccgtgggatgacgcctgcagcgtgggattcctctgtctggacgcggttaaagccgatgatctggattattacatccacagccgttccagccgtaagaattttatgtactacataaagctcttcaaacgcctttcagctgtcctgagagtggaagaagagcaggagaagctctatcggcaaaagctcatcagagcgctggtggatggcaacataggcactaaagctaaccgtactgaaatcgtcgacaagacagtcatcacctggcgggcggacaaaaaaggtcagccgcttagtgaaggaatagacaacgagaaaagctggaaagcattacttggcatgatggacctgatcgcctggcgcggtttgagccataaagatgctgcagtggagatggctatatcccggggtagcaaaccgttacgtcttatagtcacgacaaatgccagactggctctgtatgttacccctacagtcgaggaacgtgacgatcgcgtggaaaaacataagtgggccatgctgctgacctttaaaatgtcagcaaaaggactgactcttgattccagaaaacctgcgttgctgagcaaaaatagtgtgtgcgaaacaaccctctatgaatggccggaggccaaggagtggaaagggttgaaatcagtgttctccagctttcacgaaaaacaaagagcgtttgagtatattgagacaggcaaagaggacctgcgaaaactgtctccggctaacccctcagaatttgaggctggggtacgtgaatggatgacggcctactgcgaaatgaatgattaccgcaaaaccgggggccaggtgcagcagccgagattgatgataccggtaggcatctacattaaccggggagactggaagtatatctacgtcactacagagagtgaggccgctgggtatttttatcacaactgcagcgaacgcctgaaaaaggaactttttcaggaatatgtttcacgctttgctcacccggaaggaaagctcgaacggcttgaaacccgggggaaccagttggcattgggcatgacgaacaaaactcccgacatcggcatgttctgtgcagatcgcaatgttgaaatggataacgtgaattatggacctttatcttacagcgcctacagtcagctggagcgaattgaaaacagattgatttttgtcctcgctgaagcggaacgagggttacatcacaggatttatattgccgataaccttaaaagcgacaatggtgagttcatcatagatgaactccttggttcctcacatctacaggcacagtctgccgttgatgtattcgaagtcattttacctaagtcgttgtcagaaggcccgctgccggtaatgaaatcgagtggtgaaatctaccgtattcaccactggtttgatatctgcccaaaaggcgctgacgctaatgtttcattgagcaatatcgaggcacctgtaagtaaggttaccagacacagtttcgatagcagggaagcggcaattatgcatatcctgatgcagaaagaaacggttaggaaaagtatctccggagacagattcaatacgccagaaggtgtagacgaaaggtggtattag

SEQ ID NO: 214065 - DNA, 1245 bp, Klebsiella pneumoniae
atgtctcttctgaatctggatttaattgaagccatttactctgatgccgagcgtgaactcaccaatgatgagttgtatagggaggtacagtctcgcctttcaatttcagataatgatttcaataaaaaagaaaaattcggtttggccggtgtgccgcataacaaaataaaacaccgtatccgttggttccaacagacgctaaaagctatgaacgtcattgagcgtataagctcaggccgttctctatggcgccactgtcggaaaaacaagtcagggctttccgaagtcagggaaggggcttgtttagtggcattcagtacagatctcggcgtagcgattttaggaaattcgacaatggtgttaccgggcaataccgagccggttcatctctgcctgacttctccaccttatccgctcagaaagcagcgggattatgctgcagccttcaaaaacgactgtgactatattgatttcatcgtagaagccattcggccaattgcccaccagctggttgacggtggttctgtcgtgctgaatatcggacaggatatttttaatccggggcggccttctcgttccctctatcctgagcgcctgttactggccttgtgcgaaaagcttgacctctacctgatggaccgggtgccatgggttaatatgagcaaaccaccttctccgacatattgggcctgccgcaagaaaattcacctgctggccgggcatgaaatgattttctggctgaccaataatcctgatgctgtccgctcctgtaaccaacgtgttttgcagccccacaccgagagccatagcgcgttgatttccagaggcggagagatgcgcaagacaatttacggtgacggcgctcatggcgtgaaaccaggggcctttgcgcaccacactaacggggctattcccaaaaatgtgatgatcagaggccatgcatgtgctgacactcgtcggtttcatcaggaggccaaacgcctggggcttccggctcatggggcgatgtttcctacggccatccccgattttttcatacggttcctgacggaggaaaacgagcttgttgttgatccttttgccggttctctcaagacaggcctggccgccgagcggctcaaccgcagatggatgtgttttgatagtattctggaatggttacgaatttcagccaccggctttttttctgacttcccgggatttgagatgaacccgattattgataacggtgagttgttcgcgtaa

SEQ ID NO: 214066 - DNA, 765 bp, Klebsiella pneumoniae
atgactttcagcgacgaacagaagaatgccagcgacaaacatgcggatgatcctgtgcaatcaggacagagcgaacaaaacacaattaagattcttaaaccaggatcaaatagcgacctgattgaccaacttcgaggtgggtctctgggcaaaacatccgttgactatgaataccactcaccggaacctactgaagttgcccagcgtcttgctttaattaattattcgaatttgagtgctggggaagagaaaatggtgacttttaaacctgttaatttgcttcaaattatgtcatctcacaagatggaaacagatgatgttgcgctaatcgccggtaccgattcttttgcagtggagtcctggttcaaggaaggggtcgccagtgagacagccctgcacaacatcgcatgtgcagtcggggtatcgacggaatggattcggggctttgtctccggtgaggatgaaacgcttaaggcaaacagtgaaggcctgacgaaagagttgcagaatcttccccctgaagaaatctgcgttctggcaaaaagcttcagtttgcgtttgaaacaaatcagcgagctcgataacacgcagcagtgcccggccgggtcgatcgtctctcttaatggggtttacaataatgataccgaagagctccttgctacttatcggctactgcctgaaacagaaagacaaaatctatatcgtgtggtttgcttgagacacaaagaactagcacgactttacgaacaatatattaaagattaa

SEQ ID NO: 214067 - DNA, 375 bp, Klebsiella pneumoniae
atgttagagaaaatttactaccttgccctttttctgattgtgatttgcattattcgtggtttcgttttcgcatggagcagacgcagtcaattggccctgacgttgaccatcagtgccctggttatttgtctggctttccatactctggataactccgtagcaactggtatggatgagatattttccggtacaagggacttaacacagtgtgacttcattgaccagcaatcagctgaaatcagcggtcttggctatccggtcgttgtcctaatgtgcgatgacggtcaacaggttgttaatgctgacgtttactcacaacagctgatgcagaatcaggattgcaacccgcccagggaggtgacaagttgtcattaa

SEQ ID NO: 214068 - DNA, 318 bp, Klebsiella pneumoniae
atgcaccatgtagctgatcgtcctgaggaagaaatccgggctatcgagttgtatacattgttgggccgtgaaggcgtgcaggtacgtctgaataatatctctgttaaggcaacatctcgttgggagcaggtaatacctttgcctcctgattatacggggacacccattgattttctgacggatgctgaacgcgaagaaaggcatcttctgttaatcggacagatgctctgcattgatgagcaagcagaggcccgcgagcgtataaaacagcgtttagccagtcgtaggaagggtagcagccagcagaatgctgactga

SEQ ID NO: 214069 - DNA, 312 bp, Klebsiella pneumoniae
atgattcattcatttgaagaaaaaaatcttgagcagttatttacgagcgggaaatcgcagtcagggcttcctacggatattactaacagtcttaaaagagcccttaatgagttacacgctgcgggaagcgaagccgacctgatccgtctcaaaagccgtaactatgaaaaaatccaccatacgcggttacgcgaacgtgaaagggcgggcgatatgtcctctatccgcgtgtcttcaaaataccgcctgctgtttacgtgggccaatggtggcgctaatcgggtcaaacttaccgctcatgcccatgcttaa

SEQ ID NO: 214070 - DNA, 273 bp, Klebsiella pneumoniae
atgtcaggtaactttaattgtcagattgtttttaccgaacagaatgagccagttataactggcgaagatgccgttactactatcttggaacagctggaatcagcaggcatccaggtggaatcacaatgccgctctggttattgcggtgcatgtcgactcaagaaaaaatcgggtgaagtgaagtatgataatgacccactggcttatgttggacaggatgaaattttgccttgctgttgtcgaccttgtggccccctggtactggatatttaa

SEQ ID NO: 214071 - DNA, 219 bp, Klebsiella pneumoniae
atggcaagtaaaggcattgaaaaattagtctctgaggcaagtaaacaaggatactctgtatttcgcaaaggagacaggatagagatttgtaaacctaacagaaaaatggtgcgtctggttattttgcctgatggtacgggatacaggggagatgttgacctaacgctggcaaaagccatcagaacgcaaaagcaaatgaaagaggtactaggcctctag

SEQ ID NO: 214072 - DNA, 447 bp, Klebsiella pneumoniae
atgagtgttaattcaagcattaatgaggggaaaaacactgcttccctttcagtgtcagttaccacattggaggagtatgaagaaattcgtgatatgatacgtgacatccgcttctatagagccgtagccggttcggaaaaatttagtgatctctatactgattttgagaataacattgatgccgtgctctcgaaatttgaagaaaaaaaccctcatcttattactgcggcccatgaactcaagctgaacaatgcaaaaaaagaaagtgctaaaaacttcataccgatggttttactttttaattttgctgccgtaatctttcttttcgcaatggagtatatgaacacacccagtaaaatagcaggcttgctagtcttgttgggtatattcgtttcaatctttcgctgttatgccaatgttaaagagattaaaaaccaaaataaataa

SEQ ID NO: 214073 - DNA, 156 bp, Klebsiella pneumoniae; identical to SEQ ID NO: 185865

SEQ ID NO: 214074 - DNA, 309 bp, Klebsiella pneumoniae
atgggtaactattattgggcaatctgtcatcactgtgatggccacggaagcatggacaaccctgcgttttcagatggttttaccaactctgaactttacgatatggagccagaggaacggcaaaggatcgttaacggtgcctatgatgttctttgcactacctgtaaaggcagcgggaaagtgaaagttccaaacatccgcgagatgtctttcggcgaaaaaagagcattagtggaaagacagcgtgagcagcgtgaactcgatgagctgagccaaatggaaaaaatggaacggatgatgggatgctga

SEQ ID NO: 214075 - DNA, 663 bp, Klebsiella pneumoniae
atgaaatcctcgatattttcaaacttctttcggtcatccctgccagtcattcttctgactgcattcatgagccctgttagctttgccagcagtattgatgaaccagccaattataaatttgagtctagcgatttacctggtttgaaccacttaactgatctgattaatgaacgaaacaatacttctgcgaaaatatctgagcacaatgtgcttaatcaaagtcaggaggaactgaccaatagtatatccatgcagctgaagcacaaacttgaacaagaaaaaatcgatcaactgatctcatcactgaacaaaattaactcatccagcgaagagttgaattctagcattcagcatctgatctctatacttgaaagccaaaaacagagtcatgatgcggccatctctaaaaatataactgccgaaggaaatgttttaaaatcaacaaaaaatgacatgattgagttaatggtggaggatttgggtgcagacgctcaaaagcaaaaagtcgacattgagaacaacgatcttcatagaacgacgccgttaaacgaatctcaagcaatggatgatctcaggagccaattgcaagcgttcttcctcacaatttgtgtggttggtctgcttgtttttatcgcatgcaagaacacgactcgcaaaaagtaa

SEQ ID NO: 214076 - DNA, 294 bp, Klebsiella pneumoniae
atgagtatgcaaaacaaaaaaaatgattcttactttagtcgaaaccaaaaatggttgagcccgctggttattctaattttttgcctattaagctcacaagtcggcaagattattggcgaaagcaatgtatttccaggctacattataaaaactgttgcaaccattgcgcttttcatctgtgcattcaatgcaaggatgacaccaactttgtctgccagaatcattgttactacgttctatttttgtgtatttggtatgtttggtttactaatttttaactattttagagggtag

SEQ ID NO: 214077 - DNA, 318 bp, Klebsiella pneumoniae
atggcattactgatatcagcagacgatcgcattacaaggctatcccctcttgacctggaaggtagccgtgataatgacggtgcattctcgcttgcagatatgcaacaactggtcggtggttacattgaagctgtgaagctcaaccctgtaatcgttcatgaaaacattcgatattgctggttggttattaatgaagaaggaaagcttctatccttaccagtaaacaaaaatgcaactattctggtgaaaagtgttatcggccctgacgactatatagtcggaaatgcgttgatgctcgaagaaaccgaatttgaatag

SEQ ID NO: 214078 - DNA, 249 bp, Klebsiella pneumoniae
atgataatccgtgacaagattaccgcagaattgaattaccaggcatctgtagaaggagagacgggtaatataaaaatgtgtcgtattattctggagtctgtgaacaacatggttgtttacaatacaatggtaaaggtaaaaaaagcaccaggctctgactcaaaagccggcgatgagcagtatttccactatgtaaagtcctgggtggttccgttcattgaaaaaatgcatgcagtcaatgataaatga

SEQ ID NO: 214079 - DNA, 1203 bp, Klebsiella pneumoniae
atgagccttctggcggagtggttgcaaacaaagtgttctgcgaatgtttgggtatacgttaagcgcttatccgcgaacgataccggtgctacaagatcccaccagtctggtctttacatgccaggagccgtcattgatgagctgtttccttccctccgtgatactcagttaagaaatcctgaagctcttttttctgttcacgtgtcatctcatcctgattgccctgaccttgatgatgtaagggccatttactacaacaataaatttttcgggggcacccgtgatgaaaagcgtctgacgggctttggtagacaaaatcctctccagaatccggagaataccggagctctggcacttctcgccttcgaccatgagcctggaacatcatccagttattgtgatgtctgggtctgcaaggacctgaccgaggaagatattcttgaaccaattattggtgaagttatcccgggagcaacgatatttggtccgggagataaaataattggagggttcgttacagaaacttctcctggcagaacaaagtataagcttccacccgaatggactcaccacttcccttcaggaagggagattattagttttgccgcatgtcattacgatagaacaactgacgacccggactcacaactgacgcggaggaggaaaattgagtttgaaatttttcttgccgttgaggaactgcacgtgctgggtcagatagccgaaggctttgcgacggtgaatgattttattacgcttgctaattcagtgagtaaccggaggaagtctcgtgccgggaaaagtcttgagctccatcttgaatctcttttcaaagaacacggtgcaacgagctatgaaacccaggctatcacggaaggtaagaaaaaacccgatttcatctttccttccggtgctgcctatcacgatccttattaccctgctgaacagttacgcatgttgggggttaaaaccacatgtaaggaccgctggcggcaggtactgaatgaggctgacagaatagatacagttcacctgttcaccttacagcagggcgtatctgtggcacagttcagggaaatgcagtctgaggggatacggctcgttgtaccggtagggttgcataaggcctttcccgaggaaatcaggggggagctaatgtcactatctgcgtttatcgatgaacttaaaaaactctattggtga

SEQ ID NO: 214080 - DNA, 1416 bp, Klebsiella pneumoniae
atgtctgaatttgattcccttgcggaagagctggtggaagaggcacgtaatgaagaggccagacaacagcaaagggacctgtccctgatagggaaagtccttgaaatctatgatcagaagtttgttgccgaacttctgcgtaagctgggaaattcagactggaccagggagaccctgaaccgctggattaacgggaaatgtgggcctcgttcacttaccgtaactgaggcatcgcttcttgaaagactgctcccgcagccgccagctaaccatcccaattatgcttttcggttcatcgatctcttcgccggtatcggcggtatccgtcatgggtttgaagccattggcggccagtgtgttttcacaagtgaatggaacagctattcagtcaaaacttataaagcaaactggtattgcgatcccgaagctcatatcttcaattctgacatccgcgatgtgaccctcagtcataaagaaaatgtcagtgaagaagacgcctacgcccacattgataaatcgatacccgatcatgatgttctgctggcgggtttcccgtgtcagccatttagccttgcaggtgtgagcaagaaaaactcacttggccgtaaacacggttttgaatgtgatacacaggggaccctattctttgatgtggctcgtatcatcatggcaaaaaaaccggccatctttgtactcgagaacgtcaagaacctcaaaagccatgataaagggaaaactttccgtgtcattatggataccctgaatgaactcggttacgacgttgccgacgctgacgcaacaggtgccgatgatccaaaagttattgatgggaaaaatttccttcctcaacatcgcgaacgtattgtattagttggatttaggcgtgatttaaatctcgctgagggtttcactcttagggacatagtcgaaaaattcccgcaacggcggccggcagttaaagatttgctcgatatggaagttaatgacaagtacatattgacgccaaaactttgggattatctttataagtatgccaaaaagcataaagaacaagggaacggatttggatttgggcttgtagataccctcgacaaatcaatggtttgcagaaccctcagtgccagatatcacaaagatggatctgaaatcctaattgaccgtggatgggatatgagtattggagaaaaggaatttaacaatctcgaaaacatggatagacgtccacggaggttgacccctagagaatgtgctcggctaatgggatttgagcagccagggaaagtaactttccgaatccccgtatccgatactcaggcttaccgccagttcggaaattccgtcatcgtgccggtattcgatgcagtagcgaaattgctggagtcacggatcatcgaggctgtaaaggcccggaaatag

SEQ ID NO: 214081 - DNA, 330 bp, Klebsiella pneumoniae
atggataaacgttacgagttggctgacaagcacgggatgtcccatgaattcatcgactggtttttcgataaaaagaaagatggttatggagacctgtggtttgtcatgatgtcggcaatgtgggagggctataaagcccgggacacccattcgagaaaagcatttgcgtaccaccaagagcaagaaatttttgaagcatggtgggaacagaacaacgaaggcgggcctctctctggttgggcgaatctccgcactaaagatgggtataatgacgaagacattgataaacaatgggaggcctggctgggaagagctcgttatactggttaa

SEQ ID NO: 214082 - DNA, 435 bp, Klebsiella pneumoniae
atgacgcaacaattttctcctccgcatgaggtggtggaaatgtctcggcgtatttttgaaaatttaatctccagtaccctcaatacatctgataccacaggaacctgcatgtatggttcgattctggtttccatgctactggagaaattttcaggggtcaggacacgtatcgccggtggggatggtgttggtgatggtggaatacttactgccgccggtatgaaggggcattattgggttgtagccaacgtacatggaatgttttttgttgtcgatatcacggcagatcagtttggcatggacaaaatcgtatacaaagggcttaaggatgctccagagtatattgaaggccaccaaatcaccattgatgagcatgttcatgagacccttcaccagatcatagaaagttacagttcagaatataaccagctgtga

SEQ ID NO: 214083 - DNA, 438 bp, Klebsiella pneumoniae
atggcgatgaataaaaaagaacaagcagcctatgatcagctggtggctcaggccagaataaacagagctttacgttggtctgactatcacgttgaacgtgatatgcccgtaccggagacctcgggggattaccaaaacggatggagcttcaacgtgtcctcaggcacagtttatccaacatggagcggtaatagtgtccacggcacccgggaggagggcgaagttgttgatgcagcctcccgtcgtatgcgtggtatgaatggtagccagaatggcataccacagttcagcactaaagaacgcgccctgaaggcattacgccgctccctagaaatcaagtttgccatgcaattggatgccatagataaagcaatcgaaaatgaagtagagcctacaacactttgcagagagaaagacacctctaatgccaaacggtaa

SEQ ID NO: 214084 - DNA, 444 bp, Klebsiella pneumoniae
atgtcaactatccctcaattagctaagctgggtttttcctcagatgttgttcctgtgatcaataccccagcgcccaatatgactcgcggatttgagcgctttcatatcagctataacagttcctctgccgggtatggctgcgatacaaccgctctcgttctggatggccgtgtgtttttcgtactgaacggggaccatgtctgtgatatgaccaaagctgccgcagcacgcggtatcgatggctgcattgacgtcttcatagaccgtatcgagtcggctagtcgacacagcgagcataaaatggctattggtctgacaaacgatgagttcggattgatgccgaccgcgctcgctgtcatcggagaagagaacatcctccgtcttctatctgctgtgacaggaaacgctcaggacttttcagcgtacggtattaatcaggattaa

SEQ ID NO: 214085 - DNA, 360 bp, Klebsiella pneumoniae
atgtttaatagcctttctgattatctacagcaacaacgagatcgcgaggaggctctgaaacgaaaactaagccagttgaagccaactgttaggaatggcgaggcaggagagataatcgcagcgctgattgacctcggctcagtggggggcgattttaaaaaaacgacgtacgattatatctatgagtattttgcatccgcccgctgtattgatgtgttggtgataatgttatttctcaatatgaagcatccactctccgatggagcaataaaaaaagcctatgcaagacagtccgacagcgaagatgcgaggtctgcttacataagcttgatagttgacactattgataaacgccggtaa

SEQ ID NO: 214086 - DNA, 861 bp, Klebsiella pneumoniae; identical to SEQ ID NO: 25304

SEQ ID NO: 214087 - DNA, 198 bp, Klebsiella pneumoniae
atgatagttcaggagtttggggatgattacggctgcttcaaaggtgtgctgaagaatgaaagcgatcttatcactaagcctactttttatcccgacttgcgaagtgcagctatgtccggttttggtatgatgaagcaattatacccactgtacgatgataatctctttaatgaattcctttcagaaattccggaatag

SEQ ID NO: 214088 - DNA, 495 bp, Klebsiella pneumoniae
atggccaatatccttatgcccgatcatcttgtgaagttaaataatctcttacaggctatcgagaatgctcccgttgagtgcgatggtcatacattaatgataagcagtgctctaaatcatgcaggcatttctcatcaacgaatgtgcggtgtagttaaaaaccccaaaacggattttgagttatatccacatttctggattgagataggtgaattcaccctggattaccgactcaggatgtgggttgatttatattcaggtgaaaaactatcagagggcgcccctcacggcatatttgatgcgcgtgggcttgagtatctttacacttcgggaagcatttgcccaccacctgccatggactttaatttattaaacttaatcagtaatggttattacgaaaaaattaactttaccgagctaacaacactggcacattctgtagatattagtttaataagtgatgttaagaatgttacaaacaccggggttgcctaa

SEQ ID NO: 214089 - DNA, 657 bp, Klebsiella pneumoniae
atgtcgacaattcatctcattacaacatgcgcgaaaaggaaatcaggacctgtacatgacactgtgttcccctaccatacgacagatactgagattgcctatcaggaatggaaaagtcttgtgcagtcccgattcactacatgtgatgatgatattaaggaaacgcaaaacatataccgtagtgctcactggagtacagctaagtcgattgcaagctctaattctcatatctgtttatgggttatttctgcaggtctgggcctacggcacagttctgatcccgctataccttatgatgcgacgtttacaaagataggaaaaaagagcgccagcatatgggagatgctgacttcagaccctatactgccgggtaaagtcccttctcttgcggaactgttaagtttgtaccggcatgatatctttatcatcgcggcctctcccgtctacctgaacgctgtagaggacgatctcgttaaaggagtggcttatcttccctgtccgagaaagcagcttaaaatcgcttccagcgcttcctacaatggaagattaagggaatatgtgcgatgcggcggaagcagaatgatgaaagaccttaatgcaaacatgacgactctaaacattaaacatgctggcatgctgattcatgagctggggtaa

SEQ ID NO: 214090 - DNA, 603 bp, Klebsiella pneumoniae
atggcaggggcattgttttcactttctgctggcggggtgatttttgcaacatctgttattattatcattcttagtgctatgctatatgacagtatagttaagagacgttctgaaaatattaactcaccagagttcacagaatcacctgaactggcatcttgcaatcattcaggaggtaccgtcctgctttatcttgattttgatggagtcctccatcgaaggatgaatgagacatttgaaagaatgcctctactggaaaaaattttaaaacaatgtccagaaattcaaatagtcgtgtccagcagctggagggaaacgatgactttagatgggcttaagtacctttttccggtaccattcaggcacagaataataggtgttacaccttcacttcaggaagtaaaagataccgaatatattcggtacagagaatgtcttttacatgccagacatatggggatcaacaagtttattatcatagatgatgaatcacaccgttttccacctgggtgcgaaaatctggtatcaacgaattacagtgaggggatgactgaccaaactgtagcaactgtcattatgaaatattgtcagtacttaacatga

SEQ ID NO: 214091 - DNA, 516 bp, Klebsiella pneumoniae
atgttcgaacataacattgcttttaacggcatgatgattgtgattgttatcttatcttatctgctatttaaaagtcttaagtcaaagaaaaggcttcggcataagtatgatgaggtatttaaggcttttcatattgcggattcagagtacaccggcggcctaaaagatgtttacaaaaacttatctttaagcaatgctcagttgcagttccttgctgtttacttcaatcaagacactgtccagtttgatggtagaaatattgtgtgcgaaaaagaggatgatgttcagtatattctttcactcatatcggacagccatttttggttggataaatccatgaaaggaataaatgaagtggtaaataatacggacgtaataaaagatattaaattatctctatcgccgttcgcttcgttgggtgagctgaatgttatagatgatgaatttaaactgaaaaataaagagtttgatggatttgccaaacttaaagttaagtatgatgtaaaaagggggtga

SEQ ID NO: 214092 - DNA, 957 bp, Klebsiella pneumoniae
atgaacaccgatgtagatcatgtccaagaaaatttttttatatcattgcaggattgtataaataaagaagagaaaacaaaaaatacatgcattgagtactggcgacgtgaagctgagagggtgaaggaagaaagcgcaagacgtagagcactgtctataaagataattaccgaaaaaagcatgattcttgaaacgttatttctaaatatacaaaaaacaaatgcgttcaaagaacagtatgaaagaaacctgatagctaaatggggtggcgttattgatgacgataagacaaaggattatgatatattcctccctagtttggaacatttatctgcttatgtatcatgtgcaaagaacgatgaatatagcaggaaggtgctttataacagacccgaattatcaaggggtatcaagtatgacaatagttattactgcccgcaggaaaaaaaatttatatatatgaggaatgacaaatttcgtccagatctagaacttctgacaaatcctccttatcctgatttttgtaagaatttactttacttttatgtcaggtcattttcgctgcatctcaaaaaaggagaacctgggaaaccattggagataggtattcgcaattcagtgagcaaaaacacttatgaagacttgtgtataggtctggaaattcttatgccatacatgtgcaaaactgaaagcggcaaagtgattatttgtgatgaaggatacttatcatgtgatagctattatagaagcatactggttaacccgaaaacagggggtgctgagttagttatatacagaaaggggcgctttgaccatcgacagaaaccgaatacacgagaacctcgtaagtggttgaatgaagatataataattaaagaatttcctaacatacgaattgtttttctgtatatcatatcgtgtcggtatcagcagcacttcaaaaacagggatatatag

SEQ ID NO: 214093 - DNA, 957 bp, Klebsiella pneumoniae
atggaaaataaacaaagcactaaaaaacaaactctgattcatatcgccttggtactaggtggctttgtagctggctcggtaatttggggggctggtagtaataaaattaactcaaatgacgcctctaatgaggctgccaataaacagcatatcgaacgggcaaatagtatcaatgcattagctcaaacagcgaaccaggtaaataagccagccggtttagtcctgactgagcaggacaaggaacttattggcaaaactgcggcacaatatttgatcgatcatccggagaacctggtggaagccggtaagcgtcttgaagccaaccgtgatggtgaaaaaacctcagacgtcgtgaatacaaaagacgtattgcttgaaacaaaattcacgccgaactacggcccagataacgctgatgtagctgttattgaattttttgattacatgtgtcacttctgccagcagtccagccccgtgcttgaaaaggccattgcagaaaataagaatgtccggactttcttcaaagacttcaccatttttgctgaccgtacacctatctccgggatgggggcaaaaattggtctctacatctttaataagtacgggcaggaaaaatactacgagttccataataagctcatgagtgaagcgggtagggcaatgaaggacaggaaggactatacaccttctaatctggcggctctggtcaatggtttgggatataaagaaatactggatcagcaaggtaacttcttgcttactgtcgaaatgcgcgatcagcttcagaatgttcttgatgcaaatatgatgctggcggataaactcaattatagcggcacgccagtgtttattgttatgaacatgaagaacccgcaaaacaaaaccacaaccattatgcccggtgcgcctgatttttatcgcttgcaacaggcaattgataaggcaaaagggaactaa

SEQ ID NO: 214094 - DNA, 342 bp, Klebsiella pneumoniae
atgggattaatcagaacagtggtttatgtgggtatcattggtggtatttttgcctatacacaaacaaaagatagccttgaaaatatttcgtttccggatgcggagtttccttcttcaatcaccagaaataactttatgcaatcatcatggttaaacgatcattacgcttcactaaagaatggcggaattgctgacggtatacccggtgttctggatgatgatcaggatatcaggggggctgtcaataatgttgtcatgactgccggtaatgtcgatatccagaaggctattcaggatgcagtggatgaactagacagcaatagccgtaaatccagtaagtaa

SEQ ID NO: 214095 - DNA, 312 bp, Klebsiella pneumoniae
atgaagaaattaatggcagtggctgcgatagtggttgtttcgtttgccgctcaatccaatgtttgcgggcccgttgcgtgcaaagttactttcgtcgatgtcgacggaacgcaaaagccgatcatgcttctcgatgacaaagtttcaacgcggaagagctcaatgaaccgtgtatttgatgatgtgtactcgcacggccggaaggtccagactgacctgaaatcaaccactccagctgccgggcatcctgataaatcatcacccgtgcaaatgagcagggaattcagtcctgtggccatctacagcgcataa

SEQ ID NO: 214096 - DNA, 729 bp, Klebsiella pneumoniae
atgattaaacccattgctgttgctctgatattgttaaccacatcggcctatgctgatgttgatttacctgcagaattaaaggaaaaaattgaagccgttggtatcaatcctgtctctgcagaaaaatctccggttagcggtatttactcggtcttctcaaaagaggggaccagttacgtcacttctgacggtgaatacatcttcaccggaaatttattcaaggtgaaaggtaaggaagtggaaaacaccacggacgagtttatcagtaaagggatgcgatcctatattgagaagctcgatactatcacctacaaagcaccggaagagaaatatgtcatcggtgtctttactgatatcacctgtggcttttgccagaaactacatagcgatctgcaatcctatctggataaaggcatcacaattaaattcatcgcatacccacgtgccgggatgaactccatgattgcccgaaatatggcatcggtgtggtgtgcagatgacaagcctgcagctttgaccagagcaatgaaagggaatggcttgcctgatacgcaaccgacaaaggcctgcattgactctattcagaaccagtttaatgcaggaaacatgttcaaactctcaggcacacctagcggtttaagcctgaagggtgagccgatggtatttgcggggttacgtgaccctgaccagatgcttaacagcctgaatacggccaatcagaaaaaataa

SEQ ID NO: 214097 - DNA, 621 bp, Klebsiella pneumoniae
atgactagattattttttggagcggcgctgttcgcaactttaaccgtcaacgcaaatgcagcattcaatccccccccggatcgaccaatgccccaaaatgtacccgagacggtaaaaaacgaatgtttaactgacgccgcgcgattcttcgggattgaccgtgacctcgtctttactctttttgataatgaaggaggtaagattggttctttcgtccttaacaccaatggaacatgggatattggcccaatgcagattaactcatcaaatcttgcagaggtgaaatctcacttcccggcaatcacctggcgtgagctcgcttacgatgcctgtgcttctttctgggtagggacatggtggctacaccgtaaaattatagaccgtaagggtaacgtgtttgaaggtattgcggactacaacagtaaaacgcctcgcgtcagagctaattatattttcaaatttatggaacgatataaccgacgtctgcagcgtaacggcaaaatgacgcagctcaatgcatggaccggccttgatcgcgtaaagccgaatcctccagagataacgggtaagctcgctaacaaccttcatcagcagtccgggcaatacgataagcaaaagtga

SEQ ID NO: 214098 - DNA, 3342 bp, Klebsiella pneumoniae
gtgaatgaatcagcaataaaaaccgaaaatgtgttcctcttctggagagccattgaagcattaacccctcaggatattgataaggaaaatgcccgggacaaactcaacccggtttacaaagtaggcgcaggaaccatgcttccctgggatgacccggatcatacccgtaaggatgttgctcctggcaaagcgtggcgctactccgctcaggcgggggtttatcatctaagtgtgattaccaaaatgctggaggataaaatcggtgcccatgaagcggtacctgaagaacgcaaatcagggaaatgcaggctttttgatattggtttcaatgaagaaggcatcccccagccagccacattcatgttatccctgtctgcatggtcggcggctcagatactcaggcatgatcgcggcgtttatgctcttcatgctcccctttgctccgatgtgtcagacctgcccgcaccaaacgacagcctcccgctggtggatagcggtttttacgattttgataatctgacccttcatctcatgcagtgggtagacattgaggcttatcgattacaggaggagggacagaaggccgatacaggatggttgaagacgcttgagaaactggtcatcgcaaaactgtattttccggaagaagccatggatacgtcaatcgtcagtgtggttaagtgttccctgaccaggaaggcaaaagtcatccaggaagacagtgcaaagaaagacaataaaaagaaagaagcggtgcccgatgacctcattaacagttttttcattcaggaactgcgaaagctcgacgcggagtggaggcaaggagggggtggggccggttttaaagactttatcatggcgataacccgggataaccaacagcgcctcgatatacgcactgaagaaggcctggatttcgcctttgagaaactgttgcccacacagccaccagctggctcctggccttcaaagtacccgcttgcattcagccagcagctggccgtcaatgaaatctggaccagaaatcacaatgcaccgggtatttttgccgttaatggtcctccgggaacggggaagacaacactcctgcgtgatgtggtggccgcagtcgtcaccgatcgggcgagtaaactggttaaactcggagactctgcatttagagccaaagacagcctcaaatacgatgacaggctgataccctattattcgcttcacccgtccctggcggggagtgccatcgtgattgcatcgtccaataacggagccgtggagaatatctcacttgagctgcccgggatggaagcggtaccggaggatgtgtcagatcgtagcgattactttggcgggctggctaccgtaatacttaacaggcctgcctgggggcttctggcggcaagactgggcaataaaagtaaccgagagcaattcgttaacacactttggtggggaaatttgcagaaaagtgaaaaaggcgatgaagcacctccggagaaatttacacccgaacgtggagaggggctgaaataccatctgaatttactgcgaccgccccggaaagtcagagagcctgcactgacctggactgaggctgtcacacgttttgaacaggcacaggcggtggaggaagccgagcgtcagcaactggtcgccagttcagggctaacgcataaaattgagtggctcgaagaacaacgaagtgtgtgggaagaaaggaagcaaaccgcaacgcttcagattgaggaatgccggaacgcgctacagacgctctctgacagactcgtcgcgatggaaatgaacctgaccctgtccagtggagaacgggacgaactcgatcagcgcatccaccagcatgaaaaaaataaacccggccttctggctaatctcttttcgctggggaggatatcgaagacatggtgggatcgttatcaacggctgacagacgaatcagatgctttgcgggcgacgttgactcagcaacggaaggaactgcagcaggcgcaatcagaaaaaaataatgcggacaatgaactcaggagcctggagcgtgagctcactcaggtgatcagcaacggtcaggcggtctgtaaagagcaggaacagaataatacattgctgaagcaggctatatccgatctaggagcctactggccggagcgggatgcaacagaacaacaaagggagttgtcagcaccatggcttcatgagcgctggagaaaggcgagggaaggcgtgtttatcgcagcattagacgttcaccgggcgtttattgaaaataaccccgtaaaaatggccgccaatatagggcttgcaatggactggttaaaagggcgaaaactgaccgaaaaacaggcggctctggccctcgactccttagctctggtcgtcccggttatatcaagcacctttgcatccatgccccggatgttcagggatgcaggtcaggaagcgataggctggttgctgattgatgaagccggacaggcacaacctcagcatgcgattggggctatatggagagcaaaacgaacggttctggtaggtgacccaaaacaactggagccggtcagcagtattccgtccactgtagagggggcgctggcaaaacactataagatcccttcctgctggtggcccggaaaagtctcagcacagatactggcagaccagacgatggatgttggcacctatctgcccgacccggagtctgaacagatttgggtgggctgtccattacgggttcaccggcgctgtgatgaaccaatgttcagtatcagtaaccatattgcctatgacggactcatggtacacgggaaaaagccgggcctggcggattttcctgaaagtggatggctggatgtgaaagggagaacatgcgaaggaaactgggtagcggaggaaggggtggcggtggaaaagttacttttggcgttgcgtcatcagcattcactcacacctgacgacgtgtttctgatctcgccattccgggattgcgctaagcagcttagtcggatcgcaaagagactgggattcaggatggacagaacgggcactgtacataaaacacagggtaaggaagctgcagtggttatcctcgtgctgggaggcaacataaaaagccagggggcgaaagcctgggcggcggaaaaacccaatcttctgaacgtcgctgtaagcagggcgaaacaacgcatttacgtgatcggcgagcgtgcattatgggagaagcaaccttacttctccactctgtcccgggcactgggaaggctggaggagccggtgagcaacagcaacccgcgctcaatgtcatatatggaagagtacttaacaacagaatggcgttga

SEQ ID NO: 214099 - DNA, 3945 bp, Klebsiella pneumoniae
atgagtaattacacgatttataccattggtgatattgattttgtttatacagcttttaacgggatcgcgctgattttttccagccatggttctaatgaatggctcagatttgctgcatatgcagcagcaattggactcttctataaatcaatgaaatgggtccttgcccccacaaaaaacgatgtccctatattctcatggataatggggttgttgttctattcaattgccgtcattaaagctgatgtcactctggaatcggttaaaacgggggaggtcaggaacatagacgacgtaccgttatttatcgcgtcaaccggtgaactgacaaccggattacttcacgggctgattacggactggcgagcagcgtttgatccgcttacgccggtgggtcaggtcactgacacgctcgatgacagcctgacgctggggccgatgacaaaaatggtcaaatacatggagtggggcggggaatccagtgggttctgtcaggctttcccgaatacgatgagcgggagcgaaaaacctgtcacttttgatgtctgcagaatcatccagtctattgcacgcgattgtattaaaacgacccaggactcagaagttcagacacccctgagaggggtggcgttgaatgaaatctatgccactgatcttgcgtcagtaatgaacgtgatggattcaatgacggccaacagcctcaagacagcaagcgtcccaatggtgacatctacaggtttgcagtatgcgtcctgtacggatgcctgggcggcggttaaagccgcattcgactctcctcagggcgcgtctattatgcgtaatctgggtcagatgaatcagtttgtcgcaccgcagcaagaggatagtggccaacaaactgattttatcggtggtgcagccaccacgctttttggaagtgccggtcaggctcacaatatcactactgctgcatttgtactcaaccaaatagataaaggtgtgctgcagtatcgcaagtcgttgggtatagcggctgactaccagcttttcgaagcgagcatgaaacgaaccaatgccatggtcagtcaggggcaactctggctgaacatctcaggcgctgcaatatcgttcctggaaatgttcagctacatggttgccccatttgctctgattgcgatcctcttcctgggaggtgaaggcataacttcagctgcaaaataccttcaactgatagtcttcgttaacatgtggccgataacggcggttatggtcaacgcatacgtaaaaatggtattaaatcaacaatttgacacatggtcatcgctgggtgtacagaccacgatgaactgggcgaatatggggagtattcaggagacgtacggcagctacctgtcagtagcttcagcgctgtattgcatggtgccgatgctgacgctgttcctgttgaccaccagcattcatcctatgatgggagcgttgaaaaatgtcacgccggatgctcctgccaatactggtcatgtcacaccagaagtgtggtcggcgggtaatgcgggtaaacagtcctttggtgaccagacacacaccgcagccacttcaaccggtgccggtatgtcaacaggcgggcttctgaatgcggccgttcgtagttcaatgccctctctgtcacttggcaataacttgcaggatactgtttctgcagcaggtagaaatgatattggaactacaagaatgtctagcagaactgctacacaagcttttagtgaggcatggaactctgcgtttcaggggcagcattcacaaatggcttcgtccggtacccaggctaatcagagactagttgaggatttagcatctagcatcagtagtggtgttggctcgagtgtaggtgtttcttctgaagccgccaaaggtagtgccttaagtgcagttcttcaagcagcaggagaactgggaggttcattgggacttggtggcggcggtggaaaaggaatatctggagcattgaaaggaggcattgttggaaaaataaatagtgattcatccttaactgactcagcgaaaaaggctcttactgacaaccttgaaaacatgatgagaaatggaagttccttttctaaggatatcggtcagttggaatcgaatattacacaggatgggtttacaagttctgatggttttcagaaggttgcacaacaaatgcaacaatttacccagtctattagtaacaccgaaacaaatgcattcagcaaaactggtggtcaagcatctcaactggctatgagtaacagtctgaatattgatggcaatatgatctcagataccatgagaacaccggcaaccgaggattcagtaagagcttgggcgtcagcttcaggtcttaatgcagatgcgatagctggtcagtggaagtcaacccgcgatatgatgaacaggagtaacacgctcggttctgataagaatggtaatgatgcctttgcaaaggtattacttgaccaggcgcaagctaaaactcaaatggaatccggggaaacagtcgccaaaaacctgtctgatattaaacagacatctgcgatgtttaaaaatgcagtcagcatgatgggggcaaatgaacagatacttgcaccagctgccgaaaaattagatcaatttgttgctttgggaggtggcgggcagtatgcgaattaccaagagcaaactcaaatggcccctgatacgtcagctgtgccaacagcaggagagattggtggaaatgttgccggccagagagctcaatcaactgcgaacctgggtcaacacagagaagcctccacagctcagccaggtaatacaattggcggaattaccgctcaaagccttaacgagaacaatggtcgtttacacgttgcaaatgaaggtggcgcaggtgaaggtcgtgttcattctcaggcagacagagatactttaaaccaggttaaaaataatcttccaatggggtccacaaatgacacaattgagagaggaaaacaggctggttcagttggagaagcaactacaggaagagtccaacctcttcttcttggtgacgcgccttctaacgatttcaacgcttcaacacagcaaacaatgaggaacttgcaatcaagtgaagcacctaaaagctttgatagctttagtagtaccggtgacaaaacacaggatgctaaagcagcattaacgcaggcaacattgcatagtgaaaacgcacgtaaccaaatcgggcaagagcgtgaggcaagcttggcagaaagcaaagcatacctcgataagtataatgaaatcaccggtgcagcaatgtccgaatcaggagttgaacggattggaagacaagcgtcggatgggaaaaataatggtttcagtggcgggctcaatgatgtcgtaaatgcagaagtcactggaagcggtacgacaggaaaggcagcaagaggtagtgcagatgcagcattgggccaagaactgagagaaaataatggagccagttcacatccaatggataaggcatcagcagcgtggcaagctacaggagactctgtgcccgggcatgagatcgcgtctgacattgtacaacgtgttgctggtgctatccctggtggtgatgctatcgcaccgaaaataggctctcaggataatgtgccggacgcaatgggtataagtagtggtagagcgccaggctctctcatcggaaacatcagcaataatatccagttagggcaagcattaaataatgcaggtaactattccggtatgaacgatgaaaaatttactcggatggcggaccaaaacgagatgttaactaggcaggttcaacatgctctttcaaatgattctcgttatgggcctgatgtagctgccgagtatcccaaatttattgcgagtctgccaaaggatattggagtaaacgagggaacagcgaagactaaagaattccttgataagcataggaaaaattaa

SEQ ID NO: 214100 - DNA, 1356 bp, Klebsiella pneumoniae
atgttctttggcgcgttctcgatgcagcaggtccatgctgccaacgtcatggagggcatatttcagggaatggtggcttcaacagatcccgcttcagtaagaacggcgtcacgtgtcggagctgttggggggagtttctcataccgccagcctcaggtgaatactaacctcgtcaatgtcagtttcccgaaagccagcgtcgggtgtaacggcattgatattttcctcggtagtttcagcatgatcaacggtgatcagcttgtgcagattggacgcggtattgcgcagggctcagcggtatatgcctttaatacggcagtatcagcaatctgtgccgactgcgcagcgatcattgccaacattcaggacaagctcgctgcgcttaacaaatttgctaaagacagctgcaacgcgacctatgagtttttgcaaaatggactgggcacacctcaggagtttactgagaaaatcgggctcggtggcggcgctgttgactccatggtatcaggtatattcccggattttggtagcaccatgagtcagcctgcgagtgaagtcaataaaaagaactatgcgaaagacccagatgcatttaaagaaaaatatgcaggaaatattgtttaccagggatttatgagcattgataacggcaatataaatgtaggtggcgtgactgaactaacaggttacaaactggccgaacaaataatgtcgcttactggaacacttatcgtcagctgggatagtaatggggaaaattctgcgataacaccgatcccgcctacgatgaaagcagctgatttcataaaggggacaggaacgggaaatgttaagttaaatgtttgtaacccaactcctgatttacgcagtaccaggaaagctcagtgtcttgaaatgcgtcaggactctattcaattcaaaggactttctgaaaccattattgaaacattgctcgaagttcagcgagctgtcaggaatgacactgagttgacgcaggaccaacgtaaacttatcagcatgttaggtgttaataacatcattcctactcttcagaccttgtcagctgctgagggtgttcaatacatcaatgatatcagcacgatcgcggcaaaaaatttcacgatagagttgctgagtagtgtacagaataaaatgacaaatatgactttgccttcagaggcgatgacatcgtttaaggaccaactagacaaaataaaccaaacctttagaaatcagatccgcagcgcttcagaagtacagtccatccagaatactgaggaaaaaaccgtcctggcttattgggatacggcatacgttaaaaaacggacctatggcgatagcgggaatggtggctga

SEQ ID NO: 214101 - DNA, 1038 bp, Klebsiella pneumoniae
atgcaaaacaccaaaacttttatcctgaaagccgccattagttcgttgctggtgctttccactatcagcctggcagatacgcagaatgtagggaacactccttttgtttcgggacaagccctcaaaaaaggtttcttctggtataacgataaagagccggtaaaagatgaagaagaacaaccgcaacagccgctaacgggctcgtcttctcaggacaaacaagaagaacttaagctggattcacgctggcttaaagaaaatcttctgaatcttcgttatgcggcaatggataacccgaccaacgaaaacctgtcccgctattatactgcgcaacgtttaatgcttgatattgccacccgtttctctgacaggacgcgtgactatttcattaataacccgatgatgtcagaaaagagacggcagccaacggaaactgtcgcgttaaatgcgcaccgagcaggtctggaagaaaatcagcaaaaagcactgacctccatttttcagaaaggaggtttattcttctttttccagagtacctgtgcgtactgtcatgagcaaagccagatactgaatttcatgcagaattattatcacgtagacattatgccggtcagtattgacggccgtcctctccacaatggtttatttccccgttatggccgggcaactatggatatgattaagcaatacgccatcacagaagttcctactatttatctcatgtccaatgatggttcccaggctactcgagtcagtaccggtctggtatctgctgacgaactgaaaaatacgatcattcttgcagccagaggtatgaaccttctcgacgaagcgtcattccagaatacgctcgatattaagaaacaatatgcaattggcgacagagacgttctgaccgtgaacaaagatcgctatgaacaggacccttatctccttcagaacataatggatgaaaaactcagcgggtatgacatgccaacaaccgatcgggttgatacccatatttcagaacgtgaagggggctttagtggctactga

SEQ ID NO: 214102 - DNA, 525 bp, Klebsiella pneumoniae
atggcctttaaaaagagtgaggtaagccagcttaatagcctggcaagtgcgataaagctagttgaatatgatgcgaacaaatatacaataacacatctgtatggtcgtaaagttgctgacagccttgagtaccccaaagggacaaatacaagaaaaggggtcggtaaatggctgggtgaaaaatccgccatgttgctgtcaaatgtcgttgtgaacaatgctatacatattttcggatatgaccctcaaaatcctacagaatcaacaagagaaatggattttaatgcacttgttgatttgttaataaacacgggatatacgccagaatactacccgctcaaggtaaacaggattgttgaagttctgaatggtatgtcggaagctgactataaagactattgcctggtatgtaaaaaaccattcatacatgccccggacaggtatgattcctgcccaacatgtagcgcaaaaaaatgcaaagttgccattatgcgttattctcagtcagttgttccctttgaataa

SEQ ID NO: 214103 - DNA, 756 bp, Klebsiella pneumoniae
atggacgtacaacccaacgtacagactgacacggtcattaaggcgtttctccgctcggagttgcagttgatacggagtcagaaaaaactactcagtgtgttgcctcgtgatcttgcgtcggactatcgctatattcctgacaacctgctggagcgttttttccatcctgccactgatgcgcgtctaaatagaattgccctgtcagaagctaggccaggtagcctgttagttcctcgtgtcaacgggaaacctgttttatggggtgagttaataaaattaatacaggatgactctcagttactgaagttcgaaacatacggcagaccctttgacagtgctcagatgaaaccaaatgagccatgtgaattattgagcgggaagcagtatgtatataaacccgtcgaccttgagttatttaggaaaaatatcgtctctatacagatgaatttcttggtgaatctatggaacctggcaagatttaaaccagcctatgtcagggcttatttggccctgtcgaatgacgcttttcagatgctcctcgatacagagatgtcggcctttgtggaggtgacaaatgtggttctcttccccagatttataacctatgataccggacggcgtgatcacaaagtttatgcatggggctatgagataatggctgatgttctggaaggtttaattcccagagaaaatatggaaaacttacgtgtcgagttcgcgcttaaagattcatatgagaaactaaaattattttaa

SEQ ID NO: 214104 - DNA, 465 bp, Klebsiella pneumoniae
atgaacccgataattacggcacatcaggaaatcgttatcgagaactcggttcgctatatcgagttactgaaatcagaggcgtctaaaattctggatgaatactgggaggcttggaaggcacggaatcaacttatatcccagacaacgtatgcgaacgggggcagatttatacccggccgctttgcaccggtgttgagaaaggttgggtcatcgcaaaaactgacaattgtgtggaaggatttctcgcccaggttcaaaaacaaaattgaacatcatggcgtcgttgttaaacctaaactcggaggttacagcgttagttgttttaaaaatgctctggactgggaactggagatgatccaggagacggaagacaaaattaaaccgatccgcgaactactcgcggaataccatcaacgaaaactggccgacatcaaaagactggaaaaactgaagaggttattataa

SEQ ID NO: 214105 - DNA, 795 bp, Klebsiella pneumoniae
atggctgacaacgcaaccccaaaaactgaaccgcgtaatcaacggaacgctggaaacaaccgtcctttagggatggtaatttcaaaattaaagccgctttcaagtgagttttatacgcactttcatgaaaaaaacagagcctgcctgcgccagttcaacgccatttccaatgcaatttataatatttttcggctagtcgaaggagaccaggcgacaagtactaaggtgcagaaatggctctccggggtttacgatgatctatctggtaatgtaaatacattcaaggaacagattgacaaaaatgtcgccaaactgcctcttgatgattcatcattcgaaggatttgactatggtgaatttgaaattcgctggaaccatccattgacctataaattgctggatattatccagaccatcaacgtcctgactcgtcaggcacatcagctgtggctatacggtctgatatcgcaacaggttcatggccgaattaacctacaactcctgagctcactgcgggttgctatggacaacattacaaaaatattgaatgccgaaaatcgcgtgaatggtaaatacgatgcattgcctttcatccagagcattaagcgatttaaatcggtggaactttatattgccagcctcgaagcaaagcccccggttcagaccggtaacagtgataatgcagttgaaattgacactgacactgagcaaccgttaaaagcggaagaagctgcaggcaaaggtaaaccggttgataaaacccagccttcagtcacttctgtttcggtacaataa

SEQ ID NO: 214106 - DNA, 2931 bp, Klebsiella pneumoniae
atgagtattatatccaggcttttttttaaaattagggtcgccctcttcggagggcatgaccacgacattacctttgatacggatgatgagtatgacatcccgcatacgcctaacaaggatgtacaaagctaccttgattacccaagtaagcctgcaggtataacgctcttttcagagcgtgagattttatctgtccatgctaaccggttacaagaaattaatatgtatatcggtttgccaaattcagatctgagtgaggaggcatataccttcactaatctggtcattaaaccattgtatgaatatacacgttggatacatcttttacctgcgtctgaaaaccatcaccatgccgggacagggggtctgttaacgcacagtttagaaacggcttttcttgctttaaaattcgcgtacagtacggaattactccccattggtctgcaggatgaagaacagatccgtaaacgtcgttatctatatgcggcctttatttgcggtctttttcatgacgcaggcaaaatatttgatgtcgacgttatttcgtccaccccgggtgttaaaagcacatggcgtccgctctcatccagtttgatggactgggcaaagtctaaccgtattttttcctatgaagttatctggcgtaaaaggcaggctaacgagcattcagtccgggcaccagtattcctggagcgctgcttaaacgatacctgtcttaattatttaagcgacgttgtcaaagagcgtttgtacgataaaatgctgtcggctttaggtaattatacaaccagtgatgattttatttcacggtgtatgagaacggcagactggcattccaccggcactgataccagctatcggtatgacaaacaatccggtatccgggcatctgatactgctgcacgagctatcgcgattctgaaagacaatatcagtactcttaatatcaatgggttcgactcatcgtcagttcgtcatgacaaaaactcaccgcctcctgtccatattatgattattgggggctctgtttacatcaacgaacacgcggctcttgatttcatactgaatcagtttaaacatcttgggattaacttcccggatggcgatattggacgcaaagcgttaaccgaccttctgttaagcggtggctatattgagccatacggcgaacagcgggttgcccactttttccatcgcggtgattttacggaaactgacatacaacgaatgtttgatgagggtatcaaaggtctgagctggttctcccttttaaaaattaaatgggttggttttctttttaaatacgatattctgccagaaagtacgcctggtatttttagcattaacgacactaatgactatgtttttgtcgaccgcaaagggaatgatacactctacgcacgccctctttcgcatggtacaaaatcaatccgccttggtgtgaaccaatccaatgacaatgctccagtcttaaaggctgatacacagcctgtagcagaaagtgaaattgcagtttcagagactgataatactgctgaggttgaaaatattgagctgcaatccgttgataaccagcaggcgcaggaaaatactaataaaaagtccctgagcatagataattctgaacctgaaacacaaaaacgtgttactaaaaaacctgttaaaagccgtcgtgaaaaaggggtgctaactcctgatgagcagatctcaaggctccaacatcagttcaacaataatgcaattaatgcaaatgaattggctttaatcgatggagtcctgtatgtatcagaaacccatattcgctccatagctccgcttgaagaaccgcgcttaatggagaccggtctttttgtgctttctttacgttcaggaagcctcgatgaagaattcagcattccatgcaatgacgggaaacgatacgtacagttaattgacgaagtatctcttgtccagttacgtcatcaacctgatattaaagaggttgagatgcttcctttgctttctgctgatttatttggtgggattaagtctgatcacgaaggagtgtctttcacattcccgccgccactggctaaggtgcaccctgagccgctccctccggaacgttatgaagagcaagcacctgaactgaaccgtactgaacatgaaccgtctggcataccatcagcggaatatcccgatgttgaggaagatgatgttgaacagttctgggaggattacgcatcctattcgcacggtgataaccttattaaaagtgaatccggccctataaatcaaacctgtgacatctctgattttgatgtgacacagtccaaaaagtcactttcagagtgtacgcctgataccgttacctctgttacaggaaaatccccggccgaagcggagaacgattctgagacagaggaagattctgatgaggaaagcggtgacattaacagcgattttgaagcgctgttttcccgtcagaaaaatattatcactgatccttcagtagtcattgcagataaccttgaacagttaaaatccattgctacaccggttcaagcgtatgctgatgccggaaacagcgatacgcttcattccgatattgatacgattattaatcagttaaacaaaatacgattgaataactcgccgatcccgattagagagttacgtcttgcaattgttgtgactgatatcaatttttgcatgcggttgagaatctctgatgacattgcttcatggggttttcgtcaggaggagttaactgaactgcgcgatgcttttgcgcattttcctgttgctaaattaaaggtgggtatcggcaggcctattagccactacatgattcgacttagtgatcttcaacaaggtgcgctgcgcaataacattttctacgaagaatttatttcgttttttaaccatcaggaagtaagccatgaaacgtag

SEQ ID NO: 214107 - DNA, 2127 bp, Klebsiella pneumoniae
atgaaacgtagaagccgtaacaatctccatacgcaggaaatgctttaccgccctgcccttgagtttcgctcagcgctaatcctcatactgttttctgtttacgtgcttatcgactcatggaccagtaagtacggtatcagtgaaatccctttctattgctctctcgggttaatagcgatggcatgctggagggtatggcacggcgtgccggtctttatagctcactggcgattatttcatcgcacgatggactttttgtcactcgaagacttccggataattaataacgctcatttttttgctgatgaccggaagtatcagaaactggtcaatttgcaggagtcaggcggagcaccctcgaagaatagggtttacaagctctttcgtaagaaagaaaagattgtgatcccccagcgcacgacgtttctgtgcaatggtttcaaatggggcccggagcactctgaacgtacctaccaggttcataacctttccagcgatatgcatgaggttcagttaccttttatattaaatcccattacccgtcactatcgtaaacttgctttcgatttgggagggaattatgcgattttcggcgtggataaaaaggtcccaattttcgtcaatgaagaaaatttctttggacatacacttattacaggtaacgtaggtaccgggaaaacggtcctccagcgccttctttctagttcgatgcttcaccttggacacatcgtgctcgtcgttgaccctaaaaacgactatcaatggcaggacgggttaaaggaagagtgtgaaagtcttggtaagccctttatgcatttccacgcaggcaatccatcaacgtctgtatcttatgatgtcagcgctaactatgttaaggatacagacctttctgcccgtattatgagcattatttcaggcactgaaggaggtgaggatccattcctacgtattgcagagggccttgtcacaacggcgatcggtgctctgaagttgggtggtacaaaaccgactatccagaatatttactatgccattcgctctaaacaggaccttatcgttaccaccagaaatgctcttcggggtttttatacttaccatctcgggaatgattggcatttaactgttcaggtatcacagaatctggctcttgcagacgaaatcgataagcttaaagaatatttctactgcaactactttgaagataattcgcccaaaaatctgcatggcatggatacggttctggaatgttttaaatacatatctggtgatgaatctcactattacaaaattactgccagcctgatgcctatgcttaagcgattgtcccagacccctatggatatattgctttcggcgaacgatgtcgcgaacccaaaccgtaacatcgttaacagccatggactctttaacagcggtggtgtgctctacatttcactggacggcctgtcagatccggcgacagcacgtgacctctcccagctgattacttcggatatcgccgctgaggcaggtagccgctataacacagcctctgatttatccaccgttcccagggtttctatatttattgatgaggcccatcaggcagtcaatatgcagctgattaaccttctcgcccaagggcgtgctgctaaaatcgccttgttcatctctacgcagaccatttctgattttgtatcggctaccagcgccgatactgcggaccgattgacgggactttgtaacaactatatttccactcgtgtaactgacgcgaagactcaggagcttgttctgaccaaagtgggtcagaccaatgtctcgatgaaccaggttacttataccaccagcgcaagcactaaacagtcacatacaaattttaatggttccatttccgaacgaaaatcgacaacgatggtaagttctattccacaggaattactgtcgatgatcccaaccctgcacttcatcgcctgcttacaggacgggcgtaaaattgtgggtcagatgcctataaccgtaccgggcaaatcaatgcgtagatcaacaaccgtcgttgatatggtaatgacttctccttacaaacttaaactgagacgtaatctcgatgttgaagagatacttagcaaatcacagaaggtgggctga

SEQ ID NO: 214108 - DNA, 1098 bp, Klebsiella pneumoniae
atggaattcaaacaggtatcaagggcatcgttattcggtatgaattcctctcaacccaaatacatttcacgtgcaaccaagacactgaagttgtatggcatagatgttgatgatgagggcctgccggaaatactgtctcgctatgcgaagaaactcactggtgacatttgtaaggtatacgctcaatacacggttgatagccttgacgtgctggcccggacgctggcggagttttttattatccggtatgcggtgactatcgttacgcacgatgacacagaggtcacctgcaactggtctgtatctcagggcccgtttaccgagtggctcaaagatctgttgaataactgcatggcgaagagccacacgtttgaagtgcagattgataataatcaggaacgcatggctttcatacagctcaatgccgagcgtcttggctggtatcttctgccggaatttcttgatattgcaggattcctgcccgttttccttgagatgcctgaacaggttgaataccaggtgatgaggcgcaagcgacacggtaaggtaccagacatccaccagcacgatctggggattttcgaagaggatgctctgatatccggtttgaaagaaaagttacttttttggagtggcaacctgagcgacccacaggatgaatacacgtctctttttaaccgtgtcatcgatctttccattttgggcaaccgccaccagcccgcgatgtaccgtaagagtagtattattcagtcgttccttgatgagttttccgcctcggtgctgactcttcccgtccgctttaatgacggtactcttcacgcactctggacgccatgggcggagccctttagtcagttctcgcgcttgcggccggttgaagaagataccgtatacatgccaaccccgggacaggtccgctggataaatgaagatgtccgcagaaaagttactttttcgcttatatcccggttaatcgcatcggatgacctggcgtgttcgggaattcttcatggctggaaaaatcactacctcaacagagaaagcaatattcgcctggcagccctttgggcagagctattcacaaataaaactgactga

SEQ ID NO: 214109 - DNA, 675 bp, Klebsiella pneumoniae
atggctggaaaggatatgtcggcgcagagaatgacgatgatccggtttggattagggctgggtctgctgatttattttctgtttaacgtttacctggaagacaccaacaagctttataaggatattactgccgaggttaacgccagtaagttgcttatggatgtggagaaatggcagaaggtgacgcgcaatacggaaaaaacgtttaattacctttttgtcgaattaaacatcacggcttacatgaataaaactctgttgcctgaggatgataaaaccaaaccggcgcgtggaatgaacctcgcggcaaacaaattcatgagtccaagctataccgctgcccgaaacatcccgttaatggtgtatcaggcgatttaccgctggtatttgctggctggctggtttttcacgttcctcccattaatgatagctttggcactggatggttattaccagtggaaaatgaagagatttgtttttggcgatgttacaattcagctttatcgcctctggttccgttcgttgtcgataatcggtattttgataattgcctatctggtcatccctaacctgaatttattttatggactgacacagtattttccgccgcttgccctggcgttgctcgctattgccattaaccggcttctcgcgcattaccaaaaactcatgtga

SEQ ID NO: 214110 - DNA, 1137 bp, Klebsiella pneumoniae
atgtttaaaaaaagaccatcgaaacctgaaacaggctcggttcaggacgtggtatcgcgtgaaagtaagaagttttaccgtttgtataaatcgcatgtgttatcaaaaataaccctgacgattattggtatagggtttgctggttttagcggctggtccatgtatcaggataaacagaaaaacggtaaaggggcagaccatatcgcggttatccgtatctatggtgaaatgggtactggctcgcctacaggcgacggtgtcattattgcccgcgctttacgtgaagcatgggataacccgcatgctaaagcgatcctgattgaggctgaatcgggcggcggcggtccgtcggacgccattaacatttatcgtgagataaacgagcttcgcgactccctccatggagcaccggggctcacaattgaaaaccccgaccccacaacatcccagattaaaaatgatatgccaccagcaccctctgaggcggtcaaacaggcgttgctgaaagccgtgggtaccggtcatggcagactgccagctgcagcccgggacgtccgccccatcatcgtcagcattaaaaatatgtgcgcctcggcctgttattacgcagcctcaccggctgatgcgatttatgcggatcccaacgccatcattggcagcattggcgtgcgcatggaccactgggatgtgtccaagatcatggaccgccttggtgtggctaacgaaccgttgacggccggtgcctggaaggcttctcttgacccctggcgtccaattgatgacgaaacaaaggcttttctgcatagtgagttactaaacaaaatgcatgaccagttcattaatgatgtcgaagccggtcgcaaaggaaagttactttcgcgtgaacaggcggataaagaacagctctacacggggcgtttctggctgggggaccgtgcgaagcagtttggccttatcgatgatacagccaccagcacagaggtgcgtgaacgtctgagtattgtctacggcaccacgcgttttcgcgactacaacgcgccaaaagcttcgttaagcagcatgttaggattgtcactggacgtgaacgttaaagaggctttatccagtgcgcttaacaccaccagcactgtgaggtag

SEQ ID NO: 214111 - DNA, 774 bp, Klebsiella pneumoniae
atggacctgaccatgttgtcgaccatttttcttgtgttcgtcatgctgattctgtcatgcatcattctgtgtgtctggccgcttatcagtaacatgttcagcgagcagcgcacacgaaatgcattaaagagggtgttagcggaccttgaggggacacttgtttctgacattaccctacccctcaacgcctcccagacaacgcagatagaccatatctttattagcacgaagggtattttcattatcgaagagaaaaactataccggtgacatttatggtgctctcgatgataaaacgtggacggttgtatacggtttcggtaaagcgaaacataagatgttaaacccgtttgttcagaacaaaacccacatatccggagtgtgtcgggccataaagcgggatgataagggtatcatcaatgttgtgttactgacgggccgcagtaagttcatggcagaccctgcacctgagtggttgtgctgtaattgtgatgacctcgggaacaagttcaccgcgtacgatactgaacctgtgtttagtgttgaggagactggctggatcgaaaatgacctgcgtaaagcaatgctgccgcagacgctgctgaccgacctgggacacgtgtattcactgaaactgaaacaccgacaaccaatatctgtacagcacagggtaacctattttacgttactgactaccaccctgttcttccgtgctctgataaaattattttcgcgtaaacgctcagaggtcattcacaagcagtatcgtgaatag

SEQ ID NO: 214112 - DNA, 279 bp, Klebsiella pneumoniae
atgccacaggcatattcgcttttgctggaactgaatcaacacacttatctgccggtggttaatgccgagtttgatatctgtgtcatcagctgcggtaaggagtggtggcgcttcaggctggttgatgtgaaatctgatgaacgtcaggaaggaatggtagcccggacggcataccggctaaaccagtcaatggggatcgctgagcagatggttaacatgatccgcgcctggcagtccgttccgtaccttaatcctcctgcatccgactactttcgctaa

SEQ ID NO: 214113 - DNA, 348 bp, Klebsiella pneumoniae
atgtatagccgtttcatgaacgatccacttgatgaggaatacctgctttcccctggtattgtgggttcctatgctgatggtgaaatcccggcagaagagattgaggtaagggaggcggtaatacgattcaaagttacaggcgatcaggtgttgtccatgaatctgttccacaggctgtttcattaccagcgttacagggaggttagggcatcattcaacaaaagcaggttagcgctggtggacatggttaatcgttcccaattccacaaagcagcaatgcggcgtatctacagtgatttgccggagcaaagcattgcccgcagggttctgcttgattttattggatag

SEQ ID NO: 214114 - DNA, 1068 bp, Klebsiella pneumoniae
atgcgctgcaaaattagcaaaacctcgatctcacttatttgtctgatgctggtggccacctctgcggaagctgggtataaacccaatcggtcttcctacaaatcatccttccgcccatcgaccattaccaagtcgtacacctcttcaaccagaagccaggcaagccgcacggttaacgatacgccagcaccggctagcaccaaaccactgaccaccagccagaaagcgatgattgcaggttctggagccgcattaacggtcggggcagtttccgcgtccacagggaataaaccgtcagagagcacctccgggaaggtgaagaaccaggctggtgggtatgctgttgtcagtagtcgatctcagaccaagggagataacgaaggcgctgctgcaggcactacgccaaagaaatcagtgagcgggtcggagctggtggctacaaaggggacaatttccacggcaagacctccgtccgggaaatcgtcgtctgtcccgccatctcagagcattccaggaagttctgagcggggctcttcatctgtaaagttcatccctccttcacagaaccttgtgagtaacatcatagagaaagataacagtaatcatttcggtttctcgcatcttgcgatgctgtactggctaacgagtagcagcaacagccatgcatcctcgcttacatccagtgataaagagtggattcagcaacagattgaagagcaggaaattaacggtgcaagccgggtagctgcgatcaatgagctgaaagcggccggggtagatacctcatcgatgacggttgcggataacagccaacacgcgtcgactgtctccttctcctacgatatgccgacagaattaaaggcgggtcaggtctggacgttcgttgttaatgccacatggaatgataaaaaacagactccgtcatgcgagttgcaaggcgcgaaatttatagcagacaaagacaagttatacggcatgtggaaagcacctgaaactgtcgggcagaaaacgcaaatgaagtgtaaagcgtttggtgtggaagaaattaaaacgctggtgtcttcctga

SEQ ID NO: 214115 - DNA, 297 bp, Klebsiella pneumoniae
atgaagataaatataaaggatgccccgtccaggtcagaaaccatgatccgcaatattgtttacgctgtaagagcaacggcgataatgacggaatattatctgcgctcattcccggtcgtgtttttttatgtgctggtgggatttgcattagcatttgattccacgggtgtccctttggctaacctgctgcaacaaggaatgttaactaacattctgacctgttcggttatgggtaacctcctctggctgggggttaacctggcattaagaggtgattccgttttcaaaaacctgtga

SEQ ID NO: 214116 - DNA, 378 bp, Klebsiella pneumoniae
atgtccaggttcctgaagggtgttggtctgggtatggcgggcattgtgttgctgctgtgcggacttatcgcgctgtattattttgagtcgaaagcatcgctcagagcagatatcaaggcctgtcccacggttacagcgggtcaggcaaccgatgccgtcattcaggacatactcgtgaacagagagcgcattttcgctaagccacggctggagcgtcgggacatagtgattgaagaactgagcgtccagataggctatacaggaacccttgtccctttcaggatcaacggtgtcgatgatcgccggtattttggcatgtcgggatgtgcctctctcgacactgttgaatatgccacagagtttttgacccagcagtag

SEQ ID NO: 214117 - DNA, 375 bp, Klebsiella pneumoniae
atgaaaaagcaggcaggaatgttcctgatttgttttatttttctactatcactgaagcaggttaaaggagcggatgaaacgcgtaatcactctcccgatgaagctagagtgttgcacgccagcgcttcgatagaagttgcgaacgccgacgagcccgatgatgaggacacggttcgtctgacaaaaaatgagtatgacgagctggtctggaaggctaaaacctaccaagagctaaacccgatgaaaacaagcaatcctcgggagagacacggcttttcatgggatttcttttggggttgggtgggtggtgcttttacgacaaccctcatctattttttctgttttggcgacaagaaaaatggaaccaagaagtaa

SEQ ID NO: 214118 - DNA, 189 bp, Klebsiella pneumoniae
gtgatctggctgctggtgcagatgttgaagaacgaggacgaatttttcacaccatttaagcagcctataagctttccatttcatcaggaaaaagtaactcgtcaggaaaaagtaactttcgccaatatatcgttgacttttatctttctggatgacggttataaaaatgggaggggcaaggactattag

SEQ ID NO: 214119 - DNA, 975 bp, Klebsiella pneumoniae
atgaaaactcaaaacacaccagccactcacagcgacattctttttacccatatcgtgaatacgctggtggaccttgctaaacatgaaggcactctaatgacgtttgaaggccttctgcggaacggtatcgaggtagatgaagagatgatggatagcatgctgggggtgagtcaggactcagctgctcagtgcgtggttcagctaagggattgtggcgccataacgagccctgcggtatatgagatggttactcacgttgagcaactggcgatgcgtttagccccagactggtggaagcaaatcgtgccatgggcggttcagccgctgcgttattaccagaaagaggctatggcaaaacgcgaacgatttattgtccgtcatagggaacggcagtaccccttcttcgtatacgtaactggtcaggtagagtatccggaagatgacccgctgtatggcacgtacgttacagaaggtacgttcctggtaggtaaagcgaaaaccatacatgatgcccttgagtgcgcaaaagaagcttttacgcggggtgaatggattgtccaggatgaagaagggcgggatgagttcgttgaccatctgacaggacgtgaccaggggccggtgagtttttccgaaaggactatagagatccgcgataagggtgacaggctggtgttaacaggcaatgcccgcacactggagtggcaccgccatgtaaccagccctgatgagatcgaaaagataaaagcacagcaaaaagacctctatcagaaagcaagctatgagagtggctgggacaactacgagaccgcacgtcagttgcgacaggaagcagaacagttatccgtgggcatagtagatgaaagctggcgcaatcttccggacgttattaaagccgttgaggagtttcattatccggcgttcatggatgaagagacgttcgcctttaacgcagacgaggacatgggaatagcatga

SEQ ID NO: 214120 - DNA, 162 bp, Klebsiella pneumoniae
atgaagcattcagatcagtttgacaaccctgttattgataatgattacatagccgagccggaaagcatcaaagcctggttaagagagtttaaggacttgccaccagctccccctgaactgatagaagcgcttaacaacatgttaggcaacgatggcgactga

SEQ ID NO: 214121 - DNA, 165 bp, Klebsiella pneumoniae
atgcataaatataccgtattgctcaatgatggcaccgtaggcacactcattgttgattcagttgatgagggacagaatgtgacagtcgatctgcatgacgagaacggcaatccaatcacagcgacaggaactgtcgtggaaattttggaagagtcagagtcctaa

SEQ ID NO: 214122 - DNA, 159 bp, Klebsiella pneumoniae; identical to SEQ ID NO: 23262

SEQ ID NO: 214123 - DNA, 261 bp, Klebsiella pneumoniae
atgacactcactgcatattaccagttaaggaatacaaagtccgcaggtcttggtttcgaattgctgaccagtgaaccgggagcctttattgtgctggaagaatgcagttatgagaaaccgtatgaaattgcccgctatgggcataatgggagtgcaggcgatcgttcgaatgcgttcagttgcgcgatgaataaagcccgtagcctgcagaattacagtggagcaaagctggattacaacgtttacgaagaaactgcctga

SEQ ID NO: 214124 - DNA, 471 bp, Klebsiella pneumoniae
gtgatcctctacaggctgacgaaaacaaagtatctttctacggcctggaccggatatggtgcgaaagaggctggtgggcgctggaatagcgtgggggtgtcaatggtatatgtatccgaaacggcatcactaacgatgctggagacgctggtacacctgcatgcggcacagataatggactctttcacgctactgagtatcgatgtgcctgatgaactgatccaaagcgcaaacatggatgaattaccgggcaactgggctgatgaggatgcgcctcaggaactggctgattacggagatgcctggtcatttaccaggagctcggttgcactgcgtgttccctcagccttatcgccggtagagttcaattatctgttaaatcctgagcaccctgagttttacgggatcgtgcagaaggctcaacagataccgttccggtttgatagtcgtcttaaacctgacaggaagtga

SEQ ID NO: 214125 - DNA, 444 bp, Klebsiella pneumoniae
atgaaaacatttagtttgtcctcaactccagccagaccacagcgcctctggcaggttgccgggttaaataatgctgatggcgtagcgcttctgggccaaatcaatgaaggcctggacgggaaggtggcgaatcggatcactgactgggccagaataacccagaatgacctgagaaaaatgtccggtatcccgtcgaccacatttagccgcagtgtgaaggcacgttttaacccggaacaaagtgaacgtctggtacggattatccgcgtcattgatcgggcggtagatttgtttgaaggcgacaaggaagccgcacagaagtggttgaacgaacctaaccgggcattgagctggaaagtgccagcagacctgatggcatccgagacgggagcgtatgaggtcattaagctgattacgcgtctggagcatggggtgtactcgtga

SEQ ID NO: 214126 - DNA, 1272 bp, Klebsiella pneumoniae
atgtatgctctggcggatgtgaacagtttctattgcagtgttgagaaatgcttcagacccgatttacgcgataaaccagtggtcgtcctttctaacaacgacggctgcgttatagctcgttgtaaactggccaaaaaattcggcattccaatgggtttaccctggtttaagttgcgtgagcagcgtttcccggagcccgtgattgccttctccagtaactacgagctgtatgccagcatgagcgccagagtacatttctgcctggaggaattatcatcccgtgtcgaagagtattccatcgatgagtcgtttatttgggctggtgggattgataactgcatgacgtttgaggaatacggacatcagctaagggaacatgttttccgctgcactgggctgacgataggggtaggcctggcccctacaaaaacccttgctaaagcctgccagtattccagtaagacctggccccagttcggaggggtactcgcactgactgcaggccaacgtaatcggatcgataagatgctttctctgatgccggtagaggaggtgtggggggttggtggacgaaccacaagtaagcttcatgcaatgggcataaccactgcactggagctggctcgtaccaaccctgcattcataagacgaaacttcaccgtagttcttgaacgaacagtgagggaactacggggggaaagttgtatcgacctggaggatgccccgccaccaaagcaacagatcatatgcagcaggagctttgggcagcgtataacaacgtatgaatctatgcgccaggcaatttgccagtatgctgaacgtgctgcggaaaaattgcgccaggaacgtcagtactgcggtcaggtatcagctttcataaaaacctcgcctttttcaaaacatgaaccctattacagcaaagtctccagcgaacagctctgcattccatcacgtgatacgcgggacattatcgcggcggcgggccgggctctggataaaatctggaaagacggacataactatgcaaaggcaggtgtcatgctcaacgatttccgtccctgcggagttacccagctatcgttatttgaagaggggaggtcgtatgcaaacagtgacgcgctcatgaacgtactggataccataaacaactcaggcaaaggcaaggtatggtttgccggtcgtggtatcgcaccggcgtggtcaatgaagagagatatgctctctccagcctacacaactaggtgggactcgataccgatcgctacactctga

SEQ ID NO: 214127 - DNA, 231 bp, Klebsiella pneumoniae
atgcgtgatggagatttgctggtggtggaccgttctctgcgtcctcaacatcgcgatatcgtgatcgccgaagtggacggcggcttcactgttaaacagctccagactactcccagactggccctgttgcctatgaacaatgcttattccccaatttacccagaccccgatgaactgacaatttttggcgtggtgactcattgggttcatcgtgcccgggggaatctgtaa

SEQ ID NO: 214128 - DNA, 738 bp, Klebsiella pneumoniae
atgcatgttgtcatcagcactgtggaagaaaatatgaacaacaacaatctgattatcgtcgcagaagacgatgatgacatcgctgccatactgacaggctatttacgtaaggcaggtatgaaaaccttaagagccgaagacggtgagcaggcaatcaatcttacccgtctgaacaagcctgatctcctgctattggacatccacctgcccgtgtacgatggctggaatgttctcaccacgttaagaaaggaaacgaatgtaccggtcatcatggtgacagcactggatcaagacgttgataaactgatggggctacggctcggggctgacgactatgtgataaaacccttcaatccatctgaggttattgcccgggttgaagctgtgcttcgcagaaccagaccggttgcagagtctacacattcacggcctttaagaacgccttttttaacgatttatcctgatgagttttacgttgaaatcactgcacaaggtgaggtttccacgccagtattaaccaccactgagtttaagcttttaacctatttggcgagaaacccgagaaaagtctgttcacgtgaagagttactcgatgcgtgtttacctgagggagactcgctggatcgtactgtagacagtcatatgagtaaacttcggaaaaagcttgaacatgccggattgaagggcattccggaaagcatccgaggattaggctaccggttgggtgacaaaaaatga

SEQ ID NO: 214129 - DNA, 1062 bp, Klebsiella pneumoniae
atgaacaaagaaacgattctgagccgtcagattttgacatatatgttgttgttaacgtttgttattattgccattgcaatactcggttcctacttattttatagtttcctgatttattacctgccgggtggaatgaacgaaggtagtgaagatgctatgacattccttgactggatgtggattctgatggcgtccattaccagtctggtcgttgcacttttctttaccgtaaagctgtctgcaagaatattcaacccactgaatgacgttgcatacagcctgaaacaaatctctcagggaaaccttagtgccagagcatttaacagcagttctaagttgggagagatgaataggctcgtcaatgactttaatgagatggctgaaaagttacagacgctggatgcgcagcgaaatttatggaatgctgcaattgctcatgaactccggacgccggtgactatcttacgtgggaggcttcagggactggttgacggcgttttcgaaccagaaccgtcgttattcagaaaccttcttaaacaaactgaaggtctgaccaacttaattgaagatctccgcgtcgtgagttcttcaggaggcgcagggtactccttgatgctgagtgaagtcgatctcaaggccacgatttcaaatgcgcttgataccttttggccggactttgataaaaagcatttcaaaattgtcactgagattaaccagcagtattgcgtttgcgatcccttacgcattattcagtgcctcaccgttctttttgacaatgccttaaaatactccacatcacaaacgctgttaataaagaatggtattacaggaaacgataattttattatcgttcaggaccaaggacctggaattcctgaagaactcctgaagtccttattccagccttttcagcgaggagaatacgccaaaaatattaatccagagggctgtggtttagggttgtcggtagttaaagccattatgtgcgcccacggtggagacgttagctatagtttaacaccagaaaatggctcacttttcaaactctcatggcctgtttaa

SEQ ID NO: 214130 - DNA, 936 bp, Klebsiella pneumoniae
atgaacaaaataaactatcaaatcaaatacattgaatatttgttaagaaaatgcagaacaattttgactaatgacatttcatttcatgcagacaggttaagagaaatatctggcacatatccggatttactcaaccctgtaacgcttaatgagaaaatttgccatcgcattttatttatccacaacccattttatacattgcttgctgataaacttctggtcaggcagtatgttgagaaacggactaatttaattaagcttattcctttagtaggtgtttataatagagttgatgatattgatttcgacaaacttccctcaaaatttgttttgaaatgcaatcatgatagtggtagcgcggtcatatgcacggataaaacgaatattgatcccgctaaggttaaaagcaaattaaaactatctcttaaaaagaacatgtattatacgacccgagaatggcagtataaaaacataccacccgtgatcctatgcgaaatgtatctggatctattttccagtaaacaccggaatataactccggaaatgataagaatacattgctttcacggtgtggcatgttttatcgaggccgactttactgacagcgatggaaacgaattcattaacgtttatgacagagcgtggaatttacaaccctttcagatggaatacccaaacacgccattgccggttgatgaaccagaatcatttcataaatccgttattgccgcccaggacttagcaaaagaaatagactactgccgcgtcgatcttatgctaaaaggagatgatatctatttcagcgaaataacattaagtcccaaaagaggcaaacttaaaatcaccccatcaatttgggacgcaaaactcggcagtatgtgggatctgtctcttgctaaaacaggttcgatcgagcctgtgtattcatgcccttaa

SEQ ID NO: 214131 - DNA, 1038 bp, Klebsiella pneumoniae
atgagtgtcctctttccacccaggctggctccaggagatgttattggtgtaaccgctccctcttctggcgtacctgaacatctgcatcccagactggaactcgccataaaaaacctaaagaaaagaggttaccaggtccgcgaaggacgctgcttacgctcgcagcacaaaaataaaagcgccactaaattttctcgcgttgaagaattaatgtcttatcttactgacccagatataaaagctgttatgccacgttggggcggtgatctggcgatggaattacttgatttgattgattttgatctgttgtcccggtctaaaccaaaatggtttgtgggcttttcagatcttagtacacttcatttcccactgacgacgatatcgggctgggctactttgcatgggccgaacctcatggatcttggcgctcaaaagttagatgccaccactcaggccgtatgggaaattctggaatcgaatcggggaactgtaatcaaacagtactcttcaacagcatttcaagcggatgaaaatcaatggggaacagcgtcagacggaggtttcaatctgacccaaaaaacacagtggaaacgccttgatggtgttacatcttctctgacatttagcgggaaactgatcggcggctgcctcgaaataatatccaggttagcaggtacaccattcgggaatgtgcccttgttcaaggcgagcaatagccctcaaggaataatcctctattttgaaaatgtggaaatggctccctgtgaattaacacgcgcattatttagcttacgattacagggttggtttgataacttaaatggtgttcttatcggcagaagtgctgcacccgacgtaagcgacccgactaaacataattatctggatgcccttaaagccgcttttgagaatattgccgtgcccgtactgtatgatgttgatattggccacatacctcctcaaatatccctggtcaatggagccgatgcgacggtatttttcgctgaaaatggtagctgggtaactcagcagttgtag

SEQ ID NO: 214132 - DNA, 363 bp, Klebsiella pneumoniae
atgcaagctatcagactattcaccctgattctgccattgttcctggcactctgcgccggtataccggccagcgccagcacaccttcaggcagcatttcctctgcaaacacagcaattaccactcatgataataacggaaacctcctgccgaatgctctgcggattcagtatgatgttgattcagatggtagagttcagaatgttaagatactggaatcgacaacgactccggagtttgaacataaaatcatcgagaaaatgatgagtaaatggcgctttgaaaaggggaaaccgggaatagctaaaagagtagtcgtcatgatccaacccaaatcagccagcggtcccgcgaataagcagtaa

SEQ ID NO: 214133 - DNA, 390 bp, Klebsiella pneumoniae
atgaaaaaactttcacttcttgttccactggtgtttactgcgccggtacaggcttctgaagtcacggtaggtcagatttgcaaggcggcttctgctgcgatgtttggccgtgaccataagatcatgcaactggataaagtggaatcaggtattgcctacgtacattatatccgacagaacgatggcacccgttgggcaataaagtgtaaacttataggtgatcaggttatgtgggcatctgataaccctgacagcaccggtcgctggcgggatgatcctgcggacagtacagtcaaatattctattgatggtaaaaaaataattattaccgagctctatactgacggttccagtaccacgaactcttatcccatgatgcagctaaaatga

SEQ ID NO: 214134 - DNA, 477 bp, Klebsiella pneumoniae
atgaagatcagacttgctgtgcctgtggaggcagaagaatgctggaatattcgaaatcaggctatacgttacggatgtaagagtagttatgatgatgcggttattgcagcctggacaccggaaaaaatgcctgagagctacaggaacgtcattgtagtgaatccttttttcgttgttgctgcccctgatggcagactgttagctacaggctatcttgatctatctacaggaagtattgaggctgtatttacgctacctcaatatacaggtaaaggtttaggtagtcagattattgaagccatcaaaagtgaagctcgtggacgtggttttgagcaattgactttgtcctcaacacctaatgcccagactttttatgagaaacatggtttcaaacttatgcaggaaagcatgtatccctctgccttggcgcaggctgaactgcgctgcatggaaatgtctataaatctcctgggatag

SEQ ID NO: 214135 - DNA, 843 bp, Klebsiella pneumoniae
atgagcctgttggtagttatcgccgggctgttgctggctggcgcgctggggctgctgtacttcccgtggtcgggcaaaggggcggtagaccgcgatgccctcaaccgcgccctgtaccagtcgcgcctgcaggagctggcgcaggagcgcggcgaggacaacccggcgctggtcgtcgaactgcagcgcacgctgctgacggatattccgccccaggcacagcctggcgaacggccgctaagctgctgggcgctgcttccgggcgcgctgctgctggtggtcctgagtctgggcctgtatctgaaaaccagcgatattggtcaggtgctgctctggcagcaggctgaacgacattttcctgcgctgttgcagcaggttaaggacccgacggcggcgccgctgcgaatggatgagctggcggagctgcggcttggcctgcgcagccacctgcaggatacgccgaacgacctcgccggctggcagctgcttgggcggctgggcctgttgttaaacgatggcgagacggcgatcggcgcctttggccgggcgcatgctctgtcgggggacgacccggcggcggctttcgattacgccagcgcgctggtgcgggcgggagatagcggccaggttcggatgggcgagctgctgctgcgagacctgcatcagcggcagccgaacagcctgccggtgctggagatgctggccctgagcgcggtgcgtaatgaagattaccccgaggccgtggcggccctgcaggcgttgctggcccggctaccggaaggggatgcgcggcgcgaggcgatcgtccgccagctggcgcaggcgcagcagcaggcgcagtga

SEQ ID NO: 214136 - DNA, 459 bp, Klebsiella pneumoniae
atgagacgtgtaatagtcatcctgctggcgctgatgctgaccggccagacgtgggccgccatcgatacctggcagtttaaggatgaggcccaggagcaggccttccgcgagatcacctcccaactgcgctgccctaaatgccagaacaacagcatcgccgactcaaacgcgatgattgccgctgatatgcggcagaaggtgtacgagctgatgcagcaggggaaaacgaaagggcagatcgttgactatatggtggcccgctacggtcattttgtcagctacgagccgccgctgaccgcgggcacggtgctgctgtggctggggccggggctgttcgtgctggcgggcgcgggagtgatcatcgcccgcgcgcgccgtcgcgacattcctgacgcggcgctcagcgccgaagagcgccagcggctggcggcattattgcaagaaggaaaagaacgatga

SEQ ID NO: 214137 - DNA, 555 bp, Klebsiella pneumoniae
atgaaccggaagctattgtttattccgctggtgctgtttctggcgctggccgccgcgctgttctggcagctgatgcgcaacgccgatggcgatgacccgacgaccctcgagtcggcgctgattggcaaaccgctgccggaatttcgccttgaagcgctgaatacccccggtcagacgctggaccgacggacgctgattgacggcaagccgctgctgctcaacgtctgggccacctggtgtccaacctgtcgcgccgagcatcagtttctcaacggcctggcgcagcagggcgtgcgggtggtggggatgaactacaaagacgatcgccagaaggcgatgagctggctgcagcgcctgggtaatccctacaggctgagcctctacgacggcaacggcatgcttggcctggatctcggggtctatggcgcgccggagacgtttctcatcgacggtcagggcattatccgctggcggcacgccggcgacctgaacgaacgggtgtggcgcgaggagctccagccgctgtgggatcaatacaaccggagggcgggctga

SEQ ID NO: 214138 - DNA, 1953 bp, Klebsiella pneumoniae
atgatgccggagctgggcaactttttattgtgtctggcggcggggctggcgctgctcctgagcgtttatcccctgtggggcgcggcgcggcaggatcggcggctgatggccctggcgcggccgctggcctgtgggctattcgcctgtatcggcggcgccttcctgctgctggtgcacgcctttgtggtcaatgactttaccgtccgctacgtggcggaaaactccaacagcgcgctgccggtgtggtatcgggtggcggcaacctggggggcgcacgagggctcactgctgctgtgggttctgctgctcagcgtctggaccttcgccgtcgccatcttcagccgccggatgccgctcgacgccgtcgcccgggtgctggcggtgatggggatgatcgcctttggtttcctgctgtttatcctcttcacctccaatccgttcagccgcggcctgccgcagtaccccattgatggccgcgacctcaatccgctgctgcaggatatcggcatgattttccatccgccgatcctctatatgggttatgtcggcttctcggtggcctttgccttcgccatcgcctcgctgctggcgggccggctggatactgcctgggcgcgctggtcgcgtccctggacccaggcggcatggatgttcctcactctcggcatcgtgctgggctcggcgtgggcatactacgaactgggctggggcggctggtggttctgggacccggtggaaaacgcctcgtttatgccgtggctggtgggaaccgcgctgctgcactccctggcggtgaccgaaaagcggggcagcttccgcgcctggacggtgctgctggccatcgccgccttctccctgtgcctgctgggcaccttcctggtgcgctccggggtgctggtttcggtgcatgccttcgcctccgatccgtcgcgcgggctgtttattctggtactgctgattgtcgccatcggcggatcgctgctgctgtacgccctgaagggcggccgggtgcgggcgcgggtggaacatacgctttggtcgcgcgagacgttcctgcttggcaacaatatcttgctgatggccgcgatgctggtggtgctcctcggaacgctgctgccgctggtgcataaagagctgggcctcggcagcatctccatcggcgagccgttctttaacaccatgttcaccgccctgatggcgccgtttgcgctgctgctggggctggggccgctgatccgctggcggcgcgatgacgtcgccaggcagattaagcgcctgattatcgctctgctggtgacgttgtcactttctctggcgctgccgtggctgctgcaggaccgtatcaccgccatggcggtcattggcctgatgatggccctgtgggtgctgatcttcgccctgatggcggttcacgaacgggccacccatcgccacggcttctggcgcggcctgcgcactctgacccgcagccagtgggggatggtgctcggccacgttggcgtggcggtgaccgttatcggcatcaccttcagccagaactacagcgtggagcgcgatgtacggatgcgccccggcgacagcatcgatatccaccgctatcactttgtgtttaacggcgtgcgcaatatcgtcggccccaactggaccggcggcgaaggcattatcgccgtgacccgcaacggccgcccggaagcgacgctgtatgccgagaaacgcttttacaccgccagccggatgatgatgaccgaggcggcgatcagcggcgggctgacccgcgatctgtacgccgcgctaggggaagagctgagcgacggcagctgggcggtgcgtctgtactataaaccgttcgttcgctggatctggtacggcggggtgctgatggccctcggcggtctgtgctgcatgctcgatccgcgctaccggatgcgtaagaagctgcaggaggcctcatga

SEQ ID NO: 214139 - DNA, 459 bp, Klebsiella pneumoniae
atgcaagcgcgtcgtaaaacccggctgtatatcgtgctggcggtgctcgccggcctcgggctaaccgtcagcctgacgctgtacgccctgagtagcaatatcgatctgttctacaccccgggggaaattatctacggtaaaacggaaacccgggcgctgccccataccggtcagcggctgcgggtggggggctacgttcagccgggctccctgcagcgcgacccgcaaactctcgacgtgcgctttaagctgtatgacgcccgcggggtggtggacgtcagctataagggcattctgccggacctgtttcgtgaagggcagggcgtggtggcccagggcgtgctggacggcgagcggcatattaccgcccagcaggtgctggccaaacatgatgaaaattacacgccgccggaggtgaaaaacgccatgacgccggagaaaacgggggcgcagccatga

SEQ ID NO: 214140 - DNA, 231 bp, Klebsiella pneumoniae
atgagccccgccttttcgtctttcgccgccttcctgaatatgggcggctatgccgtgtacgtctggctggcggtggccgtggccgtcgccgcttttggcctgctgacggtgcataccctgtgggcgcggcgggcgctgttccatgaggtgcgacgccagcaggcgcgcgagcggcggatcgctgccgcccgcgaacatgacaaggaggccgcggatgcaagcgcgtcgtaa

SEQ ID NO: 214141 - DNA, 738 bp, Klebsiella pneumoniae
atgtggaaagcgttacatcaactggcgatccccgagcggctgtaccgcctgtgcggatgctggatcccctggctggcggcgttgagcgcgctgttgctggtcatcggcctggggtggggctttggcttcgcccccgcggactatcagcagggggaaagctaccggatcatgtaccttcacgtcccggcggcgatgtggtcgatggggctgtacctggcgatggccgtcgcggccttcgtcggggtggtctggcagatcaaaatggccgacctggcgatcgccgccctggcgccggtgggggcggtctgcaccctggtggcgctggtcagcggcgcggcatggggcaagccgatgtgggggacctggtggatctgggatgcccgtctgacctcggagctggtgctgctgtttctgtatgccggggtcatcgccctgtggcacgcctttgacgaccgccggctggccgggcgcgcggcggggatccttgtgctggtcggggtggtcaatctgcccatcattcattactcggtctactggtggaacaccctgcaccagggctcgaccaacctgcagcaaaccatcgacccaagcatgcgtctgccgctgcggatctgcatctttgccttcctcacgctgtcggtcaccctgaccctgatgcgcctgcgtaacctgatcctgcaactggagcgccgtcgaccgtgggtggtggcgctggtgaataaaggagccgcccgatga

SEQ ID NO: 214142 - DNA, 660 bp, Klebsiella pneumoniae
atgatgcgtgcgctgttggcccgggaactgcgcctggcgtggcgcagcggggcggagatcctcaatccgctctggttctttctgatcgtcatcaccctgtttccgttcggcgtcggcgccgcgccgcagctgctggcgcagattgcgccgggcgtggtgtgggtcgccgcgctgctggcggcgctgctggtgatggatcggttgtttcgcgacgactggcaggacggttccctggagcaactgatgctcctgccgacgccgctggtggcggtggtgctggtgaaggtggttgcccactggatgatgagcggcctgccgctgctgatcgtctcgccgctggcggcgctgctgctggggatgagtctgcatgacgccggtgtgctggcgctgaccttgctgctcggcaccccgacgctcagttttctcggcgcggtgggggttggcctgacggtcggcctgaagcgcggcggcgtcctgctgagcctgctggtgctgccgctggcggtgccgctgctgattttcgccaccgcggcctgccaggcggcggccgccgggctcccggtcggcggctatctggcgatgctggcggcgttcttaaccgccagcgccaccctgtgtccgttcgccaccgccgctgcgctgcggctgaccgtgcgataa

SEQ ID NO: 214143 - DNA, 624 bp, Klebsiella pneumoniae
atgctgcatgcagagcgactgacctgcatcgttgacgatcgaccgctgtttgcggcgctgacgctgtccctcgctgccggcgagttgctgcaggtcgccggtgataacggcgcggggaaaacctcgctgctgcggatcctctgcggcctggcgcgcccggaaagcggggtggtgagctggcagggccagccgctggcgaaggtccgggagtcatttcaccgtcagctgctgtggctgggccataaacccggcgttaacgcggcgctgaccgccgatgaaaacctgcgtttcttctttccggccagccgccttcagcagcgggaaagcgccctcgccgccgtcggcctggcgggctatgaagatctccccttaagccagctctccgccgggcagcagcgccgggtggcgctcacccgcctgtggttaaccgacgcgccgctgtggatcctcgatgagccgttcaccgccctcgacgccacggcgatggaaaccctgacccgtcgcctggagcagcacgcccggcaggggggatgcgccatcctcaccacccaccagccgctgcggccgctgggctgtccgttgcgcaccctgcgcctcggcggcgacgctggaggcgggcaatga

SEQ ID NO: 214144 - DNA, 1341 bp, Klebsiella pneumoniae
atgatgaaaatgcaatggttatcggccctggtgcttggggcattgagctgcgcggccttcgccgaagaggcgcctgcggacagcaatctgattaagcagggggagtatctggcgcgggcgggggactgtgtcgcctgccacaccaacggcaaagcggggaaacctttcgccggcggtttgccgatggagacgccgatcggcaccatctactccaccaatatcacgccggataaagaacacggcatcggcgggtacaccttcgaagagttcgacgacgcggtgcgcaagggcgtgcggaaagacggttccacgctctatccggcgatgccgtatccctcgttcgcgcggatcagcgaagcggacatgcgcgccatgtacgcctactttatgcacggcgtggagccggtgaatgtcgccaacaaggacaccgacatcccatggccgctgtcgatgcgctggccgctggcgttctggcgcggcatcttcgccccgacgccgagcgactttgtcgccaacccgcaggttgacccggtgctcgagcgcggccgctatctggtggaaggcctgggccactgcggcgcctgtcataccccgcgtagcctgacgatgcaggaaaaagcgctcagcgaaagcgaaggcgatgattacctggcgggcagcaatgcgccgattgacggctgggtcgcctccagcctgcgcggcgaaaaccgcgacggtctggggacctggagcgaagccgagctggccgagttcctcaaaaccggacgcaacgataaatcggtggtcttcggcggcatgagcgatgtggtggagcatagtctgcagtatctctctgatgacgacatcaccgccatcgcccgctacctgaagtcgctcccgccgcgcggcggcaaacagaccccagccccggtggaagacagcgtggcgaaagatctgtggaagggtaacgacagtaaaaccggcgccgcgctgtacgtcgataactgcgccgcctgccaccgtaccgacggcgcgggctataaacgcgccttcccgtcgctgaagggcaacccggtggtacagaccgaagatgccacttcgcttatccacatcgttctgaccgggagcaccacgccggcggtgaaagatgcggtctccaacctgaccatgccgtcgttcggctggcgcctggacgaccagcaggtggcggatgtggtcaatttcatccgcaccagctggggcaacaacgcgccggcggtcagcgccagcgatgtggcgaaggtgcgtaaggagactgcggcgcacgatgagaaggcgttaggcaacgccgatatctcgaagctgccgggggccggacagtaa

SEQ ID NO: 214145 - DNA, 1785 bp, Klebsiella pneumoniae
atggccaccgtattgaaaaaaaccgatgtcgcgatcgtcggcttcggctgggttggggcgatcatggccaaagagctgaccgaagcggggctcaacgtcgtcgcgctggagcgcggcccgatgcgcgacacctggccggacggcgcctatccgcaggtgattgatgagctgacctacaacatccgccgcaagctgttccaggatctgtcgaaaagcaccgtcaccatccggcataacaccagccagcaggcggtgccctatcgccagctggcggccttcctgccgggtaccggcgtgggcggcgccgggctgcactggtccggcgtccatttccgcgtcgatcccattgagctgcggatgcgcagccactatgaagaacgctacggcaaaaacttcatcccccaggatatgatcatccaggatttcggcgtcacctacgacgagctggaaccgttcttcgataaagcggaaaaagtattcggtacctccgggaccgcctggtcgatcaaaggcaaggtcgtcggcaaaggccgcggcggcaacgccttcgccccggaccgctcggacgacttcccgctgccggcgcagaaaaacacctggtcggcgcaactgtttgaaaaagcggcgctggaagtggggtatcacccctataacctgccgtcggccaacacctccgactcctataccaacccctacggcgcgcagatgggcccgtgcaacttctgcggtttctgcagcggctacgcctgctacatgtactctaaagcctcgccgaacgtgaacattctgccggcgctgcgccaggaaaaacgctttgagctgcggaccaacgccaacgtgctgaaggtcaacctgaccgacgacaaatcccgcgccaccggcgtgacctacgtcgacggccaggggcgcgaaatggaacagccggcggacctggtgattatcggcgccttccagttccacaacgtgcacctgatgctgctctccgggatcggcaaaccgtacaatccggagaccggcgaaggggtggtggggcgtaacttcgcctaccagaacatgaccaccatcaaggccattttcgacaaagacacctataccaacccgtttatcggcgcgggcggcaacggcgtcggggtcgacgacttcaacgccgacaacttcgaccacggcgcggcgggctttgtcggcggttcgccattctgggtcaaccaggccgggaccaagcccatctccggtttcccggtaccgccgggcaccccggcgtggggcagcaagtggaaagcggcggtggccgatacctacacccatcacctgtcgatggatgcccacggcgcgcaccagtcctatcggcagaactacctcgatcttgatccgaactacaaaaacgtcttcggccagccgctgctgcgcatgaccttcgactggcaggaaaacgacatcaagatggcgcagtttatgttcgataagatggcgccgatcgccaaagcgatgaagccgaaatatatcctcggcagcccaaaaaacgccaacagccactttgataccaccacctaccagaccacccatatgaacggtggggcggtgatgggggaagatccgaaaaccagcgccgttaaccgttatctgcaaagctgggacgtgcataacgtcttcgtcatcggcgcctccgcgttcccgcaggggctgggctacaacccaaccggcacggtggccgcgctggcctactggtcagcgaaggcgatccgtgagcagtatctgaaaaatccgggtcccctggtgcaggcataa

SEQ ID NO: 214146 - DNA, 756 bp, Klebsiella pneumoniae
atgatgtcgagcgagaaaaccaacaattccaggcgtgatttcctggttaaatcgatggcgctgatcccgacggtggtgatcggcggcgcgggagcaggggctattggcgtggccaccagcgcgaccgcgcaggcggcccccgcttcagagccagcctccgggaacaccgcgacggccagcgactggaagccgcagttcttcaacgatcgtgagtgggcgtttatcaacgccgccgtcgctcgcttaatcccggcggatgaactcggtcccggcgccaaagaggccggcgtcccggagtttatcgaccgccagctcaataccccttacgccaccggctccatctggtatatgcaggggcccttcaatcccgacgtgccgaaagagatgggttatcagctgccgctggtgcccaaacagatctataacctcgggatcgccgacgccgaggcgtggtgtcaggacaaatatcataaaaccttcgctgaactgagcagcgagcagcaggacgaggcgctcggcctgtgggaatcgggtaaagccgagttcaaacagctgccggcctcgctgttcttcacctatctgctgcaaaacacccgcgaagggttcttcagcgacccgatccatggcggcaataaaggcatggtcggctggacgctgattaattttcccggcgcgcgcgccgactttatggactgggttgaacggggcgaacgctaccccttcccgccggtatcaattaatggggagagggcgtaa

SEQ ID NO: 214147 - DNA, 372 bp, Klebsiella pneumoniae
atgttcgatcatgtgaaattcggcgttagcgactatgccgccagcaaagcgttctttttgcaggccctggccccgcttggcgtaacgctggtcggcgaaggcgaaccgagctacggcgcagagctggccggcagcggcgatgcttctctatgcctctatcaaagtgcggaaaaaccggcgccgctgcacattgcctttcgcgccgacagccgcgagcaggtcgatgccttctggcaggcggcgctggccgccggaggaaaggacaacggtgcgccggggctacggccaaactaccacgccagttactacgccgcgtttgtgattgcgccagacgggcacaatattgaagccgtgtgccatctggcggggtaa

SEQ ID NO: 214148 - DNA, 1071 bp, Klebsiella pneumoniae
atgattgagttatcggtagaaaatctgcatctcacctatggcgacaacccggtgttgaagggggtgtccatgacgctcggccggggggaggtagtatcgctgctggggccttcgggaagcgggaaaaccacgctgctgcgggcggtggccgggctggaaaaaccgacgagcggacggatcgccatcggcaaccgcacggtgtacgacggcacgccgcgcagcgagatcccggccgaagagcgtaacctcggcctggtgttccagtcctatgccctgtggccgcacaaaacggtgttcgacaatgtggcctatccgctgaagctgcgtaaagtggccgccggggagataaaagagcgggtgcagcgtgtgctggatcagctggggctggggcaccttggcaaccgccatccgcaccagctctccggtggccagcagcagcgggtggccatcggccgggcgctggtttacaacccgccggtgatcctgctggatgaaccgctctccaaccttgacgccaagctgcgcgaagaggcgcgggtgtttctgcgcgagctgatcattaagctgggcctctcggcgctaatggtcacccacgatcagaatgaagcaatggccatctccgatcgtattctgctgctgaacaatggcgtcattgagcagcaggggacgccgcaggagatgtacggcagcccggcgacgctgttcgccgctgagtttatgggcagcaataaccgcctgcacggcaaagtgatggcgctggagaacggcagggcgcggatcgaaggcgccagctggagcctgtgggggcgagcgggcgagggggttagcgttggcgagccggcgacggcggtgatccgcgtcgagcgcctgcgacttgacggcgccgcgcaggataacagcctccagctaccgctgctgaccagcatgtacctcggcgaccgctgggagtacctgttccgtaccgaaggcgacgactttccgctgcgcgcctacggaacggcgctgcgcgatgccgaacactgccatctgacgctcccggcggaggatgtgtggatttttccgcagcggtag

SEQ ID NO: 214149 - DNA, 1770 bp, Klebsiella pneumoniae
atgaacgtattacgcagaaagtggcaggggctgccgcgcggcgtggtggtgtgcatcacggcgctggtgatttatgtcccgctgttatttattgtggtgcagagttttctttcggcaccgttcttttcccgctccaaatcgtggagtctggaagccttcgcctttatttttaccgacccggatttttatctggcattaaggtcaggttttattctggcctttggcctggtgattatcgccattccgctgggcggtattttggcgtttctgatggtgcgcaccgatttacccggccggcggatcattgagccgctgatcctggtgccgatcttcgtctcgccgatggtgctgggctttggctacgtggtggccgccgggccggtaggcttcttttcccagtgggcgcagcagctgatcggctttgtgccgtggaatatctactcgatgttcagcattgtggtcatcgccggcttaactcacgttccgcatgcctatctctatatctcttcggcgctgcgcagcgtcggctccgacgtggaagaggcggcgcgcaccgtcggcgccacgccgctgcaggtgatgacctcggtgagtctgccgatggtgcggccatccattctttacgcctgcgtgttgctctttttcctcggtctggaagtcttcggtctgatgctggtgctgggcgaccccgagggcaacatggtgctggcgacctatctctacaagctgactaacaagctcggcaccccctcctaccatctgatggcggcggtggcggtggtgctgatctgcatcaccatcccgctggtgatgctccagcggcggctgatgcgcaccgccaaccgctttgtcaccatgaagggcaaggcgtcccaggcgcgggcgctgccgctgggcaaatggcgctgggtcgccggagcggtggtggtggcctggctgacggtgaccatcggcgtaccgctgctcggcgtggcgctgcgcgcttttatatccaactggggcgtcggcgtgtcgctgtgggatgagctgtcgctggcgacgttccacaatatctggcagcagcccaacctgctgcgggcgatcgtcaactccatggctatcggcatcatcggcggcgcgctggcggtgatctgctatctgtttgtcggcatcgccatgcaccgcaaagcggacaacgtcacccgctttctcgactacagcgtgctggtcccgcgcgcggtaccggggctgctggccggcctggccttcctgtgggtattcctgtttgtgccgatgtggctcgatcagtcgctgaagcacggctggctctcggcgctgccggtggccgactggctgcgggagcaccttatcgtgcagctgcgcgccctgcgcaacaccatcttcagcgtctggctggcctacaccgtggtgtggatggcctacggcctgcggctcatctcctcgacgctgctgcaggtgggcccggagctggaggaggcggcgcgtagcaccggcgcctcgcgggggcagatcacccgccacgtgaccgttccgctgtcgcgctatgggctgattggctcctggctgctgatgttcctgatctttgagcgcgagtattccactggcgtctatctgctgtcgccgggtaccgaaaccatcggctcgatgctggtgtcgctgtgggcggcgggggccatcgatatcgtcgcggcgctctcctttatcaatattctgctggtggtgattggcctgggtatcgccctgcgctttggagtgaaattacatgattga

SEQ ID NO: 214150 - DNA, 1089 bp, Klebsiella pneumoniae
atgtataagaaaataagtggtttagtggtttcactgacggccgttttcgcctgtgccgcctgggcggaggtgcctgcgggctatcccgcggattatcaaaaaacgattgatgccgccgtaaaagagggcaaggtggtgatctattccacgaccgataccaaagcggccgggccgttaattaagggatttgaagcgcaatacccgggtgtaaaagtcgaatataacgacatgaacagtactgagctgtataaccgctatatcagcgaacaggccgccgggggcggcagcggggatgtggtgtggagctcatcgatggataccgcgctgaaattagccaccgaatacgccgaacaatatgcctcgccggaggtgaagcaattacccgactgggcggtctggcagcaaaaagcctatggcactacctatgagccggtggtgtttatctataacaaacggctgatcccgcagaatgaggttccggattcgcataccgcgctggcaaaacttatcgccagccaggccgataaatttaaaggcaaagtcaccacctacgatatcgaaaaatcgggcctcggctttatgctggcggtacaggacagccaggccgacgcgaactattttgccgacctggcgaatatcgccaaaggcggcctgacggtgcagtcttccaccggcacaatgatggagcgcgtctcctccggcgaaaacctgatcggctataacattcttggctcttatgccgaagcgcgggcgaaaaacgatccctctttaggtattgcctatcagaaagattacgtgctggtgctctcccgcgtctcgtttattagccaggagagcgaacatcccaacgcggcgaaattgtggctggattatgtcctgtcggaaaaaggccagcagatcctcgccagccaggcggatattccctctattcgtcgcgatattgcaggtaaaaatgatatcgacggcatgaccgcgctgctgggcaaagcgttaaaaccgatcccggtcaacgaaacgctgctcgattatttacagccgcaaaaacgtctgcagtttattaaacaatggcgcagcgccgccgcgaaataa

SEQ ID NO: 214151 - DNA, 1080 bp, Klebsiella pneumoniae
gtgcctacaggacaccgctttctggcgacggatctgcatcagtttgtcgtctcactgtttacccatctcggcagtaccccaggggaagccaccctcgtcgcggaccatctgatcgccgccaatcttgccgggcatgactcccacggcgtcgggatgatccccagctacgtcaaatcccacgccggtggttttctgcagctcaaccgccacgccacggtgaccaaagacgccggcgccgtggtcaccctcgacggcaacgccggcttcggccaggtggtcgcccacgaagcgatgcagttaggcattgaaaaggcgaagcagcatggtatggcggctatcgccctgcgcaatgcgcatcacgtcggtcgcatcggctactgggccgaacagtgcgccgccgccgggctgatctccattcacttcgtcagcgtcatcggcgacccgatggtcgccccgttccgcgggaaggacagccgcttcggcaccaacccgctgtgcgtggtgtttccccgcgcgggccatccgccgctgctgctggactacgccaccagcgccatcgcctttggtaaaacccgcgtcgcctggcataaaggcgaagccgtggcccccggctgcctgattgacgccgagggtcgacccactaccgacccggcggtgatgcagacctcgccgctgggcgccctgctcaccttcgcccagcacaaaggctatgccctggcgacgctgtgcgaagtgctcggcggcgcgctctccggcgggcaaaccacccatcaggagagcctgcagaccagcgtcgacgccatctttaactgcatgaccacggtgatcctgcgcccggacgcgttcgatgccccggacagccaggcgcagacggaggcctttatcgcatggtgtaagcagtcgccgcacgatgccgatgccccggtgctggcgcccggcgaatgggaggccgccaaccgcgaagcgcggctggcgcaggggatcccgctggatgccggcagctggcaggctatctgcgccgccgcgcgcgacgtcggcctgagcgaatcgcacttcgaccgctgccgccctctcgcctag

SEQ ID NO: 214152 - DNA, 2151 bp, Klebsiella pneumoniae
atgaaaaaaatcacgagcgtgtgcccctactgcggggcgggttgcaaacttaaactggttgtcgacaacaataaaatcattcgcgcggaagccgccgacggcgtcaccaaccagaaccagctgtgtctgaaaggctactacggctgggattttcttaacgatacgcagctcctgacgccccgtctcaaacaaccgatgatccgctaccagaaaggcggcgccttcacgccggtcagctggcaggaggcgattcgctataccgccagcaagctcagggagatcaaagagaagcatggcccgcgcgccatcatgaccaccggctcctcgcgcggcaccggcaacgaaaccaactatgtgatgcaaaagttcgcccgcgcggtgctcaacaccaataacgtcgactgctgcgcccgcgtctgccacggcccctctgtcgccgggctgcagcaggcgctgggcaacggggcgatgagcaactcgatcagcgacatcgaaaactcgaaatgcctgctggtctttggctacaactgcgccgactcccatccaatcgtcgcccgccgggtgatcaaagcccgggaaaacggcgccaaaatcatcgtctgcgatccgcggcgcattgaaaccgcgcgcattgccgaccgtcatctgcagctcaacaacggcagcaacatggcgctggtgaatgccttcggctatgtactgctggaggaggagctgtacaacaaagcctatgtcgaacgctataccgaagggctggatgcttaccgcgaagcggtgaaggattacgccccggaagcggtggaagggattgtcggggtcagcgcgcgggaaatccgggaggcgatgcgcatgttcgccgccgccccttccgccactattatgtggggcatgggcgtcacccagtttggccaggcggtggacgtggtgcgcggtctggcaagcctggcgctgctcaccggcaacctggggcgggcgaacgtcggcgtggggccggtccgcgggcaaaacaacgtgcagggcgcctgcgatatgggcgtgctgccgaacctgttcccgggttatcaggaggtcaccgaccccgccgtgcgggagaaattcgccgccgcctggggtgtcgacccggcgctgatggatgaccaggtcggcacccgcatcaccgaggtgccgcataaagcgctgactggcgagatcaaagcctactacatcatgggtgaagatccgctgcagactgaagccgacctcggcctggtgcgcaaaggcatcgaggcgctggactttgtggtggtgcaggacatcttcatgaccaaaacggcggaaattgccgatgtcctgctgccggccacctcctggggcgagcacggcggcgtattcacctgcgccgaccgtgggttccagcggtttgaacaggcgatccctccggcggggaatgtgaagcgcgactgggagatcattagcctgctggccagcgaaatgggttatccgatgcactatgagaacaaccagcagatctgggacgagatgcgcgaactctgcccgctgttctacggcgtgacctgggagaaaatgggcgatatgggccatgtccagtggccatgcccgaccctcgaccaccccggcacgccgtggctgtataaagacaaccgcttcgataccccatcgggcaaaggacagctgttcgccaccgcctggcgcgcgccggcggagcgcccggatgacgagtggccgctggtgctctgcaccgtgcgggaagtcgggcattattcctgccgctcgatgaccggcaactgcgccgcgctgcagtcgctggccgacgagccgggacgggtgcagatgaatcccgcggatgcgcaacgactggggatcgccgacaaacagctggtgtgggtcagctcccggcgcgggaaggtgatctcccgcgccgacctcagcgatcgcatcaatccgggggcggtctatatgacctatcagtggtgggtgggcgcctgcaatgagctgacccaggataacctcgatccgatctccaaaacgccggaaaccaaatactgtgcggtgaaagtggaagcgattgccgaccagcaatgggcggagcgctatgcctggacggcctacagcgacatgaaagcgcgactgaaagccgctgccgacgtctga

SEQ ID NO: 214153 - DNA, 1158 bp, Klebsiella pneumoniae
atggccgtatcgccgtcactgatcgccgaagccgttggctggcgacgtgaatttcacgccgcgcctgagctcggatatcaggaacaggagacctcgcgccgcgttgcggagctgctggcctcgtttgggctgcaggtgcaccgcgggctggccggcaccggcgtcgtggcgacgctggagaacggccccgggccggttatcggcctgcgcgccgatatggacgccctgccgatcaccgagctggggagcgtcagctaccgttcacgccgtcccggggtgatgcacgcctgcggccacgatggccataccgcgatgctgctggcggccgccgcccatctggcgcagacccgccatttcagcggcaccgtccactttgtctttcagccggcggaagagaacctcggcggcgcgcgcaaaatggttgaagaggggttgtttgagcgcttcccgatggacgccatctacgcgctgcataactggccggggatccctcttggcgaagtggcgctcagcgatggcgcgatgatggcctcgctggacgccttcgagatcaccctgcgcggaaagagctgtcatgcggcgatgccggagagcggggccgatccgatcgtcgcggcggcgcagctgataatggcgctgcagaccattccttcccgccgcttgtcgccgcaggattccgcggtggtcagcatcacccagataaacggcggcgaggcgatcaacgtcctgccggacaccgtggtgctgcgcggtaccttccgctgtctgagcaatcgcgttcgcgcccgcgtgcgggagcttatcgagcgctatgtggcgacccagccgcaggtgtccgatgtgcagggcgagattagctggttcccgggttatccggtgaccaaaaaccatgcgctgcaggcgcagcaggtgcgcgaggtggctgccgccactctcggcgcgcaagcggtgcgctggaatcaggcgccgtcgatggcctccgaagattttgcctgcatgctggaggcctgtccgggggcctatttctggataggcaccgacggcgaaaccccgtcgaagccgctgcataacgccagctatgactttaacgatgcgctgatcggccccggcgtcgccatgtgggtggggctggtggagaaacagctgccggcggcgtaa

SEQ ID NO: 214154 - DNA, 1200 bp, Klebsiella pneumoniae
atgtttaacccagaccagaatcgtcttgcccccacgctggcgatgatcatggccgcgtcgcttgtgggatttatcaccggctatacggtgccgttaatcagtcttgagctggcgcagcagcagatcgcgccgctgtacgtcggcctgctggccgccctgccgcccgccggcatgatgatctcctctttcctctctcctgcgctgtgccggcgcgttgaaatgggcgtgctgctgagcggcagtctgatcctgctggcgctggcgaccatcgcctcatgcatgactaccgatatgacgctgcttttgctgccgcgcctgctgaccggcctggcctccggggtcattatcgtactcggcgaaagctggatcaccggcggcgcggcgggcagccagcgcgctaccctcaccggtctctacgcctcggcctttaccggctgccagctggccgggccgctgctgatctccgtcggccccgcctggcagacctcagcgctgatagcgattgtcgcggtcaccgccgtctgcctgttgatgctgcgccatctgcccaccggcactcgtgaaagcctcggggagcgcgccagctggcgcagcctcggcgcctttctgccggtactggcctccggggtcttctgcttcgccttctttgacgccagcatcctcgccctgctgccgctgtacggcatggacaaagggctgaatgaagggctggcggtgctgctggtcaccgtggtgctgaccggagatgcgatgttccagaccccgctcggctggctggccgaccgggtcgggattcgccgcgtgcatctgagctgcgcggtggttttcagcctgtcgctgctggccctgccgctgatgctcggctcgcgcattcagctgatggccatttgtctgctgctgggcgccgcggcgggcgcgctttataccctgtcgctggtgcgggcggggaaaaccttcaatgggcagaagctgattatgattaacgccctgttcggctttttctggtccgccggcagcgttgccgggccggtagtcagcggcatgctgatcggcatcaccggttacgatggcctgatcgtcaccctggtggccagcggcgtactgttcctgttgattcagtgtctgtgcaaaaacgagaaaaccctgcttgccagtgagcaggaagatgacatggacgaggcgacggagtccgcacggtag

SEQ ID NO: 214155 - DNA, 435 bp, Klebsiella pneumoniae
atggaaagtaataccttacatcgtggcagattgatcgatcatattctgctggttgtcgaagactttgaggcaagcaaaaacttctataccgccgtactgtcggcgctggagatcccggttatcaccaccgccaatgaatacttgctggccgacgaactggtggtggcctcacgccacagcccggaggctgccgggaaactgactgggcgccaccacctggcattccaggccagagatcgtgacatggtcgacgctttttaccatgcggcgctgacccattgcggacgtgataacggcgcgcctggcgaacgacactatcatcctggttactatgccgcttttgtgctggacccgcaggggaataatattgaggcggtctaccatggcaaggctgagcgcagcgccgggtctgttgcgatcagcttcacgcagtaa

SEQ ID NO: 214156 - DNA, 1233 bp, Klebsiella pneumoniae
atgaaattagcgttgggaccgtacatccgttttagcagaatcttgttatttccgctggcgatggttatctatgatttttctgcttatctgactaccgatctcattcagccgggtattatccacatcatccgggaatttgaggctgatgttgcgttagccccggcctctgtcagcctctatttagccggggggctggcattacagtggctgctggggccgctctccgaccgcattggtcgccgccccgtactactgaccggagccatcatctttgctttggcctgcttcagcatgatctttgtcacgtcgattgatcaatatcttatcgcccgttttatccagggaaccagtatctgcttcatttcgacagtcggttatgtctccatccaggaggcttttgatgaaaaagagtctatccgcattatggcggcgctgacatccatcgttttgctggcgccggtaatcgggcccctggcgggcgctggcctgatgaatttcctgcactggaagttattgtttgcgatcatcggcgccatgagcttgctggcctgggcgttactgatttttaacatgccagaaacggtcacctctcagggccgggggtttcgtccgggagaggtattttccgagtttgtccgcgcctttaaacagccggtggtgctcacgggcgcgctggcgttgtcattcagtaacctgccgataatcacctgggtagcactctctccggtgatcctgatcgatgacggcgggatgtcgcgcggcgcctatgcctggacccaggtgcctgtctttggcggcgttattattgccagcatcatcgtggcccgttttatcaaggatccgacctctccccgctttatctggcgcactatcccgatacagctgaccgggttgttggtattactggcgggaaatattgcatggccccatacctggtggtggtccgtttcaggaacaagtctctatgccctcggaacaggcctgttgttccccgtattattccgttttgcgcttttttcccactccctgccgaaagggacggtttcagccaccatcaacattgtggcgctcagttttatggcggcctcggtggaagtagcgcgctgggtttacttccaggctggcggcagaatagcctttcactgcctggcgctgatagcgggaatcgtcgtcatcatgctggtctcgcgcttgttaaaactccgtcagcaacatctccttcagccagcctga

SEQ ID NO: 214157 - DNA, 393 bp, Klebsiella pneumoniae
atgttttcatacattatgctgggaacgaacgatctgccacgcgccatcaagttctatgacccgttaatggcgctgctggggcacgtcaaagccggccgtaacgaacagggggcgtcctggggcaccttcaacggcaatcacacctgcgggctgtgcgtgggtgttccttttgaccagcagcctgccggggtgggtaatggaacgatggtggcgcttaacgcccgctccgtcgcacatattgcggaactgcatgccctcgccctgcaactcggcggacgtgacgaaggcggtcccggtcaccggccgcagtatggcgacggttttcacagcgcctacgtccgcgatcccgacggcaataagctggcgtttgtttactatgcgtctgcagattga

SEQ ID NO: 214158 - DNA, 615 bp, Klebsiella pneumoniae
atgacagttacatggacggtcacgcccgtggggtatcagcacattgccaaacgctgccccgcctgcaatgtgaaacgcgacttcgcgccttccggcgccatccgggtgaattcgcaaaagaagctgctggatatctggagcatctataaatgcacgcgctgcgattacacctggaatatcgccctgttttccaggctgcacgtcagcaagataaaccgtgaactgcttcagcgcctgctgcagaacgatgcagccatggttcactattatgccgctgacctcgcgacgctgaagcgcaaccgcgccgagccgtcggggcaacctgattttcgtattcacgagcaatggtcggttacgttgatggcatgtcagcggataacggtgcgcgtcagagtcagtcagccatttcgcatcagcctgctatcaatactgaaaaaacagctcaagctgagtacggctgaaatccggtggttggtcgcgacagggcatatcgagggtattccactaaaacagctcaagacgaaaaagctgaaggcgatggaatatgattttcagctggcggcggaaacgctgtatgcgcgacgccggattacgttatcactttgcggtagataa

SEQ ID NO: 214159 - DNA, 723 bp, Klebsiella pneumoniae
gtgattcacattaataacttacataagcgcttcggcgacagccatgtgctgcgcggcatcagctgcgatattaaaccgcaggaagtggtgtgcatcatcggcccgtccggctcggggaaaagcaccttcctgcgctgcatgaacgccctggagacggtcagcgaaggcgaggtggtggttaacggctttgccgcccacgaccggaccaccgacctcaacaagatgcgcgaaagcgtcggcatggtgttccagcgctttaacctgttcccgcacatgacggtgctggaaaacctgatcatggcgccgatgaatctgcgcaatatgccgcgccagcaggcggtcgacctggcggaagccttgctggcgaaggtgggcttaagcgataagcgcgacgcctggccctcgagcctgtccggcggccagcagcagcgggtagccatcgcccgcgcgctggcgatgaagccgtcgataatgctgttcgatgagcccacttcggcgctggatccggagctggtgggcgacgtgctggaggtgatgaaaaacctcgccagcgaggggatgaccatggtgatcgtgacccacgaaatgggctttgcccgcgaagtggccgaccgggtgatcttcatcgaccagggcgtgattcaggaagagggcaagccggggcagatctttagcgcgccgagcaacccacgcaccgccgcgttcctcagcaaggtgctgtaa

SEQ ID NO: 214160 - DNA, 765 bp, Klebsiella pneumoniae
atgacgggattccgttgggagatcatcgaggagtacggcccgctgtttgtggacggcgccctgatgacgattaaatgtaccattatctgcgtgatcctcgggacgctgtgggggttaactctcggtctcgggcggatggcgaaggccgagcacgggccgtggaaatatattctccgctacctggtgcagtttccggtgcgcttttacgtcagcgccttccgcggcacgccgctgttcgtgcagattatggtggtgcactttgcgctggtgccgctgtttatcaacccgcgcgacggcctgctggtgaccagcggcctgatgagcgccgactttgcccgcgagctgcgcgccagctacggggcgttcctctcctgcatcgtggcgatcacccttaacgccggggcctatgtgtcggagattttccgcgccggcatccagtcgatcgacaaagggcagatggaggcctcccgcgcgctgggcatgccgtggtggaaaaccatgcgcaaggtgatcctgccgcaggcgtttcgccgtattctgccgccgctgggcaataacgccatcgccattgtcaaagactcgtcgctggcctcggcgattggcctggccgatctggcctatgccgcgcgcaccgtctccggcgcctacgccacctactgggaaccctacctgaccatctctctggtctactgggtgatcaccttcctgctggcgcagctggttaaccgtctggaaaagaggtttggcaaaagtgattcacattaa

SEQ ID NO: 214161 - DNA, 768 bp, Klebsiella pneumoniae
atggtcaagaatttgctcaaagcgtgttgcatgatagccgcgctgacggctgccggacaggcggctgcggaaacctataccgtcggctccggcggcacctaccggccgtttgaatttgaaaacagccagaaacagctggaaggtttcgacatcgacatcatcaaagccatcgccaaagccgaaggctttgacgttaagctggtcaataccccatgggaaggcatcttcgccacgctgaacaccggcgaccgcgacatcatcatctccgggatcaccatcaccgataaacgcaaacagatggtcgatttctccgcgccgtacttcccggccgaacagtctatcgtcgtcgctcaggactcgcaggtggattcgctggcggccctgaaaaacgagaaggtcggggtggtgaactccagcaccggcgatatcgtggtttctgaggtgctgggtaaaaacagcaccgcgatcaagcgcttcgacaataccccgctgatgctccaggagctgtttgaggacggcgtcagcgccgcggtaggcgacgtcggggtagtgaagtactacatcaaacagcacccggagaagcagttcaagctggtgccggatgccaaatttgagcgtcagtatttcggtattgcggtggcgaaaggcaacagcgaactgctgggcaaaatcaacgccgggctgcaaaagatcgttgctgacgggacttacgccaaaatctataaaacctggttcgacgacaacgtgccgacgctgccagcgcaataa

SEQ ID NO: 214162 - DNA, 903 bp, Klebsiella pneumoniae
atgaaaagcgcggtaaaaaaagagaagggcaaagtcgatctgttcggcgaacgctatcgcgcccgggcgcaccagctctccccccggctgcgggcggtggtcagctatatcaacgacaaccgcgaggtggtgctggagcatacggcgatggagatcgccaccgcgacccagacctccgacgccacggtggtgcgtgccatccaggcgctgggcttcgccgggctgcgcgagcttaagcagaccatggagcgctggttcggcacctcggtcacctcggcggaaaagatgcgctcgacggttaccgcgctctccagcgacgtcaactccagtattgattttgtgcttgaaggccatcagcgggtgtgcgaggtcctgtcgcgggccgacaaccgcgcggcggtggctcaggcggtggcattgctcagcgacgcgcgccaggtggggatcttcggtatcggcgcctcggggatcctcgccgaatacaccgcccggttgttcagccgtattggcctgccggcgtacgtgatgaaccgcacgggctttagccttgccgaacagcttatcggcctgcagcgcggcgatgtgctgatcatgatggggcaaaaatccccccatcgcgaagggttgaccaccctgcgcgaggcgaagcggctgggtattccgaccatcctgctgacccaggcggtggactcgcgcttcagccaggaggcgcaggtggtgatcgacgtcccgcgcggcggggacagtagccggatgccgctgcacggtacggtgctggtctgtctcgagatgattgtcctgtcggtggcctctaccacgccacaaaaaacggtgaaatccctgaaacgaatcaacgatctgcatcgggctatcggtaaatccggcggtaaacggggccattga

SEQ ID NO: 214163 - DNA, 954 bp, Klebsiella pneumoniae
atgcgttggttcgtctcattgctgctgttgctgacgggggccgtcagcgccgccgccccacaaactcaaactttcaccgatgatttaggccgcaccgtcaccgtcccgctgcatccgcagcgcattgtttcgatgcacgatctcgatattaccattccgctgattgagctcggggcgccgccgatcgccagccacggccggacgcgcccggacggcagccactacctgcgatccagcgcccagctcaccggcgtcgatttcgacaacagcgatatccgctttattggcaccgccgatatcgatctggaagcggtagccgccgccaggccggatctgattatcaccgagcccagccgccacgtgtcagtggagcaactggagaagattgccccgacggtgagcatcgaccatctgcagggcagcgccccggagatttaccgcaagctggcgcagctgaccggcacccagccgcggctggcgatcctcgagcgccgctatcaggagcaaatcaagcagctgaaagcgatggtcaacccaccgcagtacagcgtctcagtgatccaggcgaacaacggcaaggtcacggtgcatcattcgtatcatgcgctgggccgggtgctgcgcgacgccgggttccgctttccgccgctgattgagcggatccccgatggtcagcgcattgacgtcagcgcggaacagctgccggagctggacgctgattttgtcttcgccacctggcggtcggataccggcggtaagccgcaggatgagctgcaggcgatggaaggcgtgatgcccggctggtgcgactttatgcgcgcctgccgcaccgggcactatattttgctgccgcgggaagaggtgatctctaactcctacgccgcgctgtccctgatggtggcccaggtgcagtcgcatattgccggcaggccgatcccggcggaggccaaatga

SEQ ID NO: 214164 - DNA, 1053 bp, Klebsiella pneumoniae
atgacgcgcgccgttcaccgggccggttttcggccgctggctttcgcctcccgccagctgctgctgcgcccggcggcgttaaaaattgccgccagcatagtgctgacgctgctggcgctggggctgtacagccttagccgcggcagctatccgctgcccgcgtcgacgctggcgcgggccctgctggcgccgcaggagatgggcgagcagccgcgctttattctgtttgatatccgcctgccgcggatcctgatggcgctgctgtgcggggccatgctggggctggccggcgcggcgatgcagagcatcacccgtaacgggctggccgacccggggctgatcggcgtcaaagagggggccagcatcgtggtcctggcgctggtgctgtttttcccggcggtaggcctggtctggcggccgctggcggggatggtcggcggcatagcggtggccctgctggtcctgacgctggcccgcgactgttcgcggccgcgctttattttaattggcatcggcgtctcctggagcctggcggccgcggtcggcatctttatgaccaccgccgacgtacgcgacgtgcagacggcgatgatctggctggcgggcagcctgcaggccgccacatggccgctgctggcggtggctttttgctgggcgctgcccggggccatcatcctgttctgtaccgcccgggcggcggacgtggcgctgctgggcgaccggaccgccatcggcctcggcgtacgtctgcagcagctgacggtgctgcgcttttttgcgccggtgctgctgacctcggccagcgtctcctgcgtcggcagcctgggttttgtgggcctgatggcgccgcatatggcgcgttttgtgctgcgcggcggccaggtatcgctgctgtgcggcagcgcgctgattggcgccttgctggtgctggcgaccgatacccttggccggctggcgtttgccccgctgcagatcccggcggggattgtcattgccctggtggggtgcccgttcttcgttatcttgctctggcgtcgccgtgatgccctttaa

SEQ ID NO: 214165 - DNA, 1014 bp, Klebsiella pneumoniae
atgagcgtggccatcctgctttccgcgcggcgtcgcccccgcccccggctggcgctgcttctgctaacgctgctgcttatcgccgcctcgctggtgcatcttggcttaggcgcccgctggatcgccccgcagacggtgctgcgagcgctgctggagtacgatccgcgcaactttgagcagcggattatcatcgatctgcgtctggtgcggctggcggcggcgctgctgaccggcgcggcgctcggcgtcgccgggctgctgctgcagacggtgatccgtaacccgcttggcgagccgcatattctcggcctcaacgccggcgcctcgctggcggtggtggcgacctcggcgctgggcctgtctctcggcgctttccccgtcgggcgcccgctgaccgccgcctgcggcgcggggctgctgttcggtggcgtgatggcgctggcctctgccgggcgcggcggggcgacgccgctgcgcatcacgttgtgcggagtggcgctgtcagggtttgcgtcggcggtgacggcggcgatattaattctcgatgaacagacgctgctggcgatgcgcacctggctggccggcgacctggccggactgaactggagcacgctgcagacggcgctgatcggccttggcgtcgcgctgctcattgccccacgcctcaacgtgctggcgctgggggataaggtggcgctgggccttggcgttaatctcgtccagacgcggctgctgggcctgctggcgattgcgctgctctgcggcgcggcggtggcggtggccgggccgatcggcttcgtcgggctggtggtgccgcacgtggtgcgccgtctggtgacggaagatatccgcctggcgctgcccctggccgcgccggtgggagcgctggcgctggtgctggcggatatcgccgcccggacactggtcgcgccgcaggagctggcgaccggggcgatgaccgccctggtgggcgcgccgttgtttatctttatcgccgcgaggttttttaaatga

SEQ ID NO: 214166 - DNA, 822 bp, Klebsiella pneumoniae
atgccacagcgggtgaaacctgcagagcaggggatcgtactggatgccctgtcggccggctacggccagaccctgatcgttgacgatatcaacctgaccattcccaccggcaaaatgacggtgctggccggggcgaacggatccggcaaatccacgctgctctcgaccatcgccagaatgctgaaaccgctcggcggctgtgtgcgtctggacgggcaagccattcaccagatgccgacgaaagccgtctcgcgccagctgggcatcctcccgcaatcgccgttgaccccggaaggattgaccgttttcgagctggtctcgcgcgggcgctacccgtggcaggggctgatgcgccagtggtccgaggccgatgagctggcggtagaggaggcactgcgcttaaccggtaccgccgaattcgcccatctgccggtggacagcctctccggcggccagcgtcagcgctgctggatcgccatggcgctggcccagcaaacggccaccattctgctcgatgagccgaccacctggctcgatctgcgctatcaggtcgatatccttgagctgctccagaccctcacccgcgaacatggccgcacggtggtgacggtgctccatgaccttaactttgcggtgaactacgccgatctgctggtattccttaaacaggggcgcatcgccggcacgattagcgacaacgacgtctgtagccctgagctgattaaacgcgtgtttgacgttgacgtgcagatgtcgattaacccgcaaaccggcaaacccttctttatgccgtttcgcgcccgccaggcagcggcacaatga

SEQ ID NO: 214167 - DNA, 2073 bp, Klebsiella pneumoniae
atggccgccgacaatcgcgcggcgaaaagtactaacgacgcggaagagaccatcaccgtagtggccgacggcgcgcagcaaagcgccaccagcggctatcagccgctcaactccgccaccgcgacgctaacctcgatgccgctgctggatattccccaggtggtcaataccgtcagcgatcgggttctcgaagatcagcacgccacctcactcgatgaggcgctgtataacgtcgctaacgtggtgcagaccaacacccttggcggtacccaggacgcctttacccgccgcggcttcggcgccaaccgcgacggctcgatcatgaccaacggcctgcgcaccgtgctgccgcgcagctttaacgccgccaccgaacgggtggaagtcctgaaggggcccgcctcgacgctgtacggtatcctcgaccccggcgggctgatcaacgtcatcactaaacggccggagcgacagttctccggttcggtttccgggacctccaccagctttggcggcggcaccggcagcgtcgacatcaccggccccatcgaaggcacgaatctggcgtaccgactgattggggaatatcagaatgaggattactggcgcaatttcggtaaaaacaaaagcagctttatcgccccttccctgacctggtttggcgagcgggcaacggtgaccgcgtcctattcgcaccgcgactacagcgccccctttgatcgcggcactatcttcgatctgaataccggccatgcggttaacgtcgatcgcaaaacccgcttcgatgaagcgtttaatattaccgatggctattccgatctcgctcagctcaacgccgagtatcgccttaacgacgcctggaccgcgcgcttcgactacagctacagccaggatcattacaacgataaccaggcgcgggtaatggcctatgattcggcgaccggcaacctcacccgccgggtcgatggtacccacggttcaacgcagaagatgcactccacccgcgccgacctgcagggcaacgtggtagtgggcggcttttataacgagctgctgaccggcgtcgcctatgagaattacgatctgctgcgcaccgatatgctgcgctgtaagaacgtcaaaggctttaacatctatcatccggtctacggcactctcgacacctgtaataccgtctccgcctccgacagcgaccagcggatcctgcaggagagctatgccgcatacgtgcaggacgcgctgtacctgaccgacaactggatcgccgtcgccggcgtgcgctaccagtactacacccagtacgccggtaaaggccgaccgtttaacgtcaataccgacagccgcgatgagaaatggacgccgaaagccggcctggtctacaaggtcacgccgaacgtctctctgttcgccaacgtcgcccagtcgtttatgccgcagtcgtcgatcgccagctatatcggcgagctgccgccggaagagtccacctcttacgaagtgggcgccaaatttgacctgttaaacggcattaccgccaatatcgcgctgtttgatattcataagcgtaacgtgctgtacaccgagagcattggcgatgagacggtggccaaaacggcgggcaaagtgcgttcccagggcgtggaagtggatctggcggggtccatcaccgataacctcagcgtgatcgccagctacggctacaccgacgccaaagtgctggaagatccggattacgccgggaaaccgctgccaaacgtaccgaaacataccggttcgctgttcctgacctatgacattcataacgtctataacagcaacaccctgaccgtcggcggcggcggccacgcggtcagcaagcgttccggcaccaacggcgcggattattatctgcaggggtatgcggtggcggatgtgtttgccgcctataagatgaagctgcagtatccggtgacactgcaggtgaatgtgaagaacctgtttgataagacctattacacttcctcgatcggcaccaataacctcggcaaccagattggcgacccgcgcgaagtgcagttcacggtgaagatggatttttaa

SEQ ID NO: 214168 - DNA, 1137 bp, Klebsiella pneumoniae
atgacagataaaactaagctggttgcgattgcacgaaccgatgacatgagcgctctggaagcactcaagctgttacggtttcgccgttacaatacggcaagaagtcagttaagggtcacgagtgtctggtctgcatggtgcgccaggcacggcctgaccccctttcccgtcacagcagttgatgtcgagcgctatattaatgggctgaatggatccgttaaaatggcgaccatctctcattttattgcatgcctttcaagcgtaaacagcagcctgggttttccagacttccgcaacgttctgataaaagcactggttcaggtatggcgggcgcgggagaatgagaaaaaaatcgtcaccggtcaggcccttccatttctaatatccgatctcaatattcttcgccggtcactgcataaaagcgacgacctgagagacatacgggaccttgtaatgatatgggttgggtttgaaaccctgctgcgtaacgtggaaattcgaaggattaaaaccggcgacctgaaatggcaaaatgacacgtcctgttaccttctggacgtcatgcggaccaagacaaacctttcaagtaacctgacatttcagctctcaccacaatgcagtcagcatatcagacagttgattgagactgtggaatacaccgatactgaaaccttcgggcaccgttttctttttcagcctgtgaacatccatacaaaccgatatttcccacccaccagcagtaagctatcacggggtaaatccatagacaggatgctggtcaaagcaggattcagtcaggggttactgacgcagctacaaaatgaatcaaaggtatcacgggaagatgttggtatgctgtcctctaattcactgaaccaggcatttgcacgcctctggaggattgccgggaaggtcggcgacagtaaccgacagtccgggcggtaccggacatggacaggacacagtgtgcgtgtggggggagccatagagctgtttaaagccgggtactccctggaaaagattaccgagatggggaactggtctgatccaaagatggtcttccgttatatccgtggatatcttgccagtgaaaaagccatggtaagctttatgcgtaatcatctggacgatatatag

SEQ ID NO: 214169 - DNA, 318 bp, Klebsiella pneumoniae
atgaataataaaagaacgattaccacgcgagagcagattaaaattaatggagaaattcgtgagagaacagcaacccatattgttacaggtgctcatgggtacgaaaccctttgcataagtggttatattgttgacacaaacgagatgggtgaggttatccataacagcgaaaaattagcggaagatatgttacctgttacttgtcctacatgcagggtcatttggtatcacacgcatgaatttacactcgatgattttgacagtctttcaggtaaaggagattttgttgtgacagatttgaaagaactgaatatctga

SEQ ID NO: 214170 - DNA, 324 bp, Klebsiella pneumoniae
atgacttacgcgattttcttgttagtaactgcagtttgtgcattcggtttaaattatctgacaaacaaaatatgtcccgccatggttgtgattaataagagtagaggctctaatgtacatgccttacggtgtatcacatcgttcctcctccttctggtaacactctggcttcctgtcaaaccagccgtgatcaatctggcagtagagtttgctgcactggtgaattttattgcatcagtcactctctataccgttgcaaatttaagggagaagcggagattaaaaaaacaaagaaaagaagaaaaagcagctaaaaaaggataa

SEQ ID NO: 214171 - DNA, 759 bp, Klebsiella pneumoniae
atgagccggattctaaccggtgtttgtgaagctgatccggccaggaggttatacaaagtggccgtcagccggggaaacacttttctgtctgcaaaagaacgtttccgcgtacaggtctgtttcaaaaatgccataacacatccagatgaagatcggctgctggccgagctgttgactgttcatcacttcctggctgacacctctattttatggtacatggagcaaaaaacttatgcttgctccacgacctgggccaccacgtccacctggctacctgatatctatcagcgtcaggccagcacacccaatgtggtaaagattatcaaatttatgcacgcccggtttcctggcctcaagacggttgtagaaacaaatgagcagggctatgaacaggcgcttaccagtgttgattttgagattccttactggccagtgctgccgaaatttgacgctgatataggaacgatacaagtaacgattagcgggatgatccgttacacagaaacgatgagcaataaaaattgtaaaagccctctcgacttaatgataaaaagttttaagtcagggttgatcccgatagagaaaatgccgttgagcaagaccgaaaggcttatgcctctggatatgaaagccataggtttgatattcacgcacgcaacatggccgaggtttcgttacatttttgtaccggacgaggcgggaataatgaaactggttaacgtggtcaaattaagattaaaacctctggaggaaaaatga

SEQ ID NO: 214172 - DNA, 960 bp, Klebsiella pneumoniae
atgaatactgactttgcacattacaacgaagagcaactacgcaaactcggtgagctgcacagtttactccgtcatagcgatatcggatcatcttaccttgccacgctcccggagccccgtagtgtggaggagttgaatcctccacaggaaatcaatgtgactcattcggtgcccgacgtagacaccctggtggatatttaccggcagcagcgggttgataaagtccatgtcagggatgaacattattcaaccaaaatcacccgaaaatatcccgggtttgttgtggttaaaaataatcatgacgaagtaatgtcgctggtgggtgaaatcaaccggcttcgcgacaaatttgctgatgctgtaaaaggtatcactcattaccaggactcacggtcagaaattctgcaccagatttacccgtggctggtgactttacaggtgtcccgcaatatccggatcgttacagacaaaattaggtccctgggattcacctggcaaatccctgtcattcataaattcacccgtctggaaacggtaatagaccgcctacgcagggagataactgagctccagccggatatcaatctgacaaaacaggatgtagagcggttgaaacatgagcggaccggagaaatcatgatgctatcgttgctgaatgatgaagtgtgtaatgacgatgaatcatcgagaaaatttcggcttatacgggaaagtaactttcctgctgttaacgtcaatatccggtacaccagtcctgatgatccgaatgacgttcatgggccgtacaaactcaacttccgcgcgcctttacctttaattttgttcagcgaaccggaccgatttaatccgttaaaaaattacgtaaagggtgaaaggcagaagcgcggcagttttaatgaaaaatatcgttctgtcctgccccgtatagggctggtggaagtcataaaggagtcgagatga

SEQ ID NO: 214173 - DNA, 408 bp, Klebsiella pneumoniae
atgagcaaagtgcattgtattagtggtattacctggaagaactacgatagcgcggctttcaaagtatatgccagcattggtgcggtattaagcattggcctgatcactgctaccgtaaggaactatgaaattctacaactgactgttccgtatacctggtatgtcttcttcactgtattttggctcttgttcccgtcctttacggtttctttccgtgagcaggaagggcgtttattcacctcgatgggcttttacgggttgaaactgatcacgctcgaccgtcctgtctccgatgggtactggctggtcacgatggagaaacaacgttatcgccttgtcagagtatgcagggatgggcgacgcctgcctgtatggctgacgtttaagtctttaccagagtttgtttaa

SEQ ID NO: 214174 - DNA, 465 bp, Klebsiella pneumoniae
atgagaaccagtaaattgaatatgattttaaaagaagaaatcgttttgggcatatacagctggcttcaaatgactccagtcagcatgctggtaaggaacataaccagcgatcagggcggggattacgcaatcgtccgctttaccgtcgatagccggggggttcagatggggcctaaggctcagggccagcttctctgttcattcggattcaatgttaaggaatcctgtgaggccgacacaaaagacggtccagccctcataaaggcagaaatgatgaacggcgttatgcagctggtaccggaatgcattgagctcactgacagccaaacccaggcaatcaggaaagaagtatccgtgtttaacagggtttgtgcaatgcaactccaggggggacatgggaattcaaggtcactgtgggagaaagaaattcttccccggatgaaaggctgcagacaactacattga

SEQ ID NO: 214175 - DNA, 243 bp, Klebsiella pneumoniae
atgaaactaaatgagacgtctggcgcatgtgatgatgtgcatctaaatacatttgtcatcgaccctgcaacagcccgacgttttgagtgcgttaaagagatggttcgtaagcaggggttcaataatatcacggagccagaaatcattgatgccatattgtctgaaataacaacagcagatgctgccggaatttttattgagtacaagttaaaaaccacaaaacctctgctttctacagattag

SEQ ID NO: 214176 - DNA, 609 bp, Klebsiella pneumoniae
atgagtaacccgtatgacctttcaatgtatgcattagtcggcgtaatggccatcatagccgttgcatctacctggtaccccaaagaccgtaaaattaacttttatatcttcattttaagtatagttacttttttgggactagttgctttaggatttctcaactggtttattgaaggctcagtttatggggctcttgtcagctgcgtatgtattattttcctctgcatgacacgactccggttgattgtgtatcgctataacgtcaagtcgagtgttaaacgaattgtagcttctgttaaggagggtaaaagagttgctttcattgctcaccaaaatttagagttaagggatgtcgtggtatcaatgttcagctcaatgcttccagaacagtcgcgcgtgatacatggtccatttggttttggcatggatactgagattgaattcattaagaagcgaaacagtgctgacgaaggttatcttgttatttttcttaatcagcaagactcttactcatggttaaaaattattgcgggtgattcacctgataaagcaattgcgtacaattttgacttcattcctgatctggagagtgaaaatgaaactaaatga

SEQ ID NO: 214177 - DNA, 219 bp, Klebsiella pneumoniae
atggactacaaacatgagtgctatgacctagaaaagttacttttggctgatgatgagtttctgctctacctttttgggggggacaattcagaagctttacgcagggacctacaaatgcgttataacgccggtgagcgacttataactactcatgaatgccctgatttttcacctatcaggggctgccctggccacgattgcgagactatcgatgagtaa

SEQ ID NO: 214178 - DNA, 534 bp, Klebsiella pneumoniae
atgaatgtttattatgatatcgaattggtttttaactgggtcaaagaaaacttcattctgaagcattctgtttcccttgttaacagtccttggtacgactacgacatagagatagatttgcgcttagttaagcaagcgttgttaaacggtaattttgaatttttatatgttgttcgtgatcatggcacaatgttgcttttgctttcggattttcactcctccagatctcttgactgggatggtagtgaacgctttgagtattatcattgccaaatgataagcaagcaaagtatgaaattatccaaaaaagaagcgtgtgaacttctagatcgtgggcctttactcaactccttcagtgccggtagtaaaaactcctatctgaatgagattttagagtttgttaataataaaggctttaactactcccaagcaaagtcactttttgactgtaaacgcataggggacgagttaaaccttccctcaatgagtaacttcatagcaagagtagaaaaacatatactccatatgaattaa

SEQ ID NO: 214179 - DNA, 1245 bp, Klebsiella pneumoniae
atgagtcattctacaaattataattcatcggctaaatcccctatgcagtacgcacaagaaacatttgacctggtcaaatctcatgtgcagcagctgggtggttggcgtaatgtattaacgtactatcctgagtttcaagaggctttggaaaaagctccacgttctgtcaaatgtccgtttactggtagtggaaaaacgaaattcagatttaaagataggacactagaaagtgttcatgctattcatgaagattatccacataatactttcattgatggcattgatttaattgctgaacttaaaaacgttagtaaaacgcaggctgcaaaaaacattcttgaaatgcttggagtttccaaggacagaaagttaaatgaagccgaccgtgttaatattgttctttatgagaaaaaagctcaatctttttcagatattggtgaggaagagagacttagtcgcataaacaagttagaggcagtgtataaatacacaaaacttgtgacacccgattcattggttgctcgatatctctcagggcgcggaataaaacggatgctcacgaaattaccagctagtctggggtttaatgctaagatgcgttactggccaggagctaataaaccagccagttttcatccaacgatggttgctatcttcaacgataagttaggtcgcaactgcacgatccataaaactcatcttactgatgatggacttaaaaaagctgatgttgaaaacccaaagttaatgatgaagccggtctaccagatgaatggtggttcgatgcagttatttaatccaacttactgtgacgaaacaaagtcatggtttttgggggtcagtgaaggtattgagaatgcgctatcggtaactgaagcgacttcgattccttgctgggcatcttcaagttcaacatttatggaaatgctggaaatacctgaacacttaatgccgccttctgattgccaatttattgaattgtcgatttgggcggataaagatcgggtaaatccaaacaccggtaattcagctggtgagctcgcagctcttgttctcaagagccgtatggagcccttacttgctgaacgctatcctgaagcaacagtacgggttgagattcatttgcctgaactggaaattcctgatggtgcaaaaggtgtcgattggaacgatgtgttaatgctcaaaggtcgtgaagctttcccagccagactggaagaaagattttttgacttgattaagtaa

SEQ ID NO: 214180 - DNA, 231 bp, Klebsiella pneumoniae
atgaaaggtaataaatatattaaacgtgttcgcgttgactctcgtcaattagacagtgggatgattggaaccaaggtatacgtcactgaaggggaagttgttaacggaattatgccggttgaacgtttagttcgtgatgccactttttccgaagataattccgaatcaatggattcagcagttgaaagactggtggcgaaatatattgccaatggtttcgaagtcttataa

SEQ ID NO: 214181 - DNA, 1506 bp, Klebsiella pneumoniae
atggaagagaaaactggaaaccagtttccactttcaaaagcaatgcttgctgaaatgtattcatttatggttactgatgggcatatgactggtgatggttctaatatcgtttcatacattgaaatgtatattttaaacaagcttcgtgttaatcagcttgggcaagaaggtattcctgaaatattgaatgatttttttgctcttgctgatactgttcttttcaacatgaaagaccgttttgattctttaattctagaagcgactggggttaattcaactcttagggcgtgtgagttaggattgaaactatatgaagaactagaaaagttacgtgatgatctaaaagagaaagaagaacaaagcaaatctgacgactctgatgactctcatgactctgatggttctgacgactctgatggttctgacgactctgatggttctgacgactctgatggttctgacgactctgatggttctgacgactctgacggttctgacgactctgatggttctgacgactctgacgactctgaaggctctgacgactctgaaggctctgacgattttgaaggctctgatgactctgtatcttcttcacgtacaacaccaagtttctcaccagcacagctaagaaaggcgattgaagatcttgacgaatacctggactctgatgcagaacaggataattctcatgattttcatgaatctattaaaaaatccatttctaaaatggcatctactttcagtgatgctgatattcaaaactttggtttccgattcggttttatcaatcttaccgaagaggactacaatgacgcactggttaactcccgtgagttaagaaagttactttcttctttgaataaacagactgtacggcgtaacaaccggctaagtgatcgtggagctcgtcttcatggtagaaagcttgttgaagtccctatgggagccacttctgtgtttaagaaaagtggggaaggatataaaaggtctgatgtgggggtaattaacctgcgtgatatctctgtatcaatgcgtgaagtatcagtattagctttaaatgcaaaccttgcttttaccctggcttgtgaatcggtaaacaatattgatgttgcagatattgtgtatccagttcaaaaggaagggtatattgatatagttaagttttttaataaatctgtatctagttccttttctaattatgaaaatgtttctagtggattacataccccaactgcgacggcgattaattcttgcgtggaatatttctcacgtttgaatttttcacgtaaggttatcttcattgcaactgatggagaaccatcggattcaatagaggatgtatgctctgcagttaaaaatgctaaaaaacatggcatagagattgtttgtgtcgggtatggcattgataaacctctaggctttgatggagtttatttcaaaaaaataaacgatatttctgaattaaattctttgtatagagatttaatcagaagtctagtttaa

SEQ ID NO: 214182 - DNA, 1077 bp, Klebsiella pneumoniae
atggctaatatcaaaatcgctgctattgctgataccactcaaatcagtaacactgtaaagagtttcatcgaccgcaatcctgaattacaagatggtgccgttattattaaggtagatgtcgaaggatgtcagggtcgccgtagaacgaatgaaatacgacagtttcttgatgaagatgaagtatctgaccaatcgagtgtgagtaaggtcgaggtccaatggatttctactaaagctttgaactttaaaagcgcagttcatacaagattgagtaatctcaaacgtaaatactgcattccgttcagctccatgaatatactcccaacctctaagctggaagagtatttgattgaagtcgaggccgtccgcgaatatttcaaggaaggtattcagaatgctctagaacgttatgaggaatacattcagatggaaaaagatagaagtcctaaactggcagacttaattgaaaaattacgtatgactaaagatgacttcgaaagatcgtttcttttccagattagccatccaatccctttcacaccaatgtcaattgatggagaggatttaggagatcgctattcagttggtttaatacaggatattgctctgactgctgaatctatctatgcttcctgcacaaagcctaaaattgaccagactttcgtagagaagttgtcaaatttgaaagataaggtagtgagttttatgtttttggatgatcgtgcaactaaaattgctgactctatccaaagcgtactgaaccatcttccttctggtaatttggattcaccccttcacatgagtttgttccgcgaatggttattgctgttaagtgatacaaatcgtttgaataaaattatggatggtgacgatctggtaactggttttatcgccgacattaaaaatcgttttaacgatttagatgacaatttggctaatgacactggttctctattcgttgatccttttgctagtaatggtatgcatgctaagccctctacttctccgttaactccggtctcaaataatgatgcagtccagaaaaaagtaattttctcgactccatttaatttttga

SEQ ID NO: 214183 - DNA, 1053 bp, Klebsiella pneumoniae
atgacacccgctactactgctaacaacaatgctaatgttcttactttgaatgttaactctgacgtagaaattaaatatttcaaacctgaagagttaaccaaggctatagaataccaagatggagaagaatacattattgtccgtgcaaacgaacactttaatgttgactgctttggagagaatgactttatacctattttcaaaagagttactccttttcgtgctccgttaaacagtaaatatcgcccaaacccagtcactcttcgccgtatggtgaagttacttttaaataatgaagtaactgctggcatctgcctgcaaggggaatctggatctggtaaaacggagttagcattatatatcagccatatgctgaactggcctatcaccatcaaacaaatcaataatgaattatctattgatgatcttgaaggtatgagaacgctagaaaatggaaatacacggtatgtttatagtgaccttgtgcaaggctatcgtgatgggcatatcattcttcttgatgagatagataaaataaacccagatacggcagctaagcttcatatgccgcttgagcgtaaaccgtgggcaaccggtaaagaaggtggcgagttgatttatgcaaatcgctatacccgatttattggtacagctaacactaacatgagtggagaggatatgcgtttcgcttcatcacagtctcaagactcagcatttattaagcgttttttaatattgccgatgattagacctgatgaacaagctatgtattgtgcagctgaggctcattttcctgatttgaaaccttcatgtttaagaatgtttgcaaaagttgcttttgaacttaacaatctgaaagatgacgaactggtgatggatattcgtgaattgatttcatggatttcaacatccaaagtccttgatgaagaaatttctgttggttttaaaattgcattcacttctaagttatcttctgaagcatgtagtaaagctgaaattttgcttgagcaacttttcccggaagaagtatcacgttcaatttcacaattgtaa

SEQ ID NO: 214184 - DNA, 822 bp, Klebsiella pneumoniae
atgcatttaagtaataaattaagaaagattgggaatgaaaaccaacttagtttcagattcttctttgaggatgaagaaattaaagaaaaggtatatatacctgtggaatcaaactcaatcgttgaagttcatggtaacaatgttttgaaccctgattaccaggagctagacgatttcatttggacagatgaacatatatgtacgttcttctataagataatggaatcatcttttataaccgttcagtaccatatagaccaatcgatggtttataaaatcgatgccaatgggtttcgatatttaaccccaaaactaaaattggagttagattggtattgtactaaacaatttcaaattgtgtgtcatcggtttggatatgacccagatgaaattattggttttattaagtcacgacttctgcttgagatatgctcaagagaatcaaggcaaaaacttattaaatctttagaaactgataacttaacattttctcatcctattataggaccgataaaatggtcagattttttagatgataggtactgtgaaacaaggagatcattgatcattaaatggtcgatagctgacagattgaaactctttaaaaaaattttcgatgagcaaatgattatccttgaaaatataagtgaaaatggtgcctggacattggatcagaataccgattcttatgtactaaaaaccgaagctgttgattatattgagtggttatattctgatgcatgcaaggtaatatctcatgtatacggatttgattacgaattacttttcagcacttcgaaagccattatcaaaaacttttaa

SEQ ID NO: 214185 - DNA, 354 bp, Klebsiella pneumoniae
atgtttacaaatcacattaatactgtttgcatttccggtgaagttaataaggttattattcgtaatgaatatgacactattatgctaatacttgataacaaacaggaaatggaaagaagtggtaaaatagaaatggtagtttcatcgattcaagtgaaaatacctcaagacctgtatgataaggagtttaaagagattattcgaggcgataacctgatgatagctggttgtctggttacggataaagttcactctggtgaattaaccgttgtaagagtccaggcccagaaattgattcaccgagctcctaagcctattgaaggtttcggcggttcaaggtttttaacacgttaa

SEQ ID NO: 214186 - DNA, 978 bp, Klebsiella pneumoniae
atgactactgctacagctaatgctacaactgctactcgtgctaaaaaatctaccacagccaaaccatcacgcccggctgctggaaaaattgataaatcttcaattttgatggctcattccaaagcgttctatggtgaagaaattccaccatcgaatactggcagtgatatttgtaaaatagaaaaaggcaccgataacgataagagttacatctggtatatgacagaatctgtcagccgtgtaattgagttaaaggcgcttgaagaaagttctaaactgaagcatttagttggttgtgaacgttctgtaatttacagcgtgaattttggtgatgtcttcattaatgagatcaacctcgatgaggctgaacaacttcttgaagaatttcccgacatcccacgtgaaaaaacgctcgaagcttttttatcatctctagatgaaaagcttgttgagttgaatatcagctccatggttacttcagagtctcttcacttcggtaaagataaactgaccaagctgggtgctgttaaagtaagtcaatggcttgatctggttattgatgaggtgcatgttttttataaacgtcagcactttgttgagaccgttgaatctcgtcatgaggacctcaatgacctatatggtaaattgaagcctttgatgagtgaattcgggcttcaagacaaacactatgacttatcgtttaatgagatgatgattcacaaagtaaatggttttgattttgtagttgcagatttaatgccacgactgcttaaacttgaagcatcattgaaagatgatgaattgaaagccaaagcagctatggaaacaaatcaagctcaagaaattaaagctggagaaaataatacttttggacagaaatatgataatacggtatcaagagtactgaaaggtgctgcttgtgttgctattctctatttcggaatctccactattatgaattacattggttataattga

SEQ ID NO: 214187 - DNA, 1800 bp, Klebsiella pneumoniae
atgtcatcaagcactgaagaacaagaacgtgtgatacggaatatggataaaaacacgatggtgattgcttgtcctggaagtggcaaatctttcactatgaaggaggggacgaaagccatttttcaacgtcatcctttggcaagggtatcccttgtgacctttacccgagcggctacagactctttaaaaaatagcctccagaaaatgatagagccgagatttattaaccgtattgaggtcgatacttttcatggttttataaaaaaaatggtaaaccagaccggttggaaaggaggtcttctaatcggacacaaacaaatggcgatggtatcacgtgtacaaaaacatcttaactaccatgaaagtgtgaacgacataatgccattcatcgacggcattggccgggagcttaacccggacattatcaggattaaatatacacgcgaccaggtggcgttctacaacgagtacatgagcttttgcaaaaaggataatgttgcagattttaactcactttcaaagtatgtagtgggcatgttgagtgccgataagatgaggcctttaagtattactcatctgattgttgatgaagtacaggacacagatggtattcaattcacctggatatctgagcacgcaaagaggggcattaacaccacaatcgttggcgatgatgaccagacaatatacagtttcagagatgcaggtggagttaagatctttcgtcaatttgataaagcgtataatcctaacgtttttcacctgaccaaatgtttcaggtgcgcaccattgatccttaaatttgctgatacagtgatcagaaagaacaaagcccgctacgaaaagagtctcgtatcaggcagaaaaggggataaaggaaaagtaacttttataagatcggataacgcagacgaccaatttgatgtgatcaaggagctggtggagaaaaaccctcatgattgggcgattttaagccgaaacaacacgacactcgacaaaatggaaagttatcttgaagtgccggttacgaggataggaggaaaatccttctgggagggattagagcccagcaacatcctccacctgttctcctttttccgacagccaggtaacatcggtctgatgaaacgagttctatctttcctcaatgaggatgaacaaattctagacactgtgtggaagcatatgagttccagaaaagttacttttcaacaaactgatttgcctcctaatgtatcagtccttaccaaaaccttacacaagcacatggcaccgatgatgactgatacacgagtcaaagaagaaattgaaaaccgttttaaaaaaattaaagaatggttagaaatggccggatacaagatgtccaatacgaaaggtgatccgtcagtaacccggatttctttaatgtcatgttaccgttgggcaatgaaagatggatggcttaagatgctaaatattgcagctggcatgaccatgggtaacaaagtggaatcaagtgaaacagatcaaagcggtatctgtctctgcacgctccatggttccaaaggactggaatggaaaaaagtactaatcatcaactgcaaccacgaccaaataccctcaccgaaagttatcggtgatgaaggaatagaagaggagcgccgtttattttttgttgggatgacaagggcagagcttgagctttacattacctggcatggaaaaccatcagagtttatcactgagtcgttcccgaaagtagttgagttatctgaagaaataccaatcattgatggaagtgaagatatgtgtttacaatga

SEQ ID NO: 214188 - DNA, 852 bp, Klebsiella pneumoniae
atgaaaagaacactgacagctgtactggcctgctctcttcttgctggatgcgcgacacaaccatcgagtccagaaaatcgcatgttcactaaagaacacggtgtttattggcatgctgatccaaaaaaatccctcgccgcgaatgcgtattccttggctggggttcaggtaaatgtcgaggaagcggagaatgcttcgggaggcgttgatgaaggtcttgcctccaagatgcttttgaacactgctactggagcaatcaccggcggacttaaagcaggtattggcatgtttacggcctcactatacagtgaggcggatgctgagtacctgcaggtccctcaatttgttgtttttgtaaagaacccacacaaccttccgatcgacgattcgacactagttaagtctggggcatcaattattattgaagccctcaaggatattcccaaatataataattctaattatgacagtcagaaagtagcacttaatcaatgtgtcgtcgtcaagtccgtcataaataaatgggatacttgtgatacaccttctgctgtaactggcgcaggtggcagtggcaaagaatttctcacattccaggtcatacgccctgctaccggtgatgaactatcaattttaaacttgccgaagggaaattattcaatcattcgctatatggggtttgttcctaaagatttggttttcgatacatcttcgtttcctggttttcggttgatgcctcaagactcacgaacgtctcctggcttcgcaagcgtaacaattaacggaaaagagtattatttcattaaaggtagtcttggagaaagaggtttccctctcaaaaaacgcattggataa

SEQ ID NO: 214189 - DNA, 3183 bp, Klebsiella pneumoniae
atgatatttaaaagggctgtttccttagccgtagctgtatcaatcgtaactaatacgctcagttgggcgtactatgtcacgcttatcaatattgtgatggcaccgaaagtatatgcggcaaacgaaatttatgagcaactggaaaacaattttgatctttctaatcctgcagcgaacagaacttcaacagtaaccacagaggacattttagaaaaatataagaatagtgaaaacccttcttataccgacaaaataaatggttttaatagtaccaacagttcgtcaatggatctgagtaaatatggtggaaaaacattcacaaatgatgatgttttgaattatgccaaaaccgatggttcggacatagctggtacggtatcgctacccaacatgagcggtaatagtataaccataaaagggtcagaaaacggtggaaagttactttcacgtaatgaagatggtagtataacaataagtaacaaccccaatcctggaggcgcaatcactggcaccaatacagctgaaatgtatagttctgagcaaaataatgctgatgttcagtttaatgctggtgatagttatggtgacgagaaagggttcataaacgatataaaaactcgcaagagtcaattattcaccgcaaatagttatgatgggcaagcatatcgttcgctggtggctgcaacaaaatccaatccagctccaaatatttcgccaaatgatccaatgtttacaagtggcagaaatgaaatagcgaacgctgcagctggaacgggtcaatggctgcaaaactgttcaacacagacaactaccacaacaaaagaaaaacatattccagattataaggaatattactgcaatgcacctaaaaaagataattatggtagttgcactattactcgcgacttcagtgtaccagtttacatctctggtggtaatggtgacctaagcgtatgtggcgataattgcatacgtgtatggttcggaaagcgtggtaatgattactggtctgctggtgtttatgacaacagcatgacccttcatttccaccaggacgctatcttaaaatcagcaagcatagtaaatgctgagtgggatgaccacatgcaagtcaatcttgatggtaagcagatttttgctcatatcgatggtgaatatcgcgaacctggctatggcccaccacgtaatggtatggaaagaaataaatcgaataaattaagtgaacctattgatataacgagccaagtttcagaatccgtgtacaaagaaagtgaccacgaagttgaaatgtcatcgactgtatgggtcgggggtaacggtgaagggtactttgaagtagaactaatttttgaaaatatcaagcttgaagataaacatatacaggacccaccaggctgctacgatgttgttaaacaaacaggttcattttgtaggtttgaccgttttgccgatattgacgtaggcactaagcgtttaccacaatctatattgcaatatgcatcacctttatatgaaggagaccaaggtaacttaacctggaaaactaatttagaaggatatttttgcgatcctttagggaaagaaaaattatgtcagtatgatgcatcaggaaatattctaaaagatgagaatggcaatgaggcttgttacaactatgaccagataaagaatatgcctgatgcatgttcaaaatactcgacaaactctgcatgcactatgtccagccaaacatgcgctgagggatggttcgattctgctactaatcagtgttacatgtacgaacaaaagtggacctgtgatgaaggaatcacaaggactgtgacagtaacaaacgaagcaaacacctgcgttggtatgatcccatgttcaggaggtacttgtaataccggtgcgaatgaacaaaacagtgatttcggtaaggtcgcagcctatagcagcatggttcagaacatgcagggtgatgctatgtgtagtgaccctaacgaccccaacagttgcattgtgttctccggagagaagcaatggtgtggccgttctgtaggctttgtaaacgggttggcaaaaacagattgctgcgaagctcctaaaggtgcagccgggaaactagaggcaattatcttagccgggacaatgctcagaaacacaaactgggaaaaaatatcagcaaagctgacaacctggactggtggtgagtcaggtacgtgggcatcaatgacgaacgccgtcggacaatggacatccggtgtatcttcaagtgtaggacaaatgtggcaacgtgtgacagaaccactaacttctgcatatgaatcgatagcaggaaacgtatcgagacttattggctcatcaacagttgaagggggaggttccgctgttacaacagagctcaccaaagacggattacaggccggcggtctcgctgcaataaaacagcagttgatgaataaagcttatgacatgttgcccgatacgatcagagactttgtttttaaaaatgcagcagaaacaggagggcaggctgtattctcatcggcagtaacaaatttcatgcttgcattaaacgtaataggatggatttatacagcatatcaaataactaaaatgttattagagatgctattggcatgcgaccaaaaagaaatggaagcatcaattcacaaaaaccaaggggcatgttttgtcattgatacagatcgttgtgtaaaatatctcaacgtcggtttcacaaagaaatgcataaaaaaagcgacagatatgtgttgctataactcgttattatctagagttattatgcagcaggcgtatccgcaattaggaataaatcctgtagaaagtgggtgtgtagggttgactatctcacaggtacggcaacttaactgggataaaatcgatatgactgaatatattgaatcagcagttgtagctggagaagtccctgatgagtacgcggccttcacagagagttctgtcgctaatatgggcccttataagaatgataatgcacagttaccctcagagcgagctttagattcaatgggtggtaatgtcaatatgacgaaggcaagagaagagaatgttcaggcacttaaagcagagaatgtcgactgctcgtacttgccgagacctgcaatttgtgaagtagggacagtctacactgaccctgttaccggagctgtaataaattaa

SEQ ID NO: 214190 - DNA, 1038 bp, Klebsiella pneumoniae
atgattcgaaagttacttttgtcagcattcactgctgtcatgctcagcctggctttaccaggaatggcgattggggctgagacgggtagcggaatctgtcaatcggccggtgtttggaaaggtttgattaaaaacatctgttggagctgtatttttccaatgcgcattatgggggtaggctcctcaccagaaggggctgcaccgtcacaacccgtatgttattgcacagatcaaaatggggtcccagaggtaggatggcaactgtcgtttttccaaccagtaaaaatagtagaggttgtacagtcaccatggtgttcgccattccttgaaggggttagtcttcagtcttcaagcttcgatatggggaaaggtgcaactaacaggcccaaagggggtaatgaggcagggttttatgatgttcacttatgggagtttccgatcctagtgatgcttaagctcctcattatgggggattgtaccgctgagccttatattgacccgtctcttacctacattagcgaagttgatccgctctgggaaaatgacctgcttacactcgtattgaatcctgaggcagttgttttcgcaaatcctattgcttcaatgtggtgcgcagctgactgtgtgaaggttacagctggggctgacaatctgagtgcccacttttgtgcaggttgtgatggtaacctctatccgctaaccggccatgtttttgcgaatgacgattcagtccgggtttcctcattattaactcaacgaatgattaccaagttgcacaggcaaggaatgttgatgaaaaccatgggccaggacgctatgtgcgaacgcaggttcagttatttcatgcctagatcacagtacaggctatcgatgctgtatcccgttccggaagcagaaggaccggaatgttgtcatagacttggtgattctgttcatgactggtcgacacggaagggcggacgaaaacgtataggtgtaaataactatgtatacatgctttggcgttataacgattgctgcgtaaggtggcttggttaa

SEQ ID NO: 214191 - DNA, 1362 bp, Klebsiella pneumoniae
atgccatcttctgaatgtattaaaaagttactttttagctgcctgttagctacatctctgtcatatgccgatgactcaattgatcatgcaaagactcaaagcatagagtcgattgtcggagctcctcgatacaatcccagctctgtttccgacagtgtacgtgcggtgatagaacacacaggtaagctgcgtgaagcggaaacaatgagtgacatagcgcaggacataaaaaagaatcagtctacagaggccttttctgaagaggcagacacaatcaacaagtcaaaaaacgagacaatgcgaacccagtcttccaacgttgaaaaaatgtttggcaaatcgggaattactgcacaggacttcgaacgtaaattagataacaacaaaaatgaagaactttcaactgataatggtttgacaatatttgcttcattcagcatgccagactatgtgttgatagacctgattaaaacagcatcagaaaacaatgcgcgcgtggtgttcagggggcttaaggacggtgtagaaaatcttattcagatgcaggtagtattgcgtgattatatatcgaaagcaaaaataaaaaatgaacctttagtcaccctcgatccggaaagttttacccagtatagcgtaaaagaagttccaacgatggtgtatagaaaagatgataaaacctacaaaattagtgggtcgattaacatcaagtacttcatgaaacagatcgaggaaaacccagaaagaacatccttcccggtttccgcccaaacattccctataaaagagaaaagtattgtacaggaacttgaggagcggagtaataaatatgactgggaggcagccaaaaagaacgctataaaatcaacttggcaaaatcagtggatggcgtcccttccggtatctgacgagaataaaatctggtatatcgacccaactattcaggtaaaccaagatattagagataaccaaggtaacctcattgctgccgcagggcagaagggaaatcctcttgctcaatttccacagaaactgacaatgatcgtttttgacccaatgaattctgagcagctgacatgggccaaaatacagtttcgtcaccgtttcggcgaaggaaaagttatgcccatttttacgcgaatcaaacgtgatgatggctggaagcatttggaggagttgcgcggccagttctatgggcagatgtacaagatcaaccctgaaatcattagccggttcctaattaagtccacccctacaatcatatcggttgaaggaacctacttcaaagtacagcagtttgctcaggcggatgtacgcgagtatacgcgtataaatcagcaatcagaaaaagaggcggctcaatga

SEQ ID NO: 214192 - DNA, 525 bp, Klebsiella pneumoniae
atgttgatgtcccttagatatctttctccgcatagaagaggtgttttacgagttgataaatcactgattctgcacctggtgatcatctcggtattaatgcatctgttcttttcccgtttcactcttggtcatggactcctgcacggctgtattccagctaattattacatggtggataaatatgataagagctatgaaattggggatatgattaacttcaccatggacagagatgttcgattcattaaacctggggagaaggtaataaaaatcgttgctggtaagggtggggacaaaatccagattacagaaacatacgttaaaaacggcgaccgtattttccgggttgacggaaggcgtattgccaaaaaataccatattgaaccgaattttctgaatcgtgaaatcacggttccagctggacacattttcgtagttggccagaccgattactcatgggattcccgtttttggggaacaataccagaaacgacaatcacaggaaaagcatatgccatcttctga

SEQ ID NO: 214193 - DNA, 4242 bp, Klebsiella pneumoniae
atgactaaaattaataaaatctctttgctgatgttctgttctgtgttcagtgctttttcaaacgcagaatcgataatggtttccggtaccctggaaacgtcattacctgatgtcaaattttcaaccagttcacaagtaaatacggctttcgtaaaagaaagtacggttacagccattccggtatcagaagggtgcgatgtgtcttctgatcccaatgtcaaaagtacggctggtagcctgaaatgtgtgtttgaatggttacctaataattccggcatgccgattgctaatggcttctccctgaagggcattcctgccatcgccggtgagatcaaactaccctggcaaatagtttactactcgggttctgaacgtgaaaaagtcatagtcaaggaaggggagtacaacttcaagactgttgcgccagttccccctgtgatctcctctataaaagggtcaatgagcaacggttcttccggttcaacgctgacgtcatacattaaaaacgaaacactctcaaatattgatatcaccgttgaacctcgagactacgatatggtcgcttctgtcggctctggtacctcctgcgccattgctgcaggaggctcaaaatgttccataacgaccggaagtgtaggcatcagcgatgggagttcagatttcggaagcagggatgtaggtgtaaccgtaaactcgttcaataattacttctccccaccagtaacctctaaggtgagattaagctgggattatcgtgctccagcgatagacactacattctggaacgtgtctaaagaagctcgatcattcaaggtcggagataaagatatctacgtcgctccgcagactatcgctgtcgctgtttcggttccggcccggtcagataccaatgactggtggaaaccagcagcaatgtcgctcacgcttgctcctgacggtagtttctctccaacaacaaaagttactttagatgacggtacggagctcaactttaacaaaatttggtcaaccccatcccgtcgtacacttcagcctgtcgccggatatcaggaaatttctggtaaatttgtctatttttttgatataagcgatctggccagcgcttcttacattgcaacatattctgtctcgaatacagcaggtaatgactccacttataccgaaccggaatctaaactcatactgtctgatgagccttctgtttccgttttcaaggacggcgcagagcttgttaagcgcgatcaggtgtacttcctgaatgaaatcgttatcgctgccttccagggcgaagagggtgtagccgatatcaagagcgttgtcattgataatgtcatggcttcatacacccccaccaacgtcaaagggatctaccggttaaaaccgatggcgtcactcgaaactaacaaagtccatactttgacggttgttgctgagaacgttaatggtatatccaaaacctatacaatcgatttcacctatatgccgatgactttcacactgaagtctatcgaatctgcgtcaacgatttacggttacgtccgtccttacacttcactggttacccagctatctggcaatacctgtaagattttttctactgaggaagacgctcagacgttccttagtcagttcggaacagcggtttatggaactgcctgttatgttcagtggaacaacgttccatctggtctcgaattttactcaaaatctaaagttccaggcctcacaggttacttctctaaagttggcgataacgtacttgactacaacgtctatgtaattaatacaaagggctctaaagccattgccactcataaccgtaaaactgttaaagccgttgaaccgtttgcacctgaaatttcttacaagatgagtaaaacggttgagactcttggtaaggatacagcacttgtttatatcactggtggggacgcagctaaagtgctagcaaaatcagtaccggcaaacgttgtccttacaactaaggttgagggccaggacgctgaaactaaaacctataagaataaatcaggtggcgacacgccggtaacttattctgaacgaataaaagtaccggcagcgccattatggacgcaaacgaatgtaaacatcgaagcgtcctacgagaacgaagccagtataaagtcatcaagcgtgctcaaagtttatactgttccaaacttcagcattcgtgcttatatgaaagttgcagagcgtaaatcagcgacgagcctgaaagtaccggtttcggtaaacataggccaatggaataacagctgtaactgtacattgtacgatgcatccacgatgggtaactgggatgtggtggtttacaaagttacttctaaatgggtgacggatgaagaaaccggtaaagatgtttcggtaactgagagaactccgctgaccggcgatctggccgtcaactctgaggggattgcgaccggtgagctcaacatggacgatctgactctgggtagccaccgcatcatcgctgtggctacggtacgaagtccgtttaacgattttatactcaaacgggagacctcaacgactagtatcagggtttataaaggtgctgacctcgagggtggtttgtctaaatcgcttattgtcggccgagttcctctgtccgcaatggtctcattcagaacgaaaagtactgatgattatgactccctgagtccgacagaatggcagatgtctagtaacaatggatcaacctggaatacgcttgaagatttgaccggtcttcgaagcgtaagcatcaaacaaaaagaggttggtaagtggctttaccgagccaagctgaccaataaatacactggcaaggtctcttataccgataatcttacagtggttgcttaccaggaacctaaacctgttatatcggttggtaaggttcttgaggggcatagcatcccggtgacactgactgataacaatgaagatgtacagggtagtgcagttgaagttcagtggtccgaggatggtgaggaatggacagagggcggggtaaaatacatgattacgtcctccgtggttcccaaatatatctttgcaaaagtacgctataccgaaaccgacgagatggccgggaaatctgcatggaaagaaacccgagcccgcgtcacagtcattaagcataagaaattgtcggttaaggttgaagggaactcgcaggtagaggtaggtaaaaaagttactttgcagggtacatacacgaacccgaatatcgagtactcatctgatgctaaagtttccgaggagtgggtgctcccagatggcagcgtaaaacagggggggcttcttgataccgtcctgaccgaagacatgttagatgaacgtgggtatgcaacgtttacctatcaggcctacatgccggaggcaaaagatagaaccatagcaaaacggaaaatcagcgtaaaatcttgggtatacaaattcccggaaccacgcctgaatacaaaactgaagtacaccatgattccgtcggaactcaccgtatcagtctctggtgtggatgtatcttaccctggggtcgagttcacccaagactggcaatacgacaaagatgtgatgacgctgtccagcgacaataacgggacgaaagtcttccaggtaacaaaatcaggtacacatacgctgacgtatgtcctgaaggataacaggaacaatgaagcccgggttgattacacttttatcgtgaacgaacagagtccgatggaaataaccgttaccccgaaatactctaacaagttcatgagggccccattggacctatccatgaggtccagtgttaagctggcccactcggcagactcaattgacaatgtaacgtttaagctgaatggtaagcctgtcgatggtggcaaaaattactggtcacagacgtttgagaacatcatggaaggtagttataaactggaaatggacgttgtcagtacgcagggtcagagaggggttgttgtggttgattttgacgtgataccgaacacgcctcctacatgtaacctgacatacactgaaacgcaactgagctgggcatttactgcaaaatgcagtgatcctgacggcaagatttccagttatgtttggaaggtaaatgatcaggttcgtggtgtgttcggaagtactgcaacactgtccaaagctcaaaataagggtaagctggtggtgtctataacggcttatgatgacagcggtgattcagcgacaagtttcattacgttgaataactaa

SEQ ID NO: 214194 - DNA, 537 bp, Klebsiella pneumoniae
gtggaaaatttaattgatgaagatccacaacatcaaaattaccgaaatgaaaaggtatttaattctggcaaggctgctcttgagttgaatttttctgagacaaatggcagtgttaatcttatcctggcggggcctttagcatctaagccgggcgcgtttgactggactggccaaaaggccttttcaacaaagctgagtgatgatgaagtgatcactttatgcatggcgtttcttcgccttactcatgaggctgttctgaaagataaaaaaacaaagcaccataataagcaagtatacaaaaacgtaaaagttacttttgacggtaaacccacagcgatgatggaggggggagttgtagcaatcaacaaagatgagcgagacattaactttatacataaaattagtattgatccagctgcttgccttcgcttaggtcttttcctcttgtctgtcatactggcccgaaatccaggggttccatcagacacggttctaacgtgcatgcgtcttaatgccaattcgcaactccaaaagtaa

SEQ ID NO: 214195 - DNA, 399 bp, Klebsiella pneumoniae
atgacgatagtgagtattaaaaaggctagtttcttcatagttccactaataatcctgctaggtatttattcttttactatgaagaaacctagcctctcgagctttatgcaaaaatcagttcacgccgtaagtctggcgggaactgaaacaaatatgaattttaaggtggttgatgaaaaaacaataatgattaacaatgtcccttcgattgttaaaaaggagtacactaaaagtcttagctctacagaggttcctccaggtgccccctctggagactatctaatgctagagaccagtgcttatatctttgcgatgaagcaatctggggggaatacctacattggtttgattaaaaatttaattaacgaaggtgaaggaaaaatttggtggaaaatttaa

SEQ ID NO: 214196 - DNA, 804 bp, Klebsiella pneumoniae
atgactattctttcaaatctaagtattgaccttaccgattttacaggacggattcttatcgtcagtgacctatatggacattttgaactgttgctcaaaggcctttctaagctgacccgatcgggagaagaagtggttattattactactggtaatttatttgactggggcccttcagcctgtcagctgcttgaggctgttgtttacaaaaagtttggagacaggaaagttcatttttttacggttgtaggttttcatgaattgctcatgactgatgccattactcaaaagaacattaaaactttcaggtactttccggatacacatacccgtaaacactggagaagtttaggtggaagctggcatgactcttacgatcagattttgcttgaacgtgatatttacaaaatcgattatccactggttattaatcttaaaacaaggctaggaacatacataattggttcgtcagatatcccccaggatggtagggactggaacactatcatggcaaccttgaacaagatggataatctaaacctaagaataatggcaagcaatatcactaggagtcggcattaccttgaatcaggaaattcaattaaggaaatatcgcttgttgttttaggtgtacatcaacctaagcaaatttacggaatattcaaaggtgaaatagaattagcaaaatcaaccttgtgtctgttccctaacgattgggatggattatcaaatgccccaaagaatttcaaaattcgatttcttgatatcactaaaagtgaacatgggagttgctatgacttttaa

SEQ ID NO: 214197 - DNA, 717 bp, Klebsiella pneumoniae
atgacttttaagaatctagctagtatttgcttattgtttccaactgcaggctacgtaatggcagactctcaactccagctaagttcggatgttatggttgaacagcgtttgaaaaacatagatgtcaaaaccagttattttaaaaacaaaattgatgatactaaatatatacgaatcactaatctgacagtatcattcccattaatcctttccttgcctgagattaaatattctgtcattgctaaaaatggccacggtacattgccatctgatagtaaagatatgatttgggtagaaccaggaagtaacgtaatactgaagataaaagaaggttcaaaattctatgattttgttccgattgtctacattacagggaaaaatatccccaaaatacttactgttttaccaggtaaagaaataatcgcagcaaaagagacaatggtaattgactataaaaacccgccaactccaaaaaggttatccaataatgaaaggattgttaacttatcaaactttaacaatataaacaaactgaacaaaggttattataagattcaggtaaaccaatttacatcactgagctttgataaggaggtttttattattggacgaaacaacatgctggctgggtcacaatattttactaaaaatcttattgcctacccacgcgaaaaaataattataaacataagtggagaaactcatgttaaaaaatag

SEQ ID NO: 214198 - DNA, 501 bp, Klebsiella pneumoniae
atgttaaaaaatagtctgatgtttatgatggcagttattcttacagcttgtcatcaggtgcctgggtggcataaaacgctacccgcaattaactttaacccagaaaaaacaattgaaatgccagggaaagttacagggaaatattctgttcgcgtagtcaatgcaggtatcgatgtatatgttataattgacaatggttataatgagtttatgactatagataaactttccttatacggtaatcgttgcggatatgagtctcaggaggagttgctcattcctcccgctgcagtcagtacatatatggtacctaatgttgcattattaggtctgtgttatacagatgatatcaagatgattttcattaacaataaattcaatggattgtccagggataagaaggatacaactgtccctgttgaagtgatgatgcagtttaagcttacttctgctgaagaaaaagaggagtttaatgatgttatttatagctcgtggaattaa

SEQ ID NO: 214199 - DNA, 2505 bp, Klebsiella pneumoniae
atgcaaatgacattggctgctttacctgatgtcaacacatcattgtcccgttggttgcgtcgccggggtaatagaatgggaggtagggataatgaaaaagcggatcttcttaccgtatattcactggattatcttacgaaaagtcaatatgaccctttgaaagttgctgatgggattaagattactcaagccgacgatttgaagcttagaaatttcgagttgtgggtaacggttcggatacctattaaaggtttttctccgagcgagtccgaatcaatgcgactagatggcctttttaaagaccttctatctaaactagaaggtttaaccctgtcaccaattgttggtaatgctgacacatggttgtacagtgttgataaaatattaaaccctgggaaagactccagatggaaatatggtggactggaatctagtacattaatgccattaaataatcaggtcaacattcctggaaggaagtacgaggtgggggaggattatttcgcgtcattgtctgctgatgatgatgaaacagcgcaacgatattttaagcatttgtcgatgaccaaattccctgaatatgtcaactttggtgctgtttacgagctggttgttgactggatgacaggaagcaaaaccattttctcaccttttattatcaacttctgtatacaattccctcaccaaaagaaaatacagaaagagtatcttcgttataaagcgataacagataatcagtcaaaaatacctattgttttaaaataccttcctcgccttgccgatatggacaaggattattcggcattgactagagagctggaggataaagctaaattactacaaacttacatgacattcatcgtcatggataatacactggaaaaagttaaaatagctgcaaaaagtctgattaactattacagcgagaaaaaaattgttgtggctgatgatagttatatttgtttctcaggcgtcatgtcggctctaccattatgtaatgatccgtcaacatttagagatatggatcgtggtgatgtaatgacgaatacgggtgcggctcacttagcccctatctttggcccgtggaaaggaaactctgcgaatccagtcatcccatttgtaacccgcgagggacagttggttatgattgatattttcgagacttcagccagttacaacgtatgcgttggggctacatcaggggcaggtaaatcatttgcagcaaacaacataattctcaactatctttgttctggcgagcatttaaatccgctttaccattttgatgatattagagatctgcttacggcagataaatacgatccgcctctggacttgaatggcaaatttaatgcgtcaccagatggtgctcaggtgtttgttgttgatatcggacgttcatatcaagggcttgcagagcaatttgaggactctcagtttattgactttggagttgacgctaccttttccctaaaccctttcgctttcatggtgagaaaatacaccggagatgaatctttagagggattaacgggaaatacaggagaagaaagcaaagaatctgacattatttctcaaacaataatggtcctgaatcaaataaagttaatggcttcaagtaatggtaacataagctctttacaggaagctgaaatgcttcgtctgattgtcgaggaagcaaatcatccggaagatggatatcttccttcagtcaccggatttgcaaaaaaatgcataaaacaagataagcaagaaattaaggatataggcgttcaacttggtccttggtgtgaaggcggcatttacggaaggaggtttactacgtcattgccaccgattgattttgatagccgctttatcgtacttgaactcgaagagcttaaacccaccccacatctccagtgggttgtgttaatgtcgataatccaggctgcacagcatgctatgtttattaagaaggatggacgccgtcgtttgttcatacttgatgaagcatgggagtatatcggcgaaagtaatagtgatgatgctgctgttaacttctttaccaaattccttgaagctgcatggcgtcgtttccgtaaaacaaactgtgcagggatttgtattacacagagcttcgaagatttctacaagtcgccaatcggtgttgcgatagccaacaactcaccatggaaatttattatgaagcagagcccagaggcgattgattcaatggaaaaaaataaatatatttccgcatcagcatcagaatatgaacggatgaagatgatcaggactgtaaagtatgttttttctgagattatgattcgttttgagaacgtgcaacaaatcgtccgtctttatgttgatcgtaaaatggagctttgttttactacagacccggcagaccgacgtaaaatttggaaccttgttagtgacggatatacgtatgctgaagcaattgacagagtttacgaagaagagctcgtacagctaggcatgaaaacaaggcaggttgcttaa

SEQ ID NO: 214200 - DNA, 738 bp, Klebsiella pneumoniae
atgaataacatcacgaaattactcttgtctgttgctgcggtatctacattatctggttgcataggtcaatctgagagctcctgccctggtattgaaaaaggtgttctgtgtatgggacctcgggcaattatggaagccactaacaatcatgacgacctcaagtatttaaaaaaggaaggtgatgggggaaagcaggatattgcagatagcaaatatccgacgacgttaactccaccgccgggcgtgcagtacccccagaagccggtggttagtgctggccctaagccgttgttctccggaactccccagccggtcaaaccgttgacaacagcgagttacgtgtcgcagcagcgcgtaccagcaggaaagggactgtattcagaatttgatggcaaaccggtcaatccaaccctgagctcatatcaagagcgtcagtatcaggtacagggtaccagacaagctgttatcgctcctgagcctctggccgtgttaaggcaaggtaaagttatgcgtgttcttatcgccccttacacagacgataacgacgctctgaacctccctggctacgtctatgtcaatgttaaacctcaaacgtgggtggccggtgattcagcattaaataatcctgcgcgaattgttccattggaaattcaggaccgcgctcgtgacaacatgcagcagcagcagcgcagcactaaaggtgtaacagcaaatggggtcaccggtagttctttctag

SEQ ID NO: 214201 - DNA, 858 bp, Klebsiella pneumoniae
gtgatcatgagaaagttacttttcaagtcgctcgcgtgtttagcactactcaattcagctcattcacctgccgctgataaatatgatgctgaagctgtggctttaactcgcgctgctgctgaaaatggtcttgctttaaatcagtcaacacggggattatttagccagctaggttcttcccagccaaaggatgcagtttacttacctacaggtgggatattcttatttgaggatcagcgaagtggactcacattagttaccacaacggggcgctattctttttcagaaggtaaagtctacgacgtgctccgaaaaaaacagattaagtcgatatcagatatccgagaaagttactttttaccattgagcgaagccccgttcaaacctgaggatgcctttactatccagttcgggaatccatccctcaaacgacaggcagtactcttcatttcacttgattgtcaagattgcattgactttctgaaaaagatgaatgaacagagggaaggggtacgtttcgatattgttatattaccaagccctggcgagtcggcgaaacgagtcaaacaaatgtggtgttctgttaaagctggaaaaattaccaattacgatatccttcagtcgttaataggtaaatcaaaagatataaacagcaggcttatcgcccatgaaaatattaaagattgttcagtagaacctatcgtgactggtttatatctggcatctatttataacgttcaaggtattccatctgtagttcgtgaagatggagtattgggcaatggattaccaactgattataacaactggttgaaaatgaacttacaaccattgcttaaaaatccttttgataaataa

SEQ ID NO: 214202 - DNA, 465 bp, Klebsiella pneumoniae
atgactcaaccagtaaaagatgaagatcaaaatgacgctgattttgaaaaagtggcaagcgaacagaaaagcctgacattttctctgtcttattctttcgtcgaaaaggctgttaaaatcatcattgtcgtcgctatcctggtatgtatttcagtgtatattgtgaaacaaatggatgtaggtgtaggtctgtttcacaagagcgtcaaaatagccgttcttaatccttcggctttgaatgagcagtatttaaagtcacacaatgggaataattccggttacatcccttatattcgcaagttgatggcgctataccgggctcgtgatttccttgttcttgatatgaattacgttattactcggccatcaacagtagatgaaattgcttacataaatgaatccgatgtagaaagggaactaactgaatatggtatagaccctaaatattatgagggtaaacagtga

SEQ ID NO: 214203 - DNA, 1374 bp, Klebsiella pneumoniae
atgaaaactttgaagctgaaggaattgtgggcagaaaataaagccattcgaatggcttttctgcttatcgtagcatttggggctcttgtgatggtgaccctcacgcttatgggcggagatgattcgagccagaaaacaaaaaaaattaagccggtgactaacctgcttgatacatcttccatcgtcaatatggatgaagaaggtcagaaacgctttctgcaaacagttcagcaggaaaaccgtaaagaccaacaaaacatggttgatcaggttaagcaaatggaaaagtataaggccgaaaattccagtgagctaactgaacttaaaatccaaattaagcaactcaaccaacagatctccgatatgcagaatggaaagggaccagcgagtagtcgtagtcttgatacccgagtaggccagcctgtctatgaaaatcagcaacaaaatccagcttatcagttaaaccgaaatgcagaggggaatcgcaatcaagaaatacctgttgcaggtggtatatcacctcaacgcacacagttggtacgcacaattaccagcaacagcattaccactgccaataacggtgtccttgaagtgacaccaattgttgaaaagaacattactaacgccaaccaaaaacgcgttcttaaaggtggacctggaaatggtgcgatcgcaggcgatggtaccaagcctgttgatagtaatgctcgccactcaaagcgtgctgaagaccagtatttgcctgctacgtctcaactgtatgcggttctggtgacaggtgtggaagcgccgacatcattatcgtctcaggaggaacctttgggagtaacgttcagggttaaacgcgatgtttttttacccaataattacagaatggatcttcgtgattgcaacctactaggtaccgctcgtggagatatggcctctgaacgagtctatatccgcacaacaagtctgagctgtgtaaattccaaagggaaaagctttgatatcaaactggaggcatacgcagttagtgaaatcgacgggaaagccggtatcaaaggtacgcttatctcccgaaacggtaacgccattatgggtagtgcctttgcaggtggccttagcgctctggcgcagggactaagcccaagcaaagttagtcagctgaatatcgatcctaactcacaagcacaataccaaggaccaaatattggtgctcttggcgctgtgagcgcaagcggtgcggtctcgggaggattaaacaagctgacagactggtatacacacatcatagaccagcagtggccagttgtggagctttctccgggtattaatgcgacttttgtcgttctaagtggtgcatccatcccaaccaatttatcggcgaaataa

SEQ ID NO: 214204 - DNA, 519 bp, Klebsiella pneumoniae
atgagaaagaaaagtaacttttcaatattcacctggggcattttgttcagtgttggtttaggggtaggaatttttataggtaattttggaaaggaacgtactgcgttggtacaaattgttccatcggaatatacagtgcggaaatcctcccctcctaaatttgatgattttaaggtatatgactctgacaaattgctatctgaaaaggatatcacaagaaaggacagctttgcttcaagacaggatgatagttttgatgaaaaaaacaccatcttaattgagcagaataccaatgaacagacaatagagttgcctcaaattgaaccggagaatgaaagtcagttttatgagcatctcgaaaataacgttttcaaaaatttgcgggctgaaccaccttactctgtaccgcaaatagatgaaaatgtcaggtcattgagggtaaagcgatatttacccccaagtaataaaggtcaacataatgaaaactttgaagctgaaggaattgtgggcagaaaataa

SEQ ID NO: 214205 - DNA, 522 bp, Klebsiella pneumoniae
atgacctgcttattcgcaccttccttaacgcaaaacatggccattgaacgtgatcgccatatcgctgcaaacacaaataaagaacttctagaaaaggcacaatcgggtgagcttgacgaaaaatcaatcgcacaagatgaccgcaaacaaaggataatcgatattctttatccggtggctaacggtgaagtacctacgggttttgcactccagctggataaactctcagttatacctaataacgaaaaatcaccttgtcgttttaacttttatgcaaaacttggacaacgtcttattggtgctcgtgaactggtcgatgtcattcttgtacaaaacactctgacatatccatcggttgtggatgaccaaaaatgcattactccaggtgtgatcgccacagcaatctttgataaagctttcctgcaacccggtgagaaaacggagctgtacatccttcgtgacaaactttaccaagaacgggagtcacgtgtaactaaacgaccaagtctgattaatgaatga

SEQ ID NO: 214206 - DNA, 204 bp, Klebsiella pneumoniae
atgaccgctagccccatggatcgccagctatatagaaggagaatcaccggcctggagagaaacataaaaattcgcgagcgttgcgcaaacgttttcgttacaatgccgcgctatgacacggatgcccggttgggtgcgttaggtgagtttttaggcaaaagctcacctaacgctctctgtaatgttcaaatcctggggatttaa

SEQ ID NO: 214207 - DNA, 1590 bp, Klebsiella pneumoniae
atgcaacaacgtcgtccagtccgccgcgctctgctcagtgtttctgacaaggccggtatcgtcgaattcgcgcaggcgctttccgctcgtggtgtcgagctgctgtccaccggcggcaccgctcgcctgctggcagataaaggcctgccggttaccgaagtctctgactacaccggtttcccggaaatgatggatggacgcgtgaagaccctgcatccgaaagtacacggcggcatcctcggtcgtcgcggtcaggatgacggtatcatgcagcaacacggtatcgcgcctatcgatatggttgtcgtgaacctttacccgttcgcccagaccgtcgctcgtgaagggtgctcgctggaagacgcggtggaaaacatcgatatcggcggcccgactatggtgcgctctgcagcgaagaaccataaagatgtcgccatcgtggttaagagcagcgactacgacgccatcattaatgagatggacgccaacgaaggttccctcacgctggccacccgcttcgacctcgccattaaagccttcgaacacaccgccgcttacgacagcatgatcgccaactacttcggcagcatggttccggcctatcacggcgaaagcaaagaagccgctggccgcttcccgcgtaccctgaatctgaacttcattaagaagcaggatatgcgctacggcgaaaacagccaccagcaggcggctttctatatagaagagaatgtaaaagaggcctccgtggcgaccgccactcagctgcagggcaaagcgctctcctataacaacattgccgataccgatgcggcgctggagtgtgtaaaagagttcaacgagccggcctgcgttatcgttaagcacgccaacccgtgcggcgttgccgtcagcgactcgattcttgacgcctacgatcgcgcttacaaaaccgacccgacctccgcgttcggcggcatcattgcctttaaccgcgagctggatgctgaaaccgcgcaggcgatcatctctcgccagttcgtcgaagtgatcatcgcgccgtccgccagcgaagaagcgctgaaaatcaccgccgcgaagcagaacgtccgcgtactgacctgcggccagtgggatactcgcgttgccggcctcgatttcaaacgcgttaacggtggtctgctggttcaggaccgcgatctcggcatggtcaccgcaggtgaactgcgcgtggtcagcaaacgtcagccaaccgagcaggaactgcgcgatgcgctgttctgctggaaagtggcgaaattcgtcaaatccaacgccattgtgtatgccaaagataatatgaccatcggcataggcgccggtcagatgagccgcgtctactcggcgaaaatcgccggaattaaagccggtgatgaaggtctggaagtgaaaggttccgccatggcctctgacgctttcttcccgttccgcgacggcatcgatgccgcagccgcggtaggcatcacctgcgttattcagccgggcggctctatccgtgacgacgaagtgattgccgccgctgacgaacacggcatcgccatgatcttcaccgacatgcgccacttccgccattaa

SEQ ID NO: 214208 - DNA, 1296 bp, Klebsiella pneumoniae
atgaaagtattagtaatcggcaacggcgggcgcgagcacgcgctggcctggaaagcggctcagtcgccgctggttgataccgtctatgtcgcgccgggcaacgccggtaccgctctggagccgtcgctgcaaaacgtcgccatcggcgtcaccgatattccggcgctgcttcgcttcgcgcaggatgagaacatcgatctgaccatcgttggcccggaagcgccgttggtcattggcgtggtcgacgcgttccgtgccgccgggctgaacatcttcgggccaaccgaaggcgccgcgcagctggaaggctcaaaagccttcaccaaagattttctcgcccgtcatcatattccgacggcggaataccagaacttcaccgaagtggagcctgcgctggcttatctgcgcgagaaaggcgcgccgatcgtcatcaaagccgacggtctggcggcgggtaaaggcgttatcgtggcgatgaccctcgaggaagccgaagcggcggtcaaagatatgttggccggcaacgcctttggcgacgcaggccaccgcatcgtgattgaagagttcctcgatggcgaagaggctagctttattgtgatggtcgacggcgagcacgtcctgccgatggccaccagccaggatcacaagcgcgtcggcaacggcgataccggcccgaacaccggcgggatgggggcgtactccccggcaccggtggttactgacgaagtccaccagcgcaccatggagcggattatctggccaaccgtgaaaggcatggccgctgaaggcaacacctatatcggtttcctctacgccggtctgatgatcgacaagcagggcaacccgaaggtgattgagttcaactgccgctttggcgacccggaaacccaaccgatcatgctgcgcatgaagtccgacctggtcgagctgtgcctcgccgcctgcgcgggcaagctggacgagaaaacctccgagtgggatgaccgcgcgtcgctgggcgtggtggttgccgccggcggctatccgggcagctacaatacgggcgatgagatctacggcctgccgcagcaggaagtcgcagacggtaaggtcttccacgccggcaccaaactgtctgacgaccagcgcgtggtcaccaacggcgggcgcgtgctgtgcgtcaccgcgctgggtgactccgtagcgcaggcgcagcagcgcgcctatcagctgctgaccgacattcgctgggacggtagctttagccgtagcgatatcggctggcgcgccatcgaacgtgaaaaggctaacggctaa

SEQ ID NO: 214209 - DNA, 1332 bp, Klebsiella pneumoniae
atgagcagcgataaagtacagattctggtcgttgatgatgacatcagccactgcacgatcctgcaggcgctgctgcgcggctggggctatcaggtggggttggctcacaacggcctgcaggcgctggagcagatccatcagcaggtcttcgacctggtgctgtgcgatatccgtatggcggagatggacggtatcgcaacgttaaaagagattaaggcctataacccggcgataccggtgctgatcatgacggcgttttccagcgtcggtacggcggtagaagctattaagtccggggcgctggattatctggttaaaccgctggattttgacaccctgcagcagacgctggttcaggcattggcgcacacccggcagagcgagagcgaccccagcgttgcgacggattcacggtggggcatgattggcgacagcccggcgatgcaggcgcttcttaacgatattacgctggtggccccttcggacgcgacggtgctgatttatggggagtcgggaaccggtaaggagctggtggcgcacgccatccacgcctgcagcgagcgtcgtgacaagccgttggtcacgctcaactgcgcggcgctgaatgagtcactgctggagtcggaactcttcggccatgaaaaaggggcgtttaccggggcggatcggcggcgggaaggacgctttgtcgaagcggatggcggcacgctgtttcttgatgagataggcgatatctcgccagtgatgcaggtccgcttgctgcgggcaattcaggagcgggaggtgcagcgggtcggcagcaaccagacgcttgccgttgatgtgcggcttatcgccgccacccatcgtaatctggcggaggaggtgagcgccgggcgttttcgccaggatctctattaccgcctgaatgtcgtaactattgatatgccgccgctgcgccggcgacgggaagatattccgcagctggcgcagcattttctcaaacgctataccgaacgcaatcgtaagacggtaaaagggttcacgccacaggcgatggacctgctgatccactacccctggccgggcaatattcgcgagctggaaaacgcggtggagcgggcggtggtgctactgaccggaaactatatctctgagcgagaactgcccctggcgatcgccggtacgccgctgccatcaggcgggagcgaggagggaggaattcagccgttagtggaagtggagaaagaggtgattctggcggcgctggaaaaaacgggcggcaacaaaactgaagccgcccgtcagttaggcattacgcgcaaaacgctgctggcgaaacttagccgttag

SEQ ID NO: 214210 - DNA, 1395 bp, Klebsiella pneumoniae
atgaagatcaaatctctctcccgggacgccgccgctggcgcgctgagctggctgctgaccggcacggttgtgctgctggtcatgctgttctccgcgatgatcgtccgcgactacggtcgcgagacgaccgctgcccgacaaaccattgaagagaaagggagcgtgctgatccgcgcgctggagtccggcacgcgcgtcgggatggggatgcgtatgcatcatgcgcagctgcaggccctgctggaagagatggcctggcaaccgggcgtcctgtggttcgcggtgaccgatgaaaacggtaaaattatcgcccatagcgatccgcagcaggtgggtaaaacgctgtatagcccggcgcagatgcgtgcgttagcggttggcgaacaggcccgctggcgccggcttagcgaaccgcagccggcgctggagatctatcgccattttcgcccgcttaatccggcccgcggccaccatatgggaatgatgaaccgcggcaatagcgccctggctcaggccaccgtcccgcaggtaatttttatcgcctttgatagccgcgagctggatgccgcgcaggcccgcgggcagcggaatatggccatcatgctgggtgccgccgcgctggtgatagcggcgacgatcctcgctcagttctggttccgccgctatcgtcgctcgcggaaacagctgctggaggcgatggcccgcaaggaaaagctggtggcgcttggccatctggcggcgggggtcgcgcacgagatccgcaacccgctctcgtcgattaaagggctggcgaaatattttgccgagcgcacgtcgcctggcggcgagtcgcatcagttagcccaggtgatggccaaagaggctgatcgcctgaaccgggtggtcagcgagctgctggagctggtccggcccgcccatctaaactaccagacagtcgatatcaacgcgcttatccgccactcattgcagttggtaagccaggatgcgcagagccgcgggatcgcgctgcaatttactccgcgacctgagttaaccacgatcagcgccgaccccgatcgcctgaatcaggtgctgttgaatctgtacctgaatgcaatgcaggcgattggccgtgacggcgtcattcgcgtaacagcaagcgaagccgatcgtcagcgggtgaaaatcgtcgtcacggatagcggtaaggggatgagcgatgaagagttacaggctatcttcacgccgtatttcaccaccaaggcggacggcaccgggctggggctggccgtagtgcagaatattatcgaacaacatggcgggacgatccgcgccgaaagtcagccgggagctggagcgatatttacgctttggttaccggtggatgctcaacggagggaagatgagcagcgataa

SEQ ID NO: 214211 - DNA, 438 bp, Klebsiella pneumoniae
atgaaacggaaccgtaccttacctctcgccctcgttacctttgccgcgctgaccttcgccagcaacgcggcctgggccaaccaccactggggcaacaataacgggatgggcaaccagggctacagtcagctgacccaggagcagcaggctaccgtgcaaaagctgcataacgattactatgcgcaaaccagcgccctgcgccagcagctgcagtccaaacgctatgagtacaatgcgctgctcacggcgcaaaagccggacagcgggaagattgaagctgtcgctcaggagatggaaggcttacgccagaagctggatcagcagcgggtgaagtttgatatcgccctggctgaggcaggcgttccccgcggcgcaggaatgggatatggcggctgtcgcggtagcgccggcggtcatatgggcatgaaccactggtaa

SEQ ID NO: 214212 - DNA, 696 bp, Klebsiella pneumoniae
gtgaacagttttatcgaaggggctattaagccccttttgtctgtctggcgccggcctctggcgctggcgggcatcctgttgctgactgcctgcagccacgacacgtcgctaccgccgtttaccgccagcggatatgcggacaatcagggagcgatgcgcatctggcgtaaagattctggcgatgaagtccatcttctcgccgccttcagcccgtggcgtcacggggacacctcgaccagcgaatatcgctggcagggcgatcaactggcgcttatcgaactcaatgtctatggcaaaccgccggaacatattcgcgcccgtttcgacgcgcagggcgatctgagctttatgcaacgggaagtggacgggcagaagcagcagctctccagcgaccaggtcgcgctatatcgttatcgcgccgaacagatccgccagaccagcgacgccctccgccaggggcgggtcgtcctgcggcaggggcgctggaacgctgccgcgcataccgtgctgacctgcgaagggcagacggttacgcccgacctcgatagccgggccctggcgcacattgaacgccgccagagccacgcttccgccgctgtgagcattgcctggctggaggcgccggaaggctctcaactgctgctggtcgccaatgaaaacttctgcacctggcagccgacggaaaaaagcttctaa

SEQ ID NO: 214213 - DNA, 273 bp, Klebsiella pneumoniae
atgaacaagactcaactgattgatgtaattgcggacaaagctgacctgtccaaagcacaggctaaagctgccctggaatctaccctggctgcaattactgagtctctgaaagaaggtgatgctgttcaactggttggtttcggtaccttcaaagtgaaccaccgcgctgagcgtactggccgcaacccgcagaccggtaaagagatcaaaatcgctgcagctaacgtgccggcatttgtttctggcaaagcactgaaagacgcagttaagtaa

SEQ ID NO: 214214 - DNA, 591 bp, Klebsiella pneumoniae; identical to SEQ ID NO: 136665

SEQ ID NO: 214215 - DNA, 672 bp, Klebsiella pneumoniae
atggatttagccgcactacgtacccaacagcaacagttagccgcgtcggtagagcgtgcggatcgactggatcgcgacccgccggcgttgatcggcggcgcggacgtcgggtttgagcaggaaggggagatcacccgggctgcgatggtgctgctgacctggcctgagcttgagctggtggagtatcaggtggcgcgggtcgccacctctatgccctatattcccggctttctctcgtttcgcgaaacgcctgcgctgctggcggcgtgggagcagctttcgcaaaaaccggacctgctcttcgttgacggacacggcatttctcatccccggagattgggcgtcgccagccattttggcctgatgattgatgtgccgactatcggagtggcgaaaaaacgcctgtgcggcaaaatcggcgacctgggtgatgagcctggcgcgctggccccgctgatggataaaaatgagcaactggcctgggtctggcgcagcaaagtgcgctgcaacccgctgtttattagcaccggccaccgggtaggcatggacagcgctttaatgtgggttgagcgttgcatgcgaggctaccgtctgcccgagccgacgcgctgggccgatgcggtggcgtcccgtcgtccgtcgtttgtgcgttggcaagcaaatcacagctga

SEQ ID NO: 214216 - DNA, 1065 bp, Klebsiella pneumoniae
atgaccgaactgaagaacgatcgttacctgcgcgcgctgctgcgtcagccggttgatgtcaccccggtgtggatgatgcgccaggcgggccgctatttaccggagtacaaagccacccgtgcgcaagcgggcgactttatgtcgctgtgtaaaaatgccgagctggcctgcgaagtgacgctccagccgctgcgccgttacccgctggacgcggcgatcctcttttcggacatcctgaccatcccggacgccatggggctggggctgtactttgaagctggcgaaggtccgcgcttcacctcgccggtaaaaagtaaagccgacgtcgacaagctgccgatcccggatccggagcaggagctgggctatgtaatgaacgccgtgcgcaccattcgccgcgaactgaaaggcgaagtgccgctgatcggtttttccggtagtccatggacgctggctacgtacatggtggagggcggcagcagcaaggccttcaccgtgattaaaaagatgatgtacgccgagccgcaggcgctgcatgcgctgctggataagctggcgaagagcgttaccctgtatctcaacgcgcagatcaaagccggcgcgcagtcggtgatgatttttgacacctggggcggggtgctgaccggccgcgactatcagcagttctccctttactacatgcataagatcgtcgatggcctgctgcgggaaaacgaaggccgccgcgtgccggtgaccctgttcaccaaaggcggtggtcagtggctggaagcgatggcggagaccggctgcgatgcgttgggtctcgactggaccaccgatattgctgatgcccgccgtcgcgtgggtaacaaagtagcgctgcagggcaatatggatccgtcgatgctctatgcgtccgccccgcgtattgaagaagaagtggcgaccattcttgccggctttggccagggggaaggccacgtctttaaccttggacacggtattcatcaggacgttgaccccgagcatgcgggcgtctttgttgaggctgtgcaccgtctgtccgcaccctatcaccagtag

SEQ ID NO: 214217 - DNA, 774 bp, Klebsiella pneumoniae
atggatcgtattattgaaaaattagatcgcggctggtgggttgtcagtcacgaacaaaaattatggttgcctggtggagaattaccacatggcgaagcggttaatttcgatcttgtcggccagcatgcgctgcatattggcgagtggcagggcgagtccgtgtggatggtgcgccaggatcgtcgccatgacatgggatcgttgcgccaggtgctggatcaggatccgggactcttccagctggctgggcgggggatccagctcgccgaattttatcgctcgcataaattttgcggttactgcggccacccgatgcatgccagcaaaagcgaatgggcgatgctgtgcagccactgccgcgaacgttactacccgcaaattgccccctgcattatcgtggcaatccgtcgcgacgatgcgatcctgctggcgcaacatacgcgccatcgcaacggcgtgcacaccgtgctggccggctttgtcgaggtcggcgaaacccttgagcaggcggtggctcgcgaggtgatggaggagagcggtattcgggtaaaaaatctgcgttacgtgacctctcagccatggccgttcccgcagtcgctgatgaccgcctttatggcggattacgcagatggcgagatcgtggtcgacaaaaaagagttactgaccgcggactggtatcgctatgacgacctgccgcttctgccgccgccggggacagtggcgcggcggctaatcgaagataccgtcgcgatgtgtcgggcagagttcgagtga

SEQ ID NO: 214218 - DNA, 498 bp, Klebsiella pneumoniae
atgctaaaccagctggaaaatctgacggagcgcgttggcggtagtaatgaactggtcgatcgctggctacaagtgcgtaagcatctgctcgtggcttactacaacctggttggcctgaaaccgggcaaagagtcgtttatgcggctaaacgaaaaggcgctggatgacttttgccaaagtctggtggattacctctcatccggtcattttagtatttatgaacgcattattggcgaaatggaaggcgatacccctcttttagccgccacccggctttacccgcagctggaagccaatacccagcagatgatggactactacgatacctgcctcgaaaacgccatcgatcacgataactatcttgaatttcagcaggcgctgtcggatatcggcgagtcgctggaggcgcgtttcgcgctggaagataaactgatcgccctagctgtcgcccataacctgagcaatgacgtgcgcgataatattgcgccgaccgcttga

SEQ ID NO: 214219 - DNA, 1896 bp, Klebsiella pneumoniae
atgtctactaccaaactaacccgtcgggaacaacgcgagcacgcgcagcgattcattgatacgctggcgggtaccgcttttcctaattcacgccgcatctatgttcacggctcacaagcggatatccgcgtcccgatgcgtgaaattcagctcagcccaactctcgtcggcggcgataaagataacccccggtacgaaaccaacgaaccgatcccggtgtatgacacctccgggccgtatggcgacccggatattagcattgatgtccgccaggggctggcaaagctgcgccagccgtggatcgacgcgcgtaacgactgcgcgccgctcagcgaacgcagctcggcctataccaaagcgcggctggccgacgacggtctcgatgagctgcgcttcagcggcctgctgacgcccaaacgcgccgtcgctggcaaatgcgttacccagctgcactacgcccgccaggggatagtcaccccggagatggagttcatcgccattcgcgaaaacatgggtcgcgaacgtatccgcagcgaggttctgcgccagcagcacgcaggtgaaggcttcggcgcccacctaccggaaaacatcacccccgagttcgttcgcgatgaagtggccgccggacgcgccatcatccccgccaacatcaaccacccggagtctgaaccgatgattatcggccgcaacttcctggtgaaagtgaatgccaatatcggcaactcggcggtgacctcttccatcgaagaagaggtcgagaaactggtctggtcaacccgctggggcgccgacacggtgatggacctctccaccggccgctatatccacgaaacccgcgagtggatcctgcgcaacagcccggtgccgattggtaccgtgccgatttaccaggcgctggagaaggtcaacggcatcgccgagaatctcacctggcaagtcttccgcgataccctgctggaacaggccgagcaaggcgtcgactacttcacgattcacgccggcgtactgttgcgctacgtcccgatgacggcgaagcgcctgaccggtatcgtctcgcgcggcggctcaatcatggctaagtggtgcctgtcgcatcatcaggaaaacttcctctaccagcatttccgcgaaatctgcgaaatctgcgccgcctatgacgtgtcgctgtcgctgggcgatggcctgcgccccggctccattcaggatgccaacgatgaggcgcagttttccgagctgcgcaccctcggcgaactgacgaaaatcgcctgggaatatgacgtgcaggtgatgattgaaggccctggccacgtgccgatgcagatgatccgccgcaatataaccgaacagctggagcactgccacgaagcgccgttctacaccctggggccgctcaccactgatatcgcgccgggctacgaccatttcacctccggtatcggcgcggcaatgatcggctggttcggctgcgccatgctgtgctatgtcacgccgaaagagcatctcggcctgcccaacaaagaggatgtcaaacaggggctgattacctacaaaatcgccgcccacgccgccgacctcgcgaaaggccatcccggggcgcagatccgcgacaacgcgatgtcaaaagcgcgttttgaattccgctgggaagaccagttcaacctcgcgctcgacccgttcaccgcgcgggcctatcacgatgaaaccctgccgcaggagtccggcaaagtcgcccacttctgctccatgtgcgggccgaaattctgttcgatgaaaatcactcaggaggtccgcgactacgccgcgaagcaaagtatagaagccggcatggccgatatgtcgaataacttccgcgcccgcggcggcgaaatctacctgaaacaggaggaagcctga

SEQ ID NO: 214220 - DNA, 636 bp, Klebsiella pneumoniae
atgtatcaacctgattttccacccgtcccgtttcgtctcggactctacccggtggtggacagcgtggcgtggattgagcgcctgctcgaagctggggtacgtacccttcagttacgcatcaaagaccggcgcgacagcgaagtggaggatgacgtgatcgccgccatcgcccttggtcgccgctatcacgcccgactgttcattaacgattactggcagctggcgattaagcatcaggcctatggcgtgcatctcggacaagaagatctggaaaccaccgatctgagcgctatccgccaggccgggctgcgtcttggcgtctctactcacgatgatatggaaattgatgtcgcccttgcggcgcgcccctcttacatcgcgctaggtcacgtcttcccgacgcaaaccaaacagatgccttccgcgccgcagggcctcgagcagcttgccagacatattcaacgcctggcggattaccccaccgtagcgatcggcggaattagcctggaaaaggcgccgggggtactggcgaccggcgtcggcagcatcgcggtggtcagcgccatcacccaggcggcggactggcgggcagcgaccgaccaactgctggcgctggcgggagcgggcgatgaatga

SEQ ID NO: 214221 - DNA, 756 bp, Klebsiella pneumoniae
atgaatgatcacgactttatgcgctatagccgccagctgctgctggaggatattgccatcgaagggcagcagaagctgttagccagtcgagtgctgattatcggccttggcgggctgggctccccggcggcgctctatctggccggggctggcgtcgggacgctgaccctggccgatgacgacgcggtgcatctcagcaacctgcaacggcagatcttgttcaccagcgcggatatcgatcggccaaaagccgcagcggcacagacccggctcagccagctaaacccgcagatcaaactggtagcgctccagcagcgcttaagcggcgaggcgctacgcgccgaagtggcgaaagcggacgtggtgctggactgtaccgataatatggtcacccgccaggcgatcaatgccgcctgtgtggccctcgataccccgttagtaaccgccagcgccgtgggcttcggcggtcagctgatggtgctcaccccgccctggaggcagggctgctatcgctgcctgtggccggaaagcgatgaaccgcagcgcaactgccgcaccgcggggatcgtcggcccggtggtcggcatgatgggcaccctgcaggcgctggagacgattaagctgctcagcggcatggcgacgccgcgcaacaccctgcggctgttcgacgcccgcaccagcaactggcgcgcccttgcgctacagcgctcccggagctgcccggtgtgcggagggcggcatgcagatctggtttaa

SEQ ID NO: 214222 - DNA, 201 bp, Klebsiella pneumoniae
atgcagatctggtttaacgacgagccgctggcgtgcgccgacaatctcagcgtcagcgccctgctgacccagctcgaacagcagcagccgggcgttgcgctggcgctcaatcaacacatcctgccgcgcgaccggtgggaagatcatctcttgcaggaaggcgatcgggtcctgctttttcaggttatcgctggaggctga

SEQ ID NO: 214223 - DNA, 771 bp, Klebsiella pneumoniae
atgttacgtattgcagacaaaacgtttgaatcccatcttttcaccggtaccggcaaattcgccgccccggaggtgatggttgaggcgattcgcgcctcgggcagccagctggtaaccctggcgatgaagcgcgtcgatttacgccagcgcaatgacgccatcctcgccccgctgctggcggcgggggttaacctgctgccgaatacctcaggcgccaagacggcggaagaggcggtgtttgccgcccgcctggcgcgggaagccctgggtacccattggctgaagctggagatccacccggacgcccgctggctgctgcccgacccgattgaaaccctgaaagcggcggagctgctggtccgcgaagggttcgtggtgctgccctactgcggcgccgatccggtgctgtgtaaacgactggaagaggtgggctgcgcggcggtgatgccgctgggtgcgccgatcggctccaatcaggggctggaaaccaaagccatgctggagattattatcgagcaggcgacggtcccggtggtggtcgacgccgggatcggcgtcccgagccatgcggcgcaggcgctggagatgggcgcggacgcggtgctggtcaataccgccattgccgtcgccgacgaccccgtggccatggcccgcgccttccgtatggcgatcgatgccggattactggcgcgtcaggccggaccgggggcacgcagtacgcaggcgcaggccaccagcccgctcaccggattcctggaggcgctggcatga

SEQ ID NO: 214224 - DNA, 1134 bp, Klebsiella pneumoniae
atgaaaacctttagcgatcgctggcggcagctggagtgggacgatatccgcctgcgcatcaacagcaaaaccgccgccgacgtcgaacgggcgctggcggccaaacagctcacccgcgatgatatgatggccctgctctcgcctgccgcggccaattaccttgaaccgctggcccagcgcgcgcagcgcctcacccggcagcgcttcggcaataccgtcagcttctacgtgccgctgtatctctccaacctgtgcgctaacgactgcacctactgcggcttctcgatgagcaaccgcattaagcgcaagacgctggatgccgccgagattgcccgcgagtgcgccgcaatccgcaacctgggctttgagcatctgctgctggtgaccggcgaacatcagggtaaggtgggaatggattatttccgtcagcacctaccggctatccgcagccagtttgcctcgctgcatatggaggtgcagccgctggcgactgaagagtatgccgagctgaaaaccctggggctcgacggggtgatggtctatcaggagacctatcatgaaagcatgtacgccaaacaccatctgaaaggaaaaaagcaggatttcttctggcggctggatacgccggatcgcttaggcgcggcggggatcgataagatcggccttggcgcgctcatcggcctttccgacagctggcgagtggactgctttatagtcgctgagcacctgctgtggctgcagcagcgctactggcgcagccgctattcggtctccttcccgcgcctgcgtccctgcgccggcggtattgaaccggcttcgctgatggatgagcgccagctagtgcaaactatctgcgccttccgcctgctggcgccagaggttgagctgtcgctatccacccgcgaatcaccctggttccgcgaccgggtgatcccgctggcgatcaataacgtcagcgccttctctaaaacccagcccggcggctacgccgacgatcatccggagctcgagcaatttgccccgcacgacgatcgccgccctgaagaggtcgccagcgcgctggccgcccgcggcctgcagccggtatggaaagactgggatagctggctgggacgcgcttcgcaaacctcatga

SEQ ID NO: 214225 - DNA, 1533 bp, Klebsiella pneumoniae
atggctctacacaatagaaagctctcttttacgacgccgatcgtcgtggggtttgccggtattttgctcagttttatgctgatcgctatttttgtgactctggcgcaacagaaagattttctcgaagattatcacgatattaaccgcaattttacccataacctggcgatcaactatacggaaaccctgctgcgggaaaatgattttatcctcgggcgcgcagccgccttctttgcccgcaatgacgaactgaatcgcgcagtcaatgtggagccggagaaagggttaaccacgctgatgcagttacagaacatgatgccaagcgtctcatccatctcgctggcggataccgagggccactatctgcgcgccccggaggtgctggaaaacgaagacagccgggctttcgatcccaaaacgcggccctggtttatcaaacaggcggaagccagcaccttcagccactacaccagtccgtatatggattatttcacccaccatccgacgattaccattttcaaacccatcattaccccggaagggaaactcaagggcagcctggcctttcatctcgatctcacctccatggggttcgcgctgcgccagatggtggcgcccgtacagggggaattttttgtggtgcaacgggatggcaaagtggtcctgcactccgacccgggcgcgctgtttaaacccttcgtcagggacgagctgatggataaaatgaccagcggagaggggcagctttacgatcccgggagcgacacctggtattactattactcctttaccaatcccgactggtttgtgattttccgtgtcgataacgccaccctggtcaatctgacacgtcatgagaccaatttagtgatcggcggtttcactctcgcagcgatcattattatcctgttcggtctttatctgcgtcatgcttcccgtaccgtgctgatgaatatcatcaatgcgattaaaaccggtgacgtcaaacgcgccccgcgccttgaggcgatgctgagtaaagcgattgaaaccaataaacagcgcgaactgtcctacgtccgccaggcgaccatcgacgctctcaccggctgcaaaaaccgccgcgccttcgacagcgatattgccgccctgatgaacgatcaccagccattcgccctcgcgctggtcgatatcgataactttaaatcgatcaacgacacctggggccatctcaatggcgatatcgtcctgcgtaacgtcgctcgcgaagggctacaggtcctccagccgctggagatatccctctatcgctacggcggcgaagagttcgcggtggtctttcctgccgaacatatcgataacgcccgcacgctgctggaaacatggcgggtaaacgtcgaacgacgcacctggcgcgaagatggcctgacggtcaccttcagcgccggcctcggggaatggaatatggagccactggataagctggtggtgagcgtcgatgaagcgctgtacaaagccaaacagcagggtaaaaaccgtatcctgcgcgcgtaa

SEQ ID NO: 214226 - DNA, 306 bp, Klebsiella pneumoniae
atgaagaatatcgttttgtgctgtgccgccggtatgtctaccagcatgctggttcagcgtatgcaagatgccgcgcagaagaagggtgttgaggtctctatcaaggccgtaccggtcgctgagtttaaagataatctggccgccgccgacattattttgctcggcccgcaggtgaaatatgagcaggcgaagctgcaggcgctggccgacccgttcggcaagaaggtcgccgtgatcgatatgatggactacggcatgatgaaaggtgatgccgttctggataaagcccttaagatgctggagtaa

SEQ ID NO: 214227 - DNA, 318 bp, Klebsiella pneumoniae; identical to SEQ ID NO: 136652

SEQ ID NO: 214228 - DNA, 1341 bp, Klebsiella pneumoniae
atggaattcgcgatacaactcattattatattaatttgtctgttttatggtgcccgaaaaggaggtattgcgctggggctgctgggcggcatcggtttggtgatcctcgtctttgtttttcatctccagccgggcaaaccgccggttgatgtgatgctggtgatcattgcagtggtagccgcctcggcgactctgcaggcgtccggcgggttagacgtgatgctgcagattgccgagaagctgctgcggcgtaacccgaaatatgtttctatcgtggcgcctttcgtcacctgcacgctgaccatcctctgcggtaccggccacgtggtgtataccatcctgccgattatctacgatgtggcgattaagaataacattcgtccggagcgtccgatggccgccagctccattggcgctcagatggggatcatcgccagcccggtctcggtggcggtggtatcgctggtggcgatgctgggaaattttacctttaacgggaaacacctggagtttctcgatctgctggcgataaccattccgtccacgctgctgggtattttagccatcggtatcttcagctggttccgcggcaaagacctggatcaggacgaagccttccaggcgtttattgcgctaccggagaaccgccattacgtctatggcgatacggcgacgctgctggacaaaaagctgccgaccagcaactggatagcaatgtggatttttctggcctctatcgccgtggtggcgctgcttggcgctttttctgaactgcgcccggcctttgacggtaaaccactgtcgatggtgctggttatccagatgtttatgctgctctccggagcgctgatcatcatcattacaaaaactaacccggcatcgatttccaaaaatgaggtctttcgttcgggaatgatcgctatcgtcgcggtgtacggcatcgcgtggatggcggagaccatgtttggcgcgcacatgaccgagattaaaggcgtgcttggtgaaatggtaaaagagtatccgtgggcttatgccatcgtgctgctactggtttcgaaatttgtgaactcccaggcggcagcgctggcggcgattgtgccagtagccttggccatcggcgtcgacccggcctatatcgtggcttctgcgccggcctgctatggctactatattctgccgacctacccaagcgatctggcggcgatccagtttgatcgctcagggaccacccatatcggccgctttgtgattaaccacagctttatcctgcccgggctcatcggcgtcggcgtctcctgcgtgtttggctgggtattcgcggcgatgtacggctttctgtaa

SEQ ID NO: 214229 - DNA, 4224 bp, Klebsiella pneumoniae
gtgaaagacttattaaagtttctgaaagcgcaaactaaaaccgaagagtttgatgcgatcaaaattgctctggcttcgccagacatgatccgttcatggtctttcggtgaagttaaaaagccggaaaccattaactaccgtacgttcaaacctgagcgtgacggccttttctgcgcccgtatttttgggccggtaaaagattatgagtgcctgtgcggtaagtacaagcgcctgaaacaccgcggtgtgatctgtgagaagtgcggcgttgaagtgacccagactaaagtgcgtcgtgagcgcatgggccacatcgagctggcatgtccgactgcgcacatctggttcctgaaatccctgccgtcccgtatcggtctgctgctggatatgccgctgcgtgatatcgaacgtgtactgtactttgaatcctatgtggttatcgaaggtggcatgaccaacctcgaacgcaaccagattctgacggaagaacagtacctggacgcgctggaagagttcggtgacgaattcgacgcgaaaatgggcgcagaagcgatccaggcgctgctgcgcaatatggatctggagcaggaatgcgagcagctgcgtgaagagctgaacgaaaccaactccgaaaccaagcgtaaaaagctgaccaagcgcattaagctgctggaagctttcgttcagtctggcaacaagccggagtggatgatcctgaccgttctgccggtactgccgccagatctgcgtccgctggttccgctggacggtggtcgtttcgcgacgtctgacctcaacgatctgtatcgtcgcgtgatcaaccgtaacaaccgtctgaaacgtctgctggatctggctgcgccggatatcatcgtacgcaacgaaaaacgtatgctgcaggaagcggttgacgccctgctggataacggtcgtcgcggtcgtgcgatcaccggttctaacaaacgtcctctgaaatctttggctgatatgatcaaaggtaaacagggtcgtttccgtcagaacctgctcggtaaacgcgttgactactccggtcgttctgttatcaccgtaggtccatacctgcgtctgcatcagtgcggtctgccgaagaaaatggcgctggagctgttcaaaccgttcatctacggcaagctggaactgcgtggcctggccaccaccatcaaagccgctaagaagatggttgagcgcgaagaagctgtcgtttgggatatcctggacgaagttatccgcgaacacccggtcctgctgaaccgtgcgccaaccctgcaccgtctgggtattcaggcattcgaaccggttctgatcgaaggtaaagccatccagctgcacccgctggtttgtgcggcatacaacgccgacttcgatggtgaccagatggctgttcacgtaccgctgacgctggaagcccagctggaagcgcgtgcgctgatgatgtctaccaacaacatcctgtccccggcgaacggcgaaccaatcatcgttccgtctcaggacgttgtactgggtctgtactacatgacccgtgacagtgttaacgccaaaggcgaaggcatggtgctgactggcccgaaagaagctgagcgtatttatcgcgccggcctggcctctctgcatgcgcgcgttaaagtgcgtatcactgaatacgaaaaagacgacaatggtgagtttgtcgcgaaaaccagcctgaaagacacgaccgttggccgtgccattctgtggatgatcgtaccgaaaggtctgccgttctctatcgtgaaccaggcgcttggtaagaaagcgatctccaagatgctgaacacctgttaccgtattctgggtctgaaaccgaccgttatttttgcggaccagacgatgtacaccggctttgcttacgcagcgcgttcaggtgcatccgttggtatcgatgacatggtcatcccggagaaaaaatacgaaatcatcagcgaagcggaagcggaagttgctgagattcaggaacagttccagtccggtctggtgaccgcgggcgaacgctacaacaaagttatcgatatctgggctgcggcgaacgatcgtgtatccaaagcgatgatggataacctgcaaaccgaaaccgtgattaaccgtgacggtcaggaagagcagcaggtttccttcaacagcatctacatgatggccgactccggtgcgcgtggttctgcggcacagattcgtcagctggctggtatgcgtggtctgatggcgaagccggatggctccatcatcgaaacgccgatcaccgcgaacttccgtgaaggtctgaacgtactccagtacttcatctccacccacggtgctcgtaaaggtctggcggataccgcactgaaaacagcgaactccggttacctgactcgtcgtctggttgacgttgcgcaggacctggtcgtcactgaagacgactgcggcaccctggaaggcatcaccatgacgccggttatcgaaggtggcgacgttaaagagccgctgcgcgatcgcgtactgggtcgtgtgactgcggaagatgttctgaagccgggtaccgcggatattctggttccacgcaacacgctgctgcatgagcactggtgtgacctgctggaagcgaactccgttgactccgtcaaagtgcgttccgttgtatcctgtgacaccgactttggcgtctgcgcgcactgctatggtcgtgacctggcgcgtggccacctcatcaacaaaggtgaggctatcggcgttatcgcggcacagtccatcggtgagccgggtacacagctgacgatgcgtacgttccacatcggtggtgcggcatctcgtgcggctgctgaatccagcatccaggtgaaaaacaaaggtagcatcaagctcagcaacgcgaagtcggttgtgaactccagtggtaagctggttatcacttcccgtaataccgagctgaagctgatcgacgaattcggtcgtaccaaagagagctataaagtaccttacggtgcggttatggcgaaaggcgacggtgagcaggttgccggcggtgaaaccgtcgcaaactgggatccgcacaccatgccggttatcaccgaagttagcggtttcatccgtttcactgacatgatcgacggccagaccattactcgtcagactgacgagctgaccggtctgtcttcgctggtggttctggactctgcagaacgtaccgcaggtggtaaagatctgcgtccagcactgaaaatcgttgatgctcagggcaacgacgttctgatcccaggcactgatatgcctgctcagtacttcctgccgggtaaagcgattgttcagctggaagatggcgtacagatcagctctggtgacaccctggcgcgtattccgcaggaatccggcggtaccaaggatatcaccggtggtctgccgcgcgttgcggacctgttcgaagcacgtcgtccgaaagagccggctatcctggctgaaatcagcggtatcatttccttcggtaaagaaaccaaagggaaacgtcgcctggttatcaccccggtagacggtagcgagccgtacgaagagatgatcccgaaatggcgtcagctcaacgtgttcgaaggtgaacgtgtggaacgtggtgatgtggtttccgacggtccggaagcaccgcacgacattctgcgtctgcgtggcgtacatgctgtgacccgttacattgttaacgaagtccaggacgtataccgtctgcagggcgttaagattaacgataagcacatcgaagttatcgttcgtcagatgctgcgtaaagccaccatcgaaagcgcaggcagctccgacttcctcgaaggcgagcaggtggaatactcccgcgtcaagatcgcgaaccgcgaactggaagcgaacggcaaagtgggcgcaacgttctcccgcgatctgctgggtatcaccaaagcgtctctggccaccgagtccttcatctccgcggcatcgttccaggagaccactcgcgtgctgaccgaagcagccgttgcgggcaaacgcgacgaactgcgcggtctgaaagagaacgtcatcgtgggtcgtctgatcccggccggtaccggttatgcgtatcaccaggatcgtatgcgccgtcgcgctgctggcgagctgccggcggcaccgcaggtgagcgtggaagaagcgtctgccaacctggcagagctgctgaacgcaggtctgggcggttctgacaacgattaa

SEQ ID NO: 214230 - DNA, 4029 bp, Klebsiella pneumoniae
atggtttactcctataccgagaaaaaacgtattcgtaaggattttggtaaacgtccacaagttctggatgtgccatatctcctttctatccagcttgactcgttccagaagtttatcgagcaagatcctgaagggcagtatggtctggaagctgctttccgttccgtattcccgattcatagctacagcggtaattccgagctgcaatacgtcagctaccgtctgggcgaaccggtttttgacgttaaagaatgtcagatccgtggcgtgacttattctgcaccgctgcgcgtaaaactgcgtctggtgatctacgagcgcgaagcgccagaaggcaccgtcaaagacattaaagaacaagaagtctacatgggcgaaattccgctcatgaccgacaacggtacctttgttatcaacggtaccgagcgtgttatcgtttctcagctgcaccgtagcccgggcgtcttctttgacagtgacaaaggtaagacccactcctccggtaaggttctgtataacgcacgtatcatcccttaccgcggttcctggctggacttcgaattcgacccgaaagacaacctgttcgttcgtatcgaccgtcgtcgtaagctgccggctaccatcatcctgcgcgcgctgaattacaccactgagcagatccttgacctgttcttcgaaaaagtggtctttgaaattcgcgacaacaagctgcagatggagctgattccggagcgtctgcgcggtgaaactgcctccttcgatatcgaagccaacggcaaagtgtacgttgagaaaggccgtcgcatcacggctcgtcatatccgtcagctggaaaaagacgatatcaagcatatcgaagtgccggttgaatatatcgcgggcaaagtggcggctaaagactatatcgatgaagcgactggcgaactgatctgcccggcgaacatggagctgagtctggatctgctggctaagctgagccagtctggccacaagcgtatcgaaacgctgttcaccaacgatctggaccacggcccgtacatctctgaaacggtacgcgtcgacccgactaacgatcgtctgagcgcgctggtagaaatctaccgcatgatgcgccctggcgagccgccgactcgtgaagccgctgaaagtctgtttgagaacctgttcttctctgaagaccgctacgatctgtccgcggttggtcgtatgaagttcaaccgttctctgctgcgcgacgaaatcgaaggttccggtatcctgagcaaagacgacatcatcgaagtgatgaagaagctcatcgatatccgtaacggtaaaggcgaagtggacgatatcgaccacctcggcaaccgtcgtatccgttccgttggcgaaatggcggaaaaccagttccgcgttggcctggtacgtgtagagcgtgcggtgaaagagcgtctgtctcttggcgatctggataccctgatgcctcaggatatgatcaacgccaagccgatttccgcagcagtgaaagagttctttggttccagccagctgtctcagtttatggaccagaacaacccgctgtctgagattacgcacaaacgtcgtatctccgcactcggcccaggcggtctgacccgtgagcgcgcaggcttcgaagttcgagacgtacacccgacccactacggtcgcgtatgtccgatcgaaacgcctgaaggtccgaacatcggtctgattaactccctgtccgtgtacgcgcagaccaacgaatatggcttccttgagacgccgtatcgtaaagtgaccaacggtgtggttactgacgaaattcactacctgtctgctatcgaagaaggcaactacgttatcgctcaggcgaactccaacctggatgaaaacggccacttcgtagaagatctggttacctgccgtagcaaaggcgaatccagcttgttcagccgcgaccaggttgactacatggacgtatccacccagcaggtggtatccgtcggtgcgtccctgatcccgttcctggaacacgatgacgccaaccgtgcattgatgggtgcgaacatgcaacgtcaggcggttccgactctgcgcgctgataagccgctggttggtaccggtatggaacgtgctgttgccgttgactccggtgttactgccgtggctaaacgtggcggtaccgttcagtacgtggatgcttcccgtatcgttatcaaagttaacgaagacgagatgtacccgggcgaagcaggtatcgacatctataacctgaccaagtacacccgttctaaccagaacacctgcatcaaccagatgccttgcgtgtccctgggcgaacctattgagcgcggcgacgtgctggcagacggcccgtccaccgacctcggtgagctggcgctgggtcagaacatgcgtgtagcgttcatgccgtggaacggttacaacttcgaagactccatcctcgtttccgagcgtgttgtccaggaagaccgtttcaccactatccacattcaggaactggcgtgcgtgtcccgtgacaccaagctggggccggaagagatcaccgctgatatcccgaacgtgggtgaagctgcgctctctaaactggatgagtccggtatcgtttatatcggtgcggaagtgaccggcggcgacattctggttggtaaggtaacgccgaaaggtgaaacccagctgacgccggaagagaaactgctgcgcgcgatcttcggtgagaaagcgtctgacgttaaagactcttctctgcgcgtaccgaacggtgtctctggtaccgttatcgacgttcaggtctttacccgtgacggcgtagaaaaagacaaacgtgctctggaaatcgaagagatgcagctgaagcaggccaaaaaagacctgtctgaagaactgcagatcctcgaagccggtctgttcagtcgtatctacgcggtgctggtctccggtggcgttgaagctgagaagctcgacaagctgcctcgcgatcgctggctggaactgggcctgaccgacgaagagaaacaaaatcagctggaacagctggctgagcagtatgacgaactgaaacacgagttcgagaaaaaactcgaagcgaaacgccgtaaaatcacccaaggcgacgatctggcaccgggcgtgctgaagattgttaaggtatatctggccgttaaacgccgtatccagcctggtgataagatggcgggtcgtcacggtaacaagggtgttatctctaagatcaacccgatcgaagatatgccgcacgatgctaacggtacgccggtagatatcgtactgaacccgctgggcgtaccgtctcgtatgaacatcggtcagatccttgaaactcacctgggtatggctgcaaaaggcatcggcgataagatcaacgccatgctgaaacagcagcaggaagtcgcgaaactgcgcgaattcatccagcgtgcttacgatctgggcgctgacgttcgccagaaagttgacctgaataccttcagcgatgaagaagttctgcgtctggctgaaaacctgcgtaaaggcatgccgatcgcaacgccggtattcgacggtgcgaaagaagctgaaatcaaagagctgctgcagctgggcgacctgccgacttccggtcagatcaccctgtttgatggccgcaccggtgaacagttcgaacgtccggtaaccgtgggttacatgtacatgctgaaactgaaccacctggtcgacgacaaaatgcacgctcgttccaccggttcttacagcctggttactcagcagccgctgggtggtaaggcacagttcggtggtcagcgcttcggtgagatggaagtgtgggcgctggaagcatacggcgcggcctacaccctgcaggaaatgctcaccgttaagtctgatgacgtgaacggtcgtaccaagatgtataaaaacatcgtggacggcaatcaccagatggaaccgggcatgccggaatccttcaacgtactgttgaaagaaattcgctcgctgggcatcaacatcgaactggaagacgagtaa

SEQ ID NO: 214231 - DNA, 366 bp, Klebsiella pneumoniae
atgtctatcactaaagatcaaatcattgaagcagtatccgctatgtccgtaatggacgttgttgagctgatctctgcaatggaagaaaaattcggtgtttccgctgctgctgctgtagctgtagctgctggcccggttgaagctgctgaagaaaaaactgaattcgacgtaattctgaaagctgctggcgctaacaaagttgctgttatcaaagcagtacgtggcgcaactggcctgggtctgaaagaagctaaagacctggtagaatctgctccggctgcactgaaagaaggcatcagcaaagacgacgctgaagctctgaaaaaatctctggaagaagctggcgctgaagttgaagttaaataa

SEQ ID NO: 214232 - DNA, 498 bp, Klebsiella pneumoniae
atggctttaaatcttcaagacaaacaagcgattgttgctgaagtcagcgaagtagccaaaggcgcgctgtctgcagtagttgcggattcccgtggcgtaactgtagataaaatgactgaactgcgtaaagcaggtcgtgaagctggcgtatacatgcgtgttgttcgtaacaccctgctgcgccgcgtcgttgaaggtactcagttcgagtgcctgaaagacacgtttgttggtccgaccctgattgcatactctatggaacacccgggcgctgctgctcgtctgttcaaagagttcgcgaaagcgaatgcaaaatttgaggtcaaagccgctgcctttgaaggtgagctgatcccggcgtcgcagatcgaccgcctggcaactctgccgacctacgaagaagcaattgcacgcctgatggcaaccatgaaagaagcttcggctggcaaactggttcgtactctggctgctgtacgcgatgcgaaagaagctgcttaa

SEQ ID NO: 214233 - DNA, 705 bp, Klebsiella pneumoniae
atggctaaactgaccaagcgcatgcgcgtgatccgtgagaaagttgatgcaactaaacagtacgacatcaacgaagccattgctctgctgaaagagctggccaccgctaaatttaccgaaagcgtagacgttgccgttaacctcggcatcgacgctcgtaaatctgaccagaacgtccgtggcgcaactgtactgccgcacggtactggccgttccgttcgcgtagccgtatttacccagggcgcaaacgctgaagctgctaaagctgcaggcgctgagctggtaggtatggaagatctggctgagcagatcaaaaaaggcgaaatgaactttgacgttgttattgcttccccggatgcaatgcgcgttgttggccagctgggccaggttctgggtccgcgtggcctgatgccgaacccgaaagtaggtaccgtaactccgaacgttgctgaagcggttaaaaacgcgaaagcaggtcaggttcgttaccgtaacgacaaaaacggcatcatccacaccaccatcggtaaagtggactttgacgctgacaaactgaaagaaaacctggaagctctgctggttgcgctgaaaaaagcaaaaccgactcaggcgaaaggcgtgtacatcaagaaagttagcatctccaccactatgggtgcaggtgttgcagtagatcaggctggcctgaacgcttctgcaaactaa

SEQ ID NO: 214234 - DNA, 429 bp, Klebsiella pneumoniae
atggctaagaaagtccaagcctacgtcaagctgcaggttgcagctggtatggcgaacccgagcccgccggtcggcccagcactgggtcagcagggcgtgaacatcatggaattctgcaaagcgttcaacgctaaaactgattccctggagaaaggtctgccgatcccggttgttatcaccgtttacgctgaccgttcctttacctttgttaccaagactccgccggctgctgttctgctgaagaaagctgcaggcatcaagtctggttccggtaagccgaacaaagataaagtgggtaaaatctcccgcgctcagctgcaggaaatcgcgcagaccaaagctgccgacatgactggtgccgacattgaagcgatgactcgctccatcgaaggtactgcacgttccatgggcctggtagtggaggactaa

SEQ ID NO: 214235 - DNA, 546 bp, Klebsiella pneumoniae; identical to SEQ ID NO: 139551

SEQ ID NO: 214236 - DNA, 384 bp, Klebsiella pneumoniae; identical to SEQ ID NO: 139552

SEQ ID NO: 214237 - DNA, 2574 bp, Klebsiella pneumoniae
atgcgtctggatcgtcttaccaataaattccagcttgctcttgccgatgcccagtcgctcgcactcgggcacgacaaccaattcatcgaacctcttcatttaatgagcgccttgctgaatcaggaagggggatcggtacgtcctttattaacctcggcgggcgtgaatgccgggaaactgcgcactgacatcgaacaggccttgagccgtttaccgcaggtggaaggcaccggcggcgatgtgcaaccttctcaggatttagtgcggatcctcaacctttgcgacaagctggcgcaaaagaaaaaggacaactttatttcgtcggaactgttcgttctggcggcgcttgaatcacgcggtacgctgaccgaccttttaaaatccgccggagcaacaaccgccaacgtgactcaggcgattgaacaaatgcgcggaggggaaagcgtgaacgatcagggtgccgaagaccaacgtcaggcattgaagaaatttaccgtcgatctcaccgagcgtgccgagcagggcaagctggatccggtgatcggccgtgatgaagagattcgccgtaccattcaggtactgcagcgtcgtaccaaaaacaacccggtgctgatcggtgaacccggggtgggtaaaacggcaatcgtcgaaggcctggcgcagcgtatcgtcaacggcgaagtaccagaagggctgaaaggccgtcgggtattggcgctggatatgggggcgctggtggccggggcgaaataccgcggtgagtttgaagagcgtctgaaaggcgtgctgaccgacctgtcaaaacaggaaggcaacgtcattctgtttatcgacgaactgcataccatggtgggcgctggtaaagccgacggcgcgatggatgcgggtaatatgctgaagccggcgctggcgcgtggtgaactgcactgcgtcggggcgacgacgcttgatgaataccgtcagtacatcgaaaaagacgccgcgctggaacgtcgcttccagaaagtgttcgtcgccgagccttcggtagaagataccatcgcgattctgcgcggtctgaaagaacgttatgagctgcaccaccacgtgcagatcactgacccggctatcgtggcggcggcgaccttatcgcatcgctatattgccgaccgtcagctgccggataaagccatcgacctcatcgatgaggcggcatccagcatccgtatgcagattgactccaaaccggaagagctggaccgcctcgatcggcgtattatccagctgaaactggaacagcaggcgctgaagaaagagtctgatgaggcgagcctgaagcgtcttgatatgctcaacgaggagctggcggataaagaacggcagtactcggtgctggaagaagagtggaaagcggaaaaagcgtcgctctccggcacccagaccatcaaagctgagctggagcaggcgaaaatcgccatcgaacaggcgcgccgcgtcggcgatctggcgcggatgtccgagctgcagtacggcaaaattccggaactggagaaacagctggcggcggccactcagtccgaagggaaaaccatgcgtctgctgcgtaataaagtgacggatgctgaaatcgccgaagtgctggcccgctggaccggtatcccggtctcccgcatgatggaaagcgagcgcgacaaactgctgcgtatggagcaggagctgcatcatcgggtgattggccaggatgaggcggttgaagcggtatccaacgccattcgccgcagccgcgccgggctgtccgatccgaaccggccgattggttcgttcctgttcctcggtccaaccggggtcggtaaaaccgagctgtgtaaaacgctggctaactttatgttcgacagcgacgacgcgatggtgcgtatcgatatgtccgagtttatggagaaacactccgtctcgcgtctggtcggtgcgcctccgggatacgtcggctatgaagagggaggttacctgaccgaggcggtgcgccgtcgtccttattccgtcatcctgctggatgaagtggaaaaagcgcacccggatgtgttcaacattctgctgcaggtactcgacgacgggcgtctcaccgacgggcaggggagaacggtcgacttccgtaatacggtagtcatcatgacctcgaacctcggttccgatctgattcaggaacggttcggcgagctggactacggacatatgaaggacctggtgctgggggtagtcagccagaacttccgtccggagttcatcaaccgtatcgacgaagtggtggtcttccatccgctgggcgagaaacatattgcctctattgcccagatccagctgcagcgtctgtataaacgtctggaagagcgcggatatgaagtgcagatgtccgatgaggcgctgaagctgctgagcgccaatggttacgatccggtatacggcgcgcggccattgaaacgtgctattcagcagcagattgagaacccgttagcccagcagatcctttccggtgagctggttccgggtaaaaccatcgagctggtagtaaaagacgaccgcattgtggcagtgcagtaa

SEQ ID NO: 214238 - DNA, 732 bp, Klebsiella pneumoniae
atgacgaaactgattgtaccgcagtggccaatgcccggcagcgtggcggcctgtagttctacccgcatcggcggcgtgagtctgccgccctatgactcgctcaacctgggcgcccattgcggcgacaatctgcaggatgtcgaagaaaaccggcggcggatgtttgccgccggcggcttgccgtcttacccggtttggctggagcaggtccatggcaccgaggttctgacgctggacggcggaccctatccgtcgaaacgcgcggatgcttcttatagtcgtacgccagggaccgtctgcgcggtgatgaccgctgactgcctgccggtgctgttctgtaaccgcgacggcaccgaagtcgccgcggcgcacgcgggatggcgcggcttatgcgaaggggttctggaagcgacggttgctcgtttcgccgataaagccgaaaatattatggcgtggctggggcccgccatcggtccgcaggcgtttgaggtgggaccggaagtccgggatgcctttatggcgaaggacaagaatgcgcaccgggcttttcgtccggcaggcgaaaaatattttgctgatatctaccaactggcgcggcagcgtctggcaaacgtcggcgttgagctgattttcggcggcgatcgctgcacgctaagcgaaaaggatgattttttctcttaccggcgcgacaagaccaccggtcgtatggcaagtttcatttggctgatataa

SEQ ID NO: 214239 - DNA, 981 bp, Klebsiella pneumoniae
atggcacaacgagtacaactcaccgcaacggtgaccgaaaatcaactcggtcaacgcttagatcaggctttggccgaattgttccctgattattcgcgatcgcggataaaagaatggatcctcgaccaacgcgtattagtcaatggcaccattggcgataaaccgaaagaaaaagtgctggggggagaacgcatcgctatcgatgtggaaatcgaagaagaggcgcgcttccagccgcaggatattccgctcaatatcgtttacgaagatgatgacatcatcgtgatcaataaaccgcgcgatctggttgtacatcctggcgcgggcaaccctgacggtactgtgctgaatgcgctgctgcactactatccgcctattgccgatgtgccgcgcgcgggtattgttcatcgtctggataaagacaccaccggtctgatggtggtggcgaaaaccattccggcgcaaacccggctggtggagtcgctgcagttgcgcgagatcacccgtgaatacgaagcggtggcgatcggtcatatgaccgccggtggcacagtggaagagccgatcagccgtcacccgaccaagcgtacccatatggcggtgcatccgatgggcaaaccggcggtgacccactaccgcattatggaacatttccgcatccatacccgcctgcgtctgcgtctggaaaccggtcgtacacatcagatccgcgtgcatatgtcgcatatcacccatccgctggtgggtgaccaggtctatggcggccggccgcgtccgccgaagggcgcgtcggaggagttcatcaccgcgctgcgtaaattcgaccgccaggcgctgcatgccaccatgctgcgcctgtatcacccgatctccggcattgaaatggagtggcacgcgcccatcccgcaggatatggtcgagctcatcgaggcgatgcgcgccgattttgaagcccataaggacgatattgactggttatga

SEQ ID NO: 214240 - DNA, 738 bp, Klebsiella pneumoniae
atgacgcgcatgaaatacctggtggcagccgccacactgagcctggctttggtgggttgctccggctctaaggaagaggtgcctgataatccgccgaatgaaatctacgcgaccgcccagcaaaaactgcaggacggtaactggaaacaggcgataacgcaactggaagcgttggataatcgttatccattcggcccttattcccaacaggtacagctggatctgatttatgcgtattataaaaacgccgatcttcctctggctcaggcggctatcgatcgcttcatgcgtttgaaccccacccatccgaacatcgactatgtcatctatatgcgcggcctgaccaacatggccctggatgacagcgccctgcagggcttcttcggcgttgatcgctccgaccgcgatccgcagcacgcgcgcgatgccttcaatgacttctccaaactggtgcgtggttatccgaacagccagtacgccactgacgcctataaacgcatggtgttcctgaaagatcgtctggccaaatatgagctgtcggtcgtggattactacaccgatcgtggcgcatgggttgccgtggttaaccgtgtggaagggatgatgcgtaattatccggatacccaggccacccgcgatgccctgccgaagatggaaaacgcctatcgtcagatgcaaatgaacgctcaggcggacaaagtcgcgaagattatcgccgcgaacagcaagaacacctga

SEQ ID NO: 214241 - DNA, 336 bp, Klebsiella pneumoniae; identical to SEQ ID NO: 137393

SEQ ID NO: 214242 - DNA, 1161 bp, Klebsiella pneumoniae
atgaccgaggaaaacccattactggcgctgcgcgataagataagcgccctggacgagaagctgcttgctctgctggcggagcgccgcggactggctgttgaggttggaaaagccaaactggcctcccatcgtccggtgcgtgatattgaccgcgaacgcgatctgctggagcgcctgatgactatcggcaagcgccataatctggatgcgcactatatcacccgcctgttccagctgattatcgaagactctgttcttacccagcaaaccctgctgcagcagcatctgaataaaattaacccgcattcggcccgcgtggcgttcctcggtcccaagggctcttactcgcatctggcggcgcgtcagtacgccgctcgccactttgagcagtttattgagagcggctgcgcgaagttcgccgatatttttaatcaggtagaaaccggccaggccgattacgcggtggtgccgattgaaaacaccagctccggcgggatcaacgacgtctacgatctgctgcagcacaccagcctgtcgatcgttggcgagctgacgatccctatcgatcattgcgtactggtgagcacctcgacggatgccgataaaattcagaccgtttacagccatccgcagccgttccagcagtgcagccaatacctgagccgctacccgcactggaagattgagtataccgagagcacctcggcggcaatggaaaaagtggcgcaggcgaactccccggccgtcgcggccctgggtagcgaagcgggcggcgctctgtatggtctgcaggtgctggagcactgccaggccaaccagacgcagaacatcacgcgcttcctcgtcctggcgcgcaaagcggtgaacgtctccgaccaggtgccggccaagaccacgctgttaatggcgaccggtcagcaggcgggcgccctggtggaagccctgctggtgctgcgcaaccacaatctgatcatgaccaaactggaatcccgcccgatccacggcaatccctgggaagagatgttttatctcgatattcaggccaacctggattcgctgcccatgcgcaaggcgctgaaggagctggcggatatcacccgctccatgaaggtcctcggctgctaccctagcgaaaacgtggtcccggtggatccggtttaa

SEQ ID NO: 214243 - DNA, 873 bp, Klebsiella pneumoniae
atggctgaaccacaaccgctgtttgactacaccggatacctgccggaatgcccgacctggagcgaggcagagcaggccctctactgggctgatatcatggaatgtgaaattcaccgctacgatatccgcagcggagaacaccaggtgctgcagtttccagaggaggtcggctgttttgccctgcgcgagaagggcgggtttatcgttgcattgcgcagcggcatctggctgaccgacgcccacggcctgctgcggcggaaagtctgcgataacccgagcaacccggagctggcgcggtttaacgacggcgggaccgatcgcgatgggcgcttttatgccggtaccttctgggggcctggggattacaacggcgcgctgctgatgcgagtggataacgacctgcagccgaaagtgatccagtgtgacatccatggcgccaatggcctggcctttagcgccgaccggcgctggatgtatacctctgatacgccgaacgccgtgatctaccgtacgccgctggatgagcagggtgagcctggccgacgcgaagtctttcgccgttttcagcctggcgaagggatccctgacggggcggcgatcgacgtggagggatgttactggagcgcaatgtttgacggctggcggatcgcccgtttctcgccgctgggcgaggagctggaatcctacccgatgccggttcgttgcccgacgatggtctgcttcggcggggcggatatgaaaacgctctatatcaccaccacccgggaaaacatggaggacgatgagctggcgcagtatccgctgtcaggcgccatcttcaccctgccggtagcggtggcagggatgaagaaattaccgttccgcgaatgttaa

SEQ ID NO: 214244 - DNA, 1122 bp, Klebsiella pneumoniae
atggttgctgaactgaccgcgttacgcgatcaaattgatgaagtggataaagcgttgcttagcctgctggctaagcgtctggagctggtggccgaagtcggcgaggtgaagagccagtatggcctgccgatttacgtcccggagcgcgagtcggcgatgctcgcctcccgacgtgaagaggcggctgcgctcggcgtaccaccggatctgatcgaggacgttctgcgtcgcgtgatgcgggaatcctattccagcgaaaacgacaaaggcttcaaaaccctgcagccgaatctgcggccagtggtcatcgtcggcggcggtgggcagatggggcgtctgtttgagaagatgttaacgctgtccggctaccaggtgcgtattctggaaaaaaacgattgggcccgggcggcggatatcgtcgccgatgccggcatggttatcgtcagcgtaccgattcacaccaccgtggagacgatcggcaggctgccgccccttccggcggattgcattctggttgaccttgcctcggtgaaagcggagccgctgcaggcgatgctggcggcgcatcagggcccggttcttggcctgcacccgatgttcggtccggacagcggcagcctggcgaagcaggtggtggtctattgtgatggccgccagccggaggcctatcagtggttcctcgaacaaatccaggtttggggcgcgcggctgcaccgcatcagcgccgttgagcacgatcagaacatggcctttattcaggcgctgcgccactttgccaccttcgcctatggcctgcacctggcggaagagaatgtacgtcttgagcaactgctggcgctctcgtcacccatttaccgactggagctggcgatggtaggccgtctgtttgcccaggatccgcagctgtacgccgatattattatgtcatcggaaaacaacctggcgctgattaagcgctactaccagcgtttcggcgaagcgatcggcctgctggagcagggcgataagcaggcgtttatcgacagcttccgtaaagtcgaacactggtttggcgattacgctcagcgtttccagagcgagagccgcacgctgctgcgtcaggcgaacgataatcggcagtaa

SEQ ID NO: 214245 - DNA, 1071 bp, Klebsiella pneumoniae
atgcaaaaagacgcgctgaacaacgtacatattaccgacgaacatgtattaatgaccccggagcaactgaaggcggaattcccgctgagcgtcgagcaggaagcgcagatcgcgcacgcccgtcagaccatttcggatatcatcgccggtcgcgatccgcgcctgctggtggtatgtggtccttgctccattcacgatccggaagccgcgattgaatatgctcgtcggtttaaagcccttgccgcagaggtcagcgatagcctctacctggtgatgcgcgtctattttgaaaaaccccgtaccaccgtcggctggaaggggctgattaacgatccgcacatggatggttcgtttgatgttgaaggcggcctgaagattgcgcgtcgtctgctggtcgagctcgtcaatatgggactgccgctggcgacggaagcgctggatcccaacagcccgcagtacctcggggatctgttcagctggtccgctatcggcgcgcgtaccacggaatcacaaacgcaccgcgaaatggcctctggcctgtcgatgccggtcggctttaaaaacggtaccgacggtagcctggctacggccatcaacgccatgcgcgccgcggcgatgccgcaccgtttcgtcggcatcaaccaggccgggcaggtctgcctgctgcaaacgcagggtaatccgaacggccatgtgatcctccgcggcggcaaggcgccgaactacggtccggaagatgtggcgaaatgcgaaaaagagatggcgcaggcgggactgaagccgtcgctgatggtagattgcagtcatgggaactccaataaagatttccgccgccagccggccgtggctgaatccgtggtcgcgcagatcaaagatggcaaccgctccattatcggcctgatgatcgaaagtaatatccacgaaggcaatcagtcctctgaacagccgcgtgaggcgatgaaatacggcgtctcggtgacggatgcctgcatcagctgggagactaccgaggcgctgctgcgtgaactggataaggatctccgcggccacctggcggcccgtttggtttaa

SEQ ID NO: 214246 - DNA, 510 bp, Klebsiella pneumoniae
atgacagtattacaccgtcttttattgactgtattttttctcatcgcggtatctcctgtttttgctgccggaccttcagaacatgttcgcgctattgtttccgggatcgtgacctacacccgttggccgtcattaacaggagcgccaaagctgtgcatttttgcctcatcacgcttcacccatagcctggctcatgaagatccggatgcattaccctatcaaccggtgatagtacgtaatcgtgaagaagcgttaaaaacgacctgcgatggtttttattttggcagcgaatcgccgactgaacagtcagaactcactcgccgctatggcccgaggccgctgttactcatcgcagaacaaaatacggattgttcaattggtagcgcgttttgcctgatcatcaatgacgaccgggtccgcttctccgttaatctggacgttctgacgcacagcggggttcgggttaacccggacgttctgatgcttgcccggaagaaaccacatgaataa

SEQ ID NO: 214247 - DNA, 1224 bp, Klebsiella pneumoniae
atgaataaggacttttcacagactccgcgcccgactttcaaacgcgcgctccgtcgcattagcgtgataagcgtggtgatctccatgacgctggtctggctgctgctaagtacagcctcaatcttcacgctcaagcagtacgcgcagaaaaatcttgagctcactgccgcgaccatggggcgcagcctcgaagccgccctggtgtttggcgacagcgcggcggcagaggagaccctcgcgtcgttgggcaagcaagggcagatctcccaggcaatcgtgctaaacggccagatgcagcacttcgccgcgtggcgccatgaacccctggccaataaagagcaagtgagcgggcttatcagtaaatggctgtttccggagcccacggtgcagcccatctggcaccagggcaaacaaatcggcgagctgagattgaccgcgcttgatgaactgattagccactttctcggtatctcgattctggtgctgaccggcagcattctgctcgcctcgttcatcgccctgctgctgacccactccctacaccgggggatcgtcgccgccctgcagagcatcactgaggtcgtgcatgatatacgtgaaaaccgccacttctcccggcgggtgccggaggagcgtatcgaggagttccatcttttcgcccaggactttaacagcctgctgggggaaatggaggactggcagcgccagctgcaggccaaaaacgcgcagctgttgcgcagttcgttacacgatccgttgaccggcctggctaaccgcgccgcctttcgtaacgcgctcgccgagctgatgcagaatgaagtcgatcatcaaacctcggcattgctgtttcttgatggcgataatttcaaactgattaacgacaactgggggcatgcggcgggcgataaagtgctgatggaggtcgccagccgcctgatgacttttgccggtaaacgccatctggcgtggcgtcttggcggcgatgagtttgccgttctgctgcgcgaggtgcgctcggaagcagaagtgcaggccctgtgccaggcgctaacggaacaatttcttccgccattcaacctgcacaacggtcatagcgccacgctctcgctgagcgtcggttatgccctggcgtgggagcacgccaccgcggaatcactgcaagaacttgccgatcagaatatgtatcggatgaaaaaccaacgtatccagcagacgctgaaataa

SEQ ID NO: 214248 - DNA, 483 bp, Klebsiella pneumoniae
atgatcagaaaatatttcgtccccgccctgatggcggcggcgcttttgacaggttgccaggctcctcagggaaaatttaccccggagcaggtggcggcgatgaaatcttacggcttcactgaaagcaatggcgattggtccctgggcttatccgatagcatcctgtttgacaagaatgactaccgactacgtcccgacagccgccagcagatcatcacgatggcctcgcggctggcggctaccgggatcacccatagccgccttgaaggccataccgataattatggtgaagatagctacaatgaagccctgtcgcttaagcgggccaacagcgtggccgatgcctgggcggaaggcgctcatgtcccacgcagtaatttagtcacccgcggccttggcaaaaaatacccgatcgccagcaacgacacggcggccgggcgcgccgaaaaccgccgggtaacggtggtcatcagcacgccgtaa

SEQ ID NO: 214249 - DNA, 1371 bp, Klebsiella pneumoniae
atgacaacctgcacctcgcgcgcggcatggctgaacctgctgcgtcgcctccatttctatattggtctgtttatcggaccgtttatctttgtcgctgccctgaccggtacgttgtacgtggcgacgccgcagctggaaaactggctctatcacgacgcgctgcatggccttgccgaggggactccgcagccgctcagcgcccagattgcggtggccgaagaagcgacccagggcaatctgcggctgctggcggtgcgtccggcgcctgcgttgggcgagaccacgcgcattatgtttgccgatccgggtctcggagagtcggaatcccgggctatttttgtcgatccgatcgcgctgcgggtgaagggcgatatgacggtctacggcaccagcggcatcctgccgctgcgccagtggattgattatgcgcatcgctctctgctgctgggcgacagcgggaggttatacagcgaactggccgcctcctggatgtgggtggccgcgctcggaggcattgccctgtgggcgatgacgcgtccaaaacggcggctgaataacgccctgcagaatcatcgtcggctgcacgtgacgctgggctggggcttactggtgggtatgctgctcttctccgccaccggcctgacctggtcgcaatgggccggcggcaatgtggacaaaatgcgggcagcgttcggctggctgacgccgcaggtcaatacccagctgcatggcgagatgccgatgacgcacgatccccatgccggacatcatatggatgcgatggccatggcccagcatcagccggcgctgcagttggcccagtttgaccaggcgctggcggcggcccgtcaggcggggctgaacgccagccggctggagatccgtccgccagtgtcagacgaccgcgcctggacggtgaatgagatcgaccgtcgctggccgacgcaggtggacgcggtggcgatcgatggcgccacgatgcaggtggtggatcgcacgcgttttgccgactttccgctgatggcgaagctcacccgctggggcgtcgatttccatatggggatcctctttggtctggcgaatcagctgctgctggtgggatttggctgcgcgctgtgcgttaccatcggggtggggtaccgattatggtggatccgccgtccgcctcaggcggcctgggatccggcgcattcgctgctgcaggcgtggctgtcgctcgcctggcctgcccgaagcctggtgcttgggctggcgtttgcccttggattggccatgccgttaatgggagccagcctgctgctgttcattgccgttgactacctgcgctggcgcgcggcaacggcaatgaggatgatgaagtccagcgactaa

SEQ ID NO: 214250 - DNA, 459 bp, Klebsiella pneumoniae
gtggtcagcaacagttttcagcaaacgacacctaaacggcgagccgcctggctggcgctgttggcgatcctgctgatcgtggtggccccgctaatctccgtctccctgcaaaaagaccccatgagcgccatgcccggcatgcaccacgccatgatgatggatagctcgtccgcgagcatggcgcagatgcccgggcacaagatggcgatgatgcacagcacagacggcgccacgcataccggacacgaaatgccgctggaccatgccgaagcgtgtggctattgcgtgctgttagcccatgtcccggggctccttttcgcgctggcgctgttcgtcgccatgcttctgcggcgcattcgcctgccggtttctcgcccggtattaaagcactggcactactttccctggctctaccccgaaacccgcgccccgccgcggctgtctgctttttccctttaa

SEQ ID NO: 214251 - DNA, 348 bp, Klebsiella pneumoniae
atgagcaacattattaagcaacttgaacaagaacagatgaagcaggacgtaccttccttccgtccgggtgataccgtggaagtgaaagtatgggttgttgaaggttccaaaaaacgtctgcaggcattcgagggcgtggttatcgctattcgtaaccgcggtctgcactctgcattcactgttcgcaaaatttccaacggcgaaggcgttgagcgtgtcttccagactcactctccggtagttgacagcattgctgttaaacgtcgtggtgctgtacgtaaagctaaactgtactacctgcgtgagcgcactggtaagtctgctcgtatcaaagagcgtcttaactaa

SEQ ID NO: 214252 - DNA, 768 bp, Klebsiella pneumoniae
atgtggattggcataattagcctgtttcctgaaatgttccgcgcaattaccgattacggggtaactggccgggcagtaaaaaatggcctgctgagcatcgaaagctggagtcctcgcgacttcacgcatgaccggcaccgtaccgtggacgatcgtccttacggcggcggaccggggatgctaatgatggtgcaacccttacgggatgccattcatgcagcaaaagccgcggcaggtgaaggcgcgaaggtgatttatctgtcacctcagggacgcaagcttgatcaagcgggcgtcagcgaactggcaacgaatcagaaactgattctggtgtgcggtcgctacgaagggatagacgagcgcgtaatccaaaccgaaattgacgaagaatggtcaatcggcgattacgttctcagcggtggtgagttaccggcaatgacgctgattgactccgtttcccggttcattccgggagtactgggccatgaagcatcggcaacggaagattcctttgctgatgggttgctggattgcccccactatacccgtcctgaagtgttagaggagatggaagtaccgccagtattgctgtcgggaaaccatgctgagatacgtcgctggcgtctgaagcagtcgctgggccgcacctggcttagaagacctgaacttctggaaaacctggctctgactgaagagcaagcaaagctgctggcggagttcaaaactgaacacgcgcaacagcagcataaacatgatgggcaggcgtga

SEQ ID NO: 214253 - DNA, 549 bp, Klebsiella pneumoniae
atgagcaagcaacacaccgcgcaagcacctgttgatccgatcgtattggggaaaatgggttcttcctacggtatccgtggttggctcagagtgttttcctccaccgaagacgccgaaagcatttttgactatcagccctggttaatccagaaggcgggtcagtggcaggtcgttgagctggaaagctggcgccaccacaatcaggacatcatcatcaagctgaaaggcgttgacgatcgtgatgccgcgaatctactgactaattgcgaaattatcgtggattcatcgcagttgccggagctggaagagggtgactactactggaaagacctgatgggctgccaggtagttacgacggaaggctatagcctcggtaaagtcatcgatatgatggaaaccgggtcgaatgacgtgctcgtcatcaaggcaaacctgaaagatgcatttggtatcaaggagcggttggttccgttcctcgatgggcaggttatcaagaaagtcgatctcactacgcgtactatcgaagtagattgggatcctggtttttaa

SEQ ID NO: 214254 - DNA, 249 bp, Klebsiella pneumoniae; identical to SEQ ID NO: 138230

SEQ ID NO: 214255 - DNA, 1365 bp, Klebsiella pneumoniae
atgtttgataatttaaccgatcgtttgtcgcgtacgctgcgcaacattagcggccgcggacgccttacagaagacaatattaaagacaccctgcgcgaagtgcgcatggcgctgctggaagcggacgttgcgcttccggtggtccgtgatttcatcagccgcgtcaaagagagcgcggtcggccatgaagtcaataaaagcctgaccccgggtcaggagttcgtcaaaatcgtccgcaacgagctggtggcggcgatgggcgaagagaaccagacgctcgacctggcggcgcagccgccggccgtggtgctgatggcgggcctgcaaggtgctggtaaaaccaccagcgtcggtaagctggggaaattcctgcgcgagaagcacaagaagaaagtgctagtcgtttccgcggacgtttaccgcccggcggcgatcaaacagctggaaaccctggccgagcaggtcggcgtcgatttcttcccgtctgatgttgggcagaagccggttgatatcgtcaacgcggcgctgaaagaagcgaaactcaaattctacgacgtgctgctggtggataccgccggtcgtctgcacgttgacgaagcgatgatggacgaaatcaagcacgtccacgccgccattaacccggttgaaaccctgttcgtcgtcgatgcgatgaccggtcaggatgcggcgaataccgcgaaggcctttaacgaagcgctgccgctgaccggcgtggtgctgaccaaagtggacggcgacgcccgcggcggcgcggcgctgtcgattcgccatattaccggcaagccgattaaattcctcggcgtcggcgagaaaaccgaagcgctggagccgttccatccggaccgcgtcgcttcccgtatcctcggcatgggcgacgtgctgtcgctgatcgaagatatcgagagcaaggttgaccgcgcgcaggccgagaagctggcctccaagctgaagaaaggcgacggtttcgacctcaccgacttccttgagcagctgcgccagatgaaaaacatgggcggcatggccagcctgatgggcaagctgccgggcatggggcagatcccggacaacgtgaaagcgcagatggacgacaaagtgctggtgcgtatggaagcgatcatcaactcgatgaccctgaaagagcgcgctaagccggaaatcatcaaaggctcgcgtaagcgccgtatcgccgccggctgcggcatgcaggtgcaggatgtgaaccgtctgctcaagcagttcgacgacatgcagcgcatgatgaagaagatgaagtcgaaaggcggcatgatgaagatgatgcgcgggatgaaagggatgatgccgccaggcttcccgggtcgttaa

SEQ ID NO: 214256 - DNA, 792 bp, Klebsiella pneumoniae
atgcctgtttttgctctactcgcccttgtcgcctactccgtcagcctcgcgctgattatccccggcttgctgcaaaaaaacagcagctggcggcgaatggcgattttatctgcgactatcgccttgatctgccatgcttttgcgctggaagcacggatattccccggcggcgagagcgggcaaaatctcagcttactgaacgtcgggtcgctggtcagcctgatgatctgtacggtgatgactatcgtggcctcgcgcaatcgcggctggctgctgctgcctatcgtctatgccttcgcgctgatcaacctggccttcgccacattcgtgcctaacgaatatatcactcacctggaaaccaccccggggatgctggtgcatatcggcctgtcgctcttctcgtacgccacgctgatcattgccgcgctgtatgcgctgcagctggcgtggatcgactaccagctcaagaataaaaagctggccttcagcagcgaaatgccgccgctgatgagcattgagcgcaaaatgttccacatcacccaggtcggcgtggtgctgctgaccctgacgctgtgcagcggcctgttctacatgcacaatctgttcagcagcgaaaatatcgataaagcggtgctgtcgattattgcgtggttcgtctatatcgtcctgctgtgggggcactatcatgaagggtggcgcggacgtcgtgtggtctggttcagcgtcgctggcgccggtctgctgacgctggcctattttggtagccgcgtgctgcagcagttcgtgagctaa

SEQ ID NO: 214257 - DNA, 1287 bp, Klebsiella pneumoniae
gtggaacatatctccaccaccacgctgatcataacgctgatcgtcatggtgattatctctgcctatttctccggttccgaaaccggcatgatgacgctgaaccgctaccggttgcgccacatggcgaaacaaggcaaccgccccgccaagcgcgtggagaagctgctgcgcaagccggaccgcctgattagccttgtgctgatcggcaataaccttgtcaacattctcgcctcggcgctgggcaccatcgtcggcatgcgcctgtacggcgacgccggcgtcgcgatcgccaccggcgtacttacctttgtggtgctggtatttgccgaagtgctgccgaagaccatcgccgccctctatccggaaaaggtcgcctaccccagcagcttcctgttggcgcccctgcaggtgctgatgatgccgctggtgtggctgctgaataccatcacccgcatactgatgcgcatgatgggcatccgcaccgataccgtcatcagcagcgccctgagcaaagatgaactgcgcacgattgtgaatgaatcccgttcacaaatctcacgacgcaatcaggatatgctgctgtcggtgctggacctggagaaggtcagcgttaacgacatcatggtgccgcgcaatgagattgtcggcatcgatatcaatgatgactggaaatctatcgtccgccagctgacccactccccgcatggccgcatcgtgctctaccgcgattcgctggacgatgccatcagcatgctgcgcgttcgcgaagcctaccgtctgatgacggagaagaaagagttcacaaaagagatcatgctgcgggcggcagatgagatctactttgtgccggaaggcacgccgctcagcacccagctggtgaaatttcagcgcaataaaaagaaagtcggtctggtggtcgatgaatacggcgatattcaggggctggtcaccgtcgaagatattcttgaagagattgtcggcgacttcaccacctccatgtcacccaccctggcggaggaagtgaccccgcttaacgacggcacggtgattatcgacggcagcgccaacgttcgcgaaatcaacaaagcgtttaactggcacctgccggaagatgaagcccgcaccgtcaacggtattatcctcgaagcgctggaagagatcccggtcccgggcacccgcgtgcgcattgagcagtacgatatagatatcctcgacgtgcaggacaacatgatcaaacaggtgaaagtgatgccggtgaaatcattacgcgagagcgtcgcggagtag

SEQ ID NO: 214258 - DNA, 591 bp, Klebsiella pneumoniae
atgagtagtaaagaacagaaaacgcctgaggggcaagccccggaagaaattatcacggagcagcacgacgacgttgaggcggtagagcctgaagtttcggctgagcaggtggatccgcgcgatgaaaaaattgcgaatctggaagcccagctggctgaagcgcagaaacgtgaacgtgaagtgatgctgcgtgccaaagccgacgaagataacctgcgtcgtcgtaccgagcaggatatcgagaaagcgcacaaattcgcgctggaaaaattcgtcaatgaactgctgccggtgatcgacagcctggaccgcgcgctggaagtggctgacaaggctaacccggagctggcgccgatggtggaggggatcgaactgaccctgaaatctatgctggacgtagtgcgtaagttcggcgtggaagtgatcgccgacaccaacgttccgctggatccgaacgtccaccaggccattgcgatggtcgagtctgaagatgtggcggcgggcaacgtgctgtccgtgatgcagaaaggttataccctgaacggccgtactattcgcgccgcgatggtgacggtagcgaaagcgaaataa

SEQ ID NO: 214259 - DNA, 879 bp, Klebsiella pneumoniae
atgaagaaccatttcaagtgtatcggcattgtgggacatcctcgtcaccccaccgccctgaccacacatgaaatgctctggcgctggctgtgcagcaaagggtatgaagtgctggttgaacagcagatcgcccatgaacttcagctcagcaacgtgaaaaccggcacgctggcggagattggccaacaggccgatctcgcggtggtggtgggcggcgacggcaatatgctcggcgcggcgcggaccctggcccgttacgacattaacgtcatcggcattaaccgcggcaacctcggctttctcaccgaccttgacccggacaacgccctgcagcagctcgccgacgtgctggaaggccactacatcgccgagaaacgctttctgctggaggcccaggtgtgtcagcaggattgccagaaacgtatcagcaccgccatcaacgaagtggtgctgcaccccggcaaagtggcgcatatgattgagttcgaagtctatatcgacgaagtctttgcgttctctcagcgatccgatggcctgattatctccactccgaccggctccaccgcctactcgctgtcggctggcggcccaatccttacgccgtcgctggacgccatcaccctggtgccgatgttcccgcacaccctttcagcgcgaccgctggtgatcaacggcgacagcaccatccgcctacgcttctctcaccgctgcagcgatctggagatcagctgcgacagccagattgccctgccgatccaggatggcgaagatgtcctcattcgccgctgtgattatcacctcaatctgattcaccctaaagattacagctatttcaatacattaagcaccaagctcggctggtcgaaaaaattgttctga

SEQ ID NO: 214260 - DNA, 1662 bp, Klebsiella pneumoniae
atgttggcgcaactcaccatcagtaattttgctatcgttcgtgaactggaaattgatttccacagcggcatgaccgccatcaccggggaaaccggcgccgggaaatccattgccatcgacgcgctggggctgtgcctcggcggcagagcggaagccgacatggtgcgtcgcggcgccacccgtgccgacctgtgcgcgcgcttcgcgctgaaagatacccctgccgcccagcgctggctggaagagaatcagctggagagcgggcgtgagtgtttacttcgccgggtgatcagcgccgacggccgctcgcgcggcttcatcaacggcaccgccgtcccgctctcgcagctgcgcgagctgggccagctgctgatccagatccacggccagcatgcccaccagctgctgaccaaacccgaacaccaaaaaacgctgctcgacggctataccggtgagtatgcgcttactcagcgtatggccgagcactatcgccagtggcaccagagctgccgcgagttggcccagcatcagcatcagagccaggagcgcgccgcccgcgccgatctgctgcagtatcagcttaaagagctgaacgaatttaacccgctgccgggagaattcgagcagattgacgaagagtacaagcgcctggccaacagcggccagctgctcagcacctgccagcacgcccttacggtactggcggacggcgaagaggccaatctgcagagccagctttataccgcgaagcagctggttagcgagctggtgggcatggacagcaagctttccggcgtcctggatatgctggaagaggcggccattcagctcagcgaggccagcgacgagttgcgccactaccatgaccgtctggatctcgatccgaaccgtctgtttgaacttgagcaacggatttcccgacaaatcgcgctggcgcgtaaacatcaggtgatgccggaagagctgccggcggtttatcaggcgatgctggaagagcagcgcctgctggacgacagcgccggctcgctggaatccctcagccagcaggtggtcgaacatcatcagctggcgctggagaccgcacgccagctgcatgccctgcgccaggccagcgccgacgagctgacccagcttatcaccgaaagtatgcactcactttcgatgccgcacggggtcttcgcgattgaggtcgcgttcgatgaacgccatctcaccgccgacggcgccgaccatattgagttccgcgtcaccactaaccccggtcagccgctgcagccaatcgccaaagtggcctccggcggcgaactgtcgcgcattgcgctggcgattcaggtgatcaccgcgcgtaaaatggaaaccccagcgctgattttcgacgaagtggacgtcggcatcagcggcccgaccgccgccgtggtcggcaagctgctgcgccagctgggcgagtccacgcaggtgatgtgcgtgacccacctgccgcaggtcgcaggctgcggccaccatcatttctttgtctgcaaagagaccgatggcgagatgaccgaaacccatatgcagccgctggataaacgtgctcgcttgcaggagctggcccgtctgctgggcggcagcgaagtcacgcgcaacaccctggcgaacgcgaaagagttgcttgcggcgtaa

SEQ ID NO: 214261 - DNA, 342 bp, Klebsiella pneumoniae; identical to SEQ ID NO: 138237

SEQ ID NO: 214262 - DNA, 291 bp, Klebsiella pneumoniae
gtgccagctaatattcgtgttgaggtcgcttacgcgctgcctgaaaagcagtacctgcagcgggtcaccttggacgagggggcgacggtcgagcaggcgattgtcgccagcggcctgctggcgctgcgtgatgacatcgatctggcgaaaaacaagctgggtatctacagtcgtccggtaaagctgcatgacgaagttcacgacggcgaccgggtggaaatctatcgtccgctgatcgcagacccgaaagagctgcgtcgccagcgggcagagaaaagcgccgcaaagtaa

SEQ ID NO: 214263 - DNA, 438 bp, Klebsiella pneumoniae
atgcctcagattagccgtactgcgctggtgcctttcagcgcggaacagatgtatcaactggtaaacgatgtgaagtcctatcctgattttctgccaggctgcaccggtagccgcgtgctggaattggggccgacgcaaatgacggcggcggttgatgtgtccaaagccggcatcagtaagaccttcaccacacgcaatacattgaccagcaaccagagcattttgatgagcctggtggatggcccgttcaagaagctgattggcggctggaagtttattccgctgagcccggaggcgtgcaaaatcgagttccatctcgattttgagtttaccaataagctgattgagatggcctttggccgggtctttaaggaactggccgccaacatggtgcaggcgtttacttcgcgcgccaaagaggtctacagtgccagctaa

SEQ ID NO: 214264 - DNA, 483 bp, Klebsiella pneumoniae
atgactaagaaaaaagcccacaaacctggatcagccaccattgcgctgaataaacgcgcccgtcacgaatactttatcgaagatgaatacgaggctggtctcgccctgcagggctgggaagtcaaatccctgcgtgcaggcaaagccaacatcggcgatagctatgtcatcctgaaggatggcgaagccttcctgttcggcgccaactttacgcccatggccgtggcttccacccactatgtctgcgacccgacgcgcacccgtaagctgctgctcaaccagcgtgagctggacacgctgtacggccgcattaaccgcgaaggttacaccgtcgtcgccctgtcgctgtactggaagaacgcctggtgcaaagtgaaaatcggcgtcgccaaaggtaagaaacagcacgacaagcgtaccgacctgaaagatcgtgaatgggcgctggacaaggcgcgtattatgaagcacgccggacgttaa

SEQ ID NO: 214265 - DNA, 378 bp, Klebsiella pneumoniae
atgaaaaaatctcttttgatgctgatacttttgacctcatgcaacgctttcgccgacaaaatcccgaactctattgagaatctaattgctgtgttcgacaccaggacgcatagcctagaaagcggcgtactctcgatcaaatacagcaaacagaaattgcacattgatgcggctgatgcaatgtttgaaggcatttgcactgacctatcaatgcataagtggaaacccgaaacaattaagaagattaggctactcaacgtctcacttgatcaaggttttgagatagatgccggcggtgctgaatgtaaaaaaacgggtaagatgacttttgatgaagcgcgggcttacaggcaaggctttatcaaacctattccgtaa

SEQ ID NO: 214266 - DNA, 357 bp, Klebsiella pneumoniae
atgcccctgcccgcttgttgccggatgtggcggggcattatcaattacacctggcgtcatgatgaacctcacgacggtttcgtgagtaataaatgtagtaccgcaattaatattctggcactggcaataccgctcttttgtctggtctgttactcgaaagctacttcgtgtatgcgccgcatgtccgcattttgggcaattcatcatttccgtttctccgccgccgcctctgaagtcgcgttaataatacacaacatcaatattgagagccaactattcaatattgagatcatctattttcacttccagttcgatgctggtcgtaaatccactatccgggttgaccgtgtgcgttaa

SEQ ID NO: 214267 - DNA, 1095 bp, Klebsiella pneumoniae
gtgagcgagatgactgatttactcaacctcagcaagaccccggcctttcgcatcgtgattgcaggtaaggatgccacgcagacactggataagcgcctgctgagtatgacgttgaccgacaaccgcggatttgaagccgaccagctcgatctggagctggacgacgcggacggcctggtaattatgccgcgtcggggcgcggtgatttctctggcgctgggatggaaaggcgagccgctgttttcaaaagggaagtttaccgttgatgagatcgagcatagcggcagcccggaccgactgacaatccgtgcccgtagcgcagacttcagggaaacgctgaatgtacggcgtgaaaagtcgtggcataaaacgacggtgggcgaggtggtgaaggagattgccgcgcggcacagcctgaaggttgccatcggtaaagatgtcgcggagcaggcgctggatcacctggaccagaccaacgaaagcgacgccagctttttgatgaagctggcgcgtcagtacggcgcgattgcatcggtgaaggatagtaacctgctgtttatccggcaggggcaggggagaacagccagcggtaaagcgctgccggtcatcactattacccgccgggacggtgacagtcaccgcttcagcatggcggacaggggagcgtataccggggtgattgctcactggttgcatacgcgcgaaccggagaaaaaagaaaccaccaaagtgaagcgtcgccggaaaacgacaaaaccaaaagagccagaagcaaagcagggggattacctgatcgggacggatgagaacgtgctggttctgaaccggacctatgcgaaccgcagtaatgcggagcgtgcagcaaaaatgaactgggagcggctgcagcgcggtgtggcgtcattttccctgcagctggcagaaggccgcgcagatctctatacggaaatgcccgtgaaggtcaccggctttaaacaacccattgatgatgccagctggaccatcaccacgttaacgcacacggtcaacccggatagtggatttacgaccagcatcgaactggaagtgaaaatagatgatctcaatattgaatag

SEQ ID NO: 214268 - DNA, 486 bp, Klebsiella pneumoniae
atgatgatggttctgggtttgtttgtgtttcagctgcgcacggtgccctatcagcaactgcagtatcagcggaactggcggcacgtcaccaacaaccgcgttaatcgccgtccgacaacgcagtttctggggccagataatgatcagctcacgctatccggcgtcctcatgccggaagtgaccggaggccggttgtcgctgctggcgctggagctgatggcggagcaggggaaggcctggccgctgatcgaggggggcgggaccatctacggtatgtacgtgattgaaaatctgagccagacaaaaacggaatttttcgccagcggtgaagcgagaaaaatagagttttcgctggggctaaagcgtgttgatgagtcgctgtccgaaatgttcggcagcctgagtgaccagcttagcagcctgcaggattccgcagcggcagcggtagggaatatcaaaaccacggtaggagggttgctgcagtga

SEQ ID NO: 214269 - DNA, 2631 bp, Klebsiella pneumoniae
atgagtgataaaaacctgcgtctgcaggtggttctgaatgcggttgataagctcacccgccctttaaaagttgcgcaggctggttctaaggagctggcctccgctgtccggcagacccgcgaacagcttaagaggctgaacgatgcagggggccagttaaaatcattcgatcagctgtcacagagcctgagccggaccagtaacgaactggaccaggcgcggctgcgtgcccagatgatgacccgcgaaatgtcagcccttgaatcccccacgaaaaagcagacggcggcgcttgaaacgcaatggcgggccgtgtcacgtctggagcaaaagcaggggcaggaaacgcggcagatggcggcggccagggcagagctgtaccgcctcggcatctctgcgggaggcggtgcccgtgaaacagcccgcattacccgcgaaacggatcgctataacaagcagctggcagaacaggagcgacgcttgtgggacgtgggcgagcgccagcgcaagctgaatgcggtcagggcgaaagctgacaagatgcgcgacgtgcgtaacagcctcgcggggaacggggccgggatgatggccgccggggtgacaacgggcgcgacgctgctggcccccattcgcgcctattcggaatcagagaacgcggctaaccagctggcaggctccatgatggggccgggcggcaaggttgcgccggagttcctgaagctgaacaagctggcgatagcactgggtgatcggctgccaggcaccacggcagactttcaaaacatgatgaccatgttacgccgtcagggtatgtctgcgcaggtcattctgggcgggctgggtgagtcggcggcgtatctcggcgtgcagctgcagatggcaccgacggatgccgcagagttcgccgcaaaactgcaggacgccacgcagaccaccgaaaaagacatgatgagcctgatggacgtgatccagcggggttattacgcgggcgttgaccctggcaatatgctgcagggtttttcaaaaatcagcgccgcgatggacattatcaagcagcaaggcctggatgccgcaaaaacattcgcgccgctgctggttatggctgatcaggcttcaatggcgggagagtctgcaggtaacgcctatcgcaagattttccaggccacgctgaacaataaaaaaatcagtaaggcaaatgatgagctggctggaacggggataaagctaagttttcagaacagtaaaggccagtttgcggggctggaaaacctgtataagcaactggataagctgaataaaatcactgacgatggaaaaaaacaggctgtcaaagcggctctttttggtgatgatgcagaaaccctgcaggcgctgaacatcatgatcaccaaagggattgcggggtatcgtgaaacagccgccaaactggataatcaggcaaccctgcgcgagcgcgtcgaggcatcccttaataccctgggcaacaaatgggaagccgctggcggctcctttaccaacgccatggcgagcatcggtgaaaccgtcgcgccggtactgaaaaatattgcggactggctgggaaatctggcgtccgcgctggatggttttgttaagcggcatccgcaattgacggcggcgctgtttaagattgcggcggtgtttgccgtggtagctaccgcagcgggcgtgttgtcgctggcgctggcatctattctggggccaatggcgatagtacgtgtgagcgctggggttctgggaattaagtttgcctccgcttttggtctgattaagcaagtcatcggcggtgcaggccaggcgatcctgtggctgggcaggttgatgatggctaaccccatcctggcgatagtcggcctgattgcgatgggagccatttatatctggcagaactgggaaacgctggggccaaaattcaccgcaatgtgggacgccatttcgtcaggggtatccagggtatggactgtaattaaacggactattagcagcaaatgggatgaaattctaagtgatgttgccgcgctgcccgcgaagtttaaagcggtgggcggtgcgatcattgacggcatcctgagcggtatcaatgagaagtgggagatgctcaagagcaagctggcatcggtgaaaagctacctgccggactggatgaccggcggcgacaaatcgccaggtgcacttcagcagaaaggagcaggcggattctttgcgggtatgtatgacagcggtggatatattccacgcgggcaggtgggcattgctggcgagaatggcccggaactgattaacggcccggcctatgtgaccagccgccgaaggacggcggcgctggcgtccgttgtcgccgggatgatggggggagcgattccggcagaggctgcgccacttcatccaatgagcctgccggcaacatcctatcggcctgcagctgagaagccggcaggggggcagccgatcattcatatcgaatcgaagccgcaatttattatccaggcattaccggggcaaagttcgcaggatattgcgaaagaggttgcgcgaatgtttgcggagcatgagcggcgtttaatggcgaaggcacgcagcaacttcagcgatcaaggggggtatgattcatga

SEQ ID NO: 214270 - DNA, 300 bp, Klebsiella pneumoniae
atgagtgagaaaacagtagcaacggtgaagctggatagccctatcacgcgtggtgatgccacgattacggaaattgtgctgcgtaaaccgcaatccggcgcactgcgcggtacgcggctgcaggcggtgatggagatggacgtggcctcaatgatgaccgtgatcccccgtatctccacgccgacgctgaccccgcaggaaatggcggacctcgacccggcagacctggccgcgatgtcgatcgaggtggtcctttttttgttgccgaagtcggcgtttgccgatttgccgacagcctga

SEQ ID NO: 214271 - DNA, 459 bp, Klebsiella pneumoniae
atgggcattgctgaatccgtcaccctgccgaaattttcccgcaagcttgagaactatcgcgggggcggcatgcccggttcagtcggtatcgatctggggctggatgatggcgcactggacacggaaatgaccatcggcggcactgaggcactgctgtttaaacagatgggcaaggccacggtggacggggtgcagatgcgcttcaccggctctatccagcgcgatgacaccggcgaggtgcaggccgttgagctggttgtacgcggacgccacaaagaggtggattccggcgagtggaaaaccggcgagagcaataccaccaaagtcagcagcgttaacagctatgcgaagctgaccattaacggcgaggtgctgtacgaggtcgatgtgatcaacatgattgaaattgttgatggcgttgacctgatggaagagcaccgcaacgccatcggcctttaa

SEQ ID NO: 214272 - DNA, 420 bp, Klebsiella pneumoniae; identical to SEQ ID NO: 135635

SEQ ID NO: 214273 - DNA, 1266 bp, Klebsiella pneumoniae
atgttcgcgcattgtgatgtgaacgccttctatgccagctgtcagaccgccttccggccagacctgaaggggcggccggtggtggtgctgtcgaataacgacggctgcgtgatcgcccgctcggcggaggcgaagccgtttgtgaaaatgggcgaaccctactttaagcagaaggctgcgtttcttcgccacggcgtcgtggcgtttagcagtaattatgagctgtatgccgacatgtccagccgggtgatggccaccctggaagagctcaccccgcgctgcgaaatttacagtatcgatgaggccttttgcgatgtcagcggtgtgcgtcattgcagagatctgaccgattttggccgcgaaatccgcgccacggtactgcagcgtacccatctgacgctgggcgttggcatcgcccagaccaaaaccctggcgaagctggccaaccacgcggcgaagcagtggccgcggcagacgggcggggtagtggacttgtcctgcccgcagcggcagcgaaagctgatggcgctgctgccggtgagcgaggtctggggcatcgggcggcggatcggcaaaaagcttgaagcgatggggatcggcacggtactccagctggcggagagcgatatccgctttatccgcaagcacttcacggtggtgctcgaacgaacggtacgggagctgcgcggcgagccttgcctggcgctggaggagtttgcccccgctaagcaggaaattatctgcagccgctcgttcggggatcggattacggcctatgaggatatgcgccaggcgatctgcagctatgccgcgcgggcagcagaaaagctgcgcggtgagcatcagtactgccggttcgtctccgcctttgtcaaaaccagccccttcgcgctgaatgaaccctattacggcaacagcgcctcgctaaagctgctgacgccgacccaggactcccgggatattatcgccgcggcgacgagctgtctggatgccatctggaaagcggggcatcgctatcagaaggccggcgtgatgctcggcgatttctacagccagggcgtcgcccagctgaatctgttcgacgagcttgctccgcggcacaacagcgccagactgatgcaggttctcgatcagctgaatgcgaaaaacggcaggggggcgctctattttgccggccaggggatccagcagcagtggcagatgaagcgagagatgctctcgccgcgctacaccacgcgatacggcgacctgctccgcgtcagataa

SEQ ID NO: 214274 - DNA, 906 bp, Klebsiella pneumoniae
atggaccggttttcagctctcaaagccttcactcgcgttgtcgaagccggcagctttacccgcgccgcggactcgctgaatatgcccaacgccaccctcagcaaaaccattcagcaactggaagcgcatcttggggtttccctcctgcagcgcaccacgcggcgtattaccgtgacgccggaaggacgggagtactatgaaaaagcccgctgtctgctggaagacctggaagagatcgacgcgtctttcaataccgcccgcaataagccgaagggccatctacggatcgccatcggcgggtcgaccgcgtgcgatgtgctgatcccgctgctggcggactttatgacctcctggccggatatccgtatcgatttgcaggtggccgataagcccgcggacctcatcagcggcaatattgactgcgccatccgcggcggtccgatggaagactcgacgctgatcgcccgtaaaatcggcgaggcgacgctggtcacctgcgccaccccgggctatcttcagcgctacggcacccccgcctcgccggatgaactacatcatggccaccggctcatcagctatctgtcgccggccagcggcagagcgtttccgtttcgctttacgcgtcacggcgtcagcaccgagctgaagacagagccccatctcggcatcaatgagagcaacgcgcatattgccgccggcgaggcgggcttaggcattgtgcagacctttacctattcgctgaaaccggcgctggcgagcggcgaactggtggagatcctcagcgcctggcgcccggccccctatccttttcacgttgtctatgcccggcaccggcacgtcccgccccggctccgcgtctttattgactggctggcggcggtttttccggccgcggtgcagggatag

SEQ ID NO: 214275 - DNA, 750 bp, Klebsiella pneumoniae
atgagcaaaaaacttgcggataaagtggcgttagtcaccggcggcagcgccgggattggcctggcgtcggcgaaagcactggcggagcagggcgcgaaggtgtacatcaccggccgccgtcaggaggagctggatgcggcggtaagattcatcgggcccgccgcccgcgggatccgcgccgacgccgccgtattaagcgaccttgacgcggtatttgcgaccattgccgaagagtccggccggctggatgtgctgttcgccaatgccggcggcggagacatgctgccgctgagcgccatcaccgaagcgcacgtcgaccggattttcgccaccaacgtgcgcggggtggtgttcaccgtgcaaaaagcgctgccgctgctcgccgatggcgcctcggtgattttgaccggctctacggcggcggtaaaagggacggctaacttcagcatctatagcgccagtaaggccgcggtacgcagcctggcgcgctcctgggcgctggaggttagcgaccgcgggatccgcatcaatgtggtcagcccggggccggtacgtaccccgggtctgggagggctggtggcggaggcggaccgccagggcttgttcgatgctctggcggccggcgtaccgctcgggcggctgggcgagccggaggagattggccggacggtggtatttttagcgtcggatgagtcgagctttattaacgccgcggagatctatgtcgacggcgggctggcgcaaatctaa

SEQ ID NO: 214276 - DNA, 1218 bp, Klebsiella pneumoniae
atgaaagagattgctttacccctccacccggcgccggcgcgcgtctggattgccgtcgttgcgctcgggatctgcgccttttcgatcgtcaccagcgaactggcgccggtgggcatgctcagcgccctggcggcggattttcaccagacggaatccggcgtgggcctcgccgtcaccgcctatggctgggtaggcgccctggcggctctgctttccggcgcaatgccggcgcgtatttcccgcaaggcgctgctggtcgggctgatgctgatcctcgcgttttcctgcctcgccgcaacccggtcttattcgatgttcgccctgatgagcgcccgcatgattggcgccctggcgcatggcgccttctgggccttaattggcattgtcgccgcgcagctggtgccgccgcaccggctggggctggccacggcgatcatttttggcggcgtgtcagcggcaagcgtagtgggggtgccgctggcgagctttatcgccaccctggcgggctggcgactcgcgtttatgtcgatggccttgctgtcactagccgccgctgcggtgctgtgctcgacgctgcccccgctggccgccccagcccccgtcaggctgcgtgtttatcgcgatatcttccgcaatccgctgctcggtggcctgtatggcgccacggcctgcatcattaccgctcactttgccgccttcacctacattgaatcgctgctgataaatctgcagggagtcccggcgaccgccctctccggcctgctgctgctgtcaggggtttccgggctgctgggtaacgttatcgcgggtaagcttatcgatcgtcatctgaaggggctgattttcgctgcgctgctgctgagcgggggcgcgctggcgctccttggcgccgcccgtcttgcgccactgccgttctgttttagcgggctactgttagccctgtggggcgccggcatcgcgattgtgttcgtaggcttacagacctggctgctgcgcagcgcgggcgcggtcgcccagccggcgtcagccatttatgtggccatttttaatgccgccatcggcaccggggcgtttgtcggcggccagttgatcgcctcagctggcctgtcgggaatggtgtggctggcggcggggatcatggtgggcagtacgctgctgatcgccctgctgaaagcgcctctgcccggtcagatcggtgcggcgacggcaggcgcttag

SEQ ID NO: 214277 - DNA, 882 bp, Klebsiella pneumoniae
atgacagcagaatttcattgggatgatgcgcgcatcttcctcgccatcgcccgggcgggaacgctgagcggcgccgccgacaagatgaacatgggaattgccaccgtgtcccgccggctggatcggctggagcaggcgttgaacgttccgctcttcagccgccatcagagcggctaccgcctgaccgacgatggcgaagccctgctcgcgcgggcggaggcgctggaatacgctggcctggcgttcggcgaagcggcgcaactgcaggggcatgtcgccggggttgtccgtctggccacctcggataacctggccacgcattttattctgccctccctgaaagggctcctggaccattatcccgagctgcgggtggaggtgctgagcggtgtgcagccggtgaacctgcaccgtcgggatgccgatctggcgatccgcatggtcaagcctgaggccgggcatctgacgttaaagcggctggggacggtggggtttggcgtctatggcgccgccgactgtctggtcggcgcggacggcctgtcgctgagcgaggcggactttgtgggttggccggaaactcaccagcacctgccggccgcccaatggatcacgcgcaccctgcgcggccggccgtgtaaagtcgaagccaatacgctcgtggcccaggtttccgcaatatccgcgggcctcggattgggcgtcctgccgcactttatggcgcgggccagcggcctgcagtgcctgcagccggagatcggcgcggatcagaccctctggctggtgatgcattctgacctggccggatccagacgcgtgcgggttctcgccgaccatctcatcgctctctttgcggaccatcaagatcggctggcgatgccctga

SEQ ID NO: 214278 - DNA, 312 bp, Klebsiella pneumoniae
atgattgtcaggacctggcacggctgtgtgccattgcaacatgctgaggggtttgcccgccacctcgagcggaccggcgtggaacacgctcagagcatcgccggcaaccggggggcgctggtgcgtcaggaaaaccagggcgaatgggcgcatttctttcttgccacttactggcaggatctcgcggcggtcaaagccttcgctggcgaagactatcacgtcgcggtcacctatccggacgacgacgcattcgaactcctctccgacccctatgtgtttcagcatgaagtcgaggccgtgtcgccgctgtag

SEQ ID NO: 214279 - DNA, 483 bp, Klebsiella pneumoniae
atgacccctttttatcaattgacggctacccgcctgcgcggccagcccctctccatggctgactatgctggcaaggtggttctggtggtgaatacggccagccattgtggcttcacaccgcaatacgctggcctggaagcgctctacaaaaagtacgcggctcaggggctggtagtgcttggtttcccgtgcaaccagtttggtaagcaggaacccggcggtgcggatgaaatcgagcagacttgtcacgttaactacggcgtgagcttcccgatgtttgagaaagtggacgtcaacggccccgccgcacacccgctgtttcgttatctgaaacaagcgttgcccggcgtgctcggcggacggatcaagtggaatttcaccaagttcctcatcggtcgcgacggcacacccctcacgcgttttgcgccgttcacgacgccggagaaaatggaagcctccattgtcgcggccctcacgcgctga

SEQ ID NO: 214280 - DNA, 564 bp, Klebsiella pneumoniae
atgatgaaatatgtcttatcgctggtggtggtggcgatactcgcaggatgtaccagcacgccaaacttgccgcctcgggataccattgtggcgatgaaacccacagagtccggtattgtcgccagctcagcgaaatacagttaccgctttgtccgtgacggtgtgcctcaggaatatcagcgttataagaccttttatgaacgctttcaccaacaggcttccggcgtgcgggttaactttgtcgtggaacaacatgaggtgacggcggaatatctggtggtgatggatcagcgcaaactggatgccgggcagcatagcgagctggtgaatcagtatcatgcggtgcaaattgataacgatcgcctcggggtgttgtttaaagcgacaggattttggactgcatcggacgcgtcagatctggccgccgcctaccagttagcgcaccccgttgtggtatcaatcaatgataagaccaaaacgattagctcgcttggcgccgttgccctggccccgttgtttccgttttacatgatgtatggatgtgccaccgggccttgtgtctga

SEQ ID NO: 214281 - DNA, 1284 bp, Klebsiella pneumoniae
atgacctggttcatagaccgacgcctgaacgggaaaaacaaaagcgccgtcaaccgccagcgctttttgcgccgttataaggcgcagattaaacagtcgatctccgaggccatcaacaagcgctcggtgaccgatattgagagcggagaatccgtctcgatcccgacggacgatatcaacgagccgatgtttcatcagggtcgcggcggcctgcgcaaccgcgtccacccgggcaacgaccattttgtgcaaaacgaccgcattgagcgcccgcaaggcggtggtggcggcggcggtagcggtcaggggcaagccagcgccgatggtgaaggaaaggatgagtttgtcttccagatctcgaaagatgaatacctggatctgttatttgaagatctggccctgccgaacctgaagaaaaaccagcaccggcagctgaatgagtttaaaacccatcgcgcgggttttacctccaatggggtgccagccaacatcagcgtggtacgttcactgcagaactcgctggcccgccgtacggcgatgaccgccggcaagcgtcgtgaactgcgcgccctggaggaggatctggaagccatcagccgcagcgaaccggtgcaactgctggaggaggagcgcctgcgcaaagagattgccgaactgcgggctaaaatagagcgggtgccgtttatcgacacctttgatttacgctacaaaaattacgaaaaacggccggagccttccagccaggcggtgatgttctgtctgatggacgtctcaggctcgatggaccaggccaccaaagacatggccaagcgcttttatatcctgctgtatctgttcctcagccggacttataaaaatgtcgacgtggtctatatccgccaccatacccaggcaaaagaggtggatgagcacgaattcttctattctcaggaaaccggcggcaccattgtctccagcgccctgaagctgatggatgaagtagtgcaggcccgctatgacccggcgcagtggaacatctacgccgcccaggcgtcggatggcgacaactgggccgatgactccccgctgtgccacgaactgctggcgaagaaaattctgccggtggtgcgttattacagctatatcgaaattacccgccgggcgcatcagaccctgtggcgcgagtatgaacacctgcaggcgacctttgataatttcgccatgcagcatattcgcgaccaggaggatatctacccggtattccgcgaactgtttcataagcagtcatctaaaagtgaagcttaa

SEQ ID NO: 214282 - DNA, 1935 bp, Klebsiella pneumoniae
atgaatatattcgatcactatcgccagcgctacgaagctgccaaggacgaagagttcacactgcaggagtttcttaccatctgccggcaagatcgcagtgcctatgccaatgcggcagaacgtctgttgatggccattggtgaacccgtcatggttgatacggctctcgagccgcggctatcccgtctcttttcaaaccgggttatcgcacgctatccggcatttgaagagttttacggtatggaagacgccattgagcagatcgtttcctacctcaagcatgccgcccaggggctggaagagaagaaacagatcctctatctgctggggccggtgggcggtggtaaatcgtcgctggctgaacggctgaaagcgctgatgcagcgcgtgcccatctatgtgctgagcgccaacggcgaacgcagtccggtcaacgatcacccgctgtgcctgttcaatccacaggaagatgcgcagatcctccagaaagagtacggcatcccgacccgctatctcggcaccattatgtcgccgtgggcggccaagcgcctgcacgagtttggcggcgatatcacgaaattccgcgtggttaaagtctggccatcgattctcgagcaggttgccatcgccaaaaccgaaccgggtgatgaaaacaaccaggatatttcagcgctggtcggtaaggtggatatccgtaagctggaacactatgcgcagaacgacccggacgcctacggctactccggtgcgctgtgccgcgccaaccaggggattatggagttcgtcgagatgtttaaagcgccgattaaggtgctgcatccgctgctgaccgccacccaggaaggtaactataacggcaccgaagggatctccgccctgccgtttaacgggatcatccttgctcactccaacgaatcggaatgggtgaccttccgtaataacaagaacaatgaggccttcctcgaccgcgtctatatcgtcaaggtgccttattgcctgcgtatctccgaagagatccgcatctatgaaaaactgctcaacaacagtgagctgacccatgcgccctgcgccccgggcaccctggaaaccctggcgcgcttttcgattctgtcgcgcctgaaagagccggagaactcgagcatctactcgaagatgcgggtctatgacggcgaaagtctgaaagataccgacccgaaagcgaagtcctatcaggagtatcgcgattacgccggggttgatgaagggatgaacgggctctccacccgctttgcctttaagatcctgtctcgggtatttaacttcgaccacgtcgaggtggccgctaacccggtgcatctgttctatgtgctggagcagcagattgagcgcgaacagttcccacaggagcaggccgagcgctatctggaattcctcaaaggctatctgatcccgaaatacgccgagtttatcggcaaagagatccagaccgcttatctggaatcctactccgagtatggacagaacattttcgatcgctatgtcacctacgctgacttctggatccaggatcaggaataccgcgatccggacaccgggcagctgtttgaccgtgaatcgttgaatgccgagctggagaaaattgagaagccagccgggattagcaacccgaaagacttccgtaacgaaatcgtcaactttgtgctgcgtgccagagccaacaacagcggacgtaatccgaactggaccagctatgagaaactgcgcacggttattgagaagaaaatgttctccaataccgaagagctgttgccggtcatttcgtttaatgccaaaacctcaaccgatgagcagaaaaaacatgacgactttgtcgaccgcatgatggagaaaggctacacccgcaaacaggttcgcctgctgtgcgagtggtacctgcgggttcgtaaatcgtcctga

SEQ ID NO: 214283 - DNA, 747 bp, Klebsiella pneumoniae
gtgactaaaatcaaacttctggcactcggcgtgctgatagcgacgtccgccagcgcggcgcatgccgacgggaagttcactcttggggctggcgtaggggtcgttgagcatccgtataagcaatatgatgcggatgtctatccggtgccggtcattagttatgagagcgaaaacttctggttccacggtctgggcgggggttactacctgtggaatgacaccaacgataaactgtcgattacggcctactggtcgccaatgtacttcaagccgggcgacagcgacagcgagcagatgcgtcgactggataaacgtaaatcgaccgtgatggccggtctttcttatgtccacaacacgccctatggcttcctgcgcacgacgattgccggcgatacgctggataacagcaacggtattaactgggatctcgcctggctgtaccgttacaccaacggtaacctgacgctgacgccgggtattggcgtggagtggaacagcgacaatcagaacgaatattactatggtgtctcccggcacgagtcgcgccgcagcggcatgcgcagctatgacccggacagtagctggaacccgtatctggaactgtcggctaactatcgcttcctcggtgactggagcgtttacggcgtggcgcgctacacgcgtctgtcggatgaaattaccgacagtccgatggtggataaatcctggagcggtctgatctccaccgggatcacctacaccttctga

SEQ ID NO: 214284 - DNA, 855 bp, Klebsiella pneumoniae
atggtgaaaaaaacagtacgcttcggcgagcaggcggcagtgccggccatcgggctgggcacctggtatatgggcgaacatgcggcgcagcgtcagcaggaagtggctgcactgcgtgcgggcatcgaccatggactgacggtgatcgatacggcggaaatgtacgccgacggcggggcggaggaagtggtgggccaggcgatccgcggtctgcgcgaccgggtagtgctggtctccaaagtctatccctggcatgccggcaaagcggcgatgcaccgcgcctgtgaaaacagcctgcgccggctgcagaccgactatctcgatatgtatctcctgcactggcgcggggatatcccgctgcaggagacggttgaggcgatggagaagctggtggctgagggcaagatccgccgctggggcgtctctaatctggacaccgaggatatgcaggcgctgtggcggacggcggatggcgagcactgtgcaaccaaccaggtgctctaccatctcgcatcgcggggcattgaatacgatctcctgccctggtgccagcagcacagtctgccggtgatggcctactgcccgctggcgcaggcggggcgcttacgcgatggactttttcagcatagcgatatcattaatatggctaacgcgcgggggattacggtagcgcaactgctgctcgcctgggtgattcgtcatccgggagtgctggcgatcccgaaagcggccagtattgagcatgtggtgcagaatgccgcagcgctcgacgtcgtcctcagtggggaagaactcgcgcagctggaccgcctctatccgccgccgcagcgaaaaacccggctggatatggtttaa

SEQ ID NO: 214285 - DNA, 885 bp, Klebsiella pneumoniae
atgataaataaaatttttgctctcccggtgaatgaaaccatttctcccgtgatctcccgtcgccagctggatgacctggagctgattgtcatcgaccatccgcaggtgaaagcctctgtggcgctgcagggggcgcacctgctctcctggaaacccgccggtgaagaagaagttctgtggctgagcaacaacaccccgtttaaacagggcgtcgccctgcgcggcggcgtgccgatttgctggccctggtttggtccttctgcgcagcaaggtctgccgtcgcacggctttgcccgcaatctgccatggaccctggaaggtcatgacgaagacgacagcggcgtaatgttgacctttgcgctccagcacagcgctgaaaccatgaagctctggccgcacgagttcaccctctatgcccgctttaagctgggcaagacctgtgaaatcgagctggaagcccacggtgaattcgagaccacctctgccctgcacagctatttcaacgtcggcgatatcgcggcggtgaaggtgagcggtcttggcgagcgctatatcgataaagtgaacaatgccgaagaaggcgttctgagcaacggcgtgcagaccttccctgaccgcaccgatcgcgtctatctcaacgccgacagctgcagcgtgatccatgacgacgcgctaaaccgcactatcgacgtggtgcatcatcatcagcacaatgtggtggcctggaacccgggcccggcgctgtccgtcagcatgggcgatatgccggacgatggctacaaaaccttcgtttgcgtcgaaacctgctgcgtaacccagccgcagaaagccagcgaagagacgccctctcgcctggcgcaaaccatcagcgtgaaaaaacgctaa

SEQ ID NO: 214286 - DNA, 996 bp, Klebsiella pneumoniae
atgactatcaaagtaggtatcaacggttttggccgtatcggtcgcattgttttccgtgctgctcagaaacgttctgacatcgagatcgttgcaatcaacgacctgttagacgcagagtacatggcttacatgctgaagtatgactccactcacggtcgtttcgacggtaccgttgaagtgaaagacggtcatctggtcgttaacggtaaaaaaatccgtgttaccgctgaacgtgacccggctaacctgaagtgggacgaagttggtgttgacgttgttgctgaagcaaccggtatcttcctgaccgacgaaaccgctcgtaaacacatcaccgctggcgcgaaaaaagtcgttctgactggcccgtccaaagacaacactccgatgttcgttcgcggcgctaacttcgacgcttacgctggccaggacatcgtttccaacgcttcctgcaccactaactgcctggcgccgctggctaaagttatcaacgacaacttcggtatcgttgaaggcctgatgaccaccgtccacgctaccaccgctactcagaaaaccgttgatggcccgtctcacaaagactggcgcggcggccgcggcgcagctcagaacatcatcccgtcctctaccggcgctgctaaagcagtaggtaaagtactgccagaactgaacggcaaactgaccggtatggcgttccgcgttccaactccgaacgtatctgttgttgacctgaccgttcgtctggaaaaagcagcgtcctacgaagaaatcaagaaagccatcaaagccgcttctgaaggcgctatgaaaggcgttctgggttacaccgaagacgacgttgtttctaccgacttcaacggcgaagtttgcacttccgtgttcgatgctaaagcgggtatcgcactgaacgacaacttcgtgaaactggtttcctggtacgacaacgaaaccggctactccaacaaagttctggatctgattgcccacatctccaaataa

SEQ ID NO: 214287 - DNA, 414 bp, Klebsiella pneumoniae; identical to SEQ ID NO: 138520

SEQ ID NO: 214288 - DNA, 279 bp, Klebsiella pneumoniae
atggatattgagcaaattatcgacagtatgacgccggaagtgtatcagcgtctggcgacggcggtagagctgggaaaatggccggatggcgtcgcgctgacgccggagcagaaggaaaatagcctgcagctggtgatgctctggcaggcccggtataacaccgacgcccagcacatgaccatcgacaccagcgggcagatggtaatgaagagcaaacagcagctgaaagaggattttggcatcgtgccgaagccgatcgccaccgttaaactgcaataa

SEQ ID NO: 214289 - DNA, 345 bp, Klebsiella pneumoniae
atggcctatatccccaaaaattacgcacgtctggaagtgggttaccgcgaaaaggcgctcaagctttttccctgggtgtgcggacgctgctcacgggagtttgtctactccaatctgcgcgagctgacggtgcaccacatcgatcacgaccactccaataacccggaagatggcagcaactgggagatgttgtgcctgtactgtcacgatcacgaacattccaagtacaccgaagccgatcagtatggctccacggtggtggcaggggaagatgcgcaaaagagcgtcggcgaggccacctacaacccgtttgccgatctgaaagcgatgatgaacaaaaagtaa

SEQ ID NO: 214290 - DNA, 1254 bp, Klebsiella pneumoniae
atgaaacgtttgcccttgctggcagctttgcccttgctttgcgcttccgcgctctctgcccaaccgctgatgtccgtcggctattttaacggcggcggcgatgtcaccgccgggccgggcggtgatatcgataagctggacgtccggcagatcacccatctcaactactcgtttggccttatctataacgatgaaaaagacgagaccaatgcggccctgaaggatcctgctcatctgcacgagatctggctgtcgccgaaggtgcaggcggatctgcaaaagctccccgccctgcgtaaacagaatccggacctcaaagtcctgctgtcggtcggcggctggggcgcgcgtggtttctccggcgcggcggcgaccgcagaaagtcgcgccgtctttattcgttccgcgcagaaaatcatccagcaatatggtctggacggcattgacctcgactgggagtttccggtcaacggcgcctggggactggtggccagccagccggctgaccgcgacaacttcactgccctgctgaaatcgctgcgtgaggcagtcggtgagcaaaagctggtgactatcgccgtaggcgccaatgccgagagcccgaaaagctgggtggacgtcaaagcggtggccccggtgctgaactacatcaacctgatgacctacgacatggcctacggcacgcagtacttcaactcgaatctgtatgactccagccactggccgacggtcgccgcagcggataaatacagcgccgattttgtggtcaacaattacctggccgccgggcttaaacccagccagatgaacctcgggattggtttttatggccgggtaccgaaacgggcggtcgagccggggattgactggacgaaagcggatgcgcaaaacaatccggtcacccagccctattttgggccgcaacagatcgcgctgtttgcctcgctgggctatgacctgagcaaagacacctacgtgaaatacaatgatatcgtgggcaaactgctcaacgatccgcaaaagcgttttaccgagcactgggacgatgaggcgaaggttccgtggctgtcggtgcagtccgcggagggcaagccgctgttcgccctctcctatgagaacccgcgctcggtagccattaaggcggactatatcaaggcgaagggcctcgccggggccatgttctgggaatatggcgccgatgaccagaatcagctggcccgtcagctggcggaatcgctggggatcaaacactaa

SEQ ID NO: 214291 - DNA, 1077 bp, Klebsiella pneumoniae
atgaaagcactggcaagatttggtaaggcctttggcggctataagatgattgatgtaccggagccgatttgcggcccggatgacatcgtgattgaaatcaaagcggcggctatctgcggcgctgacatgaagcattacaatgttgatagcggatcggatcaatttaactccatccgcggccatgaatttgccggacaaattgtccgcatcggcgacaaagtcaaggactggaaagtcggtcagcgggtggtttctgacaacagtgggcacgtgtgcggtgtatgtccggcctgcgaacaaggtgattttctgtgttgtacagaaaaagttaatttaggacttgataacaacacctgggggggcggattttcgaaatattgcctggtgccaggtgagattctcaaaattcaccgccatgcactgtgggagatcccgcagggcgttgattatgaagaagccgcggtgctggatcctatctgtaacgcttacaaatctattgctcaacaatccaaatttctacctggccaggacgtcgtggtttttggtaccggtccattagggctcttttccgtgcaaatggcgcgcatcatgggggcagtgaacattgtcatggtcggactggaagaggatgtcgcggtacgcttccctattgccaaagagctgggggcgacagcggtcgtcaacggttcgaccgaagatgtggtcacgcgttgccaggaaatctgcggtaaagacaacctgggcctggttatcgaatgctccggcgctaatattgccctcaaacaatctatcgaaatgctgcgccccaacggggaagtggttcgcgtgggcatgggtttcaaacctctcgatttctccatcaacgacattaccgcgtggaacaaaagcatcattggtcatatggcctacgactccacctcctggcgtaatgctatccgcttgctggccagcggtgcgatcaaagtcaaaccgatgatcactcaccgtatcggcctgtcgcaatggcgcgaagggtttgacgctatggtcgataaaaccgcgattaaggtcatcatgacctacgactttgatgaataa

SEQ ID NO: 214292 - DNA, 1380 bp, Klebsiella pneumoniae
atggaacatatagcaaaaccgcattgtggcgcgaggctggatcgactgccagattgtcgctggcattcgtcaatgtttgccatagtcgccttcggattactggtctgctggagtaatgccgtaggcggattaattctcgcgcagttaaaagaacttggctggaccgataattccaccaccgctacgttttccgccattacgactgcgggaatgtttctcggcgcgctcggtggtgggatcattggcgataaaatcgggcgtaaaaacgcatttattctgtatgaagcgattcatattattgccatggtcgttggggcgttttcaccgaatatgaccttcctgatcgcctgccgttttgtcatgggggttggattaggggcgctcctggtgaccctgtttgccgggttcaccgaatatatgcctggcagaaatcgcggcacctggtcaagccgggtctcgtttatcggcaactggtcttatccgctctgttcgctcatcgccatgggattgacgccgttaattagcgcagaatggaactggcgagtacagttattgatcccggccgtactgtcgctaatggcgactattattgcctggcgtcgtttcccggagtcgcctcgttggcttgagtcccgcgggcgctacgccgaagctgaaaaggtaatgcgtgccattgaagaaggggttgttctgcagaccggcaagccgctaccgcctgtggtaattgaagatgacggcaaagccccgcgcgcagttccttattcggccttattaacaggtgtgttgctgaaacgcgttattttaggttcctttgtcctgatcgccatgaacgttgtccagtataccttaattaactggctgccgacgatatttatgacccagggcattaatcttaaagactcgattgtcttaaacacgatgagtatgtttggcgcgccgtttgggatttttatcgccatgctggtcatggataaaatacccagaaaaactatgggggtggggctgttggtattaattgccgggctgggatatatctattctctgcaaaccagcatgctattaattacgttaattggcttctttctgattacgtttgtgtatatgtacgtttgctacgcctcggcagtctatgttccggaaatatggccgacagaagcgaagcttcgcggttccggtctggcgaatgcggttgggcgtatcagcggtatcgccgctccttatgcggtcgcggtattgcttaacggttatggcgtgacgggggtatttgttctgctgggaaccgtctccattattgtcgccattgccattgcgaccatcggaattgaaaccaaaggcgtctctgtcgaaagtctcggtattgatgcagttaccagcaaataa

SEQ ID NO: 214293 - DNA, 1044 bp, Klebsiella pneumoniae
atgaaaaattcaaaagcgatattaaaaaccccgggtacgatgaaaattattgccgccgatatcccggtacccaaagagcatgaagtgctgatcaaagttgaatacgttggtatttgcggttcagatgttcacgggtttgaatcgggcccttttattccgccgaaagacccaaaccaggaaattggtctcgggcatgaatgtgccggtacggtggtggcggtgggaagtcgcgtcagtaaatttaaaccgggcgaccgggtgaacattgaacccggcgtgccgtgcggccactgccgctactgtctggaggggaaatacaacatctgccctgatgtcgactttatggccacgcagcctaactatcgcggcgcgctaacccactatctatgccatccggaaagcttcacttacaagctacccgataacatgggcaccatggaaggcgcgctggtagagcctgcggcggtagggatgcatgccgcaatgctggctgacgtgaagcctggcaagaaaatcgtcatcctgggggccggctgtattggcttaatgaccctgcaagcctgtaagtgtttaggggcaaccgacatcgccgttgtcgatgttctggaaaagcgtctggccatggccgggaagcttggggcgacgaccgtcatcaacggtgcgaaagaggacaccgtcgcccgctgtcagcaattctccggcgatatcggggcagacattgtttttgaaacggccggctcggcgatcaccgtgaagcaggctccgtatctggtgatgcgcggcgggaaaatcatgatcgttggtacggttcccggagattcggcgattaattttctcaaaattaaccgtgaagtctcaattcagaccgttttccgctatgccaaccgctatccggtcaccattgaagccatttcctccgggcgtttcgatgtcaagtcgatggtgacgcatatttatgattatgaagatgttcagcgcgcgtttgacgagtccgttaacaacaaacgcgaaattatcaaaggcgttattaaagttaaccattaa

SEQ ID NO: 214294 - DNA, 837 bp, Klebsiella pneumoniae
atgctggccgatattaaatattgggaaagcgatgcccagaataaacattacgcgattgcccactttaatgtttggaatgcggaaatgttaatgggggtcattgatgcggcagaagagtctaaatcgccggtaattatctctttcggtaccggttttgtgggtaatacctcgtttgaagatttttcgcatatgatggtatcgatggctaaaaaagcctcggtgccggttattacccattgggatcacgggcgtagcatggagattatccacaacgcctgggtccatggtatgaattcgctgatgcgcgatgcctccgcctttgatttcgaagaaaatattcgcctgactaaagaggcggtggacttcttccaccctctgggcattccggttgaagcggagttaggccacgtggggaatgaaacggtttatgaagaagcgttggcgggctaccactatactgacccgagccaggcggcggagttcgtcgaacgtaccggctgcgactctttggcggtggcaattggtaaccagcatggggtttatacctcagaacccaaactgaattttgaggtggttaaacgcgtacgcgaggcggtatccgttccgctggtgctgcacggcgcgtccggtattagcgatgcggatatcaaaaaagctatttcattaggcatttcgaaaatcaatatccataccgaactgtgtcaggcggcaatggcggcggtgcaggagaatcagaatcagcctttcctgcacgttgagcgcgaggtccgcaaagcggttaaagtgcgcgctatggagaaaatcaaactgtttggctctgacggtaaagcggaatga

SEQ ID NO: 214295 - DNA, 948 bp, Klebsiella pneumoniae
atggagaatatcgaggttatttgtatcggggcagctattgttgatattccccttcaaccggtgagtaaaaatatctttgatgttgactcttacccattagaacgcattgccatgaccacgggaggggatgcgattaatgaagcgacaattatttctcgtctcggtcatcgcacggcgttaattagccgcgtgggcgatgacgcgccaggacattttattgtcgatcactgtcggcgggagaatattgatattcagagcctgaagcaggatgccgatattgatacttccattaatgtgggtttagtcaccgccgatggtgaacgtacttttgtcaccaatcgcaacggcagcctgtggaaactaaatattaacgatgttgatttagaccgcttctcgcaggcaaaggtgctgtcgctggcgagtatttttaatagcccgctgctcgatggtaaagcgttaacggagatttttacgcaggcgaaagcgtatcggttaattatttgcgccgatatgattaagccccgccttaacgaaacgctggaagatattcgccatgcgctgagctacgtggattatctgtttcccaactttgaagaggcgagacttctcaccgggaaagagacgctggatgaaattgccgacagcttcctcgactgcggcgtgaaaacggtagtgatcaagaccggcaagagaggctgctttatcaagcgtgccgatatgaaaatggaggtccctgcggtgtcgggaattaccgccatcgacaccatcggcgcgggggataattttgcctcgggatttatctccgcgctgcttgaaggcaagccgctgcgcgagtgcgcgttgtttgctaacgcaacggccgcaatatcggtactgagcgtgggtgccacaacgggcgtgaaaaacagaaagctggttgaacaacttctcgacgaatacgaagggtaa

SEQ ID NO: 214296 - DNA, 984 bp, Klebsiella pneumoniae
atgaaaatgattcctttaggcagtacggatattaaactttcccgcatgggattagggacatgggctattggcggcggtccggcatggaacggcgatctcgatttgcaggtttgcatcgataccattgtcgaggcgcatcgctgcggcattaatctgattgataccgcgccgggatacaattttggcaacagtgaagtgattgtcgggcaggcgctgaaaaagctgccgcgtaacgatatcgttgtcgaaaccaaatgtggcatcgtctgggagcggacgggcagcctgtttaacaaagttggcgatcgtcagctgtacaaaaatctcacgcctgagtcgattcgcgaagaggtggaagccagcctgcaaaggctgggtatcgacaccattgatatctatatgacccactggcagtccgtagagccctgttttacgccgattgcggaaactgtagatacgctgaacgcactgaaaaaagaggggaaaattcgttctatcggtgcggcgaacgtcgatgccgggcatatcagggagtatctcaaacacggtgagctggatatcatccaggccaagtacagcatccttgaccgggcgctggaaggtgaactgctgccgttatgccggcagaatggcatcattgtgcaggtctattcaccgcttgagcaggggctgttgaccgggactatcggccgggattatgttcccggcggcgcgcgggctaacaaagtctggttccagcgggaaaatatgctgcgggtaatggatatgctcgaggagtggcggccgctgtgtgcaaaataccactgcacgatccccgcgctggcgctggcgtggattttaaaacagagcgacttaatcaccttgctgagtggcgcaacgtcaccagagcaagttcgcgagaatactgatgcattaactatcgccttgactgatgaggattcactattaatgcgtgaaatggcagtagcgctggatacgaagtaa

SEQ ID NO: 214297 - DNA, 759 bp, Klebsiella pneumoniae
gtggcggcaaaagacaggattcaggccatcaagcaaatggtggctaatgataagaaagtggtggtttctcatttaagctcaatttttcaggtcacggaggaaactattcgccgcgatcttgaaaagctcgaagatgagggttttctgacccgtacgtatggcggtgcggtattaaacaccaccgcattatccgataacattcatttttataaacgcgcaaagtctttctttgaagagaaacagaccattgcccgtaatgcattaccatttattaagaataaaaccactatggctgctgattccagcagtacggcgatggagttattaaaactgctgaaggaaagaaacgatctcacgctgttaaccaactcggcggaagcttttcacgaactggcgcagtcggaaattaacgttgtttctaccggcggtgaactgaataaaaatacgctgtcgctgcagggaagaatcactaaggaaattatcagtcgttatcacgttgatattatggtaatgagctgtaaagggctggatatgaagaacggagcgcttgactccaacgaagcagaagcggaaatcaagaaaacgatgattcgccaggcgacggaagtggcgctgttggtcgatcactctaagttcgatcgtaaagcttttgtccagttggtagattttagccatattaattaccttataaccaataaggcaccaggtgcggaatggatagcattttgtaaagagaataatattcaactcgtttattag

SEQ ID NO: 214298 - DNA, 1359 bp, Klebsiella pneumoniae
atggaacaatgtgaccctatcggcgcaagattagaccgcttacctttatcgcgatttcattttcgtatttttggtatcatcagttttagtttattaatcaccggttttctcagctattctggcaacgtggtgctggcaaagttagtcagcaacggctggtcaaataattacctcaatgcggcatttacctcagcgctgatgtttggctattttataggttcgctaaccggcggttttataggcgattatctcgggcgacgtaaggcatttcgcctgaatttgctgatcgtcgggatttcggcttgtgtggcaacctttgtgcctaacatgtactggcttatcttttgccgctgtctgatgggctgcggaatgggggcgttaataatgataggttatgcttcatttaccgagtttattccacccgcagtgcgcggaaaatggtccgcccggctctcttttgtcggtaactggtcgcccatgctatcggcggctattggcatagtggtgattgcttttttaagctggcggataatgtttctgctcggcggcgcggctatgctgcttgcctggtatctgtcgggaagatattttattgagtctccgcgctggctggcgggtaaagggcagcgaagcgcggctgaaaagcacctccagcaggtagagtcgcaaatcgagaaagagaaaaacattatcttaccggcctggcaaagcgcggaacatagggcggaggtgggtgtggaaagcggctctttctggttgttgtttaaaggccacatgctgcggcgaacgctggtggcaattacggtgctcatcgcgatgaacatttcgctctatactattacggtgtggatcccgacaatttttgttaattcggggatcgacgtgacaaagtcaatcttgatgaccgcgattattatgattggcgcgccggtgggtatatttatagccgcgctgattatcgaccgttttccgcggcgattgtttggctcatcgttgctgattattattgcgcttctcggctacttctattcgattcaaaccgcagagtgggccatcttaagctatggcctggtgatgatttttttcctgtacatgtacgtctgctttgcctcggcggtgtacgtgcctgagttgtggccaacgcatctccggttgcgcggttcaggctttgtcaacgcggtagggcggattgttgccgtctttaccccctacggtgtcgcggtcctgttgacccgctccggggcgattacggtttttatggtgctcggggtaatgctggtgctctgcgcgctaatcctgttctgctttggcatcgaaacgcgcaagatctcgttggaggagatttcaacgctggcctga

SEQ ID NO: 214299 - DNA, 642 bp, Klebsiella pneumoniae
atggcacatcgagcgctgttactggttgatttgcagaacgacttttgcgccggcggcgcgctggcggttcctgaaggcgacagtaccgtcgacgtagccaatgcgcttatcgactggagcctggcgcgcggcgagcccatcgtcgccagccaggactggcatccggcggatcacggcagtttcgccagccagcaccaggtggaaccctacaccgagggcgagctggacggcctggcgcaaactttctggccggatcactgcgtgcagcacagcgaaggcgcggcgctgcatcctctgctcaagcagcaggcgatcgccgctgtgttccacaaagggcaaaaccggagcatcgacagctatagcgctttctttgacaacggtcaccggcagaaaaccgaactggacggctggctgcgtggtcaggggatcgtggagctgaccgttctcggcctcgccaccgattactgcgttaagttcaccgtgctggatgccctggcgctgggctacgcggtcaacgtcatcaccgacggctgtcgcggcgtaaatctgcagccgcaggacagcagccaggcgtttatggagatggccgccgcgggcgccacgctctataccctcgacgactggcgggaaacccacgcgtaa

SEQ ID NO: 214300 - DNA, 1020 bp, Klebsiella pneumoniae
atgcaaaaaaaatcgatttacgttgcctacaccggtgggaccatcggtatgcagcgctctgaacacggctatgtacccgtttccggccatctgcagcgtcagctggcgctgatgccggagttccatcgtccggagatgccggacttcacgatccatgaataccatccgctgatggattcatccgatatgacccccgaggactggcagcacatcgccgacgatatccgcagccattatgaggagtatgatggctttgtgatcctccacggaaccgacaccatggcgtttaccgcctcggcgctgtcgttcatgctggaaaaccttggcaagccggtcattgtgacagggtcacaaattccgctggccgagctgcgttccgatggtcagattaacctgctcaacgccctgtacgtcgccgccaactatccgattaacgaagtggcgctgttcttcaacaatcgactgttccgcggcaaccgcaccaccaaagcccatgccgacggcttcgacgctttcgcctcgccaaaccttgccccgctgctggaggccgggatccatattcgccgtctcggtactccgccggcgccgcagggcagcggagatcttatcgtgcaccccatcactccgcagccgattggcgtggtgacgatttaccccggcatctccgccgacgtggtgcgtaattttctgcgccaaccggtgaaagcgctgatcctccgctcctatggcgtcggcaatgccccacagaatggcgagtttattcaggtgctggcggaagccagccagcgcggtattgtggtggtcaatctgacgcagtgcatgtccggaaaggtgaacatgggcggctatgccaccggcaacgccctcgcccaggcgggggtcatcagtggtttcgatatgacggtggaagcgacgctgaccaagctacactatctgcttagccagcagctggacgttgacgccattcgcgcggcgatgcagcaaaatctgcgtggcgaactcacccccgacgaggcttaa

SEQ ID NO: 214301 - DNA, 1854 bp, Klebsiella pneumoniae
atgcgaaccctttggcgactgattgccagcttttttaaatggacgtggcggatactcaactttattcgcaaactggccctcaatgcgatcttcctggtgctggtgctggtgtgtatcggcatctggagccagttcagcagcaccaccagcgaacatgccgcgcgcggcgcgctgttgctggatattaccggcgtggtggtggataaaccatccgccagcagcaagctcggcgtgattggccgccagctgtttggcgccagctcggaccgtctgcaggagaattccctgttcgatatcgtgcagaccattcgccaggcgaaggatgaccgcaatatcaccggtattgtactggatttgaaaaacttcgtcggcggcgaccagccatccatgcagtacatcggcaaagcgctgcgcgaattccgcgatagcggcaaaccggtgtatgccgtcggcagcagctacagccagggccagtactacctggcgagcttcgccaacaaaatctggctctcgccgcagggcgaggtagacctgcacggcttcgctaccaacgggctatattacaaatcgctgctggataagctgaaggtctccacccatgtcttccgcgtcggcacctataaatccgccgtcgagccattcatccgcgatgatatgtcccctgccgcccgcgaagcggatagccgctggattggcgaactgtggcagaactacctcaacaccattgccgccaaccgccagatcaccgcccagcagctcttcccgggcgcccagggcatcatcgatggcctgcgtaaggtgggcggcgatacggcgaaatatgcgctggacaataagctggtggatgagctggcgacctccacggaagtggaaaaggcgctgaccaaacagtttggctggagcaaagcggataacaattaccgggcgatcagctattacgactacaacgtgaagacgccgtctgaccagggttccgccatcgcggtaatcttcgccaacggcgccatcatggacggtgaagagaccccgggcaacgtcggcggcgataccaccgcagcgcaaattcgcgatgcgcgcctcgatccgaaaattaaggccatcgttctgcgcgtaaacagcccgggcggcagcgtaaccgcttcggaaatcattcgtgaagagctggcggcagccaaagccgccggtaaaccggtagtggtctcgatgggcggcatggcggcgtccggcggctactggatctccaccccagcggattacatcgtggcgaacccaagcaccctcaccggctccattggcatctttggggtgatcaacaccgtggaaaataccctcgggtcgattggcgtccacaccgacggcgtcgccacgtcgccgctggcggatgtctccagcaccaaagcgctgccgccggaagtgcagcagctgatgcagttgagcattgagaatggctatcagcgctttatcaccctggtggctaacgcccgtaagagcacgccggagaaaatcgaccagatcgcccagggccacgtctggaccggggaagatgccaaagccaacggcctggtcgacagcctcggcgacttcgacgacgcggtggccaaagccgccgagctggcgaagctgaaaacctggcacctcaactactatcaggaagagccgaccttcttctcgatggtgctggatagcctgaccggctcggtacgcgcctcgctgccggcggccattcaggcctggctgcctgcgccggtcgccgcggcggccgagacggtgaaagcggagagcgacaagctggcggcgtttaacgacccgcagaatcgctatgccttctgcctgacctgcgctaacatccgttaa

SEQ ID NO: 214302 - DNA, 552 bp, Klebsiella pneumoniae
atggatgctctcgatctactgcttaatcgccggagcgcttcccgcctggcggaacctgccccggcgggcgaacagctggaaaacattctgcgcgccgggctgcgcgccccggatcatggcaccctgcagccgtggcgcttctttattatcgccgatgacggccgcgagcgcttcagccagttgctggaaaaaggggccagagaggccggccaggatgagaagggaattgagaaagcccgcaatgcgccgttccgcgcgccgctgattattaccgtggtcgcgcgctgtgaagaccaccctaaggtgccgcgctgggagcaggagatgtccgctggctgcgcggtgatggtgatgcagatggcggccctggctcagggattcaacggtatctggcgcagcggagcattgaccgagagtccggtggtgcgggccggcttcgagtgccgcgaacaggataaaattgtcggcttcctctatctggggacgccgcagctaaaagcctcaaccaccattgccctgccggataccgcgccgtttgtgacgcgattctga

SEQ ID NO: 214303 - DNA, 351 bp, Klebsiella pneumoniae
atgccccttacagcccttaagcttttcaaaaacctgtccgatgaaacccgtctgggtattgtcctgctgctcagggagctgggagaactgtgcgtctgcgatttctgcacggcgctggatgagtcccagcccaagatctcccgtcatctggcaatgctccgggaaagcggtctattgctggatcgcaagcaggggaaatgggttcattatcgcttatccccgcatattccttcctgggctgctcaggtgattgagcaggcctggttaagccaacaggacgacgtacaggccatcgcccgtaagctggcatcggcaaactgctctggtagcggtaaggctgtttgcatctaa

SEQ ID NO: 214304 - DNA, 363 bp, Klebsiella pneumoniae
atgaagacgttaacggtgtttgacccggcaatgtgctgcagtaccggtgtatgtggttcagatgtcgatcaggttctggttgatttttctgctgatatgcagtggctgaaaggacgtggcgtacaggttgaacgttacaacctggcgcagcagcccatgagctttgttcacaatgagaaagcgaaagccttcctcgatgcatccggcgcagaagggcttccgctgctgttgctggacggcgaaacggtgatggctgggcgatacccaaaacgcgctgagctggctcgctggttcggtattccgctggagaaggtagggttagctcccaccagttgctgtggtggtaatacttcctgttgctga

SEQ ID NO: 214305 - DNA, 1752 bp, Klebsiella pneumoniae
atgaaattattacagaatatcccgccttacctgttttttactggcaagggtggtgtaggaaaaacttccatttcctgcgcgacggctatccaccttgccgaacagggtaagcgggttttgctggtcagtaccgacccggcctccaatgtcggtcaggtattcgatctggctatcggtaacacgattcgccctgtgacagcagttcctgggctttctgctctggagattgacccgcaggaagccgcccggcaatatcgggccagaatcgttgatcctatcaaaggtcttctgcctgatgacgttgttaacagtatcagcgagcagctttcaggagcctgcaccactgagattgcggcgtttgatgagttcaccggcttattgacagacgcttccctgctgacccgtttcgatcacatcatttttgataccgcgccgacgggccacacgattcgccttctccagcttcctggtgcctggagtagctttattgaaagcaatccagatggtgcctcctgtcttggcccgatggccgggctggaaaagcagcgtgagcagtatgctcatgcggtagaggcgttatccgaccctgaacgtacccgcttggttctggttgcacgactgcaaaattctacgctgcaggaagtcgcccgcactcatgaggaactggctgagattggcctgaaaaatcaatatctggtgattaatggtgtgctgcctgaagccgaagctgaacatgacgccctggccgcggcgatatggcaacgtgagcaggaggcactggcaaatcttcctgccggtttatctgagctaccgacagataccctgttactccagccagtcaatatggttggtgtttcagcattgaagggactgctggctacccgttctgaggcattaccgctcccggtaacgaacatcctgtacacgcctgaaaacttatcactctctggcctggtcgatgatatcgctcgcagtgaacacggcctgattatgctgatgggcaaaggtggtgtagggaaaaccacgatggctgccgccatcgccgtcaggctggccgacatgggatttgacgtgcatctcacgacctctgatcctgctgcgcacctgagtacaacgctgaacggcagcctcaaaaacctgcaggtcagccgcatcaaccctcacgatgaaaccgaacgctatcgccagcatgttcttgagacgaagggaagagatctggacgaagcagggaaacggttactggaagaggatttacgctctccctgtactgaagaaattgccgtgtttcaggccttctcccgtgtgattcgtgaagcgggtaagcgctttgttgtcatggataccgcccctaccggacacacgctgctgttgctggatgcgaccggggcttatcaccgagagattgccaaaaaaatggggagtaaaggtcattttactacccccatgatgcagcttcaggacccggatagaaccaaagttctgctggttacgcttcctgaaaccacaccggtgctggaagcggcaaacctgcaggctgaccttgaaagagcggggattcatccgtggggctggattatcaataacagcctttccattgcggatacgcgttctccgttgctttgtcagcgtgctcaacaggaactgcctcagattgaggctgttaagaatcagcatgctgaccgtatagcgcttgttccggtgctggcgtcagagcccgccggtattgaaaagctcagagagttgatgagttaa

SEQ ID NO: 214306 - DNA, 1290 bp, Klebsiella pneumoniae
atgttactggcaggcgctatttttgtcctgaccattgttttggttatctggcaaccaaagggattagggatcggctggagtgcaatgctgggcgcgggactggctctgatatctggcgttgtgcatgtgggcgatattccggtggtgtggaatatcgtctggaacgcgacggcgacctttattgccgtgattattatcagcctgctgcttgatgagtccggctttttcgaatgggcggcattgcatgtttcgcgctggggtaacggtcgtggccgtttgctctttacgtatatcgttctgcttggtgcagcggtggcggcactgtttgccaacgatggtgcggcacttattctgacgccgatagtcatcgccatgctgctggcattagggttcagcaaaggcacgacactggcattcgtcatggctgccgggtttattgccgatacagccagcctgccgcttatcgtgtccaacctggttaacatcgtttctgcagacttctttggactgggcttcaccgagtatgcgtcggtaatggtgccggtggatattgcagccattgttgccacgttggttatgctgcatttgttcttccgcaaggatatcccaccgacttacgacctggctcttctgaaagcaccggcaaaagcgattaaagatctggcaaccttcagaaccggctggatagttttaatacttctgctggttgggttctttgtccttgagccgcttggtattcccgttagcgcgattgcggctgttggagctgtgatcctgtttgcagtagctaaacgaggccatgccattaaaactggcaaagtgctgcgcggtgcgccatggcagatcgtcatcttctcattggggatgtacctggtggtctacggtctgcgcaacgccgggctaaccgaatacctttcaggtgtgctgaatgtacttgcggataaaggactctgggctgcaacgctgggtactggcttcctgacggctttcctgtcttccatcatgaacaacatgcctaccgtgctggttggcgctctttctatcgatggaagcaccgcaacaggcgttatcaaagaagcgatgatctacgccaacgtgattggctgcgatctgggacctaaaattacacctattggtagcctggcaacgctgctctggctgcatgtcctttcacagaagaatatgaccatcacctggggatactatttccgcaccgggatcgtcatgactctgcctgtgctgtttgtaacgctggcagcgctggcgctacgtctctctttcactttgtaa

SEQ ID NO: 214307 - DNA, 426 bp, Klebsiella pneumoniae
atgagcaacatcaccatttatcacaacccggcctgcggcacgtcgcgtaatacgctggagatgatccgcaacagtggtaatgaaccgaccgttattcattaccttgaaaatccaccgtcacgcgatgagctggtcaaactcattgcagatatgggcatttcagtccgggctttgctgcgcaaaaacgtcgagccttatgaagaactggggcttgaggaagataagtttactgacgatcagttaatcgattttatgcttcagcatccgatcctgattaaccgtccgattgtggtgacaccgttgggaacgcgtctgtgccgcccttccgaagtggtactggatattcttccggatgcgcaaaaaggcgcatttgctaaggaagacggcgagaaagtagtagatgaggcagggaaacggctgaaataa

SEQ ID NO: 214308 - DNA, 537 bp, Klebsiella pneumoniae
atgcacattatcaatgctgaagagcagcacattcccgccatacggcgcatttacgcccatcatgtcctgcacggcacaggcagcttcgagacggaacccccggacacgcaggaaatgcttgcccgggtgaaaaatgttcagtcacgtggatttccctggtatatcgccctgcagggggagacggtcatcggctactgttatctctcccgctaccgcgaacgccatgcctaccggtttacggttgaaaattcggtgtacatcgatccggcttatcagcggcaggggggcggaaaagccttactcgatcatgccttaacatgggcccggtctcagggataccgccagatgatagcggttgtgggggacagtgcgaacgtcgcgtctgtagcgctgcatcttcgcgccggatttactgaaatcggcacgctgaaggacatcggtttcaagcatggccgctggctggacacggtgttgctgcagcgtcagctgggaaaagggagctgtacgctgccggacagtccggtacccggacgctga

SEQ ID NO: 214309 - DNA, 474 bp, Klebsiella pneumoniae; identical to SEQ ID NO: 102215

SEQ ID NO: 214310 - DNA, 1341 bp, Klebsiella pneumoniae
atgacgatgccatttttacagaatatccccccgtttatcttcttcaccggcaaaggcggcgtggggaaaacctctctggcctgcgcgacggcggtatggctggctgaccagggccggagaacgcttctggtcagtaccgatccggcctccaatgtcggtcaggtcttcagccagactgtgggccaccggatcactggtatccgcaccgtggaaaaccttgcggcaatggaagttgacccgatggcggccgcgcaggcttaccgcgatcgcgtgctcgatcctgttcgtgaactgatgcctgccgatgtcatcagcaacattgaagaacagctttccggttcatgtaccacggagatcgcggcgtttgatgaatttaccgcgctgctgaacagtcatgaactgcgcgaaaaatatgatcatatcgtctttgatactgcaccaaccggacacaccatccgtatgcttgagctgccgggcgcctggagcgggtacctcgatgcacatcctgatgctgcggcgaacctcggccctctggtggggctggagaaacaacaggaccagtacgctgacgcagtgaaagccctctctgatacggcactcacgcgactggttctggttgcccgcgcacaggcgtcgaccctgaaagaggtctcccatacccacgaggagctgtcggctatcggtctgcagcatcagcaccttgccatcaatggcgtgctgcctccctttgccggtgaacaggatccgctggcgcacagtattctggcgcgggaggaacgggccttacgggccatgcctgaaaacctcgcgcatcttccccggtcgatgctgtatctgaagccttttaatctggttggtctggaagccctgagggcgctgtttacagagagcacacttgttctgccggatccgggagccacgctcacgacggtcgatttaccggagcttgcctccctggtggaggacctcagccgagcgggaaaagggctggtcatgacgatgggaaaagggggcgtggggaaaaccacggtggcggctgcggtcgcggtctcgctggccagacgcggtcataaagtccacctgaccacctccgatccggcagccacctgtcttacaccctggatggctcgctgccaggccttcaggtcagccgtatcgatccaaaagcagagactgagcgctatcgtcgctttgtgctggaaaatcagggaaaaggtctggatgaagagggactggcggtactggaggaagatctccgttccccctgcaccgaagagattgccgtgtttcaggcattctcccggatcatcaaagaggccaacgaccattttgtcattatag

SEQ ID NO: 214311 - DNA, 363 bp, Klebsiella pneumoniae
atgtcaaaaattgagatctttgaagccgcaggctgctgtgcgaccagcagcgtcgtggtcagcgatgaagccgtcaaatggaacgccagcgccgaatgggcgaaaaagcatggtgtgaatattcagcgttacagcctggcaaagaacccgcagcagttcctgaatacgcccgtcatcagggccttcctgaacacgtcaggaatggagtcccttcccgctaccctgcttgacggccagctggtgatggcgggcaagctcccgtcccgggaagatatcgcccgctgggccggtatttccctcacgcaggactggaatgaagacagcacgcagccgcgctgctgcagcattccccgtatgccttaa

SEQ ID NO: 214312 - DNA, 546 bp, Klebsiella pneumoniae; identical to SEQ ID NO: 133610

SEQ ID NO: 214313 - DNA, 714 bp, Klebsiella pneumoniae
atgattgctgaactgaaaaatgttgttcctgagctgtttgatacaggtcgcaccggggtccgcctgggtgtaaagacagttgaccatcctccccggatcctgatgttgtacggttccgttcgagagcggtcctacagccgtctggccaccgaagaggctgcccggcttcttaccgccatgggtgcggatgtccgcatctttaatccttccggtctccctctgccggatgatgcagcggatacgcatcccagggttatggaacttcgcgaaatggtgcgctggtctgaagggatggtatggtgctctcctgaacgtcatggtgcgatgaccggcattatgaaagcccagattgactggataccactatcagagggcgcagtacgcccttctcagggaaaaaccctggccgtcatgcaggtctgcggaggctcccagtctttcaatgcggtaaaccagatgcgtattcttggccgctggatgcgaatgattactatacctaatcaatcctcggtagcgaaagcctggcaggagtttgatgaagacggacggatgaaaccatccccgtactacgaccgtattgtggatgtaatggaagagctgatgaagtttaccctgctgacccgggagtatgcagcgtatctcgtcgatcgctacagtgaacgtaaagagtcggcagaagcactttcccggcgggtgaatcagagcaaaatctga

SEQ ID NO: 214314 - DNA, 327 bp, Klebsiella pneumoniae; identical to SEQ ID NO: 133609

SEQ ID NO: 214315 - DNA, 405 bp, Klebsiella pneumoniae
atgaattacatcgtggctcagttgttaggggccggcgctgctgcactgtgcctgaaggctgtctttggccactccctgctggccggggtgacccgggtccatatgggggtatcactgtacaatgcctttttcatcgaaggtgtcatgacttttattctgattatgagcatcctaacgaccagaaaccccgcgattatcagcattgctgtttttcttgatgcttttattggcgggccgctgacgggggcaagcatgaacccggcccgtagcttcgggccggcattggccatgggatactgggataatcagtggctgtactgggccgctccgctgtctggcgggcttgcagctgttgcgtgctgccagctgtttatgccgcaactgaagtcaccctcaccggaataa

SEQ ID NO: 214316 - DNA, 816 bp, Klebsiella pneumoniae; identical to SEQ ID NO: 102214

SEQ ID NO: 214317 - DNA, 651 bp, Klebsiella pneumoniae; identical to SEQ ID NO: 102213

SEQ ID NO: 214318 - DNA, 435 bp, Klebsiella pneumoniae; identical to SEQ ID NO: 102212

SEQ ID NO: 214319 - DNA, 1401 bp, Klebsiella pneumoniae; identical to SEQ ID NO: 191098

SEQ ID NO: 214320 - DNA, 681 bp, Klebsiella pneumoniae; identical to SEQ ID NO: 19849

SEQ ID NO: 214321 - DNA, 930 bp, Klebsiella pneumoniae
atgaacgacctgattatgattgttattcgttttcttctttatctggatttgatggtaatatttggattgccattttttcagatatatggaataagcggtgtcagacatgaaacctataacctgactaatttcaggtcgtttataacctttgctgttgttacaggcatcattcttactggcattaatatgctcctggtatctaatgccatgagtggagtaactgacctcagagaattatccatccatgttatcgagatggtgatagaagaaactgatgtgggtattagctggattgtcagactctgtgccctgtttaccacactcggtgctttgttcctttacactaataagagagtattgtcctgcctgctgatgacgatgagtgggggcgtggcgctggctacacttgcctggggaggacacgccgttatgcatgacggtctgcattactatctccatttactgagcgatctgacccatctcggcgctgcaggtgcctggacaggtgctctggttgcatttgctatcctgctgatgcgcagaaacgagcataatgcacagagcgtcattgtgatatctgactccctggcaaaatttgccacggcaggaacggtgattgttgtagccctgatcctgagtgcgctggtcaactatctgtatattgctgagggtaacttaactcccttattcaacagttcctgggggaggatattgcttgccaagacggctctgtttgttctgatgcttcttctggctgcagcaaaccggtttcacctgggtccccggcttgaagttatggtcagggaagggaattatgatcgcagcgttgccctgatgcgaaacagcatcctgacagaattcgttgttgcgattatcattctgggcgccgtagcgtggcttggaatgcttgctccgtctcagatcagctag

SEQ ID NO: 214322 - DNA, 381 bp, Klebsiella pneumoniae; identical to SEQ ID NO: 19851

SEQ ID NO: 214323 - DNA, 897 bp, Klebsiella pneumoniae; identical to SEQ ID NO: 19852

SEQ ID NO: 214324 - DNA, 1818 bp, Klebsiella pneumoniae
atgctgttgaaaacgtctcgacgaactttcctgaaggggttaaccctctctggcgtagccggaagtcttggcgtatggagtttcaatgcgcgttccagtctgagcctgccagttgccgcatccctgcagggtactcagtttgacctgaccattggtgaaacggccgtcaatatcacgggcagtgagcgtcaggccaaaacaatcaatggaggcctgccggggcccgttcttcgctggaaagaaggtgacaccattaccctgaaggtcaaaaaccgtcttaatgaacagacgtccattcactggcacggcattattcttccggccaatatggatggtgttccggggctgagttttatgggcatagagcctgatgatacctacgtttacacctttaaggttaagcagaacgggacttactggtaccacagccattccggtctgcaggaacaggagggggtatacggtgccattatcatcgatgctagggagccagaaccgtttgcttacgatcgtgagcatgtggtcatgttgtctgactggaccgatgaaaatcctcacagcctgctgaaaaaattaaaaaaacagtcggattactacaatttcaataaaccaaccgttggctcttttttccgcgacgtgaataccagggggctgtcagccaccattgccgatcggaaaatgtgggctgaaatgaaaatgaatccgactgacctcgcggatgtcagtggctacacctacacctatctcatgaacgggcaggccccgctgaaaaactggaccggactgttccgtcccggtgaaaagatacgcttacggtttatcaacggctcggcaatgacctatttcgatatccgtatccccgggctgaaaatgacggtcgtggctgcagatggccagtatgtaaacccggttaccgttgacgaattcaggattgccgttgccgaaacctatgatgtcattgtggagcctcagggtgaggcctataccatcttcgcacaatccatggacaggaccggttacgctcgagggacactggccacgagagaagggttaagtgctgccgttccccccctcgatccccgtcctctgttgaccatggaagatatgggtatggggggaatgggacatgatatggcaggaatggaccacagccagatgggaggcatggataacagcggagagatgatgtctatggacggtgctgaccttccggatagcgggacatcctccgcgcccatggatcacagcagcatggccggtatggatcattcccggatggccggaatgccgggtatgcaaagtcatcctgcgtcagaaacggataacccactggttgatatgcaggcgatgagcgtctctccgaaattaaatgatccgggtattggtcttcgaaataacggaagaaaggttctcacgtacgcggatttgaaaagccgctttgaggatcctgacggacgtgaacctggccgtaccatagaactgcatttaaccggccacatggaaaagtttgcctggtcatttaacggaatcaagttttcagatgccgcaccggtgctgctgaaatacggtgagcggctcaggatcacgctgatcaacgataccatgatgactcaccccattcacctgcatggtatgtggagcgatctggaagatgaaaacggtaatttcatggttcgtaaacacacaatagatgttccccctggtacaaaacgcagttacagagtgacagcagatgcgcttggccgctgggcgtatcactgccatttgctctatcacatggaaatgggaatgtttcgtgaagtccgggtggaggaatga

SEQ ID NO: 214325 - DNA, 450 bp, Klebsiella pneumoniae; identical to SEQ ID NO: 129741

SEQ ID NO: 214326 - DNA, 738 bp, Klebsiella pneumoniae; identical to SEQ ID NO: 97792

SEQ ID NO: 214327 - DNA, 198 bp, Klebsiella pneumoniae
atgaaaagtaccacctatgcgcttattgctgtcgccgcgattgcggcatttgccctcctgcgcgaacactggtcacatgtggcaggttactggccatatctgttattgctggtctgcccgctaatgcatcttttccacggccacggagggcatggagatcatcaacatcaaggaagtgaaaacgataaaaaaaattaa

SEQ ID NO: 214328 - DNA, 2448 bp, Klebsiella pneumoniae
gtgaaaaatgacaatgcagtgcaacacaacaaccagactgcttctgagcagacattatccccggacgagggccacgtattgcataaggtgagagatcccgtgtgcgggatggccatcctgcccgacagggcgcacagcagcattcgataccaggaccaccaactttatttctgctccgccagctgtgagagtaaatttaaagcccatcccgatcgttatcttaccgaagatgccagtgaacattcccatcaccatcaccacgatcatcacgaagtcagccctgatcagataaaacagcctcacaaccaggcggaaaaagagaattctgaaggtgtgtggacatgtccgatgcacccggagatacgccgcagtggtcccggaagctgtcctgtctgtggaatggcactggagccgctcgtagctacggcatccacggggccgagtgatgaacttcacgacatgacaagacgcttctggctggggttgttgctggcgtttccggttctggtactcgaaatgggatctcatctgtttcccgacttgaggaatacagtaccgccacagtacaacacatggctgcagttgcttctggcctcccctgtcgtgttgtggtgtggctggccattcttcgcccgggccggaatgtcgttacgtaaccgctccctgaatatgtttacccttgttgcaatggggaccggcgtagcctgggtttacagcgtcattgcaaccgtcttcccctcctggtttcctgcatcgttcagaaacatggatggcctggtggccgtttattttgaagccgcagcagttattacggtgcttgttctgctgggacaggttcttgagctgcgggcacgggaacaaacctcaggcgccattactgcgcttctgaaccttgcccccaaaaccgccagacggctggatcatgacggtcatgaaacggatattaatgcggaagatgtcctgcctggcgataagctccgcatcagacctggagagagtattccggtcgacggtatcgtgatcgaaggcaaaacaaccgttgatgaatcgatggtgaccggggagtctatgccggttaccaaaacgaagggtgaccctgtcattggggggacgattaatcagacaggtagtcttatcatccgtgcagagaaagtcggtgatgaaacgatgctctcacgaattgttcagatggtcgctgatgcacagcgttcgcgtgcccccatccagagaatggcagacagcgtttcaggctggtttgttcctctggtgatacttatcgcggttgttgctttcttgatctggtctgtctgggggcccgagcccaggatggcgcacggtctcattgcggctgtgtcggtcctgattattgcctgtccctgcgcgctgggactggccacgccgatgtcgataatggtgggggtgggcaaaggcgcccaggccggggtgttaatcaagaatgccgaagcccttgagcgtcttgaaaaagtggacacgctggttgtcgacaaaacaggcacgctcacggaaggttcgcctacggtgacagggattatcagtctcagtccgggtggggaaatatctcttttacgtgtaacagctgcagtggaaaaaggttcgcagcatccgttgggtatggctgttgtcagagccgcgcatgaaaaggggatcgtgatacctgccgtcagtaatttcaatgccccgtcggggaaaggtgtctcaggcgatgtcgaaggtcaacgggttgttattggtaatgaactggctatgcaggaaaacagtatcgttattgataatcaaaaggccgttgcggatacgttgcggatggaaggcgctaccgttatctatgtggccacagacgggaaccttgcaggcctgatagctatctcggatcccgtgaaagcaaccacgccggatgcgcttaaagctttgcgtcaggcggggatccgcattgttatgctcaccggggataaccagcttactgctgaagcagtcgcacggaaactgggaatagatgaggttgaagccgggattctgccggatggcaaaaaagcagtgataacccgactgaaagcgtctggccatgtggttgcgatggccggagacggtgtgaatgatgccccggcgctggcagcggctgacgtgggtatagccatgggaacgggtacagatgtggcaatagaaagtgctggcgttacccttctcaaaggcgatttgatgatactcaacagggcccgtcatctgtcagaaatcaccatgaaaaatatccggcagaatctgttttttgcgtttatctacaatgctcttggggtgcctgtagctgcaggtctgctttatcctgtgtatggaatactgctgtcgccagttattgcggcggcggctatggccctttcctccgttagcgtcattgcaaatgcgttgcgtctgaaaagtgtcaggctcgggaaataa

SEQ ID NO: 214329 - DNA, 441 bp, Klebsiella pneumoniae; identical to SEQ ID NO: 133316

SEQ ID NO: 214330 - DNA, 3147 bp, Klebsiella pneumoniae
atgattgaatggattatccggcgctctgtcgccaaccgtttcctggtcatgatgggggccctgtttctcagcatctggggtacatggacgattattaacacgccggtcgatgccttgcctgacctgtcagatgtacaggtcattatcaaaaccagctatcccggccaggccccgcagattgtagaaaaccaggtcacctatccacttaccaccaccatgctgtccgtacctggcgcaaaaaccgtgcgtggtttttcacagttcggggattcgtatgtgtatgtcatttttgaagacggcaccgatctgtactgggcccgttcccgcgtgctggaatatctgaatcaggttcagggaaaactgcctgccggtgtgagttctgaaatcggtcctgatgccacgggtgtgggctggatttttgaatatgcccttgtcgatcgcaacggaaaacacgacctttcagaactgcgctctctgcaggactggttcctgaaatttgagctgaaaaccatcccgaacgtggctgaggtcgcttcggttggcggcgtggtgaaacagtaccagattcaggtcaatccggtaaaactgtcccagtacggtatcagcctgcccgaagtgaaacaggcacttgaatcgtctaaccaggaggccggtggctcatccgttgaaatggccgaagcggagtatatggtccgtgccagcggttatcttcagagcattgatgattttaataacatcgtcctgaaaacaggtgagaacggcgtgccggtttatctgcgggatgttgcccgcgtgcagaccgggcccgaaatgaggcgtggtattgccgagctgaacggccagggagaagtcgctggcggcgtggtgatcctgcggtcgggtaaaaatgcgcgcgacgttatcacggcagtgagggataaactggagacgctgaaggccagcctgccggaaggcgttgaaatcgtgaccacctacgatcgcagccagttaatcgaccgggcgattgataacctcagttacaagcttcttgaagagtttatcgttgttgctgtcgtttgcgcactgttcctctggcatgtccgttctgccctggtggcgattatttctctgccacttggcctgtgtatcgcctttatcgtcatgcacttccagggactgaacgccaatatcatgtcgctgggagggatagcgattgccgtcggtgcgatggtggatgccgccattgtgatgattgaaaatgcgcacaaacggcttgaggagtgggatcatcagcatccgggtgagcagattgacaacgccacccgctggaaggtgattaccgacgcctccgtggaagtgggacccgcgttgttcattagcctgctgatcatcaccctgtcctttattcctatctttaccctggaagggcaggaaggtcgtctgtttggcccgctggcattcacgaaaacgtactccatggcgggagcggccgcactggccatcatcgtcattcctattctgatgggattctggatccgggggaaaattcctgccgagacaagtaaccccctgaaccgggtgctgatcaaagcgtatcatcctttgctgctgcgggtcctccactggccaaaaacaaccctgctggttgcggccttgtccattttcacggttatctggccactgagtcaggtgggcggtgaatttctgccgaagattaacgagggcgatctgctgtatatgccgtcgaccttgcctggcgtctctccggcagaagctgcagcgctcctgcagacaacagacaagttaatcaaaagcgttcctgaagtggcttctgtatttggcaagaccggtaaagcagagaccgcaacggattccgcgccgctcgaaatggtggaaaccacgatccagctcaaacctgaggatcagtggcgtcccggcatgacaattgacaagattattgatgaactcgacaggacagtccgtttaccgggtctggcaaacctctgggtgccgcctatccgtaaccgtattgatatgctctcaaccgggatcaaaagcccgataggtatcaaagtgtccgggactgttctgtccgatatcgacgcgacggcgcagagtatcgaggcggtagccaaaaccgtgcctggcgtggtgtctgtcctggctgagcgacttgagggcgggcgctacatcgatatcgatatcaaccgggagaaagcttcccggtacgggatgactgtgggcgacgtccagctgttcgtctcttcagcaatcggtggggctatggtgggtgagacggttgaaggcgtggcccggtaccctattaacattcgctatccgcaggattaccgtaacagtccgcaggcgttgagagagatgccaatcctgaccccaatgaagcagcaaattacgctgggcgatgttgccgatattaaggtcgtttccggaccaaccatgctgaaaaccgaaaatgcccggccagccagctggatttatgttgatgcccgcggcagggacatggtgtcggtggtgaacgatattaagacggccatcagtgagaaagtgaaactgagaccggggaccagtgtggcattctcaggacagtttgaattactcgagcacgccaataagaaattaaaactgatggtaccgatgacggtgatgatcatcttcatcctgttatatctggcattccgccgggctgatgaggccttacttattctgatgagcctgccgtttgccctggttggcgggatatggttcctgtactggcagggcttccatatgtcagtggcgaccggaaccgggtttatcgccctggccggggtggcagcagagtttggcgtggtcatgctgatgtatctgcgtcatgccattgaagcgcacccggaattgtcccgtaaagagacgttcacaccggaaggccttgatgaagccctctatcatggtgccgtactgcgtgtccggccgaaagccatgaccgtggcggtgatcattgcgggtctgctgccaatactctggggaaccggtgcaggttcagaagtcatgagccgtatcgcggcacccatgattggtgggatgatcacggctccgctgctgtccctgttcattattcctgccgcctacaaattaatctggctgcgcagacataaaaaaagcgtgtcctga

SEQ ID NO: 214331 - DNA, 1293 bp, Klebsiella pneumoniae
atggcttctttaaagataaaatatgctgcaataattatcagcagcctcatagcaggggggctgatatcggttactgcctggcagtatgtaaactcatcacaaaaaacagtacaaaccgaacaaaaggcaccggagcgaaaggtacttttctggtatgacccgatgaaaccggataccaaatttgataaacccggaaaatctccctttatggatatggacctggtgccgaaatatgctgatgaaagtggcgatgaaagcagtggcgggatccgtatcgatccaacgcaggttcagaatctgggattaaaaacgcaaaaagtcacgcgaggaatgctgaattattcccagacaatcccggctaatgtcagttacaacgagtatcagtttgtcattgtgcaggcgcgctctgacggtttcgtcgaaaaagtgtatcccctgacgattggcgatcatgtgaagaaaggcactccgcttatcgatatcaccattcctgaatgggttgaggcacaaagtgagttcctgctgttatccggtacaggcggtacgtcaacccagataaaaggggttctggagcgacttcgtctggctggtatgccggaagaggatattcaaaggctgcgttcaacccgcacaatccagacccgttttaccattaaagcacctattgatggtgtcattactgcgtttgacctgcgcaccggcatgaatatttcgaaagataaagtagtggctcagattcaggggatggacccggtctggatcagcgctgcagtgccagaatctatcgcatatctgctgaaagatacgtcgcagtttgaaatttcggtaccggcttatccggataaaacattccatgtcgaaaaatggaacattcttcccagcgtggatcagacaacccgtacgcttcaggtccgtctccaggtttctaataaggatgagtttctcaagccgggcatgaatgcctatctgaaactgaataccaagagccaggagatgctgctgataccaagccaggccgttatcgataccggcaaagaacagcgcgtgattactgttgatgatgaaggcaagtttgtgccgaaacagatccacgttctgcatgaatcacagcaacagtccggcatcggttccggcctgaatgaaggcgataccgtggtggtcagtggcctgttcctcattgactccgaagccaatattacgggcgcgctggaacgtatgcgccaccctgaaaaaacagaaagcagtatgccagcaatgtctgaccagcctgtaaatatgcattcagggcactga

SEQ ID NO: 214332 - DNA, 354 bp, Klebsiella pneumoniae; identical to SEQ ID NO: 19861

SEQ ID NO: 214333 - DNA, 1386 bp, Klebsiella pneumoniae
atgttcaaattaaaattactcagcatcagtaccatattcatcctggctggttgtgtttctctggcacctgaatatcagcgtccgccagctccggttccccagcagttttcattgtctaaaaacagtctgacgcctgcggtaaacagctatcaggatacgggctggcgaaacttttttgtcgatccccaggtcagcaggctgatcggtgaagccctgaataataaccgtgatttgagaatggctgccctgaaggttgaagaggcccgggcccagttcaacgtcacggatgcagatcgttatccccaactgaatgcctcatccgggatcacatacaacggtggtctgaaaggtgacaagccgaccacacaggagtacgacgcgggtctggagctcagctatgagctcgatttttttggcaaacttaagaacatgagtgaggctgatcgccagaactactttgccagcgaagaagcccgtcgtgccgtacacatcctgctggtctccaacgtttcacagagctatttcagccagcaactggcgtacgaacaactccgtattgcgcgggaaacgctgaaaaattatgaacagtcctatgctttcgttgagcaacagctcgtgaccgggagtacgaacgttctggcacttgaacaggcgagaggacaaatcgaaagtacccgcgccgaaatagccaaacgagaaggcgatctggctcaggcaaacaatgccctgcaactggtgctgggaacgtaccgcgcacttccgtcagaaaaagggatgaaaggcggggagatcgcaccagtaaaattgccaccaaatctatcttcacaaattttgctgcagcgaccggatattatggaagcggaatatcagctgaaagcggctgatgccaatattggcgcagcgcgagcggcctttttcccctccattaccctgaccagtggtctttccgcaagcagtacggagctgtcaagcctgtttacgtcaggaagtggaatgtggaattttatccctaaaattgaaattcctatttttaatgctggcaggaataaagccaatctgaagctggctgaaattcgccagcaacaatcggtggttaattacgaacaaaaaattcagtcagcctttaaggatgtttccgacacgcttgcgctgcgcgacagtcttagccagcaacttgagtcacagcagcgttatcttgattcacttcagataactctccagcgtgccagaggattatatgcaagtggtgctgtcagttacatcgaagtgctggatgcagaacgttccctcttcgctacgcagcaaaccattctcgatcttacctattcccgacaggttaacgaaattaatctgtttaccgcgctgggtggcggttgggtagagtaa

SEQ ID NO: 214334 - DNA, 753 bp, Klebsiella pneumoniae
atgaacaatatcaaatctatttcaagaatattatcaccaatattgctatttataattataataattctttcgatcatagcttgcacaagagaaattggatctgacaacgattctattatgtatgctacaatcgtacaagatagcgttaatggtttttataattatttacaaaaagaaccaggcttttggttgattgttttcttaaacaatactttcacaggtgggagtattgaagcattcttttttatttattcattcatagcattgtgtttatgtttctatggaatatataaggtttctccagccccttatattagcattatcatttaccttgcatttttctttataatacatgagatgatgcaaatcagaatagctttcgctgctggatttatcttttttactttttattacattgtagataatcaaaggcgaaaatcattttttatcagtgcgatagccgtaattttccattattcaacaataatttcattctttttcttcttcttaaggccgaaacgaaaaataacaaaaatatatttaatccttcctgttctgggaatgttgtttggcttatttattaataacgcgccatcgtttagccaagcatttttcaacctaatgccaacatttatcagctataaagcgcaactttactttgacctgaatacggaaggagaccttaaaagagttacagcagttgcaatgggatttggaagtcttatttattattctttattgtttcggccttaa

SEQ ID NO: 214335 - DNA, 1578 bp, Klebsiella pneumoniae
atgagcaagttgactcgccgaagatttattggcactctcatgccagctatagcacttgagttaaccagtccgattaatttttgtcgcgccgaaaccattcctccgaaaattaagataagagcagtacaaagtctttcttcttataatccctctcatgagggggaggtcatttctgttattcatgaaattgatggcagcgtgaagttcgtcgctgcagatgcaaaaatatttaaagtcgatggtgtaaaggtcatacaatctcctaatacaaaactggtattcgtaagggatgagtattatagtaatagaatagtccgccctagttggtatgggtgccgaggggaagggaagatctcttcagatactatatgcttcgctaaaatgctaaagtctctagttgatggtgatcatatcatattaactaagggagaagtgtattataatgatttccctaataatagtcaggataaagatggctggacaattacggctaataatataacattagatggtgaaggtgctactctctcaaggataacaccaccgaattatttatgcgcagattacacgactttaaaaattactggagataattgtaaaatacaaggtgttcttcttattacttctgatgaccctataggctatcctatcatgggatataggagtactgaaaaattggatcaaagagaattattctgcagaccagttgccaacacattgaatttatgggttaaaggtgtgaatggtttttatgtaggtgacggtgtaatactcaaaaacgcggtttttaacttttttgcaaatcatcaaagtaataatttgaatatacattgttctgcaatctcttccggacaaatatatcctcagcctgtttcaaaaagttcagaccttgcccttggtagttctttcaaactagatagatgtcgtaattttatgattaaatcaactgccattaatacagcatatgctggtgtggaacttgagggaaataatacaaatggcacagtaaagattaaaacattgaaagcttatcatgcaggacttcatatctggaataatagttctgacataaaatttgatgcttattctgaagatattacagcaggtggagggttaattattggcccgggatgtaaaaattgcaatggaaattcatacgttacaaattctttgtatgtcgttgcctttgttggtgatagtaaaacaggggacttaaccggttgtgatattgttgcttctggaaaaaatgtgctaagaggggttgagttttatacaagaacattaatcgataattcgtctattcgaaacaataaaataacccttttcgctaaatacggtgattggggaggggctagctccgattataagtctggtattgtgttgaatggcggtgaaaataacactataaaagcagagttaatatcttttgattatatattatcaattcgccgtggcggtaataataaattggatattaagtatgatcgatttaaaaaacggatgtatcgtgaaaacaatccttttttttcaaacaggtttatagtcaacaaaatagatgagaacgatcttggtaaataa

SEQ ID NO: 214336 - DNA, 1005 bp, Klebsiella pneumoniae
atgaagtttttggtcactggtgccgcaggttttatcggcttccatatcgcgcagcgcctgttgaatgaagggcatgatgttgtcggaatcgacaacatgaacgactattatgacgtcagcctgaaacaggcccgtctggatcgcctggcttctccggcattccatttccagcagctggatctggccgaccgtgaaggtatggcaaagctgttcgccacagagcaatttgatcgcgtgatccacctggccgcccaggccggtgtgcgctactcactcgaaaacccgtatgcctacgcagacgctaacctgatggggtatctgaacattctggaaggctgccgtcataccaaggtgaaacacctggtgtacgcctcctccagctcggtttacggcctcaaccgtaaaatgccgttctccaccgaagattccgtcgatcatccggtctccttgtatgccgccaccaagaaagctaatgagctgatggcgcacacctattctcacctgtacggcatcccgaccaccgggctgcgcttctttacagtgtatggtccgtggggtcgcccggatatggcgctgttcaagttcacgaaagcgatgctggaaggaaaaagtatcgacgtttacaactacggcaaaatgaagcgcgacttcacctatatcgacgacatcgtcgaggcggtggttcgggtgcaggatgtgttcccgcaggccaatgccgactggaccgttgagagcggttccccggccaccagttccgcgccgtatcgggtatataacattggcaacagctcaccagtggaactgatggactacatcaccgctctggaagaagcgctgggaatggaagcgcagaagaatatgatgccgattcagccgggcgatgtgctggacaccagcgcagatactcaaccgctgtatgacctggtgggctttaagccgcaaacgtcagtgaaggaaggcgtgaagaacttcgtggagtggtacaaggattactatcagatctaa

SEQ ID NO: 214337 - DNA, 768 bp, Klebsiella pneumoniae
atgaagtacaatttagggtatttatttgatttacttgttgtgataacaaataaagatctaaaagtgcgctataagagcagcatgctaggttatttatggtcagtagcaaatccattgctttttgccatgatttattattttatatttaagctggtaatgagagtacaaattccaaattatacagttttcctcattaccggcttgtttccgtggcaatggtttgccagttcggccactaactcattattttcattcatcgctaacgctcaaattatcaagaagacagtttttccccggtccgtgattccgctaagtaatgtgatgatggaaggcttgcattttctttgcaccatcccggttattgttgtctttctttttgtttatggcatgacgccgtccttgtcctgggtttggggtatacctctcattgctattggccaggtgattttcacctttggtgtttcaatcatcttttcaacgctgaacctgtttttccgtgacctggagcgctttgtcagtctggggattatgctgatgttttattgtacgccgattttatatgcgtctgatatgattccggaaaaatttagctggataattacctacaatccgctagcgagtatgattcttagttggcgtgatttattcatgaatgggactcttaattatgagtatatttctatactctattttacgggaatcattttgacggttgtcggtttgtctattttcaataaattaaaatatcgatttgcagagatcttgtaa

SEQ ID NO: 214338 - DNA, 741 bp, Klebsiella pneumoniae
atgcacccagttattaacttcagtcatgttacaaaagagtatcctctgtaccatcatattggctcaggaatcaaagatttaattttccatccgaaacgcgcttttcagttgctgaaggggcggaaatatttagctatcgaagacgtatcctttacagttggcaaaggtgaggctgttgccctgattggacgtaatggggcaggaaagagtacctcgcttggcctggttgccggcgtgattaagccaactaagggaaccgtcaccactgaaggacgggtggcatcgatgcttgaactcggtggaggatttcatccggaacttaccgggcgtgagaatatttacctgaatgctactctgctgggccttaggcgtaaagaggtccaacaacgtatggaacgtattattgaattttcggaactgggagaattcatcgacgagcccatcagagtatattcaagcggaatgctagctaagttaggtttttcggtcatcagtcaggttgaaccggatattttaattattgatgaagttctggcagtaggtgatatcgcttttcaggctaaatgtattcagaccatcagagattttaagaaaagaggcgtgacgatactgtttgttagccacaatatgagtgacgttgaaaaaatctgcgatagagtcatctggatcgaaaatcatagactcagagaagtggggtctgccgatcgaatcattgaactgtacaagcaagcaatggcttaa

SEQ ID NO: 214339 - DNA, 1896 bp, Klebsiella pneumoniae
atgaacaatagcgttaaaatctataccagccaccataagcctagtgcttttcttaatgctgcaattatcaaacctctgcatgtcggcaaagcaaattcttataatgaaattggttgccctggagatgacactggcgataatatttcctttaagaatccgttttattgcgaactaactgcgcattattgggtttggaaaaacgaagagctagccgactatgtcggttttatgcactatcgccgtcatcttaatttttccgaaaaacaaactttttctgaggatacctggggggtagtgaaccatccatgcattgatgaagaatatgagaagatctttggattaaacgaagaaacaattcaacggtgtgtcgaaggtattgacatcttgctgccaaaaaaatggtctgtcactgcggcgggaagtaaaaataattacgatcactatgaacgaggtgaatacttacacattcgtgattatcaggctgccattgccatcgttgaaaaactatatccagagtatagcacggcaataaaaacgtttaatgatgccagtgatggctattacacaaatatgtttgtcatgcgcaaagatatttttgttgactattctgagtggctcttttccattctggataatctcgaagatgccatctcgatgaacaattataatgcccaggaaaaacgcgttattgggcatatagctgaacggctgtttaatatttacataattaagctgcaacaagatggtgagcttaaggtaaaagaattacagcgtacctttgtcagcaatgaaacattcaatggtgcactgaatccagtttttgattctgcggttccagtggttatcagtttcgatgataattacgcaatcagcggtggcgcattaattaattccattatccgacatgcggacaaaaataaaaattatgatatcgtcgtactcgaaaacaaagttagctatttgaataaaacgcggttgataaatctaacatctgctcatccgaatatttctcttcgtttttttgacgttaatgccttcactgaaattaacagtgtgcatacccgagcgcattttagcgcatcaacgtatgcgcgtctttttattcctcagctgttcagacgatacgataaagtcgtatttattgattcggataccgttgtaaaggctgacctgggtgaactgcttgatatccccctgggcaataatttagttgcagcggttaaggatatcgtcatggaaggttttgtaaaattttctgcaatgtcggcatcagatgatggcgttatgccggcaggcgaatatttacagaaaaccttaaacatgaataaccctgatgaatattttcaggcagggattattgtttttaatgtcaaacaaatggtcgaagaaaatacttttgctgaattgatgcgggtattaaaggcaaagaaatactggttcctcgaccaggatatcatgaataaagtattctactctcgagtcacatttctgccattagagtggaacgtttatcatggtaatggcaacacggatgatttcttccctaatcttaagtttgcaacgtatatgaaatttttagcagctcgcaagaagcctaaaatgattcattatgcgggtgagaacaaaccatggaataccgaaaaagtcgatttttatgacgactttattgagaacatcgttaacactccatgggagatggaaatctataaacgtcagatgtcgttagcggcttcgattggtttaacccatagcgagccgcaacaacaaatcttgttccagaccaaaatcaagaacgtactgatgccttatgttaataaatatgcaccaataggcacctcaagaagaaacatgatgactaaatattattacaaagtacgccgtgctattcttggataa

SEQ ID NO: 214340 - DNA, 1155 bp, Klebsiella pneumoniae
atgaaaagtaaaaaaatattgatcgtaggtgctggcttctctggtgcagttatcggtcgccaacttgctgagaagggacatcaagtccacattatcgatcagcgtgatcatattgggggaaattcctatgatgcacgggactctgaaacgaatgtgatggtacatgtttatggaccccatattttccatactgacaatgaaacagtgtggaactatgtcaataagcatgcagagatgatgccctatgtgaaccgggttaaagcgacagttaatggtcaggtattttccctacctattaatttgcatactatcaatcagtttttctcaaaaacttgttcgcctgatgaggccagagcgctcattgctgagaaaggggacagcactattgctgatccacaaacttttgaagagcaagcgttacgctttattggtaaagagttatatgaggccttttttaaaggatatacgattaaacagtgggggatgcaaccctcggaactgcccgcatctattcttaaacgtcttcctgttcgttttaactatgatgataattattttaaccacaaatttcagggcatgccgaaatgtggttatacgcagatgattaagtccattctcaatcatgagaatatcaaggttgacttacagcgggaatttatcgttgaagagcgaactcattacgatcacgtattctatagcggtccattagatgcgttttatggctaccaatatggccgtctgggctatcgaacattagattttaaaaagtttatctatcagggtgattaccagggatgcgcagtgatgaactattgttctgtggatgtcccctatactcgcatcactgaacataaatatttttctccctgggaacaacacgatgggtctgtttgttataaagagtatagccgtgcttgtgaagaaaatgatattccttactatcctattcgtcagatgggagaaatggctcttcttgaaaaatatttgtcactggccgagaatgaaaccaatatcacttttgtcggtcgtcttggaacctaccgttaccttgatatggatgtgaccatcgccgaagcattgaaaacggcagaagtctatttaaattcactcactgaaaatcagccaatgcctgtatttacggtttctgtacgatga

SEQ ID NO: 214341 - DNA, 894 bp, Klebsiella pneumoniae
atgaaatatacggcattgatagtgacattcaatcggctcggtaaactgaaaaaaaccgttgaagagaccctcaaacttgaattcactaatattgttattgtcaataacgggtccacggatgggacccaagcctggctttcgtcaattgttgatacacgagtcattgtattaaccctcaccgagaataccggtggggcggggggctttaaaaccggtagtcagtatatctgtgaacagctggcaagtgattgggtatttttctacgatgacgatgcttacccctatccagacacgttgaagtccttttcacagctggataagcggggatgtcgggtatttagtggactagtgaaagatccgcaaggaaaaccgtgtccgatgaatatgccgttctcgcgtgtaccaacctcccttggcgacactgtacgctatttacgctaccctggagaatttatcccggcagctaatcgttctatgttcgtacaaacggtttcatttgtagggatggtcatacatcgtgatctgctcacgaccagtcttgaccacatccatgaacagctctttatctactttgatgatctttactttggctatcagctatcattagctggtgagcaaattatgtatagcccggagttgcttttttatcatgatgtgagtattcagggcaaacttattgcacctgaatggaaggtttactatctatgccgtaatttgatcctgtcgaagaaaatattccagaaaaatgccgtgtatagcaattcagcgatagcgatacgcatcctaaaatatatattaatcctgccatggcaacgtcaaaaatattcctatatgaaatttattcttcgtggaatttcacatggcataaaaggtattagtggtaagtatcattaa

SEQ ID NO: 214342 - DNA, 1131 bp, Klebsiella pneumoniae
atgagaaaattgtgttatttcataaattcggattggtacttcgatttacactggatcgatcgtgccatcgcctcccgtgatgcaggttatgagattcacatcatcagccattttattgatgacaacataataaataaattcaaaacattcggctttatttgccataatgttactcttgatgctcaatcttttaatgcattagttttctttcgtacttaccatgatgttcaaaaaattattaaaaatataaaaccggatctcttgcattgcatcactatcaagccatgtttgattggtggtgtgctcgcgaagaaatttaatctgccggtcatcgtaagttttgttgggcttggaagagtattttcttcagacagcatgcctttaaaattattacggcagtttactattgctgcatataaatatatttccagtaataagcgctgtatatttatgtttgaacatgaccgtgacagaaaaaaactggctaagttggttggactcgaagaacaacagactattgttattgatggtgcaggcattaatccagagatatacaaatattctcttgaacagaatcacgatgtccctgttgtattgtttgccagtcgtatgttgtggagtaaaggactgggcgacttaatcgaagcgaagaaaatattacgcagtaagaatattcactttactttgaatgttgctggaattttggtcgaaaatgataaagatgcaatttcccttcaggtcattgaaaattggcatcagcaaggattaattaactggttaggtcgttcgaataacgtttgcgatcttattgagcaatcaaatatcgttgctttgccgtcagtttattctgaaggtgttccgcgaattcttctggaagcatcttctgtgggtcgcgcttgtattgcttatgatgttggtggttgtgatagccttattattgataacgataatggaattattgttaaaagcaattcacctgaagagctggctgataaacttgcctttttgcttagcaatcctaaagcacgcgttgaaatgggtattaaggggaggaaacgtatacaagataaattttctagtgttatgattatcgataaaacattgcaaatatatcatgatgtagttcgatga

SEQ ID NO: 214343 - DNA, 1209 bp, Klebsiella pneumoniae
atggctcatgaaaaaagtgatataattgtttcggtcgttattcctgtttacaacgccgaagagtatattgcagatactctaaaaaacattgtttcacagtcattgtatgaaattgaaattataataatcaatgatcattcgagtgataatacattagatatccttaaggagattgcatccagcgatgaaagaatacgaattattgataacgctgtaaatattggagctggcatatcacgtaatataggtctttcagaagcagagggagaatatataatatttcttgatgatgatgattatgtcgatacgaacatgttgaagcacatgtctgattttgcggagctatcaggggcagatatcgttgtatgcagaagccgctcatttaatctacaatctctccagtatgctccaatgccagattcaattcgaaaagatttattacctgaaaaagcagttttctcgcctggagatattgagcgagactttttcagggcatttatatggtggccatgggacaaattattccgacgtgaatttattattcagcactcgttgagctaccaagatttaagaacatcaaatgatctgttttttgtgtgtgcatctatgcttagtgccgaaaaggtaactattcttgatgaaatattgattgctcatacgattaatcgaaaaacatcattgtcttcaactcgctccgtttcctatcattgcgcgcttgatgctcttgttgctctaagggattttctttttaaaaatggcatgatgcaaaagcgacaaagggatttttataattacattgtcgtattccttgagtggcacttaaatacgctatcgggtgaagcctttaataaactgtttcaagatgtcaaattattcatcagcagttttgatatcaataatgaagacttttatgatgagtttattctttctgcttatcgacgaatcgctgatatgtctgctgaagagtatcttttttctttaaaagatcgggttcttaatgaattagaggatgcccaacgaaatattttgaccttacaaaacgaagttgaggagataaaacagcagcttcaacaaaaggacgaaatgattgcttctatgaatagggagaatttagctattaaagcagataataaaattctcgaaaattacaatgaagaactaaagactgttcaaacaaagtttcttaaactactctcaagcaaagactag

SEQ ID NO: 214344 - DNA, 1461 bp, Klebsiella pneumoniae
atgcaaaatctgatcaattctttagcagagggaaataaaaaaaacgtttacattttttatttctttctgattatgttaacattttcaccggtaattttcttttcatatgcattttcagacgactggtcaacattctttgatgctataacaagaaacggttcttcgtttcagtgggatgttcaatctggtcgtcccgtttatgctgtgttccgttactatggacaaatgttaattaatgatatttcttcattttcgtatttgcggctttttaatatattaagtctggttgtcttaagtggttttatttacaacttcatagacagcagaaaaatatttgataaccccgtattcaaagtaatatttccgctgttaatttgctcactccctgcgtttcaagtttatgcttcatgggcaacatgtttcccgttcactatttcagtattgctggcaggtattagttataataaatgtttcccacattcgaagcagcggtcgtcattgccagaaaaattatcatccattgttgttttatgggtggcatttgcaatatatcaaccgacagcaattacattcttattcttttttatgcttgatagttgtataaaaaaagaaagtagtttaactgtgaaaaaagttgcgacatgttttatcattttagttatcggtgttgcaggcagttttataatgtcaaaagtacttcctgtctggctatatggggaatcattatcgagagccgagttaaccgcagatatcggtggaaagatgaaatggttcataaatgaatcactaataaacgctgtaaataactataacatacaaccagtaaaaatatattcttggttctcctcgcttgcaattttaatcggcttatacactatttttgtgggaaaatcaggcagatggaaaacgttcatagtcatagcgatcgggataggttcctacgctccaaatttagcgacaaaagagaattgggcagcattccgctcgttagtggccttagaacttattatatcaactctatttcttattggcataaatagccttgtcagtagaatttttaagcaagcatttgtctggcctcttatcgctttaacaattatgataatagctcagtataatattataaatggatttattattcctcagcgctctgaaattcaggcacttgctgcggaaataactaataaaatacctaagaattacacaggaaaattaatgttcgatctcacagatcctgcttacaatgcctttacaaaaacacagagatatgatgagtttgggaatatttcattagcagcgccctgggcgctcaaaggtatggctgaagagatcagaattatgaaaggatttaatttcaaactatctaacaacgttataatttctgaggccaatcgatgtattgatgattgtatggttatcaaaacgtcagatgcaatgcgaaggtcaacgataaattattag

SEQ ID NO: 214345 - DNA, 981 bp, Klebsiella pneumoniae
atgacaacctcaactgatataaaaagcactccttctttagctattgtggtaccttgctataatgaacaagaggcttttcctttctgtctcgaaaagctttcgaatgtactaaattcattgatagcaagaaataaaattaacaacaatagttatcttttgtttgtcgatgatggtagtcgtgacaatacttgggcacaaattaaagatgcctcgaccgcttatcactatgtgcgaggaataaaattatcaagaaataaaggacatcaaattgccttaatggcagggttacgctcggtcgatacagacgtaaccattagcatcgatgcggatctacaagatgatgtaaattgcatcgaaaaaatgattgacgcttacagccaaggatatgacatagtatacggcgtaagatgtaatcgagacagtgacactttttttaaacgtacaacagctaatgcattttacgcaataatgtcccacatgggtgtaaatcaaactccaaatcatgcagattatcgattattaagtaatcgtgcgttggaggctcttaaacaatataaagagcaaaatatatatttacgtggattagtgcctcttgtgggatatccctcgatcgaggtgcaatatagccgtgaagaaagaattgcaggtgaatcaaaatatccaattaaaaaaatgcttgcgctggctctcgagggaattacctcattatcagttacaccgttacgaattatagctatgacaggttttataacttgcatcatatctaccatcgctgcgatttatgctttaattcaaaaaacaacaggtactacagttgagggatggacatcagtcatgatcgctatattctttcttggcggtgtgcaaatgctttctttaggtattataggagaatatgtcgggaaaatttatatagagacgaaaaatagacctaaatatttcattgatgaaagcgtaggtaatgatagcaatggaaaataa

SEQ ID NO: 214346 - DNA, 378 bp, Klebsiella pneumoniae
atgccaagttcaggcccattatggcaactaatgaaatatgggttagttgggatagtcaatacactaattacggcagttgtaattttcctgctaatgcatttgggtcttggcatttatctgtccaatgcgatgggttatgttgtaggtattgttttcagcttcatagcaaacacaatatttacatttacgcaaccaattagtatcaatagactaataaagtttttatgtgtttgcttcatttgttatgtggcaaatatcattgtcataaaaatatttttcgtttttatgccagaaaaaatatattcagcacaaatccttgggatgttcacatacactatcacaggttttattttaaacaagttctgggcgatgaaatga

SEQ ID NO: 214347 - DNA, 600 bp, Klebsiella pneumoniae
atgttgactgaacagctggactgggaaaaaacggacggtatgatgccggccatcgtgcagcacgccgtatccggcgaagtgctgatgctcggctacatgaacaaggaggcgctggagaaaaccgaagccaccggcaaggtcaccttttactcgcgcaccaagcagcggctgtggaccaagggtgaaacctcgggccatgtcctcaacgtggtgagcatcacgccggactgtgacaacgatacgctgctggtgctggtaaacccgatcgggccgacctgccacaaaggcaccaccagctgcttcggcgaaaccggccaccagtggctgttcctctatcagctggagcagctgctggccgagcgtaaacacgccgacccggagagctcctatacggcgaagctgtacgccagcggcaccaagcgtattgcgcagaaagtgggggaagaaggcgtggagaccgcgctggccgccaccgtgaacgaccgcttcgagctgaagaatgaggcgtcggacctgatgtatcacctgctggtgctgctgcaggaccaggggctggatctcggggaagtgattgataatttaagagcacggcataggtaa

SEQ ID NO: 214348 - DNA, 777 bp, Klebsiella pneumoniae
atgctggcaaaacggataatcccctgcctcgacgtccgcgacggccaggtagtgaaaggcgtgcagttccgtaatcacgagatcattggcgacatcgtcccgctggccaagcgctatgccgacgaaggggccgacgaactggtgttctatgatatcaccgcctccagcgacggtcgggtggtcgacaagagctgggtgtcgcgggtagcggaagtgattgatattcctttctgcgtggcgggcgggatcaagtcgctggaagacgcggcgcagatcctctccttcggcgccgataagatctcgattaactcccctgctctcgccgacccgacgctgatcacccgccttgccgaccgctttggcgtgcagtgtatcgtggtggggattgatacctggtttgatgcagagaccggcaagtatcacgtcaaccagtataccggcgacgagagccgcacccgggtgacgcagtgggaaaccctcgactgggtggaggaagtgcagaagcgcggcgcaggcgagatcgttctcaatatgatgaaccaggacggggtacgcaacggctacgacctgaagcagctggcgaaggttcgcgcggtgtgccacgtcccgctgatcgcctccggcggcgcgggcactatggaacacttcctcgaagccttccgcgacgccgacgttgacggcgcgctggcggcctcggtattccacaaacagattattaatattggcgaactgaaagcgtacctggcggcacagggcgtggagataagggtatgttga

SEQ ID NO: 214349 - DNA, 738 bp, Klebsiella pneumoniae
atgattattcctgctttagatttaatcgacggcaccgtcgttcgtctccatcagggcgattacggccagcagcgcgactatggcagcgatccgctgccgcgcctgcagtcctatgccgctcagggagcggaagtcctgcacctggtcgacctgaccggggcgaaggatccggcgaagcgccaaatcccgctgctgaaatcgctggtcgccggggttgacgtcccggtgcaggtcggcggcggcgtgcggaccgaagcggatgtcgcggccctgcttgaggccggcgtcgcccgcgtggtggtcggctccaccgcggtgaaatccccggaggaagtgaaaggctggttcaaacgctttggcccagagcggctggtgctcgccctcgacgtgcgtatcgacgccgacggcaataagcaggtggcggtcagcggctggcaggaaaactccggcgtgacgctagaggagctggtggaaagttatctgccggtcggcctgcagcacgtgctgtgcaccgatatctcccgcgacggcacgctggcaggctctaacgtctcgctgtacgaggaagtctgcgctcgctacccgcaggtggcgtttcagtcatccggcggcatcggcgatctcaaagatattgccgcgctgcgcggcaccggggtgcgcggcgtgattgtcggtcgcgcgctgctggaaggtaaattcaacgtaacggaggccattcaatgctggcaaaacggataa

SEQ ID NO: 214350 - DNA, 591 bp, Klebsiella pneumoniae
atgaatgtggtgatccttgataccggctgcgccaacctcaattcggtgaaatcggcgattggccgccacggctatgagccggtggtcagccgcgatccggaagtggtattgcgtgccgataaactgtttcttcccggcgtcggcaccgcccaggcggcgatggatcagctgcgcgaccgggagctgatcgacctgatcaaagcctgtacccagccggtgctggggatttgcctgggcatgcagctgctcggcaagcgcagcgaggagaacaacggcgtcgatctgctgggcattatcgaagaagaggtgccgaagatgaccgaccacggtctgccattgccgcacatgggctggaaccgggtgtatgccaaagctggcgatcggctgttccgcggcattgaagaaggcgcgtatttctacttcgtgcacagctacgccatgccggtcaacccgtacaccatcgcccagtgcaattacggggaggcgttcaccgccgcggtgcagaaagataacttctttggcgtgcagtttcacccggagcgctccgggagcgccggagcgcagctgctgaaaaacttcctggagatgtga

SEQ ID NO: 214351 - DNA, 1068 bp, Klebsiella pneumoniae
atgacccagaagtatctctttattgaccgtgacggcaccctgatttccgaaccgccggaggatttccaggtggaccggttcgacaagctggcgtttgagccgcaggtgatcccagcgctgctgaagctgcagcaggaaggctataagctggtgatgatcaccaatcaggatggcctgggaaccgacagtctgccgcaggaggcgtttgatggcccgcacaacctgatgatgcagatcttcgcctcgcagtgcgttaactttgaagaggtgctgatttgtccgcacttcccgggcgacaactgcgcctgccgcaagccgaaaacgcagctggtgctgccgtggctggaagagggtgtgctggataaatcccacagctatgtgattggcgaccgggccaccgacctcgagctggcggataacatggggattaccggcctgcgctatgaccgtgagaccctggactggccgaccatctgcgagcagctgacccgccgcgaccgctatgcccacgtcgagcgcgtcaccaaagagacccaggtggatgtgaaagtgtggctggaccgcgaaggcggcagcaagatccataccggcgtcggcttttttgaccatatgctcgaccaaatcgccacccacggcggcttccgcatggaggttaacgtcggcggcgatctgtatatcgacgaccaccacacggtggaggataccggcctggccctcggcgaagccctgaagctggcccttggcgacaagcgcggcatcaaccgcttcggcttcgtgctgccgatggacgagtgtctcgcccgctgcgcgctggatatctccggccgtccgcacctagagtataaggcggacttcacctatcagcgcgtcggcgatctgagcaccgagatggtggaacacttcttccgctcgctctcctacaccatggcggtgaccctgcacctgaaaaccaagggcaagaacgatcaccaccgcgtggagagcctgttcaaagcctttggccgtacgctgcgccaggcgatccgcgtccagggcgatgccctgccgtcttccaaaggggtgctgtaa

SEQ ID NO: 214352 - DNA, 1062 bp, Klebsiella pneumoniae
atgagcattgaagatttagcccgcgccaacgtccgcgcgctgaccccgtatcaatccgctcgccggctgggcggcaaaggcgacgtatggctcaacgccaacgaattccctaccgccgtagccttccagcttaccgaacagacgctgaaccgctatccggagccgcagccgaaggccgtgattgagagctacgcccgctacgccgaggtcaaaccggagcaggtgctggtcagccgcggcgccgacgaaggcatcgagctgctgatccgcgccttctgtgagcccggcgaagacgcggtgctctactgcccgccgacctacggcatgtacagcgtcagcgccgagaccatcggcgtcgagtgccgcaccgtgccgacgctgaccgactggcagctcgacctgccgggcatcgaagcgcggctggacggcgtgaaggtggtcttcgtctgcagcccgaacaacccgaccgggcagattatcgacccgcagtcgatgcgcgacctgctggagatgacccgcggcaaagccatcgtggtggccgacgaagcctatattgaattctgcccgcaggcgacgctggccggctggctcagcgactatccgcacctggtggtgctgcgcacgctgtccaaagccttcgccctcgccggcctgcgctgcggcttcaccctcgccaacgccgaggtgatcaacgtgctgctgaaagtgatcgccccgtacccgctctccacgccggtggccgatatcgccgcccaggccctgagcccggaggggatcgccgcgatgcgccagcgcgtggcgcagatccttgacgagcgccgctacctggtggaacagctgcgcggcatcgcctgcgtggagcaggtcttcgattccgagaccaactatgtgctggcgcggataaccgcctccagcgcagtgtttaaatctttgtgggatcagggcattatcttacgtgaccagaataaacaaccttcattaagcggctgtttgcgtatcactatcggtacccgtgccgagagccagcgcgtgattgacgccttgactgcggagaatgtatga

SEQ ID NO: 214353 - DNA, 1305 bp, Klebsiella pneumoniae
atgagcttcaacacaatcatcgactggaacggctgtagcgcagaccaacaacagcaactcttaacgcgcccggcgatttccgcctccgacagcatcagtaaaacggtgacggagatcctgaataacgtcaaagccaacggcgacgcggcgctgcgcgaatacagcgcgaagtttgataaaaccaccgtcgccgcgctgcaggtgagcgaggcggagatcgccgccgccggcgagcgcctcagcgatgagctgaagcaggcgatggcggtggcggtgaataacattgagaccttccacaacgcgcaacagctgcaggcggtggatgtcgaaacgctgccgggggtgcgctgccagcaggtcacccgccctatcgcctccgtcggactgtacattcccggcggctcagcgccgctgttctccacggtgctgatgctggcgacgccggcgcgcatcgccggctgtcagcaggtggtgctctgctcgccgccgccgattgccgatgagatcctctatgccgcgcagctgtgcggcgtaaaaaccatctttaacgtcggcggcgcccaggccatcgccgccctcgccctcggtaccgagtcggtgccgaaggtagataaaatctttggcccgggcaacgcttacgtcacggaagccaaacgccaggtcagccagcgtctggacggcgcagccatcgacatgccggccggcccgtcggaagtgctggtgatcgccgacagcggcgccaacccggactttgtcgcctctgacctgctgtcgcaggcggaacacggcccggactcgcaggtgatcctcctgaccccggacgccgacatgggcagccgcgtcgccgaagccgtggaacgccagctggccgccctgccgcgcgcggaaaccgcccgcgtggcgctctccgccagccggatcatcgtggcccgcgatctggcgcagtgcgtggctatctccaaccagtacggcccggagcacctgatcattcagacccgtcaggcccgcgagctggtggacagcatcaccagcgccggttccgttttccttggcgactggtcaccggaatccgcgggcgactatgcctcgggcaccaaccacgtcctgccgacctatggttacaccgccacctgctcaagcctcggcctggccgacttccagaagcggatgaccgtgcaggagctgtcgcgcgacggctttgccgccctcgcctcaacgattgagatcctggccgccgccgagcgccttgacgcccacaaaaacgccgtaacgctgcgcgttgccgccctgaaggagcaagcatga

SEQ ID NO: 214354 - DNA, 900 bp, Klebsiella pneumoniae
atgttagacaacacccgtttacgcatagctattcagaaatcaggccgtttaagcgaagattcacgcgaattactcagccgctgcggcattaaagtcaatttgcacacccagcgtctgattgcgctggcggaaaatatgccaatcgatattctgcgcgtgcgtgatgacgatatcccgggcctggtgatggacggtgttgtcgacctcggtattatcggcgaaaacgtgctggaagaagagctgctcagccgccgcgcccagggcgaagacccgcgctacttcaccctgcgccgtctcgacttcggcggctgccgcctgtcgctggcgactccggtggatgaagcctggaatggcccggcggcgctggacggcaaacgtatcgccacctcttacccgcacctgctgaagcgttacctcgatcaaaaaggtatctcctttaaatcctgtctgctgaacggctccgtggaagtggcgccgcgcgccggcctcgccgacgccatttgcgacctcgtctccaccggcgccactctggaagccaacggcctgcgcgaagtggaagtgatctaccgctccaaagcctgtctgatccagcgcgacggcgaaatggccgacgccaaacagcagctgattgaccgcctgctgacccgtattcagggcgtgattcaggcccgcgagtcgaaatacatcatgatgcacgccccgaccgaacgcctggaagaagtggtggccctgctgccgggcgccgagcggccgactattctgccgctggcaggcgacaagcagcgcgtggcgatgcacatggtcagcagcgaaaccctgttctgggagaccatggaaaaactgaaggcgctgggtgccagctccattctggtgctgccgattgagaaaatgatggagtaa

SEQ ID NO: 214355 - DNA, 825 bp, Klebsiella pneumoniae
atgaaaaaggtcgcgatagtcggtttgggatggctggggatgccgctggcgctgtcgttgacggcgcgaggctggcaggttaccggcagtaaaactacgcaggatggcgtggaggcggcgcggatgtgcgggatcgacagctatccgctgcgcctggagccgcagctggtctgtgataccgaggacctcgacgcgctgatgaacgtcgatgcgctggtgatcaccctgccggcccggcgtaccggggcaggggaagggttttatctacaggcggtgcaggagatcgtcgataccgcgctggcgtaccatattccgcggatcgtcttcaccagctccacctcggtttatggcaacgtcaacggtacggtgaaggagaattccccgcgtctgccgcaaaccgccagcggacaggtgctcaaggagctggaggactggctgcacaacctgccggggacgtcggtagatattctgcgcctggccgggctggtggggccttcccgccatccgggacgttttttcgccggcaagtcggcgccggatggccagcacgtggtcaatctggtgcatttgcaggatgtggtggccgctatcgaactgctgctgcaggccccgaagggcgggcacatctataatctatgtgcgccccgccatccggcgcgcggcctcttttatccgcagatggcccgcgagctcggtctgccgccgccggtgttcagcgacagcccggacggcggccagggcaagattgtagatggcaatcgtatctgcaatgagctggggtttgagtaccagtaccccgatccgctggtgatgccgatggagtga

SEQ ID NO: 214356 - DNA, 891 bp, Klebsiella pneumoniae
atgaaaccactgctggatgtcctcgtgatcctggatgccctggaaaaagaggggagctttgccgccgcgtcggcaaagctctttaaaacgccctcggcgctgagctacaccattcaccgcctggaaagcgatctcaatattcagctgctcgaccgcagcggccatcgcgcgcgctttacccccagcggacagatgctgctggagaaagggcgggaggtgctgcatatcgcccgcgaactggagaaccgggcggttaagctgcagcaggggtgggagaatagccttcgtctggcggtggacagcacctttcccgtggcgctgctctcgccgccaatcgctgcattttatcaacaacagccgctgacccggctgcacttcacgctgaacccctccctgctggactggcggccgctgactgacgggcaggccgatctgatgctgggggcgctcggcgaaccgccgccgctgagcggttatgactatctccccctcggcgagctggagctgctgctggtcgttgccccacagcatccgctggcgcgacaccgcgcaccgctaagctggcgaaccctgcgccgttaccgggcggtggccactggcgagggcggggcgctactcagcgatcaggagaccctgacggtgtgtgacgccgcggggcagctggcgctgctgcgcctggggctgggctgggggtgcctgccgcgctatcaggtgcagggtctgctggacagcggcgagctggtctgcatgaccgtgcgcgggctatctcctcgtcaacgcgcatggattgcctggaatgacgccacctgcggtttggctggcaaatggtggcgggaaacgctattagcaaatagtgctatttttacaatttatcatacggaaaccgtatag

SEQ ID NO: 214357 - DNA, 1359 bp, Klebsiella pneumoniae
atgtcgcataacgctactccaaatacctctcgcgtggaattacgtaaaacgcttacgttagttccggttgtaatgatgggcctggcctatatgcagccgatgacgctgttcgatacgtttggtatcgtctctggtatgaccgacggtcacgtgccgacggcctacgcctttgcgttaatcgctatcctgtttactgctctgagctatggcaagctggtacgtcgttacccttctgccggctcggcgtatacctatgcgcagaaatccatcagcccggccgttggctttatggtgggttggtcctcgctgctcgactacctgttcgcgccgatgatcaacattctgctggcgaaaatctattttgaagcgctggtgccttcgattccgtcgtgggtgtttgttatcgcgctggtcgcctttatgacagcctttaacctgcgcagcattaaatccgtggccaacttcaacaccgtgatcgtggtgctgcaggtggtgctgatcgccgttatcctcggcatggtgatttatggcgtgtttgaaggcgagggcgccggtacgctggccagcagccgtccgttctggtccggtgacgcgcacgtgatcccgatgattaccggggcgacgatcctgtgcttctcgtttaccggtttcgatggcatcagcaacctgtctgaagagaccaaagatgcagagcgcgtcattccgcgcgcgatcttcctgaccgcgctgatcggcggcctgatcttcatctttgccacctacttcctgcagctgtacttcccggatatctcgcgctttaaagatccggatgcgtcacagccggaaattatgctctacgtggcaggtaaagccttccaggttggcgcgctgatcttctccaccatcaccgtactggcgtccggtatggcggcgcacgctggcgtggcgcgtctgatgtacgttatgggccgcgacggcgtgttcccgaaaagcttcttcggatacgtgcacccgacctggcgcactccggcgatgaacatcatcctggtcggcgcgattgcgctgctggcgattaacttcgacctggtgatggcgacggcgctgattaactttggtgcgctggtggcgtttaccttcgttaacctgtcggtgatttcccagttctggatccgtgagaaacgcaacaagacgctgaaagaccacttccagtatctgttcctgccgatgtgcggcgccctgaccgttggcgcgctgtgggtcaacctggaagagagctcgatgattctgggcctgatctgggccggtatcggtctggtctacctagcctgcgtgaccaaaagcttccgcaacccggtgccgcagtacgaagacgtggcgtaa

SEQ ID NO: 214358 - DNA, 312 bp, Klebsiella pneumoniae
atgatcgccaatcaccccgaacgagaacaaattcgcctggaaaatgtcctttccgcgctcggaaacccgctgcgactggagatcattcgtacgctggccgacggcagcgagctgagctgcaacgccctgcgccaggaggaggtggccaagtccaccatgacccaccactggcgcgtcctgcgtgacagcggtgtgatctggcaacggcctcagggacgggagaacatgatttcgctgcgccgggaagatctggacgcccgttttcccggcctgctggatacgctgctgaaagttatggtgcaggcaggataa

SEQ ID NO: 214359 - DNA, 2103 bp, Klebsiella pneumoniae
atgccccgacccatccctctcgaacgttatcgcaacatcggtatctccgcgcatatcgatgccggtaaaaccaccaccaccgagcgcatcctgttttataccgggatgagccataagctgggtgaagtacacgatggcgcggcaaccaccgactggatggcccaggagcaggagcgcgggatcaccattacctcggcggcggtaagctgcttctggccggggatggaccgcagcttcgagccgcaccggatcaatatcatcgacaccccggggcacgtggatttcaccattgaggtggagcgttccatgcgcgtgctcgacggcgcggtgatggtgtatgactccgtcggcggggtgcagccccagtcggagaccgtctggcgccaggcgaataaataccacgttccgcggctggccttcgtcaacaagatggaccgccccggcgcggacttcttccgcgtggtgcagatgatgatcgaccgtctgaaggctaacccggtgccgattgtgatacctattggcgccgaagagcatttcaccggcgtcgtcgacctggtgaaaatgcgcgccatcctgtgggatgacgccacccagggcatgacctttagctatgggccagtcccagacgatctgctggcgacggcgcagcagtggcgggagaaaatggtctcggcggcggcagaagccagcgatgagctgatggataaatacttggaaaccggtgagctggacgaggcggagatcgtcgccggtctgcgccagcgcacggtgaagggagagatccaggcggtgctctgcgggagcgcctttaaaaacaaaggcgtgcagcgcatgctcgatgcggtggtggagctgatgccgtcgccgctggatattccggcgatacagggcgttgatgagcaaggccagccggcggaacgccatccgagcgacgatgagccgctgtcggcgctggcgttcaaactgatgaccgacccctacgtcggccagctgacctttatccgcgtctactccgggacgctgaagaaaggcgatgcggtgtggaacccggtgaagggtaagaaagagcgcatcgggcgtatcgtgctgatgcaggccaacgaccgtcacgaagttgacgaactgcacgccggggatatcgcggcctgcgtcggtctgaaggatgtgaccaccggcgatacgttatgcgatccggatgcggtgattaccctcgaacggatggagtttccggagccggtgatttcgctggcgattgagccgaagaccaaagcggaccaggagaaaatgggcatcgcgctgcagcggctggcggcggaagatccgtcgttccgtctgcataccgatgaagagtccggccagacgattatctccggcatgggtgagctgcatctggagatcattgtcgaccggatgaagcgcgagtttggcgtcgaggccaacattggccgtccgcaggtcacctaccgcgaaaccctgcgcaagaaagtgacggacgtggaaggcaaatttgtgcgccagtccggcggcaaagggcagtatggccacgtcgtgctgaccctggagccgctggagccgggcagcggtttcgtcttcgaggacgccaccaaaggcggcgtggtgccgcgcgagtacatcccttccgtggagaaagggctgcgcgaagcgatgggcaccggcgtgctggcgggttatccggtggttgacgtgaaagcgaccctgaccttcgggtcgtaccacgacgtggactcctcggagatggcgttccgcatggcggcgatcttcggcttccgggagggcgcgcgcaaagcggacccggtgatccttgagccggtgatgcacgtcgaggtggagacgccggaagagtacgccgggaatattatgggcgatctctcttcccgtcgcgggatggtgcaggggatggaagagcgcttcggcagccagatcatccgcgccgacgtgccgctggcggagatgtttggttattccaccacgctgcgctcgatgtcgcagggacgggcaacctacagcatggagttccaccattacgcggaagcgccgcgtaatgtggcggatgaaatcatcgccagccgcgcgaaaagctaa

SEQ ID NO: 214360 - DNA, 294 bp, Klebsiella pneumoniae
atgcgcaacggcttcaatggtctcgccgcaaaggtgcagacgatgctgaaagatgacccgatgtccggccatgtcttcatcttccggggccgcagcggcagtaaggtcaaactgctgtggtccaccggcgacgggctgtgcctgctgaccaaacggctggaacgcggccgcttcgcctggccctctgcccgcgatggcaaagtgttcctgaccccggcgcagctggcaatgcttctggaaggcatcgactggcggcagcctaaaagactgcttacgtccctaaccatgttgtag

SEQ ID NO: 214361 - DNA, 768 bp, Klebsiella pneumoniae; identical to SEQ ID NO: 40324

SEQ ID NO: 214362 - DNA, 957 bp, Klebsiella pneumoniae
atgaaaattgcgctggtcatttccatcacccttgccctggcaggctgtgcgctgttatcactccatatgggggtgatccccgtgccgtggcgcgcgctgctgaccgactggcaggacggacgcgagcattattatgtattgatggagtaccgactgccgcgcttgctgctggcactgtttgtcggtgcagccctcgccgtggcgggcgtgctggtacaggggattgtgcgtaacccgctagcatcaccggatattctcggcattaaccatgccgccagccttgcctctgtgggagcactgcttcttatgccatcactatccgtgatggtgctgccgctgctggcctttgcgggcggtatggcggggttgatcttgctgaagatgctggcaaagacccaccagccgatgaagctggcgctcaccggcgtggcgctttccgcctgctgggcgagcctgacggattacctgatgctcctgcacccgcaggatgtaaacagtgccctgctgtggctgacgggtagcttatgggggcgcgactggcactttgtgaagattgccgtgccgttgctcattctgtttttgccgctgagcctgcgcttttgtcgcgatctcgacctgctggcgctgggcgatgcacgagcagccacgctcggcgtgtcggttcagcgcacccggttccaggggctgatgctggctgtcgcgatgacagcaaccggcgtggccgtctgtggcccgataagttttattggtctcgtcgtgccgcacatggtgcgcaggatcgccggcgggcgtcaccgctggctgatgcccgtttcggccctgacgggcgcgttgttgctggtcattgccgatctgctggcacgaatcattcatccgccgctggagcttccggcaggcgtgctgaccgccattatcggcgcaccgtggtttgtctggctgcttgtgagaatgcgataa

SEQ ID NO: 214363 - DNA, 999 bp, Klebsiella pneumoniae
atgaccgcgctaaaacacccggtgctgctgtgggggcttcccgttgcagtacttattattattttctggctgagtctgttttgctactcggccattcctgtttccggagcagacgcaatccgcgccctgctgcctggacacacgccaacgctaccagaagcgctggtgcaaaaccttcgtttgccgcgaagcctggtcgccgttctgatcggcgcaagcctggcgctcgcgggcacgctgctgcaaaccctgacccacaacccaatggcctctccttcactgctcggcattaacagcggcgcggcgctggctatggcgcttaccagcgcgctgagtccgacgccggttgcaggctattccctgtcgttcatcgcggcatgcgggggcggcgtgagctggctgctggtcatgaccgcaggaggcgggtttcgtcatacccaggacagaaacaaactgatcctcgcgggtatcgcgctgtcggccttttgtatggccctgacccgcatcaccctactgctggccgaagatcatgcttacggcatcttttactggctggcaggcggagtgtcccacgcccactggcaggatgtctggcagctcttgccggtggtggtcactgcagtccctgtcgtgttgctgctggcgaatcaactgaacctgctcaacgtcagcgacagtaccgcccatacgctgggagtgaacctgccgagactacgtttgatcatcaatatgttagtgctgcttctggttggcgcgtgcgtcagtgtggcaggtccggtggcgtttatcggcctgctggtgccacatctggcgcgcttctgggcaggcttcgatcagcgcaacgtactgccggtgagcatgctgctgggggccacgctgatgctgatggcagatgtactcgcacgcgcgctggccttccccggcgatctgcccgcaggcgcagtgctggcgctgattggcagtccttgctttgtctggctggtgaggaggcgaggatga

SEQ ID NO: 214364 - DNA, 903 bp, Klebsiella pneumoniae; identical to SEQ ID NO: 101472

SEQ ID NO: 214365 - DNA, 2325 bp, Klebsiella pneumoniae
atgacgccgttacgcgtttttcgtaaaacaacacctttggttaacgccattcgcctgagcctgctgccgctggccggtctctcgttttccgcttttgctgcacaggttgatatcgcaccgggatcgctcgacaaagcgctcaatcagtatgccgcacacagcggaattaccctctcggttgacgccagcctgacgcgcggcaagcagagcaacggcctgcacggagattacgacgtcgagagcggcctgcaacagctgctggacggcagcggactgcaggtaaaaccgctgggaaataacagctggacgctggagcccgcgcccgcgccaaaagaagatgccctgaccgtggtcggcgactggctgggcgatgcgcgtgaaaacgacgtatttgaacatgctggcgcgcgtgacgtgatccgccgtgaggatttcgccaaaaccggcgcaaccaccatgcgtgaggtgcttaaccgcatccctggcgtcagcgcgccggaaaacaacggcaccggcagccacgacctggcgatgaactttggcatccggggcctgaacccacgcctcgccagccgctcgaccgtcctgatggacggcatccccgtcccctttgccccttacggtcagccgcagctttcactggctcccgtttcgctcggcaacatggatgccattgacgtggtgcgcggtggtggtgcggtgcgttacggaccgcagagcgtgggcggcgtggtgaactttgttacccgcgccattccgcaggactttggtatcgaggcgggggtggaaggtcagctcagcccaacctcttcacaaaacaacccgaaagagacgcacaacctgatggtgggcggcacagcggacaacggttttggcaccgcgctgctctactccggcacgcgcggcagtgactggcgcgagcacagcgccacccgcatcgacgacctgatgctgaaaagcaaatatgcgccgaataaggtgcacaccttcaacagcctgctgcaatattacgatggtgaagccgacatgcccggcggcctgtcccgcgcggattacgacgccgatcgctggcaatccacccgcccgtatgaccgcttctggggccgtcgcaagctggcgagcctgggctaccagttccagccggacagccagcataaattcaacattctggggttctacacccaaaccctgcgcagcggctacctggagcaaggcaaacgcatcaccctctcgccgcgtaactactgggtgcgcggtattgagccacgctacagccagagctttatgatcggcccttacgcgcacgaagtgggcgtgggctatcgctatgtgaatgaatcaacgcatgaaatgcgttactacaccgccaccagcagcgggcagttgccgtccggctcaagcccttacgaccgcgaaacgcgttccggcaccgaggcgcacgcctggtatctggatgacaaaatcgacatcggcaactggaccatcacgccgggtatgcgtttcgaacatatcgagtcataccagaacaacgccatcaaaggcacgcacgaagaggtgagctataacgcaccgcttccggcgttgaacgtgctctatcacctgactgatagctggaatctttatgcaaacactgaaggctcgttcggcaccgtacagtacagccagattggcaaggctgtgcaaagcggcaatgtggaaccggaaaaagcgcgaacctgggaactcggtacccgctacgacgacggcgcgctgacggcggaaatggggctgttcctaattaactttaacaatcagtacgactccaaccagaccaacgacaccgtcactgcacgtggcaaaacgcgccataccgggctggaaacgcaggcacgttacgacctgggtacgctaacgccaacgcttgataacgtttccgtctacgccagctatgcgtatgtgaacgcggaaatccgcgagaaaggcgacacctatggcaatcaggtgccattctccccgaaacataaaggcacgctgggcgtggactacaagccgggcaactggacgttcaatctgaacagcgatttccagtccagccagtttgcggataacgccaatacggtgaaagagagcgccgacggcagtaccggccgcattcccggcttcatgctctggggcgcacgcgtggcgtatgactttggcccgcagatggcagatctgaacctggcgttcggtgtgaaaaacatcttcgaccaggactacttcatccgctcttatgacgacaacaacaaaggcatctacgcaggccagccgcgcacgctgtatatgcaggggtcgttgaagttctga

SEQ ID NO: 214366 - DNA, 954 bp, Klebsiella pneumoniae
atgaatccttcgttaaccgattcccgccgtcaggcgctgcgttcagcttcccactggtatgccgtgctaagcggcgagcgcgtcagcccacaacaggaagcgcgctggcaacagtggtatgaacaggatcaggataaccagtgggcctggcagcaggttgaaaacctgcgcaaccagcttggcggtgtgcctggcgacgttgccagccgggcgctgcacgatacccgcctcacccgccgtcacgtgatgaaaggattactgctgttgctcggcgctggcggaggctggcaactctggcagtcggaaaccggcgaaggtctgcgggcagattaccgcaccgccaaaggcgcagtcagccgtcagcaactggaagatggctccctgctcacgctgaatacccaaagcgcggcggatgtgcgttttgatgcgcatcagcgcaccgtccggctctggtacggtgaaatcgccattactaccgcgaaagatgcgcagcaacgccccttccgcgtcctgacccgtcagggccaactcaccgctttagggacagaatttaccgtccgccagcaggataatttcacgcagcttgacgtgcagcagcacgccgtggaagtgcttctcgccagtgcccccgcgcaaaaacgcatcgtgaacgctggtgaaagcctgcagttcagcgcctctgagtttggcgcagtgaaaccgctggatgacgagagtacaagctggacgaagggcatcctgagcttcagcgataaaccgctgggtgaggtgatagccacgctaagccgttaccgcaacggcgtgctgcgctgcgatcccgccgttgccgggctgcgcctgagcgggacgttcccgctgaaaaataccgatgcgatcctgaacgttatcgctcaaacgcttcccgttaaaattcagtctattacgcggtactggataaacatttcaccgctgtaa

SEQ ID NO: 214367 - DNA, 522 bp, Klebsiella pneumoniae; identical to SEQ ID NO: 101469

SEQ ID NO: 214368 - DNA, 456 bp, Klebsiella pneumoniae; identical to SEQ ID NO: 103980

SEQ ID NO: 214369 - DNA, 168 bp, Klebsiella pneumoniae; identical to SEQ ID NO: 103979

SEQ ID NO: 214370 - DNA, 1128 bp, Klebsiella pneumoniae; identical to SEQ ID NO: 138315

SEQ ID NO: 214371 - DNA, 594 bp, Klebsiella pneumoniae; identical to SEQ ID NO: 94162

SEQ ID NO: 214372 - DNA, 849 bp, Klebsiella pneumoniae; identical to SEQ ID NO: 138313

SEQ ID NO: 214373 - DNA, 921 bp, Klebsiella pneumoniae; identical to SEQ ID NO: 138312

SEQ ID NO: 214374 - DNA, 1608 bp, Klebsiella pneumoniae; identical to SEQ ID NO: 138311

SEQ ID NO: 214375 - DNA, 948 bp, Klebsiella pneumoniae; identical to SEQ ID NO: 94166

SEQ ID NO: 214376 - DNA, 1734 bp, Klebsiella pneumoniae; identical to SEQ ID NO: 138309

SEQ ID NO: 214377 - DNA, 348 bp, Klebsiella pneumoniae; identical to SEQ ID NO: 198669

SEQ ID NO: 214378 - DNA, 348 bp, Klebsiella pneumoniae; identical to SEQ ID NO: 136986

SEQ ID NO: 214379 - DNA, 636 bp, Klebsiella pneumoniae; identical to SEQ ID NO: 188184

SEQ ID NO: 214380 - DNA, 1113 bp, Klebsiella pneumoniae; identical to SEQ ID NO: 188185

SEQ ID NO: 214381 - DNA, 1389 bp, Klebsiella pneumoniae; identical to SEQ ID NO: 101382

SEQ ID NO: 214382 - DNA, 171 bp, Klebsiella pneumoniae
atgattgatgttctaggtccagagaagcgcagacggcgcagcgttcaggaaaaaatcgccattgttcagcagagctttgagcccggaatgaccgtgtcgctggtcgcccgtcagcatggcgttgctgccagtcagctgttcctgtggcgggtaatgactccaacttattga

SEQ ID NO: 214383 - DNA, 378 bp, Klebsiella pneumoniae; identical to SEQ ID NO: 146978

SEQ ID NO: 214384 - DNA, 276 bp, Klebsiella pneumoniae; identical to SEQ ID NO: 5786

SEQ ID NO: 214385 - DNA, 660 bp, Klebsiella pneumoniae; identical to SEQ ID NO: 52324

SEQ ID NO: 214386 - DNA, 378 bp, Klebsiella pneumoniae; identical to SEQ ID NO: 16790

SEQ ID NO: 214387 - DNA, 474 bp, Klebsiella pneumoniae
atgaactacagcatcaccaccctcggcaagaaaaccatcgccggtttccatctggtcgggccctgggatcacacggtcaagcaggggtttgagcaactgatgatgtgggttgagaaccaccaggtgcccgcccgcgaatgggtggccgtctactacgataacccggaggaagtgccggcggaaaaactgcgctgcgcgacagcggtcaccgtggacgaggattatgtcattcccgccaacagcgaaggggtgatcctggcggcgattgccggcggggattacgcctgcgcccgcgcgcgggtggtggattacgacttcgccaccccgtggatgcagttttttgacagcctgcagcagagcacggcgtatcgcatcgccccccagccctgctttgaggtctatcttaacgacggcaaccacgacggctactgggatatcgacatgtatgttcccgttgagcgcgtcgcgtcgtag

SEQ ID NO: 214388 - DNA, 1059 bp, Klebsiella pneumoniae
gtgcgcgctgataaatcactcaagccatttgagatccgcttgtatcgccattatcgggtggtgcatggtgtgcggattgcgctggcctttgtgctcacatttttgctggtgcggctgctgaacgtgcctgagggaacctggcctctcatcactctggtggtggtgatggggccgatctccttctggggtaacgtcgtgccgcgggcgtttcagcgtatcggcggcacgatcctcggttcggcgctggggctggtggcgctgaagcttgagctcatctctctgccgctgatggtcctctggtgcgcggcggcgatgttcctctgcggctggctggcgctgggcaagaaaccctatcaggcgctgctgatcggcattactctgtcggtggtggtcggggcgccgcccggcgatatgcataccgcgctgtggcgaagcggcgatgtgatcttcggctcgctgctggcgatgctgtttaccggcatctggccgcagcgggcgttcatccactggcgcatccagatggccagctatgtcaccaactttaaccgcctctaccaggccggcttctcgccaaatctggtggatcgaccgcggctggaaaagcatctccagcaggcgctgaacgacgtggttaaaatgcgcgggctgatcacccccgccagcaaagagacgcacatccagaaggcgatcttcgaggctatccagaccgtcagccgcaacctcgtctgcatgctggagctacagatcaacgcctggtgggcaacgcgtccgggtcacttcgtgatgctcaatgcgcacaccctgcgggagacgcagcagatgacccagcagacgctgttgtccatcgcccacgcgctgtacgaagggaaccctcagcctgtgcgcgccaacaatgaaaagctgactgagatcgtcctcgaactgcgccagctgctgaaagagcagggtgatgacggcctggcggaaaccccggtccatggctatgtttggctctcaatcgaactggcgcgccagctggagctgctctcgcatctgatctgccgcgcgttgcgcaaataa

SEQ ID NO: 214389 - DNA, 324 bp, Klebsiella pneumoniae
atggaaacaactaagccttctttccaggacgtactggagtttgttcgtctgtaccgtcgtaagaacaaactgcagcgtgaaattcaggacgttgagaaaaagatccgtgataaccagaagcgcgttctgctgctggacaacctcagcgactacatcaaaccgggcatgagcgtggaagccatccagggcatcatcgccagcatgaagagcgattacgaagatcgcgttgatgattacatcatcaaaaatgccgagctgtccaaagagcgccgcgacatctcgaaaaaactgaaagtgatgggcgaagccaaagtcgaaggctaa

SEQ ID NO: 214390 - DNA, 741 bp, Klebsiella pneumoniae
gtgattaagtcattctttgctgcactctcgtttatcagccgcctgccggtcccggcgcggttatctcagggcctggagatcgaacagtaccagcgcagtatcgtcacctttccgctggtcggtttactgctcggcgccatcgccggcgcggtggcactcctcctgcagccgtggtgcggcgtcccgctggcggcgcttttcggcgtgctggcgctggcgctgctcaccggcggattccaccttgacgggctggctgatacctgcgacggcattttctccgcccgcacccgcgatcggatgctggagatcatgcgcgacagccggctgggcacccacggcgggctggcgctgatcttcgtgctggtggcgaaagtgctggtggttggcgagctgctgctgcgtgatatccaccccatcgcagccctggcggcggcctgcgccgtcggtcgcgggatggcggtgctgctgatgtatcgtcatcgctatgcgcgggaaaaggggctgggcaatctgtttattggcaaaattagcctgcagcagacgctggtgacgatggcgatggcgatcgcgctggccaccgccctgatggggctgcaggggctgcgcgccgcgctgatcaccctggtgctgatctggggtctgggatgggcgctgaagcgaaccctcggcgggcagaccggggataccctcggggcggcgattgagctgggcgaattactctttttactggcgctgctgtaa

SEQ ID NO: 214391 - DNA, 1068 bp, Klebsiella pneumoniae
atggaaacactttcggcgttactggctgccattccgcagcccgatgtggcggccatggcgcgcgctcagcagcatattgatggcctgttaaagccgcccggcagccttggccgtctggagacgctggcggtgcagctggccggtctgcctggcttgcaggggcagctggcgctggcggagaaagcgattgtggtcatgtgcgccgaccatggcgtctggcatgaaggcgtgaccccttcgccgcaggtggtgacggccattcatgcaggcaatatggtgcggggcaacaccggcgtctgcgtgctggcggcgcaggccggggccagggtgcaggtggtggatgtcggcatcgatgccgacccgctgccgggcctgattaacctcaaggtggcccgcggtagcgggaatatcgcccggacggcggccatgagcagccagcaggcggagacggtgctgctggccagcatgcatctcacccgccagctcgctgccgacggggtgaaagccttcggcgtcggcgaattgggaatggccaataccaccccggccgcagcgacgatcagtgtcctgacgggcagcgaccctgacgcggtggtgggctgtggggctaatctgccgctggcgcagcggggccataaggtggcggtggtgcgccaggcgatagcccataatcagccgaacccggccgacgggctggatgtcctggcgaaggtggggggttacgatctggtgggcatgaccggggtgatcctcggggcggcctcctgtggcctgccggtggtgctggatggcttcctctcctatgcctctgccctggccgcctgccgcatggccccgtcggcgcacccttatcttattccttcacacctgtcggcggagaaaggagcgcagatcgccctcgacgcgctgggtctgcggccgtatctcgatatggacatgcgcctgggagagggcagcggcgccgcgctggcgatgcacctgctggatgccgccagcgtgatgtataaccagatgggaacgctggcgcagagcaatattgtgttgcccgatagcgcgccgtcatcctga

SEQ ID NO: 214392 - DNA, 1110 bp, Klebsiella pneumoniae
gtgaataataaaatctctttagcgaaagaagtggcatgggccagccagaatatgccgcgtaccctgcgtcaggtcgccgcgctgcccgacctcagcggcgtgcgtctggcctgctgtatgcacctcgacatgaaaatgatcccgctggtgcaggggatcctcgacaagggcgctcaggtctttttaaccacctgtaaccccaccaccgtgcaggacgacgtggtggcctggctggtggagcgcggcgccgaggcctgcgcgtggcgcaatatgagcgatgccgactggcaacagtcatgggaaaaagcgattgcctggcagcccactcacctgtgcgagatgggcgccgatatcaccaccctgctccaccagcgcggcgagtttgggaacatcgtggcgggtctggaagccaccggctcgggcgtcaatcggctgggggatattcagccaggctatccgatctttaactgggacgatctgccggtcaaagaggggctgcacaaccgccatatggtcggtctcactgcctggcacaccttcttccagaccactcacctcaccctgcatgagaaaaaagtgctggtgatcggctacggcctggtcggccagggcgtcgcggcagcggcaaaagcttttggcggtcaggtgatggtggcggagatcgatcctgcccgccgtctgcaggcggcctacgacggctggcacgtggtggacctccaggaggctatcgcctcggcggacgtggtggccacggcgacaggcggtaaaaacgtggttaatcgccaggcgctggaccggacgaaagcgggagtatttatccttaacgtcggccacgtggcggaagagatcgacggcgattacctgcgccagtacccccaggaagaggtgatgccgtatatcaacgcctaccgcatggccgacaaaaccgtctatctgctggccaatggttcgatgctcaatctgaccgcgggcttcggcgacagcctgaacgcctttgacgtcaccctcgcggtgatggccagcggcatccgccatattgtcaccgagggcatgcgcgccccggcgaaggtttatctcctgccccaggcggtctggcagcaggccctgtaa

SEQ ID NO: 214393 - DNA, 732 bp, Klebsiella pneumoniae
atgttgagtgttattcctgcggggatattttcacggctgcggattttccttggccgcctgaagccgcacgcgctgccggtggcccgccggcatatcgtgctgggatccattggcgctggcaccggactggcggtgaccagcatgttcagccactggctgctcggcgaagttaatctgtggtttattgccccgatgggggcctcggcggtactcctgtttggcgtaccgagcagcccgctggcgcagccgtggtcgattgtcggcggcaacgtgctgtcggcgctgatcggcgtcacggtgggtatgctggtccccgatgcggcgctggcctgcggtctggcggcggctctggccatcgccgggatgtattttctgcgctgtctgcatccccccggcggcgcggtggccctgacggcgatcctcggcggcgccggggtgcacagcgaaggctatcactttgtgctgaccccggtgctcctcaactcgctgatgctggcgctgctggctattgtgtttaataacctggttggccgccgttatccgcatccgctggcggcagaggaggtcaaatccagggcggtgccgctgggtatttcggtcacccgggaagatattcacgccgcgctgctggaaggccagttcctcgacattgatgaagacgatgtccaggagttgctggagaatatcgagcagcaggcgcggcagcgtatcgcgacggcagcccgccgctaa

SEQ ID NO: 214394 - DNA, 390 bp, Klebsiella pneumoniae
atgccattactgacatttgacctgattgaaggccgtacggaacaggaggtcaaaatcctgctggatgccgcccatcgcgccgtgctgcgcgccttcgaggtaccagaacgcgaccgttaccagattgttcatgaaaacaaagcccaccatatggtgattgaagataccggcctcggattgacccgcacgcgggatctggtggtggtgcgggtctataccagcccgcgcagcgaggcgcagaagcagcgcttcttcgccattttgcaggaggagctggcggaacactgcggcctgagcggcgatgatctgatggtgtcgattatcagtaaccagaaaggcgactggagctttggccgcggggtcgcgcagtatcttaccggcgatctgtaa

SEQ ID NO: 214395 - DNA, 957 bp, Klebsiella pneumoniae
atgagcgagagtcgtccggagagttactggctccatctgtactggctgacggtgctggaagaacaaaaaagctatacccgggccgcggaaaagctggggatcagcaagtcggctatcagccagaaaatcagcgagctggagcgggtgaccggtaaaaccctcgtccatcgcaccacccgcagcgtgagcctcagcgacgacggactgcggctggtggcggagctcaacgagccgtttggtcagctgcgggatattttcaccggcgcctgcgatgagggcgggccgctgcggggaacgctgcgcctgaccgcgccggtggccttttcccgccagcagctggtcccggcaatcgcgccttttttgcatcagcatccccagctgcatctgcagcttgaggtcaccgaccggctggtctctctggccagcgaagggttcgatctcgccatccgccactgtcggcgcgaggcgctcccggatacccatgtcgcctggccgctgtgtcacaccgcgacgcttaccgtcgcgtccgccgactatattcgccgccatggccgcccggaaacccccgaagatctgcgccaccaccaatgcctgacctatcctcgtgggccacagcgcccgcagtggacgttcgcctcccgtcagtcgcccgatgctcgggtgaccatcaacgtgcaggggccattcgccaccaataacagcgagtcgctacgtgatgcggtgctggcggggcttggggtggcgctgttgccggatttcagcgcccgggaggccattggccgcgggctggtgcaggagctgctgccggcgtggcagccagtagaggtgtttgccgatcggctgtacgtcatccggccctataccccgcgcgtgtcgcgcgcggtggaaaccttcagccgctacctgaaagcgaccttcagcgagacgcgtccagctcctgcgccagcgcctcgctaa

SEQ ID NO: 214396 - DNA, 741 bp, Klebsiella pneumoniae
atgtctcagttaaccctggccgactgctggcctcgccgtttttccccctcctcgctggcgctgcagttttgcgaggatcccacccaggcggaacagccgctgtttgccaaagccagcgccggcgaggccgtcgcccagctctggcaggcgccgcagggattggtggtgccggggagctatcgtcagtttacggatctgccggcggtcagcgcgcattttgccgcgcgcggctggccggtatggcttcgccgctccggcggcggtctggtgccccaggggccgggcattatcaaccttagcctcgcctggccggtgcagcagccgctcggcgaagccgccgaaccgatctatcattcgctgtgcgctgtgctgcagcgcaccctcgcgcgcttcggcgttgccagccacgcccgggcggtgagcggttccttttgcgatggccggtataatcttgcctgcggagaaggcgcggaggcgcgcaagattgtcggtaccgcccagtactggcggccgctggcggcgggcggcggccacgtggtgctggcccatgcggtgatccttattgacgccgatctgagcgcggcgcatcaggcggcgaacgccttcgaagcgcagctcggcagcgagcgggtctattgcgctgacaagaccgttactctcgcgcagctgcttcccggcgagcgccatctgctgccccgctttagcgaggcgctggcgcaggagctggacgcgtctcgctga

SEQ ID NO: 214397 - DNA, 1320 bp, Klebsiella pneumoniae
atggattcaacaataagcgtgcagcccggcgaggcgccagattcactacatcgcgcccggcgggcggcctggggtagttttgccggcgcggtggtcgactggtacgattttcttctctatggcattaccgccgcgctggtgttcaaccgcgaatttttcccgcaaatcggcccggcgatgggaacgcttgccgcctttgccaccttcggcgttgggtttctttttcgcccgctcggcggaattatttttggccacttcggcgatcgcctcgggcggaaacggatgctgatgatgaccgtctggatgatgggtatcgccactgcctgcatcggcctgctcccctcgttcaaccagatcggctggtgggcgccggtgctgctggtgttcctgcgtgcggttcagggattcgccgtcggcggcgaatggggcggcgcggcgctgctctcggtggagaatgccccacaggggaaaaaagccttttacagcagcggggtgcaggtgggctacggcgtcggcctcctgctctctaccgggctggtatcgctgattagcagcctgaccagcgaccagcagttcctcagctggggctggcgcttaccgttcctgttcagcgtggtgctggtccttattgcgctgtggatccgtaacggcatggcggaatcgcaggagtttgaagcgcagcagagccaggacaacgcgccgcagatgaaaaagcggctaccggtagtggaagcgctgcttcgccatccgggagcgtttttactgattatcgccctgcgtctgtgtgagctgctgacgatgtatatcgtcaccgccttcgccctcaactactccacgcaaaacctcggcctgccgcgcgagctgtttctcaacattggcctgctggtgggcggtcttagctgcctgactatcccctgcttcgcctggctggcagaccgctttggccgtcggcggatctatatcaccggggcgctgatcggcactttgagcggtttcccgttctttatggcgctggagagtcagtccgttttctggatcctgttcttcgccctgatgctggccaatatcgcccatgatatggtggtctgcgtccagcagccgatgtttaccgagctgttcggcgccagctatcgctatagcggcgccggcgtcggctaccaggtggcgagcgtggtcggcggcggctttaccccgtttattgccgcggcgctggtcaccttctccggcggatcgtggcacagcgtggccctctatctgaccgcaggatgcctgctgtcagcgctcaccgcgctgcttatgaaaaagcaccccgtcgactga

SEQ ID NO: 214398 - DNA, 381 bp, Klebsiella pneumoniae
atgaatgtcggcgacaaggccgtttttgatctcgcaatgctggaaaaactggggatgaagacgatagaaaccaccaccccctggtacaccggcaaggttcgttttgacggtattccccttagtaaactcatggatttagtcggcgcgaaaggcacatcggcccgcgtgctggcgctgaacgactacactaccattatcccgattgatgatttttataaattcccggtcattatggcgttaaaaatgaacggtcaatatatgcgcattcgtgataaaggcccgttatttattgtctacccttacgacagcagtgctgaattacagaaccagatctattattcccgatcggcctggcaagtttcaaagatgattatagaataa

SEQ ID NO: 214399 - DNA, 1788 bp, Klebsiella pneumoniae
atgtcgcagatggtgtcggaatatatgcggctggagtctcgtctggcgggaatggcgattggggccgaaggggcggaccacgatgaggtgcgtctgcgtcttgagatcatgatgagccagatcgagcttctgcaggagggcgatctgggtaaatttatcaataaaagcgagcagcggaagacggtggttgcgacgctgattcgtaatcttcatctgctcgataaacaagttgataccatgacgccggagcaggtcagacagatcctgccggtgttaagcgagctggatggtccgctgacctcaatggccgccgccaccctgacgcaagatatcaatatcgttaatatcacccatgataaaatccagcatctctattatatctactcggtgatctccattctgctgatcgccatgtgtataactctcggtctgctgatgctccgacagaataataatctgcgtcgcgcccatgttcgtatgaaaacgctggccaacgatctgcaggcctcgaaagagaagctgcaggtgcagaaccgccggctgcagtacgatgcctaccatgattcgctgaccggtatgcccaaccgtctctctttctggcagcggctgcaggagatcgtcaaccaggtgcgtccctataagggatgcgccgtggtgatgcttttcgacctcgacagctttaaggatgtgaacgatacccttggccatgatgctggcgataagctgctgcaggatctggccagtcgcctctcttttttccgcaaaacctccgagacgctgtatcgccttggcggtgatgagtttgcgatgctctcctacgatctcactgaagagatggcccttgagcgggccaatgttatccgggagaagatcagccagccctatcagatctacgatgcgcagattaatatcgacgcctgcattgggatcgtgatctctgacggtgaaagccgtaccgattatctgtacaagtgcgccgacctcgcgctgtatgaagcgaaaaaagagggtagcggccatgtgcaaatcttccggccggggatgctgcagcgcctgcaggagaacaaatcgtttgaagacgatctgctgcaggccctggcccatgacgaattcaaagtctactatcagccgatcgccgataccgtcacgcgcgaaatctacggctatgaagcgctggttcgctggttccatccggtgcgtggcgccgtgccgccgacggtgtttattccggtggcagagaaaatcggtcttattaatgcccttggcgaatgggtgctgaaaaccgcctgtgccgaagcggccagctgggcgacgccgctgaaggtctcggtcaacgtttcaccaattcagttgatgaatacatcgctgaccgacaccattatcgaggtgctgcatcagaccggcctcgatccgcgacgtcttgatctggagatcaccgagtcggacgtattcaatgagaacacccgttcgctggaaattctcagccagctgcgcgagctgggcattcagatctccatcgatgactttggtaccggctattcttccctgtcccgtttaagctacttcccgttcgataaaattaaaatcgaccgctcgtttgtcatcaatattccggaacaaaaagacgatctggatatcgtccgcctgattatcagcatgggaaagagcctgcatatgcgcattgtggcggaaggtgtagagaccgaagagcagttggcttcgctgcaggcgctgggctgtgacctggttcagggatatttaatcggcaaaccgagtccgctgcgctaa

SEQ ID NO: 214400 - DNA, 333 bp, Klebsiella pneumoniae
atgcagcgaatcattattcccacccattacgttcacacccgcagcacgccgctgtggaccaaagagaccgccccggcctctatctggcgccgccatctggatgccggcacccggcagggcgtctaccctcgtctctcggtgatgcagggggcgatccgctatctcggctatgccgatgaaaccagccccgagcccgttgaaaccctgactattgaagccggccagtttggcgtctttccgccggagaagtggcactgtattgaggccctctcagaggacacggtttttaatgtcgacttttatgttgatccaaaaattcttattgagggataa

SEQ ID NO: 214401 - DNA, 336 bp, Klebsiella pneumoniae
atgaccagtgaaaataaaggttataccttagcgctagagaatggccgacttcaccagaagcaggaaaaaatatttctcaaaccaatggtgttgtatattccacagcaggcggtggaggccgttaatgacctgctgagcaagttgccggacgacagggaagagggagagtttctgttgacggtcaccaataacaataacggcgtctcggttgataaaaccttttcctcgctggcggcgctgcgcgacccactcaccgcggctgatgcggtgaaggatctgatcaatatcgttcgcggctacgagtccgatgaagagaccaacgtctgcggctggtaa

SEQ ID NO: 214402 - DNA, 915 bp, Klebsiella pneumoniae
atgagaccgccccgtctgccgccgctgggggcgctacgcgcttttcatgccgtcgcccgccaccgcagttttaaacaggccgccgaggcgctcggcgtcagcgcgacggcggtcagccatcagattaaactgctggagtcggtgctggagtgccgggtctgcgaacgcagcgcgcagggcgtcagtctgaccgctgatggcgagatcctttacgccgccacccaacgcgcctttagcgccctggaacaggccgtcgtccagatcgctcatgcccgtcagccgccatccttaaccgtcaccaccacctccaattttctcacccactggctggtgccgcggctggcggatttcaccgcccgctttccggctatcgacctgcggctacacaccagcgtcgaacgagtggatctgcatctgggcacggtagacgccgcgattcgctatcgtgaaacgccggagccggacctgtactgcacgctgctgtatgaggatcgctttatcgtggtcgccagcccgactctgggcctcagccggcctgaagatctgcagcgggtgacgctgtttcacgttgccaaccggcgcgtgccagctgattcgccgagctgggagaactggcgtcggcgctatggaccgccgacgctgaatattgatgcggggttaacctttagcgatgagacccatgccctgcaggcggcggtggccggtcagggggtggtgatcgccagcgaactgctggcgcgggatctgctgcagcgcggcgtattgtccgcgccgttcagcaacgcattgcctggcgcccgctactacctggtcactaccgaagcggtagcgcagcgggcggatattatcgctctgcgggagtggctgctcagtcagatggcgtcgggcgacggcggccatccgactgcgggatag

SEQ ID NO: 214403 - DNA, 576 bp, Klebsiella pneumoniae
atgcacgttgtaagccgctacaccgccgcggaagccgcggcaacgaacgacccccgcggccgcgctatcgcccttagcgtggtcatcgccgccggggccttgctgttaatcatgcccccggttatcggggtgaccggcacgctgagtctgctgacggcgctgattgcggcctttagcgtcgggtggggattcacacgcggacaatcctggctttatcgctcacccctggcggcgacgcgctgggcctttctgctgtcagcggccggctggctgttggcgctggtggcctggtatggcgggcaggactggccggcactgctgccgggcgtggcgtgcggtggggcgggagcggctgtcgcctggcgcattgcggcgggtaggacggcgctgccggggatgcgggtcagcggcgccacggtgctgagcgtagctatcgccatcgcggcgacgctgctgacctggcatactgcgggaggaggacgccatggcgtctgctttgccttcgccgtgctgcttgactgggcgctgctcggcgcgctgatggtgcggatccgccagcaggagagtgcggcctga

SEQ ID NO: 214404 - DNA, 972 bp, Klebsiella pneumoniae
atgaaattagccggacttcatcccgacgagcagcgtcgcctgcaatcgctacgctcttccgggctgttgaatagcggaaaagaagaacgcttcgatcgcctgaccaggcttgcccgttcgctgtataacctgccggtggcgtccatcagtctggtgggggaagatctcctgcatatcaagtcctgtgccggtctcgatgtggacacggtgccgagagatatttcattttgcgcccataccattctgcaaaccgacccgcttatcgtcaacgacatgcagcaggacgagcgctttcacgataacccgctggtcattgaggcgccgtttatccgcttttacgccgggtatccggtgcaactgccggatggcgcgaccgtcgggtcgttctgtctgatggatcaccagccgcgatcgttttccgcccatgaaatgcagatcttaagcgatctggcggcgatcgtggaggatgagttcaaggtgctggatgcggcaacctcggatgagctgacgggactgtttaatcgccgggggttcctcaccctggcagagtatgccctgctgacggcccagcgccgccatgagccggtgagcctggcgtttgtcgacctcgatcgcttcaagcacatcaatgatacctgggggcatgaagagggcgatcgcgcgctgatcgccatcgccgacttgatgaaagcggccttccgcgagtccgatatcctcgcgaggcaggggggggacgaatttatcattctgttcgccaataccagccgccacgatgccgcgacggcgatggagacgctcagccacaacgtggcgcgtttcaaccagcaggcggccaatccctggcagctggcgttctcctggggctgcgtcgaatatgatcccgccagccatcccagtctcaacgcgctggtggccaccgctgaccgcctgatgtaccaggcgaagcagaagcagggacgcgagcgccgttaa

SEQ ID NO: 214405 - DNA, 1104 bp, Klebsiella pneumoniae
atgaacctcagacaacagcaacagcaggcgttcgatcgcagcggagaacctcttatcgtcggcaacgtcagccactgcccgctgccgccggagaccctcgccgcactgggccccgattccccctatgtggtgcaggtatacggctcaggcctgaccggcgaggtttatcgtctgcgcatcgccggcaaggagtacaatttaaagaaacgtcgcgccgtcgccggcgttgccaacctcaacggccagctgtcgtttttaaatgaggtacagcgtcggcaggcattgcaacagctgaaggatgacccggtcaccgcgccgcgcttcacccacatcgtcccaacgctgtatgccgattatcgcctcggcatcctgctctccccctggatcgacggcgagccgatacaccagttaaccccgccgctgatcgcccagctatttactactctggaagcctgcgaagagcaggggctgatggagtgggatctctgtagcgggaatctgctggtggaccggcaggagcagctgtggctgttcgattttggctatatgtatcccttcgacccgctgagagaattcaacagcaatggtctggccgacccgctgttccactttgtcgaacgttttgagactcgcttcttttttagctggctgatgaccaggatccctgacgccgaacagcagctggcgcaatatcgcgagatgaagcggctggcggtcgaaagctaccgccggaagctggtctggcttcgcgcccggcgcgctgacccgcaggtgctggctcactttcagcacttgacggcgcgctgggagtcggcgctggcggaccctgccgcgctgagccggctgtttgccgtagaggcctttcgctcacatgtgctggatattgaagacgacctgcatggtcagtcctgtaccttactcaccctgcaacgcattgactgggtgataaaccagctggaacagcattatcgctttatcgccgacgaaggcggcctgttttacgataacgaagggaaatcgcagcaggcgctgctcagcagctatgcgcagaagcggcagcaggcgcagcagtacctgttgaatgccaccgccgcgaaggattaa

SEQ ID NO: 214406 - DNA, 546 bp, Klebsiella pneumoniae
atgtatcggctggagaattctgagcaaacagaccctgttgctgtgagttctgactacatctctgagtatctgaaacaaggtggcatgaatcctgccaacaaaatactggttgaaattgacttggaagaagccagcagcgacgatctcgcagaacacctgaaggtgctgattgctctatggcaaaagcagcttaaaacggcaaaaccaccaaaacgaacttttcggtttggtcataagacttttcaaagaatacttgattacaaagtcatccctttgatggatttgatctcatgggaacagctctacaacgaaggtaagaacatacctttcaacatcttagctgacattctacatggtactggtgggattcggagccgtgataacatcaaagatactgattatgattacgcgaaaagttatcttgataacgatgagtacttcaaggttttaaatgatttttatattaaaaacaatatgttaaaggactggaagatcactgacgtgataacatttaacgataaagccacggataaaaacaaaaagtaa

SEQ ID NO: 214407 - DNA, 219 bp, Klebsiella pneumoniae; identical to SEQ ID NO: 182519

SEQ ID NO: 214408 - DNA, 330 bp, Klebsiella pneumoniae; identical to SEQ ID NO: 182520

SEQ ID NO: 214409 - DNA, 312 bp, Klebsiella pneumoniae
atgaataaagatctgaaaaaagaagcaaacaagatattactgcatttatctaaacaatgctttgaattgcgtgtgagttctattattcagaaccatcctgaacaagtagaacaactcaagcatgaagaagcttttatgatgaatacttataaggacagtattaaagtagcaaaacagatgttccctaaagtcgtaaggaatacattctttgatgtaaagttatcaccaagactcattgataacgattttatattgaaagcattaaaagcatttcataaacaaatggattttatgaaagattttcaaaagtag

SEQ ID NO: 214410 - DNA, 291 bp, Klebsiella pneumoniae
atgactaaaaatattgaaattaaaaatacatctactgagctgttctatgatctggcaaagcgttctttcgaagcaagctggaaaacaatgcaagatatgtgtagtgacagcatttcgcatcttgtcgatgatgctgattttatgagcgcatttatacggctcactattaatcatatttgtcataactttgagaagtttactacacaagaaggaaatcaaggacaccttacagaggtcaactttgaagaggttgcagaacggcttgtgcgtaatgcttgggtgttttgttaa

SEQ ID NO: 214411 - DNA, 381 bp, Klebsiella pneumoniae; identical to SEQ ID NO: 182523

SEQ ID NO: 214412 - DNA, 405 bp, Klebsiella pneumoniae; identical to SEQ ID NO: 182524

SEQ ID NO: 214413 - DNA, 708 bp, Klebsiella pneumoniae
atgagcattgattacaatacaataatgacctccagcagtgaagaagtcgaagaatatatcaacagaaatcattttactgacaaacagaaactggaaatttacagtttttataacagaaacagaaaagataaaataaccgtaaatgtaaaaaaagagagaagttctgatattcaaccgggaatatcctatgttcatgcttttcttgataatctggaaaaactcggaaaaaatatgtctggtgcagaatacacaataatgatccgcttatgtaaactcatgcagcatggaaacctcattgccagtatatctcagtcggcactcgcagaagagcttaatatgagcaaatctaacgtatgtaaatgctggaataagctaataaataaaggaattctggtcaaagaagggaagcataccatgataaacgcaaatctctttctgaaaggccagtacagaacattaaatgccacaaggaaagaatatgttaagaagtcgctgagaacgaccagtgaaggcatagaagacgtattcgtcaccgtttataaagatacggtacttacaaataacgtagagaaaacaatcgataaagaagatgataaacctttactttctactcccgacgaagatattgactgggactctgtttcagaagacagcatatttgatgattattctcaagaagatgagtttgatgaagaagaaaacatataa

SEQ ID NO: 214414 - DNA, 567 bp, Klebsiella pneumoniae
atgaaattacggatagtgatgccactggtactgtctgctgccgcactaacaggttgccagcagctcaacgatggcgtgaatacagttaatggagcaatcagttcttcgttgtcttcagtaggtaaagcgctggggggaactgccaccactcaaagccttggcccggtatcgtctgtatctggccttggtgctgtctgcaaagactatgaagaaaacgcaatggcagcagagaaaaaatggacgggaaaacggatctcaatcgcaaatgcgactgttcttgaagttacgaaaggcagaagtgccagcgatatgatgacggggatgcctaaatcagcccctaactattatctgctctttaaaacagccgatacaagctactgcggcgggatggtttggctggattactactctggtattgatgatgccgttcttacttacaagaaaggccagaaagtcagcgttactggaacgataaacaatttcgaagtccgtggatttgccacagtaaacaatgccgatatgccagttcgtctggttgttctgagaaacggcactatcaatcattaa

SEQ ID NO: 214415 - DNA, 552 bp, Klebsiella pneumoniae
atgcgtaaaattttagccattactggccttgccatgttgttatcaggctgtggtgaaaaaggcgattttgagaaagctatcaatgcgaagatttcacattcaaagctgtgctactccttgcaggataatgacattgtgttcaataagggcttccccatccgggtcaaccatggctaccgttcagcggggtatagtgccagtgatgaaatattgaaaggtctggctaatcaggggctgcttgatgtttctcaacaagctaatggtttcagtagtgtcgatgttctggaagtaacagacaaaggccaagcggttgagttttgggatcgtaaagatggtgcctgtgttggtcatcgtgcggttgctgagataaaggaatggactgaaccgggaaacggtaatcagaaagttgttcgcgtgtcttatacatggaagttggcggatgttccttcatgggtagacaaaaaagtgttctcaagtgtcaagggtatgaatgaacctgaagagagcatgattaatcttgttaaaaccagcaatggctggaaagcgatctaa

SEQ ID NO: 214416 - DNA, 276 bp, Klebsiella pneumoniae
atggaaaacaacacaattaaatgccctttctgcctgaaagaaagccaaaggggtgttcatgtctgcaccggctgcatggcgacggttctgtatggaaccttccccggctggtatgctttcgtggttatattattgaccttcggcctgtctatactgatcggaatgtctacaggtatggcgggagctactatcagcctaccaattattgctgctgttgggtttatagctggtaaggcaattttctctgataatgttgtgtttaggcgaaggatgtag

SEQ ID NO: 214417 - DNA, 420 bp, Klebsiella pneumoniae; identical to SEQ ID NO: 18576

SEQ ID NO: 214418 - DNA, 1053 bp, Klebsiella pneumoniae
ttgcttcttgcagatgttgtaattgccgacatatctaccaacaatgcaaatgcactctatgaacttggcgtacgacatgccctcaagaagggaacaaccattataatgtctgaaaaaagtggggttcttcatttcgatctcaatcataccgcaaccctaatatatgaacatttaggcgatgatattggttgttctgaggcaagaaagaaaaggtcagagctacaaaaattgatatctactgctttacaagaaagcaaaacggacagcccaatttatacatttctacctgatttaaaaacaccaacattcagtgaaaaagaaatagaagaaattgttgaagaatcgaatgaatcagaaaaagagtgggttgatgttttcaataatgcagaaaaacttttaaaggaaggtaatttcactgaggcaaaaaaatattatagtcaggctatcgaattaagaccaaatgatgattacctcttgcaacgactgaccctttgtacttataaggacgtatcggataatatcagccccgttatggcttgcttcgatgctatgtccattctttctgctctttctcctgataccagtaacgatcctgaaactactggtttagctggagctattagcaaaaatatttggcgagaaatcaaagatatttcttttttagataaagccattcttttatatgaacgtggttatacgattaaaaaagattattataatggtgagaaccttgcgatttgccatcatgaaaagatggaatacctcaaaaacttaaatgcaacatctgctaatttaaacaaggaaattgcataccacgaagtaagtgctgaaatgattttcaactcagtgcttggtataacagaggaaataattaactccaattattttgatgagcgaagtgaccaaaaatgggtcttcgcatcagcatgtcaagccgccaactatattggagattcagataaatcctcaacctactttgatagatttaaagcattctgtgacaattcatgggatattgaaaccttctgtaaaaacaaattaaggaaacaataa

SEQ ID NO: 214419 - DNA, 468 bp, Klebsiella pneumoniae
atggcaaatataattacatgcaaaactaaggatggaaaaaccattcagtatgtcgatgaggtcatcggctctggctcaatgaaagacgtttatttttctccggataaatcatatgtcgtagccttctaccataaacctcagaatgaacaggcccgggaacgtatcaacatgatcaccgggaggtaccggcagaatatttttgagcagacgggtggagattactggaaagggctcttctgctggcccactgatgtggttgagcacgctgataaggtgggtattgttgtacctgcttaccagcagcatttctttttccgatatggttccaaaaacaatgatttcctcgggatcaaaggacgagaaaaggaagggaaatggtttgccagcgcgaacaatcagaataaatttctggatccgcgtgaacgtggcaatacgcttaaggaaggtgcgaacaagttcctgatatga

SEQ ID NO: 214420 - DNA, 1734 bp, Klebsiella pneumoniae
atgagcgagttcattacacctgaacataaaattattgctctcattctggaggcatcaggggaaccgactgatgctgataaagtatgctgtcttggtaacatacctgatgttgcccttgctgtgcggcagctgagagaaacggtcattcaacactgtgcaagcgaagccttaccggcggagaacactcaaacagtttcagaacgtcttacccagcccttttctgacaatatcctcccacctcaaaactctggtgaaagcgaagctgatcgacctgagattgaacccgtccatgccgctactgcacttcagggaaatgataagcaggaagcgcatagtgaaatggtggatgatacagcgtcagaaggcgttcagggacacactgaagaagttcctgatgcaaccggggtcttacagaccgaggcttccgtcacggcgcaatcagaagacatggacaaaaccgttctggttgtttctgacaacctttcagctgacaccgcagtcagggctttacggcccggggaagtacctcagagagtggagaataaaacatcccctgcccccggaaaagtgccggaggtgtttatcatgctgccaaatgcacgggcaggtgaaccctacgatgttcgactggaaatagcgaccgatacaggtgttgaggcagagatcacggaggttaacttctctcaggacatagggctgatatttgatatcaatgagcgacgcctcaaggggacgccagggcagagcggagactttgaactgactgtgaaatggtcatgcagctcacatcgtgataatgaaaaaaagttactttttgtcgtgaaccctgatccgaaaagtctctggaaagtgattgacccgccttctgatgcaccattctacaagaagagtatcgaccaccagagtgtctgtcggtcaggtattcatattgccggagcaagccgtcgtggacgctcccatgaacatgtaggctcttttcgtgacgacgattattacctcaacttcagtgatgtatccggatggagtgtattactggtagctgatggcgcggggagcgctaaatattcccgggaaggctcccgtatcgtttctgaaactgttggtaactatctcttcaaccagttcaagactgaaaaaggtcttgagatcaaaaacagggtccttcgctggaacagtgaggatcagcgagcagtatgggagtttatgaaccaccacttccgacaggcagcggtactggccgtaaacaatatcagcagtgccgcaattttggctgaagataaagtaaagtcattctcaacgactttactcgcaaccgtcacttttcgcgacggtgccgatctgtttgccgcgtctttctggttaggtgacggtgcgatagctgcatatggacctgctggcaaagtcagagtgcttgggactccggatagcggagagtatgcaggtcagacgcgttttctggatgccgatgccgtcagtgatgccggattcagtaaacgtatcagtatcggtaagtggaacgacatatcgcatctggttctgatgactgatggtgtttccgatccctggtttgaaacggataacgggcttcagaatccacaaaaatgggacaggctgatggccgagctctctcccctactcacagaccctgaacatgcctcggcacaactggtggagtggcttaactttttctctccgggaaatcacgatgatcgcacaatcattgtgctctggtga

SEQ ID NO: 214421 - DNA, 1041 bp, Klebsiella pneumoniae
gtgagacgacttcccgttttttttgttctggactgttctgagtccatgattggtgaaaacctgaaaaggatgaatgatggcttgcagaagattgtgagcgatctgcgtaaggaccctcatgctctggagactgtctgggtgtcagtaattgcctttgccggtattgccagaacgattgtcccgttacatgacattgtgtctttttatccccctcgcctgcctgtcggtggaggaactaacctcgcgactgccttacgggaactgacaacacaaatagattctcaggtccgaaaaacgacgctggaagaaaaaggtgactggaagccagttgtctacttacttactgacggccgaccgacagatgacatttcagctgaggttaagcgctggaacgaattttacgcaaaaaaagtgaatatgattgctgtggggatcggaccatcagttgatctcagtgtactcaggcaactgactgaaaacgtcttatcgtttaccgaaaatcaggaaggcgatttttcgcggtttatccagtggatcacagcttcagtcacagctcacagtcgtagtgttggcgaggattctcagccgcccctgaaacaaactgactatatcgtcaaacttgccaaagatgacacagcccgtgcatacgatgaaaactgtgtggtattaaccgggcgttgcagtaaaacccgtcgaccctatctgattaagtatgagcgtccgccagccagggtatcgggcctcgctttcgatctaaaccttaacagcttcaacattgctggttgttatcctgtggatgaagattacttctcatggacggatatgtccgtagccggggcgcagataaacaccagtgaactccatggcgtaccagggtgcccacactgcggaaacagtagtgcttttgcgatgtgtacctgcggaaaacttctctgtattgatgggcctgatgatgtgaactgcccatggtgtgggaaaggtttgtcctttcagagtgagggtggaaattcagattttaacgttagcagaggacgcggctaa

SEQ ID NO: 214422 - DNA, 639 bp, Klebsiella pneumoniae
atgcgaagactacccgtatatctgctcatcgatacttccggttcaatgagaggagaatcgatacattcagttaatgtgggtgtgcaggctatgctgagtgccctgagacaggacccttatgcgcttgaaagcgtccatatctcaataattacatacgataatgaagcccgggagtatgttcccctcactgccctggctgactttcagttttctgatatagaagtaccaagtgcgggcggcacctttaccggcgcggcgcttgaatgtctgatccagtgtgtcgaccgggatattcgccgctctgatggtgaacagaaaggcgactggagaccgctggtgtttctgatgacagatggtactccgtcagatgcctgggcttatggggaagctgtgaaagaggttcagcggcgttcgtttggctccattatagcctgtgctgttggccctaaagcgggacacgaacatctgaaactactgactgacaaagttgtggctcttgaaacactggattcgaccgcattttcaggctttttcaaatgggtcagtgccagcgtggcttcaggaagctccagtgccggagtcactactgattcggacacacttccaccaccaccacccgaaatccagcttgttctgtaa

SEQ ID NO: 214423 - DNA, 642 bp, Klebsiella pneumoniae
atgactgtcagcttacggaaagggcaaggcgtcagcctgcgtaaaaatgagttcgatctttcctcagtcacgataggtcttggctgggacatcaatgaagagaaaaaagggttcctgggcggaatttttggcaaaaaagaggaagagtatgacctcgatgttattgcctttctctgcaacgcagccggtaaagtgactgaccttggcaatgttgaaaatggtaagccgacactggttaacggcgatatcgtcttcttcaacagtcttcgccataaatcagggcagatctggttgaccggcgataaccggacaggtgccggtgacggagacgatgagcaaattatcgtaaaactaaacagcatcgatccgaagtacgaaaaaattgtctttattgttcagatctacaacggcgaaaaattacagcagcactttggaaaagtgcaaaatgcatttatccgggcggtagacggaaaaaatgtggaaatggcacgctttgacctctccggcggtgtagcctttaatggtcagcgatcgatggtctttgctgagcttgtccgggaatccagtggctggaaactgaatgcgataggcgagccttccacctccgattcgttcgtaagccatctgaggaactatatctaa

SEQ ID NO: 214424 - DNA, 639 bp, Klebsiella pneumoniae
atgagaagacttcccgtctatctgcttctcgatacatcaggttcaatgcacggagagcctatagaggcagttaaaaatggtgtccagacactactgaccaccctgaagcaggatccttatgcactggaaactgcatatgtctctgtcattacttttgactctactgctcgtcaggccgtacctcttacagatctcctcagtttcaatctcccctctttttcggcaagcggaactaccgctctgggcgaagccttatccctgactgcaaaccgaattgatgcagaagttcagaaaacgacagcggagacaaaaggcgactggcgtccactcgttttcctgatgacggatggtggccctactgatgactggcgtaaaggacttaatgaattcaaagcagccaaaaaaggggtagttgtcgcatgtgctgccgggcatgatgccgatacggatgtgcttaaggagatcaccgaaattgttctccagctggacactgccgacagctcttccatcaaagcttttttcaaatgggtgtctgccagtgtttccgtaggtagccagaaagtcgatgccggtaaaaaagaagttatcggtcttgatgatttgcctccaccgccgccagaagtaaacgtggttttataa

SEQ ID NO: 214425 - DNA, 459 bp, Klebsiella pneumoniae
atgcaattaaacaccagacaggaaagagtttacaccctggctaacatacttggctcagggaagcctgtatcggcgcagtccatcaccgcgacgctggcctgttctgagccgacactaagccgggcgctcaaagagttgagggaaacttacgctgctgaaattaaatacagtaaggctggccactcctatcagatggtaaactccggattactggataagaaaacactaaagagaatgagtgaggcgctggaccttaattctgatttaaaaacacatgaccagggggcacgggtagtactggataaggatataaaaacttccgtttccctgtcgataagacgccgtgttcttcgcaaaattgacaaactggctgcgctaagcggtacatcaagaagcgaggcagtagaaaaattagtagagttaaaaattgatgaaattatcaacgaaatgaagaaatag

SEQ ID NO: 214426 - DNA, 1224 bp, Klebsiella pneumoniae
atgggattcagatttcgtaaatcgatcagcattatcccgggggtcagggttaacctgagtaacggggcccccagcctgagtattggcccccgtggagcttcgctgtcagtgggaaagaatggaacgtttgccaacctgggccttcccggaacgggactgagttaccgcacccggattgacagaacagcacgggaaagagtgaataccaggcatcaggcagatcccggtctgaggtctgaactggagctggtggtggaaaaactgatgtccaccgtaacagcgataaccaatatccatgaactctccccttccccaaagggagggaatacctgggccatgctcgagacacagtacctggcgctccgtcagggcagtttcactcttcctgcgccggtacgaccaaacaaacctgaatatataccacttccaccagaacctgatgagcatgccggtcgcggcttccttgggggatggtttgaatctgatgcagcccgacaggagcgacagaacgaaaatcttcggcggtggcagacgtccgtcgctgatattgaacgtgaaaatgcgttgctgaaacagcgttatgagaaacagcgtatagcgtgggctgagcagtacgcagaatggcagcatcagtaccaggagcatgaaaaaaattacacgcagtctgtaggcttagcgaaagagcaattccgctctgacgcccgcttctttgaacattgtcttgaggaagttttctcgcaaacagaatggccgcgagaaacgctggtgacgtttgaggtacggccagaagaatcaacagtctggcttgatgttgatttacctgagattgaggatatgcctgataaagtgtatagcgtgaatgcccggggaactgatatcaatgaaaaagccatgacacagaaagcggtccgggaaagttacgctaaacacgttcacggatgcctgctgagattagcagcaatcgtttttcagacgcttccgtttgaacaggccgtcatttcaggcttcactcagcgggtgagtaaacgcactggatatcttgaagatgagtacattatttcctggcgggtacgccgctctgaaatcgagctaatcaacttcgggaatctgcgtggcgttgaccctattgaagcattgggtgatcgaggtctgatcaggaaaatgagttcaacttacatttttcagcctatagaaccactgacccagatggcaggtaccgactga

SEQ ID NO: 214427 - DNA, 957 bp, Klebsiella pneumoniae
atgaaaaaacaacccaacccatgggaactcggtgccacgctgtatatgcctgccacacgcaaggatatcgctgaggtcgttctggaagggaaaataccggggctacgctctctggttgtctgcctggaagatgcggtcagcgagcatgacatccctcttgcgattcagaatctttcactgtttttgaagcatttgagacacgcaagagccgtcaacgacgatgagaagtacccactggtatttatccgcccacgtcacgctgatatggggagatggttaacgactaatttggacctgagtgcagttgatggttttgtactgcccaaattcaccctttccacgctcccggtttggtgggacatcatggcaggaacatcattgatgatgatgccaacgcttgaaaccgaagaagtctatgatgttattaaaatgcaggcgctggcaaatgaactttcgagtcatgactgccgtgaccgcataatcgctttgcggatcggcggaaacgatctcatgaacgtcgtgtctctgcgacggccacgggatctgaccctttatgacactcctatgggttatgtcataaaaatgcttgtgtcagtattcgctcctcgtgattttgcgcttaccgcaccagtatgcgaacacatcgacgatcacggcgttctgggacgagaactctctatggatatcgcccatgggctggtgggtaaaacggccattcatcctgatcagattagtgtgatagaggaggcgcttaaagtgtctcctggtgagcattcagatgcgttacgaattctgaattccacccaggcagtcttcaaatctcagggagcgatgtgtgaaccggccacccatcgccggtgggctcaggggatcctgggacggggacaggtatacggtctgactacggggcaaaatccggaaggaatcaggcttattccagtttctaagcagcactaa

SEQ ID NO: 214428 - DNA, 1080 bp, Klebsiella pneumoniae
atgtcgcattttgccccgttttctggttcctataaaccggacgatgttcactttttgctgaaacccattgtcatggagatgacaccggttgacctgaaggaagaactgattcagtcaggaaaaatgcattattccgacatgttaagccaggaaccagagcctacccgctggcacctggatcttttcacccgtgcgcttgactcgggagctgcacgtctggcacgggaggtatcttatcttgctcgtgaactggcccgtcgtgctggcgatgaacctattgtcctggtaagcctggtcagagcaggtgttccactgggggtcatgctgcatcaggctctgcgtgcgatgggaaaacagtctttccactacgggatcagcattatccgcgacaggggtattgatgctgcggcgcttgattttatcgaatcacgccatggtactggtggcatagtgtttgtcgacggctggacgggaaaaggagctattaccggcgaattatcccgcacactgaaggaccgtcccggttatccggagcagcctcgactggttgtgctggctgacccctgcggatgtgcctggcttgctgccagtgacgatgactggcttatcccgttcggtatcatgggcgcgcctgtctcgggtctgatttcgcgctctgtctgggccgaagaaggcctgcatggctgtgtggtttgcgaacaccttcagtcttttgaatgcagccagatgctggtggatacggtagcacatttccgtgaacagcttgacggtaaaccccttcccgcttctggctgggacgcagggaaaaatgctgcacgctggcagctgagcagaaaagttatccagagccttgctgagcgttatgaggtggacagcattaaccgcattaagccgggtatagctgaagcgacgcgggcggttctgcgtcgtgtacctgatcatgtttttgttcgccagattgatgacccggatgtttctcttctggttgggctggcaaaagagaaaggtatccaggtgacggaagccggggatacgctcggtcagtatcgtgcggttaccattatcaaaaaggtacgctga

SEQ ID NO: 214429 - DNA, 774 bp, Klebsiella pneumoniae
atgaataagcccgtcgtcttcagcgacctcgatgacaccctgttccagacccgccgaaaaatggttgatgaacttgcccttgaaccgttccgcaccggcgcactggatcgcagcctcacgcctcgcagctttatgaccgaagagcaggccatgctggtggactggttgctggaacatgcggacctcattccggtgacggccagaggtacggaagaaatcagtcgggtacagatccccttccgttcctgggccgtgaccactcatggcgcggtgatccttcgtccagatggtacgccagacagcgactggaaagcccatatgctggagtgcctgtcctcctacgccgaccgcttaacatcaatgcaacatatcatcaccgagctcatggatgcgcgaggcattaatgcctgggcacgcctcaactacgaatatgagggtactccggtgtatctggtcatgaagcatcgcgacagcacgaagcttgatgaactgaacgctgtcggggatgagattgagcgcgttttttcgaccgaagggttttacatccaccgtaacagcaacaacattgcctggttaccctgcccggtagaaaaagggctggccgtttcatggttgctggagaaactgcgtcaggagcgtggggttttcccggtgatggggctgggtgacagcctgagcgaccatcggttcatgaaactctgcagctggtttggtcttccacgccagagtcagtttgccgaggccatatcacagcgtatttttggagagcaataa

SEQ ID NO: 214430 - DNA, 1143 bp, Klebsiella pneumoniae
atgtcagcaattgatggtaatttcggttatcaaaagacattatcctgtgggcgaattgaggtaagtagcgaggaaaccgattatcctcttactgatctctttgatatcgccgaacggcggaatccaaaacgcgcatttctgtttgtcagtaaagtgctgggtcgacatattcctgtctctcctctggtcatgcgcaatgtttatacacagctggcggagaagtttcccgggactctggacgggccggtggtatttatcgggatggctgagacggctgtcggcctcggggcgggagtgtttgatgaggtgcgtaagcatcaccctgactgtgtttatctgacatcaacccgccatccggtcgatgctgaactgttgtgcgagtttaaagaagagcacagccatgccacagaccacctgatctactatccagtttctgcggccatgcggcaaacagtagcggaggcacaaacattagtgctcgtggatgatgaagccacgacggggaaaacgttcctcaatcttctcgcctcattacgtgcatcgggtgcactccggaaggtacgacgggttattgctgtcacgctgactgactggagcggagaagcactcagtcagaacagccccctgcccctacatacagtatcgctcatctccggcaactggcgctggacacccgaaccggatgccccggttcctgtcatgccccaggtaaatgtgacctccagaggtaacgtcccgatcacaggcaaacaatcctgggggcgactcgggatgcagataccggcgagtgacctgggtctccaggttcaggtttcgcacggtgaaaacattctggtactgggcaccggtgaatttgtctgggagccgttcctgctggctgagcgacttgaagcggcaggtgctcaggtcgtgttcagttcgacgacccgctcaccgatttccactggttatgctatccagtccgccattgctttcagcgataactacggactgggtattccaaattatgtctataacgttgctcatcagcagtttgaccggatcctgatttgttgcgaaacgccagcttccagcgtggacccccggctgcttgaggcgctttccgctgtcgctcccaccgtagaggtgattacctatgaataa

SEQ ID NO: 214431 - DNA, 1059 bp, Klebsiella pneumoniae
atgaaaaagaaaatttggtttatggaagggctatcttcccagcgagacattatccttggagtgaaatcatttgcggaaaaggaaaatcaggatattgaaatcttttcttctcatcgcaacgagaggaaagagatcttgtctgtttccgatttttcaatgatcgaacctaacaacgaagaagaacgtctttcttttattcattccattactgacgctcatggtattaatgcgatacatactggtcgcaactgtaaatggtttgaaagccaccgggaaaacattcaacgctctggtgtccacctgactaccgggtcaacgggtactcactggtttgaattagccgatgaaaaagttactttttccgagtttatggaaaaaaatggacttccggttgtcccgtcggttcgggtaaaaaatgtagacgagcttcgtactctgctgagtcatccccctttcccttctgattgcctctgcattaaacctgttacaggcatttatggcatgggattctggcgttttgatgacaatgtttccccggtagcttttctcaacaaccctgataaccgtgttatccacccatcacagtatctggctgctcatgcccggatggactgctttactccacaagtactgatgccctatttacccggaccagaatactctgtggatatggtggtaagtcaaggcacggtcctggccgctatcgggcggcgtaaagaaggtgtgcttcagtatctggaaaatgaaggggaagcgattgaacttgccatcaactgcgcccgcctaatgaacgcagacggcatggtcaatgtacagactcgccataatgccgaaggcaaaccactattgctggaaattaacatgcggccatcaggtggtatcggttatacgcagcacagtggcgtgaatcttccgggtctgtatgccttccatacacttgggctgatggatgatgatcaggtcaggcagtcagcgaaaactgatttttcacctgcagtcgtccgctctgtcaccgatgtcattctctatccggcatcattgaccaacagaattgattaa

SEQ ID NO: 214432 - DNA, 585 bp, Klebsiella pneumoniae
atggtttctttaagtaaaaaccagacagtatcactcagcaaacaatccactgctctcagccagcttcagttcggactgggttgggatcctgttaagaaaaagggattatttggcagcatttttggtggcaatgattccatagacctggatgcaggttgcgttcttctggatgccgcaggtaataaaattgacaccatctggtttcgtaaactgaaatccagctgtgggtctgtcgttcactccggcgataacctgacgggtgagggggatggagatgatgaaatcattcacgtcaacctcttaaaattgccggcaaacgttgaatacctcgcttttactgtgaacagtttccgtggacagtccttcaacgacgtggataacgcattctgccgcgtcgtggatcagaccaataaagaactggcccgctatcagctgacagaacaaggcccacataccggtatcattatcgcttccctgaggcgcaacaacggccactgggactttaccgcccacggtaaagcaagcggtggccgcacaatcgacgatatgcagcgcgatatcatcagtacggtggtaaaagcatga

SEQ ID NO: 214433 - DNA, 1152 bp, Klebsiella pneumoniae
atgaatctgacaccggggggcaatgcccccgtacctgctcaggaactccgcgttagagtcattgctggtggtcctgttgatgcctcggcgtttcgattattcgctgacggaaaagttcggggtgacagcgatatggtcttttacgggcaaccccgtaatgaagatggttccgttagtttcagtactgaagggaccaataacttttttaccgttgatctgtcccgcctcaagcccgacgtacagaaagtcgcgttcacagttacctgtgacggcagccatacagtttcttccctgaatcatctgtccatacaaattgaaagtggcaatacctcattggtcagtggtcaggtagacctgaacggccgtcaggaagctgctctgatcctcggtgaagtctatcgccggaatggtgactggaaatttcgttttatcgcccagggcttcaatggcggactgaaacctctcgctgaatactatggcgtcaacgtcgcggatgaacctgttccagtcactccgccaccagcgcctccggctccgcctaaagttagcctgagtaaagtttctctgaccaaagaaaagcctgccatcagccttgccaaaaaagacaattttggtgaaatccgcatcaacctgaactggcatcgtggctcgggttcagggggcttgctgggcggtatgtttagttcgaacaaagcgattgacctggatcttggcgcattcgttgaactcgcagatggctataagtcagttgttcaggcactcggtaatgcttttggtaactatcactctgagccatatgttcaacttcagggtgatgatcgtaccggcgaggctctggatggggaatggctacacattaatggccgcgaatggaaagaaatccgccaggtactgatttatgcctttatctatcagggcgtgcccagctgggacaaaaccgatggcgtggtgacattacatgttcctgagcaaccaccgattgaatcgcgtctgactgaaggtgataacaaacgcacgctgtgtgcgattgcccgtctggtcaacgagaacggttccattcgtgtggaacgtattaaccagtacttcagaggccaggaggaaatggaccgcgcttttggctgggggtttcgctggtccagaggttccaaataa

SEQ ID NO: 214434 - DNA, 456 bp, Klebsiella pneumoniae
atgagttttttcgacaaagtaaaaggggctttgacctcgggtcgcgaggaattgacccgccaggtaggccgttacaaaaacaagaaatttatgcagggtacagtcgcggtatgcgcccgtatcgctgttgccagtgacggtgttagctccgaagaaaaacagaagatgattggatttctgcgatcctcagaagagctgaaagtcttcgatacagcagaagttatcgaattttttaacaagctggtgaccagtttcgactttgatctggaaatcggaaaaggcgaaacgatgaaatatatcctcgccctgaaagaccagccagaggcagctcaactggctcttcgtgtcggtattgctgtcgctaaaagtgatggcaacttcgatgatgatgagaagagtgctgtccgtgaaattgcccgttcgctgggtttcgacccggcagaatttggcctctga

SEQ ID NO: 214435 - DNA, 1041 bp, Klebsiella pneumoniae
atggtttccactcacatcggttttccggctgagacagtgacggtctttgttgctctgtcggtcggcgccatctttattgacctgttcatgcaccgacatgacaagccaatttccctcaaaagcgcagccttatggtccgttttctgggttgttgtagcgatggcatttgccggtttcctgtatgtgcatcacggtgccgaggttgccagcctgtttgtcacgggttatgcccttgagaaggtgctgtcagttgataacctgtttgtcatgatggcgattttctcatggttctcagttccggaccgttaccgtcaccgggttctgtactggggtatcattggcgctatcgtcttccgggggattttcgttgcgatcggtaccggtctgcttagccttggcccttatgttgagctgatctttgccgttgttgttgcctggactgcggtcatgatgctcaaaggcggtggggatgatgacgaaattgaggattattctcagcaccttgcttatcgtctggttaaacgtttcttcccgatttggccgaaactgtccggacatgcattcctgctgacccaaaaagaagtggacgccgaactggctaagccagaaaacaaagacgtatctgtagggcgactgaaaaaggcagcgctttacgccaccccattgatgttatgtgtggctgtagtggaactctctgacgtaatgtttgccttcgactctgtcccggcaattattgcagtcagtcgtgaacctctgattgtctatagcgccatgatgttcgcaatactgggcctgcgtactctgtattttgtactggaagccctgaaacagtatctgtcccagctggagaaagctgttatcgtcctgctgttcttcattgcgtttaagctgggtctgaacgctaccgatcacatctggcaccatggttacagtctgtctgcgaccaccagcctgtatgtcgtactgggtgtactggctcttggtattctggccagtgtcatctttccggaaaagccggaagctgaaaataaagaaagctga

SEQ ID NO: 214436 - DNA, 579 bp, Klebsiella pneumoniae
atgagcgtttcactatctaaaggcggcaacgtttccctgagcaaaaccgcgccaagcatgaaaaatgtcctggttggccttggctgggatgcacgctctacggacggtcaggactttgacctcgatgcttccgcatttctgctggcagccaatggcaaggttcgtggcgatgcagattttattttctataacaacctgaaatctgctgatggttccgttactcataccggtgataaccgtaccggtgaaggtgatggcgacgatgaatccctcaaaatcaaactggacgcggtacctggggatgtcgacaaaattattttcgttgtcactatccatgatgctcaggctcgtcgccagagcttcggtcaggtttccggcgcatttatccgtctggtgaatgatgacaatcagactgaagttgctcgctacgatctgacagaagacgcttctactgaaacagccatgctgtttggggagctgtatcgtcacaacggagaatggaaattccgtgcggttggccagggttatgctggtggactggcttccgtgtgcgctcagtacggcatcaacgcgtcctga

SEQ ID NO: 214437 - DNA, 576 bp, Klebsiella pneumoniae
atggctgtttctctcgttaaaggcggtaatgtttctctgactaaagaagccccgagcatgaatgttgctctggttggcctgggctgggatgcacgggttactgatggtcaggcatttgatctggatgcatcagtattccttgttggcgaaaacggtaaagtgctgtccgattcgcatttcgtattttataacaacaccaccagcccggatggcgcagtacagcatcagggtgacaaccgtaccggtgaaggcgacggtgacgatgagcaggtcaaaattgatctgacaaaagtggccgctgacgttaagaaactcgtattcgcagtcaccattcatgaagcagacagccgtaagcaaaatttcggcatggtcagtaacagctttatgcgagtggtgaacaacgataatggctccgagattgcacgctttgacctgtcagaagatgcctctactgaaaccgcaatgattttcggtgaactgtatcgccatggcgcggaatggaagtttaaggctgtaggacagggctttgctggtggcctggctgcgctggcaacccagcacggcatcaacatctga

SEQ ID NO: 214438 - DNA, 1242 bp, Klebsiella pneumoniae
atgcaattacaatcaggacagaacattccgcttcacacagctacactgactctccggcttgattatccccccagtcctggatttcacagtacccctgagacttgcctgtttatgctgaatgctgagggaaaagtgacaggcgatgccgattttatcttttacaacaatctcagtgctgccggtggcagtgtgaaactcaaccccggtcaccaacacgcagtcgttcattttgcgcttgaccagatcccggatacgattcagaagattgcaatcactatggtgatagatggcagtgatacgataagcggcctcgcgcaactgaaactttctgctgaaagtcaggccactttttttgtcgatctcaatggccgcacagaaaaggcagtaattatgggggaagtttaccgataccagggcaactggaagctcagggtgcttgggcagggatttaatggcgggcttgagcctctggcagtcagctatggtgtggacgtggagcctgcagcagaagttgtaccgcaaccagcccggatcagccttgaaaagaaactcgaaggtaaagcgcctgcgcttatcagcctggctaagaaagccagtatttcactggcaaaacacaaactggataccgttgaagcacgagtcgcttttgttctcgatgcctcaggctctatgaccggccagtttaaaaaaggacatgtacaggccgttcttgaccgtatagctgtcctgtctgtccagttcgacgatgacggcacgatggatgtatggggctttgctgagcgtcacaagaaatatcctgacgtcacactggacaatcttgacggatacattgctgccattcagaacacgggtaaacgatcggcctgggaaatccttcccggccttggcgggacgaacaatgagcccccagtcatgaatgaggttatcgattatttcaaggacagcaccttacccgtttttgtcgtgtgcattacagatggcgggatcagcaaaacacgagaaattaaagaggccatccgccgctcagccaactatcctgtcttctggaagttcgtgggactgggcggatcaaattatgggattctggagaggctggacacctttagcgaccgtcgcgtagacaacagcaacttttttgcgatcgataattttgcccacataaaggacgaagagttgtatgaaaaacttctcgaagagttcaaagactggcttggactggcaaaaaaggaaggcattatctga

SEQ ID NO: 214439 - DNA, 648 bp, Klebsiella pneumoniae
atgaacgtcattcagccccgcatgctctctgtatttgattttgacggtacgttaacgcggcatgatagctttatcccttttctgcggtttgcctttggcaatcgggcgttttcgcgacgtatcgtcagcatggctctacccacgttacgctgtatgggtaagcagatgacgcgtgatgagctaaaagaaacgctcattacaacttttcttactggtgtagaggaaaagtgggtgtcttctaaagcagaggaattctgtcagctctactggcatcgcctcatgcgcccggcaggtttgattgctgtggcgaatgaagtcacttccggcgcgatcgtcaccttatgttctgcgtcgccggaaatagtactcagaccctttgccgataaacttaggatcaaactgattggtacacaattagagacaaaagacggcattttgaccggcagaatcagtggtcataattgcaggtgctcacagaaaattatccggcttgaaaaagaatatggacctctgactgactatcatcttcgggcatggggtgatacgcggggtgattatgaactcctttccgcagcgactgagcctcactggcgtcacttccatcaaggtttccgtcgtaagcttccgtcgaagctaataattagataa

SEQ ID NO: 214440 - DNA, 390 bp, Klebsiella pneumoniae
atgacaaagcaaatattacccaatgaactggctgaaatcgtcaccggtcttcttattaaacctgaactgctgggtgagcttgactcccgtgaggcgcaccaggccttcatgctggatataggacgggttattgctgatcactgtggtggactggtcaacggtattacggatggtgacgtcgcaaaaccctatctttcagacattgagtgtacccccattctccacatcgaacctgatgaccgcctgccttcgactgaacgtaacgtatggtcaaattatcatgttgaagcttgggcagacgagggacacgaaactatcctcgacaaggcgatccgagagtctgacagagctgccttacaaactctccttattgtggccgcacaaaaataa

SEQ ID NO: 214441 - DNA, 759 bp, Klebsiella pneumoniae
atggctgactattattcagaatgcgcttgtcttattgaagcaaatcctactcaaactgctatattacttgaagcaatgaatgaattgtttgaacctgacgataattttattcaaaaactcatttcatgtgataacacaaacgacctttcagaaatggagattattgtacgtcattgtgttctaaaccacccaggcagaactgttgctaatattcctgaagacttggactggcattttgacggggataaatgccctgaaggttttcttattaacagtgatctcggagatttcaattctgaacatgctgcgctgtttgctcaggcggcacttattgcatttgacagaaatgaattgatagagttcaaaattgcttttacatgcagtaactcaaaaagacctgacgggtttggaggcgctgcttgtgtcgtgagcaaggattttatccgatggacaggtctacacaattttcttgaggctgaacgaacagctttcgccgagaagttgaaatacttcttttgtgaatttacagaggtcgtcggtgaatttgaatatccagtatcgtttatattgcgttgccctgacatcgttaatgcagcgcatagatatgatgagatacagcttaactatcgcgatggtggggaaatagatgccgaaggtggaatacaatttagttctggctctgccattaaaaaatccagtatgaaaccaatcactccggatgagttccgagtgatgaaatcgtacctgaacgtcatgtga

SEQ ID NO: 214442 - DNA, 732 bp, Klebsiella pneumoniae
atgacattaacctcgcttgtcccgattaacgctttccaacgatgtgcaatggcttctattgcttctgtagagaatcgcagatctttgggacggaaaacaggagagctggcctacgtcaaagccttttttaaagagcttacaggtaaatctcaaattacctcgaatgacttgagaaaagtcgatgcgagttacgatccatttgttcgtggagaagcaacaaaatttgagtaccttcgtgctatcgatattctgattgaatctcgtggagagcgttttattctacccctttcaaggtctctggcagtctccatgtttccagggttacagaaccgggatttacagcgacgcgaacaccgtgaccggattcatgaacaaagggtggagcgtctgacaatcaaagagtctaacttgttgaattataagctggaacataacgtatcaaaatccagactttacctgtctttctgtcttcctggtcaacataaactctggttagaggagtggcgaaacgatatccatggacaaggacttacaacgactgatatttacctgctgattaacgactggtggtcatcattctggatcacttcatacagaaaggactatatctggtgttacacactggctgatttgctggacgagattgattatgttcttagcactattacaattatggagtttaacgtctgtttttcggcactaccattatcccttatatataaagctagatag

SEQ ID NO: 214443 - DNA, 606 bp, Klebsiella pneumoniae
atgactatcctaaaagtacattattcaccaactgacggaatccctttgaacaccctttatttgaaggaaacttcaaccactgagcgttcaggttcagtgttgggtggcggcatatcgggagactctgttattctgggaggcggaggttatgccggttcggaaatacagaaaacgactcgctctactgtctttgcaccacctgatgaagttactgctgagcctgacaactcaaaaatgttaacccggatctcgttcgtaattgttgggatgattgtacttgtatttattactttaataacaaatggcattgttgatagctttgccgtaaatttatctcaaactaccgcctcgttactggaaaatgcccccttctttattatcgcactatctgtattttgttctttatttgtaataggattgacagaacatgattacactcctgtattagaagagcacaaacgaaatgaagagcgtttgtctgtataccacagactacggtatgttgaagctgataatgttgtttttgaccctaaatcgatgaacggatgttacgcagagagaaagttcattactatacttgttgaaagctgtatctctaagaaataa

SEQ ID NO: 214444 - DNA, 1272 bp, Klebsiella pneumoniae
atgtcgactgttaatgatgttattatatcttttggaaatgacagtaaaaggtattcaagagacttccagacaaaagacgaatttaaaaagagctggtacgcagttttgtcccgggcgcatgcttctgtagaagctaaggttagctgctcctgtaaaggtaaaggacagaaatcacttgccgtaaaatatcactcaggcggtgatacttatttcctggcacggtacccaaatacgggtagtcaacattctcccgactgtattttctttacgctggataaagacaattcagggttaaaatgctatacacaaggtgtcgtcaaagaccttaaagatggtggttacggcataaggctagccgtggcattagcctcatctgactcggaatctacctcgatcgtaccggcggataacaggaatacacctggtggcgtctcacagaatagcatgtcattgctgggtcttttgcagttcttgtgggatgatagcggtctgaatcgttggtatccgaaaatggccgggaaacgtaatcctggtaaggtattcaaccttatatcccactcgacagaaaaaattaaagtcgcatcacatccgctgtccatgcatttaattgtaggtgcatacccttcaacacctcaggtcatgaaaaatataaaaatgtcatcagatgctctgaagaaaaaggagcgtttgatttgtctcaatgttctatcgaaatataatcctgaaaaacattcgaatacatcaaaacgacttcctgtcaagttcttttctggtgttccgatcgtgctgatgaatactgataactgggcatctctggagaagagattcagctctgaaatagcaaattggcgttcaggaggcaacgtcatctgtattgctataggcgagctgggtaaatttaaggggaatgatacatactatcttaaaacacttcagattgctttgatgaatgttgatgataactggatcccggcagactcgagctatgaactgaccatgctaaattatcttcataagcatgagcgatcatttataaaacccctgagatatgatgcttctaataatgatgtatttccggatttctgcctgacggatattgggggtactgaactttttcctatagaggtatttggtatggatactgcttcatatttggcgcgtaaggtgatcaaagaaagttactataatgaacgatatggaaaggatgggtgggcttcatgggttgcaccggctggaccccttccccatcttcccgataaggccagcagttaa

SEQ ID NO: 214445 - DNA, 198 bp, Klebsiella pneumoniae; identical to SEQ ID NO: 196244

SEQ ID NO: 214446 - DNA, 399 bp, Klebsiella pneumoniae
atgagcgagacattacaggttctcaataacatccgtacacttcgcgcccaggcacgagagctgccattagaagtgctcgaagaagtattagaaaagttcactgtagtagtcactgaacgcagtgaagaagaaaaggcggctgaagcagctaatcgagagcgtttagaaaaactcgctcagtaccgtgaaatgatgatcgctgatggtatagatccgaatgaactgatggacgcggccgttaacattaaagtacgaaaaaagcgggaacctcgtccggcgaaatatgcttacatagacgaagctggtgagcaaaaaacttggacaggtcagggtcgtaccccggcaccaattaaagctcagctggatgcaggaaaaactctcgaagatttcctgatctaa

SEQ ID NO: 214447 - DNA, 276 bp, Klebsiella pneumoniae
atgaaagttaaagagttgatagccatactgaacgaaagagaccctgaggcaattgttctgatttccggctatgaaacgataggcggcacggaagtcgcagaagctgatttgctcgttgaaatgcagtcaatatgcttagaaaaggctgataatcttactggaaaccgtaaagttgtttcttccggaggtgaagattcagtttggttaggctggaaagatgattaccgtacaaagatgtttttagaagatgcccaaatttctgataaagatgaatga

SEQ ID NO: 214448 - DNA, 555 bp, Klebsiella pneumoniae; identical to SEQ ID NO: 138113

SEQ ID NO: 214449 - DNA, 258 bp, Klebsiella pneumoniae; identical to SEQ ID NO: 138114

SEQ ID NO: 214450 - DNA, 819 bp, Klebsiella pneumoniae; identical to SEQ ID NO: 138115

SEQ ID NO: 214451 - DNA, 573 bp, Klebsiella pneumoniae
gtgaacaataacctgccctcagaagccgtcgcccatgccgtggcggtcctgaaaaatgaacatgtcatcgcctatcccaccgaagccgtgtttggcgtcggctgcgaccctgacagcgaaacggccgttatgcgcctgctggagctgaagcagcgtcctgttgagaaaggattgatccttatcgccgccagctttgagcaactgaagccctatattgatgattcacggttaagtgactcacagcgggaagccatcttctcttgctggccgggaccggtgacgtttgtattcccggcgcgtcctgaaacgccgcgctggctgactggacgttttgattcactggccgtacgcgtgactaaccatccgctggtaatcgaattgtgcgaagcctacggaaaaccactggtttcgaccagcgccaatctcaccgggcaaccaccgtgccgtactaccgcagaggtccatgctcagtttggcgacagcttcccggtggtggatggcgccacgggcggccggcaaaacccatctgaaatccgtgatgccctgacgggtgaactgttccgccaggggtga

SEQ ID NO: 214452 - DNA, 543 bp, Klebsiella pneumoniae
atgaccaaatcagcactgttttcggtgcgtaaaaatgagccctgcccgcagtgcggggccgaactggtgatccgttccgggaaacatggcccgtttctcggctgttcgcattatccggactgtgactatattcgtcccctgaaaagccaggcggacgggcatatcgttaaggtgctggaggggcaagagtgcccatcgtgcggtgcggttatggtgttacgccaggggcgttttgggatgttcattggctgtagccgctatccggaatgtgaacataccgagctgattgataaacccgatgagacggctatcgcttgcccgcagtgcggacaaggccatctggtccagcgtcgttcccgtttcggtaaaacctttcactcctgcgatcgctatcctgattgccagttcgttatcaattttaaaccggtggcgggcgaatgccctgaatgccattacccgctgttaatagaaaagaagacggcgcaggggctcagacgcttctgtgccagtaaacaatgtggaaagccgatcccggcggaataa

SEQ ID NO: 214453 - DNA, 474 bp, Klebsiella pneumoniae
atgttcgacgtactcatgtatttgtttgaaacttacatccatagcgaagcagaaatgcgcgtggatcaggacaaactgacgcgggatcttaccgatgcgggttttgagcgggaagacatctataacgcgttaatgtggctcgagaaactggctgattatcaggagggtctcgttgaacccatgcagctcgcttccgacccgctctctcttcgggtatataccgaagaggagtgccagcgtctggatgccagttgccgggggtttttactcttcctcgagcagattcaggtgttgaacctcgaaacgcgagaaatggtgatagagcgcgtactggcgctggatacggcagaatttgagctggaagacctgaaatgggtcatcctgatggtactgttcaatatcccgggctgtgaaaacgcctatcagcaaatggaagaattactcttcgaagtaaatgaaggtatgctgcattaa

SEQ ID NO: 214454 - DNA, 1125 bp, Klebsiella pneumoniae
atgacgcccgacgagatttggctgcggctgatgaaggtcagtagcttgtatggcgacaggatggtagagatcgctcagcgcttatgcgcagccgccagcgttgatcgtgaagcgctgcatgccgtcgggatgaccgcggcgcaggcaaagttatttttccggcttgacgagcatgagcttgacgagacgcggcgctggctgggacaaccggatcatcatctgttacggggtgacgatccgcgctatccattgcggttaaaggctatcgctgattatcccggcgcgttgctggtcagcggcggcctcgccctgcttcacagcgcgcagcttgccgttattggcagtcgctcgcactcctggtatggcgcccgctgggggaaactgttcagcgaaacgctggcgcagaaagggattaccatcaccagtgggctggcgttaggcattgacggggtcgcgcaccgcggcgcgctggcggcggagggtaaaactatcgcggtactgggcaatgggctgagtcaggtttatccgcggcgccatgcaaccctcgcccggcagatcatcgacaatggcggtacgctggtatctgaatttccactcattacgccgccgcttcccgcacatttccccaggcgcaaccggattatcagcggcttaagcctgggcgtgctggtgattgaggcggcgttgcgaagcggatcgctggtcaccgtccgctgcgccctggagcagggaagggatgtgttcgccctgcctggcccgataggcaatccgggatcggaaggcccgcactggttaattaagcaaggcgcggtgccagtgacctcgccagaggatattgtggaatactggcataacgagctggcctggctgactgatacgtctgattcgataaatatttgcgtcgatcagccgtctgtagcattgccatttccggagctcctggctaacgtaggagatgaggtaacacctgttgacgttgtcgctgaacgtgccggccaatctgtgccagtaaccgtagctcagctacttgaactggagttagcaggctggatcgcagctgtacccggcggctatgtccgattaaggagggcaagccatgttcgacgtactcatgtatttgtttga

SEQ ID NO: 214455 - DNA, 510 bp, Klebsiella pneumoniae
atggcagttttgcaagtgttacatattccggacgagcgccttcgcaaagtcgccgagccggtcaaagaagtgaatgcggaaattcagcgtatcgtcgatgatatgttcgacaccatgtacgccgaggaaggcatcggtctggccgcaacccaggtcgatatccatcagcgcattatcgttattgatgtgtcggaaaatcgtgaagagcagctggtattaattaatccggaaatgctggagaaagatggcgaaaccggtattgaagaaggctgcttgtctattcctgaacagcgcgccctggtcccgcgtgcggaaaaagtgaagatccgggcactggagcgcgatggtaagccgtttgaactggaggccgatggcctgctggctatctgtatccagcatgagatggatcacctggtcggcaaactgtttattgactatctgtcaccactcaaacaacagcgcattcgtcagaaggtagagaaactggatcgtttacgttcccgtgcctga

SEQ ID NO: 214456 - DNA, 948 bp, Klebsiella pneumoniae
gtgtcacaatcactacgtatcattttcgccggcacccctgattttgcagcgcgtcatcttgatgcgctgctgtcgtctgaacatcaggttgttggcgtattcactcagcctgatcgccctgctggtcgcggcaaaaaattgatgccaagcccggtaaaagtgctggcagaagcccataacttacctgtgttccagccatcctccctgcgtccgcaggataaccagcggttagtcgccgatctcggcgccgatattatggtggtagtggcgtacggtctgattctgcctaaagcggtgctggagatgccccgtctgggctgtatcaacgttcacggctcgctgctaccgcgctggcgtggcgcagcgccaattcagcgttcactgtgggcgggggatagcgaaactggcgtaaccatcatgcagatggacgtcggccttgatacgggggatatgctgtataagctttcctgccccattaccgcagaggataccagcggcagcctgtacgataagctggccgagctcggcccgcaggggctgctggcaacgttagcccagctggtcaacggcaccgcacggcctgaagtacaagatgaatcgctggtgtgccatgccgaaaagctgagtaaagaagaggctcgtatcgattggtcgctttccgctgcgcagttggaacgctgcatccgcgcgtttaatccgtggccaatgagctggctggaaattgacggacaaccggtaaaagtgtggcgggcatcggtcatcgccgaagccgctcacgccgaaccgggtactatcgtggcagcaaccaaacagggtattcaggtcgccacgggggatgggatcctcagcctggagtcgctacagcctgcgggtaaaaaagcgatgagcgcccaggacttactcaattcccgccgggagtggtttatccctggcacccgtctcgcctga

SEQ ID NO: 214457 - DNA, 1296 bp, Klebsiella pneumoniae
atgaaaaagaatataaatttacgcagcctggccgcccaggctatcgaacaagttgttgaaaaagggcagtctttaagcaacgtactgccccctctacagcagaaagtcagcgataaagataaagcgctactgcaggagttgtgctttggtgtactacgtactctaagccagctggagtggctcatcagcaagctaatggcgcgtccgatgaccggcaaacagcgcaccgtgcactttctgatcatggttggtctctatcagttactctacacccgcattcccccgcatgccgcgctggcggaaacggtagaaggcgcggtggccattaaacgcccgcagcttaaagggctaatcaacggcgtgctacgccagttccagcgccagcaggaagcgttgttagccgaatttgctgagcatgaaaaccgctatcttcatcccaaatggctgctgaaacgcctgcagcaggcctggccggagcagtggcaggagatcgtcgaggcgaacaaccagcgcccgccgatgtggctgcgcgttaaccgcaaccatcattcccgggatgagtggcttgccctgcttaacgaggccggtttagagggctttacccaccctgattatccggacgccgtacgcctggccacccctgccccggtccacgcgttaccaggatttgatgaaggttgggtaaccgttcaggacgcctcggcccagggctgtatgcgctacctgcagccgaaaaatggcgaacgcatcctcgatctctgcgcggcaccgggcgggaaaacgacgcatattctggaagtcgccccccagtctcaggtcatggcggtggatattgatgaacagcgtctgtcccgcgtctatgacaacctgaaacggctgggcatgaaagccgaagtcaagcagggcgatggccgcttccctgagcagtggtgtggcaatgagcagttcgatcgtattctgctggatgccccctgctccgcaaccggcgttattcgccgccatccggatatcaaatggctgcgccgggatcgggatatcgccgagttagcccagctgcaggccgagatcctcaatgccacctgggcgcacctgaagccaggcggcacgctggtttacgcaacctgttctattctgccggaagagaacggtcagcaaattgccgccttcctcgcgcgaactccggatgcagaacttcacgcaaccggcacgccggcgagccccgggcagcaaaatctgccgggcgtggaagaaggtgatggcttcttttacgctaagctaatcaaacgtcggaactaa

SEQ ID NO: 214458 - DNA, 1377 bp, Klebsiella pneumoniae
atgaagattattattctgggcgccggccaggtcggcggcacgctggcggaaaacctcgtcggcgagaacaatgatattacgctggttgataccaatggcgaccgtctgcgcagcctgcaggataagttcgacctgcgtgtcgtccaggggcatggctctcaccctcgcgtactgcgtgaggcgggggccgatgatgccgatatgctggtagcggtcactagttcggacgaaaccaacatggtggcctgccaggtcgcttattcattgttcaatacgccaaaccgcatagcgcgtattcgtgcgcctgattacgttcgtgatgcggaaaagctcttcaactctgaagcggtacccatcgatcacttaatcgctccggaacaactggtcatcgacaacatccaccgtctgatcgaatatcccggcgcgctgcaggtcgtgaacttcgcagaaggaaaagtcagtctcgcggtagtaaaagcctattatggtggcccgctggtggggaatgccttatccactatgcgggagcatatgccgcatatcgatacgcgcgtggccgccattttccgccacgatcgccccatccgcccgcagggttcgacgattgtcgaggccggagatgaagtcttctttattgccgcctcgcagcatattcgcgcggtcatgagcgaactgcagcgactggaaaagccgtataagcgtattatgctggtcggcgggggcaatattggcgcgggtctggcccataagctggaaaaagattacagcgttaagcttatcgaacgtaatcagcagcgagccgctgagctggcggaaaagctgcagcatactatcgtcttctacggggatgcatcggaccaggagctgttggctgaagagcatattgaccaggtggacctgtttattgccgtcactaacgacgacgaagccaatattatgtcggctatgttggccaagcgaatgggcgcgaaaaaagtgatggtgctaatccagcgcagagcctacgtggatctggtccagggtagcgtcatcgatattgcgatttcgcctcagcaggccacaatttccgcactcctcagtcatgtccgtaaagctgatattgtcggcgtctcctccttgcgccgcggcgttgcagaagcgatcgaggcagtcgcgcacggcgatgagagcacctcccgggtagtcgggcgttcgatcgatgagatcaaacttccaccgggcacgatcatcggcgccgtcgtgcggggcaatgacgtgatgatcgccaataataatctacggatcgagcagggcgaccatgtgatcatgtttttgaccgataagaagtttatttccgatgtcgaaaggctgttccagccaagtcctttcttcctgtaa

SEQ ID NO: 214459 - DNA, 414 bp, Klebsiella pneumoniae
atgagttttttaaaagagtttcgcgaattcgcgatgcgcgggaacgttgtcgatttggcagtgggtgtgatcatcggtgcagcattcggtaaaattgtttcatcactggtcgcggatattattatgccgccactcggcctgttgattggcgggatcgattttaaacagtttgccgtcacgctacgtgatgcccaaggcgatgtcccggctgtggtgatgcattatggggtattcattcaaaacgttttcgatttcatcatcgtcgcgtttgccatcttcatggcgattaaattgatgaataagttaaatcgtaagaaagaagaggctccggcggcaccgccagctccctctaaagaagaagttctgctgagcgaaattcgcgatctgctgaaagaacaaaacaaccgttcttaa

SEQ ID NO: 214460 - DNA, 279 bp, Klebsiella pneumoniae; identical to SEQ ID NO: 138125

SEQ ID NO: 214461 - DNA, 426 bp, Klebsiella pneumoniae
atgtatcgtattggtgaactggcaaaactggccgacgtgacgcctgataccatccgctactatgaaaagcagcagatgatggatcatgacatacgcaccgagggaggatttcgtctgtactcggataacgatcttcaacggctgcgctttattcgttatgcccgacaactgggtttcagcctggaagcgatccgcgaattattgtcgatccgcatcgatccggagcatcatacctgtcaggagtcgaaagggatcgttcaggcgcgattaagtgaagttgaggcgcggattaaagagctacagacgatgcgccgctctctgcagcggctcaacgatgcctgttgcggcactgcccacagcagcgtttactgttctatccttgaggcccttgaacaaggggccagcaacggcaatggcggacgttga

SEQ ID NO: 214462 - DNA, 369 bp, Klebsiella pneumoniae
atgtggttgctggatcagtgggcggaacgtcatatcctcgatgcccaaaccaaaggtgagttcgataatttacccggcagcggagaaccgctgactctcgatgacgattcacatgtgccggcggagttgcgggcaggctatcgccttctgaaaaatgcaggatgtcttcctccggaactggagcaacgcaaagaagcgttggctctggcagacttactgaacggcgtccgtcaggacgatccgcgtcatgccgaacttagcaaacgccttgccctgctcgagctgaagttacgtcaggcaggtctgaacaccgactttttacgcggtgagtacgccgatgcgttgctgcaaaaaataaatcaggagtaa

SEQ ID NO: 214463 - DNA, 387 bp, Klebsiella pneumoniae
atgcgccatcgtaagagtggtcgtcaactgaaccgcaacagcagccatcgccaggctatgttccgtaacatggcaggttcgctggttcgtcatgaaatcatcaagacgaccctgccgaaagcgaaagaactgcgtcgcgtagttgagccgctgattactcttgccaagactgatagcgttgctaatcgtcgtctggcattcgcccgcactcgtgataacgagatcgtggcaaaactgtttaacgagctgggcccgcgtttcgcgagccgcgccggtggttacactcgcattctgaagtgtggcttccgtgcaggcgacaacgcgccgatggcatacatcgagctggttgatcgtgctgagccgaaagcagaagctgctgcagagtaa

SEQ ID NO: 214464 - DNA, 990 bp, Klebsiella pneumoniae
atgcagggttctgtgacagagtttctaaaaccgcgcctggtcgatatcgagcaagtgagttcgacgcacgccaaggtgacccttgagcctttagagcgtggcttcggccatactctgggtaacgcactgcgccgtattctgctctcatcgatgccgggttgcgcggtgaccgaggttgagattgatggtgtactgcacgagtacagcaccaaagaaggcgttcaggaagacatccttgaaatcctgctcaacctgaaagggctggcggtgagagttcagggtaaagatgaagtcatccttactttgaataaatctggcattggccctgtgaccgcagccgacattacccacgacggtgatgtcgaaatcgtcaagccgcagcacgtgatttgccacctgactgatgagaacgctgctattagcatgcgtatcaaagttcagcgcggtcgcggttatgtgccggcttctgcccgaattcattcggaagaagatgagcgcccaatcggccgtctgctggtcgacgcctgctacagccctgtagagcgtattgcctacaatgttgaagctgcgcgtgtagaacagcgtaccgacctggacaagctggtcatcgaaatggaaaccaacggcacaatcgatcctgaagaggcgattcgtcgtgcggcaaccatcctggctgaacaactggaagcttttgttgacctacgtgatgtacgtcagccagaagtgaaagaagagaaaccagaattcgatccgatcctgctgcgccctgttgacgatctggaattgactgtccgctctgctaactgcctcaaggcagaagctatccactatatcggtgatctggtacagcgtaccgaggttgagttgctgaaaacgccgaacctgggtaaaaaatctcttactgagattaaagacgtgctggcttcccgtggactgtctctgggcatgcgcctggaaaactggccaccagcaagcattgctgacgagtaa

SEQ ID NO: 214465 - DNA, 621 bp, Klebsiella pneumoniae
atggcaagatatttgggtcctaagctcaagctgagccgtcgtgagggcaccgacttattccttaagtctggcgttcgcgcgatcgataccaagtgtaaaattgaacaagctcctggccagcacggtgcgcgtaagccgcgtctgtctgactatggtgtgcagttgcgtgaaaagcaaaaagttcgccgtatgtacggtgtgctggagcgtcagttccgtaactactataaagaagcagcacgtctgaaaggcaacaccggtgaaaacctgttggctctgctggaaggtcgtctggacaacgttgtataccgtatgggcttcggcgccactcgtgctgaagcacgccagctggttagccacaaagcgattatggtaaacggtcgtgttgttaacatcgcttcttatcaggttaaagcgaatgacgttgtcagcattcgtgagaaagcgaaaaagcaatctcgcgtgaaagccgctctggagctggctgagcagcgtgaaaagccaacctggctggaagttgatgctggcaagatggaaggtacgttcaagcgtcagccggagcgttctgatctgtctgcggacattaacgaacacctgatcgtcgagctttactccaagtaa

SEQ ID NO: 214466 - DNA, 357 bp, Klebsiella pneumoniae; identical to SEQ ID NO: 139678

SEQ ID NO: 214467 - DNA, 1332 bp, Klebsiella pneumoniae
atggctaaacaaccgggattagattttcaaagtgccaaaggtggccttggcgaactgaaacgcagacttctgtttgtggtcggtgcgctgatagtgttccgtattggctcttttattccgatccctggtattgatgccgctgtacttgccaaactgcttgagcaacagcgaggcaccatcattgaaatgttcaacatgttctctggtggtgctctcagccgtgcttctatctttgcgctggggattatgccgtacatttcggcatcgatcatcgtgcagctgctgacggtggtttatcaaccgctggcggaactgaagaaagaaggggagtctggtcgtcgtaagatcagccagtacacccgctacggtactctggtgctggcgatattccagtcgatcggtattgctaccggtctgccgaatatgcctggtatgcaaggcctggtgattaatccaggctttgcattctatttcaccgctgttgtcagtctggtcacagggactatgttcctgatgtggctcggcgaacagatcactgaacgtggtatcggtaacggtatctcgatcattatcttcgccggtatcgttgcgggactcccgccggccatcgcccatactatcgagcaagcgcgtcaaggcgacctgcacttcctcctgttgctgttggttgcagtattagtatttgcagtgaccttctttgttgtattcgttgagcgtggtcaacgccgcattgtggtaaactacgcgaaacgtcaacagggtcgtcgtgtctatgctgcacagagcacacatttaccgctgaaagtgaatatggcgggggtaatcccggcaatcttcgcttccagtattatactgttcccggcaaccatcacgtcatggttcgggggtggtactggttggaactggctgacaacaatttcgctgtatttgcagcctgggcaaccgctttatgtgttactctatgcgtctgcaatcatcttcttctgtttcttctacacggcgttggttttcaacccgcgtgaaacagcagataacctgaagaagtccggtgcatttgtaccaggaattcgtccgggagagcaaacggcgaagtatatcgataaagtgatgactcgcctgactctggttggtgcgttgtacattacttttatctgcctgatcccggagttcatgcgtgacgcgatgaaagtgccgttctacttcggtgggacctcgctgcttatcgttgttgtcgtgattatggactttatggctcaagtgcaaactctgatgatgtccagtcagtatgagtctgcattgaagaaggcgaacctgaaaggctacggccgttaa

SEQ ID NO: 214468 - DNA, 435 bp, Klebsiella pneumoniae
atgcgtttaaatactctgtctccggccgaaggctccaaaaaggcgggtaaacgcctgggtcgtggtatcggttctggcctcggtaaaaccggtggtcgtggtcacaaaggtcagaaatctcgttctggcggtggcgtacgtcgcggtttcgagggtggtcagatgcctctgtaccgtcgtctgccgaaattcggcttcacttctcgtaaagcgatgatcaccgcagagatccgtctctccgatctggctcacgtagaaggcgatgtagtagacctgaacgcgctgaaagcggctaacattatcggtgtccagatcgagttcgcgaaagtgatcctgtctggtgaggtaactcgtccggtaactgttcgtggcctgcgtgtgactaaaggtgctcgtgctgctatcgaagctgctggcggtaaaattgaggaataa

SEQ ID NO: 214469 - DNA, 180 bp, Klebsiella pneumoniae; identical to SEQ ID NO: 75813

SEQ ID NO: 214470 - DNA, 504 bp, Klebsiella pneumoniae
atggctcacatcgaaaaacaagctggcgaactgcaggaaaagctgatcgcggtaaaccgcgtatctaaaaccgttaaaggtggtcgtattttctccttcacagctctgactgtagtaggcgatggtaacggtcgcgttggttttggttacggtaaagcgcgtgaagttccagcagcgatccagaaagcgatggaaaaagcccgtcgcaatatgattaacgtcgcgctgaaccacggcaccctgcagcacccggttaagggtactcacacgggttctcgtgtattcatgcagccggcttccgaaggtaccggtatcatcgccggtggtgcaatgcgcgccgttctggaagtcgctggggttcgtaacgttctggctaaagcgtatggttccactaacccgattaacgtggttcgtgcaactatcgacggtctggaaaacatgaagtccccggatatggtcgctgccaagcgtggtaaatccgttgaagaaattctggggaaataa

SEQ ID NO: 214471 - DNA, 354 bp, Klebsiella pneumoniae
atggataagaaatctgctcgtatccgtcgtgcgacccgcgcacgccgcaagctccaggagctgggcgcaactcgcctggtggtacatcgtaccccgcgtcacatttacgcacaggtaattgcaccgaatggttctgaagttctggtagctgcttctactgtagaaaaagctatcgctgaacaactgaagtacaccggtaacaaagacgctgcagcagctgtgggtaaagctgtcgctgaacgcgctctggaaaaaggcatcaaagatgtttcctttgaccgttccgggttccaatatcatggtcgtgtccaggcactggcagatgctgcccgtgaagctggccttcagttctaa

SEQ ID NO: 214472 - DNA, 534 bp, Klebsiella pneumoniae
atgtctcgtgttgctaaagcaccggtcgttgttcctgccggcgttgatgtaaaaatcaacggtcaggttattacgatcaaaggtaaaaacggcgagctgactcgtactctcaacgatgctgttgaagttaaacatgcagataatgcactgaccttcggtccgcgtgatggttacgcagacggttgggctcaggctggtaccgcgcgtgccctgctgaactcaatggttatcggtgttaccgaaggcttcactaagaagctgcagctggttggtgtaggttatcgtgcagcggtcaaagggaatgtagtaaacctggctttaggtttctctcacccggttgatcatcagctgcctgcgggtatcactgcagaatgtccgactcagactgaaatcgtgctgaaaggcgctgataagcaggtgatcggccaggttgcagcagatctgcgcgcctaccgtcgtcctgagccttacaaaggcaagggtgttcgttacgccgacgaagtcgtgcgtaccaaagaggctaagaagaagtaa

SEQ ID NO: 214473 - DNA, 393 bp, Klebsiella pneumoniae
atgagcatgcaagatccgatcgcggatatgctgacccgtatccgtaacggtcaggccgcgaacaaagctgcggtcaccatgccttcctccaagctgaaagtggcaatcgccaacgtgctgaaggaagaaggttttatcgaagattttaaagttgaaggcgacaccaagcctgaactggaacttactctcaagtatttccagggcaaagctgttgtagaaagcattcagcgtgtcagccgcccaggtctgcgcatctataagaaaaaagatgagctgccgaaagttatggccggtctgggtatcgcagttgtttctacctctaaaggtgttatgactgatcgtgcagcgcgccaggctggtcttggtggcgaaattatctgctacgtagcctaa

SEQ ID NO: 214474 - DNA, 306 bp, Klebsiella pneumoniae
atggctaagcaatcaatgaaagcacgcgaagtaaagcgcgtggctttagctgataaattcttcgctaaacgcgctgaactgaaagctatcatctctgatgtgaacgcaaccgacgaagatcgttggaatgccgttctcaagctgcagactctgccgcgtgattccagcccgtctcgtcagcgtaaccgctgccgtcaaacaggtcgtccgcatggtttcctgcggaagttcgggttgagccgtattaaggtccgtgaagccgctatgcgcggtgaaatcccgggtctgaaaaaggctagctggtaa

SEQ ID NO: 214475 - DNA, 540 bp, Klebsiella pneumoniae
atggcgaaactgcatgattactacaaagacgaagtagttaagaaactcatgactgagtttaactacaattctgtcatgcaagtccctcgggtcgagaagatcaccctgaacatgggtgttggtgaagcgatcgctgacaagaaactgctggataacgcagcagctgacctggcagcaatctccggtcaaaaaccgctgatcaccaaagcacgcaaatcagttgcaggcttcaaaatccgtcagggctatccgatcggctgtaaagtaactctgcgtggcgaacgcatgtgggagttctttgagcgcctgatcactattgctgtaccgcgtattcgtgacttccgcggcctgtccgctaagtctttcgacggtcgtggcaactacagcatgggtgtccgtgagcagatcatcttcccagaaatcgactacgataaagtcgaccgcgttcgtggtttggatattaccattaccactactgcgaaatctgacgaagaaggccgtgctctgctggctgcctttgacttcccgttccgcaagtaa

SEQ ID NO: 214476 - DNA, 315 bp, Klebsiella pneumoniae
atggcagcgaaaatccgtcgtgatgacgaagttatcgtgttaaccggtaaagataaaggtaagcgcggtaaagttaagaatgtcctgtcttccggcaaggtcattgttgaaggtatcaacctggttaagaaacaccagaagccggttccggctctgaaccaaccaggcggcatcgttgaaaaagaagctgcaattcaggtttctaacgttgcaatcttcaatgcggcaaccggcaaggctgaccgtgtaggctttagattcgaagacggtaaaaaagtccgtttcttcaagtctaacagcgaaactatcaagtaa

SEQ ID NO: 214477 - DNA, 372 bp, Klebsiella pneumoniae
atgatccaagaacagactatgctgaacgtcgccgacaactccggtgcacgtcgcgtaatgtgtatcaaggttctgggtggctcgcaccgtcgctacgcaggcgtaggcgacatcatcaagatcaccatcaaagaagcaattccgcgtggtaaggtcaaaaaaggtgatgtgctgaaggcggtagtggtgcgcaccaagaagggtgttcgtcgcccggacggttctgtcattcgcttcgatggtaatgcatgcgttattctgaacaataacagcgagcagcctatcggtacgcgtatttttgggccggtaactcgtgaacttcgtaccgagaagttcatgaaaattatctctctggcaccagaagtactctaa

SEQ ID NO: 214478 - DNA, 255 bp, Klebsiella pneumoniae
atgaccgataaaatccgtactctgcaaggtcgcgtagttagcgacaaaatggagaaatccattgttgttgctatcgaacgtatggtgaaacacccggtttacggtaaattcatcaaacgtacgaccaaactgcacgtacatgacgagaacaacgaatgcggtatcggcgacaaggttgaaatccgcgaatgccgtccgctgtccaagactaagtcctggacgctggttcgcgttgtagagaaagcggttctgtaa

SEQ ID NO: 214479 - DNA, 192 bp, Klebsiella pneumoniae
atgaaagcaaaagagctgcgtgaaaaaagcgttgaagagctgaacgctgagctgctgaacctgctgcgtgagcagttcaacctgcgcatgcaggctgcaagtggccagctgcaacagactcatctgctgaagcaagtgcgtcgtgatgttgcacgcgttaagactttactgactcagaaggcgggtgcgtaa

SEQ ID NO: 214480 - DNA, 411 bp, Klebsiella pneumoniae
atgttacaaccaaagcgtacaaaattccgtaaagtgcacaaaggccgcaaccgtggtctggcgcagggtacggatgttagcttcggcactttcggtctgaaagctgttggccgtggtcgtctgactgcacgtcagatcgaagcagcacgtcgtgctatgacccgtgcagttaagcgtcaaggtaagatctggatccgtgtattcccggacaaaccgatcaccgagaagccgctggaagttcgtatgggtaaaggtaaaggtaacgtggagtactgggttgccttgattcagccgggtaaagtcctgtatgaaatggacggtgtaccggaagagctggcccgtgaagcattcggcctggcagcagcgaaactgccgatcaaaaccacctttgtaactaagacggtgatgtaa

SEQ ID NO: 214481 - DNA, 699 bp, Klebsiella pneumoniae
atgggtcagaaagtacatcctaatggtattcgcctgggtattgtcaaaccatggaactctacctggttcgcgaacaccaaagaattcgctgacaacctggacagcgattttaaagtacgtcagttcctgactaaagaactggctaaagcgtctgtatctcgcatcgttatcgagcgtccggctaagagcatccgtgtgaccattcacaccgctcgcccgggtatcgttatcggtaagaaaggcgaagacgtagaaaaactgcgcaaggtcgtagcggatatcgctggcgtacctgcacagatcaatatcgccgaagttcgtaaacctgaactggacgcaaaactggttgctgacagcatcacttctcagctggaacgtcgcgttatgttccgtcgtgcgatgaagcgtgctgtacagaacgcaatgcgtctgggcgctaaaggtatcaaagttgaagttagcggccgtctgggcggcgcggaaatcgcacgtaccgaatggtaccgtgaaggtcgcgtaccgctgcacactctgcgtgctgacatcgactacaacacctctgaagcgcacaccacttacggtgtaatcggcgttaaggtatggatcttcaaaggtgagatcctgggtggtatggctgctgttgaacaaccggaaccggctgctcaacctaaaaagcagcagcgtaaaggccgtaaataa

SEQ ID NO: 214482 - DNA, 333 bp, Klebsiella pneumoniae; identical to SEQ ID NO: 91766

SEQ ID NO: 214483 - DNA, 279 bp, Klebsiella pneumoniae
atgccacgttctctcaagaaaggtccttttattgacctgcacttgctgaagaaggtagagaaagcggtggaaagcggagacaagaagcccctgcgcacttggtcccgtcgttcaacgatctttcctaacatgatcggtttgaccatcgctgtccataatggtcgtcagcacgttccagtatttgtttccgacgaaatggtcggtcacaaactgggtgaattcgcaccgactcgtacttatcgcggccacgctgctgataaaaaagcgaagaagaaataa

SEQ ID NO: 214484 - DNA, 822 bp, Klebsiella pneumoniae
atggcagttgttaaatgtaaaccgacatctccgggtcgtcgccacgtcgttaaagtggttaacccagagctgcacaagggcaaaccttttgctccgttgctggaaaaaaacagcaaatccggtggtcgtaacaacaatggccgtatcaccacccgtcatatcggtggtggccacaagcaggcttaccgtattgttgacttcaaacgcaacaaagatggtatcccggcagttgttgaacgtcttgagtacgatccgaaccgctccgcgaacatcgcgctggttctgtacaaagacggcgagcgccgttacatcctggccccgaaaggcctgaaagctggcgaccagattcagtctggcgttgatgctgcaatcaaagcaggcaacaccctgccgatgcgcaatatcccggttggttctaccgttcataacgtagaaatgaaaccaggtaaaggcggtcagctggctcgttccgctggtacttacgttcagatcgttgctcgtgacggtgcttatgtcaccctgcgtctgcgttctggtgaaatgcgtaaagtcgaagcagactgccgcgcgactctgggcgaagttggcaatgctgagcatatgctgcgcgttctgggtaaagcaggtgctgcacgctggcgtggtgttcgtcctaccgttcgcggtactgcgatgaacccagtagaccacccacatggtggtggtgaaggtcgtaactttggtaagcacccggtatccccgtggggcctgcagaccaaaggtaagaagacccgcagcaacaagcgtactgataaattcatcgtacgtcgccgtagcaaataa

SEQ ID NO: 214485 - DNA, 303 bp, Klebsiella pneumoniae
atgattcgtgaagaacgtctgctgaaggtgctgcgcgcaccgcacgtttctgaaaaagcgtctactgcgatggaaaaaacaaacaccatcgttctcaaagttgctaaagacgcgaccaaagcagaaatcaaagctgctgtgcagaaactgtttgaagtcgaagtcgaagtcgttaacaccctggttgttaaagggaaagttaaacgtcacggacagcgtatcggtcgtcgtagcgactggaaaaaagcttacgtcaccctgaaagaaggccagaatctggacttcgttggcggcgctgagtaa

SEQ ID NO: 214486 - DNA, 606 bp, Klebsiella pneumoniae
atggaattagtattgaaagacgcgcagagcgcgctgactgtttccgaaactaccttcggtcgtgatttcaacgaagcgctggttcaccaggttgttgttgcttatgcagccggtgcgcgtcagggcactcgtgctcagaagactcgtgctgaaatcactggctccggtaaaaaaccgtggcgccagaaaggtaccggccgtgcgcgttctggttctatcaagagcccgatctggcgttccggtggcgtgaccttcgctgctcgtccgcaggaccacagtcaaaaagttaacaagaagatgtaccgcggcgcgctgaaaagcattctgtccgaactggtacgtcaggatcgtctgatcgttgtcgagaagttctctgttgaagcgccgaaaactaagctgctggcacagaaactgaaagacatggctctggaagatgtgctgatcatcaccggtgagctggacgagaacctgttcctggccgcacgtaacctgcataaggttgacgtacgtgatgcgaacggtatcgacccggttagcctgatcgccttcgacaaagtcgtaatgactgctgatgctgttaagcaagttgaggagatgctggcatga

SEQ ID NO: 214487 - DNA, 630 bp, Klebsiella pneumoniae
atgattggtttagtcggtaaaaaagtgggcatgacccgcatcttcactgaagatggcgtttctatcccagtaaccgtaatcgaagttgaagcaaaccgtgttactcaggttaaagacctggctaacgatggctaccgcgcaatccaggttaccaccggtgctaaaaaagctaaccgtgtaaccaagccggaagcgggtcacttcgctaaagctggcgttgaagctggccgtggtctgtgggaattccgtctggctgacggcgaagaattcaccgtaggtcagaacattagcgttgaactgtttgctgacgttaaaaaagttgacgtaaccggtacctctaaaggtaaaggttttgctggtaccgttaagcgctggaacttccgtacccaggacgctactcacggtaactccttgtcccaccgcgttccgggttctatcggtcagaaccagactccgggcaaagtgttcaaaggcaagaaaatggcaggtcagctgggtaatgagcgtgtaaccgttcagagcctggacgtagtacgtgttgacgctgagcgcaacctgctgctggttaaaggtgctgtcccgggtgcgaccggtagcgacctgatcgttaaaccagctgtgaaggcgtga

SEQ ID NO: 214488 - DNA, 312 bp, Klebsiella pneumoniae
atgcagaaccaaagaatccgtatccgcctgaaagcgtttgatcatcgtctgatcgatcaatcaaccgcggaaatcgtcgagactgctaagcgcactggtgcgcaagtccgtggtccgatcccgctgccgacccgcaaagagcgctttaccgttctgatctccccgcacgtcaacaaagacgcgcgtgaccagtacgaaattcgcactcacaagcgtctggttgacatcgttgagccaactgaaaaaaccgttgatgctctgatgcgtctggatctggctgccggtgtagacgtgcagatcagcctgggttaa

SEQ ID NO: 214489 - DNA, 522 bp, Klebsiella pneumoniae
gtgacgcaatgttcatcgatcattgcggggtcaactatgctcgccgccctccccttcttgctgtgctatagcggtttgaccgtggcattatgccaccaggatctgcgccacggtctgttgcccgaccgttacacctgtcccctgctgtggagtggtttacttttttatctctgtctggcgccgcaccagctgcatgatgccgtctggggggcgataacgggctatctctctttggctgcgatttactggctataccgcggtatccgcggctatgaagggttgggttatggagatataaaatatcttgccgccctcggcgcctggcatggctggcgattgctgccgcagttggtcctggttgcctcgctactcgccggcatagcgtgggcaggagcaggtttatacgccagttgcggcaggaagagcaaatggggaagaagcaacccgctgccgtttgggccattcctggcggccgcgggtttttggtgcgggtggcagacgctggctagtctgacactttga

SEQ ID NO: 214490 - DNA, 477 bp, Klebsiella pneumoniae
atgaaaggtgatgtcaaaatcataagttatctcaataaattattgggaaatgagctagtcgcaattaatcagtactttcttcatgcgagaatgtttaaaaattggggcctgatgcgcctcaacgatattgagtaccacgaatccatcgacgaaatgaagcacgccgataagtatatcgagcgtattctttttctcgaaggtatccctaatctgcaggatctcggcaaacttggcatcggtgaagatgtggaagagatgctgcggtccgatttgaggctggagctggaaggggcgcaaaatttgcgtgaggctattgcctatgccgacagcgtccatgactacgtcagccgcgatatgatgattgagatcctggcggatgaagaaggccatatcgactggctggaaaccgaactcgatttgattggcaaaatcggtctgcaaaattacctgcagtcgcagatcaaagtgtcagactag

SEQ ID NO: 214491 - DNA, 195 bp, Klebsiella pneumoniae
atgtacgtttgtttgtgcaatggcgtcagcgataaaaaaattcgtcaggttgtgcgccagtttcaaccgcaatcttttcagcaattacgtaagtttgttcccgtgggaaatcaatgcggtaagtgtgttcgtgccgcgcgtgaagtgatggaagatgaattaaccaccatgccggaattcaaagaaatcgcctga

SEQ ID NO: 214492 - DNA, 945 bp, Klebsiella pneumoniae
atgactgaaccaaccaataaagatagcgaaataaaaaaacacctattagacttgcttaattcacagtctgaaaatatagcaaaacacttctactctcatataaaaaacttaatagaagcaggagagttttctgaagctcataataacctagcactaattgaaaaatacatgactaggccacagatggatgaagaacccaatataaatgaaaatgaaactaataaaagaaaaaatgtaaaatcacttgaacctaataattatgtagaacatataatacaattagaagaacgaaacagcatattaactctacagttagagcattatactcaggatcttaatagaaaaaacgcaataatcgaaaaaaacgtaaaacaagttaattctttgattagtgaaaataaggaactccgtagccaagtacagcaacaaagaatcgatgaaaaaatccccacctatgttaacgatgttaaatcagatcttgctagtgatgacaaacattttatattgatgtctattatctggtctattgctggggtattttttggcttccttgcggtaatatctgctttttttacattatacatgaacttagatttaaaaaatctcactaaccttcagttaatatatatcttcacgcgaggattagttggaatcgccattctttcatggctatcatatatctgccttagtaactcaaaaaagtacacacatgaatcgatcaggcgaaaagatcgtcgacatgctttgatgtttggtcaagtttttttgcagatatacggttctacagcaactaaagaggatgcaatagaagtctttaaggattggaatatttcaggtgactctgcattttcaggtcagacagagcaaccaccgagctttgcgtcatttttgaatacaatcaaagacaaagttaaagtaactggaagtgataaagaaacagattaa

SEQ ID NO: 214493 - DNA, 936 bp, Klebsiella pneumoniae
atgtcaacacacgaaatcacatttcgccatgtggacgaaaaaaagaaatccttaatcatgcagaatcgcggagggcaatcggttatagctcggatactgaaagcctatggtttttcttcccgacaagcattctgtaatcacctaggtatatcgcaaagtacaatggcgaacaggtatgcccgtgacactttccctgctgattgggtcgttatctgtagcatggagactggagtgccggtcgagtggttggcatttggcactgatacagagaagggaagaattacaaataatgcagaaaaaagtcacaacaattgtgacagcaagcatcaacatctcaatagagaacaagacatccaaaatgagaacttttttactattaaccaaggcggaaaagcagcaatagagcgaatcgttttggcttatggatttaagacaagacaagctttagctgatcatattggtgtatcaaaaagtacattagccaatcgttacatgagagatacctttcctgctgactggattattcaatgctcactggaaactggtgcttcattaacatggctaaccactggtaacggggcaatgtttgaaaagcctcgaatcaatactatcactatcccatatcataaaataattgatggatctcttgctcaagaaaccgttttgacttttgactctaagttgttagaaggaacctttctgcaacctttagcagtattcattgatgaggaaatatatattgtagaatcaaaatttaatgaagttactgatggcaagtggcttgtgaatattgaagggaaaataagcatcaaagatttgactcgcatacccgttggtatggttaaagttgtaggcactaacgcaagttttgaatgcttacttactgacattatcgttttggcaaaatgtaaaagagtttttactaaaaatgtataa

SEQ ID NO: 214494 - DNA, 222 bp, Klebsiella pneumoniae
atgacccctaacatttcaataaccctgaatacgccacatgtcacaattgagcgttatagcgaacttactggtctttcaatcgacacaattaacgatatgctggctgacggtcgcatccctcggcatcgccttcggaaagacaagaaaagagaaaaggtgatgatcaaccttgctgctcttaccgttgatgcacttactgattgcaatgttgtattcaactag

SEQ ID NO: 214495 - DNA, 510 bp, Klebsiella pneumoniae
atgtttgattaccaagtttccaaacatccacattttgatgaagcctgtcgtgcattcgcattgcgccacaacctggtgcaactggcagaacgtgctggcatgaatgtgcagattctgcggaacaagctgaacccagctcaacctcatttattaaccgcaccagaaatctggctgcttaccgatctgactgaagattcaacgctggtagatggttttctggcacagattcattgtctgccatgtgtaccgattaatgaggtggcaaaagagaaactgccacattacgtcatgagtgcaaccgcagagatcgggcgtgttgcagcaggtgcggtatctggcgatgtaaaaaccagtgcaggtcgtcgtgatgctatcagcagcattaactctgtaacacgactgatggcgctggccgctgtttcattgcaggcccgtttacaggctaatcctgcgatggcgagtgcagttgataccgtgactggcctcggtgcttcattcggtttgctgtga

SEQ ID NO: 214496 - DNA, 201 bp, Klebsiella pneumoniae
atgctgacgaaagaaccatcatttgcatcgctgctggtaaaacaaagtccggcaatgcactacgggcacggctggatcatgggtgaggatggtaaacgctggcatccgtgccgttcacaagatgaattgctggcagaactatctacgaaaaaacaggggaacaaatggctattgaaggcgctgcggcgactgttccattaa

SEQ ID NO: 214497 - DNA, 342 bp, Klebsiella pneumoniae
atggctattgaaggcgctgcggcgactgttccattaagccccggtgaacgcctgaacggacttaatcacattgcggaattaagggcgaaagtatttggcctgaatattgagtcagagcttgagcggtttattaaagatatgcgtgatccacgggatatcaataatgaacaaaataaacgggcactggctgccatattctttatggcaaaaatcccagctgaacgtcatagcatcagcattaatgagctgaccactgacgaaaagcgggagctgattaaagcaatgaatcattttcgtgcagtggtgagcttatttcccagacggctaaccatgccgaattaa

SEQ ID NO: 214498 - DNA, 234 bp, Klebsiella pneumoniae
atgcgtagtattgaaaccctcacgactaaaaccggaccggatgatgcagggcttaatattttactgacagaggctcgtctggaagaccgccgggcaagggctgaagcaatggcagctcgccttgatagcctggcgtgtcatatcacatcccgccagctaaaccacgtcgaagcggcagaactgctgcgtgtgactgctgaagcaatccagaacgaagcgcaggagatccactga

SEQ ID NO: 214499 - DNA, 228 bp, Klebsiella pneumoniae
atggctgatgcaatggatctcgtacagcagcgcgttgaagaagaacgccagcgtcatatccgtactgcccgcgccaaaacgccgggcgtatcccgcgtgctttgcattgagtgtgaagcaccaattccgccagcacgacgtcgcgccattccgggtgtgcagctttgcattacctgtcaggaaatcgcagagctgaaaggcaaacattacaacggaggtgctgtatga

SEQ ID NO: 214500 - DNA, 858 bp, Klebsiella pneumoniae
atgagcaccatcctgaaatgggcgggtaataaaaccgccattatgccagaactgaaaaaataccttcctgctggcccgcgactggttgaacctttcgcgggttcttgtgctgtgatgatagagacggattaccccagctatcttgttgcggatattaatcctgatttaatcaacctctataaaaaggttgctgctgattgcgaggcgtttatatctcgtgccagagctttatttgaggaagcaaacagggaggtggcttattacaacataaggcaggagtttaattactccactgaaattactgatttcatgaaagcggtatatttcctgtatctcaatcgtcatggttaccgtgggttatgtcgctataacaagagcgggcatttcaacattccctatgggaattataaaaatccgtatctccctgaaaaagaaattcgcaaatttgcagaaaaagcccagcgagcaacgtttatctgcgccagctttgatgaaacgctggcgatgttgaaggcgggggatgtggtgtattgcgatccgccttattacggtacgttttccggctatcacactgatggcttcactaaggatgaccagtatcacctggcatccgttcttgaacatcgatcatctgaaggtcatccggtcattgtttctaacagtgacacatccctgattcgttcgctgtatcgcaatttcactcaccactacatcaaggcaaaacgcagcatcggcgtgtcggctggcgagagtaaatctgcaacagaaatcattgctgtttccggggcgcgctgctgggtgggatttgctccttcgcgtggcgtagatagttctgctgtgtacgaggtgcgtgtatga

SEQ ID NO: 214501 - DNA, 2415 bp, Klebsiella pneumoniae
atgagtcatgacgatatgagcaactctagcggctttaacgaggccgctgcatcattttcatggaacggcccgaaaaaggccattaatccttatctggacccggcggaagttgcgccggagtctgcactttcaaacctgatcactctgtatgctgccgataacgagcaggaacaactgcgccgcgaggcactgagtgagcaggtctgggagcgttatttctttaatgaatcccgtgatcctgtccagcgcgaaatggagcaggataagctcattagccgggtaaagctggcgcatgagcagcagcgttttaatccagacatggtcattctggctgacgtcaacgcccagccttcccatatcagcaagccgctgatgcaacgtattgaatacttcagcagcctgggcaggccaaaggcttattcccgctatttgcgtgagacgattaagccatgtctggaacgactggagcatgtacgcgacagtcagctatccacttcttttcgctttatggcaagccatgaagggctggacggcctgctgatcctgcctgaaatgagtcaggatcaggtgaaacgcctgtctacccttgtcgctgcgcatatgagcatgtgtcttgatgccgcttgtggtgatttgtacgccaccgatgatgttaagccagaagaaatccgcaagacatgggaaaaggtggcagcggaaaccctacgtttggatgtcatcccgcctgcgtttgagcaactccgtcggaaaagaaaccgccgtaaaccagtgccctatgaactcattccgggctcgctggcgcgtatgctgtgcgccgactggtggtatcggaaattgtggaagatgcgttgtgaatggcgggaagagcagttgcgtgctgtctgcctggtcagcaaaaaagcatctccctatgtcagctatgaagctgtgatgcataaacgtgagcagcgccgtaagtcgctggagtttttccgttctcatgaactggtgaacgaagacggcgacacgctggacatggaagatgtggtaaacgccagctgcagcaacccggcgcatcgccgcaatgagatgatggcctgtgttaaaggtctggagcttatcgcggaaatgcgcggtgactgcgccgttttctacaccattacctgtccgtcacgtttccattccacgctcaataacggcagacccaatccgacctggaaaaacgcgacggtaagacaaagcagcgattatctggtcgatatgtttgctgcatttcgtaaggcgatgcacaaagccgggttgcgctggtatggcgtgcgggtggctgagccgcatcacgacggcacagttcactggcacctgttgtgtttcatgcgcaaaaaagaccgccgcgccattactgcattgttgcgtaagtttgctatccgtgaagaccgcgaggagctgggcaataacacggggccgcgctttaagtctgagctgattaacccgcgcaaaggaacgccgacaagctacatagcgaaatacatcagtaagaacattgacgggcgtggtctggctggcgagatcagcaaggaaacgggtaaatctcttcgtgataacgctgaatacgtgaatgcctgggcgtctttgcatcgtgttcagcaattccgcttctttggtattccggggcgtcaggcttaccgtgaactgcgattgctggctggtcaggcggcaaggcagcagggtgacaaaaaagcaggtgtgccggtactggataacccgcgccttgatgccattctggctgctgctgatgctggttgttttgccacctatatcatgaagcagggaggtgtactggttccccgtaaatatcacctcatcagaactgcttatgaaattaacgaagagccgaccgcctatggcgatcacggtattcgtatttatggcatctggtcacccattgcagagggcaagatctgcactcatgcagtgaagtggaaaatggttcgtaaggccgttgacgttcaggaggcggcagccgaccagggcgcttgcgccccttggactcgtggcaataactgtccccttgctgaaaatttgaaccaacaagggaaagacaaatcagctgatggggataccaggacggacattacccgcatggatgacaaggagttgcacgattacctgcacagtatgagcaaaaaagagcgccgggaactggctgcaaggttacgcctggtgaaaccgaaacggcgtaaagactacaaacagcgaattacagaccatcagcgacagcagctcgtctatgaactgaagtccagaggatttgatggcagcgagaaagaggtcgatttactccttcgcggcggcagtattccatcaggagcaggcctgcgtatcttctatcggaaccagcgtttgcaggaagatgataagtggcgaaacctgtattaa

SEQ ID NO: 214502 - DNA, 189 bp, Klebsiella pneumoniae
atgcaggactattttttggagtctttgaagctccagcgcattgatttttttcttaagcttgtagcggctagtgagtgtagtgatgaagagaaggggctggctttgcagtgggtttctgaactgacagatgaactcatggcaaaaatcagaacccacgaatacaaccgctcaatggatgtcatcagctga

SEQ ID NO: 214503 - DNA, 234 bp, Klebsiella pneumoniae
atgcgcattgaaataatgatcgataaagagcagaagattagccagtctaccctggacgcccttgaatccgagctttaccgcaatctgcgccccctgtatcccaaaacggtaatccgtatccgtaaaggtagctctaacggtgtggaactgaccggactgcaactggacgaagaaagaaaacaagtgatgaaaattatgcagaaggtgtgggaagacgacagctggctgcattga

SEQ ID NO: 214504 - DNA, 678 bp, Klebsiella pneumoniae
atgaaaattaataatgtagcgttaccaatatctcttgctgtaatcctaactggttgcgtaccacatgcttctaaccgaaatatcactgctattgaagtggtgaagcctgctattgggcaaagtgctaccgcctacatgggcgatcccattatcacatctgctactggatttaaaacggacgtattagaacttggtgcggctaatggtgcattgtcttctatcgctgctggtacatattgcagtgaggggaatggaatttatcgcaattatcataaccctcaagctgttgcgttaaaaaatctctatgggcaaatcggtaactatgttgattatgttagttacgatgctgcaaaaaatgagatatcaccgccaaatggcacttcttatactgcatcagaaatttctatcaaacgtgttcctgatgggctgtgtcgagtgagtaactcattggttaagactatcgaatacaatggaaatgcaggcggtgtaatgaagttcacctatcgtgaatttgcaaacgatatggctcgtgcagcatttacaacagatttttctgtagattctaaaggaagtgatgttatcgcttacaaaggtgccaagttcaaagtgaacaaggctgataactcgtctatttcttataccattatttctggctttgacaaggctgtcacgttctag

SEQ ID NO: 214505 - DNA, 1743 bp, Klebsiella pneumoniae
atgagtacctggaaccaagcctattctgcaagagaagatttgaaatcgtatggtgataatggactggctttgtttgcgttagcattacatttcagaattgatgatattgatagtgtcgcagcagagtccattaccgatggacatgacgataagaaatgtgaccttgtgtatattaatgaagaagaagaatttgctgtacttgctcaatgctatttctcaagcaaagatagacaggaagctccagcaaataaagcgagtgatcttaatattgctttagcatggcttctgcaaagagatttgcatgatgtacccgatagaataaaatcttctgctcaacagatacggacatcaatcaaacaagggaaaattaaaactctgtacgtttggtatgttcataacttaccatcttcaacaaatgtggctcaagagctaattacggttcagcagacagcagcaactattttaaaacatgattttgaagatgctaaaatacaagtgcatgcaatggaagtaggcactgaaaagttgacggaatggtatagtgaatcactatcaccaatactggttgatgagattttcaatattaaagtcagtgatggtggctatgaaataaaaggagataattggaatgcattctgtactaccattcagggaagagatttagctagagcgtacaaaaagcataaattaaaaatattttcagcaaatgttagagactaccttggatcaaggtcatctgattcaaatatcaataatggtatccgtaacagtgcggaaaattcagcatcagaattttgggcatacaataatggcgtaactgttttggttcatgaatataaattcaatgaagcatcaaagaatcttgaaatcagagggatgtcaatagttaatggagcacagacaacaggtgctttaggaacgctgccacgattacctccagaatcagttaaagtccaagctagatttataaaagtcaaagatgcggatgctgatctaattcagaatataattcagtataataacagtcagaataaagttgaagcatctgatttcagaagcacagacaaaattcaaaaacgacttaaaaatgaatttgcttctattcctgatgctgaatatgatggaggaagacgaggaggtgctgaaagtgtcattcgtcgaaaaactaatctactgccttcttatactgttggtcaagctttgatgagtttccatggagagccgacgatagcttataatcagcgatctgcaatttggactaatgactctcattattctaagatttttaatgacagtacaaaagcttcacatattgtttgtgcgtattctctcatgcggtgtattgagaacaagaaaatagctttggcaaagaaagatactctttcaaaaaatgatagcgctcaattgggatatctcaggcatcgtggttcaatacctttattgtgctcggctattgccgaatgtttggaaaactttttgggccgtcccgttcctaatttatttagagtttcgtttggaagtacggtctctccttctcaggctgaaagtatttgggagccaattgtagatgtgtgtctggctttaagtaatcagttgctgcctgcactggttgaaggagggttgaaaagtcctacaaaagttaaagattgtatatcaaatttttcacagcttattactgcaacggcccaaatgaaccagcctgtatatgaggcatttgagaaaaaaatcaaatccgcattctaa

SEQ ID NO: 214506 - DNA, 1026 bp, Klebsiella pneumoniae
atgggaaagagtaagaagaaccgcgctgcgtcgcagaaccagacccagcataaaagccagacttcagccgaagcattcagcttcggcgatcccattccagttctggatcgccgcgaactactggactatgtggaatgcgtacagacagatcgctggtatgagccgccagtgagttttgacggactggcgcgaaccttccgcgccgccgtgcatcacagctcaccgattgcagtaaagtgcaatattctgaccagcacctatatccctcacccgctgctcagccagcaggctttttcacgttttgtgcaggactatctggtttttggtaacgcctacctggagaaacgcactaaccgcttcggtgaagttatcgcccttgagcctgctctggcaaaatacacccgacgcggattagacatggatacttactggtttgtgcaatatggtatgacaacccagccgtatcagttcacgaaaggcagcatttttcatctgatggaaccggacatcaaccaggagatctacggcctgcccggttatctttctgccatcccatccgctttgctcaacgagtccgccacgctgttccgccgcaagtattacatcaacggcagccatgcaggcttcatcatgtatatgaccgatgccgcgcagaatcaggaggatgtgaacaatctccgcaacgcgatgaaaagtgccaaaggtcctggtaacttccgtaacctgtttatgtactcgcctaacggtaaaaaagacgggcttcaaatcatcccgttatcagaagtcgcggcgaaggatgaatttctgaatatcaaaaatgtcagccgcgacgacatgatggctgcgcaccgcgtgccgccgcaaatgatggggattatgcctaataatgttggagggtttggggatgtagagaaagccagttgcgtttttgttcgtaacgaattaatgccgctacagaaacggctacaggaactaaatagatggttgaaagatgaaattattcgttttgcgacatactcattatga

SEQ ID NO: 214507 - DNA, 1767 bp, Klebsiella pneumoniae
atgaacaccacactgacatccgcagatctcgatccccgtcggcaggccatgctgctgtactttcagggatatcgcgtagcccgcattgctgaaatgctgggcgagaaagttgcaaccgttcacagctggaagaaacgcgacaagtggggtgactatgggccgctggatcagatgcagctcaccaccgccgcacgctactgccagctcatcatgaaggagcacaaagaagggaaagatttcaaagagattgacctgctggcgcgccagtcggagcgccacgcgcggatcggcaagtttaacaatggcggcaacgaagccgacttaaaccctaacgtcgccaaccgcaacaaaggcccgcgtcgtcagccggaaaagaacgttttcaccgatgaacagattgagaagctggaagaaatcttccattcctccatgttcaactaccagcgccactggtgggaagccggaaaaaccaaccgcatccgcaacctgctgaagtcacgccaggtcggcgcgaccttttactttgcccgtgaagccctgattgacgccctgcttaccggacgtaaccagattttcctttccgccagtaaggcacaggcccacgtctttaaacagtacatcatcgacttcgccaaagaagtggaagtggagctgaaaggcgatccgatggtgcttcccagcggggctacgctttacttcctcggcaccaatgcccgcacggcccagagttaccacggcaacctgtatctggatgaatatttctggataccgaaattccaggagctgcgcaaagtggcttccggtatggctattcacaaaaaatggcgacaaacctatttttccacaccatccagcctgacacacagtgcttatccgttctggtccggtgcgctgttcaaccgtgggcgcaacaaagccgataaggtggacatcgacctgtcccacagcaatctggcccccggcctgctgtgcgcagacgggcaataccgccagatagtcaccgtggaagatgctgtgcgcggcggatgtaacctgttcgatctcgaccagttgcgcatggagtacagcccggacgaataccagaacctgctgatgtgcgagtttgtggacgatctcgcgtccgtgtttccgctcagcgagctgcaggcgtgcatggtggacagctgggaagtctggaccgactttcatgcactggccctgcgcccgtttggctggcgcgaagtgtggatcggttatgacccggcaaaaggtacgcaaaacggcgacagcgccgggtgcgtggtggtggcaccgccagccgtgccgggcggtaagttccgcattcttgagcgtcaccagtggcgcgggatggacttccgcgcccaggctgacgccatcaaaaaactgactgaacagtacaacgtgacatacatcggtatcgactcaaccggcgtcggtcacggggtttacgagaacgtgaaagcgttttttcctgccgtccgggagtttgtctacaaccccaacgttaaaaacgctctggtactcaaggcctacgacattatcagccaccgccgtctggagtttgacgccgggcacaccgacattgcgcagtcattcatggcaatccgtcgcgccaccaccgccagtggcaaccgcccgacgtatgaagccagccgcagcgaagaaaccagccacgccgatctggcgtgggcaacaatgcacgcactgtttaacgaaccactgcagggcgagtccgccaataccagtaatattgtggagattttttga

SEQ ID NO: 214508 - DNA, 834 bp, Klebsiella pneumoniae
atgacagtgaaagcaaagcgttttcgcatcggggtggaaggtgccaccaccgacggacgcgaaatccagcgtgaatggctggaacagatggcagccagctacaacccggcagtgtataccgcgctgattaaccttgagcacatcaagtcttatctgccggacagcacctttaaccgctacggcaaggtaacggcgctgtttgctgaagaaatcacggaaggtccgctggcaggcaagatggcgctgtatgccgacgttgagccaacggagtccctggtggagctggtgaaaaaaggccagaaattattcacttctatggaagtcagcccgaagttcgctgatacgggcaaagcctacctggttggcctggctgccactgatgatccagccagtctgggtacggaaatgctgacattcagcgccagtgcagcccataacccgctggcaaaccgcaagcagaatcccgccaatctctttaccgccgcagaggaaacggtgatcgaactggaagaaatccaggaggacaagccgtccctgtttgcccgcgtcacggcgctgttcaccaaaaaagagcagtccgacgatgcccggttctctgatgtgcataaggccgtggagctggtcgccactgagcagcaaaacctgagcgcacgcaccgaaaaatccctgtctgagcaggaagaacgcctgtctgagctggagacagccctgcaggcacaacaggccgcctttaacgaactggtggacaagctgagccatgaggactgccgccaggactaccgccagcgtgcaacaggcggtaacgcccccgctgacactctgaccaattgctga

SEQ ID NO: 214509 - DNA, 1059 bp, Klebsiella pneumoniae
atgaagaagaatacccgctttgcttttaacgcttacctgcagcagctggcgcgtctgaacggtgtggcagctgaagaactgtccagcaagttcaccgtggagccgtctgtacagcagacgctggaagaccagatccagcagtccgccgctttcctgacgctgattaacgtcacgccagtgactgagcagtccggtcagctgctggggctgggggttggcagcaccattgccggaaccactgacaccaccgcgaaagagcgtgaacctgtcgatccgacgctgatggtcgatgtggaatacaaatgcgaacagaccaactttgacacggtgctgacctacgcgaagctggacctgtgggcgaagtttcaggatttccaggtgcgtatccgtaacgccatcgtgaaacgtcaggcactggaccgcatcatgatcggctttaacggcgtgaagcgtgcgaaaacctccaaccgtagcgaaaacccgctgctgcaggatgtgaacaaaggctggctgcagaaaatccgtgaggatgcaccggagcacgtcatgggcagcaccaccacgggcggtgaaaccacaccgggtgcggtgaaagtcggtaaaggtggcgaatatgccaacctggacgccgtggtgatggatgccgttaatgagcttatcgacgtggtctaccaggacgatgacgatctggtggtgatttgcggtcgtgaactgctgtctgacaagtatttcccgctggtcaacaaagagcaggaaaacagtgaaaaactggcagccgatatgattatcagtcagaaacgcatgggcggtctgcaggccgtgcgtgcgccgttcttcccgccgaatgcgctgctgatcacccgtctggataacctgtccatctactggcaggaagacacccgccgccgttcagttatcgacaacccgaaacgtgaccggattgaaaactttgaatctgttaacgaagcctatgtggttgaggactaccgctgcgccgcactggtggaaaacatccagattggcgatttcagcgccgccgcagcagaagccggagcgtaa

SEQ ID NO: 214510 - DNA, 651 bp, Klebsiella pneumoniae
atgagcctgagtcccgcacggcagcatcgcctgcgcgttcaggctgaacaggccgcccgtgaaggcggcagtgttcgccacgcgtcgggctatgacctgatgctgctgcaactggcggaagaccgccgccgtctcaagggcgttcagtccacggtgaaaaaagcggaaataaaggtggagctgctgccgaaatatgccgcctgggcggagggcgtcctggctgccggaggcgctcaacaggatgacgtgctgatgtacgtgatgctgtggcgcattgatgccggagattatgccggggcgctggagatcgggcgtcatgccctgcgtcatggctgggtgatgccgctgggtaaccgcaacgtgcagaccgtgctggcagaggaaatggcagatgcagcccagagcgcaatgcttgccgccaccggctttgatgccgatctgttgctgcagacgctggagctgacagacggtctggatatgccggaccagtcacgggcgcgtctgcataaagcgattggcgctgtcctgagtgaaagcaatccggcttccgcccttaatcatcttaaccatgcgttacagctcgatccccgctgtggcgtgaaaaaagacaaacagcagctggagcgcagactgcgcaatgacagccgctga

SEQ ID NO: 214511 - DNA, 465 bp, Klebsiella pneumoniae
atgaagtttgttgcgccagaacaggcaccggaacaggcggaaatcatcagaaatacgccgttctggcctgatgtggacctgtcggagtttcgcagcgtgatgcgcactgacggcacggtgacgcagccgcgtttaaagcaggttgcgctgtcggcaatttcggaggtcaacgcagagctgtatgagtttcgcagacgccagcagatgctggggtatgcctcgctggcagaggttccggcagaacagctggacgggaaaagtgagcgcattcagcactatttcaacgcggtttactgctgggcacgcgccatgctcaacgaacgataccaggactatgacgccacggcatccggtgtgaagcgcggcgaagaactggcagaagccagcggtgatttgtggcgtgacgcccgctgggccgtcagccgggtgcaggatgcgccgcactgcacagtggagctgatctga

SEQ ID NO: 214512 - DNA, 204 bp, Klebsiella pneumoniae
atgaaagtgcgtgcgtaccagggtgacacggtggacgcgctttgctggcgtcattacggacgcacgcagggcgtcacggagcaggtactgcaggcaaatccggggctggctgagcacggcccgttcttaccacacgggctgcaggtggatctgccggatattgccaccacctccacggtgcagaccgtccagttatgggactga

SEQ ID NO: 214513 - DNA, 216 bp, Klebsiella pneumoniae
atgacgcttgaacggatcagcgccttcatcacgtactgcatcgctgtactgctggcatggatgggagatttatcgcttaaggatgtgtcgacagtgggcggtgtgttgattggcgtgctgatgctggccatcaactggtactacaaacacaaaacctaccagctgctgcgcggcggaaaaattacacggggggaatatgaatccttcaaccgttaa

SEQ ID NO: 214514 - DNA, 510 bp, Klebsiella pneumoniae
atgaatccttcaaccgttaaacgctgcctggtaggggcggtgctggcgattgccgccaccctgccgggctttcagcaacttcatacctcaatggaagggttgaagctgatagccgattacgagggctgccgcctgcagccgtatcagtgtgatgcgggggtgtggaccgatggcattggcaatacgtccggcgtggtgccggggaagaccatcacggaacggcaggccgccgggagtttcatcaccaacgttttaagggtggagaaggcgctggatcgctgtgtcctggtgagcgtaccgcagaacgtctatgacgcgctggtatcgctggccttcaacgtgggaaccggcaatgcctgcggttcaaccatggtgaagtttatcaatcagaagcgctggcgcgaggcctgctatcagttgccacgctgggtatacgtcaaaggcgtatttaatccgggactggacaaccgccgcgcgcgggagctgtcctggtgcttaaaaggagcgtaa

SEQ ID NO: 214515 - DNA, 384 bp, Klebsiella pneumoniae
atgaaaaagaaactgatcggtgggttattttcggtgctgtacacggctctgatgatttttagtctctttgttccaaacaatattgttccggcactggttacagccttgacctggatagcctgcctgctgagctggggagcggtgctactatgcctggctggatggtatgcgggcggcactcatcggcgggaggcaaagcaggcgctgacgcgctttttcagcacgccaggaaaccaggtgatccgatgggccaggtgttcactacttgtgatttttctcccctttacgggccacgttgtcaccctggtattttatctgctgacgctggccgcgcttaaggttctgcgtgcgcagattattgatgcggagccggtgacggtatga

SEQ ID NO: 214516 - DNA, 291 bp, Klebsiella pneumoniae
gtgaaaatgaggatttacgccgctgggctgacactcttctgcctgctgacgttatcaggatgcgcgaacgtccagccctcgccggaggtgctgcttaccgtgaatggttgtcccagagtgacgcagtgccgcctggaaaagtcggtggcacgcactaacggcgatctgctgaccgcgctggatgaagcggaggcggcctgggcggtctgcgccgataaagtggacacgataatttcctgtcaggagcgaaacagtgaacaagcctcaatccttacgccgcgccctgaataa

SEQ ID NO: 214517 - DNA, 432 bp, Klebsiella pneumoniae
gtgaacaagcctcaatccttacgccgcgccctgaataacgcggtgccatatgtccgtgataacccggataagctgcatttgttcgttgataacggatcggtggtggcaaccggggcagcgtcactttcatgggaatatcgttacaccctgaatgtggtgattgtggatttcagcggcgatcaggggttattgatggcgccggtggtggcctggctcatggagaatcagccggatgccattcataacccggagctgcgggaaaagttgctttcctttgaagtcgatattttgcgcaatgatatctgtgatatcagcctgaacctgcaactgacagagcgtgtgatagtcagcgctgacggtgacgtgtccagcgtcgaagcagtgccggaaccggacgaaccggacgaaatgtgggcggtgagccgtggctga

SEQ ID NO: 214518 - DNA, 447 bp, Klebsiella pneumoniae
gtggctgatctgcaggaagttgacgcctggttagatgcgctcttggcgggtctggagcctgccgcacgtaagcgcatgatgcgggagctggcgcagcagctgcgcctcaaccagcagaaaaatatcaggatgcagcgcaacccggacgggacggcttacgagccgcgtcgcgtgacggccagaacgaaacagggccgcatccgtcggcagatgtttgcaaaactccgcacaacaaaatacctgaaagccgtcgccagccaggactcggcaagcgtcgagtttgagagccgtgtgcagcgcatagcccgtgtgcatcactatggcttgcgtgatcgggtcagccgtaaaggccctgtgattacttatccgcatcgacgattactaggagctaatcatcatgtcattgagttaattcacaatagtttatatagatggttgtttaattaa

SEQ ID NO: 214519 - DNA, 693 bp, Klebsiella pneumoniae
atggacgaagaacaaaaaatttatttagaaactttaaaagagttaaacacaagaagtattagcacaagaagaataacaatcacttttatatacattcttttgttggccactgccctagtattaaccggaatcttcgcaatcaaatcaaaaaacaacaacccaataacaaatttcatatcaagcatgattgatggaaataatgaactatatcaagcaaccactattctaaataactacacaaaagccttagaggcctttttcaatacaaaaacacaaaacctacatgacaaaaataatagcgttagcgatgccaacaccgctagaaatgatagattcaagttacaacctgatgatttaatttacctcaaaaaagacaagtcagaaaaaatagccgattcaatagcctctatattaattagcttttccgttcttttatttataggatatgtaacacgcatatttgttatttttaccaaatattacatgcaacttagcaatgattatgagaaccaaaagatagcatatatgctatctcggggagatatatcaaaattctcgtctactctagatgccttaaggaatcacaatatcagctttgataaaaccccgcatcctccacaagaaaaattaattgcagggctaacagaggctatagcagcacaaacaaaaagtaaatttaaaaatgaaaattaa

SEQ ID NO: 214520 - DNA, 573 bp, Klebsiella pneumoniae
atgaatactcaactaaccgaaatcatgcgccttatcactaatctgatccgcaccggcattgtgaccgaagtggaccgggacagctggctgtgccgggtgaaaacgggcgacctcgaaaccaactggattaactggctgacctaccgtgcaggtaaatcccgcacctggtggtgcccgtctccaggggagcaggtggtgctgttcagcctgggcggcaatctggagacagcctttgcgcttccggccatctactccaacgcctgcccgccgccgtcagactctgaaagtgcggacgtgaccgcatacgaggatggcggctggttcgaatacgaccccgccaccgggcgctggattattcgcggcgtgaaaagcgtgctgattgagtcttcgcaggttgtctcctgcaaaaccggtgagtttgtgatcgaggctgacaccacccgtattaacagcaatgtgatcctgaatggcgatgtgacccacggcggcggcgcgatgacgtcaaacggcgtcgttgctgataagcataaacaccctggcgacagtggcggaacgacaggagacccattttga

SEQ ID NO: 214521 - DNA, 363 bp, Klebsiella pneumoniae
ttgacgctctatatcgggatgagccgcgataccggcagagctattacggaatctgaccacctgcgtcagtcggtgcgtgacattttgctgaccccgcaagggagccggcttgcgcgccgggagtatggttccctgctttcagcgctcattgaccagccgcaaaacccggcgctgcgcctgcaaatcatggctgcggtgtatgtggcgctgcggcgctgggagccgcggctgcaactggacaccatcacggttaacagcagcaacatggatggcgcaatggttattgagctggcaggccagcgtaatgacggcgtgcccgtgtccctttccgtatcgacaggagcagacaatggccgttattga

SEQ ID NO: 214522 - DNA, 909 bp, Klebsiella pneumoniae
atggccgttattgacctttcccagctgccgccgccgcaaattgtggatgtgccggattttgaaaccctgctgactgagcgcaaggctgaatttgtcgcgttatttccggcagaagaacaggaggccgtggcccgcaccttaacgcttgagtctgagccggtggtgaaaatgctgcaggaaaatgtgtaccgggagttgctgctgcgccagaggattaacgaggcagcgagagccgtgatggtggcctattccggcggggatgacctggacaatttaggcgcaaataacaacgtacagcgccgggtgattacagctgcagatgacaccacaacaccacccacggaggcggtaatggaatctgacgcggattatcgccagcgcattcctgctgcatttgaggggatgagcgttgccggaccagtcggagcctatgaatatcacgcgcttagctcggatggtcgggtggcggatgcgtcagcgttcagcccgtcaccggcagaagtcgtggtgactattctggcccgcgacggcgatggtactgcgcctgaagacttactgcaggtcgtcggtgaggccctgaatgatgaggctgtgcggccagtggcggatcgggtgagcgtccgatctgctgagattgtcccctatgaaattgatgcggttctttatgtctaccccggcccggctaaggaacccatcctggcggcagcgaaagcgcagggcacggcatacatcaacgagcagcgtcgcctggggcgtgatgtgcggttgtccgcgatctatgccgcgctgcatgttcagggtgtccagcgcgtcgaactgataaagccactgacggacatggtgctagataaaacgcaggcgtcatattgcaccgattttaaagcagaaattggtggctctgatgactag

SEQ ID NO: 214523 - DNA, 600 bp, Klebsiella pneumoniae
atgactagcagcctgttgccgccggggtcgtctgcgctggagcgcaggctggcgcaagcctgttcaggtatcagtgatttaaacgtgccgctgcgtgacctgtggaacccgtggaaatgcccggcaaagtttctgccgtacctggcctgggctttctccgttgatcgatgggaggaaacctggacagaaaccgctaagcggcaggcagtaagtgatgcgttctggatccatcagcgaaaaggaacggtggcggcagttaagcgggtgatcgaggggctggggtattcgatgaccattgaggaatggtgggaggtggccgaccccgccgggacgtttcggcttgagatcgatctgaatgaaatcggcatcactgagccgatgatttatgagcttgagaggattataggtgatgccaaaccggcgagcagacacatctctcagatgacattgtctactacctctcgcggtattgcgcatcttggtgctgccgcaattattggcgacgaagtaagtgtttatccgcagcaatataagccgggcaacgatattttttacgatggcctgattttccatgacggcaattatcagtatgaggaatga

SEQ ID NO: 214524 - DNA, 1653 bp, Klebsiella pneumoniae
atggcgagcataaaagaattgccgcgctgggaagatgaggtctatcagatcgcgcgtggtgataaagtagaaggtggtgtcggtggtatagcgaatatgcaggcgaagacgctggcagaacgtacccggtatctaaaaaacgttgttgaatctattccggattaccgcgaattcacattttataaaactgaaaatgatccggaaggaaagttagctggaatcgctgaaacccatgacggccagctatttcgtgttgctcaggggatcgatagcgaaaactcttttatctattatcggaatgatgatggtgatgctgttccggttgcatggcagcctggcacagagttagtcaaaatattgagcaacctgattagtgatcagggagataacccattttctgtcgttttcgataatgggctttctccgttgggctataaaaatggacgcttatacgctgatgaatttgaaaagctatactcctcagattccgggttagagtttggtggcagcataattgataataatcctccagaaggttggagatttgttatttactaccgcaacgggttagtgatgtgtggtcaaaaagatgacggcacaatgatcggttttggtgagggggggagcggtggcggttctattgaaccaggtgatacagctcctgactatgattcaattcgaatgtattcaggtacagcgacagtgcgtgacgtagttgggaaacgcgctggcggtcgttttgttgttaatccggatgacaccacatcggaggagatccccggagggatactggtcgatgtgctggggcgtcgatggtatcgacaggctgattttgtttcctatgatatgtttcttgcgccgcgaatacccgcagcgactctgttgtccgtacaggttgcactggcaatggggaacaggtcatcagcaatagcatacctcgcaggagtggaggcagcagataaagctatccaggcggctcaccgctttgcgaacatcatgaaaatccccgtacgtcagaatgacggtgcattcctgatgttggttgatcatgaagcagaagtacgaacaaataccgacctgtcaggggcgataattcttacctctgcaaattccggtgtgaacgagatacgctggggacctttacgactgcttgacccttcagcacctgaaccgatgcgcatgttcaacataaaaggtaaaccgcgtattgaactgacagctgaagagttagcgacatttaacgcaacgtattcaaagtatctgaaaaaaggctctcagtacctgccttatccgaaactgtacgcgtattacggtgggatgttctatgcgctgtcgcatgaagtggaaatttaccgcaatggagaaaggaataagccgcgtgaccgcgtgttataccgagagttttcacgtattggaaaaaatggcgcattgaccgagaggattgtgaaagacattccagacgggacgattggatatgccgccattatacagaaagaagatgattttctggaatttaaatgcccgcattttattgaactgggcgacagtcgtcgattcctgaatatcgaagtctccaggccgatggtgcgcattaaaaatctggtgcatacgtcatggcagactaaggaaggtgcgaacaagttcctgatatga

SEQ ID NO: 214525 - DNA, 573 bp, Klebsiella pneumoniae; identical to SEQ ID NO: 143279

SEQ ID NO: 214526 - DNA, 1584 bp, Klebsiella pneumoniae
atgcaggtactggtcgcaatcggtggccacggccagcggcaattcgctggcctgcttgaggctggcgaatttcgcgggcggcaccaggtagtcctcgaagtccttgaactggcgcgagccttgcacccagatgtcgccggagcgcagcgcgttcttcagctccgacagcgcgcacagttcgtagtagcgccggtcgatgccggtgtcggtcatcaccagcttctgccagcgcggcttgatgaactcggtcggcgcgtcggtgggcaccttgcgggcgttgtcgctgttcatgctgcgcagcacctcgatggcgtcgagtacgtccttggcggcgggcgcggcccgcaacttgagcacgtcgagaaattccggcgcgtagcggcgcagcgtggcgtagctctcgccgatgcggtgcaggaaatcgaagtcctcgggttgcgcgagccgctgcgcttcggtgacgctctcggcgaaagcatcccaggacatgacggcctcgatggcggcgaacggatcgcggcccgcttgcttggcctcgatcagcgcctggccgatgcgcccgaacagccgcaccttggcattgatcgccttgccggatgcctggaactgctgctgatgcttgttcttggcggcattgaacagcttgcccaggatgcggtcatgcaggtcgatgatttcgtcggtgacggtggccatgccctcgatggcgagcgccaccagggtcgcgtaacgccgctgcggctcgaacttcgccaggtcggcgggcgtcatctggccgccctcgcgggcgatcttgagcagccggttctggtgaaccagccgctcgatgccggagggcaggtcgagcgcctgccacgccttgaggcgttcgatgtgttccagcatgtgccgcgagttcggtttgaccggggattgccgcagccaggccagccacgtcgtcttgccgttgtcgcggcgcttgagcagatcgtcgaggcgacggcgatgcacgtccgtcagcggctcagccaaggcgtcgtagagacgccggttggcgcgggtaatcgcttcggcgctcgcccgctcgacggcgttgagggcgggcacaatgaccgactgccgccgcaggtgctcgatcaaggctctggccagcacgatgcccttgtcggtttgcatggccagctcggtcagcaactggacagcctgccggtagtggccaatcgtgaacggctggaagccgaacaccgtttgcagctcgaccaggtgctcgcgtcgggtctgctcacgctgcccgtactcgtcccagctttcgatgccgaccttgagctggttggcgaccagtctcagcaatggcgggaacggtggctcatcagcgccaaggatgacgccgggaaagcgcaggtagcagagctgcaccgcgaagcccagccgattggccgggccgcgccgctgccggatgatggagaggtcgctttcgctgaacgtgtagtgacggatcaactcatccttggtgtccggcaacgccagcaggctttcgcgctcggcggcggagaggatcgaacggcggggcatgcggtttccttcttcttgaaattctattcttga

SEQ ID NO: 214527 - DNA, 291 bp, Klebsiella pneumoniae; identical to SEQ ID NO: 16838

SEQ ID NO: 214528 - DNA, 402 bp, Klebsiella pneumoniae; identical to SEQ ID NO: 16839

SEQ ID NO: 214529 - DNA, 357 bp, Klebsiella pneumoniae; identical to SEQ ID NO: 16840

SEQ ID NO: 214530 - DNA, 315 bp, Klebsiella pneumoniae; identical to SEQ ID NO: 16841

SEQ ID NO: 214531 - DNA, 1182 bp, Klebsiella pneumoniae; identical to SEQ ID NO: 92418

SEQ ID NO: 214532 - DNA, 606 bp, Klebsiella pneumoniae; identical to SEQ ID NO: 107131

SEQ ID NO: 214533 - DNA, 2898 bp, Klebsiella pneumoniae
atgtcacgacgccatattttcaccgaacggcagcgagcagcgctgttcgatctgcccacggacgaactgtcgctactgaagttctacacgctgggcgatgatgacctggaaaacattaggcagcgccgcagaccggaaaacaggattggctttgccctgcaactttgtgccttacgatatccgggccgtgcactggctcctggtgagatgatcccgcgtgaagtcctttccttcgtcggtgctcagcttggagttccggctgatgcgcttctcacttatgccacacggcgccaaacccgtcagcagcacatggacacgctgcgcgaaatttacggctacaagaccttcacgggccgtggtgcccgtgatctgcgggagtggactttcggccaggccgaagatgccagatcaaacgaggatcttgctcatcgttttattgtgcggtgtcgggaaacttccaccattctgcccgcagtatcgacaatcgagcgcttgtgcgcggatgctctggtcgccgctgagcggcggattgaaacgcggattgcggaaaatttaacagcggatgttcgcgatcacctggacaaacttctgagtgaaatgctcgccggcaatatcagtcgtttcatctggcttcgcaacttcgaggttggtaacaactcggctgctgctaaccgtttgctcgacaggctcgaatttctgcgtaccctgaatatcaatcatagtgctttggccagcatacctgcccatcgcattgcccggctgcgtcggcagggtgaacgctacttcaccgacggtttgcgtgacatcacttcggaccgccgctgggcgatccttgccgtctgtgttgtggagtgggaagcggcgattgctgatgccatagtcgaaacccatgacaggatcgtaggaaaaacctggcgggaagcgaagcgccagcatgacgaaacaatttccggctctaaagccacactcacggatacgatccgtaccttcaccgcgctgggagcttcgttgcttgaggcccgcagtgacggaaccccgctggagatggctgtcgccagttcggttgcatgggaccggctcgctcaactggtagcgacagggactcaactcagcaacacgctagccgatgagcctcttgcatatgtcgggcagggataccatcgctttcgtcgttatgcgccccgcatgttgcgctgtctgaagctcgaagccgcgccggtcgccggaccattggtagcagcagctttgtcgatcggagagatgaaaggtgttgcatcgccagaaaggcgtttcctgcggcccagctccaaatggaaccgtcatttacgagctcaggaaaaaggagatacccgtctttgggaagtggcggtactctttcacctccgggatgcttttcgttccggagatgtctggctcgctcattcgcgccgctatggtgacctcaagcaggtactggtgccgatgatcgcggcgcaggaaaatgcaaaactggccgtgccttccaacccacaggattggctggcagacagaaaggcgcgactcacgatcgctcttaagcggctggcccgggctgcccgtaacggcactattccgcacggtagcatagaagatggaacgttgcggatcgacaggttgacagcagacgtgccggatggtgccgaggcactcatactggatctgtatcgccgaatgccgtccgttcggattaccgacatgctgcttgaagttgatgcagcccttggtttcacagatgcgtttacccatctgagaaccggggctccatgtcgcgaccggatcggtctgctcaacgtcctgctcgctgaagggctcaatctgggcctgcgtaagatggcggaagctacaaacacgcatgattactggcagctctcacgccttgcccgctggcatgttgaaagcgaagccatgaaccaggcattggcagttgtggtggccgcgcagggtaaactgccgatgtcacgcgtctgggggatgggcacgtcagcatcgagcgatggtcagtttttcccgacagcgcggcatggcgaagtcatgaacatggtcaatgccaaatatggttctgttcccggcctcaaagcgtatactcacgtaagcgaccagttcgcgccattcgcttgtcagtcgatcccggcgaccgtgagcgaggcaccgtatattctcgatggactactgatgaacgaggtcggtcgccatgttcgcgaacagtatgccgatacagcagggttcaccgaccatttgttcggagccagtagcctgctcggctacaatctcgttctgcgaatcagggatctgccatcgaagcggttgtacgtatttaatcccgatacgacccccagggagttacgcaagttggtaggcggaaaagcccgggaggatcttatcgttgcgaactggcctgatattttccgttgtgccgcgacgatgaccgctggcaaaatcaggcccagccaactcctgcgcaagctcgcttcttacccacgacaaaacaaccttgcagttgcgcttcgtgaagttggtcgtattgaacggacccttttcattattgagtggatcctggatacggacatgcagcggcgtgctcagatcggtcttaacaagggagaggcccaccatgcgctcaaaaatgcgctccgtatcgggaggcagggggaaattcgcgatcgcacgacagaggggcagcactaccgaatcgctgggctcaatttattgactgcggtgatcatttactggaataccgtccatcttggtcatgccgtcacggagcggcggaacgaagggttggatgttccccctgaatttcttccccacatatccccattgggctgggcgcacattctactgactggcgaatatctttggcccaaggaaccgaaagcttag

SEQ ID NO: 214534 - DNA, 5736 bp, Klebsiella pneumoniae
atgtcgactgtagatacctctacagcagaggaactcaatcaaggaggctcagattttattctgacttccctcgaggctatgcgtaagaagttattggaccttacgtctcgaaatcgacttttgaatttccctatcactcaaaaagggtcttcactacgtattgttgatgaattaccagaacagctttatgaaaccctttgctcggaaatcccgatggaatttgctcctgtgcccgatccaactagagcgcagctgttagagcatggctatctcaaagttgggccagatggtaaagatatacagttaagagctcatcctagcgctaaggattgggcgcacgtcttaggaatccgtacagattttgatttaccagatagccataaaacggttgtttctgattcagatagagagttgctggaaaaagcccatcagtttatcttgcaatatgcccaaggccagaatggaaaattaacagggattcgttctgaatacgttaatcaaggtatagctttgtcagcgttgaaggaggcgtgctgcttagcaggctatgaagggcttgaggattttgaacgacaggcaaaggctgggaatgagattagtatatcttcttccaatccctctcatgacgataatcggatacaggctctgctttatccaaatgaactggaagcttgtttgcgcgccatctatggtaaggctcaaactgctttggaggagagtggcgccaacatcttgtatttggcgttagggttccttgagtggtatgaaagcgattcctctgaaaaggcacgttatgcaccgttatttacaattccggtgagatgtgaacgaggaaaattagatccgaaggatggtctttacaagtttcaactttattacacgggtgaagatattttgcccaatctctctttgaaggaaaaacttcagactgactttggcctcgctcttcctttgttcaatgaagaggaaactccagagtcttattttgcttcggtgaagaaggttgtagagcagcacaaacctaaatggtctgtgaaacgttatggtgcacttagcttgctcaattttggcaagatgatgatgtatcttgacctcgatcctgcccgctggccttgtgacaagcgcaatatattgtctcatgaagtaattcgtcgctttttcaccagtcagagctgtggtcaagagaattccggcttacctggtggcttcggtcagcatgagtactgcatcgatagttaccctgatattcatgacaaggttccactaatcgatgatgcggatagctcccagcacagtgcgttgatcgatgctatccgtggtcaaaacttagtcattgagggccctcctggtagtggcaaatcacaaacgatcaccaacttgattgcagcagctctgctcaacggtaagaaagtcctgtttgtggcagagaagatggctgcactggaggtcgtcaaacgtcgcttggatcgtgcggggctaggtcaattttgcttagagttgcacagtcataaaactcataagcgcaaggtgctggatgatattaaggctcgcttggtgagtcaggcgaccatgcctactatggaagagattgatgctcagattttgcgttatgaagatcttaagcagcagctcaatgaatatgccgcattgatcaataaccaatgggcgcaaacaggcaaaacgatccatcagattttgagtggtgcaacccgttatcgtcacaaattagatattgatgcaacagcacttcatatcgaaaacctttccgggaagcagttggataaagtgacccaattacggctgcgtgaccaaatagtagagtttagccgcatctacaaagaggttcgtgagcaggtgggggctaatgcagaaatatatgagcacccttggagcggtgtgaataacacacaaattcaattgtttgacagcgctcgtatagtcgatttgctacaaacttggcagacatcaattgtcgactttcaacatagctatcaagaatatgtagataagtgggcgttagaaggcgaaagccttaatacgcttcaatatattgagcaattggtagaagatcagtcgaatcttccagtgttgtgtggttcagagcatttcccagcacttagtgagctagattcacccgatgctattgcacgggtgcgtcactatttagataggttcgagttgctacaaggtcattatgtggccttgagccaggttatcgagcctcaaaagctacgacttttagaacaaggacaatcgtgtgactttcctcgtgaagagctggaaaaatatggtgcagcagaggatttcactttacgtgatttggtcaggtggcttgaatccatccaatcaattcatgatgagttatcatctatttatgcgcaattaaacgatttcaaaaatgctttgccagatggtattgcttcgtatatcgatgattcgcaagctggattgctattctgctctgagttgttgtcgattctgggtgctttaccgactgagcttattagagttcgagatcctctttttgatgatgatgatatcgatgcagtattgcgcgacttaatgtgtcaaatcgaaacattgcgtcctttaagagatggtctatctactttgtatcaattggaccagttgccttcccaagagatgctcgcgcatgccgttgctgttatccagcaagggggattatttgcatggtttaagagtgattggcgtagtgccaaggcactgctcatggcgcaatctcgtaagcctgacactaagtttgctgagttaaaacgctgctcagctgatttgctcaagtattcggagctgttacaacggtttgaacaaagtgactttggtaatcaacttggtaatgcattccgagggttggacaccgactgtgaacaactcatgttattgcgtgattggtacaagaaggtccgagcttgttacgggataggttttggaaagcgagttgcgataggctctggattatttaacctagatggtgagattatcaaaggtgtgcatttaatcgagaaatcgcagattagctcaagattaatgactttggttaaacgggtcgagcacgaggctaagttattaccgcgtatttctagcttgttggaagaacatgcatcttggttaggtgagcaaggtgtattgatgcaatcttaccgacaggtgcggaatactctcattgccttgcagggatggtttatcaatccagatatatcattagagcagatgactcattcctccgagattttgcaaaacataaacgatcttcagatatcccttgaaaatgactcgttacagttaggggcgtttttacaattaaccccattggcttgcggtgcgtataaaaataatcaactgacgttagacactattaacgacacgctgaattttgccgagcaactggttgataagataaattgcgtatccttggctacccagatcagacatttggctagtggtagtgattacgatttactatgtcgtgatggtggggaaatagtttcgaaatggaatgaacagattaaaaatgctgagttatatgcgctagaaacaaagttagagcggagtcagtggctcaagtcgactgatggttctcttaatacattaatcgagcgcaacgaaagagcaatacagcaaccccgttggttgaacgggtgggttaactttattcgttgttacgagcagatgcatgaaaatggattgcagcgaatctggagtgctgtacttgcgggctcgctcccgattgaaaaagttgaattgggtttagcattagcaattcatgaccagctggcgcgggaggttattcacatccaccctgaattgatgagagtttccggctcacagcgcaatgctttgcagaagtcatttaaagattacgacaaaaaactgattgaattacaacgtcagcggattgcagcaaaaattgcttgccgaaatataccagaagggaattctggtggtaagaaaagtgaatatacagaactagctttgatcaaaaatgagctgggtaaaagaaccagacatattccaattaggcaattggttaaccgtgcatgtaatgcgctggttgcaattaaaccttgtttcatgatggggccaatgtcagcagctcattacctagaacctggacgaatggaatttgatctggtggtgatggacgaagcgtctcaggtgaagccagaggatgcattgggtgtcatcgcgaggggcaagcaactagtggtcgttggtgacccgaaacagctaccaccaaccagtttctttgatcgaagtgccgacggagaagatgacgatgatgccgcggctttaagtgatactgacagcattttggatgctgctttgccactgtttcctatgagacgtttgcgttggcactatcgttcacgacatgaaaagttgattgcatactctaaccgccatttttataacagtgatttggtgatattcccttccccaaatgctgagtctccagagtatgggattaaatttacctatgtgtcaaaaggtcggttctccaatcaacacaatattgaagaagcccaagcagttgctgaggccgtacttcatcatgcgcaacaccggccgggtgagtcactcggggtagtggccatgagttccaagcaacgcgatcaaattgagcgcgctatcgatgaattgcgccgaaatcgccctgaatttaacgatgcaatcgatggcttatatgccatggaagagtcactttttgtgaaaaaccttgagaacgttcaaggggatgagcgtgatgtaatctttatttcctttacctatggaccttctgagcatggtggaaaggtttatcaacgctttggacctatcaattccgatgttggctggcgtcgcttgaatgtgcttttcactcgatcaaaaaaacggatgcatgtgtttagttcaatgcgttctgaagatgtattgacgagtgaaaccagtaaacttggtgttatttcgttgaaaggttttttacagtttgccgaaagtggcaaactagattccctcacaacgcataccggcagggctccagatagtgactttgaggttgctgtaatggaagcactcaatcacgctgggtttgagtgtgaacctcaggtaggggttgcaggattctttattgatctagctgtgaaagatccaggttgtcctggccgttacttaatgggcatagagtgtgatggtgcggcttatcactcagctaattctgctcgtgatcgtgaccgtttgcgtcaagaggttctggagcgtttgggttggagaattagccgcatttggtccactgatttgttcagtaatcctgatgaggttctatctccgattatccgtaaactccatgagcttaaaacattggctccagacgttgttgtaccttcctatgaatatgtagaaacgattgagtcaagcgctgaagtggcgtctgactcaattgattctcttatgcccaatttggggcttaaggagcaacttaagtattttgccacacatgtcattgaggttgagcttcctaatgttgatgctgatcgtcgtttgttgcggcccgcaatgcttgaggctttgctggaacatcagcctttatcacgttccgagtttgttgaacgaatacctcattatctgcggcaagcaacagatgtatacgaagcgcaacgctttcttgaccgagtcttggcattaattgatggcgaagaggctgaagcaaatgatgcagcgtttgagtctgaattggcataa

SEQ ID NO: 214535 - DNA, 2043 bp, Klebsiella pneumoniae
atgaatgatgcaggcgttcgccccttttccattcgtgcactgcttgaagatcgcgcccgctatctggtgcccatgtaccagcgcaactatgcctggggtgagggagagatcacccagctgctgcaggatgtgctggattatcagcaaaaattggtcagtggtaaggggccgcaaacctactatatcggcaccctggtggtgtttgcccgggacgatggcagtttcgaggtaatcgatggccagcagcgctttactaccctctctctgctggccaattggctcaaacatcacgcgatagattcggtggatatgagctggtatcagaccatcaacctcgcttttgagagtcgcccgatatcgagccataccttcgagcgcttatggcagggtgttgccccctacgatttgcgggggagtaccttcaatgaaggtttggtgaacggttttgagctgattggcaaggcaatggcggatcttggtttggtaggggctaaactgacgaccttttgcgactacctcttcaagcatgtgcagatctctcgtatcgaagtacccaaggataccgatctcaatcacttcttcgaggcgatgaacaatcgcggcgagcagttggaaaagcatgaagtgatcaaggcgcggctgatggagacgctgaaccagatacccgaggaagagcatcgtcgccaaagtattcatatcctgacccgggtatgggatgcctgcgccaatatggagcgctatatccagtacggctttaccccgcaagagcgccaccgtctgtttggtgagagcgactggggtcagtttgtgccccgtgattttgcccatctgcttgatctgctaggatccccaaacacggccgacgctgccgataaaagccgtgcagctgccggtagccaagggcgcaccttgttggccattttgcaggatgacaagcttgatggtgagcagacggtggaggaggagagcgcaggctccgagcgctttaacagcgtcatcaacttctccaacttcttgctccatgtgctgcgactcctgagccgcgacccgggtgatacggagggggtgccgcttgatgataaacaactggtcgatcagtttgagctgcgagtgataaggcaaccggatccagtagcggcagttcagcgttttatctatggcctgttaaagagcaagtatctgtttgatcagttcatcatcaagcgcgagtttgccgatggcaaggatagttggagtctgaagcggctgcactggtattcggaaaagagcgtcagttacatcaatacctttgacaaggatgaaaatgagaatggtttctctggtgttaaccggcgggtcctgatgttgctgtcggcgtttcatgtgtcgaccccgaccctggtttacaaacattggctgaatggtgcactgagatatctgttcgacaattgtcaccctgatcaaccggtggatgccggggcttatctgtcctatctggagagtcaggctcgccgctttgtcttccagcgctttttggcgcctggtgaaggggcttcctattaccagatgctctaccttgataacgccctgttgcccgccatcaatgtggatgagagttggcacaaggtgattacatccaaacttcgcttcggtcatatcgagaacaactttgtcttcaacttcctcgactatctgctgtgggtacgagatcggaatagcgacaaagttgctggctcctttgagttcactttccgcagctcggtggagcacttctcaccccagcatccgatggatggctataaaccggttgagcagagtgcactccattcgtttggcaacctttgccttatcagccacagcaagaactcgcgcttgagtaacttccagccgcaacagaagcaggagcactttgaagcaagccttgccaataaccagactgatagtcttaaattgcttgctatgattcggctgatgaaagataaaggtcgttggctggaagatgagatagctgtgcatcaacaagatatgttgcaggtcttactatccaatcaaattcagcaataa

SEQ ID NO: 214536 - DNA, 1452 bp, Klebsiella pneumoniae
atggagagcattaataatcaagtgcagtcggtacgccagttgctggccattccccaactggccatcccaagctatcagcgaccttaccgctggggctccaagaatatctcggatctctttaccgatttggcaacccatcaggacaagagcgcctaccggctgggctcggtggtgtttcatcagcacaccgatagtgagcagggcgagatgcttgatatcgtcgatggtcagcaacgcaccctgaccctgatgttgaccgtcaaggcgctgatcgaggtgctggataacgaaaatcgcagtggcaaagagaagagtatccggtttcaacgtcaggatctgcgtgagcaattgcaggtcttgcgtggacctatcgatgcgtttatgcagcgccagcgcttccccagccgggattcggagttcaacctcagacgcaactatctggagttgcgtcggctggtggcccgccctgagtttgacgagcagcaaattgactttctgctcaaccgctgtcaggtggtctgctttgtactgcaggatatctcggaggcgttccagttcttcgattcgcaaaatgcccgggggcgcgatctggctcctcacgatctgctcaaggcatttcacctgcgcgagtttgccggtcatgaggccaatctcaaggccgaggcggtcgcccattgggagcgcctgccaagcgacgagctggccaatctgttcgccctctatctctatcgggtacgccagtgggccgagggcaagtcggcccgctactttggcaagggggaggtggatctcttcaagggggtcaacctagatcgggtagggcattatccttacgtggagtcgctgcgcatcgcccaccactttgtcgatgagtacaacagccagtaccagcgcaagattgacggccagtacatgacgtttccctttcatctcgaccagatgatcatcaatggtcggcgctttttcgagatggccgagtactaccagacgcgggtggccgccatcgtggccgaggagtctgattccggcaaggcgcaatctgccaccctgctcggcgaaacgctgacaccgatggccagcaaggtgctatcgacactgggcagctacgagcgtcgccaccgcaccggggatcgttatgtgcgggccatgttcgactgcgccctgatcttctatatcgacaagttcggcagccaagggctgtcactggccatcgagaagtgctttatctgggcctatcgctgccgcatccgccagcaggtagtgcagttggcaaccatggataactatgtgctggagcacaatctgatccgtgccattcgtgatgctcgtctgccgggagatctgcacggcttccctttgcctagcatgagcagtcgagagaacaagaacaatcgcaatggtgccgaagatgagctggtcgggctgtttcgggagatgaaatattatgaatga

SEQ ID NO: 214537 - DNA, 654 bp, Klebsiella pneumoniae
atggggcgctggcttgctggcagactcatgaaagagctggggctggtcagttgccagcagccgactcaccggtataagcgtggcggtcatgagcacgttgctatcccgaatcatcttgagcgacagttcgccgtaacggaaccaaatcaggtgtggtgcggtgatgtgacctatatctggacgggtaagcgctgggcgtacctcgccgttgttctcgacctgttcgcaagaaaaccagtgggctgggccatgtcgttctcgccggacagcaggctcaccatgaaagcactggaaatggcatggaaaacccgtggtaagcccgtcggggtgatgttccacagcggtcaaggcagccattatacgagcaggcagttccggcagttactgtggcgataccggttcaggcagagtatgagtcggcgtggaaactgctgggataacagcccaatggagcgcttcttcaggagtctgaagaacgaatgggtgccggcgacgggctatgtaagcttcagcgatgcagctcacgcaataaccgactatatcgttggatattacagcgcactaagaccgcacgaatataatggtgggttaccgccaaacgaatcagaaaaccgatactggaaaaactctaacgcggtggccagtttttgttga

SEQ ID NO: 214538 - DNA, 960 bp, Klebsiella pneumoniae
atgaacacgcaacctgtcattgggatcagcggatgtttaaccggctcagccgtgcgattcgacggcgggcataagcgtatgggctttgtgatggatgagctcgcgcagtgggtggcgtttaaacccgtctgcccggagatggcgatcggcctgcccgttccccgcccggcgctccgcctggtgcagaccccggtcggggagatccgcatgcgcttcagccacgccccgcacgaggatgtgacggagaagatggctgatttcgccagcgcccacctcgcaaccctgggcgagctgtcgggctttatcgtctgcgccaaatcgccgagctgcggaatggagcgcgtgcggttgtacgatgaaaaaggcaatcgcgggcgtaaggaaggcgtggggctgtttaccggtgccctgatggcgcgctacccgtggctgccggtggaagaggatggccggctgcacgatccgctgctgcgggagaattttgtcgagcgcgttttcgccctgcatgaactcaacgccctgcgcgcccgcggcctgacgcgccacagcctgctggcctttcacagccgctacaagctgcagctgctggctcaccaccaggcaggctaccgggagatcggcccgttcgtcgcctcgctgcatgaatgggaggatctggaggcgttcttcgaggtttaccgcgagaagctgatggcgatcctcaagcagcccgcctcgcggaaaaaccacaccaacgtgctgatgcatattcagggttatttccgcgaccagctaaacagccgccagcgcggcgagctgcgggaggtgatcctcaactatcgcgccgggctgctgccgatcctcgccccgctgacgctgcttaagcactatctggccgagtatccggatcgctacctgcaggcgcagaactattttgacccctacccgcaggatctggccctgcgcctgacggtgaactga

SEQ ID NO: 214539 - DNA, 552 bp, Klebsiella pneumoniae
atgaaacgcattctgacccttggcctggcgctgctgatgctgatcctcgccggctgcagcaccgaggtcacggagtaccggcagcagcagcccgccctcgacattttccactattttcagggccgaaccgaggcgtgggggatggtgcaggatcgcagcggcaagcagctgcgccgcttccatgtagcgatcgatggcgacgtcgtcggcgacaccctgacgctccatgagcgctttgtctatgacgatggcgagaagcagcagcgggtgtggcgcattcgccgcaccggcgataaccgttatcagggcaccgccggggacatcgaaggcgtggccagcggccaggcggcaggcaatgcctttcactggcgctacagcatgaacgtcgaagccagcggcagccggtggctgctgcactttgacgactggatgttcctgcaggatggcagccatttgtttaacaaaaccgagatgaagaaattcggcattacggtcgccaccgtgacccttttctttacccgaaccacagcagaagagaggacagcgccatga

SEQ ID NO: 214540 - DNA, 486 bp, Klebsiella pneumoniae
atgacacgcccggcgcagtacctgctgatggccctcgcgttcgatgtttactggacgctggtggtgatgttgcgcgagcgcggtctgctgatctggctgacgctggccctcttcgcctggctgcggctgccggcggccagccgtccgcccgccctgctgttggccgcggcgggctgcggcctggacgcctgctgggcgctggcggggctgatcgattttcgcggcgacagcctgctgcccctgtggatggtggccctgtggctgatgttcgccgtcgtctggacccgactgacccgcaccacgacgcttcccggctgggtgctggccgcggccgccaccgtcggcggcccggtggcctacctgctcggcgcgcgcctcggagccatgaccctgctggtgccgatggcgcttgccgtggccgccatggcctgcggctggctggtgctcatgctgttattccatctggggatggggaggcgaaaatga

SEQ ID NO: 214541 - DNA, 1221 bp, Klebsiella pneumoniae
atgaccgatcccgtctttgcgcttgaacccgatgtgccgcgcaacgtgcggctcgcgcgctggctgctctttcgtctgctgagcggcctccgcgaaggctcgctcaccgtgcgcgaaggggcacagacttttcattttggcgaccccgccgccgcgctgcgcgccgaggcgcgggtctgcacgccggaggtgtactggcgtctgctgaccggcggcagcctggcggcggccgaggcctggatggacggcgactgggagagccaccagctgacggcgctgctgcagatcctcgcgcgcaacggcaaggtgctggggcgtctggagcgcggctttcgtctgctgggcaagcccgtcgcccgcctgcgccactggacccgccgcaacacccgcgcccaggcgcgggagaacatcgccgcccattacgacctcggcaacgaattttacgcccactttctggatgaggacctgctctactccagcgcgctgtttaccgatgaccagcaggatctgacccaggcccagcgggccaagatggcgcgtctgtgcgaccagctggcgctcaaccccggcgatcatctgctggagattggtaccggctggggagcgctggccgagtacgccgcccgccattacggctgccgggtcaccactaccaccctttcccgggaacagcaccgctgggctaccgagcgcatggcccgcgccgggctgcaggatcgcgtcgaggtgctgctctgcgactaccgcgatctgcgcggcgagtacgacaaactggtgtcggtggagatgattgaggcggtgggccagcgctacctgccggccttcttccgcacctgccaggcgcgcctgcgtccgggcggcagaatggccctgcaggcgatcaccatccaggatcagcgctatcgcgactacagcaaaagcgtcgattttatccagcgctacatcttccccggcggctttttgcccagcatcaccgcgatgagcgagctgatgacccgccataccgattttgtggtgcgcaacctgttcgacatgggcccggactacgcccgcaccctggcgcactggcggcagcgttttacccacgcctggcaggatattgaaaagctcggctttgatgagcgcttccgccggatgtggctctactacttcggctactgcgaagccggatttaacgcccgcaccatcagcgtggtgcagctcaccgcggagcgggtatga

SEQ ID NO: 214542 - DNA, 723 bp, Klebsiella pneumoniae
atgaacagctgcctctatcagggcgtcctgcgccaccgtcgcctgcagccgaaggcgcaccacttcgtctaccgcctgtttatgacctggctcgacctcgacgaactggacaggctgcctgaggcgggcatccgccgcaaccgcctggccgccgccgcctggtacgacgccgattatccgctgggcgcgccgctgaaggcccaggtgctgaaccggctggagagcctgaccggctgccgcccggcgggacgcgtgatgctcctgacccagctgcgctacttcggcttccattttaatccggtcaacttttactactgctatgacgaggccgacaccctgcgctgggtgctggccgaagtgcgtaacacgccgtggaatgagcgtcattactacgcggtggacggccagcaggcgcgcccgctggagaaagcctttcacgtttcgccatttaacccgatggacatggtctatcactggcgcttcaacgcgcccggcaaaacgctgcacatgcatattgaaaaccatcaggccagcaaggtgttcgacgccaccctggccctgagccgcgtgccgttgacccgcgccaacctgcgcgggctgctgctgcgtctgccgctgatgaccctgaaaaccgtcctcgcgatctactggcaggcgctgcggctgtggctgaagcgcgtgccgctgtacaaccatcctgtcagcaggagtgaacgctcatga

SEQ ID NO: 214543 - DNA, 1260 bp, Klebsiella pneumoniae
atgaacatcgccatcatcggcagcggcatcgccgggctgacctgcgcctggcgactggccggacaccatcaggtaacgctgttcgaagcgggcgccacgccgggcggccacaccgccaccgtggatgtcgccacgccgcagggcacctgggccatcgataccggatttatcgtctacaacgatcgcacctatccgcgctttatgggcctgctcagcgagctggggatcggcgggcaaaaaacgcagatgagcttctcggtccacaacccgaccagcggcctggagtacaacggccacagcctgacctcgctcttcgcccagcggcgcaatctgctgaagccggccttctggggactgctgagcgagatcgtccgcttcaaccgcctggcgaaactggcgctgaccgaggcgctggatccaggcgcgacgctggagagcttcctcacccgccaccgcttcagccccttcttcgcccgccactatattctgccgatgggggcggccatctggtcgtcgtcgctgcaggagatgcgccgcttcccgctgccgctgtttttgcgcttctttgaaaaccacggtctgctggatattcgcgatcgtccgcaatggtacgtggtgcccggcggttcccgggaatacgtccgcgccctgctcgccaggctcggcgatcgcctggacctgcggctcaacgcgccggtgcagcaggtggagcgccacccggcgggagttatcctgcggctggcgtccggggaggcgcattttgaccaggtgatcttcgcctgccactccgcgcaggcgctggcgatgctggcggcgcccaccgacgccgagcgtgaggtgctgggggatatcggctggcagcgcaacgaggtggtgctgcacagcgatccgcgctggctgccggagcgccagcgcgcctgggccagctggaactatcgcctgagcgacggggatttggcccgggcctgcgtcacctacaacatgaatattctccaggggctgcctgcgggcgcccccctgttctgcgtcaccctgaacccggacgcgccggtggacgatcgctatgtctggcagcgcttcgtctatgagcatccgctgtttaacccgcaaagctggtcggcccagctgcggcgcgaagagattaacggccagcagcggagctggtactgcggggcctactggtacaacggctttcatgaggacggggtgcgcagcgcgctcgacgtggtacagggcatcgccgcggcggagggcaagtga

SEQ ID NO: 214544 - DNA, 720 bp, Klebsiella pneumoniae
atgatgacggtgctcatcaccggcgccagctccgggatcggcgccggcctggcgaaatccttcgcggcggatggccatctggtcatcgcctgcgggcgcgatgcgtcgcgcctggcagcgctccagcagctcagccccaacatcagcgtacgcctgttcgatatgacagacagggacgcctgtcgccaggcgctgacaggctgttttgccgacctgatcattctctgcgccgggacctgcgaatacctcgaccacggacaggtggatgccgccctcgtggagcgggtgatggccaccaacttcctcgggccggtgaactgcctggcggcgctgcagacgcagctggaggctggcgatcgggtggtgctggtcagctccatggcgcactggctgcccttcccgcgcgcggaagcctatggcgcctccaaggcggcgctgacctggtttgccaatagcctgcgtctggactgggagccgaaaggggtcgccgtcacggtggtctctccgggcttcgtcgacaccccgctgacgcgcaaaaacgacttcgccatgcccggccgggtgagcgtggatcgggcggtggcggcgatccgccacggtctggcgaagggcaaaaaccacatcgccttccccaccggtttcagcctggccctgcggctgctggccagtctgccatcgggtatccagcgcctgctgttgcgcaggatggtgcgctcatga

SEQ ID NO: 214545 - DNA, 435 bp, Klebsiella pneumoniae
atgagcacctcgccgtccgtgattcgtcgtttcgttgagtactacgccgggctggatgcacagccgcccgcggcgctggccacgctgtaccatccggacgcgacgctgagcgatccttttggtcagcatcaggggctgttcgccattcagcgctactttacccatctgctggccaacgtggagcagtgccggttcaccatcgacacgccgctttgcgacggccagcggttcgccgtgacctggaccatgcactggtcgcatccgcgcattgccggcggagaaaccctggccctgccgggctgctcggtggtggacatcgccggggagcaggttctccatcagcgcgactactacgacgccggggagatgatctacgagcatcttcccctgctgggctgggcggtgcgcggcgtgaagcggagggtgcgctcatga

SEQ ID NO: 214546 - DNA, 729 bp, Klebsiella pneumoniae
atgccttactccatcggcgaatttgcccgactatgcgggataaatgcgaccacgcttcgcgcctggcagcgccgctacggcctgcttaagccgctgcgcaccgatggtggacaccgtctgtacagcgatgacgacgtccagcaggcgctgaagatcctcgactgggtgaaaaaaggggtgccggtcagccaggtgaaacccctgctgtcgcgccccggcgcgcggcgcaccaataactggttgacgctgcaggagaccatgctgcagcggctgaaagagggaaaaatcgagtccctgcgccagctgatctacgatgccgggcgcgaatatccgcgccaggagctggtgaccgaggtgctgcgtccgctgcgcagccaggtctccgccaacgtaccggccatcatgaccctgcgcgaaatcctcgacggcatcatcatcgcctacacctcgttttgcctcgaaggcgacaagaaggcgcccggggataactttctgatcaccggctggcacctgaccgacgcctgcgaaatctggcttgaggcgctcaaacgtaccggccagggccatcgcatcgacgtcctgccggtgcctcccgccgccctggcgccggagatttttccccagcgcaactggctgctggtcaccagcggcaaactctccgctgcccgccagaggcaggtcgaactctggcagcagcaggtcgtctccctcgaggtgatcccgctctaa

SEQ ID NO: 214547 - DNA, 534 bp, Klebsiella pneumoniae
atgaagctatggcctgttgtcaccggcgtcgctatcgcgttaaccctggtggcctgtaaatcgcccacgccgccgaaaggcgttcagccgattagcgggtttgacgccagccgttacctcggaaaatggtatgaggtcgctcgcctggagaatcgcttcgagcgaggcctggagcaggtgaccgccacctacggcgcccgcagcgatggggggatcagcgtcgtcaaccgcggttatgacccggtcaaaaaacgctggaatgagagcgacgggaaagcctatttcaccggcgcccccaccaccgcggcgctgaaggtgtcgttcttcgggccattctacggcggctataacgtgatccgcctggacgacgactaccagtacgcgctggtcagcggccccaaccgtgactatctgtggatcctgtcgcgcacccccaccattccggcggcggtgaagcaggattacctgaataccgcgcgcgagctgggctttgacgtcgatcgcctggtgtggatccgccagacgccgcgctag

SEQ ID NO: 214548 - DNA, 348 bp, Klebsiella pneumoniae
atgaatctgaacctggtatgttattccctgctgctgctcaccgccgtgggcagcgccctgctgccctacccgctggcgatgtggtttttactgagcagccttctgacatggcttatctatggcgccgacaagctggcggcgcgcaaagcctggcgccgggtgccggaaaccacgctgctggtgctgggcctggcgggaggctggccgggggccatcctcggccagcagtgctttcgccataaaacgcaaaagcagcccttccggacgcggtttttcatcagcgtagcgctcaacgtggcggcgctggccgggctgtacgtggtttatacctatctgctcagccgctaa

SEQ ID NO: 214549 - DNA, 3150 bp, Klebsiella pneumoniae
atgattgaatggattatccgccgctcggtggccaaccgcttcctggtgatgatggcggcgctgtttctcagcatctggggaacctggaccatcatccacaccccggtagacgccctgccggatctctctgacgtacaggtgatcgtcaaaacccgctatccggggcaggcgccgcagatcgtcgaaaaccaggtcacctggccgctgaccaccaccatgctgtcggtccccggcgccagaacggttcgcggcttctcgcaattcggcgactcctacgtatacgtgatttttgaagacggcaccgatccttactgggcgcgctcgcgggtgctggagtatctcaaccaggtgcagggcaaacttcccgccggggtcagcgccgaaatgggcccggatgccaccggcgtcggttgggtcttcgagtacgcgctggtcgaccgcagcggcaagcacgacctcgccgaactgcgctccctacaggactggttcttaaaatatgagctgaaaaccatccctaacgtctcggaagtggcgtcggtgggcggcgtggtcaaggagtatcagattgtcgtcgacccgatgaagctgacccagtacggcatcagtctcggcgaagtgaaatcggcgctggacgcctctaaccaggaggcgggcggctcttccgtcgaactggcggaagccgaatatatggtgcgcgccagcggctacctgcagacgctcgacgacttcaaaaatatcgtgctgaaaaccggggataacggcgtgccggtctatcttggcgacgtcgcgcgggtgcagatcggcccggagatgcgccgcggaatcgccgagcttaacggcgaaggcgaagtggccggcggcgtggtgatcttgcgctccggcaagaacgcccgcgaggtgatctcggcggtcaaagagaagctggcgtcgctgcaaagcagcctgccggaaggggtggaagtggtcaccacctacgaccgcagccagcttatcgaccgcgccatcgacaacctcagctacaagctgctggaagagtttatcgtcgtcgccctagtctgcgccctgttcctgtggcacgtgcgctcggcgctggtggcgattatctcgctaccgctcggcctgtgcttcgcctttatcatgatgcatttccaggggctcaacgccaacatcatgtcgctgggcgggatcgccattgcggtgggggcgatggtcgatgccgccatcgtgatgattgagaacgcccataagcggctggaggagtgggagcatcagcacccgggagagaagctcagcaacgacacacgctggaaaataattaccgaggcctcggtggaggtcggcccggcgctgtttatcagcctgctgatcatcaccctgtcgtttatcccgattttcaccctcgaaggccaggagggcaaactgttcggcccgctggccttcaccaaaacctggtcgatggccggggcggcgctgctggcgatcgtggcgatcccgatcctgatgggcttctggatccgcggcaggatcccggcggagaacagcaatccgctgaatcgctttttgatccgcatttatcacccgctgctgctgaaggtgctgcactggccgaagactaccctgctgattgcgctcctgtcgatcctgacggttgtctggccgcttaaccgggtcggcggcgagtttctgccgcagatcaacgagggcgatctgctgtatatgccgtccacgctgccggggatctccgctgcgcaggcggcggatatgctgcagaaaaccgataagctgatcatggcggtgccggaagtggcccgggtgttcggcaaaaccggcaaggccgagaccgccaccgactcggcgccgctggagatggtggagaccaccattcagcttaagccacaggatcagtggcggccggggatgaccatggagaagatcgtcgacgagctggataaaaccgtgcgtctgccagggctggcgaacctgtgggtgccgccgatccgcaaccgcatcgacatgctctccaccggcatcaagagcccgatcggcattaaggtttccggcactaacctggccgatatcgacgccatcgccgggcaaattgaaggggtggcgcgcagcgtgccgggagtcacgtcggcattagccgagcggctggtcggcgggcgctacctcgacattgatattcagcgcgagaaggcggcccgctacgggatgaccgtcggcgatgtgcagctgtttgtatcgtccgccatcggcggggcgatggttggcgaaacggtagagggcgtcgagcgctatccgatcaacatccgctacccgcagagctatcgcgacagcccggagaccctgcgccagctgccgatcctcacgccgctgaagcaacagatcgtcctcggcgacgtggctgaggtgaaagtggtcaccggaccatcgatgctgaagaccgagaacgcccgcccgaccagttggatctacatcgacgcccgcgaccgcgacatggtgtcggtagtgcacgatctgcagcaggccatcggcaaggaggtgaagctgaagccgggcatcagtgtgtcctactccgggcagtttgagctgctggagcgcgccaatcagaagctgaagctgatggtgccgatgacgctgatgattatcttcgtgctgctgtatctggcgttccgccgcgtcggcgaagcactgctgattatcaccagcgtgccgttcgcccttgtgggcgggatctggttcctctactggatggggttccatctgtcggtggccaccgggaccggctttatcgcccttgccggggtggcggcagaatttggcgtggtgatgctgatgtacctgcgccatgccatcgaggcggagccatcgctggagaatccgcagactttcagcgtcgataagctcgacgaggcgctataccagggggcggtgctgcgcgtgcggccgaaggcgatgaccgtggcggtgattatcgccggcctgctgccgattttatggggcaccggcgccggttcggaagtcatgagccgtatcgccgcgccgatgattggcgggatgatcaccgccccgctgctgtcgctgtttatcattccggcggcgtataagctgatgtggctgtatcggcatcggggcaagcgtagccaatag

SEQ ID NO: 214550 - DNA, 1263 bp, Klebsiella pneumoniae
atggcatccctgacactgaaaaatacggcgctgatcctcggcagcatgctgattggcggcgcgcttaccgcggcgctgtacgccagactaacgccggtcgacgctgccgctccggcagccgagcagcagcgtaaagtgctgttctggtacgacccgatgtacccgaacacccgcttcgataaaccgggtaaatcgccgtttatggatatggatctggtgccgaaatacgccgatgaggagagtgctgccgccggtgcgccgggggtgcgtatcgacccgacgcagacccagaatcttggggtgaaaaccgccgccgttacccgcgggccgctgcgctacgcccagaccttcccggccaacatcagctataacgagtaccagtatgtgattatgcaggcgcgggcggcgggctttatcaataaagtctatccgttgaccgtcggcgacaaagtgaaacaaggcacgccgctgctcgagctgaccatcccggactgggtggaagcgcagagcgaatatctgctattgcaggagaccgggggcaccgctacgcaggtcgaggggatcctcgagcgtctacgtctcgccggaatgccggacgacgatatccgccgcctgaaagccacgcgcaagatccagacccgcttcaccctcaaggcgcccatcgacggggtgatcaccgccttcgatctgcgcgccggaatgaacatcgctaaagataacgtggtggcgaaaattcagggcatggacccggtgtgggtcagcgtggcggtcccggaatccatcgcctggctgattaaagacgcctcgcagttcagcattcaggttcccgcctggccgggcaaaaccttccgcatcagcaaatggacccttctccccagcgtcgatagcgccacccgcaccctgcagctgcgcctgcaggtcaacaacccggatgaagcgctgaagccggggatgaacgcctacctgcagctgaccagcgaaagcgccccgatgctgctgatcccctccaaagcgctgatcgacagcggcagcgagcagcgagtgattaccgtggataacgagggccgcttcgtgccgaaaatcgtgcaggtattccatgagtccaatggcgtcacggccattcgcagcgggctgcaggagggtgagaaagtcgtcgccagcggcctgttcctgatcgactcggaggccaatatcgccggcgcgctggagcgcatgcgcgcgcaggcccctgatgccgcggcctctgccgcccacgcgcactaa

SEQ ID NO: 214551 - DNA, 345 bp, Klebsiella pneumoniae
atgaattcactatctaaaatcgccctgttcaccctgctctctggcgcggtgttcgccgcccaggccgccgccccgcacgccggtatggtgatgcacgagcagcccgccgccgcgcaggcgcaaagcatccgcggcaaaggcgtcattaaagctattgatatggataacaaaaaaatcaccatcgcccacgaggccatcccggcggtgaactggccgccgatgaccatgcgcttcaccatcaccccgcagacgcagctcaacaatgtgaaggatggcgacagcgtggacttcaccttcgttcagcagggcaatctgtcgctgttacaggatatccgcgcccaataa

SEQ ID NO: 214552 - DNA, 1386 bp, Klebsiella pneumoniae
atgcgctcaatacagctacttaccctcagcgtgatatttaccttaaccggctgtctgtcacttgctccggactatcagcgccccgcagcgccggtgccgcagcagttctctctcagccagaacaagctggttactgcgacagcgggctaccaggagaccggctggcgcacctttttcgtcgacccgcaggtgaaaagcctgattagcaccgcgctgaccaacaaccgcgatctgcggatggcgacgctgaaagtgcaggaggctcgcgcgcaatatcgggttaccgacgccgaccgctacccgcaattgaacggtgacggcagcaccacctatggcggcaagctcaaaggcgacaccaccaccagcagcgattatgccgccggcttaaacctcagctacgacctcgacttctttggccggttgaaaaaccttagcgaagccgaccgacagaacttcttcgccagcgaagaggcgcggcgcgcggtgcatatcctgttgattgctaacgtttcacaaagctacttcaaccagcggctggcggcagcgcagctgcaggtggccaacgacaccttgcagaactatcagcagtcttacgccttcgttgaaaaacagctgctgaccgggagcaccaccgtcctggcgctggagcaggcgcgcagcatgatcgaaagcacccgcgccgatatcgccaaacgtcagggccagctggcgcaggccaataacgccctgcaactgctgctcggcagctatcaacatctgccggacgatagcgccagcagcgccgtggacctgcaaggcgtaaccctgccgccatcgctctcctcagcgatcctgctgcagcggccggatattttagaggccgaacacagcctgcaagcggccaacgccaacatcggcgccgcgcgggcggccttcttcccgtcgatcaccctgaccagctcgctctccggcagcagcagcgaactctccagcctgtttaacgctggcggcgcgatgtggaacttcattcccaaaatcgaactgccgattttcaacgccgggcgtaatcaggccagcctcgatctggcggagatccgccagcagcagcaggtggtcaactatgaacaaaaaatccagtccgcctttaaagaggtggccgacgcgctggccctgcgccagagcctggccgatcaaattgccgcgcaggagcgctatctcgcctcgctgaatatcaccctgcagcgcgccactgcgctctatcgccacggcgcggtcagctatatcgaagtcctgagcgcccagcgcgatattttcaccacccgacaaaccctgctggaactcaactattcccgtcaggcaaatgaaatcaccctgttcaccgctctcggcggcggctggatggaataa

SEQ ID NO: 214553 - DNA, 684 bp, Klebsiella pneumoniae
gtgaagattttgattgtcgaagatgagaagaaaaccggagagtacctgaccaaagggctcaccgaggccggcttcgtcgtcgacctggccgataacggcctcaacggctatcacctggcgatgaccagcgattacgatctgctgatcctcgacatcatgctgccggatgtgaacggttgggatatcgtgcgcatgctgcgcgccgccgggaaaggcatgccgatcctgctgcttaccgcgttgggcaccattgagcatcgggtgaaggggctggagctgggcgctgacgactatctggtaaaaccgttcgcctttgcggagctgctggcgcgggtgcgtactctgctgcgccgcggggcggcggtcatcgtcgaaagccagtttcaggcggccgatctcagcgtcgatttggtcagccgcaaggtgacgcgcggtgccacccgcatcaccctgaccagtaaggaattcacgctgctggagttcttcctgcgtcatcagggcgaggtgctgccccgttcgttaattgcctcgcaggtgtgggatatgaacttcgacagcgacactaacgccattgacgtggcggtgaagcggctgcgcgccaaaattgataacgacttcgagccgaagctgatccagaccgtgcgcggcgtcggctatatgcttgaggtgccggatggccgctaa

SEQ ID NO: 214554 - DNA, 1434 bp, Klebsiella pneumoniae
atggccgctaagcgccccttttccctggccacccggctgaccttctttattagcctcgccaccatcattgctttctttgccttcacctggatcatgatccattcggtgaaggcccactttgaagagcgcgacgttcacgatctcagacagctcagcaccaccctggagacggtcctcgaccacgctgactatccgcaggcgcggcggctggagatcgtgaagaatatcattgcgggctacgccaacgtcttcatctgcctggacgatggccagggcaatattctgttccagtcgcccaacgggccggatctcagccatatgctgagtacgccggggctggcgatgcagctccgcgacgggaatgtgatttcatggaccgacccgcagccgcgggcaatggcgcacgataatcatccactggagacccgcgcctggcggttgatcatgctgccgctgggcaagcaggcggacggtaaaccggcgtaccacctgctgatggccttatccatcgattttcacctgcactatattaatgagctgaaagcgaagctgatctccgcggcgtcgataatcagcctgctgatcatcgccatcgtgctgtttgtggtctaccaggggcataagccgatccgccagatcagccgccagatccagaatattacctcgcgggatctcgatgtacgccttgacccgcaggcggtgcctgtcgagctggagcggctggcgctgtcgtttaaccatatgctggagcggatagaggatgtctttacccgccagtctaatttctccgccgatatcgcccacgaaatccgtacgccgattaccaacctggtcacgcaaaccgaaatcgccttaagccagagccgcagcccgcaggagctggaagaggtgctttactccaatctcgaagagttctcgcggatgtcgcggatggttagcgatatgctgttcctcgctcaggcggataataaccagctgatccctgagcaacaggcgctggatctggccgatgaagtgcataaggtgtttgagtttttcgaagcgtgggcggaagagaaggcggtggcgctgcgttttgtcggtagccattgccgggtgattggcgatccgctgatgctgcggcgggcaatcagcaacctgctgtcgaacgcgattcgctatacgccggccgggcaggcggtgaccatccagttgagcgaaagcgcggagacggtacgcctggtggtggagaaccccggtacgccgattgccgccgagcatctgccgcgcctgtttgaccgattctatcgcgtcgacccctcgcgccagcgcaaaggggagggcagcggcatcggcctggcgattgtgaaatcgattgtcggagcccaccacggcagcgtggcggcgcagtccgatctgcgctcgacgcggtttattgtggtgttgccgaaatag

SEQ ID NO: 214555 - DNA, 267 bp, Klebsiella pneumoniae; identical to SEQ ID NO: 137762

SEQ ID NO: 214556 - DNA, 534 bp, Klebsiella pneumoniae
atggagcagcaactgacgattgagatgattgccgatgcgttcagctacgatatcactggatttgattgcggcgaggaagcgctgaatacgtttttaaaagagcacctcaagcggcagcacgatggacaaatcttaaggggttatgcgctggtctccggggataccgttcccaggttgctgggttattacaccttatcggggagttgtttcgagcgaggcatgttgccgtctaaaactcagcaaaagaaaatcccgtatcaaaatgcgccaagcgtaaccctcgggcggctggccattgataaatctgttcaggggcagggctggggagagatgttggttgcccatgtgatgcgagtggtgtggggagcgtctaaagccgttggcatctacggattgtttgttgaagcccttaatgagaaagctaaagcattctatcttcgtctggggtttatacagctcgtggatgaaaatagtaacttactgttttatccgaccaaatcgattgaacagctctttactgacgatgagtcataa

SEQ ID NO: 214557 - DNA, 1122 bp, Klebsiella pneumoniae
atggcttatcaactcaacattaactggcccgagtttttagaaaaatactggcagaaacagccggtggtattaaaaaacgcgtttccggacttcgtcgacccgattactccggacgagctggccggattagccatggagccggaagtcgacagccggctggtcagcctgaaaaacggcaaatggcaggccagcaatggtccttttgaacatttcgacgggctgggcgaaaccggttggtccctgctggcccaggcggtaaaccactggcatatgcctgccgccgagctggtgcgtccgttccgcgtactgccggactggcgcctggacgacctgatgatctccttctccgtccccggcggcggtgtcggcccgcatatcgatcagtatgacgtctttattattcagggcatgggcagccgccgctggcgcgtgggtgacaagctgccgatgcgtcagttctgtccgcatccggcactgctgcacgtcgatccgttcccaccgatcattgatgaagatctgcagccaggcgacatcctctatattccaccgggattcccgcacgacggcataacccacgaaaccgccctgaactactccgtcggcttccgcgggccaaacggccgcgacctgatcagcagcttcgccgactatgtgctggagaacgatctcggcggcgagcactacagcgatccggacctcacctgccgcgagcatccgggccgggttgaagagtatgaactcgaacgtctgcgcaccatgatgatcgatatgattcgccagccggaagacttcaagcagtggttcggcagtttcgtcaccaccccgcgtcacgagctggatattgcgccggcggaaccaccgtatgaagaagaggaagtggtcgatgcgctgctgggtggtgaaaagctttcccgcctgagcggcctgcgcgttctgcatatcggcgacagcttcttcgtgcatagcgaacaactcgacaccaccgatgccgaagcgctggatgcgctgtgtcgctatacctcattaggccaggaagagctcggcagcggcctgcagaatccggcgttcgtgagcgaactgacgcggctgattaatcagggctactggtacttcgaagagtaa

SEQ ID NO: 214558 - DNA, 315 bp, Klebsiella pneumoniae
atgcaaaaaaaagtgctgatagtgttgatctgtgccacaggctttctttctggctgtaaggaagaaggtataaccccaactggcaaagcatgtatgggcaccgataatgactcattgattgaaggcctgaaggggaagtgccagaaaggcgatactatagcgacaaaaaaccctgcatatttttgtgatttcaaaagccagattgcttttaataattacaatagtgcgatatgtatctataccggaaagcaagctgaggaacggattaaagaagcagacatcagtccaagaaaagacagcaaacctcaatcctga

SEQ ID NO: 214559 - DNA, 579 bp, Klebsiella pneumoniae
atgtctgaaaagataatcaaaaggggaggagagctcatagagttgccctctcacaataacaatgccgtaaaagccgagatgcaggccaggacagaaaaacccaaaacgaaaatcaccaaagcgcaaagagcagaactcagattaaaatttgcgtgccggtgtgcctactgcggcagtgagctgaaggaaaagggctggcatgccgatcatgtagagccagttcgtagagatttcgatatagttcgcgcgcccctggggagtagggtgagtcacgttgcacgaagcaatggacgagtatttcatcctgatcgccatgatttagataatcttttccctgcgtgttcagcatgcaaccttttcaaagcgacatattcgatcgaaggattcagggaacagattgcccaccagcctgagcgtgctcaggcatactcagtcaatttccgcacagcccaacgatttgggctggtaacggttattgagaaacctgtggttttctggtttgaggcgtacgatgcctcaaaagaacttgaaccccagctttcttattttttggcacaccgggaggcttatcaggattga

SEQ ID NO: 214560 - DNA, 462 bp, Klebsiella pneumoniae
atgttatttaaaaatggcataaaaaaacaaataaaggcaaaaagaaagaaggccaataaaattttttggacgtgctattacatcgaaaagaaatatccacgccctatttttatagcccttctttggttacctagtcctttaatggcatatattaagctattcccgcaaacttcaactttaactgcattgctgatatacggatttgggattataataatactctctgtatggttctatttggatcttcctaaaagctggattgattcacttgaccgtcaaattttgaagtaccgatcagatacgtcattcattggtgagctcgaaaatgtgcacactgaagactttattgaccatggcaagataatagtaccaattctcgacattcaatattgggctattaaccaaaaattccaactgaatagactgcttaggaaagaaattagcgtcaaaatcaaaaagtag

SEQ ID NO: 214561 - DNA, 402 bp, Klebsiella pneumoniae
atgaaagaacattaccttgaaggtaataatatatcgatggtggttgaggtctgcatgtttctctttctcatcggtattatatgtattttatcggtttttcttctatatcgtaaaactaaaatgcatgtgaatgttgattatcttctggcttttggagtaattattactctggcttcaattgtctcggctgtcatgttcacaagccgctcattaacggtggaggaactagagctcggaagacactggaagcaagactgtaaattactggaagtaaacattccaactggtacatttaccgacccagtcaatagactaggttgttctgacgttatcgtgaatgttcctacaaaccagtatgatgagtatatcagacagtgggatttgtataagtctaaaaactaa

SEQ ID NO: 214562 - DNA, 786 bp, Klebsiella pneumoniae
atgtgtatttcaacgtctggagagcgcgtacctaacgtccttccgacttctttggttaaaggagcctgcatgaattgttctacccacaaagccataccgctgaccttttcttctgaagaaatagtctgcctccagaacggacataaaacgcagttccgtcgcgcattgaaaggtcgcactgctttctcaaagagtctaaccacctcggagacatcaggacatgcaataccggtattaaaatgtccgtatggtcagcccggagacagaatctggatcagagaaacagcaagagtggagtggcagcaggtacaggagtccccgttaaaggtgcagactggtgtacgttaccgggttaataacgagtatcgggaattgaccagcgatacgcattgcagtttgttccctacaaaacgtctaacatcacaaggcgttcctgcatgggcaacaccggtaagcatgccacgatgggcgagtcggtttttactcgaggtttccgacacccgcctggagaagctctgtgacatctctgaaactgatgcttattgtgaaggattgctcacagaagtgtgggaccaggtggttgttgccagaaattaccgtactccagatgcgttctttcagtactggtctgaagatatggatcactatgttgaaatggatgagctgtaccgtcgttctttccagagtttctgggatcagatatatggctcaggtagttgggtctctaacccgctcgtttgggttgtcacatttaaattactggacttcgataaggggggcgagtga

SEQ ID NO: 214563 - DNA, 354 bp, Klebsiella pneumoniae
atgcatgcaactcatccgacggaaaaatttaatattttggcggtcgtctatttcacaatcattgcttgtggtcagatttttctgttccctcattctcagcccatttttctgttcctcgtgactatggctattgcggttcgcttatttaccctgcggcctcaatataaaaatttacgatttctggttttgtccatcatctcacaccaccttgtttttaccattctttcgctcatccaactctatatcaatgccaggtatagcagtgccagtttcattgagtatcagatggtttacgcgcctttgctcatcgggatgggatatgtgtatttcaacgtctggagagcgcgtacctaa

SEQ ID NO: 214564 - DNA, 174 bp, Klebsiella pneumoniae
atgcgacacaaaaatagggtctttcaggagcgctttattttgatatcgtctaataactattccatccggggatgttcaattgacgccagtatgcagagcgggaaatgtgaaaacagtacacgcagcaagaaggaaacgacacagaaggagagggaggctcattcgcatccctga

SEQ ID NO: 214565 - DNA, 417 bp, Klebsiella pneumoniae
atgagctcaaaacacgtggttattagcgcgaagcatccggttgccgggtacctgtaccttgaaatgatcccggatagcgaggtggggttttcagatatctatcagataacagacagtatttttcgtgcagacgttctgccctgtgactggcgagagcataagcggcagtggggtaaggactttcttggccatggctcatgggatgtgtactacatcaaacagcatgtgaaccggattaactggtttggcaatgacagcattaaaaaaattaaggtcaggtacagcctgtccattaaagagctgattgactgggtttccgaccccgaccattggaaagatattgccgtcgaggtggatgataccagcggctccagacccttggccgtagccatggtgaatcaggatttgcacttttaa

SEQ ID NO: 214566 - DNA, 2406 bp, Klebsiella pneumoniae
atgaaattaaaattcaagcttctgacgacactaatacttggcactctttcattgcccgggcattcccgtgtttatgagtacaccatcaaagatatctacggcgcggagaaatcagtcagtgcggaaaccggcattcttaacactaacgaaaaaattcagttgagcctgatttccggcctggatcgcaaagtacacgtatctgtccggaagtcaggtacggaggtctacggcacgacaaccgatagcattaaggtaagtgatcgaattaaggcatcaacaggcgaagagttctacgggaaaatcatcacgcttcctcccctgagtgatggtccctatcaggttatctctgaaatacttaacacgcagggcaatcaggtcgactcaaccacgcaggatttcatcatcgatagtgttggcccaacctcggacaatcttagcattattcagaaaccgggttatgaaatggtcactcagggagaacgatgggagctcggactcggggcggaacaaaaattatatgtgaacgtaaataacgttaaggccgcgaccggttttgacaaagcaaccctacaggtcataaatccggacaatagtgtctattcaataacggacatggattatgatagcggatcttcttccttgtcagctccctggacattaggggataggaaaaaagcctcatggatgccgaactcggatgcagacgtagaataccgtttccgcgtgactctttatgataaggcggggtcgcgtaaagtgctgcctgaccagaaatttgttttcgataaccaacttggtgaatttaccctatttgcaatacgcgaccccgaatcacagacaagcgtggtcccggggatcacttcaggttacgtagcgtataaagcaggcatgacggttaatcaaaatccgattacccttgtctaccgtttgccgacgaataatgtcaggaaatataacaaagctggcttaagttttggcaccatcatttccgaagccaacggttacgtctatgtggcggcaacaacggcttataacatcagatacgatatacataacggataccagtgggggggagctgcagctacttacaatctgaatcttgggccggatacccctgaaagcccggagacgcccactaccgtctggctcactacggataaaaagggggaaataaactcgtttaattatttgtggaaaaccagcgatctcccagttaatttcatttcagcgagagtccgtacctctgcgagaaactatcttcagcgagcgtttacagggaaccaggaaatttgtcagatcccgccaggcgaaattgagtgcagcgggccggtaacatggacaattgccaaaagcggtaatgggagcgtgacctattcatttaaaatgtataatgaggacaagacgttatcttcaataaatcaggaaaggcgtaaccactggaacacaaatcttcttcctaaaatcaccgggtacgactatcaggaagataagaaaaaagtgctgttatttgttacgcaacccggtaacggaaactttagggaccaactccagctcaagtccgctgaactgattaattccgataccggcgtccaggtactgaatggaaccaaaattgcgctttcaggcgaagattacacctatacatttgatctgagtaaactggcggaaggaagatacaatttaggcttcttggcaaaagacacttttgaaaatgaggctacatcgccattcatcaccctcgtgcatgacatgacgcctcctgagatcagcttcaactacgaaaatgccccgctccactccggttccacagtatacgggcttgagaatatcaccattaaccttaacgatgcgctgactaagccaatgcttgaccgccttgaactaaagggtggcccagcatccgatagcgtggtcctcggttttaacctaaatgctgatggcagctacacgcctgattacccacggctgtttcctacactggatacgtcgacggataaatacactctcactgcatatgcgacagatgctaaaggtaattcgtcccaaaaaaccattcagttcgcctacttccctaaaaatcttgttaccctggagaaactgaaaacattaggcgtggttaaagcgctgaaaacgagtgacaacacacctcttgcagtcatgcgtaccggtcagctgcgacgtaacgatggctctcttgcccagggtatacagacggcaaatatcacggtcagaagcgatgctgagtatgccatcaacgttcttggaacggtgatccatcccggtgaaaccaaagaaatacagcttgacctcggaactggcgaaaactccacagtaccgatttttccggctattaacgggtctacggggcaaagtaacttcatcatcgagttcccacaacttaactaa

SEQ ID NO: 214567 - DNA, 2421 bp, Klebsiella pneumoniae
atgaaaacaattgaaataaaaattaatttgctgactacggtaatactaatcaccctctccgctttttcacttcccacatatgctcgtgtctatgaatatgtttttaaggatgtctatggaacagataaatctatcagcgtggattccggagtcctaaataccaatgaacaaattcaggtaaggataatatccggactcgacagaaaaattcggataacagtaaagaaagagaaggttggagtatatagcgtaactacagatagcgtgacggtcagtgatcgtataacggcctcaactggagaagaattttatggtaaaacgctgacattgcccccactgagtgatggaagttatgtaataacctcagatatcctgaatacacaaaacacggttatcgacagcacgtctcacaattttattattgatacagtagggccctcgtctgataacctgagcgtagaccaaaatcccggatatgatatggtcttaactggtgagcgatgggaactgggcctaggggctgaagcaaagctttacctgaatgtgaataacgtcaagtctgccaccggtttagataaagcgacaattcaggtgattaaacctgatgatacggtcttttcaacttctgatatggtttatgacagtggatcagcatccctttctataccgtggacaaaagggaatatgagtcggtcatcatggatgcctgtatcaaacgctgatgtggaatatcgcttccgtgtgacgctctatgataaagcgggaaaccgtaatgttttgccggaacagaaattcatatttgactctgaccttggtgaatacactttatttgctgtttatgacccgtcttctaaaaccagcgtagttcctggatttagtgaaggttacatagaatataagccgggaatgaccgtaaaccaaaaccctataacactcgtgtacaggataccatcgaataatagacgggaatacagtaaagccggtttgaaatttggaacgattatttccgaagcgaatggctacagttatgtatccgctaaaaccgcctataaggtatcgtacgtcattcataacggatatcaatggggtggaggttcactatcctataatatcaatttaggaagtgaggctccggtcagcccggcagcacctgacgtatggtttacatcagatataaaaggagaaatgaatgcaggcagctatctttgggattcaaaagatctacccgtgaaattcagctctgtaaagatcatagcgtctccgcgaaattatggtcagagagcgatgagtggaaatactgagatttgtcagatacctgctggtgagactgagtgtactggtgcggtatcatggtctattccgaaatcagggaatggtattacaacatactccttcagattgactgatatggataaaacactttcatcagtcactgtagaaaaaagacatcactggaacactgatctgttacccaagataactggacatagttaccaggaggaagacaaaactgtcctcttatttgtcaagcaacccgggcgcgggaaattccgcgatcttttgcagctcaaatcggctactctgattgatttagataccggggaacaattactgtcaggtactcagacagctctatctggcgaggattacacatatagttttgacctcagcaaactggccgaaggcaaatataatttaggtttttttgcaaaggacacctttaacaatgaaacgtcatcaccattcattagtctgattaacgacaagacgccccctgtggttaatttttattatgaaaatgcctctctgtcctccggtgctaccgtttacgggcttgagaacatcagcataaaactaaatgatgtgttaacagcacccagccttgtccgacttgagcttaaaggaggaccagcgtcggatagcgtgattctggggtttaaccagaatacagacggtagttatacacctgattaccctcgtctattccctagtctggattcaaatacggacaagtatacactgaccgcatatgctaccgacgcgaaaggtaactctacacaaaaaagcattcagttcgtctactacccaagaaatctcgtcacccttgagaagctgaaaaccttgggtgttgtgaaggcactaaaaaccagtgacaacacaccactagccgtcatgcggacggggcagctacgacgtaacgatggttcactggctaagggcatccaaacggctaacatcacggtcaggagtgacgcagcttatgcgataaatattctggggaacgttattcaacctgggcagacaaaagaaattaagatagaccttggtgctggcgaaaattcaacagttcctattttcactgcagaaaacggctctacaggtgagagcaatttcattatcgaatttccgcaaatcgagtaa

SEQ ID NO: 214568 - DNA, 1026 bp, Klebsiella pneumoniae
atggaagagttctttttactgtttgctagagataaaaatggcatgttatacgatacctataatgccaggttaacttctgatattgaattatattgcactcaatgccgaaaccgaattggctataataaaaaccctgcaatcgataacttcaaacaacaaattttttttaaacacgctgctattgatggcaagcacataagtctatgtgaggatcgataccttaatgaagcaattaaggaaattatccacagcatcctatcctctgaggttagcatttatgtaagtccaatttttactccgggtttaattctagcgccggataagatattcgcaccgtttaaagctatgatatcacgtgatgacctcttaggctctcaacgagttgatttcagatggacaagctcaaaaggaaaatgcatgggtttagttttcatcgatcacagtgaggtcattgaaaacaaagtatatgatgtttccgactcaaaggctttcatcgcagaaataaacctagctatacttaaaagcaaactacggtcgaagttaaaatcaaacgatggattagagtttggattaatcaataccataaaaagaatcctaataaacaaaaacatatttagccgctgggtcagttgggaaggaaaacaagcgaatttgagaatttcgccagcattttttcgcactattactccctatgggtatgactgctatctaaacataatttcattggaaggtttcttttataatgaaaatgaaggtattgaacgaaatacaaaatatattctgaagatgacaggtagggaattagactaccagataaaagagataatttaccaattcagcctagtgcgcgaaagtttcgcagatacgttctatgttgccatctatgagaaagaaagtgttttgctagattatgtgcaaaattcagttccagttaacgacaatacattcagtcaaattaaagcggcgtgtttaaggctcattcatatatatgaatctgctatgcgtggtttaaacataattaattag

SEQ ID NO: 214569 - DNA, 1011 bp, Klebsiella pneumoniae
atgagtgatgttgaacgcggtacaagcaaagacaaatacttaaccggaaacggcaaacgtacttttgttgatcaaaaaagcggactaccacctttacgaactccttctacacagaagcgactatttacactagcaaatggtcgtaaagttgaagctcgctatgtagtcgtccctggctcagaagtagctgataaaactgttgttcatgagctaaacccacgaaaccaagaggcagttgacgatctttctacaagagaaatacttcccttaattaaagaaaatggtgttacaactgaagctattgccgtattccgggacggccaatattacctgatcgaaggtagtagacgtcgttattgctgcatcaaatgctcggttgacttgcctttatgggcattcgatgtggaggttagccgcgaagatgtcgattgcattgtgaatgctgctcaaacagcaaaacgattttcttatcgtgaagttggtatcaaataccttgaaatcatgaagaataaagatttcaagaccaatgaggagcttgcttcttatcttaacattggtattgaatcgataagaaagagaattcaggccgcaaaaatcagcaaagaactaataagaatatttcctgatagtgagggaatacctaatacttactatagcaaattagctagaattgaaaaaaccgctattgctaacaacatccctcttaccgatttaacatctgaagtaggtgcggatgataataaaatatctaatattaatgatattgaggaagttcagaagtccattttagatggtttacattcagtgcttagtattctttgtaatgatggaaacaaacaggggaaatggaccgtgtcagatattgccgtgtttgataacaaggatacttacgccagggtaaaacgaagtgctgatggtcaaaaagttagttttgaatttaagcgtataggtcaatcaacaataaatgagattgaacgcttaattaaagtaagtattagcaaagcaaaataa

SEQ ID NO: 214570 - DNA, 1248 bp, Klebsiella pneumoniae
atgagcatattagatgatattcgtactatcggcctaaaaatgaaaaacgaacaagcaagccttaaggaaattatccttgagtcgagtcgtattgatgtttctgatgaacaagtcgatggtttagatcgtctaatctataaccattgtttaaataaaaaaactctctctgacttttttggtaaatctagaaatacttttagtagaattttatctgaactacatgaaaaaaaagtgataggtgaacctattttccagaataagagccacctgtatacgcgttgggatgtgcaaaaaataatggaagcgatgggcactactcaatatcgtgatatgtatttgcctcgagttatcgtgactgaaaaccataaaggtggaacaggtaaaagtacaacaacagcaacacttgctacagcggccgcattggatcttaatctgaatgcaagaatctgtgttattgatcttgatccacaaggctctttaggaaataaccttatccactccactagtgatgatagtgtttatctaaccattaccgatgttctattaagtgacattgaagataatgattttacgcaatatataaaacagggttatacggaagaacagattattggggaaatggcattttctacgcatcttccaaacatggatgtaataacggcattccctactgatgacagatttactgataaatattggagcttggataaggaagcaaggttcaaacttctgacccgtttccgtgatctggttatacctgtattaaaagaaaaatatgacctaattttcatcgatactccgccacaagattctccaattatttggtcaacaaatgaagcggctgacgcaatacttgttcccatcacaccccgggaatatgatttcgcgtcaaccacaaactatatgattactatttcagaccgacttgagcagcttccctcaaagggcgaaaatattaaatggataaatgttcttgctgtaaacgttgatgatagaagtcaacatgagattcgcactttaaataaactagtgagaactgtacgtgatcgtttcatgacaacaaatatcaaacattcagaggcttttgttgctgcagctgaaaaaggtcgtactgtactggatattaaaaaatcagaagagctctgttcttcaaaacaatatgatatagctgaaatgtctgttcagtcagtgtatcaacaacttatcaatgagattaaaagcttctcagttagggaggacagtaaataa

SEQ ID NO: 214571 - DNA, 2439 bp, Klebsiella pneumoniae
atgcgtttttcactaatcttccatagttctgctttagctttgaccctctcaatggccacaagcttgttttccatcgtgcacgcccgggtttatgagtacaccttcactgatatccatgatgctcaaaagactgtcccagaaagtgcgccatatattaatccacatggaaaatttaatgctctcctcattggtggcctggaccaacaaatccgattaaccatttctcgcgatgctgataaaagtgctgtatttagcacaactaccagtgtcatcacggttgatgacaggatatcttccactagtggaaatatcttttacggtaagactgtcactatcccacctatcagcgatggacgttacaccataaaatccgaaatcctggattcaaaatcggccgtagtttcaataacatcccatcccgttataatagacacggtaggacctacgtctgataatttctcagtgccatggattccagggtataacatggttgtaacagggccgcgttgggaactcggtcaaggtcaagaatctgccattaatcttgcaattaagaatatcaatgatctatctggttttgataaagcgattgttcaaataataaaacctgatggctcaatacaatccagctatacaatgacatatgacgaggggtctagagcagctacagcccctattactaaaggtggaggaacgatagccaaagcagcttggatgccagtctctgatgctgatgttgagtatcggttcagagctttcctctatgataaagctggaaatattacccaagtacccgaccaaaactttgtttttgattcttctgcaggtgaatatgagctatttgcagttgccgatcccaactcttccactagtgttgttcccggctttgcatctggctacattaaatataccgcagggatgactattaatacaaaccctgttacttttgtatataaaatacctaagcaaaattatagagcttataataaagctggtttgtcattcggatctttactttatgaagatacagggtatgtatatattaaacaatccacaccagttggaacatcatttacaattcataatggataccagtacggtggaggtaacgcttcatataatgttaagttaagttcaaccgctccaaaatcaccttcaattaaatcttacgcaacaaaattttcaacaattggcgaattttccgctggtacaatgaaattcacgaataaagatctacctggtgagtatcaaagtgcaactgtgttcgttgatccaagagactatgtgcagtcattttataacattacacaaggctacgaagtttgtactattcaacccggtgaaagttcgtgtaccggtccattttcatatacaataaataaaggaaatggctatatagctcattattttatagttcgtaatcaagacaagacgctaacatccaatcaatttgaaattcgtagcatttggaataccgatttaattcctaagattacaggatatgattacaaagaagagaataagtctgtccttgtatatgtttcacaacccggtaatggcaattggcgtgatgtcttgatgctctcaagggttgagatactcgatacaatttctaatacggttcttctgacgggcacaaaagttgcgatgtctggagaggattatacttattcctttgatttatcagctatacccgaagggaagtatgatttaacttttagtgctactgatacatttaacaacagttctcagttgccgttccgatctcttgttatcgataactcccctccttcaatttccttttcgtatgaaggcaaaccactattatcagaaagtactgtgtatggattagaaaacatctcagtaaatgtatcggatgctttaagcaagtccaaggtctatcaaatggttcttcaaggtggacccgcatcagatgatgttgaattaggatttactcaaaacactgatggttcatacacaccactttatcctcgtttgtttccttcacttgatgagaaaactgataaatacaccctcttggtgaaagcgatagatgatgcaggtaatcagtcatcaaaatctatccgttttgcatattaccctaagaatctcattgttcttgataaactaaatacccttgcggttaacaaaccgttaaacctttcttcaggcgaaccactggctgtactcaaagcaagtcagttacggcgtaatgatggttctttagcaaaaggggtccagacagctttaattactgttaggggagactctgcatttcccatcagtgttattggtaatattgtagctccaggtgaaacgaaggaaattcaaatcgatttaggttctgtaggtaatgatgttgttgtccctatatttcctggtgtatctggcgttgtcggtgcctccggttttatagtcgaattccctcaacttaaataa

SEQ ID NO: 214572 - DNA, 558 bp, Klebsiella pneumoniae
atggtcgcgcagacgcaccgggatcattttggcgttataggtctggttttgcttcaggctaaagacctgcgaggtcccggacttcgccgcgatctgatacggcgcagtatgaaacagcttatagccggtgccgttgggctgattcgccatcccatacatgccgttgcgcacaatgccccagtacggcgatttcgggtcacccacctgcggcaggttcgccggctgctgataacgttccacatggttgccctgcttcatcgaatagagcagatgcggatcctgtactttaccattgttcagcagagtggtaagcgccttcaccatctggatcggggtggcgatccagtacccctggccgatgccgaccgagatggtgtccccctgataccagggctttttatgcacccgctgtttccactcccggctgggcagcaccccggcgtactcctcattaaggtcgatgccggtggactggccgtagccgaacttgctcagccattcatggatccggtcaatgcccatctcgaaggcgacctgatagaaaaaggtgtccgctga

SEQ ID NO: 214573 - DNA, 477 bp, Klebsiella pneumoniae
atggatacgatagtgatcattctggcactgtgcggcggcgcattgcttagcgtccaggcggcgataaatggccgtcttggcagccaggtgggggtgctgcgcagcgcctttttaaccttcgccaccggcgcgctggtgacgggattgctgatcctgttttttgctccagcgacgtcggtaaacctgctacaggtgcctgagtggcagctgctgggcgctttttgcggcgtgccctacatcgtcattatggtgctggcggtgcagcggataggcaccgctacggctaccgtggcggtgatctttggccagctgacgatgagcctgctgatcgacaactttggctggctgggcaatagcacgatggcgttctcgccggcgcgactggcggcggtgatatgtctggccctcgcgctgtacttaatctacacctcagggaagtcggctacctcccacgaggcggcccgcgcagaacagtga

SEQ ID NO: 214574 - DNA, 435 bp, Klebsiella pneumoniae
atggcgttattattcattttattagtgattgccggcggcatgggattatcggtcgaggccggcctgctggggccgctggcgagccaggtgggggatctgtgggcaaccatgagcatctttgggattggcgcagtgttaaccttttttctgatgctctttttcagcccgcgtagcagcccgtcgttcttttctctgcccggctggcaactcaccggtggtctgttgggggcggggtacgtggtgatcttgaccgtggcgacgccggtgattggtattgccatgaccatgatcggcatcctggcgggtcaggtggcgaaaagcctggcgatcgaccattacgggttattcggcagcccacggcgcaaaatcgatccgcggcgcgccatggcgctgatgttgattatggcggcgttactgctggtggctctgggttaa

SEQ ID NO: 214575 - DNA, 933 bp, Klebsiella pneumoniae
atggccgatgccagcagcgtcgattttcgcgcccttcagcttttcatcgcggtttacgataaccagagtttttccgtagtggcccgccgcgaaggggtctctccctcgctgatctcgcgaaccatccagcagctggaagatgccctcgggcagcagctgttctaccgcaacacccgtgccgtggtaccgaccgaagcaggacgccttttcgcagcgtccgcccgggaactgctgggacagtacgccgacgcgcaacgggcgttacaggatcgggcacaggtccccggcggactggtgcggatcaatgcgccggtctattttggtcagcggcatatcgccccctggcttccggaactggcggcccggcatcccaaactgcagtttgacctgacgctgaccgacgattttatcgatccccatcgcgatgcgacggatatcctttttcgcatcagcagcctgccggacgcgggctatcacgccagagtgtttggcagccagcgctattacctgaccgcctccccggagtatgtttcacggtacggcagcccgacttcgccggaggcattgcatcaacatcgcacgctggtgtatggcggttcgcagggagccaaccgctggctgtttcgccagcgcgaagaggcatgggtgcactatccgttgaccccgctcatgacctcgaacaatgccgatgccctgctcacttcagccatcggcgggatggggatcgtgttatttcccgactggatggtcagcgaggcgctgcacaacgggacattagtcacgctgatggatcgctattcggcggccatcagccacacgccatcgtatatcgcggcgatttatccttatacccgccatccctctctcaacgtgcggacagtgattgactattttgccgacgtgtttggatcgccgccctactggcagcgctaa

SEQ ID NO: 214576 - DNA, 2178 bp, Klebsiella pneumoniae
atgagcacgtctaacgacccatccaacaatgcatccgccgggaagtgccctttccacgccgagacgccaaaacagagcgccggcagcggcaccgccaaccgcgactggtggccgaaccagctgcgtgtcgatctgttaaaccagcactccaatcgctccaacccgttgggtgagaattttaactacagggaagagtttaaaaagctcgattactccgcgctgaaggctgatctcagagcgctgctgaccgattcgcaagagtggtggccggcagactggggtagctatattggcttgtttattcgtatggcctggcacggcgccggcacctaccgcaccgttgacggtcgcggcggcgcaggtcgtggacagcagcgctttgcccccctgaactcctggcctgacaacgtcagcctcgataaggcccgccgtctgctgtggccggtgaaacagaaatatggccagaaaatctcctgggccgacctttacatgctggcgggtaacgtcgctctggaaaacgccggcttccgcacctttggctttggcgccggtcgcgaagacgtctgggaaccggatctcgacgtcgactggggcgatgagaaagagtggctggcccaccgtcatccggaaagcctggcgaaacaggccatcggcgccaccgaaatgggtctgatttatgtcaacccggaaggtccgaacgccagcggcgagccgctgtccgccgcggcggccattcgcgccaccttcggcaatatggcgatggacgatgaagagatcgtcgcgctgatcgccggcggccatacgctgggcaaaacccacggcgccgcagaaaccagccacgtcggcgccgagccggaagccgcgccgctggaagcgcagggtctgggctggcactccagctacggcagcggcgcaggcgcggacgccatcacctccggtctggaagtggtctggacgcagacgcccacccagtggagcaattactttttcgaaaacctgttcaaatacgaatgggtgcagacccgcagcccggctggcgcgatccagttcgaagccaaagacgcgccggagattatcccggatccgtttaacccggagaaaaagcgcaaaccgaccatgctggtcaccgacctgaccctgcgcttcgacccggagtttgaaaaaatctcccgccgcttcctcaacgatccgcaggcctttaacgaggcgttcgcccgggcgtggttcaagctgacccaccgtgatatggggccaaaatcccgttacctcgggccggaagtgccgaaagaagatctgatttggcaggatccgctgccggcagcgacccatcagccgagcgcggaagatatcgccagcctgaaaagcgccatcgccggcgccggcctgtcggtcagtgagctggtctcggttgcctgggcgtccgcctccaccttccgcggcggcgataaacgcggcggcgctaacggcgcgcgtctggcgctggccccgcagatagactggccggttaacgccatcgccagccgggtgctgccgaccctgcaggcgatccagcgcgcctccggcaaagcgtcgctggccgatattatcgtgctggccggcgtggtcggcgttgagcaggcggccgctgccgccggcgtcagcgtcaatgtgccgtttaccccaggccgcgtcgacgctctgcctgagcagaccgacgtcgagtcgtttgatctgctgcagccgctggcggatggcttccgcaactatcgccgtatcgaaggcggtgtctcgacggaaaccctgctgatcgataaagcgcagcagctgacgctaaccgccccggaaatgaccgtgctggtcggtggcttgcgcgtactgggcgcgaactacgacggcagcaaacacggggtgtttaccgaccgcgtcggcgtgctcagcaatgacttcttcgtcaatctgcttgatatggctaccgtctggaaagcggccgatgataacgcggagctgtttaccggcagcgaccgtaaaaccggcgaagcgaagtacagcgccacccgcgtggatctggtgtttggctccaactcggtactgcgcgccctggcggaagtgtacgcctgcgccgacgggcagcagaagctggtgcatgacttcgttgccgcctggaccaaggtgatgaacctcgaccgcttcgatctgtaa

SEQ ID NO: 214577 - DNA, 1062 bp, Klebsiella pneumoniae
atgttaaataatggatgtgtaccctcggaatctggtcccacagaggtgacggctgattttcgttttacccgcgtgatggccgagcaggcggcgcgggcgcgtctgacgctggacgacgatcagctgtcactcatcgcccgccttgacgccctcggtcagcagttggtgtccacgacaggcaggccgcagggggtgtacgtctggggacgtaccgggcgagggaaaagctttatcctcgaccactttttcgccagcctgccgctcgccgccaggcggcgggtccattttcatcacttcttccgcgaactgcaccagcggctgaatgcccccggagcgcccgacctgcagacggtgatgaggcagatgacatccggttgccgcctgctatgcttcgacgaatttcatctgcatgaccccggcgacgccatgctgattaaagccttgctggaacacctctttcaacacggtatcgtgctgctggccacctcaaactacccgccggagatgctgctgcccaatccgctgtatcacgatcgctttttaccgtcgatcgcgctgatccgcgcccatctaacggtggtggcgctgaacggcgaggaggattatcgcgaacggcatctgagccaggataacgccttctgcagcgggcggatgtgggttaatccgaatgcacaacagcgtcagctgtatgacctgccgtcgctgcctggcgaaccggtttcgctgacggtaggctatcgcacgctgctggcggccgcggcgtcgcccgcgttgctgcacttcacctttacccagctttgtcaggccgccacggcggtgatggactatctgacgctctgcgaaagctatgccgtctggctactggacgaggtgccgccattggctacggtggggccggcggcccagcagcgctttatcaatgtgattgatgtgctgtatgaaaagcagatccgcctgctgctggtgacccgctgcgacctggagacgctggtggcaggggtggaactggaggatattcaacgaacgcggagtcgcctgcaacagctgccgcgggcggtataa

SEQ ID NO: 214578 - DNA, 681 bp, Klebsiella pneumoniae
atggtatttccttatatgactcatttactcgcggcaatgttgttgggggcgctgatcggcgcggaacgacagtggcggcaacgtatggccggtttacgcaccaatgccctggtggccaccggcgcggcggtgtttattctcagcgcgatgtcggcctcgccggacagcccggggcgtattgcagcgcagatcgtctccggtatcggctttcttggggcaggggtgattatgcgcgatggcatgaacgtccgcggcctcaataccgccgccacgctgtggtgttcggccgggatcggcgtactctgcggcctgggacagttctggaacgcgacggcggctacgctgattattctgtgcgccaatatcctgctgcgcgaggcggcgcagcgcattcatgccttgccgggggccggtgacgaagagaaacgctatgtcttacgcgtcacctgtctgcgcgaacatgaaaatgccgtacgtcagctgttgctgaatattgcgcagcagcagaggtttaccctgcagggattgcagtcggcggcggcggacaccgcggaccatctggagatttgcgcgcagctgattagccataagcagcatcaaaaaacgctggcgcaaattatggcgcagatgggcgttcagcagaacgtcacatcggtgcactggcgtgtcggagaggcgtag

SEQ ID NO: 214579 - DNA, 1407 bp, Klebsiella pneumoniae
atgtctaccacccaggttctcggcgaaacgccctatgcttcgccaggacaaccgcacgccagcttaaccggacgcattgatgcgctgcccgcctcatttgggttatggtcgtttattaccctgctctcacttggcggcttctttgagctctacgatctcttccagaccgggtatatcagcgcgggcctgctggcggagggcattttccacaccggacaggcgggcatcttcggcatcgccgaccaggcggccttcgcctccgccacctttatgggactgtttatcggcgccagtctgctggcgccgctggcggacaaactgggccgccgcctgacctttatggtggcgctcgcctggtacggtcttttttcgctgctgatggcgacgcagagtagcgcggaaggggtgatcttcttccgctttctggtggggatcggcctcggcattgagctggtgaccattgatacctatctcagcgaatgggtgccaacccatctgcgcaataaagcctttgcctttgccttcttcatccagttcctctcggttccggcggtggcgctgatgtcctggatgctggtgccgaccaccctgttcggcctcagcggctggcgctgggtgatcatctttggcgcactgttctcgctggcgatctggtttatccgcaaaaagctaccggagtcagcccgctggctggaaagcaaagggcggcatgatgacgcgcatacggtgatgtgtgagatggaagcccgctgcggcctgacgccgtcgccgaagcatgcgcatgcggcacagagcgtcgtcaaacgcggcaccttccgcgaaatctgggcgccggagtatcggcagcgcaccctgatgctgatggtgatgaacttcttccaggcgatcggtttcttcggctttggcaactggctgccggcgctgctctccggtcagggcgccagcatcacccatagcctgctgtacgccttctttatcaccctcgcctatccgctgggctgtctgttctgcacccgcttcgtgcatcgctttgaaaacaagtggcagattgtcctctccgcgctgatgaccgttatcttcggcaccctgttcgctctgcaaaacagtccgatcctgttggtgatctgcgggtttatgatcacctggtccaacgcctggctgaccatcagctaccacgcctaccaggccgaggtcttcccgacccatattcgcgcccgcgccgtcggcttctgctactcgttcagccggctctcgaccgcggtgaccagcattctgatcggcattattctgcaatacgccggcacgccgggagtaattagctttatcgtcgtcagtatgctgatggtgatgctgtcggtggggatcttcggcccgagaacgcggggcattcgtctggagaatatctga

SEQ ID NO: 214580 - DNA, 882 bp, Klebsiella pneumoniae
atggatattaagcaactcaagtatttgatcgcgctcgatcagacgcgccattttggccaggcggcggcggcctgtcatattacccagccgacgctctccatgcgcattcgtaacctggaagaggagctgaacctgacgctgatccagcgcggccaacgctttgaaggttttaccccggagggagagcggatcctggcctgggcgcgggcggtgctggccgctcatgacggcctggcggcagaggcggccatctgtcgcgggcagatggtcggccagctgcgggtcggtatggtgccgctggcgagcctcaatccgatgcagttgattaaacccctggcggagaaatatccggcgctgcagttcagcctgttgtcgatgacctcggagcagattatcgatggcgtcagccgtaatcagctggatctggggatctgttatctgcagcatctggatgaaggtcagttcaagattgctcgcttgccgcaaacccggatggggctcctgcacgataaacgccatttcgacttcagcgccgggacgccgggatgggagacgctggcgacgctgcccctcggctttctgaccaaggggatgtattaccgggaatcgattgaaatcagctttaaggccaaagggctaacgccgaggtatgtctttgaaagtgattcgacgtttcagattatccaggcggtgcaggcggggatctgctgcgccattatgccgcttaacaacggcctcgaagcgctaagcgataatcttgaaattctgccgatcgccgaaactcatgttgattcacagctggcgctgattatgcgccagcaggaaccagtctcgaccctggcggaaaaatgcttcgccgaggcgcaggggatatttggctga

SEQ ID NO: 214581 - DNA, 2301 bp, Klebsiella pneumoniae
atgaccaataaaagacgcgcggttcccggtgttcacccctatgacggtccggcaggcgggtggggcgcgttgaaggccacggccatcgccgtgcgcacccagatggatgcctttgaggcgcccgccacgctgctgcgtaccaaccagccggacggttttgactgcccgggctgcgcctggccggataaagaacataaatcgaccttccagttttgcgaaaacggcgccaaagccgtgacctgggaggcgaccaccaaacgggtgacgcccgcattcctcgcggcaaataccgtatcttccctgctggcaaaaagcgattttgaactggagggctacggccgcttaacccatcctttggtttacgaccgggacagcgataccctgcgtccggtggcgtgggagcaagccttcgcccgtatcggcgagatcctccgcggcctgcagccggatgaggttgaattctacacctctggccgagcctccaacgaagcggcgtggctgttccagctgtttgcccgcgagtatggcactaacaacttccccgattgctccaacatgtgtcatgaatccaccagcgtgggcctgccacagtcgatcggcattggtaaaggcaccgtctccctcgacgattttgaccagaccgagctggtgatctccatcggccataatccgggcaccaaccacccgcggatgatgggcaccctgcatgagctatcccgccgcggcgtgccgattatcgttttcaatccgctgcgtgaacgggcgctggagcgttttgccgatccgcagaacgtgatggagatggcgacccggcgctcgacgccgatcgcctcgacctactaccaggtacgggccggcggcgacgcggcggcgctgaaagggatcgccaaagcgctgctgcagctggaggaggagcagggcaatgtgctcgaccacgcgtttattgcccaacatacccagggattcaccgccttcgccgatgacctccacgccacccgctggcaggacatcgaacaggagtctggcctgacgcgcgaatccctgaaccaggttgcggcggcttacgccaaatccagggccaccatcgtcacctacggtatgggcatcacccagcataacaaaggcacctccaacgtacgtctgattgccgacctgctgctgatgcgcggcaatatcggcaagccgggggccgggatctgtcctttgcgcggtcactcgaacgtccagggtaaccgcactgtcgggattagcgaaaaaccctccgcggctttcctcgacagcctgcagcgggtgatggggattacgccgccgcggcatcatggccacgatgcggtaaaagccctggaggccatgatcgccggcgaagccaaagcgctgatctgccttgggggcaacttcgccgtggcgatgccggaccacgaacgcgccttcccggcgatgcgcggccttgagctcagcgttcacgtcggcaccaagctcaaccgctcacatctcctgacggcgaaagagacctttattctgccgtgtctgggccgcaccgagcttgacctgcaggccagcggccggcagtcgatcaccgtcgaggattcgatgtcgatggtgcatgcttcgtcgggcaagcttaagcccgcctcgccgatgctgcgctcggagccggcgattgtcgccggtctggcgaaggccaccttgcccgccagcaaagtggactggcagtacctcgtggaagactacgatcgcattcgcgatctgatcgaacagaccattcctgggttcgaggattataaccagcgcattcgccatcctggaggcttccgcatgccgctgccgccgaccgagcgcatctggcctaccgccaccggtaaagccatgttctcggtatttaaaggggtgcatgagaacgtggtggtggagggtgaggacgtgatgcgcctggtgacgctgcgcagtcatgaccagtacaacaccaccatctacgcgatggatgaccgctaccgtggcgtctttggccgccgcgacgtgctgtttatgaacgagcaggatatggccgcccagggtctggagcatggcgatcgggtggatatccataccgcgctgccgggaagcgcgctgacgctggaagatatcacggtggtggcctacggcattgcgccgggaaccgtcggcgcctattatccggaagccaacgtgctggtgccgctgaactatctcgatgaagagagcggcaccccttcgtataagtcggttcccgttcgcctgacgctgcgctcgaaagagatccgtccgctggccggcgggcgctaa

SEQ ID NO: 214582 - DNA, 918 bp, Klebsiella pneumoniae
atgatcattcggccagaacaacactggtttcttcgcctatttgactggcacggctccgtgctgtcgaaaatcatctttcgcctgctgctaaatgtgctgatgtcgatcatcgccattatcagctatcaatggtacgaacagttggggatccacttaaccgtggcgccgttcagcctgctggggattgcgattgcgattttcctcggctttcgcaacagcgccagctacagccgcttcgtcgaggcgcgcaatctgtgggggacggtgcttatcgccgaacgcacgctggtgcgtcagctgcgcaatatcctgccggcggaacacgatgcccatcgccgcatcgtcagctatctggtggcctttagctggagcctgaagcaccagctgcgcaaaaccgatccgacggctgatctgcggcggttgctgccggaggagagggtgacggagatcctcgccagctcaatgcccaccaaccggatcctgctgctggccggcaacgaaattggccagctgcgggaggcgggcaagctcagcgacatcacttacgggctgatggacaacaaactcgacgagctggcgcacgtgctgggcggttgtgaaaggctggccaccaccccggtgcctttcgcctataccctgatcctgcagcgtaccgtctacctgttctgtacgctgctgccgttcgccctggtcggcgatctgcactacatgacgccgtttgtctcggtctttatctcttacacctttttatcgtgggattcgctggcggaagagctggaagatccgttcggcaccgcagccaatgacctgccgctgaacgcgatgtgcaataccatcgagcgcaatctgctcgacatgaccggtcagcatccgctgccggagacgctgcgtccggaccgttacttcaatctgacctga

SEQ ID NO: 214583 - DNA, 924 bp, Klebsiella pneumoniae
atgacacaacataattttgaaaatgataataaatatcatgagcgttcggtgcaggcgcgaaagagtacccttgtaagcgtggtggttaatattttcctttctgccttacaggtagttgtgggaatattttccggctctcagggattaattgctgacggaatgcactctttttccgatctggtcgccgatggcgtggtattgatggcgaataaaaagagccgtcgaccgtctgaccacgatcaccactatggccactggcgctatgagaacggcgcctccctaatcatcggcgcgatgctgctgctcgtcgggggtggcatgctatggtccgcggcgggccatctcgcgcaaccgcaaactattccgccggtgcacagcgcggcgctgtggatggcgctggtggcgctggccgtcaaggaggggctgtttcgctatatgctggcggccgccaggcggctgaattcgtcgctgcttatagccaatgcctggcatgcccgctctgacgccgcatcctccctggtggtggccctggggattatcggtaatctggccgggttcgcctggttcgacccgctcgccgcgctggcggtggggctgctgattgcgcgcatgggctatcgtttcgccgtcagcgcgctgcatgatttaatggaccgtgcggttgatgaagagatgcagcaggcgatcgccgatacgctgcgaaccacgccgggcgtggcgggcctccacgatctgaaaacccgtaaggcgggggatctggtgctggtggatgtccatctcgaggtggctggcgagatgtcggtagccgaagggcatcagattgcccgtcacgcgcgggagcgggtgctggcgcagcatccggtgcttaatgtgatggtgcatctcgatccctgcgaagcgcagggattgacgaaagcggtctga

SEQ ID NO: 214584 - DNA, 687 bp, Klebsiella pneumoniae
atgtcacataacaaaccatcccggctgcgtttcgccattaatctgggcaatgcggtcctggcccatctcggggagacaggaaagccagcgggcatcaccgtcgagctcagccatcggctggcgacgcgctggggcgtcagcgccgaattcgttccctatcctgccgcgggtaaagtggtggctgacgccggtggcgagcactgggatattgcctttctggccatcgatccggcgcgggaagccaccctgcgctttacctcgccctatatcaccatccagggcaccgcgctggtcagcgttgattcgccctgccagagcgtggccgacatggatcgcccggcaaccaccattaacgtcggacaaaacgccgcatacgatctatggctaacccgccatctgcagcacgccagcctgcatctccttccctcttcgcaggaggcaatcgacgccttcctcgccggtgaaggggatatggtcgccggtatccgccagccgctggaggcgacagcccgtcagcacgccggggtgcgggtactggcggataattttaccgagatccagcaggccatctgcgtcgcccgggcggacgtggaccgttttcacgcggtaaacgacgcgcttagcgagtggcgggcggatggcagtctgctggcgctgattgccggtcacctgggccaagcgaactga

SEQ ID NO: 214585 - DNA, 870 bp, Klebsiella pneumoniae
atgatcggcattcgccggatgatcgaggcgcaggtgctcggcctgaccggcatggcgctaaaagagatcgactttgaacgacccaaaggagagccggggctgtttggtccccagtcggccatctggcaggtgcacggcgattttacctcgatgctctgcggcggcattagcgcgctgttgctgcagatgctgcatcctctggcgctggccggcgtctgggatcactctcgttttcgcgaggatattttgggccgcctgcgccgcaccagccagtttatttctgccaccacttttgccactactcccgacgccgaacggctaatcgccaaagtacaggggatccatcagcggatcgccggggtggataaggacggaaccccgtatcaggcgagcgacccggcgctgttaacctgggtgcacgtcgccgagtgcagtcgctttatggcttcccacctgcgctacaagcggacggtggtcagtcccgagcgccaggaggactattttcgtgagtcggcggaaatcgcccggcggctgggggctcgggatatccctcagacaccgcaggaggtggcggactatctcgaggcgatgcgcccgcgactgcgctgcgacgaacgtacccgggaggtagccgaggtgctgctctccacccgtctgccggggcggatgagccagccggtcggccgggtgatgattaacgcaggaattgaccttttgccggaatgggcgcaggagatgctgggattgtcgctcacgccgctgcagcggcgcacgacgcgcctgatggtgcatggcgtggcccgcgtactgcgcgcctcggtacgcaacggcgcctggcattgcgccatgcgccggatgacggaggcgtga

SEQ ID NO: 214586 - DNA, 432 bp, Klebsiella pneumoniae
atggcgattcataagaaagggctagcgcactgggaaggcgacctgaagcatggcaaaggcaccgtgtcgacagaaagcggggcgctgagccagcagccctacggatttaacacccgttttgagggggtgaagggcaccaaccctgaggagctgatcggcgctgcacatgccgcctgcttttcgatggccctgtcgctgatgctcagcgaagagggatataccgcaacgtccattgacactaccgcagtggtcaccctcaataaaaccgacggcggctttgcgattaccgatatcgcgctgcaaagccagatcgtcctgccggacgtgtctccggcggcgttcgatgagatcatccagaaagcgaaagcaggctgcccggtatcgcaggtgctgaaggccaacattaccctcgattaccagctgaatccgtaa

SEQ ID NO: 214587 - DNA, 147 bp, Klebsiella pneumoniae
atgagcaccttttctcactcgcaagacgaagagcgcggtaagcaacctgcccgtgaggcgcccggggagcagggcgaagttccgcgtaaacgggacgacagcaaggatgacaaatccgatccctggcatccgcaggatggccgatag

SEQ ID NO: 214588 - DNA, 405 bp, Klebsiella pneumoniae
atgaaaaaactagcattggccatggcatgtctgtttgccgtaggtgtcgcgcaggcggacgataagggagggtttagccaggatgccgcgccgccgccgccgcacaaactcgatgacggctatcgcggcgtcgaggatggccggatcatgaccgttgagcaggcgaaaaccatgcacgatggcgcgaccgtttcgctgcgcggcaatctgctcaagcggcagggagatgaccgttatcagtttcgtgataaaagcggcaccatcaccgttattatcccggtcgccgcgtttaacgaacaacacgtagagccagacgatctggtcaatatcaacggcagtctggatcgcaaaatgacgccgccggtcgtgcgaatcgatcgtctgctcaagcagtcgcctaagtaa

SEQ ID NO: 214589 - DNA, 1341 bp, Klebsiella pneumoniae; identical to SEQ ID NO: 84378

SEQ ID NO: 214590 - DNA, 411 bp, Klebsiella pneumoniae; identical to SEQ ID NO: 99291

SEQ ID NO: 214591 - DNA, 1131 bp, Klebsiella pneumoniae; identical to SEQ ID NO: 99292

SEQ ID NO: 214592 - DNA, 270 bp, Klebsiella pneumoniae; identical to SEQ ID NO: 99293

SEQ ID NO: 214593 - DNA, 1299 bp, Klebsiella pneumoniae; identical to SEQ ID NO: 99294

SEQ ID NO: 214594 - DNA, 759 bp, Klebsiella pneumoniae; identical to SEQ ID NO: 99295

SEQ ID NO: 214595 - DNA, 921 bp, Klebsiella pneumoniae; identical to SEQ ID NO: 99296

SEQ ID NO: 214596 - DNA, 372 bp, Klebsiella pneumoniae; identical to SEQ ID NO: 99297

SEQ ID NO: 214597 - DNA, 384 bp, Klebsiella pneumoniae; identical to SEQ ID NO: 121690

SEQ ID NO: 214598 - DNA, 1320 bp, Klebsiella pneumoniae; identical to SEQ ID NO: 22860

SEQ ID NO: 214599 - DNA, 882 bp, Klebsiella pneumoniae; identical to SEQ ID NO: 94091

SEQ ID NO: 214600 - DNA, 780 bp, Klebsiella pneumoniae; identical to SEQ ID NO: 22857

SEQ ID NO: 214601 - DNA, 1026 bp, Klebsiella pneumoniae; identical to SEQ ID NO: 22856

SEQ ID NO: 214602 - DNA, 3030 bp, Klebsiella pneumoniae; identical to SEQ ID NO: 94088

SEQ ID NO: 214603 - DNA, 1716 bp, Klebsiella pneumoniae; identical to SEQ ID NO: 94087

SEQ ID NO: 214604 - DNA, 369 bp, Klebsiella pneumoniae
gtgaaagaattaactgtatttgaaatggataccatttccgggggttatagctgggatttctcctcaatccaatcaaccgtcaccagtctggtaagtaatggtgtagaagcagctgcatcagccgccctgggagctatcacatggggggtctatggcctgctttggggcggtactcaatccggcgctaatggtggtcttttaggttttggtttacttggtaacgcggttggcgctgtctggggaacaatcatgggagctattggcggcgcggttggctatgcagctttgggctgggaggcatccgtgaatgagtccatgcaagccatgctgggcattatcgatggctcctttgtgccatggagccactaa

SEQ ID NO: 214605 - DNA, 1287 bp, Klebsiella pneumoniae
atgactaatagtatttatcgcaaggaagcgatagcttataagaagttgcactggaaagggaaagcgctattgctggctggcttgcctgcatggctagttacatgtttatctcttttatttctctgcgctcttatctgcgcccttatattctgtaaatttacacaacgcattgatgtcaaaggcgaggttatcactctccctcactccgtaaacgttttctctccgcaacaagggtttgtcgtcaatcagtatgttcaaattggagacgttgtcaaaaaaggacagacgctttatgagcttgatgtatctagaaataccacaacaggtaatgtcagtgcagcacagattgaggtaatcaatgaaaagatagccaactccgaagctattataaaaaaactaactcataataaaaacgaaacactaattgcactggatgcccagcttaaaaatgccagaaactctcttaacgaaactgtacgtatgctggccaatacgcaacaaggcttaagcaaaatgcatgaaaacctgtccagttatgataaataccttaaggaggggttaattacaaaagatcaatacaattaccaacattcgttgtactttcaacagcaaagcgcctatcagtcattgataagccaaaagatgcaactagaaactcagcttacacagttaagcagtgataaagttactaaagctgccgattttgataatcaaatatcatcgcaatataatcagacaaatgattataaaaatcaactagtagaatcaaacgctaacggaaatattatcattaaggcaacaacggaaggacgcattgaatcattagccgtcactaaaggccaaatggttgataaaggcagtagtcttgcccaaatcaaacctattggtaacatcgagtattatctcatactttggctacctaacaacagcattccttatgttaaagtcggcgacacaataaatattcgttatgatgcattcccttccgataagttcggacagttccctggtgagatcatttctatctcatcacttcctgcctcacgacaggaaatgtcagaatataccaatgtcaatgatggcactaatcaacaagaacttgcattatataaggcaattgtcaaaataagggataaaaaatttaattacgatggaaaagaactttctctttcaaatggattaaaagcacaagcagtggtattccttgaagaacgcccgctttatatgtggatgtttacaccagtttataaaatttctcaaagcgtgagcggccctgtcaatgactaa

SEQ ID NO: 214606 - DNA, 2124 bp, Klebsiella pneumoniae
atgactaatgaactatttgaaaagatcatcgcgaaagttaacttttctctcctaaagaaaacgccagttatattgcaatcggaagccgctgagtgcggcattgcctgtctggccatggtttgtggtcattacggcttggatattgacctgtttaatttccggcagcgttttggtagtccttcacagggcgtgacactgatgtccttaagcaaaacagcggagcatgctgggttaaaaagccgtgcgctgtcgttagacttggatgaaatacgccagctcaagttgccctgtgtactccactggggcatgaaccactatgtggtgctgactaaagttcgcaaatccagctttatcgtacacgatccagcgctgggtaagcgtattatcggcatccaggagatgtccaattattttactggcgttgccttagagctttggcccgatcagaacttccagcaggaaaaggctaagtcccgccttcgtctgctggatctaatgcgcaatatagtaggcttaaaatcagcgctgctgaaaatttttgccttctccgtggtcgtggaagccatcggcttactactcccgataggtactcaactggttaccgaccatgtgattatggcgcacgaccaaagcctgctatcagttatatgcattggcctggtcttttttacactatttcgcaccttcatcagtatgctccgcgcctggacgtccttaacgctgaataccctgacaagtatccagtggaaaaccacgcttttcgatcatctggccagtctgccactatccttttttgaaaagcgtcatttaggagatatccagtcgcgtttttcctctttggataccattcgctcgacgtttactaacagtatcgtcagcggcattattgactcaatcatgaccatcggtctgctgatcatgctaactttgtatggtggctggctaacttgggtcgtagttggctttactttatgctacgcaattatgcgttttgcaacttatcgattctatcgtcgtgtagcagaagagcaggtaatcaaaggtgctcgctccagttcgcattttatggagtcattgtacggtatctcgaccatcaaggcattaaacttgaaagaacgtcggtcccagcattggcttaatataaatatcgaagcctgcaacgctggaatcaaacaaactcgtttcgatatgctatttagtgggatcaataccttcattactgctatcgatcaggtcgccgtgctctggcttggcgcgattatggttattgataataatatgacccttggtatgtttatggcgtttaacgcctatcgtggtcaattttcacaacgcgcttctagtttggtcgatctttgtatgcaactgcgaatgctctccctacataacgaacgtctgtcagagatcgttttcagcgaaccggaacaggagcttcccacaagagaggttttttctgcagactcgggtgccaaactggaagtcaaaaatttgtgctatcaatatgatccgttttctcagccgatcttttctaatttaaatataaccgtagaacccggtgagtccgtagcacttgtcggcccttcaggcgtcggtaaaactacgttattaaaagtgatgtgcggtctgttgtcgcccaccagcggtgatgtgttagccgataatctcgatatcaccaaaattggtctcaataattatcgtcttggtatcgcctgcgtactgcaagaggaccgccttttctctgggtcgcttatcgataatatcagcggcttcgaagataacgccgatattgattttgtgatggaatgcgccaaacgctgcaatattcacgatgagatcatcaagatgccgatgggctatgaaaccatagtcggcgagctaggactgggaatttcaggtgggcaaaagcagcgtattctgatcgctcgcgctctttatcgtagaccaagtattctttttatggatgaggcaaccagccatctcgacttaaaaaatgagtcggtgataaatcagtctatttcagcattaagcatcaccaggattattgtcgctcaccggccatcgacgattgcctctgccgatcgcgttatcgacctgtcgcagacaaagaccctctcgccagcttaa

SEQ ID NO: 214607 - DNA, 864 bp, Klebsiella pneumoniae
atgcaaggaacgtttattggatttaatactgcaggtattacctttgaagaccgctttctggcgctgctgttaaaaataaagcagcaaaatggcccctgtcagcaatactatctacaagcgcccatactactcgatcttcttctcatacttcaaaatcgtctgcttgtgacgtataagcgattacacgaacaaggggaaacctataaagaagagcttatcgcttataatgaatcgctgatcgctaacatccctgccgtagagatggcggagattcagcagccgaatcctgagcggcgtattatgtcgattacgcttaaaccaggcgagactgaatcgactctcattctggttctccagaatgagcaaatctgcacattatgtattgaagacaggcaggtagaggcattactcgcgggtgttcaacaagcattgaaaacaatcaatgatcaagaggttttgaagtatttaagttcaaatatggattttttaatgtgctacactgtcgacttgactacccagccgaatattgactaccagcaacacactcaggaagactggaagctaaacctattttctcattatctgggcgtgctgtactgctgcgagacagacgaaggcaagaaaattgtctccggggcggtggtgaaaaccagcgcgccgcatttgtcggaactggaaaacaacgttgtgacgcggattatcgagaaaagccccaagctcaaggcgatgcacgcggagctggcgccatgccagatcttcagtactatcatcccttcccagccgggaagaatgctcagtctggaagaatgcctgcgtcccctacacgccttctaccttgaaaagaaagcggagcttagcgcctga

SEQ ID NO: 214608 - DNA, 354 bp, Klebsiella pneumoniae
atgcaggtaaaatatttagcagggattgtcggcgcagccttactgttggcaggttgcagttccagcaatgaattaacctctgccggccagaatgtgcgcttcgtgcaggagaagccgggcgcagagtgtcagctgttagggaccgcgacgggtaaacagagcaactggctctccggccagaatggcgatgagggtggttccatgcgcggtgcggcaaacgccctgcgcaaccaggcggcagcgatgggcggcaacgtgatttacggcgtcagcagcccgacgcaaaacctgctgtcgagctttgtgcctaccgacagcgaaatgaacggccaggtttataagtgcccgaactga

SEQ ID NO: 214609 - DNA, 1647 bp, Klebsiella pneumoniae
atggcagcaaaagacgtaaaattcggtaacgacgctcgtgtaaaaatgctgcgcggcgtaaacgtactggcagatgcagttaaagtgaccctgggcccgaaaggccgtaacgtggttctggacaaatccttcggcgcgccgaccatcaccaaagatggtgtttccgttgcacgtgaaatcgaactggaagacaagttcgaaaacatgggcgcgcagatggtgaaagaagttgcctctaaagcgaacgacgcagcaggcgacggcaccaccaccgcaaccgtactggctcaggctatcgtgaacgaaggtctgaaagctgttgctgcaggcatgaacccgatggatctgaaacgcggtatcgacaaagcggtactggctgcagtagaagagctgaaagcgctgtccgttccgtgctctgactccaaagctatcgctcaggtaggtaccatctccgctaactccgacgaaaccgttggtaaactgatcgcggaagcgatggataaagttggtaaagaaggcgtgatcaccgttgaagacggtaccggtctggaagacgaactggacgtagttgaaggtatgcagttcgaccgcggctacctgtctccgtacttcatcaacaagccggacaccggtgccgttgagctggaaagcccgttcatcctgctggctgacaaaaaaatctccaacatccgcgaaatgctgccggttctggaagccgtagcgaaagctggcaaaccgctggtcatcatcgctgaagacgttgaaggcgaagcgctggcgaccctggtggttaacaccatgcgcggcatcgttaaagtggctgcggtgaaagcaccgggcttcggcgaccgtcgtaaagctatgctgcaggacatcgctactctgactggcggtaccgttatctctgaagagatcggtatggagctggaaaaagcgactctggaagacctgggccaggcgaaacgcgtggttatcaacaaagacaccaccaccatcatcgatggcgttggcgaagaatccgcaatccagggccgcgtagctcagatccgtaagcagatcgaagaagcgacctccgactacgatcgtgaaaaactgcaggaacgtgtcgctaaactggctggcggcgtagcagtaatcaaagtcggtgcggctaccgaagttgaaatgaaagagaaaaaagcacgcgtcgacgacgccctgcacgcaacccgtgctgcggttgaagaaggcgtggtggctggcggcggcgtagcgctggttcgcgttgcggcgaaactcgctggcctgaccggtcagaacgaagatcagaacgtcggtatcaaagttgcgctgcgcgcaatggaagcgccgctgcgtcagatcgtgtccaacgccggtgaagagccgtctgttgtggcaaacaacgtgaaagctggcgacggtaactacggttacaacgcagcaactgaagaatacggcaacatgatcgacttcggtatcctggacccaaccaaagtcacccgttctgcactgcagtacgcggcttccgtggctggcctgatgattaccaccgagtgcatggtgaccgacctgccgaaaggcgacgcgcctgacttaggtgctgctggcggtatgggcggcatgggcggtatgggcggcatgatgtaa

SEQ ID NO: 214610 - DNA, 294 bp, Klebsiella pneumoniae; identical to SEQ ID NO: 137717

SEQ ID NO: 214611 - DNA, 1251 bp, Klebsiella pneumoniae
atgggtggtttaaaacaggagttagggctgggacagggagttgggttgctttccacctcattgctgggtaccggcgtcttcgccgtcccggcgctggcggcgctggtcgctggcgataacagcctgtgggcatggccgctgctcattctccttgttttcccgattgccatcgtcttcgccctgctgggccgccattttcccagcgcgggcggcgtggcccactttgtcgatatggcctttgggccacgtctggccagcgtcaccggctggctgtttttatcggttatcccggtcggactccccgccgccctgcacatcgccaccggttttggccaggcgctgttcggctggcatgatgcgcagctgctgctggcggagctgggcaccctggccatcgtctggtgggtcggttcgcgtggcgccagctccagcgccaacctgcagacgttggttgccgtactgattgtggcgctgatcgtcgtagtctggtggcgcggcgggataagcccggcgcagatccccttcccggccccggcggagattgaccgcgggcagctcttttcggcgctgtcggtgatgttctggtgctttgtcggtctggaagccttcgcgcatctcgcctcggagtttaaacatcccgagcgtgatttccccagggcgctgatgataggcctgctgcttgccggctcggtctactgggcctgcaccgtgctggtgctgcacttccacgcctttggcgaggagatggcggcggcggcgtcattaccgaatatcgtggtccgtctgttcggcgtcgaagcgctgtgggtagcctgcgtcatcggctatctcgcctgtttcgccagcctcaacatctatattcaaagctttgcccgcctggtctggtcgcaagcgcagcataagccacacagctacctcgcaaggctgtcgccacggcagatcccgcgcaacgccctcaacgccgtgctgggatcctgcgtagttagcacacttggcatctatctgctcgatatcaatctggacgcgctgatcgtttacgccaatggcattttcatcatgatctatctgctgtgcatgctggcgggttgtcgtttgctgcgcggtcgctatcggctattggcagtggtgggcagcattctctgtctgctgctgctggcgatggtcggctggaaaagcctgtacgcgctggtgatgctggcggggctgtggctgtttttacccaggcgcaagctggcgacgggaagcgtgtag

SEQ ID NO: 214612 - DNA, 477 bp, Klebsiella pneumoniae
gtgcgttggattccgtttattgccttttttctttacgtttacattgagatatcgatctttatccaggttgcgcacgtgctgggcgtctttatgaccctgatcctggtgatctttagctcggtggtagggatgtcgctggtgcgtaaccagggcttcaaaaacttcctgctgatgcagcagaagatggccgcgggcgagagcccggcggcggagatgatcaagagcgtatcgctgattatcgctggtctgctgctgttgctcccggggttctttaccgacttcctcggcctgctgctattgctgccgccggtgcaaaagcatttgacgatgaagctgatgccgcacctgcgcttcagccggatgccgggcggtggctttagcgccggtactggcggcggagagaccttcgaaggggaattccagcgcaaagatgagcagcgcgaccgtctggaccataaggacgatcgccgcgattaa

SEQ ID NO: 214613 - DNA, 1437 bp, Klebsiella pneumoniae
atgttaaacaacattcgtatcgaagaagatctgttgggcaccagggaagttcccgcggacgcttactacggcgttcatactctgcgagcgattgaaaacttctacattagcaacagcaaaatcagcgacataccagaattcgtgcgcggcatggtcatggttaagaaagccgccgcgctggcgaacaaggagctgcagaccattcccaaaagcgcggcaaatgcgattatcgccgcctgtgacgaagtcctgaataacggcaaatgcatggaccagttcccggtcgatgtcttccagggcggggccggtacctccgtaaacatgaacaccaacgaagtcctggcgaacattggccttgagctgatgggccaccagaaaggcgaataccagtacctgaacccaaacgatcacgtcaacaaatgccagtccaccaacgatgcttaccccaccgggttccgcattgcggtgtatgcctccatccttaagttaatcgatgcgattaaacagctgggcgaaggcttccaggcgaaagccgtggagttccaggacatcctcaaaatgggccgcacccagctgcaggacgcggtgccgatgaccctcggccaggagttccatgccttcaatgtgctgcttaatgaagagaccaaaagcattctgcgcactgcggagctgctgctggaggtgaacctcggcgccaccgccattggtactcgcctcaacaccccggacggctatcaacagctggcggtgcagaagctggctgaagtaagcaacttaccggtcgtcccggcggaagatctgattgaagccacctcggactgcggagcgtacgttatggttcacagctcgctgaaacgcctggcggtgaaactttccaagatctgtaacgacctgcgcctgctctcttccggtccgcgcgcgggcctcaacgaaatcaacctgcctgagctgcaggctggctcttcaatcatgccggcgaaggttaacccggtggtgccggaggtggtcaaccaggtctgcttcaaagttatcggcaacgataccactgtgaccatggcctccgaagccggtcagctgcagttgaacgtgatggagccggtaatcggccaggcgatgttcgagtcgattcatatcctgaccaacgcctgctacaacctgctggagaaatgcgttaacggcatcaccgccaataaagcggtatgtgaaggctacgtctacaactccatcggcatcgtcacctacctcaacccgtttatcggccaccacaatggcgatatcgtcggcaagatctgtgccgaaaccggcaagagcgtacgggaagtggtgctggagcgcggactgctgacggcggcggagttggatgatattttctctgcgcaaaacctgatgcatcccgcttataaagcaaagcgttataccgatgaaagcgaacagtaa

SEQ ID NO: 214614 - DNA, 1302 bp, Klebsiella pneumoniae
atgtttggtgcagaactggttattgtcctgctggcgatttatctcggcgcccggctcggcggcatcggtatcggctttgccggtggccttggcgtccttgtcctgacgcttatttttcaaattaaaccgggtgcgatccccttcgacgttattgaaatcattatggcggtgattgccgctatcgccgccatgcaggtcgccggcgggatggattacctggtcagcctcgccgaacggatgctgcgccgccacccgaagtacattaccttccttgccccgctggtgacctggtttatgaccgtgctcgctggcaccggccataccgccttctccacgctgccggtgatcaccgaagttgccaaagagcaaggcattcgtccgtctcgtccactgtcgattgcggtggtggcctcccagatagcgatcaccgcctcgcccatttccgccgcagtggtctttttcgctggtatccttgaaccgctgggcgttagctatttgacgctgctggccatctgtattccggtcacgctgctggcggtgatgctcaccgctatcgtctgcaacttcctcggctgcgaactgaaagacgatccggtttaccaggagcggctggccaagggggaagtcagactgcgcggcagccaggtatttgagctgcagccgcacgccaaacgttccgttctgctgtttttgatcggcatcgtggcggtgatgttctacgccacggccatcagcgataccgtcggcctgattaagaacccggtgctgccgcgtaacgaggcgatcgtggtatttatgctgaccatcgccaccctgattagcatcacctgtaaaatcgacaccggcgaagtgctcaacgccagcacctttaagtccgggatgagcgcctgcgtctgcgtcctcggcgtcgcctggctgggagataccttcgttaaagcgcatatcagcgacatccaggccgtggccggcgatctgctgcacaattacccatggctgctggcggtggtactgtttttcgccgccacgctgctctactcgcaggcagccaccaccaaggcgttgatgcctgccgcgctgctgctgggcgtcagcccgctgacggctatcgcctcgtttgccgcggtctcggcgctgttcgttctgccgacctacccaaccctgctggcggcggtagagatggacgacaccggctcaacccgcattggtaaatatgtctttaaccacgccttcctgatccccggcgttatcgctatcacgctgtgcgtgatcctcggctttatctttggcgggattatgctgtaa

SEQ ID NO: 214615 - DNA, 324 bp, Klebsiella pneumoniae
atgactacgcctgatgctgttgttgtgctctgtaccgcgccggacgaagcgaccgcccaggatctggcggcaaaagcgctggcggaaaaggtggcagcctgcgccacgctgctgccgggggctacctctctgtattactgggaagggaaactcgagcaggagtatgaagtgcagatgctactcaaaactgaccttgcccatcagcaggcgctgctggactgcctgaagtcacaccacccgtatcaaaccccagaactgctggttctacccgtcacgcatggagacaacgattacctctcatggcttaccgcatcattacgctga

SEQ ID NO: 214616 - DNA, 1797 bp, Klebsiella pneumoniae
atggcttaccgcatcattacgctgatcctgctgctgtgcagcacatcagccaccgccgggttattcgacgcgccggggcgctcgaacttcgtgcctgctgatcaagctttcgcctttgactttcagcagcaacagcatgacgtcaacctgagctggcaaatcaaggatggttattatctttatcgtcaacagtttaccttcagcgccgccggggcgacgatcgacgaaccggcgctgccggcgggagagtggcatgaagatgagttttacggcaaaagcgagatctttcgccaacgcctgaccgtgccggtgacggtgaaggaggcggacaaagaggctactctcaccgtcacctggcagggctgcgccgatgccggattctgttatccgccggagactaaagtgatcccgctgagcgccgtgcgggcggcctcaaacgacgctcagccaaccgccgccgcgcccgtgtcgtcgctgaaccatcgtccggccttcaatccgccgctgccggttgaaccgcgcccgatggaggagaacgccgtgccgcaggcgcctgccatggcgccgccagcagacgtccccgctcgtctgcccttcaccgccctgtgggcgctgctgattggcattggtatcgccttcaccccctgcgtgctgccgatgtacccgctgatttcgggcatcgtgctgggcggaaaacagcggctttccaccgcgcgcgccctgctgctggcctttatttacgtccaggggatggccctgacctataccgcgctggggttggtggtagccgccgccgggctgcagttccaggcggccctgcagcacccatatgtcctggtcggcctgtcggcggtgtttatactgctggcgctctccatgttcggcctgttcacgctgcagctgccgtcgtcgctgcagacccggctgacgctgctcagcaataagcgccagggcggctcgcccggcggggtctttgcgatgggcgctattgccgggctgatctgctccccctgcactaccgcgccgctaagcgccattctgttgtatatcgcccagagcggtaatctgtggctgggcggcggcacgctgtacctttacgcgctgggcatgggtctgccgttgatccttgtgaccgtgtttggcaatcgcctgctgccgaaaagcggcccgtggatgagccatgtgaaaaccgccttcgggtttgtgatccttgccctgcccgtcttcctgctggaacgcatattcggcgaccagtgggggttacggctgtggtcaatgctcggtgtcgccttcttcagctgggcgtttatcacctcgctgggcgctacccggccgtggatgcggctggtacagatcattctgcttgccgccgcgctggtcagcgcgcggcctctgcaggactgggcgtttggcgccccggcggtcgagcagcaggcgcacctggccttcacccgcgtcagctcggtggccgagcttgaccaggcgctggcgcaggcgaaaggtcaaccggtgatgctcgatctctacgccgactggtgcgtggcctgcaaagagtttgaaaaatacacctttagttcacctgacgtgcagcaggcgctgaaaggcaccgtgttattacaggttgatgtgacgaagaacagcccgcaagacgtcgcgctgctgagacacctgcaggtgctgggtctgccgacgatcctgttcttcaacgctgagggtcaggaacagcctgagcggcgagtcaccggctttatggatgccgcggcattcagcgcccatttgcgcgattggcaagcgtga

SEQ ID NO: 214617 - DNA, 591 bp, Klebsiella pneumoniae; identical to SEQ ID NO: 137724

SEQ ID NO: 214618 - DNA, 2088 bp, Klebsiella pneumoniae
atgcgcgcgttcttctgggctgcctggctgggcctctgctctacgcccctgctggcggctcccctgcaaggtttttcctttgcacaaaaagactgggagctcgcctgcgataataccggcgcctgccgggcggcgggttacggcgtccgcatgggtgaggtcagcgtgctgttgacccgcaacgcgggcagcgaacagcacctcaccgccacggtaacctttgcgcaaatcgagcacgatatccccgccgactccaccgccagcctgctgatcgacgaccgggattttggcgcgctggacgctctcgacgacagccactttcgcctcgacagcgatcagaccaccgccctgctacaggcgttaacgaatcagcgcaaaatcgaattcacccttaacggccagcacctgccgctttccagcgccggcagccgcgaggtgctgggtaaaatggatgcgtttcagcgacgcaccggcaccgccgatgcgctgctggataaaggcgatgccggcgacgatgccattttgccagccactcccgccccggaaattatcgccgccccggttctccataacgcgcagccagtgccgttgagtatgcttcagcgccagaaactgctgcccatcctgacgccgctgctgaaccagcgctgcgacgactggcagaatcaggccattccggcggcagatcgccagatcacgctgaccgcgctggataaaacccattctctggcgcaggcgctctgctggcgagcgccctataacgacggttatgccctgtggctggtcgataacgcccagttgagcaaaccgcggctgctcactaccgaggcctccagctacgccgacggcgctatcgtctttttgcacaaagaacggggcatggccgactgcgtcaccggcgagacgcgcgtttgggatggtaaaacctttacccccagcctgaagtacagcaccggtatgtgtcgggaaattaccccgggtggcacttggatgctgccgacctttgtcagccaggtgatccccaggcagcagaaagaggcggataacctggctctgcgcacgttgtataacgcagtgttgaaagcgcaaaaaagcgatccagaattgtctctgaataaggtcgccgagcagtttccgttaaccggccatattaccgacttcacgctcacttacgccgacgatacgctgatcacgaccagtaaaccgtccccggatatcagcgatgatgagtggcaggcgtttctgcgctcctcgattagcgcggattcagaaaacggcaaagtcagctttacccttatcgacctcgacggcgacggcaaacgcgacctgattatcgacagctatgtgggcggcaccgggctcttcagctacaccggggtgctcaagcgaggtgatgatgattttgccgccgtcaacggcagcgacagtgataatggtgatgatttcgatgccggggtgcccggcgccctcttttccattaatggccgcggggctaaccagtggaaccactgggtcaaaatcaacggccaggtgtatgccctgtggtacaacggccagtttggcgaagataacctctacctgctacgcccgttcagcaccaccagccagacgcccgcggtgacggttcgctatcgctatacgctgaacagcatccgctccccggagaaagaccagccgctgacccccagcctgagcgacggcgataaagcggacctgctgcgctcgctggaggtaatgcagggcagcctgctgaaagacagacccgccagcgacaacgacgcgccgatctgccccatcccgccgggcacctccgctgacgaggcggataactactacagcggcgtcgccgttaactatatctatgagacggtggcctatattccggtctggctgaacgggaagtgttatatcggcaccattttcagccatcatggcgcctatcgccacggcgtggatgcggaaattaccctgagctcgccgcgtgaggacgaggaggtcattggcgattatctcatctccggactacgccacgttatcgccattaccagcggctggaaaagccgcgagggcgataacggcatgcagtga

SEQ ID NO: 214619 - DNA, 1056 bp, Klebsiella pneumoniae
atgcaaaatttaaacacggttctgcgggcgatccccgcgccggacgccgacgccatggcgcgggcacagcaacacatcgacggcttactcaagccccccggcagcctcgggcgtctggaggcgctggcggtgcagctggcgggaatgcccggcctgggcggccagccgcaggtggcgaaaaaggccttgctggtgatgtgcgccgaccatggagtgtgggacgaaggggtggcgatttcgccgaaggcggtcaccgccatccaggcggcaaatatgacccgcggcaccaccggcgtctgcgtgctcgccgcccaggccggggcgaaagtgcatgtaattgatgtcggtatcgatagcgaaccgctgcccggcgtggtgaatatgcgggtggcgcggggctgcggcaatattgcccgcggtccggcgatgagccgtgagcaggggcaggagctgttgctggaggtgatgcgctacacccgcgcgctggcccaggagggcgttaccctgtttggcgtcggcgaactggggatggccaataccacgccggcggcagcgatcgtcagcgtcctgaccggcagcgatgcgcaggaggtggtcgggattggcgccaatctgccgctggcgaaggttggcaacaagatggaggtggtgcggcgggctatcgccgtcaatcagcccgacccgaatgatggcctcgacgtactgagcaaagtcggtggtttcgatctgctggggatgaccggtgtcatgctgggggcggcgtcctgtgggctgccggtggtgctggatggctttctctcctacgcggcggcgctggcggcgtgtcagatagcgccggaggtgaaaccgtatctgatcccgtcccactattcggcggagaagggggcgcgtatcgcgttggcgcacctgggcctcgaaccgtatctcaatatgggcatgcgtctgggagaaggcagcggcgcggcgctggcgatgccgatcgtcgaggcggcctgcgcgatgtaccatcgcatgggcatgctggcggcaagcaatattgtgttaccgaaggggtaa

SEQ ID NO: 214620 - DNA, 546 bp, Klebsiella pneumoniae; identical to SEQ ID NO: 138419

SEQ ID NO: 214621 - DNA, 1524 bp, Klebsiella pneumoniae
atgacgctggcagtgatgttgcagggcacggcttccgacgtggggaaaagcgtgctggtggcgggactgtgccgcatttttcatcaggatgggctgcgtaccgcgccgtttaaatcacagaatatggcgctgaactccggcattacgccggatggcaaagagatgggccgggcgcagattttccaggccgaagcggccgggattgcgccggatgtccgcatgaatccgattttgctcaagcccaccagcgaccgtcaggcgcaggtggtgctgatggggcaggtggcgaccagcatggatgcggtgagctatcaccagtacaagccgcgcctgcgcgagcagatcctcgcggtctaccagagcctggccggagagtatgaggcgctggtgctggaaggcgccggcagtccggcggagattaacctgcgcgaccgcgatatcgtcaatatgggcatggccgagatggcgcaatgcccggtgatcctggtggccgatatcgaccgcggcggggtgtttgccgcgatttacggcacgctggcgctgctgcagcctcaggagcgggcgcgggtgaaaggggtgatcatcaataaattccgcggcgatgtggcgctcctgcgctccgggatagagcagatcgaggcgttgaccggggtgccggtgctgggcgttatgccatggcttgacgtggatctcgaggatgaggacggcgtcgcgctgcaggccgggaaataccatcgcaccgaccggcgcgatatcgacatcgccgtggttcacctgccgcatatcgccaattttaccgactttaacgccctggcggcacagccagacgtccgggtgcgctatgtccgcgatccgcaggcgctggccgacgccgacctggtcattcttccgggcagtaaaaataccctcggcgatctgtgctggctgcgcgagagcggcatggcgcacgcggtcgagcaggcccggcagcgcaaggtgccgctgctggggatctgcggcggctatcagatgctgggcgaaaccattatcgatgaggtggagtctggccttggcgcccagccagggctgggggtgctgaagaccgtgacccacttcgcccagcacaaaaccaccacccaggtgcaggcgaccctggggtctgcgctcccggattggttagccgacgcggcggggctgcgcgtcagtggctatgaaattcatatgggcgagacgcgccgcgaggcaggctgcccgccgctgctgcagttgcataaagcggggcaggcagtggacgacggggcgataagcgacgacggcctggcgttcggcacctatctccatggcctgttcgacagcgatgcctttacccgggcgctgctcaacggcctgcgccagagcaaagggctggcgccgctggacagcgccctggagtatgcccgctataaaacccggcagtttgatcggctggccaaggccatgcgcgaacatatcgccatcgataaaatttacgccatcatgcgccaacatcaggagcccctatgctga

SEQ ID NO: 214622 - DNA, 825 bp, Klebsiella pneumoniae
atgcttgccacaaccgatctctggtttcgctatcaggatgagccggtacttaaagggctgacgctggatttttcccgccatgcggtgaccggcctggtgggggccaacggctgcggaaagtcgacgctgtttatgaacctgagcggcctgctgcgcccgcagcagggggcggtgctgtggcagggagaggcgctgaattacagcaagcgcggtctgctggcgctgcgccagcaggtggcgacggtgtttcaggatccggatcagcaaatcttctataccgatatcgacagcgatatcgcttttagtctgcgtaacctcggggtggcggaagaggagatcgcccgccgggtggatgaggcgttgaccctcgtcgatgcccaggggtttcgccagcagccgatccagtgcctcagccatgggcagaaaaaacgggtggcaatcgccggggcgctggtgctgcaggcgcgctacctgctgcttgacgagcccaccgcgggcctcgatccacgcgggcgggcgcagatgatcgccatcatccgccgcattgtcgggcaggggcggcgcgtggtgatctccagccacgatatcgatctgatctatgaggtgagcgacgccgtttacgtgctgcgtcacggcgaagtgctggccgcgggggatcccggcgaggtatttgcctgcgcggagacgatggacagggcgggattgacgcagccgtggctggtgaaacttcatagcgaactggggctgccgctgtgtaaaaccgaggcggagttttttcagcggatgcacaacaacgcgataggcgcgataaaggaggcgtcatga

SEQ ID NO: 214623 - DNA, 678 bp, Klebsiella pneumoniae
atgaccgggtttgaccgactcagctaccagagccgctggttgcaggtggcgccagagcgtaagtttctgctctggctgctgctgatggcgctggcctttacgctgccggcgtggggccaggcgctgacgctggcgctgaccgccgcgctgacctgctggctgctgcgggtctcattctggcgctggtgccgctggatggcgctaccctttggctttttgctggtcggcgtgctgaccattctgttcagcgttagccgcgacccgcagatgctgttagcgagcttgcggctgggcgctttctcgatagggatttccgctccggggctggccgtggccggggagaccttctggcgcagcctggcagcgatggcggccacgctctggctggtgcttaatctgcctttcccccagctgattatcttgctcaagcgcggtcgcgtaccgcggctgttgacggagcagatcctgctgacctggcgcttcatttttattctgttggacgaggcgatggcgattcaccgcgcgcaaaccctgcgttttggctatggtagcgtgccgcagggctatcgctcgctggcgatgctggtgggactgctgttcacccgcgtcctcctgcgctatcagcagatgagcacggcgctggatatcaaattgtaccagggtgattttcacctctaa

SEQ ID NO: 214624 - DNA, 282 bp, Klebsiella pneumoniae
atgaaaaagaccctgatcctgttggcgatggtggccgccctgatgatcctgccattttttattaaccacggcggcgagtttggcggctcggacggcgaagcggagagccagatccaggtggtggcgccggattatcaaccctggttccagccgctatatgaaccggcgagcggcgagattgagagtctgctgtttaccctgcagggctcgctgggcgcggcggtgattttttacattctcggatatgcgaggggcagacagcgccgtgatgaccgggtttga

SEQ ID NO: 214625 - DNA, 738 bp, Klebsiella pneumoniae
atgaatcaggtgaaatcgctgaagcagctttcgtatggggggctggcggccgctgttctgctgatcatcgtcccgcaggaggcgttcgccatgcatatcatggagggctttttgccgccgatgtgggcgctggcgtggtggctgctgtttttaccctgcctgtggtacggcctggtgcgcctgcggcgtatcgttcaggaagagagcaatcagaaggtgctgctggccctctgcggggcgtttatttttgttctttcggcgctgaagatcccgtcggtgaccggtagctgctcgcacccgaccggcgtcggtctggcggtgatcctcttcgggccgggcgtggtggcggtgctgggggcgatcgttctgctgttccaggcgctgctgctggcgcatggcggcctgaccacccttggcgccaacgggatgtcgatggcggtgatcggcccgatggtcggctatctggtgtggaagctggcctgtcgggcggggatccgtcgcgatgtcggggtctttctctgcgccatgctggcggatctgatgacctactttgtcacctccgtccagctcggggtggcttttcccgatccggcaaccggggcaggcggatcgatcgccaagtttatgggcatcttctgcctgacgcagatcccgatcgccatcgcggaaggcttgctcaccgtgatgatctacgatcagctaaccaaacggcgactgatcgccgcggaggcacattaa

SEQ ID NO: 214626 - DNA, 711 bp, Klebsiella pneumoniae
atgagcggcaaactatacgccctgagcagcgggccgggggcggccgatctgatcaccgtgcgtgcggcgcggatcctcggccagctggatgtgctgtatgcgccagccggccgcaaaggcggcgacagcctggcgctctccatcgtacgcgagtacctgggcgcacacacggaggtccgctgctgccattttccgatgagcgccgacagcgcggaaaaagaggcggtgtggaacgacgttgccgcggcgctggcccaggaggtggcggcgggcaggcaggtcgggtttatcaccctcggcgacgccatgttgttcagcacctgggtctttctgctgcagcggattggctgcccggagtggctggagattgtccctggcgttacctccttcgccgccattgccgcgcgggcgaaaaccccgctggccatggagcagcagtcgctggcggtgatctcctgcaccgcgccggaagcggacattgccgcggcgctgcgccagcatgacagtctggtgctgatgaaagtctacggccgcttcgcccgcattaaggcgctgctggcgcaggcggggctgctggatgcggcgctgatgatgtcagaggccaccctgccgggcgagcagtgctggcgccgtctgcgcgaggtcagcgatgaccagccgctgccctatttctcgaccattctggttaacaaacagtgggaggaggcgtaa

SEQ ID NO: 214627 - DNA, 795 bp, Klebsiella pneumoniae
atgaaaaaagcacttctggtggtgagctttggcaccagctatcacgacacccgcgagaagaacatcgccgcctgcgagcgcgatctggccgccagctgcccggaccgcacgctgttccgcgccttcacctcggggatgattattcgcaaactgcagcagcgcgatggtattcatatcgatactccgctgcaggctctgcaaaagctggccgagcagggataccaggatgtggctatccagtccctgcacattatcaacggcgacgagtacgagaagatcgttcgcgaagtgcagagcatgcgcccgcgctttcagcgtctgacgctgggcgcgccgctgttgagcggtcatggcgattacgtgcagctgatgcaggccctgcgccagcagatgccgccgctggcggcgacggagcgagtggtgtttatggggcacggcgccagccaccacgccttcgcggcctacgcctgtctggatcatatgatggcggtgcagggttttccggcgcgggtgggggcggtggaaagctatcccgaagtggacatcgtcattaacgaactctcccgccagggcgtgaccggcgtgcatctgatgccgctgatgctggtggccggcgatcatgccattaatgatatggcctccgacgaagacgattcgtggaaaacccgcttcaatgccgccggtatccccgccacgccatggcttaacgggttaggggagaatccggcggtgcgggcgatgtttgtcgcccatctgcagctggcgctgaacgacacgatggagaaagcagcatga

SEQ ID NO: 214628 - DNA, 786 bp, Klebsiella pneumoniae
gtgaatcacggcgacgtgctggttatcgggggcaccagcgatgcgcgggcgatctgccagcagctggacgccgccgacgtacgctacaccctgtcggtggcgacccctaccggcgagcggctggccggcgatatccgcgggcagatacgctgcgggcgtatggagtggcagcagatggcggagtggctcagagcgcagcgcacccgctgggtgatcgatgcctctcacccctacgccgaggtggtcagccagaatattgtgcgcgcctgcgccagcgtcggggttctgctcagccgctatcaaaggccggagcagctgagcgatctgcgccatccgctacttcacgtggtcggcgatctgaacgaggcctgcgcggtggctcgtcgcctcggcgagcggatcctgctgaccaccggcagcaaagatctggcggcctggcgggcgggactggcggagaaaacgctgctcgcccgggtgctgccggtgccggaggtggttcagcactgtagcgatctggggtttggcgtcggggagatcttcgccctctgcgggccgttcagcgccgaatttaacgccgccttttatcgccagtgccgggccgatgttgtggtgacgaaagcctcgggggctgaaggaggctatcaggaaaaagtacaaccctgtcttgatgcggggatcccctgcatcgtcattacccgtccggcgccgctggtgacgggcgatgaactactgcaaagccaggccgatttcactgcgcggctgacgcgctggctgtcggcgacttga

SEQ ID NO: 214629 - DNA, 726 bp, Klebsiella pneumoniae
atgttaaacgtaatcggaattggccctggctcgcaggcgatgatgaccatggaagccgtggaggccctgcaggcggcagagatcgtggtgggctacaagacctacacccacctggtaaaagcctttaccggcgacaagcaggtgatcaaaaccggcatgtgcaaagagattgagcgctgccaggcggccatcgagctggcgcaggccgggcacaacgttgcgctgatcagcagcggcgacgccggcatctacggcatggcggggctggtgctggagctggttaataagcagcagctggacattgaggtccgtctgatcccagggatgacggccagtatcgccgccgcctcgctgctcggcgcgccgctgatgcatgatttctgccatatcagccttagcgatctgctgacgccctggccggtgattgaaaaacgcatagtcgccgccggggaagcggacttcgttatctgtttctacaacccccgcagccgcggccgcgaaggacatctggcgcgcgcctttacgctgctggcggccagtaaaagcgcagatacgccggtcggcgtagtcaaatccgccggacgcaaaaagcaggagaaatggctgaccaccctcggggagatggattttgccccagtggatatgaccagtctggtgatcgttggcaacaaagcgacttacatcgacaacggcctgatgatcaccccgcgaggctacgcgctgtga

SEQ ID NO: 214630 - DNA, 1056 bp, Klebsiella pneumoniae
atgaataccgtaaagcctgaatccattgccctgttttgcctgacgcccggcggcgtgcggctggcaaaacggctggcggccatgctgccgcttacctgttacaccagcgaagcgctgcaggaagaggggtttatccccttcaacggcggctttgccagcgctgcccgcgaggcgttcagcagcttctcggcgttgatttttatcggcgccaccgggattgccgtgcgggtgctggccccactggtgaatgacaagctcagcgacccggcggtggtggtgattgatgagcgcgcccggcacgtcatcagcttgctctccggccatgccgggggggccaatgcgctaacccgctatctcgccgggatgctcgacgccgacccggtgatcaccaccgccaccgacgtcaacgagctggccgccctcgacacgctggccttccagctgaacgcccggatgaccgattttcgcgcggcggtgaaaaccgttaaccagatgctggtgagcggtaagcgggtggggctgtggtgcgacggcgaattcatcggggcgctaagccgctgcgaccggcgcgggtttatcccggtaagcgacctggcgagcttgccggcgctcgacgccctgatctgcgtcaccctgcgccggtcgctgccgccgctgccggtgcctcactggaagctggtgccccagcgggtggtggcggggatcggctgtcggcgcgacaccccctgcgcgctgctctgtacgttgctggatcgccagcttgccgctcagcgtcttgacccgctggcgctgaaagcgatcggcagcgtgagcctgaaggcaaacgagccggggttgcgccagctggctcaccgctgccgggtgccgttcgaaaccttcagcgccgaggcgctgcgcgagcacgagcaccgctttccggcctcgtcttttgtccgggagacggtcggcgtcggcagcgtctccggcccggtggcctggctgctgagtcagggaaacctgtccggcgaaaccctgcgtgagcagggcgtgaccattactttgggagtaacacactga

SEQ ID NO: 214631 - DNA, 774 bp, Klebsiella pneumoniae; identical to SEQ ID NO: 139156

SEQ ID NO: 214632 - DNA, 570 bp, Klebsiella pneumoniae
atgaaagatgagctgtttttgcgcggcgcccaggtgccgatgaccaaagaggccgtgcgcgcgctggcgctggcgaagctggagctgcaccgggcgcgccatctgattgatatcggcgcgggcaccggcagcgtcagcattgaggctgctctacagaacccggcgctgcgggtgacggcgattgagcgtcaggccgacgcgctgcgcctgctggcggagaaccggcagcgctttggctgcgacaacatcgctatcgtggcgggcgttgcgccgctggcggtcgccgacaaagccgacgcgatctttatggggggcagcggcggccacctgacggcgctgatcgactggtcgctggcgcagctgcatcctggcggccggctggtgatgacttttattttgcaggaaaaccttcatagcgccctggcgcacctgcggcagagcggcatccacgaggtggactgccagcagctggcggtctccaccctggctaccctgggcagcggccactacttcaaaccccataatcccgtttttgtcatcgcctgtcagaaggaagaaaaccatggctga

SEQ ID NO: 214633 - DNA, 606 bp, Klebsiella pneumoniae
atgttgacggtcgtgggaatgggcccggcggggctgcagtggctgatcccggccgcgcgcgaggcaatcgccgccgctgaggcgctggtgggcggcagccgccatctccagcagtttcccgacttcgccggcgagcgcttcgcgctgggggccgatatgccggcgctgctggcgtggattgaggcccataccgggcgccgcgtcgtggtgctggcctctggcgacccgctgttctatggcattggcacccggctgattgcccattttggccgggaacgagtgcaggtgatccccggcatcagcgcggtgcagtacctctgcgcccgggcgggcatcgacatgaacgatatgtggctgaccagcagccatggccgggcggtgagcttcgatgctctggccgcccaccggaaagtcgccatggtgaccgacggccgctgcggaccgcgggagatagccgcccagctgatggcccgcggcaaaggccatcgctggatggtgataggcgagaatctggcgatggaaaacgagcggatccactggctgccggtcagcgccgtggaggacgaatatgagatgaatgcggtggtgatcctcgatgaaagatga

SEQ ID NO: 214634 - DNA, 1140 bp, Klebsiella pneumoniae
atgagcgatcagacctttgacgccccggtgtggcatcacggcaaagcgctgcgcaagggctacaccaccggctcctgcgccacagcggcggcaaaagtggcggcgctgatggtgatgcgccagcatctgattcatcaggtctcgatcgtcaccccctccggcgtcaccctgtgcctgaacgttgagtccccgcacgtcgaagggcagcaggcggtcgccgcgatccgtaaagacggcggcgatgatgtcgacgccacccacggcatgctgatttttgcccgggtcaccctcaatgacagcggagagattagcctgcagggcggggagggtatcggcacggtgacccgcaaagggatcggcctgccgacaggcagcccggcgataaaccgcactccgcggcacaccatcgagaccgccgtgcgcgaagcgataggtcctacccgcggcgcgcaggtggagatttttgctccggaaggcgtacttcgcgcgcaaaaaacctataacgcccggctggggatcctcggcgggatctcgattatcggcaccacggggatcgttaccccgatgtcggaagagagctggaagcgctcgctctccctcgagctggagataaaacgcgccgccgggctggagcgcgtggtgctggtgccgggcaaccacggtgagcgctttgtccgcgagcagatgggcatcgacccgcagatggtggtcaccatgagcaacttcgtcggctacatgattgaagaggcggttcggctcggtttccgccagattgtgctcattggccatcccggcaaactgatcaaaatcgccgccgggatctttcatacccacagccatatcgccgatgcgcggatggaaactctcgtcgctcatctggcgctgcttggcgcgccgctgccgctgctgacgctggtcagcgagtgcgacactaccgaagcggcaatggagcatatcgacgcctggggataccagcgcctctataaccatctggctgagcgaatctgccagcgtgttcttgagatgctgcgcttcactcagcaaccgcccacctgcgacgcggttctgttttcttttgataaccaggtactgggcagcagccgtccgctggaggcgattgcccgggagctgacatgttga

SEQ ID NO: 214635 - DNA, 636 bp, Klebsiella pneumoniae
atgcagtacatccaacaaccgcaggcgatcgaggcgaaaagcttcgacatcatcagcgagatcatcgccgaaacgcgaccggactaccgtttcgccagcccgctgcacgaggcgattatcaagcgggtgatccacaccaccgctgacttcgactggctggatattctgtggttttctccggatgccctgatcgcgctgagtgaggccttgagccggccctgcacgctgtataccgataccaccatggcgctgtccgggatcaacaaaaccctgctggcccgctttggcggcgaatgccgctgctatatcagcgacccgcgggtggtgcgcgaggcgcaaagccgggggatgacccgctcgatggcggcggtggatattgcggtgcaggagcccggggagaaagtgttcgtcttcggcaatgcgccaaccgcgctgtttcgcctgctggaacatcgcgagaccgccatcggcggcgtggtgggggtgccggtcgggttcgtcggcgcggcggagtcgaaagcggcgctcagcgagagcggcctgccggccatcgccgcgctcggccgcaaagggggaagcaacgtggcggcagcgattgtgaacgctctgctttaccacctgcgggaggcgcaatga

SEQ ID NO: 214636 - DNA, 960 bp, Klebsiella pneumoniae
atgacccttctcgcctggtgtgtagcctggatacttgatgtcgtcattggcgatccgccgcactggccgcatccggtgcgctggataggtcgcctgatcgccgtcagccagcgtgtagtgcgacgcgtctgccatagcgaccgggcgctgcgcatcggcggcggggtgatgtggctggtggtgatcggcctgacatggggcgttgcctggggcgtactggcgctggcgcacgggatccacccctggcttggatggctggtggaagtgtggatgatcttcaccgcgctggcgggacgctgtctggcacagtcggcgatggcggtggcccggccgctgcaggccggagatctcgccgaaagccggcataagctctcctggattgtcgggcgcgatacctctcagctccagccagcgcagatcaaccgtgcggtggtggagaccgtggcggagaacacggtggatggtattatcgcgccgctctttttcctgctcctcggcggcgcgccgctggccatggcctataaagcggtcaacaccctcgattccatggtcggctataaacacgaaaaataccgggcgatcggcatggtcagcgctcgtcttgatgatgtagccaacttccttcccgcccggctgagctggctgctgctcagccttgccgcggtgctatgccgggaagatggcgcccgggcgctgcgtacgggctggcgcgatcgctatcagcacagcagtcctaactgcgcctggccggaagcgaccgtcgccggcgcgctggggatccgccttggcggcccgaacgattacttcggccagcgcgttgaaaagccctggataggcgacgccgtccgcgacatcgcggtggacgatatttcccgaaccattcgattaatgtgggtggcgtcaagcctggcgctggcgctgtttatcggcgtgcgctactggctggtcggcgcggcctga

SEQ ID NO: 214637 - DNA, 1377 bp, Klebsiella pneumoniae
atggcaaccaggcgtgcgttcattcttgcgggtaccggcagcggttgtggcaaaaccaccgttacgctcggcctgctcagcttgctccaacagcgcggtatgcgggtgcaaccctgtaaagtcgggcctgactacctggataccgcctggcacaccgccatcagcggcatcgcttcccgcaatctcgacagctttatgcttcccgccccgatactcaacgcgctgtttaccgaacagctacagcaggccgatatcgcggttatcgaaggggtgatgggcctgtatgacggctacggcaccgaccctaactactgcagcagcgcggcaatggctaagcagcttggctgcccggtgattttgctggtcgatggcaaagcggtgtcgacctccatcgccgccacggtgatgggttttcaacattttgatccggctctcgacatcgctggcgttatcgtcaatcgggtcaacagcgacgcgcacttccagctgctgaaaagcgccattgagcgctactgtcgggtgccagtgctcggctatgtgccgcgcgtggaaggcgtggcgctgcccgaacgacatctgggattggtgaccgcccgcgagtcggtggtcaatcagcaggcatggcgggattttgccagcctgctggggcgcaccctcgacatagaccggctgctggccctcagcgaactggccgccatgccgatcggcgagtggggagaacagcttgccgccgatgccggcgaaggactgacgctggccctcgccgacgatgaggccttcaatttttattacctcgataacctggcgctgctggcgcgctgcggcgtgaagatggtgcgctttagcccgctgcgcgatcgccagctgccggcctgccagatgatctggctcggcggcggctatccggagctgcatgcggccgggctatccgctaaccacgagatgctgacacagcttcgcgcggcgcaccggcgcggggtggcgatctacgccgagtgcggcggcctgatgtacctgggcacgaccctggaagtcaccagcggcgagcgctacacgatggcggatattattcccggacacagccgaatggggacgcgtctgacccggttcggctactgcgaagcgcaggcgcagcagcagacgctgctggcagcccctggcgagtggctgcgcggccatgaatttcattactccgatttttcccccgccactcccgccgtactggcctgccgtaaacagcgagacggtaagacgctccagcagtggcagggaggatggcagtccggcagcgcctttgccagctatctccatgtccattttgcccagcgcccgaccatgctcaaccactggctgcaggcagcaaggagggcgctatga

SEQ ID NO: 214638 - DNA, 912 bp, Klebsiella pneumoniae
atgatttctgcgagtaccttgaactcagaactcatcaataaaatcgcacaggattttgcgcaagccaccagtctggcggttgtggtcgtcaatattcacggtgatgagatttctgaattgtttaatttcacgccgttttgccagctgatgcgtcagcacccggagcacagcggacgctgtcgcatgagcgaccgctgcggcgggctggaagcctcaaaaaaagaccagctgtgtatctaccgctgtcatgcggggttaaccgatttttccatcccgctggtgatcgccggccacctggtcggtttcgtgctgtgcgggcaggtgcgtctgagcaatgatgttgaactggttgatatcttgaacgtcgatgaccgctggcaggacgatccggcgctggtccaggcgtttcgcgatgtgccggagatggactattcgcgggttatcgcttcggcggatctgctgaagctgatcgtcgagaattgcctgaaaaaacagctcaactttgtggttatcaaagataacccgtcgcagaacgatccggcgcaggccagccgggcgccctcgccgcacgatggcaaaatgaagaaggcgctgcgctatatcgacgcgcatctctccgatgagctgcgtctggaggatgtggcggcgcatgtctatctcagcccgtactacttcagcaaactgtttaaaaagtatcaggggatcggttttaacgcctgggtcaatcagcagcggatggcgagcgcaaaagagctgctatgccacagcgactggagcatcgccagcatcgcgcggaatttaggtttttcgcaaaccagctatttttgcaaagtgtttcgccagacctatcaggtaacgccgcaggcatttcgtcagcaaattaatgctggatcacaaactgagtctttttaa

SEQ ID NO: 214639 - DNA, 822 bp, Klebsiella pneumoniae
gtggatacggaattgctcaagactttcctggaagtgagtagaactcgtcactttgggcgagcagcagaggcgctttacctgacacagtcagcagtcagctttcgtattcgtcagctggaaaatcaacttggtgtgaatctgttcacccgtcatcgtaataacatccgcctgacgactgccggcgaaaagctcctcccctatgccgaaacgctcatgaatacctggcaggctgcgcgcaaggaggtggcacactcttcgcgacacaatgaattctccattggggccagcgcctccctgtgggaatgtatgcttaacagctggctcggtaccctctacagcgcaccttacaatctccagtttgaagcccgtatcgcgcagcggcagtcgttggttaaacagcttcacgaacgccagttggatctgctgatcaccaccgaatcgccgaagatggatgaattaagcagccagctgttgggtaattttactcttgccctgtattgcgcatcgcctgcaaaaaacagaaatgaattgaattacttgcgccttgaatgggggcctgattttcagcaaaacgaagtgggactgataggaagcgatgatgttccgctgctcactacctcttcagctgaactgatctatcagcaattatcgcgcctgaacggctgctgttggctacctgctcgctgggcgaaagagaagcatgggttacatacggtcatggacagcgctacgttatcccgtccactttatgcgatctggttacaaaatagcgataagcaggcgcagatccatgagatcctgaaaaaccctattctggaataa

SEQ ID NO: 214640 - DNA, 339 bp, Klebsiella pneumoniae; identical to SEQ ID NO: 137918

SEQ ID NO: 214641 - DNA, 1521 bp, Klebsiella pneumoniae
atgtcgctcgctatcgtctatactcgcgcggcgctcggtatcgaagcgccattgattaccgttgaggttcatctcagcaacggtcttcctggtctaactatggtcgggctgccggaaaccaccgtgaaagaggcccgcgaccgagtccgcagcgccctgatcaacagcggctacgcttttcctgcgaagaagataaccattaacctggcgccagcggatctgcccaaagaaggcggacgatacgatctgcccatcgctctcgcgcttctcgttgcctcagagcagctcaacacgacgcgactgaatcaatatgagtttgtgggcgaactcgcccttacaggtgggttacgaggcgttccaggggcgatccccagcgcaatggaggccatcaaagccggccggcgcattgtcgtctcctctgacaatgcggcggaggtcggcctgatcggcggcagcgattgtctggtcgccgaccatctgcaagaggtttgcgcatttcttgcggggcagacatcgctttcgccgcctctcgccgaggcgcctgctcgggatgaacgctacgaagatctgctcgatgttatcggccagcagcagggcaaacgagcgctggagattgtggccgccggtggtcacaacctgctcctgataggcccgcccgggaccgggaaaaccatgctagccagccgactccccggtctcctgccgccattaagcaatcaggaagcgctggagagcgcggccatacagagtctggtcaacctccacaccgcaaagacgcggtggcgtcagaggccgttccgcgccccccaccatagcgcctcgctggcagcgatggtgggcggcggctcgataccggtccccggtgagatttccctggcccataatggcgtgctgtttcttgatgaactgccggagtttgagcggcgggtactggatgcgctacgcgaacctattgagtcaggcaagatccacatatcacgctcgcgcgccaaaattgactatccggcgcgctttcagcttattgcagcgatgaatccaagcccgacaggacattatcagggtaaacataatcgtgcatcgccggagcagacattgcgctaccttggacgcctgtcaggccccttcctcgaccgcttcgatctttccttagagatcccattgccgccgccaggaatactgagtcagggctcgcagggcgaagaatcgagcgcaacggtccggcagcgggtgctggcggcgcgtgaacgacaaatgctcaggcaaaataaactcaatgcccatcttgagaatcgtgaaatgaagaactgctgtcgcttaaggcgggaggatgctgtctggctggaacagacgctaacgcagctggggctttctattcgcgcctggcagcgtctgttaaaggttgcgagaaccattgccgatctggcagaggttgaagagattgaacgctgtcatttgcaggaggcgctcagctatcgggcaatagatcggatgctcaaccatctgcagaaaatgatggcgtaa

SEQ ID NO: 214642 - DNA, 1647 bp, Klebsiella pneumoniae
atgaatggcgcgcagtgggtggtacatgctttgcggacacagggagtcgacacagtttttggctatccgggtggcgcaattatgccggtttacgatgcactgtatgacggcggcgtggagcacctgctgtgccggcatgagcaaggggcagccatggcggccattggttatgcgcgagcaaccggtaaaaccggggtgtgtatcgcgacgtccggcccgggcgcgaccaatctgatcaccggcctggcggacgccctgcttgactctattcccatcgtagctatcaccggccaggtggccgcacccttcatcggcacggatgcgttccaggaagtagatgttctcggtttgtcactggcctgtactaagcacagtttccttgtgcagtctctggacgaactgccgcgggttattgccgaggctttccaggtggcaaactcaggccgtccaggtccggtgctggttgatatccctaaggatattcagatggcgcagggcgacctcgatccccatttctctaccgtcgccgatgagatggcatttccgcaggcggaagtggcgcaggctctgcagatgctggcccaatcgcagcaaccgatgctgtatgttggcggcggggtcggcatggcgcaggcggtaccggctttgcgcgaattcctggcggtgaccaggatgccggcaacctgcaccctgaaagggctgggcgtggtggatgctgattatccctattatctcggcatgctgggaatgcacggcactaaggcggccaacctggcggtacaggagtgcgatctgctgatcgccgtcggcgcgcgctttgacgatcgcgtaaccggtaagctcaataccttcgcaccgcatgccaaagtgatccacatggacatcgatccggcggagctgaacaagctgcgtcaggcgcatatcggtctgacaggcgatctgaactgcctgctgccggcgctgcagcagccgttagctatcgatggctggcgcgagcggagtgccgcactgcgtgccgagcatgcctggcgttacgatcatcccggtgaggcaatctacgcgccgctgctgctgaagcagctttccgaccgcaagccggcggacagcgtggtgaccaccgacgttggccagcaccagatgtggtcggctcagcatatgacctatacccgcccggaaaactttatcacctccagtggcttaggcaccatgggctttggcctgccggccgccgttggcgcccaggtggcgcgccctaacgatacggtgatctgtatctccggtgacggctccttcatgatgaatgtacaggagctgggcaccgttaaacgcaagcagttaccgctgaagatcgtgttactcgacaaccagcggttagggatggttcgacaatggcagcagctgtttttccaggaacgttatagcgaaaccactctgactgataaccctgatttcctcacgctggccagcgccttcggtattcctggccaacacatcacccgtaaagaccaggttgaagcggcactcgacaccatgctttcgagccaggggccatacctgcttcatgtctcaatcgacgaacttgagaatgtctggccgttggtgccgcccggcgccagtaactctgaaatgctggagaaattatcatga

SEQ ID NO: 214643 - DNA, 258 bp, Klebsiella pneumoniae; identical to SEQ ID NO: 137921

SEQ ID NO: 214644 - DNA, 930 bp, Klebsiella pneumoniae
atgacgacgaaaaaagctgattacatttggttcaatggcgagatggttccgtggggcgaagcgaaagttcatgtgatgtcccatgcgctgcactacggtacctcggtattcgaggggatccgttgctacgactcgcacaaaggcccggtggtgttccgtcatcgcgaacatatgcagcgtctgcatgattcagccaaaatttatcgtttcccggtctcccagagcgtcgacgaactgatggaagcctgccgcgaagtcattcgaaccaataatctgaccagcgcttatatccgtccgctggtgtttgttggcgatgtcggcatgggggtaaacccgcctccgggttacaacactgacgtgatcatcgcggcgttcccatggggagcctacctcggcgcagaagcgcttgagcaggggatcgatgcaatggtctcttcctggaaccgcgcggcgccgaacactatcccgacggcagcgaaagccggtggtaattatctttcctcgctgctggttggcagtgaagcgcgtcgccatggctatcaggaaggtatcgccctcgatgttaacggctatatctccgaaggcgcaggggaaaacctgtttgaagtgaaggacggtgtactgttcaccccgccgtttacctcttccgcgctgccgggcattacccgcgacgccattatcaagctggcgaaagatcttggtatcgaagtccgcgagcaggtgttgtcccgtgaatccctgtatctggcggatgaagtcttcatgtccggcactgcggcggaaatcaccccggtacgcagcgtggacggcatccaggtcggcgcaggccgtcgcggtccggtaaccaaacgcattcaggaagccttctttggcctcttcaccggtgaaacagaagataaatggggctggttggatccggtaagtaagtaa

SEQ ID NO: 214645 - DNA, 1851 bp, Klebsiella pneumoniae
atgcctaagtaccgttccgccaccaccacacatggccgcaatatggcgggcgcccgcgcgttgtggcgcgcaaccggaatgaccgatgccgatttcggcaaaccgattatcgccgtcgttaactcctttacccagtttgtccccgggcacgtgcacctgcgcgatctcggcaaactggttgccgagcagattgaagccgccggtggcgtggccaaagaattcaacaccatcgcagtggatgatgggatcgctatgggccacgggggtatgctctattcactgccatcccgcgagctgatcgccgactcggtggagtatatggttaacgcccactgcgctgatgccatggtttgtatctccaactgcgacaaaatcaccccggggatgctgatggcctccctgcgtttgaatattccggtgatctttgtttccggcggcccgatggaagccgggaagaccaagctgtcagataaaatcatcaagcttgacctggtggatgcgatgattcagggggcggatccgaaagtgtccgacgagcagagtaatcaggtggaacgctccgcctgcccgacctgcggctcctgttccgggatgttcacggcgaactccatgaactgcctgaccgaagcgctgggcctgtcacaaccgggcaacggctctctgctggcgacccacgccgatcgtaaggagctgttcctaaacgccgggaaacgtatcgtggagctgaccaaacgctattacgagcaggatgacgcttccgcgctgccgcgcaatatcgccagcaaggcggcctttgagaacgctatgacgctggatatcgccatgggcggctccaccaataccgttctgcacctgctggcggcggcgcaggaagctgaaatcgacttcaccatgagcgatatcgataagctctcccgcaaagtgccgcagctgtgtaaggtggcgccgagcacgcagaaataccatatggaagatgtgcatcgcgccggcggcgtgctgggcattctgggcgagctggaccgcgccgggctgctgaatcgcgaggtcaaaaacgtccttggcctgacgctgccgcagaccctggaacagtacgatgtgatggtgacccaggacgacgcggtgaaaaaaatgttccgcgccggcccggcgggcattcgtaccacccaggcgttctcgcaagactgccgctgggataccctggatgacgatcgcgccgaaggctgtatccgttctctggaacacgcttacagcaaggacggcggcctggcggtgctgtacggcaatttcgcggaaaacggttgtatcgtgaaaaccgccggcgtggacgacagcatcctgaaatttaccggtccggcgaaagtatatgagagccaggacgatgcagttgaggctatcctcggcggtaaagtcgtggaaggcgacgtcgtggtgatccgctacgaagggccgaaaggcgggccggggatgcaggaaatgctttaccccaccagcttcctgaagtcgatggggctgggcaaagcgtgcgcgctgatcaccgatggccgtttctccggcggcacctcagggctctctatcggccacgtctctccggaagcggcgagcggcggcaacattgcgctcattgaagatggcgacatgatcgcgattgatattccgaaccgcagcatccagctgcagctgagcgatgcggaaattgcggcgcgtcgtgaagcccaggaagcgcgtggcgaccaggcgtggacgccgaagaatcgccagcgtcaggtctcctttgctcttcgcgcctacgccagcctggcgaccagcgccgacaaaggcgcggtacgcgataaatccaagctgggtggctaa

SEQ ID NO: 214646 - DNA, 1545 bp, Klebsiella pneumoniae
atggcggattcacaacccttgtccggcgcccctgagggcgccgagtacctgagagcagtgctgcgcgcgccggtttatgaagcggtgcagaaaacgccgctgcaaaaaatggataagctctcgtcgcggctggataacgttattctggtgaagcgtgaagatcgccagccggtacacagctttaagctgcgtggcgcttacgcgatgatgtccagcctgactgccgaacagaaatcccacggggtgatcaccgcttcggcgggcaaccatgcccagggcgtggcgttttccgcatcgcggctgggcgttaaggcgctgatcgtgatgccggtagcgaccgccgatatcaaagtcgatgccgttcgcggctttggcggcgaagtgctgctgcacggcgccaactttgacgaagcgaaggcgagagcgattgagctggcgcaacagcagggttttacctgggtgccgccgttcgatcacccaatggtcatcgccggacagggaaccctggcgctggagctgctgcagcaggatgcccatattgaccgcgtattcgtcccggtgggcggcggcggtctggcagcgggcgtggcggtgctgatcaagcaactgatgccgcagatcaaagtgatcgcggtggaggcggaagattctgcttgcctgaaggcggcgctggacgcaggccatccggtggatctgccgcgcgtcggcttgtttgccgaaggcgtggcggtcaaacgcatcggcgatgaaacgttccgtttatgccaggagtatctggacgatatcatcaccgtcgatagcgatgctatctgcgcggcgatgaaggatctgttcgaagatgtgcgggcggtggcggagccttccggcgcgctggcgctggcggggatgaaaaagtatatcgcccagcataacatccgcggcgagcgtctggctcatattctgtccggggccaacgtcaacttccatggcctgcgctacgtgtccgagcgctgcgagctcggggaacagcgggaagcgctgctggcggtgacgatcccggaagagaaaggtagctttttgaagttttgccagctactggggggccgctcagtgacggagttcaactaccgctttgccgatgccaaagacgcctgtatttttgtcggggtacgcctgagtcgtggcctggaagagcggaaagagatcctccagttactgaacgacggcggctacagcgtggtggatctctctgatgatgagatggctaagctgcatgtgcgctatatggtcggcggccggccgtcaaaagcgctgcaggagcggctgttcagcttcgagtttccggaatcgccgggggcgctgctgaaattcctgcatacccttggcacccactggaatatttcactgttccactaccgcagccacggcactgactatggtcgggtactggcggccttcgagttgggcgagcacgagccggactttgaaactcgtctcaatgagctgggctatgagtgccacgacgaaacgcataacccggcattccgctttttcctcgcgggttag

SEQ ID NO: 214647 - DNA, 891 bp, Klebsiella pneumoniae
gtggatttacgcgatctgaaaacctttctgcatctggcggaaagccgccattttggccgcagcgcgcgggccatgcacgtcagcccgtcgacgctttcgcgccagatccagcgtctggaagaggacctcggccagccgctgttcgtgcgagataatcgcacggtgacccttaccgaagccggggaagagttacgtacctttgcccaacagactttattgcagtatcagcagcttcgtcacgtcatcgatcagcagggcccttcgctctccggcgagctgcacatcttctgctctgtcaccgccgcctatagccatctgccgccgattctcgaccgctttcgcgccgcgcacccctcggtggagatcaagctctcgaccggcgacgccgccgacgctatggagaaggtcgtcaccggcgaagccgacctggcgattgccggtaagccggagactctgccagggtcggtggcgttttcgatgctggagaacctcgccgtggtgttaattgccccggcccttccctgcccggtgcgcaaccaggtgaccgtcgagcgccccgactggtcgacagtgccctttatcatggccgaccaggggccggtacgtcggcgcatcgagctgtggtttcggcggcataaaatcagcaatccgtcgatctacgccaccgtcggcgggcacgaagcgatggtgtcgatggtcgccctgggatgcggcgtggcgctgctgccggaagtggtgctggagaacagtccggaaccggtacgcaacagggtgatgatcctggagcgcagcgatgagcaaacgccgtttgagctgggcgtttgcgcacaaaaaaagcggctgcatgagccgcttattgatgctttctggaaaattcttcccaaccactaa

SEQ ID NO: 214648 - DNA, 1476 bp, Klebsiella pneumoniae
atggctaactactttaatacactgaacctgcgccagcagctggcacagctgggcaaatgccgctttatggcgcgcgacgaattcgccgatggcgcaagctaccttcagggtaaaaaagtggtcatcgtcggctgcggcgcacagggcctgaaccagggtctgaacatgcgtgactccggcctggatatctcctatgcgctgcgtaaagaagcgatcgctgagaagcgcgcctcctggcgtaaagcgactgaaaacggcttcaaagtcggcacttatgaagagctgatcccgcaggccgacctggtggttaacctgacgccggacaaacagcactcagacgttgtgcgctccgtacagccgctgatgaaagacggcgcagcgctgggttactcccacggcttcaacatcgtggaagtgggcgagcagatccgtaaagacatcaccgtggtgatggtggcgccgaagtgcccgggcaccgaagtgcgtgaagagtacaaacgcggtttcggcgtaccgacgcttatcgcggtacacccggaaaacgacccgaaaggcgaaggcatggcgattgccaaagcatgggctgcggcgacaggcggccaccgcgcgggcgtgctggagtcttccttcgtggcggaagtgaaatctgacctgatgggcgagcaaaccatcctttgcggcatgctgcaggcgggttctctgctgtgcttcgacaagctggtggcggaaggtaccgatccggcgtatgcagaaaaactgattcagttcggctgggaaaccatcaccgaagcgctgaagcagggcggcatcaccctgatgatggatcgcctctccaacccggcgaaactgcgcgcttatgcgctgtccgagcagctgaaagagatcatggcgccgctgttccagaaacacatggacgacatcatctccggcgaattctcctccggtatgatggcggactgggcgaatgatgataagaaactgctgacctggcgtgaagagaccggcaaaaccgccttcgaaaccgcgccgcaatatgaaggcaaaatcggcgagcaggagtacttcgataaaggcgttctgatgatcgcgatggtgaaagcgggcgttgagctggccttcgaaaccatggtggcctccggcatcatcgaagagtctgcttactacgaatcactgcatgagctgccgcttatcgccaacaccatcgcccgtaagcgtctgtatgagatgaacgtggttatttccgataccgctgaatatggtaactacctgttctcttacgcttgcgtaccgctgctgaaagagttcatgaccaccctgcagaccggcgacctgggcacagcgattgccgaaggcgcggtagataacgcgcagctgcgcgatgtgaacgaagcgattcgcagccacgctatcgagcaggttggtaagaaactgcgcggttatatgaccgatatgaagcgtatcgcggtagccggctaa

SEQ ID NO: 214649 - DNA, 282 bp, Klebsiella pneumoniae
atggctaaaaccgcggcagcactgcatatcctggtaaaagaagagaaactggcgctcgatctgctcgagcagctcaaaaacggcgccgatttcggcaagctggcaaagaaacactccatttgtccgtcaggcaaacgcggcggcgatctgggtgagttccgccagggccagatggtaccagccttcgataaagtggtcttctcctgccctgaactggagccaaccggcccgctgcatacccagttcggctaccacatcatcaaagtgctgtaccggaaataa

SEQ ID NO: 214650 - DNA, 282 bp, Klebsiella pneumoniae
atggcaaaaagcgcagcggccctgcatatcctggtcaaagaagagaaactggcgctggagatcctcgccaaactggagcggggcgtcagcttcgatcatctggcgaaacgctattctaaatgtccgtctggccgcaacggcggcgacttaggcgagtttcagcaaggcgcgatggtcggtccgtttgatcaagccgtcttcagctgtccgctgctcaaaccctatggcccggtgaaaaccaaattcggctaccacatcatcaaggtgctgtatcgccgctag

SEQ ID NO: 214651 - DNA, 2022 bp, Klebsiella pneumoniae
atgcgtttaaaccctggccaacaacaagccgtcgaattcgtcaccggaccgtgcctggtgctggcgggcgccggttccggtaagacccgcgttattacgaataaaatcgcccacctgatccgcggctgcggctatcaggcgcgccatatcgcggccgtgacctttaccaacaaagccgcgcgcgagatgaaagagcgcgttgggcaaacgctggggcgcaaagaggcgcgtggcctgatgatttccaccttccacactttggggctggatatcattaagcgcgaatacgctgcgctgggtatgaagtctaacttttccttattcgacgataccgaccaggtggcgctgcttaaggaactgaccgaaggattgatcgaagatgacaaagtggtgcttcagcagctgatctcgacgatctccaactggaaaaacgatctaaaaaccccggcgcaggccgccgctggcgcgaaaggcgaacgggatcgtattttcgcccactgctatgggctatacgacgcgcacatgaaggcctgcaatgtcctcgattttgacgatctgatcctgctgccaacgctgctgctgcagcgcaacgaggaggtgcgcgagcgctggcaaaataagatccgctacctgctggtggatgagtatcaggataccaataccagccagtatgagctggtgaaactgctggtgggtcagcgggcgcgctttaccgtggtgggcgatgacgaccagtcgatctactcctggcgcggcgcgcggccgcagaacctggtgctgctcagccaggacttcccggcgctgcgggtgatcaagcttgagcagaactaccgctcatccgggcgtattctgaaagccgccaacattttgatcgctaataaccctcacgtctttgaaaagcggctgttctccgaactgggatatggcgcagagctgaaagtgctctccgccaacaatgaagatcatgaagcggagcgcgtggccggggagctgatcgcccaccacttcattaataaaaccaattacaaagactacgcgatcctttatcgcggcaatcaccagtcgcgggtctttgaaaagatgctgatgcagaaccgcatcccgtacaaaatctccggcggcacgtcgttcttttcgcgtccggaaattaaagatctgctggcctatctgcgcgtgctgaccaacccggacgacgacagcgccttcctgcgtatcgtcaacacgccgaagcgcgagatcggcccggcgacgctgcaaaagctcggtgagtgggcgatgggccgcaacaaaggattgttcaccgccagctttgatatgggtctcagccagacgctgaccgggcgcggctatgaatcccttacccgcttcacccactggctacgcgagatccagcagctggccgaacgcgagccggtcaacgccgtgcgcgatttgattcgcgggatcgactacgaatcctggctgtatgaaacctcgcccagcccgaaagccgcggaaatgcgcatgaaaaacgtcaaccagctgtttacctggatgaccgagatgctggaaggcagcgaaatcgatgagccgatgaccctgacccaggtggtcacccgctttaccctgcgcgacatgatggagcgcggcgaatcggatgaagagctggatcaggtgcagctgatgactctccatgcgtcaaaggggctggagttcccctacgtctatctggtgggaatggaagagggattgctgccgcaccaaagcagcattgatgaagataacgtcgatgaagagcgacggttagcctacgttggcatcacccgtgcgcagaaagagctgacctttacgctctgtaaggagcgccggcaatatggcgagctggtgcgtcctgaaccgagtcgttttctgctggagctacctcaggacgaccttatctgggagcaggcacgcaaaaccattacgcctgaagagcggatgcaaaaaggccaggccaacgtagctaatattcgggcgatgctggcaaaggcgaaaaaagcttag

SEQ ID NO: 214652 - DNA, 723 bp, Klebsiella pneumoniae
atggctataggtatatttgtctgtagcggctcgcttctcgttggtgcgctggcgggcgcttcactgaatcgttttattccggaacatttcaaaaaaaccttaccgttgatcgccggactgatctcaatcagtatgggcatattctttgtcaataaattgcataacctgccgccgattgccctggctattattgtcggcacgattatcggcggcctgttgaatattgaaaaatggattgaacgagccggaacaacgctgcgcagccccattgaacgtatctttccggcgcagtccagcgccagcgtcggtgcggaagattttatgaatcagtttatcgccgtgctgatcctgttctgcgccagcggtaccggcatcttcggcgccttaaccgaagggatgaccggcgacccgaccattctgctgaccaagtcgatcctcgacttttttactgccgcgattttcgcctccacgctggggtatatcatcaccgtgatctttattccccagctgattgttttcgttatcctgtttttcgcggcaacctttatcatggcgttaatcaatccgtcgatgatcgccgacttcaccgcctgcggcggcatcattatgctggcgaccggtttccgtctgtgcgggatccgtgccttccctaccgccaatatgctgccctcgctaatactggtgatgcccttctccgccgcctggcagcagtttatcgcctga

SEQ ID NO: 214653 - DNA, 900 bp, Klebsiella pneumoniae
atgaaagatgttgaacgccgcctgctggatcgcagcattcagctggaagaaatggcgcagcgtcatattgatcatgtaattctttctctgacttcacctggcgcccagtctattttagataaagccaaagccgtctcttttgcccgcgataccaacgattttatcgttgagaattatgttaagccaaatccggacaaattcagcgccttcgccaccctggcattgcagaacccggaagccgcggcggaagagctggagcgcgccgtgaaaaagttaggcatgaaaggtgcgctgatcaacggctacaccaacgttaaagatagcgagcatggcctgtatcttgatgacgaatccatgctggtattctgggataaggtcaacgagctgaacgtgcctgtctatctgcatcctcgtgaaccgctggaaggcccggcgcgtggcatctataccggttacgaaagcctgatcggctctgcctggggcttcgctcaggaaacggcagtgcatgctattcgtctgatgatgagcggtctgttcgatcgttatcctaacctcaatctggtgctgggtcacctcggcgaagggctggtacatatgctgccgcgcactcaacatcgtctctatcgtcagcgtttcggctgcggtttgggtaaagcggaaaaaccgttaatgcactacctgcagaataacttcatcgttaccaccagcggccatttcaatacccattcactgaataatgctattgaagtcatgggcgccgatcgcgtgatgttctctgtcgattatccgtatgaagatattcatcaggcctgcgactggtttgatcctttagaacttgaagcaggcctgaaagagaaaatcgcctggggtaatgccagccgcgtatttaacattaaataa

SEQ ID NO: 214654 - DNA, 681 bp, Klebsiella pneumoniae
gtgacgacgttaaaacctttgctggcccgcaaccgcagctgggcgctgcagaagtgtcagcatgatccggactatttcgaaaaatgggtcgacgggcagcggccccactcgctgtggatcggctgctccgacagccgcgtgcccgccgaggtgctcaccggcagccagcccggcgagctctttgtccaccgcaatatcgccaacatgctcgatcccgccgacgacaacgtcatgagcgtcctgcagtatgccctcgactaccttgaggtggagcgggtggtgctctgcggccactacggctgcggcggggtgcaggcggcgctctccctgcccactctgccgctggcgcaggaatcctcggcgctggctcgccgcatcggccagctgcgccacaccctgcatcacgaaattgcgcagatcgccgatgactgttgtgttgcggcctcccccggcgccagcaccagcgccagcgccaacgcggagcgctctcgccatgcgctggacgccctggtggaagccaacgttcgcgcccagttcgcccctctgctggagagtgaaccggtgcagacggtgctcgccagcgggcgaccgctcagcctgcacggctgcgtctacgatctggcttccggccatttaaccaccctcgtcgaacacctctcaccgcaggagcacgccccatga

SEQ ID NO: 214655 - DNA, 1470 bp, Klebsiella pneumoniae
atgaacacgcttcgtcaggactctctcgccggcatcgtcgtcttccttgtcgccctgccgctgtgcctcggcatcgcccaggccagcggcttaccgcccttcgtcggcctgctgaccggcatcatcggcggcctggtcgtcactgccctcagcccctcccgcttcgccgtcagcggccccgccgccggactggtcaccatcgtcgtcgccgctattgaatccctgggttccttctccctcttcctgatggcgctggcgctggccggcgtgctgcagctgctgttcggcatcctgcgggccgggcgctttatctcgctggttcccgccagcgtcatcaaaggcatgctggcggcgatcggcatcctgctgattattcagcagatccccgtcgcgctcggcagcgcagaagagaccgggctcgttgatatcgtgaagggtaacgccaccttctccctcagtgctatcgccgtcgccgcgggcggtctgctggtgctctggctgtggggctcgccgcttattcgccgggtgaagagcctgcgctggatccccgggccgctgatcgccgtcctgctcggctgcgtgaccaccctgctgctgacccattttgcgccgcagcagctggccgccctaccgcgtattaccctgccggcgttcggcagcctcggcgacctgctgggcgagctggagtctcccgcatggagcgcgtggcgcaatccgtcggtgtgggtggtggcggtgaccctggcgctggtcgccagcctcgaaaccctgctcagccaggaggcgctgaaaaagctgcgcccgcaaaatccgccgccttcgccgaaccgtgaaatggtcgcccagggcgtgggcaatctgctctccggcgtgctgggggcgatgccgatcaccgcggtgatcgtccgcagctcggtgaacgtcagcaatggcgcgcagagcaaactgtcgatctttatccacggcgtgctgctgctgatctgcggcctgtggttcagcggcctgctaaccttaatcccgctcgccagcctcgccgccgtgctgctctataccggctataagctggcgaccccgcggctgttcatcgagcagttccgccagggggcggcgcagtacgtcccgttcctcgccaccatcggcgggattatcgcctgcggcatgctggcggggatcgggattggtcttgccacccagatggcattcagtctctggcgcagccatcgccactcgctgcagctggcgcgctacgatgaccactacgtgctgcgcatccagcagaatctgacctttatgcacaatccgcatctgctggccctgctggcgaagattccggaaaagagcgtggtgatcgtcgagcacgacagcgtcggctatctcgacccggacgtgcgggcggtgctggatgattttgccgagaacgccccgcagcgcggcatccgccttaatcagtggccgctggccagccgctga

SEQ ID NO: 214656 - DNA, 1020 bp, Klebsiella pneumoniae
atgaccatcattaaaagctacgccgccaaagaagcgggcgccgatctgtcgctgtgggaatacgatgccggcgagctacagccggaagatgtcgaagttgaagtggaatactgcgggatctgccattcagacctgtcgatgatcgacaacgaatgggggatgtcgagctacccgctggtggccggtcacgaggtgattggccgggtggcggcgctgggcagcgcggcgcaggataaagggctgaagattggccagaaggtcggcatcggctggacggcgcgcagctgcggccattgcgacgcctgcatcagcggcaaccagatcaactgtctggaaggctcggtgccgaccattctcaaccgcggcggcttcgccaataagctgcgcgccgactggcagtgggtgatccccctgccggagagcatcgatctggcgtccgccggcccgatgctgtgcggcggcatcaccgtctttaaaccgctgctgacccaccacgtcaccgccaccagccgcgtcggggtgatcggcatcggcggcctcggccatatcgccattaagctgctgcgggcgatgggcgcggaagtgaccgccttcagctccaacccggccaaagagcaggaagtgctggcgatgggcaccgatcgcgtggtcaacagccgcgatccggaagccttaaaagcgctggccggtcagttcgacctgatcatcaacaccgtggcggtggacctcgactggcagccgtacttcgaagccctggcttacggcggcaacttccataccgtcggcgcggtgatgaagccgttcccggtgccggcctttaccctgatcggcggcgaccgcagcatctccggctcggcgaccggtaatccgtccgaactgcgcacgctgatgaagtttgccgggcgcagcaaagtggctccgaccaccgagctgttcccgatgtcgcaaattaacgaagcgctgaagcacgttcgcgaaggcaaagcccgctaccgcgcggtgctgaaagccgacttctga

SEQ ID NO: 214657 - DNA, 873 bp, Klebsiella pneumoniae
atgagaaagacctggcttccctggctgatcctgtcgccttccctgctgtttttactgctgtttacctggttcccgctggggcgttcggtgtatgacagcctgtttgatacccgcatggccagcgacggcgcgcagtacgtcgggctggataacttctcccgcctgtttgccgacggcgttttctggcagtcgctggtcaataatctgctctatatcctgctgacggtagtgcccggggtgaccctcgccctgctgctggcggtggcgctgagcgagaaccatcgcgtcaaccgctggctgcgcaccgcctttttcttcccgatgattatcccgatggtcagcgccgccgcgctgtggctgtttatctttatgcccggcctcggcctgctcgaccactatctggcgaagctgttcgggccgatgaacaacaactggctgggacgcagcaacagcgcgctgctggccctggcgctgatcggcgtgtggaagttcgccggctactacatgctgtttttcctcgccgggctgcagagcattccggcctcgacgcgggaagcggcgctgatggagggggctacccgcacgcaggtcttttttaaggtcacgctaccgctgctgcgcccgaccctgagctttgtgatcaccaccgcgctgatctactccatcacccagatagaccacgtggcggtgatgacccgcggcgggccggacaacgccaccaccgtgctgctctattacatccagaatctcgcctgggatacccacgacctcggtaaagcctccgccgccaccttcctcaccctggccgggctgttcgccttctcgctgattaacctgaaactgctggagaaaggagcccactatgagcgctga

SEQ ID NO: 214658 - DNA, 888 bp, Klebsiella pneumoniae
atgagcgctgaaatctcgccgctgctggtccgcacgcccgccgccgcccgtccgctgtggctgcgcctgcgccgctcgtcgccctttacgctcacagtattaatgtgctgcctggcgctgctgtgggtcagcccgtttatctggatgctggcgacctcgttcagcgccaccaccttcggcgacgatatggcgtcgctgctgccccgcctgccgctgactctcgataacttccgcgacgcctggaacagcgccgactggctgagcctgtacgccaacacccttatcttcaccttcggcaccttcttcgtgcagctgttgaccatcaccaccgccggctacgtcttcgcctgccacgagtttcgcggcaagcagacgctgtttctcctgttcctggtgcagctgatgatcatgccggtggtgatgatggtgccgaacatgctgaccctgaaaaccttcggcctgctcaacaccctcaccggggtgatgatgccctacttcacctcggcgttcggcgtgttcctgatgcgtcaggcgttcctcgccattccgaaagagctggaggaggcggcgctgatggagggctgccgctggtggcaggtgctgttccgcgtactgctgccgatgtcctggccgtcggtgctggccttcgccaccgtcagcattacctaccactggaacgagtacctgtggccgctgatgatgctcaacgatcccgataagcaggtgctgaccgtcgggctggtctctttcgccatgggcgccgaatccggcggccagtggggcaccatcggcgccgggacgctgatggtctgcctgccgctgatgctggcgttcatcctttttcagaaacagttcctgcggagcttcggcttctccgggatcaaataa

SEQ ID NO: 214659 - DNA, 825 bp, Klebsiella pneumoniae
atgctgttagcgcacatttccgatacccatttccgcagccgcggcgagaagctgtacggctttatcgacgtcaatgccgccaacgccgacgtggtctcccagcttaacgcgctgcgcgagcgcccggacgcggtggtggtgagcggggatatcgtcaactgcggccgcccggaggagtatcaggtggcccgccagatcctcggcagcctgaactatccgctgtatctgatccccggcaaccacgacgacaaagcccattttctcgagcatcttcatccgctgtgcccgcagctgggcaacgatccgcaaaatatgcgctatgcggtggatgacttcgccacccgcctgctgtttatcgactccagtcatgccggcacgtcaaaaggctggctgaccgacgagaccatcagctggctggaggcgcaactgttcgagggcggcgacaaaccggcaacgatctttatgcaccacccgccgctgccgctgggcaatgcgcagatggacccgatcgcctgcgaaaacggccaccgtctgctggcgctggtggagcgttttccgtcgctgacgcgcatcttctgcggccacaaccacagcctgaccatgacccagtatcgccaggcgctgatctccaccattcccggcaccgtccatcaggtgccgtactgccacgaagacacccggccctattacgacctctccccggcctcgtgcctgatgcaccgtcaggtcggtgagcagtgggtgagctaccagcactcgctggcccactacgccgggccgtggctgtacgacgaaaacatcagttgcccaacggaagagcgctaa

SEQ ID NO: 214660 - DNA, 1074 bp, Klebsiella pneumoniae
atgctcagtctgcaaaacatcagtaaacgtttcgacggcaaaccggcgctcagcgccctgtcgctggatattcacgaaggcgaattcgtggtgctggtcggcccgtcgggctgcgggaaaagcaccctgctgcgcctgctcgccgggctggagccggtcagcgaaggacaaatctggctgcatgatgagaacatcaccgccaccacgccgcgcgagcgcaacttcgcgatgatcttccagaactatgccctgttcccccatctgtcggtgcgcgacaacatcaccttcggcatgaaggtgcgcaaggaagagaaaagcagctggcagccgcgggtggacaaagtggcgcagatgctgcagctggaggcgctgctcgaccgcaaaccggcgaagctctccggcggccagcgccagcgggtggcgatggcccgggcgattgtgcgcaatccgcggctgttcctgatggacgagccgctctccaacctcgacgcccgcctgcgcagcgaagtgcgcgacagcattatggcgctccaccagcagctgaaaaccagcaccatctatgtgacccacgatcagaccgaggcgatgtcgatggccgaccgcatcgtggtgatgaacggcggccacgtgcagcaggtaggacggccagaatatctgtatgccaacccggccaatctgttcgtggccggatttatcggttcaccggcaatgaatctgctatcgctcccctgcgttgacggcaacgttcagcttggcgaacaacgccatccgctgccgccgcgccaccgggatcagacccgcgtctggctgggcgttcgcccggaacatattaccgaccgcgtggaggagggccatctgcgcctgccggccaccgttctgcaacgagaactgatgggggccgattacctgctccacgtcagcaccccgatcggcaccctgcgctttagccgccgccaccgcggcacggtgccggagaaaggcgagtcgctacagatcggcttctcgcctgccgatgtgcatctttttcatgctgagacccagcataatttattgatggagtgtaatcatgtttaa

SEQ ID NO: 214661 - DNA, 1311 bp, Klebsiella pneumoniae
atgtttaaaccttttacgctagtcgcggttggcctcagccttgccctgagcggcgcggcgctggcaaaagagaaaatagacttcatgttcccggcgccggtggacggcaagctgaccatggagatgacccgcgtcattaagcaattcaacgactcgcagcaggatgtcgaagtgcgcgggatcttcaccggcaactacgacaccaccaagatcaaagccgaatcggcgcagaaggccggccagccgccggcgctggtgatcatgtccgccaacttcaccaccgatctggcgctgaaagatgagatcctgccgatggacgagctgtttaaatatggcgatcaaaaggccggcgattttctgcaaaaggaattctggcccgcgatgcataagaacgcccaggtgatgggcaccacctatgcgatcccgttccataactcgacgccgatcctctactacaacaagacgatgttcgatcaagccgggatcaaacagccgccccagacctgggccgagctgctggctgatgccaaaaagctgaccgacgagagcaaaggccagtgggggatcatgctgccgtcgaccaacgacgactacggcggctggatcttctcggcactggtgcgcgccaacggcgggaaatactttaacgaagactatccgggcgaggtctattacaactcgccgaccgccatcggcgccctgcgcttctggcaggatctgatctacaaggacaaggtgatgccgtccggggtcttgaactcgaagcagatcagcgccgcgttcttctccggcaagctcgggatggcgatgctcagcaccggcgcgctgggctttatgcgcgagaacagcaaagactttgagcttggggtagcgatgctgccggccaaagagcagcgtgcggtgccgatcggcggcgccagcctggtgagctttaaaggcatcaacgaggcgcagaagaaagcggcgtatcagttcctgacctatctggtgagccccgaggtgaacggcgcgtggagccgcttcaccggctacttctcgccgcgcaaggcgtcatacgatacgccggagatgaaggcctatctgcagcaggatccgcgggcggcgatcgcccttgagcagctgaagtacgcccatccatggtactccacctgggagaccgtggcggtgcgtaaggcgatggagaaccagctggcggcggtggtcaatgatgccaaagtgacgccggaagcggcggtgcaggcggcgcagaaggaagccgacgcgctgatgaaaccgtatgtggacaagaccgcgctggcggaagtgaagtga

SEQ ID NO: 214662 - DNA, 900 bp, Klebsiella pneumoniae
atgaacaaagataacgtcaaactggctatcgccccaatcggctggactaacgatgatatgccggagctcggcagcgaaaacaccttccagcagatcgtcagcgaaatggcgctggccggctttaccggcagcgaagtcggcagcaaatatccgcgcgacccggcggttctcaagccgatgctggatatccgcggcattcagatctgcaacgcctggttcagcacctttttcgccaacggccagcgggaaaaaaccattgatgaattcgtcaatcacatgaacttccttcatgcgatgggcgcgaaagtgattggctgctccgagcagagcggcagcatccaggggctggataaaccgatcctcggcgatgcgaagccgtgcttcagcgacgaagagtggcagcgggtggcggaaggctacaacaccctcggccgcctggcggcggagaagggaatgcaggtctgtctgcatcaccacatgggcaccggcattcagaccaccgcggaaatcgacaaatttatgtcgctggtggacgagcgcgtcttcctgctgttcgacaccggccacgcctggtattccgaaggcggcgaagcgccgatgctggcgatcctcaaaaagtatctgccgcgcatcaaccacgtccacctgaaagacgtccgcccgccggtgatcgaccaggtgcgccgcgacggcctgtcgttcctcgacggcgtgaaaaaaggcaccttcaccgtcccgggcgacggggtgatcgatttccgtccggtgttcaagctgctggacgactttggctataaaggctggatggtagtggaagccgagcaggatcctgctctggccaatcctttcgaatacgccgtcaaagcgcgcaaatatattcgcgaaacggcagggatctaa

SEQ ID NO: 214663 - DNA, 885 bp, Klebsiella pneumoniae
atgaaaattgcctttgatgtggatgtcattaaggacctcgggatcacccgcatggtccatcaggtagcggagtggggctacaagtacattgaacagtcgccgcacccgcagattaacccgttctacaagcacccgcgcgccagccgggagatcatggcggagtacaagcaggcgctgcgcgataccggccttgagctgtcgtcgtttatctgcgtctaccgctggtccggtccggacgaactgcgccgtcaggcggcggtgaaaaactggaaacggctggtggaaattgcggtagagatgggcgttcaggtgatcaacaccgagttctccggcgatccgaatcagcctgagatctgcgatgaaatgttctatcgctcaatggaagagctgttgccgatttttgagcgggaaggcatccgcgtggagatccaggcgcatccctgggatttctgcgaagagaacaatgaaaccgtcgatatcgtgaagtcgttccgcagcgataacgtgaagtacgtctacagcgtgccgcacacctttttctacgacaaaggcgtcggcgacgtggcgagcatgctgcgctatgccgggagcgatctctcccatgtcctgattgcggatacccgcaaccatacgaaacattgccgctatatcgttaacccgccgggcgtggatgccgtggtgcaccagcacgtaggcgtcggggaaggggatgtggatttcgacgcgctgttccgcaccctgcgcgaaatgaaattcgccgagcagaccttcaaggtcggcggggagccgattgtcgccacctcgctgtttggctacccggaaaaaatgaaataccaggcagtggaaacccgtgaacttattgaacgtgaattgctgcgccgctaa

SEQ ID NO: 214664 - DNA, 1014 bp, Klebsiella pneumoniae
atgtcgctcaaattaggtgtcatcggcgctggcgctatcggtaaagaacacatccgtcgctgcacccaggttctgcagggcgccaccgttgtggcggtgtctgatatcaatgccgacaacgcccgcgcggcggtcgcgctgccgggcgtgcaggcggaagtctacgccgacggtcacgacgtgattaacgccagcgatgtcgatgccatcctggtcacctcctgggacccgacccacgaagagtacaccctggccgccatcgccgccggtaagccggtattctgcgaaaaaccgctggcgatgtctgcggaaggctgccgccgcatcgtcgatgccgaaatgaaggccggccgtcgtctggtgcaggttggctttatgcgcccgtacgacgaaggctatctggcgctgaaaaaagtgatcgacgatggcgatatcggcgcaccgctgatgctgcgctgcgcccaccgcaaccagtcggtcggcgagaactacaccaccgatatggcgatcaccaacaccctgatccacgagctggacgtgctgcgctggctgctgaacgatgactaccgttccgtgcaggtgcgcttcccgcgctccacctcgcacacccatgcgcgcctgaaagatccgcagatcgtctcctttgaaaccaaaaaaggcactctgatcgacgtcgaagtgttcgtgaactgccagtacgggtatgacatccagtgcgaagtggtcggcgaaaccgggattgcccgtctgccggagccgtctgccgtccagatgcgcaagtccgccagcctgtcgaccgccattctcaccgactggaaagaccgctttatcaaagcctacgacgtcgagctgcaggcctttatcaacgacgtcaaagccggccagctgcacggcccgtcggcctgggacggctacgcggcgtcggtggcggcggacgcctgcattaaagcgcagggaaccagcgagccggttgaggtgacgctgcctgagtgcccggcattctacaaacgttaa

SEQ ID NO: 214665 - DNA, 1941 bp, Klebsiella pneumoniae
atgggcaaactgagactgacaacggcgcaggcgctggtgaagttcctcgataaccagtacctggaagtggatggcgtagagctgaagttcgtgaaaggcattttcgcgattttcggccatggcaacgtcctggggctggggcaggcgctggagcaggacagcggcgatatgcgcgtctatcaggggcgcaacgagcaggggatggcccacgcggccaccggttttgcccgccaggccctgcgccggcagattatcgcctgcacctcctccatcggtccaggggcggccaacatgatcaccgccgccggcaccgccagcgccaaccgcattccgctgctgctgctgccgggcgatgtcttcgccacccgccagccggatccggtgctccagcagattgaacagagctacgatctcagcatcagcaccaatgacgccttccgcgcagtcagcaaatactgggaccgcattacccgcccggaacagctgatgagcgcctgcatcaacgccatgcgcgtcctgaccgacccggcggaaaccggcgcggtgacgctgtgcctgccgcaggatgtgcagggcgaagcctgggattacccggaatccttctttgcgcgccgcgtgcaccgtctcgaccggcgcccggccagcgccgcgcagctggcggacgccgtggcggccatcaaagccagccgtaaaccgctgatcgtctgcggcggcggggtgaaatactccggcgcgggcgaagcgctgtcccgtttcgccgagcgctacggggtgcccttcgccgaaacccaggccgggaaggggacggtggtctcgtctcaccccctgaacgtcggcggcgtcggcgagacgggctgcctggcggcgaacctgctggcgaaagaggccgacctggtgatcggcgtcggcacccgcttcagcgattttaccaccgcctcgaaatggattttccagcacccggaggtgcgtttcctgaatattaacgtcagcaacttcgacgcctggaagctggacggcattgccatgctggcggacgcccgggaagcgatgaccgctctcgacgcggcgctggcggacagcggctggcaggccggctggggcgcgcagatcgagagcgtgcagagccgtcagttaaaagagacccagcgcgtctaccaggcggtgtggcaggagaaatcctttgtgccggagatcgacgatcatctcgatcgtgaatcggtgtatcgcgagttccgccagatcaccgactccaccctgacccagagcagcgtccttggggtactgaatgaaacgctgccggccgaggcggtgatcgtcgcggcggcgggcagcctgccaggcgatctgcagcgcgtctggcgcaaccgcgcggaaaacacctaccacgtggagtacggctactcctgcatgggatatgaagtcaacgccgcgctgggcgtgaagctggcgcagccgcagagcgaagtctactccctggtcggcgatggctcgttcatgatgctgcactctgagctggtcacctccctgcaggagcgggcgaagatcaacgtcgtgctgttcgacaacatggccaacggctgcatcaacaacctgcagatggagcacgggatggacagcttcggcaccgagttccgctaccgtcagccggaaaccggccagctgcagggcggcctggtgccggtggacttcgccaccatcgccgccggctacggctgcaaaacctggcgcgtcacaaccctggacgaactgcgccacgcgctggacgccgcccgtcgcgaaacggtcagcactctgattgatattaaagtgctgccgaagaccatggtgcacaaatacggcagctggtggaacgttggggtcgcccagacggcgctctctgaacggatccgcaaggtggcgcaaatgattaatgaaaagcgcgcccaggcgcgtgattactaa

SEQ ID NO: 214666 - DNA, 1914 bp, Klebsiella pneumoniae
atgaatgcagcagtaaagcggctcgacgtcatctgtataggtcgggtggccgtcgacctctatgcccagcagattggttcgcggctagaagacgttgccagtttcgcgaaatatctgggcggctcctccggcaacgtggcctttggcaccgcgattcaggggctgaaatcggccatgctggcgcgcgttggcgatgaacacaacggccgtttcctgcgcgaaacgctcaaccgcgccggggtggataccgagtatctgattaccgacaaatctcgcctgaccgcgctggtgatgctggggattaaggatcaggagaccttccccctgattttctaccgcgataactgcgccgatatggccttaacgcctgacgacattagcgaggagtatattgcctcctcccgggcgctggcggtgactggcacccacctgtcgcacgccaacacccgcgccgcggtgctgaaggcgctggagtacgcccgccgtcacggcctgcgtaccgctctggatatcgattaccgtccggtgctgtgggggctcacctcgctcggcgatggcgaaacccgtttcattgagtccggaccggtcaccagccagctgcaggaagtgctgcatctgttcgatttggtggtgggaaccgaagaagagtttcatattgccgggggcagcaccgataccctgaccgcgctgaaaaatgtgcgcaatgccaccaaagccactctcgtctgcaagcgcgggccgatgggctgcgtggtgctggaaggcgacatcccggacagctgggaccaggtgccgctacagcagggcgtgcgcgtggaggttctcaacgtgctgggcgccggggatgcctttatgtcgggtctgctgcgcggctggctcaacgacgaaggctgggagcaggcttgccgttacgccaacgcctgcggggcgctggtggtctcccgccacggctgcgcgccggcgatgccgaccaaagtcgaacttgatgactacctgcagcgcgccgaatcggtgccgcgcccggacgtcgacgagcgcctcaaccacctgcaccgggtcaccagccgccgtcaacagtggccggagctgtgcattttcgccttcgaccatcgcaaacagctggccgacctggcgcgggagaccgggcgcgacgaagcctgcattccgcagctcaaactgctgttgttggccgcggccgaagcggcggcgcaggaggcaggtctcgatcagcgcagcggcattctggccgacggcacctacggccagcgtgcgctcaacgccattaccggcaagggctggtggatcgggcgccctatcgaactgcccagctcgcgaccgctgcgtctggagcatggcaacatcggctcgcagctgatcgactggccgctggagcatgtcgtcaaatgcctggtcttctatcacccggacgacccggcggcgctgcgtgcagagcaggacgccctgctgctcgaggtctggcaggcctgtaacaagtcaggccatgaactgctgctggaggtgatcctgccggaaaatggcccggacaaagacgagcgccattaccacactatgctggaacacttttatcagctggggatcaaaccggactggtggaagctgccgccgctctccagcgccagctggcagcagatcaccgcccttatcgagcgcgaagatccgtggagccgcgggatcctgatcctcgggcttgacgccccttccgacaaactgcgcgccggtttcgccgaggcggccgcacacccgatgatcaaaggtttcgccgtcgggcgcaccatctttggccagccgtcgcggcgctggatgcagggtgagctcagcgatgaggccctgatagaggaagtgaaacgcaactacctgacgctcattggctactggcgcgaagcccgccgctga

SEQ ID NO: 214667 - DNA, 858 bp, Klebsiella pneumoniae
atggccaataacccaacacagctgaccatcctgcaggatgaaatcaggcgtcgctacgatacgttaagcaaacgcctgaaacaggtcgcccgctatatccttgataacagcaatagcgtggctttcgataccgtggcctccattgcgcaacaggcggatgttcccccttccacgttgattcgttttgccaacgccttcggcttcagcggctttaacgaaatgaaacagatgttcaagcaacatttgatggaagagaccgccaactataccgagcgcgcccgtctgttccgccagaccaccagcgatgagtccagcccgccggaaacgccgacggaaatcctcaatatgttcacgatggtgaacaaccaggcgttgcagcagctggcgatgcagacctccagcgatgatctggagcgcgcggtggccctgctgggcgaggcggaaaatatttacgtcattggtctgcgccggtcgtttagcgtcgcctcctatctgacctatgcgctgcgtcacctcgatcgcaaagcctttctgatcgacggcctcggcggcatgttcaccgagcagctgagcctggtcggtccgaaagacgtggtagtggcggtgagcttctcgccgtacgcgcgggaagtggtcgagctggtggagctgggcgcgcagcgcaaagcgcggcagatcgccattaccgacagccaggtcagcccgctggcggccttcagcgatgtctgctttgtggtgcgtgaagcgcaggtggatggcttccgttcgcaggttgcttccctgtgtctggcccagacgctggcggtctcgctggcgctgaacagcagccaggagtccgaggccaagcagaaggcgtga

SEQ ID NO: 214668 - DNA, 732 bp, Klebsiella pneumoniae
atgagaaaagtcctcaccgtcctgctgctgagcacgctggccatcggaaccgcgtcagccgagacgctccattttggcaccaccacggccaatccaccgtttgtcaccgccaacggcaaaaatcagcccgttggcttcgatatcgatctcgcgcacgccctgtgccagcagatgcaggcgcagtgccagttcacggcgcagcgtttcgataccctgatcccggctttacgctttaagaaatttgacgcggtgattgccggcatagaagtgatcccgatgcgtgagaagcaggtcgccttcagccgaccctatcgccaggcgctctccggggtagtgatcgtcaacaaagatgtcgcccatacctttgccgatctgaaagctaaaaaagtcggcgtggtgaaaggcacgctgcatcagcgctacctgcgtgataaacagaaagccgtacaggctgtcccttacgacgatgtcgccagcgccctggccgcgctgaaagccgggcaaataaccggcgtcatgggcgacttcgccaccctcgacgcctggcagcaggagaaccctgactacgccatcatggatgaacgggccaccgacccggcttattacggtaagcagtatgcgattgcggtgcgcaaagacgatccggagctgctgaacgccatcaacgatgccctggccgcggtcatggcgacacctgacttccagcagatgcagcagaagtggtttaaataa

SEQ ID NO: 214669 - DNA, 546 bp, Klebsiella pneumoniae
atgagtgcaaatgaaaacaacctcatttggatcgatcttgagatgacagggctggatccggagcgcgatcgcattatcgaaatcgccaccctggtgaccgatgccaacctgaacattctggctgagggcccgaccatcgcggtgcatcagtcggacgctcagttggcattaatggacgagtggaatgtgcggacgcataccggcagcggtctggtggatcgcgtaaaggccagcaccgtcagcgagcacgatgccgaactggcgaccattgagtttcttaagcagtgggtgccggcgggcaagtcgccgatctgcggcaacagtatcggccaggatcgtcgcttcctgtttaagtacatgccgcaactggaagcctatttccactatcgctatctggacgttagcacgctgaaagagctggcgcgccgctggaagccggaaattctcgacggctttaaaaagcagggcactcatcaggcgatggacgatatccgcgagtcggtcgccgagctggcttactaccgcgaacacttcattaagctgtaa

SEQ ID NO: 214670 - DNA, 1062 bp, Klebsiella pneumoniae
ttgagtaaaaataaactctccaaaggccagcagcgccgcgtcaaagccaaccaccagcgccgtctgaaaaccactgcggagaaggccgactacgatgacaacctgtttggcgaaacgtcggaaggcattgtcatcagtcgctttggtatgcatgccgacgtcgaatccgctgacggcagcgtgcatcgctgcaatatccgccggacgatccgctcgctggtcaccggcgaccgcgtggtctggcggccgggcaaagacgccgccgacggcgtaagcgtcaaagggatcgtcgaggcggtgcacgatcgcgcctccgtcctgacgcgtccggatttttacgacggcgtgaagcctatcgccgctaatatcgaccagatcgtggtggtttccgcgatcctgcctgagctgtcgctgaatattatcgatcgctatctggtggcctgcgaagcgcaggatatcgagccgctcattgtgctgaataaaatcgatctgctggatgatgatggtctgcgcttcgtcaatgagcaaatggatatctaccgcaacatcggttaccgcgtgctgctggtttccagtcggactcaggacggccttaagccgctggaagcggccctgaccgaccgcatcagtatcttcgccgggcagtccggggtcggtaaatcgagcctgctgaacgccctgctcgggttgagcgaggatcagatcctcaccaatgatgtctcggacgtttccggcttaggtcaacacaccaccaccgcggcacgcctctaccacttcccgcacggcggcgatgtgattgattcaccgggggtacgtgagttcggcctgtggcatctggaagcggaacaaatcaccaacggctttgtcgaattccatgattatttaggccgttgcaaatatcgcgactgtaaacacgataccgatcctggctgtgcgcttcgcgaagcggtagagaacggcaagatcgccgaaagccgttttgagaactaccaccgcatcctggaaagcatggcgcaggtacaggtaaaaacgcgtaaaaacttttcctcgtccgatgactga

SEQ ID NO: 214671 - DNA, 963 bp, Klebsiella pneumoniae
ttgttaaacgatcttaaactttcactgcaatacattctgcctaaactgtggctcacccgcctcgcaggctggggtgcgagcaaacgcgcaggttggctgacgaagctggtcatcgatctgttcgtgaaatactacaaggtcgatatgaaagaggcgcagaagccggataccgcggcttatcgcaccttcaacgatttcttcgtgcgcccgctgcgcgacgacgttcgcccgctgaataccgatccaaacgtgctggtgatgccggccgatggcgtgatcagccagcttggcgccattgagaacgataaaatcctgcaggctaaaggtcatgactacagtctggaagccctgctggccggcaactatcagatggccgacctgttccgtaacggcagcttcgccaccacctacctgtcgccgcgcgactatcaccgcgtacatatgccgtgcaacggcatcctgcgcgaaatgatctacgttcctggcgacctgttctctgttaaccacttgacggcgcagaacgtcccgaacctgttcgcccgtaacgagcgcgtcatctgcctgtttgatactgagtttggcccgatggcgcaaattctggtgggcgcaactatcgtcggcagcattgagaccgtgtggtccggcaccgtgaccccgccgcgcgaaggcattattaaacgctggacctggcccgctggcgacaacgaaggctccatcgccttgctgaaaggccaggagatgggccgcttcaaactgggttccaccgtgatcaacctgtttgccccgggccaggtgaagctggtcgacacgctgcaaagcctgtccgtgaccaagatcggccaaccgctggcgacagcagtggaagcgaccgccgccgctgaacccgcgccgttaccggaagaagagatccgcgccgaacaccgcgccagcccgctggttgacgataaacaagatcaaggttaa

SEQ ID NO: 214672 - DNA, 3330 bp, Klebsiella pneumoniae
gtgcgcctgatatacactttcctgttggccttgagcctcagtttcggggcgtacgctgcgacagccccggatgctaaacagataacccaggaactggaacaggcgaaggcggcaaagcccgcccagcctgaaaccgttgaagttctgcagtccgcgctgaacgcgcttgaggagcgaaaatcatccctcgagcgcgcccgtcagtatcaggacgttatcgacaatttccccaaactgtttcaaagcctgcgtgcccagctcaataatctgagcgaagagccgcgccaggtgccaaccggcctgaccgccgatgcgctgaaccaggagatcctgcaggtcagcagccaactgctggaatcgagccgccaggcgcagcaggagcaggatcgcgcgcgtgaaatcgccgactccctgaaccagctgccgcagcagcaaaccgatgcccgtcgtcagctcaatgaggttgagcgccgcatcggcacgcaaaccggcaacaatgctctcgcccaggcgcaaaatcttgccctgcaggcggaatcagcgcgtctgaaggcgctggtggatgaactcgacctcgcccagctctccgccaacaaccgccaggagctgtcgcgcgcccgttccgagctggcgcaaaaacagagcgagcagctggatgcctatctgcaggcgctgcgcaatctgcaaaacagccagcgccagcgggaggcggaaaaggcgctggagagtaccgaactgctggcggagaacagtgaaaacctgccgccggacatcaccgcccagtttaaggtcaaccgtgagctctcccaggcgctgaaccagcaggcgcagcgcatggatctggtggcgtcccagcagcggcaggcgacgaatcaaacgctgcaggtgcgccaggcgttaaacaccctgcgcgagcagtcgcagtggctgggctcctccaatctgctgggcgaagccctgcgcgcccaggtggcgcggctgccggagcgccctcgcccgcagcagctggatacggaaatggcgcagctgcgcgtgcagcgtctgcgctttgaagatttgctgagtaagcagccgcagctgcggcagatccgccaggccgacggcgaaccgctgaccagcgagcagaacaagatcctgcaggcgcagctgcgcacgcagaacgagctgctgaactcgctgctgcgcggcggcgacaccctgatgctggagctcaccaagctgaaggtcgccaacggccagctggaagacgcgctgaaagagatcaacgaagccacccaccgctatctgttctggacttcggacgtcagccccatcggcttctcctggccgctggagatcgtccaggatctgcggcgcctgatctccctggataccatcagcgaactgggcaaagccagcgcgatgatgcttaccagcaaagagaccctgctgccgctgtttgccgccctgctgctggttggctttagcatcagttcgcggcgccatttcacccgctttctcgagcgctccagcgcccgggtggggaaagtcacccaggatcacttctggctgacgctgcgcacggtcttctggtcgatactggtggcctcgccgctgccggtgctgtggatgacgctcggctatggtctgcagtccgcctggccgttcccgctggcggtggcgattggcgatggagtcaccgcgacggtgcctttgctgtgggtggtgatgatctgcgccaccttcgcccggccaaacgggctgtttatcgcccacttcggctggccgcgtagccgcgtggcgaaggcgatgcgctactacctgatgagcatcgggctgattgtgccgctgattatggcgctgatcatgttcgataatcttaacgaccgcgaattctccgcttcgctgggccgcctgtgcttcctgctgatctgcggcgcgctggcggtggtcaccctgagccttaagcacgccggtattccgctctatctggataaagaggggaatggcgataatatggtgaaccgcctgctgtggaacctgatgcttggcgccccgctggtggccatgctggcggccgccgtcggctacctcgccaccgcccaggcgctgcttgcgcgtctggaaacctcggtcgccatctggttcctgctgctggtggtctatcacatcatccgccgctggatgctgatccagcgccgccggctggccttcgaccgggcccgccatcgtcgcgcggaaattctcgctcagcgcgcccgcggcgaagatgagcccgttcacgtcagcagcccggaagggtcggtggagacggaggtcagcgaggtcgacctcgatgccatcagtacccagtcgctgcggcttgtccgctccctgctgatgctgatcgcgctgctatcggtcatcgtgctgtggtcggaaattcactcggcgtttggcttccttgagaatatctcgctgtgggacgtgacctcgacggtacaaggggtggaaagccttgagcctattacgcttggcgcggtgttgattgccattctggtgctgatcatcaccactcagctggtacgcaacctgcccgcgctgctggaactggcgatcctccagcatctcgatttaacgcccggcaccggctacgccatcaccaccatcactaagtatctgctgatgctggtcggcgggctggtgggcttctcgatgatcggtatcgagtggtcgaagctgcagtggctggtcgccgcgctgggtgtgggtctcgggtttggcctgcaggagatcttcgccaactttatctccggcctgattatcctgtttgagaagccgatccgcatcggcgatacggtcaccattcgcgacctgacgggcagcgtcacccgcattaatacccgtgcgaccaccatcagcgactgggaccgaaaagagattatcgtgccgaacaaggcgttcattaccgaacagtttatcaactggtcgctgtcggactcggttacccgcgtggtgctgacggtgccggcgcctgtggacgccgataccgaagaggtgacgaaaattctcatcgccgcggcgcatcgctgctcgctggtcatcgataccccggcgccggaggcgtttctcgtcgacctgcagcaggggatccagattttcgagctacgtatttttgccgcggagatggggcaccgcatgccgctgcgccatgagatgcatcagctgatcctggcgggcttccgcgagcatggcattgatatgccgttccctccgttccagatgcgtctggaaagtattgacggcaggcaaagcagtaaaaccatgacctcggccggaaaaaccagccgccgtacggctggtagcctgtaa

SEQ ID NO: 214673 - DNA, 1503 bp, Klebsiella pneumoniae
atgcatcaacaactcaagaagatgagcctgatcgggctgattctgatgatcttcacctcggtgtttggctttgccaacagcccatcggcgttttatctgatgggctatagcgcgatgccgttttaccttttttccgccctctttttctttatcccgttcgcgctgatgatggcggagatgggctcagcttatcgtcgcgaagagggcgggatctattcctggatgaaccacagcgtcgggccgcgctttgccttcattggtacctttatgtggtttgcctcgtacgtagtgtggatggtgagtaccgccgctaagatctgggtcccgctatctacttttttgtttggcgcggacaaaacccagacctgggcgctgggtagcctgacgccgacgcagacggtcggtattctggcggcctgctggatggtcgtggtgacctttattgccgtcaaagggatcaataaaatcgctaaaattaccgccgtcggcggtatcgcggtgatggggcttaacctggtgctgctgctggtgagcggggcgatccttctgcttaacggcggtcatttcgcccagccgttaaacttcaccctttcgcctaatcccgggtatcagtcgggcatggcgatgctgtcgtttgtggtatttgccatctttgcctatggcggaattgaggcggttggtggcttagtggataagaccgataagccggaaaagaactttgccaaaggtattatcatcgcggcgatcgttatctcgatcggttactcgctggcgattgtgctgtggggcgtgagcgccaactggcagcaggtgcttggcgcgcgttcgaccaacctcggcaacatcacctatgtgctgatgaccagcctcggggcgacgctgggccaggccctgcacctgacccctgcggcgtcagccctgaccggggtctggttcgcccgtattaccggcctgtcgatgtttctcgcttacaccggcgcgttcttcaccctcagctattctcctctgaaagcgattatccagggcacgccaaaagcgctctggccgtcggtgatgacccgccttaacgtcaacggaatgcccgccgcggcgatgtggctgcagtgtctgctggtcggggtgtttatcgtactggtatcgttcggtggggatagcgcttccgcgttttataacaagctgacgctgatgaccaatgtctctatgaccttgccttatctgttcctgaccatcgccttcccgttcttcaaggcgaaaacccatcttgaccggccgttcgtgatcttcaaaaaccgtccgtcgacgctgctggcgaccggcgtggtgctgctggtggtgaccttcgccaatatcttcaccattatccaacccgtcatcgacagcggggactggaacagcaccctgtggatggtgggtggaccgatcttcttctcactgctggcgctggggatctacgaaagctaccgtcggcgcatggcgtccggcgcgctggtgatggagagttaa

SEQ ID NO: 214674 - DNA, 978 bp, Klebsiella pneumoniae; identical to SEQ ID NO: 137126

SEQ ID NO: 214675 - DNA, 1791 bp, Klebsiella pneumoniae
gtgcaaacttttcaagccgatctcgccgtaattggcgccggcggggcaggccttcgtgccgctatcgccgccgctcaggccaaccccaacgctaaaatcgccctgatttctaaagtctatccgatgcgcagccatacggtcgctgcagaaggggggtccgcagccgttgcccaggatcacgatagctttgagtaccattttcacgacaccgtcgcgggaggcgactggctgtgcgagcaggatgtcgtcgactattttgttcatcactgcccgacggaaatgacccagctggagcagtggggatgcccatggagccgccgccccgacggcagcgtcaacgtccggcgcttcggtggcatgaaaatcgaacgcacctggtttgccgccgacaaaaccggcttccacatgctgcataccctcttccagacctcccttcagtttccccaaattcagcgctttgacgaacatttcgtccttgacctgctggtcgatgacgggcaggcccgcggcctggtggcgatgaatatgatggaaggcaccctggtgcagatccgcgctaacgccgtggtgctggctaccggcggcgccgggcgcgtctaccgctacaacaccaacggcggcatcgtcaccggtgacgggatggggatggccctgggccatggcgtgccgctgcgcgacatggaattcgttcagtatcacccgaccggcctgccgggctccgggatcctgatgaccgaaggctgccgcggcgaaggcgggattctggtcaacaaaaacggctaccgctatctgcaggattacggcatgggcccggaaaccccgctcggcgaaccgaagaataaatatatggagctaggcccacgcgacaaagtgtcccaggccttctggcacgagtggcggaaagggaacaccatcccgacgccgcgcggcgacgtggtctacctcgatctccgccacctcggcgagaaaaaactactggagcgtctgccgtttatctgtgaactggcgaaagcctacgtcggcgtcgatccggtgaaagagccgatcccggtgcgcccgaccgcgcactacaccatgggcggtattgaaaccgatcagcagtgcgaaacccggatcaaagggctgtttgccgtgggcgaatgctcgtccgttggcttacatggcgccaaccgtctgggctccaactcgctggccgagctggtggtcttcggccgcctggccggggagcaggccatgcagcgcgccgctcaggcgggcgaggcaaacggcgccgccctcgatgcgcaggctgccgatgtggagcaccgcctgaaagatctcgtcaaacaggaaggtaacgaaaactgggcgaaaattcgcgatgaaatggggctgtcgatggaggaaggctgcggcatctaccgcacgccggagctgatgcagaaaacgatcgacaagctggctgaactgcaggagcgctttaagcgcgtgcgcattaccgataactccagcgtgttcaataccgatctgctttacaccattgagctggggcacggtttaaacgttgccgaatgtatggcgcactcggccatcgcccgtaaagaatcgcgcggggcgcaccagcgtctggatgaaggctgtaccgaacgcgacgacgtcaacttcctcaagcacactctcgccttccgcgaggccgatggcactacccgtctggaatatggcgatgtgaagatcaccacgctgccgccggcaaaacgtgtctatggcgcagaagcggacgcggctgagaagaaggagaccacccatggctga

SEQ ID NO: 214676 - DNA, 735 bp, Klebsiella pneumoniae
atggctgagatgaaaaacctgaaagtcgaagtggtgcgctacaatccggaggtcgacaccgcaccgcacagcgcattctatgacgtgccttacgatgaacagacctcgctgctggacgcgctgggcttcatcaaagacaacctggcgccagacctgagctaccgctggtcctgccgaatggcaatctgcggttcctgcggcatgatggtcaacaaggtgccgaagctggcctgcaaaaccttcctgcgcgattacaccaaaggcatcaaggtggaggcattggccaacttcccgatcgagcgcgatctggtggtggacatgacccactttatcgaaagcctggaagccattaagccgtatatcatcggcaataaccgcacgcctgaccaggggccaaacaagcagaccccggcccagatggcgaaataccatcagttttccggctgcatcaactgcgggctgtgctatgccgcctgcccgcagttcggcctgaacccggaatttatcggcccggcggcgatcaccctcgcccaccgctataacgaagacagccgcgaccacggtaaaaaggaacgcatggcgcagcttaacggccagaatggcgtctggacctgtactttcgttggctactgctcggaagtgtgtccgaagcacgtcgacccggcggccgcgatccagcagggcaaggtggaaagctcgaaagactttcttatcgccaccctgaaaccacgctaa

SEQ ID NO: 214677 - DNA, 396 bp, Klebsiella pneumoniae
atgacgacgaaacgcaaaccctacgtgcgaccaatgacctccacctggtggaaaaagctgccgttttatcgcttctacatggtacgggaaggcacggcggtaccgacggtatggtttagcattgtgctgatttatgggctgtttgccctcaagcacggcgccgagagctgggcgggatatatcggattcctgcaaaacccggtggtggtaatcctcaacctgattactctggcggcggcgctgctgcacaccaaaacctggtttgagctggcgccgaaagccgccaacgtcatcatcaaaggcgaaaaaatggggccagagccggtcattaaagggctctgggtggtgacggcggtggtcaccgtggtgatcctgtttgtcgccctgttctggtaa

SEQ ID NO: 214678 - DNA, 360 bp, Klebsiella pneumoniae
atgattaatcccaatccgaaacgttccgatgaacccgtattctgggggctgtttggcgcaggcggcatgtggggcgcgatcgtcgcgccggtgatggtgctgctggtcggcatcctgctgccgctggggctcgccccggccgacgcctttagctatgagcgtgtgctggcctttgcccaaagctttatcggccgcgcattcatctttctgatgattgtcctgccgctgtggtgtgggttgcatcgtattcaccacgccatgcacgatctgaaaatccatgtgcccaacggtaaatgggtcttctacggcctggcggcaatcctcagcgtcatcaccctcgttggcgtactatttatctga

SEQ ID NO: 214679 - DNA, 534 bp, Klebsiella pneumoniae
atgcgtatcctgccgataatcaccgcgattgccgtctcgttcctgtctgtcgcctgcagcacgcccgccccgccgccgggcgtcaccgtggtcagtcccttcgacgttcagcgctatctgggtacctggtatgaaatcgcccgctttgaccacccttttgaaagcgggctggaaaaggtcacgatcgcctggcacccacgcgatgacggtggcctggacgtggtcaataaaggctataaccccgaccgtggtatgtggcagaaaacggacggggtagcgtactttaccggggagcccagccgcgccgcgctgaagatttccttcttcggccctttctacggcagctataacgtcattgctctggataaggagtatcgttacgcgctggtctgcggccccgatcgcgactatctctggctgctggcccgggcgccgaccatcgccccggaggtcaggcagcagatgctggacattgccacccgacagggctttgatgtcggcaaactggtctgggtcaatcagcgctatgattag

SEQ ID NO: 214680 - DNA, 318 bp, Klebsiella pneumoniae
atgtcctggatagtcttgtttatcgctggcctgctggaagtggtgtgggccgtcggcctgaaatatacccatggctttagccgcctggttcccagcgttatcaccatcgtggcgatggtggccagcatggcgctgctctcatgggcgatgaaaaccctaccggtaggtaccgcctacgccgtctggaccgggatcggcgccgtgggcgccgccgtgaccggtattgtgctgttaggggaatccgccagcgccatgcgtatcgccagccttgtctgtatcgtgattggcatcattggcctgaagatcagcgcgcactaa

SEQ ID NO: 214681 - DNA, 192 bp, Klebsiella pneumoniae
atgcttatagggcatgaaaacaaaactgacactaaggatgacattatggtgaaaaaaacgattgcagcgttctttacggttttggtcctctcttcagcactgaccgcttgtaacaccacgcgcggtgtcggtgaggatatttcagacggcggcaacgcaatctctggcgcggcaaccaaagctcagcaataa

SEQ ID NO: 214682 - DNA, 132 bp, Klebsiella pneumoniae
atgaagcgcagcgttaaactcctggtgttactctttctgagcagcgcactgttggctggctgcaataccgcccgcggtgtgggtgaagatattcagggcctgggccacgctatctctcacgctgtgagctga

SEQ ID NO: 214683 - DNA, 567 bp, Klebsiella pneumoniae
atggcgacttactatagcaacgattttcgtgctggtcttaaaatcatgttagatggcgaaccttatgcggtagaagccagcgaattcgttaaaccaggtaaaggccaggcgtttgcgcgcgttaagctgcgccgtctgctgaccggtacccgcgttgagaaaactttcaaatctaccgattccgcagaaggcgcggacgttgtcgatatgaacctgacttacctgtacaacgacggtgagttctggcacttcatgaacaacgaaaccttcgagcagctgtctgctgacgcgaaagcgatcggtgacaacgctaaatggctgctggatcaggctgagtgcatcgtgaccctgtggaacggccagccgatcgcggtcaccccgccgaacttcgttgagctggaaatcattgaaaccgatccaggcctgaaaggcgacaccgcgggtaccggcggtaaaccggcgaccctgtctactggcgcggtggttaaagttccgctgttcgttcagatcggcgaagtgattaaagtggatactcgctctggcgaatatgtatcccgcgtgaagtaa

SEQ ID NO: 214684 - DNA, 1029 bp, Klebsiella pneumoniae
atggcgcatattgtaaccctaaataccccatccagagaagattggataacgcaacttgccaatgttgtgaccagtcctgatgaactgctgcgtcttttaaatgtagacgctgatgaaaaactgctggccggacgcgaggccagacgcctgttcccgctgcgcgtcccgcgcgcgtttatcgcccgcatggagaaaggcaaccctaacgatccgctgcttcgtcaggtacttaccgccgaggaagagtttatcgtcgcccccggctactccaccgatccgctggaagaacagcacagcgtggtgcccggtctgttgcacaaatatcgcaaccgggccctgctgctggtgaaaggcggttgtgcagtcaattgccgttattgtttccgccgccacttcccttatgccgaaaatcagggcaccaggcgcaactggcagacagcgatggactacatcgcggcgcatccgcagcttgatgaaatcatcttctccggcggcgacccgctgatggcaaaggaccatgagcttgactggctaatgacccagctggaagctattccgcacgttaagcgtctgcgtattcacagccgcctgccaattgtgatcccggcgcgcatcaccgagacgctggccagccgcttccagcgttcgtcgctgcaggtgatcctggttaaccacgttaaccacgccaatgaaattgacggtgagtttcgcgcggcgatggccatgctgcgtcaggcgggcgtcacgctgctcaaccagagcgtgctgctgcgcggggtgaacgacaacgcgcaaaccctggccgacctcagcaatgcgctgtttgacgccggggtaatgccctactacttacatgtgctggatcgggtgcagggggcggcgcacttcatggtcagcgatgatgaagcccgtgaaatcatgcgtgaactattgaccctcatctccggctatatggtgccgaagctggcgcgcgagattggcggggaacccagcaagacgccgctggatttagggctgaagcagcgttaa

SEQ ID NO: 214685 - DNA, 780 bp, Klebsiella pneumoniae
atgaccagacaatggattgaggaggtcgccggaacctgtcgggctttcggaacggattatctgcatgtcattatcgatcaggcgggggtgggtttttccgttattccggcgctgaattcgctgtcagttgagtggcagtcgctttttcatggacttccggaagcatttattgtcgatgatgctccgctggtggcgcgctttacgcttgatgatcttgagcaaatgcgctggttacaggatatcagccagcaacttgccatccaggcgccgctgctcctgttctgcacatattggcccttttcggcgctagcgaactggctcacgcagtgtatggatattctgcaggaagggcgcagcggaattttacgcttttacgatacccgggtatttccgctgttgtttacgcacattctcagtgacgagcagcaagagccattgatgcgtccggccctgttttgggcgtggcaggatcttgacggccaggcgaaaggcatcaagggcagtggtctcctgccggaacgcgatgaaaaggcgccaaaaatagaactcagcgatcgccagcttgagcatctgatgtgtatcagcgatgtcatcgtcatgttgtcgcactgtgctccgcctgcgggcatgtttgactcaagacagtcactgttttcggcctgttaccagggcatggtggaggcgacacgccagggtcttcttctggatgacgctcgtgaagactgggtaatgaagaagtggcttgccgacgtaaaaaccagtgagagaccttcagaatga

SEQ ID NO: 214686 - DNA, 2379 bp, Klebsiella pneumoniae
atgagtagcgtgaaatcgttgttgttcagccataaccaccacctgctttcggtgcagggatgtgaagccgggcttgatgtgctggccttcgagggcgatgaagccctgagccagccgttccgctaccgtattgaattcaccagcgcagaccatgccatcagcaaagagatgatgctgatgaaggcagcctccctgacgctgcaggcgccggtggctcagggcttcggcatcaatgttcagcaacccgtgcgggtgatccagggcgtggtgacggggtttgaaaggctcggtacctccagggatgaaacgcactacgcgctgacgcttcagccgcgcctggcgctgctcaaccgctcgcaccagaacgccatttaccaggaccagtccgttccgcagattgtggaaaaaatcctccgcgagcgccacggcctgcgcggtcaggattttctgttctcgctgacaaaaacgtatccgcgacgcgagcaggtgatgcagtacggcgaggatgacctgcgctttatcacccggctgctgggagaggtggggatctggtttcgctttaccgccgacacgcggctgcacatcgacgtcgctgagttctgcgacagtcagcagggctatgagaaggggctgacgttgccttcggtcccgccgtcagggcagcagtcggccggggtggacgcggtgtgggagatggcatgccgccaccgcgtcgtggagcagcaggtcagtacccgcgactacaactaccgcgaggcgacggcggacatgaacgcgcaggtggatgtcacccgcggggagaccaccacctttggtgaggcttaccactggggagataactacctgaccgccgggaatgtccatgaccgccatccggcgccggagtccggggcgttttacgcccgtcttcgtcatgagcgttatctgaacggccagacccggatgcaggccaccaccagctgcccgacgctctgcccgggacaggtgctgaaggtcaccggcggagaggaggtggccagggagtttgctgatggcgtgctcatcacggcgatgcacagccacgcccggcgcgatgccgactttgcggtggagtttgccggcataccggacagcccggacgtcggctaccggcctgagcccggcgcgcgtccggtgatggccgggacgctgccggcccgcgtgaccagcacccgggaaaacgacacctacgggcatatcgacaaacacggacgctaccgggtgaatatgttgtttgatcgggcgcgctgggaaaccgggttcgagagcctgtgggtccgtcagtcgcggccgtatgccggagacacctacggcctgcacctgccgctgctggccgggacggaggtggcgattggctttgaggatggtaaccctgaccggccgtatatcgcgggcgtgctgcacgactcggcgcacggcgaccacgtcaccatccgcaatgacaaacgtaacgtcctgcgcaccccggccaacaacaaaatccgcctcgacgatgagcgcgggaaagaacatatcaaggtcagcacggagtacggcggtaaaagccagctgaacctggggcacctggtggacagtgacaggcagccgcgcggcgaaggctttgagctgagaaccgacagctggggagctatccgggcacagaaagggatatttatcagcgcggacggacaggtgcaggctcaggggcaggtgctggcgatggagccggcggtcagtttgctgaaaggtgcggtgaatcaggtcacggaatggggaagcattacgcaaacccatcataatgttatcccagacaccggcccattaagcgcactgaccacaggcgccagcgatcttaaacagccgacattgctgatgtcggccccgcaggggattgccgcagtcacgccggaaacaaccctcctgcacagcggtaaggggctgtatctgcagagcctgggagaggtcaacatcaccacggcacagcgctgttctctgaatgccagccaggctatttcactgctggcgcaacaggaggggatgaggctggtctccgccaaaggtccgctgcaagtagagtcgcacggcgatattctatcgctgaccgcgctaaaagatatcaccgtccagtcaacccaggggcatctgcagttgacggctaaaaatggcatcaccctgggttgcggcggcgcatatatccgtcttaccccgcagggagagatacagatccacggaccgggggtgattagccttaaggggcagcatgatttgcaggggccggtcagcgaggagtttcccttgcctgagctaccggcatcggtgtgtaaagagtgccttaaaaaagcccaggcgctggcgcagggcttcgtgccgcgggaggcatag

SEQ ID NO: 214687 - DNA, 2655 bp, Klebsiella pneumoniae
atggaaaatccagccagcctgttacgccgtcttaatccctgctgtgcccgcgcaatggagggggcggcctccctgtgccagacccgggcgcatgccgagatcctgcccgagcactggctgctcaagctgctggaacagggggaaggcgatctgacggtgctggcgcggcgctatgaatgggatatggatgcgctgtggcaggatctgctgagctggctggataaacagccgcgctcggtacgtcatcgtccccagctctctgaccataccctgaggctgatgcaggaggcctggctgattgcctctctcagcggcgaagcgcagatccgcagtgttcacctgctgatggcgctggttgaaaaacagaatctgatccagtgcgatggcctgtggccgctgttaacgctgggccagcgtcagctggaacgcctgcgctccttgctggatgcccagtccgacgaacgtccgccagcgcagcaggaagcggcgctggcgcagccccatggcggggacgtggaatttgtggggcgtcctgcgggcagcgaactgaatgcggatgggctcaacccggcgctgcagaacgcgctggacaaattcactctcgacgtcaccgccaaagccagagacggccagattgacccggtgttcggacgcgacatggaaatccgccagatggtggatattctctcccgtcggcgaaaaaacaacccgatcctcgtcggtgagccgggcgtgggcaagaccgctctggtggaaggcctggcgctgcgcattgccgaaggcaacgtccccgacgcgctgaagccagtgtcggtgcgcacccttgacctcggtctgctgcaggccggcgccggggtcaaaggcgagttcgagcagcggctgaaaaatatcattgaggcggtacagcagtcgccttcgccggtgctgctgtttatcgacgaggcgcacacgatcatcggcgcgggtaatcaggcgggcggcgcggatgccgccaacctgctgaagccggcgctggcccggggcgaactgcggaccatcgccgccaccacctggagtgaatacaagcagtacttcgagcgcgacgccgcgctggagcgccgctttcagatggtcaaggtggatgagccggacgacgacaccgcctgcctgatgctgcgcggcctgaagtcccgctatgccgaccaccacggcgtgcatatcaccgatgatgcggtgcgcgccgccgtgacgctgtcacgacgctatctcaccggtcgccagctgccggacaaggcagtggatttactcgacaccgcttccgcccgcctgcgtatgagtttggataccgtgcctcagccgctgacccgcatgaaggcgcagctcaccgcgctggcgatggagaagcaggcgctgctggaagatattgcgctgggcaacagcgcccgcggcgatcggctggcggccattgagcaggaggagatccgccttattctggcgctggatacccttgaaactcagtatggtcaggagctgcagctgacggaagcgctgctcgcctgccgccgcgatatctcccgccaggcggaaattagcgatctacaaaccgcgcttatcgccgtccagcagggcaatccgctgctcgggctggacgtcgacgtccgcaccgtggcgacggtgattgccgactggaccggcgtgccgctctcctcgctaatgaaagatgagcagacggagcttctgagtctggaagagagtctcggcaaacgggtggttggccaggaggcggccctgagcgctattgcccggcgcctgcgcgccgcgaaaaccggcctgacgccggagaacggtccgcaaggggtgttcctgctggtcgggccgagcggcaccggcaaaacggaaacggcgctcgccctggccgatgcgctgttcggcggcgagaaagcgctgatcaccatcaatctctccgagtaccaggagccgcacaccgtcagccagctgaagggttctccgccgggctacgtcggctacggccagggcgggatcctgaccgaggcggtgcgcaaacgcccctacagcgtggtgctgctcgatgaggtggaaaaggcccatcgcgatgtgatgaacctgttctaccaggtcttcgaccggggggtaatgcgcgacggcgaggggcgtgaaatcgactttcgcaacaccgtgatcctgatgaccgccaacctcggtagcgacctcctgatgcagctgctggatgaacagccgcaggccagcgaatcagacctgcacgagctgctgcgcccggtgctgcgcggccacttccagccggcgctgctggcccgcttccagacggtgatttaccgtccgctgccggcgggagcgctgcgcgccattgtcggcatgaagctcgggcaggtaagtcagcgtctggcttgccattacggaatcaccaccaccctcagcgagagcctgttcgccgcgctaaccgaggcctgcctgctgccggataccggcgcccgcaacgtcgacagtctgctgaatcagcagatcctgccggcgctgagtcagcagctattgagccatatggcggcggggcagaaaccgcgccaggtgacgctggggtatcacgaagaggaaggcgtcgtgatggcgtttgacgaggggacaatatccgatgagtag

SEQ ID NO: 214688 - DNA, 492 bp, Klebsiella pneumoniae
atggcaattcctgtttatctttggctgaaagacgacggcggcgcggacattaaagggtctgtcgacgttcaggatcgtgaaggcagtatcgaagtggtggctcaggagcataacctgtacatcccgaccgataacaacaccggcaaactgaccggcacgcgtattcatacgccgttcctgttcaccaaggagatcgactcctccagcccctacctgtacaaggcagtgaccaccggccagaccctgaaatccgctgagttcaagtggtaccgaatcaacgatgccggccaggaagtggagtatttcaataccaaacttgagaacgtcaaggtggtgaaagtgaatcccctgatgcacgacatcaaaaaccccgcctacgagaagcacaaccatctggaacagattgagctgcgctacgagaagatcacctggacctataaagacggcaacatcattcactccgatagctggaacgaacgcgccaccgcgtaa

SEQ ID NO: 214689 - DNA, 1707 bp, Klebsiella pneumoniae
atgagccccccgcagcagcgtgggctggcgctgtgggccagtctgctgagtgcgctggtgtgcctgctatttttgccggttccccgctggggggcgtggctcattctgctggtcacgctggccctgatcatcgggatctggcgcatcgccagtcgtcgtaccggacgtaacgtcgcatcaaccctggcccctctcccggagggcgcttatcgccaaccggtggtcctcgtttgcggcgacctgccgtgtgtctggccgcaagcgtcaccggtgcgagtggtcaaacagggctgctggatccgcgtggaaaagacggaggagctgcagcaggtcgcgcgccaggtattgagccagcggccggaatgggggcctcagctgtcggtgctgctctgcgtctgcccgcagcggcatgcgcaaagcgatgcgctgaccagcgctctgctggccctgcgctggcaactcagccagctgcgccagcagacggggtatgccgtaccgctggtgctgcaggggcaggtgggcagcgcgatgagtcgcgacctgttgtggcaggcggcgataccgggtgaagcggtgaaagtctggcagccctcctgcgccccctgttccgtaccggcctgggtaagcgccggtggggcggccgcgctggagcagcaggtgctgatgaacagcctgatgggctggtttgaacagcacgtccatgccgtgttgacggaagagaataccgacctgccacctctgacccctgcggccgtgctgtggggcctcgggccctcgctgcctggaaggctggcatcgtcggcctggacgacgtggttatcccgacatagcggcctgtcgcgggtagctggctggcagccagatgagagcgacaccggggacgcttcagctttgccggaattaatcctgccgcagttaccggtgggacggggactcacgccacgaggcagggcctggcgagcggcgctcgcgattttcaccctcgcggctgtcgccgcgctgctcagcagtggctggaacaatcgacaactgctgcagcgcgtgagcgtcgatattgcccgttatgagcggattgcgatggatgattatcgaccaaaagccagcgctgtcagggtgctgcgtgaagatgccgcgctgcttgatagctgggcgcgtaacggcgtcccgctgcgcctgagtctgggcttgtatcacggggagcagattcgcctgccgttgctggaggcgattcgcggttacgtgccgcctccgcctccgcccaggccggtgcagcgcgtcgcgccggatgtcatccgccttgacagcatgtcgctattcgataccgggaaatgggtactgaagcctggttcgacaaagcggctggtcagctcgctgatggacattaaggccaggcccgggtggctgatcgtggtggcgggtcacaccgacagcgtgggtgaggaaaaagccaaccagctattgtcgctgaaacgtgcggaatcggtccgcgactggatgcgcgataccggcgacgtgccggacagctgctttgccgttcagggctatggcgaaagccgaccaattgcaacaaacgatacgccggaaggccgtgcgctgaaccgtcgtgtcgaaatcagtctggtgccgcaggtagacgcctgccggttaccggaccaaccctctgcgtcatcccaggatgatggcgcttcactacacaatggagagtaa

SEQ ID NO: 214690 - DNA, 690 bp, Klebsiella pneumoniae
gtgaatgagcctaaacgcggcaacgccgcgtccattgatattgatgcgctgctgcagaacacctggctgcaggttatcagcctgcgccacggcccgcagttccgcgatgaggaagggtacacgctatggcagcgctgtattgctgatgtcgagcgcgtgcaacatgagctgaaggcgagcgggcttgatgacgtcagctgtcagcatattctcaccgcccagtgcgcgctgctcgatgaagcagtgaaaggtcgcggcgtggaggatgaggcctgcctgcagtggtatgacattccgctgcaggggcacttcctcggcaccatggacgccggcgacaccctgtgcgagcggatgcgtgatgtgttgcgtgaaccggcgcccaacctggccgtggtcacctgttttcagcgggtgatgctgctgggttttattggcagctttcgctccctccacgaccccgagcgcctgaagctggtcaacgcgctcggtgagcgtgttcctccttttcagtgcccggctaccgctcccgtactggtagagagtcgcgccggtctggggataagcggctggctggccccatggccggtacgtattggcctgagcgtggtggtggtactcgccctgtggtggggactcaaccactggctcgatcacctgctgctgaccttgttaccgggggaggtgaaatga

SEQ ID NO: 214691 - DNA, 1344 bp, Klebsiella pneumoniae
atgatgaaaacggaacgtccgttgtggggccggggcattatggtgtcgcctcagcattttcaacagcaggctgcgtatgcagcctggactgcggaagtgattgcccggatgggtcttaaccacccctggggagtggttgaggcgaccttcgaaccagagatgctcaaactgggccgcctgcaggctcacaggctgcaggtccggttccaggatggcacgatgattgatacggacaatgccgatgcgctgccgtccgcgctgtcgctggacggcgcgcccggcgaggcggtgatcgtgctggcgctgcccctgatgcaggcgaatggcggcaactgtctgaagccggaggaggttgccgaaaggccggtgcgcttccggcagcgctggcgcgatgtccgtaaccagtttggggatgatacccggcagattgccgtcatacagccggagctgaccctccgcttcgcccaccaggacaacagcgattacctgacctgtccgcttgttcgcctgcagcgggactcgcagggggcctggcttatcgacgagacgtttctctcgccgctgctgcagatccagggcagccgctggctggcgacgcagcttgaacagctgctcgtccagctccgggctcgtctgacgcgcctgatggccatgcgtcgcgaaagcaatgaacggatggctgattttgccgtagccgatgtctctctgttctggttgctgaatgcgctgaacagcgccgaaccggtgctggggtactttctgcgttaccggcaaagcccgccggaacgcctctacccggagctggcgcgcctggctggtagcctgctgaccttttcgctcacccatcaggcgaatgccgtcccgatctatcagcatgaccagctgaacgcggtttttccgccgctgtttgatttactgagcgacctgctggaggcgagcctgccatcgcgggtggtggcgattgccctggagcatgatgtccggctgcacttctggcaggcgcgtctgcacgatgcccggctgcgggaaggggctgattactacctgtcggttcgttcgtcggtaccggtcgcccaactgcaggagcagtttccgcgccagtgcaaagtgggcagtccggatcatgtcaaagccatcgtcaactcctcgcggacaggggtgcccctcacgccattgcgtcatgtgccggcggcgatcccgctgcgtctggaaaatcagtatttcagcctcgatgtgtcccaccctctggcaacggaaatgctgcagagcggcacctgtatgttttacgtcccggggatgctcggtgagcctgaacttgaactttttgcggtactacgaacgtga

SEQ ID NO: 214692 - DNA, 1545 bp, Klebsiella pneumoniae
atgtctgttaccacagaaaacgcccctgttcaggggcaaaccacgctgcaggaaaacagggcgggcgagggcgtttacgcctcgctgtttgaaaaaattaatctcaccccggcgtctcgcctcggggatatcaacgactttctggacgatgccgcgctctccgaggcgccggcggcggaacgtctcaccgcggcgatgcaggtgtttatggaacgcatccgccagtccggccagcgggtggaaaagctcgacaaaacgctgatcgatcaccatatcgccgagctggatttccagataagccgtcagctggacgcggtgatgcaccatcaggagtttcagcaggtcgaatccctgtggcgcggcctcaaacagctggtggacaacaccgactatcggcagaacgtcaaaacggagatcctcgacgtcgccaaagacgatctgcgccaggactttgaggacgcgccggagcttatccagagcggcatgtactggcacacctataccgcggagtatgacactcccggcggcgagccgatcggctcggtgatctcggcctatgagttcgacgccagcccgcaggatgtggcgctgctgcgcaatatctcccgcgtctctgcggccgcccatatgccgtttatcggcgccgtcggcccggccttcttcctgaaagagaccatggaagaggtggctgccattaaggatatcggcaactacttcgatcgtgcggaatatatccgctggaaggcgtttcgcgaaactgacgatgcccgctacatcggcctggtgatgccgcgcgtgctgggtcgtctgccgtacggtccggacaccgtgccggtgcgcagcttcaactatgtcgagcaggtgaagggcccggatcacgaaaaatatctctggaccagcgcggcgttctccttcgcatctaatatggtgaagagctttgttaacaacggctggtgcgtgcaaattcgcggtccgcaggcgggcggcgcggtgaaagatttgcctatccatctgtacgatctgggcaccggcaaccaggtgaagatcccttccgaggtgatgatcccggaaacgcgggagtttgagttcgccagcctgggctttatcccgctgtcgtactacaaaaatcgcgattacgcctgcttcttctcggccaactccgcgcagaaaccggcgctgtacgataccgccgacgccaccgccaacagccgtatcaacgcgcgtctgccttacatcttcctgctgtcgcgcatcgcgcactacctgaagatgatccagcgcgaaaatatcggcaccaccaaggaccggcgtctgctggagctggagctgaacacctgggtgcggagcctggtgaccgaaatgaccgaccccggcgacgagctgcaggcctcccatccgctgcgcgatgccagcgtggtggtggaagatatcgaggataacccgggcttcttccgcgtgaagctgtacgcggtgccgcacttccaggtcgaggggatggacgtcaatctgtcgctggttagccagatgccaaaggcgaaggcgtag

SEQ ID NO: 214693 - DNA, 492 bp, Klebsiella pneumoniae
atggctgatacgttccagaatgaagtccccagggcgcgcattaatctcaaattatctcttcataccggcggcgcgcaaaagaaggtcgaactgccgctcaaactgcttaccattggcgattttagtcatgttaaggaaaaccggcctttatcggaaagagaaaaaatcaacgtcaataaaaataattttaacagcgtactttcggaatttagcccggaagttaacctctcggtgccgaatacgctggccggcaatggcgaagaggagaacgtcagactgcgttttaccgacatcaaagattttgaaccggagcaggttgcccggcaaattccgcaactccgcgccatgctggcgatgcgtaatttattacgcgatctcaaatccaatctgctcgataacgccactttcagaaaagagcttgaggcaatcctgaaagatccggcgctgtcccaggaattacgcgacgaaatgagtgcgcttgccccgaaataa

SEQ ID NO: 214694 - DNA, 249 bp, Klebsiella pneumoniae
atgcgtgtagaaatcagcattgccaaagagaaagccgcgaaaatgccaaaggggtcaatggaggccttgaaagacgaaatgacccgtcgaatcagcaagcaatatgacgacgttgaagtgatcgtgaaaacggccagtaatgatggactgagcgttttgtgggcgactgataaagaaatcgccaaagaatttgtagagaccactctaaaagacgcttgggagacggctgacgactggtttgtgcgttga

SEQ ID NO: 214695 - DNA, 285 bp, Klebsiella pneumoniae
atgcttcgacagacagacatcgccgcggctttccgcgagtccattttgcgcagttccaaggggttccagtacattcacacccgagacttcgttaccgcactgcgcctgcgcggcatccacttctccgaggtggaggcgaactcctggatcgcgcgggaacaaacgtatttcgtcgataagacgcctgaccatagcgaaaacaggctgtggatgatggcagggatggggaggggctctgatggtgctagtcagggttgttggagactccaatccatagttttatga

SEQ ID NO: 214696 - DNA, 210 bp, Klebsiella pneumoniae
atgacaacaatcgcagttaagattgagactgtttcaggggcaaaagtagaattctcacatgaagtatttatctgggatgaactgaaccagtttgagcgtgatgacatcatcagtttactggtaaacggtaatgatgatgcgcaagccgttatatcagtaagcactggctatacgctgagttggtcccaaagcgaaaacgaggccccttaa

SEQ ID NO: 214697 - DNA, 732 bp, Klebsiella pneumoniae
atgtctaatggaacacgtattctgctcaactcggacggtatcatcaccgactggagcaagcagcactttgagcctgtagcttctccgctatcggcaatcagtaatccgaaggtcgcttacgacctgttgacgcctctcgataactcgcggcacggatttagcgtgcagcagggcgttcagaagctgaaaccatatggactgcagtttcaaggtactgcaggtagtcaaacagactttacggaggctggacttgcgggactatctttcctgacggctttccgtttcagtgccatcgacacattccagtacgttctggactgtcgagatcttaccgtcggctccggtcacggctttgccatcacatacaaccccaccgggcagcgcctggagctgcgtgttgcgtggcctgatggctcaatgggtatttactacgcaaccggacaaaccatcgttgctgacaaatggtatgtggcctgtggtgtcatttcccctaaccgcaatcacaaattaactttgtctgatggaaccgcaattgctgctagcccaacgggctatctggctaacgttgctggcagtcctctcatgctcggtgcaagtgccgcaggatcctcgatgctcaaaggcgacattgggttctttggtgcatggggtaatgagttctccgcaggagatatcacaaatgccatagccctgggaactagtatcatgaccggaagaggggagacggtatga

SEQ ID NO: 214698 - DNA, 546 bp, Klebsiella pneumoniae
atgtgcggcatcaaattgcctgccgacctgtatcagaacactgtgggctcacgtaacaaaaagggcagcgacgggacgaacgcccggatcacactgcgcaacctgcacagcgttatcaacaatccgtccatcgagctggccgcagcccagaccgtcgatattccgggagacgcggcaaactggaccgctgattacctgaacagtgattacagctggataccgcggattaccctggataattgcatcccggcaattatccatactcctggcgcaaaagctgttgtcgatattcatggcggcaagctggcgcgggtctacaccaacggcaatggcaaccgctgccgggtcaccggtgctgatattgagctgatacctgatgcgtcaggcgtggtctattttgcagcagataaaacactggttactggctgttcgtggctgaatccgacgaacggcgcaacctatactggaaccttacgcggttctggaaatgagatgatcggtgatagcgccaaagcgcctaacctccctgcaaatgcgtttatttga

SEQ ID NO: 214699 - DNA, 675 bp, Klebsiella pneumoniae
atgtgcggacgttttgcgcaagcgcaaagccgggaggaatacctggcgcatctcgtggaagcggccgaacgagatattgcctgggacccggcgcctatcgggcgctataacgtcgcgcccgggacaaaagttttactcctcaatgaacgcgatgagcaactccatctcgatgccgtttactggggctatgcgccaggatggtgggataaaccgccgctgattaatgcccgggttgagactgcagcctccagcaggatgttcaagccgctgtgggagcacggacgggcgatctgcttcgccgacggctggtttgagtggaaaaaggaaggaaataaaaagcagccatactttatccagcgtaaggatgaccagccaatttttatggccgcgattggtcggactccgttcgaacgtggggaccatgccgaaggattcttgatcgtgacggccgccgccgatcgcggtcttgtcgatattcatgaccgtcggccgttggtcctgacgcctgaagccgcccgcgaatggatgaggcaggatgtcaccggcgcggaatcggcggagattgccagcgacggagccgtttccgccgacgattttacctggcacccggtaacgcgggcggtcggcaatgtgaaaaatcaggggcccgaattacttgcccctctcagcccatga

SEQ ID NO: 214700 - DNA, 843 bp, Klebsiella pneumoniae
atgaatactttacaatcgactaactggcttcagtacggtataaaagacattaaacgcctcaaacacgccaatatgcacgatccattgattccattcgaaccggtgttttccccccagggacccactttactcgtcgcggtacgtcagtctgaggtaatacgggagactccacgccaccatcacagctgtgggcagttaatcggtgccatacgtgggctacttacggtcgatggcggtgattgtcgctgggtggtaccggcaacacatgccgtctggataccgccaggtgttccgcacggcctgcgctcgcacggtccatattcaggatggagtgtttatgtttctgccaaagcctgtggcgagctacctgataagccatctgttctctcaatgacaaatctgctgcgtgaagcgataacgcgagcggctgcatggcaaggtgtagagcttaatgcgtcccaaaaacgtttagctggcgttattcttgatgaaattggttccctccccagggttaatcttgggcttccaatgccgcaagatagccgattgctcagaatcgcgcaggcgctgtcagcaaacccggacgacgggcgcaggttggaagaatgggcagcctgggccggcatgtcatcacgcacgctcacgcgacgattccgagccgaaacgggttttagcttcaatgaatggcgacagcggatacgcttactcagggcgcttgagctactggctgccggcaagccagtgacggcgatagcgctggatctgggatatgacaatgtgagtgccttcatagccttgttccgtcggatgttcggcactactccagggcggtataaaatttaa

SEQ ID NO: 214701 - DNA, 387 bp, Klebsiella pneumoniae
atgattactattactagagtattggatgacattatcaaccaccaacagataccactggatcggatactcagtcgctattttagtcccggttatcggcagcgtactgataacaagtgggaaggattagatggctttgctcagcatgcgcgtagactccgggaaattatcgccttcgctaaaattgagttacatgacgaacttcgtaacgggaatctttatgccacaaggcatcgcgttctgtgcaccaggcgcagcggagaagaggtggacatggaagtttatatgttcgctgaaatagatgattccgggcgcttcattcgtatcgaagaagccacgttaatgcttaaagggagagagagcgatagagatttaggcagcgtgaggtaa

SEQ ID NO: 214702 - DNA, 2046 bp, Klebsiella pneumoniae
atgtccgaacgaaaccccttttttagcgtcagtacgttgccttaccaggcgccgccgttcgatgtgattgacgacagccactatcgcccggcgtttgatgagggcgtccggcagcagcgggccgaaattcgcgctattatcgacaatccgcagccggccagtttcgccaacacgctcgaggcgctggagcagagtggtcagctgctggcgcgggtgacgcgggtctttttcgccatggctggcgcccataccaatccttatattcaatcactggatgaacaattttccgccgaactcgccgagctggggaatgacatctggcttaatgcggccttgtttcagcgcgtgaacagcgtctacgagcagcgcgacgcgctggcgctggacagcgagtcctatcgtctcctgaccctgacgtggcaacgttttgttcacgccggggcgacgctggctcccgagcagcaggcggcgctgcgcgcactgaacaccgaagcggctacgctgcaaagtcagttccagcagcgactgctgggagcggcaaaaagcggcggcctggtggttgattaccggcatcaactggctggcctgagcgatgaggagatagcggcggcggctgacgcagcgcgtgaaagagggcttagcgaccgctggttgctgacgctgaccaataccacccagcagccgcagctgcttgcgctgcgcgaccggcaaacgcgggagaatctcttcgccgccggctggacccgcaatcagcagggcgatgagcatgatacgcgcgacctggtactgcggctggcggcgatccgcgcgcagcaggctgagctgttgggagccgctgattacgccagctgggcgctgaccgatcaaatggcggcttccccggcggaggcattgggctttatgcgtcagatcgcgccggcggcgcgggcgagggcggaacgtgagttggcggacatccagcaggtgatcgacaacgaaggcgggggttttcgcgcgacggcatgggactggctttactacagcgagcaggtgcggcgggctgcctatgccattgatgacgcgcagctcaaaccctattttgccctcgagcgggtgctgcaagacggcgtcttctggacggcctcgcagctctttggtctgcgctttgttgagcgcttcgatataccggtctatcacccggatgtgcgggtctgggagatcttcgatcacaacggcgaagggatggcgctgttttacggtgactactacgctcgtgactcaaagagcggcggcgcatggatggatgtgtttgtcgaacagtcgactctgcgcgcgcagcgcccggttatctacaatgtctgcaactacgtccgcccgcaggcagggcaaagcgcgctgcagtcgtgggatgaggtgatcaccctgtttcatgagttcggccataccctgcatgggctgttcgccagccagcgctacgccagtctctcggggaccaatacgccgcgcgattttgtcgaatttccttcgcagatcttcgaacactgggccagccagccgcaggtgtttgcccactacgcgaagcactaccagtccggggagccgatgccgcaggcgctacgcgacaatatgttgcgtgcggcaaccttcaataaagggtacgacatgagcgagctgttggctgctgcgttactcgatatgcggtggcatagcctgtcgacctcggcattaccggaggaggtggacgcgtttgagcagctggtgcttcgggaagagaacctggatctggcggcggtccccccgcgctatcgcagcagctatttctcccatatcttcggcggcggctatgcggcaggctattacgcctatctgtggacccagatgctggccgacgacggctatcaatggttcgtggagcagggcggtttgacccgtgagaacggtcagcgtttccgtgaggcgattttatcacgcgggaacagcactgatttagctgaactgtatcgccagtggcgcggacacgatccgcagattgagccgatgctgaaaaatcgcgggttgagtgcgtag

SEQ ID NO: 214703 - DNA, 750 bp, Klebsiella pneumoniae
atgattatcatggtcaccggcgccaccgccggttttggtgaaagtattactcgccgttttatcgctaacggtcataaagtgattgccaccggtcgtcgtgaagagcgcctgaagacgctgaaagacgagctgggcgataacctttatatcgcgcaacttgacgtccgcaaccgcgccgccattgagacgctgattgctgacctgccggccgagtggcaggctatcgatgtgctggtgaacaacgccggcctggcgcttggtctggagccggcgcaccgcgccagtgtggaagactgggaagatatgatcgacaccaataataaagggctggtgtacatgacccgcgccgtgctgccggggatggtggagcgcaatcgcggccatatcatcaatatcggctctacggcaggcagctggccttacgccggcggaaacgtctatggggcgaccaaagcctttgtccgtcagtttagcctcaatcttcgtaccgacctgcacggcaccgcggtgcgcgtgaccgacatcgagccgggtctggtgggcggcaccgagttttctaacgtccgctttaagggcgatgacgctaaagccgaaaaagcttacgaaaatacccaagcgctaacgccggaagatgtgaccgaggcggtctggtgggtcgccaccctgccgaaacatgtcaacatcaacaccctggagatgatgccggtgagtcagagctttgccggactcagcgttcaccgtcagggctaa

SEQ ID NO: 214704 - DNA, 687 bp, Klebsiella pneumoniae
atggccgcagaatcgcaactgaatccgacgcaacccgtcaatcagcaaatttatcgcatcctccgccgggatatcgtgcactgcctgatcccgcctggtacaccgctgtcagagaaagaagtctccgtgcgttttgcggtgtctcgtcagccggtgcgcgaagccttcattaagctggcggaaaacggacttatccagattcgtccccagcgcggtagctacgtcaataaaatctcattgtcgcaggtgcgtaatggttgcttcgtccgccaggcgattgagtgcgcggtggttcgccgtgccgccggcatgattaacgaagagcaactttatcagctggaacagaatcttcaccagcagcgtattgctgttgatcggcagcagttaaacgactttttcctgctcgatgatgaatttcaccagaagctgtcgattatcgccgactgtcagctggcctgggagacagtggaaaatattaaagccgccatcgatcgcgtccgctatatgagtctggaccatgtcacctctcctgagatgcttctgcgccagcatcatgagattttcaccgcgctggaaaaacgcgatgccgaggcggtagaaaaagccatgagtatccatttgcatgaaatcagcgaatccgtactgctgattcgccaggagaaccgcgactggtttagtgaagaataa

SEQ ID NO: 214705 - DNA, 432 bp, Klebsiella pneumoniae
atgtataaaaaaattttattgcctgttgatgtctttgaaatggatttaagcgataaagcggtgcgtcacgcggaatttctcgcttcggccgaaaatggcgagatcaccttgctcaacgttctgccgaacagcagccgttcgctattgcgcggttttacggcggatattcgtaagtttgaagcctatatgaaagaagagtcggagaaaaaaatgcgcgaggtggcgcgactgttcgccatccccatgacgcggatccatacccgcgtagtctttggcaacgtgcgtgacgaaattctggctatcagtaacaacgaagagttcgatgtcattgtgattggttcccgcaaaccggggatctccacccatctgctgggctccaacgccgagtcaattctgcgctacgccaaaacgccggtattggtcgttagataa

SEQ ID NO: 214706 - DNA, 1464 bp, Klebsiella pneumoniae
atggaaaacaccctcttaaccgctaacgccacgctgccgacctacgatcgcagcgcactgatcccccgtatcgttcatcttggttttggcgcgtttcatcgcgctcatcaggctgtgtatgccgatatactggccagcgagcacggcagcgactggggctacaccgaagttaatctgattggcggcgagcagcagatcgccgatctccagcagcaggatctgctgtataccgtcgccgaaatgtccgccgacgcctggaccgcgcgcgtggttggtgtggtgaagcaggcgctgcacgccggggttgatggtctcgaagcggtgctggcggcgatgtgtcagccacaggtggccattgtctccctgacgattactgagaaaggctattgccattcgccagccagcggcgaactgcagctcgatcacccgctgatcgccgccgatctgcataacccgcaccagccaaaatcggcggcgggggtagtggtggaggccttatctcgccgccgggcggccggcctgcctgcttttaccgtgatgtcctgcgataacatgccggaaaatggtcacgtgatgcgcaacgtcgtctgcgcctacgcccgggctttagacgaggatcttgccgcatggatagagcagaatgtcacctttccgtcgacgatggtggaccggattgtcccggcggtgactgccgaaaccctcgataaaattacccagctgaccggggtgcgcgacccggccggggtggcctgcgaacctttccgtcagtgggtgattgaggataactttgttgccggacgtccgcagtgggagaaagcgggagcggaactggtcgccgacgtggtgcctttcgaagagatgaagctgagaatgctcaatggtagccattcgttcctcgcttatctcggctatctggccggttatcagcatatcaacgactgtatgcaggacgataactaccgtcgcgcggcgctgtcgttgatgctggacgaacaggcaccaacgctgaaggtgcagggggtggatctgtcacgctatgccagtttgctgattgaccgttactgcaatccggcgctgaagcaccgcacctggcagatagccatggacggcagccagaagttgccccagcgcatgctggactccatacgctggcatctggtgcatcagcgtgattttacactgctggcgctgggcgtggcagggtggatgcgttacgttggcggcgttgacgatgcgggccagtcaatcgagatatgcgacccgttgttgccggttatccagcaagcggtggctgccagcgccgatggcgaagcgcgagtcaaagcgctgctgggtattgaggctattttcggcgtcgaactgccgcaggagtcacgctttgtcacggcggtgacccgcgcctacttagcgctgcagcggcagggggctaaagctaccgtcgccgcgtgggccgccgcgcaataa

SEQ ID NO: 214707 - DNA, 1284 bp, Klebsiella pneumoniae
atggctatcgagactcttgccgcccggaccggggcgacgccgttacgcatccgtcgggtgcagaagatcaccctgacgctgctgtttatcgccggtatcgtcaactttcttgaccgctcttcgctgagcgtcgccggggaggcgatacgcgccgacctgggccttagcgccaccgagttcggggtgctgctctccgccttttcgctctcctacggcttcgcgcaactgccctccggtattttgttggatcgcctggggccacggattgtgctgggcgccgggctgattttctggtccgcaatgcaggccctgaccgggatggtcaattcgttctcgcattttattctgctgcgcattggcctcgggatcggcgaagcgccgtttatgccagccggcgtgaaatcgatcaacgactggtatgcgcaaagagagcgcggcacggcggtgggaatattcaactcctcgacggtgctgggccaggctatcgccccgccggccctggtcatcatgcagttggcctggggttggcgaacgatgtttgtggtgattggtttagccgggatcgtggtcggcctgtgctggtatgtgggctaccgtaaccgtcggcagtttaccctgcaggaggaggagcagcagtatctggccagtgaggaggcggcccgcccggcgctgaagtttagcgaatggctggctctgtttaaacggcggactacctgggggatgatcctcggcttttccggtgtgaactacaccggctggctgtatatcgcctggttacccggctatttgcaggcgcagcaggggttaagcctggcccgtaccggctgggtggcggcgatcccgtttcttgccgcggcggtggggatgtgggtcaacggcctggtggtcgatgccctggcgcgcagaggctacgatcaggcgaaaacccgcaaaacggcgattgttatcggtctggtgctgtcggcgctgggcaccttgctggtggtgcaatcgtccacgccagcccaggcggtggcttttatctccatggcgctgttttgcgttcattttgccgggacgtccgcctgggggctggtgcaggtaatggtggcggagcataaagtggcttcggtggcggcgatccagaacttcggcagctttgtgtttgcctccttcgcgccgatcgtgaccggctgggtagtggatacgactcactctttcaatctggcgctggtgatcgccgccggggtgacctttgccggggcgctgtgctacttctttatcgtcaaaactcgcatcgattaa

SEQ ID NO: 214708 - DNA, 327 bp, Klebsiella pneumoniae
atgctcaaaacaacgctgctgttctttgctaccgctctgtgtgaaatcgtcggctgttatctaccgtggctatggctcaagcgcggggcaacgccgctgctgctgatccccaccgccctggcgctggcgctattcgtctggctcctgacgctccatccggccgccagcgggcgggtatatgccgcctacggtggggtgtacgtttgtaccgcattgctctggctgcgggtcgttgatggggtcaaattaacccattatgactgggcgggcgcggccatcgccctgtgcggcatgctaatcatcgtggcggggtggggacgggcctaa

SEQ ID NO: 214709 - DNA, 342 bp, Klebsiella pneumoniae; identical to SEQ ID NO: 137464

SEQ ID NO: 214710 - DNA, 561 bp, Klebsiella pneumoniae
atgaccgacgcgctacacgtcaaactccgcccgcttgagcgcgaagatttgcgcttcgtccaccagctcgataacaacgccagcgtcatgcgctactggtttgaagagccgtacgaggccttcgttgagctctccgatctgtacgacaaacatattcacgatcaaagcgagcgccgctttgtcatcgaatgcaatggcgataaagccggactggtggagctggttgaaatcaaccatgtgcaccgccgggccgagttccagatcatcatctcccccgacttccagggaaaaggtctcgccacccgcgccgcacgcctggcgatggactatggctttaccgtgctcaatctgtataagctgtatttaatcgttgataaagagaatgaaaaagcgatccatatttaccgtaagctcggctttatggtcgagggtgaactgatccatgagtttttcattaacggcgagtaccgcaacaccatccgcatgtgcctgttccagcaccagtatctggccgagcacaaaacgcccgggccgtccctgctgaagccgacggctcagtaa

SEQ ID NO: 214711 - DNA, 711 bp, Klebsiella pneumoniae
gtgaaaagattgtattggctgatcccggcagcgctgctgctgacggcatgcgaccgtaaaagcgccccggacgccttcaccccggagatggcgagtttttccaatgagtttgagtttgatcccctgcgcgggccggtgaaagattttagccagacgctgctggatgaacacgatgtggtggtcaagaaggtgagcgctcagctctccagggaagggtgtttcgatctgctgaccctggaagatgtggagaacaaaaccggcgccacgctgctgctggacgccaactattacgtcgacgggcgcacccacgagaagcggctgcgcctgcagggcaagtgtcagctggcggagatgcctgccgccggggtgagttgggagacggatgataacggttttattatcaacgcacgcggcaaagagaccaccgccacctaccgctatgacagcgatggctatccgctgggaaaaaccaccaccgccaaagaggagcgatttaccgtcgcctcaacgccgtcaaaggatccgcgtaagaaattggactataccgccatcagcaccttcaacgatcgcacgctgggcacggtgcgtcagacctgcgactacgacgatcacgacaatccgctgagctgtgagctgcaggtggtcgatgaaagcgtccagccgccgctgacccgccactacaccattaaaaaccgtatcgattattactga

SEQ ID NO: 214712 - DNA, 270 bp, Klebsiella pneumoniae
atgaaactatccctctgcaccggcgctgcgctactgctgtgctccacggccgtactggcggctcccgactcctgtgaacgggtcaaaagcgacatccagcagaagatcatcaacaatggcgtaccggaaaccgccttcagcctggccattgtgccaaacgatcaggcagaccagcccggggttcaggtggtcggtcattgcgccaacgacaccttcaaaatcacctatacgcgtaacagcgacagtcccgccgaaaacgatgctcagtaa

SEQ ID NO: 214713 - DNA, 180 bp, Klebsiella pneumoniae
atgtcgaatcaggaatctcccggcggcgtcagccgacgcgcgctactaaaatctacagccctcggctccctggcgctggccgccggcgggctgaccctgccctttacgctgcgccgcggcggcggtacaacaggctacaggcgacacaacccgcattgtctggggcgcctgctcggttaa

SEQ ID NO: 214714 - DNA, 231 bp, Klebsiella pneumoniae; identical to SEQ ID NO: 121662

SEQ ID NO: 214715 - DNA, 672 bp, Klebsiella pneumoniae; identical to SEQ ID NO: 121661

SEQ ID NO: 214716 - DNA, 972 bp, Klebsiella pneumoniae; identical to SEQ ID NO: 121660

SEQ ID NO: 214717 - DNA, 432 bp, Klebsiella pneumoniae; identical to SEQ ID NO: 121659

SEQ ID NO: 214718 - DNA, 1272 bp, Klebsiella pneumoniae
atgtttgccctggccgatgtgaacagcttctatgccagctgtgaacgtgttttccgcccggatttgaaaggaaagccgatagtcgtcctgagcaacaacgacgggaacgtaatcgctcgcagtgccgaggcgaagccctggatcaaaatggggattccgtggtttcagataaaaaacgaaaggtacccggaaaaaatatatgcattttcaagtaactatgaactttacgcctcgatgtcagcgcgcgtgatgaactgcctggaggaactggcacccagggtggaacagtattcaattgatgagatgttcctcgacctgaccggcgtggagcattgtatggagattgaggacttcggccggcagcttcgtcagcacgtgtatgactgtacccgcctgactattggcgtgggcgccggaccaacgaaaaccctcgcaaaatcagcccagtgggcctcaaaagagtggaaacagtttcgtggcgtactcgctctgaccaggggaaatccgcagagaacgcggaaactgctttcactgcagccagttgaagaaatatggggggtgggtaaccgtattgcacgcaagctgaatgtgctgggcataaagaccgcactcgatctggctctgacgaacccggccttcatccgcaaaaatttttctgtggtccttgagcgaacggtacgtgaactgaacggggaaagctgcctttcgcttgaggaagccccttcgactaaacagcaaattgtgtgcagccgcagttttggcgtgaagatcactgagttcgagtcgctccgccaggctatctgccagcacgcagagcgggcctctgaaaagctgcgtaaagagcgccagtattgccggcatatttccgttttcatcaaaacgtccccgttcgccgctaaagagccgtactacggcaacgtggccacggaaaaactgcttaccccgactcaggacaccagggacatcattgcagccgccacaacggctctggagcgtatctggagggatgagcaccggtatgccaaagccggagttatgttgaatgacttcaccggctccggcgtttcgcagctgcaactgttcgacgaatgcccgccacgccctcacagtgctgagctgatgaaggttctggacgggatcaaccactcagggctgggtaaagtatggttcgcagggcggggcattgccccggaatggcagatgaaacgggagatgctttctcctgcttatacgacacgatggtcagatattcctgaagcgaaactggcgtaa

SEQ ID NO: 214719 - DNA, 975 bp, Klebsiella pneumoniae
atgtcgaatgagagaagaaaaaccatcggcagacagttaaatactcaggcgtcaatggtcgagatgactgacaccgatagaagccaggtatttaccttaaaaaccggcaggaaggtaacgttcaggtttgttcggatacctgcagctgacgttgaaagtatgaccttcgtaaaccaggagaacaatggacgagatcaacttgctctaaccagggagtctctgaaatccattatccagacgattaagtttcagcagttcttcccctgtattggtattaagcaaggtgaaaagattgagatactggatggttcaagacggcgagcctcggcgatttatatccgcacaggccttgatgtcatggttaccgatgaacatttatcagctgatgaagctcgccaactggctaaagatatccagacagctaaagaacataaccttcgggaaataggcctgagactgatagctcttaaagagtccggattcaatcaaaaggaaattgctgaactggaggggttatctcaggctaaggtcaccaggtcgctgcaggcggcggcagtaccgcaagacttgattgctctgttcccggttcagtcggagttgtcatttagtgactataaaatgcttttagaagttaacgaaaaactcagtgaaaagggcttaacgcctgaagaactcattcagtctgtctcagatcggcataatgcaattttaagtgattgcgagcgaccagaagacgaacagaaagccagtatactgaagctgatttctcaggcatctcaggcattgatagcgccacctcccaaggaaaagtcagtgatttccccactctggacctttgaagaaaaggacaagttcgcgcgcaagcgtgtgaaagggcgcacgctgacttatgagtttagccgtatgtcaaaagtggttcaggatgaactggacaaggctatcaatgaggtccttgaaagaaatttgagtcaataa

SEQ ID NO: 214720 - DNA, 1206 bp, Klebsiella pneumoniae
atggacaatattgagcagttacggaaagtcgccacacgtgcaggtaagcttctgacatctttgagcgaaaatatacgccagcaaaaagaggaattgaaacttaccgagttctatcaggaatacagcaaagccgccctgtataagctgcctaaactcagtaaaggcagtgttgagtatgctgtggccgaaatggaagccggtggctacatttttaaaaagaaaccttccggcaatacgatgaaatacgcgatgacgattcagaatgtcatcgatctgtatttccatcgtaaagtgcccaagtacagggatcgcttcgataaagccttcacgatttttgtttgtaatcttaaaggcggtggttccaagacagtctctaccgcttcattatcacatgcttttcgagctcatcctcagcttctgttcgaagacctccgtattctggccatcgatttcgatccgcaggcatctttgacaatgttcctgagccatgagaattcagtgggcttggttgaaaatacggctgctcaggccatgctccagaacgtgtctcgtgaagaattactttccgattttatagtgccgtcgattattccgggtgttgatgtcattcccgcttccattgacgatgcattccttgctgaaggctggaaggggctgtgtgaagaacatctgccagggcaaaatattcatgcagtgcttaaagagaacattatcgacaagctccagcatgactacgactttattttccttgatagcggtcctcaccttgatgcattcctgaaaaactgtattggtgcggcagacctgatgttgaccccccttccaccggcgacggttgattttcattcttccctgaagtttgtggccagcctccctgccctcattgattcgatcgaaatggacgggcatacctgcaatctcatcggtaacgtcggcttcatgtccaaaatcctgaacaagtctgatcacaaaatttgtcatagccaggccaaagaggttttcggtgccgatatgctcgatatggttctgccgagactggatggtttcgaacgctgtggggagacttttgacaccgttatttcagcaaatcccgcaacctatgatggaagtacagaggcgctaaaaagcgcaaaatcagcagcggaggactttgcgaaggcagtatttgatcgcattgagttcattcgtactaacggaggtatgtga

SEQ ID NO: 214721 - DNA, 405 bp, Klebsiella pneumoniae; identical to SEQ ID NO: 121274

SEQ ID NO: 214722 - DNA, 348 bp, Klebsiella pneumoniae; identical to SEQ ID NO: 16878

SEQ ID NO: 214723 - DNA, 756 bp, Klebsiella pneumoniae
atggcggaaatagcggttataaaccacaaaaaacgtaaaaatagcccgcggattgtccagtcaaatgagctgactgaggcggcatatagtctctcccgggatcaaaaacgtatgctgtatctgttcgttgaccagatcaggaaatccgatggttcgctgcaggaacatgacggcatctgcgaaattcatgttgctaaatacgctgaaacattcgggctgacctccgctgaagccagtaaggatatacgacaggctttgaaaggttttgcgggtaaggaagtggttttttatcgccctgaagaggatgacggcgatgaaaaagggtatgaatcctttccctggtttatcaaacgtgcccacagtccatccagagggctttacagcgtacatatcaacccctatctcattccctttttcatcgggctacagaaccggtttacgcagttccggctcagtgaaacaaaagagattaccaatccgtatgccatgcgtttatacgaatccctgtgtcagtaccgtaaacctgatggctcaggtgtcgtgtccctgaaaatcgactggatcatggagcgctaccagctacctcaaagttaccagcgtatgccggactttcgccgccgtttcctgcaggcaagtgttgatgagatcaacagccggacaccaatgcgcctctcttacatcgagaaaaagaaaggccgccagacaactcatatcgtattctctttccgtgatatcacctccctgacaacggaatag

SEQ ID NO: 214724 - DNA, 129 bp, Klebsiella pneumoniae; identical to SEQ ID NO: 121658

SEQ ID NO: 214725 - DNA, 786 bp, Klebsiella pneumoniae; identical to SEQ ID NO: 121657

SEQ ID NO: 214726 - DNA, 639 bp, Klebsiella pneumoniae; identical to SEQ ID NO: 121656

SEQ ID NO: 214727 - DNA, 231 bp, Klebsiella pneumoniae; identical to SEQ ID NO: 145440

SEQ ID NO: 214728 - DNA, 402 bp, Klebsiella pneumoniae
atgctcgacacctgtatctgctcgttcatcatgcgcgagcagccggaagccgtcctgaagcgcctggagcaggcggtgctgcgcggccagcgcatcgttgtctcggccatcacttattctgaaatgcgcttcggggccaccggcccgaaggcctccccgcgccacgtcgagctggtcgacgcgttctgcgcccgcctcgatgccatcctgccctgggatcgcgctgcggtggacgccaccacggagattaaggtggcgctgcgaatggccgggacgccgatcggcccgaacgacacggccattgccgggcacgccatcgccgccggtgccgtgctggtgacgaataatacgcgggaatttgagcgggtaccgggtcttgtgctggaagactgggtaagataa

SEQ ID NO: 214729 - DNA, 237 bp, Klebsiella pneumoniae; identical to SEQ ID NO: 95250

SEQ ID NO: 214730 - DNA, 255 bp, Klebsiella pneumoniae
ttgttgaaaagcctaaatatgcacagtagcctgagagaaacctatctcctgaagttcaggaagtgcagcacgacagaaactctcgataaagtttttgaacgtatcctagataaattaaatgatgaaggaggagatataaataagataaccagcttgaatggagcgtatgatcaccgcagagctgagatctacatgaaaaaaatctatgacaaaatacctgcctctgtgtggcatctcatcccggatgagatctga

SEQ ID NO: 214731 - DNA, 1062 bp, Klebsiella pneumoniae
atgcgacgtaattcacaaaaatggataccatttggattcgatacggtttcaaataaaattgttgatatcgccagcgttgagaatggcctttcttgcaactgtgtctgtctcatttgtggaacatccttgattgcaaaacaaggtaaaaaccaaaaatggcattttagccacagcacagaagtaaaaggggtttgtagtgagctcacactacaacatataaaaaaatacataaaggttaaaatacaggaaaaaaaataccttgctcttcctcatctactgcaaggtaaggagaaagggatcgttaacctcaaaaatctcgctggtggtgggattgtttgtggccttaatgctgacctcataggattatgtaacgatacgacaatcgggatattcgttaatgatacgtcggaggatatccagccaaatccagaccttttagctcaaacaggccagctggcgctagtggagatcgatgccgttcggattgaaagtatcatcactccctatcgtgagaacggggaaggcataaagatgatggatgcgatagaaaagctacttttcacctcagatgaagccaagcggtggatctaccatcccttaatgcagacagcacaaccacatactttacatcagtacaaacgccacctgaatgccagcggcaaccagctgctatctatgattccggtagatctacccatgaatatgaattcgttgcctctggcacctgcacagcaatggcaacatttacgatggacaatagaaatactcgctaaacttacccgggcggatataccttcagggagtaccgtttttgatgaactggtatcttatgcaccgaggatgctggattcttgggaatctataaacgtacccgcgtatgaacgttggtacgattattacatcagtaaaaggggagagggagtactgaatgaggcggagcaggaatacattagcttcatagttaaaatcgcgaactggaacgtgtctatacataacttaccagagtttgatcgcgagagagctttccatgattggtttctcactcatgatcccaataagtga

SEQ ID NO: 214732 - DNA, 900 bp, Klebsiella pneumoniae
atgtctaacaaaatcaatgagtcatacctaaatgtagaagaaataaatcagactactggtgaagttatcacactttcttccacatcggagaccagtgtacagacagttcctctgatgcgtttgggggtctttgtacctacattaaaatcgacgaacaaagcgatcgcgaagaaaagcaatgtcggatcaaacatcaacgcgtcagacgatcttaggcatctggagctagccaaatccgaagggtttgaaaggattaccatttcaggtccaaggctagacatggatacggatttcaaggtttggacaggaatcatatcggtactgaccgataatgaactcgagtctaacgaggatgggactatctcgatccgatttactgagtttgctatgcgatgtggtttttctcgtggacgtctgaaggctgaatttcgggaaaaaatcaaagattcgctcaggaaactgatgtctaatgttgttgaattctccaaggacagaggcacaaacattgaagtcactaaatttgttcagctcattggtgagtcaaccgtggacattggtaatgacaaagttatcctcactccgtcgaaaacgcttaaggatctgtatgttggtgaatacaagatcctacttaagctgagagcccttaaagcccttgcaaggaaagagtcagcccaggccctttatacgttcattgaggctctgccgcctaatccgatccctgtcagcattgagaggttcaggaagcgtttgtccctcacttccagacctgctcttcagaattcaacggtaagaaaagcacttaagcaactggaggacattggataccttgaataccaggagcttaaggaaggcaacaagatagcgtttcaaatcatcaagagaaatccctccctgaagtag

SEQ ID NO: 214733 - DNA, 483 bp, Klebsiella pneumoniae
gtgagagctgaaacgaaagaagctatgcggatgtttttggggggacgttgctacacggctaaacaactcgagaaggactatctctctgaagtggcaggttacagcgacgaccgctgggaagcgccgcaaagagctgcccggctggcggcagcggtaaaacgctacaaaacctctgagatgctgcgttttatttttgccaccatcgcgtatgatcccgacccggatctgaccccgcttgccgtgaggcggctgtgtcaggccttgttcggcagaaccggtagccagtggcttatagtggaaattttcggggtgaagggacggcagcaccgcagcgatgacagcactccggaggccgttgaaaaaatggcaaccagatatcgtcacgccgcagggctgcactgggcggcaactctggcggaaattgagcgggtaaagcgcaactatcagacccaggttaaggcatccaggaagggagaagggtaa

SEQ ID NO: 214734 - DNA, 315 bp, Klebsiella pneumoniae; identical to SEQ ID NO: 161831

SEQ ID NO: 214735 - DNA, 213 bp, Klebsiella pneumoniae
atgagcatcgaagcgaagcagtttcttaccggcagcggcagaagagtactgacaaatgatggcagacagggtatggggggagttgctggtgtaggctcttcaaccgagaaaatgcagggctacgtcgctgaagctgtttttgaaaactgcggccaactggataaccaacagctcgatgacattatcagctggatacaactttataagtcctga

SEQ ID NO: 214736 - DNA, 129 bp, Klebsiella pneumoniae
atgaaacctgacgttcgtgaagctctgattagtatccgacccaaaaaatcacagcgtgatctgatcgacatggccgcaagcctggtctcaaaatcactgactgattttatgattgcttgtcagttttaa

SEQ ID NO: 214737 - DNA, 405 bp, Klebsiella pneumoniae
atgacaattttagttacactacaggctcagctcattgtgggagaagagcaggtgataaaaagcctggcaccggaggggatgctggcggccgtatttgaagacgacggccggaccgggtatttctatgcgctcgatgagtcccttgaaggaaacccgattcttgatgcagtgcatatctacaatgtcgaggatatatcagacgcccacattccttctgatgttaaaatcggctggtctgaagacagtcagaagtgcgtgctccttatcaacggatatccgcatgcagtgttcgatttcgtggggaaaaatgggtactgcagaagcggatacccacccccgattaacaaggtttggtctgtgtccggccatgaatggagcgattcggtggatgactttttccggtga

SEQ ID NO: 214738 - DNA, 834 bp, Klebsiella pneumoniae
atgaagctttttgattatctgaagatggagtttcctggccttacgcctgaagataccaaagtccaccttgcacaaattaatgattataaagaggatccgttggttaaattccgtgcagagacttttgatgaatggcagtgctggcagaagcggctggagtttaaccgaagatatgtcgtttctctgattaggatcccggggacggaaacctggctatttgcgggagcatttcagcagacaggcaatgcgggaaagaaagcctatcctggtcgtgaggaactgtattatcaatacctccttgagaaaattcctgagactgaagaatacgcaggaaggatgtatatcagctttaaaaatacggcccgcaacttcattcgcctcggtgaaagtattcagagcgaactggttatcagctcaatcaccccggtgcgtctgaccttcggcgagtttcccggctaccgcaacgttgtgctggaccggaacagcatcggcgctatcctcagacttaatctccaatcctggcgcaccgcgctttccgtggttaaaggcatatatgtattaaccgatcgggacggtggaaaactttacgttggaaaagccgatggaatcgatgggatatggggccgatgggaatattattttggttccggacatggcggcaatgtagggcttaaggaagctttcggcacaggcgatgaaaatcgactgcagaatattactttctcgatccttgaagtcatggatcttaatgccgaaaaaggtgaaattgaccgtcgcgaaactcactggaaacaaatactgctctcgcgggagttcggctataaccgaaactaa

SEQ ID NO: 214739 - DNA, 237 bp, Klebsiella pneumoniae
atgggactccagttaattgtaaaagcagattatcagaagatagagaaagagctgggggatctgatatcagaatgcgaagttttccctgtggcagaaggcctttttggtctcgcaatttctgagcacaccctttcatctcagggggaagatgccgtgctaagcaaactcgaacgactgaagcgttttgacctctggcagggttcctggcaaacaggcagacgacgctggctctggtga

SEQ ID NO: 214740 - DNA, 261 bp, Klebsiella pneumoniae
gtgtttacaccagaatttttaaatgaagaacgaggcgagtttcttctggttgctaaccactgcctggaatcccgcgaatctatacaactgagtattgcttttaatcttgccagaatctcttacgggctgtcacacctcccgccacacattcgaagctgtagggttgtctatgatatcaggggccaatcagtctctgacgcggtcctgacccgggttagccaggcgcttcagcaggtagccattgtggagtttacacgctga

SEQ ID NO: 214741 - DNA, 729 bp, Klebsiella pneumoniae
gtggcaaagtttttttttagcttaaggttacaggaagcaatctcttcaatacctgtcatgaagatgcttgttgagcaggcagaagcgaatatatcccgtgcactaattgatgctgataagccagaagccgttgagtctggggaatttccggatgaacaacatcatgaagatggtcgaattacaacgtttccaagtacttactattcatgcggttcgtgctttggctatgatgaagatgaagttaggtctgaatacaaacatctgctcgcgcaactgacccgccgctccgtatttcttaccatttttggtctgttcgaacaccgtatggttgattgcctcgcactaatggacgacctttcaagcaagaccacagacaaaacgcgcaagaccattgaagattgccacaagcgtctcaaacggaacttcggcggtaaaagcatcaaggatgtcgatcacctggctgttatccgaaacatcatggctcatagcgatggtgttgcagaagattataagactctttcctgtaaaaaaacaaaaaaaactgaatatgaaaaacgtctcctgcgtgctattcctcgtgcgatggctgagaacgccggtgtgtcaattaacatgtttaatgacatacttatggatgatcggtttctgatgtatgccgtcggtgaatttgagcgctatattaatgaactgaacactgcagttcgcacttatcaaagcaggttgacctga

SEQ ID NO: 214742 - DNA, 1098 bp, Klebsiella pneumoniae
ttgggaagaaatgacctgcttattcgcaccttccttaactatctgaaggtctgcatccttctaacgcgtgcagtcagacgaatgcatgctgcgggcctgtgtcatagtgacctgagttataaaaatgtgctgatagatccggaactaggccacgcatgcattattgatgttgatgggctggtggttccgggaaaatatcctccagacgtggttggtacacctgattttattgccccggaagtggtgaagacaagccatctccccaaagacgatccccgccgcgtattgccgagtatcgctaccgaccggcatgcactttcggtactcatttacatgtatcttcttttccgccacccgttacggggaggaaaaattcacgatatcgatgatgaggtcagggatgaggcgctttccatgggagagcgggcactttttatcgaacacccgactgacagaagcaatgcagttaaagttaatcaggtctcatcgttttcgctcccgtgggcagatcctcagaaaatcccgtacaccattatggggccctacctgaaacctctcttcgaccgggcttttattgacgggttgcatgatccgtcgaagcgcccgacagccgatgaatgggagagcgccctggtaaaaaccgtcgatctcatccagccatgccagaacaagaattgtgaccagaaatggtacgttttcaatggcaagaccaaacccatttgtccctattgcggtacaccgtacaaaggcaaactccccatcctgaatctgtattcgtcgagaaaggctggaactttcaggccagatgatcaccggcttatggtgtggagcggtcagtcattatatgcatggcacgtcaaccgactgattgctcctaacgaacgaaccaccgatgagcagaagaaaagggttggttatttcgtcttccataatgaccagtggtggctggttaacgaggggcttagcgggctcatatcacttcccgatcggaaaactgtcggcattggtgaaaagttgctgctggaggacaacacccagttcatcctgtcttcagaggatggtgggcgattggtggtggttcagcttttgaataattag

SEQ ID NO: 214743 - DNA, 675 bp, Klebsiella pneumoniae
atgatgatctcatatcaggaacttgttcgcaccttccctaactcagtgatccacctggagccaggcgaaacattacccggctataccaatctgaaacccgtacctgataagtatttcgatgagttaaaggcactcataaataaactcaatactcaatccggtaatatttacctcaagttaaaacagatgtacgcctttttggatcgttttaacaaagaatttgtgagcacgtttacctcctgtcaaaaggggtgctcttcgtgctgtaaaatggatgttcatttaaccgcgcttgaggcaacacatattgcacaagcaagtaaacttactgccagagacaacccgcttacgaccgggcatgagtcaaaatgtccgtttttgtctgagaagggaacatgctcaatctacaattaccgcccgctgttatgcaggacatatcatgtactcactccgccggagatgtgtaatgacctggatgcacaagtcatgcagtatggttctcaaagcgcgaacatgggaaatcacatctacaaaacaatagcagagtggatctattttcagacgtatcactgcactggtaagttagaaaccaaagatatcagagactacttcccttatccccgcgaagatatccaaagatttcttcaccataaccccccgcgccctttttgctaa

SEQ ID NO: 214744 - DNA, 456 bp, Klebsiella pneumoniae; identical to SEQ ID NO: 153778

SEQ ID NO: 214745 - DNA, 2328 bp, Klebsiella pneumoniae
atgagactttttattgcagaaaaaccgtctttagcaaaggctatttttgaaggactgggcggaaatcccaatacagaaaagaaaaacggctattttgaacacggttctgatgtcgttacctggtgttatggtcatatgctggagctttacgacccacaggattatgacgacaaatattccaactggcgttatagtgatttacccattaaagcggtttatccgccaaaatataaaatcaagcctgaatcagaagcacagacccgcattattttgtctcttatcgataaagccgacagcatcgttcattcaggcgaccccgatgatgaaggatgtttgctggttgatgagattctgggttatgccggaaacaagaaacccgtccagcgactgcttgttgccgacctcaaccttgcgccagtgcaaaaatcactgtcgaatttacaacctaacgataaatttcgcggtatgacgttaagcgccctggcgcgttccctgtgcgatcagggttttggctataacatgacgcggggatgtacattaaaaggccgtgagaagggctatgacggcgttctgaacgttggccgggtacaaagtgccgttcttggtctggtgaacatgcgcacgctggcgaaccagaatcacacagaaagcttttattacgatgtattcgccagtctgtcgatgaacgggcatcagattaaggcgaaatatcagacaacagacgacgatcagatagacgagaaaaaacgcctgatctccgaagctcaggccgcgcatattgccggacgtgttacgggtaaggatgctattgttactatcgcgacgacaaagccggaaaatagcaagcctccgcttccgcttaacctttccacgcttcagcagctctgcgcaaagcgatttggttattctgcaaaagatacgctcgatgtgatgcaggggctgtatgaaactcacaagcttctgacctatccacgttctgacaatcgctatctttcagatgagcattattaccaggccggagatattgccactgctatagcggccaccgtacccgaactggcgtctgcgatcgtagatatggataaaggccagaaacacaaagcctttaatgccagtaagattgaggcgcaccacgccatcatcccgacgacaaaaagcggagccggtattcagcttaatgaaaaagagcggaacgtttataacctggtgtccgtctactttatcgggctgttctacccggatgcgatccgcaacaagacgaaaatccactttgatattaagggggatacctttacggccacacagagcgttctggtacaaaagggctgggaagcgctgggtaaggatagtgatgacgaggacgaaaccgaagatgccggaacggacggttttgacctttcattgctgaaatttaatgacagcggcctgtgtgaatcggcagacgtggacaagaaaaagactacaccacctcgctatttcacagagtcaacgttactggccgccatgacgagtgcggcaaaattcattgatgatccggctctcagaaaggcgctggaagcgaaagacgagggcagcagtgatcgtggcagtatcggaacggaagccacccgcgcgggtattcttgagaaactggcggcaaataccgggcttatctccatcgaaaaagaaaaggggtattcggagctggtatggaaaaccacaaaacaaggccaggagttttgcgctgcactgcctcctgaaatcactaaaccggatatctccgctctgtgggctgaaaagcagtctcagatcaaagccggagagctgacagttgaggagtttattaaggaaaatgatgagtacgtccaggggttaatcgacgagctggacaggaacggaatttcgatttcttcaaatgccacgccctgcccggtttgtaacaacggtttcctgcgtaagcgtaaggggcaaaatggctttttctggggatgctcctgctaccctgaatgcaagacaacattcccggacaaagacggcaaaccggatatggaagcaaaatccagatcagaaggttccatgtcccggctcgaagccccctgcccttcatgcagtaaagaaattattatccggcctaaaggctttttctgttccgggtgcgagtttaaaatctggtctgaagtgtcaggaaaaaaactgacacaaaatcaggttgagacattaatcaaaaaaggtaaaaccggagagattaaaggctttaccagtaataaaaccgggaaaaagtttgacgctgcaattgttttgcaggataaaactacgggtaaacttgggtttcagttcagtaaaaaataa

SEQ ID NO: 214746 - DNA, 1263 bp, Klebsiella pneumoniae; identical to SEQ ID NO: 153777

SEQ ID NO: 214747 - DNA, 495 bp, Klebsiella pneumoniae; identical to SEQ ID NO: 153776

SEQ ID NO: 214748 - DNA, 1836 bp, Klebsiella pneumoniae
atgtctctgaaactacccgataaaggccagtgggcttttatcggtctggttatgtgtcttgtgacgtattatactggctcagttgctgtttacttcctgaacggaaaaacgccgctttatatatggaagaattttgattccatgctgctgtggcggataataacagagagtaatatacggacagatatcaggttaaccgcaatcccctctcttttatcaggtatggtttcgtctctcattgtgcctgtttttattatctggcaactgaataaaacggatgttgctctttatggtgacgcgaagtttgccagtgataatgatttaagaaaatcgaaacttctgaaatgggagaaagaaaacgatactgatattcttgtaggtgcatataaaggtaaatacctgtggtataccgcaccagattttgtatcacttggcgcaggaacccgcgcaggtaaaggggctgcaataggtattccaaacctgctggtcaggaaacattccctgattgcattagatccaaaacaggaactgtggaaaatcaccagtaaggtacgtgaaaaactgctgggtaataaggtctatcttcttgaccctttcaacagtaaaacgcatcagtttaacccgcttttctatattgatttaaaagaagagagcggggctaaagacctgctgaagctgattgagatcctgttcccgtcttacggtctgaccggagcggaagcacactttaataacctcgcggggcagtactggacggggctggcaaaattgcttcatttctttattaactacgacccctcctggcttggtgagttcgggcttaaacctgttttctcaattggttctgtagtcgatttgtacagcaacatcgaccgggagctgatactcagtaagcgagaagacctggagggaacaaaaggacttgatgaaaacgcgctgtatcatctgcgcgatgccctgaccaaaatcagggagtatcacgaaaccgaagacgaacaacgttcgagtattgatggttcgtttcgtaagaaaatgagtctgttttatcttccgactgttcgcaaatgtacagacggcaatgatttcgaccttcgccagttgcgccgggaagatatcactgtttatgttggcgttaatgctgaagatatgtccctggcctatgacttcctcaacctgttctttaacttcgttgtggaagtcacgttacgagaaaaccctgactttgacccgacactgaaacatgactgtctgatgttcctggatgagtttccgtctattggttacatgccaatcattaaaaaaggttcgggttatattgccgggtttaaactcaaacttctgacgatttaccagaatatcagtcagcttaatgaaatctatggtgttgaaggtgccaaaacgctgatgagtgcgcatccctgccggattatctacgctgtcagtgaagaagatgacgctaaaaagatttcggaaaagctgggctatatcaccaccaaatcgacaggttcaagcaagacaagcggacgctcaacgtcgaaaagcagttcagaaagtgaggcgcagcgcgcccttgtgctcccgcaggagctgggaacgctggattttaaagaagaatttatcattcttaaaggtgaaaacccggttaaagctgagaaagccctctacttcctcgacccgtattttatggacaggctgatgatggtaagccccaaacttaccgagttaaccgcctctctgaataagactaaaaaagtattgggtgttaaagggcttaaatatccttctaaagaaaaaatgctctccgtcggtgagctggagtcagaggttttactatga

SEQ ID NO: 214749 - DNA, 1035 bp, Klebsiella pneumoniae
atgaaggatgcagagaacagacatattgtttatgaaataatagatgaatacttccaccactggcttaatgaagtcgatggtttaactgaaatcgcggtaaatcggcctgatgaactgtttgttaaagtgagtgggaaatggcagcagcatgaattaaaaatggattttaaagattgtatgtcatttgcaggggcaatttctgattatcatgatggtgggtcggttacgccagaatatcccttacgttctgttacgctccccggaggggagcgtgtacaaatagttattcccccggcaacggaacgggaaacggtgtctattacaatccgtaagccgtccagtgtgtttatcgaccatgatacctttgttaaacaagggttttactcaaggctaaatcaaggggggaaattcagggataaagaagatgaattatcttcaatgtttaaagataattgttttgaacaatttgtccctgaatgcctggttaagggtaaaacgatggtattttgtgccggaacgggggcgggtaaaaccacctttgcaaatgcctgtcttcagtacataccccatcatttacgatgtatttcaattgaagatacagatgaagcaaagttcaggttccacaaaaatcatgtgaaattgtattacccgtcagaaggggaaagtagcactgtcagttccgcttctcttttacgttctggttttcgtatgaacccggacagaatcctcatgactgaggttcgcggcgcggaagcctgggattttctcaaaggctcaagttccggccatgcagggaaccttacaaccgtccatgagagcacccctgaagatgctgtgcttggactggttcaacggtgctatatgaaccctgaatgtcagaatttgccttataacattatattgcggagggtgttaagcaacgtcgatgtgattatgagtattaagtacatcgatgaggaagataaccgatttgcatcgggtatttactatcgtgatattcattttcaggaatactttgaaaagctgaaggagtga

SEQ ID NO: 214750 - DNA, 1215 bp, Klebsiella pneumoniae; identical to SEQ ID NO: 153774

SEQ ID NO: 214751 - DNA, 930 bp, Klebsiella pneumoniae; identical to SEQ ID NO: 153773

SEQ ID NO: 214752 - DNA, 729 bp, Klebsiella pneumoniae
atggggtttaaactctcaggattaaaacttcccggttttaacaagaaaaaagaagtaacagactcttcaactacttttgaagagaaaaatgtattgatgcaggagaaaatgaaccgcatttataaattcggtggtattgcaggaattgccgtaggtgtgttgtctctgctggcactgaatggagcgctaccgttaaagagtacggttgtcgaagcttatcttattaatggtgtcactggcgttgctgaaagactgacttctgttaaaaaagaaaacctctctgaaaatgaagcgctggcgaaatacttcattactcagtatgtgaagcgtcgtgaagggtataactatttcagtctccagcatgattatgattatgttctgttatacagcgctgagaatgtggcgacggattacaacgctttaatcaacggcaaccagtcaccaaaggttatttataataaagcggaaaaaaccgcatctgttcaggataatccgtccgtgattatcagtccgtcatcccggcgcgatgataaggatatgggagcatatatccggtttaaattaaccattcgaaatgtcgcgacaggccaggatgattatgaatactggaacgtccggttgacctaccgtattgaaccacaggtcgaaatggcatcgggtgaccgaaacaataacccgcttaaattcgttgtaacgagctatgtacgcgataaagaagtgaaagggtga

SEQ ID NO: 214753 - DNA, 1056 bp, Klebsiella pneumoniae
atggcaacttctaggtatttccaggccgctcatgacgttattgttaaaactcttgaccagtctttgactggtcagttagataacttttcttcaatagcgtctcagttgggtaagtatggtatttccatttatatattgtggtatgcttataccacaatagttgggaagcaaaaaaccgcagtgcaggattttttatggaatctatgtcgattctggttaattcttgtttttgtcaaaaatatgggggggtggttagatagtgcaactcaggccattgatgggctgaaggaaacatttgcaggaggtgatccttggaaatgggttgacgagctttgggagaaagttcagcaggtagctgcatatcttatgtccaaagatacttcgaagtatgtgaaaacagatggggcaatcgcatctttattaacatatgctggagggataattgcattattgctaacttcaatagtttatctcgccgccgaagttactattaagatacttactattaccgcgccgttgtttattatttgtctttcatttggttttttaaggcagatgtttaatagctggcttcagttaatatttagctcatgcttcatattcttgttttgtggactggcaattaaagcgggaatgacgttccttaatggcattctgacaatctcgatagctaacgcagatgaattaaatctgatatcaacaggtgctcaggccggggttgcaggtgcatttatggcctggattatctggcaagccaaaacctatgcttcccagctcgcaggggtaggtgttgaaggcgcgatgcaaggggcagccgcaatggggattggtgctggcgtgttcggcgcttcccgtatggggcgtaatctgcttggtatgggtaaaaatgcagggattggcgcatggaaaggcgttcgccgtcaggatggagggttcaaccagtctcctggtgtatccggtaagttggggaatctgaccgggcagggcgttaatattggcgctaagaggcttcgccaggctgcgatagatgcggcgaaaaagaaatatggaggttaa

SEQ ID NO: 214754 - DNA, 933 bp, Klebsiella pneumoniae
atggatctggaggattttggcaggcagctgcgtgggcatgttctcagtggaaccggactgacgatcggtgtcggcttcggcgccacaaaaacactggccaaatcggcgcagtgggcgtcaaaggaatggccacaattcaggggggtactggcgctgtcgcccgaaaatccacgcagaacggcaaaattactcagcctgcagccggtggaagaaatctggggcgtggggaaccggatagcgaaaaagctgcacgttatggggatcaccaccgccctgcagctgtcgctgacgaaccccacatttatccggaaaaacttcaacgtagtgctggagcgcacggtacgtgagctgaacggcgagagttgcatttcactggaggaagcgccgccgccgaaacagcagattgtctgcagtcgtagcttcgggcagcggatcaccacctacgaagaaatgcgccaggccgtctgccagtatgccgagcgcgcgtcggaaaagttgcgcggtgagcgacagtactgccggcatatcagcaccttcatcaagacatccccttttgcggttaatgagccgtattacggtaacgtggccacggaaaaactgaacacccctacccgtgacacccgggacattatcgcggcagcggtcaggtctctggacaggatctggctcgatggccaccgctacgcaaaagcggggataatgctcaatgatttcagtccgaacggcgtcgcgcagctgaatctgttcgatgacgtgcagccacggccgcacagcgatgcgctgatgaaggtactcgacggcattaatcattccggactcgggaaagtctggtttgccggacggggtattgcgccggactggcagatgaaacgggagatgctgtcaccggcatataccacccgctggaaggagctgccggttgcccgtttctga

SEQ ID NO: 214755 - DNA, 858 bp, Klebsiella pneumoniae; identical to SEQ ID NO: 102269

SEQ ID NO: 214756 - DNA, 285 bp, Klebsiella pneumoniae; identical to SEQ ID NO: 102270

SEQ ID NO: 214757 - DNA, 1608 bp, Klebsiella pneumoniae
atgcggacacgctttagtctacggttatctccctttacttcatttcctttctcacaggccagaaaacataactggcctgaatattctctctgggaccacggtcccacctgcatcgtcggtcaggttatctgcctgggaccacggtctcacctgcgtcatcggtcaggttatctgcctgggaccacggtcccacctgcgtcgtcggtcaggttatctgtctgggaccacggtcccacctgcgtcatctgtcaggtaatctgtctgggaccacggtcccacctgcgtcatcggtcaggttatctgactgggaccacgggcccacctgcgtcgtcggtcaggttatctgcctgggaccacggtcccacctgcgtcatcggtcagcttatctgtctgggaccacggtctcacctgcgtcatcggtcagcttatctgtctgggaccacggtcccacctgcgtcgtcggtcaggttatctgtctgggaccacggtcccacctgcgtcatctgtcaggtaatctgtctgggaccacggtcccacctgcgtcatctgtcaggtaatctgtctgggaccacggtcccacctgcgtcatctgtcaggttatctgtctgggaccacggtcccacctgcgtcatctgtcaggtaatctgtctgggaccacggtcccacctgcgtcatctgtcaggtaatctgtctgggaccacggtcccacctgcgtcatcggtcaggttatctgactgggaccacgggcccacctgcgtcgtcggtcaggttatctgcctgggaccacggtcccacctgcgtcatcggtcagcttatctgtctgggaccacggtctcacctgcgtcatcggtcagcttatctgtctgggaccacggtcccacctgcgtcgtcggtcaggttatctgtctgggaccacggtcccacctgcgtcatctgtcaggtaatctgtctgggaccacggtcccacctgcgtcatcggtcaggttatctgactgggaccacgggcccacctgcgtcgtcggtcaggttatctgcctgggaccacggtcccacctgcgtcatcggtcagcttatctgtctgggaccacggtctcacctgcgtcatcggtcagcttatctgtctgggaccacggtcccacctgcgtcgtcggtcaggttatctgtctgggaccacggtcccacctgcgtcatcggtcaggtaatctgcctgggaccacggtcccacctgtatcgccggtcaggttatctccctgggaccacggtcccacctgcgtcatcggtcaggttatctgcctgggaccatggtcccacctgcgtcgtcggtcagcttatctgcctgggaccacggtcccacctgcgtcatctgtcagcttatctgcctgggaccacggtcccacctgcatcgtcggcacattattagttagggataacggttcaatcaatgcctgtcacgaacaggtattggcttgtcgccagcaacccgatgagcggagtaatcacgcagcagggcggctattacaggcgatggtgaaagctctattgggatctgaacgaagcatgttgagtgaaatttgcaaaatttcgcagagtatgcagcttaatctttaa

SEQ ID NO: 214758 - DNA, 972 bp, Klebsiella pneumoniae
atgaagcgtgcccctgtcattccaaggcataccacacatactcaatcgactgaagatacttcatcaccggcgccggccgcgccgatggtggattcattaattgcgcgcgtgggtgctatggcccgcggtaatgctatctctcttccggtatgtggacgggaagtaaaatttacccttgaggtgctccggggagactctgttgagagcgcctcacgcgtatggtcaggaaatgagcgtgatcaggaactacttaccgaagatgctctggatgatctcataccttcatttttactgaccggtcagcagactccagctttcggccgccgggtttctgatgtcatagaaattgcagacggcagccgtcgccgtaaagccgcaatcctgacggaaagtgattatcgcgttctggttggtgaactggacgatgagcagatggctgcattgtcccggctgggtaacgattatcggccgacgagtgcttatgaacgtggcctgcgttatacaagccggctgcagaatgagtttgcaggaaatatttctgcgcttgccgatgcggaaaacatttctcgtaagatcattacccgctgtattaatacggccaaactgcctaaatccgttgttgccctgtttgcacatcctggagaactgtctgcccggtcaggtgaagcccttcagaaggcttttgcagataaagaagaattactgaagcagcaggctgagactctccacgatcagaagaaagcgggactaatctttgaagctgaagaggtcattagtcttttaacatccgtactgaaacaatctcccgcatcaagagttaatctgagctcacgtcatcagtttgctccaggggcaacagcattgtataagggcgataaaatggtgcttaacctggataagtcccgcattcctgcggagtgtatagagaaaatagaagccattcttaaggagcttgagaaaccaggagtctaa

SEQ ID NO: 214759 - DNA, 1167 bp, Klebsiella pneumoniae
atgggactcatggatacactcaaccagtgcataagtgctggtcatgaaatgacgaaagcaatcgccattgcgcagtttaatgatgacagtccggaagcccggaaaataacccggcgctggaggattggtgaagcagctgatttagttggcgtgtcatctcaggctatcagggatgccgagaaagctggccggctgcctcaccctgatatggaaacccgtggaagagttgagcaacgcgttggttataccatcgagcaaatcaatcacatgcgggatgtatttggtacacgactgcgccgtgctgaagatgcgtttccgccggtgattggtgttgctgctcacaaaggtggtgtttacaaaacctccgtttctgttcacctggctcaggacctggccctgaaaggattacgcgttctgcttgtcgagggtaatgatcctcagggcacagcctcgatgtatcacggatgggtgcccgatcttcatatacacgcggaagatactctcctgcccttttatcttggtgaaaaggatgatgccagttatgcgataaaaccaacctgctggcctggccttgatatcattccgtcctgcctggcactgcatcgcattgaaactgaactgatgggcaaatttgatgaaggaaaactgcccaccgacccgcatctgatgctccgccttgctattgaaacggtcgctcatgactatgatgtgattgttatcgacagcgcaccgaacctcggtattggcacgatcaatgtcgtatgcgctgctgatgtgctgattgttcccaccccggcagagctgttcgattacacttctgcactgcagtttttcgatatgcttcgtgatctgctcaggaatgtggatcttaaaggctttgagccggatgtccgtattctccttaccaaatacagtaataacaatggttcgcagtcaccgtggatggaagaacaaattcgcgatgcatggggaagcatggttcttaaaaatgtggtacgtgaaaccgatgaagttggtaaaggccagatccgcatgagaaccgttttcgaacaggcgattgatcaacgttcttcgaccggcgcatggcgaaacgcactttcaatctgggaacctgtttgtaatgagatttttgatcgtctgattaaaccacgctgggagattagataa

SEQ ID NO: 214760 - DNA, 1011 bp, Klebsiella pneumoniae
atgacgagcgaaaataacagcttacttctgaaccttcaggaagttgataagacaaccggcgaagttgttaagctggatgtcaacagcaccagtaccgtgcagccagtagcgctcatgagactcggtctcttcgtcccaactctgaaatcaacagggaagagcaaggcgaaccggaaaaacgttacagacgcgactgaggagcttgtacagctgtctattgccaaaagcgaagggtacactgacgttaagatcaccggttcgcgtcttgatatggacacggattttaaagtctggctggggataattcgctccatgtcggagtatggggtaaaaagtgacaccctggaactgtcgttcgtcgaattcgttaagatgtgcggatttaactcccgtcgttcaaacaaaaaaatgcgcgatcgcatcagtaattccctgtttaaacttgcctcggttacgctgaagttccagagcgagaccaaaggatggaccacccatctggtgcagtcagcctattatgacatcaccgaggatatcgttgagataaaggctgaacctaagctgtttgagctttaccacatggacagaagggtactgctgcggctgaaagccattgacgccctgcagcgcaaggaatcagcccaggcgctttatacctacatcgaaagtcttccccagaatcctgcacctatttccatgaaacggatgcgtgaccggctgaatctcacctcaaatgtctatacgcagaaccacacggtgcgtaaggcgatggagcagctgcgggatattggttatctggattacaccgagtttaaacgtggccgagccacctatttcagcgtgcattatcgcaaccccaaactcatcagtggtcctgtgaaggttccgcgcaaagcggaagaagagaaggcgccagagcaaaattatgacgaagtcattaaggcgctgaaggctgctggcatcgatcctcttaaactggctgaagccctctcagcgatgaagccagaaaattga

SEQ ID NO: 214761 - DNA, 741 bp, Klebsiella pneumoniae
atgaacagcatcattcccttgcagaattcaccagaacgcgtctctctgctgccgatcgccccgggcgttgattttgcgaccgcggtggcactccggcggatggccacctcaacaggtgccacgccggcttacctcctggcgccggaagtgagcgccctcctctggtatatgcctgaccagcgtcaccacatgttgttcgccaccatgtggaataccgggatccgtatcggtgaagcccggacgctcaccccggaatcgttcgacctggatggtctgcgcccttttgttcgggtgctgtcggaaaaagtgcgggcacgtcgtggccggccgccaaaagatgaagtgcgtctggtaccgctgacggatgccagttttgtgcgtcagatggagagctggatggtgaccacccgcccccgccggcgggagccgttatggccggtcacggatgagacaatgcgcaactggctgaaacaggcggtgaagcgggctgaagctgacggcgtgcatttttcgatccccgtgacgccgcatactttccgtcacagctatattatgcacatgctttatcaccggcagcccaggaaggtcatccaggcactggccgggcataaggatccgcgctcgatggaagtctatacccgggtatttgcgctggacatggctgccaccctggccgttccctttaccggtgatggtcgagatgccgcggagatccttcgctccctgcccccggccggctga

SEQ ID NO: 214762 - DNA, 948 bp, Klebsiella pneumoniae; identical to SEQ ID NO: 102272

SEQ ID NO: 214763 - DNA, 291 bp, Klebsiella pneumoniae; identical to SEQ ID NO: 139257

SEQ ID NO: 214764 - DNA, 567 bp, Klebsiella pneumoniae
atgatattggttacccaggattactatctttttcaaggtgttaagaatttttttcctgatatcattcagttagattctagcggaaaagcgattttagataatgaggttgatgaagtctctctgctggttgatagccgctcgccgctttgccattacgattatctcgtgctggcagcggcgaaatccagaaagcgaatatgttgtatcgtcctcgatatgcgccatcgggaagagcatttactgagcctgaaatcgtttttaaacatgtcattatcacccgcggatatggcgacattatttggcctttttctggagatgaatagcaagcgtctgaccaaagagtggtttgacgatctgcgcttaagtttgtctgaacagttaatgttacgtttactcatggcggggatgaccatggaggaggtggccgtcaatctcaatacgtcactaaaaagcctttaccgcaagcgtactgcgctttatgagcggttggggttagataattttaatgaagcttgcttatttatctttcgaaataagctgctggagcagaccgaacgttcgttatga

SEQ ID NO: 214765 - DNA, 2490 bp, Klebsiella pneumoniae
gtgttgtgcaatggattcttgatgaacatatggcaaatagaaatggaaagatcaccttattcaaatacgttattgtttaatcgcaacacgaaactctcgctatcaatcggcttgcttttgctcttcccggcgctggttcagggagcggattcactctatgaccagcaaatcttgcaagcgcgccaaggtcagtacgccccctttctcagttaccttcagcagtaccagctgcggcatgccttaaccccttctcaggtggcggactggctgcaggtggccctctgggccggtcaggacgatgaagtggtgaaagtctggcgacgctaccaggtctatatgccgcttcccgcacggggcaccgccgccgcggcgcaggccctgcgcaaccagaagcagtggcaaacctcgctcaccctctggcagcaggcactcagccaggcccctggcagcgacgactatcgtatcggctatatcaaaacgctcgccgatgcccgcaaggacggcgaggcgctcagcgaagctcgtcgcctggtggcggagcaggcgagcgttgcgcacctgcagacgctctcctatgtctacctgcggctgggcaaaagctgggaccagctgttggtggacacgcagatcctcgatcgtgaaccgcaaaacaaaaccgcgctggccagcctgatggcgaccctgacccgcaaccggattgattcccctgctctcggcctggcgaatagcgtcgaactgacgcctgcggaaaagcgtaacttgcagttgaacgccgccgccgaactggtgcgccttgccgataccccttcccgcgaagaaaaggcgcgttacgcgctggcccgcacggcgctcacgcagtatgacgcgatgatcgccgcctggcaccccgacccacaggctgcgcccgacatcatccgggcgcgtattgatcgtctgggcgcgctgtacgccagcgccgagtacgcgcaggtcatccgcgaataccaaagcctgatcgcccagcagcagaccgttcccgactgggccatcggctgggtcatctcctcttttatcgcccttaagcaaattgagcctgcgctgacgcttatccaccagcatccttcgtggctgacaagccaacagaatgaggaacacgagcttttctacgctctgctggacaccggtcagtacccggcggcgcaacggtatgttgcccgcctcaccaggaatgcgccctacatccgtcgtctctacggctcgccaacgccgcagccgaacgacgactggctcaccgcacagtcgcttaacgtgcactatttagcggctaccaacgacctgccgcaggccgaagcccgaatgcagcgcctggcggcgacggcccctggaaaccagggcctgcagatagactatgccgcccttctgcaggagagaggattgccacgggcagccgaacgccagctaaaagcggcggaatctctggaacccgccagcctgcagctggagcgccagcaggcctgggtcgccctcgatctgcaggagtggcggcaaatggatctgctggctgacgacgtcgtcgcccgctcgccacgggatctgaacacccagcgcctggccagagcgcgcgagatccatcatctctccgagctgcgcctgagcgttggcaaagggctgcattccgacaacccggtgagcggcacgcacgacctcagttttgagacggcgatctacagcccgccgctagccgacagctggcggttgttcggcgggcaccgcttcgctgaaggcaattttgaagaggggaaaggcagccgtcgccagctgtttgccggtattgaatggcgtccgcgcgactactggggcgagcttgagctctccagcgtcaattttcacgacgagaacaagcccggcgtccgcctttccgccgcccatgacgttagcgatcgctggcagctgggcggcgaactggagcggatttcgcagcagacgccgctgcgcgcgttacgcaacggcgtcagcgccaaccgcggcgaaggctggctgcgctggtctccaaacgaacgccgggagtaccgcttcagcgcggccgccagccggtttaccgatcgcaaccgccgccaggagtacaccctctccggtaaagaacgcctctggcaaaccccatggttaacgctggatttgcagcccggtctgtcggccagcgccaatagccgcaccgacaccgcctactacagtccggcacgggacctcgccgccaccgcggcgctggccgtcgatcacacgctttaccagcgctatgacaccgtctggagccagcagttactggccggcggcggcagctactggcaaaaaaatcacgccgccggggcgatcacggtgctgggttacgggcagcgcctgcgctggaacaacgtcgtcgacaccgggctgatgctgaactgggataagcgcccctacgacggcaaacgtgaaaacaacctcgccatcactcttgatgcaaatatacggttttaa

SEQ ID NO: 214766 - DNA, 2016 bp, Klebsiella pneumoniae
atgctgaacacgaccctgcgcaacggcccgatgcttctcatctggctgtgccttatcttcagcgtgcgtgctgaggaagtccccttcctcgccccgcagcagcgcccccaactggaggccaatcaaccctggccggcggatcgctttctggtgctggcctaccatgacgtcgaagacgatgccgccgaccagcgttatctttcggtgcgcaccagcgcactcaatgagcagatcgcctggctgctgcataacggctaccatgcgattagcgttcaggacattctcgatgcgcattatggcttaaagtcgctgccgcccaaggcttttctcctcagttttgacgatggttacagcagcttttacacccgcgtatggccgctgcttaaagcctggaacgtcccggcgctgtgggcaccggtgggcagctgggtggacactcccgctggtcagcccgttaattttggcggcctgatgacgccgcgcgagcgcttcgctacctgggagatggtgcgcgagctcagccgctcgccgctggtggagatcggcgctcacacctgggcctcgcactacggtctgccggccaatccgcagggcagccgcgagcctgccgccgccaaccgcggctgggataaaaccaccggccgctatgaaagcgacgcgcagtttacccggcgaatgacagatgacgtgcagaaagtgacggcgaaaatccatgaggttgccgggaaaacgccgcgcgcctgggtgtggccctacggcgccgccagcggcagcaccctgactatcgccaaacagcaagggtatcagctggcgtttacgctgaacgacggcctgggcaacgtgaaggatctggacaatattccacgcctgctgatcgccggtaacccgtcgctcaaggcctttgccagcgccgtgacccagattcaggaagccgatcctgttcgggtgatgcatgtggatctggactatgtctatgaccccaatcccgtccagcaggcaaagaatatcgataagctggtgcagcgcgtctatgacatgaaaatcagccacgtctttctgcaggccttctccgacccgcagggcgacggcacggtcaagtcgctctatttccccaaccgctggctgccgatgcgcgccgacctgtttaacttcgtctcctggcagttgcagacccgcggcaatgtgaaggtttatgcctggatgccggtgctggccttcgatcttgcctcagatctgccgcgcgttcagcgctgggatccgcaaaccgggaaggcgttacttgcccgccagccgtacgtccgtctgtcgccctgggatccccgggttcgccagcagatcaccgacatctacgaagatctggcccgacacgccagcttcagcgggattctgtttcacgacgacgccgtgttgaccgattttgaagacgtgagcccggaggcggtcgccgcctggcggcagacgggtatggcgcacgatgccgccccggtgccccaacgtccgcaagagcgccaggcatggatgcgtttcaaaagccaaaccctgacccgcttcactctggatctacgccaggcagtgcaggccatccgcggcccgcaggtgaaaacggcgcgtaatctcttcgccctgccgatcctggagccgcaaagcgaagcctggtttgcgcagaatctggatgacttccttgccgcctatgactggacggtccccatggcgatgccgctgatggagtccgtgccgatcgacgccagccaggcctggctgacgcggctggtgcaggccgtcgcccgccacccgggcgcgctgaagaaaaccatctttgaactgcaggccagagactggaatcgacgccagcaaaacgccattcccgaccagcagctggcggactggatgcgtttgctgcggctgaacggcgtcaaaaactacggctactaccctgacgattttattaacaaccagcctgatatctctcgtatcaggccgcaattttcttcctggtggtaccctgaccatgactga

SEQ ID NO: 214767 - DNA, 1329 bp, Klebsiella pneumoniae
atgactgatcgcattatcgcattgtgcattttatgcctcgtattcgggctgccgttaggtgtcgcagcggtatttaccggcgagcttatcctcgactttgtctttttctggccgctgtttatgtcagtgttgtggatcaccgggggtctctacttctggtttcagctggaacgtcactggccgtggggggaggataccccgccgccgacgctgccgggcaatccactgatctcgatcctgatcccctgctttaacgaggagaaaaacgcccgggaaaccatcagcgcagcgctggcccagcgttacgccaatcttgaagtgatcgcgattaacgacggctcttcggacaacaccgcccaggtgctccagcagctggcgcaggaggagccgaggctgcgggtgatccatctggccgccaatcagggaaaagcggtggcgctcaaagcgggcgccgccgccgcccgcggcgatctgctggtctgcatcgatggcgacgccctgctggaccgggataccgcggcctggctggtcgcgccgttgatccattatccgcacgtcggggcggtcaccggcaatccgcggatccgcacccgatccacgctgatcggccgcattcaggttggggagttctcgtcgatcattgggcttatcaaacggacgcagcggatctatggccgggtctttaccgtctccggcgtaatcgccgccttccggcgccaggcgctggcggacgtcggctactggagcccggatatgatcactgaagatattgatatcagctggaagcttcagctccgccactgggacatctttttcgagccgcgagcgctgtgctggatcctgatgccggagaccctcaaagggttatggaagcagcgtctgcgctgggcccagggcggcgccgaagtctttctggtcaatctgcgccgcctgtttcactggcagcatcaccggatgtggccgctgtttctggagtatgcctgctccacgctgtgggcctttgcctacgcgatcaccattctgctgtttatcctcagccgcctgatgccgctgcctgacaatctggcggtgcatagcctgtttccaccggaattcaccggcatgctgctcggcctgatgtgcctgctgcagttcgtcgccagcctgtatatcgagcggcgctatgagaaaaaggtcgccaaatcgctgttctgggtgatctggttcccgatggtctactggatgatcggcctgctgaccacgctggtcgcttttccgaaagtgatggtgaaacgtcaacgttcccgcgcgcgctgggtgagtccggaccggggaaaaggaagcctgtga

SEQ ID NO: 214768 - DNA, 450 bp, Klebsiella pneumoniae
atgaatgaaaatacgctcatcttaaccgaacatcgggtgctgccccggctggtcgacgccggcttaacgctgctggcctggctcggttttctgttctttctgtacgccaatttgctgatgcagttcatcgcgccgccctctccgcgctgggaatcgctgatggactccctgaatacggcgctggtgtatctgctgattgccgcgctgaacggctggctgttgatcctctggtatcactacaaccggcgccgcgcccatacccggcgtcataccgcggtgctcgctctgcgcgacgatgagctggcgagcagctttaacgtcgcgccgcagattatctcggagatgagccgctataatttgctcaccgtttaccacgatcaaatcgggcagattattgatttaaaaagccacgcgttaccgccgccgcaggaagagagcgatgacgcatga

SEQ ID NO: 214769 - DNA, 786 bp, Klebsiella pneumoniae
atgtctggccacaagaaatacctctctgtcgccctgctgagcgctgtcttactgccggcgatggcctctgccgctgacgcgccggcgactttcaccccggaacaggaggcgaaaatcggcaaaatcgccgccgactatctggtcgcccacccggaagtcctgctgcaggcgagccagaaactgcagcaaattcaggctgagcagcaggccagcgcggccactcaggcggtgctgaagaacgccgccgtgttgacccaggataaaaataccccgacctacggcccggccaacggcaaagtcacggtgatcgaattcttcgactaccagtgcgtctactgcagccgtctggcgccggtgatggagcaggtgattaaagcgcacccgcagacccgcttcgccttcaaagagtggccgattttcggcggccgctgggaaagctcgctggaggcggcaaaaaccggcctgcagatctatcaacagaaaggggcggatgcctatctggcctaccataacgggatttacgctaccggccataacgaaggcaagctgacgacggcggatatccagcagcaggcgaagaaagccggctttgatgcgaagaaggccgccgacgtcgaaccggtgctgcagagcattaacgatctggcgcaggagattggtctgagcggcacgccgggcgtgatcgtgatgccgaccaccggcgccacggaagccagcatcaccgtcttcccggggctggcagacaaagcctcgctggaagccgccatcaaaaaagccggcggctaa

SEQ ID NO: 214770 - DNA, 759 bp, Klebsiella pneumoniae
gtggtcaacgcggcccaggcggagtaccctgcgcagcggtttttcttgctcttttttcaggtggtttctctcgatatgtatgcatttcttcaacaatgggacatggcagtgattatgctgcagattgtcgccatcgacttactgctgggtggcgacaatgccgtggtgatcgccatggcctgccgcaaactgccgccgcagaaacgcaccaaagcgatcatcatcggtaccgtgggcgccatcctggcgcgcgttctgctgctggcgatcgctttgtatctcctgtcgctgccgtggctgaaaatagtcggcgcgctgctcctgctgtggattggcatcaagctggtcaggaatgaggaagaagagagcgaggttagcagctctggcagcctgtggcgcaccgcgatcaccatcaccgttgccgatgtgattatgtcgctggataacgtactggcggtagctgctgcggggaaagggcacattgcgctggtcgccctcggcgtggcgatcagcattccggttattgtcgccggcagcaagctggtgctggtcctgctcacccgctttcccacggtggtgctgctgggcgggatgctcatcggctggattgccgggtcaatgctggtcagcgaccctaccattcgccagctgtttcccagcgccggcgagggcaccgcgcgcctggctggcgccgtcggcgcgctgctggtgctattcaccggatggcgccgccgcccacggccgcaggcgaaggactaa

SEQ ID NO: 214771 - DNA, 918 bp, Klebsiella pneumoniae
atggaattgaaggattattatgccattctcggggtgcaaccaaccgacgatctgaaaaccatcaagaccgcctaccgccgcctggcgcgcaaatatcaccccgacgtcagtaaagaaaacgatgccgaagccaaatttaaggatctcgccgaagcctgggaagtcctgaaagatgagcaacggcgcgccgaatacgatcagctctggcagcatcgcaacgatcccggcttcggtcgccagcgacagacccacgagcagagctacagtcagcaagatttcgacgacatcttctcctccatgtttggccagcaggcgcatcagcgtcgtcgtcaacacgcggcgcgcggccacgatctggagatcgaagtggcggtgttccttgaagagacgctggccgagcagacgcgcaccatcagctataacctgccggtgtacaacgtgtttggcatgatcgaaagcgaaacgccgaaaacgctgaatgtgaagatccccgccggggtagtcgatggtcagcgtatccgcctgaaaggccaggggacgccgggggagaatggcggcccgaacggcgatctgtggctggttatccacatcgccccgcatccgctattcgatattgtcggtcataacctggagatcgtcctgccgctggcgccatgggaggccgcgctgggcgcgaaagtgacggtgcccaccctgaaagagagcattctgctgacggtgccaccgggcagtcaggcagggcagcgactgcgtatcaaagggaaaggactcgtgagcaaaacccacaccggcgatttgttcgccgttattaaaatagtgatgccgccaaaaccagatgaaaaagcgcgtgagctctggcaacaattggccgccgccgaagccagcttcgatccgcgtaagacatgggggaaagcctga

SEQ ID NO: 214772 - DNA, 306 bp, Klebsiella pneumoniae; identical to SEQ ID NO: 138241

SEQ ID NO: 214773 - DNA, 2340 bp, Klebsiella pneumoniae
atgtcggcccaaattcgtgaagggcaagaaaaccttgagctaattagcggtctcggaatgcaaattgagtttattgggcaacctgatgttgaattagcatttgaaagcttgggtaatgagagggggcggaacaaagctcagcacatagaagttttaagtatacataaggagggcgatataacctctgcaaatgtatttgtgcctgatggaaagctagtgcatttcgaaaattacattcaggattatttgactgagaaacgccgcgcagacggggtttccgctgaccataaatcgttaataaatacattatcagcaatacgtcttgcagaaattaaatctctttggacagacgatttgagtttattgccatctgacccggatgaggcattttggtgggaagtatggctaccagtgaggggtaatagaaatgccgttgttactgattttcatcgaataagccatgcgactggatgccaggtcagcgaacacaaagtcgattttcctgagcgaaccataacctggatgtatggttctcagagccaattttctcaagctaggttggttttaaactgtgtagcagaattgcggcgtgcaaaagatacagctgagtttttcgaaggactaccagcattggaacaacagctttgggtggatgatgcactgcgacgtctccaggttccttcacccgaagacaatgtaccttatatctgtttgttggattcaggcattaatcgcgggcacgctatgcttgcacctgttttgcaccagcaggacatgcatacagtcaatgacgcgtggggagtcaatgacaccgcaaaccatggtacggggttggctggagttgcaatctatggcgatatgattgacgctttgtcttctactgatgcaatagaagtaggacaccgactcgagtcagttaagcttactccaaattatggggccaacgttggtgacgcaaaacagcatgcatatctgttcagctcagccgttacacgtcctgaaattctcaatggtcagcgcaaacgtatttttagttcagcagtaacagcaactgcttatcgtgactttggtcgcccttcagcttggtcatcaatggtcgattcactggcagtagatgcgctagcagaaaccccttttccccggttgtttgttctttccgctgggaacatagttgatcgcgaccattggggaaactatcccgccagtctttcagttaatcaaatccatgatccgggccagtcatggaacgcattaactgtaggtgcatttactgacaaggttgagttaaatgagcctgaatttattccggttgctgatcaaggagcattaagtcctttcaccactacctcaatgggatgggaacctgtctggccgtttaagccagatgtagtttttgagggggggaatgcagctgctaacacagaatttgtcgataactttgcgagtttagaattactaacaacaagtgcttcatcccaccgccaattttggacaactaatgcaactagtgcagcttctgcgctgtgtgccagaatggctgcaaggttaatggcacaatatcctgagtatcgcccagaaacgatccgtgctctgatcacacactctgcgcaatggacacctgctatgttgcgtatgtatcctgctcgcaataaaagtggcttcgcacagcttatacgccattgcggctggggctcaccagatgttgaacgtgcgctctggagtgtgaaaaatagtctgacactggtagctgaagacagcttgtacccctatcgtaagactcgcgacggtattaaaactcgtgacttgaatttacatgcgctaccttggccactggaacagctccaggagttacaggatacgcaggtagagctcagggttacattgtcttatttcatcgaacctaacccttcagcacgggggagttcatcaagatatcattacccatcccaccgtcttcgctttgcgatgaaaagacaaacagaatctttagacgaatttaaaactcgcatcaatgcagcagctgagtctgaagagagtgagcatgggactaccggtaacgatgataactggtcattaggtgctactcaacgacataaagggtcgttgcatcaggatatatggcggggggcagcagcagagcttgctagttgtggttatttggctgtttatcctgcacaaggttggtggagaaccagaggcgctttgcaacgatttgattctgaagctaaatacagtctggttgtatcgattcatgcacccgaagcagacgtagacctttatgccgcagtggaaaccttggtcgaaaatatggttgaaaatcctgttgaaataatgggttag

SEQ ID NO: 214774 - DNA, 1041 bp, Klebsiella pneumoniae; identical to SEQ ID NO: 121680

SEQ ID NO: 214775 - DNA, 810 bp, Klebsiella pneumoniae; identical to SEQ ID NO: 121679

SEQ ID NO: 214776 - DNA, 510 bp, Klebsiella pneumoniae; identical to SEQ ID NO: 121678

SEQ ID NO: 214777 - DNA, 327 bp, Klebsiella pneumoniae; identical to SEQ ID NO: 121677

SEQ ID NO: 214778 - DNA, 729 bp, Klebsiella pneumoniae; identical to SEQ ID NO: 121676

SEQ ID NO: 214779 - DNA, 432 bp, Klebsiella pneumoniae; identical to SEQ ID NO: 121675

SEQ ID NO: 214780 - DNA, 2001 bp, Klebsiella pneumoniae; identical to SEQ ID NO: 121674

SEQ ID NO: 214781 - DNA, 249 bp, Klebsiella pneumoniae; identical to SEQ ID NO: 121673

SEQ ID NO: 214782 - DNA, 543 bp, Klebsiella pneumoniae; identical to SEQ ID NO: 121672

SEQ ID NO: 214783 - DNA, 321 bp, Klebsiella pneumoniae; identical to SEQ ID NO: 121671

SEQ ID NO: 214784 - DNA, 198 bp, Klebsiella pneumoniae
atggcaggaaattatgcggtcattgaaaacgggatagtcatcaatataattattgcagaaaatggttatgagtacgctggtgcagaccttgtggaatatcaagaaaacatattttgccagccaggaatgttttataacaaagatgatggtttattctatgacgacaaagagttctcaaaaataaataacatcatctaa

SEQ ID NO: 214785 - DNA, 867 bp, Klebsiella pneumoniae
atggcgactaacgattttaaacccttcgctactggtagcggggcaaacgtattatcacaggctgattatgaagcgctatctgcactggcatcaggatttctttccggcaaagcctcgtcagcacaagtaaataaagcactacggcaatcctctacaattgctgccgtccttgcgcaattcatggcggatagcacaggaagcgatgtcctggataatggaaacattgccacgttactaaatattctcaagtccgcacttaataatcaggcagaaggacgcctgctccgcattcaggtttttaccgctagcggagcatgggtaaaaactgctggcactaaaaaagtcagaatcaaggcatggggtgcaggcgggggtgggaagggaacggacacagcagggacgggggcatcaagtggcgcaggtggggcttatgtagagggcttgtatgatgtaagtagcatcactggagcaaatattgttatcggtgctggtggcgctgctgttgtggcaggaaattccggaaacggtggcgatggtggtgatactaccattgttgatcttggcatttctgcaggcggtgggaagggcggcaattcaacgggtaattctgctggaggtactcccggcgcgccctctgtagggactattttttcagtggtcgggcaaggtggccagggggcggtcggcgccttgggcggtgtgggtggagcgtctcacagcagttatggtggtcttcctcacgtcagtacatctggagatgatggtttctttcccggtggcggcggtgctggtgcatcgtatgattcagtggccagggcgtcagggaaaggggctaatggctacgttatcattgaggagctggcataa

SEQ ID NO: 214786 - DNA, 774 bp, Klebsiella pneumoniae
atgagcagatacactgaccgcataacaaactaccacgccggtaaaccaaagttctttgcccacgtcgacctatccaccaggccactgagtgatgtttccgatgccatgtcacggctaatacccgattttgatattgataccgccgtaggcgtgcaactcgacgttgtgggtgaatgggttgggcgctcccggcgcgtagccacaccggtaaccgggatttatttttcgtgggacaccgagcgggttggctgggaccagggggtctggcagggcccatatgacccaaacgacggttttatcgatctaagcgatgaaatatatcggctaatgctgaaggtgaaagtggcgataaacaactgggatggacagaacgactcgcttcctccaattcttgataccgcccttgccgggtccgggatccgaatggctattgtcgacaaccaggatatgtcgatttctatctggatactcggtgacccatcggtagccctaagtgaaatagaccggttaattctggatagcgccgtcaataaaggcccctttatcgcattaccggcaggttacgtaccatcgcgctatgacattaacccaattgaccaggttaacagcgaactatggtgggctattcaaaacggttatatgacggttaaggccgccggagttcgtgtccgtgaaatagagaccgtcagtgatggttatcagttttttggcttcgatatcgaaaatgactatatcgctggtttcgaccgcgggtcatggggagagagattttaa

SEQ ID NO: 214787 - DNA, 1197 bp, Klebsiella pneumoniae
atgtctttggacctcgacacgctcggcttatcggcaacggtaaccgctgaggggataagtgcgcccgactaccagaccgttctggacaccatcactggttattttcagcagatttatggcagtgatgcctatcttgacccggacagcaaagacggccagatggtcgctctggtggctctggccattcacgatgccaacaacacggccatttccgtttaccggtcattttctccgtcgacggcgctggacgatgcattaaccagtaacgtcaaaattaacggcatcactcgccgtgctgcgacaaactctacggtagatgagctgatcgaaggtgaggccggaacgttgatcacaaacgggtctgtgaaagatgccaacggtatcatctggaatcttcctgctcaggtgacaattggtattgatgggacggttattgctacagcgacgtgttctgttgctggtgctgtggccgcccctgccgggtcagtcaataagataaacaccccgacacgtggttgggtatcagtaactaacccgcaagcggctacggtaggcgttgctgccgaaacaaatgctgaattgcgtgtccggcaatcacagagcgttgctttaccgtctctgacgccgtttgaggcggtagatggcgcgatagcaaatatcagcggcgtaacgcgacacaagctgtatgagaacgatacagataccactgatgcaaatggcctgcctccgcactcaatcgccgccattgtagaaggtggtgatgcgacggtcattgcaaacagcattcgtggtgtgaaagggcagggcgtaacaccctacggtagtacggtgattgttgtgcctgataagtacggaaaccctcactcggtaggtttttcaaggccggtcgatgtacccatttacgtcaaaatcactatcgaacctcttacgggctacacatcccaggttggcgaagagataaaggcggctgtatctgcctacattaactcactggcaatcggcgccagcgttcttctcagtcgcgtttactcaccggctaaccttggtgttgtcagtggtggtaatgccaggtattacgacattaccgagttgctgatcgggacgtctgccggtggcgtagccgcggcaaacgtggatattgcctttgaccagtcagcatcctgcgccgtcagcaatattaatctggtggtctcatga

SEQ ID NO: 214788 - DNA, 354 bp, Klebsiella pneumoniae
atgcgataccgtcgagaagatgacgatggggattacaccttcggtcagggcgatgatacctggctggttaactcccccgaggctgtcgcgcaggccataaaaactcgctttctgctttggtacggacagtggtttctggacaccacagaaggtacgccatggattcagtccgttctgggtaagcaaaagccggatacctacaacctcgctatccgtaagcggatcctcgaaacgcagggggttagctcaatcactgcatttaataccactgttgacggtaccacgcgccgtgtaacgttcactgcgacggtggaaaccatctacgggacaaccacagtaacttcggaggcgtaa

SEQ ID NO: 214789 - DNA, 654 bp, Klebsiella pneumoniae
atgcccgtagcactaaactcccagctcggcagtaaagagcaggcagacgcacaactggcgcaggcgatcatgtctgcaatgcgcgtctccatgcctggcatcattcagtcgtttgatccggatgctgtcaccgctgttgttcagccagccattaaaggcgcagagaaggacgaatccggcgcccaggtatcggtaaacctcccactgctggtggacgttcctgtcgttttccctcgtggcggaggctgtacgctgacttttcctgttaagcctggtgatgaatgccttgttatctttgcagaccgctgtatcgatttctggtggcaaagtggaggtattcaggagccagtagacgagcgcatgcatgatttgtcggatgccttctgcattgtcggccctcagtctcaggcgaaaaaaatcggcggtatcagcaccagtgcggtagagctgcgcagcgatgacggggaaacaaagttgagccttaatcctgccagcggagctatcaacggcacggcgccgggaggttttaacctgaacgggcttaaaattctttcggacggccgcctgcagctggtggatggctcaatcgttgataagcatacgcatggtggcgttgaacctggtggcagcagtacagcaccactcggaggatga

SEQ ID NO: 214790 - DNA, 567 bp, Klebsiella pneumoniae
atgaacgcttacgactacaagaaagcagtttaccggatagcaaggcatgaggctggtcattggcttgcagcctacatcttgggatgggatccaaaaaaaattgaactaaaagttcccagctcggaaaatagtcattatggctatgcgttatgcgcctataaagtaaatttagagactatatgtgatgtcagagattacgctcgtggcagagttaaggtgctctattgtggtgcatatgctgatggttatgatggatataattttgactatgaaagaatagggcgtgagatggggcgcacaggtggtgcgtattctgatttttggaaagccgaagagatatatttcttttattataattgccttgagagtaaaggtgattgggagtacgaatttaatcctattgtgaacgacgttaaattgttagtcagaatgcatcatgacttccttgattctgttggaaattatgcaaaagataaagctttgaacatcggtgatgttatagagataactcctgatactctcaaaaccttgttcatagaaagtaagataagactcccttcttattag

SEQ ID NO: 214791 - DNA, 186 bp, Klebsiella pneumoniae
atgagcttaatcactaccgcttggtgttttaacgttaaatgcattgtcggcgggattttctggggaaaatctttctccattaacggggtaattaataaaaatatcccccgttctctcctgttcacatttcaggtcttcgcaagggataggcggatgatcaatttttacaccggtgagaaaatttga

SEQ ID NO: 214792 - DNA, 342 bp, Klebsiella pneumoniae
atgaaaaaattaggaatatttttggtctttggggtgttttattcctgcggagctttttctgccactcaatgcggaccttttttcttaaagggcgaaagcgatgggttgatgcatatcaacggacaagcccctgaaacgcagaaaatgaccttcctcaagcaaaaagacgacttcgataacgtcatgatgcaatggatgctcccagacgccaaaacagggcgttggctaggtctcgactacgttaagcgcaacaataaggccatcctcaacgtcgaagtgatccgcaagaacatggacgagcccagagagttctggacgtacgactgtcggaaggtgaagtaa

SEQ ID NO: 214793 - DNA, 1023 bp, Klebsiella pneumoniae
atgtctcagaactggatgcggcactttgagctgcagcttattgatgataagggtgatgggatttcgctgtcggattttaaggtgacgtttaatatccagaagatgcccgcgactatctttaacggattcgtcggtaacttcaaaatctacaatctgtcgccggagactcaaaaccggatcatgggtaaagagtttactcgtgtaagggctattgccgggtataacggcacagcagatagcagcggcaactatcctgataaaaatgtggggatcatctttaacggtgatattcgctttaccgtcaccggcaaagataacgtcaccgatagttgggtgcttatccagtgtattgatggctgggaggggcatctcaacgccagcgtgaaaacgacagtgtcggcaggctggaagcatgctgacctgtttgatttgggtatgcagtcccttagcccttatggcattacagagggaagcaggccggattttggtccaactgtattcccccgcggccgcactatttatcagaacactggacgccttatgtacagccttgcagggcagtgcaaggctaactggtggtacgaaaacaaccaggtgcatatcgttcctgatgataagtacatacaggaagcgattgtgctgaacgccaatacgggcctgatcggtatgcctcagcagacgatgggcgccggggtaaatgtgcgctgtctgataaacccgaatattaagcttggggggcttatcaggctggatcaggcttctgtatatcgtcaggctctcggtaatgatcaggttggtcagtcaccaggtctattaggcgaaagtaccacagacggtaacatctatgtcgatgggcttcccgggtcgcagctggcggcaatcaataccgacggtgattacattgtcggcagcattgactatactggcgatactcgcgggcaggcgtggtatatggacctgctgtgtctggcgaaaggggctagagaactgcaaagcctgagcactttaaacaaggttggctga

SEQ ID NO: 214794 - DNA, 303 bp, Klebsiella pneumoniae
atggctgtttcagaaatccctctgtcaccagaaaaccagcgattctccatatctgtggcaggtcaaagtctgcaaatggctgtcacctggcgtgctgctttctggtgtctggatatcatggacagtaccggggccgacctgataaaggggatcccgcttatcaccggcgccaacctgttggcgcagtatcgctatctcgggcttggcttttcgctctatgtcaattgcgacgacccggcaaatgataatccaacccaaacagacctcggcattaaaagccatctctacgcagtaacggagtga

SEQ ID NO: 214795 - DNA, 600 bp, Klebsiella pneumoniae
atggatattctttcaaccattttccagcagcggagccgccgtattggtctgatgatacccgatgtggtggtttcagagcgtcatagcgatgctctggaggtgacagagcatccagttgaaaggcctacaagcgcaggcacagggttcattgcagaccatgcgtatcggcgcccgtcagaagtcgttatggagataggctttgctggtggtggttccttgctggatttttatgatacagcaggcatcgggctgtctacgccccttaacaacatggggcctaaggaagtctatgctgagctgctcaaaatgcagcaggaaaggcaattgcttgatgtgaccaccgggaaacgtctttataccaatatggtgatccgctctctggatgtgacgaccgaacgtaccagcgaaaacgtactgatggcgacagttacactgagggaaataatcaccagccaaacgcagacagtcagcgtggcagcgaaggaaaatatgaaagagggggtaaacacgtcagcggtgcaaaattcaggagtaaagacgccgactccgaaagatgagtcgctactaagccggtttgtcggcttcatctcgggaggttaa

SEQ ID NO: 214796 - DNA, 2004 bp, Klebsiella pneumoniae
atgaacgctgaaacgctcaaggactttctgatctcgcttgggtttaacgttgatgaggccggtgctaaaaagttcgatgctgtagtggcgggtacgacgctgaaagcgattgagctaggcgtcaaggtcgaagcggcagcgctttctgttgtcgcgttcaccgccaaaatagccagcagcctcgacaacctctattgggcctctcagcgcaccggagcgacggtagagggcatcaagcaaatcgggtatgcagttagccaggtaggcggcagcgccgactcagcgcgtggatcgcttgagaatctggcacggtttatccgcaataacccaggcgcggaaggtttcctgaaccggctgggggttcaaacgcgtgatgccagcggcaatatgcgggacatggcgacgatctttaccggcgtcggccagcgtcttagcagcatgccgtattaccgcgcgaaccagtacgctcaaatgctgggtctggatgaaaacaccctgatggcaatgcgtcgcggtatcggccagtttagtggcgaatacaccgcgatggcgaaggcgatcggctataacgccgatgtggccgccgtcagctctaataaattcatgacctcgctgcgctcctttgggctgatggcaggcatggcgcgggataaaataggctccagcctcgctgatggccttgctggctctctggacaggctgcgtcgacaaattctggaaaacttcccgaaaattgaaggcgcaataaccggtaccgtgaaaggaattctctgggctggtgagatggtaggcagggtaatttaccgccttattcaggccgccagtgatatccgggcctggtggatcgggctggatagcgacacacaaaagcttattcagacgcttggtggcttgcttgtagcctggcgattgctgaatgcggcaatgcttgcctctccgattacctgggtgctggcgctcgcaggcgccatcctggtgctgtacgacgattacaagacctggaaggaaggcggtaaaagcctcatcgactggaagtcgtgggaaccggcgataactctggcgcttaacgccattgaaaaactatggactggtgtgaagcgccttaaagatgagctgattaagcttttcggtatcgaccctaaaacatggtcgattaagttcgaattcgacagtctgaagaagcagttcaatgagctgaacaagatgctggataccataggcaagcttctcaatgcgattgatgaaggtcgctggtcagacgcggcagcttacgccagacagctgctgaatcagggcggcgagccgacaccatcaaacgcggtgacagacagcgccaatagagctgcggactggattcagaataaaaccgggtttgaccctcgcagtattggtcaagccgttactggctggtttggcgctgacgctactcaatacgggcagtctgttaaacgacctcaggccactaaagcaggcgctcagttgctgggctggatggctccgatgatgggtaagctggaagcgctgtacaacctccctgcgggcctgctgcgtagcgtagcccttacagagtctggcggtaaccagttcgctgtttctggtgctggcgcacagggattgttccagtttatgcctggaaccgctcgggatatggggctacgcgggaatgatgtcttcgacccgatcaagtcagcggaagcagcggcgcgatatctttcgatgctcctgcagaagaacggcggtgatctgaataaaactctggcctcctataactggggcatcggtaatgtgcagaagtacggcatggcgctgatgccgcaggaaaccaggcaatatatcccgaaagtgttgagcaatatgccgggggctggggcgacattgaaccagaataccgttatcaacatttctggtgtcagcgatccgagagaggcggggaaaatcgtctctgaaagccagggcaacgttaatgcacgcgctacccagcaactaacccgggggccgagctga

SEQ ID NO: 214797 - DNA, 153 bp, Klebsiella pneumoniae
atgcgcccggttgatgccggatacatcacttacaccgcacttaaagacggctcggtcgacctggccgatgttgcccgcatgaatgactggctggacctaaaagccgataacgaataccgcatagcgaaatggagagaggacaatgaacgctga

SEQ ID NO: 214798 - DNA, 426 bp, Klebsiella pneumoniae
atggaatttgaaatcaaaggggttaattaccgaaccgccaaacttgacgtattccagcaactgaaggtcagccgtaagctgctgccggtgctggccgggctcgttagtgaattttccacgctgaaagcgcaggccgctgcgggtaactctggtgcagtgctggaaagcgtactgccgaaaattgccgatacgctggccgcgctgccggatgaggacgttaacgcggtgatttatccgtgcctgagcgtcgtttcccgccagcacgaaaagggctggacgaaggtgttcgatcagggcgtactgatgttcgacgatacggacctgtttaccatgctgcagctggtggcgcgggtggtcgccgatagtctgggaaattttttgaaagaactccccgccagcgagacgtccaccccgccagtggcctga

SEQ ID NO: 214799 - DNA, 426 bp, Klebsiella pneumoniae
atgaaaactcatgagttaatttctttgattgaatatatctccaagataatggcgcattacccaaacaaaagcgtggaatatgcacttgatgacatactgaatttacttgatgctcgtaaaaaaaaaccaacccccatcgttaaagaaaaacaaagttcacaaatactaaaaaaagaagactacctcaagtcctccaaggatatgtattcacttcgacacatacataacaaaagttcaaagtcagacagtgagccaaatgaaacattaaatgatctatccattgaacaattaaaaaaactagcaaatgatataggcatcaaaacatcatcaagacaaaataaaggaatactagtaatgaatatcactaaaactctggaaagaagacgaatagactccaccattaaagacaaagacaaagaggattaa

SEQ ID NO: 214800 - DNA, 951 bp, Klebsiella pneumoniae
atggcaaaagtgataagcatgattaactggaaaggtggtgtaggaaaatccacattatctttacatcttggggttgggctgatgctcggttccgacgagcatccaaaagtattactcattgatttagatcctcaatcaaatctatcatatttagcattgggggtggaaaaatatgtcagacatgtttacaccaaaaaaaagcccacactaaaaaatatttttgatgattatttcgatggaaagcaattccatactcgcgacgctataataaaacaaccgataactgcaagccctggtcaggtctggatcaacgttgatttgctaccttctcatcacgaactagttcttgttgatatgatgttggcaagagaaaagaaaagtgcatcaactcatcaaaaggaaacagaattggaactcgataagatggcaataataaaaaaagccatagatcaggttgcagaagattatgattacattattctagattgcccaccaaatattaatcttgtcacacaaaatgctttctttgcaagtgaactgtaccttatccctgcaattccagactttctttccacggttggtatttccctaataaaatctgaaatggataagctcaataaaaactttagagggatgattcaatattctaactcatctattgaatttaatgacaccgaaatgcttgggattatatttaatatggtagacgaatataataaaaagcccaaagaaactcatgaggacacaatcaatgatgttaaaaaacagcatccaaacatggtgttcaataactacatcacagccggggacggtatatccgttgcgtccgaaaacaatttaacagtatttagccactcttctttacctcgttccaaacctaatgcagaaaaacagagtgaatatctaactcaagtagttagcgaactttatgaaaagttggagaatatataa

SEQ ID NO: 214801 - DNA, 1191 bp, Klebsiella pneumoniae
atgcctttaaacgatatgcagattcgccgcgctaagcctgaagctaaagcctatacacttggagatgggcaaggcttgtcattacttatagagcctaatggaagcaagagctggcggttccgctatcgctatgccggtaagcccaaaatgatctcgcttggtgtgtatccgacgatcacccttgccgatgctcgttctcgtcgcgacgatgcccgaaagctggtcgcggaaggaaagaacccgagtgaagttcgaaaagagcagaagatcgcattgcaaacggaatccgaaagtgcgtttgaaaagatagctacagagtggcatcagatgaagtccgcaaaatggtcggcaggatatgcgtcagatatcatggaagcgtttcagaacgacattttcccgtatgtagggacaagacccatcggtgaaataaaaccgctagaactgcttaatgtgctgcgtaaaattgaaaaacgcggggccttagagaagatgcgcaaagtgcgacagcgttgttcagaagtgtttcgttatgccatagctactgggagagctgagtttaatcctgctgcagatctctcgagcgccctcgaagtacatcaatccaatcatttcccgttcctaaaagctgatgagctaccagattttctacgtgccttagacagttacacagggagtcggcttgtccagattgctacgaaattactcatgattacgggtgtgagaaccatagaattacgtgctgcattgtggtcagaatttgatctagataacgctatctgggaaatttctgctgaaaggatgaaaatgcgcaggtcacatcttgtgccattgtcgactcaagcgttagatttacttaatgaactcaaaatgatgacgggtaactatcgttatgtttttccggggcggaacgatccgaacaagccgatgagtgaggcgagtataaatcaggttatcaagcgtattggctatggcgggaggctcactggacatgggtttaggcacactatgtcaacaatattacacgagaaaggattcgacagtgcatggatagagattcaactggcacatgtagacaaaaatagcattcgtggtacatacaatcacgcacagtatctagagaaaagaagctcgatgatacaatggtataatgactatatttactcaattaaggattccacatggcaaaagtga

SEQ ID NO: 214802 - DNA, 1254 bp, Klebsiella pneumoniae
atgctggaacaaatgggcattgccgccaaagcggcctcctggcagctggcgttactctccagccgggaaaagaatcaggtactggaaaagatcgccgattatctggaagcgcagaccgacgatattctgcgcgccaacgcggaagatttagccgaagctcgcgccaatggcctgagtgaagcgatgctcgatcgcctcgcgctgaccccggcgcgtctgagcggcatcgccagcgatgtgcgccaggtgtgcaatctggccgatccggtcggccaggtgatcgacggcgggctgctggacagcggtctgcgtattgaacgtcgccgcgtcccgctgggggtgattggcgtgatttatgaagcgcgtcctaacgtgacggtcgacgtcgcctccctgtgtctgaaaaccggcaacgcggcgatcctgcgcggcgggaaagagacctggcgcaccaacgccgccacggtgaaggtgatccagcaggcgctgcaggagtgcggtctgccggccgccgcggtacaggctatcgagagcccggatcgcgcgctggtgggcgaaatgctgaagatggataaatacatcgatatgctgatccctcgcggcggcgcgggcctgcacaagctatgccgtgagcagtcaacgatcccggtgatcaccggtgggattggcgtgtgccatattttcgttgatgaaaccgccgagatcccccccgcgctgaagatcatcgtcaacgccaagacccagcggccgagcacctgcaataccgtggaaacgctgctggtgcaccgcaacatcgccgacaccttcctgccggcgttaagcaagcagatggccgagagcggcgtcaccctgcacgccgccccttccgccctccccgcgctgcaaaacggccctgcgaaggtcgagccggtgaaagcggagcagtatgacgacgagtatctgtcgctggatctgaacgtcaaagtggtgactgatatggatgaggctatcgcccatatccgcgaacatggcacccagcactccgacgccatcctgacccgcaccctgcgtaacgccaaccgctttatcaatgaagtggactcttccgcggtatatgtgaacgcctccacgcgcttcaccgacggcggccagttcggcctcggcgcggaagtggcggtcagcacccagaagctgcacgcccgcggcccgatggggctggaagcgttaaccacctataagtggattggtttcggcgacgataccattcgtgcgtaa

SEQ ID NO: 214803 - DNA, 1104 bp, Klebsiella pneumoniae
atgagtgaaagccagacgctggtggtaaaactgggcaccagtgttttaacaggcgggtcccgtcgcctgaaccgcgcccatatcgtcgagcttgtgcgccagtgcgcacagttgcacgccatgggacaccgtattgtcatcgtgacctccggggccattgccgccgggcgcgagcaccttggttacccggaactgcccgccaccatcgcctccaagcagctgctggcggcggtgggacaaagccgtctgatccagctgtgggaacagctgttttctatctatggcattcacgttggccagatgctgctgacccgcgccgacatggaagacagagaacggttcctcaacgcccgcgacactctgcgtgcgctgctggataacagcatcgtcccggtcattaacgaaaacgacgccgtcgctaccgcggaaatcaaagtgggcgataacgacaatctctccgcgctggccgcgatcctcgccggggcggataagctgctgctgttaaccgaccagccaggcctgttcaccgccgacccgcgcagcaacccgcaggcggagctgattaaagacgtttacggcatcgacgacgcgctgcgcgccatcgccggcgatagcgtctccggacttggcaccggcggcatgggcaccaagctgcaggccgcggacgtcgcctgccgggcggggattgataccatcatcgccgccgggaaccgtccggacgtcatcggccatgcgatggcaggcctgccggtaggtacctgcttccacgcccaggagtctccgctggagaaccgtaagcgctggatcttcggcgcgccgccggcgggggaaatcaccgtcgatgcgggcgcgacccaggcgatcctcgaaagaggcagctcgctattgccaaaaggcatcaaaatcgtcagcggcaacttctcccgcggcgaagtgatccgcatccgcaatagcgaaggacgcgacatcgctcacggcgtcagccgctacaacagcgatgcgctgcgccttatcgccggccagcactcgcagcaaatcgatgccattctgggctatgaatacggcccggtggccgtccaccgcgatgatatgatcatccgttaa

SEQ ID NO: 214804 - DNA, 1053 bp, Klebsiella pneumoniae
atgaaaaagagtactctggcattaatgatgatgggctttgtggcttcaacagcgacgcaggcagcggaagtttataataagaacgcgaacaagctggatgtgtacggcaagatcaaagccatgcactatttcagcgactatgacagcaaggatggcgatcagacctacgtgcgtttcggtattaaaggcgaaacgcagattaacgacgacctgaccggctatggccgttgggaatctgaattctccggtaacaaaaccgagagcgactccagccagaaaacccgtctggcgttcgccggcgtgaagctgaagaactacggctccttcgattacggtcgtaaccttggcgccctgtacgacgtggaagcctggaccgatatgttcccggaattcggcggcgattcctctgcccagaccgataactttatgaccaagcgcgccagcggcctggcgacctaccgcaacaccgacttcttcggtctggtggatggcctggatctgaccctgcagtaccagggtaaaaacgaaggccgtgaagcgaagaaacagaacggcgacggcgtcggcacctcgttaagctatgatttcggcggcagcgacttcgccgtcagcgcagcctacaccagctccgaccgtaccaacgatcagaacctgctggcccgcggccagggttcgaaagcggaagcctgggcgaccggcctgaaatatgacgccaacaatatctacctggcgaccatgtactctgaaacccgcaagatgaccccgatcagcggcggctttgccaacaaagcgcagaactttgaagcggtggcgcagtatcagttcgacttcggtctgcgtccgtccctcggctatgtgctgtcgaaagggaaggatatcgaaggggtggggagtgaagatctggttaactacatcgacgtgggcctgacctactacttcaacaaaaacatgaacgccttcgtggattacaaaatcaaccagctgaaaagcgataacaaactcggcatcaacgatgacgacatcgtcgcgctgggtatgacctaccagttctga

SEQ ID NO: 214805 - DNA, 462 bp, Klebsiella pneumoniae
atgaccattgatagcgggtcggacgatctgatcccggtggtggcggccctgcatgatcagatgcacacctggcagggaaccccctatgaatggggcggtactgaacaaagcggcgtcgactgctcgggtttcgtctggcgcacgctgaaggatcgctttaacctgccgatggagcggatcaccacccgcgagctgctgcacatgggcgtgcgggtcaataagcgggatttacgtcccggcgatctggtgttcttccgcacccgggccgggatgcacgttggcttttacgataccgatcataatttccttcacgcctcgagcagccagggcgtgatgcgctcttcgctggacaacccttactgggaatcggcgttctatcaggcgcgtcgtctgccgaaggagtataacgcgcagatcaccatgaacagcgacaccctgcatctggcgaagaatcgccgctaa

SEQ ID NO: 214806 - DNA, 870 bp, Klebsiella pneumoniae
atgcacgttcgctattctctgctcgcctcgcaggcgacaacggccctttttgtgctgctgtggggcagcgcggccatcttcacccgctggggactggataacgcctcgccgatggcgctgctggtctttcgttttctggttgccctggtcgcgctggcgccgctggctatcgtccgtcggcgctggctgcccgcgccgggcacccgcctgcagacagctgccaccggtctgatgctgattggcggctattcggtctgttacttcgaggcgatggccaacggcgtgacgccgggacttatcgccaccatcatggggatccagcccatccttacgctttgcgtggtggagcgccgcctgcaggggcggcggctgtcagggctgctgcttgccctggcggggctggtgctgctggtgtggcgcagcctggcggcctcaccgatggcgacggtggggatcctgtttgcgctggcggcgctgctgctgatgacctttggcgcgctgtggcaaaagcgcagccgtcaggcgccggcggatgtcctgccgctgcagtatgccgttagtctggggctgtgcctgctgattgccccggtcagcggctaccagtttaccgttaacgccgggttgattattccggtgctgtttctcggactgctgatttcggtggtcgcccagctactgctgtaccgtctgctgagcgcgggaaatatcgtcaatgtcaccagcctcttttatctggtaccagcgatcacggcgctgctggattatctgctgctgggcaaccggctgccggcggcggcgatgatcggtatgatggcgatcgtcggcgggatcgtgctggtgttccgcaccgcgaaggtccgcgccggctga

SEQ ID NO: 214807 - DNA, 666 bp, Klebsiella pneumoniae
atgggcaacacgctgacgatttttgatctcgataacaccctgatacagggcgatagcagtacggtctggagccagtttatggttcgcgaagggctggcgacgcagaaggggtatcttgcccgcgaggcgcggctaatggcggattatgaccggggagagatgaatatcgccgattatgtggccctgatccaggcgccgctggccggaataccgaagtcggacgttgacgcgctggtggcccgctgcgtgcgcgaggcgatcctgccccgggtctatccgcaggcgtgggagctcattcgtcgtctgcgggccgagggagagcagatgctgattatctccgcctcggttagcctgctggtgcaggcggtggccgccgcgctggagatcgatcaggcgctgggtattgacgtggcgatggtcgacggcggctacagcggtgaaatcaccgggatccccagctatcagcaggggaaggtggcgcgtctggcgcagtggcgcgaggcgcatccgcagtatgacggcgaggtgacgttctataccgattccattaacgatctgccgctgtgcctgcatgcggatcgcgtgcggctggtcaatccctgtccgcagctgcaggcggccggtgccggatacggctggccggtgctgagctggcggctggaatag

SEQ ID NO: 214808 - DNA, 681 bp, Klebsiella pneumoniae
atgcttgccgggcctacagacagtcggagccggacgagtaggccgggtaaggcgcagccgccacccggcaataaagcggctccgtgcctgatggcatcgcccggtggtgctgcgcttaccgggcctacgaggtgtgagcctgtgagaggccccggtaggccgggtaaggtgccagccgccacccggcaaaataacggcgcaaccggaaatgtccctgcccgcgctgcgcttagcagggctacagtttctatgttatttccggacagattgcgctcccggttaattgtctgcgttatggcactcatggcgctgggagcgcacagggggcggccagtcgccgccgccccctgtacccccgggctccggccagcaacatcgccgctgcgcggtcccttcgacttatccctgcaggcttcgggtcgggccgaggcagcgtccctgcaaaacacggccctcagcccgcatccatgcgggctgccccggccttccgggaacgtctcagcgatgttgaggccgccagcaccggcagtttcagcagcccctgcgccagcggtgatttggggttgtaggccgggtaaggcgcagccgccatccggcataaacgcagctccgtgcctgatgccatcgcctggcggcgccgttgcttgccgggcctacagacagtcggagccggacgagtag

SEQ ID NO: 214809 - DNA, 357 bp, Klebsiella pneumoniae
atgggttttccatcgccagcaaccgactaccaggaaaacaggctgtcactcgatcagcactgtaatacaggagcgccgggagtattcttttttcgaagtgatacctactctttccgggaagggataaagcctggtgcgctgctcatagtagattttgggggcacgcccgttgacgggtctttggtgctctgtgtcctggaacaagaattcaggatcatgcgattgcgactacaccccaagcggtgtctccaggaactcgataagctggataacttcagggctatacctgatgacgatgaggacgggttggaggtcaggggggtcattacgcacattgtggcactgttgcaaagttag

SEQ ID NO: 214810 - DNA, 240 bp, Klebsiella pneumoniae; identical to SEQ ID NO: 80558

SEQ ID NO: 214811 - DNA, 663 bp, Klebsiella pneumoniae; identical to SEQ ID NO: 97239

SEQ ID NO: 214812 - DNA, 663 bp, Klebsiella pneumoniae
atgggtaaaatcttgcttgtcgtatcagataaaggtggggtaggcaaaagcacctacgtggctaacacaggctcaatgctggtcaacaaaggtaagtcggtaattatcctgaagacagataaaaaccacgatctgttgagctggaacgaaaagcggacagataacggcttactcactatcccggttcacgcagcttacggaaacgtcagcaacgaaattaagcgccttagtaagctgtgtgaagttctcattgtcgattgccccggccacgacagccaggagttccgtagcgccctgacagtatcagatatcgtggtgacactggttaagccgtcctctgatttcgaaagcgaaacactgaccagtgttacagagaaaatccgcaccgctcagaaagctaacgcagctctggaaccgtgggtgctgttcaccagaatcaactcagcgaaaccccgccacagaaaagcggccattgatctggataaattactgcgttcggacaacatctggattcaacctctgaaaacccggatatccgagctggatgtgtatgaaagcgcctgtaatgaaggggcaggggtacatgacgttagccgggcatcgagcctttcaacagcgaaagcacagattgaacttgtggcacaggaaattggcattttatag

SEQ ID NO: 214813 - DNA, 285 bp, Klebsiella pneumoniae
atggctttaaaactaaaccgcccgaacatcgatgaatctcagcaaccagcaacaaacgcagaaaccgcgcgttttatctccggcgctaccagagcgcctgtagcgggtaaaccaaagttgatgaacttcagactgccagcgtactttgaggagatcctggaagcggaggcgcagagaacaggccagagcaagacaaccgttctaaaggcagcgctggccgcattcgataacctggacgagaacctgaaaaaccactggctgcttgaatctgcaaaattagggtag

SEQ ID NO: 214814 - DNA, 312 bp, Klebsiella pneumoniae
atgttcatattcagatatattaaaactcttattaatatctacttgttatacatccaaccgatattggggatgttccttataggtataggcttatgggggttctatgcacctgatgagggaacttgtactaatctcaatattgagttatgcgctgtatcagctattgatgttctgaagcctgctatttttgtatttttaggcattattaccgttgccggatggtactttaccgaacttcagccgaagctaaggggggagggcaagtatatgaaggtaaaaacaggtgtaaaaccggaagatttcgttaagtaa

SEQ ID NO: 214815 - DNA, 285 bp, Klebsiella pneumoniae; identical to SEQ ID NO: 153755

SEQ ID NO: 214816 - DNA, 354 bp, Klebsiella pneumoniae; identical to SEQ ID NO: 153756

SEQ ID NO: 214817 - DNA, 444 bp, Klebsiella pneumoniae; identical to SEQ ID NO: 153757

SEQ ID NO: 214818 - DNA, 873 bp, Klebsiella pneumoniae; identical to SEQ ID NO: 153758

SEQ ID NO: 214819 - DNA, 516 bp, Klebsiella pneumoniae; identical to SEQ ID NO: 153759

SEQ ID NO: 214820 - DNA, 237 bp, Klebsiella pneumoniae; identical to SEQ ID NO: 153760

SEQ ID NO: 214821 - DNA, 552 bp, Klebsiella pneumoniae; identical to SEQ ID NO: 153761

SEQ ID NO: 214822 - DNA, 270 bp, Klebsiella pneumoniae; identical to SEQ ID NO: 153762

SEQ ID NO: 214823 - DNA, 243 bp, Klebsiella pneumoniae; identical to SEQ ID NO: 153763

SEQ ID NO: 214824 - DNA, 339 bp, Klebsiella pneumoniae; identical to SEQ ID NO: 153764

SEQ ID NO: 214825 - DNA, 165 bp, Klebsiella pneumoniae; identical to SEQ ID NO: 153765

SEQ ID NO: 214826 - DNA, 258 bp, Klebsiella pneumoniae; identical to SEQ ID NO: 153766

SEQ ID NO: 214827 - DNA, 1320 bp, Klebsiella pneumoniae
atgcaaacctatttcgaccagctcgaacgcgttcgctttgccggacccaaaaccgataatccgctggcatttcgccactataatccggatgaaatcgtgctgggaaaacgcatggcagaccatctgcgttttgccgcctgttattggcataacttctgctggaatggcgcggatatgtttggcgccggttcgtttgagcgtccctggcaggccgcgggcgatgcgctggaaatggccaaacgcaaagcggacgtggcgtttgaatttttctacaagctcaacgtgccgtattactgcttccacgatgtcgacgtctcgccagaaggcgcgtcgctgaaagagtatttgcataatttcgccatcatgaccgaggtgctggcggagaaacagcagcaaaccggcgtgaaactgctgtggggcaccgccaactgctttacccacccgcgctacggcgccggggcggcgaccaaccccgatccggaggtgtttgcctgggcggccacgcaggtggtgaccgccatgaacgctacccaccagctcggcggcgaaaactatgttctgtggggcggccgcgaaggttacgagtccctgctgaataccgacctgcgccaggagcgtgagcagattggccgcttcctgcagatggtggtggagcacaagcataagattggctttggcggcacgctgcttatcgagccgaaaccgcaggagcccaccaagcatcagtacgattacgatgtcgcgacggtgtatggtttcctgaagcagtttggtctggaaaatgagatcaaggtgaacattgaagccaaccacgccaccctggcggggcactctttccaccatgaaatcgccagcgccatcgcgctgggcattttcggctccgttgatgccaaccgcggcgatgcgcagctcggctgggataccgatcagttcccgaacagcgtggaagaaaataccctggtgatgtatgagatcctcaaagccgggggattcaccaccggcggcctgaactttgacgccaaagttcgccggcagagcaccgacaaatacgacatgttctatggccatattggcgccatggacgtgatggcgctgtccctcaagctggccgcgcgcatgattgaggatggcaagctcgatcagggtctggcaaaacgctatgccggctggcagggcgagctggggcagaaaattatgagcgggcagatgtcgctggataatattgcccgatacgctgagcagcataatctgaatccgcagcctcagagcgggcgtcaggaattactcgaaaatctcgtcaatacctatatctttggttaa

SEQ ID NO: 214828 - DNA, 1455 bp, Klebsiella pneumoniae
atgagtaaaaacataatgcacagtcggcatgatgaatatcataaattaacccgcggagaacgaattggttatggcatgggcgactttgcgcaaaacctggttttcggcacaattgggggttttctggctttgcatatgctgacggtaaataccatcagcacggcaacggcaggctttatttttctttttgtccgcatcattaacgtgttttgggatccgatggtcggaacctatgtggataaacgaacctcaaaagcagggaaatatcgtccctggctgttacgagccggcgtgccgctggtgatcctgtcggcattactgttcgcgccaatccccggagtgaaaggttcggtggctttcgcctttattatttatctggcgctggacctggtttattccttagtcaatattccctatggctcgctgaatgcctcgctgacccgcgacccggaatcgatcgataagctgaccagtacccgcatgatgctggccaacagcgccaacctgctggtctataccctgttcccgatgtttgtgcagatggcggcgccgaaagatcgtagcctgaaagacaccggctttttcggccttgagctgaatctgggcaactataccgatccgtcagcgaactacgcctggttcggcgtgtacgccatctatatgatcatcggcgcggtggccctgtttatctgctacaaatgcaccaaagaacgcgttgtcgcgaccgccgagcagaccgccaacgtcaaaactaccgaccttttccacgagctcagacataaccgtccgctggttattctcggcatgttctttatgctggcctttaccttcatgttcttcatgaacaccgttaacggcttcttcaaccagttcgtcgtcggccattccgaatggatgggcgcggtgggtctcgtcgcgtctattcccggcatcgccttcccggtgttctggccgaaactgaaaaaaatctttggtaaaaaaggcttcttccatctgttcctcgccatgttcatcgtcggcgaactgctgacctacgtctggtcccgcgaagggatgcacgacgccctgtggctggcctacatcgccacctttattaaacagtggggcttaacctccgccaccggctttatgtgggcgctggtaccggaagttatcgcgtacggcgaattaaaatcgggcaaacgcaatgccgccattatcaatgccattatgggactcttcttcaagatcggcttcaccatcggcggcgctatcccgctgtggctgctggcggtgtatggatttaatgaaagcggcgccgtgcagagcgccagcgccatcgacgggatcattatgaccgcggtgtggatcccaattgcgctggccgctatttcgatggtgatcatgcaggtttatccgatctccgataaacatgttaccgacatcaaccgtcagctggatgagatccgcgtgtag

SEQ ID NO: 214829 - DNA, 1680 bp, Klebsiella pneumoniae
atgtcacttattcaaaacccgatattacgcggctttaatgccgaccccagtattattcgcgtcgaggatacgtactatattgccaactcgacgtttgagtggttcccgggcgtgcgtttacatgagtccaaagacctgaaaaactggaacctgctgccttcgccgctctccaccaccaccctgctggatatgaagggcaacccctcctccggcggcatttgggcgccggcgctctcctgggccgacgggcaattctggttggtgtataccgatgtgaaggtcaccgaaggcgcctttaaagacatgaccaactacctgaccacggcgaaggatattcggggcccgtggagcgacccgatcaagctgaacggcgtcgggtttgacgcctcgctgttccatgacgacgatggccggaaatatatcgtccagcaaacctgggatcaccgggagtaccatcaccccttcgatggcattaccttaacggagctggataccaagacgctgaagttaatgccggaaaccgcgcgcaccatctaccgcggcaccgccgtggcgctggtcgaggggccgcacctctataaactgaacggctactactatctgtttgccgcccagggcggcaccgtgtttacccaccaggaggtggtggcgcggtcgaaaaccctcgaggccgacagcttcgaaaccgagccgggcgacgtgttcttaaccaacgtcgataccccggacagctacatccagaaacagggccatggcgcgctggtctccactccggaaggcgaatggtattacgcctcgctctgcgcccggccgtggaatcgcccgggggaatccatctacgacccgcgcggctggtcaaccctcggccgggaaaccgcgatccagaaagtgtactgggacgacgagggctggccgcgtattgaaggcggtcacggcgggaaaaccttcgtcgaagggccaaaagacgccatcttcaccgaaagcgccagcgataatagccagcaggatgactttacctcgccagcgctcgacccgaactggaataccctgcgggtgccgtttacggccaaaatgggcaccaccggcgacggcaaattaaccttaatcggccagggttcgttagccaatacgcatgacctgtcgctgattgcccgccgctggcaggccttctattttgacgccgcggtgaaggtgaaattcgagcccttcagctaccagcagatggccgggttaacgaattactataacgaccgccactggagcttcgtcttcctgacctggaatgaaattaacggcaaggtcatcgaagtcggcgaaaataaccgcgggaaatacacgtcgtacctgaaagataacgccatcaaggtgccggacggcgtcgaatacgtctggttccggactaaagtccgcaagcagacctacagctatgaatacagcttcgatggcgtgacgttcaccgagatcccggtccagctggatgccgcggtactgtccgatgactatgtgttgcagagctacggcgggttctttaccggggcgttcgtcggcctggcggcggtagactacgccgggtacggcacccaggctgagttttatcagttcgagtatcaggaactgggcgataggttagcggccgatgggagctatagctgggaggctggcgagacgcgggataagtaa

SEQ ID NO: 214830 - DNA, 639 bp, Klebsiella pneumoniae
atgaaaaaactaccggaccatttatccagggaatgcatcatcgctgccattcgcgcttacgatgcaggcgttgcgcatcagtttaaaagcgcgcgtctgtacgagatcgagtttgaggggcgtcggtatccttcaaaagccatcgtcgggttagcggccacgcttgccacgggaacggaatttaccccggcggatttcagcggagggattaaatccaaatgcgtgcgtctgttactggatcaaggatttacgatcgcgtcgcagggcgctggcgatgacgaggttgcgcttttccccgatgagggacagacgactatggagttcgtggaaggggcggcgatgcaggtggtggtcaatcgctatgagcgcgaccgtcaggctcgtcaggcggcgcttcgcctgcatggctgccggtgtcaggtatgcggtctggatatggccagccgctatggcgaaatcggccagggttttatccatatccaccatctcattccgctggccgggatcaagcaggactaccgtctgaaccctgaaaccgatctgatcccggtatgtcccaattgccatgcaatgctgcaccggcgagatccgccgtttactcccgaagagctgaaggcccggctgcgccccgcagactga

SEQ ID NO: 214831 - DNA, 870 bp, Klebsiella pneumoniae
atgccctccagcacgaccctgcaacacgcgatcgagaacatcactatctggcgcaaaggcgaacagcgtgcgccgcataagccactgttactgctgtacgtcctttcccagtaccagcgcggccatgcgcggatgttcgactacgcctcggagatacgcgatgagctgcatagcctgctggaacgctttggcccacagcgccgccagtaccggccggacatgccgttctggcgcctgaaaggcgacggcttctgggagctgcacaacagcgagcagtgctcaatccagggcagccgaaagccgcccggcaaagagctggagctctgtcacgtcgccggcggcttcgatgagccgcattttgcgttactcaacagaaataagaggctgatcaataccctcgcccatcagatcctcgaggcgcactttccggagagtattcaggaagaactggcagaagagatggggtttgatctgctgcagatccgcaaagagcgcgacccgcattttcgccagcaggtgctgcgcgcctataactatgagtgcgcgatctgcggcttcaatatgcgccatgataatacctccgtcgccctggaagcggcccatatcaaatggaagcagcacggcggcccatgcgaaatccctaacggcctggcgctctgcgcgattcaccataaggcttttgataaaggatccattggtctggatgaggatatgcgcatccaggtttcgccagcggtgaacggcggaggcatcgttggcaggctgttctgggattttgatggtaagccgattaccttgccgcaggggaaagaatgttatccccaggaggggtttgtggcatggcaccggcgggaggtgttcagggggtaa

SEQ ID NO: 214832 - DNA, 963 bp, Klebsiella pneumoniae; identical to SEQ ID NO: 104004

SEQ ID NO: 214833 - DNA, 489 bp, Klebsiella pneumoniae; identical to SEQ ID NO: 136038

SEQ ID NO: 214834 - DNA, 198 bp, Klebsiella pneumoniae; identical to SEQ ID NO: 136037

SEQ ID NO: 214835 - DNA, 2796 bp, Klebsiella pneumoniae
atggccagaaaacaatgccaggtctgcggccaacccgccaccgtgcgggtggaagccaatctcaacggtcgtcacagcaccatgctgttgtgcgacgaccattaccggcaattagtgcgccagcaaaagcgcaccgtttcgccgctggaagccttgttcggctcgcgcagcggcctgttcgaggacttcctcggcagtgacttcttccgcatcggcgacgacgcgacgccagttgccgccgataccgatgacgtggtcgatgcctcgtttggcgagcccgccgccgcaggttcgggtgcgccgcgccgtcgcggcagtgggctggccagccgcatcagcgaacagtcggaagccttgctgcaggaggccgccaaacacgctgccgaatttggccgctccgaggtggataccgaacatctgctgctggcgctggccgacagcgacgtggtcaagaccatcctgggtcagttcaagatcaaggtcgatgacctcaagcggcagatcgagtctgaggccaagcgcggggacaagcccttcgagggcgagatcggcgtgtcgccgcgcgtgaaggatgcgctcagccgcgccttcgtggcctccaatgaactcggccattcttatgtcggtccagagcatttcctgatcggtctggctgaggaaggcgaagggctggccgccaacctgctgcgccgctacggcctgacgccgcaggcgctgcgccaacaggtcagcaaggtggtcggcaagggcgccgaggatggccgcgctgagacgccgaccaacacgccagaactcgacaagtactcgcgcgacctgaccaagatggcgcgcgacggcaagctcgacccggtgatcggccgcgcgcaggagatcgaaaccaccatcgaggtgctggcccggcgcaagaagaacaacccggtgctgatcggcgagccgggtgtgggcaagaccgccatcgtcgaagggctggcgcagcgcatggtggcgggtgaagtgcccgagaccttgcgcgacaagcgcctggtggaactcaacatcaacgccatggtggccggcgccaaatatcgcggcgagttcgaggagcgcgtgcagaaggtgctgaaggaggtgaccgagcaccagggcgagctgattttgttcatcgacgaggtgcacaccatcgtcggtgccggccagggcggtggcgaaggcgggctggacgtggccaacgtgttcaaaccgatgatggcgcgcggtgaactcaacctgatcggcgccacgacgctgaacgagtaccagaaatacatcgagaaggatgccgcactggagcggcgcttccagccggtgacggtacccgagccgacggtggcccaggccatcatgattctgcgcggcctgcgcgacaccttcgaggcgcaccacaaggtcagcatctccgaggacgcgatcatcgcggcggccgagttgtccgaccgctacatcacggcgcgcttcctgccggacaaggcgatcgacttgctcgaccaggcggccgcgcgcgtgaagctgtcggccacggcccggccggtggccgtgcaggagctggagtccgaactgcaccagctgcggcgtgaacaggattacgtggccgcgcgcaagcagtacgaccaggccgccgagctcgggaagcgcatcgaagccaaggaggccgagctcaagaagctcgtcgaggactgggagcgggagcgggcctccggcagtgccgaggtcaaggcggaacacgtggcgcagatcgtctcgcgcctgaccggcatcccggtcaacgagttgacggtggaagagcgcgaaaagctgctgcacttggaacaacggctgcacgagcgcctggtgggacaagacgaggcggtccgtgccgtggccgatgccgtgcggctgtcccgcgccggcctgcgtgaaggcagcaaaccggtggctaccttcctgtttctgggcccgaccggggtgggcaagaccgagctcgccaaggcattggccgaatcgatctacggcgatgagcacgccctgttgcgcatcgacatgtcggaatatggcgaacgccataccgtggcgcgattggtgggcgcgcctccgggctatgtcggttacgacgaaggcggtcagctcaccgagaaggtgcggcgcaagccctacagcgtgctgctgctcgacgagatcgagaaggcacaccctgacgtatacaacatcctgctgcaagtgttcgacgacggtcgcctcaccgacggcaagggccgggtggtggatttcaccaacaccatcatcatcgccacgtccaacctgggttcggacatcatccagcgacggctgaaggcgcgcggggcggccggcgaggagtacgaaaagaccaaggccggagtcatggacgtgctgcgcggccatttccggcccgagttcctcaaccgcatcgacgagatcatcgtcttccatgcgctgggcaaggaggagatccgccacatcgtcggcctgcagctcgatcgcgtggcgcgcagcgccgccagccagggcgtgacgctcactttcgatcagacgctgatcgaccatttcgcggaagaaggctacaagcccgagttcggtgcgcgtgaactcaagcgcctgatccgcagcgagctggaaactgcgctggcgcgcgagatgctcggcggcggcatcggcaagggcgatcacgccagcgcacgctgggacgacaaggccgaacgcgtggtgttcgaacgcaaagagccaccgcagaccccggccgagccggagcagccggatgccgcgaaggcgagcgacgcatcttga

SEQ ID NO: 214836 - DNA, 570 bp, Klebsiella pneumoniae; identical to SEQ ID NO: 164821

SEQ ID NO: 214837 - DNA, 264 bp, Klebsiella pneumoniae; identical to SEQ ID NO: 101375

SEQ ID NO: 214838 - DNA, 294 bp, Klebsiella pneumoniae
gtggcgcacgtattcggtgaacgcacgttgtccacgctggagcgtcttctgggcctgctgtcggcctttgaggtcgtggtatggatgacggatggctggccgctttatgaatcacgcctgaagggagaactgcacgttatcagcaagcgatatacgcagcgcattgagcggcataacctgaatctgaggcagcatctggcaaggctgggcaggaagtcactgtcgttctcaaaatcggtggagctgcatgacaaagtcatcgggcattatctgaacataaaacactatcagtaa

SEQ ID NO: 214839 - DNA, 1254 bp, Klebsiella pneumoniae; identical to SEQ ID NO: 118524

SEQ ID NO: 214840 - DNA, 3075 bp, Klebsiella pneumoniae
atgacaatgattacggattcactggccgtcgtattacaacgtcgtgactgggaaaaccctggcgttacccaacttaatcgccttgcggcacatccccctttcgccagctggcgtaatagcgaagaggctcgcaccgatcgcccttcccaagagtcgcgcagcctgaatggtgaatggcgctttgcctggtttccggcaccagaagcggtaccagaaagctggctggagcgcgatcttcctgacgccgatactgtcatcgtcccctcaaactggcagatgcacggttacgatgcgcctatctacaccaacgtgacctatcccattgcggtcaatccgccgtatgttcccacggagaatccgacgggttgttactcgctcacatttaatattgatgaaagctggctacaggaaggccagacgcgaattatttttgatggtgttaactcggcgtttcatttgtggtgcaacgggcgctgggtcggttacggacaggacagtcgtttgccgtctgaatttgacctgagcgcatttttacacgccggagaaaaccgcctcgcggtgatggtgctgcgctggagtgacggcagttatctggaagatcaggatatgtggcggatgagcggcattttccgtgacgtctcgttgctgcataaaccgagcacgcaaatcagcgatttccatgtagccactcactttaatgatgatttcagccgcgctgtactggaggcagacgttcagatgtacggcgagctgcgcgatgagctgcgggtgacggtttctttgtggcagggtgaaacgcaggtcgccagcggcaccgcgcctttcggcggtgaaattatcgatgagcgtggtggttatgccgatcacgtcaccctacgtctgaacgtcgaaaacccgaaactgtggagcgccgaaatcccgaatctctatcgtgcggtggttgaactgcacaccgccgacggcacgctgattgaagcagaagcctgcgatgtcggtttccgcgaggtgcggattgaaaatggtctgctgctgctgaacggcaagccgttgctgattcgcggcgttaaccgtcacgagcatcatcctctgcatggtcaggtcatggatgagcagacgatggtgcaggatatcctgctgatgaagcagaacaactttaacgccgtgcgctgttcgcattatccgaaccatccgctgtggtacacgctgtgcgaccactacggcctgtatgtggtggatgaagccaacattgaaacccacggcatggtgccaatgaatcgtctgaccgatgatccgcgctggctacccgcgatgagcgaacgcgtaacgcgaatggtgcagcgcgatcgtaatcacccgagtgtgatcatctggtcgctggggaatgaatcaggccacggcgctaatcacgacgcactctatcgctggatcaaatctgtcgatccttcccgcccggtacagtatgaaggcggcggagccgacaccttcgcaaccgatattatttgcccgatgtacgcgcgcgtggatgaagaccagcccttcccggctgtgccgaaatggtccatcaaaaaatggctttcgttgcctggagagacgcgcccgctgatcctttgcgaatacgcccacgcgatgggtaacagtcttggcggcttcgctaaatactggcaggcgtttcgtcagtacccccgtttacagggcggcttcgtctgggactgggtggatcagtcgctgattaaatatgatgaaaatggcaatccgtggtcggcttacggcggtgattttggcgatacgccgaatgatcgccagttctgcatgaacggtctggtctttgccgaccgcacgccgcatccggcgctgacggaagcaaaacaccagcagcagtttttccagttcagtttatccgggcgaaccatcgaagtgaccagcgaatacctgttccgtcatagcgataacgagctcctgcactggatggtggcgctggatggcaagccgctggcaagcggtgaagtgcctctggatgtcgctccacaaggtaaacagttgattgaactgcctggactaccgcagccgaagagcgccggacaactctggctaacggttcacgtagtgcaaccgaacgcgaccacatggtcagcagccggacacatcagcgcctggcagcagtggcgtctggcggaaaacctcagcgtgacactcccctccgcgccccacgccatcccgcaactgaccaccagcgaaacggatttttgcatcgagctggataataagcgttggcaatttaaccgccagtcaggctttctttcacagatgtggattggcgataaaaaacaactgctgacgccgctgcgcgatcagttcacccgcgcaccgctggataacgacattggcgtaagtgaagcgacccgcattgaccctaacgcctgggtcgaacgctggaaggcggcgggccattaccaggccgaagcagcgttgttgcagtgcacggcagatacgcttgccgacgcggtgctgattaccacggtccacgcgtggcagcatcaggggaaaaccttatttatcagccggaaaacctaccggattgatggaagtggtcaaatggcgattaccgttgatgttgaagtggcgagcaatacgccacatccggcgcggattggcctgacctgccagctggcgcaggtagcagagcgggtaaactggctcggattagggccgcaagaaaactatcccgaccgccttactgcggcctgttttgaccgctgggatctgccattgtcagacatgtataccccgtacgtcttcccgagcgaaaacggtctgcgctgcgggacgcgcgaattgaattatggcccacaccagtggcgcggcgacttccagttcaacatcagccgctacagtcaacagcaactgatggaaaccagccatcgccatctgctgcacgcggaagaaggcacatggctgaatatcgacggtttccatatggggattggtggcgacgactcctggagcccgtcagtgtcggcggaattccagcttagcgccggtagctaccattaccagttgctctggtgtcaaaaataa

SEQ ID NO: 214841 - DNA, 1149 bp, Klebsiella pneumoniae
atggcgcaaaacatttcgtggtatggcatgatagcacccgaagagagtcaattcagggtggtaaatgtgaaaccagtaacgctatacgatgtcgcagagtatgccggtgtctcttatcagaccgtttcccgcgtggtgaaccaggccagccacgtctctgcgaaaacgcgggaaaaggtggaagcggcgatggcgcagctgaactacattcccaaccgcgtggcacaacaactggcgggcaaacagtcgttgctgattggcgttgctacctccagtctggccctgcacgcgccgtcgcaaattgtcgcggcgattaaatctcgcgccgatcaactgggtgccagcgtggtggtgtcgatggtagaacgaagcagcgtcgaagcctgtaaagcggcggtacataaccttctcgcgcaacgcgtcagtggtctgatcattaactatccgctggatgacgaggatgccattgctgtggaagctgcctgcgctaatgttccggccctatttcttgatgtctctgaccagactcccatcaacagtattattttttcccatgaagacggtacgcgactgggcgtggagcatctgatcgcattgggtcaccagcaaatcgcgttgttagccggtccattaagttctgtctcggcgcgtctgcgtctggcggactggcataaatatctcacacgcaatcaaattcatccgatagcggaacgggaaggcgactggagtgccatgtccggttttcaacaaactatgcaaatgctgaatgagggcatcgttcccactgcgatgctggttgccaacgatcagatggcgctgggcgcaatgcgcgctattaccgagtccgggctgcgcgttggtgcggatatctcggtagtgggatacgacgataccgaagacagctcgtgttatatcccgccgttaaccaccatcaaacaggattttcgcctgctggggaaaactagcgtggaccgcttgctgaaactctctcagggccaggcggtgaagagcaatcagctgttgcccgtctcactggtgaaaagaaaaaccaccctaccgcccaatacgcaaaccacctctccccgcacgttggcagattccttaatgcagctggcacgacaagtttcccgacttgaaagcgggcagtga

SEQ ID NO: 214842 - DNA, 1011 bp, Klebsiella pneumoniae; identical to SEQ ID NO: 101477

SEQ ID NO: 214843 - DNA, 1197 bp, Klebsiella pneumoniae
gtgatagtcctcagcaacaatgacggctgcgtaatcgcacgcagccgcgaagcccgcgccatcggtattccgatgggcgccccctggtttaaggtgaagggactggcggaaaagcataacgtggccgtgttctccagcaattattcgctgtaccacagtatgtcagaacgggtcatgcgttgccttgaggcgctggcgccgcgcgtggagcagtacagtatcgatgagatgttcctcgacgtcgccggcatcgacaactgcgtggattttgaggattttgggcgccagttgcgagagtatgtgcaccgccacaccgcgctgaccatcggcgtcggtatgggacccagcaaaacgctggcaaaatcagcccagtgggcttccaaagagtggccgcagtttggcggcgtactggctttgaccccggataatccccgccggacagagaaactgctttcactgcagccggtggaagaaatatggggtgttgggcgccggatctcgaagaagctgaacacaatggggatcaccacagcactacagctggcgcgcgcgaatccagcattcatcaggaagaatttcaacgtggtgctggagagaaccgtccgggaactcaacggagaaagctgtatttcgctggaagaagcgcctccgccaaaacagcagatagtctgcagccggagttttggtgaacgcatcacggaatatgacgcaatgcgccaggctgtctgccagtacgcggagcgtgctgcggagaaactacgcagtgagcggcagtactgcagacacatcgcggtctttgtgaaaacgtcgccgtttgccgtgaaggagccttactacggaaacatggccagcgagagtctgccgttcccgagcagagactcgcgggatatcatcgccgctgccgtcagagccctcggacgcatctgggtccccgagcaccgttatgccaaagccggcgtgatgctgaacgatttcacgcctgcgggggtttctcagttgagtctgtttgatgatgttcagccccgggcaaacagcgaagccctgatgaacgttgtggacgggattaatcattcaggacttgggaaagtctggtttgcgggacgaggcatcgctcctgactggcagatgaagcgagatttactgtcgccagcatataccacaagatgggcggacattccgtcagcaaggctctgttaa

SEQ ID NO: 214844 - DNA, 228 bp, Klebsiella pneumoniae; identical to SEQ ID NO: 200686

SEQ ID NO: 214845 - DNA, 627 bp, Klebsiella pneumoniae; identical to SEQ ID NO: 200685

SEQ ID NO: 214846 - DNA, 621 bp, Klebsiella pneumoniae
atgttcgtttttggatatctccgggcatccacttcagagcaggatgccagccgggcaaaaaatgtactgaaggcgtttgcaaaccaacatggccaccgtattgctggctggtatatcgataatgtctccggtacgacaatgaaccgccctgaactgatcaggcttcttggtgatgcggaacctggtgatgtgatcctcattgaacaggtcgacaggctcactcgcctggatgatgcaggctgggagacactcagaaagcaaattacagacaagcagctggccatcgtcagtcttgatctaccgaccagctatctggcgctatccagcacagtaagtgatgactttacccgaagcatgctgaaggccgtaaatggcatgatgctggatatgctggccgctattgcccgaaaagattacgaagaccgtcgacgtcgacagtcagagggtatcagtaaggcgaaagcagaaggaaaataccggggcagggtggccgatgcgcagaaacacgaactgattcgcactctgcgcctggtcaatggaaaatcgctgcgagaaacagctcgcctggctggcgtttctaaaatgactgtgatccgggtctgctccagcgctgataaataa

SEQ ID NO: 214847 - DNA, 267 bp, Klebsiella pneumoniae; identical to SEQ ID NO: 138609

SEQ ID NO: 214848 - DNA, 954 bp, Klebsiella pneumoniae; identical to SEQ ID NO: 181239

SEQ ID NO: 214849 - DNA, 612 bp, Klebsiella pneumoniae
gtggcgctgacacacaaaacagggcatctggcatggtgcgcacttgtcgcgctggcactggccagaaaggagcagggagagctgtctcctgcacaggaaaacctttttctcacccgctggctcgcggcagcactgaagcaacggcgattctcgcgcgatgtggcacaggatatcgggtggttactgaatcaggggcgtttgctgggtgtgagagcaaagctggcagacaaactggactatgtctggcgctcctgcagcggcgagctgactgaacagaacgacatgttccggctgacgtatgcgctggaaacagcgaaagacatgggctggaattaccgcgtaatgagcgacagagaatgggccgggcgatatgccttggtactcaatcctggagtaaacggcgtttatctcttacggacaaacctcgatgccgcttttgacgacaatggccagcagacaaatccgctgacagcacgtctgacagggagcgtagcaggggtaatgaagctgttaaatcgctgtggctggcaggcagagcctgagtctggtgcctccctgccccaccagtattcactgatggccggacagggagtgccaggaaagggggattag

SEQ ID NO: 214850 - DNA, 279 bp, Klebsiella pneumoniae; identical to SEQ ID NO: 181237

SEQ ID NO: 214851 - DNA, 636 bp, Klebsiella pneumoniae; identical to SEQ ID NO: 67329

SEQ ID NO: 214852 - DNA, 852 bp, Klebsiella pneumoniae; identical to SEQ ID NO: 67330

SEQ ID NO: 214853 - DNA, 399 bp, Klebsiella pneumoniae; identical to SEQ ID NO: 67331

SEQ ID NO: 214854 - DNA, 1110 bp, Klebsiella pneumoniae; identical to SEQ ID NO: 133099

SEQ ID NO: 214855 - DNA, 276 bp, Klebsiella pneumoniae; identical to SEQ ID NO: 67332

SEQ ID NO: 214856 - DNA, 699 bp, Klebsiella pneumoniae
atgaaaagaaaactcttaggaatattaatcacattaaacgtgctggctccatttgttcatgcagatgaaccgttcagtattccggcgtcagcagtaaatacacaagctttcgatgaaccaccagattcagccgaagctatgaatattgtgaccaatgcagttaaacaagttccgggcacagtggctgtaaaccaaccccaaattgacagcaatcagccgcctgttaatacgaaccgtccgacaactgcactacctgcagcccccggactttctccggcgagtgcatcatcacctgcggttcggtcaatgaccgattccttgttaaacaatacgccttctgaggggcccggtcagaaagcaataaatgaagcaaaaaaaaggtatcagccaatgcaaaacgtcacggtacctccgggaggaaacattgttctccctgtttcattaggtttgcaaaaccggatccagacgacgtttaagaacgtaagcgtttctacaacggcaccctcagaagacacaaccatctatgttgaaggtggtagtgtctttataacgaccgtaaaagatgcgcctataggcatcatgttgtccgaagaaggagttccagaatcaacttataacctgacattaatccctatagatgtgccaggtgcaatgattcgtgttcaaacacagttaaggaaggtgcgaacaagttcctga

SEQ ID NO: 214857 - DNA, 861 bp, Klebsiella pneumoniae
atgagcgagaaaaagtcacttttagaacacgtcatgaacttcttcaggtttgtacctaagaagaagacggttgataaatcaaaggatgacgaggctgacgatgttcagtctgaaaagactgaaagttacagcactgataaaattcagcgtcagaaggcaatccttaatttgtcaaaagaactcgcccctcccaaacaagggaagaaaacgggtgctgagctgacctacagtcagttaattcaacgtgacaaaaaattaatcttaaataacagattgttaacggttattgctggccttttggttattaaagtggtctttttttccacaacagagatcattgccatcccccctgatatgactgaggaagtatccgttgccggaagcaaggccagtgagtcatataagacgcaatggggtctatttatagcaaccacattgggtaacattaacccgaaaaatgtgaatttcgttaccagttatattctgaagatgtttcctgcatctaaacaaaccgagttagaggctgaactgaaaaaagcctcggatttaatgcttgcgcggaaggttgatcagacctttgttgctgaggacgttaattttttaccgggtgataatgttctttatgtctgggggactcgcaaaacgaaattcctaaacgtctctgataaggaacaaactgagcgttggacgtatgagatggttttgagtgtaaaaagtggacgaccccgaatcctctatctaaaccagtactcaggaactccgaacatcaaaaaagtcacagttaacgggaaggtattggaaaaagagttcactgaaaataccgacatgaacaagcaacagaacgaagcagaagcccaataa

SEQ ID NO: 214858 - DNA, 369 bp, Klebsiella pneumoniae
atgatccagaaatcaatggctatgagcggtactactgctaacttcaatctggctgaaagcctgcgtaatatggtcagcaataaaatgttccaggtatttgtagcgctgttgtgcgctgcattgttctcatcgattgcgctggcgggcggtgatgacggtgccctgggtgaaatttggacccaactgtcagaagcgttaagtggcgcgcctgggaaggccttggcagcatgtatgctgatctcagcattctacttctctatcggacgtccgaacccgggcctggcgctggtatcattccttatgatgatgattctggctaacggtgaaaagatcatcaccggtttcctggatgctggtgtagcgctgtaa

SEQ ID NO: 214859 - DNA, 315 bp, Klebsiella pneumoniae
atgaaaagtcggatggtagaggtagctggtttaaatcttaaaatttccttacataacaatatgttatctttgagctgcaatattgacgggctcagtgtttacaatactagtcgtattattcgcaactcaaaactaaccgaatctgagattttcgcaaaaattgacgctgattgggttagcaaggtcttctccctaaatatcaggcagataaacaacatcgtccattccaatgtcagtgtaatacctgtacttactcaacctaaacaggtaaacgtatcggctggagcaatggtgtcctgtttcaagaatttctga

SEQ ID NO: 214860 - DNA, 669 bp, Klebsiella pneumoniae
atgtggatcacaaaagataacgaaattatctcagacgctgagccggattcagacggttttctagaagtaagccgtccatgccccgactgtttaggttcaggtattaactgcctccagtgtgctggttctggttcattgccacctgttatggaaaaagtttttcctgtgtatgagtggatagctaaaaactctctgaagatgccgtttaaatcccctgaacaaacccttattaaacaatttctgaacactatattggctactcccaatcaggataaaagtaatctatacgcagcacttgtccaaaaattggataaaagttactttcctacaaagttgcaatatcgatgtctgaaacctgctgtgtcaagaacaagatcagcagctaaaattcaagtacggccgtttaatgccaaaatcggggctagtttgtatttggttttcaccgtaattaaaattcaagtgctcactagaaaatgttcctctgagaatttttcttccttacttttagaaacctctgatcaccggcattttattgcttatgattctcatccatcagggcttaaggtaggggacattattaattgcaatgttcgagttgtaaaacgcctctggattaataacatgagtatattgcaggtgaaaatggtctcatcttctctgatcaaatga

SEQ ID NO: 214861 - DNA, 786 bp, Klebsiella pneumoniae
atggggcaatacatactcgttatgaatcataaaaagaatttccaagagatagggcttttacaggatttctttagaaaaaaccataaatcttcctttaattgtaatcaaaaaaaagttgagatcacttccagtgatatcaccccacttctcgtaaaaggtaaaagtgactttcctcagggtacgatttcattatccggcccggtgatgcatttgcgttatcaacctttgtggtttgccattttgttgggtttgaacgcgagacaaccaatccataaagaatttcagttcaaaatttcacttattgatattctagaaaagtcggggcgtgtttgtcagggattaggtattcggcaagtcaactatacactcgctgaagtttcatactttttgttgttactcatagagttcaggttcgagattcaaacaaataatacctataatacctgttcggtttttactgaaatcagtcacgacatagaattgcagtctattagcatggcttatgttagtatcaatcctaaagtggtcgataaactatgggagctgactaattcggtgtctgtttttttgacgacactttttttcgccaaacgatctgagctatacaacctcctgcaaaagttactttcaaaaactgaccctgtttctcttagcgacattgcacctgcaacgaatcaacacgtacagttgttgcgccattacggcttcgtcacctacacaaaaaagaagcaattacttgatattcatagtgttagcgttttgattgaaggactcaacccattgtga

SEQ ID NO: 214862 - DNA, 1179 bp, Klebsiella pneumoniae
atgaaacaagcagctgacttttttatctctacagagcggaacgggcggctagtcaaaaatttgcgtgaatttagtgacgcaaatcctgacatttgccataaagcggttaatggtcaaccgtttatgatcgacccaagggcattagtgttagttccaaactggaactgccgtgagatgggactgggggaggcatattacaaattacctaaaccagccgagcatattcagaaccttaagaaagcatttcttaatggggcagatattgaccctataactgtcgttattgttgacggaaaaccgcttgtacgacaggggaactgtcgtacacgagctgcgctcttggctcaacaagaatcagggctccccattctagtaagattacgtgaattccagggggatgagatagagcaggaatggcattcgcttgatggggctaaatctctccccctttgccccgtaggtcgcggaattgcctatagcagactggtaaatgatgcggggatgtctgtcgaacaggttgcacaacgggaaaacatttctgaaatggctgttcgtcaaatcatttctctgtcatcaatcgatgatgaactaaagacgttgattagccaggatgttatctcttacacactctgtctggaattaattcgtgatcttggcgaaaaggaagctcttgaaaagattcgggccgacctcaacgccaagataaaggtaattaataattcaacagagactgattcccttcctctgaatgtagccgaaataattaagtcacatggtagtcctaaggcagtcagggtcacaaaatcttctctgggagtgcaaccaattccaagaaaactggctcaaaatctcgcggcaagtactaaagaagtttgcaacagattacgagcctcccttccttctgcgtttgatctggaacagattggccctaacgaaaaaatacatattgaaattgacagacatttaatagaacttatatttaattcaggggattctattcgtgaccatgaggctaagctcgagcgtaaaacaacaaagggaaaactttctaattcttctccttcagaagcatctgatgtaaacactgatacaatgccagccaatgatcctctggaggaaccatcttcagaaaatcaggaaatagaattttcactactgaattttcattccgctgtttga

SEQ ID NO: 214863 - DNA, 321 bp, Klebsiella pneumoniae; identical to SEQ ID NO: 103996

SEQ ID NO: 214864 - DNA, 828 bp, Klebsiella pneumoniae; identical to SEQ ID NO: 103997

SEQ ID NO: 214865 - DNA, 864 bp, Klebsiella pneumoniae; identical to SEQ ID NO: 103998

SEQ ID NO: 214866 - DNA, 828 bp, Klebsiella pneumoniae; identical to SEQ ID NO: 103999

SEQ ID NO: 214867 - DNA, 1011 bp, Klebsiella pneumoniae; identical to SEQ ID NO: 104000

SEQ ID NO: 214868 - DNA, 870 bp, Klebsiella pneumoniae; identical to SEQ ID NO: 104001

SEQ ID NO: 214869 - DNA, 636 bp, Klebsiella pneumoniae; identical to SEQ ID NO: 104002

SEQ ID NO: 214870 - DNA, 534 bp, Klebsiella pneumoniae
gtggacaatggtatcgactggtttttcaatttcctatacgtcgagtcgctccgccaggctgtttgtcagtacgcagagcgggcctctgaaaagctgcgtaaagagcgccagtattgccggcatatttccgtattcatcaaaacgtctccgttcgccgtcaaagagccttactacggcaacgtggccacggagaaactgcatacacctactcaggacacccgggacattattgcggccgccacaatggctctggagcgtatctggaaagacgggcaccggtatgccaaagccggagttatgctgaatgacttcaccggctctggcgtttcgcagctgcagctgtttgacgaacgcccgccacgccctcacagtgctgagctgatgagggttctggacgggatcaacaactcagggctgggtaaagtatggtttgccggtagaggaattgcgccatcctggcaaatgaaacgcgatatgctctcccctgcgtacaccactcgctggagagatatccccgttgcgaggatcggttaa

SEQ ID NO: 214871 - DNA, 876 bp, Klebsiella pneumoniae
atgaatgataatgtttatatcggcgaggttataggtccagattgtgaaagtgttaacaataaactcaccgtcacaagtaaggccacagttcagcctgtagccctgatgagattaaatgtttttgttccttcaagcaggcctgcaaagggcaccagaacatcaatcgatgcgacctctgttctcaaggatctggaattctcaaggcgggaggggtacgacgatattcgtataaccggtgaacggttgagtatggccatcgacttcaaggtatgggtcggtatcatagaagctttcagtaagtacggtttaaaaaccaacagcattaagcttacttttcatgagtttgctggaatgtgccgctttgagtctaagagattcgattcccgtcttagaaaaagtatttcagaagctttgaccaggatacgtggcaagaccattacctttacccgtagcgattcagagggccttcaaaaagtttccgtaacaggtttgcttaagacaggtgaactggattttgcaaacgacctggtggaacttgaagctgatcagcgactatgggagctctaccaaactgattacactgttctgctacgacataagccgataaacgctttaacccgaaaggaagcagctcaggccctgtatactttcatcgaaagcctgcctacgaacccagtccccatatctttcaaacggatacgagacaggctctcattgctctctccggtaaaggaacagaaccgtatcattaaactggccctcaagcagttgcaggatattgggtaccttgaccacagcatcaccaaaaaaggtaaagagactttcattctgatccaccgtcgctcagcaaatctgaaaccaggaacagctgtataa

SEQ ID NO: 214872 - DNA, 627 bp, Klebsiella pneumoniae; identical to SEQ ID NO: 92435

SEQ ID NO: 214873 - DNA, 795 bp, Klebsiella pneumoniae; identical to SEQ ID NO: 95251

SEQ ID NO: 214874 - DNA, 144 bp, Klebsiella pneumoniae; identical to SEQ ID NO: 92434

SEQ ID NO: 214875 - DNA, 1017 bp, Klebsiella pneumoniae; identical to SEQ ID NO: 92433

SEQ ID NO: 214876 - DNA, 324 bp, Klebsiella pneumoniae; identical to SEQ ID NO: 92432

SEQ ID NO: 214877 - DNA, 489 bp, Klebsiella pneumoniae
atgatgatctcatatcaggaacttgttcgcaccttccctaactcttgcgtcgtgaccccaaccggtactctgaatagcggtatcgttcagctgatcaccgtaaccactgccgaagcgaatgcagaatcagcgggtaccctgttcaaaactcaggatttcggttttgacgtaaaagactgtgcacagggcagcgctacaccggttactggcgtaactgtaaacgtttccggtattacttccagcgacaataccatcctggacaacactgcttctaatggtgcaaccggtattggtatcggtatccagcgcatcagcgattcccatcgcgtagccttcgacggttccgacactatgaccgaaagctactctgccgctagcggtactcagctgaaatacaccactggttatgtaagaaccaacgccgcgaccccggtaactgaaggtccggttaaaggtgttgcgacctttactatcgattacaccctctaa

SEQ ID NO: 214878 - DNA, 687 bp, Klebsiella pneumoniae
atgttcaggaccttattaaatctcaccgcatcctgtgtattactcctcagcagtattgcccacgccggtattgtcattgaatccacccgctatctttataaagaaggtgcacgggaaattaccgcgcaaatcgaaaataaagatgatattccctatctgattaaatcttgggttgaaaccccggcagggaaagcgccttcttttatggctaccccgccgctgttccgccttgagggaaaacagcagaatacggtgcgtctgttttcaactggaaacgttaatgccccgactgaccgcgaatctttgtactattttaacgtgatggcaattcctccggctgatgatgaaaaagccagcaccaataccattcaactggcggtccgccaccgcatgcgcctggtctatcgtcccaagacgcttttcgatctatcccctaatacggaagcgaaaaagctcgaatggcgtaaagctggcactaaattaacgatcaaaaatccgacaccgtttttttactatttccatagcattcagatcggtggcaaagaagtgaaaccagaagtcaactcggtcgctccaatgaccactaaagaggtgacgctaaaagaaaacatcagcgcctccagcattacctggaagatcgtcaatgattatggcggagcagggtcgctctattcctcatcgctgtaa

SEQ ID NO: 214879 - DNA, 2544 bp, Klebsiella pneumoniae
atgccaaataagaataatggattattcaaactatccactgtctttatcgcaatgctttcggcattgctttctggtttgaataataaagcgcaagcacgtgactttttcgatccctcattcattagctcattgaatggtagcgatccatcaaccactcccgatttatccatatttcagactcagaacgcgcaggcgccaggggattatcgggtcgatattatgtttaatggccgctacctggacaccaggaccataaagtttgtcgccaacaatcgcgccagcagcgataaccgcgaacccgctctggttccctgcctgagtctaaaagcactcgcggaatatggcgtaaggataaaagcctttccagagttagccgaggatcaaaacggctgtgcaaacttttctgtcattcctgacaccaaagcagattttgactttaccgcccagcgcttaaatatctctattccgcaggcggccttatccaccaccgcacagggatatattccaccggatcagtttgatgacggcatcaacgcgttattggtgaactatcagttcagcggctcaaacgacatgcaggccaatgatgaatactacagtctgaatctgcagtccggcctcaacgttggcccgtggcgcatccgtaacctcagcacctggaataaaaacaacagcggtgccggggactgggattccgcctatctctatatgcagcgcagcatccgctccatcaatagtaaccttgtgatgggtgagagttcatcgctcaacggtatcttcgacagcgtgccgtttaccggtattcagctggccaccgatacgacgatgttgccggaaagtatgcgcggctatgcgccaattattcgcggtatcgccagaaccaatgcccgcgtcatcattaaacaaaacggctatcaggtataccagacctatgtcgctcccggggcgtttgaaatcaccgatatgtacccgagcggcggtagcggcgacctttacgtcacagtggaggaatccgacggatcgaaacaagaatttgtcgtgccgttcgccaccctgccggtgatggtccgtgaggatcagctggaatatgagatcacatctggtaaatatcgcccgtacgatggcggagtcgatgaaacgccgtttacccaagccaccgcgacctacggcgtctccagcagcctgacgctatatggcggcatgcaggcggcttcgcgatatcaggcgctgtcgacagggcttggctataaccttggtgaactgggcgccgcctcggcagacgtcacccaagcctggtcaaaaaagaaagaggatgaaaagacttccggacagtcctggcgagttcgttacgggaaaaacattgtcgaaaccggcaccaacgtcaccatcgccggctatcgctactctactcgcgggtttaatacgctttccgaagtactggatagctactctaatgacggcagttatacctctcgttcgctacgcaaccgtaccaacctgacgctgaaccaaagcctgggtaaaggcctcggtagcctgtcgataagcggattgattgaagattactgggatgataagcgtaccaacaaatcaattagcgtaggatacaacggcggtttccgtaatgtgaactactacctcggctacagctataaccgctacacctggagcggagataactctggtaaggatgctcaggacgatcagcgcatcactctgaccgtaacgctgccactgagcaactggctaccgggcacttacaccagctatcaattaactaacagcaacccggggtctaccgatcagtctgtatccatcggtggtaatgcgctggagaacgacagtctggaatggagcctacatcaagggtacagcaaccgcgaatactacagcggcgatatgcgcgcaacctataacggtgcccgcggtagcgttaatgccggctatagctatgacaataacagccaacgtatcgactacggcgccaacggcagcatccttgcccatgccgatggaattacgctgggtcaggatatcaccgacgctgccgtgctggttaaagcaccagggctagatgacgtcaggctggccaacgataacaccatctccaccgactatcgcggctacgccatcgtcccgtatgttacgccttatcgtcgcaccgatatcacgctcgacagcaccacgcttggtgaagatatggaactgccagaaaccaccaagagtgttgttccgacgcgtggcgccatcgtgcgtgcaagctatgacggcaatatcggccagcgggcctttgtgcacctgaaaacagccagtgggcaggatgtgccttatggcgcgatggtcctactcgtcggcgacagcaaatcgcagccaagtatcgtcagcgacgctggtatggtttatatgtctggcctgcagcagaccgggatccttaacgtccagtggggcaaaagcgccgcgcagcagtgcaatgcttcatttactttaccgaccagggaaggcaaagcgtctggcatcaggcaaatcgaaacgatttgccgttag

SEQ ID NO: 214880 - DNA, 1035 bp, Klebsiella pneumoniae
atgaaaaaaatagttattttaataacgttgctgatgcttggcggccaagctgctaccaattgtacctataaaggcaataccaagcgtcaaggcttaacgctgaccaatattaaaataccaacagatgcttccattccggtaggtagcgtgttacatactcataaatttggtactggcgcatataaaacatttacctgtaataaaaacaccgatgaccaatatattattgacgtcggggctgccgttgttcctggtgttaccggtgttcagggtggtccggtttatgaaacggggattgatgggattgggtttcaggtctccgatctgttacgtagtaaaaatggttcattgatcgccgccgaggcaggttcaaccttggtaccaataacaagctcatctgaaaataattaccaatttattacggtatggttaatcaaaactaagacggtgattgatacgagcaccaagtcaacatctaacccctcagtttcgttctcggtagggaatttaaaaacaaaccctgttgccaatgacagactattatacgctgtaacctctatctctattaaaaatattaattaccgcacaacatcttgtaatatctccacaccacgatcgcaaatcacgctgaatcgtatagacaaaggaaaattgatgtcactttcccgtggtgcaacaactccgtcggagaaaactattgccatgaatattagttgcccgaatgactccgttggcaatactctcatctattggtttaatcctgttggaggaataagcgcttcagggaatggtattgtcgataatatgctttccggcagtgatgcagcaaataacgtgggtattatattcaaactttcaggtagtcctgttgttttctatgataccgataattacaattataaaataaacactagcaacgatcttaacaaaaccatcaacctaaccgccgactattatcgccaaagtgataacagtaacgatgttacgatggggcttgttaaaggaatgatggaagttgttattcaggaagaataa

SEQ ID NO: 214881 - DNA, 294 bp, Klebsiella pneumoniae
atgaagcaattgactgttttcgaaatggaggccatctctggtggctattcttgggatttttcctccatccaatccagcatcaccagtctcgtaagtaatggcgttgaagcagtggtttctgctgccaccatgggaactctggcggccgtctttggcacctttgtcggcggtacacaggctggggcaaatggcggcgtcctgggatttggcctctttggtaacctcgtcgggatgtttgtaggcttagggaaggtgcgaataagcaggtcatttcttcccaagctgactcgctga

SEQ ID NO: 214882 - DNA, 531 bp, Klebsiella pneumoniae; identical to SEQ ID NO: 14377

SEQ ID NO: 214883 - DNA, 180 bp, Klebsiella pneumoniae; identical to SEQ ID NO: 14376

SEQ ID NO: 214884 - DNA, 378 bp, Klebsiella pneumoniae; identical to SEQ ID NO: 14375

SEQ ID NO: 214885 - DNA, 300 bp, Klebsiella pneumoniae; identical to SEQ ID NO: 14374

SEQ ID NO: 214886 - DNA, 264 bp, Klebsiella pneumoniae; identical to SEQ ID NO: 14373

SEQ ID NO: 214887 - DNA, 420 bp, Klebsiella pneumoniae; identical to SEQ ID NO: 14372

SEQ ID NO: 214888 - DNA, 1686 bp, Klebsiella pneumoniae; identical to SEQ ID NO: 14371

SEQ ID NO: 214889 - DNA, 258 bp, Klebsiella pneumoniae; identical to SEQ ID NO: 14370

SEQ ID NO: 214890 - DNA, 243 bp, Klebsiella pneumoniae
atgacgcagccgtgggtacgggcgcgttttgggttgccgatgatttatgttgatgcgaaagtggttatgacgctctatagaggagtaaaggagttttatccgctattagctcctgatcaaaatatagttgcgtcatttagctataataaagatttttttgttgaaagtgtgactttttatccgctggagcgagccaaagaaattcaggttgcgctggagaaaaagcgacttggtcgcaaatga

SEQ ID NO: 214891 - DNA, 507 bp, Klebsiella pneumoniae
atgaatattgatgtcgaaacacttgtgaagcaattaggtaaaccttatcaggatatttatgatcaaggtttaattccctacaaaacaaaaccaacgggtactattagtgatgatatttccaggttgaatatgaggcgagaaggaatatttttatcttttatcaataaccaagaaaaaaatcttgaagaagtgactttgcggttagaagatgaaaataaaatggattggttatttcctaatccgctgccatttggtcttgaaccagtaatgacccagaaatgggtaagggccaaacttggtcatccaatgatttacactgatgcgcagataatcatgactatttatgttggtgtgaaggaattttatactttgcctgtccctcatcaatatatcgttgctgcatttacctataacaaagatttttttgtacaaaaagtcacattttactcaattgagcgagccaaagaaatacaagccgcgttagagataaaaaggttgggtgggtaa

SEQ ID NO: 214892 - DNA, 201 bp, Klebsiella pneumoniae
gtgtggtgtatttatcaaatgagtattgatgtcgaaacacttgtgaaacaattaggtaaaccttatcaggatatttatgagcaagggttagtcccctacgaaacaaaaccaagtgttacggttagtgatgatatttatagattagatatgaaacgtgagggaatatatctagcgtttattaatgatctggaaaaaacttaa

SEQ ID NO: 214893 - DNA, 1110 bp, Klebsiella pneumoniae
atggagcgggtgcatcagcggaatataatccgtcagaaaaaactggagggaaaaattgaaggtcatgccagttttgcactgggggaggcgaaggccgaaacggccctgtacctgccggacaggttaggtgtcagccttttattttcggcgaaaaaagtgactccacagacaccggatggtgtctgtaatatgggagcgctgcgttttgccatgaaactggtattgtcaggtagcgttggtgccagtgctgcaattgaattaggggtgacagcagactggagtggagaaatgggaaagggctatggcattaaaggccgtcctgcaaccctgactgctccaccgttgccaggacagcagcaggtgaatttaaagacctcaacaatacctgaagcacaggggggaggtgaaattggtgtttttgttggtgctcaggcgggaggtaatatcagtggtgccattgagtggtttgagccgcatcctgatgatacgccagtagctataggtgttgagaaagataacaaaccccttgtcaataaagagaagaagtttgccgcgatagccaaactggaagcggggatgacggtgcaggcaggcgctgggggaagtggggttttttatatcacctatattcagggacgttttcgtatttactgtaaagcggctttatgttggggagtgggagccaaaggggaagtcggttttgaagttgatggcagcagttttgcggcttttatgaagagttttatgtttatgctaaggaatgtggattatcagaagcttgagcagatgatggcaggagatgccttccgttctttatgtgcaattcctattattatggcggcacaagggatacaggcgggtgaggccatgctaaagaatatgggaataatattacgacgaattgaaaccgatcttgaagatgaaaataagcgcgttcatctgatgaatagtattttgtcaaaccccgaccagcttaaatatacccctccggaaacaaaaggggcagtgattgccacattaattgatcagaactgggtggactggcttgaccctcgcaatcagaataatgattttttttttccgttaacagctggaagctcggtcctctaa

SEQ ID NO: 214894 - DNA, 900 bp, Klebsiella pneumoniae
atggaaaataacattatagttatttcagttactgtatgcttactggtcgggtgcgatcagggaaatgctgccaggagtgaaaaagcggctaaagagcttgtgggtaagtcgctctctaacatgattcccgttcagggcggtgagtttttaatgggcgattttggaccgttagtcggtgaaaaactgcctttcagcataaaccaggatgacaaggtattacataaggttgtattaagcgatttttcaatatcaaaatacaaagtcaccaatgatgattataataaatatctgcagataacaggagtaaaaaaaccacccattaatattctgctaaaagattacccatcattgcaaaaaagtgattattctgttggcatcacctggcaacaggcaaaagactattgtcagtggttaggtaaggagtctggtaaaaaatttgatttaccaacagaggcgcaatgggaatatgcagcaagatccagagggcaatacattccgtttgcaacgaataatggtgagttcctgcccggtaaaaacatccccagccaggatgagctgagtgaatatactgatggagcaggtattcctatttacccagtaggcaaatatcccccaaatcccctgggtctgtatgacatgggacttagtggctcagaatggaccaatgactggtatgcgtcagattattactctcattctccggtaaacgatcctcagggacctgcgcagggtactaaaaaagtcctgcgtggatatattggcggtgacagacaatacgctttaaccgtgttcagacaatcagatttgccagttccaaagatcaataaagacgatgattatgaaaaatatggtgttggtccgcagtatgttttcgttgcgtcatcaataaataatgtgtga

SEQ ID NO: 214895 - DNA, 891 bp, Klebsiella pneumoniae
atgataaaattaatcgtagttgcttctgttgccgccagtttactgctcgggtgcgatcagggaaataccaccgggagtgaaaaagcagctaaagcacttgtggataaatcggtctctaatatggtccctgttcagggtggtgagtttttaatgggtgattttggtccattagttggtgaaaaattacttttcagcatacaacaggatgataaaactttacataaggttattttaagtgatttttcgatatcaaaatataaagtcaccaacgatgattttaatgtttatttgaaagtaacagataaaaaaaatccacctgtggatatactggcaaaacgtcatccttctctgctaaagggggattatcctgcaggtgttatctggcaacaggcaaaagattattgtcagtggttaggtaaaaaatccggtaaaaaaattgatttgccgacagaggcacaatgggagtttgcagcaagatccagaggtcagtatcttccgtttgctactaacaatggtgagttttcaccaggaaaaaatgtccccagccaggatgaactgaataaatacactgatgggatggggcttcccatttatccagtaggtaaatacccatcaaatcccttaggcctgtatgatatgggactgagtggttcagaatggaccaatgactggtatgcagaagattattactcccactctccggtaaagaatcctcagggaccagagcaagggaccaagaaagtgttgcgtgggaatgttggcggcgacagacagtacgcattgactatgtttagacaatctgcttcaccactcccagaagaagttgatggtgactatgaaaaatatggtgttggtccgcagtatgtatttcgttgtgtcgttaataaataa

SEQ ID NO: 214896 - DNA, 1080 bp, Klebsiella pneumoniae
atgaatatagggcatctcaattttttcaaggttaataagtgcggtttatacaaagtaaatgataacaatacctatggtttagaacttagcgaaacctttgacctcatacaggattgggtaggaacgaagtcacttgcacttacgataccatgggacccaaaagaaaagccaaacagatcaaagtgttactgcaaagatatctataaagatgaaaatactggtgatttcttaatcatgctttggaaatctgatactgatagtaccggttctttattaggtgcgagtgaagatggtgagattggaagctcatctgtagttaaatatacaaatagctacagagggaaaaaagttatctggggtcgaccatgcttttattgggttatccctgagcttgaaactatagtgtcgattaaatttgatcattcaatttgtgattctgaactatttcaagactatgtacattcatctattacaaatagagttaaacatagcaaaagagttaagaacaaaaccgagaaaggttatataagattatctaatactgatgacgatgatttatataaatatatgtacagatttgatatgaagctccgaagcttagaaaccacgcatactgagttaggcaaattgataccaaaaatcacgcacatagttcgtagagaaactattatcataaacccaaatgatgcacgagctgattggctaaagacctttagtactctcgtcccatttgtctccggaaagaaaaacaccagaacaagacagattgaaattaaggcagaagcgaaaccgtccttgaatgaagttaaagaaatcatcgaaaagtattcttctgaggatagagagaaacgactttgggacaatgtcgggtttgctacggataagggaataacttgggtagataaatatagaatgcgtgatattctcaatgttccttccgaagattattcaacgtattcagccgcatatatttacgaacaaatatcacacaaaagaaaagaattcatttctcctatattaaaagaatcaaaagctttacaatctcaatcaagaataaataaagcatctggagaggattga

SEQ ID NO: 214897 - DNA, 537 bp, Klebsiella pneumoniae
atgttgaaagctatagtaggcatcttcaaatacacatggatatacttagcgatattctgtatatcgctgataatcatttcaccatctaatattaattatgtgtataacgattttgctaactattgcactcttctcgtatcagtttctggaatggtttttactattatgggaatttggttagcgtttctttacccaaatgctttacagcgtatcgttaaccccaaaactatagaaactgttgatttcaccgaacagctggaagatacaagaaggttagaggcaatagttggaagtgttctaaagtcatctttcgttatgatcactttacttgtagtatatttagttaaacttgtatttttcaaaagtcatctttatttagagagccaagaagtaataaaaaatacatctttagcattaattattgctatttcctatatgcagattgaggcggtagttagcgtaatacttgcaaatgttatgttcatcaatgatttacataacaagcgtgagcaaagagacatcgatgaccaagtatga

SEQ ID NO: 214898 - DNA, 954 bp, Klebsiella pneumoniae
atgaagaagaatatacgtgttatacctaaaaacattcatagcaagttaagaaggcttggcaatacagtcgttgctggcacttcgatcgcatttacagagaatcaattaaaaaatggaatgttagagcatctcggaatatattttgataatgatgttattaaatatgaggcatcgatcattcctgatccattgcaaggtaaatattcatttaaaaatgttttcggcgaggaagtcatcagaaaagacctcccaaaagaaactcactataccgaaattgagtcacctaactggggggatagctctaacggtacacatactgttagattacctcacgataaataccccagagacataatcccaccaaaacttatagcaattgaaattaatcacaagaagtcctcggacagctattttatatttaatttcagagcaactagaattttagaaaaaaattcaaataagtttgatgatgagttgctatttgatctaaatcttcttcaagaaaatctcggtaaatgtggcgttgagaatgctgataaacctatatctacttatgctgatacacttatagtctcatgggacatatttccgccaggtagcaaagaagaaattttagcaagaattttcaaaggaaaaaacataactgacgataagaaagccgttgctgaaaatagatatgagttcttcatgagccttgaacctaaaaaaattgttactggaaatagtacgttcagtaattacattggagctatgctagaggacgatctggttgtttttgagaacatagaatatggcaatgcgatatatattctctatgacgactgggatgaaatcagcaaactatctcgaattgatttgttatcaggaagagcaggaagtaattttgatagaataatccacagtggtaattggaaagaggaagtacgaaaaaaagttgctactggaagattatga

SEQ ID NO: 214899 - DNA, 1263 bp, Klebsiella pneumoniae
atgaagctcaacgccaggcaggtagagaccgcaaagcccaaagacaaaacctacaaaatggctgatggcggcggtttgtatctcgaagtttcggctaaggggtctaaatactggcgcatgaaatacagacgcccctctgacaaaaaagaggatcgccttgcttttggtgtttggccaactgtgacgcttgctcaggcaagaaccaagcgcgacgaagctaaaaagctgttagtacagggcattgacccaaaagccgaacagaaagaagctcaggccgagaattcgggggcatatactttcgaaacaattgctcgcgaatggcatgccagtaacaagcgatggagtgaagaccatcgatcgcgcgttcttcgctatcttgagctttatatcttccctcatatcggttcgtccgacattcgccagctcaaaaccagccacctgttagccccgattaaaaaagttgatgccagtggcaaacatgacgtcgcgcagcgtcttcagcagcgtgtaacggccattatgcgctatgccgttcagaacgattacatagactcaaacccggccagtgatatggctggtgctttatcaacaaccaaagcaagacactatccagctttaccctctagccgtttccctgaatttcttgctcgtctggcggcatatcgtggtcgtgtaatgacacggatcgccgtagagctttcattgctcacttttgtacgttccagtgaactccgttttgcacgttgggatgaattcgattttgctaaatctctttggcgtatacctgcaaagcgtgaagaaattaaaggcgtacgttactcctaccgcggcatgaagatgaaagaggaacatatagttccgcttagtcgacaagctatagtgttgttagagcagcttaagcaaatcagtggtgataaagagctactttttccgggagatcacgacgcaacgaaggtcatgagtgaaaacacagtaaacggtgcgttgcgtgctatgggctatgatacgaaaacagaggtctgtgggcatggattcaggacgatggcgcgcggcgcgctgggggaatcgggtttatggagtgatgatgctatagaacgccaactgagtcattcagagcgtaataatgtacgtgcagcatatattcacacttctgaacatttagatgaacgccgtttaatggtgcaatggtgggctgattatctcaaatcaaatgaaggcaaaatagtcacaccttatgaatttgccaaaataagaaaaagctga

SEQ ID NO: 214900 - DNA, 207 bp, Klebsiella pneumoniae
atgaatcgttgccgtaatgcaatagataaaatagggcgaaactttcattatattatcgttaatgataatgccagagtacttgataaagatgggttctatcaggacgctgagcggttgagttcagagataatgagtctcaaaagtgagtttgaaaactacattatgttatgcaaagggcgaactgtttctaacaaggttgaggtgtaa

SEQ ID NO: 214901 - DNA, 1161 bp, Klebsiella pneumoniae
atgggcgtttatgttgacaaggaattcagggttaagcgtaagtcctctgaagctggccgcaagtctgctttcgcccataaagttaaaaatggtggtaaaaactatcaacgcaacgttcaggaacgtatcaaccgcaagggtgccagtaaggaggttgttgtcaaaatctcaggaggtgcgattacccggcagggagttcgaaacagtattgactatatgagccgggagtcagagctgccagtgatgagtgaaagcggtcaggtatggaaaggtgatgagattcaggaggctaaagagcacatgatagatcgtgctaatgaccctcaaaatgttttcgatgataaaggtaaggaaaataaaaaagtaacccaaaatattgtgttttcaccgcctgtatcagcaaaggtaaaacctgaagatctgcttgagtctgtcaggaaaacgatgaacaagaagtacccaaatcatcgttttgtgcttggctatcataacgacaaaaaagaacatccacacgtgcatgtcgtttttcgtattcgtgataatgacggtaaacgagctgatatcaggaaaaaagatttacgggaaattcgtacaggtttttgtgaagagctgaagatgaagggctatgacgttaaagccactcataagcagcagcatggacttaaccagtctattaaagatgcgcacaaaacagcgccaaaacgacagaagggcgtttatgaggttgttgatgttggctacgaccattatcagaacgataaaaccaaaccaaagcagcatttcataaagcttaagacactgaacaagggcgtggagaaaacatattggggggctgattttggtgagttaaccactcgcgagaacgttaagaaaggtgatcttgttaagctgaagaagttaggacaaaaggaggtgaaaatccctgcacttgataagaacggtgtacagcatggctggaagactgcacacaggaatgagtggcagctagagaacctgggggttaagggcatagacagaatctcttcatccagtaaagagctggtgctgaacagcgcggagatgattaagaaacagcaactccagatgagaaatttctcgcaaataaaacagtcgatgattcaaagcgaacagaaagtgaaaatcggaattcgtttaggataa

SEQ ID NO: 214902 - DNA, 651 bp, Klebsiella pneumoniae; identical to SEQ ID NO: 153768

SEQ ID NO: 214903 - DNA, 237 bp, Klebsiella pneumoniae
atgactgctacccgaaaaaaaaccgcaacgagacgcaagccccaacgtaatacactctacctgccctcagcttctcgtgaggaactggataaaattgctctggagattggctatcgcagggggcgacgtatttcaagctctggtgttgtccagtacctcataaaaaaatattccagccaggctattgaggagctgataaacgaagacgatgaagacgatgacgacttcgatgactaa

SEQ ID NO: 214904 - DNA, 645 bp, Klebsiella pneumoniae
atgttatctactactgcttttgcggcgcttgctttgcaatgcgcggccagcgttcatcccgatactgcgcatgaagttgcaagggttgaatctggttttaacccatatgctattgccgagataataccgaaggttgaacgtaagcccggtgacaaaggcgtagtgtcctactttcccaaaactaaggaggctgcactccagatcgtaaatcaaattgaatcacgaaatcatcgttactcagtcggtcttatgcaaataacgagtacgaattttgcaaacttcaatacaaccgctgagaaaatgtttgacccctgcgaaaatctcaaggtttcagagcaaattttggtggattgttataaacgtggtggcgatattttacgtggcctgagttgctattattccggcaatccagaaacaggaactaaacctgaatcagattttaataacaccagttatatacagcgcatagggtttaatccgcctgataacaaaaaaaactgggtggttccttcagttaaagatgcaatcagaaaggagaatgtaacacagagtatcaaacctaaagaagttaccgtatatccccaatatgccatgcgtggcactgttttagatgaaaaggaaacaaacgatgttaaaactcaataa

SEQ ID NO: 214905 - DNA, 291 bp, Klebsiella pneumoniae; identical to SEQ ID NO: 153770

SEQ ID NO: 214906 - DNA, 1134 bp, Klebsiella pneumoniae
atgagtaccgtttttaaagggctgacacgccccgctttgattagggggctgggcgttccgctctacccctttcttggaatgtgcgttatctgcgttttgcttggtgtctggattcatgaggctatgtatgccctcatcctccctggctggtatgccatcaagcgagttacgaagatagatgaacgcttttttgacctgctttatctgcgaatgcaaatcaaaggtaatcctctggcaaacaagcgcttcaatgccgtccattatgcggggagttcgtacgacgcagtcgatatatcgaaagtggacaattttatgaagcttaaagaccagtcttctcttgaagagttaatcccgtattcatcacacatcactgataacctcattgttaccagaaaccatgatctactggcgacctggcagattgacggagcttattttgaatgtgtagatgaagcggatctagccttgcttactgaccagctcaatacgctgatacgtagttttgatgggaaacccgttaccttttatacgcatcgtattcgggttagaaaagaagtgcgacctgtatttgacagcaagatcccattcgtcaacagagtgatgaacgattattacgaatcgctttcggcggctgagtattttgaaaacaaattatacttaaccgtatgctataaaccgttcagcgctgaagataaagtgacgcattttctttcaaggaaaaagggtaataaaaatatcttcgaagaacccattaatgatatgaatgaaatatgtggcagattgagcacctatctctcccggtttcattcccgtcgtcttgggttatatgaagaaaataatatagtttattcagaacagcttacgctgttccagaaactgctatccgggcgctggcagaaagtcagagtcaccaatagtccgttttatacatacctgggtggtaaagacctgttctttggtaacgatgctggacaaatcactgcctctgaccatgcccggtactttcgttgcatcgagatcaaggactactttcaggaaacggatgccggaatttttgatgcactgatgtatctcccggttgagtatgtacagacttcctcttttactccgatagacaagggaaggtgcgaataa

SEQ ID NO: 214907 - DNA, 312 bp, Klebsiella pneumoniae; identical to SEQ ID NO: 97178

SEQ ID NO: 214908 - DNA, 648 bp, Klebsiella pneumoniae; identical to SEQ ID NO: 97177

SEQ ID NO: 214909 - DNA, 267 bp, Klebsiella pneumoniae; identical to SEQ ID NO: 121816

SEQ ID NO: 214910 - DNA, 1434 bp, Klebsiella pneumoniae; identical to SEQ ID NO: 97176

SEQ ID NO: 214911 - DNA, 1209 bp, Klebsiella pneumoniae; identical to SEQ ID NO: 14805

SEQ ID NO: 214912 - DNA, 1029 bp, Klebsiella pneumoniae
atgaaccactccctcaaaccctggaatacctttggcattgaacgcttcgccaagacgatagtacgcgccgaaactgagcaacagttgctaagcgcctggcaaaccgctgccgcggcaggcgaacccacgctgatccttggggaaggcagtaatgtcctgtttctgaacgactatgccggtacggtgatcctcaaccggattatggggatcgaggtgagcgaaacgccggaagcctggcgcttgcacgtcggcgccggcgaaaactggcatcaactggtgcagttcacgctacagcatgcgatgccaggtctggaaaatctggcgttaatccctggctgcgcaggatcttcgccgatccagaatattggcgcctacggcgttgagctacagcgggtttgcgaatatgttgactgcattgagctggaaaccgggcgtaagcaacgtctttcagccgcggaatgccgttttggctatcgcgacagtatcttcaaacatgaatatcaggaccgctatgccatcgttgcgattggcttatcgttagcgaaaacatggcagcctgtactgagttacggtgatttaacgcgtctcgatccgcagaccgtcacgccgcagcaggtatttgatgcggtctgtcatatgcgaatgactaaattgccggatccaaagattaacggtaatgccggcagcttttttaagaacccgatcgtcagcgctcaggttgcggaagcgctgctggcgcagttccctcatgcaccgcactatccgcaggcaaatggcagcgtcaagctggccgctggctggctaatcgatcaatgtgagctcaaaggacaacgcatcggcggcgctgccgtccatcggcagcaggcgctggtactgattaatgaagatcgagcgaccagcgaggatgtggtgaaacttgctcattatgttcgccagcgggtgggtgcgaaattcgatgtatggcttcagcccgaggtgcgcttcattggcacgcatggtgaagtcaacgcagaggagagcattgcgtga

SEQ ID NO: 214913 - DNA, 963 bp, Klebsiella pneumoniae
gtgaaagaccatactatccctttaacgctaatttctatccttgctgatggtgagtttcactctggcgaacagcttggtgagcagttaggcatgagccgggcggcgattaataagcacatccagaccttacgtgactggggcgtcgatgtgtttactgtgccgggcaagggttacagcctgccggagcctattcatctattagatgagaaaaagatttctcaagagatagaccatggccgagtgacagtccttcccgtcatcgactctactaaccagtatttgttggacaggcttgatgagctgacgtccggagatgcctgtgtggctgaatatcagcaagcagggcgaggccggcgaggcagaaaatggttttcgccctttggcgcgaatctctatctctccatgtactggcgtctggagcagggcccggcagcggctattggcctaagcctggtgatcggtattgtgatcgctgaagttctgcagcagctcggggccgaacaggttcgcgtgaaatggccaaacgatatttacctgcaggatcgtaagctgtcagggatcctcgtagaactgacggggaaaacgggcgatgccgcacaaatcgtcagcggcgcgggtatcaaccttgtgatgcgtcgcgtggagtctgatgtcgtcaatcaggggtggatcagccttcaggaagcgggggtggtcatcgaccgtaacctcctcgccgcgcgcctgattaaagagctgcgcctgggactggagctgttcgagcaggaaggattggctccctatctaccgcgctgggaaaaactggataactttattcatcgcccggtgaaactgattatcggtgataaagaaatttacggcatttcgcgtggcattgacgcccagggcgcactattgctggagcaggatggtgtaataaaagcttgggtgggtggtgaaatatcattgcgcagtgcagaataa

SEQ ID NO: 214914 - DNA, 927 bp, Klebsiella pneumoniae
atgacaccgtacctacaatttaaccgccaccaatgggctgcacttcgtgattctgtcccgatgacgttaaccgaggaagaaatcacgcggttaaaaggcatcaacgaagatctctctctggaagaggttgccgagatctatttgccgctgtcgcgtttgctcaacttctatatcagttctaacctgcgtcgccaggctgttctcgaacaatttcttggcaccaatggtcagcgaattccctatattatcagtatcgctggcagcgttgcggtaggaaaaagcaccaccgcccgcgttctgcaagctttgcttagtcgttggccggagcatcgccatgtcgaactcattaccaccgacggttttttgcaccctaactcggttttaaaagaacgtgggttaatgaagaaaaaaggctttccgcagtcctatgatatgcatcgcctggtgaagtttgtctccgatctcaaatcaggggtaccgcaggcaaccgcgccagtttattcccatctgatttatgatgttattcccaatggtgacaaaaccgtcgcgcaaccggatattttaattcttgaagggctgaatgttctgcaaagtggaatggattatccgcacgatccccatcatgtattcgtttccgattttgtcgacttttctatttatgtcgatgccccggaagaattattgaaaagctggtatatcaaccgctttcttaaattccgggaaggggcgtttaccgatccggattcctatttccataattacgctaagctctcgaaggaagaagcggtagatattgccacttcgctatggaatgaaatcaacctaatgaatcttaaagaaaatatccttccaactcgcgagcgcgccagcctgatcatgactaagagcgccaatcactcagtgaatcaggtacgcttacgtaaataa

SEQ ID NO: 214915 - DNA, 1389 bp, Klebsiella pneumoniae
atggctaaactgaacaagaagcaactttctttactcaaggaaatgcctgcagaacaactaatgcaaataatttgtgaaattgctgatgataatagtcaggtaaaatcatttattatcaatcaatatctattgactccagaagaactcctgaagaaggttgaaagcgaatataaaaggaaaataaagtcaaaacgtttctatgattattatgaggctgctggtttctttgagggtttatacaagagcattatattacctctcgaaaaaacggtgtcagctcggccagataaaacagaggtatgttgccataatttattgatctcttttgataaagtcagcgaaatcgctgatacatcagatggttcatggatgaactattataatggtgtggtcgagatatggttaaaatccctagctctgcaaaaaaacaaaggcattgatgatatagcagataaaattttttccgttcttagtggcgaggtttattttaactttaatatctttgacaagtataaaaaggagcttggatataatgttattcgtgctttaagagaaaagcttctggacgcaggtgatgtgaattctgctgttgagctaagtttgtatatcagggatgttgatttcatcagacaatgctttgataaaataaaatttaaccaaccagaatatgtcattaagtttgctgaattgctgatagatgaactgtgtgcaggggaagcgattcttgttcttaatcaaattaaagatgataaaaccgttgatcatgcagggcttcgtgataaatgggctgaggtgttcgctttggctctgattgaagagggggaggttcagcaggcaaaaacaatttgccttgatggatttaagaacaggtgtgatgttgttttttataaaatatataatagagtagagaaagttaatgactcactgggtttattttctggcatagcaaagagcaaaggtttcccctttgttgtactttttttgtcagcgatagataattatggaaagcttgattcggaaataatgaatgcgagtaaaaatgaaattaaagatatgatggttttattacgaggttcttttattcggtccttatcaagtgagctttacaggcatggttacgcatgtcctgcaactcttcttcgtagagtgctggtagaggacagtattagccgcagtcagagcaagtactacacctacgcggcatctgacatgaaaaaaagtattgattatagtaaaaatatcgtatggactgaaaaagtcccttcaacagaagaatatttcaaatcgctatttgtcgagcataaaagaaaatatgcactctgggaaatgatgctggacaaaattgatggtttagctatagagaaagattcagtatcatattcagcataa

SEQ ID NO: 214916 - DNA, 1275 bp, Klebsiella pneumoniae
atgtcactgactgatatcaaagcaaaaaatgcaaaaccccttgagaaggaatacaagctgactgatggctttggtatgttccttcgcgttaccccgaagggttccaaatactggcaaatggcttaccgcttcgaagggaaacaaaaactcttctctattggtgtttaccctgcagtttctctttctgacgcaagacaacgccgtgacgaggccagaaggcttctggctcagggtattgaccctaatgcaaagaaacaggcagaggttaaagagcttaaagccaaacgtgataatacacgctccttcagaacagtagccaaagcgtggttctctacgaaaacaaaatggtctgattattatggtgatgccgtatggaagcgccttgaaacttatgtcttcccggtaatcggtgacaaagatgttgccgaactggatacgggtgatctgctggttccggtgaaaaaagttgaggctcttggttatcttgaagttgccatgcgcattcaacaatacattacggcaatcctgcgtcatgccgtccagcaaaagctgatacgccataacccagcctatgatatggaaggtgcagttcagaaaccacaaactgaacaccgccctgcacttgagctggaagaaataccccagctactgaacaaaattgccgaatacaaaggccgcaggttaaccatactggcaatacagctcaatctgatgattttcattcgttccagtgagcttcgtttcgctcgctggtctgaaattgatttcaaaagtaagttatgggtgatacccgaacagcgtgaagcgattgaaaacgtcaaacattcaactcgtggggctaaaatgaagcgtaagcacttcgttcccctttgtaagcaggccatgaagatactcaaagagatccgacaactgacttatgaagaaggccatgatgatggattaatctttactggctgttatgactcgtttaagcccatgagcgaaaataccatcaacaaagcccttcgcaatatgggctatgacacgaagcaggacatctgcgggcacggttttcgcacgctggcctgtagtgccttaattgagtcaggtttgtggtcagaagacgctgtagagcttcagatgagtcataaggaaagcaacagcgtccgtgctgcttatacccataaggctaaacaccttgaccagcgccgactgatgctccagtggtgggctgatttccttgatgctaacagcaacggtatggtcaggccgtttgagtttgcttccaataaataa

SEQ ID NO: 214917 - DNA, 408 bp, Klebsiella pneumoniae
atgcagcagttcagtgacccgatgagtgcccgttcgctgctccagtcgcagcagaactccgatgaggcgctcagtattaaacgcgacgctgacccgacctttgatttttgcggctatctggaaatgttaccgcagaccaacgggatgtttatggggaatgccagtatcatcccgcgtaattaccgtaaatatctctatcacgcttatctggcctatatggaggccaacggctacaggaacgtgctcagcctgaaaatgttcgggctgggactgcccatgatgctgaaagagtacgggatgaattatgagaagcggcacacaaagcaggggatacaaaccaacctgtcgctgaaagaagaaagctacggcgactggctgccgaagtgcgacgaacccaccgcgacttaa

SEQ ID NO: 214918 - DNA, 267 bp, Klebsiella pneumoniae
atgcgcaagatccgattcactgaacaccagatcatcgccgtattgaagtccgtcgaagctgaacgtaccgtcaaggatgtttgccgtgaggccgctatttcggaagccagctattacaactggaaggcaaagcatggcgggatggaagcggtcgatattaaaaaaatcaaagatctggaagacgagaatcggaggcttaaacagatgtttgctgatctcagtcttgagtgccgggcactgaaagacgtcatcgaaaaaaagctttaa

SEQ ID NO: 214919 - DNA, 480 bp, Klebsiella pneumoniae
atgtacgacgcgttggtctgcggcagacgcttccggaccttcaatgtggtggacgattttaaccgtgaagcactggcgatagaaatcaaccggaatatcccggctcagcgaatcatccgggtgctggacaggatcgtggcaaaccgcggctatccgctgaaaatgcggatggacaacgggccagaactggtctcgcgggcactggcacaatgggccgaagaacatggcgtgcagctcgaatttattaaaccgggtaaacctacacaaaatgcttttatcgaacggttcaaccggacataccggacagaaattctggatttttacctgttcagaacactgaatgaagcacgggaaattaccgagcgctggctgatagaatataacaacgagcggcctcatgagtccctgaacaacctgacgccggaagagtaccggctgatggctgaaaaaccggaactctcaaaaagtgcgtggaactaa

SEQ ID NO: 214920 - DNA, 480 bp, Klebsiella pneumoniae
atgtcaaatccagcatatctttggctaaccgatacaaacggctcccctataacgggtagttctctcgttacagggcgtattggcgctattgaattaaaagcggtaacgcaccacctatccattcctgtggatggaaacaccgggagattaacaggaaccagagtacatacgcctattacggtacagaaagattttgataaaacaacgccccttttatacaaagcgctgagtgagaaccaaacattaaagtcggcaaccataaagatgtatcagatccttgatgcaggtgttgaaagcgaatattttaatattacattagagaatgtaaaagtaaccggaattacccccaacttatttcctgattctggtacaggtacgcacagcgagacgattcagttaaggtatgaggccatcacctggaaacattgcgatgggaatatcatttacaaagattcctggaaccacagggcaacggcataa

SEQ ID NO: 214921 - DNA, 348 bp, Klebsiella pneumoniae
atgaaaaaaatcatcacgccactcgtcgatatagttctctgcacctatattattaccacatgctttatttgcctgactgagtttaataactggcagaataaaataatcgcagtgacgattataatcggtagcgcttatatcatcgccattgcattgaatagattactgggaacaaagataggtgtgttaagcggtatttttaatttactatcaggcccactattaattattggcgctattgtttgcatagccttacttgacccgtggccggttaaggttattggtctgtttttatgggtcattataatgttttgtttaccttcatttataaatagagataaggaataa

SEQ ID NO: 214922 - DNA, 675 bp, Klebsiella pneumoniae
atggcagacatagaagggatagcgcggaagttatataacatcattatctctcctgatacagttacagggcttatcaatggtggattatctgttcctttagattatggttatctgatttacggtatctttgatacggatacaagatatgaacgtgaaacagaaagaatccgtatgatgaccgcgataagacatgacattcttaactatgaaaatatcgttaatgcagttaaattaatctttcagttatttaataaatatctatccgaatcagaacaagatagaatatacagaagtgtagttacctctatcgtgggtagaatctctacgaatattatcgcatcgaacatcgctaaagccgttatagaaaaaacgtcatttacttatgtagtatttaaggggaaagggaatccaatagcctttttaagtactatcctcttgtttggtggaatggcagagcgatccatcaggacgtctgataaactcaggaatgaagagcccgaggtatactcgttgttaagaccccgcgattatgatctgctttatttcttatttgccgatgcggtacaaccttttgtggatgccatccatgcagggtacaccgagggcaaccccgtattcgacaagattatgaaaagagtggaagatcatttaaatacgaatgctaaggctgggtga

SEQ ID NO: 214923 - DNA, 621 bp, Klebsiella pneumoniae
atggcgctggagctgtacaacgtcagccacgcgaaacgacaggcgcggaacgcggagaaaacccggctgaccctgcgctggttgcgggaagagctgtgttccacggcggagctggttgcgcggcggctggggattgcggcggtgcagccggtctaccgcttcctcgacagcctggtggcgaaagggctgctggtccggaccaaatatccggtggacggccgtcaggtcagcgtgtgggggctgacgccgcatggcgtggcgttctcgttcgacgaggacgaaccgctggcggatgttattccgtttcagccgtcaagggtgtcggcagcacatctgccgcaccggctggccgtgcaatccctgcgccttgatatggaagccagaggggccaccggctggcgcattctgcaccgtctgagtcttaaaggcatgaaagtgccggacgccctggcggagctggacggtaaaacggtggcgtttgaggtggagcgcaccgtcaagagccgtcgccggtatcaggaagtggtgtccgggtatctgttcaaccgcaaagctaacggcatcgatgaaatctggtacatctgcccggaccgggcgacgcaggtcagggtgcacgtatag

SEQ ID NO: 214924 - DNA, 1965 bp, Klebsiella pneumoniae; identical to SEQ ID NO: 14368

SEQ ID NO: 214925 - DNA, 129 bp, Klebsiella pneumoniae; identical to SEQ ID NO: 14369

SEQ ID NO: 214926 - DNA, 534 bp, Klebsiella pneumoniae
atgatccggaccgctggctccctgaagctgggcaaagtacaggtttcagtgctggtccgttcattgctgaaaagtgaacgtccttccggactgactcaggcaatcattgaagtggggcgcatcaacaaaacgctgtatctgcttaattatattgatgatgaagattaccgccggcgcattctgacccagcttaatcggggagaaagtcgccatgccgttgccagagccatctgtcacggtcaaaaaggtgagataagaaaacgatataccgacggtcaggaagatcaactgggcacactggggctggtcactaacgccgtcgtgttatggaacactatttatatgcaggcagccctggatcatctccgggcgcagggtgaaacactgaatgatgaagatatcgcacgcctctccccgctttgccacggacatatcaatatgctcggccattattccttcacgctggcagaactggtgaccaaaggacatctgagaccattaaaagaggcgtcagaggcagaaaacgttgcttaa

SEQ ID NO: 214927 - DNA, 147 bp, Klebsiella pneumoniae; identical to SEQ ID NO: 19093

SEQ ID NO: 214928 - DNA, 279 bp, Klebsiella pneumoniae; identical to SEQ ID NO: 97173

SEQ ID NO: 214929 - DNA, 276 bp, Klebsiella pneumoniae; identical to SEQ ID NO: 97172

SEQ ID NO: 214930 - DNA, 255 bp, Klebsiella pneumoniae; identical to SEQ ID NO: 97171

SEQ ID NO: 214931 - DNA, 822 bp, Klebsiella pneumoniae; identical to SEQ ID NO: 97170

SEQ ID NO: 214932 - DNA, 222 bp, Klebsiella pneumoniae
atgcagtatgtgaaaacgcgcccggccctgaatgttgaagagtccgaccgcctgtccttcatgccgtacatgttcggcatggattttatgctcgcagaattgcaggtgtatgcactggcaaaaaaatggatgcccgaatatgaagtcgaattctggcattacatccgcttaccggagggcggcggttacatgatgcccgattgtggccgcgttcacgtatag

SEQ ID NO: 214933 - DNA, 768 bp, Klebsiella pneumoniae
atgagaaacgacaccttcaacgcgctgatactccgccacggcgaccggatgctaaaggatgcgggctggccgccttgcgtggatatgatgcaaatcgcgcctgaaaccatgcccggctggtcagtcgccaccggctcgctcgatgccgcgcacattctggcgctggtcacgcacctttgcctgccgctgacctatggccgggccgggttgctgaccgccagcgcccggcggctggcgggaaccccggcgcggctgtatctgtacccggcaaagggctttatgccgccggaaaaactggcggacgcccagacacttcatctgccttatgcacaggaatggctgacggcggcggaatgtgacgatctgctggctttcctgaaagcctccctcacgcagatagcggaaatcgtcaggctggatgcgcaccgccttgccgctgcgctgaaaccgtccgtcacgccgcgactgatggacaggcggtttggtgactggcgcgtactggctgacgagtacgagcatgaaaactggctcgatgaaaacgacactgacgtactggatgccgtccttgacgctgttctggtgcgcggggcgtcgttctgccccatcctgttgaccgtggttaatgaacgacgggaggaaatcgaagccgcaggcgttattaccgatatgctgcgtttccccggcgacccggcccgccgctggcttgatcgccgtgtactgcgcgaggtggtgagtgaagcccgggcgacgcccgcacaaactgaatga

SEQ ID NO: 214934 - DNA, 411 bp, Klebsiella pneumoniae
atgctgtatggcacccgtaaagaactgaacaaaaaacttaaacgcatgtttgggaacgaagaacgctatgccctgctggtctggacgaaagaagacgtgttggccctgtccgggaacatgacggaggccgaggctcaaaccctgcttgagcttatcggccgcacgggaacgggggagcacaccgaagaaggcgtgtcattccgcaccgtgcaggcgctgtacgcagggattcgcccgggcattccccgcgtgagcgtccccgtcgatacgctgtatcgcatcacggacattgccgcacaggcgattaacggagaagacgagcattcgccgtccctgacggtcgatcactacccgagtgtcgctgacgctcaggcagaaatcgcctggctgaaacgtgaactggccgcctga

SEQ ID NO: 214935 - DNA, 222 bp, Klebsiella pneumoniae; identical to SEQ ID NO: 179506

SEQ ID NO: 214936 - DNA, 702 bp, Klebsiella pneumoniae
atgtccagattcattctcgggaactgtattgatgtgatgcgcggattccccgaccgtgccgtggaccttatcgtgactgacccaccttatttagtagggtttaaggaccgttccgggcgcagtattgccggcgataaaaccgatgaatggctggcgcctgccacccttgagatgtaccgcgtgctgaaaaaagacgcgctgatggtcagtttctacggctggaaccgggtggaccgctttatggccgcgtggaaggcggcggggttctatgccgtgggccagcttgtgttcaccaaaacctatgcttccaaccgccgtaatgcgaaagaccgtcgcggattcgtggactaccgccatgaaggggcttatgtccttgccaaaggccgcccggtgccgcccctcagaccgctgccggatgtgatgccttttccgtataccggcaacccactgcacccgaaccagaaaccggtggaggcgctacagccgctgattgagtcattcagcgccccgggcgcgattgtcctcgacccgttcgcagggagtgcctcgacctgcgtcgccgcataccgcgccggacgccgctatatcggcattgaaatgctggcgcagtaccaccgggccggaaccgagcgactggccgccatgcaccgggccgtcaacaccccggcggcgaacgatgaatggctcccggaggtggcgtga

SEQ ID NO: 214937 - DNA, 231 bp, Klebsiella pneumoniae
atgtcccccgtcttcagaaatgctctccgctttgccggcgtacccgtcgacagcagcgaaccggtacgcagacagtacggcagccgcatgattggtatcgtgacggtatgcctgctcccgctcctggtgttcgacgtcccgctgtgggttttcgtgctctcccaggttatctggggcgcgggcgtgtatatcggcctctccgtggccggagataaatcccggaaccgctga

SEQ ID NO: 214938 - DNA, 246 bp, Klebsiella pneumoniae; identical to SEQ ID NO: 200688

SEQ ID NO: 214939 - DNA, 168 bp, Klebsiella pneumoniae
gtggcgcagaccctgggggttgaggcgttccatattgggccgaccatctcccctggcgtgccctgggtgcgtgacacccgccagccgctctccctggcgctgaagtcaggtaacttcggcgatatccagttctttgcccgtgcccagcaggagtttcgtcatgactga

SEQ ID NO: 214940 - DNA, 621 bp, Klebsiella pneumoniae
atgactgagcaacaactgcgagaggaaatggtgcagattggcgcctcgttatttagccgcggctatgccaccggctccgctggcaatctgtcgctgctgctgccggacggcaacctgctggcgacgccgaccggcgcctgcctcggcgaactgcaggctcagcggttgtcggtggtgacgctgcaaggggaatggatctccggcgacaaaccgtcgaaagaggtcacttttcaccgggcggtctatttgcacaacccggcctgcaaggcgatcgtccacttgcacagccactatctgaccgcgctctcctgcctgcaggggctcgatccgcacaactgtatccgcccctttaccccctatgtggtgatgcgcgtcggcgacgtcccggtggttccctactaccggccgggcgatgaccgtattgcccaggcgctggccgggctggcgccccgctataacgcctttttactggccaaccacggaccggtggttactggctcatcgctgcgcgaagccaccaacaataccgaggaactggaagagaccgcacggctgatatttaccctcggcaaccgcgagatccgctacctgaccgctgacgaagtaaaagaactgagataa

SEQ ID NO: 214941 - DNA, 783 bp, Klebsiella pneumoniae
atgccaaaattcgctgcaaatttatccatgctgtttaccgaactgccgttcctggaacgctttgccgccgctgcccgggcgggatttgaagccgttgagtttctgtttccctatgagtatgccgccggggaaatcagacagcgcctgcaggagaaccagctgcagctggtgctgttcaataccccacccggcgacgtcaacgccggagaatgggggctcgccgccatccccgggagaagcgcggaggcccgacgcgatattgagctggcgctggagtatgcctgccagctcggttgcccgcaggtgcatatcatggccggcgtggtgccgccgggagcggatcgcgcagcctgcgaggccgtgcttatcggtaatctgcgctacgccgcggagtgctttgcccgccacgacaagcggatactcatcgaagcactgaatccgcagaccaaaccgggctatctctaccacagtcaatatcagacgctggcgatggtgaaacgggtcgacaggccgaacctggcggtgcagttagatctgtttcacgcgcagaaggtggacggcaatttaagccatcttattaccgaatatgccggccagtatcgccatattcagattgcctccctgcccgaccgtcatgaaccggatgagggcgaaataaactatccgtggctctatgcgctactggataaaaccggttatgacggctggatcggctgcgaatatatcccccggacagacacgctttccgggctggggtggttctcgccctaccggaaaaaataa

SEQ ID NO: 214942 - DNA, 1365 bp, Klebsiella pneumoniae
atgtcgacatcggcgctgttacttattgcgttagccagcgtagtgctgttgctcctgttagtgatcaaagcgaaagcacatccttttgtggcgctcctgatcgtcagtctgctggtggcattcgccaccggcattccggcagataaaattataaccaccattgaaaaaggcatgggcggcctgcttggccacatcgccagcattattattctgggctcaatgctgggggtactgattgaaatgtccggcggcgccgaatcgctggcgaaaacgttgaccggcgtactgggtgcaaaacgaaccattgccgccttaaccatcgtggcttttattctcggcaccccggtcttttttgaagtcggctttatcatcatcattccgttaatctacggcttcagcaaagtcgcccacgtgtcgccgctgaagtttggcctgccgatggccggcgtgatgttaaccgtccacgtggcgctgcccacccatcctggcgcagcggctgcggcaggcattctgcatagcgatgtcggttggctgatgctggcggggattggggtgtcggtggtcgtcggtatcgtgggctattttgtcgcccggtttatcaatcggcgccattatcatctgtcgattaacgtgctggagcagcaacaaacggcggaagtaccggatctctcggttaacgcgcagcagacccgtctgccgccgccgaatgcgctggttatcggtgggctgatcgtggtgcccatcatgctgattgtttccgggacgctgtgtcaggcgcttctgctgccggaaaacgcggttcgccagctgatgaccgtcattggtaccccgccggtcgccctgctgatctccctgggcctggccagctggacgctgggcatccgtcggcggatgagcctgaaaaagctgggcgaagtcaccggcagcgcgatcccctcgtcggcggacgtgatcctcgtcgccggcgccggcggcgcctttggcggcgtactggtcgcttccggcatcggtaatgccttagccgaggcgctggagacaatacatctgccgctgatgcccgccgcttttctgctatcgctggtgctcagagcctcgcagggttcggccaccgtggcgatcctcaccacctccggtctgctgtcgcaggcggttgtcggtctggagccgctgcagctggtgctggtgacgctggcgacctgcttcggctcgctcgggctgtcgcacgtcaacgacgccgggttctgggtcgtcacgcgctatctcggactctcggtgccggatggactcaaaacctggaccgtcttgacaaccatcatgggggtgacgggctttctcatcacctggctgctgtggtttgcgctttga

SEQ ID NO: 214943 - DNA, 942 bp, Klebsiella pneumoniae
atgtatgccgtacttatgaagcagatgctctatttgaaaatgctggcgtggctggaggataatatctattgtaacccggcgatcgatgacctggcgctgtatatgggctattcacgtcggtttgtgtacgacgtgttttaccagtatggccagttacccatcgggcagtatattcgtctgcggcggttgaccatcgcagcggtcagtctgcgcttaacacggcaaccgatcgccgctattgcctggcagttaagctatgactcgccgcagaccttttcccgggagtttaagaagcgcttttcgctctcgccacgtgaataccgttgcgcggcgcactgggacacggcaaagctgttgaaaaagtttcacccggacggagagagcctacctctggctcgttttttttctctgccggaacaggtctattatggctatccgatgaagtatgaactgcgcctgtcggatttggtgttgcaaagcaccgctaagacgagcatcagacaaaaggttgaccgttttttcaccgctggcggaggctcgctttccgtactttccgactacgccgcggcgagcaaaaatgagcttaacgtcgaggttaacgcttttgtcggctgtcatgaggcgggaaagctgccccccgcgctggccatgaacagctcgctgaccacccggtcagggctttatgtcggggttgaattctacggcaattggtcacgttatgctcgtttatccagcgatctgtatatggagctgctgccatccctgggggtaagtcgtcgggacggctatgacattgaatgttttataacccgccatgcggaaggcgaagaggcaggggacaggcgctatcgcgtacgctattttatcccggtgacgctgtcggcagcgggtctgcggtctgacagcggtagtgggtcagggcctgtgccggggcgaagttaa

SEQ ID NO: 214944 - DNA, 132 bp, Klebsiella pneumoniae; identical to SEQ ID NO: 104006

SEQ ID NO: 214945 - DNA, 1359 bp, Klebsiella pneumoniae; identical to SEQ ID NO: 136042

SEQ ID NO: 214946 - DNA, 483 bp, Klebsiella pneumoniae; identical to SEQ ID NO: 136043

SEQ ID NO: 214947 - DNA, 267 bp, Klebsiella pneumoniae; identical to SEQ ID NO: 125559

SEQ ID NO: 214948 - DNA, 255 bp, Klebsiella pneumoniae; identical to SEQ ID NO: 102310

SEQ ID NO: 214949 - DNA, 258 bp, Klebsiella pneumoniae; identical to SEQ ID NO: 102309

SEQ ID NO: 214950 - DNA, 204 bp, Klebsiella pneumoniae; identical to SEQ ID NO: 136047

SEQ ID NO: 214951 - DNA, 690 bp, Klebsiella pneumoniae; identical to SEQ ID NO: 92428

SEQ ID NO: 214952 - DNA, 690 bp, Klebsiella pneumoniae; identical to SEQ ID NO: 92429

SEQ ID NO: 214953 - DNA, 219 bp, Klebsiella pneumoniae; identical to SEQ ID NO: 92430

SEQ ID NO: 214954 - DNA, 306 bp, Klebsiella pneumoniae
atgcagtttaaggtttatgcctataaaagagagagccgctatcgtctgttcgtggatgtgcagagtgacatcatcgatacccccgggcgacggatggtgatcccgctggccagcgcctggctgctgtcggataaggtttcccgtgaactctatccggtggtgcacatcggggacgaaagctaccgcctgatgaccacggacatggccagcgtcacgtcctccgtcaccggggaggaagtggccgatctcagccaccgggaaaatgacatcaaaaatgcgataaacctgatgttctggggaatttga

SEQ ID NO: 214955 - DNA, 396 bp, Klebsiella pneumoniae; identical to SEQ ID NO: 92431

SEQ ID NO: 214956 - DNA, 438 bp, Klebsiella pneumoniae
atgatgatctcatatcaggaacttgttcgcaccttccctaacatccgtccgtgggaagcgactgctgaaagtttgtcagaacagattgatgcctatgtaagcccaatccttgaaggccgtagtgaagaagatttactcacagagttaatgctaaaacgtggcatcgacctgagtgtaaacattgaaacccgtcagtttgatggattaaccgtttcttgcgttgacggtggcaaattgtttacctgctttgccaaacaaatccctgcatcttcagtagaagaactgaccaaggggatcatcgactggcataagagtttaaaagttgggaaagatacggtctgctatttccttgatgatgcgtttgaaaataacgttgctaaaacaaatctttgcgccattctggaacagcatggcctgactaacctgcacagcctgtaa

SEQ ID NO: 214957 - DNA, 1290 bp, Klebsiella pneumoniae
atgaaactacattttgaatctgaccttacctatcagcaaaacgccataacttcggtctgtgatttgtttgtgggacaggagaagtgggagagcgaaatgactgtgctggccccagctcagggtgcactctcatttgaaggcgcaacaggttcaatgcctgtaaacccacagatacccgaagatgatgttctgctgaaaaacttaaacaatgttcagttgaagaatcagcttccaccttcacctgtgctcgacagccatgattttactgtcgagatggaaacagggacaggtaaaacgtatgtttatcttcgcaccatgcttgagttgaataaacgatatggcatgagcaaatttatcatcgtagttccttccgttgccatcaaggaaggcgtttataaaacactacaaatcactgaagaacattttaaaagcctctatgcgggaattccatacgaatactatctgtatgactcgtctaaacctgcggatgtgcgaaattttgcaaccagctctgttatgcagatcatggtaatgacagttggtgcgattaacaaaaaagacgttaataagctctatcagtccagtgaaaaaacaaccgttgacgatctggataagccaattgatctgatacgtgctacacgcccaattattattgtagatgaaccgcaaagtgttgatggtggcttaaatggtgcgggtaaaaccgcacttgatgctatgcacccaatgttcaccttacgctattcagcgacacatgtgcataaacatcatatggtgtatcgcctcgatgccattgatgcttacaatcagaaactggtcaaacaaattgaagttgccgggcttgaagtccagaatgcaagcaatagcccctatgtaaaactggtcagtattaacagtaagaagaatagcattagcgcgactgttattgttgatatagccgataaaaaagggggcgtgaatcgttctgagattaccgtgtatgacggtacggcacttgatgacgaaacggggcgtgatatttatcagggatacaggataagcgagatccgcacgggcaaagaaggctatctgacactggaaacgccttctaatacctactatatgcaagttggtgatgtcgtgggtgatattgacccgatgctcatccagcgtcatatgattaggcgtacaattcgtgaacatattgataaagaacttcgactgaattcccagcaaatcaaggttctcaccctgttcttcattgataaggttgatttctatcgccagactaatgaagaaggacttcgttaa

SEQ ID NO: 214958 - DNA, 1629 bp, Klebsiella pneumoniae
gtgatcaaaagccccgcatataaagatttgctcccttctcatccagaacatgctaaagacgttcatgatggttatttctccattgataaaaaaggtggatgggctgaaacaaccgaaagcaataatgcaggccgcgaaaatgcggaacgcggttataacctcatcatgaaaaataaagagaagcttttgagtttctcgaatccggtgaggtttattttttcacactctgctttgaaagaaggctgggataaccccaatgtgttccagatctgtagccttcgagagatgggaagtgaacgagaacgtcgtcaaacattagggcgtggtcttcgtctgtgcgttaaccaagaaggtgaacgtgttcgtgatgacagcattaacattctgactgtcgttgccagtgaaaattacgaagcctacgctgaacgattacagtctgaaattgagagcgaaacgggtatccgttttggtattatcgaaaaagatgcattcgcccatctgatcttctctgattcctcacaaggtgtaggaatcaccggttcgcatgacatctggtctgaactacagactgaaggttatctggaaaaatcgggaaaaatcactaaaaccctgaaagaaactcttctcgatggcacttttgctgttagcgaaaggttccttcctcttcaggagcaaattgaggctatcctgcgtaaatcagcagggcgactcaatataaataatgctgatgagcgtaaagtaatcaaataccggaaagaggtcttaaacagccctgaattcgaagcgttatggcagcgcatttgccaaaaaacactgtatcgtctggcatttgatgaagatgtattgatcaagtcctgtataaaatcactttctgaaatgcagcctgtagcaaaagcaatggtcagtttcagcaaagcaacaatcaaacaaagtcaatctggacttgatgtcaaagctcagtctaatgggacaacaagcgctgttatagatgttgcagagcagccactgccagatattcttggtgttctacaggaaaaaaccggactgacaagacgcagtttaagcaccatcctgaaagagagtggaagactcgctgattttgctaaaaatccacagcagtttatcagtgaagctataggccgaatcaactactgcaaacgcctgtcaattgttgatggtattaaatattatccactaaaaggagaggtgtatgcgcaaagtctctttatggataaagagctaacaggatatgcccgtaatctttttgaaacctcgtctaagtcagtttacgaatacgttcctaaagattctgaagtcgaaagccgtttcgctcaggaactcgaagaacaggatgaagttaagctttatgtgaagcttcccggttggtttaaaattccgactccactgggaacttacaatcctgactgggccttagttattgaagacaatggtgaagaacatatttactttgttgtagaaacaaaaagtaaacacattggtcttggtaatgaagaagatgcgaaaattacttgtggaacagctcatttcagtgctttaaaagaagaaaacactaatgcagcaaaatatatcagagcgacaaatcttacagaagtaataagcagcatttga

SEQ ID NO: 214959 - DNA, 540 bp, Klebsiella pneumoniae; identical to SEQ ID NO: 19206

SEQ ID NO: 214960 - DNA, 837 bp, Klebsiella pneumoniae; identical to SEQ ID NO: 22759

SEQ ID NO: 214961 - DNA, 804 bp, Klebsiella pneumoniae; identical to SEQ ID NO: 6089

SEQ ID NO: 214962 - DNA, 816 bp, Klebsiella pneumoniae; identical to SEQ ID NO: 6090

SEQ ID NO: 214963 - DNA, 861 bp, Klebsiella pneumoniae; identical to SEQ ID NO: 49918

SEQ ID NO: 214964 - DNA, 762 bp, Klebsiella pneumoniae
gtgattccaatagaacgacatcagcgtattttagccctggtggagcagcgtggggcggtaagcattaacgagctgacggagatcctcggcgtgtcccatatgaccatccgtcgggacgtcagtaaactggaggagcaggggctgctggtcagcgtctcgggcggcgtacgcgccgtcagccggctggccgcggaacccagtcatctggtgaaaagcacgctgcagagtgaggagaaacaggcgatcggcgcgctggcggcgagtcatatcgctaaaaacagttgcatctatctggatgccgggactaccaccctggcgctggcgcgggcgatcctcgaccggaacgatctccaggtggtcaccaatgattttgagataacccagctgctgatcgatgccagccagtgcggcgtgatccacaccggcggcactctgtgccgggagaaccgctcctgcgtgggcgaatcggcggcgcgtacgttacgccacctggctatcgatacggcctttatctccgccagcggctgggacagtcgcgggatattcacccctgatgagaacaaggttaccgtcaaggagaccgtcagccaggtcagcgcgagaagcatcctgctgtgcgacagttcgaaatacaatcaggtggccacgtttatggcgttacctttgacccggttcaccaccatcattaccgaccggcatctttccgatgccgccgccagtcatatcgcccggcccgcctgcgaggtgctgcgggccggataa

SEQ ID NO: 214965 - DNA, 903 bp, Klebsiella pneumoniae; identical to SEQ ID NO: 30075

SEQ ID NO: 214966 - DNA, 702 bp, Klebsiella pneumoniae
atgtccagattcattctcgggaactgtattgatgtgatgcgcggattccccgaccgtgccgtggaccttattgtgaccgatccgccttacctcgtcggttttaaggaccgtcagggcagacagattgccggggatgtgacggacgaatggctgcaaccggccacgctggagatgtaccgcgtccttaaaaaagacgcgctgatggtgagcttctacagctggaaccgtgtggaccgctttatggccgcgtggaaggcggcaggattctatgccgtgggccagcttgtgttcaccaaaaactatgcctccaaccgtcgtaacgccagggcccgacgcggatttgtggactactgccatgaaggggcttatgtccttgccaaaggccgccccgtgccgccccttaaaccgctgccggatgtgctgcccttcccgtataccggtaataccctgcatccgacgcagaaaccagtggaggcgctacagccgctgattgagtcattcagcgccccgggcgcgattgttctcgacccgtttgccggaagcggttcgacctgcgtcgctgcataccgtgccggacgccgctatatcggcatcgaaatgctggcgcagtaccaccgggccggaaccgaacgactggccgccatgcaccgggccgtcaataccccggcggcgaacgatgaatggctcccggaggccgcgtaa

SEQ ID NO: 214967 - DNA, 222 bp, Klebsiella pneumoniae
atgaattacgacggtcacgaagccctgcgccgcgatatggccgggctggcgaacaatctttgcgacctgaaaaccaccctgaaagtgctggaagacacgtaccactaccggcacgacggactgacggaacggcttgccggtatcagtctgcgacgtctcagcgtcctgatggatgaggcgttcaatattgccctgatgctcgatgaaagctttctggagtga

SEQ ID NO: 214968 - DNA, 420 bp, Klebsiella pneumoniae
atgtacggaatccgtgaagacatttgcaggatgctgagtgagcaatatcccgcagaaaccccgctgaacctgattatctggactccggcggatattgaagcgctgtctgacgggatggaatattccttttcagaacatgacgtaagggccgtactggaacgcatggacgctataccggaagaacaacggcttgagtcgggcgtgtcagccggcctggtgatggcactgatagaccaggtgaaagagaacgggcagagggtgactgtgccggttgacctgcttgaaaccctgctgattaccgccgaacaggcattgtgggacagggaatggaccgcacgggatcgcaatctcccggtgccggaaagcgtaatgcgccgcctggcggatacagcaaaagtgcgggcattactgaaaagctga

SEQ ID NO: 214969 - DNA, 768 bp, Klebsiella pneumoniae
atgatgaaaaatgaaacccttaacacgcttattctgcgtcacggcgaccggatgctgcgccaggctggctggcccgacactgttgatatggcgcccgtcgcccctgaaaccgtacccggctggcttgccgcctgcggctctctcagtggcgtggaaatcctcacacttacggaacagctttgtcagccgctgacgtatggccgggcagcgttgttgctcgccagcgcccggcggctggcgggaaccccggctcgtctgcatctctttccggtgcaggcatatccgcatccggagcggctggctgactgtcaggttatccgcctgccttacgctcaggagtggctgacggcggcggaatgtgacgatctgctggccttcctgaaagcctccctcacgcagatatcggaaatcgtccaccgggatacgaagcgcatcgccgccgcgctgacgtcgtccgtcaatccccgtctgatggacaggcggatcggtgactggcgcttgctggccgtcgagtatgatcatgataactgcctggacgaagacgaaaccgacaggctggatcaggtcctcgatgccattcttattcgcgatgcgcgattctgcccgatcctgctcaccctggttaacgagcgggaggaaactatcaggagcgcaggggttatcactgatcagctgcgttttacggacactccggtccggcgctggtttgatcgccgggttttaagggaaatggtgagagaggcccgcgccagcagaactcaggagtga

SEQ ID NO: 214970 - DNA, 1164 bp, Klebsiella pneumoniae
ttgaaaggccgtttgtttattgctgtatctttgctcgcttcgagcgtttcctgcgcatttgccgtcgacttacctgctacggtcgcgccgccttccattcaggctggctcctgggtgctgatggattacaccaccggtcaggtcctgaccgcgggtaacgaacatcagcagcgcaatcctgccagtctgaccaaactgatgaccggctacgtggtcgatcgcgccatcgacagccatcgtatcacctttgacgatatcgtcaccgtgggtaaagacgcctgggcgaagggcaacccggtgttcgacgggtcatcgctgatgttcttaaagccaggggatcgcgtcagcgttcgcgacctcagccgcgggctgattgtcgactccggtaacgacgcctgcgtcgcgctggccgactatgtcgccggcggccagccgcagtttgtcgccctgatgaatcagtatgtcgaaaaactgcacctgcgagacacccatttcgaaaccgtccacggcctcgacgctccgggccagcacagttcggcctatgacctcgcggtgctctcgcgggcgattattcatggcgaaccagacgtctaccacatgtacagccagaaaagcctgacgtggaacgggatcacccagcaaaaccgtaacggtctgctgtgggataaaaccatgaacgtcgatggactgaaaaccggccacacctcgggggccgggttcaacctgatcgcctcggcggtggatggccagcgccggctgatcgccgtggtgatgggggcggacagtccgaaaggccgcgagcagcaggccgctaaactgctgcactgggggcagcagaacttcgacaccgtgcaggtgctgcagaaggggcagaaggtcggcaccgagcgtatctggtacggcgataaagagcagattaagctcggcaccgatcaggatttctggttagccctgccgaaggcggaagtgtcgcgcattaaagcgaaatatgtgctggataagaaggatcttgaggcgccgatcgccgccaatcagcgggttggcgagatttcactgtatgacggcgacaaggtggtggggcactatccgctggtcaccctcgaaagcatcaataaaggcggagtgttctcgcgaatgagcgattacctgcatcacgagctgtaa

SEQ ID NO: 214971 - DNA, 1425 bp, Klebsiella pneumoniae
atgcaagatagcgtcaaccagcccggatttttattccacgattatgaaaccttcggcaccagcccttccctcgaccgaccggcgcagttcgccgccatccgcaccgacgcggagctgaacgtgatcggcgagcccgaggtgttttactgcaagcccgctgacgattatctgccgcagccgcaggcggtgatgatcaccgggatcaccccgcaggaagcgctggccaaaggggataatgaggccgcgtttgcccgccgcatccacgatctgttcacggtgccgcaaacctgtatcgtcggctataacaacgtgcgctttgatgacgaagtgacgcggaatatcttctatcgcaacttctatgacccttatgcctggagctggcagcacgataactcgcgctgggatctgctcgacgtgatgcgcgcctgctatgccctgcgcccggaagggatcgcctggccggagaatgacgaagggttgccgagcttccggcttgaacatctgaccgtcgccaacggtattgaacaccagaacgcccatgacgcgatggccgacgtatacgccaccatcgccatggcgaagctggtgaaaacccggcagccgcggctgtttgattatctctacagccaccgcaataagcgcaagctggcgacgctcatcgacgtgccgcagatgaagcccctggtgcatgtctccggcatgtttggcgccgcgcgcggcaacaccagcttggtggcgcccctggcctggcatccggaaaaccgcaatgcggtgattatggtcgatctggcgggcgatatggcgccgctgctggaactggatgccgatgccctgcgcgagcggctttacaccccgcgcgccgagcttggcgatctgccggcggcgccgatcaagctggtgcatttaaataaatgtccggtactggcccaggccaataccctgcgcccgcaggatgccgaccggctggggatctccattcagcgctgtctggagaacgcccagctgctgcgggcgaatccgcaggtgcgcgagaaggtagtggcggtctatgccgaagccgagccgttcgtgccgtccgaaaacgtcgacgcccagctgtacaatgggttctttagcgatgccgaccgcgcggcgatgaaaatcgtgctggaaaccgaaccgcgcaatctgccggcgctggatatcaccttcgccgaccagcgtatcgaacgcctgctgtttaactaccgggcgcgcaacttccccggcacgctcgatgaacatgagcagcagcgctggttagagcaccgtcgtcaggtgtttacgccggcttttttgcaggcctatgccgatgagctgcagatgctgtatcagcagtatgcggatgataaagagaagctggcgcagctgaaggcgctgtggcagtacgcacaggatattgtctga

SEQ ID NO: 214972 - DNA, 837 bp, Klebsiella pneumoniae
atgttattagtaacagtgtcactactttccggtttaatgatttatattatcattatgaacagagcagaactcaatagttcactatctgcaaggtttgtaaaggctttgaaaaatgaagccctgtcgctggtctatcaacctatttacagaattgaagacggacagatctgcggatttgaggccttgctcagatggaaagatgaaagactcgggaatattagccctgaagtatttataccgctttctgaaagggaagggttgcaggaggatgtgactttattcgtcattaaccatgctatccgagaatttatccatactgctattcagaatgaaatatttttgagcgtaaacattaatccaagcgatcttgattcagaaaaattcagggataaactactaggattaatttctgaatataacatcccatataaaacaatccttcttgaaattacggagcgtcaaggaggggattttaaaggtatgaaaattcacattgataaatataaaaatcatggtgtcaggtttgccatcgatgactttgggacaggatattctaatcttaatctggtaactgcgcttgatgtagatgaaataaaaatagacaaatcgctaactagtgctattggtactgaatctttacgatatgatcttcttcccggactgcatgagatgttccgctccattgcagataagattgtgtttgagggtgtagagactcaggagcaggtgaactatctgaagacgttctggccacagagttatgctcagggctggtattactccagagcgcttccgctggaagaagcgagaaaacttaccatccgggaattgaactga

SEQ ID NO: 214973 - DNA, 678 bp, Klebsiella pneumoniae; identical to SEQ ID NO: 210673

SEQ ID NO: 214974 - DNA, 861 bp, Klebsiella pneumoniae; identical to SEQ ID NO: 210674

SEQ ID NO: 214975 - DNA, 906 bp, Klebsiella pneumoniae; identical to SEQ ID NO: 210675

SEQ ID NO: 214976 - DNA, 591 bp, Klebsiella pneumoniae
atgacagctattaacgttcagcccacgcagaacgcggtgatgtgcggcatcaaattgcctgccgacctctatcagaacactgtgggctcacgcaacaaaaagggcagcgacgggacgaacgcccgcataacgctgcgcaacctgcacagcgttatcaacaatccgtctatcgagctggctgcagcccagaccgtcgatattccgggaaacgcggcaacctggaccgctgattacctgaacagtgattacagctggataccgcggattatcctggaaaattgtatcccggcaattatccatgctcctggcgcaaaagctgttgtcgatattcatggcggcaagctggcgcgggtctacaccaacggcaatagcaaccgctgccgggtcactggtgctgatattgagctgatacctgatgcggcgggtgtgacctatttcgcagcagataaaacgctggtgacgggctgttcatggctgaacccggccagtggtgcaacctatccaggtacgttacgtggttcaggaaacgaaatgatcggagaaagtgctaaagcaccaaaccttcctgcaaaagcttttattgaggaataa

SEQ ID NO: 214977 - DNA, 732 bp, Klebsiella pneumoniae
atgggaaacggaacgcgtattttacttaactcggacggtgttattactaactgggaaaagcaatattttgaaccagtaaagtcaccactggcagcaattgcaaacccgatcgtggcttttgatttactgactcctgtagataactcacgacatggtttcagcgtgcagcaaggtgtgcagatcctgaaagggtatggacttgaatttcctggttccgccggtagccagactacgtttgcaaagtccggactgtccggactgtcttttcttactgcatttcggttaagcgcagttgatgtatttcagtacgtgcttgactgcagggatctgacaccaggtacaggccatggttacgccattacgtttaaccctgccggtcagcggcttgagcttcgtgtcggctggcctgacggtagtcagggtatctattttcaggaaggtaagacgattgttgcggggcaatggtatgtggcatgcggtgtcatttctcctaaccgcaatcacaaattaacgttgtcagatgggactgcaattgctgcaagccctgcgggttatctgttaaacgtggcgggaaacaagctaatgctgggtgccagtgctgccggttcatcaatgatgaaaggtgatctggctttctttggtgcatgggaaaaagaatttaccgcaggcgacactctgacggctgtcgcgctgggtaaaaacatcatggctttaagagggcaggcagtatga

SEQ ID NO: 214978 - DNA, 204 bp, Klebsiella pneumoniae
atgacaaccgtagaagtacgcattgaaacagttaatggcagcatggtcactttttcgcgtgtatctgaaaactgggtaaatctgaaccagtacgaacgggatgacattatcagcggatggataaatgaggataaaaacagccaggccgcattatcggctagtgatggatataccctgagctatcacgttttagctcaagaatag

SEQ ID NO: 214979 - DNA, 1077 bp, Klebsiella pneumoniae
atgagcacagccttttatacaaaactgaccgcggcgggagttaatgccatgactcgcgcagtcatgaataatgaaccaatctctattactgaaatggctgttggagatggtggcggtaataatattaatcctgacggaatgcagggactagttaatgaagtttaccgcgctccgttaaacaggctggttattgctgatctggacagaaatgtcatccgggcagaaatgctgatgatgccccaggttggcggatggtggctgcgtgaagcggcgttatttgatgacagagggatctgtctggccgtagcaagtttacctccatcctataagccattgctggaacaaggggcagggcgtatgagcacggtgaatatttacatcaccgtcaacaatattgccgatgtgcaactaattactgacccggcgatcattctggcaacgataactgaggttgataaggctaagggtgaggcaaaggattacgccgacgaaattgtaggtaacttagacaagaatattcagcaggtgattgctgatgctataacggcggcaaagcgagatttctgggaagatgataatccggttggcaccacccgcttttttaaccagaacctcaatcccaatgagcgctggccgtggtcgcaatgggtgtacaccggcgaaaacaaaacgatccgcgtcggcagggctgacggttcggacgtcgggcagacaggcggcagcgatactgtcacactccagcaggctaacctgcccgctgtgcaggttaacgtcagtggcgaaaccagtgaactccccgggcaggagctgaccaccagggaggcgggacggcataaacacaaaggcggaatgctcgcccctggcgaggcctgggatgataattacatagtcggttcggataacgacagccgccgcaccagaaattatacggatgaggtggccgatcatagccatattgtggacttgccagcccacaaacacacgaccaccggcaaaaccgataacctcggtgaagggaaatcattcagcgtggttgaagcccacacactgctgatgtgctggagccgcgttgcctga

SEQ ID NO: 214980 - DNA, 2478 bp, Klebsiella pneumoniae
atggccgcgcaccttgagcgtgcaatgtcacgcggtcttaagcaagcactggcggagctcgtgaacggcacaggtccactgccgttccgacagttgcgacaatcggctcgtaacttcaccggaaccgagttggagaaagaactgattgtctatcgccatatccagcattggatgccggaagtggatctgctgttgagcacgctatcactgtcgcagaaaaatctgcaacacctggcagagaaagtcgactactacggtgccaaactgaaacgtcaaaccgtaggcagccaatggctgtatttattgtgctatcttcaaacgcgatggcagcaagcgctggaacgtattgccgatggctttgtgcatcatgtcagacagaccaaacagaaggcaaaggattatgcgcaggaagcggtgtttaaggattggcaaaaagcagctaaaaatgtcagcaaggcagctgaagtactgcacctgttcattgatgacagcattgatctgcaactaccgtttgcaacagtaagacagcaagcactgagcctgctgaccaaaagggatctggaatctgtatgtctcttcctgaacgagcagcgacgatcggtcgatgaagccatgtggcagtactgcgacgagaaagaaagtctgcggaaaggtttgctgcgagagttgttcctatgtctgcgcttcgaaggctgcgacggcacccagcacttagcggccgccttggcgaaaacacaaaacgaactcaacggccaggacgctcagttgcaaactgccgacaccagactcctttccaaaaaatcacgtgaattcctgctggatggtgaagggaatatcctgatcgatcgttatgagtggttcctctatcaacagattcctgatcgcctgaatggccagctgacgctgcctgatatcactaaataccgggcactcgacgccgacctgatcgacggggaacattggcgaaaaaacaaatatacgctgcttcaacagagccattttacaaaattagcggaggagcctgaaaagctgatcaaacagatggccatggaattggatacccgtttgtacgaagtcggcgaatatcttgaacaggaagacaaccggaatatcatcttgcgtaatccgcagggtaaacgcttctggcgcctgccttcggccagcaaacatcatctggtcaacaatcccttcttccagcaaattcccacaacggggattgcggatgtactgcgcatggttgatcgtgacaccggtttcattgactgcttcgctcatgtgctgggttcccaatccagaagccgttcccatgaatatgacctgttggcaattctggtcggcaatgcaaccaatcaaggcatttacggcatggcacagatctctgatcgtacctatgatcagctcagcactatccaggcgaactatcttcgcctggaaacattgaatgctgctaacgacaacatcaataacgcgacagccaagctacccatcttccggtactacaacatccaggaagatgtgatccacgccagtgccgatggtcaaaagttcgaagcccggcgcgagaccttcaaaacccgttattcgtcgaagtactttggcactcaaaaaggtgtttctgccatgaccttgatcgccaatcacgctgcgatcaacgccagagtgatcggcgccaacgaacatgaatcgcactacatctttgatttgttgatgagcaatacgtcagacatcattccggatgtgctctcaaccgatacccatggggtgaaccatgtgaacttcgcgttactggatctgttcggataccagtttgccccacgctatgcccaggttggcaaagtgatcaatgacatgtttgatgtcaaggaagacaaagaacaccgaattcagctgtgcttaaaaaagccaatcaatacccatcgtattgcgcagcactgggataccatccaacggattgcagtatcacttaagcagcggaaaacaacgcaagccaccttggtgagaaagctctcggagtacaagcgcaatcacccgctgctggaagccctgacggaatacaatcgcctggtgaaagcgaattatctactgtgctacatcgatgatgccagtttaagaaactatgttcagcgcgcgctgaaccggggagaggcctatcaccaactgcgtcgggccgtgagcagcgtcaatggggatcagttccggggcagttcagacgaagaaatccagctatggaatgagtgcgctcgcctggtcaccaatgccatcgtttacttcaactccaggatactcagccagctgttgaccagcttcgaataccaaggagataccaagagaatagatatcgtcaaacaggcatcccctgtggcctggcacaacattaacctcaaggggacttaccacttcgaattgagcgaaaaattgccagatctggaggagcttatgcgctcaatcgagggatatttacccgtcagcgaaaagtaa

SEQ ID NO: 214981 - DNA, 1209 bp, Klebsiella pneumoniae
ttgcgcggaaaacccgtcatttgcctgagtaacaatgacggctgcgtaatcgcgcgcagccgcgaagcccgcgacatcggtatcccgatgggcgccccctggtttaaggtgaaagcgctggcggaaaagcaccacgtggcggtcttctccagcaattattcgctttatcattcattttcagaacgcgtcatgcgctgccttgaggcgctggccccgcgcgtggaacagtacagtattgatgaaatgttcctcgacgtcgccggcatcgacagctgcatcgcttttgaggacttcggtcgtcagctgcgtgaacatgttctccgtcacaccgccctgaccatcggcgtcggtatggggccaaccaaaacactggcgaaatcggcgcagtgggcatccaaagagtggccgcaatttggtggcgtgctcgcgctcacgcggggtaatccccgccagacagagaaactgctttcactgcagccggtggaagaaatatggggtgttgggcgccggatctcgaagaagctgaacacaatggggatcaccaccgcgctgcagctggcgcgcgcgaatccgaccttcataaggaagaatttcaacgtggtgctggagagaacggtccgggagctgaacggagaaagctgtatttcgctggaagaagcgcctccgccaaaacagcagatagtctgcagccggagttttggtgaacgcatcacggaatatgacgcaatgcgccaggctgtctgccagtacgcggagcgtgctgcggagaaactgcgcagtgagcggcagtactgcagacacatcgcggtctttgtgaaaacgtcgccgtttgccgtgaaggagccttactacggaaacatggccagcgagagtctgccgttcccgagcagagactcgcgggatatcatcgccgctgccgtcagagccctcggacacatctgggtccccggtcaccgttatgccaaagccggcgtgatgctgaacgatttcacacctgcggggggttctcaattgagtctgtttgatgatgttcagccccgggcaaacagcgaagcgctgatgaacgtcgtggacgggattaaccattcagggcttggaaaagtgtggtttgcaggacgaggcatcgctcccgagtggcaaatgaaacgagaaatgctctcccctgcctacaccaccagatggactgatttgcccgtcgctcatctgtaa

SEQ ID NO: 214982 - DNA, 201 bp, Klebsiella pneumoniae
atggacagaggaatgctggcagagtggctacgggatattgcccaacatatagaagaggaaagcccactgatacgtgatgtcagtgtggatgatgccctttcagatgaggggctggccaaaaagatcatcaccatcacgttcaatgcgcctggtcgtgtcatacagactgaagaagacgtcagcagcatcccccggcactaa

SEQ ID NO: 214983 - DNA, 933 bp, Klebsiella pneumoniae
atgccgaactggtgcgccaaccgactgaccttcagtggaatacaacaacacgccgatgaactcaagtcatgggtgcgtggcgagcaattatccctgcccggacgggcaaaacgagaaggaatacagctgtttctggccggatgtgctggcctgctgcgaccagatacggtctcgccgtatctgccctgtccggcgctgaccgccagcggtgtggcgacagaaagtacgcccgcgtcgcaggcattcacccgctggctggcgatgtttaccgctggcgctgaactggacaccgacacctgtcagacgttgcaccagtgctggctggactctggcatcagtcgcctgcgctggaacaggcttgacgagtacgcaatggcggtcattgaacgcctgtaccgccagaagtcctgcgactggagcgatatttttcgtccgcaagacccggagtcctggtggaacacgttgtgcgatggcgaagagaacgcggattgcggcgcgccaatggattttcgtctggtgctgccgactcgcctggatattgaggtgaacggctttaacggcggtctgctggacggcatcccgtcctcatacagccattacatcagccagtatggctgcaaatggccggtcggctacgacatgaatatctgttttgacggcgacacctcgctgacggtggattttgatacgccgtggagtccggtcagtgaagacgtggtggcggcgctgagtttgcggtacggcgcggagattgagcactggtacgctgaacagggatgcgattactgcggctacggacgctacagcaatggcgacattaccgaacgactcagcgacagtctggaatggggagaacccgacccggaagacgactacccggacgtgaccggcccggactggattattaacaactttgcacgctttggcggctga

SEQ ID NO: 214984 - DNA, 234 bp, Klebsiella pneumoniae
atggaaaaacgcatgaccgtgaaagcctttatagaccgcttgtcgcagtaccccgacgacgcgctgtgctgcggcacgttctggctggccgatgattttctctcactggacggctcgctcacggaaggcgacatcgatgcagcgatggagcgggcgcaggacagtcatgatgcgaatgacggatttaactggagccacctgcaggcggcgattgatgaggtaaaacgtgtatga

SEQ ID NO: 214985 - DNA, 336 bp, Klebsiella pneumoniae
atgaatacctggctggtcggctttgccgttgaaatcagcggcgtggaaatgatggtgcatcacatgatatcagcaaccggcctggcgcaggctgaatcgggcgcgatacagatgggccggacgtggtgggacaatttgctgctcgaggatgaccgtcactgctggcaatatccggatggcgtggtctggtttaacagcatcatcctgctcgatgacgtggagagcagtatcctgcgcggactgaagtttctggatacgtgggcagtaaccggcgtaacggatacgcccggcctctgcgatgagtacggaaatgactggcgggatatcacacgctga

SEQ ID NO: 214986 - DNA, 483 bp, Klebsiella pneumoniae
atggctatttttcatcttgattttaaaattgtgaaacgttcagaaggtaggtcttccgttgcgaaggctgcctatcatgctcgtacacgtataacagatgaaagaacaggtgatacgtatgattatagccgccgtaccgatttatatgggcatttcatattagctccagttaatgcaccggaacatatcataaaagactctacagcattgtggaatgaagttgaacgggtcgagcgtcagcaaaatggtcaaacatcacgttatttcgatgttgctattcccaccgagttaaacaatgacgacaagaaaaaacttgtccttgagtattgtcagaaaaatttcgttgataaaggcatgattgccgatatcgcttttcatgatcttgatagcgataacccacacgctcacgttatgttgacattaaaaaccataggccctgaaggttttggtaaaaaagaaagaagctggaacgacagtgtttga

SEQ ID NO: 214987 - DNA, 369 bp, Klebsiella pneumoniae
atgagtgaatataattcaaataataatgagaagaaaaacaaaaaacaacttgaacatattaatctatgcattacacgagatttttatcatggtgataaaattaatagcgaaataaaagaggtgatggatgatgctgatatatcatttaaaactgtgactgaacgtttcagagagagtgttttggaaaaaatgattaattggctagatagtgggaggattgtgcattctgacgttccgatgattattacaatttttcaacaggaagtttatgggttcaattttagaaaattaaaaataagatcatatataaatgacgggttaattaagaagttcggtaaaagtattgatcatgggatggttaaatggtag

SEQ ID NO: 214988 - DNA, 267 bp, Klebsiella pneumoniae; identical to SEQ ID NO: 99373

SEQ ID NO: 214989 - DNA, 243 bp, Klebsiella pneumoniae
atgaaagtattaattaaattgagtaatgactggcctgaacatgtgagtggcaatccagtccttgataagtgggttcacaagattccttggtccggcatcgaatgctttttattatgtgaagatggtaatgtttatcagtcatatataaaaatgcctttttctgtagagataaaagaatttcaacttttcaggcatacacacatagatgaaacttcatttatgattgaagaaatcaatgaatag

SEQ ID NO: 214990 - DNA, 216 bp, Klebsiella pneumoniae; identical to SEQ ID NO: 18568

SEQ ID NO: 214991 - DNA, 123 bp, Klebsiella pneumoniae; identical to SEQ ID NO: 169070

SEQ ID NO: 214992 - DNA, 1488 bp, Klebsiella pneumoniae
gtgatgtacggagaggagaagtcggactcgctcatagtagcggcgaagcaggcgaacaacccgaaaggagcggagtcagtggagcgaaggagcggggccaaggggaacgcggaacagccacacatgcgccggacacagagccgggaaagcatgtcacagaggctgtcacgcgtgcgggaagctgcgaagcagcggaagaaagaacggtttacagcattgttccacctgctgacagtcgaagcactggaagccgcattcctctccctgagcaggaaagcggccgccggagtggatggcatcaggtggatggactacgccggaaacatgaagaacaacataacagatctgcaccggaggctacatcagggcagctacagggcgcagcccggcaggcgtcactacatcccaaaagcggatggaaaacaacgcccgctcggcatcgcctcgctggaggacaagatcgtccagtatgcgctggtgaaaatcctgaacgcagtctatgaaaacgactttatggggttctcatacgggttcagacccgggcgaagccagcacgatgcactggacgcactggccacagggctggtacgcactaacgtaaactgggtactggatgccgacatcagtcagttcttcgacagggtgagccacgaatggctgatcaggttcacagagcatcggatcggcgaccggagggtaatcaggctcatacgtaagtggctcacagccgggacgtcggaggagggtcaatggcgagcaacggaggaaggcaccccacagggtgcggtcatctcaccgctgctggcaaacatatacctccactacgtcttcgatctgtgggcgcatcagtggcgacgtcgctatgccacaggcaatgtggtaatggtcagatacgccgatgacatcgtcatcgggttcgacaaacgatacgatgcccggcgcttccgtatagccatgcagcgcagactgagggagttcggactcacggttcacccggagaaaacccgtctgatggagttcggccgcttcgctgccgaaaaccgtgccatcaggggaaaaggcaaaccagaaacgttcaacttcctcgggttcacgcacatcagcgggaaagatcgcaacggcaggttcatgctgatacgaaagacccgccgggatcggatgacggcaactctgaaagccatcaaagacggtctgcgaaggcgctggcattactcaatccccgaacagggaaaatggctcaggagagtggttcagggatacctgaactatcactcggtaccgggcaacttccccaccatgcagaagttcaggacacacgtaacaaacctctggcgccgggcgctcaggcgcaggagccagaaggatgatacgacctggacgaaagcaaacaaactggcagccgcatggctaccaagggttcgggttcttcatccatggcctgtggagcggttcaccgccagacacccgaggcaggagcccggtgcgtaa

SEQ ID NO: 214993 - DNA, 1779 bp, Klebsiella pneumoniae; identical to SEQ ID NO: 181973

SEQ ID NO: 214994 - DNA, 570 bp, Klebsiella pneumoniae
atgaaaaaaacagtattaattaaaaacaaaaaaagtaaaaaaggtttctctcttttagagctattacttgttttaggtattatcgcagccttagttgtagcggcttttatagtatatcctaaagtacaggcatcacagagagcacaggctgaaagtaataacatcgcaacgatacaggctggtgtgaaagcactcttcacttctgcctccagttttactggattaactaactctgttgctgttcaggcgaagatattcccggataacatgttgagtggttctggttcagccgctaagcccatcaatgctttcaaaggagatgttacattggctgcggataaaactggtccgtcaggggcggatggttcttcatttactatcacctattcaaacgttcccgcatctgaatgtaccaaaattatcactgcggcagcaggaaacttctacacggctggtgtaggaacggcaggtaatgttaaagcagcaggtggagttttaaatgtggcgtctgctgctacagagtgtgataaaggtggaaacagtaataagttgattttcacgtccatataa

SEQ ID NO: 214995 - DNA, 303 bp, Klebsiella pneumoniae
atgaaaatgtttggtataaaaaagggattttcactattggagctgatccttgctctaggcatcggcagtgcaatagctttaataaaattccaagatatgaaagttgaacaagaggatttagttgctaaaacagcaggggaacaaattaaacaattaggtgaggcagttaatggttatatcagtatgagatatgataagctatctacactgacatcaagcagtaatcaaagtagcgatccgggaccaagaacctgtaattctacaggctgtgaaattgattaccatacccattatgagcagtaa

SEQ ID NO: 214996 - DNA, 591 bp, Klebsiella pneumoniae
atgacggctattaacgtccagccaatacagaacgctgtcatgtgcggcatcaaattgcctgccgacctgtatcagaacactgtgggctcacgcaacaaaaagggcagcgacgggacgaacgcccggatcacactgcgcaacctgcacagcgttatcaacaatccgtccatcgagctggccgcagcccagaccgtcgatattccgggagacgcggcaaactggaccactgattacctgaacagtgattacagctggataccgcggattaccctggataattgcatcccggcaattatccatactcctggcgcaaaagctgttgtcgatattcatggcggcaagctggcgcgggtctacaccaacggcaatggcaaccgctgccgggtcaccagtgctgatattgagctgatccctgatgcgtcgggtgtgacctatttcgctgcagataaaacgctggtgacgggctgttcatggctgaacccggccagtggcgcaacctatccaggcacattgcgtggttcaggaaacgaaatgatcggagaaagtgctaaagcaccaaaccttcctgcaaaagcttttattgaggaataa

SEQ ID NO: 214997 - DNA, 732 bp, Klebsiella pneumoniae
atgggtaacggaacacgaattttgttaaatgcagacggaattattactgactgggcgaaacagcattttgagcctgtatcttcgcctctttcagcaatagcaaatccgaaagttgcatttgatttattcactccagttgataattcaaggcatggtttcacagtacagcagggcgtgcaaaaactgaaggcttatggccttcagttcccaggtactgcggggagccagactacatttacagagccagggctcactggtttgtcatttcttactgcgttcagattaacagcagtagatgtatttcagtatattcttgactgtcgcgatctaactcccggctcaggacatggttttgccataactttcaaccctaccgggcagaggctggagctgcgagtaggatggcctgacggaagtcagggaatttattatcagtcagggatgagtattattgccaataaatggtatgtggcatgtggtgtaatttcccctaacagaaaccataagctcacactttcggatggcactgcaatcgcggccagcccggcaggttatcttgcaaatgtggctggtagcccgctgatgttgggagcgagcgccgctggttcttcaatgctcaaaggagatatcggattttttggcgcctggggcaatgaatttacggcgggagatatcactaatgccatcgccctggggaccagcatcatgaccagcagagggcagacggtatga

SEQ ID NO: 214998 - DNA, 210 bp, Klebsiella pneumoniae
atgacaacaatcgcagttaagattgagactgtttcaggggcaaaagtagaattctcacgtgaagtatttatctgggatgaactgaaccagtttgagcgtgatgacatcatcagtttactggtaaacggtaatgatgatgcgcaagccgttatatcagtaagcactggctatacgctgagttggtcccaaggcgaaaacgagggcccttaa

SEQ ID NO: 214999 - DNA, 267 bp, Klebsiella pneumoniae
atgcacaccgctttttcttccccgtcttctgcccctgccgcgccgctgatgccggtctctgacaccgttcaggagcgttttattcgcctgcccgaagtgatgcatctgtgcgggttatcccgctccacgatttacgacctcatcagccgggaggctttcccgaaacaaatctccctcggcgggaaaaacgtggcgtgggcgcagtcggaaatcaccgggtggatggctgaccgtatcgctgaacgcaaccggggctatgacgcatga

SEQ ID NO: 215000 - DNA, 195 bp, Klebsiella pneumoniae
atggctacgaccctcaccccgtctcacccgcaatttgtcttcgtgtttgccgctgtccgtcgcgcagaccgtcagccccgtatctgtatgctccgcgccgtcgccggagatgaacacgccgcacgcctttccctcgttcgcgattacgtcctctcgtttgccggtcgtctgccggtggcggaggtgcgcgcatga

SEQ ID NO: 215001 - DNA, 228 bp, Klebsiella pneumoniae
atgaaacagcccgccatcaccgtaaaagacctcgaatgccttgagcacctgcgtaacgtcggccactttgtcagcgcgatgatgcaggagcaggactgcactaccattcgccgcgacccggcgcaacagtcgcagcttacctccgtgatttacctgatgaccgcccagctcgacggcgtggtcgaacgctgcaatcaccgctggttcaccggggagggcaacgtatga

SEQ ID NO: 215002 - DNA, 267 bp, Klebsiella pneumoniae
atgcacaccgctttttcttccccgtcttcagcccctgccgcgccgctgatgccggtttctgatgccgctcaggagcgttttattcgcctgcccgaagtgatgcatctgtgcggcctgtcccgctccacgatttacgacctcatcagccgggaggctttcccgaaacaaatctccctcggcggaaaaaacgtggcgtgggcgcagtcggaaatcaccgggtggatggccgaccgtatcgccgaacgcaaccggggctatgacgcatga

SEQ ID NO: 215003 - DNA, 195 bp, Klebsiella pneumoniae
atggctacgaccctcaccccgtcacatccgcagtttgtctttgtgtttgccgctgttcgtcgcgcagaccgtcagccccgcatctgtatgctccgcgccgtcgccggggatgaacacgctgcacgccagtccctcgttcgcgattacgtcctctcgtttgccgggcgtctgccggtggcggaggtgcgtgcatga

SEQ ID NO: 215004 - DNA, 228 bp, Klebsiella pneumoniae
atgagacactccacgattactgcccgtgacctcgaatgccttgaacatatgcgcaatgtcggccagctcgtcagcgagctgatgcaggtgcaggactgtacttccctgcgtcgtgacccgactcagcagttgcagctcacctccgtgatttacctcatgaccgcccagctcgacggcgtggtcgaacgctgtaatcaccgctggttcaccggggagggcaacgtatga

SEQ ID NO: 215005 - DNA, 1482 bp, Klebsiella pneumoniae
ttggggcacccgacagacccgcaggaagcaataaaatctctgggccatcagcttgatagtcgttacagacaggttgctgcacgtcttggcgaaaatgaggctgtcgaactcgatgtttctggcccgaagccccggttgacaatttctcccctcgccagtcttgatgagccggacagtctgaaacgactgagcaaaatgatcagtgatctgctccctccggtggatttaacggagttgctgctcgaaattaacgcccataccggatttgctgatgagtttttccatgccagtgaagccagtgccagagttgatgatctgcccgtcagcatcagcgccgtgctgatggctgaagcctgcaatatcggtctggaaccactgatcagatcaaatgttcctgcactgacccgacaccggctgaactggacaaaagcgaactatctgcgggctgaaactatcaccagcgctaatgccagactggttgattttcaggcaacgctgccactggcacagatatggggtggaggagaagtggcatctgcagatggaatgcgctttgttacgccagtcagaacaatcaatgccggaccgaaccgcaaatactttggtaataacagagggatcacctggtacaactttgtgtccgatcagtattccggctttcatggcatcgttataccggggacgctgagggactctatctttgtgctggaaggccttctggaacaggagaccgggctgaatccaaccgaaattatgaccgatacggcaggtgccagcgatcttgtctttggccttttctggctgctgggataccagttttctccacgcctggctgatgccggtgcttcggttttctggcgaatggaccatgatgccgactatggcgtgctgaatgatattgccagagggcaatcagatccccgaaaaatagtccttcagtgggacgaaatgatccggaccgcaggctccctgaagctgggcaaagtacaggcctcagtgctggtccgttcattgctgaaaagtgaacgtccctccggactgactcaggcaatcattgaagtggggcgcatcaacaaaacgctgtatctgcttaattatattgatgatgaagattaccgccggcgcattctgacccagcttaatcggggagaaagccgtcatgcagttgccagagccatctgtcacggtcaaaaaggtgagataagaaaacgatataccgacggtcaggaagatcagttgggagctctggggctggtcactaacgccgtcgtgttatggaacactatttatatgcaggcagctctggatcatctccgggcgcagggtgaaacactgaatgatgaagatatcgcacgcctctccccgctttgccacggacatatcaatatgctcggccattattccttcacgctggcagaactggtgaccaaaggacatctgagaccattaaaagaggcgtcagaggcagaaaacgttgcttaa

SEQ ID NO: 215006 - DNA, 576 bp, Klebsiella pneumoniae
atggcagcagtaacaacctcccgcaggccgtcgccgctgcagcgacgggtactgattgtgctggccgccctcgatgcgaaacgtccggggccggtggcgacgcgggatatcgagcgggtgctggagcagggcggggacgccccggtgtacggaccgaacctgcgcgcctcctgccggcgcatggaagccgcgggctggctgcgcaccctgcgcgcgccgaacctgcagctggccgtcgagctgacggaggccggtcgcggcattgcagaaccgctcttccaggcagaacgcgaggctgaaacggcacgacaacgactgaccgacgtccggcgtctgccgttacgccagacggctgccggtgacgcggtggagctgcagctggatgacggccattacaccatcagggaagcggcctacgtgatccgtctggacggtaccacctgcctgcagctgacggatgccggcggcatacgccggataaaagagggcgatcccctgcaggtggccagctggtatcaggcctgttttgatgcaggcctgccggtcatcgttcaggtgaatgagagccgggactga

SEQ ID NO: 215007 - DNA, 495 bp, Klebsiella pneumoniae
atgaaagtcactgaacccggactgaatacgctgatcgataacctgaacaccctgatttgcgaggacagcctgctcacgcgccaggagcgtgaaaccctggtgcgggccgtggcggccatcggcgccatgaaagcacgcgtcagcatgaaaaaaggcgaagcgccgaccgttgccagacgggaaaaaagggagaaaaaagaccgccagcctgatccgcgttttccgcgagccggtcatccctggcaggaagacgaaaaaaccttactgagtgatgcgcttgaaccggtcccggatgaagagatcggtacgcatcttttctggctttccgagaaactgggcagaacgcctttcagtgttgctttccagatcgcggcaatcagggagctgcaggacggctgggaggagcagttcagggagatttcggataaaattcgcttgtccggcctgagcatcagtgattatctgaagcagaacggcacgggccataacgcctga

SEQ ID NO: 215008 - DNA, 816 bp, Klebsiella pneumoniae
atgtcaagagcaccagtcagagatcgcagaatttctgtccggaaaagtcgcccggcctgctgctgtcctcattgctgtagcacccgacggagaagcactagggtttgccgagctttcgatccgcccgtatgcggaggagtgctactccggcaacgttgcgttcttggagggttggtacgttgtgccaagtgcgcggcgtcagggcgtaggtgtagctctggtaaaagccgccgagcattgggctcgtggtcgcggatgcaccgaattcgcctccgacactcaacttaccaacagcgcaagcacctcggcgcacctggcggctggattcacggaggttgctcaagtacgctgcttccggaaaccgttgtgaggggcgccgcgttggtgcctaacaattcgttcaagccgaacttgcttcgttacaccaaagccatggcagaaagagcttgccatggctttggctccactacgcaagtcggcttaactcaggcgttagtaccactgaaaccctcctttatttcgcccatgtttattcaaacggcattcagtttctcaaacgctgtgcagcgctgggtttgccgtttctctgggcttcgcctggtggcgttacgctggtttgtggtctttttggcctctggcccttgtgtagcaagcgcgagcagctatttttttcgtagtgctgtgccgcctcggtggcaccgtgccttttcgcagttagcgcccgtcgccaagttacggttatccgttttggcttctggctctaacatttcggtcaagccgacccgcattctgcggtcggcttacctcgcccgttaa

SEQ ID NO: 215009 - DNA, 786 bp, Klebsiella pneumoniae; identical to SEQ ID NO: 99907

SEQ ID NO: 215010 - DNA, 522 bp, Klebsiella pneumoniae
atggctaaaccaaagtattcccctgaaacaaaactggctgtggttaatcattatttgtccggtaaagacggagaacagagtacagccgacctttttggtattgaaagaacatctgtccgtcgctgggtcagggcatggcagttccacggtgcagaaggcctgactgcaaaaaataatcattattccgatgaatttaaactcgtggtcgtccgggcggttatcagtgaccgcctgacgatgcgtgaagcggctgcccggtttaatctctccgcagaaatacttgtccggcgctggctcgacgtgtacaacgatgccggagcggaaggtcttttaaacatacaatgcggacggcccggaaaaatgacaaagccaaaaaatatcccaccactaacagataaagagctggaaaaactctcccccgaagaactcagggccgaactgcgttatctgcgggcagagaatgcctatctaaaaaagttgaaagccttggttcagagcgaaaaaaatggcaaaaagccctga

SEQ ID NO: 215011 - DNA, 189 bp, Klebsiella pneumoniae; identical to SEQ ID NO: 79255

SEQ ID NO: 215012 - DNA, 1200 bp, Klebsiella pneumoniae
gtgattactaacccggaaaccaccgccgcctcgccggatatggccattccgtttggcctcaagttcagcggctatgcccgctatggcgctcacttccagaccggcgaccagaaatatgtcggcgtcgacggctcctataacggcgcctcggcgatcggccgtctgggcaacgaaagcaacggcggcgaattccagatcagcaaggccttcaaaagcgcgcagggggctatctgggatcttaacgtgatgttcgaccactggagcgacgaagttaacctgaagaaggcctacgtcggcgttaccaacgtgctggaatccaaccccaacgcctatatctgggccggccgcgacttccaccagcgtccgcaacaggggatcaacgactacttctggatgaaccacgacggccagggcgccggggtaaagaactttgatatcggcggcgtgcagttcgacgtggcggcggtgtcgcaggtgaaatcctgtagtccggaagtgatggccgacgagaccaacccgtcgcgcatcacctgtaccggcagctccgacaccggcgacaacggccactacgcgctgaccaccaaaacccacaacatcaaggccgggccgatcgacgtcgaggtgtacgccaactacggctttgactcaaaggcggtggacagcgacgcgcgtctcgaagcctggcagggcggcctggtgctgagccacaccaacgacagcggggtgaacaaggtgatcctgcgctactccgacaactcggataacagcgtctacaacaagaccgacgacctgaccacggtctacgccagcttcgagggcagccataagttcacccagcaggcgcaggtggaatatctgctggccttccacgactacgacaacggcagggacaacaccgacaaccgcaagaactacggtgccatcgtgcggccgatgtatttctggaacgacgtgtactccacctggctggaagcgggctaccagcgcgtggattacgaccagggcggggataaccacggctggaagctgacgctgtcgcagaacatagccatcggcatggggccggagttccgtccgatgctgcgcttctacgtgaccggcggccaggtggacaacgagcataccgcgaaggttaacggcacccaggaccagcagctggattcgctgaacgtcggcgggatgtttgaggcgtggttctga

SEQ ID NO: 215013 - DNA, 1110 bp, Klebsiella pneumoniae
atggccgaatcctgtccgggaacgaccaaatcgtcactcgagggcattcaggcctggtacatcagggatgaaacctattcagctgcgctggccgagttggtcaatgcccagaaaaaaagccctctggcggcattctggggcgatggaacaacgtcatcgtctgatggacagaactttcgggtggggagtcacgggcgttatgctggtcaggtcaatcttaaatacggtcaggatccaagcgtgcagatttatacgcatatttcggaccaatacagcccgttttacaccaaagttatcagccgcgtgcgggattcaacacacgtacttgatggtctgctgtaccacgaaactgatctggaaattacagagcattacaccgacacagcaggtttcactgagcatgtttttgcgctaatgcatctgctcggattcgcttttgcgccaaggatccgggatcttcatgacaaacggctgtttattcatggaaaagctgagttgtatcaggggcttcagtcaatcatctcgacaaccagcctgaatctaaaggaaattgaaacccactggcatgaggtgctgcgtctggcaagttctataaagcagggaacggtaacagcatcactgatgatgaaaaagctggcaagctatccgaagcagaatggtctggcaaaggcgctgagagagattggccgcatcgaaaggtcattgtttatgctggactggttcagggatcctttactgcgtcgacgcgtacaggcggggctgaataaaggtgaggctcgcaatgcccttgcgcgagcggtctttatgcatcggctgggtgaaatcagagatcgggggctggagaatcagagctatcgagccagcggtctgacgttgctgactgcggcgatctcactgtggaatacggtatatatagaaagagcgatagattctttgagacgaaaagggatcccgattaatgagcaactgattacccatctgtcaccactgggatgggaacatatcaacctgagcggggattacgtctggagaacgaacctcaaactgggacagggtaaataccgcgcattacgctcagtgaatagtaatatgtacaaaaaacaggcttag

SEQ ID NO: 215014 - DNA, 879 bp, Klebsiella pneumoniae; identical to SEQ ID NO: 52347

SEQ ID NO: 215015 - DNA, 318 bp, Klebsiella pneumoniae; identical to SEQ ID NO: 52346

SEQ ID NO: 215016 - DNA, 849 bp, Klebsiella pneumoniae
atgcacggtaagcgccgtcgcatagccctccgctatccacaggcgttttcccgcctgtttctgcccgtcgatgagatggcatgctcccttgacctgcccgcccttcagggtgcgcttgagcccctcagcattaataagctggaggttaaccagcgtgccggactcgtcatacaacggtaccgccacatcaccggcgcggtaggccacgccgccggttttgtgcgacgtggtcagcgtcagacactcacgaccggcaaagcccttgcgggtcaggtaggcattgccggtggccgggcgggttttctccagcagtctgacggccagcgcggccgctgctttgcggtcggcctccgttccggcctctgcggccgctgtcacctccggggctaccggcggcagattcccggtgacggcgttcaccttcccggcggcctcggatgccgatatgccgaacaccttctcaaccagtttcaggccgtcaccggcgccgcactgattacagaaccatgtgccgcgcccttcctggtcatcaaagcggaaccggtcagcgccgccacacaccgggcaggcctgatggcggttttttatcactttcatccccagcgccgggagaatgcgcggccagtggccgcacgcctgttttaccgtgtccgttacgttcattttcatggttttctccctcagtgcagtacaggcgatgtgatatggcgggcacagagctcatccatcacggcgagcccgaggaaggacagcgacggggcggctttcagcggcccggcctgcatcaaatcttccagcagcgcacaggcaatcaaacgacctttttcctcgccatgctggcgcaggtag

SEQ ID NO: 215017 - DNA, 567 bp, Klebsiella pneumoniae
atgaccaccctcacgctacagcaggcctttgaagcctgtcagaagaacgaaaccgcctggctgaaccgtaaagccgaactggcggccgcagagcaggaatatcaggaacaggtgctggccggggatgaccgtatcccggcaattatgcaggaactgcgcgacattatcgatgtcaaaaaatgggagataaatcaggccgccgggcgctatatccgctcccatgaagcggtgcagcgcatcagtatccgcaaccggctgaatgactttatgcaggcgcacgggacagagctggccgccacgctcgccccggagctgatgggactcagtcagcagcccgcactcctgaccggccatgcgctcgaccgttcggcgcattacctgcgcgaagcgctgtcagtgtggctgagtaccggtgaagaaattaattatgcggcagaagacagcgatattttaacggccatcggattcaggcctgacgcggcttcgcgggtggataatcaggaaaaatacacccccgcacagagcctgatttatgcccgccggcgtacggaactggccggcagatag

SEQ ID NO: 215018 - DNA, 246 bp, Klebsiella pneumoniae
atgatgcactgtccgttctgcaaaaagtcggcgcatgcccgcacctcccgctatctgtcggagaacgtcaaacagcgctatcaccagtgcaccaatattgagtgctcggcgacgttccgcaccactgaagccatcgacgaggttatccggcccccggcggagaaagcgccgcctgtcgcggacccggtcacacccccggcaccccgtaaagtgcagggctgctacagctcgccataccgtcattaa

SEQ ID NO: 215019 - DNA, 825 bp, Klebsiella pneumoniae; identical to SEQ ID NO: 96871

SEQ ID NO: 215020 - DNA, 894 bp, Klebsiella pneumoniae
atgagaaaattaatcgtagttgcttctgttgctgccagtttactgctcgggtgtgaccagaagagtgctgacaagcgtgaaaccctgtctgaagcgcttgttgctaagtcactctctaacatggttcccgttcagggcggcgagtttttaatgggggattttggaccattagtcggtcaaaaactacctttcagcataaaccaggatgataaggtattacataaggttgtattaagtgatttttcgatatcaaagtttaaagttaccaacgatgattataataaatatctgcaaataacaggaataaaaaaacctcccattaatattctggtaaaagagtacccatccttgcaaaaaggagattattctgttggtgttacctggcaacaggcaaaagactattgtcagtggttagataaggagtccgataaaaatattgatttaccgacagaagcacaatgggaatatgcggcaaggtcaagagggcagtatcttcctttttcgactaataatggaaatttcgagcttggttctaatatacctgaacaaaagaaattagatgaatacacagatggttatggttttcctatttatccaattgggaaatatcctccgaatccgctaggtttatacgatatggggctaagtggagccgaatggagtaatgattggtattcaactgattattattcccactcccctgtttatgatcctcaaggtccagttaagggtaatgaaaaagttttaagggggtatgttggcggagatcgtcagtatgccttgactatattcaggcaatcgtcacaacctgtgccaaaatttgctgggcgtgatgattatcaaaagtttggagttagtcctctttttgtatttcgttgcgttattaataaataa

SEQ ID NO: 215021 - DNA, 765 bp, Klebsiella pneumoniae; identical to SEQ ID NO: 6031

SEQ ID NO: 215022 - DNA, 246 bp, Klebsiella pneumoniae
atgttacagatttccgtccgtttctccccggagcaggtgaaggccatgcgcagcggtacctttgccgcactgcagcaggaaattgagcgccgcctcaccccacgctaccctcacctctggctgaacatcgggaaaagttcgcagaccgcgctggatgtcagcggcgcgcgcagcgaccaggaaaagtcagacatcatgaacacgcttgaagctatctggcaggacgacacatggctgccggaatga

SEQ ID NO: 215023 - DNA, 624 bp, Klebsiella pneumoniae
ttgatacaacaacgcctttctaccaatggtcttgatcctaatgatttgccttcaggctggagtggtggtttaagaactaatgatgtctatgctgctggtacggttggtgctggttcaggtggtgctgttaatgcctatatgaacagcagcggtaatatatacgcttccaatgatgttaatgtcgggcatcaggttaatgctcagtatgtctgggcctcgggtaatcttaactctaactatattcattccaatggtaatattgatgctgatggcagactgaatgcaggggagttcctatatattaatgggaaagcaaatgtaggagcaaactgttcaccaaatggtttacagggcacggattcaacgggattgttgttgtcatgtgtcggtggtaaatggacaaaagcttctggtggcggtggtgggctttactctactaatactaaagatggtaatagtgcaacatgttcgactccaaatacagatacaaacgcatgttcttgcccatcgggaaaaacatcagtggtcataatgagttcaatatcaacaagcgttacaatccgtccagataatgggcagggtgtgactacaaaaagtacacaaagattatatcaatgtagatga

SEQ ID NO: 215024 - DNA, 777 bp, Klebsiella pneumoniae; identical to SEQ ID NO: 121845

SEQ ID NO: 215025 - DNA, 720 bp, Klebsiella pneumoniae
atggccgatatctttgaggagaattaccgctgttacggctaccggcgccttcacgcgatgcttcgcagtaacaacagagttatttctgaaaaggttgtccgcagactgatggcagaagagcagctcgttgttaagcgcaccaggcgacgacgatataactcttactgtggcgaaatcggtccggcaccggaaaatttactcgcccgggattttagttcctgcaggccaaatgagaagtggctgaccgatattacggagttccagcttccggctggaaaagtctatctgtcgccggttatcgactgctttgatggccaggttgtaagctggtcgataggaacacgcccggacgcgacgctggtgaatacgatgctcgatgacgcactcgatacgctcagcgaacatgataaaccggtgatacacagcgatcgtggtggccattaccggtggccgggctggcttgagcgtatcaacacctccggacttataaggtccatgtcgcgcaaaggatgctcgtcggataatgctgcgtgtgaaggcttcttcgggcgtatcaaaaacgaaatgttctatggcagagactgggcgggtatcacgctggaaaaatttatctgcttcctggacaggtacatacgctggtataatgagaaacgtatcaagctatcattaggtgcaatgagtcctgtgaagtaccggcagcatcttgggatcacaacataa

SEQ ID NO: 215026 - DNA, 507 bp, Klebsiella pneumoniae; identical to SEQ ID NO: 121668

SEQ ID NO: 215027 - DNA, 606 bp, Klebsiella pneumoniae; identical to SEQ ID NO: 170890

SEQ ID NO: 215028 - DNA, 606 bp, Klebsiella pneumoniae; identical to SEQ ID NO: 53558

SEQ ID NO: 215029 - DNA, 231 bp, Klebsiella pneumoniae; identical to SEQ ID NO: 121864

SEQ ID NO: 215030 - DNA, 324 bp, Klebsiella pneumoniae
atggatgacatatcagaaaagcaaaaaaacagaactaagccacgtattaaaaagacattagaacagcagttggcttcagctcagatgcgtttaaatcgcttacaacataaatccaagcaagaaactaaacagattgaaactcgtcagaagatcattctaggtgcagaagttgctaaagcattagattgtgatgttttcacggttgataaggaactggttttaggaatgctgttggagaccccaaatctacatcctgacgataaggtgagatttagaaaaaatgggttgttatttctggctagcatgaaaggtagaaaaacttaa

SEQ ID NO: 215031 - DNA, 498 bp, Klebsiella pneumoniae
gtgggcgtcaacggcgtaaccggcttgtctgcggatgtgttctgggatctgcaggacccggcaactgatgccggactgctgaaccagaacgacgtcaccaccttgatcaggaaggatggtttccgcttctggggttcccgctgcctcagtgatgatccgctgttccagtttgaaaactacacccgcaccgcgcaggtactggctgacaccatggcagagggccatatgtgggcggtggatatgccgcttaacccgtcgctggcccgcgatattatcgaaggtatccgcgccaaaatgcgcagcctggtgaatcagggctacctcatcggcggtgattgctggattgatgacagcgttaacgacaaagacagcctgaaagccgggaagctctggatcgactacgactatacgccagtgccgccgctggaaaacctgatgctgcgccagcgcatcactgaccgttacctggtggatttcaccacccgcgtaagcgcataa

SEQ ID NO: 215032 - DNA, 204 bp, Klebsiella pneumoniae; identical to SEQ ID NO: 92423

SEQ ID NO: 215033 - DNA, 477 bp, Klebsiella pneumoniae
atgagtattcaacattttcgtgtcgcccttattcccttttttgcggcattttgccttcctgtttttgctcacccagaaacgctggtgaaagtaaaagatgctgaagatcagttgggtgcacgagtgggttacatcgaactggatctcaacagcggtaagatccttgagagttttcgccccgaagaacgttttccaatgatgagcacttttaaagttctgctatgtggtgcggtattatcccgtgttgacgccgggcaagagcaactcggtcgccgcatacactattctcagaatgacttggttgagtactcaccagtcacagaaaagcatcttacggatggcatgacagtaagagaattatgcagtgctgccataaccatgagtgataacactgctgccaacttacttctgacaacgatcggaggaccgaaggagctaaccgcttttttgggcactgttgcaaatagtcggtggtga

SEQ ID NO: 215034 - DNA, 279 bp, Klebsiella pneumoniae
gtggatgtggactggctgatcgccgagcgtcccggcaaggtaaaaaccttgaagcagcatccgcgcaagaacaaaacggccatcaacatcgaatacatgaaagccagcatccgtgccagggtggagcacccgtttcgcatcatcaagcggcagttcggcttcgtgaaagccagatacaaagggctgctgaaaaacgataaccaactggcgatgttattcaccctggccaacctgtttcgggtggaccaaatgatacgtcagtgggagagatctcagtaa

SEQ ID NO: 215035 - DNA, 369 bp, Klebsiella pneumoniae
atgcataagcgcgaagacggttttgtggtggtcaacgaagaggtatgcattggctgccgctactgccatatggcctgcccgtacggcgccccacagtacaacgccgacaaaggccatatgaccaagtgcgatggctgtcacgagcgcgtcgccgaggggaaaaagccgatctgcgtcgagtcctgcccgctgcgggcgttggatttcgggccgattgccgaactgcgcgctaagcacggccagctggccgcggtagcgccgctgccgtcggcgcactttacccggccgagtatcgttatcaaacctaacgccaatgcccggccgtgtggcgataccaccggttacctggcgaacccgaaggaggtgtga

SEQ ID NO: 215036 - DNA, 141 bp, Klebsiella pneumoniae
atgtaccgggtaaaacagctgttcgggggggcactgacgctgcgtgactacgatggtcaggttgcggaggctatggccctggtacgagcgctgaacaaaatgacgaaagcaggtatgcctgaaagcgtgcgtattgcctga

SEQ ID NO: 215037 - DNA, 252 bp, Klebsiella pneumoniae; identical to SEQ ID NO: 30842

SEQ ID NO: 215038 - DNA, 324 bp, Klebsiella pneumoniae
gtgtacgctctggccaaaaaatggatgcccggatatgagggcggcttctggcatttcatccgcctgccggaagggggcggatacatgatgccagacagtgggcgggtacatctggtcagtggcgaaaactggtttgatcgcatggtcagcgccgacgcggcgggcattattctgaccagcctggcgattaatcgccgtctggcggcccatcatgacagcagtaacccggcactgactcgcctttatatgctgcgtgatgcccagctctggaatcacattacccttcacccggaatgcaacgccatttacgccgcgctggactga

SEQ ID NO: 215039 - DNA, 324 bp, Klebsiella pneumoniae
gtgtacgctctggccaaaaaatggatgcccggatatgaggggggcttctggcatttcatccgcctgccggagggcggtggttacatgatgccggattgtggccgggttcatctggtcaacagtgaaaactggtttgatcgcactgtcagcgccgacgcggcgggcattattctgacatcgctggccgttaaccgtcgtctggcggcccatcatgacagcagtaacccggcactgacccgcctttatatgctgcgtgatgcccagctctggaatcacatcacccttcacccggaatgcaacgccatttacgccgcgctggactga

SEQ ID NO: 215040 - DNA, 171 bp, Klebsiella pneumoniae
atgattcatgtcagtaagaaaagtgcccagaaaacgcacacacccgatttgcagggcaataccaagtcgattgtgatcaccccggcttttcccgataaattctttatccgcttcatcaagatgaaaataacgcgccagctgaagggcactgttgcaaatagtcggtggtga

SEQ ID NO: 215041 - DNA, 123 bp, Klebsiella pneumoniae
atgagtaacttactattattagtcctggcggtggtgttattgtttacatctttgttttttggcctgtcctatgttagagaaagaagaaaaatgaagatgcgctttaataaattccgacgttaa

SEQ ID NO: 215042 - DNA, 636 bp, Klebsiella pneumoniae
atgactatgcctgatattttaattaacactgaaaacatatttcttaatcgcggaatttgcgaactgcttagcgagattgcgaaggaagaacacatccgtgaaccgtattccgttgtagactattccacagatatattaggtccgattgatatgctgttcacagaaatggccgctggtgaacattatctatgccacccgtttttcaaaaaactccctccgcacacgtctatttttattttcgtcgccaccgacagcgctttgcaggttgaacggttaccactttgtctacgcgatgccacttttatcagcatgaacagcgacttgcgccgcgtaaaaaatcagattgcaaaacgtctgacggagtcgacaacatctagttgcggtgggctggaaaaagacagcagacgctgtgtcaaatgccctcggttaaccttgaccaaatcacaactttatattatcgatgcgatcagaacgggaatgaacaatcagcagatagcgcaagaactgggcatcagccataagacggtcttctctcacaaaatcaatattatgaaaaaattccaaatagctaccaaacaagagttaacgagattctcatctgttgctcttgcgctttccgcaggaaggatcggttaa

SEQ ID NO: 215043 - DNA, 474 bp, Klebsiella pneumoniae
atggcactcaaaaccttgtcagcactcccggtatttgctgattctctttttgccgatcgctttaatcgtattgaccgtcttttcagccagttaacgggcgatacgccggtgggcactttaccggcttatgatttacagaaagtcgacgacagcaatttcctgctcagcgtcagcgtgcctggctggaaagatgatgagctggaaatagaaaccgtaggggggaatctgcatatttccgggaaacgccaggaaaccgattcctcgacagacagcggtgaacgctggatttataaaggtatccgccgcgctaatttccagctcagtttctctcttcctgaacacgcccaaattaatcaggcgcagctggatagcggcatcttaaaaatagccatccaccaggaaatcccggagagcgaaaaaccgcgtaaaattgcgatcgagaatcaggggcgcgtgatagaacataaagtttga

SEQ ID NO: 215044 - DNA, 513 bp, Klebsiella pneumoniae
atgactgacgagatcgatagcgacgcaaacaatacgcatgaactaaccgctgaagtggctcgggcgctgatcgcgtgcggtttgcgactgaccacggcggagtcctgcaccggagggaatctggcggcagcgctctgtgcccaggcggataccgcggcattttatgataccggcgtagtgaccttcagcgatgaagccaagcgcaacgtgctgcaggttcgcgcggaaaccctggcggtacacagcgccgtcagcgaagcctgcgttcaggagatgtcctctggtattctggcgctcgccggggccgatatcgccatcgccgtcagcggctacgccggaccggagggcggggaagatggtacccccgccggcacggtatggtttgcctggaattttcgcggccagactgaaaccaaacggatgtgctttgccggcgactgtgagaccgtggtggcgaaagcggtacgatatgccctggcggcgctgagcgaaaagcttgcccactggcagtga

SEQ ID NO: 215045 - DNA, 1218 bp, Klebsiella pneumoniae
atgctaaccaccctgatttaccgcagccaggttcatcctgaccgcccgcccgtcgatctcgacgctttagtccatcgcgccagcagtaaaaatttgccccttggcatcaccggcattctgctgtttaacggcctgcagtttttccaggtcctggaagggactgaggaggcacttgagtcgctgttcagcgaaatccaaagcgacccgcgtcatcgcgacgtagtggagctgatgcgcgattactcagcctaccgacgttttcacggcaccggaatgcgcatactggatctccggctgtttgaaaccgatggcgcgctggaggaaattctgcgctttagcacgtttggggtcaccgaaccggtcaacgaccggatgttccggctgcttagcgccttcattgccgacggcggccgctattgcctgcccgagccgctgcagccctctcgctggatgatgatgcccgcgtcaggtacggccgcaccgcagcacctgcccggtcaaccttgccagtttgctctgcaggctattgtcgagccggctaaaaagcgagtttcttccttcgaggctctgatccgcagcccaaccggcggctctcccgtggaaatgtttgccgccattgcggcggaggatcgctaccgttttgatcttgaaagcaaagcgtatgcattcgctctcgccggccagctgccgctcgggaaacatcagctggcgattaacctgttgcccggatcgctgtatcaccaccctgacgccgtaggctggctgatggacagcctgctggcggccggcctcagaccggatcaggtactgatcgaggtcaccgagacagaggtgatcacctgctttgaccagttccgcaaggtgctcaaagccctgcgcgtcgcgggcatgaagctggccatcgacgactttggcgcaggttattccggcctgtcgttactgacccgttttcagcctgataaaatcaaagtggatgcggaactggtacgcgatatccatattagcggcaccaaacaggcgattgtcgcctcggtcgtccgctgctgcgaggatcttggcattacggtggtggctgaaggtgtcgaaaccctggaggagtggtgctggctgcagtcggtgggcattcgcctgtttcagggctttctcttttcccgaccctgccttaacggcatcggcgagatctgctggccggtagcgcgccaggcaatggacctgtaa

SEQ ID NO: 215046 - DNA, 612 bp, Klebsiella pneumoniae
atgactaattttttgttcaatataaaaaatcactatttgcgagtcgctattgctgaactggttgatgaagcgatgaaggccgccgggcggccacactatcagttttctcaacaatgggatgcaggatcgatggcgcaagctgatgtgatatttacggaaatggtcgcgggggagtggtacttgtgccaggatctttttcagcatgccccggaacaatatacgctttttattttcccggacaatgaacacgctaccgtagatgagggtttaccgaattgtctgcagcatgcggtatttataccgcctcacgctcgcgttcagcggctgaaagatgagatagctaacgccattgagcgtccgctgctaccgcggcaagacccgccgttcaatcgtctgcggcgttgcattaattgcgcctgcaggtcggtcagcgacgcgcaaaccaaagtcatttacgcgttcagtattggcctgagcccgcatgaagtcgccgctgcgctaaatattagtcccaaaacgattcattcacataaaaagaatattatgagtaaatttaatttgaatagccgtcagcagtttaacaaccttgtgcaactgctcgccaaacgctga

SEQ ID NO: 215047 - DNA, 942 bp, Klebsiella pneumoniae
atgtatgccgtacttatgaagcagatgctctatttgaaaatgctggcgtggctggaggataatatctattgtaacccggcgatcgatgacctggcgctgtatatgggctattcacgtcggtttgtgtacgacgtgttttaccagtatggccagttacccatcgggcagtatattcgtctgcggcggttgaccatcgcagcggtcagtctgcgcttaacacgacaaccgatcgccgctattgcctggcagttaagctatgactcgccgcagaccttttcccgggagtttaagaagcgcttttcgctctcgccacgtgaataccgttgcgcggcgcactgggacacggcaaagctgttgaaaaagtttcacccggacggagagagcctacctctggctcgttttttttctctgccggaacaggtctattacggctatccgatgaagtatgaactgcgcctgtcggatttggtgttgcaaagcaccgctaagacgagcatcagacaaaaggttgaccgttttttcaccgctggcggaggctcgctttccgtactttccgactacgccgcggcgagcaaaaatgagcttaacgtcgaggttaacgcttttgtcggctgtcatgaggcgggaaagctgccccccgcgctgggcatgaacagctcgctgaccacccggtcagggctttatgtcggggttgaattctacggcaattggtcacgttatgctcgtttatccagcgatctgtatatggagctgctgccatccctgggggtaagtcgtcgggacggctatgacattgaatgttttataacccgccatgcggaaggcgaagaggcaggggacaggcgctatcgcgtacgctattttatcccggtgacgctgtcggcagcgggtctgcggtctgacagcggtagtgggtcagggcctgtgccggggcgaagttaa

SEQ ID NO: 215048 - DNA, 1365 bp, Klebsiella pneumoniae
atgtcgacatcggcgctgttacttattgcgttagccagcgtagtgctgttgctcctgttagtgatcaaagcgaaagcacatccttttgtggcgctcctgatcgtcagtctgctggtggcattcgccaccggcattccggcagataaaattataaccaccattgaaaaaggcatgggcggcctgcttggccacatcgccagcattattattctgggctcaatgctgggggtgctgattgaaatgtccggcggcgccgaatcgctggcgaaaacgttgaccggcgtactgggtgcaaaacgaaccattgccgccttaaccattgtggcttttattctcggcaccccggtcttttttgaagtcggctttatcatcatcattccgttaatctacggcttcagcaaagtcgcccacgtgtcgccgctgaagtttggcctgccgatggccggcgtgatgttaaccgtccacgtggcgctgcccacccatcctggcgcagcggctgcggcaggcattctgcatagcgatgtcggttggctgatgctggcggggattggggtgtcggtggtcgtcggtatcgtgggctattttgtcgcccggtttatcaatcggcgccattatcatctgtcgattaacgtgctggagcagcaacaaacggcggaagtaccggatctctcggttaacgcgcagcagacccgtctgccgccgccgaatgcgctggttatcggtgggctgatcgtggtgcccatcatgctgattgtttccgggacgctgtgtcaggcgcttctgctgccggaaaacgcggttcgccagctgatgaccgtcattggtaccccgccggtcgccctgctgatctccctgggcctggccagctggacgctgggcatccgtcggcggatgagcctgaaaaagctgggcgaagtcaccggcagcgcgatcccctcgtcggcggacgtgatcctcgtcgccggcgccggcggcgcctttggcggcgtactggtcgcttccggcatcggtaatgccttagccgaggcgctggagacaatacatctgccgctgatgcccgccgcttttctgctatcgctggtgctcagagcctcgcagggttcggccaccgtggcgatcctcaccacctccggtctgctgtcgcaggcggttgtcggtctggagccgctgcagctggtgctggtgacgctggcgacctgcttcggctcgctcgggctgtcgcacgtcaacgacgccgggttctgggtcgtcacgcgctatctcggactctcggtgccggatggactcaaaacctggaccgtcttgacaaccatcatgggggtgacgggctttctcatcacctggctgctgtggtttgcgctttga

SEQ ID NO: 215049 - DNA, 783 bp, Klebsiella pneumoniae
atgccaaaattcgctgcaaatttatccatgctgtttaccgaactgccgttcctggaacgctttgccgccgctgcccgggcgggatttgaagccgttgagtttctgtttccctatgagtatgccgccggggaaatcagacagcgcctgcaggagaaccagctgcagctggtgctgttcaataccccacccggcgacgtcaacgccggagaatgggggctcgccgccattcccgggagaagcgcggaggcccgacgcgatattgagctggcgctggagtatgcctgccagctcggttgcccgcaggtgcatatcatggccggcgtggtgccgccgggagcggatcgcgcagactgcgaggccgtgcttatcgataatctgcgctacgccgcggagtgctttgcccgccacgacaagcggatactcatcgaagcgctgaatccgcagaccaaaccgggctatctctaccacagtcaatatcagacgctggcgatggtgaaacgggtcgacaggccgaacctggcggtgcagttagatctgtttcacgcgcagaaggtggacggcaatttaagccatcttattaccgaatatgccggccagtatcgccatattcagattgcctccctgcccgaccgtcatgaaccggatgagggcgaaataaactatccgtggctctatgcgctactggataaaaccggttatgacggctggatcggctgcgaatatatcccccggacagacacgctttccgggctggggtggttctcgccctaccggaaaaaataa

SEQ ID NO: 215050 - DNA, 903 bp, Klebsiella pneumoniae
atggctgcacacactaacgtctgcgtgattggactgggttcaatgggcatgggcgccgcccgcgcctgcctgcaggcgggcctgaacacctggggcgttgacatcaatcccgacaactgtcgcgcactgctggcggcgggcgccaaaggcgcgggccccagcgcggtgccgttcgccgcggaactggatgcagttgtgctgctggtggtcaatgccgcccaggtgcgggggatcctgttcggcgagagcggcctcgccgcccatctgaagccgggcaccgtcgtgatggtgtcgtccaccatcgcctccgccgatgctcaggccattgccgaggcgctggcggagtaccagctattgatgctcgacgcgccggtatcgggcggcgccgtgaaagcggccgccggcgacatgacggtgatggcctccgggagcgatgccgcctttgcccgactcgcgccggtgctggacgccgtggccggcaaagtctaccgcatcgggagcgacattggtcttggatcgacggtaaaaattatccatcagctgctggccggggtgcacatcgccgttgccgccgaagcgatggcgcttgccgcccgcgccgggatcccactggaaacgatgtatgacgtggtcacccacgcggcgggtaattcctggatgtttgagaatcgcatgcagcacgtcctggatggcgattactcgccaaaatccgctgtcgatatttttgtcaaagatctcgggctggtgaatgacactgcccgggcgctgaccttcccgctgccgctcgctaccaccgcgctgaatatgttcacctccgccagtaatgccggattcggtcgggaagatgacagcgcggtgatcaagattttcaacggcatcaccctgccgggccataaacagtga

SEQ ID NO: 215051 - DNA, 261 bp, Klebsiella pneumoniae
gtgcacccgataattaaggtcatgctggtgggcggtaaggcggacgggctgttggtcagcgtcgccgatgacgcgaccgaggtctcggtgacgcctgcgcagtacggtgcgctatccgggcaaccgttgagctaccgaattgttagccaaaccattgacgatgaacgctatttttttggcgttttcagcgacgcccatcaggatagcgataagctgacgcgggtcgccctgacccgtggaatgaaaaaaatgttctgttaa

SEQ ID NO: 215052 - DNA, 1266 bp, Klebsiella pneumoniae
atgaaattctcagaactggcgccacgagaacggcataatttcgtctatttcctgctgttctttttcttttactatttcattatgtcggcctacttcccgttttttccggtgtggctggcggacgttaaccatttaactaaaacggaaaccgggatcgttttctcgtctatctcgttattcgccattatttttcagccggtgttcggcctgatgtcggataagctcggcctgcgcaaacatctgctgtggaccattacggtattgttaattctgttcgcgccattctttattttcgttttctctccgctgctgcagatgaatattatcgctggttcgctggtaggcgggatctacctggggattgttttctccagcggctccggggcggtggaagcttatatcgaacgcgtcagccgggccaaccgctttgaatatggcaaagtgcgggtcgcaggctgcgtcggctgggcgctatgcgcctcgataaccggcgtgctgttcggcatcgatcccaatatcaccttctggatcgcctccggctttgcgctggtgctcggtctgctgctctggctgtcgcggccggaaagcagcaacagcgcccaggttatcgaggcgctgggcgccaatcgccaggccttttcgctgcgtacggcggcagagctgctgcgtatgccgcgcttctggggctttatcgtctatgtggtgggtgtcgccagcgtctacgacgtgtttgaccagcagttcgccaactttttcaaaagctttttcgccagtccgcagcgcggtaccgaagtgtttggcttcgtcaccaccggcggcgagttgctcaacgcgctgatcatgttctgcgcgccggccatcgttaaccgcatcggcgccaaaaacgccctgctgaccgcggggatgatcatgtcggtgcgtattctcgggtcgtccttcgcctcatcggcagtcgaggtggtgatcctcaagatgctgcatatgtttgagatccccttcctgctggtgggaacttttaaatatatctcttccgcctttaacccgcgcctctcggccaccctgttcctgatcggttttaatctgtcaaaacagctgtccggggtggtgctttccgcctgggtgggccggatgtacgacaccgtcggcttccatcaggcctatctgatcctcggctgcataaccctgagcttcaccctgctctcgttcgtcaccctacgcggcggcaaccgtctgctgccgaccgcagagacgcagagccccgcctga

SEQ ID NO: 215053 - DNA, 1065 bp, Klebsiella pneumoniae
atgccgcgtcgtaccgcaaccctggaggatgtcgcccgcgccgcgggcgtgtcccagcagacggtctcccgggtgctgaaccgtcctgaggtggtgtcagcccgcacccgcgagcaggtgatccgcgcgatgcaggcgctgcactatgtgcctaaccgctcggcgcagctgcttgccggcaaagcggcgccctccatcgggctgattaccgcctcgctgacgctgcacgccccctcgcagatcgccgccgcgataaagagccatgccagcctgcatcagctggaagtggcgatagcgatgccggcgcaggctgattttgtcgcgctgcaggcccggctggacgagctgcgcgcccagcatattcgcggggtgatcgtcagtctgccgctggagagcgccactgccgagcggctggtgcaagacaatccggatatggcctgcctgtttctcgatgtctccccggaggccgatgtctgctgcgtgcgcttcgaccaccgcgacggctgcggggcctgcgtgcgccacctgtgggagctggggcatcgcgaatttggtctgctggcgggaccggaaagttcggtttccgcccgtctgcgtctcgccagctggcgcgaggcgttgcacagtctgaatattgcccgctctactacggtgtttggcgactggagcgccgccagcggttggcagaaaactttcgagctcctccacctgcagccgcggatcagcgccatagtggtggcaaacgatcagatggcgctcggtgtgctcagcgcgctggcccagctcaatcgcagcggcagccaggcggtatcggtgaccggctacgatgacaccgccgacagcctttacttccagccgccgctcaccacggtggcgcaggacttcgatctgttgggcaaaagggcggtggagcggctgattgccctgatggcggccccgcagctgcggatccgcgagctgctgccgacccggctcatcgtgcgccagtcggcctggcctgtcgccgccgcggaggaccggcagcagaccctggcgcagttgaaagcgctggtggagaagctttag

SEQ ID NO: 215054 - DNA, 669 bp, Klebsiella pneumoniae; identical to SEQ ID NO: 212229

SEQ ID NO: 215055 - DNA, 1200 bp, Klebsiella pneumoniae
atgactacgaatacggtctcacgcaaggtagcgtggctacgtgtcgtgacgttggccatcgccgcgtttatttttaacaccacagagtttgccccggtcggtctgttgtcggatattgccgacagcttcggcatggaaaccgcccaggtgggcatgatgctgaccatctacgcatgggtggtggcgttaatgtcgctgccgtttatgctgctgaccagcaaagtggagcgccggcgcctgcttatcggcctgtttattctgtttatcgccagccacgtcctgtcgttttttgcctggaattttgacgtgctggtgatcagccgcattggtatcgcctttgcgcatgcagtgttctggtcgataacgtcggcactggccatccgcatggccccgccgggcaaacgggcgcaggcgctgagcctgatcgccaccggtaccgcgctggcgatggtgtttggtattccgatcgggcgcattatcggccagtactttggctggcggatgaccttcctggcgatcggcctcggcgcgttagccaccctggcctgcctcgtaaaactgctgccgaccctgccgagcgaacattctggctcgctgaaaagcctgccggtgctgttccgccgcccggcgctggtcagcgtgtacattctgaccgtggtggtggtgaccgctcattataccgcctacagctatatcgagccctttgtccagacggtagcgggcctgagcggcaactttgccaccgtactgctgctgatccttggcggggccggtattatcggcagcattctgttcggtaaactcggtaaccagcacgcgtcggggctgataagcctggcgattgccctgctgctcgcctgcctgctgctgctgctgccggcctcgcataacccgcagcacctgatgctgctcagcatcttctggggggtggcgatcatgattatcggtctcggcatgcaggtgaaagtgctggcctccgctccggatgccaccgacgtcgccatgtctctgttctcgggcatctttaatatcggcataggcgccggggcgctggtcggcagccaggtgagtctgcatctttccatggcctccgtcggctacgtcggcgccattccggcgctggtcgcgctggtctggtcgctgatgatattccgtcgctggccggtatcgctggaagaccatcagccgcaccactcctga

SEQ ID NO: 215056 - DNA, 795 bp, Klebsiella pneumoniae
atgcaggaaattcaattttatctggtcgatgctttcagcgataaaaactttggcggcaatgccgcggccgtctgcccgctcagcgagtggttagccgacgatgtgctcctgaaaatggcccagcagcataatcaatccgaaacggctttctttgtccgtaccgacgagggctatgagctgcgctggtttaccacactcgctgagatcaatctctgcggtcacgcgaccctcgccgctgcgcacgttattttcgaatatctcgaccatccttcggcgacgattctctttagcacccgttttgttggtgagctgcgggtcacccgtaatggcgactggctgacgctcgatttccctgcgtggtcgacctctccggtggaaaacccgccggcggatctgctgaccgggttgggactcgaggccgccgttgaagttcgggaagggcgcgattatctggtggtgctggcggatcgccagcaggttgaagcggtgcgaccggatatggcgcggctgcgaacgcttggcaaaatgatctgcgtcagcgcgccggatgaagagtatgactttgtcagccgcttcttctgcccgggagaaggggtgccggaagatccggtcaccggctccgcccatagcatgctgatcccctggtggggcgaaaagctggggaaaaccaccatgatggcgcgccaggtctccgctcgcggcggcgacctgcgctgccagtggcagggcgaccgtgtgctgattagcggccaggccaccacctatatgcgcggaacggtttacctgcgaggttaa

SEQ ID NO: 215057 - DNA, 1320 bp, Klebsiella pneumoniae
atgaacacgacagctaacactactcgtattcgctggtggatagccgggttaatgtggttggctattgccatcaactatatcgaccggacagtattatctgccgcagccccacatttaatcgatgaactgaaactcgaccccgaaatgatggggtttatcatggcggcttttttttggtcatactcgttattacagatccccgccgggtggttcgccgatcgttttggtcagaaaaaaggtcttggtttagccgtcgcctggtggtcaattgccacctcgatgatgggtgttgccacgggttttaaatcacttctggcactgcgtctggctttaggtgttggcgaggccgccgcctaccccagcaacgcagggatcgccgcacgctggtttccggataaagaacgtgccaccgtatccggactcttcgatagtgcgtcaaaatttggcggggcgattgccatgccgcttatcgtctggatgatctacacctttgactggcgactgacctttttgattatcggcagtgtgggcattttatgggttatcgcctggtattttatctatgctgaaaacccggaagaacacaaacgcatcagtccttcagaagtgcgtattattcgtgatggccaaaaacaacatcacggcgacaaaactgtattgcccatgaaatggtataagctcttgcgttatcgtaacatttgggcaatgtgcatcggcttttttaccatcaattatacctcctatttttttattacctggctccctacttacctggtaaaagaaaaaggtatggattttattaaaatgggaatggtagccgctctgcctttattatgcgggatggttattgaagtttttgctggctgggcctcggatcgtctggtacataagaaagtactgtctcttacggccacccgtaaactgtttttgactatcggcttgcttatggcactttgtatcggctttgcaccatttaccgactctgtgtttatgaccgtctttctcttgtgtgtcgcaaaatcaggcacgacggtcgccgcatcgcaggtttgggccttaccgggtgatgttgcacccaaaaatagcgtctcaattgtcgctgggctgcaaaatacggtttcgaatatgggaggcgcagtcggtccgatcattacgggtgcgatcgttgctgcgacaggctcattcaactgggcactgattttctcggccattcttgtcgttatcgggataatcaactacctgttcctgatgggtaaaattgaatctatcaatgacaaaggtggaaaatcacccgtccttaatgccgcagaacaacattaa

SEQ ID NO: 215058 - DNA, 951 bp, Klebsiella pneumoniae
atgaaagtaatttgcacctcgccctcattcgccaaatacgacgatgcgcccatttcggcactgaaagaggccgatcttgaactggtcatgttgcctgccgatgcctctatagagatgctggctcagcatctgcctgatgccatagcgatgattgtcgccttcaccgacatcaatgaatcgctgctggcaaaggccccgaggctaaaaattgtctgcaaacacggcgttggtgtggataacatcgatcttaacgctacacgtcagcgcaaaatttttgtcactaacgttcctgatgccaacaagcatgcggtggccgattttgcttttggcttaattctcaatactgcccgccagatttatcaggcaatcagtgaaacgaaagcaggcaactggcctcgtatttttgccactgatgtatatggcaaaaccctggggatcgtcggtttaggccatatcggtaaggaagtggcgcgacgtgcgcgcggattcaatatgcgagtgctcgccaccgacgcctggccagacagagaatttgcacaacaacaccagattgaatatgtctcactggataccctgacggcgcaaagtgattttattagcctgcatacccctttaaccccggaaactgaaaatatgtttaatgccgcccggctacagcagatgaaatcaggggcattcctgatcaatgtttccagaggcggtattgttgatgaacaagcgttgtatgaagcactaaaatcaggacacctcgccggagccgcagctgacgtttttctcgaggaaccttgcgctacgcaccctttatttaccctggcgaattttgcgccaacatctcatattgctggatatacggatggcgcaattagcaatattagcgcgcgctgcgtcaacaatattattacctgcgtctgtcgtggtaaacgacctgaaaacattatgaattcgctgtaa

SEQ ID NO: 215059 - DNA, 1236 bp, Klebsiella pneumoniae
atgaacgacggcaataacagagtgctggtgctggcggatgactttaccggggccaatgacgccggggtcagcctggcggaggcgggtatgtcggtggaagtggccttcaccgccggacagccatcaaccgcccgggcattaattctcaacagcgacagccgggcgatgagcgccgcggcggcggcggacaaggtcgccgctctgctgcgcggcgcggcgacattcgtcccgcactggcaggtaaagaagattgactccacgctgcgcggtaatcccggcggcgaactggaggcaatgatggcggagcaaggctgccggatggctgtggtggccccggcttatccggcagccgggcggcatacccgggacgggcgctgctatgtgcatggtgtgcccctcgatcagaccgaatttgccagcgatccgaaaacgccggtgagccgggcggagattagcgaaattatcgccatgcagagccgtcttccctgtctgaccctgaacgctggccagcttccggcggcattagcgacggcgggcgaggagaagcgagtgttgattgtcgacgcctgggaagacagccatctggaccaggtgatcgacgccgttgcgccccatgcgcgggagaccctgctggtcggctcggcgggtctctgcgaggcgctggctcgccgcctgcgccgcagcgagcagggcccgctgctggcggtggtcggttcgatgagcgagatggcgcagcgtcaggttgctgcgctgcaggtccattcccgagtacgggtgattgaaattgatgtcgaacagaccttcagcggatcgccaaaggaggaagcttctcggatcgccggggcgctgcgtgagggccagcactgcgtggtaaccacccgcccgaatcacgccgtccggcaagggattgaagcccggtgccgtgaacgcggcctcagccgcgccgcctacggggagcacatctgcgcctggcttgccgacgtcacggcgcaggcggtggcgcagtcttcccctggcgcgctgtatcttaccggcggcgatgtggccatcgccgtcgcgcacgcgctcggcgccacagggtttcagatccgcggccgggtggcggagtgcgttccatacgggcattttctcggcggccgctggtcgcggccggtgatgaccaaagccggaggattcggcaccgacaccacgctattacatgttgtgaattttattgaggagaaactgagtgtctaa

SEQ ID NO: 215060 - DNA, 762 bp, Klebsiella pneumoniae
atgaagggatataaccggttagagcagattatggacttcctgaaaagccataatctggtgacagtcgaccagctggtggcggcgaccaacgcctcgccggccaccattcgccgcgacctgatcaaactcgatcaggaaggggtgatcagccgaacgcacggcggggtgacgctgaaccggtttattccttcccagccgacgacgctggagaaagcccagcgcagtccgcttgagaagcaggctatcgccagtgcggcggcagcgctggtgaaagccggcgacgccattgtgcttgacgccggcaccaccatgattgagctggcgcggcagatcacccatctgccgctgcgggtgatcaccagcgatttacatatcgcgctgttcctatcggaatttaagcagatcgaagtgacgattatcggcgggcgcatcgatgacagcagccagtcgtgcatcggcgatcacggccgccgcctgctgcagaccatctggcccgatctcgccttcgtcagctgcaacggctgggaccttgagaaggggatcaccgccccgacggaggaaaaggccgccctgaagcgcgatctgatggccaatgcccggcggcgtatcctgctggcggacagctccaaatacggcgcctggtcactgttcaacatcgctccgctggcgtcgttgaccgatatcgtgaccgacgcccacctgccggataaaacccgcgaggcgctggagaccctttccccgcagctgatcattgccgactga

SEQ ID NO: 215061 - DNA, 1452 bp, Klebsiella pneumoniae
gtgaaaactttaaaccgtcgtgatttccccggcgcgcagtaccctgaccgtatcatccagtttggggaaggtaacttcctgcgcgcattcgttgactggcagatcgacctgctcaacgagcataccgacctgaatgcgggcatcgtggtcgtgcggcctatcgccacagattttccgccttcgctgaacacccaggatggcctgtacacgactattattcgcggcctgaacgagcagggcgaagcggtcagcgatgcgcgtcttatccgctcggtcaaccgggagatcagcgcttacgcagacttcgacgcttttttacgcctggcgcataacccggagatgcggtttgtcttctccaacaccaccgaggcgggcatcagctaccatgccggggatcggtttgacgacgcgccgccggtcagttatccggcgaaactgacccgtctgttgtttgagcgttaccagcatttcgccggtgcggccgacaagggatgggtgattattccctgcgagctgatcgattataacggcgaggcgctgcaggcgctggtgctgcgctatgctagcgaatgggaactgccgcaggcatttatcacctggctgacctcagcgaataccttctgttcgacgctggtggatcgcattgtgaccggctatccgcgtgatgaagtggcggctctcgaggcgcagaccggctataaagatgctttccttgataccgccgagcatttctacctgtttgtgatccaggggcctgcctcgctggaggccgagctgcgtctcgataaactgccgctgaatgtgcgcattgtggacgatatcaagccgtataaagaacgcaaagtggcgatccttaacggggcgcacaccgcgctggtgccggtggccttccaggccgggatcgacaccgtgggtgaggcgatgaacgatgcggagatttgcgcgtttgtcgaaaaagcgatttatgacgagattattccggtgctggatctgccgcgcgatgagctggtgtcattcgccagcgccgtgacagggcgcttccgtaatccctatattaaacatcagctgctctcgattgcgctcaacggcatgaccaagtaccgcacccgtattctgccgcagctgctggcggggcagaaagcgcatggcgcgctgccgccgcgtctgacctttgccctggcggcgctgatcgccttttaccggggagagcgggatggtgagagctatccagtacaggatgacgccgactggatatcgcgctatcaaacgctgtgggcccgccatcgcgatggccagatgagcactcgcgagctggtcaccgccgtgctcagcgtggcggatcactggcagcaggatctgagccagaccccggggttggtggagctggtgactgccgaccttgacgctatcctgacctgcggtatgcgcgacgccgtcaaacctctgtgctga

SEQ ID NO: 215062 - DNA, 447 bp, Klebsiella pneumoniae
atggtcatcgatatccgggaagtacggccccacgacaaagccgaatggcttcagctttggcaaggctacactcgtttttacggtagcccgcagccggaagaggtgaccgaatacacctggcagcggatgctggatgtaaactcgtctgtattgggtagagtcgcggtggtggatgatgcggtggtcggcttcgctatctgtgttcttcatgagggaacctgggttaccacgccgatctgctatctggaggatctgtttgtcgatcccgccttccgtggacagggtattgccagaaccatgattaagtcgctgcaaagcgaaggggcggacaaaggctggtcgcggctgtactggcatacgcgccgtgataatcccgcccgtcatctgtatgatgagtttaccccggctgacgattacgtacgctacaggatcacgcttgagtcctga

SEQ ID NO: 215063 - DNA, 762 bp, Klebsiella pneumoniae
atggccgactggaatccttcgttgtatctgcaatttgacgctgaacgtacccgccccgcggccgacctgctctcgcgtattgcccatctgcaggtcgagcacgccgtcgacctcggctgcgggccgggaaacagcacccgcctgctacgcgccgcctggccgttggcgacgatcgtcggtatcgataactccccggccatgctggtccaggcggcgcaggccttacccgactgcgaattcattgatgccgatattgcccgctggcggcctgcgcaaccgccagatgtgatctatgccaacgcctctctgcagtggctgacggatcatgagacgcttttcccccatctggtaaaccagctggcggacaacggaacgctggcagtgcagatgccggataactggcaggaaccttcccataccctgatgcgtcaggttgctagcgagatggggttgccggaccgtggacgccagccgttactcccgcccgccgcctggtacgatctgctcagccgccagggttgcgaagttgatatctggcgcaccacctattttcatccccttgcttctcatcaggcgattgtcgactggctgcagggcaccgggttacgcccctatctggcaggcctggacgagcaggccggaagcgcgtttctcacacgctatctcgcattgctggccgcacactatccgttacagtgtaacgggaaggtgctcctgtgtttcccacggctgtttatcgtggcgcgaaagatcgccgcctga

SEQ ID NO: 215064 - DNA, 1335 bp, Klebsiella pneumoniae
atgagtacgctaatcacggataaggtcgagaacgcagcggtccaaaaagaaaaactggacaccagtgcgtatttaccccataccccctggctgcaatttttactggtctgttgcctgtttgcgctatgggggatggcgggcaacctgaatgatattttgatcgcccagtttaaaaagggcttcgatttaacggatacccagacagcgctggtgcagtcgatttttttcctcggctacttttttgtcgccctgcccgcggcggcgctgattaagcgtttttcctataaagcggcgattattattgggctgtgcctgtacgccctcggctgcttcctgttcgttccggccgcacagatcatgacctacggcgcattcctcgcctgcctcggagtgatcgcctgcggactttcttttctggaaacgtcggcaaacacctactccagcctgctgggtccgattcaatcctccacccagcgtattaacttttcgcagatcttcaactcgctgggcgtgatctccggcgtattaattggccagctgatggtctttggcgaaaacgatccgagtcatgaacaactgctggcgatgcccgccgccgctgcagacgttgcacgccatcagatggttggtcaggtggtcgggccctatctgattatcggctccgtactggtggtgctggcgctggtgttcgtgtttattaaattcccgtcgtgcaagggcgcgcccgctcaacaacagcaactcccgacggaaagcatggggccaacgctgaaacgcctgtttgctatcccgcgctttcgcctcgggatcctgtcgcagtttttgtacgtcggcgcccaggttggcgtatggagcttcacgattcgctttgtgcagctcgtgcagcaaggcaccagcgagcactccgcgacttactggctgctggcttctctggtgatttacgccgtgggaaaaaccgtggccacctggttgatgaaccgtctgaatccggcgatgctgctcggaacgtttgccctggccgccaccgccctgttactgattgccgttttcagcggttcaatgctggcggtctatgcgctcattctggtcagcttctgtatggcgccatgctggccgacgaactttggtctggtgatcaaagggatggggaaagatacccagaccgcaggctcgatcgtggtgatgtcgattatcggcggggccgtaattccgctggtgatgggcattatctcggatatgaacggcggcaatatgcaaatcgcctttatcgctccgctcctgtgctttgtgtatgtcgctttctacggcttctggtgcgtgcgtaagggggtataa

SEQ ID NO: 215065 - DNA, 942 bp, Klebsiella pneumoniae
atgtcaggaaaagtctgtgtttttggttcattcaatttcgacatggtcgccagggtggatcgctttccggtaccaggtgagtcgttagtggcctgcggaagtatgaccagcgccggaggtaaaggggcgaaccaggccaccgccgcgctaaaagcgggagcaaatgtccactatatcggcaagattggcaatgacaccttcggccattttgcccgccgtcatctgaaaggcgtgggcttcaatgctgtgacgctgctggtcgccgaagagatccccaccggcaatgcgctgatttatgtcgccggtaacgatgccgaaaacatgattgccgtcgatcccggcgcgaatatgacggtgaccgatgatgaaatcgccggctgcattcccgctatcggctgcgcggatgtggttctggttcagctggagaacaatctttctgctattgaacaggtcatagacgccggcaaacaagccggggccctggtaatactcaatcccgcgccctggcagcccgttgagcacgccgttctaagcaaagtggatttacttacaccgaacgccacggaggccgggttaatgaccggacgccgggttgacagtctgacggccgcggctgaggccgccgacgtgttacatgctcagggcgcgcgcaacgtcattatcactctcggcgccagcggcgccctgctgagcgagcatggggtgaaatcccctattccctgctttccttctcacccccgagacactaccggtgcgggcgatgccttcaacggcgcgctggcggcgcggctggcctgcggggaaccgctacaggccgcagcccgattcgcggcggcctatgccgccgtcagtgtcgaaaagcaaggcgcctcatctttacctgagtacctggaggcacaggaacggcttctccgtgccgccgctgattatgaaatggcataa

SEQ ID NO: 215066 - DNA, 1506 bp, Klebsiella pneumoniae
atgaaagataaaatactcacgattgatgttggcactggcagtacccgcgccgctattgtgcgcattgacggcgcgatgatcggctttgcgcaaagagagtatgagcaaaccacgccgcgtgcaggttggtcagaacaggccccgtctttatggtggcaggccgcctgcgactgtatacgcgaggtgctttaccgctatcctgaaacggcagcgcaaattgcggttattggtgcttgcggacagatgcatggcaccgtccttctggacgaccgtggcgagctggtggaggacagggcgctgttatggaatgataagcgcagccagccgcaggtggatgcctttatcgcgcgcgaagggcgggaaaagtggctggcgcatttgaataatccgcctgcggcagcatggcccgctttcaagttagcctggtggcgcgaaaatcatccggatcgctggtcgcagctcgccaaagtattaatgccgaaggactatattaatttcatgctgaccggtgccatggcgaccgattatagcgaagcgtcatgctatttcctgatggacagcgaaacccgtagctggtcttcgcaagcctgcgaaacgtttggtctgcgggtcgatcagctcccggagcttaaactttccagcgacataatcggccaggtgacgcagcgcgcagccgacctgacgggcctgccggcgggtatcccggtggttgccgggacgtcggatatggcggcctctctgctgggctcgggtgtgtatgaaccggggatggcgtctgattcaaccggcacgtcgacgctgatgacggtggtgtcgccgcggccgttacaccatccgctggttaataatcttcatcttgccaacgcggcctggggcggatttacgatcctcgacgccggcggcgatgccgtccgctgggcgcggctggcacttgccgataaccagattacgcatccacagcttttacaggaagcggcggcggtgccggcgggggcagaagggctgctgtttcttccctatctgacgggagaacgtctggccgaacacacgaactcgcgggcacagttttttggcctgcagcgcaagcatcgccgcggtcatttattccgcgcagttctggaaggggtggcctttgcatcctggcgcaatcttcggcagctgcagaagtgcgcgcagtatccgcaacaaatgatcgcttccggcggcggcgcgcgcagctcgctgtggcttgaaatcaaagccgcggcgtacaatctgccgatattatctacgcgtaatcaggagaatggcgtcaccggatgcggtattatcgccggggttggcgtagggttgtacgccgattttgccagcggcgtgcggcaaacggtgcagttcgacaaactgatctcaccggatccccgtctgcgggattattaccacgcctgctgcgagctttttgatacgctgtaccggcaatccgctgccttatacgacaggctggatgcgctcagcgtggggcccgactga

SEQ ID NO: 215067 - DNA, 774 bp, Klebsiella pneumoniae
atgtttgcagaagaaagacaggagaagttactcggtattctcagggaaaaacgcaaagttgctgtttctgagatgtgtgacgtctttaatgtatcgggcgccaccattcgtgccgatctccgccagctggaagaggaggggttgctgacccgaacgcatggcggagccgttcttcgtacccgagcgagcttcgaacaagcatcggacgcccgcgaaattgtcaatctcagcgcgaaagaacggatcggccagcgcgcggcggcgctggttgaggatggcgatataatcgtgctggataccggtaccacgacgctacatatcgcgcgcaatattcgtgacagacagaacgtcacggtggttaccaatgattaccaaatagcccgggagcttgaggccagtccctcgattcaaactattctgctgggtgggatcgtcaagaagggataccactgcgtggtggcaattaacgggcgttccatactcgacacgctgaacgtcgataaagcatttatgggcaccaattcgctgtcgctgaaacacggcgcctgcgtggccgatatcatgctggcagaaacgaaacgcggcatggtggaacacgccagtcaggtgattattgtctgcgactatagcaagctgaataacacctcgcttgcccaatttaccgcagcagatcgcattgacaccgtagtggtggatcgtctgcctgatgacgttcaggcgtatcgtaatgctggcattcaggtgatctctctggatgaagagaatcttctctag

SEQ ID NO: 215068 - DNA, 987 bp, Klebsiella pneumoniae
atgaactatacgcatcttggccgcaccggcctgaaagtcagccgcctttgtctcggaaccatgaattttggtgacgtcaccgacgagaagaccagcgcccgcattctggatgaggcgcttgaggcgggtatcaatttcattgatacagcagacgtgtatggcactgaacaatctcccgatatccagcaaggctcggggctgtccgaggaaattattggtcgctggcttcagcagggtggccgccgtgaacgcatcgttctggcgacaaaagtctatcagcctatgggaccgggcccgaacgatcgccgactttctgcttaccatattcgcaaagcctgcgaggacagtttgcgacggcttaataccgaccatattgacgtctatcagatgcatcacatcgatcgtcatacgccgtgggaagagatctggcaggccatggaactgcttgttcagcagggaaaggttctttatatcggtagcagcaatttcgcgggctgggacattgcgactgcgcagtcagtcgccacggcccgtcatttcctgggcctggtcgccgagcaaagtctttataatctgacagcccgcaccattgagctggaggtcatacccgcatgccgccattttggcctggggttgatcccctggagcccgcttgccggagggctgcttggcggcgtactgaaaaagatggcaagcgggcgccgtgcaaggcccgcgtttgcccgtctaatcgaacagtatcgtccgcagctggaagcctacgagggattatgtgaggacctcggcgaaaccccctccgatgtggccctggcgtggctcctgcagaatcctgtcgttaccgctccactgattgggcctcgtacggtcgaacaactccagcaggcgcttcacgcaacgacagtcacgctatcagacgacaccatgagctgtctcgacgaaatctggcccggccccgggggagaagcgccccaggcttatgcctggtaa

SEQ ID NO: 215069 - DNA, 1026 bp, Klebsiella pneumoniae
atgaatggacttgtgaaagaaattcagcaatggattagccctaatcggtctaaggtgtatatcatttcttcatcaacgcattcgggttttaacgccgcacaaggaaaacttttctgtatgcaaataagcagagctgatgttgccgatcttatttatttcatggcgattgcacgtcatcgcagcttcagccgtgcggcaattgaactaggcgtcagtgcatcagcgctgagtcatgccctgaaggggctggaaacccggctcggggttcgcctgcttaatcgcacgaccaagagcgtcacccctacggcagctggtgaggaactggttcagtctgttcttcagcctttcgacaccatagaaggcgcgcttgaatcgcttaaccggtatcgcaatacccctaccggtcgtatccgcatcaatgccgccgttgaagcggcaaatcttttgcttgcgccggtcatgcccgcttttatggatcgctatcccgatattgaaatcgatattgtggccagcaaccgtatggttgacgtgactgatgcgggcttcgatgccggcatccgctacggtggcaccgtcccggaggacatggttgcccggcgtttatctgccgatattcgctgggttatcgcggcctcccctgattacctggaacgctacggaacgcctgaacatccggatgatttattacaccatcgctgcatcagcaatcgtctcggtgacgatcgggtttatcgctgggaacttgcgcgagacggcgaaacataccaaatgacggtgccaggctcagtgacggtcaatcatgccgaaacgggtctggtggccgtattgggcggggctggcctgatgtattttccggagcctcttgttgcaccctatgtcaaggatggacggctccgtctggtgcttacggaatggtccccactggaggaaggttttcatatctattattcaagccgccggcaattgccgaccgggcttcgccttctgattgagttcatacaggaggccaggccgctggggttgtga

SEQ ID NO: 215070 - DNA, 1392 bp, Klebsiella pneumoniae
atgttatcattattaaaaaaaggcccgtcggcgaataaagttcctgctgagaaaattcaggcaacctatggtcgataccgtatgcaggcgctgctaagcgtatttctgggatacctggcgtactatatcgtgcgcaataacttcaccttatccacgccctatctgaaagaacagttagacctcagcgccacgcagatcggtttgctcagcagctgtatgctcatcgcctacgggatcagtaaaggcgtaatgagcagcctcgcggataaagccagcccgaaagtctttatggcctgtggcctggtgctgtgcgccatcgtcaacgtcgggttaggattcagtaccgcattctgggtcttcgctgcgctggttgtcctgaacggcctgtttcagggtatgggggtcggcccctcttttattactattgcgaactggttcccgcgccgtgagcgtggccgcgtaggggcgttctggaacatttcccataacgtcggcggcggaattgtcgccccgatcgtcggcgccgcattcgccattctcggcaccgagcactggcagagcgccagctacattgtaccggcctgcgtggcggtggtattcgccattagcgtactggtgctgggtaagggttcgccgcgcgaggaaggtctgccttcgctggcagagatgatgccggaagagaaagtggtgctgaagaccaaacacggccagaaagcgccggagcacatgagcgcatttcagatcttctgtacctacgtactgtgtaacaaaaacgcctggtatgtctcctttgtggatgtgtttgtctatatggtgcgtttcggcatgatcagctggctgccaatttacctgctgacggtgaaacatttttccaaagaacaaatgagcgtcgcattcctgttttttgagtgggcggcgattccgtctactctgctggccggctggctctccgacaagctgtttaaagggcgccggatgccgttagccataatctgtatgacgctaatcttcatctgtctgatcggctactggaaaagcgaatcgctactgatggtcacggtattcgcggcaattgtgggctgccttatttatgtcccgcagtttctggcctcggtccagaccatggaaatcgtccccagctttgccgtcggttcagccgtgggtctgcgcggatttatgagctatatctttggcgcatcgttaggcaccagcctgttcggcgtaatggtcgataaaatgggctggcacggcgggttctatctgctgatgggcgggatcgtctgctgcatactcttctgctacctctctcatcgcggcgcgctggaacttgagcaacagcgtaaaatcaccgagcaggaagaggcccgactggcactggctgacgcacagtaa

SEQ ID NO: 215071 - DNA, 873 bp, Klebsiella pneumoniae
atgcgtgtttacgttactggtaatattaccgtagatgaaacctggtccattccggatataccgaaaaaaggaacctccattcacggcgttaaagtgtcgcaggatatcggcggtaaaggcgcgaaccaggcgattatattatcccgctgcggaatagagacgcgtttaattgccgccacgggaaatgacagcaacggcgcgtggatccgccagcagataaaaaatgaaccactgacgctactacccgacggccatttcaatcaacatagcgatacctcgattattttaaatagcgctgatggcgacaacgccatcattaccactacggcggcggccgatacattcagcctggatgaaatgattccgcatatggcggatgccgtcgctggcgatattctgctacagcagggcaatttctccctcgataaaacgcgggcgctgttccagtacgccagaagccgcggcatgacgacggtattcaacccctcacctgtcaatcctgacttttgccatctgtggcccctcatcgacatcgcggtggtcaatgaatccgaggccgagctgctccagccatacggggtgaaaaccttagtgattacccagggcgccgcaggcgcctggctggtccaggagggccagcgtcagttttgtcccgccgtgcccgccgaggcgcttgatactaccggcgcgggcgacacgttcctcgccgtcatgttggcctccgccctgctgcgcggcgtcgcgccggatgcgctggcgctggcgcacgccagtcgcgctgccgccattacggttagccgccgggggacgctcagcgcgtttcccggcagccgtgagctcgccgccctgttaaccacggacggggcgcgctga

SEQ ID NO: 215072 - DNA, 954 bp, Klebsiella pneumoniae
atgatgttatttcacaccggaaaactgcgtttacttgctgtcgccacgaccatgctggcatcaatgagttttatttctgccgccagcgctgccggtccgacttatgcgctggtacaaatcaaccaacaggcgctgttctttaatctgatgaataaaggcgcacaagatgcggccaaagccagtggcaaggatttagttatttttaactctaacgataatcccgtggcgcaaaacgacgcgatagaaaactatattcagcaaggcgttaaaggcattctggttgctgctatcgacgttaacgggatcatgccagcggttaaagaagccgccgccgcaaacattccggtgattgcgattgatgccgtattaccggccgggccacaggcagctcaggtcggcgttgataatattgaaggcggcagaattatcggtcaatacttcgtggactacgtgcagaaagagatgggcggccaggcgcgactgggtatagtcggcgcgctgaattcggccattcagaaccagcggcagaaagggttcgaagagacgctgaaaagcaatccgaagattactatcgctaacgtggtcgacgggcagaatgtgcaggataaagcgatgaccgcggcggaaaacctgatcaccggtaatccggatctgacagcgatttatgccaccggcgaacccgcgctgctcggcgctatcgccgccgtagaaaaccaggggcggcagaaggatattaaagtctttggctgggatctgacggcgaaggcgatttccggtattgacggcggctacgtcaccgccgtactgcagcaggacccggaaaagatgggcgccgaagccctgaatgcgctgaacagcatcacgtcgggtaaaaccgtgccgaaaaccattctggttccggcgacggtggtaaccaaagcgaacgtcgattcataccgtccgctgtttaagtag

SEQ ID NO: 215073 - DNA, 1023 bp, Klebsiella pneumoniae
atggcgcaggaaatgagtataaaacgtgtattgttatccgatgtggcaaagctggccgggctgtcgaaggcgaccctgtcgcgctatatgaacaacagtattgtgctgccgcaggacaccatcgaccgcatcgaaaccgccattcgcgaactggactatcgcggcaatagcctggcacgccgtcttagcaaaggcggcagcgaaacgcttggcctggtgcttcccgatattaccaaccccttctttgccgaactggccgacgcagccgaagaggccgcttctgccagcggctacagcctggtgctgtgtatcacccgcaacaacccggaaaaagagtgccagttcattcgctggctggatacctgccaggtcgacggtctgctgttcaccaccaaccgccccgataatggcctgctgcgcaaggaagtccagcgtcacgaacggattgtcctgctggatgaagatattcccggcagtaaggtaccgaaagtgtttgccgataacgtccagggcgggcggatcgccaccgaaaaactgatcgccgccgggcatagccatatcgctttcgtcggtggcccggacaagctgatgagcgtccgcgagcgctatcagggcttttgcaccgcgatggagcaagcgggcctgagctggccgcccgaatgggtgatgtatggcgactaccagcgcgagtttggccagcaagcgttgcggtacctgttcagccaacaggttcgccctaccgccgtcttcgctgccagcgactatctggtgctcggtctgctcgacggcttgcgcgccagtgggctccaggcgccagaggcgctatcgttagtgggcttcgatgacgccaactatgccgattttacccagccgcggatctccactatccgtcagcccgcccgcgaactgggccgcactgcggtgaacatcatgatgcgcctgctaaacgacgatccggatatccctgcggaaacccgcctgccggttgaatggattggccgcgactcgatcaagatttgttaa

SEQ ID NO: 215074 - DNA, 783 bp, Klebsiella pneumoniae
atgcagcagccacaaactaccccgccaagggtagagatgatcaatatcaccaagacctacgggtcgatacgctcattgcgcggagtcaaccttgagctggccccgggcgaagtgctgggcttagtgggcgataacggcgcggggaaatccaccttgaccaaagtgctctctggcgcggtgatcccctccagcggcacgattcgtatcgacggtgaacagcaacagtttacgaatccggccgattcacgccgttgccatatcgagatggtctaccaggatctgtcgctctgtgacacggtcgatgtcgcgggcaatctgtttatgggccgtgagccgatgaaatcggtcctcggcatcccctttctcgacgaggccaaaatgcacgccgatgccagagagatgcttaaagggctcgggatctccattccggatacccggctgctggtgcgaaatctctccggcggccagcgccaggctatagccatcgcccgcgccgcggcctttgacccgaaagtgctgattatggatgaacccaccgccgcgctggccgtcgcggaagttgaagcggttctggagctcattcgccgcgtttccgctcgcggggtgagcgtgattctgattacccaccgcctgcaggacctgttcctggtctgcgaccggatcatggtgatgtatgaaggtaccaacgtcgccgacagacgggtgtccgacaccagcctgagcgatatcgttaacctgattgtgggcgaaaaattcaccgcccgctctgcggcagcacattga

SEQ ID NO: 215075 - DNA, 1002 bp, Klebsiella pneumoniae
atgaatttaagcagctcacgcatgatccagcattcgctgccgcgccgcctgctgcataaccattcaggcgtagtcagcatcgcgctctttttcgtcttctgctgcgtggtgttttcgctgatcaccagcaactttctcaccggcaccaactggctcaacattatccgtcagagcgccccgctgctgatcgtcgcgacggcaatgactctggtcattaccaccggcggtatcgatctgtcggtaggctccaccctggcgctggtcggcgcgctctccgctatcgccctgaatagctggggtctgccgtggccggtggtactcctcggcggcctgctgctaggcggattcgttggcgccatcaacggcttctttattgcctatgagggcattccggcgtttatcgtcacgctcgccaccctggccgtagttcgcggcatcgcgctgctggtcacccagggctactcgattccggtgccggctgacagcctgtttacctttatcggacgcgcgtgggtcgtcgggatccccatgcccgcactgctcggcattctgattctgctgatcgggcatatcgttctcaaccatatgcgctttggccgctacgtgaccgccatcggcgctaacgccgaaggcgcgcggcgcagcggcattaacaccaaagcggtcaccatgaaggtctatatcatcagcggaatggccgccgcgctggcggggatgatcattaccgcacgcctcggcagcggctcctccaaccagggcgaaggctttgaactgcaggtcattgctgccgttgtgctaggcagcaccagtctgtttggcggcttcggaactattattggcacgctgctgggcgcactgtcgattgcggtcattcagaacgggctgatcctgtcgcatatttcgccgttttacacccagatagccaccggcaccattatcctgctggctatctggctgaacacccgcattctcaacccgacgcgctccgcggcaaaaggatag

SEQ ID NO: 215076 - DNA, 1080 bp, Klebsiella pneumoniae
atgaaaggatcaatttttcgccatccctccccgctgccggttggcgttagcagcggttatgtaatgactgtgcttggcccactgccgattaacgaaatgggcgttactctaatgcatgagcatattctgctggatgcctccggcaaatgggtgccgccctgctgctgcagcgatcgccatcttgccgaaatgccggtgaaaatggaaaaccttggcgaactgtcgctcaacccgctgatgagccgcgataactgtcagctgtttgatgccgacgttgcgattgacgagctgactaaatatcgcgcccttggcggagaaacggtagtcgacccgaccaatatcggcattggccgcgatccgaaagcgctggcgcgcatcgcgcggctgaccggtctgaacatcattatgggtaccgggctctatctggaaccttcgcaccctgagtgggtaaaaatcagcagcgtcgaacagctgaccgaacggctgatttacgatcttggcggcgcggaggagaaaccggaggtgctcgccgggctcatcggcgaaatcggtatctccagccgctttacgccggatgaggagaaatccctgcgcgctgcgggtcgggccagcgccgcgaccggcgtgccgatcgaggtccatctgcccggctgggagcggctgggccatcgggtgctggatattctcgagcaggaaggcgccgatttacgccataccgtgctgtgccatatgaatcccagctttgccgataagcgctaccagcgcgaactggcgcagcgcggggcgtttctcgaatacgacatgattggcatgagctattactacgccgacgagtcggcgcagtcgccctccgacgaggagaacgcccgcgcgatccgcgagctgattgacgacggctacatccagcaaattctgctgtcgcaggacgtcttcctgaaaaccatgctcacccgctacggcggccacggttatggctacatactcaagcattttgttccccgtctgcggcgccacggcgtcagcggcgaacaacttgaaaccttaatgattggaaacccccagcgggtctttggcggataa

SEQ ID NO: 215077 - DNA, 756 bp, Klebsiella pneumoniae
atgcagaaaaaaatcttactggtcggtgagtcctggaccagcacgtcaacgcacgttaaaggcttcgaccagtttgccaccgccacctggcacaccggcgcaacggactttctggccgcgctcgccgacagtccctatgccattacctatatgcccgcccacgcggcggcgaccgactttccgctgacgctggaagcgctgcaggagtgggatgcgattattctctcggacattggcgccaatacgctgctgctgcatccggacacctggctgaagagccgccgaaccgccaaccgtttaaccctcctgcatgattacgtggccggcgggggggcgctgatgatgatcggcggctattacagcttccagggaatcaacggcggcgcgcgctaccgccataccgaggtggagaaagtgctgccggtacgctgcctggcctgggacgatcgcattgaaaccccggaaggctgctatgccgaagtgacggagtctcaccccctgtttaacgatattccgggcgaatggccgtggctgctgggctataacgaagttgaaatgcacccggaaggcaaactgctggcgaccgtggccggtaccggtcatccgctgttggctgttcgcgaatatcagcagggtcgctcgctggtgtggaccagcgacatgtcggcgcactggttgccggaagagtttgccaaatggcccggctatcgccagctgtggattaactgcctcgactggctgacggaacgccgctga

SEQ ID NO: 215078 - DNA, 1143 bp, Klebsiella pneumoniae
atgaccgcgacccttgagctcgcccggcagctgctgggctttaacaccatcaacccgccgggcagcgaagccgactgcatgcggttcttcgccgactggcttgacgatagcggttttgaggtttcgctgtcgtcgttcggcgaaggacgctgcaatcttatcgccagcctgcccggggcgaagagcggtaaaccgctggcctttaccggacatctggataccgtcccgctgggaaatgcccgctggcagtacgatcctttcggctcgcagatggaagacgggcgtctttatggccgcggatccagcgatatgaaagcggcgatagcggcgtttgccgtcgcctgcgttcatcagcgggaagcgatcctcgccggacgcggcgcggtattgctgataaccggcggagaagagaccggctgcgacggcgcgcgggcgctgatcgcctccgcaacgttgccggaggtgggcgcgctgatcgtcggtgaacccaccgccaactatccggttatcggccataaaggcgcgctctggctacgctgcgaaacgcgggggaaaaccgcccacggcgcgatgccggagctggggatcaatgctatctatcttgcggcggatgcgttgggtaagattcagcatttttcgccaggcgcgccgcatccgctaatgaagcaacccaccctcaacgtcggacgcatagaaggcggactcaatattaattccgtaccggaccgcacgcgttttgatgtcgatatccgcagcgcgcccaatttacagcacgccactatccgggagcgcttgacgacgctgcttggcgaaagcgtcaccgtctccacgctggtcgacctgcccgccgtcctcagccgggaggatcatgcgtggattaagcaggtttatcaacgctgtcagccgctgcacgctgagccgattgcgccgcgcgtggtgccctactttaccgacgcctcgctgctgctgcctgcattgggcgatccgccctgtattattctcggccccggcgagccgtcggtggcgcatcaaaccaacgaatactgcctgctcagccgactggcggaggccgaacagctatacggtgacatcattcgcgactggatggcatcaccgcccgcgacgaaagtaaaaaatgagtga

SEQ ID NO: 215079 - DNA, 183 bp, Klebsiella pneumoniae
atgtccgtgaaaaccaacgctgtgctcgtttgcaccctctctttactcctttccgcctgctcgggtcgtgcttctgcgccgggcagcgccgaagacgctaaaatatcggctgaagtggataagatacttcgcgattatcaaacgggttccgatacttcaccccaggccaatgcctcacgctaa

SEQ ID NO: 215080 - DNA, 165 bp, Klebsiella pneumoniae
atgctgcagcgtgacgggacggtgcaggatccaacggtcgagagcggcgatcggccattctgcgcgcaggtgatgtccgcgctgaaaaaagccaacatcccgcccgcgccggacgaaaaaacctatcaaaccttcagtcatgtcgtgctggacgtgaagccctga

SEQ ID NO: 215081 - DNA, 792 bp, Klebsiella pneumoniae
atgccagagataaagcttttcatgttccagtcaggaacacagcattgtcgatatcagcatatccggatgaatcagggcgtgggagagcattatgagatccctgtcccctggtttctgctgacccatccggatgggtttacgctgattgacggcggtctggctgtcgaaggattgaaagatcccagcggttattggggaagtgctgtagagcagtttaaaccggtgatgtcagaagaacagggttgcgtggaacaacttaagaggattggcattgctcctgaggatatccgctatgtggtcctgtcccatttgcactctgatcatacgggagcaattggtcgcttcccccatgctacgcatgttgtccagaggcaagagtatgaatatgcctttgcccctgactggtttacttcgggagcctattgccgacgcgatttcgatcgtccccaacttaactggctatttctgaacgggttgtccgatgatcactatgacctttacggtgatggcacgttacaatgtattttcaccccagggcattcaccgggccatcaatcttttcttatccgcttaccgggtggtacaaattttacgctagcgattgatgcggcttataccttagatcattaccatgagaaggcgctcccggggctaatgacgtctgctactgatgtcgctcagtctgtgcgaaagctgcgtcagcttaccgagcgatatcatgcggtattaatacccggccacgatcctgaagaatggaaaaaaaacaggcttgcgccagcctgttactattga

SEQ ID NO: 215082 - DNA, 888 bp, Klebsiella pneumoniae
atgcgcatatttatcagggtggttgaacggggcagcatgtcggctgcagcccgcgatctcggtattggccagcccgccgtgagtgaaagaatagaaaaactggaagctcatcttgggacacgtttgcttaggcgcaacacgcgtaacatgtctctaacgcaaagcggtaacgtgttttatgagcgaagcaaaacggccgttcaggcggcagagcatgctctttctgtgaatgaggaaaatcaggggctgcaaggcaaaatccgtattgccgcgccctattccgccggagaaagcttgctgatgcctgcattgttgcagcttcagaacgagcatccggcgctgcaggtcgatgtcatttttaacgaccgcgtcatcgatcccgtcaccgagggggtcgatttatcactgagattaggtgatgtctccgaaggtttttttgtcgcacgcccgcttggcaccgtgcgcagagtgttactggcctctccggctctgctggcgaaaatgggtcatcctgacacgccggatgcgctgacggattatccatttgctgctgtttccggtgtattcgccagtaatcgcattcaattggtcgcttccgaagatcaactcattaatgttcccgtcaatattcaatttcagtccacgcactggcggagtgtcctctcctggttattagcgggacatgccattggtgttttgcaaagtccggtttgcagaaaagaaatggcagacggcgcgctcatccacctcttaagccactatccgatcccgccatttagtgcctggttgctccatccaccagctgggatgatgtcgtatgaaacgcgaatttgtgcctccctactggagggctatctcagagatttgttgcttgagccggccggctga

SEQ ID NO: 215083 - DNA, 903 bp, Klebsiella pneumoniae
atgcggccagttcttgactttaatgcgctgaaaatcttcattgctgtggtggaaagagacagttttgtcggggcatcgaaagccctggaaatgccgacatcaaatgtgagccgttgcatttctcagttagaagacaaactgaaccttcagctcattgagcgcagtacccgacatatgaagctcacacaggctgggcatctactctatacccgggcgaagccattactggaagcacttgagcaaactgaaaccgaattaacgttgcgacaaatgcaattcaaggggccattacgtatctgtattcccaatgaaatcggtcctgtattgctgggctctgttgttgctgatttcgcctgtcagcatccggatctggagataagttgcgtcacaaatttgtcgggttatgaatccctgcgagatgatctggatttagctgtcattgttagccgtggtcagatggatgacagtgactacatcgcccgtcatctggtgacgatcccttgcaccatcgttgcggccccctccgtcatccagcgttatggcacgccttctcgaatacagcaatttgaagagttaccctgtattacaacggtgaatgcgcttaaaggcgctccctggcagtttgtgaataaaaagggcggattcgagacgatcaaggttaacggtcgttatcgggtcaacagcggagagatggcagggcgagcggccatctcaggtgtcggttttgccatcctgtcgaaacaagcctgccaaccctatattgatgatgggcggttaatcgagattgaatttgaacaatcggcagcccccttgcaattgttcgctctgtattcagatcggcgttacttgccggcaaaaacaagagcgcttattgatttcatgcatcagagattgagtcattaa

SEQ ID NO: 215084 - DNA, 1209 bp, Klebsiella pneumoniae
atgccactggtcaccacaacatttaatcaaaagacgctcattcggattgctatggtaatcgctttggtccagtttactaatgcgctggaatatatgatgttcagccctgtttttacatttatggctgcagatttcgctgttcccgtcaccttctcaggctatgtatccggtatgtacacatctggagccgtcctgtcgggaattatcgccttttactggattgatcgttgcaataagaagcattttttaatcgctaatatggtactgctagccatggcgacactgttgacgacattcactaccagttttcctcttcttcttacattgcgcttcttcgcaggactggttggcggtacgacaatggctgtggggatcactattttgataaaccacacaccggctgacttgcgcggaaaaatgttggcgacggtgattgcgtcattttcgatggtcagcatcgtagggatgcccgctgtactatttttgtgtactcattacggttggcatgtcgcgttgtggttaatttgtacactgtgttggttggcattgccactgatcgtctccatcatccctcaggatcccgtcactttcgacacgtcccacgcgctgcccctcgatgtagatactttactgtttgcttccggtaatgcgctggtacagtttagtccaatgctgatcattcctgtcctggcgccattaatgacgcagctgttgggggcttctcaaggtctgctgccctggttgttcttcggcgggggcctggcggggtatctgtctaccagaatgacaggcgcattaacctctcgtgtttctgctttgagtttggcgaccgggtcgaccctcgtttttatcctgagcttactgatacccctgatgggctatccgcatccagcgctatttattacgttatttctcggcgcagcttacagtcgtctggtgtcatcgtcggcggtgacgattcagtttcctgataacaagcaacgagcgggattctcttcattacagacatccatgatgtatctgatgacaactgccgcatttttcctgtctgcttttttgttacccgaccatcgcatggcgctacaaaatatggatacgctgttggcggtatgtgcaattaccgcatcaggaaccccaattattgtcatcgttttgcaaaagaaactggctaaacgtacgttcgagcccgatcgtttcaccactgagtag

SEQ ID NO: 215085 - DNA, 621 bp, Klebsiella pneumoniae
atgctcgtcactgattcacttcttgcatacaccctcgctgccacactgcttactcttacaccaggtctcgataccgcgctcatcctgcgcacggccaccgctgaaggtggacgcaaagccttgcatgccgcgttaggcattgatctcggatgctttatttggggcgccgtggtggcctttggcttaggggcgctgctggcggtttctgagtttgcttataccttgttgaaatggtgcggagcgggctacctttgctggctgggcatccagttgcttctgcgcccgcgccagcaatttaacaccactccggcagaatccactaccaccagtaactggtttctgcgtgggatgctggggaatgtgcttaatcccaaaatgggtgttttctacgtttcgtttttacctcagtttatccctgccgggcattcacccgtgagctggacttttctcctggtcgctatccatgtattgattggtacgctgtggtcgttaacgctgattaccgccactcgctatgccgcaggcatcctgaaaaaaccagccgtagtgaaatggatggatcggacgaccggctgcctgtttctgttattcgctgcgaagctggcaatgagtcggcggtag

SEQ ID NO: 215086 - DNA, 1107 bp, Klebsiella pneumoniae
atgtctctaaaacaaatatggcaagcagcaaaccctaaaggacatctgctgaccgctatctcgtttctgatccccattgtctgtggttctgggtttattatcgccatcggcatggggcttggcggaacggtgcaggacacgttaactccgggacaatttgatgtatggcaggcgatggccaccctgggcgccaaggcgcttgggctgttgccggtggtgattgccgtgggaatatctggctcgattgccggcaaaccaggcatcgcgccaggatttgtcgtcgggctggcggcgaataccataagcgcaggctttatcggtgggatgattggtggctatattgcggggtatattgcgctggcgatcattaaaaacgtcaaggtgcctgactgggcccgcgggttgatgccgacgctgatcgttcccttttttgcctccattatcagctgcctgattatggtctatatcatcggtacgcctatcggtatctttacggaagcgcttacgtctttcctgagaagcatgggcacgtcgtcgaatttggtgttaggcgcagtcataggcgcattgtgtattgttgactttggcggcccgctaaataagacatgctttgctttcgtgctgaccctgcaggcgcaggggataaatgaacccattaccgcacttcagttagttaacaccgctacgcctatcggatttggcctggctttcttcattgctaagcttctgcgtaagaacatctataaccgtgaagaagtggaaaccttaaaatcggcggttccgatggggattgtgaatatcgttgagggttctatcccgatcgtcatgaatgatattgtgcgcggtatcgcggcggcggctatcggcggcgcgtgcggcggggcggtcaccatggtctatggtgcggatgcgacggttccttttggtggagtattgatgatccccacgatgtcacatccgatggcaggcatcatggccctgctggtgaatatcgttgttaccgccacggtctatgccgtcatcaaaaaagatatccctcgcgacgtgattgttgataatgattacgaagaagaggatatcgacctggatgatattaaagtgagctaa

SEQ ID NO: 215087 - DNA, 312 bp, Klebsiella pneumoniae
atgaatattgtcggcgttaccgcctgcacggtggggattgcacatacctatattgcgcaaaagaaaattgaaactgcggctaaaaaagccggacataacgttaaaatcgagacgcaaggaaccatcggcattgagaactcgttaaccgctgatgagattgccgcagcagatattgtcctgcttgctgccgatgtcaaagtaacgggcgaggagagatttgccggcaagaaagtcgttaaagtcgcgacggaaacggcagtcaaatcccccaataagttgattgaaaaactcagtgaactagtcaattcataa

SEQ ID NO: 215088 - DNA, 681 bp, Klebsiella pneumoniae
atgagcgctaaattttcaccgtcactgatgtgcatggatttaacgcagttcaaagagcagatcacggcaatgaataaaaaagcggatttttaccatgttgatataatggatggcaattacgtccgcaatatcacactgtctcccttttttattgagaatctgaaaaaaattactactgtgcccattgatgttcatctgatggtgaatcatccggaagatatcattcccatgtgtctcgaggccggcgccgatataatcagctttcatcccgagacggcgaataacaaaatattccgcctgctgaatcagatcaaggatgcgggcaaaaagtgcggggtggtgctgaacccggcgacaccggcagaaagcattgccgaatatgcgcatctgctggataaagtgacggtcatgtcggttgaccctggctatgccggacaaaagtttattcctgagtcgctgaacaagattagaaagctcatcaacatgcgcaaaaataatggttatcactatctgacggaaattgatggctcttgcaatgagaaaaccttcggtcagattgctgaatccggggtagatgtctttatcgtcggcacatcgggtctgttttcgctccatgaggatgtcagccaggcgtgggacagaatgatcgagatcttccagcgggaaactgtcgctgcataa

SEQ ID NO: 215089 - DNA, 1263 bp, Klebsiella pneumoniae
atgcttcattttcttatttatgatgtgctaggaacaccggcgatactggttggtttattttcactgatcggtctgctgttgcaaaaaaaaggaatttcagacgttatttcaggcacgctgaaaaccatcatgggttttgtcatattgaccgccggcgccggtattatagcctatacgttaaccatctttagccagttatttgagcattctttccatattcagggcgtggtgcccaacactgatgccatggccgctctggcgcagaagaattacggcacggaaaccgccaccattatggtattgggcatgctgatcaatatcgccctggcgcgtctaacgccattaaagtacatctttctgaccggacatcatacgctttatatggctgcgatgctggcggttatcctgtctgtagggggcttgtcagggggatgggtggtggccatcggggcggttattctcggtgcgatgatggtcatctccccggctatcttgcagccgtttacccgtaaaataaccaacaccgacgatctggcgctcgggcattttggatctattggctacctgctgtccgcgctggtgggcaaaattattggtaaaggtagtccctcgattgaagagatcaaagtacctaagtcgctcaatttccttcgcgactcatcggtggccatctctctcaccatgatgattctgtttctggtgctggtgctcgttgcgggcaaaacctttgtcgaggagaccctgagcgctggtcagaactttattatcttcgctattattcagtccctcacgtttgctgcaggagtttatatcatcctcgccggggttcggatggtgattgccgagatcgtcccggcgtttaaagggattgcagacaaactggttaaagacgcgaagccggcgctggactgtccgacggtgtttcccttcgctccgaatgccgtcatcgtcggcttcctcgcaagctttgtcgcagggctggtcagtatgttcctctgcccgctgttcggcttgagcgtcatcgtcccgggcctggttccccactttttctgcggggccacggcgggggtttacggcaacattaccggcggacgtcgcggggcggtggtaggggcttttgctcacggtctgctcatttcgttcctgcctgccattctcttgcccatgatgggggatatgggactgggctccacaacctttggagacgcagactttggcgttgtcggcatcgtgctgggtcatatcatcgcaatgtttaactaa

SEQ ID NO: 215090 - DNA, 267 bp, Klebsiella pneumoniae
atgaaaaaagtgcttatcgtgtgcggtaatggtttaggcagcagcttcatcgttgaaatgaatgtcaaaaagatccttgccgaaatgaataaagaagctgaagtcgcacataccgatctgacgtcggcaaaaagcgaaactgccgatcttattcttagcgccaaagacattgcagaacatcttagcagtcactctgcaaaggtcgttggattaagtaatttacttgataacaataaaattaaagaaattttagcagaaaacatttaa

SEQ ID NO: 215091 - DNA, 438 bp, Klebsiella pneumoniae
atgatcagagactggttaaccccggataaaattaaagtcattaactcaatagatagctgggaaaatgccgttcgacttgcagcagaacccttgctgatgcaagggtatatagccgggtcgtatattgaggcgattttgcaaagccataaagaacttggaccctattacgtattagctcccggcttggcgatgcctcatgcccgtcctgaacagggggtattaagaaatggattatcgcttcttcatattaaagaaggggtgtcgttcggctcgacagagaacgatccggtatacgtggtaatcatactatgcgctcgttccggaaatgaacatatcacgatgattggtgaactggctgaaatctttagcgatcagcaaaagttacaccgattgttaaatgccgatgatagcaaggcgattcaggccgttattgactga

SEQ ID NO: 215092 - DNA, 1059 bp, Klebsiella pneumoniae
gtgattttggtgaagagtttagacgcggacggtagcccgaaagaaaaacgacgtaaaggaacgggtaagataaccctgaccgaggtggctgagtttgtcggtgtgagcgccatgaccgtctcgcgagcgctgagaatgcctgaaaaagtgaatcctgagcttcgcgatcgcatcgatgcggccgtcagtcaactcggctatgtccctaatctccaggcacgtaatctggcgtcggtccattccgatcttattctcgccgtcgttcccaccttctcttcgccgggttttttgccggtctctgaagcgctgcaaaaagtgctgaccgaacgcggatataccatgatgtttatggaatccgggcatgacggtcaaagtgaacaaaagacgtttgaaaaaatgctcgcctataacccggcggccattattcagttcaatatcgataccattgagagctgcacccagttgctggccaacgtggatgttcctattctggaaattggcgcgctaaatacccaccctgtgggtatgtgcatcggcgtggattacggtaaggccgtaaaacagatcgtgactcatctggccgacgcctcattaaaaaacatcgcactgctctgtaccccggctaataacacaatgtttcgccagttgctgagcggttggaatacggcgatgctcgctctgaaccgctccccgcaccgggtggtaaccacgcatttgccatccaccatcgccacaggcgtcaatatattcaaggatatgatgattacctggggcgatctggatgcgttaatttgcacgtcggatgaaatggcctgtggatgtatgatggcctgccacagtgccggcatcaaggtgcccaataccgtagccattgcgagtttaggcggaggagtgttatcgacagtctgttcccctgccctgacaaccgttgagtttccctggcatgacattggggtgaaagccggtaaagctcttctcgaactgcttaacgataagcctggtgaaaagttcattgaaattccgtcagtgctcaaagtccgggccagtaccgcggcatga

SEQ ID NO: 215093 - DNA, 1299 bp, Klebsiella pneumoniae
atgcgtttcacggaagcctgcttactgaaaacggagaacaacatgacgacactcagcgaaccgttggttaccccgaaatatggcaagtggcgccagctggtgctgggcctgatctgtatggccgccatctccagtccgcaatatgtctggacgctgttgacaaaacccctggccgccaaacttggcgtcggtctgccagaattgcaagtcaccttctcgctgctgatcatcctgcagaccttcttttccccttttcagggacggttagtggaaaaatttggcccgcggcggctgatcgctattggcacggtgatggcgggaatgagctgggtgctttccgcgcaggtgaatggcctggcaacgctctggctggtttatggctgcatgggcggcctcgggaccgggatcgtctacatcggcgttgtcggcctaatggtcaaatggttcccacaacagcggggatttgccgccggcgcggtggcggcgggctacgggatgggggccatcataaccactttccccatctccctgtcgctgaccactaacggccttgaacacacgatgacgactttcgggatccttttcgccctcgtcggcttcctcgccagtcaggggctgaagctgccgccccctgctgtctcccagcccgtcagtcagacggtggtgcagagcagcagatcgtttacttcccgggaaatgctgcgccagccgctgttctggctgatgttcgccatgatggcgatgatgtcgacttccgggctgatggtcacttcgcagatggcggtgttcgccgaggatttcggcattagccaggcggtggtgtttggcatggcggcgctgccgctggcgttaacgatagaccgctttaccaacggcttaacccggccgctgtttgggtttatttccgaccgcttcggccgcgagcaaaccatgtttatcgcctttgcgctggagggggtagcgatgatgctctggctggcgtgccgggaagatccgctgctgtttgtcctgctctccggggtggtgttctttggctggggggagatcttctcgctcttcccgtcgacactcaccgatacgttcggcagcgagcatgccgccagcaactatggctggctgtatatttcgcagggcatcgggtcaatctttggcggtccgctggcggcactgctctatcagcacactcacggctggcatgtggtcttcagctgcgcgattggccttgattttgtcaccgccgccctcgcgctgtgggtgctaaaaccgtggcgcgcgcgatttatccgccagcatagctaa

SEQ ID NO: 215094 - DNA, 537 bp, Klebsiella pneumoniae
atgatgttacccctgaccacgccccggctgctgctgcgccggttcagaacggaagatctgccgtctttcagccattatcgcaatctgccggaggtggcccgctttcagagctggacccactacggcatgacagaggcgacagccttctatgaacaacagcgttcgcaggcctttgctgaggatgagagctggttccagcttgccgtagagattcaggccaacggtgcgctggcgggagatgtggggatccacttcttagatcacggcagacaagccgagctggggatgaccttttcccctgcgtatcagcatcaggggtatgcccgggaagccatgcgggcggtgatggccttactctttgaacagttagcccaccaccggctgacagcggtggtagacacccgcaataccggcgcgatcaaactcctggaagggctgggctttcgtcgcgaggcgcattaccggcagaatatcttttttaaaggcgagtggggcgatgagtacctgtacgcgctgttgcgtagcgaatatcagtga

SEQ ID NO: 215095 - DNA, 129 bp, Klebsiella pneumoniae
gtgttgcgcctgaactcccagctaaccgattacgaggagatcttcgcctacggcgatacgccggaagatttcgccatgctgaccctggccaccaccaaaatctatcgctgggatgaggctccgccatga

SEQ ID NO: 215096 - DNA, 480 bp, Klebsiella pneumoniae
atgtctatacccgcacatttatggctggaagatgaaaatggctccccaattctcggcagttgtttgatgccactgcgcctgggttctatcgagttaaaatccttttctcatggggtaactattccggtagatccaaactggggaaaactaaccggtacgcggatccatcaacctgtaacgatcgtaaaagagttcgatcaaacaacaccgctcttgtacagagccgtctgcgaaggccgaacgatgaagaaggcgacaatcaagatgtaccgcattctggaaacaggtatcgaagccgaatatttcaatatcattctggaaaacgtcaaatttaccacggttgcaccatttctttctccgggtgggatgagtagtacccatctcgaaacactcgaattgcgttatgaggcgatcacctggaagtataccgaagggaatattatctatcgtgactcatggaatgaccggtgttgcgcctga

SEQ ID NO: 215097 - DNA, 693 bp, Klebsiella pneumoniae
atgtactacaagaatgaaattgtccgttatttacaggctaacaatattcttgcgttaaaactcgaacatgccgtagcgggtgcagaaaaggccgtagcaaaccaaattgaaaccataggcgcaggtgcaaagcgtgcgctttattatacgtcctgttttaccgatgagtaccaggatgtgtgcctgcaacaaaaaaccgaagacatacgatttaaaaacggtgtgatttatctccttaaacatggaaatattgcatacgatatgctcaagctatattttgaacaaatattcaaagacaaagcttcagaggaactggagcgtataaagcgaatacttatggctgttaacattcatattgccgcaagctcactgaccaacgctggatttgctttggcaacagcctcatttgtcgctacaggtataaacctcaatcttgaacttagtgcattggctggacgccgggcagggggagtggtaggcgctatcggaatatatgatattgtgcagaaagcagcagagagtgcacatcgtctttgcgtttccgaacctgcgtattattcggtactttacgcacatgagctggaaatgatgtactttctgatagaaccattgtttctaaaatctgaggcgtttacagcacaacaggcctcgaatgagggtattgcagacatcattaccaggatgatccgatag

SEQ ID NO: 215098 - DNA, 1119 bp, Klebsiella pneumoniae
atgaagcaggtgggtattgttggttggcgagggatggtgggctcagtattgttgcaacgcatgatcgaagaaaatgatttcgacgatattacagcgcatttttttagtacctccagtgcgggtgccccgggcccggttattaatggtagaagcgacaggctgaaagatgcgaattcccttagcgcactcgccgaaatggatatcatcatcacctgtcagggcggggattataccaaagccatctatccggcgttaattaaccatggctggcaaggttactggattgatgcggcttcggcgctgcggatggatgaaagagcctgcattattctcgaccccgtcaaccgcgaaaatatcgatcgtgcggtaaaagcgggaattaaactgtttgtcggcggcaactgctccattacgctgagcctgatggggttggccgggctgataaaagcggatcttatcgaatggatgagcgtgatgacctatcagtctgcctccggggcgggcgccaaacaggtgcgggaattaatcgcacaaagcgcttatatcagtcagcatttatccgctgatgaactgacatcatcaggttccgtgctgccattggtaaataaagtgagtgagttgattaacagcgcgggcatgccggtggagacttttggcgtccccctcatgggcagcatcattccgtggatcgacagcgatctgggcgatggaaacagccgcgaagaatggaagggcgaggcggaaactaataaaattcttggccttgcgccgggtaccatcccggtcaatggtttatgcattcgggtcggggtgatccgctgtcacagcgcggcgattacgctgaaacttaaacgtgaggtcagcgaagcggaatttgctgagttagtcacccattcccatccgtgggtaaactatgtccgcaataataagcaagagagtgtcagtaaattgaccccggctgctattagtggttcgctgcaggtaggtattggccgctacaagaaaatgtcgctaaataatgacccagtctactcggtgttaacggttggcgatcagctattgtggggcgctgcggagcccctgcgccgcatgttaaatatcctgctgggcaaaatatag

SEQ ID NO: 215099 - DNA, 1044 bp, Klebsiella pneumoniae
atgaatccgaccagtaagaaaaatattcttgtcctggcggccctgggcgctgccgccctggcggcagcgagctacggcgtttactggtggcataccgggcgctttatgcagaccaccgatgatgcctatgtcggcggcgacattagcgccatctccagcaaagtctccggctatatccagcagctggcggtgcaggacaatatggcggtgaaaaaaggtgacctgttgatccgcattgacaaccgcgattatcgcgccgccctcgcgaaagccgccggagaagtggcggcgcagcaggccgcgctggccgatatccaggctacccgccagcttcagcaggcgaccattgccggctctgcggcctcgttactggccgccacagcggcaaccgaaaaactggctaacgacaaccgacgctataacgccctggccgcgtcgagcgcgatttccgcacagatccgcgataacgcctccgccgattatcgccgggcgcacgccgagcaggagaaggccaaagcggataaaaccgtggccgaacgtcagctggcggtgctggatgctcgccagcagcaaatcctggctgccctggcgcaggcccaggctaacctcgagatggccaggctgaacctcagctataccgacattcgcgcaccgttcgatggggtgattggcaaccgccgcgcgtggtccggctccttcgtcagcagcggtacgcagctgctctccctggtacccgcgcacggcctgtggattgacgctaacttcaaggaaaaccagctggcgcatatgcgtgccggccagccggtgaccatcgtcgccgatgtgctgccgaaccatacctttaaggggcatgtcgccagcctggcgccggcgaccggctcacgcttcagcattctgccggcggagaacgcgaccgggaatttcactaaaatcgtgcagcgggtgccggtccgcattgcgctggaaggtgacggggcaaagcttgacgtcctgcgcccgggactgtcggtgatcgtcaccgtgaacgaaaagagccctcgatga

SEQ ID NO: 215100 - DNA, 1275 bp, Klebsiella pneumoniae
atgggcgtttccgttaaacgcattgtcgtcaccgggatggggattgtcagcccgctgggctgcggcgtacagcacgtctggcagtcgctgctggcaggtaaatccgggatcacccgactcagcgagcagctggtcgcggatattccctgcaaagtggctggccaggtgccgtccattgacagcgatccgctgcacggcttcgacccgctggcgaccatcccggcgaaagagcgcaaaaagatggatcgctttattgagtttgcgctggtcgccgcccgcgaagcgctggcccaggccggttggtcgccagcatccgaggccgaacaggaacgcactgccacagtgatcgccaccgggattggcgggttcagcgagatcgccaatgcggtacataccaccgatgaacgtgggccgcgtcgtctctcgccgttcactatcccctcttttctggccaacctggctgccgggcatgtgtctatcgcccacggcttccggggccccatcggcgcgccggtcaccgcctgcgcggctggcgctcaggccattggcgatgcagcgcggatgatccgcagcggcgaggcggatattgccctctgcggcggcgcggaagcggcaattcatcgcgttagcctggccgggtttgccgcggcaagggcgctgtccagcgcctacagcgaccagccggaaagcgcttcccgcccctttgaccgtgaccgcgatggttttgtgatgggagaaggcgccgggcttatcgtgatcgagtcgctggagcacgcgctggcgcgcggcgccacgccgctggccgagctggtcggctacggcaccagcgcagatgcttatcacctgaccgcgggcccggaagacgggaacggcgcacgtcgggccatggagatcgctattcgccaggccggggtgaccgtcgaagagattgatcatatcaacgcccacgctacctcgacgcaggtcggtgataaaggcgagctggcggcgattaaaacgctgtttggcgcccatccggtcgccattacctcgacgaaatccgccaccggccatctgttaggcgcggccggcgggatcgaggccatcttcaccattcaggcgctgcgtgatcagatggtgccgccgacgctgaacctgcatcaccccgatgaagacgcggcaggcatgaacctggtggcgctgcaggcccgcccgcagaagatgcgttatgcgctgtcgaacggttttggctttggcggcgttaacgccagcctgctgctgaaacgctggcaataa

SEQ ID NO: 215101 - DNA, 744 bp, Klebsiella pneumoniae
atgctgagaggtaaaagagctgtaattaccggtggcggcggcggatttggtcaggcgctgagcgtgtggctggcgcgagaaggcgtcgaagtggatttttgcgcgaggtgcgctgatgatattcaaaaaacttgcagtgtcatcacggctgaaggtggaatggcgaaagggtatctctgtgatttaacccagcctaaatccctttctcagttttcttcacagttgttaacttcagacaaacccatagacattttaatcctcaatgctgctcagtggctttcaggaacattagacgaccaaccagacacagaaattgtcaataccatcagttctggactgacaggttctattctactgactcaggcgttactacctgggttaagacgttcagaaagcgcagatatcgtttcaattatatcttcatgtgggattcctaattttacagattcaatcgcgcaccccgctttctttgccagtaaacacgggcttagcgggtttacaactaaactttcgtaccagttgtctaaagaaaatatacgtgtgactgggttgtatcccccggatttcgagctgacagggttagaggcgtttgtcgatagccagcccaaaatgggggaacgtctgatgaatgggcgttcagtctgggaaacaattcgttttgtgctgactcaaccccgtaattgccatatcaggagcatctactttgaaggcccaactcgcgaaaaactggcagtcagaagctga

SEQ ID NO: 215102 - DNA, 1614 bp, Klebsiella pneumoniae
atgggacggagatcaggatttgaaggttttatacgtgctacaggcagagccgtagcagcagcagagcgtgagcgtaagagagcagagcgccatcagtttgccgaggctcgccgaatagagcgcgaaataaaacgtgataatgctcagagacttcgcgagcaaaaggaggctgataagttagcaaaagccatgtatttggaagaacgtcaagatgaagtttccgatcttaacgctgagctgaacgagactatctccgcgctttcaacacttctggaacatactctcgaatttgatgattcgattgatttttcggcgctgaaaaaacatccaaaattcgaagaattcaaaacacctaagcatctcttaccagacccggagccagagataaaagttgtgcatgctccagctgcatggaagactattttcccatgggtaaagaacagatattatcgagaattgcagcaggcagaagaatctttcaataaaagtaaggaagatcattcaattaaacttttaagccagaaggttgagcttgatgctttagttgctgattatcaggcccgaagaactgcttacctcgaagaaataaaaagccagcacgacgaagttgaccagtttgagcaagactacctcaactgcgatcctgacagcgtattggcatattgcgaaatggtgctgacacggtctgaatatcctgagaacggcttcccacaagcctttaggttggcctatttacctgacagtaaggagttggtggttgaatacaacttacctgatattgcagtagtaccgcgcgagttggaatacagatatgtcaaaacgagagatgccattgatgccaaggcgcgaaagattggcgagatcaaagaactctatcaaaacataatcgccgcgatcacactccgcacaatgcatgagcttttcgaagctgacaaggcatctgctttaacatcagttctgtttaacggtgtaatcgaaactatcgatcctacaagcgggcatgacactaaagtcacattagtatctgcccgtgctttcaaggacgattttatgcaaataaaactcgaaagggtcgaaaagagtgcatgccttagaagtttaggtgcacaagtttcagggcggccagatgaactccaagcagtaaagcctattatcgaattcaacatggttgataaacgctttattgaacaaggtgatgctttatctgcccttgaaacacgaccaaaccttatggaactttcaccttcagaatttgaggtgttagtatcaaatcttttcagccaaatgggactggataccaaactcaccagaggtacaaaagacggtggcgttgatgcggtggcattcgacacacgtccgatactcggtggcaaagtggtgattcaggctaaaagatataaagacactgtcggtgtcagttctgttagagatctttatggaacaatgatgaatgaaggtgctaacaaaggtattctggtgtgtacaagtcaatacggtaaagatgcatatcgtttctgcgaagataaaccaatcgaactcatagatggaggcgggcttctctacctcttaaaagagcatgctggggtatcagcacgtatcaaccccattttttaa

SEQ ID NO: 215103 - DNA, 225 bp, Klebsiella pneumoniae
gtgaaccatcttatcgttgaaaaaatcatcatcatcattcttctcatcctgtggggattcgataccttcagaaccaggaaaagaaaacgctatgatcccgcgattgaagcggctgatgccagcgaacgttatcaatggcgctatctgagatggggatttcgaatcatacaggtggtagcgggagtgtatatcgtcgtgcagctgattcaggttttactgagatag

SEQ ID NO: 215104 - DNA, 924 bp, Klebsiella pneumoniae
atgatacatcctatcgctaacgccccctgcagctggggcgtcgatgacccgaaaaaccctaacctccctgcctgggctaccgtgcttaaggaggcggcgcaggctggctatcgcagcattgagctcggcccctggggttatctccccaccgatccggccagcctgcgcgcggcgctggagcagcatcagctgtcgctggtcgccggcacgatctttgacgatctggtgagcgaggcccatttccccaccctggtggcgctgacccatcaaatctgccgcaatctgtcgcaggtagccgctgccgaaccgatcccgggccgccctttccagccgccctatctggtgattatcgacttcggcaaccccgaacgggcgcgctttgccgggcgcggcgcgctggctccgcgcctcaatgacaaagactggcagcgcatgatggagcacattatcgcccttagcaccctcgcctggcaggagtacggtgtgcgggcggttatccatccgcacgccgggggcagcattgaattcgcggatgagatcgagcggctggccaacgatatcccgcacaacgtcgccgggttgtgtctggacaccggacatctctattacgccgggatggatccgctcgactggctggatcgctattaccaccgcctggactatctgcacttcaaggatgtcgacccgcaggtttatcagcgcgctatccatgaaggtatcgacttcttcactgcctgcgccgaaggggtgatgtgcccgctcggcagcggcgccattgactatccggctatcaaagactttcttgcccgccgggggtatcagggctggataaccattgaacaagagcgcgacccgcgccatgccgcaggcagcctgcaggcggtcacggaaagtctgcgctatctgcgcgacgtcggattctga

SEQ ID NO: 215105 - DNA, 1173 bp, Klebsiella pneumoniae
atgattaacggtttaaaacctctcgaccgcaccctgcgctggggcatggtcggcggcggcggcagcagccagatcggctatattcaccgttctgcagcgctgcgcgataacaccttcacgctgctggccggcgcctttgatattgatggcgagcgcggacgccagttcggccaacggctgggggtggatcccgaccgctgttacgccgactatcaaagcctgttccgcggcgaggctgcccggcctgacggcattcaggcggtgtcagttgccacgccaaataacacccactatgccatctgccgggccgcgctggaggccgggctgcacgtggtgtgcgaaaagccgctgtgcttcagcagcgaggaagctgacgagctggtggcgctcagccagcggcggcgcaagatcatcggggtgacctacggctatgccggccaccagctgatcctgcaggcccggcagatgatcgccgacgggctgctgggcgatatccgtatcgttaatatgcagtttgcccacggttttcacgcccagccggtggaacaggaaaacgccagtacccgctggcgggtcgatccccgcttcgtcggccccagctatgtgctgggcgacctggccacccatccgctgtttctggtcgaaaccatggccccgcagctgaagatcacccggctgatgtgcgccagacaaagcttcgtcaaaagccgcgcgccgctggaagataacgcccatgtactgatggaatatgacaacggggccatcggctcactgtggagctccgccgtcaactgcggttcgatgcacgggcaaaaggtgcgaatcatcggtgaaaaagccagtctcgaatggtgggatgaacagcccaaccagctacgctacgaaatccagggcgaacccgtgcgcatcctcgagcgcggtatggactatctcgatccgctggcgcgtcaggatgatcgcatcggcggcggccatcccgagggactgtttgaggcatggtcgaatctctatcgccgcttcgccatcgccatggatgccgccgaccgtcgcgacgaggcgctgctggccgacttctggtacccggacgcccgcgccggggcgttcggcgtccgctgggtggaaaactgcgtgcgttctgccgacaacggcgcctgctgggtcgacttccgctaa

SEQ ID NO: 215106 - DNA, 1911 bp, Klebsiella pneumoniae
atgccccttttgagagatgaaattcgcgaccactccgcggaagagatgctgtttatccgccgggccgcaattgcttttctgctggtggtggtctgctttggcgtgctgatcgttaacctctaccatctgcaggtggagcagcacgatttttaccagacccggtcaaaccagaacgacatcaaaatgctgcccatcgcccccagccgcgggctgatattcgatcgcaacggcattccgctggtgcagaatatcaccctgtatcgcctgcaggtgatcccgagcaaaattcccgatatggccgcgctgttgcagcagctgacgcctatcgtcgacctgacgccggacgacatcgccagctttcgcgacgatatgcaccacaccagccgctacaaagcggtcaccctcaagtcagacctcagcgatgtggaggtggcccgcttcgcggtcaacgaattccgtttccccggcgtgacggtggagagctaccaacaacgggaatacccctacggcgcagagctggcgcacgtggtgggctatgtgtcgaaaatcaacgacagcgatctgcagcggctggcgaaaaacggcgaagaggagaactacgccgccgaccgcaatatcggtaagcagggcatcgagggctattatgaaaaagcgctccatggcaccaccggctatcaggaagtggaggtggataaccacggccgggtggtgcgtctactgaaagaggtgccgccggtggccggaaaaaacctctatctgactctcgaccttcatctccagcagtatattgagtcggtgctgaagggacagcgggcggcggtggtggtggtcgacccgcgggatggcggcgtgctggcgatggtctccagtcccagctacgatcctaatccgttcgtcaaaggtatcggctatcaggcctataaatcgctgctggagaatccggaccggccgctgatcaaccgcgtcacccaggggctatatcctccggcttcgacggtcaaaccctatatggcgctgtcggcgctctccgctggggtcatcaccccgaacaccaccttcttcggggcgccgacgtggacgctgccgggcacgcaacgccgctaccgcgactggctgaaaaccggccacggcatgctcaacgtgactaaagccatcgaagagtcagcggatacctttttctatcaggtcgccttcgagatgggcattgaccggatccatgaatggctgagcaagttcggctacggccagtccaccggcatcgaccttaatgaggagtacgccggggtgctgcccagccgggagtggaaacagcgggtgcataaaaagccctggtatcagggggacaccatctcggtcggcatcggccaggggtactggatcgccaccccgatccagatggtgaaggcgcttaccactctgctgaacaatggtaaagtacaggatccgcatctgctctattcgatgaagcagggcaaccatgtggaacgttatcagcagccggcgaacctgccgcaggtgggtgacccgaaatccccgtactggggcattgtgcgcaacggcatgtatgggatggcgaatcagcccaacggcaccggctataagctgtttcatactgcgccgtatcagatcgcggcgaagtccgggacctcgcaggtctttagcctgaagcaaaaccagacctataacgccaaaatgatcccggtgcgtctgcgcgaccatatcttctacaccctgtttgccccttatcagcatccgaaggtggcgatggcgctgattctggagaacggtggcggggatggggtggtagccggaccgacggcgcgcgccatcctggaccatatttttgtcccgcagcaggcatcttcggcggcagccgatgtgccgcagcgtgatagcgccgatgcccagtaa

SEQ ID NO: 215107 - DNA, 2178 bp, Klebsiella pneumoniae
atgagcacgtctaacgacccatccaacaatgcatccgccgggaagtgccctttccacgccgagacgccaaaacagagcgccggcagcggcaccgccaaccgcgactggtggccgaaccagctgcgtgtcgatctgttaaaccagcactccaatcgctccaacccgttgggtgagaattttaactacagggaagagtttaaaaagctcgattactccgcgctgaaggctgatctcagagcgctgctgaccgattcgcaagagtggtggccggcagactggggtagctatattggcttgtttattcgtatggcctggcacggcgccggcacctaccgcaccgttgacggtcgcggcggcgcaggtcgtggacagcagcgctttgccccactgaactcctggcctgacaacgtcagcctcgataaggcccgccgtctgctgtggccggtgaaacagaaatatggccagaaaatctcctgggccgacctttacatgctggctggtaacgtcgctctggaaaacgccggcttccgcacctttggctttggcgccggtcgcgaagacgtctgggaaccggatctcgacgtcgactggggcgatgagaaagagtggctggcccaccgtcatccggaaagcctggcgaaacaggccatcggcgccaccgaaatgggtctgatttatgtcaacccggaaggtccgaacgccagcggcgagccgctgtccgccgcggcggccattcgcgccaccttcggcaatatggcgatggacgatgaagagatcgtcgcgctgatcgccggcggccatacgctgggcaaaacccacggcgccgcagaaaccagccacgtcggcgccgagccggaagccgcgccgctggaagcgcagggtctgggctggcactccagctacggcagcggcgcaggcgcggacgccatcacctccggtctggaagtggtctggacgcagacgcccacccagtggagcaactactttttcgaaaacctgttcaaatacgaatgggtgcagacccgcagcccggctggcgcgatccagttcgaagccaaagacgcgccggagattatcccggatccgtttaacccggagaaaaagcgcaaaccgaccatgctggtcaccgacctgaccctgcgcttcgacccggagtttgaaaaaatctcccgtcgcttcctcaacgatccgcaggcctttaacgaggcgttcgcccgggcgtggttcaagctgacccaccgtgatatggggccaaaatcccgttacctcgggccggaagtgccgaaagaagatctgatttggcaggatccgctgccggcagcgacccatcagccgagcgcggaagatatcgccagcctgaaaagcgccatcgccggcgccggcctgtcggtcagtgagctggtctcggtcgcctgggcgtccgcctccaccttccgcggcggcgataaacgcggcggcgctaacggcgcgcgtctggcgctggccccgcagaaagactggccggttaacgccatcgccagccgggtgctgccgaccctgcaggcgatccagcgcgcctccggcaaagcgtcgctggccgatattatcgtgctggccggcgtggtcggcgttgagcaggcggccgctgccgccggcgtcagcgtcaatgtgccgtttaccccaggccgcgtcgacgctctgcctgagcagaccgacgtcgagtcgtttgatctgctgcagccgctggcggatggcttccgcaactatcgccgtatcgaaggcggtgtctcgacggaaaccctgctgatcgataaagcgcagcagctgacgctaaccgccccggaaatgaccgtgctggtcggtggcttgcgcgtactgggcgcgaactacgacggcagcaaacacggggtgtttaccgaccgcgtcggcgtgctcagcaatgacttcttcgttaatctgcttgatatggctaccgtctggaaagcggccgatgataacgcggagctgtttaccggcagcgaccgtaaaaccggcgaagcgaagtacagcgccacccgcgtggatctggtgtttggctccaactcggtactgcgcgccctggcggaagtgtacgcctgcgccgacgggcagcagaagctggtgcatgacttcgttgccgcctggaccaaggtgatgaacctcgaccgcttcgatctgtaa

SEQ ID NO: 215108 - DNA, 870 bp, Klebsiella pneumoniae
atgatcggcattcgccggatgatcgaggcgcaggtgctcggcctgaccggcatggcgctaaaagagatcgactttgaacgacccaaaggagagccggggctgtttggtccccagtcggccatctggcaggtgcacggcgattttacctcgatgctctgcggcggcattagcgcgctgttgctgcagatgctgcatcctctggcgctggccggcgtctgggatcactctcgttttcgcgaggatattttgggccgcctgcgccgcactagccagtttatttctgccaccacttttgccactacccccgacgccgaacggctaatcgccaaagtacaggggatccatcagcggatcgccggggtggataaggacggaaccccgtatcaggcgagcgacccggcgctgttaacctgggtgcacgtcgccgagtgcagttgctttatggcctcccacctgcgctacaagcggacggtggtcagtcccgagcgccaggaggactattttcgtgagtcggcggaaatcgcccggcggctgggggctcgggatatccctcagacaccgcaggaggtggcggactatctcgaggtgatgcgcccgcgactgcgctgcgacgaacgtacccgggaggtagccgaggtgctgctctccacccgtctgccggggcggatgagccagccggtcggccgggtgatgatgaacgcaggaattgacctcctgccggaatgggcgcaggagatgctgggattgtcgctcacgccgctgcagcggcgcacgacgcgcctgatggtgcatggcgtggcccgcgtactgcgcgcctcggtacgcaacggcgcctggcattgcgccatgcgccggatgacggaggcgtga

SEQ ID NO: 215109 - DNA, 447 bp, Klebsiella pneumoniae; identical to SEQ ID NO: 211006

SEQ ID NO: 215110 - DNA, 1626 bp, Klebsiella pneumoniae
atgcaacgggaggagtggtttcacagagcggtcatctatcaggttgacagttcgctcttttatgatgccaatggcgatggttttggcgatctcgcgggcattcgccaaaagctacactacattcgcagcctgggagcgacggtgctctggctaactccgttctatctcactcctctgcaggatgatggctatgatatcagcgatcatctgcagcccgatccgcggttcggcactatcgctgacgtgattgagctgattgcccgcgcccgcgagctgggactgcgggtgatcgttgagctggtgatccagcacacctccgcgcagcacccgtggttccaggcggcgcgacgcgatccccggtcgccgtggcggccgtattatctgtgggccgatcggccgccggaaaacgacgatcctcccatgtttcccggcgttgaggagagcgtctggcgctgggacgaacaggctgggcaatattatcgccacatgttttatcaccacgagcccgacctgaatctcgcccatccgccggtgatcgctgaaatcgaaaacattatcaccttctggctgcaggctggggtgtctggctttcgtctcgatgccgcgtcacatctggtcaagcaggccggaaagggcgacgagacgcgcggctacccgctgctgacccatctccggcaggttgtacagcgcctcaatcccgatgcgatactcctgggtgaagtggacgtcgcggtagaagattaccgtcattatttcggccagggcgatcggctgcagatggtgcttaatttctggcttaacaaatacctctacctcagcctggcgcagcagcgcgccgcgccggtgttgaaggccctgcaggcgatggtgaccccgccggacgggtgctgcttcgtcaactggctgcgcaaccatgatgaactggatcttgaggggattggcgagcgcaacaagcgccaggttatccgcacctttgcccctgataaatcgatgtccgtttaccagcgcggcgtacgccgaagactggcgccgatgctggacggcgatacccgacgcatagccttagcccatgctatcctgctggcgctccccggcgtgccggtgatgcgctatggcgacgagattggcatgggtgacgatctctccttaccggagcgctacgcggtcagaacgccgatgcagtggtcagccgcggccaacgccggcttttcccgggcggcgcgggatgatttgccggtaaaaccggtggccagcgggcggttccgctaccaacggatcaatgtagaaacggcgctgcgccatcccaggtcgctgctgcatcgggtacgcaatatggtattggcgcgcacggaatatactgaactgggatccctcccttttactctccttaccctaaagcccgacgcggtgctgggcttactctatcgcagcgaatcgcgggaggtattgatgctggccaactgcagccagcaggcggtagaggtcctgctcccgccgctggccgagggctactggagcccaattctggaagataagctctatcaggatgggctgcacggcgggaaagatgcgcggctggcactctccgagtatggttaccgttggttcagccgcagcctgagttag

SEQ ID NO: 215111 - DNA, 894 bp, Klebsiella pneumoniae
atggacagggtgattgctgcgcaggtgtatctgcgcatctgcgagctgggaagtcttagcgccgcggcgcgggcgctgggtatgtcgcgcccgatggtcagtcgctatctggagcagatggagagctgggccggcgcccggctgatccatcgctcaacccggcggctgacgctgaccccggccggggagaaggtattgctcaagacccgcggtttgacgcggatcgccgatgaaatcgccggcgagcgtcagcgggccgatcccagcggcacattgcgcgtcgcctgcgcgcactttaccgccatgcagctaatctccccgctgctaccggactttctcgcccgctatccactgctgcgcctggagctggatatcaataaccatccggtcagcctgatcggcgagcgtatcgacgtggccattcgcattaccgacaacccggaagcgggggccatcgctcgtcgcctcggagtgtgccgttcgctgctctgcgccgcgccgggctggatgcgccagcatggcccgttgacgacgcccgacgatctgcaacgacataactgcctgctatacagccatttcgccagccagcactggcagttcagcgatgcgcaggggcgcgaagcgtcggtggcggtgaacggtaatctgagcgcagggatatcttcattgctgctggaggcggcggttgccgggtgcggcattgcgatgcttcccgaactggaggcccggggcgcgattgacagcggcacgctggaggtggtgcttccggagtggacgccaaaggcgttgagcgtttacggcatctatctttcccgcgactaccaacctgacggattaccgctatttcttgatgcgctgcagaggcgtctgggagaggagactggccacggctga

SEQ ID NO: 215112 - DNA, 852 bp, Klebsiella pneumoniae
atgaaattatctgcccttgctgttgctaccgccctgttcagcggcgcggtcttcgcggcgcctctgacgctgcaaacttacaacccgcaggaaaaaggactttttgccgtcaactcgaccctcgtttccggtccgcatgaagcggtacttttcgacgcgcagttcagcgtcaaagatggggaaaagctggtggagatgatcaggaaaaacggcaaaccgctatcgcggattgtgatcacctctggcgatccggatttctattttggtcttgagccgctggtaaaagccttcccgcaggcggaggtggtcgccacgccggaggtcgtcaaacatattgaagccaccaaagcggccaaactggcgtactggggcccgcaaatgaaagacggcgcgccgacgcaggtgtatgtcccgcaggcgctggaggccaacagctttaccatcgatggcgagaaagtgaccatcatgcagccgcatgactacgcggcgttcgtctggatccgggcgaacaaaacgatcctcggcggcaccggcgtggcgtggggtatgcatctctggaccgccgacacccagacgccggccagtcgtcagcaatggcgtaatacgctggaccagatgatcgccctgcacccgcagcgggtgatcccgggccattatctcggcaccccgccggagggagacagcgcggtgcgctttacaaaaacttatctccagcagttcgagcaggcgctgaagacgcattcggattcggccggggtgatcaaggcgatggaggcacagtggccgggcctggcggagaccagctcgctggagttaagcgccaaagttaataccggtgagatgaagtggtga

SEQ ID NO: 215113 - DNA, 687 bp, Klebsiella pneumoniae
atgagccagcaaaaaatggttttgcagccgatattacgcctctggctggggctgtttagcggactgttgctggtgagcgccatcagcgcctttcacggtgagtactggtatttcggcgataagcaggcgttttacgcggcgaaagccggcgaggtctctgtgcatgaactctatacgccggcgaaaatcctctttgcttttatcgtcagcacgatcccgccgctgctgtggctgctgctggttaaccgtcgggcgccgcggctgctgacccacactctcccatcggtgttactcctgctggcgggtttgctgtttttcttcctgagacccgacgtgattcccggcggggaaacccctgtctatcgctacggcgagcgggagcgctactaccagacgatacgctggcagaaaccggagcctggcgcgtggcggggtacccgctctgagtacaacgtgtatatcgaatatcgtgatcccaggggatatcgcaaagtcgacaatattaaaaacgcctatacctgtgaaacccaccgggagtctcgcttttttaccttaacgaccgaagaggattggtatccggattcgtatccgaatattctcgaggctccctgccaggcgataaaggatccccaggcgatgacggaatatacccgcgaccacgcccgctggtttcccattacgttttag

SEQ ID NO: 215114 - DNA, 1716 bp, Klebsiella pneumoniae
atgagtacattactaactgcccatgcgctccacgtggagacggcttttgggccgctgtttaactccctctccttcaccctgaagaaaggcgaccggatcggtctcatcggccataatggttgcggcaaaagcaccctgctgcaggtgctggacggcaccctcgcgcccacctcgggcagcgtctcgctcgccggtcagtgtctgatggcccgcgttgaacagcatctgccggaggcgctgcatacgcagtcgctgctgcaggcggtgctggccccattacccgccgacgcgcgggaagcacagcgctggctggccgagcgcctgctggcgcagatgggctttaccccggcggtgatggagcagcagaccgccaccctgagcggcggccagcacacgcgtctgctgctggcccgggcgctgatccgccagcctgatctgctcttgttggatgagccgggcaaccatctcgatctgcccaccctgctgtggctggaaagcttcctgcaaacctggcaggggagcttcgtactggtgtcacacgacaacaccttactggatgctgtaactaatgcgagttggatcctccgtgaccagacgctacattgcttcgccttgccctgcagcgctgcccgtcaggcactgcaggagcaggatgaaagcgccgcgttacgtcataaggcggagcaaaaagagatcgaccgggtcagcgccagcgcccggcggctggccacctggggtcgggtctatgacaatgaagatctcgcccgcaaagccaaacagatggagaagcaggtcgcccgcctgaaagacgagcagaccgagctcagcgtcggcccgccgtggcgcctggtgttacagggggacgccctgccggccgaccgccttttggagatggacacccttcccgtctcgcccgcgccgggtcagccatccctcttcaccaccggcgtggcgcgcctgcgcagcggcgatcgcgtggccatcatgggacgtaatggcggcggcaaatcgtccctgctgcgcctgctgtggcagcagatgaacaacgcatcgcctctcccggggctgcgcctgcatccccggttgcaccccggctactatgaccagacgctggcgcagttgccgaacgaggccagcctgctcgaggccctgacgccgtttgccccgtcggcggacacccgtaaacgggcgctgatcgccgccgggtttggctgggcgagacatagccagaaggtcagcaccctcagcggcggcgagcgatcgcggctgctgttcgttggcctgtcgctggcgcgctacagtctgctgctgctggatgaacccaccaaccatcttgatatggagggtaaagcggcgctggcgcagacgctgcgcgattaccccggcggcgtgctgctggtcagtcatgaccgccagctgattagcgaaagctgtaaccgcttctggctgattgacagcgccgggctaacggagtggcacagcctggaggaggtctatgcccgtctgcaggccgtggcgcccgccccggacagtcggctcgctttgcagagtacacccgccggggctgacgatgatgaggaggcgctgctggcgcggctgattgacctggagcagtggctggctgacgacatggcccgcaagccaaaacatcaaaagccgtcactgcaggcacagtggcaagaggagattgcccgcctgcttaaccaactgacgtaa

SEQ ID NO: 215115 - DNA, 954 bp, Klebsiella pneumoniae
atgcctgatacccccttaatccaacagattcgtaccgcctcgcggttaatggtgcgcgagctgggctttatgagcaccacgctggccgccacccattattcaccttcggcggtgcacaccctgcttgaggtatcgatgaggggggagatgacggccgcgcagctggtcacgttgctgggactggaaaaatcaagcgtcagccggatggtctctcgtctgctggcggccggtgagctggaggagcgtccttgcgcggaggatgcgcgcgcgaaatcactcgccctgacggcaaaggggcacgatactgtggcgaaaattaacgcctggggtacccgtcaggtggtggaggcgttagaccatctggatgagacgcagcagcaaactgtcgccactggactggcggcctatgcccgggcgctggcgcagtgtcgggatagcgcgctcgcggatacggctccgcaaatttcgctgatgaccggctaccagccggggatgatcggccggatagcccagatgcacggggagtattacgcccgtcatcatgactttggcgctttttttgaaggcaaggtcgccagcggcgtagcggaatttgccacccggctctcctccccggccaaccagatctggctggcgatccgcgaagggaaaatcgtcggctcgctggctatcgatggcgaggacctcggccagcaggaggcgcatttgcgctggttcattctcgatgacagctgccggggaagcggcattggcaggcggctcctcagcgaggcgatggctttctgcgatagtcgccagtttagcgcggtgcagctgtggacctttaaagggctggacgcggcccgcaaactgtatgaatcctttggcttcacgttaatccgagaatggcagggggagcagtggggaaaggtaatgaccgagcagcaatttacccggtccggaaacaccggctaa

SEQ ID NO: 215116 - DNA, 1011 bp, Klebsiella pneumoniae; identical to SEQ ID NO: 136848

SEQ ID NO: 215117 - DNA, 1623 bp, Klebsiella pneumoniae
atgcatcgtcattttcgcctgcccgcgctggccgcgctgtttctcaccggcgccttttccgtctgggccgccgacacgccggttaaaggcggcaccttaatttatctggagcagcaaccgcacaccaatctctatccgcccgccggcggcttttacccgaatggcgggattctcaatcagataaccgacaagctcacctggcagaacccgaaaacgctggagattgagccgtggatcgccgagagctggaccagcaatgccgataaaaccgagtacaccttccacctgcgcaaaggagtcactttctcagatggcacaccgctggacgccgccgccgtcgccaaaaacttcgatacctatggtctgggagataaagcccatcgtctgcccgtctcggaggtcatcaataactaccagcgcagcgaagtgatcgacccgctgacggtaaaattctacttcaacaagccgtcgccgggcttcctgcagggaaccgccaccatcggctccggtctggtatctctcagcaccctgcagcgtaattttgaagagctgggcgatgcccgacatattatcggctccggccccttcgtcgtgcaggatgaaaaaccaggccgcgagctgacgctggtggcgcgcaaggattaccagtgggggccgaaaaacattgcccagcaggggcccgctaacctcgacggcatcacctatattgtgacgccggaagacagcgtgcgtatcggcgcgctgctggcaggtcaggcgggctttattcgccaggtgcaggcctacgatgaaaagcaggctaccgatcagggatttaagatctacgctgcccctacccgcggggtcaacgacagcctgagcttccgcccggataacccactggtcgctgacctgcgggtgcgtcaggccctgctccatgccaccaacgccaggcaggtggtggagacgctgttctccgctaactacccgcaagccacctccgtgctggccagctctgccgccggctatgtcaatctcagcgataaactcaccttcgaccaggccaaagcccggcagttgctggatgacgccggctggaagcccgccgccgacggtattcgcagcaaagacggtcagcggctggcgctgaccgtctatgagtcgctgccgcagccgcaaaataaggaagtgctgcagctgatcgcccagcagtggcgccaggtgggtgtggcgttgacggtcaaagccggggatgccggtagccgtacgctggataacctcgacccgcagaaaaccccgctcaccgtctcagaagtgggccgcgccgacccggatgtggtgaaaagtatgttcttccccaacaaccgcgatgcgctgctgcagaaaggcggctccagcgataaagtgcagcgcttccgcgatgataagctcaatgacctgctgaccggcatctccgcggcggtagagccgcagcagcgcttgcagttaaccggtgacgcccagcgctatctgatcgataacgcctatgtgatccctattttcgaagagccgcaggtgttcgccggcgcgccgtgggtcaaaggcgtcagcttcgaggccgtcggtcgtccgtcgttctacggcgcgtggctggacaagcactaa

SEQ ID NO: 215118 - DNA, 1383 bp, Klebsiella pneumoniae
atgtcggtgcagaatgataaagataatcattaccttttgaacaactggcggcctgaaaacaaggcgttctgggaaaataaaggccaagccattgcgcgaagaaatctatggatatcagtggcctgtctgctacttgctttctgcgtatggatgttattcagcgccgtagcggtcaatctcaataaggtcggttttcatttcaccaccgaccagctttttttattaaccgccctgccttcactttccggcgcgatattacgggtcccctactcctttatggtacccctttttggcgggcgctactggaccgtattaagtaccgttatcctgatcgtgccttgtatttggttaggggtggcaatccagaatattactactccgttctgggtatttattattattgcgctgctgtgcggttttgccggagcgaattttgcttccagcatgggaaatatcagtttctttttcccaaaagcgaaacagggcagcgcgctgggagtcaacggcggccttggcaatctgggcgtaagcgtgatgcagatggtcgccccggcggtcatcttcctgccgctcttcacctttctcggcgtccatggcgtcacccagcccgatggttcgacaatcacccttagtaatgcggcgctcgtctgggtaccgctgctgctgctcgccaccgtcgcggcatggttcggcatgaacgatatcgccggttcaaaggcctcgattcgcgatcagcttcccgtgctcaagcgaccgcatatgtggctgttaagcctgctctatctggcgacgtttggctcgttcatcggcttttccgccggctttgccatgctggcgaaaacccagtttcccgcggtcgatatcctcaagctcgccttctttggaccgttcatcggcgcgctggcgcgctcgttcggcgggatcatctccgaccgtctcggcggcgtgcgggtgacgctggttaacttcgtcctgatggcgctgtttaccggcctgctgtttctgaccctgccaggcagcggctccggcagctttctcgctttctacgtggtgtttatggggctctttttaaccgccggtctgggaagcggctccaccttccagatgatcgccgtcatcttccgccagctcaccatcgacagcgtaaaacagcgcggcggcagcgatgaagaagcgcagcacgaggcggtcaccgataccgctgccgcgctgggctttatctcggcgatcggcgccatcggcggcttctttattccgaaagccttcggcacctcgctggcgatgaccggctcaccggttggcgcgatgaaagtcttttttgtcttctatgtggtttgcgtgctggtgacctggctggtctacggccgccgtaaacccgcttaa

SEQ ID NO: 215119 - DNA, 846 bp, Klebsiella pneumoniae
atgagtccctttttacgcgcctatttttcccgtctgagctggacgggtgagcctgatgtttccattgataccctgcgggaactgcatctgcagcataacagcgccatcccctttgaaaacctcgacgtcctgctgccgcgtgaaatccaccttgacgatggggcgctggaagagaagctgatcgccgcccgccgcggggggtattgttttgaacagaatggcctgctggagcgcgcgctgcgcgagataggctttaacgtccgcagcctgctgggccgcgtggtgctggccaacccgccgcagatgccgccgcgtactcaccgtctgttgctggtggaggtggcgggggagcgctggatcgccgacgtcggcttcggcggccagacgctgaccgcgccgatcaaactgctggccgatatcccacagcaaacgccgcacggcagctatcgtctggtgcatgaaggggatgagtggacgctgcagttcaaccatcacgaacactggcagtcgatgtaccatttcgatttaggccgccagtatgcgtctgattatgtgatgggcaacttctggtcggcgcactggccgcagtcccacttccggcaccatctgctgatgtgtcgtcatctgccggacggtggcaaaatgaccctcaccaacttccactttacccactgggagaataaccatgtggtggagaagatcgattttgccgatgtctccgcgctgtatgaagggctgcagacccgtttcggcctgggggtggacgatcctaaacatggcttcagcgaagcggcgctggctgcggtgatggcggcgttcgatacccatccggaagccgggaagtaa

SEQ ID NO: 215120 - DNA, 1656 bp, Klebsiella pneumoniae
gtgaaacaaacattcctttccggcgcgacccttgccgccctggtgatgctggtcgcgttaccgttagtgtttattctgctgcaggcgatttttccccgttttagcgccggttcgctcggggacgcctttggcggcatcccggcgctgctggccgatcctcagctgccggcgatgctcggcggtacgctgtggatcgccgccggcgtggcgttggtcagcgtaatgattggcctgccgctcggcatcctgcgcggtatgttttcgctgccgctgccccggctgtgggatctcctgtttttgatcccctttctgacgccgccctatatctcggcgctctcctggatgctggccctgcaaagccagggctatctgcagcagctgaccggctggcagctgaacgatctgctgttcagccgcagcgggatcgtgctggtgatgacctttaacatatttccggtggtctactttgccgtctcccgcagcctgctggcgagcgggacccggctggcggtggtcgcccgcgtccatggcgccagcgcctggcgcgccttctggcacgtgacgctaccgatgctctctccggcgctggcggcggggatgctgctggcgtttaccctcgccatcgaggagtttggcgtaccggcggcgctgggcagccgggcgggagtggtgatgctgacggtcggtattgagaaaaagctggccgactggccggtggatctccctggcgccgcgctattgtcgctgctgctgatggcggtggcgttgttcgcctggtggctgcaaaggcggctggtgggggagaaagaggtcaccagcgtcaccggtaagccgggggagaaccacggggcatcgctgggctggatgatgctgcccgccatgctggcgatggcggccgtcggcggcctggcggtcggcgtccccgccgtctcgatgatgctcaccagcgtgatgggcacgctctccggtggcgtgagtgttgagaatgtcacactgcgtcatttcgcggcgctgtttgaccagcagggagatgccctgtcggccctcggcaccagcctgtcgctggccctgggttcggcgctaatcgtcggcgcgctgggcctgctggccgcctggttggtgatggtgcagaagattaaagggcgcgggatggtggacgcgctgtcgctgatgccggcggcgctgccgggcgtggtggtgggggtcggtttgattctgctgtggaatcagcccttctggccgcgctcgccctataacacgctgtggatgctgctgctctcctattgctgcctgctgttgccctggccggtgcgctatgtcggcagcgcgctgcgccagctgggcccgaaccttgagcccgccgccagggtgcacggggcgtcgccactgcaggcgctgcggttgattgtcctgccgctggtctttccggcgctgctggcggcgatgctgatggtgttcgcggtggcctcccgggagctggtgacctcgctgctgctctctccggccggtacgcaaaccgtggcggtgtttatctggcgccagttcgaacagggttccgtcggtcagggcatggcgatggccagcctgacgttgttgaccggtctggtcctgatgctgacggcgctggcgctgatgcagcgccgcacgcgcggttaa

SEQ ID NO: 215121 - DNA, 618 bp, Klebsiella pneumoniae
atgataaccgtttatggcgtgccgggatggggctcgacgattagcgagctgatgctctccctggccgatattccctacgaggtggttgacgtggagggctttgaccagcccggtccggcgcgcgagcgtttgcggcagattaatccgctgtgccaggtgcccaccctgaggctggccgacgggagcatcatgaccgaaaccgccgccatcgcgctgatgatcctcgaccagcgtcccgatctggcccccgcgccggggacgccacagcgtccgcagtttcagcgcctgctggtctggctggtggccaatgtctatcctacctttacctatgccgattacccggaacgctgggcgcccgccgccgcggagcagctggtggagaattgtcgccagtaccggaaaaatctctatctctggttcgaacagcagctggccgccgggccgtgggcgctgggcgcgtcgataacgttgctggattgctatatcgcggcgatgtaccgctggggaccccgccaggcgtggtttgacgaccacgcgccaaaattcgccgccatcgcccgggcggtctgtcagcgaccggagctggccgcggcgctacgtcgtaacaagctgatttaa

SEQ ID NO: 215122 - DNA, 879 bp, Klebsiella pneumoniae
atgacccttgttctcagcgcttttgccatgagcgcttacgcggcgctggatctgcgcgccaatgagcagccattgccggtcacccgcgacccgcaggcgatagcgaaaattccgccgggctatcgcttcgttgagccggggacgctaacggtggcgatctcggcgctcaattcgccgccgctggccctgctggccagcgacaaccgcacgcggatcggtagcgacccggatatagcccgcctgctggccggaagccttggcctgaagctcaggctggtgcccaccgcgtgggaggactggccgctgggcatcgcctccggccgctacgatgtggcgctaatcaatatcgcggtgaccgagaagcgcaaagagaagttcgattttgcgacttaccgggtggactccctggccttctcggtgaaatccaccagcgatatcgccgcggtaaacggacccgccgatctcgcggggcgcaaagtgatcgtcgggtccggcaccaatcaggagcggatcctgctgggctggaacgaggacaaccgcgccgccggacggccgcaggcccagccggtctacctgaccgatgatgcctccggcaacctctatatccagtccgggcgggcggatatctttttcggcccgcagtcggtggcagcctataaagcggcgcttaacggccagacccgggtggtgggcctggggccgaaaaaagcgtgggtggcgacaaccaccaaaaaaggcaacggtctggtctatgccctgcaggcggctctcgacggggcgattgcccgcggtgaatatcagcaggtgctggcgcgttggggggagcagggcgaagcggtggcgcagtcggtggtcaacccgccggggataacctactaa

SEQ ID NO: 215123 - DNA, 597 bp, Klebsiella pneumoniae; identical to SEQ ID NO: 135258

SEQ ID NO: 215124 - DNA, 375 bp, Klebsiella pneumoniae
gtggaagccgctatcgcccgcgccaaagcgcgtaaagccgaacagcaggccgcgccggtggaagccccggccgtcgaaccggtcgacccgcgcaaggcggcggtggaagccgctatcgcccgcgctaaagcgcgtaaagccgaacagcaggccgcgccggtggacgccccggccgccgaaccggtcgacccgcgcaaggcggcggtagaagccgccatcgcccgcgccaaagcgcgtaaagccgaacagcaggccgcacaacaggatctcgcgtcagccgcagccaatgacgacccgcgcaaagcggccgtcgccgcggctatcgcccgcgttcaggcgcgtaaagcaacacagcaggcagttaacgaggaataa

SEQ ID NO: 215125 - DNA, 171 bp, Klebsiella pneumoniae
atgggattaggtgcttcaggtatcgcgctggctggctggttcttttttttctcagtaaatgaatataaatttctctggggtttactttcagttgtggaattcctggtggggtatctgatatatcgatttgcatatgcatatatttatgatgaatggaatgattatcattaa

SEQ ID NO: 215126 - DNA, 753 bp, Klebsiella pneumoniae
atgcaaacgataatgatcaccggctgttcatcgggttttggtctggagacggcgcgttattttctcgagcaaggctggaaggttattgccacgatgcgcgctccgcaggaaggtttgttacccgccagcgaccgcctgcggctggtacgtcttgacgtcacttcggcgcagagtatcgcagaggccattgccgaagccggagagattgatgtgctggttaacaacgccggggtggggatgcttaatgccctggagggcgcctcgcgcgaggcgatagccaacctgtttgccaccaataccctgggaacgattgccatgacccaggcgatgattccccggttcagagcgcgccgaagcgggaccatcgttaatattacctcggcggtcaccctgcaaccgatgcccctgctggctgtctacaccgcgagtaaggcggcggtgaatgccttcacggagtcgctggcgctggagctccgtgcttttaatattcgcgtcgggctgatcctcccgggacgcgccccgcagacccggttcggggaaaacgcccgccggacgatggggcagctcccggagagctatgcggcgctcggccagcagatcttcgacagcatgcaggataacgccagcgtgacgcaggcgacggatgtcgctcaggccgtctggcgaatggtgcacgatcctgatgccccttcgcggctgccggcaggggaagatgccctggcgatggcgcaggccagtcatcgccttgtctga

SEQ ID NO: 215127 - DNA, 927 bp, Klebsiella pneumoniae
atgagcgatccgctggcggaggtcatcgcgatgttaaatctcagagcggtgctgaccaaaaccatcgagggggcgggagactggcgagtccggcgctcggatcaggggttgtcattttatggcgtcgtgctggaaggcggctgtcggctggaaattgaccagcatgagccgcagatcctgcgcgccggggattttattctgatcccggcggcgtaccgcttctcgctaaccagcctgaccccgcctccttcaccggcgctggaaaccatcccggtgcaactggcggagggacactttcggctgggcgccctcgacaagcctgcgcagatgcaggcgctgattggccactgcgcttccggttcaacgaacgccagcctgctggcctcgctattgccagcctttgtggtggtccgcaatcaaccgcggctggccacctttgtcgggctgctgaaagaggaagcgcaggcggatcgcgcgggcaaatctttcgttctggcgcggatggttgagctgctttttatcgaggccatccgttcctccggcacgctcgcgacccccggtctgatgcgcgggctgagcgacccgcgggtcgcccaggcaatccgtctgctgcatcaggcccccgccagacgctggacggtcaacgctctggccgccgactgcgcgctgtctcgctcgacgttatttgaacgctttaccgacctgaccgggatgaccccgatgggctatctgttaggctggcgaatgaccctggccatgcagtggctgagcgagacgggcatcagcattgcggatatcgccgagcgcatcggctatggctcggccagcgcgttcagcgtagcttttacccgttataccgggatatcgccgggcaaatatgcccgccagcgggcggcgctaaatgtctcccgaccagctctgacttaa

SEQ ID NO: 215128 - DNA, 885 bp, Klebsiella pneumoniae
atgcgtcgtaaaatccccagcagcgctgcgctactggcttttgaggccgcggctcgtcacggcaactttgcccgcgcggcggcggagctcgcgttaacggaaggggccatcagccggcagattgcccgtctggaagcgctcctcgacagtaaactcttcgacaggacggggagccgggtgcggctcaatccggcaggcgcccgctacgctcgtcaggtccgcgagatcctcgctcgtctggaacgggacacccatgacgtcagcgggatgcccgtcgatggccgcagcctggagatcgccgtgctccccaccttcgccagccgctggttaattccccggcttgggcgctttgcggcgcagcatccgcatatcgtggtcaatattgccgcccgcagcgatcccttcattctgccgggaagcggatttgatgccgccatccattttgaacacccggcgtggaccggaatggaggtgacgtttttatttgcggagtatttgctgccggtctgccatgctgcgctgctgacggatgacgatcttccggggctgcttaaccggctaacgcgcattcaccggcggcaaaacccggacgcctggctgcactatgcccgcgagtgcggtctggcgctggataaccccgcccaggggccgcgctacgatctgcatgagatggcgatcgccgcggtactaagtcagcagggagtggccctggtgccgaagatgtatgtggaaagcgagctgagcgccggaacgctggttgccccgtggccgggctccccgacgctggctaagcgcttctgcttgatcaaacccggcggcggggagggggagccagcgctgcagatgtttgagcgctggctgcagacggagattgcggcaggttaa

SEQ ID NO: 215129 - DNA, 516 bp, Klebsiella pneumoniae
atgctctatgtcgtcgaatgcgcctacaccgatccccaaagcgaagcggcgtggaataccttttacaatcaggaaaaactaccggcgctggtctctgtgcccggtttctacgcctcccagcgcttccgcgctctcagcgagggctgcccctgctacctggcgctgcacgatatccacgatgctaccgtcatcgacagcgacgcctaccgccgcaacggcggcggccattttgcccgctggcaatcggcgatcgccgactggcatcgccacctctatctaacgaataatacgctgcgggaggttgccccggatgaagtgctgctgctgggcgataccgcggaggacttgcccgtcgctgcgccgatactcctgcagccaggcggcctggcgagcgaacaaagccggtatgccgccatcctcccacgagacaacctgcatcacctggccacgactgccgccgtctttatctatcagcccatcaccgcccggttacgcaacccggcgcagcgcgcgtga

SEQ ID NO: 215130 - DNA, 948 bp, Klebsiella pneumoniae
atgatcctgtcttacttagcttcccgtcgccgccagcggcaggcggctatcccggcgctggcgcacattaccccctctccctggcgccaggggtggcgacagctgcgccgtaaccggctggccatgttctgcctgctcctgctggcggtgatggcggtgtggtgcgtgctggggcccgtctggtcgccgtggagtgatgatgccaccgacgccctgagcatcaaccagccgcccggggcggaacactggctggggaccgatttcctcggtcgcgatgtctacacccgcctgctgctggccgggcgcatctcgctggttatcggcctgctgaccatggtgatgtcggtgtgcctcggctacctgctcggcgccctctcgggttacgtcggcgggttaaccgacaaactgatcatgcgcgtggccgacctggtgatgactatccctgggttaccgctgttaattgtcgccggggcgatgctttccgagctcgatttttcgccggactcgcgcatttatatggtggtggtgatgctcagcctgctggagtggccccgactggcgcggctggtgcgcgggcaatgtctctccctgcgcgaacgcgattttatgctggccacccaggtgctgggcctgtcggcgcgtcgccggctgtttggccacctgctgccgaataccattccgattctggtggtgatggcgaccatggccgtcgccaacgccattctcagtgaatccgcgctgagctatctcggcctcggcgtggtgccgccgacgccgtcgtggggcaatatgatggatgccgctaacagcctgatcgatttccagcgccgcccctggctgtggatgccgccgggcatcgccatctttatcaccgtgatcgccatcaacgtgctgggcgatggcctgcgcgacgccatggatcccaatatgaaaccgaggctgaaatga

SEQ ID NO: 215131 - DNA, 981 bp, Klebsiella pneumoniae
atgaccacgccgttagtctcctttaatcatctctccgtctctttcgccggcgaacgctctcgcgtgcgcgcggtgcaggaggtctctttcaccattcaggccgggcaaaccgttggcgtggtgggtgaatccggctgcggcaaaagcgtcaccgccatggcgctgatgggcctcctgccgccgcagacggcgcgcatcgacggcggcgagatccgcttcgcggaccgcgatctgctgcggctgaaagccagacagatggccgatctgcgcggtcaccagctggcaatgatttttcaggaaccgatgtcggccctcaacccggtgttgaccatcggggagcagctgtgcgaaccgccgatccgccacctcggcgccacgccgaaagccgcctggcatcaggccatccagctgttaagcgaggtcggcctggcgcgcggggacagcctgatgacccgctatcctcaccagctttccggcggcatgctgcagcgtgtgatgatcgccatggcgctgagctgtcggcccaaactgctgatcgccgacgaacccaccaccgcgctcgacgtgaccgtgcaggcgcagatcctacgcctgctgcgggatcgggcccgggccagccagatggcgatgatgctgattacccacgacctgggggtgatcgcgcagatggccgagcaggtggtggtgatgtatgccggacgaattgtggaacaaggcgccaccgcggaagtgctacggcatcctcagcatccctacacgcgggggctgatcgcctcccgacctgtgcccggtgagcggcgtcggcggctgtactcaattcccggccaggtgccggatctggccgccctgccggcgggctgcgcctttgccgggcgctgcgagcgggcgacgacgcgctgccgggaggcgattccgccgctgctcggcgaccgccaacgtgctgcctgcttttatagcgaatttgcggaggtgacagcatga

SEQ ID NO: 215132 - DNA, 396 bp, Klebsiella pneumoniae
atggatggcctggcgatatccgctgtgccggtcgccaaagccggtatggcggcaggcctgttcaacaccgtacgcgttgccggcgaggggatcgccctggcggtcgtctccgcggtattaacggcaagcaataccctgaccctgcagagtcgcgttcacgggtatgcccccgaggtgattcaccgcgccgcaggctggctgggggccggcaatatgccgcaggcggctgcgcttttgcctgatttttccctccgggcgctgcgcgagagctatgactctgcttatacgctactgtttagcgggctggcggtcgtcaccctgctgtgcgccctgatgatctggctgacgctatgccggaaggggggcgctatccaaacccgcgacagtggatcctga

SEQ ID NO: 215133 - DNA, 990 bp, Klebsiella pneumoniae
atgaacgcaaccacccagaatcaacgctatgccttacaggaactggaaaaagaggcgctaatgggcgccgagggcgaagagaccttcgcccgcgaagtgcgctgtatcgacctgtcgaactttgccgcaagaaaaaatgacattgccgaacaactgtgggaggcgtcggtggagatcggcttcttccaggtcagccatcacggtattccgctggcggagatccgccaggcgttcagcatgaccgaggcgtttttcgacctgcccgacgaggtgaagcgccagtatccgctggccggtaacgccggctgggaaagcaaagcgcaggttcggccgtcgacccgcaccccggatcaaaaagagtcctatcagataacccggccgctgatggccgggcgctggcccagcgatcgggagctgccaggcttccggcagacgatgctcgggtttgagtcgcagtgctggcagctggggatgaagatcctctcctgctttgctttgaagctcggttttccggaatcgtttttcaccaccgcgcacgatccgcagcgtgacacctatcagagcaccttgcgcatgctgcattactatgcaaccgagcagtcgcagcaggggatgtggcgggccggcgcgcacaccgattttgactgtctgacgctgctgttccagcgccccggccagggcggcctgcaggtttgtcccggtaaagaccgcgaaagccagcagtggaccagcattgagccgcgggaggaggtgatcacctgcaatatcggcgatatgctgatgcgctggagcgacgaccagctgccgtctaacttccaccgggtgagaaatccgctgccccatgaatatcaggggccgcgctacagcctggcgtttttttgccaggccaataaagatgtcgagatcctcgggccgcagaggaagtacccgcccatcagcgccgaggattatctgcagcagcggatccaggccaattttgccaaagggtaa

SEQ ID NO: 215134 - DNA, 333 bp, Klebsiella pneumoniae
gtggccggtcgaaaatggcgaggccgcgcgtccggcaagcagtgccaggaatacattcctcaggtttcggcatgggtaccggctttgacgatctgtagcgcgctggggctcgccacgctgccgctggcggtgacgaaccccggatggacggtctcgccgctggcgctgtccaccaatgcaataggcgacgcgctatgcagcacgtgctggtggccccattccatcagggcgaacagcaccagcgccgggatactgctgtggctggtgccgatggccgccgccgccgcggtgggccttatcgtccatatggcgggactgtccggcgcaggatga

SEQ ID NO: 215135 - DNA, 3117 bp, Klebsiella pneumoniae
atgccgcactttttcattgagcgccccatcttcgcatgggttattgccctgtttattgttctgacgggactgttgtccatacctcgtttaccggttgcgcaataccctgaagttgcgccacccggtattatcatttcagtgagttaccctggagctagcccggaagtgatgaacacatccgtcgtgtctctgatcgagcgtgaaatttcgagtgttgacaatttactctattttgaatcttccagtgacacgacagggatggcgtcaattacggtaactttcaaacccggtaccgacatcaaactcgcccagatggatctgcaaaaccaaattaaaattgtggaatctcgcctgccgcagtcggtaagacagaatgggataaatgttgaggcagctaattccggttttttaatgatggtggggttaaaatcgccaagcggagcctatcaggaagctgacttaagcgattattttgcaaggaatgttactgatgaactccgtcgcgtacctggtgtaggtaaagtccagctttttggcggagaaaaggcactccgcatatggctggacccgatgaaattacacagctatgggctctctgttacggatgtattaagcgccatcagtcaacaaaacgtgattgtttcaccgggcagaaccggagatgaacccgcgacgagcagtcaagaggtgacctatccaataacggtaaaagggcagctctcttcggttgaagaatttcgcaatatcacgattaaatcacaggtctcagccgcccgggtgacactggcagacgttgcccgcgtggaatccgggttgcaaagttacgcatttggcatccgtgaaaatggcgtgcctgcaacggctgccgccattcagttgtctcctggcgcaaatgcgattagtactgcgtcgggtatccgcgcgcggttaacagaactgtccggtgtgcttcccgagggaatgacattcaccgtgcctttcgatacggctccatttgtaaagctatcgatattgaaggtagttgagacatttgttgaagccatggttctggtctttttcgtgatgctgcttttccttcacaagatacgctgtacgcttattcctgcgattgtggcacccgtggcgctgctcggcacatttaccgtaatgctattaagcggttattccatcaatattttaaccatgtttggaatgatactggccatcgggattattgttgacgatgctattgttgtggtggagaacgtcgaacgactgatggaagacaaaaaaatgtctccacaggatgcaacgcgagaagcgatgcgtgaaattacgccggcaatcattggtattacgctggtgctcactgcggtgtttataccaatggcctttgccagcggttctgtgggtattatttatcgacagttcagcatttcgatggcgatatccatcttactgtcggcattcctggcgctgacgttaacgcctgcgctttgtgcaaccctgctcaaaccacatggtattcatcagggtaaaagcagcgtattttcagcgtggtttaacgctcactttcatcgcctgacttcgttttacgccactggtctgggatttgtactgaagcgtactggccgtatgatgatgatctacgctgcattatgtttggcattgtttgccgggctgtccaccttaccatcatcatttttacccgatgaagatcagggttattttatgtcctcaatccagcttccttctgatgccacgatgcagcggacgcttaaggtcgtcgatacatttgaagaggagatcgcccatcggcaggcggtagaaagtaacattatgattctgggatttggtttttcagggtcaggccaaaattcggccatggcattcaccaccctcaaggactggagacaacgcaaaggaaccacggcacaggaagaagctgaccatattcggtcccaaatggcaaacgtgccggacgccgtaacaatgagtctgctgcctccggctatttctgatatgggaacctcatccgggttcacttattatttacaggacagaggggggaaaggctatcaggcactcaaaaaggcggccgatgagcttattgtacaggcaaatcataatcctcaccttgccgatgtctatattgatggacttggtgagggaacaagcctttccctacatgtcgacagggaaaaagcggaagccatgggggtttcgtttgatgaaataaatcaaaccatttccgttgcagcaggttccaattatgttaatgactataccaataatggtcgggttcagcaggttatcgtccaggcggatgcgccataccggatgcagcctgaacaacttttggctttgtctgttaaaaaccgtctggggcagatgcttccattatccacttttgtgacgctttcgtggaatgttgcaccgcagcaactgatacgctatcagggatatcctgccatacgcataaccgggagttccgcacagggaaaatcgtcaggtaccgcaatggcggcaatggacaatctggctaagcacttaccaccggggttcgccggggagtgggcgggaagttcgttacaggaaaaagagtctgcatcacagcttccgggtcttattgtgctctcggtactggtggtattcatggtgctggctgctctttacgaaagctggtccattcccttcgcggtcatgctcgttgttcctctggggctgctcggcgctgtgctggccgtatccgttacaaatatgacgaatgacgtctttttcaaagtgggtctgataaccctgattggactttccgccaagaatgcgattctgattatcgagttcgcgagacaattgatgaaagaaggaaagagccttattgacgcgacattgacggctgcaaagctacgcttacggccaattctgatgacttctctggctttcacattaggtgttgttccgctgatgcttgccagtggagccagcgacagcacgcagcatgcgattggtaccggtgtattcggcgggatgattagcggaacgctactggccattttctttgttccggtatttttcgtgacgatcacacgatttacaggcatgcgaaaatacagactggggaatagccggaacggctaa

SEQ ID NO: 215136 - DNA, 1053 bp, Klebsiella pneumoniae
atgacgcgcgccgttcaccgggccggttttcggccgctggctttcgcctcccgccagctgctgctgcgtcctgcggcgttaaaaattgccgccagcatagtgctgacgctgctggcgctggggctgtacagccttagccgcggcagctatccgctgcccgcgtcgacgctggcgcgggccctgctggcgccgcaggagatgggcgagcagccgcgctttattctgtttgatatccgcctgccgcggatcctgatggcgctgctgtgcggggccatgctggggctggccggcgcggcgatgcagagcatcacccgtaacgggctggccgacccggggctgatcggcgtcaaagagggggccagcatcgtggtcctggcgctggtgctgtttttcccggcggtaggcctggtctggcggccgctggcggggatggtcggcggcatagcggtggccctgctggtcctgacgctggcgcgcgactgttcgcggccgcgctttattttaattggcatcggcgtctcctggagcctggcggccgcggtcggcatctttatgaccaccgccgacgtacgcgacgtgcagacggcgatgatctggctggcgggcagcctgcaggccaccacctggccgctgctggcggtggctttttgctgggcgctgcccggggccatcatcctgttctgtaccgcccgggcggcggacgtggcgctgctgggcgaccggaccgccatcggcctcggcgtacgtctgcagcagctgacggtgctgcgcttttttgcgccggtgctgctgacctcggccagcgtctcctgcgtcggcagccttggatttgtgggcctgatggcgccgcatatggcgcgtttcgtgctgcgcggcggccaggtatcgctgctgtgcggcagcgcgctgattggcgccttgcttgtgctggcgaccgatacccttggccggctggcgtttgccccgctgcagatcccggcggggattgtcattgccctggtgggctgcccgttcttcgttgtcttgctctggcgtcgccgtgatgccctttaa

SEQ ID NO: 215137 - DNA, 1026 bp, Klebsiella pneumoniae
atgagcgtggccatcctgctttccgcgcggcgtcgcccccgcccccggctggcgctgcttctgctaacgctgctgcttatcgccgcctcgctggtgcatcttggcttaggcgcccgctggatcgccccgcagacggtgctgcaggcgctgctggagtacgatccgcgcaactttgagcagcggattatcatcgatctgcgtctggtgcggctggcggcggcgctgctgaccggcgcggcgctcggcgtcgccgggctgctgctgcagacggtgatccgtaacccgcttggcgagccgcatattctcgggcttaacgccggcgcctcgctggcggtggtggcgacctcggcgctgggcctgtccttcggcgctttccccgccgggcgcccgctgaccgccgcctgcggcgcggggctgctgttcggtggcgtgatggcgctggcctctgccgggcgcggcggggcgacgccgctgcgcatcacgttgtacggagtggcgctgtcagggtttgcgtcggcggtgacggcggcgatattaattctcgatgaacagacgctgctggcgatgcgtacctggctggccggcgacctggccggactgaactggagcacgctgcagacggcgctggtcccggcgctgatcggccttggcgtcgcgctgctcattgccccacgcctcaacgtgctggcgctgggggataaggtggcgctgggccttggcgttaatctcgtccagacgcggctgctgggtctgctggcgattgcgctgctctgcggcgcggcggtggcggtggccgggccgatcggcttcgtcgggctggtggtgccgcacgtggtgcgccgtctggtgacggaagatatccgcctggcgctgcccctggctgcgccggtgggggcgctggcgctggtgctggcggacatcgccgcccggacgctggtcgcgccgcaggagctggccaccggagcgatgaccgccctggtgggcgcgccgttgtttatctttatcgccgcgaggttttttaaatga

SEQ ID NO: 215138 - DNA, 774 bp, Klebsiella pneumoniae
atggtaaccgagacgatagcgcgcggcgcggcggtatccatcagccatcttcatcatgcgtttacgcttggcaaacagacggtaccggtgctggagaatattagcctgcagctgcgcccgggggaaagcgtggcgctgctgggcccttccggctgcggtaaatcaaccctgctgcggctgctggcggggctggaagcgccgcagagcggacagatgcagatcgacggcgcggcgcccggcgccccggggccggagcggatccttgtgtttcaggatccgacgctctatccgtggctgacggtgcgtcagaacgtgctgctggggccgcaggcgcagggcaaaaaggggctggaggcgaaggcagacgcgctgattgaccgcatcgggctgcaggccttcagcgaggcgtggccgcggcagctgtccgggggtatggcgcagcgtgcggcgctggcgcgcgccttgttgaacgaaccgcgtctgctgctgctcgacgagccgttgggcaaactcgattcgctgacccgcatcagcatgcagcgggagctgatcgccctctggcagcagcaggggtataccagcctgctggtgacccacgatatcgaagaggcgctgctgctgtgcgagcgggtgctggtgatgtcgccgcgtccagggcggattatcgccgagtttgcgctgccgctggcttttccccgtcatcgtgataacccgcagctgctgcagcatcgtcaggatatattgcgcatcctcggccaggaggcggactggtaa

SEQ ID NO: 215139 - DNA, 996 bp, Klebsiella pneumoniae
atgccaacgtattcgcctgagcaggctctggcgcgccccaccggccgcgcgccgctgtggggagaagggctgctggccgccgcgctgtggctgctgggcggtctgtttactcttacctggcccgacgccgggcggcgctggccgtttagcgaaggctgggcgctggcgcaattcaccctcggcggcggcttgctgctgctggcgctgagctatcgctactggcgggcgcgcggcgcgcgtgtgctgcatgccggcaagtggctggcgctgctgccggtgctgtttgctgtctgggaagggctgaccgccaaaactgccgtgctgccggtaccattcttcgcgccgccgcaggcgctgatcgaggtgctgcacgacgactggccgcgcctgctcgacagcctgctgcactccctggggctgctggggctcggtgtgctgctgggtaccagcagcgggttcatcaccggtctggccatcggctggtcgcaacggattggctactgggtgcatccggtgttacgtctgctggggccggtgccgtccaccgcgctgctgccgctgtgcctgtttatttttccctcgagcttcggcgccagcgtgtttttgatcgcgctgagcacctggttcccggtcacggtgctgacctggtccggagtgatgggcattgataaggcgtggtacgacgtggcgcggaccctcggcgccagccagcgtttcctgatcctgcgggtggcgatccccgccgcgttgccgaacgtctttgtcggcctgtttatggggctcggcgcgtcgttttcggtgctgattgtcgccgaaatggtcggggtgaagtcggggatcggcttttacctccagtgggcccagggctgggcggcctatcctaatatgtatgccgcgctgctggtgatggccttgttatgttccggcctgataagcggattatttatgctgcgtgaccggctgctgagctggcagcgaggagggatgcaatggtaa

SEQ ID NO: 215140 - DNA, 1038 bp, Klebsiella pneumoniae
atgaccagaacccttttttcccgccgccgttttttacagctcagcggcggcctggcgctggccggggtctctctgccgctgtgggctcatgatatggcggacatggccggcggcgatacccatccggcgctgcgcctgccgcagccctacaagatcaagctggcgatcaacaaaagcgcggtatgcctcgcgccggtcgccgtcgccgagcagcagaagatattcagtaaatacaacctcgacgttgagtttgttaacttcggcaactccaccgatgtgctgctggaggcgatcgccaccggtaaggccgacgccggggtggggatggcgctgcgctggctgaaggcgctggagcagggctttgacgtcaagctcaccgccgggacccacggcggctgtctgaacctgctgacggctaaagactcgccgttcggcggcctcgagagcctgaagggtcaaaccatcggcgtcaccgacatggccggaccggataaaaacttcttcgccattctgcttaagcgccacggtatcgacccgatcagcgacgtgcagtggaaagtctacccggcggatctgctcagcgtggcgctggacaagcgcgaaatcgccgccatcagcggcagcgagccgtttagctatcgtctgctggagaccggtaagtatcagctgatcgccagcaatatgaccggggattatgccaacctcagctgctgcgtgctgggggtgagcgggagcctggcgcgggaccataaaccggccgccgcggcgctcacccaggcgatccttgaggcgcacagctatgccgctgcgcatccggaaagcgtggcgcaatccttcctcgcccatgccctgaataccagtgaagcggaggtgagcggcatcctccacgggcagggccacggccatcacgcggtgggcgaagcgttcgtgaaagagctgacgcagtatgcggtcgacctgcagcgggtgcaggtgatcaagccgggtaccgatccccatcagttcgcggagagtatctatgccaacgtattcgcctga

SEQ ID NO: 215141 - DNA, 963 bp, Klebsiella pneumoniae
atgcgtctatcattttcaggccgggtggcggccgcgctgatgctgctggcgctgggcggctacgcgacagcgcaggagcggcttaccctgcgtatcgccgatcaaaaaggcggcatgcgttcgcagctggaggcggccaacgccctgcaaaatctcccttacgacattaagtgggccgagttcccggccgccgcgccgctggcggaagccctcaacgcgggcgccgtggacgcggggatcatcggcgatgcgccgttgctcttcgccctggccaacggtgcgccggtcaaagctattgccgtggataaaagcaacccggcggggaccgcggtgctggtatcacccggcagcacgttaaaaagcggcgctgatttaaaaggcaaacgcatcgccaccggtaaagggtcgattggtcatttcgtggcgctgaaagcgctggagcaggcggggatttcaccgaaggaggtgcagtgggtgttcctcggcccggtggacgccaaagtggcgttgctaaacggttcggtggacgcctgggcgacctgggagccctacaccacccaaatggtgaagaccaacgaggggcagatcctggtgagcggcaaagggctgctgccggggaataccttcctcgcggcaacggattccgcgcttaacgatccgcaaaaacgcgccgcgctgcaggattatctccagcgcctggccggcgccgagcgctgggcctacgctaatctccacagctacggtaaaacgttgggggagatcatccgcttcccggcggagatcgcccgcgcgcagtttgccaaccgccagtcgcagtggcagccgctggccgaggaaacagtggcccaacagcaggcaacggcggacttttatctcgccaacggcctgatccgcacccggctggacgtgaagccgacctttgaccgccgttttagcgtgcccgccgccgaggtgacaccatga

SEQ ID NO: 215142 - DNA, 903 bp, Klebsiella pneumoniae
atgagaaagcttaaaattggtctggcgctaggtgcgggagccgctcgcggatggtcgcacattggcgtcatcaacgccctccagcgggccggtattgagattgatatcgtagccggttgttctatcggttcgctggtaggggcggcgtatgcctgtaaccgactcccggcactcgaatcatgggtctgctcattcagcaactgggatgtcctgaagctgatggatctctcctggcgccgggggggactgctgcggggggaaaaggtattcaatcattaccgccgcattatgcccgtcaccgagattgaacgctgcgagcgccggtttgctgctgttgccaccaatttaagcaccggtagggagctgtggtttaccgaaggcgatctacatttagccattcgcgcctcctgcagtatgccggggttaatgtcgccagtaaggcataatggttactggctggtcgatggcgcggtggtcaatccggttcctgtgtcgctcacccgggcaatgggagcggatattgtgattgccgtcgacctgcaacatgatgcccatcttatgcagcaggatttgttctcccttgaaacgccgcggcaggaagcggaagagaaggaggggccatggcatactcgtctgcgcgctcgcttgacgcgaatgagttcccgccgtacggccgtgacgccgacggcgatggagatcatgaccacctctatccaggtactggaaaaccgtcttaaacgcaatcgtatggcgggtgacccgccggatatcctgttgcagccatactgtccgcaagtttcgacgcttgattttcatcgcgccggagaggcgatcgccgcggggcaactggcggtagaaaagaaaatggatgaattattaccattagtgcgtacagccgtttga

SEQ ID NO: 215143 - DNA, 444 bp, Klebsiella pneumoniae
atgaatgacgtacttgatgaaattgacagggcgatcctcacctgcctgactcaggatgccagagtttcgctcaaggtcctgagcgcgcgagtggggctgacctcgccgagcaccgccgagcgggtgaagcgcctggaggagcggggtgtcattcagggctatggggcgcgggtaaatctcgccgcgctgggctatagcctgcaggcgctggtgcgggtccggccgctgcctgggctgctgcagaaggtggataaatatatccaggcgatgccggaatgtattgaaagtgacaaggtgaccggggaagattgttttgtaatgcgtctcgtggtgcgcgatattgcccagctggataccctgctggacggtctgacggagtatgcgcagtgtaacacctcggtggtgaaaagctcgccggtaaaaaggcggttgccaccgctgtga

SEQ ID NO: 215144 - DNA, 897 bp, Klebsiella pneumoniae
atgcaacttacccgcggcgtctggcagatgagcctggcaatgataatctccggctcgatcggcgcgttcgtgctgctctctggtttgccggtgactgatgtggtgttctggcgctgcctgattggcgcgctaaccctgctggtgtttatcgtgttaagccgccagcccttcagccggctaacgcgtttcactctcgctctggcggtgattggcggcgcggcgctggtcgtcaactggctgctgctgtttgccgcctatttgcggatctcaatcggtatggccaccgtggtctataacacccagccgtttatgctggtactgatggggatggtgctgggggaacgggtcagcgccgcgaaatggggatggttactgctggcctttggcggcgtagtgatcctgctgtcgagcgagctgatgcctgcacacgaagaggggcttaccaccggcgtgttgctggcgctgggcgcggcattcttctatgccctgaccgccatcatcgcgcgcaaactgcatccgctccccgcgcagcatatcgccttcattcaggttctcgtcggcgtcgtgatgctgctgccgctggtgcatgccccagaattgacggccagcttcccctggcgctatctgctgatcctcggcatcgtccataccgggatcatgtatcagcttttatatagcgcgatacagaaactgccgacgcccgttaccggttcgctctcctttatttatccgctggtggcgatggtggtcgactatctggtcttccaccatgcgttatccgcggtgcaattgctcggtgggatgcttattctgtttgccgccgcagggaataatctcggctggggcgaaaaaaaaccccgccgcggcggggtcagtgagcagtcgcgggccagttag

SEQ ID NO: 215145 - DNA, 678 bp, Klebsiella pneumoniae
atgcacttcctgaatatgttcttctttgacatttatccgtacattgcgggttcggtgttcctgattggcagctggttgcgctatgactatggccagtacacctggcgcgccgcctccagccagatgctggaccgtaaggggatgaacttggcgtcgaacctgttccatatcggcatcctgggtattttcgccggccacttcctcggcatgctgaccccgcactggatgtatgagtccttcctgccgatcgatgtcaagcagaagatggcgatgatcgccggcggcgcctgcggcgtgatgaccctggtgggcgggttactgctgctcaagcgtcgtctgctgagcccgcgcgttcgcgccaccaccaccggagcggatattctgatcctctcgttgctgatggtgcagtgtgcgctcggcctgctgacgatcccgttctccgctcagcatatggacggcagtgaaatgatgaaactggtcggctgggcgcagtcggtggtgacgttccacggcggcgcgtcacagcatctggatggcgtggcgtttattttccgcgttcacctggtgctgggcatgaccctgttcctgctgttcccgttctcccgtctggttcatatctggagcgcgccggtcgaatacctgacgcgcaaataccagattgtccgcgcccgtcgctaa

SEQ ID NO: 215146 - DNA, 711 bp, Klebsiella pneumoniae
atgattgaactcgtgattgtatcgcgtctgctcgaatatcctgacgctgccttatggcagcatcagcaggagatgttcgaggcgctcgcgtcatcagagaaactcagcaaagaggatgcccacgcgctgggcgttttcctgcgcgatttagtggctcaggatccgctggacgcccaggcggcctatagcgaactgtttgaccgcggccgggccacctcgctgctgctgtttgaacatgtccacggcgaatcccgcgatcgcgggcaggcgatggtcgacctgatggcgcagtacgagcgccacggtctgctgctggatagccatgagctgccggatcatctgccgctatatctggagtatctggcgcagctgccggaagaggaagcgcttggcggcctgcgggacgtcgcgccgatcctcggtctgctcagcgcgcgcctgcagcagcgcgaaagtcgctatgcggtgctgttcgagctgttgctgaagctggccaatacgcaggtcgacagccagaaggtggcggagaagattgccgacgaagcgcgcgacgatacgccgcaggcgctggacgccgtctgggaagaagaacaggtcaaattctttgccgaccagggctgcggcgagtcggaaatttccgctcaccagcgtcgttttgccggagccgtggccccgcaatatctgaatatctctaacggaggacagcaataa

SEQ ID NO: 215147 - DNA, 1536 bp, Klebsiella pneumoniae
atgaaaattcgttcacaagtcggcatggtgctgaatctcgataagtgcatcggctgccacacctgctcggtgacctgtaaaaacgtctggaccagccgggaagggatggaatacgcctggttcaacaacgtggaaagtaagccgggcgtcggtttcccgaacgactgggaaaaccaggaaaaatggaagggcggctggatccgcaaaatcaacggtaaactgcagccgcgcatgggcaatcgcgcgatgctgttgggaaaaatcttcgccaacccgcatctgccgggcatcgatgattactacgagccgtttgattatgactaccagaatctgcataacgcgccggagagcaaacatcagccgatcgcccgtccgcgctcgctgatcaccggccagcggatggacaagatcaccagcggtccgaactgggaagaaatcctcggcggcgagtttgaaaaacgcgccaaagatcagaacttcgacaacatgcagaaggcgatgtacggccagttcgaaaacaccttcatgatgtatctgccgcgcctgtgcgagcactgcctgaacccggcctgcgtcgcgacctgcccgagcggcgccatctataagcgtgaagaagacggcatcgtactgatcgaccaggacaagtgccgcggctggcggatgtgtatcaccggctgtccgtacaagaagatctatttcaactggaagagcgggaaatccgagaaatgcatcttctgctacccgcgtattgaatccgggatgccgacggtgtgctccgaaacctgcgtgggccgtatccgttatctcggcgtcctgctatacgacgcggacgcgattgaaaacgccgccagcaccgagaacgagaaagatctgtatcagcgtcagctggacgtgttcctcgatcccaacgatccgaaagtgatcgagcaggcgctgaaagatggcgtaccgcagggggtcattgaagctgcgcagcagtcgccggtttacaaaatggcgatggactggaagctggccctgccgctgcacccggaatatcgcaccttgccaatggtctggtacgtgccgccgctgtcgccgattcagtccgccgccgatgcgggtgaactgggtagcaacgggatcctgccggacgtggaaagcctgcgtattccggtgcaatatctggcgaacctgctgaccgcgggcgatacccagccggtactgctggcgctgaaacgaatgctggcgatgcgccactataagcgtgcggaaaccgttgacggcgtcatcgatacccgcgcgctggaagaggtggggctgagcgaagcgcaggcccaggaaatgtatcgctatctggcgatcgccaactacgaagatcgtttcgtggtgccgagcagccatcgtgaacaggcgcgagaagcgtttccggagaaaaacggctgcggctttagctttggcgatggctgccacggctctgacagtcagttcaacctgttcaacagccgtcgcatcgacgccatcgacgtgaccagcaaaacggagccgcacgcatga

SEQ ID NO: 215148 - DNA, 3744 bp, Klebsiella pneumoniae
atgagtaaattcctggaccggtttcgctacttcaaacagaagggtgaaacctttgccgatgggcacggccagcttctaaacaccaaccgggactgggaggatggataccgtcaacgttggcagcatgacaaaattgtgcgttccactcacggtgtcaactgcaccggctcatgcagctggaagatttatgtcaaaaacggtctggtgacctgggaaacgcagcagactgactacccgcgcacccgcccggacctgccgaaccacgaaccacgcggttgcccgcgcggcgccagctactcctggtacctgtacagcgctaaccgcctgaaatacccgctgatgcgtaaacgcctgatgaagatgtggcgggaagcgaaagttcagcatagcgatccggttgaggcatgggcgtcgattatcgaagacgccgacaaagccaaaagcttcaaacaggcccgcggtcgcggcggttttgtacgttcctcctggcaggaagtgaatgagctgattgccgcctccaacgtctataccgtcaaaacctacggtccggaccgcgtggctggcttctcgccgatcccggcgatgtcgatggtctcctacgcgtccggcgcccgttatctgtcgctgatcggcggcacctgcctgagcttctacgactggtactgcgacctgccgccggcttcgccgatgacctggggcgagcagaccgatgtgccggaatccgccgactggtataactccagctatatcatcgcctggggctcaaacgtgccgcagacccgcaccccggatgcgcacttctttaccgaagtccgctataaagggaccaaaaccgtagccatcactccggactacgccgaaatcgccaaactctgcgatctgtggctggcgccgaagcagggtaccgatgccgcgatggcgctggcgatgggccatgtgatgctgcgtgaattccacctcgataagccgagccagtatttcaccgactatgtgcgccgctataccgacatgccgatgctggtgatgctcgaggagcgcgacggttattatgccgccggccgtacgctgcgcgcatccgacctcgtggattcccttggtcaggagaacaatccggaatggaaaaccgtcgcctttgacgagaagggcgacatgaccgtaccgaacggctccctcggattccgctggggcgacaaaggcaaatggaacctcgaacagcgcgacggtaaaactggcgaagagattgagctacgtctgagcctgctgggcagccatgatgaagtggcgaacgtcggcttcccgtacttcggcggcgaaggttctgagcacttcaacaaagtcgatctggaaaacattctgctgcacaaactgccggccaaacgcctgcagctggccgacggctctaccgccctggtcaccaccgtgtatgacctgaccatggctaactacggcctggagcgcggtctgaacgatgacaactgcgccgccggctacgatgaagtgaaagcctacaccccggcgtgggcggagaagatcaccggcgtctcccgcgcgcatatcatccgtaccgcccgtgaatttgccgataacgccgataaaactcacggtcgttcgatgattatcgtcggggcgggcctcaaccactggttccacctcgacatgaactaccgcggcctgatcaatatgctgatcttctgcggctgcgtcggtcagagcggcggcggttgggcgcactatgtgggccaggaaaaactgcgtccgcagaccggctggcagccgctggcgttcgcccttgactggcagcgtccggcacgtcacatgaatagtacctcgtacttctataaccactccagccagtggcgctatgaaacggtgaccgcgcaggaactgctatcgccgatggcggataaatcccgttacagcggccacctgatcgactttaacgtgcgcgcagagcggatgggctggctgccgtcggcgccgcagcttggcgtcaacccgctgcgtatcgctgacgaagcgaagaaagccggcatgaccccggtggattacaccgtgaagtcgctgaaagagggctcgattcgctttgcggccgagcagccggaaaatggcaaaaaccacccgcgtaacctgtttatctggcgttccaacctgctgggctcctccggtaaaggccatgaatacatgctcaagtacctgctgggtaccgagaacggcattcagggcaaagacctgggcaagcagggcggcgtgaagccggaagaagtcgaatggcgggataacggcctcgacggcaaactggatctggtggtgaccctcgatttccgtctgtcgagcacctgtctctactccgacatcgtgctgccgaccgccacctggtacgaaaaagacgacatgaatacctcggatatgcatccgtttattcacccgctgtcggccgccgttgatccagcctgggaatcgaagagcgactgggagatctataaaggtatcgcgaagaaattctctgaagtgtgcgtgggccacctcggtaaagaaaccgacgtggtgaccctgccgatccagcacgactccgccgcggaaatggcgcagccgctggatgtcaaagactggaaaaaaggcgaatgcgatctcatccccgggaaaaccgcgccgcatattattccggttgagcgtgattacccggcgacctacgagcgtttcacctcgatcggcccgctgctggaaaccatcggcaacggcgggaaaggcatcgcctggaacacccagagcgagatggatctgctgcgtaagctcaactacaccaaggcggaaggcccggcgaaaggccagccgaaactggaaacggccatcgacgccgcggaaatgatcctcaccctggccccggaaaccaacgggcaggtggcggtgaaagcgtggcaagcgctgagcgagatcaccggtcgcgagcatacgcacctcgcgctgaacaaagaagacgagaagatccgcttccgcgacattcaggcgcagccgcggaagattatctccagcccgacctggtctggcctggaagatgagcatgtctcctacaacgccggttacaccaacgttcacgagctgatcccgtggcgcacgctgaccggacgtcagtcgctgtatcaggatcaccagtggatgcgcgacttcggcgaaagcctgctggtctatcggccgccgatcgacacccgttcggtgaaagcggtgatgggcgagaagtccaacggcaacccggaaaaggcgctgaacttcctgaccccgcaccagaaatggggtatccactcgacctacagcgataacctgctgatgctgaccctgtcgcgcggtgggcctattgtctggatgagcgaagcggatgcgaaagatctgggtatcgaagataacgactggatcgaagtgttcaacgccaacggcgccctgacggcgcgtgcggtggtgagtcagcgcgttccagccgggatgaccatgatgtatcacgcgcaggaacgtatcgtgaacctgccgggctctgaaatcaccggtcagcgcggggggatccataactccgtcacccgtattacgccgaaaccgacccacatgatcggcggctacggccacctggcctatggctttaactactacggcaccgtcggctccaaccgcgatgagtttgtggtggtacgtaagatgaagaacattaactggttagacggcgaaggcaacgaccaggtacaggagagcgtaaaatga

SEQ ID NO: 215149 - DNA, 1212 bp, Klebsiella pneumoniae
atgccagtaaatatttttgatattccttcggaagagaaaacatcccaaaaagcattatcactatgggttgaattcggaatttgtgtttgtattattgctgtatatgtatgtgttttcttggtttatttttctgagtatttatcaaaaaataattatgttttctggtctgagttattgctggtgccgctactcttaagcggggctgtatttttcttcagagttataatgtggaataatgagaatatcgaaacagtttactggaataaaactcgcctggattattatcaggagttgcttcaaaaaggaagggcctatcttgagatcattgagttacagatcagattgcctgatttaaatggagatgtgactaatatcatagagggagatttattgcctgttcgctatgcaccaaagtttacgcatatgtccagatatcttagttttaattccccaacaaatgaattaaatagcattcatcaaatacaggatagaaacgctattttatttaataaaataatgggatttctgattaatgatatccatatgcatataacccttttgcctaaatatattagggtaaaagtgatatgcgctcttaatgataattttaaacctctgatggaaaatatttggcaagaacgacttgataatatatatcccggggagaatattgagtttagtagaaacttatctgaatccatcgataaattgctggatagctcttctgatgaatatatagttcttattgccgccagtttttatggcgcagaattacttgacgatgaaatcgacgataaatctgaatctgtgatgtttttgttgggaagactgagaaatgatggcgagactggtggtcgctcatctttaggggctttttttcgaccagaatgtgattgggtaggaatagataaattgctcctttggggaagggttaatgaagggagaaggctatctggtgttatatattctgggttgaatgaagaagagcttaaaaaattggtgttaaaaacaacagatgtaatgtcggaaagtgcactttcgtcgtatatgtacgttgattcagacaactatttatgtaaatgcccacctcttaccgagtttttgcaattgagttatgtaaatgagcatctccccccaggacagtatttattggtaaataaaaataatgatgttttgaactgtcatttatttaactcagttgcaagtgtttag

SEQ ID NO: 215150 - DNA, 780 bp, Klebsiella pneumoniae
atgacattctcggagattttttcaagacaggaacaacaacgtgttgatgaggaatatcgcggtgattatcgtaattacaaaaataagcaaaataatttacctgattctcagaggagcaaagttttttcaagtaatgaatattggttggtaaataaagaacaggatctatggcttggcttgtttgatggaaaaaatatcaaagtgccagcaaactattacaaggatattcctaatggtgggtatcatcaacaacgaatattaagagttaaaagaaagggtaaaatttcacaatttttattgcaacgtgaaactaataattacccatctaaatgtctcagtgtaataaataatatagtttttgactcttcattatatacatatttttactctggatgtactagttttagttttgaacctaactcaacccgccatagcatattatatgatattttactatatgataaaatatatgatgcgataattgtgcttgattcaataccttattcaactcctgaagatcttaaatatataaaagaatctttggtgtcaataaatggatactatcggtatgatgcgcttgacgttgcatttagaataatcgcaaaagatcagatcgttattgttgaccctgacacaggaaaagctttacctaaggtaccaaaaactgatgacaaagggaaaatcatcttgattaatggaaagccagtaatggttgatgaccctgatggctataatcctgtcattttaaaaagacttcctgaagttactattgccaattaa

SEQ ID NO: 215151 - DNA, 2028 bp, Klebsiella pneumoniae
atggaacagtatacagttcagaagggtgacagcctgtggaaaatcagtcgtaaattcggaattgatgttaatgaactggccaatattaacggtcttctcactaaagcagagcagcatattatccagcccggtcaggtattgagtttaccatcaaaagacaaagtttatgatactcaattgactttgaggatttgcgatctcgtctggcgcccgcttggagatgcaaaactcagactcacttttgatggtaagacgtgtgattatgtaacagacagcactggtgttgtcgctggtctgcttattgaagacagcaccaaaggtataaaggttgaactgcaacatttaaataaaaaagaatacattctgattgcagaccataaaaaattgccgctgggaacgttaagtttgcggatatcatccagggaaatgataataaaagggagtaccagagttaaacaaggtacccaacaatcgagcaaacaacaggaaaaagaaaaggcgaaacagagaaatgactcatctgcttccggcccatcagaaagtagaacagcggaaagcccgacaccttctgtaaatcaaaccacgagaaccgaaggtggtgctcccaccagtgtgagtaatattggtaatgtcagtgaagggttacgccttcctccagaggcagaacaatatcgagattatatcattgaaacagctaaaaaatatgaattccagccagagggactttctgcattaatttatgcagagtcaagatggaaagcaaatgcgaccaatcctactggttctggagcggtagggttaggacagtttaaacctgatacatggctatccctatgtgcagaatcggagtctaaaatatatcagcttataacaggaaaatattcctaccagaaactggtctataaaaatagaaaactttttggtgaattggtcgatggaactataacggaaatcgataaagatactgttttatctttgcgggttaatgcagaatacagtattgatatgattggattgtatgatcgaaaagggattgactcacttagtttaaagttatcagcagttagtgctcttgaatcagatgaattagttaaaatagcttaccttgttcatatgaatggggcatttggcgcatatgacattattatgaatgggaaagaaactcctggaaaaggcgaaaaaatcccgactaatattgttttctataaccgactaattggtaatttaaaagataatgagatgataattaggtattattctattgatagtacatggaggaccgcttttgttgcatggatggtcaattatttcgattcaattatcgtacctgatcattaccgaattgaaccgaagatgaaaaattactccaccaaagatattattcagaaacttaattctacgtacattctaaatacggatttacctccagtaactattacgaattcgcagccaagaaataccccatctccttctgtaaacgttgaggggaatacatggagtaatccactttctgtttgccggattcgtactcatgctcttcctcgagtccgtagtgctacttttaagggatggagaactcgctctaatggacgtcgttatcaacaccagggcttggatatagaagctgcgccaaatacaccaatattttcagtagcagatggtcgcatcgcttttataattgatcctcctcgtagtgattatggcagacagttgtgtattattgttcagattgacgatcttccactagagaaggcgttgctttgtagatgtaatgatagtgaaattagtgaggtttattttttctacgcccatctgtctgcaattcattctggtttagaaaggggagaccatgtacgttgtggtgaattattgggagaaactggttgcacaggtaatgccaatggaatgaccagtatagctttaggtgctcatctccattttgaagttagagtaaaagagagacctggtcctggtatagcaaacaggcttgatcctgctcctttcatcgatgggtttaattatccttaa

SEQ ID NO: 215152 - DNA, 1341 bp, Klebsiella pneumoniae
atgaagattttccgcccattatggcgcgacggggcttttctggtcccgcagcagtttcagcaacaggcccgctgggacgcgcacgtcgccgatacggtctcccgcatggcgctcgcccacccgtggggggtattgcgcgcggagtttgacgcgagcgcgctcaccctttcccggctcaacgctacccggctgatcgtgcgtttcgccgacggaacgctgattgacaccgagctggcggatattttgccaccggtccgcgatgtatcggacgtgatgcaggacagcgtggaggttctgctcgctctgccgctgctcagcgccagcggcggcaatcttgatgacggccaggagagcgcccgcccgcgccgctggcgcgccgagcaggtgaccgtccaggagctggccggccatgaacgcagcgagctggccgttctgcggcacgcgctaacgctgcgtctctccaccgaggaaaatgcagccttcctcacctgcccggtagcgcgtctggtgcgcgacgcccaggggcagtggatcgttgacccggaattcatcccgccgctgctgtcgctggcggcaagcccgacgctggttagcgagctgggtgagctgttacatcgcctgcaggcccgacgcagacgcctgatggccatgcgtcgtgaaagcaatgcgcggatggctgattttgccgtggcggatgtttccctgttctggctgctcaacgcgctgaacagcgctgaaccggtgctcagcgagctgcatcaggacccttcgcgccatccggagctgctctatcgcgaactggccaggctggccggcagtctgctgactttctcccttgaacatcatctggaagcaatcccccgctaccggcatgcctcgccagagcaggtattcccaccgctgtttgccctgctggatacgctgctcgaagtcagcctgccctcaagggtgatcgccatcgttctggagcagggcgccgaccgggagatctggcggggcaggctgcacgatgcgcgtctgcgcgagggggcggatttttatctgtcggtgcgctcttcactcccccctcaccagctacagagccgctttccgcagctctgtaaggcgggtagccatgatgatgtcgccgaggtcgtcaatattgccctcagcggcatcgcgatcaaaccgctgagccatgtgccggcggccattccgctacgtctggaaaaccaatatttcgctctggatctctccaccgatgccgcccgcgcgatgctggaggccggcaactgcaccttctataccccggaatcgcttggcgacgtgaaacttgaactctttgcggtactgcggtcatga

SEQ ID NO: 215153 - DNA, 2295 bp, Klebsiella pneumoniae
atgaaagtagatatcgatacccaggatgtacgatacgccgacgcctggctgggctttcgcggtacggcgtggcaaacgcagatcgacgttcgcgactttattcagcataactacaccccttacgagggcgatgagtctttcctcgccgacgcgacgccagcgaccaccgccctctgggagcaggtgatggccgggatccgcgtcgagaacgccacccatgcgccggtggatttcgacaccaatgtcgccacctccatcaccgcccacgcggcgggctatatcaaccagccgctggaaaagatcgtcggcctgcaaacggaccagccgctgaagcgcgccctgcatccttttggcggcatcaagatgatcaaaagcgccttcgaggcctatggtcgcgaaatggatcctgactttgagtatcagtttacggcgctgcgtaagacccacaatcagggcgtttttgacgtctattccccggatatgctgcgctgccgcaaatccggggtgctgaccgggctaccggacggctatggccgcggacggatcatcggcgattaccgccgcgtggcgctgtacggcattcgctacctggtccgcgaacgtgagctgcagtttgccgacctgcagccggcccttgagcgcggcgaggcgctggaggccaccctgcgcctgcgcgaagagctggccgaacagcggcgcgcgctgctgcagatgcaggagatggcggcccgctacggctgcgatatcgcccacccggcgcgcactgcccgggaggcggtgcagtggctctacttcgcctatctggcggcggtgaagtcgcagaacggcggcgccatgtcgctggggcgcacggccaccttcctcgacatctatatcgaacgcgatctgcgcgccggtttattaaatgaggagcaggcccaggagctcattgaccacttcatcatgaagatccgcatggtgcgtttcctgcgcaccccggaatttgattcgctgttctccggggatcccatctgggcgacggaggtgctgggcggcatggggctggatggtcgcaccctggtcagcaaaaccaccttccgctatctgcatactctgcataccatgggcccggcgccggagccgaacctgaccgtgctctggtcgcaagcgctgccggcggcgtttaaaaaatatgccgcccgggtctctatcgccacctcgtcgctgcagtatgagaacgacgatctgatgcgcagcgattttcacagcgacgactacgccatcgcctgctgcgtcagcccgatggtgatcggcaagcagatgcagttcttcggcgcccgcgccaatctcgccaaaacgctgctctacgcgattaacggcggggtggatgagaaactgaagattcaggtggggccgaaaaccgcaccgttgcgcgatgaggtgctggactacgacaccgtgatggccagcctcgaccactttatggactggctggcggtgcagtacatcagcgcgctgaacatcatccattgcatgcatgataagtacagctacgaggcggcgctgatggccctgcacgaccgcgacgtctaccgcacgatggcctgcggcatcgccggcctgtcggtagcggcggattcgttgtcggcgataaagtacgcccgggtgaagccggtgcgcgatcaccacgggctggcggtggactttgtcattgaaggcgactatccgcagtacggcaacaacgacgatcgggtcgatgccatcgcctgcgacctggtggagcgctttatgcgcaaaattcaggcgctccccacctggcgtcaggcggtgccgacccagtcgatcctgaccatcacctccaacgtggtatacggccagaaaaccggcaacaccccggacggacgtcgggcggggacgccgttcgctccgggggccaatccgatgcatggccgcgaccggaaaggggcggtggcgtcgctgacctcggtggcgaaactgccgtttacctacgccaaagatggcatctcgtataccttctccatcgtgccggcggcgctcggcaaagccccgtcagcgcaggaaaacaacctggtgggcctgctggacggctacttccaccacgaggagacggtggaggggggacagcatctcaacgtcaatgtgctgaaccgggaaaagctgctcgatgcgatagaacacccggagcagtatccgaatctgacgatccgcgtctccggctatgcggtccgctttaacgcgctgacccgcgaacagcagcaggatgtgatctcccgaacgttcaccagtcaactctga

SEQ ID NO: 215154 - DNA, 942 bp, Klebsiella pneumoniae
atgaatactttttctctgcctaaaacacagcatctggtagttttccaggaagtgatccgcagcgggtcaatcggggccggagcaaaagcgttaggactcactcagccggcggtcagtaaaattattggcgacatggagagttattttggcagcgaattaatcgtccggcgaaataccggcgtctcgctcaccgaggccgggcaggtatttctcaactggtcagaagcgatcacccgtgaaatgaaaaatatggtcaatgaaatgaatgctctgaccaacagcgcggtggtggatgtctcctttggtttcccttcgctggtcgggtttacctttatgtcggagatggtgcatcagtttaaaatgactttccccaaggcgcgggtctcgatgtatgaggcgcagctctccgcctttttgccggcaatccgcgacgggcgcctcgacttcgccatcgggacgctgagcgatgagatgaaactgcaggacctgcacgtcgagccgctgtttgagtctgagtttgtgctggtggcgaaccgggcgcggatcggcaacggcaccgtccgcctggcctcgctccagcacgagcagtgggtgctgccggagaccaatatgggctactacagcgaactgctgaccactctgcagcgcagcggtatccgccgtgaaaatatcgttaataccgattcggtggtgacgatctataacctggtgctcaatgccgattttctgacggtgatcccctgcgacatgaccacgccgtttggctcgagccagtttgtcaccatccccattaaagaggccttgccggtggcgcgctatgcggcggtatggtcgaaaaattaccggttaaaaaccgccgcggcgtcgctggtggagatggcgaaacactattcctcggggcagggcaaccgccactggcagccattacaaattattgcgtaa

SEQ ID NO: 215155 - DNA, 801 bp, Klebsiella pneumoniae
atggctgaacgcatgacctttccgatgtatgccatccaccgtcaacagacccaggccctgtggcaggcggtgcagtcgctgttggccgaacgcggcgtgatggtggcgggggaccctccggcggctgaccccggggatctgctggctcactggcgccagccgacgctgttgctgagccagacctgtggctacccgctggtgacccaattgccggaggtgcagacggtgggctgcttccactacgctgcgcccggttgcgaagggcgccgctatcgcagcctgctggtggtccgcgaagcggatagccaccggatgctgggggactttttgggccgtcgggcggtgtgcaatgccgagcactcgcagtccggctacaacgtactgcgtaaaatggtcgcgccgctctcccgggaggggcgttttttttcagcggtgatgttcagcggcagccatcgacagtcgctgcgcgaactgcagcaggaaaacgccgatatcgccgccatcgactgcgtgacctacgcgctgctgcagcgctatcagccgcaggctctggctggcctggtggcgatcggctggagcccggccgcgccagggctgccgctgatcaccgccggcgtcaccccagcggcaacgctgaatagcctgcgcgaggcgctccagcagctggtaagcgatgatcgctatcgttccctgtgcgacgccttgctgatctgcggctatagcgatatgtcgcgggaggcctatgcgccgctgctggcgtggcgggatgaggccgcggcgctgggggtcagccagctatag

SEQ ID NO: 215156 - DNA, 1014 bp, Klebsiella pneumoniae
atgaggcaacacggcaaggtatcggaagtgacggaaaagaagacggctgtctatgtggatgaccaacagcgcatcctgatcagccagctggcgcgcggctggctgtggcgcagcgagctgccgacctggctgctgattgtgacggtttacggcggctggtttgcctgcgtggcgggctggcggacgctgggactgtttccggccacgctgctgttgatctggtttaccgcctggtatatgtccttacagcatgagctgatccatgggcatcccacccggctggcatggtttaaccagctgttggggacgctgccgctggcggtctggtatccctatggcgtctaccgcgacagccacctggcgcaccatcgcaaccatctgctgacgcaccctgaggatgaccccgaatcgtactacgtaacggcggaaagctggcagcgcttctcagcctggcagcgccgccttatccacctgcgcaacaccttctgggggcgtctgctgctggcgccgatgatggatattattcacaccctgaacagcgcgctgtgggctttccacgagggcgaccgccgcgctatcgccatgtggagtctgcatctgttgctgctgacgggcctgctgacctggatggcggcgcagggtttttctccgctgtggtttgtgctggcggtgagctacccggcgctggccctgaccaaagtacgctcttttctcgaacaccgcgccgcggatgacccgctggcccgctcggtgatcaacgaggccgggctcccctggcgggcgctgttcctcaatctcaactaccatgcggtgcatcatgatctgccaggggtcccctggtacgctttacgtcaactgtatctgcatcgccaggcggcgtatctgcagcgtaatcaggggttcctggtgcgcgggtacggcgagtggcgacgccattttagccgccgggcggtggcggtgaacgcccatccgggctttggcgagcaggcgcaggcgggaggagaacatggctga

SEQ ID NO: 215157 - DNA, 816 bp, Klebsiella pneumoniae
atgaaactggtcatcgatcatctcacccgctatggctacgatgaagaagtgaagttttccacccagtatctgcgcctgacgccgcgcagtaccgcccggcagacgatcaccgcctggacgctgaccctgccggacggcgcggcggtgaccactaccgacggctggggcaatgtgctgcatgtgctgacgctggataacccgcacaaggagatcaccatccgcgccagcgggattgtcgatatcgccgacgaaggggaggagacgtgtgatgaagaggccgagctgctgtcgccgctggtttttctgcgctgtacgccgctaacccgcgccgatacggcgatccgtgagtttgcccagcgcctctatcgtcccgatgcggcggaagagagtctgaatcaactgatggcggatctgctgttaagaatgccatactcccccggcgcgacccaggtgcaggactccgccgccgacgccttcgcccgcgcgaagggggtgtgccaggatcatacccatgtttttctcgcctgctgccgcgcgctggagatcccggcgcgctacgtcagcggctatgtctacagcgataacgcccagcatgtggcgatgcatgcctgggcggaagtctggctcgacggccgctggctgtcgtttgatatcaccaataatacccgtcgcctgaatcagcatttacggctggcgaccgggctggattatctcgacgcctgcccggtacggggcacccggctgggcggcggcggggagattatgttaactaacgctgaagtgcgcgaacacagccagcaggcgcagcagcaataa

SEQ ID NO: 215158 - DNA, 930 bp, Klebsiella pneumoniae
atgctaagtcgtacggcgagtgaactgttctggatggcccgctatctcgagcgggcggagagctacgcccgggtgctggacgtgacctggaaattatcgatgatcccccgccacagccagcagtcgcgggatctggcgctgccgctgaatttgtcgatgacccacgagttgtttcaggcgcgccatgcccgctttaccatgagcaatctgctcaacttttttgcccttgatggcaacaacccctgcagtatttacagctgcgtggagatggcgtggaacaatgcgcacgccgtgcgcggcagtctgtcggccgaagtgtgggagagcatcaatgccacccgcattgaactgcgaagcctgcgccagcaggggctgggcgagctggggagcgatggcttttttgagtgggtgaaagagcgggtgcatctgtttcgcggagcggtgataggcacgctgctgcgcaacgacgcgctgagctttatcggtatcggcaccctgattgagcgcgccttcgccaccacccagctgctgctgattaaggatcaacagctgaccaacgatccggacccggtgcgggaatactaccggctggataccctgctcaatgcggtcagcgcccgcgaagcctacaacagcctctaccgccagccggtcagtcgcgaaacggtgatggagctgctgatcctgcgcaacgatattccgcgttcgctgcgcgccagcattgccgatctggtgggcgagctggagaagatcgctaacgaccgctcctatcaaccgctgcgcctcgcccatcagcttaacgttgatctgcgcttcagcacccgtgacgacctggcgcaggcggacctgcagaccacccttaacgggctgctggcgagaattaacgcgctgtccgacagcatcagacaaacctatctggaggccttatga

SEQ ID NO: 215159 - DNA, 1011 bp, Klebsiella pneumoniae
ttgtcagtggctcgctttaaaatagggggaaatcacaacgaggtgtttatcgtgacagacaatagcctgcattcatccggcgtgctagcgccgcgctcgcatcttattgccgatctggtgatgggcagattgacacctgcccccatctggcggcaaaaaaattaccgctttaagtttttgctgcgcacggccttattttataacgccaccagagcgatgctggaagcgctcagcgctcgggatgattttaatcagctgctggccgcgcaggctacgctgccgggcaaagtacaccgtcaatatctgacccgcgatctcaacgcctggcagcgggcggtggcggtaatcaaccattatcgctatatcgacaccctacgcggatcgcggctggcgcacgctatgaccgcggtgtctgaggtcccgctgctgacgttaaacggaaaagaggaccgccggtttactctttatgcctcctcggcaggcaaagccgaacgtgagggtgaaaccactctgtggctgcgcgacagcgaccacaccctgctggccagcgccaccttcagcgtaacccgtgatcacgatgcctggcagctggttatcggcggtctgcaggggccacgacgtcacgtttctcatgaggtgattaagcaggcgactcgcgcctgctacggcctgtttccgaagcgcctgctgctggagtttatctggcagctggccgcgcgcagccaaatcgcggctatttacggcgtcagcgataacggtcacgtgttccgcgccctgcgctatcgcctgagcaaaggccgccatttccacgccagctacgacgagttctggcagtctatcgacggccacccggaaagcccctggcgctggcggctaccgctatgtctggaaagaaaatcgctggagagtatcgccagtaaaaaacgtgctgaatatcggcggcgattccagctgctggatcagctgacggagcaggtggcaatattgacgcagcggcatgccggtgactaa

SEQ ID NO: 215160 - DNA, 1146 bp, Klebsiella pneumoniae
atgaaaagaaaagtactggcactcatggttccggcattattaatggctagcgccgctaatgccgccgaaatctataacaaaaacggtaataaactggacctctacgggaaagttgacggcctgcattacttctctgacgacgcttcagaggacggcgaccagacctatgttcgctttggtctgaaaggcgaaacgcagattacttccgagttaaccggctacggtcagtgggaatacaacattcaggcgaacaccagcgaaaaagaaggcgcgaattcctggacccgtctcggctttgccggcctgaagtttgccgactacgggtcgctggactatggccgtaactacggcgtggtctacgacattgaatcctggaccgatatgctgccggaattcggcggcgatacctacacccagaccgacgtttacatgaccggccgtactaacggcgtggccacctaccgtaacagcgatttcttcggcctcgtcgacggcctgcatttcgccctgcagtatcagggtaataatgaaaacgccggttctggcgaaggcactaataacggtgggaaacgtaagctggcgcgggaaaatggcgacggttttggtatctccagctactacgatctcgatatgggcatcagcttcggggcagcgtattcgtcttctgaccgtacccataaccagctggcggccgcgcgtagcagccagcgttatgccaacggcgataaagccgatgcctggaccgtcggcgcgaaatatgacgccaataacatctatctggccgccatgtatgctgagacccgcaacatgaccttctatggcaacgatagttttggcggaattgccaacaaaacgcagaacttcgaagtggtcgcgcagtatcagttcgacgactttaatttaccgctgcgtccgtccgtcgcctatctgcagtcgaagggtaaagatctctacgcctattctcgctacggcgacaaggatctggtcaagtatgtcgacgtgggcatgacctactacttcaacaaaaatatgtccacctatgtggattataaaatcaacctgctggatgaagacgaccgcttctacaaaaacagcggtatcgcgaccgatgatatcgtcgccctcggcctggtctatcagttctga

SEQ ID NO: 215161 - DNA, 1635 bp, Klebsiella pneumoniae
atgtcgctaattgctatcgtgctggtctttatcatggccatcgtggtgaccgtgttcctgtcccatcttctgcccgttaaagtgccgctaccgctgatccaaatcgccgcgggcgccgcgctggccgccagtggctttcaggtcgattttgacccgcatatttttttactgctgtttatcccgccgctgctgttcctcgatggctggcgcatccccaaagacgcttttttccgcgatatgaagccgattttatcgctggcgataggcctggtgatggtgactattctcggtattggcctgtttattcactggctgatcccggctatcaccgtggcggcagggttcgctctcgcggctattctgtcgcctaccgatccggtggcggtatcggcaatgaccgccagctcgccgcttccctcaaggatggcgcatattctcgaaggggagtcgctgttaaatgatgcttcagggctcgtcgcctttaatttcgccatcgccgcggtgctgaccggcagcttctccccgggagacgcggtggtgaaatttttcctgatggccttcgggggcatcctcagtggcctcgtggtggtgtgggtcaccggcaaatgtaataactttctggttcggcgcacccgcgaggagccagccatccagatcctgatcagcctgcttatccctttcgccgcctacctgctggccgaggcgttccatgtctcgggcattcttgccgccgtcgccgccggcattgcgatgcattatgagcagctgtcggggccccggcttccggcgacgcgcatgaaaagcagcgcggtatggtccatgctgcagaccaccctcaacgggatgatctttctgatgctgggcgagcagctgccgcgcatgctcaggacgctgccggcggtagccagccaggccggcgtctcttcgccctggtatctgctgctgtacgccgtggccatcaccctggcgctcggtctgatgcgcttcgcctgggtatggctgtcgatgaagctgacaatttttcgccgtaaacgtcggggcaaggccatcaccgtccgtccacgattcagtatcctcgccgtcatggcgctggcgggagtgaagggctctgtgaccctcgccggtattctgacgctgccggtggtgctggccgatggttcgccgttcccgggccgtgaactactgatctttctttcgatggcggtgatcctgatgtcgctggtggtggcggctatcggtctgccgtttatgacccgttatcttgccgatgatctaccgcatgacaccggtaaggacgacattggcgccgtgatgaccgaggtggccattaaccgtcttaacgcgctactggacgagccggtggaggatcccagtgagcaggccctgcgggccgatgccggcaatatgctgctcgaaacctatcagcggcggcttcactataacgacaatgacgaggggcaggatgtcgggctggagctggctaagcgcgccaggctggagaaatatatgcaacgagaggtcattatcgcccagcgtcaggagctgttccggctgcgccgcgcccataacatcagcgatatcactttttatgaggtgctgcgggagatagatctgaaggaagagagtttacgctaa

SEQ ID NO: 215162 - DNA, 1623 bp, Klebsiella pneumoniae
atgaagcatctatttcgacactggcgaacgtcgggcgccgttatcggctcactgctgaaaaaagggagcattgcggtactggcgctgctggtggtctttctcgccgggcggatctatgagtcccagcgcggcccggccctgcatcgctggcatacctggagtggcaacgagatgtcggccgaagagatcgaccaggcgacctttgcccagtatctggcgcgggagaagacgattttcgccgatctccagcgtgaggtgacagaggctttgccggaggaagataaaaccccggtcaaccgcttttatcgtcacagccgggtctggccggggcagtttaagcaggactggaaccgttcttttgtgctgatgccgctgggcaagccgcgcggcagcgtggtgctcctccatggcctgaccgattcgccctacagcgtgcgctatctggcgcaactctggcagcagcggggttatgtggcggtggcgccgcgtttgccgggacacggcaccgcgccgggggcgttaacggcggttgactgggagacctggctggcggcgacgcgtctggcggtacgcgaagcgacccgccttgccggggcggacgtgccgctgcatctggtcggctactctaacggcggcgcgctggcgctcaagtatgccctcgatagcctggaagacaatcacttgcgccagccgcagcagatcattctgctgtcgccgatgatcggcgtgaccgcgtttgcccgtttcgccggcctcgccgggctaccgtccgtcttcccggcgttcgcccgcgcggcctggctgaacgtggcgcctgagtttaatccgttcaagtacaactcctttccggtcaaggcggcgagacaatcgtggttattgagccaggcgctgcagcagcagattatccgcgcggcccggcagggcgagctgaacgcgctgccgccgatcctcacctttcagtcggtgatggattccacggtcagcacccgcgcggtggtggagtccctgtatcgctatctgccggataacggcagcgagctggtggtgttcgatattaaccaggcggcggatctccgggtcctgtttcgccctgcgctctatgcggcggtgaatacgctgctgcccccggcgccgcgggcctataccaccacggtggtgaccaacgcgacggcgcacacgctgcagaccgtcgcccggaccacgctggcccaggaacgggaagagcatcgttatcctttacacctggcctggccggcggatatgtactctttgtcgcatgtggcggtgccgtttcccctgagcgactcgctgtatggtcgcgagccggacgagaagaaccgctacggcattagcctgggcaccatttcactgcgcggagagaccgggacgctgagcgtggggctggagacgttaatgcgcgtcacctccaatccattctttccatggatgatgacgcgcgtcgatgagcgcatcgcctgcggcgaacaggcggcggtggcggcctgcctgaaagcgcaggccagagcagaggcgttaaaacaggatcaggtgcagaacggtacgcagcaggatgccgacgatcgccgcgggagccacgaagcggaacaggcggacaaaccgtga

SEQ ID NO: 215163 - DNA, 1104 bp, Klebsiella pneumoniae
atgaacctcagacaacagcaacagcaggcgttcgatcgcagcggagaacctcttatcgtcggcaacgtcagccactgcccgctgccgccggagaccctcgccgcactgggccccgattccccctatgtggtgcaggtatacggctcaggcctgaccggcgaggtttatcgtctgcgcatcgccggcaaggagtacaatttaaagaaacgtcgcgccgtcgccggcgttgccaacctcaacggccagctgtcgtttttaaatgaggtacagcgtcggcaggcattgcaacagctgaaggatgacccggtcaccgcgccgcgcttcacccacatcgtcccaacgctgtatgccgattatcgcctcggcatcctgctctccccctggatcgatggcgagccgatacaccagttaaccccgccgctgatcgcccagctatttactactctggaagcctgcgaagaacaggggctgatggagtgggatctctgtagcgggaatctgctggtggaccggcaggagcagctgtggctgttcgattttggctatatgtatcccttcgacccgctgagagaattcaacagcaatggtctggccgacccgctgttccactttgtcgaacgttttgagactcgcttcttttttagctggctgatgacccggctccctgacgccgaacagcagctggcgcaatatcgcgagatgaagcggctggcggtcgaaagctaccgccggaagctggtctggcttcgcgcccggcgcgctgacccgctggtgctggctcactttcagcagttgacggcgcgctgggagtcggcgctggcggaccctgccgcgctgagccggctgtttgccgtagaggcctttcgctcacatgtgctggatattgaagacgacctgcatggtcagtcctgtaccttactcaccctgcaacacattgactgggtgataaaccagctggaacagcattatcgctttatcgccgacgaaggcggcctgttttacgataacgaagggaaatcgcagcaggcgctgctcagcagctatgcgcagaagcggcagcaggcgcagcagtacctgttgaaggccaccgccgcgaaggattaa

SEQ ID NO: 215164 - DNA, 837 bp, Klebsiella pneumoniae
atggcatttgtcaccacccaagacggcgtcaacatttactttaaagactggggaccaaaggaagctcagccgatagtctttcatcacggctggccgttaagcgctgacgactgggataaccagatgttatttttccttgccgaagggttccgggtcatcgctatcgatcgtcggggtcatggccgctccgatcaggttagcgaggggcacgatatggaccattacgcggcggacgtttcggcggtggtggaacatctggatctgcacaatgcggtccacgtcgggcactccactggcggcggccaggtcgcccgctacgtcgcccgctacggccagccgcaggggcgggtggcgaaggcggtgttaattagcgccgtcccgccgctaatggtgaaaaccgagcagaatccgggcgggacgccgatcgaggtgtttgacggtttccgcaaagcgctggcggcgaaccgcgcccagttctatctcgacgtcgcctctggcccgttctatggcttcaatcgtgatggagcagagatatcccaggggacgatccagaactggtggcgacaggggatgatcggcagcgctaaagcccattatgaaggcattaaggcgttttcagagaccgaccagacggaagaccttaagtcgatcactttgccggtgctggtgatgcagggagatgacgaccaggtggtgccctataaaaatgcggccatcctgcaggacaagctgctgccgaacagccagctgaaaatttatcctggcttcccgcacgggatgcatacctcccacgccgatactatcaacgccgatctgctggcgtttatccgcgcctga

SEQ ID NO: 215165 - DNA, 762 bp, Klebsiella pneumoniae
atgaatatcgcatttctgggtattgatctggctaaaaatctttttcagctctgcgggttaaaccaggccggcaaaccggtttatacgaaacgaactggccgaaaagaattgctccagacgctggcaaatattcctgcatatctgattgggatcgaagcgtccaccggggcattttactggcagcgtgagtatgagaaactggggtgcaaagtaaaggtcaccagtcctcagtatgtaaaaccctttgtccgcggacaaaaaaatgatggtaatgatgcacaggccatcgcagtggctctgatgcgaccgacaatgcagttcgtgtggccaaaaagccccgaacagcaggatatccaggctttacaccgggcaaggcagcttattgttaatcaccgcactgctacagtctgtcaaataagagggctgttacttgaccgggggatccccattggcagtgctgtctccagagctcgccgggctattcctcttatccttgaagaagcagaaaacggtctaagttcccgtatgcgcagaacaattgccgagctctatgagctctttaacgatctcgagcgtcggatccatttttttaataaggaaattgaaacagtattcaggcaatcagaagcctggcagcgtatcgccagagttaaaggtattggccctaaaacggccacggccgttgttgctgctattggcaaaggaactgaatttaagaatagccgccactttgctgcatggctgggtctggttccactgtaa

SEQ ID NO: 215166 - DNA, 342 bp, Klebsiella pneumoniae
gtgcgtaatccctcgccactggccacgccggaagcgctgaaccagagctggtctgttgattttatgcattatgccctggtctgtgggcgtcgttttcgcacgttcaatgtcgttgatgactttaaccgtgaggcgttgtcgattgaaatagatctgaatctgccagctccgcgagtggtcagtgtgctcgacaggatcgcggcaaaccgcggttatccggtcatgctgcgtatggataatggtccggaatttatctctctggcactggctgaatgggcagagaagcatgcagtaaaactggagtttatccagtcgggtaagccgacgcagaacgctgaatga

SEQ ID NO: 215167 - DNA, 267 bp, Klebsiella pneumoniae
atgcgtaaagcccgttttactgagcatcagatcatcgctgtgattaagtcggttgaagccggacgaactgttaaagatgtctgccgggaggccggtatttctgaagccaccaactacaactggaagtccagatacggcggcatggaggcttctgatattaaaaaaatcaaggatcttgaggacgagaaccgacgtctcaaacagatgtttgccgacctgagtcttgagaaccgggcgctgaaagacgttatcgaaaaaaagctttaa

SEQ ID NO: 215168 - DNA, 228 bp, Klebsiella pneumoniae
atgaatatgacgaaaaaaggcgacaagcatctgcggacactttttattcatggtgcccgcgctgtcgtcagggttgccacgaataacaatgatggccatatgaatcagtcggttaaccagttaaaggaacggcgcggatttaataaaacgaccgtggcggtcgctaacaaaaacgcgcgaataatctggtcgatgctgagaaatgagaccgagtatcgggtagtgtga

SEQ ID NO: 215169 - DNA, 1812 bp, Klebsiella pneumoniae
atgtctttgtcgagaagaaaagtcttaaattattttataccatcatttgttatagccttgctcgctaaaaaaacatatgccagcaataatttaaaagagaatgttaaatctgaagtatctcaagaagaaaaatattcaggaatgcaggtttcaaaggatgttgataattttttgcataataagttgtcatccttggatggctcaaaaatgttaggatacaaaaatactagattccgagggacatacctacttcaattgtctagtatagaatctaataatatatcattacttgagtttataccacctgaattacataacagcatcagagaatttacatgttatgatgatttgactcaatatattcaaaaagctatcgatgcaatctttgccatcggaggtggtgttatcacttgtcctcctggacaatattatatgaatataaaaaccaaacctggcgtaatattaatgggggctcgaatgaactcggtaagaaggacattaccttggagttttgaaacgaaagtgacgccattctcaactcgctttagaaatttttcaaaaaatgactgggtaatttcatcggaaacagaattgcaagatgacaaatcctctaaatgtttcggtttgattggtatcgattttgatgctaaagatgctaacaacagtgctggcggtgtccgtttgcgtggtcctgagttttgtataaagtcatgtagtttttttggcttccaagatcaaggattagaagtaagtggtaatataggattaattgaagatgtaatagcaaacgcttgtttaaaaaataaaaaaagaactcaatatgtaggaactatagaagtttctggcgcctctgactgtcatattcacagagtcgagggaaacgcacaggttattggaatgaattctattagttcttcacagccttatatatgcggaataaaaatcgttggtaataatcattatgtatctggcttgatgggagaaatgtctgagactggaatatacattgggtcatcgagtgttgtccataaagtcactaattgcagggcagataataatgctggccctgggtacataatacatggtgtaatggggaataatttacactcatataataatagtcggacaggggatgggttatactcaggatttcaaatattagatagaacttcgacattatttttgagtaattgtctttcggagacagatcgcttccctgtcgatggaacaggagaacagcgaaaacataaatatggttatgatgtggcattgatggattttccatcattacatttcaagccatggttaaatcaatgtttttcacgtggtcataaagagggttggatcaattcgcctaaaaaaaatggtgtgcaatatactcccacaattggcattttaaatttgaataaaaatattaaaaagccaatggttgatggtgtaagtgttatttgtgttggcgatgatggccctagtgagattattggctttaatggtgggatgattggccagcgtgttgatctttttttgttagaagataaagttacaacattagttagcgactctacttttaaacttaataatagtgatgtaaaggtagttcccgggcgtgtttatagttttataaaaatttctaatgatacatggctagaatctagttcattagttacagtaaataatgaaagaatgaatgaaaggcctcgttcaaatactactgcaggcatgatgtactttgattccgatttaaataagccgatttggcgtaatgctaataatgatggttgggtggatgctgtcgggaataatgttgattaa

SEQ ID NO: 215170 - DNA, 1425 bp, Klebsiella pneumoniae
atgatacactgtactgatttacagacttttttattccacgattatgaaaccttcggcaccagcccttccctcgaccggccggcgcagttcgccgccatccgcaccgacgcggagctgaatgtgctcggcgagcccgaagtgttttactgcaaacccgctgacgattacctgccgcagccgcaggcggtgatgatcaccgggatcacgccgcaggaagcgctggccaaaggggataatgaggccacatttgcccgccgcatccacgatctgttcacggtgccgcaaacctgtatcgtcggctataacaacgtgcgctttgatgacgaagtgacgcggaatatcttctatcgcaacttctatgacccttatgcctggagctggcagcacgataactcgcgctgggatctgctcgacgtgatgcgcgcctgctatgccctgcgcccggaagggatcgcctggccagagaatgacgaagggttgccgagcttccggcttgaacatctgaccgtcgccaacggtattgaacaccagaacgcccatgacgcgatggccgacgtatacgccaccatcgccatggcgaaactggtgaaaacccggcagccgcggctgtttgattatctctacagccaccgcaataagcgcaagctggcgacgcttatcgacgtgccgcagatgaagcccctggtgcatgtctccggcatgtttggcgccgcgcgcggcaacaccagcctggtggcgcccctggcctggcatccggaaaaccgcaatgcggtgattatggtcgatctggcgggcgatatggcgccgctgctggaactggatgccgatgccctgcgcgagcggctttacaccccgcgcgccgagcttggcgatctgccggcggcgccgattaagctggtgcatttaaataaatgtccggtactggcccaggccaataccctgcgcccgcaggatgccgaccggctggggatctctattcagcgctgtctggagaacgcccagctgctgcgggcgaatccgcaggtgcgcgagaaggtagtggcggtctatgctgaagccgaacccttcgtgccgtccgaaaacgttgacgcccagctgtacaatgggttctttagcgatgccgaccgcgcggcgatgaaaatcgtgctggaaaccgaaccgcgcaatctgccggcactggatatcaccttcgccgaccagcgtatcgaacgcctgctgtttaactaccgggcgcgcaacttccccggcacgctcgatgaacatgagcagcagcgctggttagagcatcgtcgtcaggtgtttacgccggcgtttttgcaggcctatgccgatgagctgcaaatgctgtatcagcagtatgcggatgataaagagaagctggcgcagctgaaggcgctgtggcagtacgtgcaggatattgtctga

SEQ ID NO: 215171 - DNA, 1896 bp, Klebsiella pneumoniae
atgaacaatagcgttaaaatctataccagccaccataagcctagtgcttttcttaatgctgcaattatcaaacctctgcatgtcggcaaagctaattcttgtaatgaaattggttgtccaggagatgacactggcgataatatttcctttaagaatccgttttattgcgaactaactgcgcattattgggtttggaaaaacgaagagctggcagactatgtcggtttcatgcactatcgccgtcatcttaatttttccgaaaaacaaactttttctgaggatacctggggggtcgtgaaccatccatgcattgatgaagaatatgagaagatctttggattaaacgaagaaacaattcaacggtgtgtcgaaggtattgacatcttgctgcccaaaaaatggtctgtcactgcggcgggaagtaaaaataattacgatcactatgaacgaggtgaatacttacacattcgtgattatcaggctgccattgccatcgttgaaaaactatatccagagtatagcgcggcaataaaaacgtttaatgatgccagtgatggctattacacaaatatgtttgtcatgcgcaaagatatttttgttgactattctgagtggctcttttccattctggataatctcgaaaatgccatctcgatgaacaattataatgctcaggaaaaacgcgttattgggcatatagcagaacggctgtttaatatttacattattaagttgcaacaagatggtgagcttaaggtaaaagaattacagcgtacttttgtcagcaatgaaacattcaatggtgcactgaatccagtttttgattctgcggttccagtggttatcagtttcgatgataattacgcagtcagcggtggtgcattaattaattccattgtccggcatgcggataaaaataaaaattatgatatcgtcgtactcgaaaacaaagtaagctatttgaataaaacgcggttagtaaatctaacctcggctcatccgaatatttctcttcgtttttttgacgttaatgctttcactgaaataaacggtgtgcatacccgagcgcattttagcgcatcaacgtatgcccgtctttttattcctcaactgttcagacgatacgataaagtcgtatttattgattcggataccgttgtaaaggctgacctgggtgaactgcttgatgtccctctgggcaacaatttagttgcagcggttaaggatatcgtcatggaaggttttgtaaaattttctgcaatgtcggcatcagatgatggcgttatgccggcaggcgaatatttacagaaaaccttaaacatgaataaccctgatgaatattttcaggcagggattattgtttttaatgtcaaacaaatggtcgaagaaaatacttttgctgaattgatgcgggtattaaaggcaaaaaaatactggttcctcgaccaggatatcatgaataaagtattctactctcgagtcacatttctgccattagagtggaacgtttatcatggtaatggcaacacggatgatttcttccctaatcttaagtttgcaacgtatatgaaatttttagcagctcgcaagaaacctaaaatgattcattatgcgggtgagaacaaaccatggaataccgaaaaagtcgatttttatgacgactttattgaaaacatcgctaacactccatgggagatggaaatctataaacgtcagatgtcgttagcggcttcgattggtttaacccatagcgagccgcaacaacaaatcttgttccagaccaaaatcaagaacgtactgatgccttatgttaataaatatgcaccaataggcacgccaagaagaaacatgatgactaaatattattacaaagtacgccgtgctattcttggataa

SEQ ID NO: 215172 - DNA, 1167 bp, Klebsiella pneumoniae
atgaaaattactatttccggtacaggttatgttggtttatcgaacggtgtcctgatcgcgcaaaaccacgaagtggtggccctggatatcgtacaggccaaagtggatatgcttaaccagaagatctctccgattgtcgataaagagattcaggaatatctggcagaaaaaccgttaaatttccgtgccaccacggataagcacgacgcgtaccgcaatgccgactacgtgatcattgcgacgccgaccgattacgatcccaaaactaactacttcaacacctctacggtggaagcggttattcgcgatgtcacagagatcaacccgaacgcggtaatgatcattaaatcgaccatcccggtggggttcacccgcgacatcaaagaacgtttagggattgataatgttattttctctcctgagttcctgcgtgaaggacgtgcgctgtacgacaacctacatccgtcgcgtattgtcatcggtgagcgctccgcgcgtgccgaacgtttcgctgatctgctgaaagaaggcgcgatcaagcaggatatcccgaccctgtttaccgactctaccgaagcggaagcgatcaaactgttcgctaacacctatctggcgctgcgcgttgcctatttcaacgagctcgacagctatgctgaaagccaggggctgaacagcaagcagattatcgaaggggtatgcctggatccgcgtatcggcaaccattataacaacccgtcctttggctacggcggctactgcctgccaaaagataccaagcagctgctggcgaactacgaatcggtcccgaacaatatcatcgcggctatcgtcgatgccaaccgtacccgtaaagactttatcgcggattctattctcgctcgtaagccgaaagtagtgggtgtgtatcgcctgatcatgaagagtggttcggacaacttccgtgcctcttctattcagggcattatgaagcgcatcaaggcgaaaggtattccggttattatctatgaaccggtgatgcaggaagatgagttcttcaactcccgtgtcgtgcgcgacctgaatgccttcaagcaagaagctgatgtgatcatttctaaccgtatggcggaagagttggcggatgtggcggacaaggtctacacccgcgatctgtttggtaacgattaa

SEQ ID NO: 215173 - DNA, 1371 bp, Klebsiella pneumoniae
atgacacagttaacatgctttaaggcttatgacatccgtggtgaactgggcgaggagctgaacgaggacatcgcctaccgtatcggccgcgcctacggcgaatttctgaaacccgggaagatagtggtggggggcgatgtgcgcctcaccagcgagtcgctgaagctggcgctggcccgcgggctgatggacgccggtaccgacgtgctggatatcggcctgagcggcacggaagagatttacttcgccactttccacctcggggtggatggcggtatcgaggtgacggccagccacaacccgatgaactacaacggcatgaagctggtgcgcgagaacgcgaagcccatcagcggcgacaccggcctgcgggatatccagcgcctggcggaggagaacctgttcccgccggtggacccggcgcgtcgcgggaccctgcgccagatttcggtgctgaaggagtacctcgaccacctgatgggctacgtggacctggcgaacttcacccgtccgctgaagctggtggtgaactccggcaacggggcggcggggcacgtaattgatgaggtggagaaacgcttcgcggcggccggggcgccggtgacctttatcaaggtgcatcaccagccggacggccatttcccgaacggtatcccgaacccgctgctgccggagtgccgccaggacaccgccgacgcggtgcgtgcgcatcaggcggacatggggatcgcctttgacggcgacttcgaccgctgcttcctgttcgatgacgaggcgtcgtttatcgaggggtactacattgtcggcctgctggcggaggcgttcctgcagaagcagccgggggcgaaaatcattcacgacccgcgtctgacatggaacacggtggacatcgtgacccgcagcggcggccagccggtgatgtcgaagaccgggcatgcgttcatcaaggagcggatgcgccaggaagacgccatctacggcggggagatgagcgcgcaccattacttccgcgacttcgcctactgcgacagcgggatgatcccgtggctgctggtggcggagctgctgtgcctgaagaacagctcgctgaaatcgctggtggcggaccgccaggcggcgttcccggcgtcgggggagatcaaccgcaagctgggaaatgcagcggaggcgatagcgcgcatccgggcgcagtatgagccggcggccgcacacatcgacacaacggacggtatcagtattgaataccctgagtggcgctttaacctgcgcacgtccaataccgagccggtggtgcgtctgaacgttgagtccagagcggatactgcgttaatgaatgcaaaaaccgaagagattttagctcttctcaagtaa

SEQ ID NO: 215174 - DNA, 1416 bp, Klebsiella pneumoniae
atgttgcttcctgtgatcatggctggtggtaccggcagtcgtctctggccgatgtctcgcgagctttacccgaaacagttcctccggctgtacgggcagaactccatgctgcaggaaaccatcacccgcctctcgggccttgaaatccatgaaccgatggtcatctgtaacgaagagcaccgcttcctggtggccgaacagctgcgccagctcaataagctgtccaacaacattattcttgagccggtcgggcgcaacaccgccccggccatcgccctggcggctcttcaggccacccgtcacggcgacgacccgctgatgctggtcctcgccgccgaccatatcatcaataaccagccggtcttccacgacgccatccgcgtcgccgagcagtatgccgatgaaggccatctggtcaccttcggtatcgtgccgaacgccccggaaaccggctacggttacatccagcgcggcgtggccctcaccgacagcgcccacaccccgtaccaggtggcccgcttcgtggagaagccgaaccgcgagcgcgccgaggcctacctcgcctccggggagtactactggaacagcggcatgtttatgttccgcgccaaaaaatacctctccgagctggccaaattccgcccggatatcctcgaagcctgccaggtcgcggtgaatgccgccgacaacggcagcgacttcatcagcattccgcatgacattttctgcgagtgtccggacgagtctgtggactacgcggtgatggagaaaaccgccgacgcggtggtggtcggtctcgatgccgactggagcgacgtcggctcctggtccgccctgtgggaggtcagcccgaaagacgggcagggtaacgtcctcagcggcgacgcgtgggtgcacaacagcgaaaactgctacatcaacagcgacgagaagctggtggcggccatcggcgtggagaacctggtgattgtcagcaccaaggacgccgtgctggtgatgaaccgcgagcgttcccaggacgtgaagaaggcggtcgagttcctcaagcagaaccagcgcagcgagtacaagcgccaccgcgagatttaccgtccctggggccgctgcgacgtggtggtccagaccccgcgcttcaacgtcaaccgcatcaccgtgaaaccgggcggcgccttctcgatgcagatgcaccaccaccgcgccgagcactgggtcattctcgccggcaccggccaggtgacggtcaacggcaagcagttcctgctgaccgagaaccagtccacctttattccgattggcgccgagcacagcctggaaaacccgggccgcattccgctggaagtgctggagatccagtcggggtcgtacctcggcgaggacgacattattcgtattaaagaccagtatggtcgttgctaa

SEQ ID NO: 215175 - DNA, 1407 bp, Klebsiella pneumoniae
atgtccaagcaacagatcggggttgtcggtatggctgtgatggggcgtaaccttgcgctgaacatcgaaagccgcggttataccgtctccgttttcaaccgctcccgtgaaaagaccgaagaagttattgccgaaaatccaggcaagaagctggttccttactatacagtacaagagtttgttgaatccctcgaaactccacgccgtatcctgttgatggtgaaggccggggctggcaccgacagcgccatcgattccctgaagccttacctcgataaaggcgacatcatcattgatggcggcaacaccttcttccaggacaccatccgtcgtaaccgtgagctatctgccgaaggttttaactttatcggtaccggtgtttccggtggtgaagaaggggctctgaaagggccttccatcatgcctggtgggcagaaagaagcctatgagttagttgctccgattctgaagcagattgctgcggttgctgaagacggtgagccatgtgtcacctatatcggtgctgacggtgctggccattatgtgaagatggttcataacggcatcgagtatggtgacatgcagctgattgctgaagcttatgcgcttttgaaaggcggtctggcactttccaacgaagagctggcgcaaaccttcaccgaatggaacgaaggtgagctaagcagctacctgatcgacattaccaaagatatcttcaccaagaaggatgaagaaggtaagtacctcgttgatgtcattcttgatgaagcagcaaacaaaggtaccggtaagtggaccagccagagctcactggatctcggcgaacctctgtctctgataaccgagtccgtatttgctcgctatatttcttcgcttaaagaccagcgtgtagccgcgtcgaaagtgctgagtggtccgcaggcccagccggccggtgataaagctgaatttatcgaaaaagtgcgtcgcgcgttgtacctcggtaaaatcgtctcctatgctcagggcttctcccagctgcgtgctgcttctgatgaatacaactgggatcttaactacggcgagatcgctaagattttccgcgctggctgcatcattcgtgcgcagttcctgcagaagatcaccgatgcttatgcgcaaaacgctggcattgctaacctcctgctggcaccgtacttcaaacagattgctgatgactatcagcaggcgctgcgtgatgtagtggcgtatgccgtacagaatggtattccggtaccgactttctctgctgcaattgcctactacgacagctaccgttccgcagttctgcccgctaacctgattcaggctcagcgtgattactttggtgcgcacacctataagcgtactgataaagaaggtgtattccataccgagtggttggaataa

SEQ ID NO: 215176 - DNA, 1404 bp, Klebsiella pneumoniae
atggcaaccttgtatcatcggactcgctcgaatgcgaatgcttctttgatttcaatggctcaacgcttttccgatgtggtcataatctttttgggattatatttggtatgtcttattaattcagtcccattcgaataccaacatgccctcatgtctttactatcgttggtcattttccagatgataggtggtataactgatttttatcgttcctggcgtggtgttgcgttttcgacagagtatattttaatctttaaaaactggacgcttagcttattaattgctttaggacttttatctttagactcatcgatcgatactcgttttttatttttcattcagtggtacttgctagttgatgttggtttttttgtatgtcgctcagttatcagattgatctcagggttgcttaggaaatttggctataacacccgaagagtggctgttgtcggctcattacctgcaggaattaatttgctaaaaagctttattgagcagccttggctaggcttcgttgttaaaggtatttacgataatataaaattggatagtgccgaatatgacaatgtaccttatgctggaaatatagataagcttattcaggaagcccgtgagggaaaaatcgatcgtatttatattgcgatgagcatgcgcgatgagtctaaaataaaggatgtggttaggcaattaacggatacaacttgttctgtattgctaattcctgatattttcacttttaacatcctccagtctcgtacagaggaaataaatggcgtgccggttgttccattatttgattcaccgctgaatggcattaatatggtctttaagcgtcttgaagatataatcgtatcatctttgattcttattctgatatcaccaattcttctggttatagctactgctgtaaaaaccacgtcgaaagggccggttattttccgccaggtacgttatggaatggacgggaaacctataaaagtctggaagtttcgctcgatgactgtgatggaaaacgacgataaagttattcaggctacaaaaaatgatattcgtgtgactaaagtcggcaagtttttacgcagcacttccttagacgaacttccgcagttctttaatgtactttttggtcagatgtccgttgtaggacctcgaccacatgcagtttctcataacgagcaatatcggtccttaattcaagggtatatgcttcgtcataaagttaagccaggtatcacaggcttagcacaaattaatggttggcgtggtgaaactgatactttagaaaaaatggaaaaaagaatcgaatatgatttgttatatatcagaggttggagcatttggttagatctaaaaataatattccttactgtttttaaaggatttattaacaaatctgcttattga

SEQ ID NO: 215177 - DNA, 1215 bp, Klebsiella pneumoniae
atgaaattacttgtatatggcatcaattatcgtcctgaattaactggtattggcaagtatagtggtgaaatggtgaagtggtttgttgataatggtcttgatgttagagtcattactgctccgccatattatcctgcatggaaggttgcaagtgattattctggatggaaatacacgaaagaaaaacatccacaaatagtatacagatgtcctctttatgtacctaataaaccctcaacaataaagcgtttattacatttgtccagttttgcattcagttcattttttcctcttgtaatgcaggcgcgttggaaacctgattatattatttgcgttgtacccacgttattttatgtgccaggggctctgctattaagaaaactaactcgtgccaaggtaatcattcacatacaggatttcgaggtcgacgctatgctcggcttgggtatggctaaaaaaggtgtgtttgctacatttgccaaaaagtttgaaaaatggtgtctaacgtctgcagataaagtgtcctctatttctaaaacaatgttgttgaatgcttctgataaaggtgtgccacaaagtaatctgatatttttccctaactggtcagaactagaaagattcaaaaatgtcaaaagtgagcagtcagtcaagctgaaagaagaatttggaatagctgaggaacaaaaagttattctttactcaggcaatataggtgaaaagcaggggcttgaaatcgttatcagtgctgcacaaaaaatgacagcgaataactatgttttcttatttgttggccaggggggggggaaggaaaaattagaaagaatgagcgctgaactggatttgaaaaatgttctttttaaacctttacaaccttatgagctattaccagcactattaaatattgccgattgtcatctcgtcgttcaaaagaaaggcgctgctgatgcggttctgccttctaagcttacgaatatcctcgctattggtggcaattctgttataactgcagaggaaagtactgagcttggtcagttatgcaaaaataatcctggtatcgcacaatgtgttgagcctgaatctgttgatgctctcatttctggtattgaaaaatgtttgctaatgccacgtcacaacgatgtagcgatcaaatatgcaaatgcctcacttgatatgaataatgtcctttcaaaattcatagtggatataaaaagataa

SEQ ID NO: 215178 - DNA, 459 bp, Klebsiella pneumoniae
atgtttttagatgataatacatttaaaaatgtaataaggaatacaccactaatttcaattgatttgatcattcaaaatgagaaaggtgagtatttagttggtaaaagaaacaaccgccccgcaaggggcttttggtttgttcctggagggcggatacaaaaagatgagtcattggacaatggtttcgccagactgacccaaaatgaaattggcataaaaatgatacgaaatgaaagtacttttcttggtgtctttcaacatttctatgatgacaatttttttaatactgagttcagtacacactatatagtattggcgtatgaaatatctattatctccagcggtcttgtatttccacatgagcaacataatgaatatcactggatgagggtggatgaaatactaaataatgatttagtacattttaatactaaagcttattttatggatgttgcttag

SEQ ID NO: 215179 - DNA, 969 bp, Klebsiella pneumoniae
atgacaattaagaagagagtttttgttgctgggcataaaggtatggttggttcagcaatcgtaagacaattgaaaaacagagacgacattgagctcgtactgcgttcacgtcaggagctcaacctgcttaatgctcaagacgtaaataattttttcgctaatgagcgtattgacgaagtgtatttagctgctgcaaaagttggcggaatagttgcgaataatacttatcctgctgattttatatatgaaaatattctcattgaagctaatatcatacatgctgcacatgtaaatgatgtctataagcttatgtttctaggttcatcttgtatttatccaaaatatgctaagcaaccgattagtgagtccgaattactacaaggaacacttgaatcaacgaatgaaccttatgctatagcaaaaatcgctggtattaaactctgcgagtcttataatcggcaatataatcgcgattatcgttcagtaatgccaactaacttatatggagaaaacgataatttccatccttctaattcgcatgtaattcctgcattactacgccgttttcatgaagcaaagttagaaggtctaccacaagttgttgtatggggtagcgggacaccgatgcgcgagtttctgcatgttgatgatatggctgctgcatctatttatgtcatggagcttgataaagcactttggcaggagcaaacacaaccaatgctgtcacatattaacgtaggcactggcgttgattgttctattaaagagttagcggaaacaatttcaaaagttgttggttatcaaggggaggtcgtttttgattctaccaaacctgacggcactcctagaaagttattagatgtttcgagattggtaggtttaggctggaagtatcagattaaccttgaagcaggcttggcacggacttatgaatggtttttaagaaatcaacaaagcttccggagttaa

SEQ ID NO: 215180 - DNA, 1119 bp, Klebsiella pneumoniae
atgaaaaaggttgcactaattacgggcgttactggtcaggatggttcttatcttgcagagtttttactcgagaagggatatgaggttcatggtattaaacggcggtcttcttcatttaatacagatcgtgttgatcatatttatcaagatccgcactcctcaaatccgaagttccatctccattatggcgatttaactgatacttctaacctgacgaggcttttatcagaaataaaacctgatgaggtctacaacttaggagctatgagtcacgttgctgtttctttcgaatcaccagaatatacagcggatgttgatgctattggtactcttcgtctactagaggcaattcgttttttggggcttgagaaaaaaacccgtttctatcaggcatctacttctgaactatacggtttagtgcaggaaattccgcaaaaagagacaaccccattctatcctcggtcaccatatgccgtagcgaaactttatgcatattggattacggttaactatcgtgagtcatatgggatgtacgcgtgcaatggtattctgtttaaccatgaatccccacgccgtggcgaaacgtttgtaacacgaaaaattacacgtgggctttccaatattgctcaaggtttagaaaaatgtctttatcttggtaatatggactccttacgagattgggggcatgcgaaagactacgttaaaatgcaatggttaatgctgcaacaagagcaaccggaagattatgttatagcaactggcgtccaatactcggtacgtcaattcgttgactttgccgcttccgagttgggtattaaattacgctttgaagggcatggcgttgatgaagtcggaattgtagagagtgtttctggtgaagatgcacctgcagtaaaagtaggtgacgtaattgtagctgttgatccacggtatttccgtcctgctgaagtggaaaccttacttggagacccttcgaaagctcacgataagttgggctggaaaccagaaacaaccttacaagagatggttgtcgaaatggttagaaaggatctggaggctgctaaaaaacattctctactcaaatcacatggttacgaggtttcgatttctctggagtaa

SEQ ID NO: 215181 - DNA, 921 bp, Klebsiella pneumoniae
atgaataagcctaatctaactgttattatcttaacaaaaaatgaacaactacatctaaggcgttgtttagactcagttataaatttttgcgaaagaattgttattgttgactctttttctgatgataatacattggaaattataaaagagtatcctggtatagttgaactctatcaacataaattcatcaaccatgctaaccaatttcaatggggcttagataattcgggagtaacaacggattgggtaatgaggcttgatgcagatgaatatattgaatctgagctccaagctgagattcaaaacaaattaaatttaattgataaaaataaaaattgtattttcatcaggcgtaagtacttttacaagggaaagtggataaaacatggtgcggtatatccactaaatctgttacggatttggcggaacggccaaggtcgtatagaacaaaggtggatggatgaacatatagttgtcaataacccacagcctgaatttttcaaaggtcatatcgtcgattataatttaaatgatatgaagtggtggatagaaaaacacataaaatatgcagatagagaagttgttgatttattaaacattaaatatcaattatttaatcgtgatgaggatgttaggaagcaaggtggtttccaagctaggcttaaaagaaaggtaaaagaagatttatatttcaaattatctccatcattgaggtcactattgtattttttatatagatatttttttcggttgggttttttggatggatcaaaaggatgggattttcatttaatgcaaggtttgtggtatagaagttacgttgatattagatataaggagttggatgcactcatttctgatataagcagtgatcgtgaaaaattaagcgtattatctaaatcaactggtttaagtctctga

SEQ ID NO: 215182 - DNA, 540 bp, Klebsiella pneumoniae
ttgtctggtgaatatgaaattaactactttagctttaaaaataaattacatcgcttaatttgggggggggtgtatataatattttttaaatattctcctgtgcccatgtttagatataggaattttattctttcattatttggagctagacttggtaacaatgtcagaatctatccaagtgctaaaatatggattccaagaaatttaactattggaaataattcctccattggaccaagggcgcaaatttacaatcagggttctatttatatcggtaatgattcaattattagtcaagatgtaactatttgtgcgagtacacatgattacaacaaacgtgatcatcctcttatattaaagaatgtagaaattgggaatagagtttggctttgtgccgagtcctttgttggacctggagttcaagtttttgatggggctgtgttaggtgctagagctgtcgctaagagaaatttatcttcatggtctgtatacgatggtaacccatgtaataaacttaaagaaagaatgaataatgaataa

SEQ ID NO: 215183 - DNA, 1284 bp, Klebsiella pneumoniae
atgaacagcaataaagcaatgatggcgcgtcgcagcgacgcggtcccgcgcggcgtcggccagatccaccctatcttcgccgaacgcgcggagaactgccgggtgtgggacgtggaaggccgggaatatctcgattttgccggcggtatcgcggtgctcaataccggccacctgcatccgcaggttgtcgccgccgtcgaagaccagctgaaaaagctgtcgcatacctgcttccaggtgctggcctatgagccttatctggcgctgtgcgaaaagatgaatcaaaaggtgcccggtgatttcgccaagaaaaccctgctggtcaccaccgggtcggaagcggtggagaacgcggtgaagatcgcccgcgcggcaaccgggcgcagcggcgctatcgccttcaccggcgcctatcacggccgcacccattacaccctgtcgctgaccggcaaagtgaatccttactccgccggtatgggcttaatgccgggccatgtctatcgcgccctctacccgtgcgcgctgcacggcgtcagtgatgacgaggcgatcgccagcatccatcgcatcttcaaaaacgatgccgcgccggaagatatcgccgccatcattattgagccggtgcagggtgaaggcgggttctatgccgcctccccggcctttatgcagcgcctgcgcgccctgtgcgacgagcacggcattattctcatcgccgatgaggtccagagcggcgcgggccgcaccggtaccctgttcgccatggagcagatgggcgtcgcggcggatatcaccaccttcgccaaatccatcgccggcggtttcccgctggcgggcgtcaccggccgcgcggaggtgatggacgccatcgcccccggcggactgggcggcacctacgccggcaaccccatcgcctgcgccgccgccctggcggtattacagattttcgagcaggagaatctgctggaaaaagccaaccagctcggcgacaccctgcgccagggcctgctggcgatcgctgaagatcatccggagatcggcgacgtgcgcggtctgggggcgatgatcgccattgagctgtttgaagagggcgaccgcagcaggccgaacgccaggctgacggcggatatcgtcgcccgcgcccgcgacaaaggcctgatcctgctctcctgcgggccgtactacaacgtgctgcgcatcctggtgccgctgaccatcgaaaaggcgcagatcgagcaggggctcaagatcatcgccgactgctttagcgaggcgaaacaggcatag

SEQ ID NO: 215184 - DNA, 750 bp, Klebsiella pneumoniae; identical to SEQ ID NO: 213874

SEQ ID NO: 215185 - DNA, 465 bp, Klebsiella pneumoniae; identical to SEQ ID NO: 135366

SEQ ID NO: 215186 - DNA, 735 bp, Klebsiella pneumoniae
atgcgcagttacaggcagtggttagttttcagtaaggctttgttagcgctattgttgctggcaggcatcactccggcgccgtttgctgcggttaacgttgatcgaacccggctcgtcttcgctgctaacgatgttgtccagtcgctgacgctcacaaacgatagcgtgacgccgatgctgttacaggtctggaccgatgccggagagacggcttcttcaccagacagtagccgcacgccgctggtggtcttgccccctgtctttaaaatgcagccggatgagttgagaacgcttcgtgtgatgctgagctcgcgccgtagtttgccaggggatcgggaaagccttttctggcttaatatttaccagatcccccccgagcagaatgcaacagacagcgtcactcgcaaattagtgttacccctgcgattacggttaaaggtatttattcgtccgcacggcttaaaggcccccaccagcaacgatgagcggaaattacgcttcagtatcgcttcgcagggcatcacgataaccaatccgaccccgtggtatatgagcctggctgtcgcgccgataaagggaataagtatcggtaacatcatgctcgcgccctatgaacagcgcgatgtcgcgctttctaatatgccagcggtggggtcaacagtagactatgcggtgattaatgattcggggaactggcggacctataccgcaaccattatggataaagaaatttga

SEQ ID NO: 215187 - DNA, 1335 bp, Klebsiella pneumoniae
atgtgtcatcttcgccgaacgctgctgtttgcagctggcctgcttttcagcaccgcgccctgggctaactgcgttaaggtcacggataatagtttcctttctgaggctgcgattaaagcgggttataccgcgcgctactggcgcggcgcctatgatgacaatatcggtcatcttggtctgccgtcagtcattagcgttagcgccaataacaagttccagccttcaggtactgtgcttgccagcgcagtggctaatttccttaccgccggcgttcagacaccctactcggcaaaacaggtgctttaccgctgtgatttgaaggatgccgggcaactgtacgaattatattctaccaatgccgataacccttttgttggaggacgccgggcgaaagaagttgaaggggcctactatgacgcggaacgtaacgtcgcggtacggatgactaacctgagtactggcgaatactatagccgctactggaagcagcgccagcttactgcggatagttggtttcaggacgatcgcgcaatctatattcccgcaggcgcgtttagtaatgtcctgtatgagatgattaaaatcgccgcctcggatcagtatatttattcggacagaatcaacaaagacctctatacccagccgcgcggttatatcgcctttaaagggccgggcttaataacatccgctattcagccaggtatggatcatgcttcaagctattatggttggcctgcttattggcccggtgcatggagtagctataatcaggttacctatattcgcggcgcagcttgcaccattgaagattatcctgcgacagtgctgctccccaccatatcagcagaagcgcttacttctggcgaaagcagcgaggcgcctttcagtataacgcttgagtgcgaagccggcgcgatgtcttcaactcaccccacaacccaggtagctaatgtcgccatgggctttttggtcaaccagcctgcggctgttgccgccgcgcgccgcctgggcctgacgaccaccggtggcggattaacctggttactggatacgcattatggcgaaaagggcgtggcttccggagtaggaatacggatttacgatgagcgcggtgcgccgcttaacctgttaccagacaaaacgagtacgggaacgggcaatgcccgtggctggtatgggtataaggagctcacggtacaaaccggcaaaaaagatcatggttcggtggaaatctggcacggtgattttacggcctcccttgaggcgcttggaggacaaacggtaacggtggggagcgtgaatgcgcagttacaggcagtggttagttttcagtaa

SEQ ID NO: 215188 - DNA, 2556 bp, Klebsiella pneumoniae
atgtcgctgaaggttaaattctcacgccaaaatatcttcgttatcttagccgtagcctgcgttggtcaggctttcggtgaagaatattatttcgacccctctctattgcagggaacagcttacggacaaggtatggcgagcgttaacggacccgacacccccgccggagagtatctggttgacgttatcgtcaatggaacgctgataaaatccggcgtaaaaatccgctttagtccagtcaatggcggacagcgcaccgagccctgccttccgttatcgctgatgcaggccgctcaggttaaatcgctcccggacaacgcgctgcaaaatagctgccgtccgctaagggattgggtatcccgcggtgaatggcaatttgatagcgcgacgctacagctccggcttacgctgccgatgagcgagctgatgcacaggccgcgcggctatatcccgccttcgcagtgggacagcggcgcgctggcgctgtttttacgccataacaccaactggacccacacagacaacaccagccagcacttccgctaccactatttgtggagcggcatcaacgttggcagcaatattggcctgtggcagctccgccatcaggggaatctgcgctatgccgacagtaaccaaagcggtagcgcctggcattataatcgcgtgcgcacctgggtacagcggccactcaccgcaatcgacagcatcatggcatttggcgataactataccgactccagtttattcggcagcctgtcattcaatggtattaaactcgccacggatgagcgcatgtggccgcagggcaaacgcggctatgcgccggaggtgcatggcgtggcgtcaagcagcgcgcgggtggtcatcaaacagctaggcaaagttatctatgaaacccatgttccacctggcccgttctatatagatgatctttacaacacccgctatcagggggatttgcaggttaaggtgattgaggctaacggaaaggtttctcgttttaccgttccctattccgccgttcccgactcggtgcgccctggtaactggcactacgcttttgctctaggcaaggtccgccaatattaccgcatcgacaaccgttttcttgaggggacgctgcagcacggggtgaataatcatctcacgcttaatcttggatcgcggttggcgcatgattatcaggcctggctggctggcggcgttctggcaacccgtctgggcgcgttcgggatgaatgccacctggtctggcgcacaagtggaacataacgatcggcagcagggctggcgcgcggagttcagctatagcaagaccttttccacaggcactaatctggtactggcggcttatcgctactcaaccggcggattccgcgatttagaagatgtgtttggcgtccggcaacaggagcacaacagcattgtttactactccgataccctacaccaacgccaacgtctttctgcaaccgtcagccagccgttaggtcggttggggacgctcaatcttagcgccagtaccgctgattattacaataaccggtcgcggatcacgcaactgcagctgggctatagcaaccagtggcgaaaagtgagttatggattcaaccttgccaggcagcgctccacctgggacgatggccgcttctaccacagcgttaacgaaccgcaggatctgaaccagcggcaaaaatataccgagacgacgctatcgttcactttatccattccctttaactggggcgacaatccgacctccgtggcaatgaattataaccagtcgcgcgcgaaccgctcctcaaccttgtcgatgaacggaacccgtggcgagcagagcgaactctcctggtcggtctacggcggctatgatcgctatcgcaatggggatgaagggacagcaacgacttttggcggcaacgtccagcaaaacacccgttttggcgcgctgcgcgtgggctacgatcagggaaaagactatcgtcaggtggcgctaggttcctccggaaccgtggtgttgcattccggtggcgtgacgttcggcccctacgccagcgacacgtttgcattaattcacgccgatggcgcacagggcgccgtcgtacagaacggtcagggggcggtaatcgaccgttttgggtatgccattttgccctcgctgtctccctatcgtcgcaacaacgtctcactcgatacccggcagatgcgcagcgatgctgagctgaccgggggaagtcaacaggtggttccctatgctggcgcgatcgcacgggtgaacttctcaacgattaccggcaaagcggtgctcatcgcggtgaaaatggcagatggcggcataccgccaatgggcgccgaggtcatgaacagcgaaggggccgtcattgggatggtcgggcaaggcgggcaggtgtatgcccggatcagcacaccctctggctcattactggtgcgttggggaaaaggagccaaccgacgttgccgtgtgccttaccagttcgatatgcattctcctgaaaacgtgatttatctcacgactacctgcgagaggaaatag

SEQ ID NO: 215189 - DNA, 759 bp, Klebsiella pneumoniae
atgaaaaaggatgccccacgttcagggctacgctatctggtgctgctgatagccctgttctttcccgttaccggggcctgggccagcgttaccattgtaggcagtcggattatttatccatcgaccgtcgcctcagtcgatgtacagctaaaaaataacgatgactttccctatatcgtacaaacctggtttgacaatggcgatctgcatattgggccggagaacgcgagcggcattccttttatctctacgccgccagtatttcgaatccaaccgaaatcagggcagatcgtccgcgttgtctatagccagcgtaaagcgctgccgcacgatcgtgaatcggttttctggttcaacgcgttgcaggtaccgccagccaatataggtggccgccagcaaaataaagtgctggtgatgctaaggacgcggatcaaactcttctatcggccggaaggcattggttcaccaggtaatctggcgaaaaaactgcacatcaccgtggtgcgtaatgcccgaaaaggcgccggtattgtcatcagcaatccgcaaccctggtatgcctccctcagtaatctgagcgtgaaagtaaatggtacttcacgcgagcttaatgtcgacatggtcccccctttttccagtcgcactttctggataccgggaaacgtcaacgccaattcacttaacggtaccgtcactgtgacggtggttaacgaccagggtgcaaggataagcgagcgttatcatgtcgctgaaggttaa

SEQ ID NO: 215190 - DNA, 537 bp, Klebsiella pneumoniae; identical to SEQ ID NO: 135371

SEQ ID NO: 215191 - DNA, 861 bp, Klebsiella pneumoniae
atgttagtgactgtgttttgtgaaaagattgcgaatgttaaggtgggtgaaatcatttcaccctgtgttaatatgacaggcgacagagtaagtgtattgaagaacggattttccatggatgaagagttgttgttaatcgctaaaaaggtgatatttgatagtgccagaatgacattggctaatggtaataagattattaaaatctctgagtcggagacaaacctacttcttgccttccatcgcggtatatataaaaaagaagatatcattgatttcgtctggaagaatcgtgcgggttgtgtttcagaatcgagttattacaagcttattaatcaaatgcggaataatttttcgctcgttggtttgaaagcggacgatattgttacccgtccacgaattggtgtttcgttgtcactgccattagaaccgttaaaaaaacaacgttcggaagccggcgaacagaccagcgatacagcgcggggtaaagacagtcgtcagactcatctcgcggagggtaaaaaatttaccgccaaaatacgtcttctggtgctgacaatgttgttgatgctgttaacggctatagcgatgctatttcaacatgcacctgtgcaaaataaacacaaaagcaccttcaggatgcttggtgataaggatggctatatcttcttcaaaatggcgagcgataaagtgacatttaaggaggtggtttcagcctataacaccctgacgctaccgctatgtcgccagaacggacattatctttattacctccgggagccgaacatgaatctttttttgcagtgcctgaatcctgttgaaacggcggtaccaaaatgcattaccatcaaagagcgttactaa

SEQ ID NO: 215192 - DNA, 318 bp, Klebsiella pneumoniae; identical to SEQ ID NO: 135373

SEQ ID NO: 215193 - DNA, 1563 bp, Klebsiella pneumoniae
gtgaagctaaaactatcgtatataatttgtgcagtgctggtgccgctggtcatgatgattacgttagcactgctggtcagtgtcctgcagtttaaacaggatgtcgccctgagtgcgaaaaccttattacgttttagtgaagatgtctcaactgcttcgtggcgggtcaccgggcaagccgtaaaattagcggacaggccctgcgctgaaattttgtcggagcttaaccgtacccgcgcctttactccttatattcgtgatattggtttgctggaaaagggcaatctgctctgttcctttgttagcagagagcaggcgcatccttttcctctgccaccaggtaaaacgctcccaacgccgctacctgccaggtgggttcgctcatttagctggatggccggtgggcctggcaggcccgcggtggtttacacacagcaagtcgcggcggataaagcggcgtttgttatcgtcgattctcggtatgtccaggagctgatggatgtactctcagaggagagagaggccgttttcagcctgagatttggcaaaggcgatgccattatcagtcaaccagcacagtatgatcgaatagtgatgacccagaattacgtcactgacgacggaaagatttctcttaccgtcgctgcgcctcttggcacattgacggcagtttggatgaaatctctgctcatttttatccctctctcgttttgcttctcatttttgaccctggttctttaccggcattggtcgaaaatgcggatgtccatggcgcgagaaattatccgtggtatgaaaaatgcgcagttcacggtgcattatcaaccagtatttaacgttaaccgcggtaattgtggtggggtagaggcattaatgcgttggcctcttcccgatggtcgttttattacacccgacattttcatcaccgccgcagaaaacgaaggtatgatcgttccgctttcgcggcatctgtttaagctcatcgccgaggatgtcgaaaggtggcaggtcgccgaaggcttttatatcagtgttaatatttcgcctgaacacttggtgcatgagagctttattgaagacgttgagttgttacaggcaagattaggcaatctgcgtctgatgctggagctcaccgaacgcagcctcattgtacaaccagcacttgtgtcagataagctgatacggctacgtgagaaaggcatattgatagcgatagacgattttggtaccggctactgttcgctttcttacctccagcagctacccgttgattatctgaaaatcgatcgtacttttgtcgatacgattgataccagcggtagcgacgtgcccattctggataccattatcatgcttagccataaactcggtcttaatatcgttgcggaaggcgtgagttcagaacatcaattgagctatattctcgatcataacgtaggatttatacagggctatctttacgcaaagcctatgtgttcatctgattttacgcgctggcttgatacgcgtgccaatgagcaaaatgacaggattaaatgcaaaaaatgttcaataaatcagtaa

SEQ ID NO: 215194 - DNA, 735 bp, Klebsiella pneumoniae
atgagtaagaaaaaatacctaattgataagaaagtcattcttgattgcgaaaagatgacgctgtcgtgcgatcgcgaaagcttgagaatttctgaatccgaatgcaatttgcttattgctttccatgaagggttatttaagaaggatgacttaattgcctgggtatggggacgaaaaggcgttgtggtttccagtgcgagctattataaattaatcaaccagttacgcggttcatttgaaaaggtcggccttcccccttcagcggtattaacgcgtcctaaggtcggcgtaacgctctcggtatccatcgaatcattgcctgatgcttcaacacccgcaatgcaaaatatcgccagcgataccgttgcgccagttgcagacgcgtcgccagaaccaacgcaaatttctcagtttaccatcaggaaagaatggttttttttaatcggcgcaacgttattcttgctggtaatgatttatatataccacaacagtaagccagattatttttctgaattgggaacctataacggatataccttttacggtgttacagaggataaccgtactcttgaggatgcggtgggggctttttccgagttgagcccgcaagtctataagcaaaatggcaattttatttattatattcgtgtccctaataccaatatttttgttcagtgtctgaatcaactgaatgtttcggagcccaaatgcatcactatcaaagaacggtactga

SEQ ID NO: 215195 - DNA, 489 bp, Klebsiella pneumoniae
atgcatcactatcaaagaacggtactgaacagcattacgctgcttatcctggcggtatccttcgcgttactgattttacatgtacgtcaacaacgctaccctttatcagatttgaacgcttttttatgtactaccaggacggtaacctcagttcaaccgggtaattttcacgctgatggcaatatcgtccttgatttcaaaaataaacgcattacgcttcaatatgacatcatcaccgcacagcagataaaaaaagtgttgtatcgcgatgtatatataaaaaacctgaagatgccgggggccggaatttatacatttgatgttgattcggtaaaggtgttttctactgatactgccggtgattttttagcacattttcgcttgctgcaccccggtgccgctaatgaaataagagtcaccagagtcggtaatagcacctatttgtactcaataaatcgtcagatatataacgtttgtaccttgcagtga

SEQ ID NO: 215196 - DNA, 537 bp, Klebsiella pneumoniae
atgcagcgtattttttcaccatggattatggcagcactattattttcgcccgcattagcggtagcgatggaaaatcataccctctcggttggctatgcccaaacgcaccttagtgcgttaaagagctctgccagtaaagatcttcgtggcctcgcactaaaatatcgttatgagttcaattctgactggggggtattaacctctcttaccgccactcgtcatgaagtacaaaattacaagtgggacgcggggaagttacataaagatggggataatactaccagctatagttcgttaatgattggaccgacctatcggtttaatgactatattagtttgtatggtaatgtcggcatggcagaaatgaagataaaaaaccgggataatcattcctcttcagaaaatgcttttgcctatggagcaggcgttatttttaatccattaacgaatctttcccttggcctctcatgggaaacggccaaattacttttcgttgatacaaatacatttggtgtgagcgtaggttatcgtttctaa

SEQ ID NO: 215197 - DNA, 474 bp, Klebsiella pneumoniae
atgaatagaataaaatttgcttttggcttttttatttctggcgctctactgggccttttttataatttactgaatgataaaatacatcataaggaagagtgcacggcatcgctcgtcgtgttcaagggtaatacacaaactaacttgacgttaaatttcatgtattcgcttgatgaaagcaagggcactgttgcggtcagcggtagttatctggatggagggaaactgcagggccacatcagaagagacgtcatttatgatatggtcaaaaatcatgaatctcatcatttccactcccgagaaataaaccgatacggtaacattgattctgtatcggatacgttcctggccaccatcctgccagatttttacgtttatccggatgaaaaaataagctatatcatctcaaaacaaaatgaacatagcttcctgataaaagttggttcaaggccactactgtattgcgctaactaa

SEQ ID NO: 215198 - DNA, 825 bp, Klebsiella pneumoniae
atgtattggatcataaacaaaaatatagaattttggcctgaaaataagcggttaatctcgttgaaaaacccagctcaaagcgtcacattgacggctccggcaagccactgtcttgttcttttactggaagccactccggaactggtcagtcagcaagttttctttaaaaaagtgtgggaagatgaagggattctggtcccggcaaataccctgtatcaaaacatatcgatagtcaggcgcggactgcgcgatgtcggggaaacggataattcgatagtcgtgacggttccgcgaaaaggctttcatatcaatcctaacgttaacgttgagaggatggatgaaaaacctttaaattcagaaagttataatgacatcaccatcataagccaggatgacgtcgctgaaaaaaatccgaccacagagtctggtgatatcgtgcaaacggccaccagaaaaaacatcggtgcaaaggctacaacattcttgatcatgctgttaagtttactggcgggttgtttgtcttttcattacatttggcattttcatgatgaaaaacctttttttagcagctatacattggttgaaaacgatcgcgggtgtcatttttataccaaagatgataaccatgctaaagttgataaatttaactattataaatctttgatattcaaatccggacttgattgtaagaagtatcccttcgtttatttttcgatgtcgcaaatgtctcccggatttatagtctttatttgcagaaaaagttacagcgagaaggtttctgccggatgtgttactctctcttttcgtggaatagtatatgaatag

SEQ ID NO: 215199 - DNA, 396 bp, Klebsiella pneumoniae; identical to SEQ ID NO: 139233

SEQ ID NO: 215200 - DNA, 363 bp, Klebsiella pneumoniae
atggttactattataaggcacgaagtcaatgaaagcctggcaatatccggtgtggtcgaaacccgtggtctggtctttgtgagttactgtctcgggaacattggaaaacctatcgaggaacagataaatggtgccttcgataacttgagtgaaaggcttaacgctatcggcctgacgctggagtcagttgttaaaattgatgctttgtttcgtgacgtgtggcatatcccaataatggaaaagatcatgcgccagagatttaacggcaattatccagccagaaaatctatccaaaccgagtttgcccatgatggaggagctgcaggtatgctctttcagcttgacgcgattgcctgccggtaa

SEQ ID NO: 215201 - DNA, 519 bp, Klebsiella pneumoniae
atgaaaaaattatcagcagctgcgtttgcatttggtctgttatctgtgtctgtatctcaggcattggcggcggatgccaccgttaacttcagtggaaccattcttcaggaagcctgcagtgtagatacttcagacaatactgttaacgttcagctaggcacctacggtgctgctcaattcccgacggtagggacaacgacccttcctgttcctttcgccatcaacttaacgggttgtccggcttcaggtggcccgacggctgcactggtgaccttttcaggggccgcggatgcggccggtgacctggcgttgaccgcaggcggcgcatcgggcgtttccattaatatcaaaaaagcagatggtaccaacattgatattaactctaccgattccggtattgcactgactagcgctacgacccaacagctccgctttaccgctaattacatcagtactgcggcttctgtcaccgcaggcgcggctaacgccgtcgcccaggtaaacatctcttatatgtaa

SEQ ID NO: 215202 - DNA, 699 bp, Klebsiella pneumoniae; identical to SEQ ID NO: 139040

SEQ ID NO: 215203 - DNA, 2484 bp, Klebsiella pneumoniae
atgatgtctgcgctattcaatgctccagccatatcgtttgcggatgagttttttaatcctgctttgcttgaggttcgcgaaggagaaggtgcgccgacgacagacctctccgtatttgaagtcgtcaatggacagccagcaggaaactaccgggtagatatctacgtcaataacgaaatggtgaccgcagatgcccgcgatgtgatgttttcaaagaaccaggatgggaagctggagccctgcgtcacgttggcagaactcagccaatggggagttgatacggcctcatttccagaactcgccgtcagtgatagcgaatgcgccaatcttgcgggcatccctgatgcatttgccgacttccagtttaaccgccaaaagctgaatctgagtatccctcatgcggcaatgaatacgcgcagcctggatgaagtgcctattgaacgttgggatgaaggtattccagcccttctcctcaattacaacatgaatagctatcagagccgatataagggtgcagaaacttacgaaagcacgtatttgaacctgcgtcccggtctcaatatcggtccctggcgtctgcgcaactacaccacctttgagcatagtaatcagagtggaagtaaatgggacaacgtctatagctatcttcagcggaatattgtctctttgcgaagccaactgacgttaggcgacagttcagcaccagctgatgtcttcgatagcgtgccatttcgtggttttcagatggcctcggatgatgacatgctgccttccagcgtacgtaactatgcgcctgtgattcgaggggttgcccgcagcaatgccctggtgaccatccgtcagaatggttacgttgtctatgagaccaaagtggcgccgggggcgttcgagatctccgatttggcctccaccggaggagcaggcgatcttgacgtgaccatcaaagaagccgacggcagcgagcagcacttgcgcatcccctacgcatctttgcctgttctacagcgtgaaggtaagtttcgctatagcgttacgggcggtcaattccgcgcctacgatgctcacacggaaaaaaacctgtttgttcagggcaccggaatttatggccttccgtggggctttacgctctacggcggcgtgcaaaatgcaggcaataaatatcagtcatatgcgttgggggtgggtaagaatatcggtagctggggcgccttttccgccgacgccatccattcccgatccatgtcgaccgataccggcaggcaacagggccagtcgctccgggtgcgctatagcaaaaatttcctgcagacgggaacaaattttaccatcgccggctatcgctattccacctccggatttcgctcgctggaagaaacgctgggtacctaccgtagcgataataacattccttcttatatcaccgatcgccggcgtaaccgggctgagctgtcgctgaatcaggatcttggcgataactttggggcgttgaatgcatccttgatcagcgaggattactggcagaacgaacgtaacagcctgtcggcaaatctgggctattacaaaaatttcaacgcgattggtatcagtctgaactactcctggaaccggaataccgggctctatggccatgccgaacaggataatgtggtctcctttgagatcaatgtgccgctggataaattcctcaaccggacatacgcctcatacgggacaacccatgcgagtggaaacggaaccagccacaacctccgactgaatggttcagcctttgatgatgccagtcttgactgggggataaacgcgacgcttgcggggcgcagcgaacaacaagtcgtcgggggtaacgtcagctggaaggcaagccacggaacgttaaatggttcctacagccgcagccgcgacagccaacagctggggtatggcatagccggtggggtagtgattcatgagaatggtatcacgctgtcccaatccctgggtgaaaccattggtttagttaaggctcctggcgcagaaggcattggcgtcaataactacgccggtatctctacggatagtcggggttacgcggttgttccgtatctgaccccctatcgccgcaatgatattagcctgaatagtaaaaccctgcgggacgataccgatatcacctatatgaccaataaagtcgtccccacccgcggggctatcgttagagcagagtataaaaccgccattggccaccgtgtcctgatgacgttaacgcggcctgggggtaaaccggtcccctttggcgcgatggcgtcgctgcttaaaagtgaagaaaacgcgtcaattgtcggtgacggcggagaagttctgctgagcggtttaccgcaaaaagggacgctgcaggtgaaatgggggaatggccaggggcaggaaaccacctgtcgggcggattatatagcccataaatctgctggcgcgtccggtctctggaacgcgacgagcgtctgtcaataa

SEQ ID NO: 215204 - DNA, 1167 bp, Klebsiella pneumoniae
atgaagtggtttgtttttatgttcgcggcaatcgcggcgacgctgatggtcacccctgaggctaatagcggatcgtttgatccggtaactggtgcttatactacggatccgataaccgtcacgctgacgccaaagaccgtagctgccagcacgtcggtaatcgcgaatggtgaaaaggtttactgggccactagtacatatgcccaactatcaggcccgttttactggggaccgcatacctacaccatggatagcgccgctattgctacaacagcagccacccgtatgaatgctggtggattgtgtactgcaaccgccagcggtacatctcttaccataagcggatgtttctcctttacggacatttacactatctacgtgggcaaaagcgcctcttgtaaatctttttttaatttctttaacgatataaatagttcgttaacctctttcggcgattttgttggacttacttttagctctggtacaggaacagtagtcaataggcagttgaacaagacgtctataccagatgtccatacgacttctattacttatccaagtcagaccctattaccacctaattcctggcccacctacaatacaaatttgcaggcgacactatccgcaaaaacgccgccttatatccacctttattgcaacgtatcgcaaggtggccagatctcgcgggagaatggcgcttacatgtcaagatctttggatatagtgcctgcggccaataaacccgcttatcccccgacgattagttactcgctggcgctccctatcaccaacaatatcaccgtaaatatccgtaatatcaccgcgattgacattctcccaaggacggtatttaacaccgggactatctccgcctggcgcacaacctatatggaacaaccgcttaccgtaaccgggcaggggaatatcacccgcaattttggcgcataccagaactttaacgttcttgaatcctggacctgcgcgacaacagggcaaatcgattttcgaataatgcgcgacaataccaacgccaacgtttgtacgggggcgacctatacccatccggtgcagacgccacagtcgttgacggcgcagtggaaagcgcaaagttcgaccgcatcaggcgcatggagcgccagggctacggtgacctttacgctgccgtag

SEQ ID NO: 215205 - DNA, 1263 bp, Klebsiella pneumoniae
atgaaattcaagcatggtcgttacagaccaaaccaatatctcatttgtgatccgtatggtttttaccatgtgagaattgcactacctgactatatgcaatcgctgtttagtggaaggaaaacgttagttcgaaccctatcaaccaatgaactaaaaatagccagaatgaagcgtgatcagatagcggatgagtttcaccgtttgcgagatgccatccttccagacaggccagatagtgtggcagacgtgatcgagttatttcgaagcaaggcaaaatacgcgaagacagcaacgaaagtgcaggttattaataaatgtcctgctttacgtgggatgttggatatttaccttttacaaaatagcaacaaaaagaaagttacgacgttgtctaaaactaaaaaggcggtagaagtatttctcgatcatcttcgtaaacgtgatattgcactcaatgaggtaaaccgaaccacagttacagcctggattgatgttcttcagaagaagagatcgcaacaaacaatcgctaactacattagtgctatggctcagatttgggatttagcttcatcacgatatgaagatgctccggagaggtctcagtccccctggcgtggtcataaactggatgttgcagagagtagggctagttatgaggtttttactcctactgaactggcgaaagtcttctctgccctggaaggtgacgaggagatgcagaacgtaacgctgatagggatgtatagcggcatgaggttaaatgagatttgctctttacgtgttgaaaatattagagaaatagaaggtgttttgtgtttcgaagtcaccgaaggtaaaacaaaatcagcgtccaggatcataccagtccacagcatgataatggatatgttgaaagagcttgtacaaaagcctcataacggctttctgttttacagagcgtcaattattgaccgtgcagacggaaaacgctcaacgtggcacacacagcgatttacacgggctaaacgcaaggcattgggagagcaggggaccgaaagaaaagttttccactcgttgcgtcatggggtagctcaaattttcgacaggggcggggtgggaaccggaaagctaaagcccgtaccagaagatcgcattgctttattacttggtcatgagcgaggctccacggagagtttcaaaacttatagtaagaatgccgcttctcctgttgagctacggcaatatatcgagttactacgctatccagaaatagaaaaggggcattaa

SEQ ID NO: 215206 - DNA, 1809 bp, Klebsiella pneumoniae
atgagtggaagtaaagtaactgccagcactctggtaaataaaatagtttaccgaacagatttaaatagtctgaaaaaggttagaaacgatatgaggaagttgcaaaaggatttcagcaaaacagagggaactatagccaaagcaaaaatgcaggcccagaaacaggtgtatactgcacaaatgcagcagcagaggcaggttcaacaacaacagaaacaggcagcaaaacaagctgctgtagatgctaaagcaaaagccaacgaacagaaaaaattagcagcagcgcaagctcgtgctttgaaaattcaacaacaacaatctaagaagatagccactcaacaagaaaatgctgacctagcaagaaaacgtgccgcattccagcttggacgcctccagaatatgagcggagccgatcgctacgctgcgatcaaacaggctaacgccctcgtggatgcatatgcacggggaaataccagtttaaaatcgatgactcaagctctgagccaacatatagcacagcaaaaggccatggcaaggaatcagcggaagcaagctaaacagtcaggtcaaccacataggaagggttcatctggttggctgagtcgtcaggcaagcgcatttatccccggtgagattctcgggccaaccgcagccgcttatgctgcccaacaggcctatcagattatggcgggaacactggctggggccattgagagaaaccagggcaggaaaatgatccagagttttggtggaaatgaccttgagtatatgagtttgcgccgtgcctctctcgctactacaggttttgacatctcccgtgaaaaatatgctgatatcagcaaggattggttagataaacaaggtgatttatcttttggtaacacggataaaaatggtaattttaccggaggtggagaactatcagacctcgttaacgtaatgcgtcaacgtcttggatataccaatcaaggggcagtcgccaaattaaactcatttaaaacaccagttgagtttgctgtatttatgcggggtctcagagatgcaggtaaagtaactcaacaagaatttgttaactttggtgaacgaattaatgatatgagctacgtattgaactctgtttcaagtggtggtgaaaatcttctcaagattcaaaatgaattggttgattctcatttagcactaacgactgctcaacagaaatctattaataatctgactgagatgtcagcactatttaaccaagctaaagaatctttaggtgatcaatttgcggcatcttttagtaaaagtttagaggatttagggattaatacacaaaatctttcctctgaaatgggaacattagttccgttggtaaaagatttggggacggggacggctcagactgtgaaaggttttaaagatttgctcgatgtcctttctattatcacagaatggaaaaatagacttttaggtgagaaaccagaagagcgaaatatctttcagcaaggggctacgtttgttggggaatcactgttgccaccgggtgttttagatatggcaagtcggattaaaaatatagttagtcctggttctgattcttctgttgcatcacaggtgcaaaatggtggttggtataatcaaattatgccagcaacgccatctatgcagtaccaacccgtcattccggatttaaaagctgattttaaccttaccgtaaatccatctcctgaatttggagtgatggtggaggcggtagctgataaacggatagagtgggcatttgatgatcagaactaccaaattaatcaaagtattcttggtcaataa

SEQ ID NO: 215207 - DNA, 1041 bp, Klebsiella pneumoniae
atgttttcatatgatgcctataaaatggtagaccttgccccgatttttgaagttgcaccgagtgaaggttatctgctacaaaacttgaatattttcgataagtcttcgagcaatggtatttacgttatgcttgaccgactgattgaggataacaaaactctcctgaaccaaccgaaaaaacgttacagttttgaacacgacgcaacggctcggactcctgctaacagcttccctgtagagcttctgcatctgcaccgcgaggatactgtgagcgctgttgattttcagaaagcaggccgcaaaccggggacagatgttcaggaaacgatgctcgacatcgttgcggactataccctcaaacatgctaaagcctataaacggtatgtcgaggctgcatacggtgatgctctgtttcgtgggctggttcagactccatacactcaagaagcgccagttattgattatgcggacagcttcgatgctccgatgatggcagacactatcaccctgtccaacggctctaccgatgcgctggaggtgtttaacgggttcctggataaaattagcagtgctacagatggtttgtggactgatgttcgccgtgtcgtctgttttgcctccgcgagtttctataatagtctgcgtttccacgcctccatgaaaagcgcttaccagtacgttgacccgtttaacgaaatgaatattgtctatcagcgcaaagaggttctcccaaatgtgcagaccttcacgttaccaggactgagcatagacgtgatcaaagtgactgacccgctcctgactccgtttatcgctgatggtacagcggtcatgctgccagtttttcaggccaatacgaacgtttatcaacatctgtacggtcctgcctcagttgatactaatctagcggcgtctggcattactcaagaatatttctcctatcagtacgagaaagaacgtggtgaggttgaaattgtatcagaggcgtcggtgttgcccgtaaaccacggtaccaatttcagtctggttattactgccaattaa

SEQ ID NO: 215208 - DNA, 351 bp, Klebsiella pneumoniae
atggcactaattaaattcccgcaacctaatctcagcgtctgcgacgttctgagccgtgaattaaacggctacagccgaaaagttaaagtttttccaaagattcctgattgcgtccctggaactgtgattgatgatagcggcgaaattgtcggttcggcttctacctctgcgaacgtggtccttgaatataaagacgcagacaatacgcctgtcgctgttctagtagcaaatacgaatatccatatcaaagatttcagcctaatttgtgatgatgtagcaaaagctaaagaactcctttctgctgatcccgctgtttatttcagcactggcaatgatctgccgactacctga

SEQ ID NO: 215209 - DNA, 225 bp, Klebsiella pneumoniae
atggttacaattacaaaaggcgtccaaacgtttgacgggaaaatccccgttactctgttggttgatgatgtcgaaacggcaaacgagttaatcaagctcgctaaagctgcaaatgtccctgtagtagaacaggaagaagatttaaataaatctaaaaataaaactactcaagataaactaaaacagattattaaaaacaaaggggttcctaatggcactaattaa

SEQ ID NO: 215210 - DNA, 282 bp, Klebsiella pneumoniae
atgattgattttgaacagcacaagaatattgtagaagacttcgttgaacagcattacccactggcacatagtctgatggttgatagctatattgacccggaagcctattattcaaactaccagatgctactagaagcgatgaataatctccctgagcatccagattattttcttgaatggttggtagaatatgacgcagctttgtatattaacctgatggaactgattgtcattaccagaactattaataacgtttttgaacaagtttcttctgcgcagtga

SEQ ID NO: 215211 - DNA, 264 bp, Klebsiella pneumoniae
ttgacaaagaaaaaaacttttgaggtcagcattaacaacttacccgccgcactaaaacgtttagacctaccagccgaacaagtccaggttatcgaaaattataaaaaacagtttccattcttgattgaagatgaagaaaatgtattagttagcctcgatcaactttgggaggcactggatacaccttattatacgcggcccggaacggcgtccgaaaatccggacggctttgatttatgctgcctcatcaccaaaataaactga

SEQ ID NO: 215212 - DNA, 423 bp, Klebsiella pneumoniae
atgaacaaaaacgaaccaccatttctggcaattgattaccgcattctggcattagatattaaaacagacgtcaacgaaaaaaccatcgatagcagcaccattctcaaactcaaattagtctattgttacctactcgggttatccaaaaaatgcagtgaagtttatccagaacaaacaaaaatgggtaaaacattgggtattggttcccgacaagttgttgggagatgtatctcgctacttgagtcgctgggatggatttcaaaaacatcgagaaacggaacatcaaatctatacgaggtgaaaaccgtcgagcaaattttagaaggtattccgtgcgagactaaagaagaacaatcaacacctacaatacagcactctgttgtatcagatgatgatggtgatatcccatcattttcaaaataa

SEQ ID NO: 215213 - DNA, 159 bp, Klebsiella pneumoniae
atgaacattcgttttagccctgacactcacaaacttttaatagctcgtgccaatcgtgaggataagcccgcagccgcactggttaacgaattaattacagcaatcctaaagcaagaggaaaagaatgaacaaaaacgaaccaccatttctggcaattga

SEQ ID NO: 215214 - DNA, 435 bp, Klebsiella pneumoniae
atggaaattgatgattttagacgtagcgaaggccgcatgcgtgatcttgtcgatgactgtgactacatcgaaactcgtaaaaagtattattatcaagaagctaagaaaatgcttgataattttagggttgatataaatatcatacatgcagatgatgaaggctgcggcaaactaacattcgaggtataccaagatataaaatttcaattgaccattaaaaatagaattaaatttattgcagttgatttgcaattgtttgagacagacaattactctcgagaatatttaagtgatgaacatcgttattccttctcaattggccttggtgataaatttagtgatgttgatacgcctctggagagtcacaattacaaacaacattttaggcatatactcatcacgttaatgaagaatatcgccagaatagaagattag

SEQ ID NO: 215215 - DNA, 570 bp, Klebsiella pneumoniae
atgagtcgtacttttgcatattgccgtgtctcgacgaacgagcagacaacagaaaaccaaatcatgaggattcgtcaggctggttatgacatccttgatagccgagtagtgtctgagaccgtctctggtggtgtacaggccatgcagcgtagggcttttgctaacatggttgatcacaaacttgaggaaggtgacacgctggttgttttaaaacttgaccgcttaggacgcgataacatcgacgtacagcagaccatcaccatgttaatcgagagaggaataaaagttgtctctcttgatttgcctgtgagagacctttcaagcgctgaggggaaactcatgctacaaatgttttcatcgtttgctgagttcgaaaagtcgcgcattatagagcgaactaaagagggtttagagcgtgccaaacaggaaggtaagatattaggccgccctgttgctacagagacacgcagacgtgtacaggaagccagggagcagggattgagtcagtcaaaggcggctcaatctctggggttgggaatcgctactattaaacgctactggaacatctag

SEQ ID NO: 215216 - DNA, 207 bp, Klebsiella pneumoniae
atgaaaaaactaattttgttgggtctattggttctcagtggtcaggcgaatgccacacagattacgatgaccaatccccaggaagagcagacagagaacggaaaaacgctatgcatctatgagaacagcaattacacattcacctacatcactaaaggcgcttgtccctatgcaaaaacctttgatacagaggattcagaagagtga

SEQ ID NO: 215217 - DNA, 150 bp, Klebsiella pneumoniae
atgaacaaatcagcagcaactaaacgcaacaatcgcaaaatccatgcgaggaagtttctgtcaacgccagagggcaaggcctggctcgagcggaagcaggccgaagaggctgagttgaaacttgtttctgagctaaagaggtttatctga

SEQ ID NO: 215218 - DNA, 1254 bp, Klebsiella pneumoniae
atgctggaacaaatgggcattgccgccaaagcggcctcctggcagctggcgttactctccagccgggaaaagaatcaggtactggaaaagatcgccgattatctggaagcgcagaccgacgatattctgcgcgccaacgcggaagatttagccgaagctcgcgccaatggcctgagtgaagcgatgctcgatcgcctcgcgctgaccccggcgcgtctgagcggcatcgccagcgatgtgcgccaggtgtgcaatctggccgatccggtcggccaggtgatcgacggcgggctgctggacagcggtctgcgtattgaacgtcgccgcgtcccgctgggggtgattggcgtgatttatgaagcgcgtcctaacgtgacggtcgacgtcgcctccctgtgtctgaaaaccggcaacgcggcgatcctgcgcggcgggaaagagacctggcgcaccaacgccgccacggtgaaggtgatccagcaggcgctgcaggagtgcggtctgccggccgccgcggtacaggctatcgagagcccggatcgcgcgctggtgggcgaaatgctgaagatggataaatacatcgatatgctgatccctcgcggcggcgcgggcctgcacaagctgtgccgtgagcagtcaacgatcccggtgatcaccggtgggattggcgtgtgccatatcttcgtggatgaaaccgccgagatcgcccccgcgctgaagatcatcgtcaacgccaagacccagcggccgagcacctgcaataccgtggaaacgctgctggtgcaccgcaacatcgccgataccttcctgccggcgttgagcaagcagatggccgagagcggcgtcaccctgcacgccgccccttccgccctccccgcgctgcaaaacggcccagcgaaggtcgagccggtgaaagcggagcagtatgatgacgagtatctgtcgctggatctaaacgtcaaagtggtggctgatatggacgaggctatcgcccatatccgcgaacatggcacccagcactccgacgccatcctgacccgcaccctgcgtaacgccaaccgctttatcaatgaagtggactcttccgcggtatatgtgaacgcctccacgcgcttcaccgacggcggccagttcggcctcggcgcggaagtggcggtcagcacccagaagctgcacgcccgcggcccgatggggctggaagcgttaaccacctataagtggattggtttcggcgacgataccattcgtgcgtaa

SEQ ID NO: 215219 - DNA, 1104 bp, Klebsiella pneumoniae
atgagtgaaagccagacgctggtggtaaaactgggcaccagtgttttaacaggcgggtcccgtcgcctgaaccgcgcccatatcgtcgagcttgtgcgccagtgcgcacagttgcacgccatgggacaccgtattgtcatcgtgacctccggggccattgccgccgggcgcgagcaccttggttacccggaactgcccgccaccatcgcctccaagcagctgctggcggcggtgggacaaagccgtctgatccagctgtgggaacagctgttttctatctatggcattcacgttggccagatgctgctgacccgcgccgacatggaagacagagaacggttcctcaacgcccgcgacactctgcgcgcgctgctggataacagcatcgtcccggtcattaacgaaaacgacgccgtcgccaccgcggaaatcaaagtgggcgataacgacaatctctccgcgctggccgcgatcctcgccggggcggataagctgctgctgttaaccgaccagccaggcctgttcaccgccgacccgcgcagcaacccgcaggcggagctgattaaagacgtctacggcatcgacgacgcgctgcgcgccatcgccggcgatagcgtctccggactcggcaccggcggcatgggcaccaagctgcaggccgcggacgtcgcctgccgggcggggattgataccatcatcgccgccgggaaccgtccggacgtcatcggccatgccatggcaggcctgccggtaggtacctgcttccacgcccaggagtctccgctggagaaccgtaagcgctggatcttcggcgcgccgccggcgggggaaatcaccgtcgatgcgggcgcgacccaggcgatcctcgaaagaggcagctcgctattgccaaaaggcatcaaaatcgtcagcggcaacttctcccgcggcgaagtgatccgcatccgcaatagcgaaggacgcgacatcgctcacggcgtcagccgctacaacagcgatgcgctgcgccttatcgccggccagcactcgcagcaaatcgatgccattctgggctatgaatacggcccggtggccgtccaccgcgatgatatgatcatccgttaa

SEQ ID NO: 215220 - DNA, 462 bp, Klebsiella pneumoniae; identical to SEQ ID NO: 136352

SEQ ID NO: 215221 - DNA, 870 bp, Klebsiella pneumoniae
atgcacgttcgctattctctgctcgcctcgcaggcgacaacggccctttttgtgctgctgtggggcagcgcggccatcttcacccgctggggactggataacgcctcgccgatggcgctgctggtctttcgttttctggttgccctggtcgcgctggcgccgctggctatcgtccgtcggcgctggctgcccgcgccgggcacccgcctgcaaacagcggccaccggtctgatgctgattggcggctattcggtctgttacttcgaggcgatggccaacggcgtgacgccgggacttatcgccaccatcatggggatccagcccatccttacgctttgcgtggtggagcgccgcctgcaggggcggcggctgtcaggactgctgcttgccctggcggggctggtgctgctggtgtggcgcagcctggcggcctcgccgatggcgacggcggggatcctgtttgcgctggcggcgctgctgctgatgacctttggcgcgctgtggcaaaagcgcagccgtcaggcgccggcggatgtcctgccgctgcagtatgccgttagtctggggctgtgcctgctgattgccccggtcagcggcttccagtttaccgttaacgccgggttgattattccggtgctgtttctcggactgctgatttcggtggtcgcccagctactgctgtaccgtctgctgagcgcgggaaatatcgtcaatgtcaccagcctcttttatctggtgccagcgatcacggcgctgctggattatctgctgctgggcaaccggctgccggcggcggcgatgatcggtatgatggcgatcgtcggcgggatcgtgctggtgttccgcacagcgaaggtccgcgccggctga

SEQ ID NO: 215222 - DNA, 666 bp, Klebsiella pneumoniae
atgggcaacacgctgacgatttttgatctcgataacaccctgatacagggcgatagcagtacggtctggagccagtttatggttcgcgaagggctggcgacgcagaaggggtatcttgcccgcgaggcgcggctaatggcggattatgaccggggagagatgaatatcgccgattatgtggccctgatccaggcgccgctggccggaataccgaagtcggacgttgacgcgctggtggccggctgcgtgcgcgaggcgatcctgccccgggtctatccgcaggcgtgggagctcattcgtcgtctgcgggccgagggagagcagatgctgattatctccgcctcggttagcctgctggtgcaggcggtggccgccgcgctggagatcgatcaggcgctgggtattgacgtggcgatggtcgacggcggctacagcggtgaaatcaccgggatccccagctatcagcaggggaaggtggcgcgtctggcgcagtggcgcgaggcgcatccgcagtatgacggcgaggtgacgttctataccgattccattaacgatctgccgctgtgcctgcatgcggatcgcgtgcggctggtcaatccctgtccgcagctgcaggcggccggtgccggatacggctggccggtgctgagctggcggctggaatag

SEQ ID NO: 215223 - DNA, 963 bp, Klebsiella pneumoniae
atggcattcacatcgcgaattactcttctggcggcgctggctgtcgccgccttccaggcgcaggcggtcaacgttaccgtggcgtatcaaacctccgctgagccggcgaaagtcgcccaggcggacaacaccttcgccaaaaccagcggggcgaccgtcgactggcggaaatttgacagcggcgccagcgtggtacgcgccctggcctccggcgatgtgcagatcggtaatattggctccagcccgttggcggtggccgccagccagcaggtgccgattgaagtgttcctgcttgcctcaaagctcggcaactccgaagcgctggtggtgaagaaaagcattaccaaaccggaagatctgatcggcaagcgcatcgccgtgccgtttatctccaccacccactacagcctgctgtcggcgctcaaacactggggcatcaagccgggccaggtacagattattaacctgcagccgccggcgattatcgccgcctggcagcgcggagatatcgatggcgcttacgtctgggcgccagcggttaacgaactggaaaaagagggcaaggtgctgaccgattcttctcaggttggggagtggggcgcgccgacccttgacgtctgggtggtccgtaaggacttcgctgagcagcatccggagatcgtcaaagcgtttgctaaaagcgccatcgacgcccagcagccctacatcgccaacccggaggcatggctaaaacagccggacaacatcagcaagctggcgcgcctgagcggcgtgccggaagccgatgtccccgggctggtgaagggcaatacctatctcaccgccgctgagcaggcgcaggcgctgaacgggccggtcaatcaggccatcgtcgataccgcgcgcttcctgaaagagcagggcaaagtgcctgcggcgggaaccgattatcgtcagtacgttactgaccgctttgtgaagtaa

SEQ ID NO: 215224 - DNA, 768 bp, Klebsiella pneumoniae
atgctgcaaatctcgcatctttccgccgactacggcggtaaaccggcgctggcggatatcaacctgacgctggagagtggggagctgttggtggtgctggggccttcgggctgcggtaaaactaccctgctgaacctgattgccggattcgtgccctatcagcacggcagcatcaccctcgaaggtcagcgggtgaccgggccgggcgcagagcgcggggtggtcttccagaatgaaggtctgctgccgtggcgcaatgtgcaggataacgtggcgctgggcctccagttggcgggcgtggataaagcgcagcgccggcaagcggcggcgcagatgctgaagaaggtggggctcgaaggggcggaaaagcgctttatctggcaactgtccggcggtcaacgccagcgggtgggcatcgcccgggcgctggcggcgaatccgcagctgttgctgctggatgagcccttcggcgcgcttgacgcctttacccgcgagcagatgcagacgctgctgctgaaactgtggcatgagaccggcaaacaggtgctgctgatcacccatgatattgaagaggccatcttcatggcgaccgagctggtgctgctgtcgccggggccgggacgggtggtggagaggctgcgacttgatttcagccgtcgctttgtcgcgggcgaatcctgccgcagcatcaaatccgacccgcgctttattgaacagcgggaatacattctgagccgggtgtttgaccaacgggaggctttctcatga

SEQ ID NO: 215225 - DNA, 828 bp, Klebsiella pneumoniae
atgagcgtggtactgaacgacaaaccgcgtcagtcgacgctgaagtggcgctggccgctctcccgccagctcaccctcagcgtggcgaccctggcggtattgctggccgtctggtgggcggtcgcggcgttgcagctgattaacccgctgtttctgccgccgccaggccaggtgctgcagaagcttatcaccatcgccgggccgcagggctttatggatgcgacgctctggcagcacctggcggcgagcctgacgcggatcgttatcgccctgctggcggcagtgcttattggcgtaccggtggggatcgccatggggctcaactcgacggtgcgcgggatcctcgacccgctgatcgaactctatcgtccggtgccgccgctggcctacttaccgctgatggtgatctggtttggcatcggtgaaacctcgaagatcctgctgatctacctggcgattttcgcgccggtagccatgtcggcgctggcaggggtaaaaagcgcgcagcaggtgcggattcgcgctgcccgttcgcttggcgccagccgggcgcaggtgctgtggctggtgatcctgcccggcgcgctgccggagatcctcaccggactgcgcattggtctcggggtgggctggtcaacgctggtggccgctgagctgatcgccgccacccgcggattaggatttatggtgcagtctgccggcgagtttctcgccaccgatgtggtgctggcggggatcgcggtgattgccattatcgcctttttactggaactgggtctgcgcgcgctgcagcggcgcctgacgccctggcatggagaagtacaatga

SEQ ID NO: 215226 - DNA, 492 bp, Klebsiella pneumoniae
gtggtggcttatcgacgttattacattaagggaggaacctggttcttcactgttaaccttaaagaccgtagaagcatgcacctaactgaaaacatagaattattgcgctactctgtcgccgttgttaaacaacatcgcccctttattattgatgcctgggtggtgttgcctgaacatctgcattgcatctggacactacctcataatgatgacgatttttcttcacgctggagagatatcaaaggctgttttagcagaacgttaaaacgacaacccctctggcaaccgcgcttctgggagcatgccatacgcgatgaagatgattaccgccgacacgttgattacatccatatcaatccacttaagcatggctgggtcacccgggtgatcgattggccattttcaacctttcatcgcgatgtccagcgcgggctatatcccccaaattgggctggcgatagctttgatcttagctgcggtgaacgccgatag

SEQ ID NO: 215227 - DNA, 1221 bp, Klebsiella pneumoniae
atgtttaaatcttttttccccaaaccggggccgttttttatttctgcctttatctggtcgctgctggccgtgatcttttggcaggcgggcggcggcgactggctgctgcgggtcaccggggcatcgcaaaatgtggcgatcagcgcggcgcgcttctggtcgctcaactatctggtgttctacgcttactatctgttttgcgtcggcgtgttcgcgctgttctggtttgtctactgcccgcaccgctggcagtactggtcgattctcggcacctcgctcatcatcttcgtcacctggtttctggtggaagtcggggtggcgatcaacgcctggtatgcgccgttctacgacctgatccagagcgcgctggccaccccgcataaggtcagcatcaaccagttttatcaggaaatcggcgtctttctcggcatcgcgatcatcgcggtgattattggcgtgatgaacaacttcttcgtcagccactacgtcttccgctggcgcacggcgatgaacgagcactatatggcccactggcagcatctgcgccatatcgaaggcgccgcgcagcgtgtgcaggaagataccatgcgttttgcttccaccctcgaagatatgggcgtgagctttatcaacgcggtgatgaccctgatcgccttcctgccggtgctggtgacgctctccgaacatgttcccaacctgcctatcgtcggccatctgccgtatggcctggtgattgccgctatcgtctggtcgctgatgggtaccggcctgctggcggtggtggggattaagctgccgggcctggagtttaaaaaccagcgcgtggaagcggcctatcgtaaagagctggtttacggcgaggacgatgaaactcgcgccacgccgccgacagtgcgcgagctattccgcgcggtgcgtcgcaactatttccgtctctatttccactatatgtatttcaatatcgcccgcatcctctatctgcaggtggataacgttttcggccttttcctgctgtttccgtcgatcgttgccggtacgattaccctcgggctgatgacgcaaattaccaacgtcttcggccaggtgcgcggctcgttccagtacctgatcagctcgtggacaacgctggtggaactgatgtccatctacaaacgtctgcgcagttttgaacgcgagctggacggcaaaccgctgcaggaagcgatcccgacattacgttaa

SEQ ID NO: 215228 - DNA, 795 bp, Klebsiella pneumoniae
atgggcctgttaaaccggataaaaatgctgtggcgagccgccgtcggctcgtcttattcctggcctgcgatggatatcgtcctgcccggcgaacgctatttgcacctcgtcggcagtatccatatgggcacccgcgacatggcgccgccgccggcgaagcttctgaaaaaaatacgccaggccgatgcgttaatcgtcgaggccgatatcagcggcaatgaaaccccgtttagcaatctccccacttacccaccgctggcggaacgcctgagcgatgcgcagctgagcgagctagaggcgcgagccggcgagctgggcctgtcggtcgggctgttcgacagccagccgctgtggcaggtggcgatggtcctgcaggccacccaggcgcagaagctggggctgcgaccggattacggcatcgattatcagttgctgatggccgcccgcgagagcaacatagcggtgatggagctggaaggcgccgacagccaaatcgcgctgttgcgcgatctgcccgacggggggatggcgctgctggaggatacgctgacccactggcgcaccaacgcccgtttactgcaggtcatgatcggctggtggctggagcaaccgccgtcgcgcggcgcggtatcgctgccgacgacctttagccagtctttatatgatgtgctgatgcaccagcgcaacctcgcctggcgcgagacgctgctggccttgccgccggggcgctacgtggttgccgttggcgcgctgcacctgtatggcgaagggaatctgccggatatgctgatataa

SEQ ID NO: 215229 - DNA, 918 bp, Klebsiella pneumoniae
atgctaatttttattcctatccttattttcgtcgcgctggttattgtggccgcggcggtgaaaattgtcccgcagggctaccagtggacggtggagcgcttcgggcgttttacccagacgctgcagccgggattaagcttagtcgtgccgtttatggaccgtatcggccgcaaagtgaacatgatggagcaggtgctcgatatcccctcgcaggaggttatctcccgggataacgccaacgtcaccatcgacgcggtctgctttattcaggtgatcgacgcgccaaaggccgcctacgaggtcagcaatcttgagcaggcgatcgtcaacctgacgatgaccaacatccgtaccgtgctcggctcaatggagctggacgaaatgctctcccagcgcgacagcattaacacccgcctgctgcatatcgttgacgacgccaccaacccgtggggggtgaaaatcacccgcgtcgaaattcgcgacgttcgcccgccggcggagcttatcgcctcgatgaacgcccagatgaaagccgaacgtaccaaacgcgcgtacatccttgaggccgaaggggtgcgacaggcggaaattctgaaagcggaaggggaaaagcagtcgcagatcctcaaggccgagggcgaacggcagtccgcgttcctgcaggcggaggctcgcgaacggtccgccgaagcggaagcccgcgccacccaaatggtctcctcggcgatcgcctcaggcgatattcaggcgatcaactacttcgtggcgcagaaatacaccgatgcgctgcagcagattggcgccgctaacaacagcaaagtggtattgatgccgctggatgccagcagcctgatgggatcgatcgccgggatcagcgagctgatcaaagaaggcgctggcgatcggaaaaaatcatga

SEQ ID NO: 215230 - DNA, 678 bp, Klebsiella pneumoniae
atgaaggaaaataacgcgcttttgcgtctcgacggtgtggggtttaagaccgacgacgccgttattttacacaatatcaattttcagcttcgcgccggagaattcaagttgattaccggcccttccggctgcgggaaaagtaccttgctgaagattatcgcctcgctgctcagcccaacctccgggcgcctgttcttcgacgatgcggatgtcgcgacgctgtcgccggaaaggtatcgccaacaggtctcttactgcgcgcagacgccggccctgttcggtgattcggtttacgataatctgatttttccgtggcagatccgcaataaacaaccggatccgcaggcgctgctggccgacctgcagcgctttggccttgacgaaaatatgctggaaaaatccattaatgaactctccggcggggaaaagcagcgcgtatcgctgatccgcaatctacaatttctgccgcgcgtgctgctgctggacgaaattaccagcgcgctggatgaaagtaataaacagaatgtgaatgacattattcatggctacgcaacggaaaaacaggtcgctgttctgtgggtcacccacgatcgcaatgaaatttcgcatgccgatgaagtgattacgctgcaacctgccggcggaaatatgcaggaggtacagcatgaacgggcataa

SEQ ID NO: 215231 - DNA, 687 bp, Klebsiella pneumoniae
atgccagcggaaaacatacttgaagttcatcatcttaagaagtccgtcggtcagggggagcatcagctctccatccttaccggagttgagctggttgtcaaaccgcggcagaccatcgccctgatcggcgagtcgggttccggtaaatcgaccctgctggcgatcctcgccggcctcgacgatggcagcagcggggaagtatcgatgctgggcaaaccgctgcaccggatggatgaagaggcgcgggcggcgctgcgggcgcagcacgttggttttgtttttcagtcgtttatgctgatcccgacgctcaacgccctggagaacgtcgagctgccggcgctgctgcgcggcgccagcgatagccagagccggggcgatgcccgcgcgctgcttgagcagctgggacttggcaaacgcctgcaccacctgccggcgcagctctccggcggcgaacagcagcgggtggcgctggcccgggcctttaacgggcgcccggccattctgttcgccgatgagcccaccggcaacctcgatcgccagaccggggacaaaattgccgatctgctgttctcgcttaatcgcgaacacggcaccaccctgatcctcgtcactcacgatccgctgctggcggcgcgctgcgatcgccgtctgcgcctggtggatggccagctgcgggaggaagcatga

SEQ ID NO: 215232 - DNA, 939 bp, Klebsiella pneumoniae
atgacgcctgaagaaaaagaaaacgctctccgcgcccaggctcgtcgctgcgcagaagagctaaccaaagcgatgagcgtaaagcctaaaccgaagtggaacgctgtatgccccccccatccttcgcaggcactacgagaaggtaaagccgatgggtgtcagcctggtaaaatttgtcagtgttattggccgcatgaatgggcggtatggagtggaatcatgaaagaacgcggaatgatttttaacgccgatatggtgagggccatcctcgacggccggaagactcagactcggcggcctatcaaatggaaacagactcggttcactgaaattggtgagcgcgaagacggtagcaaatggccgtggagcgaagatgcagagcatgcttgcgacttctggcacccatgcccgttcggcgccgtcggcgaccgtatctgggtacgcgagacgtttcaggggccgctgttcgactacgacctaatggatagctattgcaaagaccccactccgtttgagaagcccgaattctgcgtttacaaggctgatggagtgccagcgccagagttttacgatgcagatgatgaactgcattgcagctggcgaccatctattcacatgccgcgctgggcctgccgcattctgctggaaatcaccgacgtacgggtcgagagactgaacgctatcagcgaagaggacgcacaaagcgagggcgttcataccgaggtatgggaccagacagtagtcgcaaggaattacgcggcaattgatgagtttttccaattttggaccgaggacatgccccactacgtagaaatgaatcaactgtatcggtcctcattcagaagcctgtgggaatccatctatggcgccgaaaactggcaagccaacccctgggtttgggttatcgagttcaagcgcgttgaaggcggtgcagcatga

SEQ ID NO: 215233 - DNA, 657 bp, Klebsiella pneumoniae
atgaaccgctactcacttatctatgccgacccggcctggtcttacgggaacacgatcagcaacggcgccgccgtcgaccactaccccaccatgagcttgctagatatgaagcggctcccggtatgggagctcgccgcggataacgccgtattggcgatgtggtacaccggcacccacaaccaggaggcgatcgaactggccgaagcctggggctttacggtacgcacgatgaagggattcacctgggtgaagttgaatcagctggccgaactgcgcattaacaagaagctggcagatggagatgttgccgacttttacgacttcctcgacctgctgaacgccgaaacgcgcatgaacggtggcaaccacactcgcgccaataccgaagatgtactgatagccacccgcggcgccgggctggaacgtaagcacgctggtattaagcaggtggtctacagccctctcggcgcgcacagcgagaaaccgtgggaagttcgccatcgactggatctgctttacggcgacgtgccgcggattgagttattcagccgcagcgcagcgccaggctggagccactggggcaaccagtgcgccaccgcttccgttgagttgatccccggctgcgtcatcgacgtagtgaagacggaggcagcatga

SEQ ID NO: 215234 - DNA, 429 bp, Klebsiella pneumoniae
atgaaacgcactccattttaccgcaggcccggaaaagcagggaaattctccggccttcgcgagcgcgtgatctggatgattcagacgcgcggccgccctgtaaccggcagcgaaatagcggagaaattcggcgtgacgcttgtcgaatttaaccgcgttgcgaacggcataaccaagggagaaggccgcattgcacagctgatcgcatcagaaacctggctcaacgaggacggcatttgcgatcgcacctttgacctgatcacaaggccaaaggtcattaccccgcagggtaaaacgcgcctgttcactaagcgctcgatagctcaggccgcctctggaaaccgccagaaatgtattgataaagcggcccggcgccgccggcttatcgcatcgggcctctatatcgatgaaatggagtcagtcctatga

SEQ ID NO: 215235 - DNA, 681 bp, Klebsiella pneumoniae
atgacaccagaaattatccttgcacgcactggcattgatgttaccggcgttgaacagggtgatgaatcctggcaccgcttacgcctcggcgtgatcactgcctcggaagttcacaacgtcatttctaagcctaagtcaggaaagaaatggactgatatgaagatgtcctacttccttacgctccttgccgaagtgtgcaccggcgtggcgccggaagttaacgccaaggcgctggcctgggggaaacagtatgaggccgacgctcgcaccctgtttgagttcaccaccgacgtgcaggtaacagagtcgccgatccttttccgtgacgaaggtatgcgcaccgcctgctcaccagacggcctgtgcagtgatggccgcggccttgagctgaagtgccctttcacctctcgcgacttcatgaaattccggcttggcggcttcgaggctatcaaatccgcctacatggcccaggtgcaattcagcatgtgggtaaccggcaaggatgcctggtatttcgcgaattatgaccctcgcatgaagcgagaaggtattcatcacgtggttgttgagcgcgacgacaaatacatgtccgccttcaacgaaatggtgcccgagttcatcagcaagatggatgaatcgctggcggagatcgggttcaccttcggggagcagtggaaatga

SEQ ID NO: 215236 - DNA, 846 bp, Klebsiella pneumoniae
atggctaacgaacttgtgattacagccagctctcttgctgagcgaggcattgacggcgctacctggagcgccctcaaaaacagtatttaccctggcgccaaagacgaatcggtaatgatggcgctggactactgccgggccagaaaccttgatccgcttctgaagcccgtccatctggtgcctatgagcgttaaggactcgaagtcggggaaaagcgagtggcgcgatgtggttatgccgggcatcgggctttatcggattcaggccgatcgctccggtgattacgctggcgcaaaagaaccagagttcggcccggacgtcactctgacgcttaccggtattgaagtgaccgtacctcaatggtgcaagtacacagtcagcaagcgcatgccgagcggggagatcgtcgaattcagcgcgaaagaatactgggttgagaactatgccaccgccggccgcgacactaccgcgccaaacgcaatgtggaaaaagcgcccttatggccagctggcgaagtgtgctgaggctcaggctctgcgtaaggcgtggcctgaaattggacagcagcccaccgccgaagagatggaaggtaaaacgctggaagttgatgcgcgtgacgtaacgccgcgcagcgctacagaggcgctccctctggcggccagcgatgaaacgctgcaggcaataactgacctcctgacgtccctgaataaggactgggaacaggacttcctgcctctgtgcagcaacatcttcaagcgtgacatttcccaggcatcacagctcaccgaagaagaagcacagaaaggctttagcttcctccagaaaaaagcgcaggtggcagcatga

SEQ ID NO: 215237 - DNA, 285 bp, Klebsiella pneumoniae
atgaacgcataccgcgcatatgacgtgatcgaagagcgtaagtgggctgagcaaacgctgtccgaagagaaggaaaagtggattgacgatcgggcacaggaaattatcgacgccctgccgaaagagccgtcaggcctgttccgcttctctgtgccgatggacaaaagcccatacgaaggcctccgcagcgatgcagctggcgaggcatataacgatctcatctcggcagtagcttacgcccaggcggagtacgactgggatcaccgcaccggctgcccgttttaa

SEQ ID NO: 215238 - DNA, 972 bp, Klebsiella pneumoniae
atgagcgaaataatggatttaaccgtcatcgaaataaaaccagaacaggcgccgaccctgtaccgggctggcggtcttgacgcttaccttgagcagattcgccaggccgtgaacgaggttccggacctgaccaccaagaaaggtcgtgaccgtgtcgcctctctcgctgcgcaggtatcacgcagcaagacggcaatcgaaaagccgggccgcgagtacctgaaacgccttaaagaggctgtgcgccctgctgaggcggaaattaagcggtttgttgatgcatgtgacgagctgcgcgacgcgacacgtaagccactgaccgaatgggaagccgagcaggaacgcattaaggccgaagaagccatgaatgcccttcacgtcgaagcgctggccatgaatgaagagttcgatcgccagctggcagctcgtattgagtcttaccacgaaatggccctcctgatgaatgacgctttcgaccgtgagcaggccgagaaaaaagcagaagccgagcgccagcgcattgcccgcgaagaagtgattaagcgcctggcagaagagaaagcgaagcgtgaagcagcagaacaggcgcagcgtgaaattgacgccgcagccgccagagagcgcgaagcgattttggccaaagagcgagccgagcgtgaacagcgagaagcagttgagcgtgcggagcgcgaaaagcaggctgctgttgaagcagagcgccgcaaagcacaggaagaagccgaccgcatccgccgcgaggcagaacagcgcgaacaggcccgccttgctgaggagaagcgcaaagcagatgagcaggcgcgccgcgaagccgacgttaagcaccgcaaggctgtaggcactgaaatcgtcaaagctcttctggccaataccagccttacccgggatcaggctatcgaggttcttaccgcggttaaagacggccgcattccccataccggtatcagttactga

SEQ ID NO: 215239 - DNA, 204 bp, Klebsiella pneumoniae
atgtcgaatgaggatgagtttttcgcagagatgcacccacagatagcgcaggtcatcgggatagcggttatgcagctgctggttgagaggcgcgagccatcaagagaggcgctgatagagatgattcaggtgttgttgcagggtgaccaggtagatctggcagtagagctggcactggacgtgctgatgcagagggaagagtag

SEQ ID NO: 215240 - DNA, 900 bp, Klebsiella pneumoniae
atgtcccaagaattatctttaacctttaccgaaaacatatattattcaacaaaagaacctgtaagcatcaaagatgtgatcacatcccttcaagggtgggaagccatcgcaaagcaatcagaaggtgttttacaggagctgaccggtgcaaatatcctcgatatatcggtgcatgtagcccgattagaagccggaagcctctatgaagatatagttattaaactcctctttggcagccaagaagaaatggacaagtttcttgctggcgctcatgcaaagctaggaaatgggaaaatgagaaatgctctcgttggtgctgtcgttataggtctagttagctatggcttggtcctggcaactaaggctatggctccgaacaacacctcccactttgaagcaaacaacaatacgattatcaatattggagctggtgaggccaatatttcacctgaacgccttcagtccatcatcgaaagcacagtcaccaataagaagacacttgccaaaaactccattaagacacttgcgccagccagagcagatgagggagcaactatggtaataggcatgggtagcggcacagtgacaatcccggctgagaccattaaaaaagccccaactgaagttgtgtttacgccggaatcgtatactcaagatcactctgatgtggatgttgaaatccgcgcattggacctcgataatccagagaaaggctgggctgcagttattcctgggttgatagatcgaagagtaaatatggtacttggtcccaacgtaaaaccctcagactttgctggtaaatttgctgtacgggctgatatcacaataacgtatcaactcaaatcatctgataagaaataccagccaaaagaagtatttataaaagaagtaatcaaataa

SEQ ID NO: 215241 - DNA, 486 bp, Klebsiella pneumoniae
atgagggctgatggtgaagatgacaagaagccttcacacataaatcatgatgtgttcagggtcgacattttggatctggccgtcagtgccggcccgggcattgtgaatcaggagttcgtggagattctccactccgttgaatatgcgccagcggaagcgcgccacatgttcgatgggcgcaaggctgagaacatccggatcatcaacgtccggggcgacagcatgtctgggacgattgagccgggtgatctgctgttcgtcgacatcagcgttaagagcttcgacggcgacgggatatacgccttcctgtacgacgacactgctcacgtcaagcgcctgcagaagatgaaggacaagctgctggttatctcagataacaagagctatgcagcctgggacccgatcgagaaagacgagatgaaccgggtgttcgtgttcggcaaggtgatcggcagcatgccgcagacgtacaggaagcatgggtaa

SEQ ID NO: 215242 - DNA, 234 bp, Klebsiella pneumoniae
atgaacccaaccattaaaaccgcaattaatattgtcggctctcagaaaaagcttggtgaagcctgcgatgtttctcagcaggcggtttacaagtggctccacaacaaggcaaaggtttcgcctgaacatgtaaacagcatcgtaaatgcaactaatggggaggttcaggcgcatcaaattagaccagaccttccaaagctattcccttctccgaagggcgttccggccgcctaa

SEQ ID NO: 215243 - DNA, 222 bp, Klebsiella pneumoniae
atggagagttcaacggcacgcaacaaaacagaggctctcagaatagagagttggttgcacaaccggatagccgagatcggcactacaacaatcgcaaatgtggccggagtgaataagtcgacggtgagtcgctggcgggagagtctgctgccgaacatgtcgctattgctggccatcctgatttctaacaggccgggagagaaaggtgactttgaagcatga

SEQ ID NO: 215244 - DNA, 729 bp, Klebsiella pneumoniae
atgtcacttatggcgaaagcaatgggggtcaaagtgggaaactcactgcgtaagctcgttcttatcaagctggccgacaacgccaacgacaagggcgaatgctggccttcgtatcaacacattgccgatcagtgcgaatgcagcaaatccgctgttcgcaatcatattgatgcgcttgaggatatggggctactcaagcgtgaaaatcgcgttggggttaacaacgggaagggtaatacatccaacgtgtattatctgagcctggatgccacccctatgccttcaaaaagcacaggggtatgccatgaaatagcaccccctatgccatctgatggcacaccccctatgccaccagatggcaccagaaccagtcactcttttgaaccagtcactgaaccagactctctctctgcgcgagggaagtttatcagcgaggctgcaaagagacggatcgggatttcacccaacggggaaatacctttccctcctgccttcaagccatcggcagatcacattgcgattgcctctgagaaagggatcaacattgaaaccgagttgctgaactttcgtgattatcaccaggcccgcggcacaaagctgatcgactggaactcggcattccgggtgtggctcaggaacgcgagagttaatccgctttcaggtcgccagagaagcgaacctgattccccacactggaacagccctgaaggctggaaggacttcatatga

SEQ ID NO: 215245 - DNA, 777 bp, Klebsiella pneumoniae
atgaccgctcagcttatgaccgcgatcagcaatcgcgatggtgatgcgctggccagaatggccgcaggtagcacggagccgcagaggcttctcgatttcgaagctgaaaggctggttgattctctgttccgacagctgaagcagatcttcccggcgtctacccagactaacctgcggaccgacgccgaagagaagacagcgaagcgccagtggattgccgcttttgccgaaaacggcatccgcacccgcgaacagttatccgccggtgtgcgctatgcgagagccagtgaatcgccgttctggccatcgccgggccagttcatcaagtggtgcaaggacagcggcaccgtgctcggggtgactcttgtcgacgtgatgaatgagttccaccgctacagccgtgagaaggggctgcatactggcggtgctgagcgcttcccgtggtctcaccctgtcatgtactgggttgttaccgatacccggcgagcaatgtaccagcgccagctcagcgaggcagaaaccgagaaatacgctgctaaaaagctggaagactgggcgctgaaagtcgccgccggagaacaaataccgtcgccggtactggctctggagaacaatcaggaagccattccgacaaaccatgtcagccgtcagcaggggtttcaccctgaaggcaaaagcttcggatgcatgccaaacgcagcatcgctcggcgcgttaactccggctcagtggctgcgggatgaatacctgcttgggaaagagagagggcttatctga

SEQ ID NO: 215246 - DNA, 303 bp, Klebsiella pneumoniae
atgaaaaagaactctggcaaacaagccgttattaacttcatcggccagcatcctggctgcagctttcaggatatccgccgcggcaccgggcttgactcttcagtggtcaattcctccctgtggcagatgcaccgtgacggacaggttaagcgtgaaggtgagtgcaggagctaccgctacaccctgatcgacacaacagccgtaaccgaaagcgatccgtctgttcagtatcgccagcgtcctggcggagtaaacccaatgaccaacctgtttaaccagtgcctggcgggagtaagaaaatga

SEQ ID NO: 215247 - DNA, 453 bp, Klebsiella pneumoniae
atgaacatcgaaatagtaaacgagctcatcgcctccctggagagcgcaggtgagctgtcgatcaaagagacaaaggttatggcgctggctaaagcgtttaagcagctggctgcggagaatgtggcgctgaaggctgcattcaacaaaccagatgcatggttgtcctgccattcgattccgccgacatatcaagagccagatcgcggtggtgagtatcttgcagtgcatgagcagcccggggagaaaaacgatgacggcagtgattcgtggcctgtttacgccaagcctgaaatcgaaacccccgccaccgatcgcatcgtagccggcattaaggctgatggggtggaggagtgggtttccagcagaggtggtcgctggaatggcacgaccgaagaagcgctgaagttcgccaaacagctgtgggaaggtaaatcagaggaggttaaatcatga

SEQ ID NO: 215248 - DNA, 363 bp, Klebsiella pneumoniae
atgagctgcggatatcaaggttatgagtttggtgcacattacccggatagcatttgctgtgatggctacctctgggatgctgacagcggtgacgaaatggggatggataacggcggagatattccttgcccggtctgtaatcgtaaggaatggctggctttctaccgtgatgaaatcatcgagtgtggcatggagcaggcagagcgaaaacgcggacctaaaactgtgaaatatggtggttttcctgagccaatacgttttgatgcaaaggctatgcgcagcattcgtcgcttgcttcgacgtggctggtatcagggcaggaaatatgacgccaagcagctgcgcgagggggtcgacaaatga

SEQ ID NO: 215249 - DNA, 207 bp, Klebsiella pneumoniae
atgagcaaccgaatccctaacttcggctggaaccgcctgaaactggcaacgctcacttatgaacaactagctcaactggaagagcaagtgaaggccgagcacgcctgcaaaaacggcattcacctcttcgacaaagccggtcagcgcaaactcgatgcccttagctgggccgtatacaacaagcagaaggcggagcgtgcagcatga

SEQ ID NO: 215250 - DNA, 270 bp, Klebsiella pneumoniae
atgagcaaatcattcatcgtaattatccggcgagcctggtgtaacgaaggcggacacggtatcgaatattcatccgaccttattcactacgagacccgcaatggagccatatcgcacggttttcgtactgtagatagcgacgacttcaacatcggcgtaatcgaggacggcaagttgatttcatttgactggatggataagccggttggagaaagcgaagacacgctggcgcagattgccgagctaatcggcctggaggatgcagcatga

SEQ ID NO: 215251 - DNA, 750 bp, Klebsiella pneumoniae
atgactgatatcaccgaactggcgaaagcggcagaaaaatatcgctccacccttgaggctcatcgtaacaacccgcgtgacggtgtggcactgaatgcctgggatgatgctaccagcaaatttatggagctggtcgacaatgacgagctcaatatcatttcggggttgctagaggcgctggagaaggcgaaggggatggaaacctactggaaaactcaatgccgtgggataacagaccactgcgaggagttgcaggcgcgcatcgccgaactggagtcccacatcgtgaagccgcctgttcacccgaccgtagccagtgagaatttagacgacgaaacgctacaggaactaatcgagtttcgccgtactacgtttgagtaccactcaaaagaagggaataaggtacagacaatcatccacggtgtaacgctcgcggccctgcgcgaactccaggaacgccgcaaggccgacagcgagccggtggcagaagtggtttcaatttatggcgaccccgaagcctttggggagcgagagattagaccgcttgtcggcattcagcaaatgccatacgggacaaagctctatcgccacgcgcagccggtgccggtagtgccgaaggaaatgacagcaggcattgccgtaaaacactgggaaggcggtagaggatctattgaaagtttcgttgctgggtataatttttgtcgcgccgccatgctcgcagccgccccgcaggaggtgaaaggtgagtga

SEQ ID NO: 215252 - DNA, 267 bp, Klebsiella pneumoniae
gtgagtgacgtaaaaagcaaaatcatgcaggtgttgatcgagggagcagatcaacaggagaaatgggcacatggtcattatccctatcgcgtggctacctggaatatccgatgcgcgatggagcgcaaattccctggggtagagtggaagagcgcagacctgcgcaaagcgctcatcgagctgtcgaaggatgggctggtatccaaatgtccccacgagagccgcattggtcaggctgtctggcgtctggaggtgaaaggtgaataa

SEQ ID NO: 215253 - DNA, 225 bp, Klebsiella pneumoniae
gtgaataaggtcgaattgcttgagaagatatcggcgctcgctactgaatgccacacactggcttgtgagcttgatattggtgatgagcgaaccgaaatgttcgaaatctacggcgcgctgcacaacctcggtcgccgcggctacgccagtcaggtggggaggcgaatgaatccactgctctcatcctgcgatgacgacgaggatgaggaagatgacgacgactga

SEQ ID NO: 215254 - DNA, 240 bp, Klebsiella pneumoniae
atgaaaaaatcagatgttttttccactatcagaaagatggtcgattgcgccccaaaaggagacagaacagttactgttcagcttcagattatcaaatattaccatcaacttactggcgtaactgctaaagagtttgttgaagaaattggacttaaaagttcattggttacactctttactgattctatgaagcttgccaagaaactgtctgaggtgggatttgataaggaaaaaatttaa

SEQ ID NO: 215255 - DNA, 258 bp, Klebsiella pneumoniae
atgtcacagtggaacattgcagtcaaatcgaaagacgagcaggacaaggtcaacgttgacctcgctgcgtccggcgtcgcctacaaagagcggcttaaccagccagtgatagctgagcaggtagccagagagcagccagaacacctgcgggactacttcatggagcgcgtccgctactaccgcgagcagagcgtccagttaccccgcgcatccgatccgcgctatctggaaatggctgagcagaacgccaagaaatag

SEQ ID NO: 215256 - DNA, 468 bp, Klebsiella pneumoniae
gtgaagcaacaattctgccttatcaacgacaatgttaagcgtaacgtcgtcaacttcatccagtctctgcccgtcgaccaccgatcgccgctgattatcgaggcgcgcgaagaaagccgcaccgacaaacagaatcgtctcatgtggccacttttgaaagacctgagcgatcaggtgatctggtacggtgaaaagctggagccagcggagtggaaagacctcatcaccgtactggtcagccagatgcaaaacccggagcgtaagcagaaatccgccccgggcatcaacggcggccgcgtctacttcggcgttcgcacctctcaatccagcaagcgctacatggttgaggtgatcgaggcgatctactggttcggcaccgagcacaatgtgaagttcagtgagaagtccagcattcggattgcatgggcccaggaatggagggcttcgcatgcacagtctgctcgctaa

SEQ ID NO: 215257 - DNA, 171 bp, Klebsiella pneumoniae
atgcacagtctgctcgctaaggtcatggagcgcggcatcttccgcgttccggcgcgccgcaagcgcaaggtcgaagttaaaccttccgatattcccacctttcactatacggctcacctggcggatgtccgctggctgcgccgcgctgcccggaggaaaagccatggctga

SEQ ID NO: 215258 - DNA, 291 bp, Klebsiella pneumoniae
atggctgatttacgcaaagcagctcgcggtcgcgaatgtcaggttcgcatcccgggcgtctgtaacggcaaccctgaaaccacggtattggcccatatccgcattgctggattgtgcgggaccgggattaagccgcctgatctgatcgccgctatcgcctgttcatcctgtcacgatgaaatagaccgtcgcactcgcctggtagatgcggagtatgcgaaagagtgcgcactggagggaatggcccgaacgcaggttatctggatgaaagaggggttgataaaagcatga

SEQ ID NO: 215259 - DNA, 363 bp, Klebsiella pneumoniae
atgaaccaatatcgcatttcattaccctggccgccaagcaacaaccgctactaccgacacaatcgcgggcgcacacacatcagcgcggaagggcaggcataccgtgacagcgtcgccagaatcatcaaagactcgatgcttgatatcggcctggccacaccactgaaaatccgtattgagtgccacatgccggatcgccggcgccgtgacctggacaacctgcaaaaggctgcattcgatgctctgacgaaatcaggtttctggctcgatgaccagcaggttgattattacagcgtgaagagaatgcctgtagtcaaaggtgggcggcttgagctaaccattaccgaaatggagtccgcatga

SEQ ID NO: 215260 - DNA, 141 bp, Klebsiella pneumoniae
atgagccgtgacgttatcgaacgcatccgcgaccgctggcaaaagcttcgcctcctgcgtagccgcggcaccgtgctggtcgactacaaaatattacgcaatttcgtccgtatctataagcgcctgggagaagaagcatga

SEQ ID NO: 215261 - DNA, 690 bp, Klebsiella pneumoniae
atgacagctcaatacttggaatttgttcgccagcagctgatagtggccaccgccgatctgagcggcgcgacgaaagggcaactggtggctttcgcagaaaatgcgcaattcaccgctacggcgcgcagccggggaaggaagaaagtagccgacccggtaaccggccgcatggtaaacccatccagcccgccaattcccgggcagcagtcccgcgcaaaaggttcatcaatcgctctcgttctgcccgttgagtattcgacggccagctggcgccgggctctgctgtcgctggaagagcatcagaaagcgtggctgctgtggaactacagcgacaatatccgctttgagtatcaggtagcgataacacagtgggcatgggaagaattccgtgatcaactcggcgctaagaaagtggccggcaagacgatggagcggctgaagaaactgatatggctggcggcgcaggatgtcaaagccgagctggcagggcgggagacgtatgaataccaaaaacttgccgctctggtcggagtgaccccgaagaactggtcagaaacgtttacagagcggtgggaggagatgaaaaccaccttacggcgccttgatagtgattctcttttgcaggttacgcgatcacgttcacaacaaaaggcgacaaatttagacttaagtcttgcaaaactggattaa

SEQ ID NO: 215262 - DNA, 468 bp, Klebsiella pneumoniae
atgagccgattagcagccattatcagcgccattatgatctgcctggttgtttgccttggttggctagccagtcactaccacgacaacgccaccgagttcaaaaggcagcgtgacgagaaggttaaagcgctaaaccttgcgaacgagaccatcaccgacatgacaactcggcagcgtgatgttgcagcgctcgatgccaaatacacgaaggaattagccgatgaaaaagctaaaaatgatgctctgcagcgcaagcttgataatggtggtcgggtgctcgtcaaaggcaagtgtccagtgtcagccgcaacccaaaccaccggcgcccccagcatgggcgatgatgccaccgtcgaactctctgcagttgctggacgaaacgttctcggtatccggtccggaatcctcagcgaccaaacagccctgagagcgctgcaggaatacatcaccacgcagtgcctgaggtga

SEQ ID NO: 215263 - DNA, 138 bp, Klebsiella pneumoniae
atgctgatactcttcattctcctgtcgatctggctctgtcgactgtcggagaagcgtggctggtttaaggtcagccatattatctcaatgctggcgctcgaagatgagcatccggcacgcggtaaggggctgcgttga

SEQ ID NO: 215264 - DNA, 144 bp, Klebsiella pneumoniae
atgcgcactactggaatcctaatggcggaaattacgcttcgcccatacatgaagccgctgctcatcctctcagtgcttttgcgctggggctggctcactaagaagtgtatccggattgtccctgtaattggcaagcaggcgtga

SEQ ID NO: 215265 - DNA, 636 bp, Klebsiella pneumoniae
atggctgaaaatgacaatcgcagaccataccctcccgtcaacttcactggcgaaaactggctgccatatacccggctgatccctgctaccgaaatcggcgaatgggtaaatcagaacatcctctccgaagatggccgaatccataaccccgaccacgagcacctgctcgatgctgacgtcgcgtttatgtgggcctccggtgcattcgccaaaagtggccgcattgtgctgggtcagtgtgagcaggtaatgatgcgcgccggaggctggcagaagtcccgcatggagcagcagatgcatgaatggttcggtcgcataccgaagttcatcatcaccctggctgccgactactgcgagcaatgtaacgatctggagttctgcgcactggtagagcatgagctttaccacatcgcccaggctaccgacgattacggcgcgccgaagttcaacaaagagaccggaatgccagttctgaagcttcgcggccatgacatcgaggagttcgttggagtggtccggcgttacggcgcaagcaaagacgtgcaggaaatggtggatgcggcgaacaggccggcggaggttgctcatatcgatgttgccagagcatgcgggacgtgcatgctgaaactggcttaa

SEQ ID NO: 215266 - DNA, 468 bp, Klebsiella pneumoniae
atggctgcactaaaaccagaggtgaaagccgccattgttcaaatgcttgcgtgctatgacacaccctctcaggtggtcgaggctgtccagaaagatttcggtatcaccataacccggcagcaggtcgaaactcacgacccgacaaaggttagcgggaagactctcgccaaaaaatgggtcgacctcttcaaccgcacccgcgaccgatttctcaacgaaatttccgacatcccgatcgccaacaaagcctaccgcctgcgcgtccttcagcgaatgtctacgactgccgaaggtatgaaaaacctcggcatgacagctcagttactggagcaggctgcaaaagaggtgggtgaggcttacagcaataagcaaaaagtcgaacacaccagtcctgacggtagcatgtcgccgcgaccaacgacgatcagactggtaggagtagagccaactaatggaaagtcaggttga

SEQ ID NO: 215267 - DNA, 1299 bp, Klebsiella pneumoniae
atggaaagtcaggttgacctacaaatcccggcgaagctcgttcccgtattcgcgacagagggcattcgctatcgtggtgcgcatggtggccgaggttctgcaaagacgcgcacattcgcgctgatgagtgcagttaaagcgtatcaggcagccgaaagcggattaagcggcgtcattctctgcgctcgcgagtttatgaactccctcgaagagtcatcgatggaggaagtaaaacaggcgatccggtctgttccctggctggatgattacttcgatattggcgaaaagtacatccgcaccaaaaaccgcaacgttagctacgtcttctgcggcttgcgccacaacctcgacagtattaagtcaaaggcgcgcatactggttgcgtgggtagatgaggctgaatcggtatcggcgacggcctggaagaagctgcgcccgacggtgcgagaaaatggctctgaaatctgggtgacatggaacccggagaaagacggcagcgccactgacaaactcttcagaaagaacccgccgaaaagctcgatgattgtcgagatgaactacagcgacaatccatggttcccggatgtgctcgaagaagaacgcctcgaagatctggaaaacctcgactacgccgattatgcgtggatttgggaaggcgcctatctggagaactcagacaagcaggtgctggcgaataaatacgtcgtacagagctttgaagacgacctctggaagaaatcagagcgcctgctgttcggtgccgacttcggtttcgcaaaagacccaagcacgcttattcggatgttcatcctggataacaacctctacatcgaatacgaggcctacggtaatggtgtagagctcgatgacatgtggaagttttacgctggaaaaaccgatgccacgccgaaacagcttgaagactggaaagttactgacgaggcgaaattccccggcatacccgaggctcgcaaatggcctatcaaagccgacaactccagacctgaaactatcagccatatcaagggccagggtttcaatatctcagcagctcagaaatggcagggcagcgtagaggatgggataacttgcctgcgtggctttaagaaaatcatcattcacccacgctgcaaggagacggctaaagaagctcgtctctactcgtacaaaactgaccggatcactggcgaggtcttgccggtcatagaggacaagaacaaccactgctgggacgctgtccggtacggactggacgggtatatcaagcacaaagcgcaagtcggcgcagtattcttctaa

SEQ ID NO: 215268 - DNA, 900 bp, Klebsiella pneumoniae
atgttccgggatatcgaggaccggtatctcggcatcaagcgcgcacttaaagcgttgttcgaccagcgcctgaccgggagagagcgagaggttaacagccacaactggcacttcctgtgccacgttaacggcgccgagccaacgctctaccaggtcaacgccggcaagtttatctacgacatgtcagcgcaggaactggcgaacctgctcgaagcggtgcaggttattctcgacgattacctgctggaaggcggcgaacaaaacctctgggcgatggattacgtcgccgcagaatacgaaagggggacgttcggtgcatacacaaacctttcccagcaatcaccagtatacgcagcgcaaaccagcatccatcaactactaagtagccccgcttacctcaaccaaatagctgcatcacgggtaacaacctacagtgattggcgaggtattagcgatgatgccaggagggatttagctggtgttattagtgatgctgtatcaagaggtgtaaacccaagagaaacagcgtcggtcattagcaaaaggctggatgtgagcatgtccagagctaaaacgatagcccaaactgaacaggtgggggcattaaggcgcgcgcagcgaaatgaaacagattgggcgaaagagcggcttggtctgaatactgccatcctatggatttctgcgctgaaatcgacgacaagggccacccatgctgcgaggcacgggaagacttattcgacagaagaggttgccgagttctattcaaagaatggcaatgctttcaattgctactgcgccaatgtcccatgcctattggatgatcaggggaaactttataacgatggactgactgaaaagctcaccaaagaaagagaaaactggaagtccaccgaggattaa

SEQ ID NO: 215269 - DNA, 240 bp, Klebsiella pneumoniae
atgagtcaagaaaataaggcgcttgctgcggcttacctgaaagagtgcgtcaattacaacccggaaacaggactcttcacttggctgaatcggcctctggaacactttaagtcacttagggcgtgtaacgcttggaactcaaggtattccggcctggtagctggcagcatccgaaaggatggatattgcgcactaaaaattgacggcaacggctataaagcacaccgcatagcctgctga

SEQ ID NO: 215270 - DNA, 183 bp, Klebsiella pneumoniae
atgagcggcgtatatttcgaatcgaagcgacatggcgatatctcatgcacgcacgttaagatcggcggcgtcgaagcgatgatgaagcaggtaggtgatcgcaaagtcattaagtcacaaggtcgcggcaacgtgcgccaagtaaaagctatcgtcagagcgttacacaaaactatccaataa

SEQ ID NO: 215271 - DNA, 1386 bp, Klebsiella pneumoniae
atgaaacgcaaccgcgttaacgtgctgaccgtcgtcaactccgcttcaaacatcaccactgaaaccatcgacggcaagccacatatcgtggttcgcggcatcacgcctgtcgtggacgatatcgtgatgaaccggaagttgtacccggcagcagaaatcgaaaaggcctacaacacgctcgagcgtaacccgatgccgctgggccacccgaaagtggatggcaagcatgtgtctgctcgcgatgtccgggcggtgaatgaatatcacgtaggcgcatggctgcagaacgtcagccacgaaggtgggaaggtgacgggtgatatgtacgttaaccgccagtacgccgagtcaagcgagaagggcaagcgcctgattaatcgcctcgatgagatgatctccggtaccaactcagaacccatccatatctctaccggactcctatattccggcattgccgctaatggtgagtcgaagggcaagaagtacaacgagatcgccaccaacatgatgtttgaccatgtggcggtgctgctcgatgagcctggcgccggaactccggaagaaggcgtgggcatcttcgtcaactcagaaggtcatgagcagcagatcgaagttgctcgccttgctgatggtatcgactgcacccgcgaaggtctgctcaacaagaccaaattcttcttcaccaacgcctccaacttctcttttgacgacatttcacgcgctatcagcgacaagttgcgtgagggtgacacagaagataagtggctatggccagaaacggtgtggccagacagcttcatctaccgcgatgaagccaagtatttcaaacagaagtacctcatcgatgacgacggcaaagccgtgtttgtcggcgaacctgtagaagtcgtgcgcaaacccattgagtacgagattaaaaccaacggagagaacgatccgatgaaagaactgattatcaatgcgctgcaagccgcgggtaagccgactgaaggcaagtccgatgccgaactgatggacgcttacaaccagctagcggcagagaaggcggcagccaagaaagatggcggcgacgaaatcgatcccgccaccggcaagcctaagaaaaaagagcaggccagcaacagcgaagaagcgccggcatggtttaagccatttgctgatgatttggcagccgttaagtcaggccttgccgtgaacgctgacaaagagaaaggcgaaaaacgcgctgccgtaaaagcgaaattcgggctggatgacctggcggtgaatgcgcttgacggcgccgcccttgatggcctgtttgctcagtgccagacctctaccggcctgaatggtgcattcagtccggtcaacaacaacgattctttcagcgaaatgccggagtaa

SEQ ID NO: 215272 - DNA, 432 bp, Klebsiella pneumoniae
atggctaaagacgggaaacacgtaattcacgcgggcgggattttccccaacccgcaacttaatcgtgaaggttctgcggccgcagcgtttctgccgggtaccgtaatctttttcagtgcagccaagcctacaccgtctgttgatggcgctgaagacgcgattctttacgttgctaactacgactatttgcgctgcaaaacggttgacgatgcctatgcgatcggtgactgggtggtaaacatccagccaacgccgggcgttttcctcaacgttcgcgctgccgctggtacctacaccaagggccagccggtttctgtggccaatggccaaattaaagcactggcagagggtgaaaccatctttgcctatgtcgaagaagacaagtccctgaccgccacagcaggcgatctggttcgcgtcgtgttcaagtaa

SEQ ID NO: 215273 - DNA, 348 bp, Klebsiella pneumoniae
atgtcggcaaccgcgaattggtcatacaccgcgacggcgacaatctggcgcaatctcggtaacgatgaatacggtgactcgctcggcttctcgccccctgagtcgattctctgtgattacgaaggcggcctgtcaaagcgcatcggcaatatcggatctgaaatcgtcgtgaagaataccgtttggtctgagtatgcactggcagcggcgggtgattacctgctgattggccagtcaaccgaatccgacccgattgtggccggcgccgacgaggtgcagcaggttatccgatatgccgacacgttcgagcgtttggctgatgattttgcgattatcacgggagtctga

SEQ ID NO: 215274 - DNA, 426 bp, Klebsiella pneumoniae
atggcagggcgagtacgcggcatgaaagaggctaagtccaaaatggacatcctcattaaagacattactggacgaaaggcagtccgcggcattcaatcggcaatattgatccttggcgctgcttccgcaaaagaggtgcctcgtgatacctcaacgttactgaatagccaattccgagaaattgacttcaatgggactctgatagccggacgggtagggtattcagcgaattatgcagtttatgtgcatgatgctccgggtaaatatttaaacacccagacggatcgccctgtaaaggccggagaggctcctggttcaagaggggttatatgggggcctaatggtaaccctaaatttctctactggcctgcgagagataacgagaaagccatgtacgaagcattcaagaaggaaatgaccttatga

SEQ ID NO: 215275 - DNA, 384 bp, Klebsiella pneumoniae
atgatgcccatgatgcatgagcgggtgcggaacatgtttgttgatgcagggctaaccgccggttttacagtgcagcaactcatgtatgacgaccctagtgatctgtcgaaggcagtcatggttttcaggccaaatggcggctcgaatgtccgcaccaatctcggatctgagtatcatgtgctcgtcgatgttgtcggcgcgaaaaataatcgcaaagacgcgctcagcgccgtacaacgcattatcgattatgtccaggctaacccaatggctgacgagtgcgtcggctatatccagaacatgggcgcgatccccgcgccggtgcttacagaagaggggcgaatagtcttcagactccagttcgcctgtacttacggcgaatag

SEQ ID NO: 215276 - DNA, 744 bp, Klebsiella pneumoniae
atggctaattgccagagctctaacgagcgcctgttcggcggagcggtcgtgctggaagtcgccgatggctgtccggatgtcaaaccactcgaaacggagtggatggcgctggctgctggtacgtccaagggcttcgacttcaacccgaactcggttacctcggatgcggatgacggtggcggctatgtcgagaccatcatcaccaacagtgacttcactctgagctttgaaggcgaagtccgcaagaaggacaaactggatcagtacggcgtcggaaaattcatcaagtattttgctgacgaattgaaggctaggcgccagcctggcatctgggttcgcatggactacggcccggtcgaatttatcggctacatgaacatcacggcgctgagttccgacggtggcactaacgacatcgttacgttctccactgagttcaaggtcggtgatgccagcaccatcgaagtcaatcctgtgacagacgttccagtcactggcgtgacggtaaccccgacaaccagcaccggcgcggctggcgggaccagcaccttcacggtgaatatcgcaccaactggcgcaaccaacaaagacttcactgttgcgactaccgatgcgaccaaagcaactgctaccgcttccggcaataccgttaccgtgacgcgcgtcgccaccggcagcgcgcagatcatcatcaacacggaagacggaaactttgcggccgtgcatacggttaccgttacctaa

SEQ ID NO: 215277 - DNA, 699 bp, Klebsiella pneumoniae
atggcggtcttgaaagacataggagagctcggcataagcgatagtcgcgagggcgggagggattatgtgttgcgtccatctttcgaggcgatgtcgaggcttggggagccagaagaaatagtaaggttgtatgctgaaataaatggaagtgatgtgcagagggctttttatgactgcgatgaagccttcggtggagtaccggactggatgttgccagtaataaataacctttctgacaaaatcctgtctgcctctatgctggttttgcaggcctgctgtgaagaggatttgactcgcgcgattggtgaatggagtgagatagaaggcaagataatgtatttgcctggcatcatgccaaaagaagatattgttactttagcaaaagaattaatgctgcatggcatcatcgggaatgccaaagtaagacgtctgcagcggcatgaggcaaaggaaactacaaccgagtttaatgcggctgagtacatcgcagccgctcagacccatttcaacattggcctgagagaagcttctcaactgacgatgacggctttccagttgctgctagctgcaaaatatcctgatcaaaaaggcttcactcgagatgaatatgatgcgatcgccaacgaatatcttgccaggcaggcagccaggagagggaaagcaaaggcgatcagacaatcatcggcggctgaaagttag

SEQ ID NO: 215278 - DNA, 357 bp, Klebsiella pneumoniae
atgaaaggcatgcgcaacatagctccgttcggattaagaatgtcggaagcgctaaaggaggcagtcgcagaacgcgccaagcgcaacggtaggtctatgaactctgagatcgtaaacatcattgaggacgcgctgctgaacgaccgggttactcctccagacatttacgctgaagcaaaagactacttccccgaagaaaaaggagaagaagttatgatatctaagaaaaaattaaacgaattgattgagcgatctatggaagaggcaattaaacacttcgcatcgacttttacccataatgcagtagatgaattggttcaatccctatccgatcgatatgagttcaaaaggaaatag

SEQ ID NO: 215279 - DNA, 174 bp, Klebsiella pneumoniae
atgagagatatgttgtttacagggcgcaagagcgaaagcttcatgttaaggatgcccgaacgtatgaaagaggaaattcgccggatggctgagatggatgggatttcaatcaactctgcaattgtgcagcgtttggcaaaaagcctgcgtgaggagcgcatgaatggtcagtaa

SEQ ID NO: 215280 - DNA, 699 bp, Klebsiella pneumoniae
atggtcagtaaaaacagcgaagccccattggcggcaacctttggggcttctatcgaaaataaccgcgaaggaaatatcgacatgaatagtgtacagaacaaagagctaagtttccacaataccaatttttcatatatggaaatgggcggtcaggtctggcttacggctgctgaagttggtcaggctctggagtacgctgacgataaagccgtgcagcgcatctactcacgccatgctgatgaatttacagcacaaatgacaggggtggtcaaactgaccaccccttcaggaaagcaggaagcgcgcgttttttctctgcgtggcgcccatcttgtagcgatgtttgctcgcacgccaaaggccaaagagttccgccgctgggtgctggatattctggatcgggaagtggcgcattcgccgattgcgaagcagttcagtgacgaagagctttgctcactgtcttacctgtggagatcaagcgcagttatgtacgaagcctgtcataacatttacccgttattactggccgcagagcacaaattactacctcgctttgcctcgatagtgactaaccatgcgaggactataaacaggacgcgagatcttcttcgccgcgaaacgaaacatattgaacaacacccatggggggatactaactggaaaaatgtattttcatacgggacgggagtattgcagtga

SEQ ID NO: 215281 - DNA, 2478 bp, Klebsiella pneumoniae
atgtctggtgacgagctcgctggaagtgttgtctatgaggtgcgcgcagaagttcagcctttgttgcagggtgggaatcaggtaaacaagatcctgtctgagatagaatcctctctggatgcgaacatcgcacaattcaaaaagatggacactcaggtttcagcgaccgcgcaaggcgttaaccagtcagtgcgtagctttggaggatttcagaacgcgctgcgccaaagtggatatcaaatccaggactttatcgtgcaagtacagggcggacagtcagccttagtagcccttagccagcaaggctcgcaacttcttggtgtatttggcaccggaggcgcagtcgctggagcactattaactttgggtacagtaatcgtcggttctctgattgcgggtatggataatgcgtctgtatctacaaaggccctgacagactcgcaaaaacgattggcggatatttttcagattacggcgaatggtgtcgttgttctgtccgacaaatttgcaaaattggctgagactagcgaaaacgccgccagggctcagctaacgattgctcttattgatgctcaaaatattattaaatcatccgtgcaaagtgttaatgatcttggagacgcccttggcacatggaaagccccgttatcagcagcgatcagccagcttgatgccttaaaggcaaggggaagtgatgtaaacagcattctgaaagagcttggtggcacatatgaagggaatatcattggccttaaccagttaaaccaagtcgtaggagaaatatccacagcctttgggattagcgccaacgatgctgttaagcttgttcaggcactggccgacgtcagacataatgccaacccggatactattgcagctttgcgagatgtaactgtcgacctaagtcaaaaatatggatacgcgaataaatcgctatctgaatttactggcaaagttggtgaatattcgcttaaggctgatcaggcggccgaatctacccgcctagcaacagaaatgcttcaaggtcataaagtcgcatctgaagctgacactgaggcaatagctcaaaacactcagaggctgcaaacctacatccagatgatcaaggatgagggtgccaccattgcaatgacagccaggcagagagctctttatagagcggagcagttaggggcaacggaagaagacaaaaaggcgatcaattcatcattcgataaaattgatgcatttaaagcagagcagcaagcacaaaaaacagcagctaaggaaagccgccggtctgcatcgcaatctgctggcgaggccaaaaagttagctagtcagcaggattcaattgctcagaagctcgaacagcttcggcagaaagctatgctcgcagctgattcttctcaagagctatcgcgagaacagtccatactctccgctcagcagtctcttggcaagggcgctacgcaggagcaaattgctctggccgggaaatatgccgctcaggcatacgatgttgccgccgctattaaggctcagcaaaaagcagagaaggagaagcaggatactgaaagcgcttatgcccaggtaaggcaggctgcatcacctgttgtcgcagtggatgatcaatttcagaagcaaatggcttccctgaatgcctatgccacgctgtaccctcagaaaattgccgaggtcgaggcgactcgcgcccagattgaggagcagtaccgccagaagcggcaggaagctatgtggcaggaactcagccagcaaagcctcggctataacatgctgacgagtgcggtggatgcgtttagcgggaatgcctccaatgcgatcaccggtctgctaaccggcacaatgtcagcgcaggaggcgatgcagtcactcggcaataccatcctgaacagcgtgatcaacagcattgttcaggttggcgtggagatgctgaaaaactttatcatcgggcagacaatcggtgccgcgtccactgcaaatgggatgatacaggcagcgctgctgacaaacgcatggacaccggcagcctatgccgcctccgtggctacaggtggcgcagccgcaaaagtaggggccgtggcctatggttctgggctggcaacatcaatggctctaagcactgtatctggtgctcgctacaatggcggcccggtatcagccggcggcctgtatcaggtcggcgagaaaggcaagccagagatttaccaggccagcaccggcaagcagtacatgatccccggcgataacgggaaggtcatcagcaataaggatatgcagtcaggaggagggatcagcgtgcaggtgaacgtcataaaccagtctactggtgccaccgtacagagtgccgacggctatatgcaggacggtagcgcagtggtggatttgctgatcaccgacatggaaagaggcggccccgtatcctctcagatgcagcagacatttggactaagccgcaaagcgcaaggtgcttactaa

SEQ ID NO: 215282 - DNA, 477 bp, Klebsiella pneumoniae
gtggcaacagttcaataccctccgttcctgccgctgccccagcgcgccgatcagaacatgacgcaggatacagcctggcagacgacgcagacggcagtcggtccattgataatcacgccgatcaccacggacctgaaagcgacctggacgctgcagtggatattcacgctggcccaggccgagcggtttaagtcatggcttcgttcgccgacctactgcgaccgcgggcgcaactggttccagatgccgatcgacctgggtgatacgcagggagttcagcagcaaacgctgcatttcgtcgatatgccggtgcagaccagcaaaaacggcaacattgtcacctggacagcaacggttatcagcaacggcatcgaggacattaccgaggactatgacgactggattgttgaggcccagcctggctatggatactggctggattacctgataaccgaagtgatgccgagggctgactaa

SEQ ID NO: 215283 - DNA, 471 bp, Klebsiella pneumoniae
atgccaacattacgagaatggaaagagaggcgtccggcgagcgacatcaaacagacggtggagttttatcatcctgcgtttggttattaccgggtggtaaataacctgtttcgtccggcgacgtttggcgggaactcattcgagcctgcgcggttcagcgtgaccgagccggcgcaggacggaacggcggtcatatcaatgaccataacgtttgtcgccgccacggaacatgtacggcagacactgaaaagctggcgcggcgcggcgcgcatgacgccgataaagtgcctgtatcagcagtggaatgcgattggtgacactacatccctgaaagactggacgctgtatgtgaacgacatttccgccgatgccagcaacgtcaccgtgaccgccggcaagaccaatccgctgacgctggccaactccatcatttacaccacgaaagactatcccggactgatcaccgtatga

SEQ ID NO: 215284 - DNA, 396 bp, Klebsiella pneumoniae
atgacacagagcgactttatcgggcttgttaacggcaagccatgggctaaccgcgcctgtagttttgagcagatggactgctggggcctggtggttctctattaccggcatgtgctcggtctggagctgcatcacatcgctggctacgaatcgggcgcggatttcatcacctgctacgaacaggaacacgcccactggcggcgtgtgccggtggcggcaaccggctgcatcgccgttttttaccgcggcgaagtgccggcgcatatcggtgtgatgatcgacccggttaagtgcctgcatgcccgcggcgaattcggtttcgtgcgctgcgacagtccgctggcattactgaaggtttacagcaaagtggagtacatggtgcatggtgcgatatga

SEQ ID NO: 215285 - DNA, 2478 bp, Klebsiella pneumoniae
atggtgcgatatgagttacagaggctgcctggcgcgccgctgcagcggggaacggtagatgccggcaccacactggtgagcttgctggattctcttcagttgcaccgcgatgttatcgttaaactgaatggccgagctctgcctgacgattacgatatcagccggccactgcgatccggcgacgtcgtggctgtgttcgaccagccagagggcggggtgggaaagctcatcaccacgatattgcgtccggtcacgaaaatcctctccggcgcgctgaaggtgttcggactgtcaaataagcctagtgcgtcggtatcggtggcgacaggcgaatcacccaacaacgacttaaccggccagacgaaccgcgcgcggctctacaaggggcgccctaacatttacggccagtgccgcgtctttcctgacctgattcaggaagcactgttcgagttcgtcgacaataacaaacaattgacggaatggttcgaggtcggttacggccggtacacgatatcgtcgatccgatactcggaatcgaacctcggcagcctggcgggcgcgagttctgcgatttataacccgggcgatgttatcggcacaattgaggtcgggtatcagtttgatgacgtggataacgagactgtaccgggcctgaacgaaagtcaggacttcccggcccagactgcgaccacgacggcgccgacatcggtggcgatcgaaagtaatcagctcaaagctgttgttctgtcgaacgacgataactttgcctacttcgcagcgctggcggtacctcatcctgtgtcattcgtcatcaatgccacctggaacgatggcggcacaagcgtcactcggaatgtcaccggtgccgggaacatcatctcctcggagagctttatcggcgacgatacgctgtcgtacacgacgttctatattggcgagctctccggagagattacatctctgccgggcaatgcggttatcaacgcgacgttgttcacactgaacgatcagacaccacttgttatcggaccttcagtgtcgccaatcgtctcgacgcaggtctgggtgcatgtgctggttcagctcggcgcgacggccggcacaacgcaataccggatcaagttctggcaggtcgatgacgacaacaatcaggtgcctggcacgtcagagcagcatgattatttcttcgataacgactttcaggtgacaacccggtatttccgcacaacgcataagttcgtcccggcggccggagcggggcgctatgcggtaactatcgagcgcctcgataacagcaatgacgccaacgtcgtgactctgatggcgatccacgcggtgaacgtacgcgaaaacgtcgtgtatccggaggacacaattgcccgaatcacgatcaagggctcgaatgacagcaacagcaaccgcgagcagaagtacaacatgctggcgcagcggcataccatcagctacgaccggactaccggcgcggttgattatgcgctgcggccgagtcgctcgtttgctgatgcaatcctgcatgagtgggtggttgtcggtaaacaggacgtggccagtattgacgtcgctgctctttatgccattgcagactctttgccggatgctcagcttgggtatttcgattacaccttctcggatgagaagcagccgttgggtgagcgcatagctacgattgccaatgtggcccgcgtcgacggcaacaatatcggcgatgtgctgacgttctggcgtgatgaaaaagtgacaaatcccgatgcggtttttgcgcgctcaaacatgttctgggacgagtacaaagtagcctggcaaatgtctctccctggtggttacgacggcgtggcgctggattacgttgacccgctgacgaacaagaaggcttacatctacctgcagatcgacagcagcggcatcaccgaggttgaggacgctaccgttaacgcgatgcagatcagcctggacggctgccgcaacgccactcaggcaaccgatcgggcctggcttgaggcgaggaaaatcctttactcacgcctgaccatgacagtgaaagtgctggagtcgacgcaggtagtgcgaggtacggtggttcagtgtccggacatgtacgacaacgcgcagcagaccggatacataaccgggcgatctggagacgtgtttgcgacctcagagcgtctcgacttctcactcggtgatatgtgggtggtgatgaccgacagtctcgggaattaccgggggcgctggcgggcctatccagtaagcggcaaagccaaggcgttccaggcttcagcagatgcttttgatctcaatatttatgaccgcaacacggcacaaaaccccagccggtatttcatcgctaccgactcggaactgaactccacaatctggcgcgtcgatagcgccaaacccaacggtgacgatactcaaacgctatctctgactgagtattcagactcgatttatccgtaa

SEQ ID NO: 215286 - DNA, 2742 bp, Klebsiella pneumoniae
atggcagaagtaccgttaccaactcccacagataacgctgttccgagcacggatatccgtgacgcagtttatgccggcgccatgctggataaggttgtcaccagtaccgacctgacatacaccgatcgcctcggcggtgagcattacaccgtagacggaattaaggcggaaggggataaggtcgttgaggaaacgaggcagaacctgatccctctcagccggcagtatatgacccttgcagatgctcaggcagatattgcgaatattccagaaggtagcgccacctatgttcgtagttctgatggaattaccctggctgacgagtatctcaataattcaggagtattagttgccactggccgggtaatgatttccaagggatatatcgatgatcttgcgtcaagggggttaatctcaactgagctggatgatggtctcgatattgttgatgttgaatatgacccagtttccatgcgcatgtctaagttcactatgcgtgatggtcgtgtgtttatccctttgctgcaattatctgaaaatgcagtcactggaaataatattcaaaatggctcagtaagctcagaaaaactttcgctggatgttcaaagtattttatctcaggaactggaccctgatactgggttttcagaaatcaactacgatccggtaaccagacgtatgtcttcatataccacaacggatggacaggtttttattcccttgctacaggtacctgagaatagcgtcgggaactcacaactttccacagaagttcagcaggtcattccactggaccttgaccctgatactggttatgtcagcgtcgactatgatccggtgacaaagcggatgtccagctatgtgacgacagatggcgatgtatttatttctcgtcttctgttgggtgatgacatcgtcggcttctcaacgctgactgaagatgtacagaataaaattattgcacacccacaggatgttgtagatgcccgcccggatgcaacgcgctcaacgctctccgaaatcgcggtgcggaccaatgcacgcgacggctctgcctggtctccgctgccgtcgcatgtgtgtaaggccgcattcggaattaatgcgaccggcaccgcgattgaataccggcaggccagcgggctgctgttcaccgggaaagcgcgggcgggcgtgtttacgccaggcgcggtgccatcgctgacgaaaaaagggcggtttctcaccaccgcagttaccacgccgacagggacgtttgctgtcggtgattactacagctacgaggcctataacacaaacggaaacctctccgagacactaccgggcacctggggcagtcagagcctgtactgcggcgacaatcttgtctggaatggtacagagttcgtcatccagcgtgggccgggcaccggtgtgattaaaatcgcggacagctggtatgaggtgactgctgctgggacgttcaacggcatggcgctgcaggcaggggacaaattgctctatacaggactgcaaactgccggtggcgcatccatgactccacgatgggtattgctgtcatcagccagtgatgcactggtttacgcgggagagtttgcgccttcctctggttatcctgctagtccactgcgtaattcggtttatcaggcatccgcagcgggtaccatttcaggaaatagtttttctgccggagattacgctctctgggatggctccgcgtggattcgcatagcaggtcaggcatccgttactgttgctgcaggcagctctatcagcctacgttgtagtcaaaactctgacgagtgggaaattcggcgttctgataagagctctggccctgtcggtgtaaggctgaaagctcaggtgatgacgacaatccgtaaatctcttgggagtaagcttctcttgatcggggattctcttttcggcagtggaaattccggcaaccaaatcctttcagaggtgagcgtgcccggggaggtccgctcctatggcggctctacttccgatcaggtcctcggtatgttaaagcaggaaattcttgttaacggggataattatgccggacaggtcatctgcttttggcacggacaaaataaccagccgacaactgatttaaatgctgcacaaatcaggcaggattctattgaaatggctgcattggttggggccagggatgccagatatatattcctgacaattatgggacaaaggaccgagacatggaacggctcacgaattgttgtacagcagcatgaggaccagtacgctaaaacgggtgttctttacgagcttggagaatggtacagaagaatatttccaggacgtttctttaacgtataccaaaatatgctttctgctgctactgacgcaattgatcctacttacccgggcatgaccgaaaaacaagttgctgttacttatggcgttctaccctggtcatttttcaatggcgggtcatttacagggttcacaacaaacgacctggtatacaaaggtacatggagtgacacagtattgccaactggtggtagttctatggattactacatcaggataggtggcggaacagttggaaacattatttacaataatggcggtgtatggtctgaaaaatcaatagaccggacacaccttagtaactctggtggtcttgcgcttgctaatggaggggcaggtttttccacaatatcatccagcgaaggtcttgccggaatgcttaacaataactttttcttttga

SEQ ID NO: 215287 - DNA, 828 bp, Klebsiella pneumoniae
atgggtcgcgccaatcctttatatggagctaattttacagatccaagaatgcctattttttatccgtaccctgggttaactgatggctctcttggtctgctggatgcctatgaagtggatgaaaactttaatttatcagcgacaggtactgatatatcaacaacgccaaatttagccgcgatcccagccgccaccttaactggtgtatcgcaggccgatctggactttaagtattcaaatacacttggtagcactgaagttaaatttgagagaacaccaaagcttggtattcatggcatagtctctcaggtcaatcaggtgtctggccacctggcccggttccgctgccctggcatcctgccgtacgttgttgcacatcagactgatcatcagttcgcagtatttgtgcatcatcgtattactcgagataagccgtcatcgacgagccagaaccctgtagaagtgttgatgtcgcataactcatctccatctaataacaagttgctgattgccagtctggatggagggttgacaggtaatcctgccctgaaatctcaagcgtcagcaaaaacaggcacagatatggctgtcgcaactgcctactacgaccatatggtttgggggtcacctagcggtttcggtacgctactgaacaatttgtgtcgttcatacgtcctttacagatggcattttattgatctcactgcagcaggtatgaccatggcagaggccacggcgtctgaacaggatatctttaacaggcgattcagttcaggcgggaagtactatggcgacacgatcccaacaaatccgtctacctttccgtag

SEQ ID NO: 215288 - DNA, 1305 bp, Klebsiella pneumoniae
atgagcactacaccgttaacgctttcttttgccggacaacaaccgcccatcgccctgccgcaggtgtcgggaacgcgggggccggtgggagtcgacatgcgcgggctaaatcagtccggattctgcagctatgaccccggcttcgccaataccgccggatgccagtcggcgatctcgtggatcgatacggaaaacagcgtgctattgcaccgcggctatccggtggatcagctggctcgccagtgcgattttctcgaagtggcctacatcatgctgaacggtgacgcgccggatgaggccagctatcaaacctttcgcgagaccatcacccgccatactctggtccatgagcagatagcccgcatgtgcagcggctttcgtcgcgactcgcacccgatggcgctgatgtgcgccctggtgggggcgctggcggcgttttatcatgacgtcctggacgtggaaaatccgcagcaccgggcgctggccgccacccggctgctgtcgaaaatgcccactatcgccgccatgagctacaagtacaccattgagcaacccgcggcgtatccgcgcaacgatctctcctatgccggtaatttcctgcagatgctgtttgctatcccggcggaaaaatacgttctcaatccggttatcgagcaggcgatgaaccagatcctggtgctgcatgccgatcacgggcagtgcgcctcgaccactacggtgcgcgcggcgggctcctccggggcgaacttattcgcctgcgtcgccgccgggctggcgtcgctgtgggggccgatgcatggcggagcaaatgaatcgagcatgcgaatgctggaggagattgaaagcgtcgatcaggttccggcgtttctgcgccaggcgaagcgcgatccgcaggcatttcgccggctgggttttggcaactcgcgctaccgtcaccgtgacccgcgcgccgatatcctgcgtgaaaccagccatcgggtgctggcggaggtaggcatgtccgaccgcctgctgcaggtggcgatggcccttgaggacgtggcgctgaccgacccctattttgtggacaatggcctgtcgccaagcgtggatttctataccgcggtgatccttaaagcgatgaatctgccttcgtcaatgtttgcggtggtcaccgcggtcggtcggacggtcggttgggtggcgcactggaacgagatgcaccaggcgccgctgaccatctaccggccacggcagatttacgttggcgagggctatcgggattacgtctcccgacgcggcgagcggtcaacgggcccgcagtga

SEQ ID NO: 215289 - DNA, 867 bp, Klebsiella pneumoniae
atgaattatcaattagtgaagcaagtcagagaaaataacccattaagaaaaagcttcattgaccttgccgttaagacttttgacctgtcttttgaagagtggtatcagcaaggttactggaccgacgcctatatcccctatgcttttgtcgaacgcaataaagttatcgctaacgcttcggccaacatcatcgacctgcgctggcagggcgagccccggcgttatattcagattggcaccgtgatgaccgaaccggaccaccgtaataagggattagccggccagcttatccatcacatcctgcaggactggcagcaggaggcggacgccttctttttattcgccaatcccaccacggtggatttttaccccaaatttggcttcacccgcagcgaagagtatcaatatattatgccagtctccccgcgagccggtgattttcgtaaactggatatggacagccctgacgatgtcgccctgctccgccattactatgaaaaatccaacccgttctcaccgctgcgggtggagcataactttggcctgctgatgttttactgctcagcctttatgaagcattttgtctattactcggcaaaaaatgaggcggtggtcatcgccatgcaaaacggtccggtgctgatctgctttgatctattctgcgacgtgggcaagagcctgtcgacgctggtcaacgaactggccgatgaccacgtttaccaggccatcctcggttttacccccagtgaagaccggctcggcgagtatgagaagatagagggagaagatatcctcttcgtctatgaccagaaggaaaacctgtttaaagacaggaagttgatgtttcctttactggcgcatgcctga

SEQ ID NO: 215290 - DNA, 1188 bp, Klebsiella pneumoniae
atgctgaatatcgccgccctgcgccagcagcaaattccgctggccgctgagccgcgctcgccggtgccgtttcatattctgatgaagccgattggccccgcctgcaatctcgcctgccgctattgctattacccgcaggacgaaacgccggtcaacaagatggatgacgcgcggctggagcagtttatccgccgctatattgccgcccagcccgccggcgcgcgggaaatcaactttgtctggcaggggggcgagccgctgctggccggcctgagcttctacaaaaaagcgctcgccctgcaggcgcgctatgcccccgacggcgtgactatcagcaacagcctgcagaccaacgggacgctgatcaacgacgcatggtgccgactgttccgcgaacatggctttattatcgggttgagcctcgaaggaaacgaagcgctgcaggactaccatcgtccggataaacgcggccggtcgacctggtcggcggcgctgcgcggcattgacctgctccatcagcatcaggtggactttaatctgctggtggtggtgcataacgagatggcggcccacgcggcggcgatttatgaccggctggtcagcctcggcgcgcgctatctgcagtttcagccgctgatgagcgaaggcgcggccctgcgcgaaggataccagctcagcgccgataactggggacgttttatggtcggcatctggcgacagtggcggaagcgctgcgatagggggcgggtgttcgttatcaatatcgaacaggcgtgggcgcagtatttcactcataccagcggcagctgcgtgcacagcgcccgctgcggcagcaacctggtgatggagcccgacggacagctctacgcctgcgaccacctgatcaacgccgaacatcggctgggccgcctcgatgagcagacgctcgccgccgcggtcgacgcctcggtgcaactgccgttcggtcagcagaaaagtctgcgccgcgaatgccagacttgctcggtaaaaatggtctgccagggcggctgcccggcgcatctaaacgccgcaggcaacaaccgcctctgcggcggctactaccgcttctttagcgacatcctcgcgccagtacgccccttttcccgcgaccttaatggcctgaaggcctggcgggccgcgtttgttgggactgcgcatactgcgtag

SEQ ID NO: 215291 - DNA, 1173 bp, Klebsiella pneumoniae
atgtcgagtacacctctcactgataatgcgctttcccggcccgccgggctgatggtgtccctgcgtttgctggcggcgatcgtgatttttgccgctattgcgccgggtattctgatgaccgcgccggcggtggcggcgcagctggccagcgaatggcagctaaaacccgggcagatcggctggctgttctcagcggagctgggggcgatgagcctggcgacgctcccggcgtggtggtggatgagccgcctcgactggcggcgggttgccctgacggccggggtggtgtttctggccgccaacctcgcctcggcggtggtcacccagtatgagacgctgctggcggcgcgctttatcgcctcgctggcgggcggcacgttgatgattttgtgcatcagctgcgcggccggaacgccgaacccgtcgcgggtctacgccttctgggtgctcgggcaactgctgttagggatgcttggcctgctggcgctgcccggcctgttcgcgacctttggcctgaaggtggtgtatctgatcctcgccgccatcatgctctgctgtttgccgctggtatccgctttccctccgcgctttcaaccgctttcagtctcccgccagcagccgtcgacggcgctgtggcgtcaggcgctggcggtgctggcggtgctcactttctatatcagccttagcgccgtgtggacctttatcggcaccatcggcagcgcggcggggctgagcccgacgcaggtcggtctggtgctggcggcggcgacggtttgcggcattatcggcgccggcggcgcggccctgcgcggcacccggcgggccgatcgtttaccggtgtggctgggctacggcctgttgatcgtcagcgttgggctgctgatcggccagccgctgctggtgcgttacgccatcgcggcgctgctgtttaagttcacctggaccttcgtgctgccctttattctcgcccgcgtggccgggctcgataacagcggtcggctaatgaacagcatcaatctggtgatcggcggcggcatggcggctggcccggcgcttgcgggggccttactgcaacacttcgccagcgccgacccgctgctggcggcggcaggcgtctgcgcgctgctgtcactgattttaattgtggcggcgtccgccgccgggaaggcttag

SEQ ID NO: 215292 - DNA, 303 bp, Klebsiella pneumoniae
atgaagataatctcagtgaaaaccttaagggacttctgggcggagaatcccgacgctgaacaaccgctaaaggcctgggtagacgaagcgacaaaagcagactggaaaaccccggcggagataaaggaccaataccgcagcgcaagtattctgaaaaataagcgggtggtattcaacattaaaggaaatgattaccggttaatcgtagccgttgcttatctgcgagggtgggtgttcgttaagtttatcggttcgcataaggaatatgacgagataaacgctgagacgatagagaggaagtaa

SEQ ID NO: 215293 - DNA, 363 bp, Klebsiella pneumoniae
atgatgaatgtgaagcctatccgcactgaacaagattacgaggccgcgttacgcgcggttgaacctttttttgataatgaacctgcgccggacacgccggaaggggatttttttgaggtgatgtgcctgctgattgctgaatatgaaaaaaagcactatcccatcgagccgccgacgccgatagaggcaatcaagtttcgcatggagcagcaggggctgaccgtcaaagatctggagccggcgattggtaaatcgaatcgcgtgtatgaaattctcaatggtacgcgcaacctgacgctcccgatgattcgccggcttcacgcacagttcggcattcctctggagagtctgatcggcgcgtga

SEQ ID NO: 215294 - DNA, 1485 bp, Klebsiella pneumoniae
atgagcgagataaccttactggcggaagtgaccgccttcttacgccagccgcacgggcagtttattgccggtcaacgtgaggcgggccgcggcgcgccgttcgcggtgatcaacccggcgaccgggcgggcgattgccgaggtcaccgcggcggatagtgaccaggcggatcgcgctatggagagcgcccgccaggcgtttagtcagtggcgcgagatgccgacgctggcgcgcggcgcgctgctgctgaagctggcggacacgctggcagagcatcgcgaagcgctggcgcagctggaaagtctctgttccggcaaaactatcacgctggcgcggatgctcgagctggaccagtcggtggcgttcctgcgctacttcgccggctgggcggggaaagtcaccggtgaaacgctggatgtctcgctgccatcgatggccggggagaaatataccgcctttacccgccgccagccgcttggggtggtggttggcatcgtgccgtggaacttctccatcatgattgccatctggaagctggcggcggccctggtctgcggctgcaccatcgtcctcaagccgagcgaatatacgccgctgacgctgctgcgcgtggcggagctggcaaaagcggtgggtatcccggatggggtgattaacgtggtcaacggcgccggcggcgagattgcccagcggctgattacgcatccggcctgcgccaaggtgagcttcaccggctcggtggccaccggtgaaaaagtccagcagtcggccagtgcgtcaggtaaacgggtgacccttgagctgggggggaaaaacgccgcgctgttcctcgatgacctgacgccggaggcgatggtcaacggcattattgaagctggctacctgaaccaggggcagatttgcgccgctgcggaacgtttttatctgccgcagggaaaactggatgcggtactggcgctgctgaaagacaagctcagcgctttggcgccggggtcgccgctggatgaacgaacgctgatggggccgctggccaaccgccagcagtatgacaaagttttgcggctcattcagaccgcccgcgacgagggcgataccatcgtctgcggcggcgaagcgctgccgggggagggctatttcctgcagccgaccgcggtcaaagtgcgcagcgaagagagcaccctgatgcgcgaagagaccttcggtccggtgtgcagttttatcggctatcgcagtgaagaagaggcgttggcgcggatgaatgcctcaccgtatggcctggcggccagcgtctggtcggataatattcgtcaggcgctacgctactcggaggcgattgaggccggcatcgtatgggtcaatatgcataccttcctcgacccggcggtaccgttcggcggcatgaagggctcgggcgtcgggcgcgaattcggcagcgcgtttatcgatgattatacggagctgaagtcggtgatggtgcgatattaa

SEQ ID NO: 215295 - DNA, 1083 bp, Klebsiella pneumoniae
atgaaatacacacttccggcgttgacgctggccatcagcgcggcgttaagcggctgcgcgacgcctcattcctctgccgtttcccaaccggttgtcgactcgccagtccctaacgtggcgcaaccgctgcagcgccagctagcggaagggctgtacgagatggcgttaagcccgcagggtgatgcgctgtacgtcgccagcgctgaaggctttaaaaatgtacagggcggggcggtttacacactggatccgcacaccctcaataccatcggcctgacgcataccgatctgaaaaacttcgctttacagctctctgcggagggtaaaacgctgtatgtcagcaattcgctggacggcggcatcagcgctatcgacaccgcctccggcaaggtaaaaaaccgcctgctgttcagcgagcgcaatgaaaaaggtcgcccttatggggcccgtcagctgctgttgctgaataatactctctacgttggcgcggtcgccgacccggcgcaaatctgggtggttgacgccacaaccctgaagctgaaaacgcggattaaaaataccggtaaatggatgaccggcctgcactactccgcgcaaaccggtcgcgtgtacgccgctaacggcagcggtgaaattctggtgatcaacccgcgtaaccaacgcattgaacagcgctggaagccgctgggcgacaagccggcgctgctgcttaatatggccgaagatagcgacaccggccgtctgttcgtgaccgacaactcgaaagcgaaaaccactctggtgctggatatccacagcggcaagctgcttaaacagctcgacgtcggcgattcgctggcggtgcagttcaataagaaacgccacgaaatttatatttcacagcgtgaatccggcaaggtcatcagccttgacgccagccgctacacgctgaagaaaagctgggcgctgccggccaatcccaacagcctgctgctttccgccgatggtcagacgctgtttgtcaccgtcaaacagcccttcaataaagaccactccactaaaggcccggacagcgtcgtacgtatcgacctgaatgcgcaataa

SEQ ID NO: 215296 - DNA, 1377 bp, Klebsiella pneumoniae
gtgaaagacgcgtcaacgtcgtcggagaccgtcacggaaagtggcccgacgcttcatcgcggtttacagaaccgacacattcaacttatcgcccttggcggcgccattggcaccggcctgtttctcggcattggtcccgctatccagatggccggtccggcggtcttactgggctacgccgtggccgggattgtcgcttttctgatcatgcgtcagctgggcgaaatggtggtggaagagcccgtatccggttcctttgcccactttgcctataaatactggggaccgttcgccggctttctctccggctggaactactgggtgatgttcgtgctggtagggatggcggagctgaccgccgccgggatctatatgcagtactggcttcccgacgtgcccacctgggtttgggcggcggctttcttcatcattattaacgccgtcaacctggtcaacgtacgcttgtatggcgaagcggagttctggttcgcgctgatcaaggtgctggcgattatcggcatgattgccttcggcctgtggatgctgttcggcggccacggcggcagcaaagccgggttcgacaatctgtggaaacacggcggcttcctcgccaccggctggcacggacttattctgtcgctggcggtgatcatgttctccttcggcgggctggagcttatcggcatcaccgccgccgaagcgcaaaacccggaaaagagtattcccaaagcggtcaatcaggtggtctatcgtatcctgctgttctatatcggttcgctggtggtgctgctggcgctctacccgtgggtggagatcaaatccgacagcagcccgtttgtgatgattttccataatctggacagcaacctggtggcctccacgctgaacttcgtcattctggtggcctcgctgtcggtgtataacagcggcgtgtactccaacagccggatgctgttcggcctgtcggtgcagggtaatgcgccgaaatttctcgcccgcgtcagcaagcgcggcgtgccggtgaactccctgctactctccgggattatcacttcgctggtggtggtgctgaactacctgctgccgcatgaagcgctggggctgctgatggccctggtggtggcgacgttgctgctgaactggatcatgatctgtatggcgcacctgaagttccgcgccgcccagcgccgcaaagggcgcgaatcgaagttcaaagcgctgctggcgcccgccagcaactacttctgcattgctttccttgggctgatcctggcgctgatgtgcactatcgacggcatgcgtctgtcggcgatcctgctgccggtgtggatcctgttcctgtttatcgccttcaaactgctgcgccgcccggcgtaa

SEQ ID NO: 215297 - DNA, 1023 bp, Klebsiella pneumoniae
atgaaaacgattaagggaccgggcatttttctggcgcagtttatcgggccgcaggcgccgttcaacaccctggcggggatagcgcagtgggccgccggcctggggtacaaggcattgcagatcccctgcaaccacccggcgatttttgatgtcgagcgggcggcggcgagccagacctactgcgacgaggtcagcggcatcctggcggagcatgggctggtgatcagcgagctgtccactcaccttgaaggacagctggtggcggtgcatccaacgtatgacgcggcgttcgacgcctttgccccggcggcgctgcatggcgatccgcaggcgcgccagcgctgggcggtggagaaagtgcgccaggcggcggtagcctccggccgcctggggctgcaggcgcacgcgaccttttccggggcgctggcatggccctttttttatccgtggccgccgcataatcagccgcttctggatgaggcctttgccgagctggcccggcgctggcggccgctgctggacctcttcgacgagcagggggtcgatgtctgctatgagatccaccccggcgaagacctgcacgatggcgtgacctttgagcgttttcttgcgctggtggataaccatccgcgctgcaatatgctctatgacccgagccacctgcatctgcagcagatggactacctgacctatatcgatatctatcatgcgcgtattaaagcgtttcacgtcaaggacgccgaatttcgccgcaacgggcgcaatggcgtctacggtggataccagccctggcagcagcgggccgggcgtttccgctctcccggcgacgggcagatcgacttcaaaggggtgttcagtaagctgaccgaatatgattttgccggctgggcggtgctggagtgggagtgctgcctgaaggatagtgagaccggcgcgcgcgagggcagcgagtttatccgccgccatatcattcccgttgccggacgggccttcgatgactttgccgccggcgggagggagtaa

SEQ ID NO: 215298 - DNA, 1152 bp, Klebsiella pneumoniae
atgattcaggttgcgattatcggggcagggtttattggcccggcgcatctggaggcgctgcggcggctgggagatgtcgaggtggtggcgttgtgcgacagccgccttgaggcggcgcagcgcaaggcgcaggcgttgaacattgcccatgcctacgacagcgtggaggcgctgctggcccatccggggctgcaggtggtgcataactgtacgcccaaccatctacatgcccagattaaccggcagatcctcgccgccgggctgcacgtcttctccgaaaaaccgctgtgtatgacggcggaggaggcgcgggagctggtggcgcttgccgcccgggccggcgtggtgcatggcgtcagcttcgtctaccgccagttcgctatggtccagcaggcggcggcgatgatccgccatggcgaggtcggcagaatcttcgcggcccacggcagctatttacaggactggatgctgctggagaccgactacaactggcgggtcgattcggcgcagggcggcgcgtcgcggacggtggccgacatcggctcccactggtgcgataccgtgcagtttatgaccggtcggcggattgtcgaggtgatggcggatctgtctatcgtctggccaacgcgtaaagcgccggtcaatggcaaagcgaccttcagcgccgttcacgaggcgcaggcatatgaaacgcggcctgtcgataccgaggactttggctcggtgctgttgcgttttgacgatggcagcaaaggcagctttatggtctctcaggtgagcgccgggcggaaaaaccgtctggcggtggagattaacggcagcctctgttctctggcctgggatcaggaagtgccccagcggctgtggatcggccaccgcgagcagccggatcgcctgctcagcgatgacccgagcctgctgcggccggaaatcgctgacagcgcccattaccccggcggccatattgagggctggccggacgcctttaagaatatgatggggcatttttatcaggcggtgcgcgccgggaagatgccggcggccggggcccggcgcttcgccgctttcgacgacggcgccgatgtgatgtacatcatcgaggcgatcgtcaaaagccatcagcagcagcgctgggtcagcgtcgaacgctga

SEQ ID NO: 215299 - DNA, 981 bp, Klebsiella pneumoniae
atgtctattcagaaaattgctcgtctggccggcgtctcggtggccacggtgtcgcgggtgctgaacaacagcgatacggtaaaagccaaaaaccgtgagcgcgtgctgcaggcgatcaaagagagcaactatcagccgaacctgctggcgcgtcagctgcgaaccgcccgcagcaatatgatcctggtgatggtctccaatatcgctaaccccttttgcgccgaggtggtgaaggggatagaagaagaggcggagaagaatggctatcgcattctgctgtgtaactccgggtcggatctggcccgctcgacctcgggcctgcagctgctctccggcaaaatggtcgacggcattattaccatgaacgcgctctccagcctgccggagctgaccaccatgattggcgacgcgccctgggtgcagtgcgcggagtatgccgacaccggcagcatctcctgcgtcgggattaacgacgttgaggcggctcagggggcggtatcccggttggccgatagcggccgccgccgcatcgcgctcattaatcacgacctcagctatcgctatgcccgtctgcgcgagcgcggctataaaagcgtgctgcacgtgcacggtctggcgtatcagcaggtgacctacgcgcaggatcttagcgcggcggccggtaaacgggcgatggagcaactgctgtcgcaagacgagaagcccgatgcggtgtttgccgtttcggactccctcgccgccggggcgctgcgggctatcgcccaggccggactgcgggtgccggaggatatcgcggtgatcggcttcgatggcaccgagctggcggaagtggtctccccgcagctcaccaccgtcgaacagccctcccgggcgatcggccgtacggcggtgtctctactgatgaaacgcatcgacgatcccgacgctgccgtcgagcgggtgatgatggactggcgcgtgatagaccgcgccagcgtctga

SEQ ID NO: 215300 - DNA, 1428 bp, Klebsiella pneumoniae
atgaatacgtctgctgtttcacccggccgcgccggtctgttgctgctgctgagcggccagatgctgccgcttattgatacctcgatcaccaatgtggcgctggacgccatcacccacaccctggcggccagcgccacgcagctggagcttatcgtcgcgctgtacggcgtcgcctttgccgtctgcctggcgatgggcagtaagcttggcgataactatggccgccggcgcctgtttatgtggggcgtcgccctctttggcatcgcttccctgctgtgcgggatggcgaacaacatcggcgccctgctggcggcccgcaccctgcagggcgccggggcggcgctgattgtgccgcagatcctcgcgaccctgcacgtcaccctcaaaggccccgcccacgcccgggccatcagcctgtatggcgggatcggcgggatcgcctttatcgtcggtcagatgggcggcggctggctggtgtcggcggacatcgccgggctaggctggcgcaacgccttttttatcaatgtgccgatctgcctgctggtgctggctctgagccgccgctatgtgccggaaacccgtcgcgagacgccgtcgcggattgactggcagggcaccctgtacctcgcgctgatcctctgctgcctgctgttcccgatggccctcggtccggagctacactggccgctgtggctgcagctgatgctggtggcggtcctgccgctgctgttcgccatgcgtcagagcgccctgcgccagcagcagcgtggcgaccatcctctgctgccgccgcgtctgctgcagttgaccagcatccgcttcgggatggccatcgccctgctgtttttcagcgcctggtccggctttatgttctgcatggcgctgaccatgcaggaggggctggggatggcgccgtggcagtccggcaatagctttatcgccctcggcgtggcctattttatttcggcgctgtatgccccgcggcttatcgcccgctacagcatggggcggatcctgctgaccggtctggcggtgcagatcgccggtctcctgctgctgtgcgccaccttctcccgcttcggcgtcgccaccaacgccctgacgctggttcccgccacggcgctgatcggctatggccaggcgctgatcgtcaacagcttttatcggattggtatgcgcgatatcagcgccagcgacgccggggccgggagcgcaatcctcagcaccctgcagcaggcgaccctcggtctcggaccggctatccttggttcgctgttcctggcgctggcccgtcgcggcggcggcaactatccgcaggcgctgattgattttctgctggtcgaggtggccatgatgctgttgctgggggcgatagcgctgtggctacgccatcatctcaaccgacagccggcgacggtggcctcgtaa

SEQ ID NO: 215301 - DNA, 867 bp, Klebsiella pneumoniae; identical to SEQ ID NO: 212762

SEQ ID NO: 215302 - DNA, 1035 bp, Klebsiella pneumoniae
atgaacgtaacccgaaaagagcagcgcattattcagcgcgcgctgaatgcctggcaggccagcggggagttaaccccctcggacagccagcggctggcgcaaacgatgcgcgtctcccccttcgactggcggcgcctgagccgctatgccttctggaccgcgctggcctgcgtgctgatttccctgggcagtctgttcgccgacagcgagctggtggcgtggctgctgagcctgttcagccactcggcgctgatgcggatcctgctgcctgcgctgctggcagtcgcctgctacggctggggttttcgtcgccagcggcgggagacgcagtggcactacagcacagaggcgattttgtttctgggcgtcgtctttaccgccgtggcgctatggcagcttggcgaacggctggataacggcagcggccatatcgcaccgctgtttctggccggatgcgtgttttacggcgccatcggctatattgcccgctccgggctggtgtggctcttttttctgctggcgctgggcaactggttcggcgcggaaaccggctacgtctcggggtggggcgcctactggctgggcatgaactacccgattcgcttcgtcctgttcggcggcgcgctgctggcgctctgctacggcgcgcaatccctgcttcgccagcggcagctgtttaccgtcagcaaggcgatgggcctcacatacctgtttattgcgctgtggatcatgtcgattttcggcaattacgacgcagacaactggtaccaggtgagccaggcgcgactcctgccgtgggggctgctgtttgccgtagcggccggcgtctgcatttttatcagcctgaaaaccgatgacggaatgctgcgcggcttcggactaaccttcctggcgatcaatctctatacccgtttctttgagtttttctggaacgggatgcacaaggtgctgtttttcctgatccttgccgtctcgctggcggtgattggccgctatgccgagcgcatctggcatgcggggaacgttaagccatga

SEQ ID NO: 215303 - DNA, 2724 bp, Klebsiella pneumoniae
ttgaccaagatgaataacccaaagtttacgacgccctcgggcaacaccgcgccacggcaggtctggcagcagaccgttgacgcagtgctggcgcagaccaaaagccaggccgctgggttaagttccgcagacgccgccgagcgcctgaatacctgtgggccgaatgcgctgccggaaaagaaaggcaaaccgggctggctgcgctttctcgcccactttaacgacgtactgatttacgtgctgctggccgccgcggcgctgaccgccatcatggggcactgggtcgataccctggtgatcctcggcgtgacggtgattaacgccctgatcggccatatccaggagagcaacgccgaaaaatcgctgcaggggatccgcaacatgctctccagcgatgcccgcgtccagcgtaacggcaagcatgagactatcccgacgcgcgacctggttccgggggatatcgttatcctgcgcgccggcgaccgcgtgccggcggatatgcgcctgattgaaacccacaacctgcgggtggaagaggcgatcctcaccggcgagtcgacggtggtggataaaatcaccgacgcgctggagggcgatctgccgctgggcgaccgggtgaacatggtcttctccgggaccaccgtcagcgccggcggcggcgtcggcgtggtgaccgccaccggcgcgcagaccgaactcggccatatcaaccagatgatggcgggtattgagaagcaccgtaccccgctgctggtgcagatggataagctcggcaaagcgattttcgccattattctcgccatgatggtggcgctgtttatcttcagcctcgcgctgcgggatatcccgatgggcgagctgctgctgtcgctgattagcctggcggtagccgcggtaccggaaggactgccggcgatcatctcgattattctgtcgctcggcgtgcagacgatggcgcgcaagcgggcgattattcgtaagctgccgaccgtggaaaccctcggcgccatgaccgtggtctgctcggataaaaccggcaccctgacgatgaacgaaatgaccgtcaaagcgatcatcaccgccgactgctgctatcgggtggaaggcgacagctacgagccgcaggggcggatcttcctcgaggggagcgatgagcccgtgcaggttcagcccggcaccgtgctggagacctggctgcgcaccatcgacctgtgtaatgacagccagcttacccaggatgagcgcggtctgtgggggatcaccggcgggccgaccgaaggggcgcttaaagtgctggcggcgaaagcgcagctcccggcggtggaggcccgtctggtggccaagatcccctttgactcgcagtacaaatatatgtcgaccctgcagcacatcgatggcgatgcccgggtgctgatcaccggtgcgccggacgttatcttcgccatgtgccgcgagcagatgagccgccacggcgcggtgccgttcgaggcgcagtactgggaagaggagatggcgcgcttcgcccgtcagggactgcggatggtggcggcggcctgtaagccggccagccttgatgccaccaccctcaaccatgaggacctgcaggagggactgattttcctcggcatcgccgggatgatggatcccccgcgtccggaagccattgacgccatccacgcctgccagaccgccggcatccgtgtgaaaatgattaccggcgaccacccgcagacggcgatgagcatcggccagatgctggggatcaccaatagcagccaggccatgaccggctaccagctggagcacatggacgatgcggcgctggcgaaggcggcggtggagtacgacatctttgcccgtaccagcccggagcataagctgcgcctggttaaagccctgcaggataacggcgaagtggtcggcatgaccggcgacggcgttaacgacgcgccggcgctgcgccaggccgacgtgggtatcgccatgggtatcaaaggcaccgaagtcaccaaagaggcggccgacatggtgttgaccgatgataacttcgcgaccatcgccagctcggtaaaagagggccgtcgggtctatgacaacctgaagaagaccatcctcttcatcatgccgaccaacctggcgcaggggctgctgatcatcatcgccctgctggcggggaacattattccgctgaccccggtgctgatcctgtggatgaacatggcgacgtcggcgacgctctccttcggcctggcctttgaggccgcagagcgcaacgtgatgaaccgtccgccgcgtaaaaccggccagcatgtgatggatggtttcgccgtgtggcgagtggctttcgtcgggtcgatgatcgcgattgccgcctttatccttgaggcctggctggcgccgcgcggccacagtccggagtttatccgcaccgtgctgctgcagatgctggtgacggcgcagtgggtctacatgatcaactgccgcagcagcgacagcttctccttgagcatgggtctgctgcgcaacaaaggcatctggctggtgaccggcgtcctgctgctgatgcagctggtcattatctatgtcccgctgatgcagagcatgtttggtacggaagcgctgccgctgcgctactggtttgtcactctggtcatcggcgtcgccatgttcctggtggtggaagtcgagaagcgtctgacgcgccggttccgcaaaacggcctga

SEQ ID NO: 215304 - DNA, 1080 bp, Klebsiella pneumoniae
atgattaaaaccttccgctttgctctgctggcctgcggtctggtcggcggcaccctgacggcgaccgccgcgccggcggtgccggtccgcgtcgccacggttgaactggctcctcatgctgaagaacgcgctatccccgggcgggtcgaggcgatccgcgccgtcgacattcgcgcgcgcaccgaaggggtgattgttcagcgccacttccaggacgggcagtatgttaccgaaggcgacctgctgttttccctcgacgacgcgcagccccgcgcggcgctggctctggcgcaggccgagctgaaaagcgccgaagcctcattacgtcagtcgcagcagttgctcactcgctacgagcggcttatcaacaaccactccatcagccgcaacgacgtcgatacggcccggatgcagcgcgacgtcgccgccgctgccgtacagcaggccaaagcccgcgtcgaggcccagcagattgtgctcagctacactcagattgcggcgccggtgaccggtcgcgtgggccatagcgcctttcacgtcgggacgctggtcaattcgtccagcggcgtgctggtggacattgtgcagttggatccggtgcgggtctcgttcgccctcgacgaagccgcgtttttcagcaaaaccggccagcacgccgatatccacgctctgaagcaggcgtggctggcgcagattgagattgatggtaaacggcgcgacggggtgttgacctctatcgataaccggatcgacgcccgcaccggcagcgtagcggtgcgggccgagttcgccaatccgcagcaccgtctgctgccgggcggcagcgtgacgatcctgttccgtccgcaggaactgccgtcgcgagtgatggtcccggccgccgccgtgcagcaggatccgcagggctttttcagctgggtgctgaagccggaccacaccgccgggcagcgtcgtctgaccctcgcggggcagcaggggcagcagtttgcggtcgagaaagggctgcaggcgggcgagcaggtgatcaccgacggcgcgcagcggttgcgcgaaggcgccgcggtgcaggtgctgaactag

SEQ ID NO: 215305 - DNA, 720 bp, Klebsiella pneumoniae
atgttattacgttgcctgctccctctggcgctgctgcccctggccgccgtcgccagcgccgcctgtaccctcaccgacccgacgctgaccctgcaaagctatcgggtggatgcgcagaaagagcgcattgcgatgtactggcaggatcggcacggcaaagcctggggttccctgcgttcgctgctggcgggtatcgatggcgacggccgggtgcagatggcgatgaacggcggcatttacgataaggcctacgcgccgctggggctgtatatcgaagacggcaaacggctgacgccggtcaaccgctccgccggcggcgggaacttctttatccgccccggcggcgtattcctggtggaaaacggccgggcgaaaatcgtgccgctgccggcgtacaaaccctctcccgccatccgctatgcggtgcagtccggcccgatgctgattgaaaatggcgtcatcaactggcgactgaagccctccgccagttcgcgcaagctgcgcaacggggttggtatcgataagcagggccgggtggtgtttatgctcagcgatcgcgagaccaacttttacgattttgcctgctatgcgcagtcaaagcttggcgtgcggcagatgctttatctcgacggcaccctgtcgaagatgtaccgcaaaggcggcagcgtgccgtggcagtatcatccgttcgtgaccatgataacggtggagagaaaatag

SEQ ID NO: 215306 - DNA, 1668 bp, Klebsiella pneumoniae
atgcacaaaaagacgttattttcgcgtgccggtcgtctcgccgtggcggtgagcggcgcactggccctggcgggcgccgccttacctgccaacgcctccacgctgcggatcgccatgaccgccgcggatattccgttaacccttggccagccggatcaaggctatgagggcaaccgctttaccggcatcccgctgtacgacgcgctggtggagtgggatctgtcgcaaggtgaaaagcccagcggtctggtgccggggctggcgaccgagtggcacatcgatccgcagaacaccagccgctggattttcaccctgcgtccgggggtgaagtttcatgatgggacggaggtgaacgccgacgccatcgtctggaacgtggataaggtgctgaataaagcggcgccgcagtacgccccgggtcagatcggcaacaccctgtcgcgcatgccgaccctcaccggcgcagagaaaattgacgaccacaccgtggcgctgaccacctcggaaccggatgcgctgctgccgtacaacatcaccaacctgtttatcgtctcgccgacggcgtggcagaagcagtatgacgcggtgccggccagcgtgagagatagcgccgcgcgcagcaaacaggcgtggaccgccttcgccgcccacgcggtgggtagcggcccgttcaaactggagaagctggtgccgcgtcagcagctgatcctcgataaaaaccccgactactggaacaaagatcgcattccccgggtggataaagtggtgctgatccccttgccggaggccaacgcccgtaccgcggcgctgttgtcgaagcaggtggactggattgaagccccggcgccggacgccatcgatcagatcaagtctcagggttttcgcctctacgccaacacccagccgcatctgtggccctggcagttctcctttgaaaaaggatcgccgtggcaggacatccgcgtgcgcaaagcggccaacttgtgtctgaaccgtgctgagctgaagagctacctcggcggctatatgaccgaggccactggggtctacgaggctgacagcccgtggcatggcaaacccaccttccagatcaaatatgacccggacgccgcccgccagctaatgaccgaggccggatacagtgccagcaaaccgctgcacgtcacggtggctacctcggcctccggctccgggcagatgcagcccttgccgatgaacgagtatatccagcagagcctgaagagctgcttcttcaatgtggatatcaaagtggtggaatggaacaccctgtttaccaactggcgcctgggcgcccgggacccctcggcgaaagggatcgatgcgatcaacgtcagcgccgcggttaacgatccttactttggcctgatccgcttctcgacggccaaagcgtttccgccggtggcgaccaactggggttacttttccacgccggagacggagaagctggccgccgccgtcaagcacgcctttaccccggcggagatgaacaaagcggccggtgagttgcacgccgcgctggtggatcaggtgccattcctgtttgtcgcccacgacgtcgggccgcgtgcgatttcccctgcggtgaccggggtggtgcaaccgcagagctggtttatcgacctcagcctggtgagcaaaaaagagtaa

SEQ ID NO: 215307 - DNA, 954 bp, Klebsiella pneumoniae
atgatcaatacgctgctataccgcattctgctggctatccccaccatgctgggggtggcggtgatctgtttcatgctggtgcagatcgccccgggcgacccgctggtgtcggtgatgccgccggacgcctcggaggcgctgcgtcagacattaatgcaggcttacggctttgataagccgctgcccctgcagtttatccactggctgtggcgggcgctgcacggcgaccttggtatgtcggtcgccaccggccgcccggtgatagacgaagtgatgaccgcggtggcttactctctgcgcctggcgctgctggcgacggcgatcggttttgtcctcggcagcctgttcggctttgtcgctggctattttcgcaacagcgtcattgaccgtctggcctcggtattgtcggtgtttggcgtcagcgtgccgcactactggctggggatgctgctggtgatcctctgcagcgtcaagttcgcgctgctgccggccaccggcggcgggccgataggcgaggtgggctggcaatgggactgggcgcacctgcagttcatgctgctgccggccctcaccctgtcggtgatcccgaccgggattatcgcccgcaccgtgcgctcgcaggtggccgatatcctcagccaggagtttatcgttggcctgcgcgcccgcgggctcaacgagtcgcgcatctttgtccatgtcatgaaaaatgccgcgcccaccgcgctggcggtgatggggctgcaggtgggctatctgatgggcggctcgatccttgtggagaccgttttctcctggccgggaaccggattgctgctcaataccgccatttttcagcgcgacctgcccctgctgcagggcaccatctgggtgctggcgctgtttttcgtgctgctcaacctgctggtggatattctgcagaccaccctcgacccgcgtattaagaggagctga

SEQ ID NO: 215308 - DNA, 894 bp, Klebsiella pneumoniae
atggtggatacagcaacgacgaaagcggtcccggccgcagcggcccacgcttcccggcaaggttactggcgcggcgtgctgcgccgcctactgcgcgaccccggcggggtggtggtgggcgtggtgatcctcctgctgctggccctggcgctgttcggtccgtggcttatcgtcaaagatccctatcaaacgtcgatgttcctgcgcctgaaacccatcggcagcgacggcttcccgctgggctcggatgagctgggacgcgacatgctgtcgcggctgatccttggcacccgactgtcgctgtttatgggaattgtcccggtggtgttcgccttttttatcggcggggccatcgggattatcgccggctatacgggcggcaaaaccaataccgtgattatgcgcaccgtggatgtgttctatgcctttccctccgtcctgctggcgattgcgctgtcgggagcgttgggggcgggcatcggcaatgcgctgttgtcgctgaccctcgtgtttgtcccgcaggtggcgcggattgccgagagcgtgaccgcccaggtgcggcatatggactatatcgacgccgcccgggccactggcgccagcgcgttgaccattatccgcgtccaggtgttgggcaacgtgctcgggccgatcttcgtcttctccaccgggctgatttcggtgtgcatgatcctcgcctccggcctgtcgtttctcggcctcggcgtgcggccgccggagcccgagtgggggctgatgctcaatacgctgcgcacggcaatctatacccagccgtgggtggccgccctgccgggcctgatgatttttatcacctccatttcgttcaatatcctcgcggaccgcctgcgtgcggcaatggcgattaaggagtaa

SEQ ID NO: 215309 - DNA, 1038 bp, Klebsiella pneumoniae
atgcaaccctttatcaatatcgaccttggcgggccggcgcagccgctgctgaaggtcaatcacctgctgaagtactttcgcggcggcaaaggccgggaggtggtgcaggcggtggacgatatcagcttcacggtgatgaaaggcgaaaccctgggggtggtcggcgagtcgggctgcggcaaatcgaccactgcccggctgctgatgcagttgctcacccaggacagcggcgaactgatcttcgacggacagggggtcggctcgtcacgtctgccgctgaaagcctaccgtcgccaggtgcagatggttttccaggatagctatgcttcgctcaatccgcgcctgaccatggaggagagcatcgccttcggccagcgcgtccacggcgtcagcgccagagaggccagcgaatatgcccgctatctgctggcgcacgttggccttgagccggcgcgctttgccgaccgctacccgcatgcgctctccggcggccagcggcagcgggtgaatatcgcccgcgcgctggcgatgaagccgcggctggtgatcctcgatgaggctgtgtcggcgctggataaatcggtggaagcccaggtgctgcagctgctgcaggagcttaaacggactctcgagctgacctacgtgttcatcagccacgatctacacgtggttcgctggctgtcggatcggatcctcgtcatgtaccttggcgaagtggtggagattggcccggcggagcagctgtttaccgcctccgcccacccctatacccgggcgctgttaagctcgatgccctccatggacccggaaaaccgcaccctgacctcgccgctaagcggcgatccccccagccccatcgcgccgccgagcggctgccgctttcacacccgctgcccgcatgcgaaggcggtctgcgccgaggtgaaaccgcggctggaggcggtcggggaggggcaccagagcgcctgcctgatggcgcagccggcctcgccctggcatcaaagcatcccccttaaggaggtcagccatgtcggataa

SEQ ID NO: 215310 - DNA, 1011 bp, Klebsiella pneumoniae
atgtcggataacgcctttgtccatgtgcgcgacctgcgggtcgtctttcgccgcgacgggcagaccatcaacgcggtcaatggagtctcctttgaggtacaaaagggggaggtgatggcgctgattggcgagtcgggttccggcaagagcgtgaccctgcgggcgctgatgcgcctgcacccgccagggagcagtgagctctccggcaccctgcaggtgggggatgacgaggtgctgacgatgagcgccagccagctgcggcgctatcgcggcggacgctgcgcgatgatttttcaggagccgctgctggccttcgatccggtctacaccgtcgggcagcagattattgaagggttgcgccgccacgaagggctgtcgcgccaggcggcccgggacagggcgctggaggccctgagccaggtgcgcattcccagccccgagcggcggctggatgcttacccgcacgagatgtccggcggaatgcgccagcgggcgatgatcgcccttgcgctctcctgtaacccgcagctgctgctggcggatgagccgaccaccgccctcgacgccacggtgcaaatccagatcctgatcctgctgcgcgagcagcaaaagcagcgcgggctgtcgatcgtgtttgtgacccacgatatcggcgccgcggtggagatcgccgaccgggtggcggtgatgtacgccgggcggatcgtcgaggaagcgtcgatgagcgagatcctgcgccacccgcgccatccttatacccaggtgctgctgggcagtcggccgaaagaggggcttaagaaaggtgatgccctgcactgcattcccggcgcgccgccggatctggcgcgcttgccgcccggctgcgcctttgccgagcgctgcccgcaccgtcgcccggtctgtgagcagagtctgccgccgacggaatccgtcgcggagcgccacgcggtgagttgccaccgctggcgcgagctggcgattgacgctaacgcccaggccctggccgtctga

SEQ ID NO: 215311 - DNA, 1269 bp, Klebsiella pneumoniae
atgagcagtgatgtactttttacccccgcgaccgacaccaccggctggcgcatcaatggcgaccgcctgtgggcgtcgttaatagatctcgcgcagatcggcgccacgccgaagggcggctgccgccgtctgaccctcaccgacctcgaccgccaggggcgggacaaggtaataggctgggcgcgggaggccgggatgagcgtcaccatcgataaaataggcaatgtatttatgcgccgggaaggccgcaaccccggcctgccgcccatcgtctccggcagccatatcgacactcagcccaccggcggcaaatttgacggcaactacggcgtgctggcggcgctggaggtggtgcgcacgctcaacgatctgcagattgccaccgaggcgccgattgaggtggtgttctggaccaacgaagaggggtcgcgctttgtgccggtgatgatgggctctggggtctttgccggcgtcttcccgctggaggagacctgggccgtcacggataaagagggcatcagcgtcggcgaggcgctggcgcagatcggctatattggcgagcagaccccgggggaccatcccgtcggcgcctattttgaggcgcacattgagcaggggccgattctcgaagatgaagcgaaaaccatcggtatcgtgcagggcgtactggggatccgctggtacgactgtgtggtcaccggccaggcctcgcacgccggacccacgccgatgcgcctgcgtcaggatgccctgcaggtggcgacccgcattatgcaggaagtggtggccattgccgggcgcagcgaagagggacgcggcacggtcggtagcgtgcaggtgtggcccaacagccgcaacgtggtgcccggggaggtcaccttctccattgatatgcgcaatctcagcgatgcgctggtggacgagatggatcgccagctgcgggcgtttatcgcggaggttgagcgggagagcggtcttcaggtggccctgaagcaggtaagccactatccggcggcgccgttcgatgctgaatgccagcaggccattgccgatgccgcgcagcggctgggctatccggcgcggccgatcgtctccggcgccgggcatgacgcagtgtatatgagctacctggcgcccaccgggatgatttttatcccctgcaaggacgggatcagccataacgaaattgagtatgcctcgccggagcacgtcgccgccggcgccaacgtgctgctgcaggtgatgcttcagtacgcgcggccggtgtag

SEQ ID NO: 215312 - DNA, 924 bp, Klebsiella pneumoniae
gtggtagattcagcaatggataaatcggcgcccggtccctggtccggatgggttcatggtttactgggggtgatcattttcagcggttcgctgcccgcgacgcggctggcggtgcaggatatggatccgttgttattgacctttctgcgcgcctctatcgccgggctgcttgccatcgcgctgctggtgggctttcgccagaaacgcccgcgcctggcgcagcttgtgtccctgatcatcatctcatccggggtggtgctcggctttccgctactcacggcgctggccctgcagcgcatcacctcggcgcattctattgtgtttattggcctgctgccgctgatgaccgccctctttggcgtactgcgcggcggcgaacgcccgcggcgggctttctggatcttttcgctgctgggcagcctgctggtggtgggattcgccctgacgcaaaatgcggcggcctcactcagcggcgatctgctgatgctggcggcggttatcgtctgcggcctcggctatgcggaaggggcgaagctgacgcgggagctcggcggctggcaggtgatctgctgggcgctggtgattgccctgccgttgatgctccccgcctcgctgctggttcagcccgcatcctggcatgccatctcggcctcctcctgggcggcgctcggctatgtgtcgctgttcagcatgctgatcggtttcatcttttggtacaaagggctggccgcgggcgggatcgccgccgtcggccagctccagctattgcagccgttcttcggactaggcctgtcggcggcgctgttgcacgaaaccgtcagccccttgatgctggcggtcacgctgggcgtggtgctgtgcgtggtgggctcgcgcaaatttggccgccagcgggttggcgcagggagcccgagccgtgattga

SEQ ID NO: 215313 - DNA, 1335 bp, Klebsiella pneumoniae
atgaaagcccgatataaagccgttgtcgaccgatatgcgcaggcgatccgcagcgggcagctgcccgccggcagccgtctgccgacgcaccgtacccttgccgccggagaacgcctctcgctggccaccgccacgcgcgtctaccgtgaactggaagagatggggttggtcagcggcgaaaccggccgcggcaccttcgtgcgcgacctctcgctgcctccggggcacggggtcgatcagcaggtggtcgccgccgatgtcgtggatctcaatttcaactacccttcgctgccggagcagggcgatgcgctgcgcgaggcgctcaggcagctggcgatggcgggcgatattgactcgcatctgcgctatcagcctcatgcagggcggctcgccgagcgggacattatcgcccgccatttgacctgccagcactttgcgccggacgcggaaaatgtcctgatcgtcaacggcgcacagcacgggctggcggtgaccgtcatggggctgttacgtccgggggatgtggtggcggtggatgcgctgacctattcgggcttcaaagttctggcggcgctgtatcatctggagctggcggcgatcccctgtcggccggagggaccggacctgcgggcgcttcatacgctgtgccagcagcggcgggtgcgggcggtgtataccatgccgacgctgcacaatccgctgggctgggtgctcaacaccgggcagcgacaggcgctggccgatctcgcgcgccagcacgatctgctgattattgaagatgccgcctacgcccggctggtgagccgtccgccgccgccggtggtcagctatgcgccggaaagaacggtgtatgtcaccggattttcaaaaaatatcgccaccggactgcgcgtgggggtggtgatttctccgccgcgctatcgcccggagattgagcgcgccatccgggccacgacgtggaatacgccgacgctgataagttcgctgatctgcgcctggattgaagatggcacggtggcgcgctttgaaacgcagaaacgccaggatgcgcgacagcggcagcaggtggtccgcgaggtactttgcgggcttcccgtcgtcagtcatcccgattcgtacttcgtctggctgcctctgggtgaagagagccgggccgatcggctggcgaatgcgctgatggaacgccgcatttcggtgtcgaccgccgagccgttctgcgtctccgccacgatcccgcaggcgctgcgcattgcgctcggatcggtgcctttcgacagcctgcgcccggcgctgctcagcgtgcgcgacgccgttgagtatgaacaataccgctaa

SEQ ID NO: 215314 - DNA, 1464 bp, Klebsiella pneumoniae
atgatccgtcacctgttacacgttgattttcagcctggccgcggtttgcaggaacaggtgcgagagacgctggtgaatgccattctcagcgggatcttcgccgccgacaccccgctgccctcctgtcgccagctggccagccagcttcgcgtctcgcgtaacaccaccgcgctggtgtttgaaagtctggtcaacgagggctacctgattagccgcccacgcagcggttactacctgcatcccgactatcatgaagcttcgcctgccgccgtcgagagtgcaccgcagcgcgaagcggctgcaccacgctggggcgaccggctgcagatgacccccagccagcaggagtcgatcctcaaaccggcgggctggatgcactaccgctacccgtttatctacggccagcccgatacccggcaattcccgctggccacctggcgctcggcggcgaactggctgcacggcggggtgcgcgacccggcgtgggtcatcgaccatattgaccaggatgtgccgatgctgatcgagcagatccgcacccgggtgctgcccaagcgcggcattgtcgccgcgccggatgaaattctcatcacccttggttcgcaaaatgcgctctacctgctgacccgactgctgctctcttccaccacccgcattggcgtcgaaaacccctgcttccgcgaagccatcaacacctttctgctcgccgacgccgaggtggtgccgcacccggtggatgaagaggggatcgtgcttaatgagcgtccctgcgattactactatgtcactccaggccatcaggtgcccaccggggtgaccatgagcagtgcgcggcgtcgccagctgctggagcatgccgcccgccatgacgcggtcattattgaagatgattatgactcggagagtaactttaccctcaacccgctgccggcgctgaaagccagcgatcgcagcggccgggtggtgtatgtcagcagcctgtcaaaagcgctgtcaccggggctgcggttggggtttatggtcgccgacccggacctgattgacgaggcgcgcgccctgcgccggctggtctatcgccatccgccgaccaacattcagtaccagatggcccacttccttgcccagggccattatgaaacccatctgcggcgctaccactatgactccgcccagcgctgggaacgcctgcatgccgccctgcagcgctatctgccgtcgtgtcgcgcgctggcggggagcgagcatgctaacgccttctggctgcagaccccggcgcagatcaacacccagcaactcacctggcgcgccgcccacgccggcgtgctgattgagcccggggcgcgccattttctcagcgccgcgccgccggataactattttcgcatgggattccacgccattaaccctgacgccatcgcccagggggtggaggtcctgcgcggccagctggagcagatgggttag

SEQ ID NO: 215315 - DNA, 765 bp, Klebsiella pneumoniae
atggcaacgagcaacgtagtgtttatcaccggggcgacctcgggttttggcgaagcggcagcgcaggtgtttgccgacgcgggctggtcgctggtgctgagcgggcgccgctatccgcgactgaaggccttgcaggacagactcgccgccagggtgccggtgcatattattgagcttgacgttcgtgacagcgaggcggtggctgccgccgtggcgttgctgcccgccgatttcgccgatatcaccaccctgatcaacaacgccgggctggcgctgtcgccgctgccggcgcaggaggtggcgctggaggactggaaaacgatgatcgacaccaacgtcaccggtctggtgacagtcacccacgccctgctgccgacgctgatccgccatggcgccggggcgagcattatcaatatcggctcgatcgccgggcagtggccctatcccggcagccatgtgtatggcgccagcaaggcgtttgtgaagcagttcagctataacctacgctgcgatctgcttggcaccggcgtgcgggtcaccgatctggcgccggggattgccgagaccgaatttaccctggtgcgtaccaaaggcgaccaggcggcatcggataagctctatcgcggcaccacgccgctgagcgcacgcgatatcgccgagcagatgttttatatcgccacgctgccggcgcatatgaacattaaccgggtggaggtgatgccggtgcgtcaggcatggcagccgttcgctatcgaccgggattaa

SEQ ID NO: 215316 - DNA, 567 bp, Klebsiella pneumoniae
atggcgcagggagcgcacagggggcggccagtcgccgccgccccctgtacccccgggctccggccagcaacatcgccgctgcgcggtgccttcgacttttccctgcaggcttcgggtcgggccgaggcagcgtccgtgcaaaacacggccctcagcccgcatccatgcgggctgccccggcctgccgggaacgtctcagcgatgttgaggccgccagcaccggcagtttcagcgaccccagcgccagcggtgatttggggctgtaggccgggtaaggcgcagccgccacccggcgaaatcaaggataccgtgcctgatatcttgcccggcggcgctgcgcttgccgggcctacggggtgtgagcctgtgaatggatcctgtaggccgggtaaggcgcagccgccacccggcaacaccacgggtaccgtgcctgattattgcccggcggcgctgcgcttgcacgggcctaaacgccagccggacagttccctctcccttcgggagagggccagggtgaggggaagcactacagtgttgttgtttatgttatcggtggcttcagcgtag

SEQ ID NO: 215317 - DNA, 912 bp, Klebsiella pneumoniae
atggatcccttttctgatatcttaaacctgctctctgctacgagttatacaactgccggtctttctacaggcaacaactgggcaatgacatttccggggtttcatgggttcaaatttattgttgtcagaaaaggatcttttttgtttcggctcgaagacgaactgacatggaagacattaggtgttggtgaaggggtcattctcaccagaaaaatgagatttgtgatggcaaccaaccgggaatgcgcgccattagaatctaccgaagagaaaagaccccgcgttcgcgaaaccatcaattacggcggagatgacaacatactgatcgctggaaaaatggagatcgatctcgtttcatctgagcttttactacaagaattgcctgaaacaatcttctttcaaacccagcctgatgagcctaccgggcttagcccactgatgaagttgttatttatagaaaagctttcaaaccgaccgggtgcatctcaggcatgtaatcatctgatgcacctgattatgattgaagcgctacgtgcctggtatgaaagcagctccacttcccataagggaattctcaaagcatataaagacccgcggattgttgcagcgcttaatgccatacacaacgaaccagaaaaaaactggcggctgcatgaattagcgtccacagccggtatgtcgagggctggatttagcaaaacattcagtggcctgaccgggcagaccccgattggttatgtaacaaactggcgcatgctgcttgcaagtaaaatgcttcgcttaggaaacagaagcgtcaaagacatcggtttcagtttaggttatcagtcagaaagtatttttagctcagctttcaagcgtatctatgggctatcgcctaaaacttatagagcaacaatgcgttgcttatga

SEQ ID NO: 215318 - DNA, 852 bp, Klebsiella pneumoniae
atgctctacactactctcaacaacagcgttaaaatgcctttactcggctttggcgtctaccagatggtagaccttcacgaatgcgaagccgctgtttttaatgccataaaagcaggttatcgacttattgatacggctgcggcctatgaaaacgaagaggccgttggcgcggcaattgctcgcagtgacgtctcgcgtgaagcgttatttataacaaccaaagtgtgggttcaggatgcaggttacgaaaatacgcgcaaagcatttttccgctcccttgaaaggctcaagctcgactatctggatctttacctgattcatcagccctattcagatgtatttggctcctggcgtgcgatggaggaactttatgaagaaggtttaattcgtgcaattggcgtgagtaattttgctcccgaccgactaactgacttaataaccttcagtcgcattgttcctgctgtcaatcaggtcgagacacaccctttccatcaacaaattaataatgctgaatttatgaaagcatctggtgttcagcctgaatcgtgggcgccttttgcggaaggtaaaaatcaaatattcacccatcctgttctactgcctatcgcccgcgcgcacaacaaaagtgtggctcaggttgtgcttcgctggttaattcagcgcggaattgtggtcatacctaagtcagtaaagcccgagcgtatgcgtgaaaacttcgatgttttcaatttttctttgagtgatgaagaaatgcgttcaattcagtctctcgacacgggaagaacactctttactgagcataccgaccctgagcgtatcaggaacgtggcaacccgaaaattcaatacctga

SEQ ID NO: 215319 - DNA, 588 bp, Klebsiella pneumoniae
atgagtaatagagacaaagaactttttgccataaacagggatgatgttgtgtttatttttgtcgaccttcaggaaggtctgatacgaaagagtaaaacaatggagcctaacgcactgtcctcaaacacggcaggtttggctcaggttgcccatgcaatcagtgcccctgctcttttttttaccgttcctcaggaggctaaggaaggtgagccactgccaaaactccagggatatgcaaatgacagtaataccttttatcgagtcatcgccgatccgttcctggtcaattcaatcaccatcgcactggataatttagcgcgtaagacattgattatatgcgggtatagcgcagaagttggagtgttgctgactgcacttggaggccttcgtcaggggtataacgtatttattccggttgattgtgttggtagccagtcactgagaactgaaacggtggtacttaaacaggctgaaaaggctggcgctgtaataacatcccttgcaacactggcggcacagctggctccggacttttctagagagccgggaaagacaatattatctgtcatctcaaatgccaggtgttga

SEQ ID NO: 215320 - DNA, 996 bp, Klebsiella pneumoniae
atgtttccagtcggcattgacgtaagtaaaaacactctggatctttgcatgctttatgacggcatcaaaggacgcataaaaacccgtaacatccaaaataacagacattcagttgaaaatattcttcgctggctgaggcttcagcactgcggcccggaagatgttcatgttgtgatggaagctaccggtgtttatcacgaacggctggccactgagttacatgacgccggtttccgggtttctctggccaaccctcaccgcagtcgggagtttgcacgtggcatgggaataatgacaaaaacggataaggtggatgcttatatgctggcctgttacgcattccttaagaaaccacaccgctgggagccgccggcacccgaaatcagatatctcggtgcactcctgcgacgacgggatgttttgctgggcgatgccctgcgtgaggaaaactggctggaaaaatacctgtcgacagacacacctgcagatattatcagttcctgcaggcgtatggcgcagcttctacgcgaggaggtaagtaatatcgagcggcagattaaagcacatatcaaagcctgccctgcactgaggcgtgattatacactgctgacctcaattaaatcggttggtccccagctggggatgcatatgctggtcgtgcttcgcagccataactttgcatcagcagagcaggctgccgcctttctgggcgtggtgccgatcgagaaacgctcaggcacatcggtccggagtcgaccccggatgtcgaaaattggcccccctcagttgagagcgaagctttacatgtccgccctgtgcggaaaaatctacaataagcgaatgcgtaatatttacgatgagatgtgcctgcggggtaaacctaaaatggtggccattggcgcgctgatgcggaaactggtgcactggtgttatggcgtcctgaagaccggaaccgtttttaatgacgaaagcctgaaacaagtactgtcaacctga

SEQ ID NO: 215321 - DNA, 705 bp, Klebsiella pneumoniae
atggcgatcgttaatcttcaggatttacaggttacattcggcgcgaagacggcggtctccgccgccagtttccgtgtcgacgccggggaaaccttcagcctgatcggcgcctcgggctgcggcaaatcgacgattttgcgcgtgctggccggattgcagcgtgaatggcgcggcagcgtggatctgctcggccagaccattacgccgggcttccgctttcagggcgatctgcggcgcaacgtgcagatggtgtttcaggatccgtatgcctcgctgcatcccaaccatactctgtggcgcaccctggcggagccgctgcagatccacggcatccgcgacgttaccccgcgagtgaccaccgcccttgagcaggtgggtctggccgccgatgccgtgcgccgctatccgcatcagctctccggcggccaacggcagcgcgtggccattgcccgcgccctgctgctgcacccgcagatcctgctgctggatgagccgacctcggcgctggatatgtcggtgcaggcggaaatccttaatctacttaatcgtctgaaacaggagtacggcatgacctatctgctggtcagccatgatgccgacgtcatcgcccatatgtccgatcgggcggcgtttatggcggagggtgtgatccagcgctttttcgatcgcgaagcgttggtcaacggagagcaccggatgaggtga

SEQ ID NO: 215322 - DNA, 837 bp, Klebsiella pneumoniae
atgactgacatccgactgaccgtccagggactcgccgtcgactatcccaccgcccgggtggtggacaacgtcagcttcaccctcggcaacgagcggctggcgctggtgggcgaatccggctccggcaaatcgatgaccgcccgggcgctgatgggcctggtgcgcaagcccggggtggtgagcgctgaacggctggaggtgctggggcgcgatgtgctgaccctcagcgcccgcagctggcgcgcgctgcgcggcaacgatatcgccatggtgctgcaggacccgcgctatgcgctgaatccggtgcagtccattcagacgcagctggaggaggcgttaaccctgcatcagcgtctgagccgccgcgcgcgcgccgaggcggtcaaagacgccatcgccgccgtcggtctggatctgccggtcctcagccgctatcccggcgaactctccggcgggatgggacagcgggtgatgatcgccctcgcgctgctcaataacccgaaggtgctgatagccgacgagccgacctcggccctcgacgcccgcctgcgcaaccagatcctcgagctgctggtggagcagagcgcgcagcggcagatggccatgttactgatcagccacgatctacggctggtagccgcgcattgcgatcgcgtgctggtgatgtaccaggggagacaggtcgacgagatgccggcgcgggcgctgccgagcgcgacgcacccttacacccgcaccctgtggacctgccggccaaatgcccacacctacggccagatgctgccgaccctcgacagaacccaggactttacggagacagcccatggcgatcgttaa

SEQ ID NO: 215323 - DNA, 834 bp, Klebsiella pneumoniae
atgccgacttatctgtttttacgccgtctgcgccgctcacccgccgccttcagcggcctgaccctggtgatcctgctggtgctgaccgcgctgttcgccccgtggctggcgccgcacgatcccaactggcaggatgccgccgctcgtctgcaggggcccggggcgggacactggctcggcaccgacagctacggccgcgacctgctgtcgcgcttgctctacggcgcccgcccggcgctgggtctggtggcgctggtgaccgccattaccctgcccgtcggtctgctggtgggtatcctctccggctactatggcgggtggctggagcggatactgatgcgctttaccgacgtggtgatgtcgatgccgcgcctgatcctcgccttcgcgttcgtggcgatgctcggcccggggctggtcaacggcgcgctggcgttagccctgaccacctggccggcctacgcccgtcaggcgcgcagcgaaattcagcgcctgcgccatagcgactacctcgccgcggcggagatgctgggcatccgcggcgggcggctgctggtcggccatattctgccgctgtgtctgccgtcggcgattgtccgtctggcgctcgatctggcgggtattatccttgccgccgccgggctcggctttctcggcctgggcgcccgcccgccgatggcggagtggggagcgatgattgccgacgggatgcaggtgattttcgaccagtggtggatcgccgccatccccggcgcggcgatcctgctcgccagcctggcgtttaacctgctgggcgatggcctgcgcgatattctggagccgcaacatgactga

SEQ ID NO: 215324 - DNA, 1569 bp, Klebsiella pneumoniae
atgaccaaaaaactgttgcctttactgctattgtcggcgctctccgccgccgcgcatgccgccacgccgcccaacacgctggtggtcgcccagggtctcgacgatatcgtcagcctcgacccggcggaagcgaacgaactctccagcattcagacggtccccagcctctatcagcgtctggtgcagccggaccgcaacaaccctgaaaaaatcgtaccaatcctcgccgaaagctggcaggccgatccggcggcgaaaaccctgaccattaaactgaagccggatgccaaattcgcctccggtaatccgctgcgcccggaagatgtgattttctcttacacccgcgcggtgacgctgaataaatcgccagcgtttattctcaacgtgctcggctggcagccggacaacatcgccagccagctgaaaaaggttgatgaccataccctgacgctgcactggaccgccgacgtcagcccggcggtggcgctgaatattctctccacccccatcgcctctatcgttgatgaaaaacaggtggcgccgaacgcgaaaaataatgacttcggcaacgactggctgaagatgcactcggcgggcagcggggcctataaaatgcgcgtctaccagccgcatcaggccatcgtgctggaggccaacgccagctcccccaccggcgcgccgaagatcaagagcatcattattaaaaacgtccccgacccggcttcccgccgcctgctgatccagcagggggatgccgacgtggcgcgcgatctcggcgctgaccagattgccgccctgcaggataaacccggcgtgaaggtgctgagcatcccgtccgccgagcagaactacctggtgtttaataccgccaacagcgccaacccgctgctcaataatccggccttctgggaggcggcgcgctggctggttgattatgatggcatcaccaaaaatctgctgaaaggccagtactttattcaccaaagcttcctgccggccggcctgccgggggcgctggagactaatccgttcacctttgatccgcaaaaagctaaggctatcctcgataaagcgggcattaaggatgcccacttcaccctcgatgtggagaacaaaccgccgtttatcaccatcgcccaatcgctgcaggccagctttgcccagggcggggtgaaggtggatctcctgccggccgccggcagccaggtctatgcccgggtgcgcgcgaagcagcatcaggcggcgatccgcctgtggatcccggactactttgatgcccactccaatgccagcgcctttgcctggaacgatggtaaatccagcaccgtggccgggctcaacggctggcagatccctgagctgaataaagccaccctcgccgcggtggcggagccggacccggcgaaacgcctcggcctgtacaaaacgatgcaggaaaccctgctccagcattcgccgtacgtctttattgaccaggggaaaacccagatcgtggtgcgtgacaacgtgaagggctatcagcagggactgaacgccgacatggtctggtacgataacgtgaccaagtaa

SEQ ID NO: 215325 - DNA, 696 bp, Klebsiella pneumoniae
gtgccggaaatcaatgagtatggccagcaggtgaacgacctggtccctggctggcagggggcgcaagtcctgcggcggacagcgttaaatggccgtttttgccgcctggagccgctggacgttgaccgtcatgcggcggatctgtttgccgcctatgcgctcggcgacaacagcgactggacgtggctggcgtctacgcggccggagagcgtggcggcgaccgcccactggatcgcgggcaaggtgaatgatgatgccctggtgccgtatgcggtggttgacctgcgtagcgagcaggcggtgggcatcgtcagctatatggcgatcgagcgggaaatgggcacggttgagatcggccatgtcacctggtcgcgacggatgaaaaacaccccgctgggtaccgaagcggtctggctgctgctcaaaaacggctttgaccatggctatcgtcggctggagtggaaatgcgattcgatgaatgtcgcctcgcgccgcgccgccgagcggctgggctttagctgggaaggacgtctgcggcagaggctggtgcgtaaagggcggacgcgcgacagcgatatgctgtccatcatcgacggcgagtggcctgcgcgcgatgcggcgctgcgggcgtggctggcggcggagaactttactgccgacggtcagcagattaagcgcctggaggcgtttcgctaa

SEQ ID NO: 215326 - DNA, 894 bp, Klebsiella pneumoniae
atggcagattttccccctgtcgccagcctgcgcagctttgaggcggtggcgcgcctcggcagcgtaacgcaggccgcccacgagatgagcgtgacccattcggcggtcagccagcacatcaaacagctggaagccctggtcggcgtcacgctctttatccgccacggccgcggagtgcgcatcacggaagaaggacggctctatgccctgcaaatccgcgaggcgttacagcacatcgccgacgccacgcgcatggtgcagatcaaaccccgcaccctggaagtgaccctggcgacgctcccctcctttggctgccactggctgctgccgcggctggcgcgctttcagacgcggcatccgcagatcgcggtgcgcctgctgaccagcctggcggtggttaacctgcaacaggagggtatcgatctggccattcgcatggggcaaggcgattgggagggaatggaaagccggcatctgtttgccgatgaacagctggtggtcgccgcccccggctatcgcggcggtaacctgccgaccaccccgcaggcgatcgccgccagcgatatcattttttccatggagtcctggaacgcctggtgcagccaggcggggctggaaaagccgatcgtccccgcgggcctgcgcctgaacgactccaatctggtgctggaggcggtccgcctgggggccggcgtggcgctggagcggcgctccctggtggcgggggcgatagcccgcggcgagctggtgcagctcaccgccgtcaccgtcccctacccctggcactactggctaaccgtctccccgcaggcggagaaccggccggaagtcgcccggttcatcgcctggctggaggaggagatcgccctctggcgccagcagatcagcgcttag

SEQ ID NO: 215327 - DNA, 1500 bp, Klebsiella pneumoniae
atgtcggtaaacaaggatattattattgccctcgatgagggcacaaccaatgccaaagccgttgccttcgacagccacgggcgggtaatcgcgcaattttcccgcgcgcttgagatcgctacgccgcaggaaggatgggttgaacagtcagcggagcttctccttgccgcgtcgctggaggtgatttctcgcacagtggccgccgttggcgaggagcgtgtggcggccctggcgatcagcaaccagcgcgaaaccgtcgtgggctggtatcgggaaacgggcgaggccatagcgcctgccctgagctggcaatgttcacgtactgccgcattttgccacatgctgcgtgaacaaggtcatgagccgcagatcaaggcggtaaccggcctgccagtcgccccgctcttttccgcctcgaaaatgcgctggctgctggaccacactccggatggtctgaaccgagcgaaagatggcgagatttgcctcggtacggtggatagctggctactctggcacctgacgcaaggccagcatttttgttgtgattacgccaacgcgtctcgtacacagctcatgaatttgcaaacagcggactgggataccgatatgctcgccctgtttggcattccgtgtgcagcactcccggtgataaaaccttcaagtggactgtttggttacaccgctggtttagccaccctccctgatgggatcccggtaatggcgatgattggcgattcgcatgccgcccttttcgcccacggtctgggcgccgccggttgtgttaaagccacttacggtacagggacctcggtgatggcgcccgtcgattcggtggcgtttcacgtcagcaatctcgccaccacggtggcctggcacgacggagaaaagctggtctacgcactcgaggggaacattccccataccggcgatgcggtggcgtggatggccgacagtaccggattgagcgaacgctctcccgccgaactggcccaggcgctgaatgctctgccccgttcggtagattccaccttaggcgtcttttttgtgccggcgctcaccggcatgggcgccccctggtgggacgataaggcccgcggtttgatccatggattaagccggggcgtgaagcgggcccatctcattcgtgccgcgctagagtcaattacctaccagattgccgatgtaatcactgcgatgcgtgcccatcatggctttacgctcaacacgctgctggtggatgggggacccaccaaaaacgactggttaatgcagtaccaggccgacctgctaggttgtccggtgatgcgcagcgatgtggccgagctgtcggcgaccggcgcggcactgctggcgcgtaaagcgttgcacaagctgacggtggcagagcttcagccctttttaccagaacacatcacttatgcaccagacctgatccggcatcatcggcttgtgcaacgatggcagtcctggcaacacgcggtgacgctggcaagacgctga

SEQ ID NO: 215328 - DNA, 1419 bp, Klebsiella pneumoniae
atgtcccgaattcctcaacaactcaccatgggcgtcattattggcaaccggggatttttccccagctatctggtcgccgaagcgcgcgaacaggcggtagccctgtttagccgtcttgggattaacaccattatgcttgatccatcccagacggaactgggtggcgtggaaacccggcaggatgccaaaatttgcgccgagctgttccgcagccaccgcgacaatattcacggtgtcgtggtgctgttacccaactttggcgatgagaaagccatcgccgaaacgctgcgcctctccggtctcaacgtcccggtgcttattcaggccgaagaggataatctggataaaatggggttgtcgacgcgccgcgatagcttctgcggcaaaatttccctttgcaacaacctgcgccagtacggtatcccgtttacgctgaccacccagcacgtctgcgcgcttagcggcgaggtgtttgagcaggatctgcggcgcttcacgcagatatgtcgcgtggtgaacagtatgcgcggcgtgcgcgttggcgcgatcggcgcccgtccagcgggctttaacaccgtgcgctacagcgaaaagctgctcgaacgtttaggcatcgcagtggaaacgttagatctatcagaggtgtttacccggattaaagccctgcgtgatgacgatattcgtgtcgatgagaagcgccgcctgctgatcgataatgccgacgccagcggtattccggcagataaactgatcaccatggcgaaactgtttgtggtcctgagcgagtggattgttgccaacgacatcgacaccaccgcaattcagtgctggacctcgctgcaggaaaatctggggattaacgtctgctccatcatgagcgtgatgtccggacaactgatgccaagcgcctgtgaggtcgatgtcatgggcgcgctctccatgtacgcgctcgccagcagcaacctgagccccgcctcgatcgcagactggaacaataacttcggcgacgatcgtgataaatgtgtgctgttccattgtgggaactttgcctcggccagccttgagtcgccgcacatgggaacggccgatattatcggcaccaccgtcggcaaagaaaacacctgcggtgccgtgcacggtcgcatgaaaagcggcgcgctgacctattttcgcctcagcaccgacgacctgactggcgaaatcaaggcctacgtcggagaaggtcggtcagttgacgatcccctcgatacggtaggctgtcgggcggtcattcaggttccccacctggaaaatctgctgtcgtggatctgccgcaacggctttgagcaccatgtcgcgatgaaccattctgccagtgccgcaattttgcacgaggcatttacgcgctacctgggcgtgtcgacctatctccaccagtaa

SEQ ID NO: 215329 - DNA, 951 bp, Klebsiella pneumoniae
atgagtaatagcgaacatctcgccacggtgatggtgaatgcctttattgatgccgtagaccgcggcgtggatctggtgccggtggtggccgactccacctcaacggcgaaaattgctccgtttatcaaaagattccctggccggctggtcaacgtcggcatcgccgagcagacgctggttggcgctgccgccggtctggcgctgggggggaaagtggccgtgacctgcaacgccgcgccattcctcatctcacgagccaatgagcagattaaggtcgacgtttgctacaacaacaccaacgtcaaactgttcgggctgaacgcgggcgccagctacggtccactggccagcacccaccacagtattgacgatatcgccattctgcgcggttttggcaatattgaaatttacgcgccgtccagtcccggcgagtgccggcagattattgattatgcccttgcccacgtcgggccagtgtatatccgcctcgacggtaaagcgctgccggaactgcatgatgaacgttaccggtttgttccgggcaacattgatgtgctgcgtctggggcgcgatattgcgctggttgccatgggctcaacggtacatgaaattgtggaagccgccgcacaactcgctgcagaaggtattgacgccaccgttatcagtgtcccatctattcgtccttgtgatacccaggcgctactggcggcaatccagtcctgtccggccgcgatcacggtggaagaacacaacgtcaacggcggcgtcgggagcctggtggcggaagtgctggccgaggccgggtgcgcgatcccgttgcggcgcttaggtattcctgacgggcaatacgccattgccgccgatcgcgccgccacgcgcgcgcgccatgaaatcgatgccgccggggtggtgaagcacgcccgcaagctgcacataaaaaaagcatcctga

SEQ ID NO: 215330 - DNA, 831 bp, Klebsiella pneumoniae
atgaatccgttttcactctccgttaaggagttagaacaaaaagcacgcgccatccgccgccgcatcatcgtcttgaatgcggaaagcccggcaggcggccacaccggtgccgatctgtcacaagtcgaactgctgaccgccctctactttcgcatccttaactgctcccctgcgcgaaaagagagcgacgaccgcgatatctatattcagtcgaaggggcacgctgtcggtggttactactgcgtgctggccgaagcaggctttattcccgttgactggctggcaacctatcaacacgccgactcggctctgccaggacacccggtaaagcacaaaacgccaggtattgagctcaataccggtgcgctgggccatggtctgcccgtggcggtaggcattgcgctggcagcgaaacgcgataacaacccgcgtcgcgtatttgtcgtcaccggcgatggcgaactggcggagggcagcaactgggaggccgcgctggtcgccgcccactaccagctggataaccttattattatcaacgacaaaaataatctgcagctggccggtgcgaccaaagagatcatgaataccgatccgctggatgaaaaatggcgcgctttcggcatggaggttacgcagtgcaacggcaacgatatggcggaggtagtcgccacccttgagggccttcagccgaacgggaaaccacacgttgtgattgctaacaccaccaaaggcgcgggtatttcctttattcagggacgccccgagtggcatcaccgggtaccgaaaggagaagaaattgaactggcgctggaggaactgaaagatgagtaa

SEQ ID NO: 215331 - DNA, 951 bp, Klebsiella pneumoniae
atgtcgaagcaggatgaacagcggttgctggtgaagatcgccacgctttactacagcgagaataaaaagcagtccgagatcgcctcgctgctgcatctgtcccagtcttttgtttcacgggcgttaacccgctgtcagaaagaggggctggtgaaaattaccgtggtccagccgacaaatatttttgtcgatctggaaaaggcgattgaggagcgttttggcattcgacaggcgatagtcgtggatgtgggcgagaacgccagttacagtcaggtaaagcatgccatcggcagcgcagcggcgcactatgtcgaaacgcggctgcggccggaagacctcgtggggatctcgtcctggagcagtacgatccgctgcatggtggatgagatgcatccgcagaacattcgcgccgccggggtgattcagctgttgggcggcgtcggtcccaacggcaacgtgcaggctaccattttaacccagcagctggcggctcatttaggctgcccggcttggctgttgccgtcgcagagtattgagcactccgtggaggagcgcagccgtctggtaaacagtccggacgtcgcggcggtggtggcgaaatttgccgaagtggatgtggccatcgtcggtattggtgaactggagccttcgcagctgctgaaaaactccggtaactattataatgaaaccatgctccagctgctggcggcgcgcggcgcggtgggggatatctgcctgcattactatgatgcggcgggcaaaccggtactgagccaggatgaggatccggtgatcggtatggaacttgagcaaattcgtcgctgtccgcaggtgattgcgctggccggcggcgtggacaaagagaacgccatccgcggcgcgttgcagggcgactatattgatgtcctgatcaccgacttcccgaccgcgcgcgcgttaattaagggctaa

SEQ ID NO: 215332 - DNA, 963 bp, Klebsiella pneumoniae
atgaaaaaacgtccgcactcgaccccgcacgacagcctgtttaaacgctttttgcgcgacaacgaaaccgcacgcgattttctggatattcatctgccgcccgcgctgcggcaactgtgcgacttaagcactctgcacctggaatccgggagctttgttgaggacaacctgcgcgccagctattccgatattctctactctctgcagaccagcaagggagagggctatatctatgtggtcattgagcatcagagcaccccggacagccatatggcgttcagactcctgcgctatgccctcgcggccatgcaacagcatcttgatcgcggccataaagcgctgccgctggtgatccccatgctgttttatcatggcagcatttctccctatcccttttcactgtgctggctggacgagttcccacctgactcaccggcaaagcagctttatctcggggcttttccgctcgtcgatgtgaccgatattcccgacgacgccatattacagcatcggcggatcgcgcttctggaactggtccagaaacacatccgtcaacgcgatcttagccatatcctccagcagttggtggaggtggtgctgatgggatacactgaccaccagcagttcaaaacgttatttacctatatgtcgctgcatggcaatagcgccgacccggacaactttatcgaccagctggtcgaacgtctgccgcaatatgaggataccctgatgacgattgccgagtacctgaagcagaaagggcgcgaagagggaaaacaacgctggttacaggaaggcttgaacgaaggtttacaggcgggtgagcatcgcgaagcctgccgcatcgcgctgatgatgttagagaacggcatggacactgaaaccgtattgcggatgactcgcctcagcgcggacgaactggcgacgctggcgcgccaggcacgccagtctccccccgcttag

SEQ ID NO: 215333 - DNA, 1089 bp, Klebsiella pneumoniae
atgaaaatgacacaatcggtcgcactggcgccgcgcggcggagcctctctctcccgtgaaaatatcctgctgttgttattaaaactgcgcacctttatcgcgctgtttctgattgtcggcttcttcacgatgaccgtgcccggatttttatccgctggcagcatggtgattatgattaaacacattgcgattaacgcctttctggcgttggggatcacctttgtcattatcaccgccggtatcgacctctcgattggcgccacgctcggtctctgcggaatgatagccggctggcttatcaccaaagggatcgtcctgccgatgttcggcatcgccatttttccaagcgtgtgggtcattgtgcccctggtgctgctgataggcgccctgattggcgccgttaatggctggatcattacccgctacaatgtggcgccgtttatctgcaccctcggtaccatgtatgtgctccgcggagccgcgatgctgacctctgatggccaaaccttccccgggctcgcgggcaatccgcagctgggcaacacgggtttcgatgaaattggcgcaggtgcgctctttggcatcccgtgggccatctggctgatgatcctcctggcgctgatcatcgcctatatcgcccggcgtttgccttttggccgccatgtttatgcgatcggtgacaacgagcgcgccgccgagctttccggcgtgaaagtgaagcaaattaaagtgctggtctacacgctgtccggtttttgcgccgccattgccgggatcgtggtctccgcgcagctgctggccagccatccggctaacggtaccgcttttgagatgaatgctatcgccgccgtcgtactgggcggaacatcgctggccggcggccggggaaccattctgggtacgctgattggtgcgtttgtcatcggttttctcgccgacgggctggtgatgatgggggtgagcgagttctggcagatggtcatcaaagggatcgtgattattgtggcggtcattatcgatcagatgcaaaaccggatgcagcagaaagcggcggtggtcgcccagaaagcggtcatggagaataagtaa

SEQ ID NO: 215334 - DNA, 1527 bp, Klebsiella pneumoniae
atggccagttcacccgcagaggaaatcattttacgcacccgtggtatttccatgctgttccccggcacggtggccctggataacgtcgactacaacgtctggcgtggcaaagttaacgtgatcatcggcgaaaatggcgcgggtaaatcaacgctcatgaaaattctcgccggtgtgcaacagccgagcctgggcgaaatggaactcaacggcaacatagtccatttctccagcacccgcgaggccgccgcccacggcattggtatggtccaccaggagctgaacctgtttgaaaatcttagcgtcgcggaaaatatctttcttggtcgagagctacagcgcgggcttacgccaattaacgaagcagagcaggaacggcaagccgcggagctgttgcagcgactcgatcagccgatctcgccgcgggagctggtgggtaacctgaaggtcggtcagcagcagttggttgagatagccaaagcgctggcggaaaatgcggacattctgatccttgatgagcccacctccgccttaagcaaaaccgaggtggatatcctgtttcgggtcatccgcgagctgacgcgtcagggggtgtccattatctacatctcacaccgtctggaagagctgatggccatcggcgacgtcattaccattctgcgtgacggcaaattccaggcggaggccagggtgagtgaaattgatgtgccatggatcgtccgtgaaatgctgggaagcgatccggtaagtcattttcttcccccgaatcgccgcttcggtgccccactgctggaagtggagaacctgacctgcgtgaatgccgcgggcaatacggtggtggataacgtcagttttaaagcacatgccggtgaaattattgggatctacggtctaatgggcgccggacgaaccgagctgtttgaatgtctgctggggacagcgcgccactactttggcaagatctggctggacagcaaaccggttccccagcggttaaccacggccgaacgcatccgcatgggcatgagtctggtgccggaagatcgtaagcggaccgggatttttccgatctcttcagtcgccagcaatctgaccattgccagcctgtggcgtcgtcttcagcgcggggtaaccattgccaataaagaggaagaggccgtcgtcgccagcacgattggcaatctctccattaaggtctcatcaccagaggtcgagatccaggcgctcagcggcggcaatcagcaaaaggtggtgattggccgttcgctgttaaccaatccgaaggtgctgtttcttgacgagcctacgcgcggaatcgacatcggcgccaagggggatgtgtttcgcatgatggtgcaattgtcgcagcagggaatggcggtggtgttctccacctccgatttaaaagaaatcatggcggtctctgaccgtatcctggtgatgtcaggcggcaaactgaccgccgatatcgttcgtgaccaggccgaagagtcggcgctggtttcagcaagcgctcaggggttctaa

SEQ ID NO: 215335 - DNA, 612 bp, Klebsiella pneumoniae
atgatgcggttaaaacaatggggcgccgtgctgatgggctgcgccgccctgttgctgacggcctgcacggtggtggacttagatgagaatggcaagccagtgctgcctgccgacccgaacgcgaaacccagcttcgaccatctcaccccgcagcagatcgcgcaacaaacctggcaatctcgagtgattgacgcagcgaaccaacatgcgctggacgcgactgcgctggaaaaagtgcgtcaggcctctggcgcgacgccacagagcgtctttgttcgcctgagcagcgaagtgaccgggattgacgtcagcaacccacgcgagcaaaagctcactcttacgctacacggccagccgttggtcgtgcagctgggtcctgtcatgcggggcaacgccattcgcgatgccagcggttttaaatttgaagactttaccaaccaggtgcagtttgcgcagctttcacgcgcctacaaccgggaggcaataaaatcgttgccgacagtggacgcgagctggacaggcaagcctatcgatattctctttgcggtcacggtggttaacggcagcctgcaggatgcggccgctcttgagctaaaacaggaggcgcgctga

SEQ ID NO: 215336 - DNA, 942 bp, Klebsiella pneumoniae
atgaaaactaccctgataaagtctgttctgtttgcctccatgatggccgcatctggctcacttttcgccgccgataatggcctgatcgcgatcattaccccttcacatgataatccattctttaaagcggaggctgacggcgcagcggcgaaagcgaaagagctgggttacagcaccctggtcgcctcccacgacgacgacgtcaacaaacaaaaccaactgattgaaacggctattgcgcggaaagccaaagccatcatccttgataatgctggcgcggatgctaccgtcggcccgctggaaaaagcaaaagcggcaggtgtgccggcatttttaatcgacagggagatcaataaaaccggcgtcgccgtggcgcagatcgtctctaacaactatcagggcgcccagcttggcgcagaaaagtttgccaatctcctcaacggtaaaggcaagtatgtcgaactattaggtcgtcagtcagacactaacgccagcgtccgctcgcagggttatcacgatgtgctggacgactatccggaaatgaaaatggtcgcccagcagacggcgaactggagccagacggaggcctttacccgtatggaagccattctgcagacgaatccggatatcgtcggtgtgatttccggcaacgataccatggcgctgggggcggaagcggcgctgaaagccgcgggtaaaaacgacgtgattgtcgtcggcttcgacggtagcgactacacccgcgactcgatactcaagcagggcaacattaaagccacggttctccagcctggctggaagcaggcgcaaatggccgtggaacaggcggactttttcctgaagaacgggaaagcccaaaaagaagagaagcagttgatggactgcatcctcatcgatagtggcaatgcgaaaaaactcaacatgttcaacctcagcgagtaa

SEQ ID NO: 215337 - DNA, 660 bp, Klebsiella pneumoniae
atgcgccaccatcgcaccgttttgcctctggccggctataccatccagcagatcgacttcgacccggcgactttccagcctgaagatctgttctggctgccctatcacgccagcctgaccgggtggggcggcaagcggcaggcggagcacctggccggacgcatcgccgcggcatacgccctgcgcgaggtgggggagaaacggcttcccgccatcggcgaccagcgccagccgctgtggcccacgccctggttcggcagcataagtcattgcggccagcgcgcgctggcggtgatcgccgatcggccggtgggcgtcgatatcgagcgccggtttaccccacagctggccgcggagctggagagcagcattatcggtccggcggaaaaaacagcgctgctgcgcagcggcctgccctacccgctggcgctgacgctggcgttttccgcgaaagagagtgggtttaaggcctggtcttcacacgctttagccctgcccggcttccacagcgcccgaattgtggcgctcactgcgcagcaggttcatttacgttttaccgtcagcttctccgtacagcttgctgatttcaccttgcaaatcaatcatctgataaaagacgatttcgttattacctgtacctgcccgcctcgcgaagcgtga

SEQ ID NO: 215338 - DNA, 2229 bp, Klebsiella pneumoniae
atgaataacaggatcaaatccctggccttgctggtcaatctgggaatttacggggttgcttttccgttaagcgcagcggaaaccgccaccgacgataaaaacagcgccgctgaagagaccatggtggtcaccgccgccgagcagaacctgcaggcgccgggcgtctccaccatcaccgccgatgagatccgcaaacgccccccggcgcgcgacgtctcggagatcattcgcaccatgccgggagtcaacctgaccggcaactccaccagcggccagcgcggcaacaaccgccagattgatatccgcggcatgggcccggaaaataccctgatcctgatcgacggcaagccggtcaccagccgcaactccgtgcgccttggctggcgcggcgagcgcgacacccgcggcgataccagctgggtgccgccggagatgatcgaacgtatcgaagtgattcgcggcccggccgccgcccgctacggcaacggcgccgccggcggcgtggtgaatatcatcaccaaaaaaaccggcgatgagtggcacggctcatggaacacctatatgaacgccccggagcacaaggatgaaggctccaccaaacgcactaacttcagcctcagcggcccgctgggcggcgattttagcttccgcctgttcggtaacctcgacaaaacgcaggccgacgcctgggatatcaaccagggccatcagtccgagcgtaccgggatctatgccgatactctgccggccgggcgcgaaggggtgaaaaacaaaaacatcgatggtctggtgcgctgggaattcgctccgatgcagtcgctggagtttgaggccggctacagccgccagggcaacctctacgccggcgatacccagaacaccaactccaacgacctggtaaaagagaactacggcaaagagaccaaccgtctgtatcgcaacacctactcggttacctggaacggcgcctgggacaacggggtgaccaccagcaactgggcgcagtacgagcgcacccgcaactcgcgcaaaggcgaaggcctggccggcggcaccgaggggatctttaacagcaaccagttcacggatatcgatctggcggatgtgatgctgcacagcgaagtcagcattcccttcgactatctggttaatcagaacctgacgctgggcagcgagtggaaccagcagcggatgaaggataacgcctccaatacccaggcgctgtcgggaggcgaaattccgggctacgacagcaccggccgcagcccgtactcgcaggcggaaatcttctcgctgttcgccgagaacaacatggagctgaccgacaccaccatgctgactccggcgctgcgtttcgatcatcacagcatcgtgggcaataactggagcccgtccctcaacctgtcgcagggcctgtgggatgacttcacgctgaagatgggcatcgcccgcgcctataaagcgccgagcctgtatcagaccaacccgaactacattctctacagtaaaggccagggctgctatgccagtaaagacggctgctatctgcagggtaacgacgacttaaaagccgagaccagcatcaacaaagagattggcctcgagtttaaacgcgacggctggctggcgggcgtcacctggttccgcaacgactaccgcaacaagattgaagcgggctatgccccggtctatcaaaacaataaaggtaccgatctctaccagtgggaaaacgtgccgaaagcggtggtggaaggtctggaggggacgttgaacgttccggtgagcgagaccgtcaactggaccaacaacatcacctatatgctgcagagtaagaacaaaaagaccggcgatcgtctgtcgattatcccggaatacacgctgaactccaccctgagctggcaggttcgcgatgacgtttcgctgcagtcgaccttcacctggtacggcaagcaggagccgaagaagtacaactacaagggtcaaccggtcaccggcagcgagaagaacgaggttagcccctacagcatcctcggcctgagcgcgacctgggacgtcaccaaatacgtcagtctgaccggcggcgtggataacgtcttcgataagcgccactggcgcgcgggcaacgcccagaccaccgggggcgccaccggcacgatgtacggcgccggcgccgagacctacaatgaatcgggccgcacctggtacctgagcgtcaacacccacttctga

SEQ ID NO: 215339 - DNA, 3882 bp, Klebsiella pneumoniae
atgaccactcgtttaccgctggttgccgcgcagccggggatctggatggccgagcgcctctccactctgccaggcgcctggagcgtagcccactatgttgaactacgcggcgccctcgatccgacgctgctgggaaaagcgattgtcgccggtctgcagcaggcggacaccctcagcctgcgctttgaggaagaggagggggaagtctggcagtggctggcggccgaccgcacctttggcgaaccgtcgatcattgacctgcggacggcgccggatccgcatcgcgccgctacggagcggatgcaggcggatctggcgcaggatctgcgcgtcgacggcggcaacccgctggtgtgccatcaactgctgcgcgtcggcgacgaccgctggtactggtatcagcgttatcaccacttgctggtggatggcttcagcttcccggcgataactcggcagatcgccgccatttaccgcgcctggcagcgtggggaagccactcctgagtcgcctttcacccccttcgccgaggtggtggacgagtaccagcgctacgccggcagcgaggcctggcagcgggataaagctttctggcaggcccagcgccaggcgttaccggcgcctgcctcactctctgccgcgccgctgggcgggcgcgccgccgggagcgatatctggcggatgaagctggagatgaacgccgacgccttccgccgcctggccagccatgcgccgcagtgtcagcccgctgacctggcgctggcgctcaccacgctgtggctggggcgcctgtgcaaccggatggactacgcggcgggctttatctttatgcgtcggatgggttcagccgcgctgacctcgacagggccggtgctcaatgtcctgcctctggcggtgcatattgacgcccgggagacgctggcggacctggcgatgcgcctcgccgctcagctgaaaaagatgcgccgccatcagcgctatgacgccgagcagatcgtccgcgacagcggcaaagcggcaggggacgaaccgctgttcggcccggtgctgaacgtcaaagtctttgattaccagctggatatcgatggtgtgcaggcagtgacccacaccctcgccaccggcccagtcaacgatctcgagctggcgctgttcccggatgagaccggcgggctgtcgctggagatcctcgccaacaaggcccggtacgacgaagccgagctccgtcgccacatggcgcgactgaccgcgctgctggcgcagttcgccgccgatccggcgctgcgctgcggcgaagcagagatgctctccgccgacgagctggcccggctggcggcggtcaacgataccgctgtgccgctgcctgccaccaccctcagcgcgctggtggccgaccaggcgcggaagaccccggatgcgccggcgctggcggacgcccgctggcagttcagctatcgcgagatgcgtcagcaggtggtggcgctcgcgcagctgctgcgtcagcgcggcgtgaagccgggcgacagcgtggcggtggccctgccgcgctcggtgttcctgaccctggcgctgcacggcattgtcgaagcgggggccgcctggctgccgctggacaccggctacccggacgaccgcctgcggatgatgctggaagacgcccggccgtcgctgctgatcgccacggaggaccagctggcccgcttcagcgatattccggggctggaaagcctctgctaccagcagccgctggccgccggggatgacgcgccgctggcggtgtcaaaaccagaccataccgcctacatcatctttacctccggctccaccgggcggccgaaaggggtgatggtcggccagaccgccatcgtcaaccgcctgctgtggatgcaggatcgctatccgttatctgccgacgacgtggtggcgcagaaaacgccgtgcagtttcgacgtttcggtgtgggagttctggtggccgtttatcgccggcgcgcagctggtgatggccgagccggaggcgcaccgcgacccgcaggcgatgcagcagttcttcgcccgctacggcgtgaccaccacccactttgtgccgtcgatgctggcggcgtttgtcgcctcgctggatgccgacagcgtcgctgcctgccgcacgctgcggcgggtattctgcagcggcgaagcgctgccgacggaattgtgccgcgagtgggagcgcttgaccggcgcgccgctgcataacctgtacggcccgacggaggcggcggtggacgtcagctggtatccggcctgcggccctgagctggcggcggtgaccggcagcagcgtgccgattggctggccggtgtggaacaccgggctgcgcattctcgatgccgcgatgcgcccggtaccgccgggggtggcgggggatctttatctcaccggcatccagctggcgcagggctatctggggcgcccggatctcaccgccagccgctttatcgccgacccgtttgcccccggcgagcggatgtatcgcaccggcgacgtggcgcgctggctggcgaacggcgcggtggagtaccttggccgcagcgacgatcagctgaagatccgcgggcagcgcatcgagcttggcgagattgatcgggtgatgtcggccctgccggacgtggcgcaggcggtgagtcacgcctgcgtcttcaaccaggcggcggcgaccggcggtgatgcccgacagctggtgggctatctggtctctgactccggcctgccgctggataccgcggcgctgaaagcgcggctggcggaacagctgccgccgcatatggtgccggtggtgctgatgcagctcgctgagctgccgctgagcgccaacggcaaactggaccgcaaagcgctgccgctgccgaccctcggcggcgagcgcagcggccggccgccggagcccggcatggaaactcttgtcgccgccgccttcagccagctgctgggctgcgaggtgaacgatatcgacgccgatttcttcgcccttggcggccattcgctgctggcgatgcgcctggcggcacagctcagccgccagctggcgcggcaggtgaccccggggcaggtgatggtggcctcgacggtgggcaaactgagcgcgctgctggccgccgatctcagcgatgagcaggcccagcgcctggggctggatacgcttctgccgctgcgcgagagcgacggcccgacgctgttctgcttccatcccgcctccggcttcgcctggcagttcagcgtcctggcgcgctatctcagcccgcgctggtcgattaccggtattcagtcgccgcgcccgcaggggccgatggccagcgccgccagcctcgacgaggtgtgcgagcatcatctgcgcacgctgctggcgcagcagccgcacggcccttattacctgttcgggtattcgctgggcggcaccttagcccaggggattgccgcccgcttgcgccagcgcggcgaagcggtggccttcctcggcctgctggatacctggccgccggagacgcaaaactgggcggagaaagaggccaacgggctggatcccgaggtactggcggagatcgaccgcgagcgcgaagcgttcctcgccgcccagcaggggcaagcctccggcgagctgttcagcgctatcgaaggcaactatgccgatgcggtgcggctgttaaccaccgcgcatagcgcgaagtttgacggcaaggcgacgctgttcgtggcggagaagacgcggcaggaggggatggatccgcaggtcgtatggggcccgtgggtgggggaactggaggtgttcagccagaactgcgcccacgtcgatatcatctccccgcaggcctttgaggccatcggtccggtggtcagggagattctggggtaa

SEQ ID NO: 215340 - DNA, 576 bp, Klebsiella pneumoniae
atgaatccgcacagcgcggcgcacattagccaccagcccggcgcgcttttatcgccggtgagctcgaccagggctgtggaaatagctggcgtcagtccgccgaagatcgtggtggcaaggctgaaggccagcgaaaagcgcatggtgcggacgtataccggcataacttcggtcagcgccgcgaccatggcgccgttatacatgccaaagaagaacgagaaccatagcaggaccagcgtcatacgggtgaaatcgggcgcgacggtgagccagtgcatcaccggccaggtggtgagcagcgccagcacggtaatgcccatcagcaccggacgacgaccgatccgatcagagatcgccccgctggcgaagttccatatcaactctccggacaaagcggggatgaggaaagtcaccccaggggcgtgtgcgggaagggcgccagaggcgcccataaaaaagccaaccggcaggttggcttttcagtctcagcgaaacggggaattatttttccaccacgtcgtgggcgtgttcgtcctcgcggcaatccccttccgcacagtgaccgtacagatataa

SEQ ID NO: 215341 - DNA, 1197 bp, Klebsiella pneumoniae
atgttgaatgtggaaatgctgtccaccggcgatgaagtgttgcatggtcaaatcattgataccaatgcggcatggctggcggatttcttttttaatcagggtttaccgttaacgcgccgcaataccgttggcgacgatctcgatgcgctggtggcgattctgcgcgaacgcagcgaacaggcggatgtgctgatcgtcaacggcggcctcggcccaaccagcgacgacctgagcgcgctggccgccgccactgcgaaaggcgaggggcttattttgcatccggagtggctggaaaccatgacccgcttttttgctgagcgcggcaggccgatggcggaaagcaaccgtaagcaggcggaaatcccggccagcgctgagatgatcaacaacccggtcggtacggcctgtggctttgccatccagctcaaccgctgcctgatgtttttcactcccggggtcccctctgaatttaaggtgatggtcgagcaggaaattttaccgcgcctgcgccagcgctttacgctgccggacccgccggtatgcctgcgtatgaccacctttggccgctcggagagcgagctggcgcaaagtcttaatccgctgacgctgcctccgggcgtggtgatgggttaccgctcgtcgatgccgatcattgaactcaagctaaccggaccggccaaccagcgcgacgccatgctggccctgtggccggaggtgcgtaaggtggctggcgacagcctgattttcgaaggcacggaagggttaccggcgcagatcgcccgctgtctgcaggagcggcagctgagcctgacgctcagcgagcagtttaccagcggcctgctggcgctccagctgtcccgcgccggcgcgccgctgctggccagcgaagtcgttccggcgcaggaggagacgctggcgcaggcggcccgctgggcggccgagcggcgcataaaccattttgccggcctggctctggcggtgagcggtcaggaaaacgatcatcttaacgtggccctggccaccccggacggcaccttcgcactgcgggtgaagtttagcgccacccgccacagcctggcggtacgccaggaagtctgcgctatgatggcgttaaacatgctgcgtcgctggctgaatggccaaccgctggccagcgaacatggctggattaacgtggtggattccctctcgctgtaa

SEQ ID NO: 215342 - DNA, 1293 bp, Klebsiella pneumoniae
atgatgagcaacactctgctggagagcgtggtgaagaaaaaccgcgcccgcttaatcccctttatgctggcgctgtacgtgctggcgtttcttgaccgttctaatatcggtttcgccaaagagacctaccagctggataccggactcagcaatgaggcctacgcgctgggggccggtatcttctttgtggtctatgccttcctcggggtgccggccaatctgctgatgcgcaaatttggcgccaggcgatggatcggctgcaccacgctgctgtggggcgtgctgtcggcggcgatggcgtgggcggatacggaagcgaaattcctgctggtacgtaccctgctgggcgcggcggaggcgggcttctttcccggaatgatctacctcacttcacagtggtttccccagcaaaaccgcgccagcattatggggctgttttatatgggcgcgccgctggccctgacgctgggatcgcctttatccggtgcgctgctggagatgcatggatttatgggccatcccggctggttctggatgtttgtcattgaaggcctgctcgccgtcgccgcgggagcgttcaccttcttctggctggacgattcgccacagcatgcccgcttcctgagcgcagcggagaaacaggcgctgataagcgagctggcgcgcgaggaggagaaaaagattgcctcgcgcctgtccgatgcgctgcgtaacgggcgggtctggcagctggcgctgatttatctgaccattcaggtggcggtctatggtctgattttcttcctgcccacccaggttgctgcgctgctgggcaccaaagtcggcttcgttgcctcggtggtgacggccatcccgtgggtggcggcgctgtttggcacctggcttattcctcgctactccgatcgcaccggcgagcgacgcaatatcgccgccctgacgctgctggcggcggcggtcgggattgcggtgtccggactggtggcgccggtgctggctatcatcgcgctgtgcgtggcggcggtcggggtgatcgccgtgcagccggtcttctggacgatgccgacgcagctgctgtccggcacggcgctggccgcagggattggctttgttaacctgtttggcgccatcggtggttttctggcgccgatcgtgcgcgtgcaggccgaaacgttgttcgccagcagcgccgccggactgttaaccctggccggcgtcgccattgtcggggtggtcattatcttttcattgagccttacccgcgcggtaccccagcgcggcagcgtacagcattga

SEQ ID NO: 215343 - DNA, 804 bp, Klebsiella pneumoniae
atgaacacactgttatctaaccccttcaaacggggattattacgcggtgagacgcaaatcggcctgtggctgagctccacctcatcctacatggcggagatcgctgcgacgtcgggatacgactggctgctgatcgacggcgagcatgccccgaacaccattcaggacctttatcatcagctgcaggcgattgccccctatgccagccagccggtcattcgcccggtcgagggcaaccgcagcctgataaaacaggtgctggatattggcgccagaaccttgctggtgccgatggtcgataccgccgagcaggctcgggaggtggtctcagcgacccgttatccccccatcgggagccgcggcgttggcgccggcgtggcgagagcggcgcgctggggaagggtggagaattatatggcggaggcgaatgacgaactctgtctgctgattcaggtcgagagccgaaccgcgctggagaacctggacgctattctcgaggtggacggcattgacggggtgttcatcggtccggcggatctctccgcctcgctgggctacccggacgatgccggtcaccctgacgtgcagcgggtgatcgagcagagcatccggcgcattcgcgcggcggggaaagcggccggatttctggcggtcgacccggcgatggcggaaaaatgtcttgcctggggggccaactttgtcgccgtcggggtggataccatgctgtatacccaggcgctggaccgccggctggcgatgtttaaatctgccagcgcccagccgcaagagaaaacgagctattga

SEQ ID NO: 215344 - DNA, 1179 bp, Klebsiella pneumoniae
atgaacgatacccgttttgaaagctgcattaagtgcacggtctgtaccaccacctgcccggtaagtcgggtcaatccgcgctatcccggcccgaaacaagcggggccggacggcgaacgcctgcgtctgaaggatggcgcgctgtacgacgaggcgctgaagtactgcattaactgcaagcgctgcgaggtcgcctgcccgtcggatgtgaaaattggcgatatcattcaacgcgcccgggcacagtacggccagcaaaagccgaccctgcgcgacgccatcctcagccataccgacctgatgggtaccctttccaccccctttgcccccctggtcaacgccgccaccggcttaaaaccggtgcgccgtctgctcgacgcgacgctcaacatcgatcaccggcgtacgctgccgaaatatggtttcggcaccttccgccgcgcttaccgccagctcgccgcccgtcagaagcaatacagcgaacaggtggctttctttcacggctgctacgtcaactataaccatccgcagctaggtaaagatctcattcgcgtcgtcaacgcgctgggtaccggggtgcagttgttatcaaaagaaaaatgctgcggcgtaccgctgatcgccaacggttttttcgacaaggcgcgtaagcaggcgcagagcaacgtcgccgcgatgcgggaaaacacgctaccgatcattgccacctcctcgacctgcgcctttacgctacgtgatgaatacccccatctcctcgatgtcgataacagcgatcttcgcgatcgggtcgagcttgccacccgctggatctggaaacagctggctgccggcaggacgctaccgctgcgcccgctgccgctgaaagtggtctatcacaccccgtgtcatatggaaaagatgggctggtcgctgtataccctcgagctgctgcggctgatccccggcctgcagctggaggtgctggattcccagtgctgcggcatcgcaggcacctacgggtttaaaactgagaattacgcggtatcccaggctatcggctccccgctgttccgtcagattgaggagagcggggccgacctcgtcgtcaccgactgcgagacctgcaaatggcagattgagatgtccaccagcaaacgctgcgagcatccgctgacggtgctggcgcaggcgctcgtctga

SEQ ID NO: 215345 - DNA, 342 bp, Klebsiella pneumoniae
atgacgggacgtcttgatagcgaggtcattatcatcggcggcggagcaaccggcgccggtatcgcccgcgactgcgcccggcgcggattacgaacgctgctcattgagcgccatgatatcgccaccggggcgaccggccggaatcatggactgctgcacagcggcgcccgctacgcggtgaccgacaacgaatccgcccgcgaatgcatcagtgagaaccgcatcctgcgccgcatcgcccgccactgtattgaaccgaccaatggctgtttatcaccctgcctgaagatgacctggcatggcagcaaacctttatcgacgcctgtcagcaggctggcatag

SEQ ID NO: 215346 - DNA, 708 bp, Klebsiella pneumoniae
atgatgaaaaaccgaattcctttaatcctgctgcttaacatcgcgggtgtagcgctattttgctcctggtatctgccagccaaccatggcgcgtggttgccggtcgactccgcgatcttccatttctttaaccatggcgtcagcgtcagtcatgcttatgcctggctgctggcgatcatcaacaatcgcgccttcgacgcctgttcgctgctggcgatgggctgcctgatgctgagctattggctaaaggcgccgactgcaggccgtcgtcagatcgccatcatgggcctggtgatgctgctggcggcggtgatcatcaaccagctcgcacaacacctgatgccggtacagcgcgccagcccgtcgctgttttttagcgatattacccgcgtcagcgacgtcgttaacttccccactaaggatgcgtcgaaggacagcttccctggcgatcatgggatgatgctgctgatcttcgcgagctttatgtggcgctattttggccgtcgcgcgctgggcgtcgcgctgattatctttgtggtctttgctttcccgcgggtaatgattggcgcccactggtttagcgatattgccgtcggctccctgaccgccgtgctgatcggcgcgccctgggtattgatgaccccgctgagcgataaattgatcgactttttcgatcgctacttacccagcagaatatcggccaaataa

SEQ ID NO: 215347 - DNA, 255 bp, Klebsiella pneumoniae
gtggaatgtcgtactgattgtggcgcatgttgcatcgccccctctatatcatcgccgatccccggcatgccgcagggcaagccggctaacacccgttgtatccagctttccgagcgcaatttatgccttattttcggctcccctctgcgcccgaaggtgtgcgccagcctgcagccctcgccggagatgtgcctcacccaccgcgatgaagcgatcacctggctgctggagcttgagctggccaccgcgccctga

SEQ ID NO: 215348 - DNA, 2151 bp, Klebsiella pneumoniae
atgtcttcaacgaaatcaaataaacgaatcagcgcagatgaaattgatattggtcgtctgtatggtgaattaattgaccatcgtaaattaattcttagtattactgcaatttcagtatttataagtattttatattgcctgtttgctactccagtttatcaagctgatgctttaattcaagttgagcagaagcaaggtaatactatacttgagagtttgagtcaggttcttccagatgcacaacctcaatcagcacctgaaatatctttgcttcaatcaaggatgatattaggtaaaactgtagacgatcttaaattacagactattgtaacaaataattatttccctattgttggtaaaggatgggctcgattaattggcgaaaattccggtaatatagatgttgagaacatgattataccggagcaaaagcttaaggaaaacaataaagcaatactaactgtcattaataataatgaatatactgtatctattgatgatactacttatcatggaaaggttggtgttcaaataaaagagccaaatttatcattattaataaataaaatcgatgctcaacctggtgatagttttaagataaaatataagactagattagaggcgataaatgatttagcaaattctttccatgttgaagaccaaggaaaagataccggcatgttagccttgactttgactggagatgatccatcattaatttcagtgatacttaataaaataagtgaaaactatttggaacaaaatgtctctaggcaagccgcacaagatgcaagaagcctcgagtttttaaatgaacgtttgccaaaagtaagagatgatctggacagagcagaagataagcttaatagttatagaaaacagaaagattccgtcgatctgtcattagaagctaaagctacattagatcaattagttaatgttgataatcaaattaatgaactgacctttcgagaggctgaaatatcgcagctttttactaaggatcatccgacttataaagcacttatcgagaaaaaaaatacactaagtaaagagcgtgggttattgaacaatagaatttctgcgatgccagcaactcaacaagaagtattacgtctgagtcgtgatgtcgaatctggacgtactgtttatatgatgctattaaacagacagcaggagctagaaatttctaaatcaagtgcaattggtaatgttcgtattgttgatgagtccgttacagagccagagccagtaaaacctaaaaaggcaatggttgttatattaggagttcttctcggtggcttaatctctgttggggttgtcttactaagagtttcatttagaagaggaattgaatcaccagagcaattagaagaggtagggattagcgtttattcaagcatacctgtatcagagtggttagaaagtaataataaaacaaggcatggtgatagcaggaatctgcttgctatagataatccagctgacttagccatagaggcaattagggggttaagaacaagccttcattttgctatgcttgaagccaaaaataatatattaatgatatcgggcgctagccctaatgctggtaaaacatttgttagcagtaatttggcagtaattgaagctcaaaccggtaagtctgtattgtttattgatgccgatatgagaaaggggtactcacataaattatttggcataaacattggcaatgataatgttggattgtcggaattgctttcaagtaattatgattttgagaaagcaattaataagatagcagaaatgaaaatagacttcatttctagaggtcaagtaccacataatccggctgaaatgttaacaagcattaaatttgataatttattacgatgggctgcaagcaattatgacttggttattgttgataccccgccagtcctagcagtgacagatgctgagattattggtcgctatgttggaacaactttgttggttgctcgatatgaaacaaacacggttaaagaaatggaagtcagtataaaacgttttgagcgaagcggtatcaatgtaaaaggttgcatactcaatggcgtaatgaaaaaatctagctcgtattatggctatggatataatcattatggatatacatataatgatgataagtaa

SEQ ID NO: 215349 - DNA, 1161 bp, Klebsiella pneumoniae
atgtttaaaattcttcgtgtcattccttcaatggatccgcaaaagggaggtccatctgaaggtatcagacagcttcagcaagagatacataggcaaggattaaatataaagtgcgatatagtatgcatggatgatttatcagaagatgttaaagatgttgagtatgctagtatttatgcggtaggtaaaggtaaaggtgtatattcatattcagagagtttgaaagattggttagagaaaaatgtccaaaaatatgattttgtaataatccatggtatctggcaatatcatagctatatcgctagtaaattatgtattaaaaacagcattccgtattttttatatactcatggaatgcttgacccttggtttaaaaaaaattatccaataaagcatatcaaaaaaatgatttattggatgttaattgagcgaaaggtcgtgaacaatgcggaggctgtaatatttacaagtgaagaggaaaaaatactagcacgtcagtcattcccactatatgaaccaaaagaatttgtaactgcatacggaacttctggcagtattgtcgataaagagattgcaaggagtgcatttaatgaaaaattcccttcgctaaaaggtaaaaaaatacttctttatatggggagaattcatgaaaaaaaaggatgtgatatactaataaattcatatgcaaaaattagtaaagaacataatgactatcatttgttcattgctgggccggatacgtctgcatacgcaaaaactctgaaagatcttgtgtcctctttaaatttaaatgacaaagttacttggggtggaatgcttagcggtgatgtaaaatggggcgcttattattcaagtgagattttttgcttagcatcacaccaagaaaactttggaatagtcgttgcagaagccttatcatgtgaggttcctgttgttactactacgaaagtcaatatctggcgagaaatagaacgcgccgatgctggcatgattgcaatagataatgatgattcttttactgaatgcttaaatgagtttattaaaaaatacgaaaacgatcgtgagagattaagagggaatgccttgagatgctttaaggaaaactttgacataaaacttgtagcgacatcatttaacaacttaatatcctcagaacgataa

SEQ ID NO: 215350 - DNA, 573 bp, Klebsiella pneumoniae
ttgagatatcgaagtttttttaacttagttttcggatttcttattgggcaaggagcaatgtttatagcgcaaacattgttaatttctaaatctgaagttgcacttgttggccaaattacaattggtctagggctattgacattagctcagtggttggctgatgctggaggggtttttttaataccgcgcttgttaggctcagaagaaaatgcacagaaaagattagcgtgctttattaatgcgagatttatttttgtcacaattattgttataagtgttctagtttatcttattactaaaaattcgtggcatctgtactacggactcgtatcatttataattcctgttttgctaatttcatcttttagtgtgattggctatctcgatttttataatgaaacgaaggcttctggaacattgtctggagtgtcttggtcattagcctcattgcctttgtattattcatatttctatgaaggagatagatatatcataggtatgagtgctgggctgctttttgttttaggaaacgcattatttattattaaaaaaaataaaatattcattttatga

SEQ ID NO: 215351 - DNA, 1428 bp, Klebsiella pneumoniae
atggcttttgatgatttgcgcagctttttgcaggcgctggatgaccagggacaactgctgaaaatcagtgaagaggtgaacgctgagcccgatctggcggcggccgccaatgcgaccggacgcatcggcgacggtgccccggcgctgtggttcgataatattcgcggctttaacgacgctcgcgtgacgatgaacaccatcggctcgtggcagaaccatgccatctcgctgggcctgccgcctaacacgccggtgaaaaagcagattgatgagttcattcgccgctgggataacttcccggtgacgccagagcgccgcgccaacccggcgtgggcagaaaatactgttgatggcgatgatatcaacctgttcgatattctgccgctgttccgcctcaacgatggtgacggcggtttctacctcgataaagcctgtgtcgtttcacgcgatccgctggataaagataacttcggtaagcaaaacgtcggtatctaccgcatggaagtgaaaggcaagcgcaagctcggcctgcagccggtaccgatgcacgatatcgcgctgcatctgcacaaagcggaagagcgtggggaagatctgccgatcgccattaccctcggtaacgacccgattattaccctgatgggcgccacgccgctgaaatacgatcagtctgaatatgagatggctggcgcgctgcgcgagagcccgtatcccatcgctaccgcgccgctgaccggctttgacgtgccctggggttcggaagtgatcctcgaaggggtcattgaagggcgtaagcgtgagatcgaggggccgttcggtgaatttaccggtcactactccggcggtcgtaacatgacggtagtgcgtatcgacaaagtctcttatcgcagcaaaccgatttttgaatcgctctacctcggtatgccgtggaccgagattgactatctgatgggcccggcgacctgcgtaccgctgtatcagcagctgaaggccgaatttccggaagtgcaggcggtcaacgccatgtacacccatggtctgctggcgatcatctccaccaaaaaacgctacggcggttttgcccgcgcggtgggcctgcgggcgatgaccactccccacggcctcggctatgtgaagatggtgatcatggttgatgaagacgtcgacccgttcaacctgccgcaggtgatgtgggcgctctcctcgaaggttaacccggcgggagacctggtgcagttgccgaacatgtcggtccttgaacttgacccaggctccagcccggcaggcattaccgacaaactgattatcgacgccaccaccccggttgcgccggaccttcgcggtcactacagccagccggtgcaggatctgccggaaaccaaagcctgggctgaaaaactgaccgctatgctggccaaccgtaaataa

SEQ ID NO: 215352 - DNA, 915 bp, Klebsiella pneumoniae
atgttacatcttggaatagatattggcggcaccaaaatggaagccgtactgctggacccggcgggcgaatgcgtccagcgcctgcgccggccgacccacaaagagagctatgacgcctttatgcgtcagctgctgaccctgattgccgatattcgcgcggtcagcccgcagccgttcaccctggggatcggcctgccaggggctatcgatccgcaaagcggacgcattaaaaactgcaactgcctggtgctcaacggtcacgatctgcgccgggatatcatgcagcagcttggccagccggtgtggatggcaaacgatgccgactgcttcaccctttcggaggcggtggatggcgccggcgccggagctaccaccgtcttcggggtgattatcggtaccggctgcggcggcgggatcgccgttcatcaacagctgctcagcggccccaacgctatcgccggggagtgggggcataatccgctgccgggctatactcctgagcgcgatggcccgccgcagccctgctactgcggcaaaacgaactgcatcgaaagctttctctccggcaccggcttcgcccgccgctatggggaacaggcgcgtgcggaagccattgtcgccgcggcgcaaaacggcgatccgcgcgcgctggcccactggcgacactttatcgatgcctttgcccgcagcctggcgtcggtgatcaatattctcgacccgcaggtgattgtgctgggcggcggtctgtccaacgtcagccagatctatcgcgatctgcctgccgccatcgtgccgtggatcttctccgacacctgccgcacgcagatcaaaccggcccgtttcggcgacgccagcggcgtgcgcggcgcggcctggctgccccggcttcccggcgccgcgcaagggccgcggtag

SEQ ID NO: 215353 - DNA, 372 bp, Klebsiella pneumoniae
atggcgatgcgcagccgctcgcggcagctgaaaagcgtggccaagattggcctgctgccgtcgctgtttaatatcaacgagccgatactgtttggttttccggtgatcatgaacccggtttttttactgccgtttctctttgttccgcggataaatgcctgtatcgcatggtatttaactcagctgggtatcctcgaccgcgcggtggcgatgctgccatggtcgatgccttccccgctgggggcggcatggtcggcgaacggcagctggaaaaatttgtgcatgagcctgttcgcgatgtttaacgcctggatgctctatcgccccttcttcaaagtgtacgaacgtcagctcgcggaaaccgaacgctga

SEQ ID NO: 215354 - DNA, 1338 bp, Klebsiella pneumoniae
atgataaagctgaaacactcaatacctctggctctcctctcgctggcaggggccagcagcccggcctgcgccgatccgaagtatgattttgcgctgcatggctatatccgctccgggatcctggcgaactccgatggcaaccgcgcggactccgtcggcctgatgccggacggtaagtggcgactgggcaacgaagaagacaccaagatcgaactgatccccaccgtgacgctgacggcggacagcggcgtggtggcgaaagtgcaggccaacctcactcaccagtcgaaatgcacctccgactggaactgtcaggatgacgatggccatgacgtacagtttcgtgaagggttcgccgagctgagcaatctggattttgcgccggagatgaccttctgggccggtaagcgctatagcagctccaacacctccagccatcagttcgactgggagtacattcagtacaacggcaccggcggcggcttcgataacatggatctcggcttcgcccgcttcgacgccggggtgtacgccttttcacccaccgatgaaaccaaagcctacccggtggataagggagatcagggctacccggatgactattccctcaacctgtggctgaaaaagatcgcggggacaggcttcgatctggagctgatcggccaccacatgaaccgtaacgaaaaccatccgacttccgccgagaagggctatggcgtgaccggtatttataactttgacggcttctatggtctgaccggaggctactcccgcctcgcattgcagtacgggaaagggctggcggcgggtgactcgctgggtaaaaacggctggggctgggccaacctggaaaacacccagtcctggcgagtggtgctggatagcgtggcctcgatgggcgacctggagatctcgaccttcgctttctggcagaaagataaaaactaccgctggtggacagaagatgaaaatggctggggacgctcgatgtgggtcgctggtatccgcccttatcatcagatcacccgcaactttgccatgcagtacgagctgggctacgaatacctggatgacaaaaactacaaaggagtaaacggcaaaggcaaaggcggcctgaccaaagtcaccgttgcgccaacgctaacctttgactccggtttctgggcgcgtccgcagctgcgcttcttcgtcacctacgcgaagtgggataaaggtgtctccgatgcattagacggtaactacaactgggataccaataccatcaccgccggcgggtattcccgcagtggctctaccgacaccgttaacttcggcgtacaggccgaggtctggttctaa

SEQ ID NO: 215355 - DNA, 2193 bp, Klebsiella pneumoniae
atgaagccgatgaaaaacctgctgctgatggggctgctgtccgcgctgggggccggcggggcgctggccgccgagcgctcgcactttacgcactttatcactcgcgacggcgccaccctcaaggacggcgacaaggtgtttcgtttcgccgggatccacgcgccggagctacaccgcattgaagacgatgcccgcggctcctgcagggcagacccgcgcggctgggggcaatactttaaatggccaacggcccaggagcagcaaaactggatccaggcgatggtgcaaaccggggcgaaagcccagcgcgtctacgtgctgtcggtgcagcaggaatttgataaggcctgcgggcgcgagacccatattctggcgccggaaacggcggacggcatgccgcggctgaatgagaaagccatgcgggtgtatgacaacatgattgccgaagcggataaacagggattgcgtctgatcctgccgtttatcgaccactggtggtggtggggcgggcgcgagcagcttgctgcgttctatcatgaaaaagcggaagacttttatcggaccgatagcaagaccttcaaagcctatctggatgtgatccgccaggtcatcacccggacaaataccgtcaccggccgcgcctattatgatgaaaaggcgatcatggcctgggaaaccggtaacgagctggaggataccaacgccgatttcctgcatcagaccgcggcgtggattaaaaaatgggcccctcatcagctggtggtggatggtacctataagaaaatcaattcctttgcgctgaccgaccccaatgtggatatcgtcagcaatcactattacaccaatgccgataataaccatcccgggcaggtgatgcaggatttgcgcgccgtcggcggacaaaaagtctatctcgtcggcgagtttggcctgctgccggcggatcaactgaacgccattatgcagtcgattgttcacagcgaggtcaacggggcgcaagccgccggcgggcttatctggggcttccgcggccatcgtcacgacggcggcttctactggcataaggagtcgaccgggcactacagctaccacctgccggggtttgccaaagaaggcgaagcgaaccaggagcaggcggtggtcgatctggtgcgcaccgccgcggcgcagatggccgggcagcagacgatggcaccgctgccgaagccggacgcgcctttgctgcgcgaaaccacctcgcccttcgcgatcaactggatgggcgctgcggtaggacgcagctacgatgtcgaacgcgccgcctcaccgaccgggccgtggacggtggtgggccgggatatctccgatggcgttaacgaatggaatccggaaaccatggttctgttccgcgacgattatcgtcagcttcagctcgggcacacgtattactaccgggtgacggcgaaaaacgagagtggtcgttcggccccttccaatgtgattagcgtgcagcatagcgaggagaatcagccaccggttgtcacgctggaaccggccctaaccaccacgcaggaccagggcgtcgagcttacggccagctggcaggacgatggcctgccgtcgcgagaggttaaggtgggctggcagcacgccggcgatggccaggtgcatttctgccatgccgatcgggctcaaacccgggcctggtttacgacgccaggtacctatgcgctgacgttcacggcggacgatgggctgttgaaaagcagcaaaaccgtgaccgtgacggtgggcgaggcggcggggaaagcgccagcggatttctgtcgttatcacggcgaagtttatggcgtggctgaggggcggctgacggtgatgaagagtgataaagacgcgctgacagttggtgaggacggcttcctcggcccatttgccaacgagggggataaggtcagctggcaggtgcaggcgccgtggagcggtcagttcctgctcaatgtaaccttcaacggcaaatggggcggtaagcagaactcatttgtcgtcaacgggggcgctccgcagaccgtggccttcccgcagacggatgagcagggccagcagctgcggataccggtgacgcttaaagccgggagcaatcagattgacttcggccgcttcgccggcgactggggctatatgttcattaaatcgatcgaagtggtcgctgagtag

SEQ ID NO: 215356 - DNA, 1401 bp, Klebsiella pneumoniae
atgcagcagtatcagtttccgcaagggttcctgtggggggcggcggcgtccggcccgcaaacggaaggggtcaccaataagcgccatcgttccatctgggacagttggtttgccgaacagccggagcgattttatcagcaggtagggccgcagaccgtgtgtgatacttatcatcagtatccgcaggacgtggcgctgatgaaacagaccggcttcaactcatttcgtacctcgatacagtggtcacgactgatcgctgatttggaaaccggcgcgccggacccggacgcggtgcgtttttatcacgcatatctggatgagatgatcgctaacggcattgagccgatgatcaatctctaccactttgatatgccggaagcgctgcagaaacagtacggcggctttgaatcggcgcacgtagccgagctgtttgcccgctttgcccgcaccgcctttagcctgtttggccataaggttaaatactggataaccttcaacgagccgattgtgccggttgagggaggctacctgtacgactttcactatccatgtaagaaagatggccggctggcggcgcaggtggcgtttaacattatgctggcgcacgccaaagcggtaacggcttatcgtgaactggcgctggcgggcgagatcggcgtggtgctcaacctgaccccgagctataccctcaccgacagcgacgcggataaaaaagccgccgggtatgccgacctgttttttaaccgcagcttccttgacccgctggtaaaacatgaattccccaaagcgctgtgcgagatccttgccgcccacgactgcctgccgacgaccagcaaagacgacgcggcgttgatcctcagcgcggatatcgattttcttggggtaaactattatgtgccgcggcgggtaaaagcgcgtgagagcgaatatgacctcgattatttcaccccggaatactatttcgaaaacgcggtgaacccgcagggccgctttaatccttatcgtgataacaacgagatcctgccgcaggcgatctatgacattgccgccaatattcgcgataactacggcaatattaagtggtatctcgcggaaatcggcatcgcgatggatcgacaatcagagggcgagcccggggcggacggggtgatagacgatactttccgcatccagctgatggaggagcatctggtgcagctgcatcgggcgatagccgacggcgcgaactgctttggcgtgcaccagtggacgtttatcgacaactggtcgtggatcaatgccttcaaacggcgctacggcttctggcgactggatctggagaccggcgagcgacagataaaacgcaatgcgctgtggtttgccgaactggcgaccagcaacggttttaccagcgataaatag

SEQ ID NO: 215357 - DNA, 2727 bp, Klebsiella pneumoniae
atggcctttgatccgccacttgggagcacgtcgcccgcggtgctgctcgataacgccactcgcctggacgaactcgttaacggtccggccggtacggttaacgaccgtgccgggcaaccgctggactcctggcgcctgatgctgcagacattcgcggcaatcgtagaaaatacgcgggaaaacctgatccctctgggaaaacaatatacagacctgtcgaaagcccaggcggatatcgcaaacattcctgatggtgcagtgatctatgtactgagcgcgctcagtgacgttctggctgatgagtataaaaatatcagtggtgtactcacgaccaccggcaaacagatggcggcaaagggctataccgataatgttatcaacagcctgaaatcgtctggcctgatccctgaagtcatgaacccggaaaccggttatgtactggcgtttcgcgatccggagtcgaagcgttcctgcatcctcgtaaccgttacgggccaggttgaaattcccctgctgcagtaccagaacgggtcgattgaacgcccggcgttgcaggaggaaattcagcggttaattcccatgacccttgatccgtccaccggatacattatggcctggatagatcctgttacccgccgcatggcgttgcgggtttcggtgagtggtgaggttgatattccgctgctaaaaatcgcagacggtgccattgaaccggagatgctgtcaccaaatctgcaggggctggtccccgtttacctgactccggacagtggctatgtcatggcctgggttgatcccgttacccggcgctgtgcgatgcgggttaccgttacgggccaggtagagattccgctgctggcgattggtaaaaacgtcatcacagccgacaacctcaccgattcattacgcgggtcgctgatgccggtagctcaggacgtcgtgagcgtttatcccgatgcaatacgatcacgaattgcagaacttacagcccgtaccaacgacaaagacggatcgggatgggttcctttgtcatcccatatctgccgggcattgtacggtgtgaataccaccggcacggcgctggaatatcggcggtcgttcggcctcaaagttgccggtaaggcgcagggcgttccttttaatcccggttcagtagcctccatcacccgcaggggacgactgaccagcccgacgatatcaacaccctccggcacgttttcagcaggcgactattacagctacgaggcatataacaccaactccagcgtttcggaaactgcgccgggaaactggaacgggcagaacgtctatcttggcgatctgctggtctatgacggcaccagctggagtattcagcgctcacctggctctggagcagcgcgaaagaacgatacctggtatctggtcacctcggacgggacatttgcaggaatgacgctctctcctggtgacgcgctgttattcctgaccttacaaactgcaggcggcggatttctgcagccacaatttgccgtcctgaactccaccagtgatctcctgctgtatgggggggagttttccccggcttcagggcttcctggctcaaaccgcccgaatgtcctctaccaggcatcagctggcgggagcgctggaggggaaacgtatgtcgctggcgattacgccatctttgatggtgttaactgggtgaggatcgccggagaaccagtttcaacggttgctgccggacagagtatcagcctgcgatgtgctgcgaacgcggatgaatgggagttcaggcgtgcggataaagcggcgacgtcggttgcagtgcggatgaaagcacaggttgctaatgctatgcgtcaggggatctgccagaagctgctgctgatcggcgactcgatgtttggcagtggttcctctggcacaacgattatcgcggcgactggccgtattggagaggtccgctcatatggcggctccacgtcagatcaagtggtggggatgctccagcaagaggctttatcctggggcgatcgctgggctgggcaggtaataggcgcatggcatgggcagaacaatcagccgacgacagatctgggggccgcccaggtacgtgaggcgtccataaagctgcataagctggcctgggcgatgttcattcgcgtgctgttccttactgtaatggggcaacgtcaggcgacatggaacggcgtgcggatggtttatacgcagcatgaaaatcagtttgccagaaccggcccgctctatgagctcacggagtggtatcgccgaatgttccccgaacaacacgccgtagtgtacgagatcatgttgtctgcggcgacggatgccatagacccgactttccctggtatgactgaaaaacaggttgccgcgaaatatggcgtgctgccgtggtcattttttgccagcgcgctgatgccctcaggactcacaaccaacatgctgacctaccagggaacctggagtaacgccgggacgccttccggtggctcacatgctgattactatctgcggattgcagccggtacggtgggaaatgtcatcgtgaataacaacggctcctggtcagaaattgccatcgatatcacccatctcagccaggccggaggccaggcgctggcgtttggcggtgcggggtttgacctgggcgcaggatacacgccgatcccggcacgggacggcattgctgacatactgaacaacaattattttttcaaatga

SEQ ID NO: 215358 - DNA, 837 bp, Klebsiella pneumoniae
atgggacaggttgttaatctctatggggcgaatttcacggattcccgattgccgatcctctacaactatccggggctgaatcccggatcgttgtttttgctggacgccgtgatgatagaccccgatttcaatttctctgcaaccgggacaacggtatataccgataacctggcggcagaagtggccgcagaactgacagggaaaaccgcggctgatttgcaggtggcatggaataacacgctggtcaccaccggctctgcgccggaggcgaaatttgaaaggacggcaaaaggcgggatacatggcatcctgtcactggtgaatcaggtgtcaggtcaccgtgggcggtttacctgcccgggcatcatgccgtatgtggccgaacatcagcacgatcataaattcctgctcgttatgcactatcaggtgacccgcgtcggcagtgggacgcctgcaacgcagaccactgaggtgctgatttcgtcacagacgtccccatcaacgaaccgcctgatcgtagcccgtttaccgaacgcggtttctgcgggtccggcgcagttcagcctgcagtcggataaaaacggaactgactttacagagaatatttattatcaggatatgcctgtgtggggggcggcgtcgggtttcggcgcgctggtgaataataattgcaaatcgtttgtaatgtaccggacgcacctgattgatattgacgcatccgggatggcactggctgatattgtggcagcagagcagcagctgtttaatgccaactttaacgctggggggaaatacgcgggggacaccatacctaccagcccatcggcgctgccttaa

SEQ ID NO: 215359 - DNA, 219 bp, Klebsiella pneumoniae
atgacagtatgcagattatgtcagtgtgagccaatggtgatgacaaagccggaaactgacggtgcgatcagtttctatgtttattacgtcgagtgttccggatgtggtgttggtactaaacgattttcggaacaatcattcaatgcagaagaggcgattcaaaacgctcaggcacagtgggcgctgatgaatgcagaaaaagaagttgtgagtaattaa

SEQ ID NO: 215360 - DNA, 1236 bp, Klebsiella pneumoniae
atgagtgtttaccagtcatggcggacggcctggccaacaccaggcgtgttaagaaattatcctcctaatccgctttatgtggatacggtcagaggaaaagcgtcgggaaaagggtcagtcgatgatccggtgaacagtctcggcctggcgcaggggctatgcctcggtctttccgattatgaaatccggattattgccccggaaagttctccgctacgacaggaagtcgtatttaacaccaccgagaatgtgaccttatccggcgttgacggcgaaccgtggtacacctttggatcagaagaacatacatccgggtggactcagaacggccaggtttaccagaaaacactgggatatacctcagtgcttcaggttgtggtcacaacaatgacggagacggtcggggatcgacacgacttcctgtataagctggttcaaaacaccgggacgcccaccaccccggcggcgggtgagtatgggtataccggaggcattatttatatccggttacctgatgattccagtccaaacctgcacaccattgaggtttcaaggcgaaatttcggtgttagcgcaattggtttcgggatgctgacggtatatgactgcgtagcgcgctactgcatgatcaacggcatttcctgcggactgtccacgcaaccggcaggcaccggtttcctgactgtcaataactccgttattgagtactgtgcgaatgccggtgttggtggtacggggcgaaatgagttgatcatctgtaataacgtgcgtgcctggcggatttcaaatgatggcttcgggcagcatgcgcctgtaggcggtgccggaaaaatgatcctgaatggctgtaatggtagttataacggcgatcaggccggtcagtctgcccagggggcttcaaaccatgagtttacgaaaatggtaatcaacggagggacattcaattttaatgtctcaggcggaatggtggctattgaaaatgcgcagtgtgatattcacggcgacacaaaatacgggcctgttgtgatggacgggaatatgaggctggggaatacggcaggaactatcgccagccaggctggatgcgcctggctgaactatgccacagggatagtgacgggagatgtaaccgttaaaaacggtcatggtgtgggcgttcgccgtgggccagatgccattgtggaaggtatcgcaacgatccactcagtcaacaacgcgctgccggatatcctgtga

SEQ ID NO: 215361 - DNA, 744 bp, Klebsiella pneumoniae
atggccctgactcctccactcggctcgacgacaccagaggtcttgttacgtaatgctggcgatcttgatcgcgccatgaacagtgaagctgatacatggcaaaaccgaggtggtgatgagctccccaccatgaagggatatcagaaacaggtggatgccatcactgatgatgtttttcaggccagggatacggctgttgaagcagcggcaacgttacccactaaacaacaattccttgagctacaggtggaagtcgacgatataaaggccgatcctgcaaacgcgatggcaaaaattaccattccggcgaaagactttgaccttgctgtggggagtgccagctttggcatgatagccagtcgcctcgcgggctggcagttcactcatggggtaaacgcatccatcaccaaaatgatagacctgccgtctcactggtcaaaaatgcgtatctctctgatctggacaaacctcgttgctaacaacaatttcaatgtgagcctttctggtgagcggcatagctggtctgccggtgagtcattcaatcaggagcctgcaggttatgctgcagtcgttccggttaatggcacaccgtttattgcagtggaaacacaattagagcttgatctcaccgttgacccaacacggcataccacccttcgcatcggacgaaatggcgcgtcttccagcgataccctgcccactgccatcgcattacttgccgtcagactgacaaaggtggcttaa

SEQ ID NO: 215362 - DNA, 3078 bp, Klebsiella pneumoniae
atgacgataaagttttacccgtcccggctaccgggtgaaccccttgaaacgcacgagcatggtgtgctgacgctgcatgagtggatgagcagaaatgtcccgagctattcacaggataaaactcatcctgtcgtgatcgagctgaacggccaggcagtccccccggcggaatggccgttatgtttgttgcggccagacagcgacgtgcggatatatcccattccgtatggcacggggcttgaaattgccgcgtgggtttctgtggccgtatccattgcgtctacggcctatgcattattctttgccccaaaaccagagctgggtggcttttcatccagtaacgcttcatcgctggatctgaatccggctaaagccaatacagcgaagcttggcgatcccgttagggaagcttttgggcgaaaccggatatacccggattacctggtgcagccggtaacgcgattcgaccccgctgatcccaccagaatgacggtcgaaatgtttgtctgccttggatatgggcgtttctcctataccggtggggattttcgggtaggagaaactccggcgctgaccttaggcgagggcttttcatataccagctatgggcctggcgataatgtggccggggatcgtcgcagtgagatatggttcaactcaacggaagttgggggaacgtcgagcggcagcggcctcgatatggctcagactgcccctgaagccagtgatatcgttgctgatgccatgaccgtcagcggtgcctctgtctcgttttctggcctcgatgtcgatgatgataatgatgaagacgaggatgagaacaaacttcctcctggctggatcgccggttcaattgtcaccctgaaagcgccagtgaattatcaggtatccatcgagggcggttttaacgtgctgacaggcgacgtcgtgtcagagattgcgccattcagcggaatgcctgtcaccctaacgtttaacggtactgactatgatctgcagatcgccacgtatactcctcaccaggacgccgttccgggaacagggggagcgactgcggtattacgcgccagtgcgtcgccgtcaacgtatgactttacgacaaccagccagacctttgctctgacctggcagggtatcacctataccatatctctggtcgccaactacggcacaatgtctggcttgctcacagcgattaatggcgggttgaatggttcggggctcattgctcaggatgatggcggcgtgatacgtatcgtcgagatctccagcccctggcgtggcggttccattacgtcatctttcctgcctgcgtcagtatttggtgacagcccggtatttactgctggtgcagcctccagtggcggaagccctgcggtaacagccagcgtcacgctggcatacgattctggcactgccttttccggattgccggaaggcacccagcggatttccctggcgcaccgtggcaacgaataccagatagcgtctactgatggcccctctgcgaccgtacagcgtgtggttaacggtgtcgttgacagcacctggtcaggctttatgacccgtaccgtcgtggattttgccgcgtctggtattaacgataatgaaacctggctaggcccctttctggcctgcccgcagaatgaagttgtggacgccttcgaggtcaactttgctttcccaaacgggatttgcgggttccagaacaacgggaataagcgggtccgccatgtcgagtatgaaatccagtatcgcgtttatggttccggatcagggtggacgagtaagccaggggtttacgcgcttaaaaacattaatggcctcggttttacagagcgttttgatctgtcctctcctgggctggtggaggttcgatgccgccgccgtaacgagcaggggagcaataacgcgagagacagcatgttctggcaggcgctcagaggtcgtttgctttcccgtccgacctcctacgcagggatatcaacaatagggatcacggtagaaaccggcggccagctggcggcgcagtcagacaagcgtgtgagtgttgtcgccacgcgaaactatgatggcggtggtgacaggacaatcagcggtgcgttcctgcatcttgcccgcagtctgggatatcgcgacgaccagatcgacattgcggcgctcagtacgctggaggctacctactggacgccaaggggagaatattttgatcaccaggcaagcagtgacagcacatcagcaaaggatattttcgacaaaatagccgaggctggcatggggtattttctgctatctgacgggttgctttctgtcgggagagagggcgtcaaaagctggacagggatcattacacctcaggataccgtcgaggaaatgcagacgtcattcagggtcccgtcggaggatgattttgatggcgtggatgtgaaatatatcaactctgtgacttgggcggaggaaaccgtacagtgccggacgccggaaaatccttttccgcgcaaaacggaggcatacaccattgatgttgccatgactgcagatcgcgcctggcgtatcgggatgcgtcggttaatgaaatatcttcaccagcgccgaacgtatacggctacgacttcaatgctgggatggtgtcatgacttcggtgatcacatcattttgtccgacgacattccaaccgggaaaacccaaagttgcctgattgacgcgatgatttacgacttccaggaaattacgctgcacgttacggagccactggactggagctacgcgaatcctcgctgctggatacagtttcaggacggtcgaccatcatcgcgaatgctcacgccgcaacgggtagatgatttcacgctgacggtgccgtacaacgacgatctgcatcccggcgactggattatggacgacccagatattgatctgccgaagttattgttctgcgacagtgaaaagggtgcgcggcatgggatagtccaggaggttgccccatcaggtgacagcaactgtcagattactgcacctgaatataaagaaattttctaccagtacgacgacgccacataccccggcgacgtcgcctaa

SEQ ID NO: 215363 - DNA, 381 bp, Klebsiella pneumoniae
atgtttaaccctgataaataccgttcagtcatctggctgaagggcgggcgcgtatatccgcagctcgactgcttcggcattgtaaatgagatacgtcgcgacctggggctacctgaatggccggattttgcaggtgtgaccaaagaaggcgggggcctcgaccgggaagcgagaaagctgatgcttacgctgaaacgttgtgaaccctgtgaaggtgccggagtggcttgctattcgggttcaacggtttcccatgttgggatcgttgtgatgctcgataaccagctgcaggtcgcggaatgcaatccaggctcgggggttacgtttctgccactgtcgcgatttatccgtcgctttaaccgcgtggagttctggcaatga

SEQ ID NO: 215364 - DNA, 477 bp, Klebsiella pneumoniae
atgacaattcttgagcggctatatgccagcagcggatcggaggttattcacgatacgctgcagatatcggcaggagatgataactactggctaaccagtggctgggatgacgtttcagtgacgctggaaaatggtcagccggtgacgtttgaggccagcgcgatagatatcgccttaccagccaggaacgccgacgggacacaggatttaaagtttgctatcagcaatattgacggaagggtttctgaggcgatcgataaaattctggatgaaatgaaatcagccacgctgacattccggcggtacatttcatccgatctgtctgctccggcatcatcaccgtatacgctcgatatcaaatccggctcctggaccccgacagcagttcaggtcacggcaggctatatgaatgtcctcaaaacagcctggccccgtaaacgttacaacctcgccgagcatccgggcttacgttactaa

SEQ ID NO: 215365 - DNA, 474 bp, Klebsiella pneumoniae
atggcagatattttctacccggacgaatacctgcccatgccgcttatggacgggtacgggtttaagcccatatcacctttgctgcgaacggagatgacgtccggtcgcgctcaacaacgaaggcgatatacctcaacacccacccaggcatcggttaaatggatttttaaaactgatgctctggcgcaggtgtttgaggcgtttttcagggatgcgcttaaagatggccagtcctggttctatctgaaactccagactcccatcggggtaaagccctataaagccaggttcgtggatatttacgaagggccgacgctggtcgcgccaaaatactggcagtacagcgcaacgctggaattatgggagcgcccgttaccgccttctggttggggaaattacccagaatggctggcgggccagtcgttactggatattgcgctaaacagagagtggccgaagcatgacaattcttga

SEQ ID NO: 215366 - DNA, 3411 bp, Klebsiella pneumoniae
atggcaacccttcgcgaattaattataaaagtttcagctaattctcagtcctttcagaccgagatcgctcgcgcatctcgcatggggtccgattattataagacaatgcaacggggtgggcggcaggcggctgtttccgcacgcgagacaagacaggcgctagccgaagtatctgcacaattatcagaaactaaaagtgcagctatgggtatggctggtgcgtttgccggagtttttgcgaccgggcaccttattgctcttgctgatgagtggagttctgtgaatgcacgtctaaaacaggcgtcaacatcaaccgatgatttctccaattcccaacgattacttatggatatcagccagaaaacagggacagcgttcagtgataacgcaggtttattttctcgttcggcagcatccatgcgtgagtttggctattcctctggcgatgtactgaaagtcaccgaggctatcagcacgggccttaaattatccggggccagcacgtcagaggccagtgcagttatcacacagttcagccaggcgctggcgcagggggtattgcgcggggaggagttcaactctgttaacgaaaacggtgatcggatcatccgagccttagcggcaggtatgggcgttgcccgcaaagacctcaaggcgatggctgataacggactgttgacaatagataaagtggttccggctattaccgctcagttacgggtgatgcaggctgaatttgatgcaatgccaaaaacagtatcagcctcgactcaaaaggttgaaaacgcctttatggcctgggtgggcggtacaaatgatgcatacggtgcctccgctgtgcttgctggtggtcttgattcactggctgagaacattgataccgtagcaatggctgcaggagcgttaacggctgtgggcgtgacccggtttctgggaaactggacgcttcaactgaaatcacacaccgaagagctaattagggccagaggggcggaaatttccagcactgcggctaaaatcgaaggagcaaacgcctcacttgttcagattgaaacggaaaaatcgttacttctgtctaatcagcgctcactagtggctcaacttgaactggcgcagacggaaaaacaacgcgcatccatcaggacactgcttgcaagaaactcaatggagatggtcaaagcgaataaagcggaaaccgccacggtcaatgagctgtcaatagcaaatcagcggcttaatgcgctcacctctgtaacgagaaccgcatgggctggcgtatcatccctctttggtggcattccagggattttgatgctgggtgcaggtgcctggtatacatggtatcagaaccaggaacaggcgcgtcagtctgcgatacagtatgcctccacccttgatgaggtggtggaaaaggcgaaagccatgagcgaaattcaaatcagaggctctattgctgattctggtgactccattgacgcgctcaaagataagctggaagacttgagggatgctcaagccgaggccgctgctgaagttcagaaatatacgtctctcgctcgacagatgggcgttcagaatgatcaaaataatggttacgtacagaacgctgctaaatatcagcgggaatataataaaatatcccgagatattgctgatactacatctcaattaaacaatgctgtagatgcgcaaaataagttacaaactgagttagcctcaaaagttcaggcatcggcagtcgcttttgacaaaataaaaagttcgataattggtgcgctgaatgttaatgaagtaatggcaacatcgctgtcagttaccattcaattcatggacgaattaaaaaagcgttctgggaacggccagcccccagcaccccaaaccaatacagcttacgataattttataaagcaacagaaggagagcatagccctctctcagaaagaaggtgtagagcgggccaagcttaaagctcttcaagatgccatcaaacagggagcggttagaactgataataaaggtaatattttacctgggcaggatgagcagatcgcagctattcaaggtaatgctgctacagactttaaacttaacgaatcgcaaaaaaaacctcgcggaaagtcagaggtagaaaaaaatgaagatgcatatacccgtattgttaaacaacaagaagaacagattgcactcgccggacaaagcaatgaactggcaaaaataaaatatcagatagttcagggggagttagcctcactcgatcgagctaaaaaagaaactattctgcataatgctgcgcttatcgatcagaaaaacattgctgaacagttaaaaacgttccgtgatgggctggctgatagtaatgctgctgcgcgtgacagggggaatattgattttcttggtgccgggatggggggaaaggcccgcgaccgcatgaaggaaatggcagatattcgcactgattttctcaaacagcagcgggacctgcagcgggatttcagtcgaggggaaatttctgaggacctgtacaaacagcaaacggaagcactgcaggctgcacttgctgaacggctggcgattcaggaggactactacaaaaaaaccgatgaacagcagtcagactggcgcgctgggatcagcgattccctgatgaactatgccgatcaggcttctgaactgagttcaatggctgccactgcaaccagcgagattctggatgccaccacaaactctatctccaacaacctgacaaacgtcctgacaggcgctgcttcttttaaagatgggatgtcaaatattttctcttccctgggcgaaacggtgattaagacgctgatccagatggcaacacaggcgttgatcactaaagcgattatggcgtcatttggcggcggagcgggtgggttgttcggtagtctttttggcggtgccagcggtgcggcaagtagtggtaccgctattcaaagcgcgggagctaatttttcatttaacgctctcggaggcgtttacgattctccgtcactttctgcctacagcaatggtgtttacagcactccccaatattttgcgtttgcgaaaggtgcgggtgtattcggcgaggccgggccggaagccatcatgccgcttacccgtggtgctgatggttcgcttggggtcaaagctgttgggcgggaatcgccggcggtacagaacgctgcgaggcagcagcaagaaagacaacttctttcaactggtgacatcaacgtcaattaccacctcactggtaaaccggatgatgtgatgatgcagacattggatgcccacggccgccgcctggctaaacagataaaatctgaactgacgagcgacgtaaacaatcctcaaaatgccttcggtagagctctttactccaaccttcagcccaaaaaaccacgataa

SEQ ID NO: 215367 - DNA, 306 bp, Klebsiella pneumoniae
atgcctggcatgcagttcctgatggcgctggcgctccggatgggccgcacgctgggcgaactgcgacaaaccatgacggtcggcgaattcaggatgtgggctgaatacgatcgtatcagcccgatcggtgatatccgtggcgatattctcaatgctcagctggtatcagcggtttacggggcgcagggcggtaaagtcaccattgaagaggctcagcttcagtggagcacagaagaagatgaggcaagcgacagcggcgatccatttgccgggttagaagccgctttgctcgcagcatcagcttga

SEQ ID NO: 215368 - DNA, 366 bp, Klebsiella pneumoniae
atggcgggctttcgtaaaaaagaagtctccgttccggagtgggataacgccaaagtcatcattcgtgagccatcagcagaagcctggattcgctggcagggcattgccagcccggaaccacccaaactaccggaagggcaggagccccaggaggcaccagaactgaccccttcagaacgagccttccgcacgatgcgggccgacgtcacgcttttcatcgatattttgctggataccgacctgcagcccgtctttactgtcgatgacaccgaacaggttgaagcgatctatggccctgtgcattcccggctgttgaagcaggcacttgatctcattcgtaacgcggatgatgctaaagcaaagtaa

SEQ ID NO: 215369 - DNA, 705 bp, Klebsiella pneumoniae
atgtcagcactatttgaacgtgcccaaaaaacagtagtaatgattacctctgtgccggtcaccgcggcagagctggatacggcaacctggttaaacctgagttgcactatcaaacaggccagctttaccgctggtcagaaaaacgatattgacgtgacagtgctgtgttcagatgaaacggaaaatatcaacggccttcctgctccgtctgaaatgtcactttccggtaacttctaccgcaacccggcgcaggatgcacttcgtgcagcatacgataacgacggggtttatggatttaaggttattttcccgtctggtaatggattcctgatgcgagctgaggtacgtcagcacacctgggattctcaaaccaacggtgttgttgctgcaacgttctcgctgcgtctgaaaggtaaacccaccaatattaacgccccaggagttctgtcgtttgctactgaccttccggcgtcccaaacggtcgcggcaggaagcgccctgaccatgggcgtggtcgtccagggcggtacggcaccttatacctacgcctggaaaaagggcacctcgacggtcagcggccagaccagcgcaacgtttacgaaagccagcgctgtatccggtgatgccggggtttattcctgcgtggttactgatgccgatggcactgtgatcacttcttctgattgcaccgtcaccatcaattaa

SEQ ID NO: 215370 - DNA, 348 bp, Klebsiella pneumoniae
atgacagaggatgatctctatgacctgctgtcgacgctggcagacgggcgggtttatccgtatgtggtgccgctaggcagcgacggacttcctgcagtttccactccctatgtcattttctcgataccgactgatgttgccggggatgttttctgcggccaggcagagtcgacactgcgcattcaggttgatgtatgggctgaaacaaatgacgaagccagagcgttacgcctggacgccctggctcgcctgcaggtactttcacctgtcgaggtgacaaaaattcctggctacgacacgacaacccatcttcatcgggcaaccctcgaaataacggtcattgcctga

SEQ ID NO: 215371 - DNA, 450 bp, Klebsiella pneumoniae
atgattgatgtgaatctggatttttccgggctgcaggatatcgcccgcgatctgcaaacgctcagcaaggccgaaaataataaagttctccgggattcgacccgtgctggcgccgaattgctccgccaggaggttattgatcgcgctccggagaaaaccggcaaactgaagaaaaacgttgttgtcgtcacccagaaaagccgccgtcgaggtgaaatctcatcgggggtgcatattcgtggcgttaacccgcaaacggggaacagcgacaacaccatgaaggccagcaacaagcggaatgcgttttactggcgcttcgtggagctgggaacatctacggcgccagcacatccgtttgttcgtcctgcctttgatacccgcatggaagaggctgcgcaggtggcgatgcagcggatgaatcaggctatcgatgaggtgttatcaaaatga

SEQ ID NO: 215372 - DNA, 327 bp, Klebsiella pneumoniae; identical to SEQ ID NO: 190770

SEQ ID NO: 215373 - DNA, 270 bp, Klebsiella pneumoniae
atgaaacttatcgcggtgaaaccaatttattttggtggggtagtggtgactgaaggcgagtcactggagacgctggaacagcatggccgtgagttggttcaaaaaggttatgcacggctggtagatgttgataattctgcgcagccggaacagccggaacagccggaacagccggaacagccggaacagccggaacagccggaacagccggaacagccggaacagccggaacagccggaaactgtgccagagaagaaggctaaaaaataa

SEQ ID NO: 215374 - DNA, 1218 bp, Klebsiella pneumoniae
atgtctgatgtaaacgagattctgaaaaaagtcaccgcttccattgaagaagcaaccggcaaatttaacgccaaagcggaagaagcgctgactgaagcgaaaaagaacggcaaattgtcggcggaaaccaaagaaaccgtggacaaaatggcgactgagtttaatgcgctgaaagaagccgaaaagactcttaaagcagcgctgggcgaactggagcagcatgttgcacagatgccgctggcaaacgcaaaacaggttattgaaactgtcggccagcaggttatctctgctgaagccattaaagttctgtcgtccagcatcgaagggaacaagcgtatttctgttcctgtaaaagctgctctgatttccagtgacgttcctgagggggttgttgaaccacaacgactgccgggtattgatgtagcgccaaagcagcggttatttattcgcgatcttatcgcgccaggccgtacgggttcaccggccattttctgggtgcagctgaccggctttaccaatgctgcggcagcggtaccggagaacacgaccaagccgtatagcaatattgagttcacgccgaaaatcactccagtgacaaccatcgcgcacatgttcaaggcatccaagcagattctggacgacttcgcccagttgcagtccatgattgatgcggaaatgcgttacggccttaagtacgtcgaagaacaggagattctgtttggtgatggcactggcgctcacctccatggcatcgtgccgcaggccacggcttacagcgcggcatttgccgttgaacagcagaacggtattgacgatctgcgcctggcaatgcttcaggctcaacttgcccgattccctgcatccggtcacgtcctgcacttcatggactgggcgaaaatcgaactgactaaagacaccctggggcgctatatcctggcgaacccggctgcgttgacggggccgacgctgtgggggcttccggttgtcgccactgaagcagcagctttccagggcaagttcctgacaggtgcatttaatgctgcggcacagcttttcgaccgcgaagacgcaaacgttgtgatctcgacggagaacggcgacgacttcgagaaaaacatgatctctattcgctgtgaagagcgtctggcgttagcagtaaaacgccctgaagcatttatttatggctcctttactgtgccggcttccggcggccagtaa

SEQ ID NO: 215375 - DNA, 849 bp, Klebsiella pneumoniae
atgagcaaaaaacaacttccggtggcgccggcgggtcgcccctgcgcgcgcgttacctgtgaaacattaccgtccgcactggaccgctgggacggtgggatcaaggcggcgactactgacgataacactatttctgtttttgatgttatagggcaggactactggggtgaagggataacagctaaacgtattgccggtgcgcttcgggcgatgaacggcgcagatgttacggtgaatatcaactcgccgggtggcgacatgttcgaaggtctggctatttataaccttctccgcgaatacgaaggccatgtaacggtgaaggtgctgggcattgccgccagtgccgcctcaataattgcgatggccggggatgatattcagattggccgcggtgcctttctgatgatccataactgctggttgtacgcgatgggaaaccgccatgacttcgctgaactggcgcagtcactggagccattcgataccgcaatggctgatatttacgcggcgcgatccggccttgatattgccgccgttcagaaactaatggacgccgaaagttatatcggtggcagcgatgctgtggcgaagggactggcagacagcctgctttctgctgatgcggtcagcgacggcgacgaatcacctgcagctgcgcttcgcaaacttgatgcactgctggcgaaaacaaataccccccggtccgagcgccggaaattaatcaaagcattaacaggtaacacgccgggcgctgttaccgatcccgatggtaagccgggcgctgccgaagatatcaaacctgaaaccctcaattcacttgaaagcgctcttgcggcgttagtcaaataa

SEQ ID NO: 215376 - DNA, 1308 bp, Klebsiella pneumoniae
atggctaagaataaacagcaaccagggcgcgttaagagcgctcttttaaactggcttggtgttcccataagcctgacgaccggtgaattctggcgggagtggtacggaaccagcagtagcggaaaagtggttaccgctgacaaagttatccggctttctgctgtctgggcgtgcgtaagactcttaagtgaatcagtttccacgcttccgcttaaaatttacgagcggcaggctgatggatcgcgaaagctggcccagaacaatcccgcctaccagatattatgcaggcgtcctaacccggaaatgaccccttcccgtttcatgttgatgattgtggccagtatttgcctgcgtggtaatgcatttgtcgagaagctatatatcggcagcaaattggtttcgctggtgccgttacttccgcagaatatggttgtaaagcgactcgatagcgggaagttacagtatacatacacggaaaatagcgttaagcggatcattccagtagaccggatgatgcatatccgcggatttggtcttgatggtgtttgcgggatgatgccgacaatggccggggttgacgttttcggcgctgctatgtcggttgatgaagccgcggcaaaaatcttcgaaaatggcctgcaaagtaccggtttcctgtcttcaaaaacggcgcttaataaggaacagcgagaaagattgcgtcaaaaccttcagtcttttattggttctaaaaacgccgggaaactgatggttctggaaaatgaactgacttaccagaatgtcactatgaacccggaggccgcgcaactccttgaaagccgttcattcagtattgaggaaatttgtcgctggtttcgcgtaccgccatttatggtcggccatacgacaaaacaatccagctgggcttcgagtcttgaagggatgaacatgctgttcctgactcataccctgcgtcctctcctggtcaatattgagcaggaaatatcgcgttgtcttctgaacagtgatgaggacttgtttgctgagttctccgttgaagggcttctgcgcgccgatagcgctggtcgtgctgcttactataccagcgcactgcagaatggctggatgtctcgcaatgacgttcgccgtcttgagaacatgccgccgatagaagggggcgatatttacaccgttcagctcaacctgacgcaactgaaaaatctcgaaagcagcaaccctgccgttcaggcgctggctttgcgagagctgcataaccacgtattccccgacatttcctttgaacaatctccgctgaaacaggccgcttag

SEQ ID NO: 215377 - DNA, 1743 bp, Klebsiella pneumoniae
atggtggagaaaaagaagaagacccgctcaaccagttcttcggttgaacccgccacgcaatatgcgcgggatgtagactccggcaaagaaatcgccgggcctgacatcaggaatgcctgtaagcgacatctcaaagatttggaatcctgccatgctcgcgggttggtatgggatgttgcagcggcgcagcgcgccatcgacttttttgccaaggtactgaagctcaacggtggtgagcatgaaggtaaacccttcaacctgctaccgtggcagtgctttattgtagggtcgatattcggctggaagaactcggatggttatcgtagatttcgcatggtgtacgttgaatctggtaagggttccggcaaatcaccactggctggcggagtggggctttactgtctaacagcagataaggagcctcgtgccgagatatatgcagcagcaacgaaaaaagaccaggccatgatcctttttcgtgatgctgtcgcgatggtggatcagtcccctgcgttagcacagcgaataaataaatcaggcggtgccgggaaagagtggaaccttgcatttcttcagaccggctcatttttccggcctatcagttcggatgatgggcagtcagggccacgcccacactgtgcactgattgacgaaattcacgagcacaaaaacaaccaggttgtggaaatgatgcgcgccgggacgaaaggtcgtcgccaggcgttgattttcatgatcactaacagcggccacgacaaaaccagcgtctgctacgactatcacgagtatgggcgtaaagttgccgaaggctcgattgaggatgacagtttcttttctttcatttgctccctggacgaaggagaagacccattcaaggacgagtcctgctggaaaaaagcaaacccctctcttggtcatacttttaccgatcgctacctgcgtgagcaggttactcaggctcgggggatgccgtcgaaggaaagcattgttcggcggttaaacttctgtcagtgggtggatgccgataacccatggatgagtagcgatgtgtggatggggtgcgaagaggactttgacctgcaggagctgcagggagaagaatgttatggcggcctggacctttcaggaactcgcgaccttacgtctctggcgctctttttccctaaaaaaagaaagctgctggtggagttctggacaccaaaagatactttgctggatagagcgaaaacagaccgcgtaccttacgacgcatgggaacggggaggccatattcataccactcccggaaaggcggtgaaatatggctttgttgctgagcgcattgctgatctttccatgttgttcgatatcaaggcgatcgccttcgaccagtaccgcataaaatatcttgagccggaattagagagcgcttctgtatcagtaccgctgatacctcacgggcagggatactacaaggcgcaggattccggactgtggatgcctcattccatcgaactttttgaacagatgctcgatgatggcgtaatcattattaaaacaaacccctgcctccgatggaacgctgcttccgccgtaaccgaagccgaccaaaaagaaaaccgcatattcgccaagaaaaagagtactggtcgaatagatggtgtggttgcgtcggcgatggcaattggtgctgcagaaggttatgagcctgatgatggcgatatagagggcttttttgacgatccgatcatagtgggtatctga

SEQ ID NO: 215378 - DNA, 465 bp, Klebsiella pneumoniae
atggcaggacgacgcccgaaaccgacccacctcaaagtggttaccggcaacccgggcaaacgcaaacttaacgacaaagaaccatcgccagcgcgagaaataccaagccctccagagcacctcactgactggggaaaggtggcgtgggggaagctgaccgtgctgctggatggcatgggcattttaaccattgccgatacgctggcgctcgaacgactctgcgatatttacgccgacattctgcagcttcgcctgactattgctgacgaggggcgaacttacaccgtgcagaccgagggcggttttttgattaaggctaacccggcagtagcaatgttggcggatgctgatcgacgttttaaaagttacctggttgaattcggtctgactccggccgccagaacgaaggtgaaagtggatggtggagaaaaagaagaagacccgctcaaccagttcttcggttga

SEQ ID NO: 215379 - DNA, 342 bp, Klebsiella pneumoniae
atgaacaaagagccccgcatttacggcagcaagtgggaccgtgagcgtcttatcttccttcgcgcaaaccccttatgcgtcatgtgccaggagcaaggcagggtgacagcggcaacggtggttgaccatatcatcccgcacaaactgaaagaggctctgcgctctggtgacagccaggcaatcgcgaaggcgcaaaagcttttctggagccggaagaactggcaagggctgtgtaagcagcaccacgactcaacgaagcagcgaatggagaagcgtggcaccgtgatcggctgcgatgaaaacgggatgccactggacccggcttctcattggtttaagtga

SEQ ID NO: 215380 - DNA, 441 bp, Klebsiella pneumoniae
atgctaaattactcatccaaaatggtgggggttagcgtgaaaattgaccatgagtacctaaaaggattgctggtggctttcgaggaatcagatagaccagtaaccaatattcgtgaattaaaagagaaaggctttgattacaatgtcgatcaatttgtattccatatgagactactggatgaccgaggcctaataagtcaacctgacggaggattcggctttggtttgcaagtctctgttgatggattttattcttgggctgttattccgctccggctaacggctgaagggcatgacttccttgaagcaataaggaataaagaagtctggtcaacgcttaagacgggtttcaaagatgccagcatcggaaccctcgtgacagtatcgaaagaattgttcaatcgggcattagctaaacagctcgataagtattttgagtag

SEQ ID NO: 215381 - DNA, 246 bp, Klebsiella pneumoniae
atgtcagagatcactgcatccgagcaaatccgcctggatataatcaagaaagttaattatgacaccgcagcggccaagctggccattgactgggtaggcgacagctatctgaagtctgagctattcgctgactctttcgatcgtgttttcacggaaagtgagattgtctcgaagacccgtaaggcaatccaggaagcgaccgaagcgctggcgctgtttgatactgccgctgagaaggtcagctaa

SEQ ID NO: 215382 - DNA, 351 bp, Klebsiella pneumoniae
atgagtcgcttaaccgccgttatcatcgcaatagcaatcctgctaatgttctgtgccatttcatggcgtatgggatggagttcccacgctgatcacatcaatgctcaggctgcgaagaagagagagaaggccgagaatgccattaagcctgtagaggaaaaggccgcgactgctaacgaagcgggtaaggtcatctacaaaacaataacccgcgacgtggtgaaatatgttcagtctccgaatcgtactgtgtgtaggtttgatgatgctgctgtgcagttgcgtcagcgcgccatcgatgctgccaactccatccccggatttgatgagtccgccgtgcaaagcaagtga

SEQ ID NO: 215383 - DNA, 498 bp, Klebsiella pneumoniae
atgtctccgacactacgtaaaactgttcttgcggcggtgggcggcggggccctggcgattgcctctgcactcatcactggcccgatgggtaatgatgggcttgagggagtgcgatactccccttatcaggatgtggtaggtgtctggacggtttgctacggccacgcaggtaaagacatcatgctcggcaaaacctataccgaggcagagtgtcgggcgctactaaataaagacctgaataccgtcgcctggcagatcaacccttacatcaaaaaaccgatcccagaaacaatgcgtggggctctgtactcattcgcctataacgtcggagccgggaacttccagacctctactctgctgcgcaaaatcaaccagggtgaccagaaaggtgcgtgtgatcagctgcgccgctggacctatgccaaaggtaagcagtggaaaggacttattacccggagggaaattgagcgtgaagtgtgtttatgggagcaaagatga

SEQ ID NO: 215384 - DNA, 216 bp, Klebsiella pneumoniae
atgtatcgaatggacaagctaacaacaggtattgcctacggaacgtccgcaggtaacgcggggttctggatgttgcaattgctcgacaaagtatccccatcccagtgggccgctattggtgttctgggaagtctggtatttggcttgctgacttacctgacgaatctgtacttcaaaattaaagaagaccggcgaaaagctgctcgaggtgaataa

SEQ ID NO: 215385 - DNA, 171 bp, Klebsiella pneumoniae; identical to SEQ ID NO: 106609

SEQ ID NO: 215386 - DNA, 333 bp, Klebsiella pneumoniae
atggatacgtacatccaaatgaaactgattctgaaccctgccaaccggcggggttttgcttttctgggggaagcgatgcagcagccatatttttttaacccgggcatgaccactcaacagcttgaagactggcttgggcaacagaaaatctatcttgcccacttcaaccgtctgatagcagaaaaagccgctcttgaggagcgactgagtcagatctctgcggagattgggcgagtcgctactggtagctttgaaggaatgctgagttttccctgggatcccagtcctcttgtggaaaatcctcaacaggatagtggccagtcggcagattga

SEQ ID NO: 215387 - DNA, 477 bp, Klebsiella pneumoniae
atgatgaacaataacaatctgcaacataaccaattcttcaccatcgaacaggacttttcgcctgagaaaattactgatgctgagcgtcttgttatggagcgtttcagttatatttatgcaaactgggccgatgaaaaaaacttaagccgtgaggcggaagaacttcgcgtaagagaaattaaaggttttaaaaacatcctcctctctccctggacattaagcgatgtaaccattgaatgggattactgggaatccgtacttcgtcacaggtataaaacacaaaatggcgatggctacgtccagattatctgggatcggcgcgggtggctcactgaccttttgtgcgttatgaaaccagttacccgggctgaagcattaacagtctgcaagtggttactggcatgtgactattttgaggaacgggattcgctgtttgatcgcattattttgaacctggtcggggagtgcgaagaatga

SEQ ID NO: 215388 - DNA, 963 bp, Klebsiella pneumoniae
atgaaaacggcagaagcagcaaaaggtcgatggtctgaaatttttgaatattacggcttgccgccgatcaccgggaagcaccattacaagggcgagtgtccggtatgtaaggcgagggggaagtaccgcgtagatgaccgtgatggtcagggtacatggatttgtgtatgtggtagcggcgacggcatgaagctgctgaccctgacccagtcaaaaagcttttccgccatctgcgcagaagtggaccagctcatcgggaataactatcagcgcatcaacgtgcctgctaacagttcggcggcgcggcagcgccagcgagtcattagtaagttttcaaagttgctcgatttacggggtactagcgcggctggttaccttctgcaacgtgggataagccgcctgccggcagaaggcatccgtttttgtgaccgccaacgccatgcggggcgcgtttatcaagcgctgtatgccctggctaccgatgacaaagctgagctttgttacctgcaccagacgctgctggacggcgacaggaaggcagatattgatagcgccaaacgtcttaagtcgcttcaagaggacagctatctggatcacgcccgctctgtggccattcgcatgtttccggtatcaacgacgatcggcatcgccgaaggtatcgaaacagcactctcatgttatcaggtttatggcgtcaatacctgggcggtaatcaacagcgggtttatgaagaaattccgggtaccggcaggtgtgaagcatctgattatttttgccgacatggacaagcactctgcaactggacatgccgcggcgttcgagtgcgcccacgccaacttgctggcgaaaaacgacctggtcaaagtcagcatacgctggccggataacggagatttcaatgatatgcttatgaacggcgatcaggttcgtgaacaagttttctataaaaaggtggcagcatga

SEQ ID NO: 215389 - DNA, 1659 bp, Klebsiella pneumoniae
atgcttaacatcacaccgaactttgcacaggaacgtgggcttaacatgctgcggcgcacctggaaggcgcacgattccttcatggtctacgcaccgaccggaagcggcaaaacaggcctggctgcgtttatcgccgccggcctggttagtcgtggtatgagtgttctgtttgtcgccccgtatacgatcctgattaaccagaccgcccagcgctttacagaatacgggttgccggaagaccagattagttttatctggcgtgatcaccctaactatgaccctaatctgctgatccagattgcgagcgctgacacgctcatcaggcgtgaatttcccaaaaacatcgatctgcttattgtcgatgaggcgcacctgcgtaaacgccgtatcctgaaagaaatcgaacggatcacagcggagaaaaaagcgaaagttatcggtttatctggtaccccttttgcgccgttcctgggccattactatcaacacctgattaagccaacgacgattggcgaattgatccagcgtggtgacctcagtaagtacgaatttttcgccccaacaaaaccggatcttagcggggtagaaacgaagccatctatggagttcggtactgattacgacgagtcccagctggcggaaatcatgtgcggttctgacctggtgggcgatatcgtcgataactggcttcgtcatggtcgtgaccttcctacggtggcgttctgcgttaacaaggcccacgcaaactttgtaaccatgcagtttaacaaggcgggtattaacgctgaggtcatggtcgcagaaacaccccacgaagaacggcaggtgatgattcaccgcttcgagactggcgccacaaaaataatcgtcagtgttggtgttttggtagccggttttgatagcgatgttcggtgcattatctacgcccggccgacaaagagtgaaatccgctggctgcaggcgattggccgcggactgcgaactgcacctgggaaagatgcctgcctgatttttgatcacagtggtaccgtgcatcgcctcggcttccctgacgccattgaatacgacgaactaccgtctaaaaacgatggcatgaaaggggctgcagcgcgggcagccaaagaacgcgaagagaaactcccgaaagaatgccctgaatgccacttcatgaaacccgccggcgtctacatctgtccgaaatgcggttttaagccgctggccggagaggacgtagaaaccgacagcacccgcaacctcaaaaaaatgagtaaaggcgagaaggtttacaccaaaagcgacaaacagtcctggtggagtcagatcaagttttaccagcgtcatcgtgcggcgcaggggaaacctgtcagcgatggctggtgtgctcatacctttcaggagaaattcggcgaatggcccaacggcttaagcgactttccaatggagatcacaccggaggtcagcaatcacatcaaacacaaacttattaaatttgctaaacgccgcgaacgtctgcagcagatggggaagaaacctgaccaggatctatttccacctccgagcgccaatatcaactatgagcctcctgagggcagcgacgggcaattaattatcgaagcaaaacgaaaattccagaaaaacataaatagcgcgagtcagtga

SEQ ID NO: 215390 - DNA, 675 bp, Klebsiella pneumoniae
gtggccacggcaaacatgattcaagaacttctgaaggaaaaagggtggagtaaagccgagctggctcgtcagttaggggttagcacgcagacggttgtctactggacgaagggagacactgtcccaaggggtaagagattagcccagctttctgaaatcagtggttacccacaatcctggtttctgggtgagggacaacccgccaccttccctgcgtccgctcaaaaaggagatactgatagcgttaaattcaaagtattagatattgaattcagttgtggtgatggagttagcgtgaaaagtgacttcattgatgtggtccgctccatagagttagaccccgagtacgctcgtcaagttgtaggcaacagacccttcaagaacattgagattggcaatgccaggggtgatagcatgtcgccaacaatagcaccgggtgatttattatttctagataaaacaataacatacttcgatggtgacgggatttatgctttttgttttgaaggtgaatgttatgtaaagaggctgcaaaaaataggcagcaaaattgtagtattatctgacaactcgaattaccaatcttggagcatcgagaaggatgccttggatatgctctacatccagtcaaaagttatctcatcagttcctttcaacattaacagattcggttaa

SEQ ID NO: 215391 - DNA, 414 bp, Klebsiella pneumoniae
atgaaaactccaatccaaatgcttgaagtgtttgtatcagacataatagaaaacactgttcttctggaggagatctataaaaaaagtaacgagaattacgaaacggattgttctataaacagcctaattcgttcaatgcaaaagaccgtagataacatgaacggatatattaagagtcatattaattcagtcaaaccctgcatacatgtagcggacagaaacgatctgactgatgatatattcgatgtgattcttactgctaaaaaacttgaagcagtcgcgcaaacttatagtgagtctttttttactgacgaggacaatgacaaccccgcgtgccatatgtcagctgtgatatttgactatgctcgtgaactttgcactgatcttaaggctatcgagaataaaataggctaa

SEQ ID NO: 215392 - DNA, 225 bp, Klebsiella pneumoniae
atgggtatgcagcgccgccaagatattcagtgcgtcaccattaaggctgagcaacttaacttccttatgcagacaattttcacacatcacaaggactttgactaccatcaacttgatggggttttaggtcttgcatatgaccttgctggcgaggtctattcatggatggaaaaagaggaaaagattgtacagcaaaatgaagaacacaaaagaaggggtaattag

SEQ ID NO: 215393 - DNA, 366 bp, Klebsiella pneumoniae
atgagtaacttaattactacctatcgccgccgaattttaaaagcagccttgttacgccaccagcgaaagactgggagtagcttacttgtcattaagcttaacaagggtgggattagtactatcgaattaactgagattcttcttgatggattgttgcggaaattcgagcgactggcgctcggtgagtacggaaatgtggaaggtgtgaaagctcttaagggaatttacagcaactctgttgatgttaatggcagcggcgaattcctcacagaaagcgggaaagagttaatcgacgagcttatttctgaactggttgagttcgtcaaaaagcagaaaccagttactgcggagtccggcaatgaataa

SEQ ID NO: 215394 - DNA, 723 bp, Klebsiella pneumoniae
atgatgaataacttgatcactaacaaaccatccatgaccagccttgaaatctccgaattagttaatagtcgtcatgacagtgtgaaacgtaccattgaacggctggtagatgctcgcgttattgtccagccaccgttggtggacgaacccggaacagactctatggggcgtccgcggacaatgcaggtattccgcttcacagatgagcaaggcaaacgcgacagcatcatcgtggtcgcgcaactcagccccgagtttaccgccaggctggtagatcgctggaaagaactggaagaggagcgctcgcgtccaaaatcacaggccgaactgatcgcagaaatggcccttttgaatctcgagcaggaacgccggctgtatcaggtagaagaacaggttgaaaccgtcgcggaagctgtcgaaaacattaagcgtggaaatatgcgggccgggtatgtcggttatcgccaggtggtcgcaaaaagcggcatgaccgatgccaagtgccgaaaccttgttaacgcataccgtatcccaaccgatacgcacgagttcatgacgcctgatggtctgctgtctcgccgggcgatcgtggagtttgaaccttttatgaaagcattccgccaaatgatggcagaagccgaaccacgtggggcccgttggtatcacccgaaaatggggctgtttcaggctattgggtgggaggaaaaacattgtgaaggttga

SEQ ID NO: 215395 - DNA, 225 bp, Klebsiella pneumoniae
gtgaaggttgagtttaatgatcaagggtcggtttcagttatcacggtcaccagctctgtatttgagttccgccgacacaaccgggcgattgatgtggcgttgcttctcacgcctgaaatgaccagccagagcagcggttttttcattatgaaaacgatcttaagcgggaaaacacatcacgtgctgcgggcctacaagcatctgctccgggaggctaagcgatga

SEQ ID NO: 215396 - DNA, 465 bp, Klebsiella pneumoniae
atgagtaatatcaccgagctggcgcagagagagaaattcgaagcgtggtgggaacgcactcagcataacggcagtcctccacgctttggctgggagtactggcgcgaaggcgaaggctataaggttgacgatgacgactcagagcttgacggaatgtgggaggtatggaaagcggccagcgctgagctggttgaggcgctggaatcagagaaaaggatttgctctacgtggagaaaaacagctaagtcgaccggtgaaaagctggagaaggcgcagcagcgcattattgaacttgttgctcggaaggagaaacgactgcccgtgccttacgcctatttgcgagagagcgacggacaaatccaaatctctataggtgctgagcgccctagcgaccgctcagggggctatgccaccccatggtttcccatctataccgccactggcatcaaggtggagacaaagtga

SEQ ID NO: 215397 - DNA, 147 bp, Klebsiella pneumoniae
atgaatagagaatttgagatatggatcagactgcgctacggcggccgctatgacctgacgcgagacggtcacggctactacagccgggaagtagttaagcggatgtatgaagtgtggtgccactgtcgtggcctggaagtggtgtga

SEQ ID NO: 215398 - DNA, 489 bp, Klebsiella pneumoniae
atgattggccaccaggtcgatgccgtctgcccggataaagccgctggcgactatgtcatgaccgcaatccatgactttgacggcgcccagacttatagcgaaaagccgggccatcgcttcacgctgaacgctgacttcgccgcagtaaaggccgagaactacgatgcgctagtgatccccggcggccgggcgccggagtatctgcgcctgaacgaggaggttattaaactggtacaggcattcgacgccgcgcgtaaacctatcgccgccgtctgccacggcccgcagctgctggccgccgccggtattctgcagggccgcacctgcagcgcctatcccgcctgcgccccggaagtgcgtttgagcggcgggcactatgcggatattggtatcgaccaggcgcatgtggacggtaacctggttaccgcccccgcctggccggctcatccacagtggctggcgaaattcgccgccctgctggcggaataa

SEQ ID NO: 215399 - DNA, 915 bp, Klebsiella pneumoniae
atggataaactggatactctgaccttgtttgtgcgcatcgtcgaacggggctcattcagtgccgccgccgcggatctgggggtttcccggccagtagcgaccgcggctattaaagcgttggaggtcagtctcggggcgcggctgctacatcgtaccacccggcacgtacggccgacggcagaaggctcgctgtattatcagcgctgcgtgtccattctggcggcccttgaggaggccaaccgcagcgccggggggagcatctccggcaccattcgggtagacgtggcgggcaacctggcgcggaccctgctgctgcccgcgctgccgcagtttctcgcccgctacccggacattacgctgcagatcggcgaaagcgagcgtgacgtcgatctggttcgcgagggagtcgactgcgtcattcgcggcggccatctccccgacagcgagatgatctgccggccgctcgccgggttgcaggagatcacctgcgccagcccgacctatctcgcccggtacggcaccccgcatacgattgaaggactgacgggccacgtgatgatcgggtttgtttcatcgcgcacgcaacgtaccttgccgctgagctttacccaggatggccgtcagagcgaggtcagtttgccctgtcggttgctgacttccgatgccgacgttggcgccgaagcggcaaggcttggctttggcctgtatcaggcccccttgccccgccttgaggccgatctggcgtcgggcgcgttaacggaagtgctggccgattttcgccctgcgccgctgccgctctccctgctctatcccagtaatcggcagctctctgcccgggtacaggtatttatcgactgggtgacggcgctgatgaagcctcccctggcgcagcaggcatccggaaggctaaaataa

SEQ ID NO: 215400 - DNA, 1059 bp, Klebsiella pneumoniae
atgagctctgctgagacaactaacccgaatgcgcctgtttcactgattgaacaatgggataaaacgtttgctgagagcttgaaagtggatcaccgtaaggtgaccttccagaaccgctacgggataaccttagttggcgatctctacctgccgaaggatcgcggtgaacgcaaactggcagctattgccgtgagcggtcccttcggcgcggtaaaagagcagtccagcggcctgtatgcccagacgctggccgaacaggggtttgtcaccctggcgtttgacccatcgtatacgggcgaaagcggtggctacccacgcaacgtggcctcaccggatatcaataccgaggattttagtgccgcggtggactttctgggcctgcaaaaagaggtggatcgcaaccgtatcggtttgctcggcatttgtggctggggcggtatggccctgaacgacgcggcgatggatacacgcgtcaaagcggtggcgaccagcgtaatgtatgacatgagccgcgcgatggggcatggagtgggcgatggcaaagaccgctataccactgccgatcgtcgcgccgtactgcgctatctgaacgtgcagcgctggaaagatgcggcaaacggcaccttcgtccccggtgggcatgacatttatgttgatgataagggcaacgtcagcgctgccgatcgtattttgccggaaaccttgcccgccaaccccaacccggtcctgaaagagtttttcgattattaccgtatgccgcgtggtttccatccgcgttcggttaattcaaccggggcctggaatgcgacgatgccgctgtcgtttatgaatatgccgctgctgagttacgccagcgaagtgactattccgacgcttatcgtgaccggcgaaaaagcccattcacgctattttgccgaagatgcctttaaggccatcggcagtaaagagaaagcgctggtgattgtcccaggcgcaaaccacgtcgatctctatgacaacgtcgcgggcaaaattccctttgcgacgttcgcgcaattttttaaaaccaacctgaaatag

SEQ ID NO: 215401 - DNA, 885 bp, Klebsiella pneumoniae
atggcgaaacgggaaaactataatgacctttatctgtttatgcaggtggtacgggaaggcagttttaccgccgcagcgcaacgacttggcctggcgcagtccggggtaagccgtgcggttcgtgaacttgaagagcggctgggcgttcagcttctggtgcgtaccacccgccggttgtcgctcactcaggcaggtgagcagctctatcacaacgtcgaatccggtttcgacgccttagatatgggactcgccacgctggcccactatcgtcaaacgccctccggtacggtacgcatcaatgccagccagcatgccattgataaagtcctgctgccgaagctggcagtatttaaacaacgctatcccgatatcagactggaactgatcagcgaaagccggtttgtcgatattattgcgcagcgatttgatgcgggcgtacgtctgggcccggaagtcggaagcggcatgattgcggtacgcatttcgcccgatatggagatggcggtggtgggtacaccggaacattttcgccgctacggctttccacaaacgcccgccgatttagtcgcccacccctgcatcgcttatcagttcggcgacggcagcctttacgcctgggaacttaatgtggatggcaaaaaaatcacccacccgcctcagggacagtgggctttcgccgatagctatatggaggccaaagcggcgaggctcggtctggggctggcctatgtcccggaagagctgattaccgacgatctagcccagggcacacttatccgggtgctccagcgttatagccagcgtctggaaggttcatttctctattacccgcaccgcaatgtgtcgcccgcgctgagagcggtcattgatacattgcgaatgtag

SEQ ID NO: 215402 - DNA, 603 bp, Klebsiella pneumoniae
atggcgccgggagcgcacagggggcggccagtcgccgccgccccctgtacccccgggctccggccagcaaaatcgccgctgcgcggtcccttcgacttatccctgcaggcttcgggtcgggccgaggcagcatctctgcaaaacacggccctcagcccgcatccatgcgggctgccccggcctgccgggaacgtctcagcgattttgaggccgtcagcaccggcagtttcagcaagaaaagtgaataaattaacgacaggtcgtacgaacgtaggccgggtaaggcgcagccgccacccggcacaaaatcagctctgtgcccgctgtccttgcccggcggcgctgcgcttgcgcgggcctacagacaatcagagccggatgcgttggccgggtaaggcgccagccgccacccggcataataagcaccgactcagaatcgcgtcacaaacggcgcggtatccggcagggcaatggtggttgaggcttttagctgcggcgtccccagatagaggaagccgacgattttatcctgttcgcggcactcgaagccggcccgcaccaccggactctcggtcaatgctccgctgcgccagataccgttga

SEQ ID NO: 215403 - DNA, 552 bp, Klebsiella pneumoniae
atggatgctctcgatctactgcttaatcgccgcagcgcttcccgcctggcggaacctgccccggcgggcgaacagctggaaaacattctgcgcgccgggctgcgcgccccggatcatggcaccctgcagccgtggcgcttctttattatcgccgatgacggccgcgagcgcttcagccagttgctggaaaaaggggccagagaggccggccaggatgagaagggaatagagaaagcccgcaatgcgccgttccgcgcgccgctgattattaccgtggtcgcgcgctgtgaagaccaccctaaggtgccgcgctgggagcaggagatgtccgctggctgcgcggtgatggcgatgcagatggcggccctggctcagggattcaacggtatctggcgcagcggagcattgaccgagagtccggtggtgcgggccggcttcgagtgccgcgaacaggataaaatcgtcggcttcctctatctggggacgccgcagctaaaagcctcaaccaccattgccctgccggataccgcgccgtttgtgacgcgattctga

SEQ ID NO: 215404 - DNA, 1854 bp, Klebsiella pneumoniae
atgcgaaccctttggcgactgattgccagcttttttaaatggacgtggcggatactcaactttattcgcaaactggccctcaatgcgatcttcctggtgctggtgctggtgtgtatcggcatctggagccagttcagcagcaccaccagcgaacatgccgcgcgcggcgcgctgttgctggatattaccggcgtggtggtggataaaccatccgccagcagcaagctcggcgtgattggccgccagctgtttggcgccagctcggaccgtctgcaggagaactccctgttcgatatcgtgcagaccattcgccaggcgaaggatgaccgcaatatcaccggtattgtgctggatctgaaaaacttcgtcggcggcgaccagccatccatgcagtacatcggcaaagcgctgcgcgaattccgcgatagcggcaaaccggtgtatgccgtcggcagcagctacagccagggccagtactacctggcgagcttcgccaacaaaatctggctctcgccgcagggcgaggtagacctgcacggcttcgctaccaacgggctatattacaaatcgctgctggataagctgaaggtctccacccatgtcttccgcgtcggcacctataaatccgccgtcgagccattcatccgcgatgatatgtcccctgccgcccgcgaagcggatagccgctggattggcgaactgtggcagaactacctcaacaccattgccgccaaccgccagatcaccgcccagcagctcttcccgggcgcccagggcattatcgatggtctgcgtaaggtgggcggcgatacggcgaaatatgcgctggacaataagctggtggatgagctggcgacctccacggaagtggaaaaggcgctgaccaaacagtttggctggagcaaagcggataacaattaccgggcgatcagctattacgactacaacgtgaagacgccgtctgaccagggttccgccatcgcggtaatcttcgccaacggcgccatcatggacggtgaagagaccccgggcaacgtcggcggcgataccaccgcagcgcaaattcgcgatgcgcgcctcgatccgaaaattaaggccatcgttctgcgcgtaaacagcccgggcggcagcgtaaccgcttcggaaatcattcgtgaagagctggcggcagccaaagccgccggtaaaccggtagtggtctcgatgggcggcatggcggcgtccggcggctactggatctccaccccagcggattacatcgtggcgaacccaagcaccctcaccggctccattggcatctttggggtgatcaacaccgtggaaaataccctcgggtcgattggcgtccacaccgacggcgtcgccacgtcgccgctggcggatgtctccagcaccaaagcgctaccgccggaagtgcagcagctgatgcagttgagcattgagaatggctatcagcgctttatcaccctggtggctaacgcccgtaagagcacgccggagaaaatcgaccagatcgcccagggccacgtctggaccggggaagatgctaaagccaacggcctggtcgacagcctcggcgacttcgacgacgcggtggccaaagccgccgagctggcgaagctgaaaacctggcacctcaactactatcaggaagagccgaccttcttctcgatggtgctggatagcctgaccggctcggtacgcgcctcgctgccggcggccattcaggcctggctgcctgcgccggtcgccgcggcggccgagacggtgaaagcggagagcgacaagctggcggcgtttaacgacccgcagaatcgctatgccttctgcctgacctgcgctaacatccgttaa

SEQ ID NO: 215405 - DNA, 1020 bp, Klebsiella pneumoniae
atgcaaaaaaaatcgatttacgttgcctacaccggtgggaccatcggtatgcagcgctctgaacacggctatgtacccgtttccggccatctgcagcgtcagctggcgctgatgccggagttccatcgtccggagatgccggacttcacgatccatgaataccatccgctgatggattcatccgatatgacccccgaggactggcagcacatcgccgacgatatccgcagccattatgaggagtatgatggctttgtgatcctccacggaaccgacaccatggcgtttaccgcctcggcgctgtcgttcatgctggaaaaccttggtaagccggtcattgtgacagggtcacaaatcccgctggccgagctgcgttccgatggtcagattaacctgctcaacgccctgtacgtcgccgccaactatccgattaacgaagtggcgctgttcttcaacaatcgactgttccgcggcaaccgcaccaccaaagcccatgccgacggcttcgacgctttcgcctcgccaaatcttgccccgctgctggaggccgggatccatattcgccgtctcggtactccgccggcgccgcagggtagcggagagcttatcgtgcaccccatcactccgcagccgattggcgtggtgacgatttaccccggcatctccgccgacgtggtgcgtaattttctgcgccaaccggtgaaagcgctgatcctccgctcctatggcgtcggcaatgccccacagaatggcgagtttattcaggtgctggcggaagccagccagcgcggtattgtggtggtcaatctgacgcagtgcatgtccggaaaggtgaacatgggcggctatgccaccggcaacgccctcgctcaggcgggggtcatcagtggtttcgatatgacagtggaagcgacgctgaccaagctacactatctgcttagccagcagctggacgttgacgccattcgcgcggcgatgcagcaaaatctgcgtggcgaactcacccccgacgaggcttaa

SEQ ID NO: 215406 - DNA, 642 bp, Klebsiella pneumoniae
atggcacatcgagcgctgttactggttgatttgcagaacgacttttgtgccggcggcgcgctggcggttcctgaaggcgacagtaccgtcgaggtagccaatgcgcttatcgactggagcctggcgcgcggcgagcccatcgtcgccagccaggactggcatccggcggatcacggcagtttcgccagccagcaccaggtggaaccctacaccgagggcgagctggacggcctggcgcaaactttctggccggatcactgcgtgcagcacagcgaaggcgcggcgctgcatccgctgctcaagcagcaggcgatcgccgctgtgttccacaaagggcaaaaccggatcatcgacagctatagcgctttctttgacaacggtcaccggcagaaaaccgaactggacggctggctgcgtggtcaggggatcgtggagctgaccgttctcggcctcgccaccgattactgcgttaagttcaccgtgctggatgccctggcgctgggctacgcggtcaacgtcatcaccgacggctgtcgcggcgtaaatctgcagccgcaggacagcagccaggcgtttatggagatggccgccgcgggcgccacgctctataccctcgacgactggcgggaaactcaggcctga

SEQ ID NO: 215407 - DNA, 1254 bp, Klebsiella pneumoniae
atgaaacgtttgcccttgctggcagccttgcccttgctttgcgcttccgcgctctctgcccaaccgctgatgtccgtcggctattttaacggcggcggcgacgtcaccgccgggccgggcggtgatatcgataagctggacgtccggcagatcacccatctcaactactcgtttggccttatctataacgatgaaaaagacgagaccaatgcggccctgaaggatcctgctcatctgcacgagatctggctgtcgccgaaggtgcaggcggatctgcaaaagctccccgccctgcgtaaacagaatccggacctcaaagtcctgctgtcggtcggcggctggggcgcgcgtggtttctccggcgcggcggcgaccgcagaaagtcgcgccgtctttattcgttccgcgcagaaaatcatccagcaatatggtctggacggcattgacctcgactgggagtttccggtcaacggcgcctggggactggtggccagccagccggctgaccgcgacaacttcactgccctgctgaaatcgctgcgtgaggcagtcggtgagcaaaagctggtgactatcgccgtaggcgccaatgccgagagcccgaaaagctgggtggacgtcaaagcggtggccccggtgctgaactacatcaacctgatgacctacgacatggcctacggcacgcagtacttcaactcgaatctgtatgactccagccactggccgacggtcgccgcagcggataaatacagcgccgattttgtggtcaacaattacctggccgccgggcttaaacccagccagatgaacctcgggattggtttttatggccgggtaccgaaacgggcggtcgagccggggattgactggacgaaagcggatgcgcaaaacaatccggtcacccagccctattttggaccacaacagatcgcgctgtttgcctcgctgggctatgacctgagcaaagacacctacgtgaaatacaatgatatcgtgggcaaactgctcaacgatccgcaaaagcgttttaccgagcactgggacgatgaggcgaaggttccgtggctgtcggtgcagtccgcggagggcaagccgctgttcgccctctcctatgagaacccgcgctcggtagccattaaggcggactatatcaaggcgaagggcctcgccggggccatgttctgggaatatggcgccgatgaccagaatcagctggcccgtcagctggcggaatcgctggggatcaaacactaa

SEQ ID NO: 215408 - DNA, 345 bp, Klebsiella pneumoniae; identical to SEQ ID NO: 214289

SEQ ID NO: 215409 - DNA, 885 bp, Klebsiella pneumoniae; identical to SEQ ID NO: 139398

SEQ ID NO: 215410 - DNA, 549 bp, Klebsiella pneumoniae
atgtctgtatcttttcaacatcgttttattcttacaggtggcccagggtcaggcaaaagcgcgataattgattcgatgataaaacgaggtttttggtgttctaaagaggctggaagaggcgttattcaagatcaggtaaacatcggcggtgatgcactaccatgggccaatcagcgtgcatttgcagagcttatgctatcctgggaaatgcgctcgtggcacgaagcggaggggcaaaaatcactatgcttcttcgaccgtggcgttcctgatgttttaggttatttacgtctttctgaacttaccataccgaggcatctggaaaacgctatcgcgaaatttcgctataaccgaaccgtatttattgcaccgtcctggcgtgagatatatgtacaggatgccgagcgcaaacaatcttatgatgttgccgttgcgacatatcatgcaatggtgaaaacgtaccgtctgtatgactatcagttgattgaattgccatgcgtttcagttgaagaacgtgtggattttattctttccagagtcgtactttga

SEQ ID NO: 215411 - DNA, 447 bp, Klebsiella pneumoniae; identical to SEQ ID NO: 135639

SEQ ID NO: 215412 - DNA, 1407 bp, Klebsiella pneumoniae
atgtttgaattcgacgcgtttcatctggcccgattgcaattcgcctttaccgtatccttccatatcctctttccggccatcaccatcggccttgccagctaccttgtggtgcttgaggggatgtggctgcgaacccgggataatgtctggcgttcactctacaatttctggctgaaaatttttgccgtcaattttggcatgggcgtagtctccggattagtcatgtcctatcagttcggcaccaactggagcggattttcccagttcgctggcagtattaccggcccgctgctgctgtacgaagtgctgaccgccttcttccttgaagcgggattcctcggggtgatgctgtttggctggaataaagtgccgccagcgctgcatttttttaccacctgcatggtggcgcttggcacgttggtttctaccttctggatccttgcctccaatagctggatgcagacgccgcagggttttatcatcgaaaatggccatctcatcccgcaggactggctggcgattatctttaacccctcttttccgtatcgcttgttccatatggcgatagccgcgtttctcagtagcgccatgttcgtcggggcgtctgccgcgtggcatcttctgcgcggcaacgactcgccggccatccgcaaaatgctgtcgatggcgatgtggatggcgctgctggtggcgccgatccaggcggtggtgggggatatgcatggtcttaacacccttgagcatcagccggcgaagatcgcggccatcgaagggcactgggaaaatcgccccggcgaggccacgccgctgctgctgtttggcctgccggacatggagcaggagcggacccgctatggtcttgagatccccgctctcggtagcctgatccttacccacagcctgcataagcaggtgccggccctgaaagacttcccgaaagaggaccgaccctattcgcccgccgtcttctggtcgtttcgcatcatggtcgggatgggcgtgttgatgatcgccttagggatctgcagcgcctggctgcgctatcggcggcggctgtaccactcgcgtcccttccagtggtttgcgctctgtatggggcccgccggtcttattgccctggtcgccgggtgggtgaccaccgagatgggccgccagccgtgggtgatatacgggttgctgcgcacgcgggatgcggtgtcgttgcacagcaccctgcagatggccatcagcctgctggtatttatcgtggtttactgcgccgtgtttggcgtggggtattactacattttccggcttatcaaaaaagggccgcagccggtgacggagctgacctcgaaaaccgcaggcaccccggcgcgtccgctctcagcggctgagccggtgcgtgatgaggagaacgcatcatga

SEQ ID NO: 215413 - DNA, 507 bp, Klebsiella pneumoniae
atgaatcacgttgaacattaccatgactggctacgagatgcgcatgccatggaaaaacaggcagagtccatgctggaatcaatggctggccgtatcgataattatccggatctccgtgccagaatcgaacagcatgttaacgagaccaaacggcaaattaccgtgctggaagagatcctcgaccgcaatgagatttcgcgctcggtgattaaagattcgatgagtaaaatggcggctctcggccagtccatcggcgggatgtttccttccgatgaaatcgtcaaaggctcgatcagcgggtacgttttcgagcagtttgaaatcgcctgctatacctctctactggcggccgctgaaaaagcaggcgataccgcctccatcccagccattgaagccatactggcggaagagcgggaaatggccgactggctgattaaacatattcctcagaccacggagcagtttctcctgcgttcagatgctgacggcgtagaagcgaaaaaataa

SEQ ID NO: 215414 - DNA, 1194 bp, Klebsiella pneumoniae
atgaaagcactcacttatcacggcccgcatcatgtcagcgtcgacaccatgcctgacccggctcttgaggcagcggacgatattattctgcgcgtcaccgcgacagcgatttgcggttccgatctgcatctgtaccgcggaaagatccccggcacgcaccatggtgatattttcggccatgaatttatgggggaagtggtggaagccggttccgaggtcaccgcggtccgcaaaggcgaccgggtggttatcccgtttgtcatcgcctgcggagactgcttcttttgtcgcttgcagcagtatgccgcctgcgaaagcaccaatagcggccagggagcgacgctcaatcgaaaaggcatttcgccaccggcggcgctgtttggctatagcgatttgtacggcgggatcccgggcggccaggcggaatatgtacgggtccccaaagccaataccggaccgtttaaagtgccagacaccttacccgatgaaaaggtgctgtttctgtcagatattctgcccaccgcctggcaggcggttaaaaacgccgaggtcaaacccggcagtagcgtggctatttttggcgccggcccggtaggcctgctctgcgcctcctgcgccaggctcaatggcgcagaacagatatttatcatcgatcataacgattaccgactcgatttcgcgcaacaacgctatggcgcgatcccgataaactttgaccaccatgacgatcctgcgcagtggattatcgataacacgccgggccatcgcggcgtcgacgcggtgatcgacgccgtgggcttcgaggcgaaaggtagccttacggaaaccgtcctcagcaccctgaaaatcgaggggagcagcggaaaagccctgcgccagtgcatcgccgccgtgcgccgcggcggcatcgtcagcgtacccggggtttacgccggtttcatccacggctttatgtttggcgatgcctttgataaaggactgaccttcaggatgggacaaacccacgtccacgcctggctgccggatctgctggcgcttattgagcaagggctgcttaccccggaggagattgtcactcaccatatgccgctggaggaggccgcgcgcggctaccagatctttgagaaacgtgaagaggcgtgccgcaaagtgatcctcgtaccgggaatgcagcccgggaaggcgaccctctga

SEQ ID NO: 215415 - DNA, 153 bp, Klebsiella pneumoniae
atgcagtggttcgaagccgcagacctgattgtcaaaggcatggaaggcgctatcgccgccaagaccgtgacctatgacttcgaacgtctgatggaaggcgctaaaatgctgaaatgttcagagtttggcgacgcgattatcgcgaatatgtaa

SEQ ID NO: 215416 - DNA, 1341 bp, Klebsiella pneumoniae
atgactaacatgagtcaggctccggcgacggagaaaaagggcgttagcgatctgctgggatttaaaatcttcggcatgccgctccccctttacgcatttgcgttaattacactattactttcacatttttataacgcattacccaccgatatcgtcggcggctttgccatcatgtttattatcggcgctatattcggggaaattggcaagcgcctgccaatattcaacaaatatatcggtggcgctccggtgatgattttcctggtggcggcttattttgtctatgccggtatttttacgcagaaagaaatcgatgctatcagcaacgttatggataagagtaacttccttaacttattcatcgcggtattaattaccggagcaattctgtcggtaaaccgccgcctgctgctgaaatcactgctcggctatattccaactatcctgatgggcattgtcggcgcgtctatttttggcatcgctatcggcctggtgttcggtattccagtggatcgcatcatgatgctgtacgtcctgccgatcatgggtggcggcaacggcgcgggcgcggtccccttgtcggagatttaccactccgtcaccggtcgttctcgcgaagagtattactcaaccgctatcgctattctgaccatcgctaacatcttcgccatcgtctttgccgccgtcctcgatatcatcggcaaaaaacacacctggctgagcggcgaaggggaactggtgcgtaaagcctcgttcaaagtggaagaagatgagaaagcgggacaaatcacccatcgcgaaaccgccgtcggtctggtgctgtccactacctgcttcctgctggcctacgtcgtggcgaagaaaattctgcccagcattggcggtgtggctattcactatttcgcgtggatggtgctgatcgtcgccgcgctgaacgcctccgggctgtgctcaccggaaatcaaagccggtgctaaacgcttgtctgatttcttctccaaacagctgctgtgggtgctgatggtcggggtcggcgtctgctacaccgacctacaggaaattatcaacgccatcaccttcgctaacgttgttatcgccgccattatcgttatcggtgcggtgctcggcgcggcgatcggtggctggctgatgggtttcttcccaatagaatcggccatcactgcaggcctgtgtatggccaaccgcggcggctccggcgacctggaagttctctctgcctgtaaccgtatgaaccttatctcttatgcgcaaatctcctcccgtttgggcggcggtattgtgctggtcatcgccagcatcgtgttcggcatgatgatttaa

SEQ ID NO: 215417 - DNA, 909 bp, Klebsiella pneumoniae
atgagcgacgtgttaattaatcctgcgcgtgtgcggcgcgtgaagccactgagtgccgaagaggtggtcagcgcggtagagcgcgcgctgttgaccgaagttcgcctgaccccaaagcccgggttggtggatattcgtaacgctggcgcgcactgggatatggatctggcctcgtttgaggccagcaccgcggtggtggctccgtggatggagaaatttttcatcatgggccacgatactgcggcggtcgcgccggagcaggtattgatgatgctgcgcccggtagggatggcctgtgagaacgatatgctggaggccaccggcggggtgaatacccatcgcggggcgatcttcgcttttggcctgctcagcgcggcggcgggcaggctggtgtcgaaaggtgagccgatagagcagcaccggctttgcgaccaggtggcgcgcttctgtcgcggcatggttatgcaggagttgtcttctgctggcggggaacggctcagtaaaggcgaggctcattttctgcgctatggtctctccggggcccgcggcgaggcggagagcggtttcctgacggtgcgtacccaagccatgccagtctttacccgcatgatggaagagaccggcgacagtaatctggcgctactgcaaaccctgctgcatctgatggcgtggaatgatgacaccaacctggtctcgcgcggcgggcttgccgggctgaactttgtccagcaggaggcgcagcgactgctgtggcagggcggcgtgctggcggacggcgggctggaggcgctgcgacagtttgacgatgagctgattgcccgccatctcagccctggcggcagcgccgatctgctggcggtgacctggtttttatccgcgtttcccgccggcgcgcttttcccgctgtaa

SEQ ID NO: 215418 - DNA, 1149 bp, Klebsiella pneumoniae
ttgattaagtcagcgctattggttctggaagacggaacccagtttcacggtcgggccatcggggcaaccggcacggcggttggggaagtcgttttcaatacttcaatgaccggttatcaagaaatcctcactgatccttcctattcccgccaaatcgtcactcttacttatcctcatattggtaatgtcggcaccaacgccgccgatgaagaatcttctcaggtacatgcgcagggtctggttattcgcgacctgccgctgattgccagcaacttccgcagtactgaagacctatcttcttatctgaagcgccataacatcgtggcgattgccgatatcgatacccgcaagctgacgcgtctgctgcgtgagaaaggggcgcaaaacggctgcatcatcgcgggcgacagcccggatgcccagctggcgctggaaaaagcgaaagcgttcccgggcctgaacggcatggacttggcgaaggaagtgaccaccgcagaaacctatagctggacgcaaggcagctggaccctggcgggcgacctgccggaagcgaaagcggaaagcgagctgccgttccacgttgtggcatatgacttcggcgcgaaacgcaacatcctgcgcatgctggttgaccgcggctgccgcctgacggtggtgccggcgaagacctccgccgcggacgtgctggcgctcaatccggacggtatcttcctctccaacggccctggcgacccggcgccgtgcgattacgctatcgaggcgattgaaaaattccttgagaccgatattccggtattcggcatctgccttggccatcagctactggcgctggcgagcggtgccaagaccattaagatgaagttcggccaccacggcggcaaccacccggtgaaagatattgataacaacgtggtgatgatcactgcccagaaccacggtttcgccgtggatgaggcgacgctgccggccaacctgcgcgtgacccataagtcgctgttcgacggcaccctgcaggggatccatcgtaccgacaaaccggcgttcagcttccaggggcaccctgaagcgagcccggggccgcacgatgccgcgccgctgttcgaccactttatcgagttaattgagcaataccgtcagtccgcgaaataa

SEQ ID NO: 215419 - DNA, 2391 bp, Klebsiella pneumoniae
atggctgaaacaaagtctcaacaatcaaggctcctggtgacgctgactgcgctatttgcagcgttctgcggcctctatctattaatcggcggggcatggctggtcgtgcttggcggctcctggtactaccctatcgccgggctggtgatgctgggcgtgaccgtaatgctgttccgcggcaagcgcgctgcgctgtggctgtacgccgcgctgctgctggcgaccatgatctggggcgtctgggaagttggtttcgacttctgggcgttgacgccgcgtagcgatatcctcgtcttctttggcatctggctgatcctgccctttgtctggcgtcgtctgccggtgccttccgctggcgccgttggcgcgctggtcgtcgccctgctgatcagcggcggcatgctgacctgggctggttttaacgacccgcaggaagtcaacggcaccctgagcgccgacgctacgccggccgcaccgatttccaccgtcgccgacggcgactggccggcctatggccgtaaccaggaaggccagcgcttctccccgctgaagcagattaacgccgataacgtgaagaacctgaaggaagcctgggtgttccgcaccggcgacctgaaacagccgaacgatccgggtgaaatcactaacgaagtgacgccgattaaagtcggcgatacgctcttcctgtgtaccgctcaccagcgcctgtttgcgctggacgccgccaccggtaaagagaagtggcattttgacccgcagctgaacgccgatccgtcgttccagcacgtcacctgccgcggtgtttcttatcacgaagcgaaagcggataacgcccctgccgacgtcgtcgccgactgtccgcgccgcattatcctgccggtgaacgatggtcgcctgttcgcggtaaacgccgacaacggtaagctgtgcgaaacctttgctaataaaggtattctcaatctgcagaccaacatgccggtcaccacgccgggcatgtatgaacccacttcaccgccgatcatcaccgataaaaccatcgtgattgccggcgcggtcaccgataacttctctacccgcgagccgtcaggcgtgatccgcggctttgatgtgaataccggtaaactgctgtgggccttcgatccgggtgcgaaagatccgaacgccatcccgagcgatgaacatcacttcacgctcaactcgccgaactcatgggcgcctgccgcctacgacgctaagctggatctggtctatctgccgatgggcgtgaccactccggacatctggggcggcaaccgtacgccggagcaagagcgttatgccagctcgattgtggcactgaacgccaccaccggtaagctggcctggagctatcagaccgtccatcacgatctgtgggatatggacatgccttcccagccgacgctggctgatattgaggtcaacggcaaaaccgtaccggtcatctatgccccagcgaaaaccggcaacatcttcgtgctggatcgtcgtaacggcgagctggtggtcccggcgccggaaaaaccagtaccgcagggcgctgccaaaggtgattacgttaccaaaacccagcccttctccgatctgagcttccgtccgaagaaagatctgaccggcgcggacatgtggggtgccactatgttcgaccagctggtgtgccgcgtgatcttccaccagctgcgctatgaaggtatcttcaccccgccgtctgagcagggcacgctggtgttcccgggtaacctggggatgtttgaatggggcggtatctccgtcgatccgaaccgtcaggtggctatcgccaacccgatggcgctgcctttcgtctcaaaactgatcccgcgcgggccaggcaatccgatggagccgccgaaagatgcgaaaggctctggtaccgagtccggcgtgcagccgcagtacggcgtcccgtacggcgtaacgctgaacccgttcctgtcgccgttcggcctgccgtgcaaacagccggcctgggggtatatctccgccctggatctgaaaaccaacgaagtggtatggaaaaaacgtatcggtactccgcaggacagcctgcccttcccgatgccggttaaactgccgtttaccatggggatgccgatgctgggcggtccaatctccacggccggtaacgtcctgttcatcggcgcgactgcagataactacctgcgcgcgtacaatatgagcaacggcgagaagctgtgggaagcccgtctgccagccggcggtcaggcgactccgatgacctacgaagtgaatggcaaacagtatgttgtcatctctgccggcggtcacggctcgttcggtaccaaaatgggcgattatattgtcgcctatgcgctcccggatgacgccaaataa

SEQ ID NO: 215420 - DNA, 126 bp, Klebsiella pneumoniae
atgcttggttgggtcattacctgccacgatgagctggcgcaggagatgctggatcgtcttgaacgaaaaatttggtccgctggcccagtgccgggcggtcaattactggcgcaatctcagcagtaa

SEQ ID NO: 215421 - DNA, 711 bp, Klebsiella pneumoniae
atgaatgaaggcatagcatgctgtccggaaaaccggacatcaacacgggaggcggtggttgacgccatgctggcgtcaggcgatgaacttgcacaactgcagccggcgctgaacctgctttcgcccccgctgaacgccacgcctggtgaagcgctgctggccagctgttatgaggccggcgctgaccacaacgctgacgaggcaacacgggcggtgagcgccttaccggcggcggtcgtgcgctctgcgacgccctcgctgcagcgcagcggtctgctgtgcatggcggccggggcgctcagcgcccggcaacttccactgacgcacaaccggctgtgtgacgtggcggggcagttcgcccgcgctatccctgaaggcgatgaagaggcgggcagtggattttataccgtgcgcagcgtgtccctgcccgtctaccggcggctgtggcgggataaccattctcacagcgtctgtctacagcaggcgctgctgcatttgctggcctggaagagtgattcgccctgggcgcggcagcaggcgcagcgtctgctctggcagggtggcgtgctgggtgagaagggggaatttgcgctactgacgctggatgatgagcttcgcgagcgacagatagtctggcccgcgctgagatcgctgctggcggtgaccgggtttctggtcagattcccggccggtccggtatttagcgattaa

SEQ ID NO: 215422 - DNA, 966 bp, Klebsiella pneumoniae
atgaacagtaccggtctgagcattatcaagacattaggctgtatgacagcggtgacctttttcaccatctataacacctgggatcgctttgattatgactatcactggctcctcgggctgctgacctttatctcgaccatcgcgacgccgctgttttttgtcgtggccggctatcttgatgcgcagacgcgccacgatgccaactggcaaattggtaaaattaaaagcgtggtcatcgtctttctgttttgggtgacggtctattatgtctgggagccttaccagcgcggctacctgatccagccctggtttattttcgccctgattgtcatctatacctttcatcctttgatcgcctggctcagccagcggcgcgggctctttttcgccgtgctcctgacgctgctgtgctgctcctacggttacgacctgctctcggtgatctacccggacagacatcttttcagtttgccgccgcagtatcgcctgtggacatggctactgttttatttaaccgggcagttgtttaacgatccaaagatcgcggagtggatacgcaacccacaggtgattaaagggtcgattatcgccctgccctttgtctatttatttacctggttttatgaacgccatttcttcttcgccctgtttaaagcagatcgtaatgcgttcattctcacgggatcgcaaatttatatcctgatcgtcctgctggtgatcgccgctaacgccgtgcagtttaaaaagaaccgcgagtggaaagaggccgtgctggcgacggtcagtaaagcgatgaccggagtttatatcctccactattccgtgtttcacctgctggtgatgctcatccctgtgcattcgctagccaccaagttgggggtaatagcgctgacctttgtcctgtcggtgctcatttcccttgccgcgctctccagtacgctgctcaggaaggtgattaccttgtaa

SEQ ID NO: 215423 - DNA, 3066 bp, Klebsiella pneumoniae
atggatatttcccgtcagtttattaacaacccgacccgcgtctggttagccattttgctgttaggggtgggtggcctgttcgccctgctcaatatcggccgcctggaagatcccgccttcaccatcaaaacggcggtgatcgtcacccactaccctggcgcgtctgctcagcaggtggaagaggaggttaccctgccgctggaaaacgcgattcagcagcttccctcgctggataacgtcagctccatctcctcgaatggcttatcgcaaattacggtgaatattgcttcgcagtaccattccagcgagctgccgcaaatctgggatgagctacgtcgccgggtcggtgacgccagccgccttttcccccctggcgtagtcccccctttcgtcaacgatgactttggcgatgtgtttggctttttcttcgctatctcggacgacagttttaccaacccggagctggtgcgctatgccgaacagttgcgccgggagctggtgctggtgccgggggtcggtaaagtcgctatcggcggcgtcattccgcagcagatcaatgtggatatctcgctggcgaagatggcggcgcgcgggatcaccctcaaccagctcgccgcaatcctggcccgactcaacgtggtgtccagcgccggggagatccgcgttggcagcgaatcgatccgcctccaccccaccggtgagtttcagagcatcgatgagctgggagatctgctggtcagccctcacggcgccagcgccaccacccgactgcgggatattgctacgctgtcgcgcgggctaaccgactcgccggccagtatctatcatgccaacgggcgccaggcggtgaccatgggagtttcttttatccctggcgtcaacgttattgacgtcggccacgctctcgaggcccgcctccagcagatggccgccgacaaaccggcgggcatcgacatcgatattttttacgatcaggcagctgaggtcgcccactcggtcaatggctttattaccaattttctgatggccctggcgattgtcgtcggcgtgctgctggtatttatgggggtgcgcagcgggattattattgctctgtcgctggcgctcaacgttctcggcaccctgcttatcatgtatatctgggggagcgaactacaacggatctccctcggagcgcttatcatcgccctgagtatgttggtggacaatgccattgtgattgtcgaaggggtgctcatcgcccgtcagcaaggctctccgctgctgggcgcgattaactatgtgatccgtcgctctgccctgccgctgcttggcgcgacgatcatcgccatcctcgccttcgcgccgattggcctctcccaggactctaccggggagtattgcaaatcgctgttccaggtgctgctgatctccctgatgctgagctggttttccgctctgaccatcaccccggtgcttattaagtggtggttgtttaaaaacgccccgtcggccgccgccgcggaggaaaaagccgatccttaccgcggcagcttttaccgtggctatcagcagacgctgcgaatactgctgcagcaaaagaccctgaccctggtgctgatgggcgcgctgttagccggagcgatctggggctttacctttgttcggcagaatttttttccgtcatcgaatacgcctatattctttgtcgacctgtggctaccctacggtaccgatataaacgccacggagaagatgacccgggatatcgagcggtcgatagccggtcagccgggggtggtcaccaccgtctccaccatcggccagggcagtatgcgtttcattctcacctacagcgggcagcgccagtacagcaactacgcgcagattatggtgcggatggatgatcaacgcggcatcgcccctgtcacccgccacgtggaggactggattgccagaaactacccgcaggttaacgccagcaccaaacgcattatgttcgggccctccggggatagcgcgattgaggtgcgcattaagggcccagacccggatacgctgcgcgcgctggcgagtcagataggcgatatcctcgccgcggacccggcgaccgacagcgtgcgtaatgactggcagaaccgcagcaaagtgatccgcccgcagtattccccggcgctgggacgcgagctgggggtggataaacaggatattgataacgcgctggagatgaatttctccgggagtcgcgccgggttatatcgtgaaggggccgatctgctgccagtgatcgtccggccgccggaagcagaacgtcaggatgccaaccatctgaataatgtgctggtctggagccagagtcgccagcaatatatcccgctgagtaacgtcatcaatggtttcgccctggagtgggaagatccgttgatcctccgccgggatcgtacccgggtgctgacggtccagaccgaccccagcccgctaagcggccaaacctcgggtgatattctcgcgcgggtgaaaccgcgcattgacgcactgccgctgccccacggctaccgtatcgaatggggcggcgatgccgagaactccagtgaggcgcagcaggggctgtttacaaccctgccgcttggctatctggtgatgtttatcataacggtgctgatgttcagttcgctgaaaaacgccgtcgccatctggctgaccgttccgctggcgctgatcggggtcactcccggctttctgcttaccggcatccccttcggctttatggccttaatcggcttgctcagcctgagcggtatgctgatccgtaacggcattgtgctggtagaagagatagagcaacaaaaacaggagaaagatcaacgacaagctattattgatgcggcaacctctcgtctgcggccgatcctgctgaccgccttcaccaccgtacttggcctggccccgctgctgcgcgatgtctttttccagagtatggcggtggtgatcatgttcggcctcgcctttgccaccgtgctgacgctgctggttctgccggttatttacgcctgctttcaccataaggatatgacgcctcaacgatga

SEQ ID NO: 215424 - DNA, 1086 bp, Klebsiella pneumoniae; identical to SEQ ID NO: 136133

SEQ ID NO: 215425 - DNA, 432 bp, Klebsiella pneumoniae
atgtataaaaatatcgttgttcccgttgacgtgtttgatgcgggcctggccgacaaagcgctctctcatgcgaaattcctcgcccaacattctgccgggcaaattcatcttatccatgttattccggccttttctcctgtattaacccgcggatttatctctgatgcccgaaagatggaagaccatttgcttaataccgctaaggaaaagctgagcgagctggtgaagaaaaatgggcttgcggaagacgccagccatatttatgtgcgcagtggcaatgttcgcgatcaagtgattgccctggccgatgagctgaaagcggatgtggtgattgtcggttcgcgcaatccgggtatccagactcatctgctgggctcggaagcggccaatatcgtgcgctatgcccatgtaccagtgttcgttgtgcgctga

SEQ ID NO: 215426 - DNA, 1074 bp, Klebsiella pneumoniae
atggaaaatttaaagcacattagttttaatgaagtaaactttgacgatgctttttttgactcattgaaagctgactatagagctggttttgtagaatggtttcacaaaaaagcaaaagatctaagagaaaaagcatacgtgctctacaatgaggatgattcaattgatggattcatgtatctcaaaattgaagatggcgaggttactgatgttaacccttcattggctaatttaaaacatctcaaaatagggacctttaagtttaatacgaaaggtacattgcgaggtcaacgttttttgaaaaaaatatttgaccacgcattaagtgaaaaagtgaacgatatatatgtaacagtttttgataagcatgattacctgattaaactttttttaaattatggatttataaaatacgggaaaaaagaatccgaaaacggtattgaaaatgttttagtaagagaaatgagcacagatgatctcactggagaccttcttgccgattatcccttcatcaacaacagacataaagaaaacaaatacttactatctatttatccagattttcatactcgtctattcccagactcaaaacttataactgaatcaccagatattattactgacgtgtctcacgctaacagtataagaaaaatttacatctgcgccatgcaagatgtagcaaatataaaaatgcatgacattctcgtaatttatcgaacgtcagataaaaaaggtccagctcattatcgttctgttgctacatctctatgtgttgtagaagatgtcagagatattttttcattcccaacagagcaagattttattaaatactgtgctcggtatagtgtatttaccgaaatagaattgagaagtttttataaaacaaagaaatacccatatattataagttttacatataatcttgctttaccgaaaagaatcactcgtgctaaactaatagaagacgttggtttaaacccacaagcatattggggtgtgttaaaattaaccgacagagaatttgacaacattattaaacttggtgctgtagatgaaagtattattgtcaattaa

SEQ ID NO: 215427 - DNA, 1080 bp, Klebsiella pneumoniae
atgtcacgaagttttgcggtctgggggtgtagggattatcatagtagttcaggctcgacctacaactctgaacataagaatttcattgaagagttgcatattaatttttggaacataagcgctcataaatttggctatttagattttggcatcacattcaaaaagcctgaagatgaaaccatcgctaaacatggggcaatatgcatattcctaccattcgaaaaagaaaataattttttttcagatcttagtgaaaaccttgaatcaagcagagatctcgtaactgctgttttcaatgaataccttattgacactaaaacagtagatggtagacatttaaaattagtgctcgccaataaaggagacttagttgttaatactaagttatcatttagcggcggcgagcttgaccatagagtcaaaataacaaaaatccacaatggcaccttactagcctttaaactcaaggattgtctctcttccgaagatgcttgcaatcactatttaagattccgtgtccaaattaataaagaagatatcggtcttttagtgaaaacattttaccccaaagatctcttccttaagagtagtatcgagcggtctgatatcattgattttagggttaatgagcaaagaaatctgccctccgaaatagccacaactcttgctagcgccgcttgtacccctttgaaatgccatatttttataatccgcgatatggttgatgactgtgctgcatccggttcaaattataaaggttcaagaattttagagtctgagacatggacaaaatattttagcaaaggcgtatctttcgggtctcatgatccaatgatatatcattggaaaatatcgaatgatataaattcgagacttaatgatttttctgttgtcgtaaaatttaaaaacacgaaatccaaactaagcaaaatatttgcatacattttctacggcgcagcaataacatttgttatgaaatttgtcccaacagaaagcttagataaaaatctatttatttacggctcactatcgttaatagcattatatataatcgcacatttcattaaatttagaaaatga

SEQ ID NO: 215428 - DNA, 612 bp, Klebsiella pneumoniae
atggattttaacaatggtggccgtgaggctattcttcgtatgcttgaggcctacggagtaagtactcgtaaggctctttgtgagcggcttgggatttcatcaagcacgatgagcaccagatggatgagagacgtgttccctgcggactggataataaagtgctcaattgagactgacgtcccagttgagtggctttcatttggaactgggagtcctaagccaccccaaaaatctttaggtatccaatcagcaaatgaaaatgttcttgctgatttgttttccgtacctcgaaaaaaaatcaaagatggtaaattattagattcaaatttttacctactcgacaaagcgttggtgccagattctctgcaaaaacctatcgtaatcatggattcagatcagctctatttagctgatcagcattttcacgaagtgaccgatggtaagtgggtggtagagatagaagggaaagtgagtattagagaacttacgagaatacctgtaggaagagtcaaggttggagcacccaatccatgccattcatttgagtgctttatcagtgaacttaacccaattgcacgatgccatttttacttactggtcaatttgaattaa

SEQ ID NO: 215429 - DNA, 222 bp, Klebsiella pneumoniae
atgactcctcacatttcaatcacgttgactgttccttccgtatcaattgaaaaatatagcgaacttactggtctatcaattgacacaatcaacgacatgctagcggatggtcgcttgatacggcaccgcttacgcaaagataaaaagcgagaaaaagttatgatcaacattgcggctatgactgtcgatgctctctcagattgcaacgtatccatcaattag

SEQ ID NO: 215430 - DNA, 153 bp, Klebsiella pneumoniae
atgtttgattatcaaacctccaaacatgcgcactttgatgcggcttgccgagcatttgcgattgagcacaatctggaagatgtagccgctgctgttggcatgaggccgcagatcctgcgcaacaaattgaatccagcacagccaaccgtttaa

SEQ ID NO: 215431 - DNA, 468 bp, Klebsiella pneumoniae
atgcagcacccgacactgaaacaaattggcggctggctggcagagcagagcggcatcacggttcaggtgccggatgccacgtatgcgactacgccgatcccccatttcacccacagcggcacaggctttcagctgcttaatgtgctgggtctggcgttttccgtcacggattacatctggtacccgctacctgatggcggactgtacctgggaggcgcggacggggccatgtttgccggtcgggaagtggaaattccggcagaatttgcccaaagcacggcgggaggcaacagtatgacactgccggtggtacagagcctgcgccccggtgtgcagatgaacggccagcggatcacccgcgttcatctgcataatgcggatatgaccgtgacttggacgccccgcaataaacaggctgcccagccactacagaaaacgccgcttcagcgccagattgaggcgcattaa

SEQ ID NO: 215432 - DNA, 459 bp, Klebsiella pneumoniae
atggggcgggtcgtggcgcataccgaacctgtgagcagtagtaattttgccgatccattccgcccgcgctatgccgtggatgttcagctgatggatgcgaacggcaacccggatggtaatacgccggtatattcagccgtaccgctgccggtgccgatggcggggcatgattccggactgtttcagttcccggcgctggggacgctggtagaaatggggttcaccggagggcggccggataagccttttatccgtggtagccacccggacagcacaagcctgcctgacctgaagccgagagaacagctgcaacagcaacgcgaagaggtgtcgcagcgtgtcactcaggccggagactgggaaagaaaaaccgatcagactatccgtgaagactctatgtccagggaagtgaccgccgatacggaaaacgcgagctggtcacgcgggaaacgagggtga

SEQ ID NO: 215433 - DNA, 444 bp, Klebsiella pneumoniae
gtgaaagcctctgataaaaccacggtgatcggcacggcgcaactgacggcaggggccattcagcagattgcgaccggggattatgctgtggcaacaggtcgaaactgcctggcaacaatcagcggcgatgatgaaacggaggttgctggccagcagaccacaaccactggcaaaggcctgatagagaagattggcgagatacgccgcagcatcgccgccgtgcagcagcagattgttgcgcccgcggtctggatcggctcagaacaaatcaatgtgacacagctgatgctggacacgctcgacgtggtgaaagaactggccacgctcaccgccagccatacccacccggacaccggcacaccaaccaatgccggagagattgaaagcgtggcgatgaagaccgatacactgaacgagaaatactcccccgtcatcgctaagtaa

SEQ ID NO: 215434 - DNA, 858 bp, Klebsiella pneumoniae
atggatagctctcttacacttactgttgcacaaagtgaagcttggcaacacgcagcattgattttagccaaaaaaataggagtaggatccaaaaaatccaatgccgagttaaaaagtttattattaaattttgggagtatacaaaagctatatgattatcacttttcaatgataccacccgattcggatatagtttctaagcttgataagatattttcaagtttgaaagtaaattttggagtgattaattgtttagacgataattatccagatttacttcagggtatttatggtgctccacctgttttgtattatcgaggtgatattaatatattgaaactgcctcgaagcatttcttttgttggtacaaggaatcttgataatcctgaacatattacgcaaagtttaaatgccttggaacggcttgtaaaagccggttttcaggttattgtcagcggacttgcaaaaggttcggatacgcttggccatcaaacagcaataaagcttggagcaaaaacgatagcggttttaggtaaccctataaatatttcttatccagctgaaaacaaaaatcttcaagaattgattgcgaaagaacatctcgttttgagtgaatatccggttggtatcctttctcaaggctcttattttgcaaacagaaatctcacaaccgttagcctttcaagagaaggtgttgtggtggcaagagctggagataaaagtggaactcaatatgcgataagaacatgtgttgaacaaaacaaaactgtttatgcgttagaaaataatattcatgaaccagaatatcagtgggttcataagtataaaaaatcgattaaagttgttaaggatagataa

SEQ ID NO: 215435 - DNA, 1323 bp, Klebsiella pneumoniae
atgaattcaagagctataatctttgacttagatgatacaatctttgctacagaagaatttaaaccatacctccgaaccgaatttggacgagaaaccattcctgctcttattgaacgcggtgagattgaagttcgagaaaggcatcagggcattgtggaatatatcaataaactgataaatagcgggattgctatctttatattctctgactctccctcggcttattgttttgctattcttgataaaggtggtgtcaacgtaagtcgagacaatgtttattgtagtcaacacaaacctacagttgatgataataacatctttacttcatatcaagatattttggtggttggtgatagtcccaaagatatatattttgctcatttaagggctttcccgtctatcttacttggaagattgagcaaaaaatcctgtgaatattataatcgctggacaaagcctagtgctatatgtacaaatctggatgaactgaaatctgctgtagatgactacctaaatggacagttggttttccagcaacatgattttaaaaaaaattatgataccgtcgatcctgatgaatgtgaattaacaacaataccatcagaaaatatggggcatgcctttgaatattggccaaattcagatgactgggatgatgtagaagatcgaaaaaaagtatggtttgaagtaaagagatcaattaaagttgcaaaagaattaactccaagccaaatagaaaatagtgaaagagttgcattttacaatcgaaataacactatcgggtatggaaaagctttcaaagcattgatgtgggtatcattccaggagtttttaaaatgggcgaaaaaagagaaactaactgggaaaatatatttggttcctacaccaccctcagttccgatggaatgtaataaatcatttccgatgctaattttggctgaatggtggtcaaagtatgcttattttgcgcggaaaaagggtgagataaactttattcttgaacatttttacatcgttgaacgcttttggccaacccctccagctcatatgtcaaatggaaggagagaggttaggccccatcttgagacattaggtacttataagaaaatcacaaaaaatgatggaacggctgtaataattttagatgatatagttacctctggaactcaaatgaatgctgttgcaacactactaaccgaagttggaatttttaaaaatgagattcctttttacggatacgcctttgctcgaacaacacgtccaggtgcagatgtctccgaattgttgaggctatttagcgcatctgaaattgctggatcatga

SEQ ID NO: 215436 - DNA, 1002 bp, Klebsiella pneumoniae
atgatgcgatggataagcctgctgcttctgctgctgccgctggcggtggcccccgccgcccgcaatgataaaccggtttcgctggtgattgacgatgcgccagtggcccaggtgctgcaagccctggccgaaatgaaccataagaacctcgtcgtcgcgccggacgtcagcggcacgctctccctgcgtctgcagaaggttccctggagccaggcgctgcgggcggtagcggatagcgcgggtctctctttgcaacagcaggggacggtcatctacgcgcacactcaggcctggcaaaaggcaaatcaggcgcagcgtgaagccgaacaggagaaacgcctgcagaacctgcccctgcaggcggagagcgtgaccctgcactttgccgacgctgaggagctggctaaaagcggcggaaagctgctcagcgccaggggacacctgatggcggacaaacggactaatcggctgctgatccgcgatgatgcccggcacctgccggcgttgaaggcctgggcgcaggagatggatctgccggtcggccaggtggagctggccgcccatatcgtgtcgatgagcgaaaccagccttcgtgagctgggggtgaagtggcggcttgcggaagccggaagcccgccaggctccgggcaaatcaccaccctaagcagcgatgtatcggtaaacgatgccagcacccgcgcagggtttaacgtcggcaagatcaacggtcgcttgcttgagctggagctatccgcgctggagcgcaagcagcaggtcgaaattattgccagcccgcgtttattggcctcccacatgcagcctgccagcatcaagcagggaagcgagatcccctatcaggtttccagtggcgaaagcggcgccacttcggtggagttcaaagaggcggtgctgggcatggaggtcacgccgacggtgctgcagcagggaagagtgcggcttaagctgcgaataagcgagaatacgccaggccaggtgctgtag

SEQ ID NO: 215437 - DNA, 1245 bp, Klebsiella pneumoniae
atgtctgaaaactccaccttttctcccgtcctcaccggccgggaacgtacggctgtccctgcaaaatctctgagcttcgtcgaaggggtatcgatgattgtcggtaccaatatcggtgcgggcgtcctctctatcgcctatgcgtcaagcaaagcgggctttttaccactgctgttctggctggtgctggtgggtagtctgaccacggtgactatgctctatgtcgcggaatccacgctgcgcacccgtaaacatctgcagctcagtggattatcgaagcgctacgtcggcggctttggcgcgctgatgatgtttctctccgtctgcgtcaatagcgtcggggcattgacggcgtatatgaccggcagcggtaagctgctgcactccctgtttggcatctcgccggcgctgggtagcgtgctgtttttcgttccggcggcaggggtactctacctggggctgaaggcgatcggccgcggtgagaaatttatcagcatcggcatggtggtgatgatctcggtgctggtgattgccacgctgttgaaagagaccacccgcgtcggctatctgctcgacggcaactggctgtatatggttccggtcttcaacgtcgtggcattctgcttctcggcacagtatatcgtgccggagatggcgcggggcttcgccgacaaaccggaaaaattgcctaaagccatcatggtcggcatggcgctgacctttaccctgctggcgctggtgccgttgtcggtgatctcgcttaacggtctggacaatatctcggatgtggccaccatctcctgggggcgggcgcttggcgaatgggccttcttctcagccaatctgtttgcgctgtgcgcgatgctgacctcctactggggactgggcggcagcttcctgaccaatatcttcgatcagttccgcctggggaatgacgaacaacccgctcggcgcctgatggtgctgctggtggtggcgatcccgccgttcgtactggcctatagcggcatggtctccttcgtcaacgcgctctattttgccggggtgttcagcggcgtcattttatcgattatgccgatcctgatgctcaagggcgcccgccagcgtggcgatctgaccccgggctggacctgtccggcctggatgacccatccgcttatccaatgcttcattgtgttgttgtatctttgcagcgccgcctacgcgatagcatccgcggtgggctacctacccgcaggctggtaa

SEQ ID NO: 215438 - DNA, 1266 bp, Klebsiella pneumoniae
gtgaaaagctcagaactgaatcaacgtcgccagcaggcgacgccgcgcggcgtaggcgtaatgtgtaactactttgtcgagaaggcggaaaacgccacgctgtgggatatcgaaggcaatgaggtgatcgatttcgccgccgggatcgccgtgttaaataccggtcaccgccatccgaaagtggtcgccgcggtagccgagcagctgcaggccttcacccacaccgcctatcagattgtgccgtacgaaagctatgtttcgctggcggagcgtatcaacgatctggcgccaattgacgggccggcaaaaacggctttcttcaccaccggcgcggaagcggtcgagaacgcggtgaaaatcgcccgcgcttacaccggtcgtccggggctgattaccttcggcggcggtttccatggccgtacctttatgaccatggccctcaccggtaaggtcgcgccctacaaaatcggcttcgggccattcccgggctcggtgtatcacggcgtttaccccaatgcggcgcatggcgtgaccaccgcggatgcgctgaaaagcctggagcgcattttcaaagcggatattgcgccggaccaggtagcggccatcattctcgagccgatccagggggaaggcggctttaacgtcgcgccggccgatttcatgcaggcgctgcgcgacctgtgcgatacccacggcattctgctgatcgccgatgaagtgcagaccggtttcgcccgtaccggcaagctgttcgccatgcagcactatgaggtgaaaccggatctgatgacgatggcgaaaagcctcgccggcggtttcccgctgtcgggcgttgtcggccgcgccgaggtgatggatgcgccagccccaggcgggctgggcggaacctatgccggtaacccgctggcggtggccgcggcgcacgcggtgctggatgtgattgccgaagagcagctgtgtcagcgcgctgaacagctgggtagccatctgcaggaagtgctcaaccaggcgcgcgctacctgcccggcgatcgttgatgtccgtggccgggggtcgatggtggcggtggagtttaacgatccgcaaacaggcgaaccgtcgccggaattcacccgccttgtgcaacagaaagcgcaggagaacggcctgctgctgctgagctgtggcgtctacggcaacgtgatccgcttcctgtatccgttgactatccccgacgcccagttctcgaaagcgctggatattctggcgcgcgtactgaagagctaa

SEQ ID NO: 215439 - DNA, 1524 bp, Klebsiella pneumoniae
ttgcgttcgctggtgggtgacctggtgttggtccgtctgcaggaagagcgggatcctcttctgcacaaacgcgtatataacgcgctgcgccgcgcgatcctcgacggttcgctggcgccgcaaagccgtctgccgccgtcgcgggacctggcgggcgaacttggcgtatcaagaaacactatattaacaacttatgaacaattgctggcggaaggatatgtggtttcccgtcggggaagcggaacattcgttgccaaaaccgcccctgagagctcattgacggctaaaggtcagcaagaaaacagcagtatcgcagcaccgacggcgcatctttcacgccgaggccagcatctgctcggccaggtcagcgccagcccgcgccagtggggagcgtttatacccggcgtgccggacgttaacgcctttccccacccgctgttcagtaagatccaggcccgcatcagccgtcggcccaaaccggagcggctcagctatagctgcaacggcggcactccggaactgcagcaggcgctggtggattatctgcgcgtgtcgcgcggcgtccactgtcagtcagatcaaattcttatcaccgaggggatccaccaggcgatcgatctggtcacccgcatgctgtgtgataacggcgatctggcgtgggtggaggagccttcctactgggggatccgccacgtgctggcgatgaacgacgttcgggcagagcccctgaccgtggatgccaacggcctgtgcccgccggagacggttgacgatgcgccgaggctgatcttcgttacgccttcccaccagtatcctctgggcgcggtgatgagccttgagcgccgccagcgcctgctggcactcgcccgtcagcaggggagctggatcgtcgaagatgattatgacagcgagtttcgcttttccggtcagccgatccccgccctgcagggtctggtcgccgacgccccggtggtctatatcggcaccttcagcaagacactctatcccggccttcgcctgggctacgtggtgatcccgcggccgctggtcagcgacctgaagcacgcccatgccgagctttaccgcggcggccattcgctgatccagatggcgctggcggagtttattaccgccggccactattcggcccatatccgccgtatgcggctgctctacagccgtcgccgcgcctttttaactgagcttatccagcggcactgtatgccgtacgccctgtctgacttcagcgataatgccgggctgcatttgatcctcaatttgcccgcagaggctgacgatgtggcgatcgccagagaggccaatgcgcggcacattctggtgcggccgctgtcgcgctactacctgacggcggcgcgcaagaaaggattactgatgggattcgccagccagcccgaagagcagatggcgtcggcgttcagcgtcttactcggctgcctgcagacgcactgcccgcagatgctcctgctccgggaggacgcagaaaaacaaaacgccccaacctga

SEQ ID NO: 215440 - DNA, 1056 bp, Klebsiella pneumoniae
gtgaataagcgcgacgcaatgaaccagattcgccagttcggcagcaagttcgatcgcctgcgcaacgccgcgggcggcggcggcggcgggcgcaatgcgccaaaacggccgaaagcggcgcctaacccggcctcgcgtaagagcaacgtattcaacgagcaggtgcgctatgcctggcacggcgcgctgcaggatctaaaaagcacgccgctggcgaccttcctgacggtcatggtcatcgccatttcgttgaccctgccaagcgtctgctacatggtctacaaaaacgtcagcagcgcggcgtcccagtattatccctcgccgcagatcaccgtttatctggaaaaaacgctggatgacgatgccgcggcgcgggtggtgggccagctgcaggcggagcagggcgtcgacaaggtgaattatttatcccgcgatgaggcgctgggggaattccgtaactggtctggctttggcggcgccctggatatgctggaggagaacccgctgccggcggtcgccatcgtggtgccgaagctggatttccagagcaccgaggcgctgaataccctgcgcgatcgggtaacgcggatccagggcgtcgatgaagtgcggatggacgacagctggtttgcccgtctctcctcgctcaccgggctggtaggacgcgtgtcggcgatgatcggcgtgctgatggtggcggcggtgttcctggtgatcggcaacagcgtgcgcctgagcatcttcgcccgccgcgataccattaacgttcagaagcttatcggcgccaccgacggctttatcctgcgtccgttcctctacggcggagcgatgctgggcttttccggcgcgtttttatcgctgatcctgtcggagattctggtaatgcgcctctcgtcggcggtgaccgaagtggcgaaagtcttcggcacccagtttgagctgagcggcttaggcttcgacgagtgtctgttgatgttgatcgtctgctcgatgatcgggtgggtagccgcctggctggcgacagtgcaacatttacgtcactttactcccgattaa

SEQ ID NO: 215441 - DNA, 2112 bp, Klebsiella pneumoniae
atgaaaaaatctcttttttggttgctggcgctggtgctgtcacccgtcgccgtgctggtggtgatcacgccgatggacagccaaaagcagtatatttttggtctgttaagtatcggtattctctttctgatgggcttcagcaagcgccgcagcgtatcggtcattatggtcgtcacgtcgctgctgatgtccacccgttacatgtattttcgcctcacgcagaccctgcacttcaactcgtccattgaagctattctcggcatgggactctttctggcggaagtctatatctgggtgatgctactgcttaactatctgcagacggtctggccgctgaagcgcggcattgttccgctgccggatgatatgagtaagtggccgacggtcgatatctatattccgagctataacgaaccgctggaggtggtgcgcgataccgtcctggcggcacaatgcattgattatccaaaagataaaatgaaaatctatcttctggatgacggtaagcgcagcgagtttgccgtcttcgccgccgacgttggggtgggctatatcacccgcaatgacaacaagcacgccaaagcggggaaccttaaccatgcgctgaccctgactcagggggagcttatctgcgttttcgactgcgaccacgtcgccacgcgcgtcttcctgcaggccaccgtcggcggcttcctgaaagacccgatgctggctctggtgcagacgccgcactacttctattccccggatccatttgaacgtaacctctccgtcggacgcaacattcccaacgaagggatgttgttctatggcccgattcagcaggggaacgacaactggaacgccacctttttctgcggctcctgcgcggtgatccgtcgcgaggcgctggcgcagatcggcggtttcgccgtcgaaacggtgaccgaagatgctcatacggcgctgaagtttcagcgtctggggtggaagtcggcctttctcgatatcccactggctgcaggcctcgctactgaacgcctggtggtgcacgtcatccagcgtacccgctgggcgcgcgggatgacgcagattttccgcgtcgataatccgctgtttggccgcgggctgacttttcagcagcgcttgtgctatctcagcgccatgctctactaccagttcgcgctgcccagggtggtgtttgtcaccgccccgctggcttacctgctgtttaacctcaatattatttactcgtcggcgagcctgatcgtctcctatgccctgccgcacctgttcctcgctatttacgtcggttcgcgaatgaacggccgctatcgctacagcttctggggggaaatttacgatattgtgctggccttccacctggtgctgccgaccctggtgacgatgattttccctaaacgcggcaagttcaacgtcaccgataagggcggcctgctggacgtcggctacttcgatttcaccgtggtgcgcccgcacctggtggtggcctgcctgctggcgctgggggtggtggtcggcatcgtccgggcgattggccatgactattttggctcggatcccaacgttatcgccctcaacgtcgggtgggggatctacagtctgatcttcctgctggcggcgattgccgtggcgcgcgaaacgcggcaggtgcgaaaaaccattcgtatcgatgtcgatattccggtggtgatccattacgccagcggcatcgtctcgcgcagccataccgcggacctgtcgatgggcggctgccgcgtggtcgcgcctgataatcgccatctggaggatgacatcgaagagattgagctgatcctgcagtccggggctatctcgatccctgcccagcttgtcacctctgacgagcgcttcctgcgcctcaagtttgatgaagatattccgctttcgcgccgccgtgaactggtgcgcgtggtgctggcccgcgcggatgcgtggattaatccgccgcgcccgcaggataacccgttccgctccttcttcaccattttacgctgcgtgttcgaactgttctggctgacgtggaaaacccgtcgcagccagcgcaatcgggcaacagtggcgaaaacggcgcaggaggatgggacgttatga

SEQ ID NO: 215442 - DNA, 1311 bp, Klebsiella pneumoniae
atgccgcaacttgatgaatacctccgccagctggcgccctccatgacccaatggcgccgcgattttcacctgcatgctgaatccggctggctggagtttcgcaccgccagtaaggtcgcggatattcttgacgggctaggctatcagctggcgctaggccgcgacgtcatcgatgccgacagccggatggggctgccggacgaggagaccctggcccgcgctttcgaacgcgcccgcgaacagggcgcgccggagcgctggctgccggcgtttgaaggcggtttcgccggcgtggtggccacgctcgacaccgggcggcccgggccaaccctggcctttcgcgtcgatatggatgccctcgatctcaacgaacagcatgacgatagccaccgcccccatcgcgatcatttcgcctcctgcaacgccggcatgatgcacgcctgcggccatgacggccataccgccatcgggctggggctggcgcatgtgctcaagcagtatgccgcccagctcaatggcgtcattaaactgattttccagcctgctgaagagggtacccgcggcgcccgcgcgatggtggccgccggcgtggttgatgacgtggattatttcacggcgatccatatcgggaccggcgtcccagcaggtaccgtcgtctgcggtggagacaactttatggccaccaccaaattcgacgtgcagttcagcggcgtggccgcccacgccggcggcaagcccgaggacgggcgcaacgcgctgctggccgccgcccaggccgcccttggcctgcacgccatcccgccgcacagcgccggcgcctcgcgggtcaacgtcggggtgatgcaggccggtaccgggcgcaacgtggtgccctcttccgcgctgttaaaagtggaaacccgcggcgaaagcgaagccattaatcagtacgtgttcgagcgagcgcagcacgtcgtcgccggggctgcggcgatgtacgaagcccgctacgaactgcgcatgatgggcgcggcgaccgccagcgcaccgtcgccggcgtgggtggactatatgcgcgaacaggccgcccgggtgcccggcgtgcaacaggcggtggatcgcatcgccgccccggcgggctcggaagacgccaccctgatgatggcccgggtccaggcgcgcggcggcctcgcctcgtacatgattttcggcactgaactcagcgccggtcaccacaacgaaaagtttgacttcgacgagagcgtgatggcggtagcggtcgaaaccctggcgcgcgtcgcgcttaactttccctggcagcggggggtgtaa

SEQ ID NO: 215443 - DNA, 216 bp, Klebsiella pneumoniae
atgagcagaatgattcttgtccctatcgatatctctgataaagaatttactgaacgcattatcagtcacgttgaatcggaagcgcggattgacgacgccgaggtgcatttcctcaccgtgatcccttctctgccctatatgcctcactgggaatggcctataccgctgagcttcccggcatggacgagctgcgtgagggttctgaaacgcaattga

SEQ ID NO: 215444 - DNA, 495 bp, Klebsiella pneumoniae
gtgacagcgagggaacgtttttttaagaaactgcagcaacagcaaaatccgcggcggacagcggccctcgacgggtcggccgccgcggatatcgccaggtttcgtcagcagatggcggagctggctcagcagataagtcagtggtttgatggaaccggtattgaggtggtgatttcgacccgccatctccacgacctgagtacccttggctacagcctcaacagcggcatctgccgctacgatatcccggccattcgtctgcaaaacggcgagcgcagcgtcaatatcgtgccgcagcagctgttggatggcgtggaaaaggggatcgtgaccctgagtcttgaggcgcccgacggcgcgggatcccgggaggtgttttatctgagcctggccccggaggagggctggatgatccgcaaggcgcaccagcccccggaagcgcggcttatacttaccgaagatcgcttttttatggcggtagacagcctggcctga

SEQ ID NO: 215445 - DNA, 1182 bp, Klebsiella pneumoniae
atgtggttgcacgctggtgagttccaaccccgattgcagggttgcgcagtgagagctattcctacatttcctcgctatcgtcttgcgaaaccgccagttgcaaagcgctggttaggaggaggtgccgctctggttttgctctctggtatcatcgcggcaatggcagggaaatccgatgccaataccagtatcattcttatctgcatggttggaatggtattacttggcggtgttgtctggtttttacgcacaatcttttttcgcctttcagttcatcattcacatacctgggagcgcgaagcagaaaatgagcgcaggcattggtgggaaatccatcggcgtcagtttgccctgaaagatattgtcctgattggcccggcaggcgctgaactttctgactggctgcgtgtgattaagcgagagcatcaggctccattagtcaggcaggaatccctggggaaatcgttgcgtattgccagaagcttctcttctgctcttattgaacgtgaaaaacaactggctcaaatgctggtattgcaatggaaaaggcagcgaggtaaggaattattcgtttctccggagaaatatttctggcaggggagtcctgaagcctggcaagcctttgtggcacagctcattgagagttttccgggaattacagctcctgaattacctgagttatggcaaggggagaaaacattatccgtactggctaatgttcttgcggacaagaaacagctggctaattttttgattgccgggtgccagtctttatctcctgcttctgactctactcgtcctgctggtgaatgcgcagtactgtggctggctggaaaccagggggacgtcacattatcccgtggtgaattttttgagccttctgatagtgagtccctgcggcacgtcgccttgcgagccgaaaaacagagcgaacttaatgagtcgcccgaacggtgcattctcttctcacacccggagcaacctgaactcgccgattgtggctggaatgtgacccacaatatccaggatgactactggggcgatcctggaaagcttgatgcgctggttgtgatatcgctcgctgcaattaccgctaagactgaagcaaaaccctgcggctggatagcgtcagacccccttcatactttagctcttgggatcgtaaaaccaaatggaaactga

SEQ ID NO: 215446 - DNA, 258 bp, Klebsiella pneumoniae
atgaaacgtattatcaggcagggtgattcgctaaaagagtatggtggttcagttattggcggtcactatctttattttggtaaaggtattgctgtgaaaggtgatgcggtgaaatgtaataagcatgggatgacaacgattgtcgaaggtagctctctgacaaaagttgacggtcaaccagtagcattacatggtcatcgctgcgcatgtggttgcacgctggtgagttccaaccccgattgcagggttgcgcagtga

SEQ ID NO: 215447 - DNA, 2400 bp, Klebsiella pneumoniae
atgtccaaaataaatccagacttaacatggtatccacctcattttccaaaacaagggcgtttaccaacagatacagcggcaacgaagcgaaactgtaaacagcaggatagccatgagctggcataccggaatgagctctgtcacgctgcgggtaaagccgtagagccgccttgttgtaaaactctgcatatcagtttattttttgacggtacaggaaataaccttaataacgatctgtatatttccagccctaaacatccaacaaatattgctcgtttgtttcgtgcaacgatcggtcagggttatgccggtggtgttcaggggcatactgaagagctggttgatttagcgggaacgtcaggcaacaaatattataaatattatatccctggggttggcacaccttttccagaaattaatgaccttgattacagtacgccaggtctggcttttgcgacctacggtgaagaacgcgtcaactgggggctgctacggattattgacgcactcagaagaacatcgggtttaaccgagatttctgatgccgagtgttatgccgccgtcaaccgaatgacatcaaatctgggatcggacgggccagacaggcgttataccgtgttcaatgaacttttaaaggcagcagatcttgcacctaaactgaaacaggcagttacacaaccagaaccaggaaaacctaagctattaggcattaagttatatgtctatggtttctcccgcggtgcagcaagtgcgcgagcatttgtgaactggctatctgagttgctgccagggggcaggagaaagggaagtaaacctgagctttgtctgaagtcgggtgacgtaaaaatccgcttaagtattgaatttcttggcctgctcgacactgtggcatccgttggcattgcaaatattgcgccattcgcagaagggcatatgggctgggctgatgacaccatggaattaccggataatgggctgatcaaaaaatgcactcacctcgtttcatcccacgaacaaagactttgtttcccgctggattcaatttgccgcagcgacggaacttacccaagttatgctacggaagtggtttatcctggaatgcactccgatattggtgggggatatcccccgggagatcaaggaaaagcagtaggtcataatgatagtaatttactttcgcaaatagctttacatgatatgtatgcatcagcttttgaagctggagcaccattaaaagtatcgccccaatcgttacctaaagagcttttatctcaattatggcgagcaatgccgccagagttgcaattagaatttactatttctgaatcgttagtggaaagattcaatgcctggcgtgagtttactcttaatttatcttcagatagtgctgaagcttctactgatgcattccaatataaccccattcgtgcaagttcaaatgtcattgcagctctagaaaatcaactcggctggattacggcatggcgtatcgggcgatatgtaaacggcgcttataaatctcaaggattttacaaatcttcaggtgtcgcgtggcaaaataaagattcagatccggccactctggctgcatctaaggctgagcaagaacggaaacaaaaagatgtggatgatgagcgcctgaccgctattgtggataacaggtttaaaaaattcacgccattacctcctggcccaaaagattttgacccggctatcgctcaggttcagctaagacaggcggcagaagaattcaatgctgattacctgtctaagccacgccccgttacggggaactggaaatatacgatgtctcagcaattatctaatgtgatatactccttcagtgagaatgatttctctgttgagtatgaacgcatcaaaagttcaggtgacagtaaatttaacaaactctttccgaagcaatctgctggagaaaccgctcaatcgccagacagtctggtcagatcattatttgacgatcaggttcatgactcacgcgcctggtttatgcacgcaacctttggtgacagagaaccctggggaagttacttcctttatcggatgattttctttggggagttgatgagtaaaaatgtttcattgatcgctaaatatggccggtttgttgaaggccaacttaaatcagcgataaaaggagccagtctcatttttgataacacgactatcaacagtaatatttcagatgaaatcacatctggtattaaacaagtgatctctatcatccctgcttcggcaagtgggcctgaagttattaatgcagaatctactattcaacctgcaatgacaaatggaattgcgccattgagtagccagacacgtaaagccctggatgctgcgaaactggccgaaaccaaagctgatattcttaaaatatggtga

SEQ ID NO: 215448 - DNA, 336 bp, Klebsiella pneumoniae
atgaaatctccctttttctttttagttacagcggtattgctgttaacgggctgtaaccagcctgatgaagctgaatcagtcagcggcggtggcggaaccatcgaagctatcaaccatacccactgggccatcaaccactttagtgtcaacgggcagtcgggcgtcgatattatcggcccgtggcaaggcggcggtggcgcggggtattttggtgtgcctccaaaatgggaaccgggaatgacggtaaaaatcgagtgggaaacaggtgttgggtattcaatggattttccaggtttcggggatgataaaaaagtccttgaatgggaaaaaaaataa

SEQ ID NO: 215449 - DNA, 777 bp, Klebsiella pneumoniae
atggatttcgtttctccgtggatggacaaaatcagaacaacctgccagcgtgccgaaatagaccatattgatgtgataatcgatcagtgtgctgttaatttctctgtcctgccagcacttactactttcagtaaccctatgatgtggcagtcgctatatcaagggctacctgaggatatttatcctgaggatgcgcctgtgctggttcgggtggatctatcggacgctgaacatgttcagtggctaaataaccttgcagcagaaatgatggaatcggctcccctgctgatatgcggttcttgctggccgtttgaacagcttgctgattggctcagggattgtgttgctgcgcaacatgaaggtcgggaggggattttccgtttctgggatacccgtatttttcctttcttgttcagccacattcttgatgctgagcagcaaaagcaactgctaataccggtcttattctggacatggctcgactgtgactatcagtcttccattcggttggggagtggtgaaatcccggaatctgacaagtccgtggtgcaaatcgaatttaccgatagccagtttgagaaactcatgtgtgtcagtgatacgagccagtttctgagatacgagagtgtgccagaagggatgtttactaaccggcaagccgaatttacagcctgttatgaggcgatgcttaccgcaacagagcagagaattgtttttgatgataagcgcaatgactgggttatggcgcaggttatttcaaataactctgttacctga

SEQ ID NO: 215450 - DNA, 492 bp, Klebsiella pneumoniae
atggcaattcctgtttatctttggctgaaagacgacggcggcgcggacattaaagggtctgtcgacgttcaggatcgtgaaggcagtatcgaagtggtggcccaggagcataacctgtacatcccgaccgataacaacaccggcaaactgaccggcacgcgtattcatacgccgttcctgttcaccaaggagatcgactcctccagcccctacctgtacaaggcggtgaccaccggccagaccctgaaatccgctgagttcaagtggtaccgaatcaacgatgccggccaggaagtggagtatttcaataccaaacttgagaacgtcaaggtggtgaaagtgaatcccctgatgcacgacatcaaaaaccccgcctacgagaagcacaaccatctggaacagattgagctgcgctacgagaagatcacctggacctataaagacggcaacatcattcactccgatagctggaacgaacgcgccaccgcgtaa

SEQ ID NO: 215451 - DNA, 1707 bp, Klebsiella pneumoniae
atgagccccgcgcagcagcgtgggctggcgctgtgggccagtctgctgagtgcgctggtgtgcctgctatttttgccggttccccgctggggggcgtggctcattctgctggtcacgctggccctgatcatcgggatctggcgcatcgccagtcgtcgtaccggacgtaacgtcgcatcaaccctggcccctctcccggagggcgcttatcgccagccggtggtcctcgtttgcggcgacctgccgtgtgtctggccgccagcgtcaccggtgcgagtggtcaaacagggctgctggatccgcgtggaaaagacggaggagctgcagcaggtcgcgcgccaggtattgagccagcggccggaatgggggcctcagctgtcggtgctgctctgcgtctgcccgcagcggcatgcgcaaagcgatgcgctgaccagcgctctgctggccctgcgctggcaactcagccagctgcgccagcagacggggtatgccgtaccgctggcgctgcaggggcaggtgggcagcgcgatgagtcgcgacctgttgtggcaggcggcgataccgggtgaagcggtgaaagtctggcagccctcctgcgccccctgttccgtaccggcctgggtacgcgccggcggggcggccgcgctggagcagcaggtgctgatgaacagcctgatggactggtctgaacagcacgtccatgccgtgttgaccgaagagaataccgacctgccgcctctgacccctgcggccgtgctgtggggcctcgggccctcgctgcctggaagtctggcatcgtcggcctggacgacgtggttatcccgacatagcggcctgtcgcgggtagctggctggcagccagatgggagcgacaccggggacgcttcagctttgccggaattcatcctgccgcagttaccggcgggacggggacttacgccacgaggcagggcctggcgcgcggcgctcgcgattttcaccctcgcggctgtcgccgcgctgctcagcagtggctggaacaatcgacaactgctgcagcgcgttggcgtcgatattgcgcgttatgagcggattgcgatggatgattatcgaccaaaagccagcgctgtctgggtgctgcgtgaagatgccgcgctgctcgatagctgggcgcgtaacggcgtcccgctgcgcctgagtctgggcttgtatcacggggagcagattcgcctgccgttgctggaggcgattcgcggttacgtgccgcctccgcctccgcccaggccggtgcagcacgtcgcgccggatgtcatccgccttgacagcatgtcgctattcgataccgggaaatgggtactgaagcctggttcgacaaagcggctggtcagctcgctgatggacattaaggccaggcccgggtggctgatcgtggtggcgggtcacaccgacagcgtgggtgaggaaaaagccaaccagctattgtcgctgaaacgtgcggaatcggtccgcgactggatgcgcgataccggcgacgtgccggacagctgctttgccgttcagggctatggcgaaagccgaccaattgcaacaaacgatacgccggaaggccgtgcgctgaaccgtcgtgtcgaaatcagtctggtgccgcaggtagacgcctgccggttaccggaccaaccctctgcgtcatcccaggatgatggcgcttcactacacaatggagagtaa

SEQ ID NO: 215452 - DNA, 492 bp, Klebsiella pneumoniae
atggctgatacgttccagaatgaagtccccagggcgcgcattaatctcaaattatctcttcataccggcggcgcgcaaaagaaggtcgaactgccgctcaaactgcttaccattggcgattttagtcatggtaaggaaaaccggcctttatcggaaagagaaaaaatcaacgtcaataaaaataactttaacagcgtactttcggaatttagcccggaagttaacctctcggtgccgaatacgctggccggcaatggcgaagaggagaacgtcagactgcgttttaccgacatcaaagattttgaaccggagcaggttgcccggcaaattccgcaactccgcgccatgctggcgatgcgtaatttattacgcgatctcaaatccaatctgctcgataacgccactttcagaaaagagcttgaggcaatcctgaaagatccggcgctgtcccaggaattacgcgacgaaatgagtgcgcttgccccgaaataa

SEQ ID NO: 215453 - DNA, 282 bp, Klebsiella pneumoniae
atgctccagcacaaaatcagggaggcgttctgcgcctctatctctcgcaacccgaaagggtatcagtacctacgcaccagtgactttgtcaaccctctgcgccggcgcggcatccacttatcagaggtggaagctaactcctggacagcgcggaaacaaacgtatttcgtcgataagacgcctgaccattgcgaaaacaggctgtggatgatggcagggatggggaggggctctgatggtgctagtcagggttgttggagactccaatccatagttttatga

SEQ ID NO: 215454 - DNA, 549 bp, Klebsiella pneumoniae
gtgctgattggctatgcgagggtatcaaccggggatcaaaacctcgacttacagaaaaacgcgctgatccgcgcagaatgtgagctggttttcgaggatatggccagcgggaagaatgcccggcggccagggttaaagcgcgccttacggcggctgcgaccgggtgatgtgctggtggtctggaaacttgaccgactgggccgaagcgtgcgtgacctgattacactcgtgtcggagctgcaggcgcgcggggtgaatttccgcagcctgactgacagcatcgacacctcgacgcctgcgggacgctttttcttccacgtcatgagcgccctggcagaaatggagcgcgagctgatcgtcgagcgtacccgcgccggtttagccgctgctagggagcaggggagagtcggtggccgtcgccgggtaatgactgaagatgtggtggagcagtgccgcagaatgctggagaacggcgctacccggcagcaggtggctgatgtgacaggcgtggacgtgaaaacaatctacaagtacctcccggcgacttga

SEQ ID NO: 215455 - DNA, 1401 bp, Klebsiella pneumoniae
atggcaatcctctacaacatctttaccgttttctttaatcaggtgatgaccaatgccccgctgctgctgggtatcgtcacctgtctgggctatatcctgctgcgcaaaagcgtcagtgtgattattaaaggcacgatcaaaaccattatcggcttcatgctgttacaggccggctccggcatcctcatcagcacttttaaaccggtggtggcgaaaatgtcagaggtgtacggcatcaacggcgcgatctctgacacctatgcctcgatgatggcgaccatcgaccggatgggcgaggcctatagctgggtgggctacgcggtgctgctggcgctggcgctcaacatctgttacgtcctgctgcgccgtctaaccggcatccgcaccatcatgctgactggccatatcatgtttcagcaggcggggctgatcgccgtctcgttctttatctttggttgcggaatgtggacgaccatcatctgtaccgccgtgctggtctccctgtactggggtatcacctccaacatgatgttcaagccgactcagctggtcaccgacggctgcggcttctccatcggtcaccagcagcagtttgcctcgtggattgcctacaaagtggcgccgtatctggggaaaaaagaggagagtgtggaagacctcaagctgccaggctggctcaatatcttccacgacaacatcgtttccaccgcgattgtcatgaccattttctttggcgcgatcctgctttcctttggtattgacgtcgtgcaggcgatggcggggaaaacccactggacggtctatatcctgcagaccggtttctccttcgcggtggccattttcatcattacccagggcgtgcggatgttcgtcgccgaactgtccgaagccttcaacggtatctcgcaacgcctgatccccggcgcggtgctggcgattgactgcgccgcgatctatagctttgcgccgaatgcggtggtgtggggctttatgtggggcaccatcggccagctgattgccgtcggcattctggttggcattggctcttcaattctgattattccgggctttatcccgatgttcttctccaacgcgacgattggcgtctttgccaaccacttcggcggctggcgcgcggcgctcaaaatctgcctggtgatgggcatggttgaaattttcggttgcgtgtgggcggtgaagctcaccggtatgagcgcctggatgggaatggcggactggtcgattctggcgccgccgatgatgcagggcttcgcctccatcgggctggcgtttatggccgtcatcatcctgattgctctcgcttatatgttcttcgctggccgcgcgctgcgcgccgaagaagacgcggaaaaacaactggcagaggcctctgcccaataa

SEQ ID NO: 215456 - DNA, 558 bp, Klebsiella pneumoniae
atgaccctacgtagcatactggccgcctcgttactgcttctcccgctgctggccacagcgcataacttcgtcgacggccagcgcgtggcgcccgttggcgtcgcggatcggggagagcttattctggataaggataagtttagctataaaaactggaatagcgcccagctggcgggaaaagtgcgcgtggtccagcacatcgccggacgctcgtcagcaaaagagaagaatgccaacctgatcgaggcgattaaagcggcgggcttcccgcacgatcgctatcagaccaccaccattgtaaacactgacgacgccatcccgggcaccgggatgtttgtacgtaacagcattgaaagtaataaaaagctcttcccatggtcgcaatttatcgtcgacagcaatggcctggtgcggaaagcctggcagctggacgagaagagctcagcgatcgtggtgctggataagaacgggcgtgtgcagtgggctaaagacggcgccctcacccaacaagaggtgcagcaggtgatcgacctgctgcataaattgcttaataaatag

SEQ ID NO: 215457 - DNA, 207 bp, Klebsiella pneumoniae
atgaaaattttccaacgctacaatccgctgcaagtggcgaagtacgtgaagatcctgtttcgtggacggttgtacatcaaggacgttggcgcatttgaatttgataagggcaaaatccttatcccgaaggtcaaggacaagctgcatctgtcagtgatgtccgaagtcaatcgtcaggtgttgcgtctgcaaactgagatggcataa

SEQ ID NO: 215458 - DNA, 873 bp, Klebsiella pneumoniae
atggaactggatatcaatgagctactcaatttctcgccattgatgaagacctttaccttcaatgcctgggtcgtcgcaggcttcacgccgattacccgcggctccacgctggactactacattaatcgcccgcaggggatgaaaggttacatcattaatctgaccctgcgcggccaggcgcgggcgaaagcgggcgatggcttcctgctgtgccgggaaaacgatctgttgctgtttcctcccggcgtgccccatcattacggcagggacgaacacagcgagtactgggaccatctgtggatctactttatcccccgcccctactggatagactggctgaagtgggaccaaaccacccacggtatcggcaaaacaaccattaacgatcccgaccagctccagcaactgcgcgatctgttctacgaagtgatacgccaccactctgcgtccgtaccgctgtcagaagcgctggcaatgaacgcgctggagagattaattctccgctgttttcaacagcaacccattagcaaccgccatgcccacgacccacggattaacgccatctgcgactatcttaacgcccacattgcacaggaggtaaaaatcgagactctggcggcgatggtgtttatctccccttcacgtctggcgcaccttttcaaaaatgaactggggcaaacggtctatgcgtggcgggaaacgcagcgcatcaaccgcgccaggtggcttattcagagcacttcgctcccacttaacaaaattgctttatcggtgggctacagcgatccggtctatttcacccgcttgtttcgtaaacataacggcatcccgccgggcgaatatcgcaaacgctatgcggaaatgaagggctaa

SEQ ID NO: 215459 - DNA, 2010 bp, Klebsiella pneumoniae
atgtctcatttattttatggcgtggcgtattacgatgaatatatgccggaagatcggctggctaaggatatcgccttaatgcgcgaaaccggcattaacgtggtgcgtattgccgagtccacctggagtacgctggagcctgaagagggccagtataatttctaccatatcgaccgggtgctggaggcgatgcatgaggccggcattgcggtcatcgtggggacgcccacctacgcggtcccggcctggctggcggcgaaacatcccgatattctggtcaccaccgtcgcggggcagcaaaaatatggtccgcggcagatcatggatatcgtcaacccgacctttcgccgctatgccgaaaaaattatccgcacgctgatggcccatgtgcagcaccatccggcgattatcggctggcaactggataacgaaaccaagcattacgacaatattggccgctatatgcaggagggcttcgtgcgcagcctgcaggagaaatatcctgacctccggcagctgaatcgcgatttcggcctggattactggagcaaccgcattgaccgctggcaggattttccgccggtggaaaacaccatcaacgccagcctcgcctgcgccttctcccgctatcagcgtcagcaggtcaccgagtatctggcctggcaggcggccatcgttcgggaatacgcccagccgcaccagttcgtcacccacaacttcgatttcgaatggcgcggttactcttacggcgtgcagccgcgggtcgaccattttgcggcggcgcaggcgctggatatcgccggcgtcgatatctatcacccgagtcaggcacacctgaccggacgggaaatcgcctttggcggcgccatcacccgctcgcttaagccgggccagaactacttcgtgctggaaacccaggctcagggcttcgcccagtggacccccttcccgggccagctacgcctgcaggcattcagccatatcgcctccggcgccgccatggtctcctactggcactggcattcgattcataacgcctttgaaacctactggaaggggctgctcagccacgacttctcgcgcaacccaacctggcaggaagctaccaccatcggcgccgatttcgcccgcctgtcgccgcagctggcggagctgaaggccgaaaatgacgtcgcgttgctaataagtaatgaggcgatggacgctctcaatcacttccttcccggcgacgccaggggcaacatttataacgatatcttccgccgcttccacgatgcgctgtatgaccacaatatcagcctcgacatcatccacgatgtgaacgaggaaacctcgcgctaccgggtgctgatcgttcctggtctgtacgccgccgatgagggcctgctaacgcggattaacgactatatcgcccggggcggcagagcgctgatcggctttaaatcaggctttagcgatgaaaacgtcaaggtgcgcagcagcgcgcagccgggggttttgcgccagagctgcggcgtcagctacagccagttcaccctgccggaagagacgacggtaagctcttgctgcgcagagattgattgccgcaatgacaatcaggctgagctgtggatggaattgctgacgcccgatgacgggacccgcaccctgctgcgctatcagcacccggcatggggcgaatacgccgccgcaacggaggcggattacggtcagggtcgcgccctgtacgttggctttctgccgcagaagggcctgattagccagctgtttgatgtcctgacggcggatctcacgctgaactcgcgaacttccgcctatcgctatccgttagtggttaaaaagatgcgtaaccgcgccggaaataatatccacttcctgttcaattactccggcgaggcgatggatgttgtcagcgagaccctgggtaccgcgctgctgagcggggagacagtatacgtcggccagccgttgcgcctcagggcctgggaatttactatcatcgaaagctaa

SEQ ID NO: 215460 - DNA, 1233 bp, Klebsiella pneumoniae; identical to SEQ ID NO: 134781

SEQ ID NO: 215461 - DNA, 300 bp, Klebsiella pneumoniae
atggcatcaatttataaaatcgcgtacggcctcgtactcatagtgatgttttttacgctcaccatcaaactgcacgaccccatgcttaatctgggcagttggccattttatcgtgaaatgcttaccaggctgacaggcaccctgctcccgattaacctgctgttaatagtgatggagtttgtccgtatgattgcccatcccctgtcacgtcgggtggccggtagagtgaaggtacatcaggccatattacgttatgccagacgtcagggcgccagaatgacgccatgggaactgaagtaa

SEQ ID NO: 215462 - DNA, 1188 bp, Klebsiella pneumoniae
gtgaaaagcgttcgctatttcacccttaacttttctggcttcacgaccgccgcctgtgaaaaacaggggtatctgcgtcttatcgccggcgaccatgtcttttataccgataaacgctattttaacgacccctcgctttttgaccgcctgacgatcaatcagcctctgcaccttggcgtccgccgcctggacaacggcagttactggatccactggctcagcgatggcgaaacgctccttgagcccagtcaacgggtaaagcgctgggcccggccgctgctgagtatcagcctgctgacgctcatcgtcgctcttatcccgctcatgatgagcacctcagaatggggaaggttcggcttcggcattatcgcgatactggccttcatcgcgttgttaaccggcctctgcgagctactgttccaccgggcgctaaaaatgcaccccgccatgcgcgatctgttggcgaagatggcgcaggcccgccgccgcgacttttccttttgccagccgctaccgactacggcgcaaaccctccgccagtcggcgaagccttttacgcaagccctgccggaacgctatgccgtccggacgggaaaaattagcaatatcatttttaagaaatggttcgcggggaacccaacgcgggaataccatggcgttgggatacaatgcgacacggcgccgctggccttcttctggcagaacggcttcaccaacttcggcctgcatccctttttttaccgccgtcaaccgccctttctcgctatcggcgatcggatagtcgccgtctaccaacggaaagataacgacgtccaggcgttatacaacgtcagcgacgggggcgcttttctgaaaaatcatccctgttatcccggtgaccggcaaatgtcgctagtctataacctgttttatggcatggtgctggtgatgtacctcctcatactcggcatgtcgctaaataacccatacaaaccagtcaggggatttgggtggttaattcaggattcactggacatgctgtccctattattactcagtttcggcgggatcctggcggtactggagctgattggcccgacggcctggttattgtcacaccgggtggctgactggatgaagatgcgctcggcgatgcggcactacctgcagggagcggcccgccataccgcgctcgaggagatcatgtaa

SEQ ID NO: 215463 - DNA, 1503 bp, Klebsiella pneumoniae
atgagctcacccctgttgattgcgcgcacgctggataacgcgctctatttactgcccgcgatggccaaccgccatgggcttatcaccggtgcgaccggcaccggtaaaaccgtcaccctgcagaagctggctgagtcgttctcggagattggcgtgccggtatttatggccgacgtcaagggcgacctgaccggcattgccgccgcggggcagagctcagagaaactgcaggcgcggctggagaagatcggcgtcagcgactgggagccgcatgccaacccggtggtgctctgggatatctttggcgagaagggccacccggtgcgggcgacggtttccgatctcggccccctgctgctggcgcgcctgctcaatctcaacgaggtgcagagcggcgtactgaacattattttccgcatcgcggacgaccgcggcctgctgctgctcgacttcaaagacctccgcgccatcacccagtttatcggcgataacgccaagtctttccagaaccagtacggcaatattaacagcgcctcgatcggcgccatccagcgcgggctgttgaccctggagcaacagggcgccgagcacttcttcggcgagccgatgctggatattgccgactggatgcgcgtcgatgccagcggtaaaggggtgatcaatatccttagcgccgaaaagctctaccagatgccgaagctgtacgccgccagcctgctgtggatgctctccgagctctacgagcgcctgccggaagccggcgacctcgataaaccgaagctggtgttcttcttcgatgaggcgcatctgctgttcaacgacgcgccgcaggtgctgctggataaaattgaacaggtgatccgccttatccgctccaagggcgtcggcgtctactttgtctcgcagaacccggcggatattcccgacgccgtgctcggccagctgggcaaccgcgtgcagcatgccctgcgcgcttttacgccgaaggaccagaaggcggtgaaaaccgccgcccagaccatgcgcgccaacccggccttcagtaccgagcaggcgatccaggagctgggcaccggcgaggcgctgatctccttcctcgatgagaaaggcagcccgtcggtggtcgagcgggcgatggttatcgccccctgctcgcgaatggggccggtcagcgatgacgagcgcaatggtctgctgaaccactcgccgctgtacggcaagtatgaggaggaggtggaccgcgagtcggctttcgaaatgctgcagcaaggggtgcaggtcgccaccgggcagcagtcggctccgccggcgaagggccagcagaacggcgatgacgacgggctgcttggcggcctgaaagatatcctgttcggcagcaccggcccgcgaggcggtaaacgcgacggtatcgtgcagaccgcagcgaaaagcgcggttcgccaggtcaccaatcagatcgtccgcggcatgctgggcagcctgctgggcggacgcaagcgctaa

SEQ ID NO: 215464 - DNA, 1014 bp, Klebsiella pneumoniae
atgtcgctcaaattaggtgtcatcggcgctggcgctatcggtaaagaacacatccgtcgctgcacccaggttctgcagggggccaccgttgtggcggtgtctgatatcaatgccgacaacgcccgcgcggcggtcgcgctgccgggcgtgcaggcggaagtctacgccgacggccacgacgtgattaacgccagcgatgtcgatgccatcctggtcacctcctgggacccgacccacgaagagtacaccctggccgccatcgccgccggtaagccggtattctgcgaaaaaccgctggcgatgaccgcggaaggctgccgccgcatcgtcgatgccgaaatgaaggccggccgtcgtctggtgcaggttggctttatgcgcccgtacgacgaaggctatctggcgctgaaaaaagtgatcgacgatggcgatatcggcgcgccgctgatgctgcgctgcgcccaccgcaaccagtcggtcggcgagaactacaccaccgatatggcgatcaccaacaccctgatccacgagctggacgtgctgcgctggctgctgaacgatgactaccgttccgtgcaggtgcgcttcccgcgctccacctcgcacacccatgcgcgcctgaaagatccgcagatcgtctcctttgaaaccaaaaaaggcaccctgatcgacgtcgaagtgttcgtgaactgccagtacgggtatgacatccagtgcgaagtggtcggcgaaaccgggattgcccgtctgccggagccgtcggccgtccagatgcgcaagtccgccagcctgtcgaccgccattctcaccgactggaaagaccgctttatcaaagcctacgacgtcgagctgcaggcctttatcaacgacgtcaaagccggccagctgcacggcccgtcggcctgggacggctacgcggcgtcggtggcggcggacgcctgcattaaagcgcagggaaccagcgagccggttgaagtgacgctgcctgagtgcccggcattctacaaacgttaa

SEQ ID NO: 215465 - DNA, 1266 bp, Klebsiella pneumoniae
atggctctaacagatatcaaagtcagaacagccaagccaacggataagcaatataagctgaccgatggcagcggtatgcaccttcttgtccatccaaatggttctaagtactggcgtttgcagtaccgttatgacggcaagcaaaagatgttggcacttggggtttaccctgaaatcacactggcggatgccagagcacgtcgtgacgaagcgcgtaagctactagcgaatggcgtcgatccgggagacaaaaagaaaaatgataaggttgaacagagtaaagcacgaacctttaaagaggtagcgatcgagtggcatggcaccaataaaaagtggtctgaagatcacgcccatcgcgtgctaaaaagcctggaagataatctttttgcagcgcttggtgagcgtaatatcgctgagttaaaaactcgtgatttattagcgcccattaaagccgtagagatgtctggacgtcttgaggttgctgctcgtcttcaacagcgcactacggccatcatgcggtatgcggtgcaaagtgggttaattgattataacccggcacaagagatggctggggcggttgcttccggtaatcgacaacatcgtccggcgctggaattaaagcgcatctctgagttgcttgagaaaatagacaactataccggcaggccgctaacccgctgggcaacagaacttaccctgcttatctttattcgatccagtgagctgcgttttgctcgctggtcagaaatcgattttgaaacgtcaatgtggaccatcccacctgagcgagagcccattcctgatgtgaaacattctcagcgaggttcaaagatgcgtacaccgcatttggtgccgctttcaaaacaggcgctggcgatcctgaagcagataaaacagttctgtggcgaacatgagttgatctttattggcgatcatgatccgcgtaagccaatgagtgagaacaccgtaaacagtgcgctccgggtgatgggctatgacactaaagttgaggtttgcggtcacggctttcgcacaatggcctgtagttcgttaattgagtcaggactatggtcgaaggatgcggtggaaaggcagatgagccatatggaacgcaattcggtgagggcggcgtatatccataaagcggaacacctggatgagcgcaagctgatgttgcagtggtgggcggattttctggatgccaatcgagggaaagggattacgccgtttgactatgcgaagatcaaccggggtaatggcgagtga

SEQ ID NO: 215466 - DNA, 876 bp, Klebsiella pneumoniae
atgacctctgacaaaaccctgaagcaagcgatatcaaatatcaccatttggcgcaaaggcgaacagcgtgcgccacataagccattattgctgctgcatgtcctttcacgctatcggcagggtcatgagcgcctgtttaactatagttctgaaatctacgagcccctgttggatcttctggaacgttatggaccgcaccgccgtgaccagcgcccggacatgccgttctggcgtctgaagggcgatggcttctgggaactacaaaacgcggaactgtgctcaaccaatggtagccgccagccgccccgtcgtgaactcaccgaatataatgtcgcgggtggatttgatgccgacaattttgcgttggtggcaaaaaatcacaggttaattgatacgctggcgcagcagctcctggaggcacatttcccggccagtattcaggaagacatcgctgacgaaatgggttttgatattcgcacctctctccgtcaacgcgatccgaaattccgccagatggtgctacgtgcttacaattatcagtgcgctatatgcggctttaacatgcgccacgacaatgcgccgattgctctggaagctgcccatatcagatggaagcagcaccatggcccttgtgaagtacctaacggcctggcgttgtgcgcaatccatcataaagcgtttgatcgtggttcgattggtttggatgaaaatatgcgtgtgaatgtttccgacgcggtaaatggtggtggggtggtacagcgactgttctgggattttgcgggaaaggcgattgcgttgccacctgttaaagaaaattatccgggagagaagtttgtggaatggcacaggaaagaggtgttcagaggagagcattga

SEQ ID NO: 215467 - DNA, 966 bp, Klebsiella pneumoniae
atgcctttagatttaagtaacactttagttattggcatcagcgcaactgcgcttttcgacatgagcgaatccgatcgtatgtttcgggaaacctatgcgaccgatcctgatagtgccattgagaagtaccgcgcctacatgctcgaacacgaaaaccagcctttacagcccggaacaggctaccccttagtcaaagcgttgctgggtctgaaccggtaccgccagccggatgataaatcgccgttggttgaggttgttgtgatgtcgcgtaacagccctgatacgggtatccgcgttttgaatactatccgccatgacaggctcgatatcacgcgttctgcctttacggcaggcgaaaccgttgccgattaccttgatgcatttgatgtggatctatttttaacaactaacgttgaagatgcgcaaaaggtgattgattcccgattctgcgctgctgcaatcctgaaagatccgccttccgacgcctccgatatcccggaggggcaagtgcgcattgcttttgacggcgacgcggtacttttttccgatcaaagcgagttagtatataaaacacaagggatggctgcctttcatgctcaggaagacgcgcagcaggatattcctatggaagaagggccatatgccactctgttaaaaaaaatagccaagcttcaggaacgactgccaacccgcgttgagtattctcccgtccgtattgcactagtgacggccagaaacagcccatcagaaatgcgcgtcattaaaacgctcagaagctggggagtatacgtcgatgaggctttttttctgggtggtgtagagaaaacaaaagtcctgaaggcgtttaagccacacattttctttgacgatcaggatgtgcatttgatcgcagcggcaaaggttgtaccttctggaaaagtcccttatgccagtaactccgaacttgcagaacgtgaagcatcgtga

SEQ ID NO: 215468 - DNA, 1323 bp, Klebsiella pneumoniae
atgattctattcttttatccttacataatgctttgctatagcgctggatacgctttattgcaaacactggatgggatgggtgtgattagtaccaactttgtggaaatgaacgcacagggtgctcttttgagcagttactggtctcccaataaagttgctgtagtcttaggaggatgttttcttgagctctttattttattattaccctttattttcttgagctcatggatacttgccagaaaaaagggactcatcatttgttttgttcttcttataacccctggcctattatcgctctgtcaccttcttcctgctatccagtggttgccattgacctatgaaataggaggtgcaggtgcaacaggtaacgcagctggactcggaagtcttagcctcatagggctattgtgcggttggattttggcagtaatcattagtgatatttttgctacaggagagaaattcagacagtggacagatattttcctaatactgacagcagttggtaacggtattttctgggtatcagacagagaggtagcagtcggtaaaaccgcatatgagaaaacaattacggatattaatgatgcagccaaataccttctttttcaggtgaaagactacagccgcatgtgtgacaataacgggcttgccgaaatgtcatcttgtcagtgggcatcgtacattcaagaaacgctagaaaatattgctagtacaaaatcatctgttattgaatatgtaatacctgaaaatcttgacaccttctaccgaattcctgagtactatagtaatcaagtatccccagataaaatcagacaagaatttcaagacttcaataaaaaactatgcccaaataaacctctttccaaaacaataacacaattgccatcaccttctcgatggtgccagacaccacccccagcttactgcaatgccattcaagagggaaaatataaaacaggcatgtcagaccgtttcgctgtcgccaatgagtgtgtaactacatcattattaaggtaccgccaagttttattaaaagaacaagctcgtttatccttaagtaaaaatgcccctcattatagatggatgtggtttattgctatgtctttttttattggtgggaaaattgccaatgtaatgacaaaaataggtaatgtagagaatcgtggcataactgaaaaacatagagttaaatttatccttttaaaaatacttggctttattgtgcgtacattaataagatgtgccatcttgtgttggaaagtgtttttttcaacgttcaattatatcaaaaaattgaagaaaataaaaaatgatacttaa

SEQ ID NO: 215469 - DNA, 3282 bp, Klebsiella pneumoniae
ttggacttctttgacccgttaacaattaaatttactttgcctgcaaagattgccccagcccgaagggttggtggtaattttattcataagttattttttcgagtaacgacagtggaggctaaagtcagaaatgcaagtttccctggatactttgaacttgttacgggtctgaagcctcctctagactatatctatctgaaagatccaaattccagagggaaatgcgcagatggtgtagcttctcttaaagctaaggaaccatttacattcgaaaaatggcgagaagatacggagttaagctgggagcaatttccagagcaagcatttagcacttcacctgatgaaattaatgaacaatggcataatcaatttcagtttagagaggacgatccagagcacctttctccaggtcttagaaaaccccaactgggtgcacttcatgcaattgcaggctatttcgctactgatttacaggtagaacctgctaccgtcgtactgcccactggaacgggaaaaacggaaacaatgctggcaaccatgatataccagcgatgcgagcgaattttgctcatagttccatctgattctctccgaacacagatatcaaaaaagttcatagatttaggatatttgccagcgctaacagtcgttccacccaacattgcactccctaatgtcgccattattaagaagggaattcaggtagcggaagaagctaagcaattaacttgtgaatcaaatgtcttggttgctacgaccagtgttttgtctgcctgctccgaaacagcattaaatgcactttgcgagtcatgtagccatctttttgttgatgaggctcatcatatctcagcctcatcatggcagacaattcgcgaacgatttaaagacaaacgtgttgtgcagttcacagctaccccctttaggaatgataagaagtcccttggtgggaaaattatctataactacacgatgggggaagcccaacgagcaggctattttacaaatgtaaatttgctgcctgtagaagagtattactctgaccttatggatcatgcaatcgcagatacagctattggtcaactgcgtaaagacttaaataatggccttgatcatttgcttatggcccgtactagcaataagcagcgagcagaagaaatactgactatttatcagaaaactgtaccgaattttaatccaatcgttgttcattctgattatcctaaaacggaaataaaaaaacgtcttgataaattattatcaagacaatcaagaatcgttatttgcgtagacatgttgggagaaggctatgatctacccaacctgaaaattgccgctttgcatgatcatcataagtctcttgcagttactttgcagttcattggccgttttactcgtgtcaataaagcacagaaaatcggtcaagccagtgtaatcatgaatgttgcagaccctaatgttgaaggtgaattacagcatctatattcaacagatgccgattgggataatgtattaaggcgactctctgaaggacgaattgctagagagattagattgcaagaagtcgtggatgccttaaaaaggaaaggtgatttacacgatcagatttcgctctggaatcttgagccaagctgttctgtcatgttatttcaaacatactgtgacaattgggagcctgaaagatacaaggaaaaactgcccagattcgatgaatcctggcatgcaatagcagaagatgagaatttgcttgttgtgctagctatccaggcaacttcagtccggtggggaaactataaagatcttaaagataccaattataaaattctaattgctcattgggatcaagacaggtccgccttgtttatattctcaaatgactataaagcattccgagttgagaatctagtcagtactatttgtgatgataaatttgaagttgtcagtggtgaaaaagtctttaatgtatttaatggtattgaatatcctttggcaagaaatttaggcgcatctcaaattggggcaatcagctttactcaatattttggcccaaatgtcactgaggggctatcactaattgaagcgtctcaatcaagcttaagcaatattgctgcattaggttatgaatccggaaaccgtgtaatctggggatgctcgcaacgcagaggtaaagtctggtcaccacaaaaaggtggcagcattgctgattggtgcaactgggttaagaaagcctgggacaagatctttagttctgaaccggatccaaacaatcttacgcgtaactttttgcgtcctgtcccattacttgaaccctataatgaatatccaatatcagctcaatggggtgagtatttgcttactgcgttcgaagataaagttatttttcattttgatactgtatctgctcatttatatttagtagaggtcaggactgctggaaaatttgaagatggtaatgtgcgactcattttctctacagatgaaacgtcatctgaatataaattatgtctcacgggaagtgctacagcgaaaggttatgcctatcagttgatatctggccctgacgtttttgtacagcgtggtgaatctgaacctgtatcactatcagagtatatggaaattgatccagtaatgattcattactccgatggctcattttcatacaacgctcatatagtccatgtaagccaaaaaattggcctttatgacaaagacgaaattgtagcttttgattggaagggaactgatgttcgagtggaatcaatgggctatactcgtgatccatcatccatccaatggcgttggtacagtgaaattaaagataattacgatgtcattattaatgatgatggtaaaggtgagtcagcagatttagtggggttgagaatagttgatgactgtattgttctctctttaatccattgcaagtattcaggctcagaagaagctggagcaagacttaaagatctttacgaagtatgtgggcaggcgcagagatgcattcgttggaaacacctgaatctttcctatttataccatcacattaagcgtcgcgaggaacagtggcgatcgcgtggtcattctcgctttctgaaaggcactataaaagaccttgctgctatgaaagagcgctccagaatcacacctcttaaattccaagttgttattgttcaaccaggacttagagtaagcaaaattaatgaagaaggccttaagttacttggcagtacggccttatttatcaagaaaacaacgatggcagatttagttgttattggttctaaatag

SEQ ID NO: 215470 - DNA, 1179 bp, Klebsiella pneumoniae
atggtgaaattaagcaatgtctgcgacataaatatcggaaaaacccctagcaggggtaataatagatactggggaaagggtcataaatggttatcaattgctgatatgaaccaaggaaaatggatctccactacaaaagagcagataacagatctagctgtagaggagtctggaatcaaaaaagtcccagctaacactgttttatttagcttcaaattgtcgatagggaaagtttgcttatccgaaaatgaaatttatacaaatgaggccattgcagctcttcctataaaagacaaatcaaaattggatactctctttctaagccatgttatgaaatctttattattttctaacatgacagataatgctgtaatgggggcaactcttaacaaaaaaaaacttgcggaaattcttattcctttacccccaatcgaagaacaaaagcgcatagcggctattcttgataaaacagatggagtacgccaaaaacgcgagcaagctattaagatagctaacgattttctttactccgtatttttggaaatgtttggtgatccggtaatgaaccctaagggttttcaaaccagattattaagtgatttttttattgatgaaaaaaatgggactaaatgcggcccttttggaagcgctttaaaaaaagatgaatatacaaaaataggtgttcccgtatggaatatggacaacattactctaaagggtgactttatcgactctccttcactttggataagtgaagacaaatatgaagaacttaattcatattctgtactagatggcgatgtcattatttccagagcaggtactgttggtaaaatgggcgttgtgagaacgaattcgctaaaatctattattagtacaaatcttattcgggttcgatttggtgaaaaattgtatccagaatacttcgtatcccttatgacctactgcaaaggtagagttggtaacctcaaaactggaccggatggtacatttacccatatgaatactggagtcttgagtgatttaacatttccttatccaccattagagctacagaaaaaatatattcaaattcgtcaagctgttatgcttattattaatcagtataacaactttgactttagaatcgatgaagcgttccgtgccataaaccaaaaagctttcctctgtcaatcatag

SEQ ID NO: 215471 - DNA, 1635 bp, Klebsiella pneumoniae
atgattaccggtgacttaaaaagtaaaatcgacggactatgggaagatttctgggtgggtggtatcacaaatccgctgaccgttatcgaacagatcacctacctgatgtactccaggatgctcgatacccaggaacaacgggacgagaagcgtaagcaaatcgcaggcgttgattttaaaccacgctttgcgcctgagcagcaagagttccgcttcagccactacagcaaccttggctcggacgaaatgatggaagtagtgcgcgacggcgtattccagcatttccgtcagcttgggcaagctgaagatacgaaagtgacgctgctgggcaactttatgaaagatgctcgcctggagattgttaaaccgtcactgctgaccaaagccgtggaggtgatcaaaaacctgccgctggatcgtggcgacaccaaaggcgatctctacgaatacctgttaagcaagctaaccaccgccgggatcaacggtcagttccgcacaccgcgccacattatccgcacaatggttgaaatgatggagccaaacccggcgcgtggtgaaacgatctgcgatccggcctgtggtacaggtggttttctggcaaccagttatgaatacctgctggagaaatacagttcactggagtccattcataccgagattggcacaaacgaacgcggcgaattagaagagcaaaaaatctttaccggcgatctgctgacaccgtggcgtgaccatgtggataacaacatgttccacggctacgactttgacactactatgctgcgtatcgccgctatgaacctgattatgcacggcgtggaagcgccggatatccactatcaggacaccatgagtcagagtttcagtaccaacttcccacaggccagcaaaaatgctttcaacctgatattggcgaacccaccgtttaccggttcactggatgaggaagatatcgacgccacgctgtcggcgatggtgaaaaccaagaaaactgagctgctgttcctggcgcgtattctgcaaatgctgaaagtaggcggacgcagtgccactatcgtgccgcagggcgtgctgtttggctccagtaaggcgcaccaatcactgcgtaaaacgctggtagaagataaccagctggaagcggtgatcaatctgccttccggcgtatttaaaccttacgctggtgtggcgacggcgatcctgatctttaccaaaggtggtcagacggacgaggtctggttctacgatctgcaaaatgatggctacagcctggatgacaaacgtaacccgataaaagacaacgacctgccgcatctgctggcaagctggaagcattaccgtactttacgtggcctaccggttgataactttatgggcgagaaattttcctcgttgctgaagcagcaatactcggaagggattggtgatggtgttgattttaaagatcgtactcaggcggcgtttatagtgccgaaagaggaaattgcagctcagaaatacgatctctctataaaccgttataaagaggtagtgtatcaggctgaggaatatgaagatccgaagataatactaaagcgactgaaagatctggaaaaagaaatcttggcagatctggctgagctggaggggatgctgtga

SEQ ID NO: 215472 - DNA, 3414 bp, Klebsiella pneumoniae
atggagcagtctctcaattttgaaatgttgcgcagccagtggccggaactggcagaactcgcgtgtatggcggaacgatatgttcactccgatccggaaagctgtctggtcaagctacgcaactacaccgaattgatggtacgttggttataccgccaggaacggctgcctgaaggcatcaaagcaaatctgtatgatttaatgaacgccgatgtcttcaccagcatgatgccagaagccatcatcatgaaaatggatgcactgcgtatccatggcaaccgcgccgcacacggtggacgtattaaagctaaagatacctattggctgctcaaggaagcgtatttactgggagtttggctctatgttcgttatgcccatggtaatgttgataactgcccaaaattttctcttcctccgttaacacaatcttcaggtcgtgcagatgaaaaacgtctggaagatgcaatcagggctcaggatgaaagccgtgagcgcgaactggctttacaacgcgcactccagcaagagcaggaaaaagccgaacacctcacccagcgcctgaatgaagccagagctcgcaaccagcatgttgccgacatcctctctattgatgaagcggaaacccgccgccgcctgattgactcccgcctgcttgctgctgactggaatgtaggcgaagaacttaaaaataccgatcaggttacgcaggagcatcttgttaaagaacagcctactgcaactggcgacggttatgcggattatgtcttgtgggatgaagcgcataaaccgctggcggtggtggaagcaaaaaaaaccagcatcaatgccgagcaaggacgaattcaggctcggctatatgcagactggctggaaaaagaatacggtcaacgcccagtcattttctacaccaacggctacgatatctggctgtgggacgaccataaaactcatggttatccgccacgtcgagtatttggtttctacagtaaggaaagcctgcaatatcttattcagcagcgtgaaacccgtctgccgctgaacagtgtgccgcacgttaaagataacgaaggtaaggccgttgctggacgtttgtaccagcttgaaaccattgcccgcgtcagcgaacggtttaccaataaatatcgtcagtcattaatcgttcaggctaccggtacaggcaaaacccgcgtggcaattgcgctaagcaaactgatgattgatgcccgttgggtaaaacgcgttctgttcctttgcgaccgtaaagagctgcgcaaacaggcggcgaatgccttcaatcaattcaccaatgagccgctgtatgtggtcgggaaatcgaaaaaagcagacaggcagaacgctaggatctacattgccacttatcccggcatgatgaaaatcatggaccattttgatatcggttatttcgatctgatcatcgccgatgaatcccaccgctctatctacaacgtctacggcgacctgtttaagtattttgatgcgctccagattggcctgacggccacgccgatcgacatggtgagtaaaaccactttcggcctgtttggttgtgaaggacgtatccctaccgccaactacagcctggaagatgccatcgccgataacaatctggttccctatgaggttgttacgcacaccacggaattcctgcgcgaaggcatcaaacaggagaagttaagcgacgcacaaatccgcgaactggaagaacagggtatcgatcccaatacgctggaatttgatggtaaggcgctggatgaggcaatttataacaaagacaccaaccgctatattctgcgtaatctgatggaaaatggcctgaaagatcgggacggccagcttcccggtaaaaccattatttttgcccgtaaccacaaacacgcgctgttgttaaatgaattgttcgacgacatgtacccgcaatttgcaggacgcttctgtcaggtcatcgacaactacgatccccgcgccgagcaactgattgacgattttaaagggctggatgaaagcaccaacaaagagctgaccatcgctatctccgttgacatgctcgataccggtattgatgtcccggagattgtgaatctggtctttgccaaaccggtcaaatcaaaagtgaagttctggcagatgattggccgtggtacgcgcctctgttcggggctgtacggcaacgatgacaacggcaaaccactagacaaacagaaattccgcatcttcgatcactggggcaattttgagtatcacgagctacataccgaagaggccgaagtcacagcgacaaaatcgctggcgcaaaaacgcttcgaggcatggatcacgctcgggaccgctgctcagcgtaagttcgacaaacaggcggtggatttagtcgctcaccagctccgcgagcagatcaacgcactggatgaaaagtcgattgccgtgcaggagaagtggcagcaaaaagcgcagtacagtgatgaaaaagtgctgcgccagctttccccgaaaacgcagcaggatttactatctgtcctggccccgctgatgcagtggctggacgtgcgcgggcaaagcgatgccatgcgctttgatatggatattctggcggcgcaaactgcccgttataccaacccggaagaattggatgtgctctggccggtcatcctggagaaagtggaacgtctgccgccgcatctggcacaagttcagcagcagggacaacggattaatcagcttcgtgatttgggctggtggaagcaggccagtctggaagagctggaggatatccgcattcacctgcgcggcattatgcacctgatggagaaagatgctacgccgaaatttggttcgatacaggtggatattaccgaagatgcgaacctgatccagacggaaacccgtaaaaccaatatccgctcgattgatttcaaactctatcgacagcaggttcagggagcgctggggccgctgttccagcaaaacccggtgctgaagaaaatccgcaacggcgagccggtcacgcaagccgagctggatgaactggcgaagctggtgctgatccagaatccgaacgttgatatccgggcactgaaagagttctatccgcaggcaacagctagcctggataaacttttgcgtaccatcatcgggatggacagcgacgcagtggaagtgcgctttgcccagttcgccgcagacaacagcctgaccagccagcagctgcgcttcctgtcattgctgaaaaaccacatccgcgattacggcaccattgaaatgcggcagctctttgaacagccatttacgcatatccacaacgaaggcgttaccggcgtgttccccgacatagagcagatcgcccggttgcaaaagatagtcgaagagttgggtattgtgaccgacgcggcgacggtataa

SEQ ID NO: 215473 - DNA, 600 bp, Klebsiella pneumoniae
atgaataatagtcaccaatataacccatcatggaatccaaactggtttctttcagtaattttggataatcatatcgatgcaatggtagccagatattcttgtttactaacattacgcctagacttcttttataaaaaaaatgccccccactacttacatcaagatcatcatgcacttgagcgtgacctgcgattattgatgaataaaatgatgcaaaaagctgcagttgtgggctatttctgggtcattgaatggactgtagaccatggcttccatgcacatgcagcatactggctggatggacatcaaacgcaaagatcctatccttttgcgctgcaggcgggagaactctggaaggaattaacccaacaggagggctattttaatatctgccaatttaaagagccttataaagccgatatcaatattcccgtgcgttacaatgagcccaccagtattctaaatattcgtcgagtattgagctatctgacaaaagaggagcaaaaagaggggctctgttcatacggatgcaatgaagtcccacaacgtccaatgtcagggaggcctcgtaaagcgatggacactatttctgaaaattag

SEQ ID NO: 215474 - DNA, 243 bp, Klebsiella pneumoniae
atgaccagccaaacgaccttgccattaactaaaaccctggattcaaaatcggtattgaacgatcagctcgtcgacatggcatttatcactgcctacaccaatatgaccgacaaatggttctatagattaatttctgaaaatgcgttcccagcaccaattaaacttggccgaagttctcgttggctaaaaagtgaagtcgaagcctggatgacagaacggattaaaaattcaagaggacagtaa

SEQ ID NO: 215475 - DNA, 1089 bp, Klebsiella pneumoniae
atgaataagaatgataaagatagtcatttagatgcttttgggaaattattctctaatgaattatcacagaaggaaatggtttcgattgagcggtcacccacttctgccaatcctgaaaataaccaggaaggctctttcttgcaggcatcagaggtaaagcaacttcctggcgatgatagtaagcacgagtgcgcagatgtcgatctttctcctgctactctggtgtccgaaataaatcaaactgaccctgcgatagaacgtgtgatgcggcaggtattggctcaggaagatactacccctaaaaagcaagtcttaaatggaggtgaagacccctaccttcgtgatgttgattttaggtggttaaaaggagatgccaatgagcgagccattttctggttttggatatatatccgcactgcatcaaatagccgtctcaatttgccagaattaaagttgcaaaatggctgggattcagaggatcattgtttatattctttttttagacttccggataatcccgtcagctccgctgaaaggagtcggttaattattaccttcttcaataaactctcgggtttcttcaatcctatccaaattaaagagtcattcgaacatattcgtagtatctggcttcacttgattagccctgttcgacaatttaaatggttaaagaaaaaagactctgagggtattgaatgggcgtgggattatttattaaaaaggaaggatgttaatgataacatccttttttggtttaagcccgcagatgcaaatgagaaatatattgcgatcatgggggcaattgattgctgggttatacgggggaataaaattgattgtcaggataaaaaattacttctggataatatgaaaaaagcgtttcagcagcgcgggcgacgagataaaaagaaaagcttcaatcttaatactgagatttctataaaaacccgtagagagctcaaagagctggttaaattgcatggtgttaatataaataaatttattgaaaggctgattgatgatgaatatgggaaatataaaggcaaccctaatgaatataaaatatctttattaaagaaaaaacaataa

SEQ ID NO: 215476 - DNA, 891 bp, Klebsiella pneumoniae
atgtcccaagcccccgaatcgcaggataccagtgatatcatgcgtacctgcctaaatttcttaccccaacaaacgactgaacgtattatttcccgtctgcaacaggcaattcactacgagcccgtaattggcattatgggcaaaagcggggcgggtaagagctcgctttgcaacgccctgtttcaacaaccggtatgcctgaccagcgatttgctgggctgtacccgtgaacctcagcggatagtgctcaccgtgggcgagcgcagcatgacactggtggatttgcctggagttggcgagacaccggaatacgatgcggaatattcggcgctgtatcagaagttgctgacggagctggatttgattatctgggtcctgcgtgctgatgatcgtgcgcgggcggtggatattgtcacgcaccggtcactacttgcttatggcgcggatgcttcccgtttcctgtttgtcatcagccaggcagatcgcattcctccgttgccagaacctgccggtcaggctgttccttcaactgagcagtgcctttcacttgcggttatcagttcgcagattgctggtcagttgccgtcctctttcccggtgatggctgtttcagcacataccggctacaacctgcatgctctggtggaactgatgatacacgcgttacctgtacaggccagtagcgctttttattgccagttaaagccagaaaatcatacggaggagagtgatgtcgctgtacgtcagcgttttggtgaaatagccggttcggcttttgatacggtgatcacttctgagcgtctgccttctggctggagcttgttgctgaggaggctgcgggaaaaactggtacagcttgcatcggaattatgggagaggatttttggctga

SEQ ID NO: 215477 - DNA, 690 bp, Klebsiella pneumoniae
atgaaaaccagaacaataattgctctttttctctccgccgcctctgtctctgcgcaagcaggcaactggatggtgaaaaacggatggtgccagaccatgacggaagacggtcaggcgctggttatgctgaaaaaagacactattggtatcttcggccagttgcagggttgccccaacggtcagcaggaactgatgggaagccgtatcagtattaacgggaatttgatccccacctctcagatgtgtaatcaacagacaggctataaagctgttgaaatcgaaggcggtcaggcacccgccgcagccaggaaagccattgaatcaattgccgctcaggataattccagcgtgcaggtctttggcacacaaatgaaatttacccgtggtgatatgctccaggtttgtccgaaatatgtcaacgctcttacagacgcatcagcagatgccaccgggaacaagccgctgaaagtcaacaaaggttcggtaatgaaagcggccagacaggcgtacacgaaagaatatgaccgtgaaacggcagacgccgctgattttggcagctatgaagtgaagggaaatacggtggtatatgaagtctacaatgccgcttaccgcacctacgataaaatcgttgttactgtaggatctgatggtaacgccaccgatgcaaaggtggagtacatggggcaataa

SEQ ID NO: 215478 - DNA, 447 bp, Klebsiella pneumoniae
atgaatactgcaatcactgacgtcaccttatcgtcagacactattttcgccacgcctgtcgcagatgaacagcgccccggtttctggtcgcagcattttgccgctattccacagtggatattactggagccacgcatcttcgcctggatggaccgtttctgcgcgaattacagcgaaggtatctggaatttttacacgctcagcaacggcggggcctttatggtgccggacactgaccgcgatgcgcaatggcaactctttaacagcatgaattgcaatgatgcgcaaatgagtgcagaggccgccggaattaccgtctgccttatcgagtacagtcatcacgcctgccgtaccgggtgcgatgccatgacagcgcacttttatcgtctgcgtgagtatgctctgcaccatcaggaatgctccgccatcatgcgcattattgactga

SEQ ID NO: 215479 - DNA, 477 bp, Klebsiella pneumoniae; identical to SEQ ID NO: 102362

SEQ ID NO: 215480 - DNA, 327 bp, Klebsiella pneumoniae
atgccactgactgatgccatacagtggggattaaagcgaagtttcacaccgaattttggggcaaggctggtacaggaaggcaaccgactgcactacctggctgaccgggccaatatcaccggtaaatttggtgacgccgaatgtctgaagctggaagaagcattcccgcattttatccgccagatggaactgatgctgagcactggcgaacttaatccccgtcatgcgcacagcgtcactctctaccacaacgctttcacctgtgaagccgatactctcggtagttgtggttacgtctacatcgttatttatcccactcaacgttaa

SEQ ID NO: 215481 - DNA, 342 bp, Klebsiella pneumoniae
atgaaaaccttacctgcaacaattcagcgggcggctaagccgtgcccgtctcccgtgacggtctggcagatgctgcttacccgtctgctggagcaacattatggccttaccctgaatgacacgccgttcagcgatgaaaccgttattcaggaacatatcaacgcaggcatcacactggttgatgccgttaattttctggtggaaaagtacgaactggtacgtatcgatcgcagagggtttaactgtcaggaacagtcaccttatctgggcgcagtggatattttgcgggcgcggcaggcaaccggcctgttacggcaaagacatcttccttcgatacgctga

SEQ ID NO: 215482 - DNA, 885 bp, Klebsiella pneumoniae
atgcgcctgccattcccggcgggcgtgtttgctttttacggacaaaataccatgcaaacagaagctgaaattttaaccgatcataatgagctgatttgctccaccagtattgaacgcatcgtcacaggacgtaatgctgcgttgaaacagattgaggcgctgatttgtcagctagatgacgtttcccgacttacttcagaaattggcggcgacatagcgagtcattgggcgatgcggcagggccatgctttcgactgctggctggtgcaacctgtagataaagcgatgcctgtcatcacccgcaatatcgaccgcagcatctggcgcgatctgatgctgaagtccgggatgttaacgttgatggatgctgaagcccgcagtcagtgggcgaagaacctggaggagggcgatcttccggccatcagtgaagccaatatcctgagtacctttgagcagttgcaccataacaagcaggacgtttttgagcgcgggataattaatttattcaagggattgagctgggactacaaaaccaataatccttgttacttcggcaagaagattatcgtcaacaatctggtgaagcatgacagatggggctacagcttgaactggggctggcgacgcgatcagctcgccgatctggagaggatgctgtacctacttgacgggaagaccattcccgataaccggcatgatatctctatccggtttatggactttgtgcgcgacaacccgcatcagcaggtcttcgaggatgagctgttcaccattcgctactttcagaagggcagcgggcatatcacgtttaatcgtctggatctggtggagaagatgaatgacattgtggcgaagtactatccagggatgttgcctgccaaatga

SEQ ID NO: 215483 - DNA, 894 bp, Klebsiella pneumoniae
atggagcatactacatttcataaaaacctaaattttaacaagctgatcatcctcgattgcctgcctgaaaatgattatcaaacagcaaggcaccttcatgaaaatctaagcgacaaagggtttggaagtggaatttctttgcttaaggttcaagatgaaaatacatttcgagaagtattgcaagagataagggagatgttcaatcctgaattaaatgttagctttcaaccaattattcacattgaagctcatggtaattcacggtcaatggagttgccagataaaagtattattccctggaatgatcttgcttataatctcagaataattaataaacttatgggcaatcaacttatcacgtttattggaacctgtcatggctatcactttatctataaaaatcacacaattaaagaattcgcaccagtttatttttgcatagcacctctagaagaaattcccgcttgtgatattgaacattcagcacttactttctatgaaaacttatttttaacaggagatttaacacgttccgctaaccttttggattcaacaaaactttacacttacaattctgattatatgtttcatcgagcttttcatgaagccatgcaaaaaaatcatagagggaaagccttaaggatcagaagagaagccttaatcactgaagcaattgagattatgggtaaagattggaaaaaaatgagtccaaaagataaacgtgattatctcaagaaagcacgagaattactggatgtttctttgaaaagtaaggaatcgctcagagcagagtttgaaaaattttcaatcggttacatgggttatatagatggggatgttttcgaagaaatttggaaacatatgaaccataacaaacaagggaaaatatattga

SEQ ID NO: 215484 - DNA, 273 bp, Klebsiella pneumoniae
atgaacacgtcaccgtggaacaaagaccttaccctcggccaaaaaagactacttcagatatctcatatctgggggatccgaatccggcttgagctagaaggtaaaacgcgcgatttaactctattcaatatggtcctggacagtaagctacgaggctgtgatctggtcaaactcaaagtatctgatgttgcatatagtagctctgtttcaagcagagctactatatgcaataaaaaactggtagccctgtgcaatttgatcctacccgcctaa

SEQ ID NO: 215485 - DNA, 693 bp, Klebsiella pneumoniae
atggctattcggaaaagtatcccaaacgaaaccaaattgcggctgttttcggcgtcggcaggtcattgtcagaaacctgactgtcttaagccgcttttcccagcagagataggcggtgataagcatattgctgaaatggcacatgtcattcctcatggtgatactgggccccgccacgaagagagacctgctgaggagtttgaagcagactcatttgaaaacctcatactgctatgtccgacttgccacaccattatcgataaagcgcctgagtcatttccaagaagcatgattttagagtggaagaacaaccatcttgcagccttagcgcacaagcaaggtaatgttcgttatgaagatagaagacaagcgagagaggctgtcgtagcagctatggatgaaagtaaggctatatggaaagagttcgctcctgtggaaggggcaaggtctgacttcaatcctgagtctgaaacggcccaaatatggtcgcaaaggatgaaaagtgtcattttacctaatcacttccgcattcaggcgatcataagtacgaatttatgccatctgacagctgaagagcgggaaacctttgcacaatacaaagaacatgttcgcgggcttactgagcgccatgtttgtggtgtttctggaagggccattcgttaccctcaagatatggataggatatttgcatga

SEQ ID NO: 215486 - DNA, 645 bp, Klebsiella pneumoniae
atgaactggcaagttaaatatgcacttgaaaatataaataaccactttaaaagaacaggttatgcagaacatgttgctgacgatgctatcagaatttctatccgcgacagacctgacacattagttattatttccgcatcatatgagatcactcttgagatagctaagcagtatcatgaaaaattccctgatttggatttcctctgtggttacaggaaagagtgtgtgtggacaggtgaggctatcaactacttaagtaacgcaaaagtaggatggggtaatgcaggtaccttatattctgccctttcagacaataatgttaatattgcttctcacaaagattattttttctcatatcggcttataactcaaatgggagttgtaaaaagcatagagcgggaatttgatcgcgtatttaatattcatttagccaatggtcgcaagctgagggtgggaatgctacttgaatacgagcctacagctgatgccgtgcgctcattttgggaaaagtttggtccggttgatgtcatttggaatattaatcctaacggggatcctactaataatgccgttgtagcagggcgtgaacttggttgcggagtcatgaaatggtcagaattcaaggaattaattcttcgtcgttga

SEQ ID NO: 215487 - DNA, 336 bp, Klebsiella pneumoniae
atggtcagaattcaaggaattaattcttcgtcgttgatgtcggtaaacgatgtggcacgccaccttttaaatacgtgcaagacattgaagttttttgaatgttttatgtttggttcgtcgctttttggggttggcactgattacgatattttggttataggccctgcaggggaagcattaatccaactcaaagcagagctgaagattgcaggagctgaattgccgctggatattttatacatgcttccaaaagaggcggaagaaaccgattttgttgtaaagcaaaaatgtgtatctcttagccatttagtgactctggattcactggttgtgtaa

SEQ ID NO: 215488 - DNA, 504 bp, Klebsiella pneumoniae
gtgacagaatttcttgaaaaaatgtttgatcgtgtatattcggagaaagacttcagcattaacatcgcaatatttttctccggaatcgcaggagttatctgttatcttattcttcgcgattatgtactgacgctgttttcttttgttattatttttccggttgtaaagattattgcggggggattatatctgcgaattattacccgcaatggtgaggcagttgcagaaaaacgactggcaacactttataattctctgactggaagagaaaaagaagtagtaatgcactttgtgacgcatggtggttctgttatgacatggggacaaatgaataggcttgatgatcctgaaccgggtgtagaatctctggcccgtcgtggattactgaatacgtccgttacgatggatggtatgcgagaaacttttgaactagatctgaccctctttaattatgcatataagtatcactctcatcaggagaagatgcttacttcagaagaataa

SEQ ID NO: 215489 - DNA, 282 bp, Klebsiella pneumoniae
ttggaggagatcgccatacgcaaagcccgattcaccgaacaccagatcatcgccgttctgaagtccgtcgaagccggacgcaccgtcaaagatgtgtgccgcgaagccgggatttctgaggcctcgtactacaactggaaagcgaagttcggcggtatggaagcctctgatatcaaaaagatgaaggacctcgaagatgaaaaccgccggttgaaacagatgtttgcggacctgagcctcgagtgccgcgcattgaaagacgttattgaaaaaaagctttaa

SEQ ID NO: 215490 - DNA, 543 bp, Klebsiella pneumoniae
gtgcgcaatccggctccgctggcaacgccagaggcgatgaaccagagctggtccatcgattttatgcacgatgcgctggtgtgcggcagacgtttcagaaccttcaacgtggtggatggttataaccgggaagcgctggcgatcgaaattgacctgaatatcccggcgcagcgggttgtcagagtgctgggcaggatcgtggcaaaccgcggatatccgctgaagatgcggatggataacggtccggagctggtcttgctgacgctggcacaatgggcagaagagcatggtgtgatgctggagtttatcaggcccggcaagccaacgcagaatgcctttatcgaacggttcaaccggacatacagaacagaaatactggatttttatctgttcagaacactgaatgaagcacgggaaattacagagcgctggctggctgaatataacggcgagcgcccccacgaatccctgaataacctgacgccggaagaataccggctgatggctgaaaccccggaaatctcaaaaagtgcgtggaactaa

SEQ ID NO: 215491 - DNA, 1488 bp, Klebsiella pneumoniae
atgagcttacctgaggaaaaaatagctaaacgagcactgaaagccattgaatttatttgtcgacagctctcgcgctttgcaaaaatgacacccgttgagcttatggcttacttacgaaagaatcccaaagatgccttttgtaatattccccatccgaaaggaaatggacatatccattgtggttctcttgcctggaacaagctgaatgagcttgtagacctcactatcgaattggatcacggtcttgggcgacgagtaggccgcaaactcgcaaaggaagccgtaataaatgcttttgttaaaagagtattacaggaggcacgtggagttgatcaggaaaccgcaatgctgcttcttaaagacgctttaacgattttgagagaaaagcttgtagttatcgaacactacctaccgtgtgtgcttttccctggggatacacctactgaattcagcgttggtcctgtcacattcgtccgtcgctccaagttcttcgatgataaaaaatcagtactaaaacatagtattcatgttaacacgaaggcgcatattcagtgcgtaaaggaagcgattgctcaaggtttcccacaagaacgcacgcacactaaagatgaatcaagacaactagtgcgtaaattacagtcccgagcagtcaaagcctacaaagactatccatggattgcttgtgtgaaagtgagtgattgtgatgaagcaatctctaaagaacgagcgctccaagctacagagatggcgcttcacatcatccgtatcctcttgggagctaaaccgacaagggaaattaggctagcatggtcacgcagcggagctctgcgctcggcacatttgcacgctgatgtacatggtgtgattcacgcaagtctctgcgctgattctttagaaccggttggtgtaataaactggcatgaagcattgataagggcaaatttagaattagacatcctcggttctgctttgatatccatagtcaatccagtagaaactactcaccttcaccagcgccttattgacgctatcaattggtttggggacgcggttacagattcaaatgtacattcgagtatcgtaaaatacgtatctgcaattgagcggttgttcttcggtaaattcgaagcagggcgtacaaaattgtttgccggtcgggttagggatgtgttgaaagctttcaattgtgatgaagagcatcatgtttacactaaagctctagaactatacaaaactcgttcggctttagtacatggtgaacaatttcgcactgaagatgaatcctttaacagtattaatattgcatcagaattaagtaggatgtgccttctatgctctgcacagctttactccatgatgctacaagcattcgaaaatcctaataatgcaaaattagaagaaatcatgaagcgcataaacgatgaagggttgaattggctggcagaggctgcagcattaggctgtgcaaaacactctccaatcagataa

SEQ ID NO: 215492 - DNA, 459 bp, Klebsiella pneumoniae
atgcccgaacatgcgccaccaggccccgtgcgtcgccccggactgctcggctggatagcattacttcccggcgtgctggtcggcttttgcctcggcgcgtggatgctggcgataacgctggagtggctgggcgaggcgtttttctggcggaacacctgtgccagtcacagtgagcaggtattgcaggtgacatggcagtggtggaaaagctctgctggcgcaccgatgtggttagtagaagacctcgcgattgtcagcgatacgttgcagcaagggattgcggcgctggttcattcgctcaacgggcaaagcgggttgttctggacggaaaccatcactacggtgatccgctgtgcgttactgtctgcgagtaagttacccttacctttctgctgcgctggctattttattgcaggcgctaccacagtttgtgctgatcattgttatagggctgattga

SEQ ID NO: 215493 - DNA, 267 bp, Klebsiella pneumoniae
atgataccccggacacaccgccagctcgtgagcgttgaagtgatgtggcctgcacaaacactgcctcttcccctgcaacaggcggtggaagcgctgacgcagggagaaacgcccgaccagattatcgctcgcatgaatttgcagggctttcaggcatggcgcgaagctacatcgccgcaaggcgaacacgacatttttcagatacgactggatgaggcacacgaggcacggttcctctgccgctacattactctgccgctgcactga

SEQ ID NO: 215494 - DNA, 1224 bp, Klebsiella pneumoniae
gtggcactgggccagcgcccggactacgcccgtatcgcccgccacgttatcaacatcgacgaactatttatcgactacgcccgcgtctttttgaccagccacgaccgccaggcatgggacaacgtggtacggattgccggtggcatcactgagaaaaacacgccacgtaatcttcagggaagggacagctacgtcgtcgcgctggagcagtacctttcaaccacccgattacacgacacgatcctcgacggtctacgtactgccgtgcgctatgacaaaacctatttcgataagatcgtcgcctcgctgctgccactgctgggaaaactgaccaccagaaaaatctcccaactgctggccccggactacggcgaccttaacgacccgcgcccggtatttaactggcagcaggcgattatttatgtcgggctggatgcattgtctgacgcagaaattgccgccgctgtcggcaactcaatgttcgccgatttggtcagcgtcgccggacatatctacaagcacggcgtgatggatggcctgccgcagacggaagagaacccggccatcaacctgcactgcgatgagttcagtgaactgatgggcgatgaatttattccgctaataaataaaggcggcggcgcaggtgtagaggttacggcctacacccagacgctctccgatatcgaagcccgcatcggcgaccgcgccaaagcggaccaggtcgtcggcaacttcaacaatcggatcatgatgcgggtgcgggaatctgccaccgtcgaattgttgacgaagcaactgccgcaggtggatgtgctcagcaacagcatcagttccggcgttgccgacagcgccgacgcacagggcaacatcggtttttccagcaacacccaggatcggatgagcagcatacaggtgccgttactggaacccgcctcactggtacagcttcccaaagggcaggcgttcgctctgctggaaggtggtcagctctggaagctacgcatcccattaccggacgcagcacacgatccgctgatgccggaaagcatcacacacatagcccactatatggaaaaacagtacgacagcacgcccatatggtgggaccgcccggagacagttgtaacggcgaaaaatgaccctattttatggctgaatgacagcgaaaccacggagaaacagaccgatgataccccggacacaccgccagctcgtgagcgttga

SEQ ID NO: 215495 - DNA, 264 bp, Klebsiella pneumoniae
atgatgaataagaagttctggatcagatgggtgagtatcgcgctgatctgtgcagcgtattacgctatcgtgctttatttcgatctggtcttcgctcttaactttacagagacaatgagtcaaggcggagaatttaccccttctcaatgtacctggtttgttaaggagctagcgcaaaatcactctgattcggctttagcctccatcattggtttcgctgtctgcgtccctttgatcctgctcatcttcaagaaagtgaaatga

SEQ ID NO: 215496 - DNA, 1128 bp, Klebsiella pneumoniae
atggctattggtcattttttatttaggggtgataagaccgcttgcggtggcaggattcttgaaggatgccccaaccatcaatttttcgataaagatatggcatgtgaaggccataaagtaacctgcggcaaacatccagggcattatcgtatctgcggtggccttgatagtgacgaaatacatggtaaaagagtagccggaacactgcacagccgtagttcctgtccctgcaaatcacgttttattccttccatcgatgacacttatgaattttctacaggggcagcgaaagccgacacagcccaatctcaagtcgtcgaatttcccgttctcccccgcccgatttatgatccccaagctgataatgtgactgacacctgcaagtcagaagataacccgctgctgaacggcgtttatatatggactgaaacgacaagtgcaggtcatgttttcgtttcagtgcatgagaataacaatatcttcctctacacctatggacgctatggacgcactgataaaagtaccttcactggggatgggattttagactttttccaggatgaagatgcgcgtaagtattaccgatacgaactttatgaaatgggggctcgcgctttccgcattgatgatgcagatcctaaaataatccgtaaattcttcgaaaacctttggaatggcggagtaacaccaattcaaacgccaaacatgcaagatggtacaaagcgaagaggccgaaccattgataaatatgatgtcactggtagcaactgtaccactcactcagtcgaggggctcaagtttgctggctcaaaggtattcgaacacggttacacatccacgacaacacagctaccaatcgacatagaagaagattttactattccggtttcactgcaaagatatcttgaatcaaagagtgcagacttctcatcaatcctcgttgtcgaaatgactaatacattcaaacagcagtaccctaacaccgagaacaaaagccctcaatcaatgggagggagtgcaaaaatccaacaatctgctgccgattccgctgctgttgctggctcaacttccccctactcaggcggtacagtaggcggttcattgggaagcacttacgatgatgaataa

SEQ ID NO: 215497 - DNA, 267 bp, Klebsiella pneumoniae
atgaaaaagacccgctataccgaagaacagattgcgtttgctctgaaacaggccgaaaccggcacccgcgacggggaagtctgccgaaagatgggcatttctgaagccactttttataactggaagaagaaattcgccggtctgggcgtgaccgaactgcggcgtctgcggcaactggaggatgaaaatctgcggctgaagaaactggtggctgacctgagtctggacaaggagatgctgcaggaggtactgaaacaaaagttctga

SEQ ID NO: 215498 - DNA, 348 bp, Klebsiella pneumoniae
gtgatggaaaggttgcgggtgctgggcaagcgtctgccggtacgtattcagacagataacggcagcgagtttattttgaaaagtctggataaatgggcgtatgaacacggtgtcacaatggacttatcccgccccggaaaaccaacggataatccgtttattgaatcatttaacggcagtctgcgggatgaatgcctgaacattcactggtttctctcgctggaagatgcgcaggacaaactcgacaactggcgcagggaatataatcatgagagaacgcattcatcattaaatgacatgactccggctgaattcatccgaagtctccggaaagacgaagatctctga

SEQ ID NO: 215499 - DNA, 2223 bp, Klebsiella pneumoniae
atgaagaaaattcttataatgacgccggacattgaggggcctgtccgtaacggcggtattggtactgctttcactgcccttgccactactttggcaaaaaaggggtatgatgttgatgtattgtatacatgtggcgactattctgaatcatctgtatcgaaatttagcgactggtcacgtatttatagtacctttggtatcaatctgctaagaaccggactgataaaagagattaatattgatgcaccgtattttagaaggaaaagttattcaatttatctctggttgaaagaaaataacatctatgacactgttatttcttgtgagtggcaggcagatctttattacactttattaagcaaaaagaatggaacggattttgaaaatacaaagttcattgtaaatactcacagttcaacgttatgggctgatgaaggtaattaccagcttccatatgatcagaaccatcttgaactctattatatggagaaaatggtggttgaaatggcggatgaagttgttagtccgtctcagtatttaattgattggatgttgagtaagcactggaatgttcctgaagaacgtcatgtaattttaaattgcgagccatttcaagggtttgtgacgagagatgatgttacagttaaaataaatgaaaagccagcttctggcgttgagcttgtatttttcggccgccttgaaacccgtaaaggacttgacatattcctgcgtgcattaagaaaactatctgatgaagataaagagagcatttctggagtaaccttcctcggaaaaaatgtcactatggggaaaactgattcatttacttatattatgaatcagactaaaaatttgggactcgcagttaatgtcatcagcgactatgatcgtaccaacgctaatgaatatataaaaagaaaaaatgtattagtcatcattccatcacttgtagaaaactcaccctatactgtttatgaatgcttgattaataacgttaatttcctcgcttcaaacgttggtggaattccagagcttattccgcaggagcatcatgcggaagttctatttattcctacacctgtcgatttatacgggaaaatccactatcgcttaaaaaatataaatataaaaccagggcttgctgaatcacaagacaatattaaagaagcttggtttgtcgcagttgaacgaaaaaacaaccgcgcattcaagaaaatcaatgaagctaacagcccgttagttagcgtgtgtataactcacttcgaacgtcaccatttgcttcagcaagcactcgcatcaataaaatctcagacgtaccaaaatattgaggtcatcttggttgatgatggaagtacgacagaagattctcatcgttatttaaatctcatcgagaatgattttaactctcgaggctggaaaattgtccgtagttctaataactatctgggtgctgcaaggaatttggctgcgcgacacgcctctggcgaatatctgatgtttatggacgatgataatgttgctaagccttttgaggtagaaacgtttgttactgcagcattaaactctggggccgatgtgttaaccacaccaagcgatcttatttttggtgaggagttcccttctccgttccgtaaaatgacgcactgctggcttccgttagggcctgatttaaatatcgccagctttagtaactgctttggcgatgctaatgcgctgatcagaaaagaggttttcgaaaaagttggcggatttactgaagattacggtttaggtcatgaagactgggagttttttgccaaaatatcattacagggatataaattgcaaatcgtcccggaacctctattttggtatagagttgcaaactccggcatgttgttaagtggaaataagagtaaaaataactaccgcagtttccgtccttttatggatgagaatgttaaatataactatgcaatggggttgataccttcctacctcgagaagattcaagaacttgagagtgaagtgaatcgcttgcggagcatcaatagtggtcattctgtcagtaacgagttacaacttttaaataataaggttgatggtcttatttctcagcaaagagatggctgggcccatgaccgttttaatgctctgtatgaagcaattcatgtccaaggcgcaaaacgaggcaccagcctggttcgccgggttgcccggaaagtgaaatcaatgttaaaataa

SEQ ID NO: 215500 - DNA, 810 bp, Klebsiella pneumoniae
atgaccaatatgaagttaaaatttgatttgcttctaaaatcttatcatctatctcatcgatttgtctataaggcaaaccctggtaatgctggtgatggtgtaattgcatctgcgacgtatgacttttttgaacgaaatgctcttacctatatcccttacagagatggcgagtgctacagttctgaaactgatattttaatttttggaggcggaggaaacctgatagaaggattgtattctgaaggtcatgactttatccagaataatattgggaaatttcataaagtaataataatgccgtcgacaatcagagggtatagcgatttattcatcaacaatattgataagtttgttgttttttgtcgcgaaaatatcaccttcgattatattaaatctctcaactacgaaccaaacaagaacgtattcattactgatgatatggcattttatctcgatcttaataaatacctgtcacttaaacccgtctataaaaaacaggccaactgcttcagaacggactccgaatctctaactggagactacaaagaaaacaatcatgatatttcgctcacctggaatggcgattattgggataatgaatttctggcgcgtaattctacccgttgcatgataaactttcttgaagagtataaagttgtcaataccgacaggctgcatgtggcaattttagcatctctgcttggcaaagaagtcaacttctatcctaactcatattacaaaaatgaagctgtttacaattattcactttttaatcgttatccaaaaacatgctttattacggctagttga

SEQ ID NO: 215501 - DNA, 243 bp, Klebsiella pneumoniae; identical to SEQ ID NO: 209014

SEQ ID NO: 215502 - DNA, 639 bp, Klebsiella pneumoniae
atgaaaaaactaccggaccatttatccagggaatgcatcatcgccgccattcgcgcttacgatgcaggcgttgcgcatcagtttaaaagcgcgcgtctgtatgagatcgagtttgaggggcgtcggtatccttcaaaagccatcgtcgggttagcggccacgcttgcgacaggcacggaatttaccccggcggatttcagcggagggattaaatccaaatgcgtgcgtctgttactggatcaaggatttacgatcgcgtcgcagggcgctggcgatgacgaggttgcgcttttccccgatgagggacagacgactatggagttcgtggaaggggcggcgatgcaggtggtggtcaatcgctatgagcgcgaccgtcaggctcgtcaggcggcgcttcgcctgtatggctgccggtgtcaggtatgcggtctggatatggccagccgctatggcgaaatcggccagggctttatccatatccaccatctcattccgctggccgggatcaagcaggactaccgtctgaaccctgaaaccgatctgatcccggtatgtcccaattgccatgcaatgctgcaccggcgagatccgccgtttactcccgaagagctgaaggcccggctgcgccccgcagactga

SEQ ID NO: 215503 - DNA, 615 bp, Klebsiella pneumoniae; identical to SEQ ID NO: 136980

SEQ ID NO: 215504 - DNA, 633 bp, Klebsiella pneumoniae
atgaaaaaagtcattctggcgagcctgctggcaaccatgatgagtacctctccggtatgggcaacagatagcgcgacggcagcgccagccgcggcagccacgacgcaggtacagaaagaagccgccgatgtgctgcaggtggcggtgcagggcgcgaatgcgatgcgcgacatccagttcgcccgtctggcgctgttccatggccagccggatagcgccaaaaaactgacagacgacgccgccgcgctgctggctgccgatgatgccagctgggcgaagtttgtgaaaactgatgctaaagccaaaatgatcgccgatcgctatgtgatcattaacgcctctatcgccctgtctgaagactatgtggccacgccggaaaaagagagcgctatccaatccgccaacgaaaagctggcgaaaggcgatcagaaaggggctatcgataccctgcgtctggccggtattggcgtgattgagaaccagtatctgatgccgcttaaccagacccgtaaggcggtagcgcaggcgcaagaactgctgaaagccggtaaatattacgaagcgaatctggtgctgaagggcgctgaagagggcattgtggtggatagcgagatgctggtggcaggcaactga

SEQ ID NO: 215505 - DNA, 576 bp, Klebsiella pneumoniae
atgtttatgtttagccattacaccttaaatgcgtttagcccacgcgtcttcattcgatataaacggcatgcctgcctgatggcggtattgctgtttatctgcggagcctgttgtctggcctggccgttggtcgccggctggtatctcgccacagtaaccggcatgttattgatgatctgcggcttctattcgctgtacagcctgattgtcttccgccagcagcactggaaatcacgcctggtggcgctgatcttcgccatcgcctggatcgtgctcggcctgagctttgtcgtcaatcccctcaacggtatgagcagtctggccattttatttggctttttatttgttctcggcggtatttcccgcatcgttaacggatgtcaaacccgcaaacaaagcggcgctggctggaatatttttatcggcctgttggatttacttatcgcctgcctgtggctggccatgaacccgcagcaaagctggttatttattaccgcctttatcggcgttgaaatgatatttagcgccatcggcttgttggtcctgcgcaataaaatgaagcacgctcaggcttaa

SEQ ID NO: 215506 - DNA, 804 bp, Klebsiella pneumoniae
atgaaccagacttctaccttaaccgggcagtgcgtggccgagtttcttggcaccggattgctcattttcttcggcgcgggctgcgtcgctgcgctgcgggtcgccggggccagctttggtcagtgggagatcagtattatctggggccttggcgtcgccatggccatctacctgacggccggtgtctccggcgcgcacctaaatccggcggtgaccattgccctgtggctgttcgcctgttttgaacgccgcaaggtgctgccgtttattgttgcccagacggccggggccttctgcgccgccgcgctggtgtatgggctctatcgccagctgtttctcgatcttgaacagagtcagcatatcgtgcgcggcactgccgccagtcttaacctggccggggtcttttccacgtacccgcatccacatatcacttttatacaagcgtttgccgtggagaccaccatcacggcaatcctgatggcgatgatcatggccctgaccgacgacggcaacggaattccgcgcgggccgctggcgccgttgctgattggcttgctgatcgccgtgctcggcgcgtcgatggggccgctaaccggctttgcgctgaatccggcgcgcgacttcggcccaaaactgtttaccagtctggccgggtggggctcgatcgcctttaccggtgggctggcgatcccttactttctggtgccgctgctggcgccggtggtgggggcgattatcggggcgtttttgtatcgcaagcttatcggccgccatctgccgtgcgaatgcggtatcgatgagtaa

SEQ ID NO: 215507 - DNA, 2109 bp, Klebsiella pneumoniae
atggtaccgtcaacatttcttcgttctaagcccgcgcgctgcctgcccgtattgctggcgactcttatttttgctggctgcggcacccacacgcaggatcaaagcgcggcgtttatgcagggtacgtcgcaggccaactccagtttctacttacagcagatgcagcaaagcacgaatgatagcaagaccaactggcaattactcgccattcgtgcactactgcaggaagggaagaagcagcaggctatcgacctgtttaaccagctgccggcgaacctgaacagcactcaggcccgtgaacagtcgctgctggcggtggaagtgaagctggcgcagaacgattatcaggccgcccgtaatctgctggctaagatcgatccgacaaaccttgagcagcctcagcaggcgcgctactggcaggcgcaaatcgatgccagccagggcaaaccatcgctgaccctgctgcgcgccttaatcgcccagcagccgctgctgagtgacgccaaacagcgccagaaaaatattgatgcgacctggcaagcgctcacctcgatgccccaggaccaggccaatgcgctggtgatcaacgccgatgaaaatatcctccagggctggctggatctgcagcggatgtggtttgacaaccgcaacgatccgacgctactgaaagcgggcgttaaagactggcagacgcgctatccgcaaaacccgggcgctaaaatgctgccgacggcgcttgtgaatatgcaaaactataagcctgcgtccatcaacaagattgcgctttttctgccgctgaacggtcaggcgtcgatcttcggccgcactatccagcagggctttgaagccgctaaaaacggcgcgccgtcggtgacgggcagcgcggttcccgcccaggtcgcccaggcggcgaatgtctccggtaatgatgatgtggtgagtccgtcgcaggcagaaatcagcgatcttaccgccaccggaagccgcgctgatccggttcaggccccgacgcaggaccaggcagcgcctgctgcggaaccggcagcccaggcgccggcaacatccaccacgccgcagactaccgcttccccggccacccagccggttaccgcgccggccgcacagccgcagcccgtggtcgcaaccgccgctaacccttctgcggaactgaaaatttacgacaccaccagccagccgataagccagctgctcgcccaggcgcagcaggatggcgccaccctggtggttgggccgttgctgaaagaaaacgttgaagaggttatcaagagcaacacgccgctcaatgtgctggccctcaaccagccggaaaaagtcgaaagccgcgctaacctctgctatttcgcgctttctccggaagacgaagcgcgtgacgccgcccgacatatccaccaacaggggaaacagaccccgctgctgctggttccgcgcggcgcgctgggcgatcgtgtggttagcgcttttgccgacgagtggctgaagctgggcggcgccagcgtcctgcagcagcgttttggatccacggccgagctgcgcgccggtgtgaacggcggcgggggcattgcgctgagcggcaccccggtctccaccctgccatcagcgcagaacagcatcctcggcagtgcggatgagatgccggtaagcagcggcggcagcgtcgatgcggcctatatcctcgccaccccggaacagattgcctatatcaaaccgatgatcgccatgcgcaacggcagccagagcaatgtcaccctgtacgccagctcgcgcagcgcccagggcaccgcggggccggatttccgtctggagatggaaggcttgcagtatagtgagatcccaatgctggccggcagcaatccgtcgctaatgcagcaggcgctgtccgcggtgcgtaatgactactcgctggcgcgtctgtatgccatgggcgctgacgcctggtcactggcaaatcacttcacgcaaatgcgccagacgcctggcttcgagctgaacggcaataccggcgatctgacggccaaccaggattgcgtgattaacaggaaactgtcatggctcaagtaccagcagggaaaaatcgttccggccagctaa

SEQ ID NO: 215508 - DNA, 1452 bp, Klebsiella pneumoniae
atgcagtttgaggtcattattcccctgatcgcctacctggtggtggtgttcggtttatccctctacgccatgagaaaacgcgcctcaggtagctttcttaatgagtactttctcggcagccgctcgatgggcggcttcgtgctggccatgacgctaaccgccacctatatcagcgccagctcatttatcggcggacccggcgccgcctataaatacggcctgggctgggtgctgctggcgatgatccagctccccgccatctggctgtcgctgggcgtgctggggaaaaaattcgccatccttgcgcgtcgctataatgctgtcaccctcaatgacatgctgtttgcgcgctatcagagtcgcctgctggtctggctggccagcctgagtctgctggtggcctttgtcggcgccatgaccgtccagtttatcggcggcgcccgcctgctggagacggctgccggtattccttacgataccggcctgctgatcttcggggtcagcatcgcgctgtataccgcctatggcggctttcgcgccagcgtgctcaacgacacgatgcagggcatggtaatgctgatcggcacgatcgtgctgctggtaggcgtgatccacgccgccgggggggttggccatgcggtagagacgctgcagtcgatcgacgtcaagctggtgtccccgcagggcgcggaagatatcctctcgccaacctttatggcctcgttttgggtgctggtctgcttcggcgttattggtctgccacataccgcagtgcgctgtatctcctacaaagacagcaaagccgtgcatcgcggcatcattatcggcaccatcgtggtggcgatcctgatgtttggcatgcatctggctggggcattaggccgggcggtgatccccgatttaaccgtgccggatctggtgatcccgacgctgatggttaaagtgcttccgccctttgccgccgggatcttccttgccgcgccgatggcggcgattatgtcgacgatcaatgcccaacttctgcaaagttccgctacgatcatcaaagatctgtacctgaactggcggccggatcaggcgactaacgaaaagcggcttaaacgcatgtccgccggcatcacgctcctgctgggggtcttgttgctgctcgcggcctggcggccgccggagatgataatctggctgaacctgctggctttcggcggcctggaagccgtcttcctgtggccgctggtgctgggcctttactgggaacgcgccaacgcggctggcgcgctgagcgcgatgatcgtaggcggcgtcctgtatgccgtactggccacgctgaaagtgcagtttctgggctttcacccgatcgttcccgcgctgctgctgagtttgctggcgtttgtggcggggaaccgtttcggtcgtcccgccccacagtcccccattttgactactgataaataa

SEQ ID NO: 215509 - DNA, 654 bp, Klebsiella pneumoniae
atggcaagaaaaacaaaagaagaggcgcagcgcacgcggcagctcctgattgagtccgcaatccagcagttcgccctgcgcggagtaaccaataccaccctgacggatatcgccgatgcggcgggagtgactcgcggcgcggtgtactggcattttgccagtaagacggagctgtttaatgaaatgtggcagcagcagccgccgcttagagatttgattcagcccagtcaggccatagagtacgaacaggaaccgttaaatgctttacgcgagcggtttattgcaggcctgcgctatattgctgcgaatcctcgacagcgcgctctgatgcaaattctttatcagcgctgtgagttttccagtgatatgctttcggaatacgaaattcgccaacgtattggttttaattattcactcattggcggcatcctgcagtgctgcgtgcgtaacaatatattgccagccgaaacaaacattgaggtgatattaattgttttacacagtgctttttccgggctgattaaaaactggctgctcgatccgcaacgcttcgatctttatcagcaggcgcctgcgctggtggataatataatggcggtggtctgtgctgcgcgtttatcgggagggcctgcgctacggctggtgaatcagtaa

SEQ ID NO: 215510 - DNA, 1140 bp, Klebsiella pneumoniae; identical to SEQ ID NO: 209779

SEQ ID NO: 215511 - DNA, 1029 bp, Klebsiella pneumoniae
atgaccattcgcatcgcgattaatggcttcggtcgcattggacgcaacgtggttcgtgctctatatgaatccgggcgtcgtgcggaaatcaccgtggtggcaatcaatgagctggcggatgccgcgggcatcgcgcatttattgaaatatgacaccagccatggccgtttcgcctgggatgtccgtcaggagcgcgagcagctgtttgttggcgacgatgccatccgtctgctgcatgagccgaccattgcggcgctgccctggcgcgaactggcggtggacgtcgtgcttgactgtaccggcgtatacgggagccgtgaacacggtgaagcccatcttcaggcgggggcgaaaaaagtgctcttttcccaccccggcggcaacgacctcgacgcgacggtggtgtacggcgtaaatcaggatgaacttcgcgccgggcatcgcattgtctccaacgcctcctgcaccaccaactgcattattccgatcattaaactgctcgatgacgcctatggcattgagtccggcaccgtcaccaccattcactcggcgatgcatgaccagcaggtgattgacgcttatcatccggatctgcggcgtacccgcgcggccagccagtcgatcattccggtggataccaaactggcggcagggatcacccgtatttttccgcaatttaacgaccgttttgaagcgattgccgtgcgggtgccgacgattaacgtgacggcaattgacctgagcgtgacggtgaaaaaaccggtaaaagcatgtgaagtcaaccagttgctgcaaaaagcagcacaaggtgcatttcatggtatagttgactatacggaattaccgttggtctcgacagattttaaccacgatccgcacagcgccatcgtcgatggtacgcaaacccgggtcagtggcgcgcatctgatcaaaacgctggtctggtgcgataacgaatggggctttgctaaccgaatgctcgacacgacgttagcgatggcggctattggtttcaggttcgacgcgtaa

SEQ ID NO: 215512 - DNA, 1164 bp, Klebsiella pneumoniae
atgtctgtaattaagatgaccgatctggatctggctggtaaacgcgtttttatccgtgcggatctgaacgtaccagttaaagacgggaaagtaaccagcgacgcacgtatccgtgcatctctgccgaccattgaactggcgctgaagcagggcgcgaaagtcatggttacttctcacctgggtcgtccgaccgaaggcgagtacaacgaagaattctctctgctgccggttgttaattacctgaaagacaaactgtccaacccggtacgcctggttaaagactacctggacggcgtggaagtggctgccggtgaactggtggtgctggaaaacgttcgcttcaacaaaggcgagaaaaaagacgacgaagaactgtctaagaaatacgctgcgctgtgcgacgtgttcgtgatggacgctttcggtactgcgcaccgcgcgcaggcttccacccacggcatcggcaaatttgctgacgtggcgtgcgcaggcccgctgctggccgctgaactggacgcgctgggtaaagcgctgaaagagccagctcgtccgatggtcgctatcgttggtggttctaaagtgtccaccaaactgaccgttctggattccctgtctaaaatcgctgaccagctgatcgtgggcggcggtatcgctaacaccttcgttgccgctcagggccacaacgtcggtaaatccctgtacgaagcagatctggttgatgaagccaagcgcctgctgggcacctgcgatatcccggttccgaccgacgttcgcgtagcgaccgagttctccgaaaccgcaacggcaaccctgaaatctgttaacgacatcaaagatgacgagcagattctggaccttggcgacgtttccgcacagaaactggctgaaatcctgaagaacgccaaaaccatcctgtggaacggcccggttggcgtattcgaattccctaacttccgtaaagggactgaaatcgtggctaacgctatcgcggacagcgaaggtttctccatcgccggcggcggtgacaccctggcagcgatcgacctgttcggcatcgctgacaaaatttcctacatctccactggcggcggcgcattccttgaattcgtcgaaggcaaagtcctgccggcagtagcgatgctcgaagagcgcgctaagcagtaa

SEQ ID NO: 215513 - DNA, 1080 bp, Klebsiella pneumoniae
atgtctaaaatttttgatttcgtaaaaccgggcgtcatcactggcgacgacgttcagaaagtgttccaggtagcgaaagaaaacaactttgcactgccggcggtaaactgcgtaggtactgattccatcaacgccgttctggaagctgcagcgaaagttcgctctccggttatcgttcagttctctaacggcggcgcagcgttcatcgcaggtaaaggcgtgaaaactgacgttcctcagggtgctgctatcctcggcgctatctctggcgcccaccacgtgcaccagatggctgaacactacggcgtgccggttatcctgcacactgaccactgcgcgaagaaactgctgccgtggatcgacggcctgctggacgccggtgaaaaacacttcgccgctactggcaaaccgctgttctcttcccacatgatcgacctgtctgaagagtccctgcacgaaaacatcgagatctgctctaagtacctggctcgcatggccaaaatgggcatgaccctggaaatcgaactgggctgcactggcggtgaagaagacggcgtggataacagccacatggacgcttccgccctgtacacccagccggaagacgtggattacgcctacaccgagctgagcaaaatcagcccgcgcttcaccatcgccgcttccttcggtaacgtacacggcgtgtacaaaccaggtaacgtagttctgaccccgaccatcctgcgcgactctcaggaatatgtttccaagaaacacaacctgccgcacaacagcctgaacttcgtgttccacggcggttccggttcttccgctcaggaaattaaagactccgtcagctacggcgtggtgaaaatgaacattgataccgacacccaatgggcaacctgggacggtatcctgcagtattacaaagcgaacgaagcttacctgcagggccagctgggcaacccgaaaggcgaagaccagccgaacaagaaatactacgacccgcgcgtatggctgcgtgctgcccagacttccatggtgactcgtctggagcaggcatttaaagagctgaacgcgatcgacgttctgtaa

SEQ ID NO: 215514 - DNA, 1020 bp, Klebsiella pneumoniae
atgcagtatacccggctcgggaagagtgacttactggtctcccgtatctgcatgggatgtatggggtttggcgatccgtcaacgggtcagcatcgctggacgctggacgaaacagccagccgggacatcatccgccacgctctggaacagggcatcaatttttacgataccgccatcgcctatcagaacggctccagcgaacggtacgttggccgggcgctgcgggagatggcaaaacgcgaggaggtggtgctggccaccaagtttctgccacgaaccgctgcccagattgccgaggggatcagcggaaaacaggcgatagcccgctcgcttgaccagagtctgcgaaacctcgggatggactacatcgacctctacatctaccacatctgggattacaacaccccggttatcgacgtgctggaggcgctgcacaccgcagtgaccgccggcaaggtgcgcgcgattggcatttccaattgctatgcctggcagctggcgaaggcgaacgctcttgccgaacgcgaagggctgacatcctttgtttctgtgcagagccactacaacctgattatgcgtgaagatgaacgagagctgttcgggctgtgcgcggaagagggtatcgccatgactccctatagcgcgctggccagcggccgtctctcccgcttagaaggccacacgcggcgagcggtggaagatgattatgcccggggcaaatacgacggcacggcagagcaggaccggatcattattgcccgcgtcgccgaacttgccgaacggcatcaggtctccatgaccgaaatttcgctggcctggctgctgactaaagtcaccgccccggtgatcggcgccacgcaaaagcatcatgttgacggcgcggtcaacgctgtagcccttcaactgagcccggaagacatccgttatctggaagaagcctaccagccgcacgttctcacaggcgtgatggcgcaaaacacgccgcaagccaaagaccatcatcaggtgtggacgcggtaa

SEQ ID NO: 215515 - DNA, 276 bp, Klebsiella pneumoniae; identical to SEQ ID NO: 138648

SEQ ID NO: 215516 - DNA, 957 bp, Klebsiella pneumoniae
atgacgactccgattgcgctccgcgactggcgcctgctggcggccgggtgcggcggccttctactgctggccgccgctatcaccttgcacagccactggggtgactttctccagtggtgtctcgccacccaaattaccctgcatcgctatctggtgatgtaccttctgttgctgaataaccatcagtacagcggcggtatctggttgctggtgggggcctttctctatggcgtgctgcacgccgtcggaccgggacacggtaaatttatcgtgacgacctacctgagcaccaatcaggagagcctgacggcggcgcgggtggtgccctttctcggcagcctgttgcagggcgtcactgcgatactcttcgtctttattcttgcggtggggctgaatctggccgccggcgatcttagcgccagccgctggtacgtcgagaagatcagcgccctgaccatcggcgtctttggggcttatgttatctttcgcgctctgcaaagcctgtggccggcaaaacaggtgattcgccgtctgacgccagcgcatcagcatgacgcctcgtgcggctgcggccatcacggcgtggggcaggatctgcagggcgctgactggaagacgcgccttggcgtggtgctggctatcggcgttcggccctgtagcggggcgattatgattttattattcgccaacgcgttggggattgttagctggggcatcgccgcggtgatgagcatggcgctgggcaccgcgctctcgatcctcggtctgtcgctactggttcactatgcgcgccatcggacggtcaaacgattggccacgaatcaccgcccgcggccctggctggtaccgttggtgaagatcctcggcggtctggcgctgatcctctttgccgtgggattgtttttcaccgtggtgccgatcagcgccaacggcgactttatcgccgctggctgttag

SEQ ID NO: 215517 - DNA, 897 bp, Klebsiella pneumoniae
atggcttttctctcacgtaatctgattctcgacctgctgctcaccgcgctggcgcccgctatctgggggacgacctacatcgtcacctcccagtttctgccccctgaccgcccatttattgctgcgctgctgagggtgctgccggcaggtatcgctcttctgatctggagccgtcgttttccgcaacgcggcgaatgggcaaagctgatcgttaccggcatcttaaatatcggcgcgtttcaggcgctgttgttcatcgccgcctatcgcttacccggcgggctggcggcggtgatcggcgcgatccagccgctgctggtgatgctcctcgcctggtgtgtcgaccggcagcgctcgccctggctggcggtgttctccgccatcgccggcatactcggtatggccatgctgctgctgtcgccgcacaccgtcctcgacccgctgggtatcggcgcggcgtttctcggggcgatcagtatggcgctgggcacctggctctcccggcgctgggcgctctccctgccgatcgtcgcgctgaccggctggcagctgacgatcggtggggtggtgctggccccggtggcgctgatcgttgaccctcctttgcatcagataacagtgctgcaggcggccggctatctgtggctgtgcctggcgggcgccatgctggcctatggcctgtggtttcgggggattggccgcctctcaccggtggccgtgtcggcgatgagtctgctgagcccggtgaccgccgtggtgctgggatggattttccttggacaaaagatccaggggatggcgctggtggggttgatcgtggtgctggcgagcgtgctgtctatccagcgcgcgctggcgcgccaggcggcgggagcaaaaacgaaaaaagccccataa

SEQ ID NO: 215518 - DNA, 702 bp, Klebsiella pneumoniae
atgaagcgtattgccctttttttctgtttcatttttagttttgcggcccatgccaacaatattattgttaacggtacccgctttatttatccaggaaatgaaaaagaaataacggtacagctttcaaataacgccgaccgtccggcgctggcgcaggcctggctggataacggcgatgccgatgccacaccggataccattaccaccccgtttattatcaccccgccgatttcgcgcgttgacgccaagagcggccagacgctgcgtattaagctcggcagcagcgccggtctggcgaaagataaagagacgctgtggtggctgaatctgctggaaattccgccggtggtggccaatcagaaaaatgaaggccagaacgtgctgcagctggcgatccgttcgcgctttaaatttatttatcgtcctgccggactgggcaaccgcgatgcggcggccgagaagctgaccctgaccgccagcggcagtggtctcgccatcaacaacccgacgccgttctacattaccgtcagccgtatttcccgcgacggcggtaaagccctgaacagtaaaaccgtgatgctggcgccgcagtccagccagacggtggcgctctcctccgccgtcaaccgcggcgaaaccctgaccgttaacaacattaatgactatggcgccgatgtcgcagtgaaagtggccgttaaataa

SEQ ID NO: 215519 - DNA, 2487 bp, Klebsiella pneumoniae
atgaagcagaggtcattctgcccgggaagattaagcaccgcgatcgccatcgcgctgtgctgctttccgccattttccagcggacaggaaaacccgggaacggtatatcagtttaacgacggctttattgtcggcagtcgcgaaaaggtcgatctgtcgcgcttttcgaccagcgcgattaccgaaggcacttactcccttgacgtctacaccaacgacgagtggaaagggcgctacgatttacgcatcgcgcgcgataaagatggtcggctgggcgtctgctacaccaaagcgatgctggcccaatatggcatcgcggcggaaaagctcaatccgcagctgagcgagcaggagggctactgcggtagcctcaaatcctggcgcaacgaagaaaacgtcaaagacaacctggtccagtcctccctgcggttgaacatttcggtaccgcagatctatgaagatcaacgcctgaaaaactatgtcagcccggagttctgggacaaaggtattaccgcgctcaatcttggctggatggcgaacgcctggaacagccatacctcttcggtaggcgggtcggataacagcagcgcctatctgggcgtcaacgccggtctgtcgtgggacggctggctgctgaagcacatcggcaacctgaactggcagcagcagcagggtaaagcgcactggaacagcaaccagacctatctccagcgccctatcccacagctcaactccatcgtcagcggcgggcagattttcaccaatggtgaatttttcgacaccatcggtctgcgcggggttaatctttccaccgatgacaatatgttcccggacggcatgcgctcgtatgctccggaaattcgcggcgtggcgcagagcaacgccctcgtcaccgtgcgccagggcagcaatattatctatcagaccaccgttccgcccggaccgtttaccctgcaggatgtctatccttccggctatggcagcgatcttgaggtctcggtgaaagaagcggatggctcggtagaagtgtttagcgtgccttacgcttccgtcgcccagctgctgcgtccgggaatgacccgctacgcgctctccgccggtaaagtggacgacagcgcgctgcgcaacaagccgatgctctatcaggcgacctggcagcacgggatcaacaatctgttgaccggctacaccggggtcaccggttttgacgactatcaggccttcctggtggggacagggatgaacaccggcatcggcgcgctctcttttgacgtcacccattcgcggttgaagagcgatgcccatgatgactcgggtcagagctatcgcgcgacctttaaccgcatgtttaccgatacccagaccagcatcgtgttggcggcgtatcgctactcgacgaaaggttattacaacctcaacgacgcgctgtacgccgtcgatcaggaaaaaaatagtcgcagcaactacaccctgtggcggcaaaaaaacggcatgaccttcacggtgaaccagaacctgccggacggctggggcgggttttatctcagcggccgtatctccgattactggaaccgctccgggaccgagaagcagtatcaggtcagctacaacaattcatttggtcgtctctcctggtcggcgagcgcgcagcgcgtctatacgccagacagctccggtcatcgtcgcgacgatcgtatttcactcaacttcagctacccgctgtggtttggcgataaccgcaccgccaacctgacgtcgaacacctcgttcaataactcgcgctttgccagctcgcagattggtatcaacggttcgctggacagtgaaaacaaccttaactacggcgtgtcgaccaccaccgccaccggcggtcagcatgatgtggcgctcaacggcagctaccgtacgccatggaccaccctcaacggcagctacagccagggcgaaggctatcgtcagagcggcattggcgccagcgggacgatgatcgcccacagcggcggcgtggtgctctcaccggaaagcggctcgacgatggccctgattgaagccaaagacgcggccggggcgatgcttccgggatcgccgggcacccgtgtggacagcaatggttacgccatcctgccgtatctgcgcccgtaccggattaacgccgtggaaatcgacccgaaaggcagccatgacgacgtggccttcgatcgcaccgtggcgcaggttgtgccgtgggaaggcagcgtggttaaggtcgcgttcggcactaaggtgcagaacaacctcaccctgcaggcgcgccaggcgaaccacgagccgttgccgtttgcggcaagtattttctcccccgacggcaaggagatcggcgttgtcggccagggcagcatgatgtttatcagcgatgcgaacgccaaacgcgcgattgtgaagtggagcggcgggcagtgttcggtggatctgggacagcaaacaacaaaggatagcgtatgtcgctga

SEQ ID NO: 215520 - DNA, 810 bp, Klebsiella pneumoniae
atgaatggttctttacgcgcgcaatgtatcgccgagtttttaggcaccgggctgtttctgttttttggtatctgctgcctgagcgccctgaaactgaccggcgccagcctggggctgtgggagatctgtattatctggggactaggtatttctctggcggtgtacctgacggccggcatttcggggggacatctgaaccccgcggtcaccgtcgccctgtggctgtttgcctgcttcccgggcagaaaagtggtgccctatatcgtggctcaggtcgccggcgcgtttggcggcgccgtgctggcctggatactttacagcaccctgtttacgcaatttgaaacggtgcatcatatggtgcgcggcagcctggaaagcctgcagctggccagtatattcagcacctacccggcgcctgagctcagcatctggcatgcggcgctggtggaggtggtgatcacctcgatgctgatggggatgatcatggcgctcaccgatgatggcaacggcgtacccaagggcccactggcgccgctgttgattggcattctggtggcggtgatcggcgcctcgaccgggccgcttaccggcttcgcgatgaatccggcacgcgattttggcccgaaattgttcacctggttcgccgggtggggcaatatcgccatgaccgggggaagagatattccctattttatcgtgcccattatcgcaccgttgttaggggcctgcctcggcgccgcaatttatcgttttcttatcgccaataatctgccctgtcatacctgcgtggaggaagaaaatacgcgttag

SEQ ID NO: 215521 - DNA, 738 bp, Klebsiella pneumoniae
gtggatggatggcagcgcgcctttgtcctgcatagccgtccgtggagcgaaaccagcctgatgctggacgtcttcacggaagaatccggtcgtgtgcgcctggttgccaagggcgcacgctccaaacgctctaatctcaaaggcgctttacagccctttacccccttgctggttcgcttcggcggtcgcggcgaagtcaaaaccctgcgcagcgcggaagccgtttcgctggcgctgccgctcagcggcatcaccctctacagcggtctctacgttaacgagcttatctcccgcgtgctggagcacgaaacacgcttctccgaactctttttcgactacctgcactgcattcaggcgctcgccggggccagcggctcgccggagcccgcgctgcggcgttttgagctggcgctgctcgggcacctggggtatggcgtggattttctccactgcgccgggagcggcgagccggtagacgacaccatgacctaccgctatcgtgaagaaaaaggctttattgccagcctggtgattgataacaacacgtttaccgggcaccatttgaaagcattggcgagtcgcgagtttcctgatgttgatacgctgcgcgccgcgaagcgctttacccgtatcgccctgaagccctatctcggcggcaaaccgctcaagagccgggagttgtttcgccagtttatgcccgcgcgaaaggcgggagccgataatacgaataatgattaa

SEQ ID NO: 215522 - DNA, 693 bp, Klebsiella pneumoniae
atgtattacagcaatgttgtcatcagctatttacaggccaataaaattctcgcaatgaaacttgatcgcgctgtttcaggcacagaacaacgggtttccggtcaggttaaaacaataggtgctggcgtaactcgaatcctatattatacatcctgttttactgatgagtatcaggatgtatgtaaaaagcagaagaatgaggatgttagatttgctaaaggtatctaccatcttttacagcgtaagaatattgtatatgaaatactgaaaatatattttgaagaaatatttaagcacaaaacaacagagcagttagagcatattaaaagaattctgatggctgttaacattcatatcgctgcagactctctaaccaaatctggatttgttttagctacggctacctgtgtttcggttggcatgaaactaagccttgatatgggagcgattgctgggcgttctgcgggggtcgccgttacagtggctggtatgtatggcgttgtgcagagggctgcagatagcgctgagcgtctccgaatctgttatcctgcattcttttctatactatacgaacaagaacttgaaatgatgtatttcctggtggcgccattatttgaacatgccgacgcttttaaagcccaatgggcttcagaggcagagctcgctaatatcatcgaaagaatgattaggtag

SEQ ID NO: 215523 - DNA, 237 bp, Klebsiella pneumoniae
atgaagaaggcgattataaagatgtatcgcattctggaggcgggcattgaggccgagtatttcaacatcatcctggagaacgtcaaagtcactacggttgcgccgtatttatcacctactggtatgagcagtacccacctggaaacgctcgagatgcgttatgaggcgatcacctggaaatacatggacggaaatatttactaccgcgactcatggaatgaccgctgttgtgcatga

SEQ ID NO: 215524 - DNA, 1869 bp, Klebsiella pneumoniae
atgaaagaaccaaataaaatagatggaaatcgccgcgatctcctcaaaggtctggggattgccgctgtcgtgagcctgttaccagagacgggaaacgccgcacaaaataatgccgccccgaaagcggcatgggatattcctttcaccggcgaaatccctgacacactgcccgaaggctacaatattttactaataacctgcgatcaggaacgttatttcgagcggtatccctttccggtgccgggccgggaacgcctgatgaaaacgggtatcacttttaccaatcatcagaacacggccaacgtttgtacgccatcgcgctctgtcatgtacaccgggctccatatgccgcacacccggatgtttgataatcttggcttcccctggatgaattacgatctggacccggaattacgtaccgtgggccatatgatgcgtgaactgggttattacacggcgtataaaggtaaatggcatcttacccgggagatcgatcagccggtcgctggtaaatcggtagaagaaatggacctgggcgagatcccgacgccgcgactgcatgaaattatggaaaagtatggtttctctgattatcacggcattggcgatgtcatcgggaaaagtaagggcggctatttctttgattcagtcaccacggggcagaccattagttggctacgtaacaccggccgcccgctgaatgatgaaaataaaccctggttcgcggcagtaaacctggttaacccccacgatgtcatgtttatcgacaccgatgagcatggtgagcaggtgcagtggaaagggccaatggataaagaaaaccacaccctgctgccaacccaacccccgcacaaccaaatctatcagcaaagctggccagactatccgctgcctgcaaaccgccaccagccgctcgatgagcctggcagacctgccgcccataaagagtaccagaatgccagggcggtgatggagggacagttccccgatgaagaccggcgctggcgcaaattactggattattatttcaactgtattcgcgataatgaccagcatcttgaggcgattctcaatgagctggataacctgcagctgacgcaaaatacgattatcgtctttaccgccgaccatggggagctcggtggctcccaccagatgcatggtaaaggttcctcggtgtacaaagagcagatccatgtgccgatgatcattcgccatccggcgtatccgggaaatatccgctgcaacagtttgaccaatcatctggatttagtaccgaccctgattggtctgactggacgcgatcgctcgctgcgagagaaagtcctggagggcagaaaaggccgggatatgagcccattactggcgcatcctgagcaagcgggcttaaatgcgctgcgtccgggttcgctttattgttacggcatgatcctgtatatggatgcgcaatacacggcaaaattcagaaagctggctggagaaaaactcccgcacgatcaatttaaaaaagcgatcgcgtcactccatcctgatttttcccatcgctcagggatccgtatgatcaacgatggacactataaatttgcccgctacttttcgctcaagcagcatcatattcctgcgaccctggccgagctgctggagaataatgatgttgaacttttcgatctggttaacgaccccgaagaaaatcataacctcgcccgggagccagagaaataccgggatctgttaatgacaatgaacgataaactcaatcagctcactgccgctgagattggcgaagatgatggcagctatatgcccccgtttgaaggaagccagtgggatctgacggcggcccagatgcatcaatatatgcgcgattag

SEQ ID NO: 215525 - DNA, 1179 bp, Klebsiella pneumoniae
atgagcgctaattttaataccgtagcaaaacccggcggcaatcgatgcaatctggcctgtcggtattgtttctatctggaaaacgaggttccgcgtccagggtatgccaccatggacgacctcacgctggaagcatacattcacaacaccatttcatcgaccccctcgcaaaacgtcgagttttgctggcagggcggtgagcctaccttatgcgggctggatttttttgcaaaggtggtcgagctccagcagcgttaccgtggtaacaaaatcatcgccaacagcctgcaaaccaacggcatcttgctgaacgataaatgggctcgttttttgcgtcgtcatggatttctggtcggattatccattgatggccctgcgtcactccacgacacctggcgtacgacgggctgcggaaaacccacctgggaaaaagttgtgcaggccatacgctgcctgcaacagcatgacgttccggtgaatgccatggtggtggtcagccgccagtctgcaagccaggggaaaagtctctatcgctgcctgagccgcgagctaaaccttcaccatctccagtttattcctctcgttgactcccctgctccctggtcagttacccctgagggctggggcaaatttttgtgcagtgttttcgacgactggctggaaaacgatgttggcagggtgtttatccagtactttgataatctgctcggcgtatgggccggccagcccgccacgctctgcaccatgcagcctgtctgtgggcagagtttactggtggagcaaaacggcgatgtctacagctgcgatcactttgtctcagcggaatataagctgggtaatctgaagcaagatgctatggcagcgatggcgagctcgccatttcagcaacagttcgggaagcaaaagggccaactctctgcccgctgtcagggctgccactggcgctttgcctgccatgggggatgccctaaacaccgttttaccatccatgacgacgaagcacagaattacctgtgcagcggctatttagcctttttcggccatatcacgccctatatgaacgtcatgcgaaggctttttttaaattgccagccgcccgcgctcattatgagtcttatcccggagattcggcaaaatatattacaattaacggagtctgaagatgaaagaaccaaataa

SEQ ID NO: 215526 - DNA, 270 bp, Klebsiella pneumoniae
atgccctgctattctcttaaaaatttcatcattgatttggtgaatgtattttcattaaaaatttataatatgaataatgcctgccatatggctataagcgcaggcgtaaattatcaagggcgtagtgatccacgtttactcttcagcaaggttgtttttggctatcggttggtcaacggccgctgccggatattctacattacgttcatcctgcgccttacccgcctcgcgcacaatcgccagcgccagtccggcaacgatcaacgttaa

SEQ ID NO: 215527 - DNA, 2292 bp, Klebsiella pneumoniae
gtgtcagagttgttatccatcgccttatttttagcttcggtggtgctgtatgcctggaaagcgggtcgtaacacctggtggtttgccgccacgctcacggtgttaggcctgttcgtggtgctgaatatcaccctctacgccagtgactacttcaccggcgacggcatcaacgacgcggtactctacactctgaccaacagcctgaccggcgccgggatcggcaaatatatactgccgggggtcggcgtggccgtcgcactggtcgccgtctttggcgccctcggctgggtgctgcgccgccgtcggcatcatcctcatcacgtcggttacagcctggcggcgctactgctggcgctggcctccgttgatgccagcccggccttccatcagatcagcgagctggtgaaatcccagtcacgcgagggcgatccagactttgccgcgtactataaagagccgtcgaagcaaatcgacaatccgcagctgaacctggtctatatctatggcgaaagtctcgagcgcacctattttgataacgacgccttccccaacctcacccctgagcttggcagaattaaagatgaggccattgatttcagcaataccatgcagctgccggggaccgattacactatcgccggcatggtcgcctcacagtgcggcattccgctgttcgcgccgttcgaaggtaatgcctcagcctcagtctccagcttctttccacagaatatttgccttggcgatattctgaagaactccggttacgagaattactttgtgcagggggctaacctgcgctttgccggcaaagacgtgtttcttaaatcccacggcttcgatcatctgtacggggcggaagagctaaaaactacggtggcggatcctacctaccgcaacgactggggcttctatgacgacaccgtactcgacgagacctggaaaaaattcgaagagctgtcgcagtccgggaaacgcttctcgctcttcgccctgacggtggatacccaccatcccgacggttttatctcacgcacctgcgagcgtaaacgctatgatgtggacggcaagaaaaacctctctttcagcgccgttagctgcagtcaggaacatatcgccgcgctgatagagaagattaaagcctcaccctatttcaaaaacacggtcatcgtggtctcttccgatcacctggccatgaagaacagcgcctgggattatctcaacaagcacgatcgcagcaatctgttcttcgtcctgcgcggcgataaaccgcagcaggagaccctggcggtgaaacgcaacaccatggataacggcgcgacggtgctggatattctcggcggcgataactatatcggcctcgggcgtagcagcctctccggccagtcgctctccggtattttcatgaatatgaaagagaaagtcctggcatggaagcctgacgtgatccgcctgtggaatttccccaaagaaatgaagaatttcaccatcgactcgcagaaaaatatgatcgctttctccggcagccatttccgtctgccgctgctgctgcgggtatctgaccagcgcgtagaaccgctgccagagagtgaatactctgcgccgctgcgcttccagctggccgatttcgcgccacgggataatttcgtgtgggtcgatcgctgctataaaatgggccagctgtggtcgcctgagctggcgctctccaccgactggtgcgtctcgcagggacagctggggggtgagcagaaggtccagcacgttgataagccgcagtggcacggcaagaccgccttcagggacacccttatcgatatggagcgctataagggcaacgtcgatacgctgaaaattgtcgacaacgatattcgctataaggccgacagcttcgtgtttaacgtcgctggcgccccggaagaggttaaacagttcagcggtatttcgcgtcccgagtcgtgggggcggtggtccaatgctcagttgggcagcgacgtgaagattgaatataaagagccgctgccggagaaatttgatctggtgattaccgccaaagcttatggcccaaacgccaataagccgattccggtgcgagttggagaaagtgagcaagtgctcactctggataatgacgtgactaccacgacgctgcattttgacaacccaacgcgcagcaacacgctgatcatcaccccgccggacccgcaaaccactaacgagggcaatatcctcggccactccccgcgtcagttggggatcggcatggtggagatcaaagtggtgaaaagcgaaggctaa

SEQ ID NO: 215528 - DNA, 852 bp, Klebsiella pneumoniae
atgacgacgaagatgatttctgaagagaccctgcagccgcaggcgcaggaagaaacccggattacgccgcgcgatttacgccgggtgttctggcgctctttccagatggagttctcgtggaactatgagcggcagatgaatctcgcctttgtttacgcgttgatcccggtgctgaagaagctctatccgcgcagagaggagctggccgcagcgctgaagcggcatctggtttttttcaataccacgccgcatatcgtcaccctgctgctggggatcaccacggcgatggaagagaaaaacagtcagcagaaaaacatggatgccactgcgattgataacgtcaaagcctcactgatgggaccgttagccgggctgggtgactctttcttctgggggacgctgcgcctcatcgccaccgggatcggcaccagcctggcgctgaagggcaacatcctcgggccgatcctgtttctgctggtgtttaacgtgccgcacattctggtgcgctggtgttttacccgctggggctacgtactgggcaccggggtcctgcagcggatccagaagagcggaatgatggagagcctgacctacggggcgtcgattatcggtctgatggtagtcggggcgatgaccgcttcaatgatcgatatcaccattcctctctccttcggcgccggggaggccaaaacccaggtacaggacattatcaacgacattctgccctgcatgctgccgttggtgagttttggcatcgtctactggctactgggacggaaagttaaaccgctctcaattattggcggcatggcgctggtgggcattctgggttcgtggatcggattgttttaa

SEQ ID NO: 215529 - DNA, 780 bp, Klebsiella pneumoniae
atggtagaggctctcttactgggtctggtggcgtttatcgcgcaatcggaatatgccttagggacgtcgctaatttcacggcctatcgtcaccgggctgctgaccgggctggtgctgggggatgtacagaccggcgtcattatgggcgcgacgctggagctggcgtttatcggctctttctccgttggcgcctcgatcccgcccgacgtggtgaccggcggtattctcggcgtggcgttcgccattacctctggcgcaggcacagaaacggcgttgctgcttggcctgcctatcgccacgctgactttgatcctgaaaaacatctatctggggatgttcattccaatgcttagccagaaggcggacgggtatgcggaacgggcggatctccgcggcattgagcggatgcatttgattgccggattcggcctgtcgctgatgcttgccgcggtggtcaccgtctcattcctggtgggcagcaacgcggtgaaatccctgctcgatacgatcccggaatttatcaaacatgggctcagcgtcgccaccggcatcatcccggccctcggcttcgcgatgctcgccaggctgctgattaacaagaaagtggcgccgtattttttcctcggttttgtgctgatggcctatttgaaaatcccggtgaccggtatcgccattctcggcgctatcgtggcggtggtcatggttaacgtcaccgcattgaattcacctcgtatcacgacagaacaaggagtcagcgatgacgacgaagatgatttctga

SEQ ID NO: 215530 - DNA, 471 bp, Klebsiella pneumoniae
atgattacattattaagggtagaccatcgattacttcacggccaggtggccttttcctggacccaatatgtcggcgccgattgtattttaatcgccaacgatagcgtccctggtgatgagctgcggaaaaccaccattaagcttgccaaaccgccctcggtgaagctggtgattaaaaatataaatgattctattgaggcaataaaaagcggggttaccgataaatataatttatttattgttgtggagtcggttaatgacgcctggcgtattgccagcgccatcgacgaaataaaaagcataaatcttggcggaataaaggctaaagagggcagtaaaaatatctctaaggcgattaatttactgccgacagaaatagaacagctacaacaactggtgggcaagggcgtcgaagtggagattcgccaggtcccgaacgatcgcaaacagctttttgcggaatgcgtgtaa

SEQ ID NO: 215531 - DNA, 423 bp, Klebsiella pneumoniae
atgaaacgacactatatttttgccagccatggcagctttgctaacggtttgttgaactccgtggaactgatcctcggtaaacaacccgatatacataccttgtgtgcctacgtggaagaagaggtcgatctgacgcagcaggtggaagcgctagtggcgcgtttcccggcgcaggatgagctgatcgtgattacggatatttttgccggtagcgtgaataacgagtttgttcgttttttatctcgcccacatttccatttattatccggtttaaatctgccgttaattattgacttgctgatttccgcagcggaagacgataccgaaaaattaattaccgaggcattaacaaacgccaaagagagcattcagtactgcaatcaaacgattgccagcgcgatgactatggataaagacttctga

SEQ ID NO: 215532 - DNA, 2766 bp, Klebsiella pneumoniae
atgcgtaaaacggaactgttggcttttttgcaaaatcagaccgattttttcgatccggataacctgagcgaggtctttaccgccagctggctggcccggcgtttcgcgatgcaaagaaataccgccagccattatctcaatcagctggtcgctcaggacgtgctggtgaaaatcaacacccggccggtctattttctgcataaaaaagccttttgccagcagttctacccgctttcccgcagtgagtatgccagcatggcggagttactcgcggagagcgaccgccagccggagcaggcggaccatttttcgttgctgaccgggcatgacggcagcctgcgtaaaccgattgagcagatgaaaaccgcgctgttttatcctaacggcgggctaccgctgctgatcaccggcgacagcgggaccggcaaaagctatatggctgagctgatgcatgagtttgccatcgcccaggggctgctggcgcccgatgccccctttgtgagctttaactgcgcgcagtatgcgagtaatccggagctgctggccgccaacctgtttggctacgtcaaaggcgcgtttaccggtgcgcagagcgataaagcgggggcgtttgaggcggcaaacggcgggatgctgtttctcgatgaggtccatcgcctggatgctcagggacaggagaagctgttcacctggctggatcgtaaggagatctaccgggtgggggataccgcgcaaggcttgccgatttcgctgcggttggtgtttgccaccaccgaagatattcacagcacttttctcaccaccttcctgcgccgaattccgatcctggttagcttgcccgatcttcaacaccgtagccgcgaggagaaggaggcgctaacgctacagtttttctggcaggaggcgcgcacgcttgccgcccggctgcaactaacgccgcgactgttgcaggtcctgacgcagtatgtttatcggggcaacgtcggcgagctgaagaatgtggtgaagtacgccgtggcgtcagcctgggccaggtctccgggccgcgaaatgttgaccgtgacgctgcacgatctgccggaaaatgtcatggccgcgacgccagcgctcagcgaagcgatgggccagcaggagccgctgcttatcgagccgcagaccagcctggtctggctgctgcgcgcgcgcgacccggtacaggggctgatctatgacgttcagtgtcgggttctggcgcagtatgaagcggtgctgaataaaaaaacggtctgggaagaggcgcaaaggagcatgggggaagagattgaaaccctcttcgatcggttgatctttgataatcatgactccagtagctcgcagatgctgctgctgatcgctcatcaggttcgggaggagtattatcgcctagaaaagcgcttcaatatccagtttaacggcaactgcctctacgcgctgagccactacctgatccaccgatcccgacagccgcagtccacgataaacaatgaaaaagcccgccagctggaggacttcctggtacagaagtttccgctgctgtatcgcttttgcgaagcgatcctcggtgcgttgacgctgaagctggatattgaaccccagcgtatcgacctgctgctgttagtgctgtggttccacaagaatggcgccatcagccagcagcaggtgacccgggcgataattctcgctcacggttacgctaccgccagcagcatcgccaacgtggcaaaccgcttgctgaaaagccagctctttgagtcattcgatatgccgctggacgtgacgccggaggctatcgctaaccaggtgatggcctacatagagagccatgctctggcatcaggattgataatcctggtcgacatgggatcgctgaacgccattcaccgccattttaatcgtcgcctgagtacgccgatggcgatcatcaacaatgtctccaccggtatggcgatgtacgtcggggagcgcattttgcagggcgttatgctggaagatatcgtccgcgagatcggcgatgaccttgcggttgagcaccagctctattacccgcaaaccgataagccgcgggcgattttaaccacctgcgcgaccggtctgggcgcggcggcgaatctgtcggcgctgttaaaagccagcattcctgaagcgcttggcattgatattgtggcctgcgatgtggagacccttgccgatcccgcgcgacgggagccgatgctaagccgctatgaggtgctggcgatcgtcggcaccctggatccgcatcttgccgatctaccctggatctcgctggattcgctgatctctggcgaagggagtcgtccgctgatgcgcatttttggcgaactggcgacggcggagcaggtcagcgagatcaacaacctgatcctgaaaaacttttcgctgcgccgggtgatcgagtcggtgacgatcctcgatacggctaaggtgatcaaccaggttgagcagtttttgctgcgctatgagcatctggccgggcgcgatgtacctaacgatcgtaaggtcgcgctgtatgtgcatatcagctgtctgatagagcgattaattcgtcacgcttccccagcccaatacactggagggcagtgtccggatcgcgagctggctacgctacgcgaggcctttagtgtcatagagagcgggtatagtgtcaaaattcccgttgtagagctctgctacattcacgatatcctgacgcgggaaacggaatttattcaggaagatcaagacttttaa

SEQ ID NO: 215533 - DNA, 822 bp, Klebsiella pneumoniae
atggagctgaccgccgttcccgccacgcagttcagcagcgtgcagttaacggatattctcaacgcctgttttgaagcctacctggtgcctgttacccagtcggtagagggatttgttcagcgttttagcgccgaggggatgagcttggtcgattcccgcgtctggctggccggagatgaaccggcggcgatcgcgatcgtcgcgcgccgggggagtgccgctcgcctggcggcctttgccctgcgcccgtcctggcgcggcaaaggcctgggccggaaactgatgcaggaactgctgatgcttttgcaacagcaggggatcgagacggtattcctggaggtgatccgcgataaccatgcggccgtcgcgctgtatcagtcgctgggctttacgcgacgctatgggctctgcggctacctgagtacagaacttctggccccggtgccgggcgtattgcagctttatcccaccctatccctgcttcggcgcgccattgaggagagtaacagccagcttccctggctgctggatccgcttaccttcgccactctgccatgtcaggtcgtgacgctggaacagcgcgccttcgcggttctaacgacggcgggctcgcgccctgtactgtcgtttttgtgggtggagcccgccgcccgccgccaggggctggcgcgtgagctgctgaaggcgctggcgcagcagttcccgggcattggtacttcggtgacggtcccggaaacttttacgccgctgtttgccgcggccggctatacgccgctctcgctgcagcagtatgaaatgacgatggatctggccgacgcgtag

SEQ ID NO: 215534 - DNA, 873 bp, Klebsiella pneumoniae
atgaaggattatattgccgtcgactggggctctacccagctgcgcggctggctgattcgcaacggccagtgcgtcgaaacgaagcagctgccgatgggtattacccgcctgaacggacgatcgcctgctgatgtattcgcggagcatttggccccctggcgcggcgcacaggcgctgccggtgctgatggccgggatgatcggcagcgacgcgggctggcaagcggtgccgtatctggactgtccgacggcgatcgacgcgcctgggcggcagctatgcgccgttgctgaaggcgtgtggattatacccggcctcaagattgaacaggacggggatttcaacgtgatgcgcggcgaagagacgcagctgctgggcgcctggcaactgatgcccgcggagtgttacgtgatgccgggtacccactgcaaatgggtacaggtggtaggcggcggggtgcgtcattttgccacggcgatgaccggcgaactgcatcatctgctgatgacgcaatcgctgatcggcaaagggctgcctgcccagcagccggacgatgcggcgtttgaacgggggctggagaaaggtctggcgcagccgtcgctgattagcgaactgtttgtcgccagggccgcccgggtgctgggaggtctggcggcgagctcagtcagcgattacctctccgggctgttgattggcgcggaggtggcgaccctggggcagcgtttctgtacttctgccgtcacgctggttggcgaaccggcgctgaatgcccgctacggtcgggcgatgaaggcgcgcggaatgatggttaacagctgcagtggcgatgaggcattgctggctggcatggcgaggataatgcatgaacaagattaa

SEQ ID NO: 215535 - DNA, 1485 bp, Klebsiella pneumoniae
atgaatagtcatgtctttttagtcggctttattatttatgcgttagccatgatttggcttggctggtacgtgtcgcgtcatcaaaaaagcggtgaggattttttactcggtggccgttctttgccgctgttcctgacgctggggtccaccgtggcgaccatggtgggaaccggttcaagcatgggcgctgtcgggttcggctacagcaatggatgggccgggatgctttacggcgtgggcggcgccatcggtattttactggtggcctggctgtttgcgccggtgcgaaagctgcgctttatgaccatgagcgaagagctttcttattacacagggggcagccatttaattaaaaatctcgtcgggataatgatatttattgcctcaattggctggctgggggcacatattcttggcgggagtatgtatttagcctgggcgacaggaattaatctgacggtggcaaaacttattattgccatggcgtttgcgatttacgtcattatcggcggttattctgctgttgtgtggacggacaccattcaggcattaattctgtttttcggttttatcctgatggcgattctggcggtggttcacgtcggggggtgggatgccatcgttcaggcgatggatccaaaggcgatgagcctgtttgcggtcgataagttggggactattccggcgctatcgctggcgatggtcatcggcgtcggcgtgctggcaaccccttcctatcgccagcgtatttactcgggaaaagacgtctcttcggtgcggcgctcgtttgtctataccggtgtgctgtatctgtttttctcggtgctgccggcggttatcggcatggcggcctggacgatgaaccccaatcttgagaacagtaactacgccttcctgttcgccaccagcttcttaccggcgatcctggggctggtggtcctgattgccggactttccgccaccatgtcttcggccagctccgatgcgatagccgccgtggccatcatgatgcgggatgtctataccctcgttaccggaaaaatgccgccggcgcataaggcgataacgctctctcgctggatgctggcgttcgttatcggcctggcgatgatcttcgccctgacctcgaacgatatcatcagctatatcaccaaaatgatctccatgctgatgtccgggctcttcgtctgttccattctcggccgcttctggctgcgctttaactggcagggcgcgctaactgcgctgctgagcggcatgctggtgtctattgtggttctggttaaggccgactggctggcttactggggcaatccgtgcattccgtcggttgttggcagctttgtttccgctatttttgttaccgtcatgacgccagccagcaaaatcagccgtcagcaggcgctggaaatgattacccaggagcgggaaggggaggcgatcccggcgaagacggtagtgcaggtctcaggagaaacgcaatga

SEQ ID NO: 215536 - DNA, 1440 bp, Klebsiella pneumoniae
atgaaagttgactggcttttcaaaaacgtcacggtgatcgacgggagcggcgggccgcaataccgtgctgatgtggcggtgaagggcgatcgaattatggctatcgccccggcgctggacgttgcggcggagcaggtgattgatggccaggggcgggtactggcgccgggctttattgatgtgcatacccatgatgatatcaacgtgatccgcatgccggagtacttgccgaagctcagccagggggtgacgacggtgatcgtcggcaactgcgggatcagtgcggcgaccgccaccatgcggggggaagtgccggacccaatgaatctcctcggcgagcagcaacactttatctatcccaccgtggaggcttatgcccatgcggtggaggcggcgcgaccgtcgctgaacgtcggcacgttaatcggtcacaccgcgctgcgcaataaccatatggacgatctgtttcgtccggcgaacgagacggaaatcgccggcatgcgcgtacagctacgcgatgcgctgcgccagggagcattagggctcagtaccgggctggcctacgccagcgccttccagtcgaccaccgaggaggtgatggcgctggcggaagagctggcggccgggaagggcgtctataccacccatttacgttcagagtttgagccgattctcgaggcgctggacgaagccttccgtattggccgtcacggcaacgtgccggtggtggtttcgcaccacaagtgcgccggggcaaaaaactgggggcgtaccaaagagacgctggcgtttttcgatgagatgcgccagcagcaggatatcgcctgcgactgttatccctattcagccagctcatcgacgctggatatgaaacaggtgaccgacgagtttgatatcgtgattacctggtccgaagcgcagccggagcaggcggggaaaacgctgcagcagatcgccgatgagtggcaggtgagcctgcacgacgccgcggcgcggctgatgccggcgggcgctatttatcacaacatggatgagcaggacgtacggcgggtgatgcgctatccggtcaccatgattggctctgacgggctgccgaacgatccgatgccgcatccgcgcctgtggggcgccttcccgcgggtgctcggccactatagccgcgacgagcagctattcccgctgactaccgcggtacacaagatgaccgggctgtcggcggcgcgcttccagctggcggatcgcgggctggtgaaaattggctactttgccgacctggtgctgtttgacccgcagacggtgcgcgatgtcgccagtttctccgacccgaaacgaccggcggacggcattgaggcggtgatggtcaacggcgtgatgagctacggcagtgataagaaaattaccggacgggcagggcgtttcctgcgtcgtcggatggactaa

SEQ ID NO: 215537 - DNA, 1017 bp, Klebsiella pneumoniae
atggagtcggtaactctatcgttacctgaagcttatgacctggcgctggaggtactcagcgccaatggatttagcgccgaccacgcggtggcgattgcccgcaatgtgaccgccggggagcgcgacggctgcgcttcccacggcctgtggcggctgttgggcattgtcgataccctgcgcaaaggtaaggtatcgcccgatgccgagccgcagatccatgaccaggcgccggggattgcgcgggcggacgccgggggcgctttttcactgctggcctacgagcgcgcgctgccgctgctgctggagaaggcgcgccacaatggcattgcggcgctggcaattaatcgctgcgttcatttttccgcgctgtttgccgatattgagccgttgaccgaggcagggctggtagggctggcctgtacgccaagccacgcctgggtcgccccggcgggcggcacacgtccgctgttcggcaccaaccccatcgccttcggctggccgcggcaggataagccgccgtttattgttgatatggcgaccagcgccgcggcgcgcggcgagatccagctgcatcagcgcagcggcaaagcgctaccggaaggctggggaatcgacagtcagggacagccaacgaccgatgccgcagaggtgctgaacggcgcgatgttgactttcggcggccataagggctcggcgctggcggcaatggttgagctgttggccgggccgcttatcggcgatatgaccagcgccgaatcgctggcgtgggataacggcgcgggcggtctcccctacggcggcgagctgattctggcgctggatccgcagcgctttctcggcgcgcaggcacaagagcagctggagcgcgccgaaacgctgttcaatgcgatgcaggatcagggcgcgcggctgccgggcgagcggcgttttgcctgccgccagcagagtgaacggcagggggtcattatcagtcgttcattgcatgatgagatttgcgccttgcgccagggcgggtaa

SEQ ID NO: 215538 - DNA, 1602 bp, Klebsiella pneumoniae
atgaccattcactctacgcataacagtcaaacccgcgttgcagagtcgggtaagtttaaaaaacagctgaccctaaccgatctcacctttatcggcctgggggcaattttcggctccggatggttattcgctgccagccacgtcgcatccatcgctggtccggccgggatcgcatcgtgggtgatcggcggctttgcggtgctgctgctggggattgtctactgcgagctgggggcggcgctgccgcgcgccggcggcattattcgctacccggtcttttcccacggcgagctgatgggctatctactggggttcatcaccctgattgctttctccagcctgatctcgattgaaattgtcgccgcccggcaatatgccgccgcctggtttccggcgctgacccaaccgggctccagttcgccgacgctgctggggtgggtggtgcagttcttgctactctgtttcttctttgcgcttaactactacagcgttaagaccttcgcccgatcgaacaacttcatcagcgtgctcaagtttctggtgccgctgctggtggtggtgacgctgttcgccttctttaaaccggagaacctgcacgctcaggggattgcgccgttcggcatgtccggggtggaagcggcaattagcgcgggcggaattatcttcgcttatctggggctgacgccgattatctcggtggccagcgaagtacaaaagccgcagcggactatccctattgcgttgattttatcagtggtgctgtcgacgattatctacgtgctgctgcagctggcgttccttggcagtatccccaccgagatgctgaacggcggctgggccgaggtgagcaaacagttctcgctgccgtatcgcgatatcgccattaccctcggcatgggttggctggcctttatggtgataagcgatgcgattatctccccgagcggcaccggcaatatctatatgaacgcgacgccgcgggtgatctacggctgggcgaaggcgggtactttctttaaggcctttacccatattgataaagcgtccgggattccgcgcccggcgctatggctgacctttgggctgtcgattttctggacgctgccgttcccctcctgggaacagctcattagcgtggtatcggcagccctggtgctgagctacgccatcgccccggtgactgccgccgggctgcgccgcaacgcgccggatctaccgcggccgttccgcgtgcgcgccttcggcatcatcggcccgatatcgtttatgatctcggcgctgatagtctactggtccggctggaatacgctctcgtggctgttggggctgcaaatcgtgatgtttgtcgtctacgtgatgtgcaaaggtaaggtgccggaacataccgtgagcctggcgcagcaggttaagtcttcgctgtggctgatcgttttttatgcgttgattatcctcttttcctggctgggcagcttcggcgggcttaatgttatcggtcacccctgggatacggtgctggtggcggcgatgtcgttggggatttactactggggcgcgcgcagctgcctgccgcaggctaactttagcggagacgaagaagagtaa

SEQ ID NO: 215539 - DNA, 1605 bp, Klebsiella pneumoniae
atgaatgcatctcagaccatggcgggacggcagtttatcgccggacgccgtattgccagcggtgaggcgacgctattgagcctgcgggcggtggacggcgaagccaccggccaccgcttttatccggcttcctgtgaggaagccgctcaggccgcagaagccgcgcagcaggcctttgccgtctattcacaaaccacgccgcagcagcgggcgcgctttctcaacgccattgctgatgaactggatgcgctgggcgagccgttttttgctatcgccggacaggagaccgcgctgccgctggcgcggctacagggagaacgggcgcgcaccagcggccagttgcggatgtttgctggcgtgatcctgcgcggcgataccttcgccgcccgtattgataccgccttagccgaccgtcagccgctgccgcgcccggacctgcgccagtatcagcaggcgttagggccggtggcggtgtttggcgccagcaactttccgttggccttttccaccgccggcggcgataccgcctcggcgctggcggctggctgtccggtggtggtgaaggcccatccgggccatatggccaccgccgagctgaccgccgaggcgatcgtcagggcggtggtacggtgcggtttacccggcggcgtattcaatatgattttcgggaccgatatcggcgccgaattggtccgtcatccggcgattcaggccgttggctttaccggttcgttagccggcggtaaggcgctgtatcagctggcgcagcagcgcccgcagccaattccgctgtttgctgaaatgtcggcgattaacccattgattattctgccgcaggcgctgcagacgcgggccgaggcgctggcaaacgagctggtggcgtcattcaccctcggcggcggccagttctgtacccgtccggggctgattctggcgctgcgctgcgccgggctggaacgctttaagtcggcgctgtgcgcgacggtagcgggctccacgccgcaggtgttgctcaatgcgccgacccttcagcactaccgtcagggcgtggcggcgcttgcggcgcacccgcgtatcgagaagttggcgagcggcatcgccgccggcgccgggcaggcgcagaccctgctgtggcaggctcaggtcgaggatctgttggcgcaggatacgctgctgcagaccgaagttttcggcccgttatcgctactggtggaagtggatgatgaggcccaactgaaggcggtggtgaaagcgcagcagggtcagctcaccgcgacgctgcatgccgaggcggatgatggcccgctggcggcgagccttctaccgctgctttgtgagaaggctggacgggtgctgtttaacggttatcccaccggcgtggaagtgtgcgatgcgatggtccacggcggcccgtggccggcgaccaccgacgcacgcgggacctcggtcggcagtcgggcgattgaacgctttctgcgcccggtctgtctgcagaacgcgcccgccgccctgttacccccggcgctgcaggatgcgaaccctttgaacctgctgcgcctggtcaacggccagtggacccgggaagcgatttcctcctctcattga

SEQ ID NO: 215540 - DNA, 921 bp, Klebsiella pneumoniae
atgagcaaaaaagcgattcactggagcggcgtattcccggcggtcagcacgcagtttcgtagcgattactccctcgatttagacgccactcacgcggtgatgaaaaacctggtgaaagatggcgtttccgggttggtggtgtgcggcagcgtaggtgaaaacacctcgctgagcaccgatgaaaaactacagattatcgaggtggcgaaggatgccgccggcggcaaaattccggtcatcgccggggtggccgagttcaccaccgcctttgcccagaaaatggcgaaagaggcggagcgcgtcggcgtcgacgggatcatggtgatgccggcgctggtctactcctcaaaaccgcatgaaaccgcggcccacttccgcagcgtggcgagcgctaccgacctgccgattatggtgtataacaacccgccgatttacaaaaacgacgtgacgccggacattctcgccaccctgaccgactgcgagaacatcgtctgctttaaagactcctccggcgatacccgccgctttatcgacctgcgtaacaccgttggcgaccgcttcgtgctgtttgccgggctggatgacgtggtggtggaaagtattgccgtcggcgcggaaggctggatctccggaatgtccaacgccttcccgcgcgaaggggaaacgttattccgtctcgcccgccagcagcgttacgaagaggcgatggcgttgtaccgctggttcatgccgctgctgcatctcgatgcgcgtccggatctggtgcagtgcatcaagctgtgtgaagagttgctgggccgcggtagcgccattacccgtccgccgcgtctggcgctggaaggcgaaacgcgccagcaggtggtggcgatcgttgaacaggcgctggccactcgtccgacgctgccggatgtcggcctctga

SEQ ID NO: 215541 - DNA, 825 bp, Klebsiella pneumoniae
atgatcggtgtttctgatgcggcgccgccgcgcgcggttaaccaacctgagctggccgtcgatgagctgagccagatctgcgaagggctggcgcgccagcggccggaaaatatgccggcgctgctgaatgcgctggcgctgattgcgcccctgctcaatgccattcctaatgtggtcttttttatcaaagatcgccaggcgcgttatttgttggcgaacctgacgctggcccgccgctgtggtttcaaaagcgtctcctcgctgctgggcaaaacctccgccgatgtctttccttccgcactgggtcagggttataccgaacaggatcttcgggtactacgggaaggcgtgaccctgcgcgatcagctggaaatgcatctctacaatggccgcgagcgcggctggtgcctgacgcagaaattggcgctgcgcgatatcagcggccagatgatcggcatggccgggatctcgcacgatctgcaggaggcccacgcccgccatccggcatggcagcggctggcgatcgtcgacgatcatatccgccgccactatcaccggccgatcgccatggaagagttaaccgccttaagcgggatgtcgattgcgcagatcgaacgctactgcaagcggatctttcatctcaccccgcggcagatgatccacaaagtgcgcctggaaaaagccaccgaactgttggctggcgatacgccgattaccgatatcgccctgcagtgcggctataccgatcacagcgcttttagccgccagttcaaggcgatgaccggctcgacgccgcgcgattttcgcctcacgctgctcggataa

SEQ ID NO: 215542 - DNA, 948 bp, Klebsiella pneumoniae
atgaccgcgccacgcccccctgttacgctgagagctattgattcacataccggcggcgaaccgacccgcctgatcgttgacggcttccccgacctcggcgacggcagcatggcggagcgccgcgaccgcttcgcccgcgacttcgaccattggcgtcaggcggccattcttgaaccgcgcggcaatgacgtactggtcggcgcgctgctgtgcaaaccggtctcggcggcggccaccgctggcgtgattttcttcaacaacgccggttttctgaatatgtgcggccacggcactatcgggcttatcgcctcgctggcctggcttgggcgtatccagccaggcgtacatctgattgaaacgccggtcggcgacgtaagcaccacgttgcacgacgatggcagcgtatcggtgcaaaacgtcccggcccgccgctggaaaaaacagatccgcgttgaaaccgcgctgggtcccgtcatcggcgatattgcctggggcggcaactggtttttcctgattaacgaccacccgttcgccataacgcccgaacagattccacagctcaccgactacgcctgggcggtacgcgaggggctggaagccgcggggatccgcggcgacgacggcggcgttatcgaccatatcgaactcttcgccgatgacgataccgccgacagccgcagcttcgtactctgtccgggaaaggcctgggatcgctcgccgtgcggtaccggcaccagcgccaagctggcctgcctggcgcaggatggcaagttgcagccgggggaaatatggcgccaggccagcatcatcggcagccagtttaccgccagctaccagcgcaccgcggaaggcatcatccccacgatccgcggcgaagcctgggtatgcggcgataaccagttgatcctcaaccctgacgatcccttctgctgggggatcgcgccgtga

SEQ ID NO: 215543 - DNA, 1110 bp, Klebsiella pneumoniae
gtgaagcagtgcgacgtcatcgtgatcggcgccgggatcatcggcgccgcctgcgcgtggcagctggcgaagcgggggcagagcgtgacgctgatcgataacggtcagcccggcgccacggcggccggtatgggccatctggtgtgcatggatgatgaccccgccgagcttgccttgtcggcgtggtcgctggaacgctggcgcgctatcacgccgcggatgcccgacaattgcgcctggcgcggctgcggcacgctgtggctggcggaaagcgaagaagagatgaccgtcgccgacgaaaaacagcggcggatggccggccatcaggtgcacagcgaacgccagactccgcagcagatcgccgggcgcgagccgctgctgcgcggcgggctggccggcgggctatgggtaccgggcgatggcatcgtctacgcgccgaacatcgcccgctggctgatagccgatgccggagaccatcttacctgcctgcgcgatagcgcacagacgattgacgagccgcaggtgctgctcgccagcggccaacggctacaggcgcgggcgatcgtggtggcctgcggccttgaagccaacgcgctgttagcagaaaactggctgcgaccgaaaaaaggccaactggcgattaccgatcgctatcggccgcgggtgcagcaccagctggttgagctgggttacggcgccagcgcccacggcggcggcacctcggtggcgtttaaccttcagccgcggcccaccggccagctgctgattggctcgtcgcgtcagtttgataaccgcgagcgcgagttggatctgcccctgctggcgcagatgctcgatcgcgcccgccatttcgtgccggcgctggcgacgttgaatatcatccgctgctggagcggtctgcgcgccgcctcgcaggatggcaacccgctgatcggcccgcaccccacccgccgtggcgtatggttagcgctgggccatgaagggctgggcgtcaccaccgcgccggccacggccgaactgctggcggcgcagatcctcgatgaacgcagcccactggcgcccgacgcctggctcccggtacgtttgtgtcaacaggaggcgattgcatga

SEQ ID NO: 215544 - DNA, 264 bp, Klebsiella pneumoniae
atgaaggccactctcaacatcaccgtcgatggccagcctctgacggtgccggaagggatcagcgtggcggcggcgctggcgttgatcggcgaccccaccacccgccaggcggttaacggcgagctccgcgcgccgttttgcggcatgggcgtctgccaggagtgccggatcgccgtcgacggccatcgggtgctggcctgtcagaccctgtgccgggccggtatgcaaatagaaaggagccgcgatgaacacgctgcgctgtga

SEQ ID NO: 215545 - DNA, 1263 bp, Klebsiella pneumoniae
atgaacacgctgcgctgtgacattttaatcctcggcgccggccccgcagggatggcggccgcgctctccgccgccgcctgcgataaacaggtgattattctcgacgataatcccgcccctggcgggcaaatctggcgtgccggtccgcaggcgacgcaacccgccctggcccggcgctaccgcgacgccatcgccgcgtctgccgccatccggttagtgaacggcgcgcggctgattgcccgcccctccgcgcacagtgtgctgtttgaaaccgccgacggcggtggtgtggtttactggcagaaactgatcctctgctgcggcgcgcgcgagctgtcgctgccctttcccggctggaccttacccggcgtgaccggcgcgggcggcctgcaggcgcaaatcaaacagggcctggcgctgaaaggagaaaaggtggtgattgccggcagcggtccgctactgctggcggtggcggatacggtgaacaaggccggaggcgaagtgacgaatatcattgagcaagcgccgctcccggcactgctgcgcttcgccggtgggctgtggcgctggccgcagaagctgcgccagttagcgacgctggctccgaaaggctatcttagcggcacgcaggtgaaccgcgctcacggcacaacgcggctggaagccgttacgttgcgccagcgcggcgtcgagcgaactatcgcctgcgatcggctggctatcggctacgggctgatacccaatatcgagacggcgctgctgtttggctgcgccacggcgcaggaggcgatacaggttaaccgctggcagcagaccagcatcgcggatatctacgccgccggcgagtgcaccggtttcggcggtagcgaactggcgctggcggagggcgaaatcgccggttttgccgccgccggggccagccatcaagcgcaggcgttatttgcccgccgcgcccgctggcagcgcttcgccgacgccataaaccgcgccttccggctggcggagtcgttgaaaaacgcggcgacgccggagagcctgctgtgccgctgcgaggatgtgcgctgcggcgacgtggctgccgccgacgactggctgcaggccaaactgacccagcgctgcggaatgggcgcctgtcaggggcgcacctgcgccgccagcgcccgctggctgtatggctggccgctgccgcagccgagagagccgctgtcccccgcccgcgcggaaacgcttattgccctcgccaggctgagcgccgagccgtaa

SEQ ID NO: 215546 - DNA, 765 bp, Klebsiella pneumoniae
atgaaacaggcacgcattgaatggcaaggacaggtacgcgacgtgctggtcaatgaacgcgaccaggtgcgcctggacgatggcacggtattaaaagaaggtgaattccgctggctgccgcccgccgacggcacgctgttcgcgctggggctgaattacgccgaccacgccagcgagctggaatttaaaccgccaaccgagccgttggtgtttatcaaagcgccaaacacttttattggccaccagcagcagtcggtacgcccggataacgtcgaatacatgcactacgaagccgaactggtggtggtgatcgggaaaaccgcgcgccgcgtcagcgaagccgaggccatggactatgtcgctggctataccctgtgcaacgactacgcgatccgcgactatctggaaaactactaccgcccgaacctgcgggtgaaaagccgcgacaccctgacgccgatcggcccgtggatcgtcgccaaagaggcgatcccggatccgcataatctggccctacgcacctgggtcaacggcgaactgcgccagcagggcaccaccgccgatctgatcttcagcatcccgttcctcatcgcttatttaagcgaatttatgaccctgcaaccgggcgacatgatcgccaccggcacgccgaaagggctatccgatgtggtgccgggcgacgaggtgatcgttgaagtcgagggcgtgggccgcctggtcaaccatatcatcagccagcaagcgtatgaggagacactgtcatga

SEQ ID NO: 215547 - DNA, 858 bp, Klebsiella pneumoniae
atgggtaagttagcgttagcagcaaaaatcactcacgtgccgtcgatgtatctgtctgagctgccggggaaaaaccacggctgccgtcagggcgcgatcgacgggcataaagaaattggcaagcgctgccgtgaaatgggcgtcgataccattatcgtgtttgatacccactggctggtcaacagcgcctaccacatcaactgcgccgaccattttcagggcgtctacaccagtaacgaactgccgcatttcattcgcgacatgacctacgactacgacggcaacccggagctgggccagcttatcgccgacgaggcggtgaagctcggggtgcgtgccaaagcgcacaatattcccagcctgaagctggagtacggcaccctggtgccgatgcgctacatgaacagcgataagcatttcaaagtggtgtccatttccgccttctgtaccgttcacgactttgccgatagccgcaggctgggcgaggccatcctcaaggccatcgacaaatatgacggcaccgtggcggtgctggccagcggttcgctgtcgcaccgctttatcgatgaccagcgcgccgaagaggggatgaacagctacacccgcgaatttgaccatcaaatggatgagcgggtggtgaagctgtggcgcgagggcaaattcaaagagttctgcaccatgctgccggagtatgccgactactgctacggcgaaggcaacatgcacgacacggtgatgctgctcggcctgctgggttgggataaatacgacggcaaggtggagtttatcaccgagctattcgccagctccggtaccggccaggttaacgccgtgttcccgttgccagcgcaggcgtaa

SEQ ID NO: 215548 - DNA, 381 bp, Klebsiella pneumoniae; identical to SEQ ID NO: 210262

SEQ ID NO: 215549 - DNA, 1359 bp, Klebsiella pneumoniae
atgactacctctaccctgcaacacaatgataataaagccgatgaagtagaaaaccgggtgatcaaaaagctgttccgccgcctgattaccttcctgtttgttctctttgttttctcatttttggatcgcattaatatcggcttcgccggtctgacgatgggtaaagatctcggcctgacctccaccatgttcggcctggcggcgacgctgttctatgtcacctacgtgctgtgcgggatccccagcaatatcatgctggcgaaagttggcgcgcgccgctggatcgccgggatcatggtggtctgggggatcgcctcgacctgcaccatgttcgccaccagcccgcatacgctgtacatcctgcgcatgctggtcggcatcgccgaggctggttttctgccggggatcctcgtctatctgacctggtggttcccggcctaccatcgcgcccgcgccaacgccctgtttatgatcgccatgccggtgaccatgatgctcggctcgatactttccggctatattctggcgctcgacggcctgtggaacctgaaaggctggcaatggctatttctgctggaaggcctgccgtcggtggtgctcggcgtcgtcacctggttcttcctcaacgacacgccggataaagccaactggctggataacgaagagaaacaggcgctgaagacgatgatcgatcgcgaacgggaacatgcggcgatcgtcccggcttcgccgcgttccacgctgcgcgaagtactgacgccagcggtgctgatgtacaccctcgcctacttctgcctgaccaataccctcagcgccattaatatctggacgccgcagattctgcagagcttcaacaccggcagcagcaacatcatgattggcctgctggcggcgatcccgcagttctgcactattttcggcatgatctggtggagccgccgatccgaccgccgcaaagagcgcaagatgcataccatcctgccctacctgttcgccgcggcgggttggctgctggcttcggcaacgcaccacagcctgatccaactgatcggcattattatggcttcggtgggatcctttaccgcgatggccattttctggaccaccccggatcgggtgatcagcctgcagtcacgcgcggtggcgttggcggtgataaacgctatcggcaacgtcggctctgccgtcagcccgctgttgatcggcattttgcgcgataccaccggcagctttagctccgggctgtggtttgtcgccggattactgatcgtcggcgcgctggtgcttacccgcattccaatgagccagcgtgaggacgccgccgccgtgccgggcttagcggcgcaaaaaggccactaa

SEQ ID NO: 215550 - DNA, 1563 bp, Klebsiella pneumoniae
atgaaacctgaagatttccgcgccgacgcgaaacgcccgttaactggcgaagagtatttaaaaagcctgcaggatggccgcgaaatttatatctacggcgagcgcgtgaaagacgtcaccacgcatccggccttccgtaatgccgcggcctccgtcgctcagctgtacgatgcgctgcacaaaccggagatgcaggattccctgtgctggggcaccgataccggcagcggcggctacacccataaattcttccgcgtggcgaaaagcgccgacgatctgcgccagcagcgcgacgccatcgccgaatggtcgcgcttaagctacggctggatgggccgcaccccagactacaaagccgccttcggctgcgcgctgggcgccaacccggcgttttacggccagttcgagcagaacgcccgcaactggtacacccgcattcaggaaaccggcctgtactttaaccacgctatcgtcaacccgccgattgaccgccacaagccagctgatgaagtgaaggatgtctacatcaagctggaaaaagagaccgatgccgggatcatcgtcagcggcgcgaaagtggtcgccaccaactcggcgctgacccactacaacatgatcggcttcggctccgcacaggtgatgggcgagaacccggacttcgcgctgatgttcgttgcgccgatggatgccgaaggcgtcaagcttatctcccgcgcctcctatgagatggtcgccggtgcgaccggctcgccgtacgactatccgctttccagccgttttgacgagaacgatgcgattctggtgatggataaggtgctgatcccatgggagaacgtactgatttatcgcgactttgaccgctgccgtcgctggaccatggaaggtggtttcgcccgcatgtacccgctgcaggcctgcgtgcgcctggcggtcaaactggactttatcactgccctactgaaacgctctctggaatgtaccggcaccctcgaattccgtggcgtgcaggccgaccttggcgaagtggtggcgtggcgcaacatgttctgggcgctgagcgattccatgtgctcggaagcgacgccgtgggtcaacggcgcatggctgccggatcacgccgcgctgcagacctatcgcgtgatggccccgatggcctacgccaagatcaagaacatcatcgagcgcaacgtcaccagcggcctgatttatctgccatccagcgcccgcgatctgaacaacccgcagatcgaccagtatctggcgaagtacgtgcgcggctccaacggtatggaccacgttgaacgtatcaaaatcctcaaactgatgtgggacgccatcggcagcgaattcggcggccgccatgaactgtatgagatcaactactccggtagccaggatgaaattcgcctgcagtgtctgcgccaggcgcagagctccggcaatatggacaaaatgatggcgatggtcgaccgctgcctgtccgagtacgaccagaacggctggacggtgccgcatctgcacaataatgctgatatcaacatgttggataagctgctgaagtaa

SEQ ID NO: 215551 - DNA, 513 bp, Klebsiella pneumoniae
atgcaattagatgaacaacgcctgcgttttcgcgatgccatggccagcctgtcggctgcggttaacgttgtcaccaccgcgggcgaagccggccgctgcggcattaccgccacggcggtatgctcggtgacggatacgccgccatcggtgatggtgtgtatcaacgccaacagcgcgatgaacccggtgtttcagggcaacggcaagttgtgcatcaacgtgctgaaccacgaacaggaaatcatggcccgtcatttcgccgggatgaccggggtgacgatggaagagcggtttgccctcagcggctggcagcagggcgcgctcgggcagccggtgctgaaaggctcgctggccagcctcgaaggcgagattagccaggtgcaaaccatcggcacccacctggtgtatctggtggagatcaggaatattaccctgagcccgcaagggcacggcctgatttactttaaacgccgtttccatccggtgatgatggaaatggaagtcgcggtgtaa

SEQ ID NO: 215552 - DNA, 2151 bp, Klebsiella pneumoniae
atggataccaaaaaactattcaagcacataccctgggtgattctcggaatcatcggggcattttgcctctcagtcgtcgccctgcgccgcggtgagcacgtcagcgccctgtggatcgtcgtcgcatcggtttctgtgtacctcgtcgcctaccgttattacagcctgtacatcgcgcagaaggtgatgaagcttgacccgacgcgctccacgccggcggtcattaataacgatggcctgaactatgtgccaaccaaccgctacgtgctgtttggccaccactttgccgcgatcgccggcgccggcccgctggtcggcccggtactggccgcgcaaatgggttatctgccgggtaccctgtggctgctggccggcgtggtgctggcgggcgcggtacaggacttcatggtgctgtttatctcctcgcggcgtaacggcgcctcgctgggtgagatgattaaacaggagatggggccggttccgggctctatcgccctgttcggctgcttcctgattatgatcatcatcctcgcggtgctggcgctcatcgtggtgaaagcgctggcggaaagcccgtggggcgtgtttaccgtctgctcgacggtgcctatcgccctgtttatggggatctacatgcgcttcctgcgcccaggccgcgtcggtgaagtgtcggttatcggtatcgtgctgctggtggcctctatctggttcggcggcgtgattgcacacgacccgtactggggcccggcgttgacctttaaagataccactatcacctttaccctgattggctacgcgttcatttccgcgctgctgccggtatggctgattctggcgccgcgcgattatctggccaccttcctgaaaatcggcgtaatcgtcggcctggcgctggggatcgttatcctcaacccggacctgaaaatgccggcagtgacccagtacattgatggtaccggcccgctgtggaaaggcgcactgttcccgttcctgtttatcaccatcgcctgcggcgcggtctccggcttccacgcgctgatcgcctccggcaccacgccgaagctgctggccaacgaaaccgatgcccgctttattggctacggcgcgatgctgatggaatcctttgttgcagtcatggcgctggttgcggcctcgattatcgaaccgggtctctacttcgcgatgaacaccccgccggcgggcctgggcatcgtcatgccgaacctgcatgaaatgggcggtgaaaacgcggcgatgatcgcagcgcagttgaaagaagtcaccgtccacgcggcggcgaccgtcagctcctggggctttgtgatttcacctgaacagatcctgcagacggcgaaagatatcggcgaaccttcggtactgaaccgcgctggcggcgcgccgacgctggccgtcggtatcgcccacgtattccataaaatcatcccgatggcggatatgggcttctggtaccacttcggtatcctgtttgaagcgctgtttatcctcaccgcgctggatgcgggtacccgcgcaggccgctttatgctgcaggatctgttgggtaacttcgtgccgttcctgaaaaaaaccgactcgctggtcgccgggattatcggtaccgccggctgcgtcgggctgtggggctacctgctgtatcagggcgtggtcgacccgctgggcggcgtgaagagcctgtggccgctgttcggtatctctaaccagatgctggccgccgtggcgctggtgcttggcaccgtggtgctggtcaagatgcagcgcaccaaatatatctgggtcaccgttatcccggcggcatggctgctgctgtgcaccacctgggcgctgggcctgaagctgttcagcagcaatccgcagatggaaggcttcttctttatggctcagcagtataaagagaagattgccgccggcggcgagctgaccgcgcagcagatcgccaacatgaaccatatcgtggtcaacaactacaccaacgccggcctgagtattctgttcctggtggtggtgtatagcatcatcttctacggcatcaaaacctggctcaatgtccgcaacaataaggtgcgtaccgacaaagagactccgtatgtgccggtaccggaaggcggcgtgaagacctcgtcacatcattaa

SEQ ID NO: 215553 - DNA, 816 bp, Klebsiella pneumoniae
gtgaaccatacccgagatattccccaaaccttctggcgagacgatcgtctgccgtggctggagctgcgcagcacctggcgcagccgccaggcctataagcgccacagccacccccagctctcggtgggggcgattatcgagggggaaacgcgctgcctgtgcgctggccaggagtacctgctacagcccggggatctgatcgtgatcccgccgcacgcgccgcatagctgtaatccgctgcatgacaggccgcgcagctatcacatgctttacctggacgcgacatggtgccgcgcgcagcgcccggatattccccctggcgccagtatcacctcgccgcagccgctgctgcgcgacagccctctctttgccagtttccagcaggttgtcgccctgatgaaccgcgggagccttgaacaactgcccgcccggctggcgcaactcctgcacgcgctgccgctgtgcgccgccgcgccgcaggcgccacatcacgccagcgccctgctgtttcagcgcctggcgatggatctgccggcgtcgccgtcgctggataagctggcccacgacagcgcgcttcgtaaagagaccgttatccgcgccgtgaaacaagataccggcctgacgcctgccagtttgatcaacatggcgcgcatcgaatatgcgaaaacgcgcttacgcgccggggatcctatcgccgacgttggctatcaggctggctttgccgatcagagccatttccataaaacctttgtcagctataccgccgccacgccgcggcagtatgcgcaaagcagatcaatatctgacaataagtaa

SEQ ID NO: 215554 - DNA, 1413 bp, Klebsiella pneumoniae
atgacccgctaccaacatctcgctacgctgctggccgaacgcatcgaacagggcctgtatcgccatggcgaaaagctgccgtcggtgcgcagcctgagccaggagcacggcgtcagcatcagcactgtccagcaggcctatcagctgcttgagcagcagcagatgattgtgccgcagccgcgatcgggctatttcgtcgccccgcgcaaagcccagccgccggtgccgccgatgtcgcgtccggtccagcgcccggtggagatcacccagtgggatcaggtgctgaccatgcttgacgcccgctacgataaatcgatcatccccttcggcggcggctcgccggacgtgacgcagccaagcctgaagcccatctggcgtgaactgagccgggctatccagcacaacctcactgaggtgttgaactatgacgaactggccgggcgtcgcgagctacgggagcagatcgcccgcctgatgctcgacggcggatcggtggtaactgccgacgatctggtgctcaccagcggctgccacagcgcgctgtcgctggccctgctgtcggtgtgccagccaggggacatcatcgccgtggaatccccctgctactacggcaccatgcagatgctgcgcgggctgggattaaagacgattgagatccccaccgatccggaaaccgggatcagcatcgaggccctggagctggcgctggatcagtggccgatcaaaggggtgatcctcgtgccaaactgcaataacccgctgggctttatcatgccggacgcccgcaagcgcgcggtgctgaaccttgcccaacgctacgatatcgttattttcgaggatgatatttacggcgagctggccaccgaatacccgcgcccgcgcacgatccactcctgggatatcgacggccgggtgatgctctgcagctcctttaccaaaaccatcgcccccgggctgcgtatcggctggatcgcccccgggcgctactacgacaagctgctacagatgaagtacgccgccagcgggaccaacgtcccttccactcagctggcggcctgtaattttattcgcgaaggccactaccaccgccacgtgcggcggatgcggcagatctatcagcgcaatatcgagatctacacctgctggctgcgggaatttttcccctgcgggatctgcgtcacccggccgaagggcggttttatgctgtgggttgagctcccggagcaggtagatatggtctgcgtcgccaagcagctgtgccggctgaagatccaggtcgcgccgggctcgctgttttcggcagcgggcaagtatcgcaactgcgtcaggatcaactgcgccctgccgccgaccgaaaaacataaagcggtgatggtgaagctgggagaagcggtgaaggtggcgatggagtga

SEQ ID NO: 215555 - DNA, 420 bp, Klebsiella pneumoniae
atgctgagtggactgaatcacctgaccctggcagtcagccagctggcgccgagtgtggcgttttatcagcagctgctgggcatgacgctgcatgcccgctgggacagcggggcttatctctcctgcggcgatttgtggctgtgcctgtcgctggatccgcagcggcgcgttactccgccggaagagagcgactacacccattatgcgtttagtattagcgaagccgattttgctagcttcgccgcccgccttgaggctgccggcgtggcgatctggaagctgaaccgtagcgaaggtgcctcgcactatttcctcgatcccgatggccataagctggagctgcacgtcggcagtctcgcccagcgtctggccgcctgccgcgaacagccgtataaggggatggagttttttgatcagtga

SEQ ID NO: 215556 - DNA, 909 bp, Klebsiella pneumoniae
gtgattaatttacagcgtctggatctcaatctgttgcgcaccctggatgtgctgcttagcgaaaacaacgttacccgggcggcgcagcggctgaatctgtcgcagccctcggtgagtattcagctcgccaggctgcgggagatttttgccgatccgctgctgatgccgggcccgcgcggcatgcagcccaccgcccacgccgatgagcttcgtcagccgttgcgcgctgcgttagccgcgctggagcaggcggtggcgccggtcagcccttttgatccggccacggcggcggagacctggcgggtggcggcgacggactatatggcctcggcgatcctcctgccgatgctggctgggttacgccaggcctctcccggcagtcggctggcggtattcgaactgcagccggcgcggctggagcagcaggcggccaacgatacagtagatcttttctttcatacccgcgagggcgcgccgccggggctgcatcagcgcctgctgtttcgcgaacgctacgtgctggctggccgggcggaacattcggcgctgcggcctgggcttagcctggaaacgttctgtcagctggagcacgtgatcgtctccccggacgggggcggcttcagcgcggcgaccgatatcgcgctggcgaacctcggactgatgcggcgggttgtcctttccgtgccacatttcctgtttatgctggagaccctgcgcaatagcgatctggtggcggtcctgccggagcggctggtgcgcgggcagagcgggctggtggtcgtcgagccgtcgctggcggtcgccggctttgagatgctgatgctgtggcacgagcgctggcaccgcgacccggcgcatcaatggctgcgtcagttcattgtgaattcactggaggaacagacatgctga

SEQ ID NO: 215557 - DNA, 783 bp, Klebsiella pneumoniae
atgaaagtactgctgatttacgcccatccggaaccgcgctcgctcaatggcgcgctgaaaaatttcgccatccgccatctgcagcaggccgggcatgaagtgcaggtttccgatctctatgccatgcgctggaaggccgggtatgacgccgacgacagcggcgcgccgccggtcggcgagttctggcggccgaccctcgattccaaacaggcctttgcccagggcacccaaagtgcggatatcgtagccgagcaggaaaagctgctgtgggccgatacggtgattttccagttcccgctatggtggttctcgatgcccgccatcatgaagggctggatcgacagagtgtacgcctggggctttgcctatggcgtcggcgagcacagcgaccgccactggggcgatcgctacggggaaggcactttcgtcggcaagcgggcgatgctgatcgtcaccgccggcggctgggcggaacactattcaccgcgcgggatcaatggccccatcgacgacatcctgttccccattcagcacggtatgctgttctatcccggctttgaggtgcttccgccgctggtgttctaccgcacggataaaaccgatgccgggcagttcgccgatcagtgcgccgccctggccgagcggctggacacgctgtggcaaaccgagcccattccattccgccggcagaatcatggcgattatctgatcccgtcgctgacgctgcgcccggagctggcgccagggcaaagcggcctggcggtgcatctggcaacgaaataa

SEQ ID NO: 215558 - DNA, 585 bp, Klebsiella pneumoniae
atgattccggccatgaatatggaagcccagcatcgtaaaaaagatcccgtccgtctccaccgtcagttgcttgaatcggcagcgatgattgccggccgggatggtatcgccgccctgtcgctgaacgccgtcgcccgcgaggctggcgtgagcaaaggtggcctcctgcatcactttcccaataagcaggcgctgattttcgccctgttcgcccggctgctggcgatcatggaaaaggcgattagcgaactgatggccgccgataacatcgcttacgggcgctttacccgcgcctatttgcgctatctgtccaacccggagctgacggacactcacgaaagccgccagttgatggtgctgtcgctggcgatgccggacgagccggtgctgcgaaaatgctggcgcgactggatgctggatcacctggcgcagggcgatgcgctggataacggcccgaccggcacgctggtacgctacgccgccgacggcatctggttatcggaactgaccgaagggcgcaccatgagcagtgaacaccgccagtcgctggtgaacgatctgaccaaaatgacgcttcccgcgtga

SEQ ID NO: 215559 - DNA, 804 bp, Klebsiella pneumoniae
atgcgctacaacatcaatgcccgtctcatttatgatgcaacggacggcacgcttaccctgcccggcagcgatgaaccggatagccagctatccatcaccgccagcgcgctactctatttttttctccgccatactggcgtcgtcagtcgcgatgaagtgttgaaaaaagtctgggatgataatggcttaacctcttccaacagcaacctcaatcaatacctgagcatgctgcgtaaaaccttccgccactacgatatcgataacattatcgtcactgtatcgcgcggcatgctgcagctgaatcaggatctgagcattgaactgctcgatgccgggccggcgcttaccgagggtgctaatccaccccagagagctgttgaaaccgtccctccggcggcgacaacgccgcccaccgattcgccacatgcgcgcggaatgtgctggtatctggccggcggctgtctgctgatcatcgccctgctgctggtggcattcacttttgccggtacccacgtcgcccgaccgatcaatctgacgctgatgaaccacagccagtgcgaactgctggccagcgatgaaatgctgcgttcggtttccgccacggcctacggtaagaatttcgatgaggtgcgtcagcggctgaagctcggctgcaagccgggggagcgtttcgttttcttctacggcgaccggctggagactaacggcctgggccgggtatttctcgcccactgcgcgatgcacgaggacaacccgtttagctattgcgataactacttttactactcctggaagccgcaatga

SEQ ID NO: 215560 - DNA, 519 bp, Klebsiella pneumoniae
atgaaactcgcgccccgcacctttttcgccctttccgctctgacgtttgtcgccgccgccggttttagcgtctggcgcctgctgccagatgccaacgatggcgtgatgagctgctccaccaaagcgatcatgcgttttgaaaacatggaaaaagagaatgtgaacggcaatatccattttaactttgccgctaacggcaacggttcgatggtggtggaaggctataccgattctgccgccggctggctctacctgcagcgctacgtcaaattcagctacaccagccaacgcatctcggcaaccgaacgccactaccgcatcaaaaagtgggaatccagcgcctcatccatcgacgaatcgccgaatgtcatcttcgactacttcatgcgcgaaatgtccgacagccatgacggtctgttcctcaacgcgcaaaagcttaacgacaaagctatcctgctgagctctatcaactcgccgctctacatctgcacgctgaagtccggcagcacgcttaactaa

SEQ ID NO: 215561 - DNA, 279 bp, Klebsiella pneumoniae
atgggtgatgcattggggcttatcgaaaccaaaggtctggtggcctgtattgaagcagcggactcgatgtgtaaagccgccaacgtcgaactgatcggctatgaaaacgtcggctccggcctggtcaccgtgatggtgaagggcgacgtcggcgcggtaaaagcggcggtggattccggtgtggaatccgcgcagcgcatcggcgaagtggtgacctcgttggtcatcgctcgcccgcataacgacatcaacaaaatcgtcattaaacacaaggcctga

SEQ ID NO: 215562 - DNA, 285 bp, Klebsiella pneumoniae
atgggtgatgcattaggtctgattgaaaccaaaggtctggtggcctgcattgaagcggcggatgcgatgtgtaaagccgccaacgtcgagcttatcggctatgaaaacgttggctccggcctggtcaccgcgatggtgaaaggcgacgtcggggcggtgaaagcggcggtggattccggcgtggaatcggcgcagcgcatcggcgaagtggtgacctcgctggttatcgcccgtccgcacaacgacatcaacaaaatcgtctcgcattacaaaattgcggactaa

SEQ ID NO: 215563 - DNA, 279 bp, Klebsiella pneumoniae
atgaaagaagcgcttggtcttatcgaaaccaaaggtctggtggcctgtattgaagccgcggatgcgatgtgtaaagccgccaacgtcgaattgattggctatgaaaacgtcggctccggcctggtcaccgcgatggtgaaaggcgacgtcggcgcggtcaacgcagcggtcgactccggcgtggaagcggcgaaacgcatcggcgaagtcgtcagctctcgcgtcattgcgcgtccacataacgacatcgaaaaaatcgcggcgcagcacaaagcatga

SEQ ID NO: 215564 - DNA, 1602 bp, Klebsiella pneumoniae
atgattgaactggataacgatttgcagtcccggcagaacgcgcgggaactggtgcgcaacgccaaaaaggcgcaggcgattctggccgccttttcgcagcagcaaatcgacgccatcgtgaaaaacgtggcccaggaagcagcgcaccacgccgaagcgctggcgaaaatggccgcggaagagactggttttggcaactggcaggacaaagtgctgaaaaaccgcttcgcctcgctgcgcgtctacgacgccatcaaagatatgaagaccgttggcatcattcatgacgacccggtaaaaaaagtgatggacgtgggcgtgccgctgggcgtgatttgcgcgctggtcccctcaacgaacccaacctccacggttatctacaaagcgctgatcgccctcaaggccggcaacgccattatcttctccccgcatccgggcgcgcgtcagtgcagctggaaggcgattgaaatcgtcaaacgcgcggcggaagcggccggtgcgccggagggctgcgtcgacggcatcacccagctgacgctcgaagccacctctgagctgatgcacagcaaagacgtgtcgctgatcctcgccaccggcggcgaaggcatggtgcgtgcggcctatgcgtccggcaccccaaccatcagcggcggcccgggcaacggcccggcgtttatcgaacgcagcgccgatatccaccacgcggtgaaagatatcatcaccagcaaaaccttcgataatggggtgatctgcgcctccgagcagtcgatcatcgtcgaaggctgcatttacgacgaggttcaccgcgagctggaagcgcagggcgcttacttcatgaatgaagatgaagcggcgaaaatggcggcgctgctgctgcgcccgaacggcaccatcaacccgaaagtggtcggcaaaaccgcgctgtacctcagccagatggcaggcttctgtgttccggccagcaccaaagtgctgatcgccgaacagaccaccgtgtcgccgaaaaacccctactcgcgtgaaaaactgtgcccggtgctcggcctgtacgtggcagaggactggaaagccgcctgccaccgcgtggtggagctgctgaccaacgaaggactcggccatacgctggtgatccacacccgtaatcaggacgtcatccgccagttcagcctcgaaaaaccagttaaccgtattctgattaataccccagcggcactcggcggtatcggcgcgaccactaacatctccccggcgctgaccctcggctgcggcgcggtcggcggcggctccagctccgacaacgtcggcccgatgaacctgctcaatatccgcaaagtcggctacggcgtgcggtcgattgacgagcttcgcgctccgggcagccgccctgagccgcagccgaccatcgtctctccggcgagcgatccgcagcgcagcattcttgatgacgtgcgttttaacgccccggccaacgccgcgccagcgcgatccgcaggcagcgatgaccgtttcgccagcgcaggcgccgccagcatggaaggcgaaatcaacgagcaaaacgtggaacgcgttatccgccaggtgctggagcgccttgctaagtaa

SEQ ID NO: 215565 - DNA, 258 bp, Klebsiella pneumoniae
atgattctcgcaaaggtaaccggccatgtcgtcgctacgcagaaatgcgatgagctgcgcggcagcaacctgctgttggtcacccgactggatgacaatcagcagccgatgaaggaccagacctgggtcgccgtcgataacgtcggcgccggcatgcacgacatcgtgctggcggaagagtacttcgcgctcaataaagagcgctacaaagcgatgtcggtggtcgccattgtcgagaacgtgtttcgggacgcctaa

SEQ ID NO: 215566 - DNA, 1140 bp, Klebsiella pneumoniae
atgagtgaatttttactgaaaccgcggatttgcttcggtcaggacgccctctcggtgctgaacgaactctccgcccgcagcgtactgctggtgaccgatcaagcgatggtcaagtttggcctcgccgagcgcgtcaccgccctgctgcgccagcgcgggatcgcctggcagatgtgggacgacgtggtggccgatccggatatcgccaccgtggtgcgcggcatgaagctgatggataaccactatccggatctggttatcgcgctcggcggcggttcggtaatcgatgccgccaaagcggttattttctccctggcgcaaacccgtccgcaggctaaccggccgcgtccatgctttgtcgccatccccaccaccagcggtaccggttcggaagtcaccgccttttcggtggtgaaagccaacgcggagaagctggtgctggtggatgcgtcgctgctgccggatatcgccattcttgacccggcgctggtggctacggtgccgccggcaattaccgccgacaccggcatggacgtgctgtgtcacgcccttgaggcctacgtctcccgcgccgccagcgacttttccgacgcgctggcggagaaagtggtgcagcaggtatttcgctatctgccgacctgctggcgcagcggcgacaacctgctggcgcgcgaaaagatgcacaacgcctcctgcatggcgggcatggccttcaccaatgcctcgctggggataacccacagcctggcacacgccctcggcggcgtcttccgcgtgcctcatggccgcgccaacgccctgctgatggcgcacgtcgtcgcctggaatgccgatgtcgacggccagtgcgacaccctcgcggcgcataaatatgcccgtctggcgtatctgctggatctgcctgccgcctcgccgcgccagggcgtcgccagcctgctggtcgccattcaggcgttaaaagaagagatgagcctgcccgccggcattagcgataccggcattgaggcggctgaattcgaccgtcgtttgccggagatggttggccaggcgctgcgcgacagctgtacgccaaccaacccacgtacgccggacgctaacgcgttaaccgagctttatcgccgggcgtggcatggacaatag

SEQ ID NO: 215567 - DNA, 3387 bp, Klebsiella pneumoniae
atggcacactacaacttaacgccgcgcgtcaaagtgctggcagaccgtttactcgcccagaaaagcacgctgtgcaccgagcatgccaccacgctgaacgccctggatggcgatatcgcgggcgttcccgccgccgttaaaccagcgcgccgtttctatgaactgatgcgccagctgccgctgaccatcagcgccgacgaactgatcgtcggcaaccagacccgtaaaccgcacggggcgattttccatgacgaaaacgcgccccgtcgcccatcggctttccagttcctcaacctcaacaacgatctggattcaccggattacaaactggtggtcgaaaaaggggtgctggcgattaagcaccagctggaagagaaaacccgcgccctcggcagcgcggtcagccgcagcggcatggatgaagtcaacggctgtcgcgccgccatctacgcctgcgacgccctgctggcgctggcgcaaaatctggccaacagcgccgaacagctggcggccgcggaaaccaatgcttatcgcaaagccgagctgctcgatagcgcggccattctgcaccacgtgccggcccatccggcgcgtaatttcaaagaagcctgccaggcgttctatctgttccagctggcgctccagctggataacggcagctatgcggttaacccgcaaggggcggatatcgcgctgctgccttacttccagcgcgatatcaacagcggcgcgctgaatacccagcaggcgtatgagatcgtggagtgcctgtggttcaagctggcggaactgagcgaagtccgcgccgcctgcgccattgacggctatccgatgctcgacgccatgctgcacggcgcggcttttgacaacgccgaagtgaacgaactctcggcgatgtttatcagcgcccagcgcaacctcagcgcgctgaatctgccggtacgtctgtttagcggagtacagcaggtcaaccacgcgccgttcgccgcctgcgccgacacgccggtgatggaaggcttaaccccgcgtatgcaacgcctgcgtaaccactacctgacggtgcgcccgagcgtctctatctatcgcgcgctggcctttaccgaagtggtgaaagccaacccgggcatgccgaccattctgttgcgggcgaaagccttccgccacgcctgcgaaaccgcgccgattctgattcaggacgatgagctgatcgtcggccatccgtgcggcaagccgcgcgcgggcgccttctcgccggacatcgcctggcgctgggtgcgcgacgagctcgacaccatgagcacccgcccgcaggatccgtttgagatcagcgaagcggataaaaaaaccattcgcgaagagatcgtcccgttctgggaaggccgttcgctggacgagatttgcgaagcgcaataccgtgaggccggcgtctgggccttcagcggcgagaccttcgtcagcgacctctcctatcaccagattaacggcggcggcgatacctgtccgggctacgacgtgctgctattcaccaaagggatgaacggcattaaagccgatgccgaagcgcatctggccagcctgagcatggaaaacccggaagatatcgaccgtatctactactacaaagcggcgattgaaacctgtgaaggagtagtcaactacgcccgtcgcatcgccgcccacgcccgcgaactggcggctaaagagcaaaacgcccagcgccgcgccgagctgctgaccatcgccgaggtcaacgaaaacgtgccggccaatccgccgaagaccttgcaggaagcgctgcagagtatctggaccgtcgaatcactgtttgaaatcgaagagaaccagaccgggctgtcgctggggcgcgtcgaccagtactgctacccgatgttcgaagccgatatccgcgaaggccgcctgacccacgacaccgcgctggaactgctgcaggcgttcatcatcaaatgtgccgaactgatgtggatgtcgagcgagctgggagcgaaatatttcgcaggttatcagccgtttatcaacctcaccgttggcggccagaaacgtagcggcggcgatgcctgtaacgatctgacctatctgattatggacgccgtgcgcttcgtgaaggtttaccagccgtcgctggcctgccgtatccacaaccagtcgccgcagaaatacatggaaaaaatcgtcgacgtggtgaaagcggggatgggcttcccggcctgccacttcgatgactcccacatcaagatgatgctgcgcaaaggcttcgattttgaagacgcccgcgattactgcctgatgggctgcgttgaaccgcaaaaatccgggcgcatctaccagtggacctccactggctacacccagtggcctatcgctatcgagttcgtgctcaaccgcgggcggatggtgctgttcgatagctatcaggggctggataccggcgacctgcgcgacctgcgcaccttcgacgaattcgacgcggcggtgaaacagcagatcgcccatatcgtgcgcctgtcagccatcggcaccgtcatcagccagcgcgtccaccgcgatgtggcgccgaagccgctgatgtcgctgctggtcgaaggctgcatggagagcggcaaagatgtcgccgccggcggcgcgatggtcaaccacggtccggggctgattttctccggtctggcgacctacgtcgactcgatggcggcgatccgcaagctggtgttcgaagagaagaaatacacccttgagcagatccgcgatgcgctgctggcgaactttgaaggttacgaagcgctgcgccgcgactgcctgaacgcgccgaaatacggtaacgacgataactacgtcgaccagtacgcgctggatattaccgaatggaccgagaaagagtgccgtaagtacaagatgctctactcgaccctcagccatggcaccctgtctatctccaacaacacgcccatcggcgagctgaccaacgccacgccgaacggccgcctggcgtggatgccgctctccgacggcatcagcccaacccagggcgcggataaacaaggtccgacggcgattatcaagtcggtcagcaagatgaacgtggaaaccatgaacatcggcatggtgcacaacttcaagttcctcaaagggctgctggataccccggaggggcgccatggactgattaccttgctgcgtaccgcctcgattctcggcaatggccagatgcagttcagctatgtcgataacgaagtgctgaagaaagcgcagcaggagccggagaaataccgcgacctgatcgtccgcgtcgccggctatagcgcctacttcgtcgagctgtgcaaagaggtccaggacgagatcatcagccgtacggtgattgagaagttctag

SEQ ID NO: 215568 - DNA, 948 bp, Klebsiella pneumoniae
gtgatcgcaaaacaagaattaacgggccgaattttcaatatccagaaatattcgatctatgacggcgatggcattcgcacgctggtgttttttaagggctgcaacattcgctgcccgtggtgcgccaacccggaagggctgaacagccagttccaggtgatgttctcgcacgacaaatgcattaactgcggcgactgcgtcagcgtctgtccggcgggtattcattatcgggcggaagagaatggcgaaatgaagcacttcgtcgaccgcaataaagactgcatcggctgccgcaaatgcgaagagatttgcacccagaacgcgctggacattatgggcaaggacgtcaccgtcagcgagctgatggagatcatcatgcaggactacgacttctatatctcctccggcggcggcgtcaccatcggcggcggcgagatgagcctgcagaccgattttgccgtcgccttatttcgcgaatgcaaaaagatgatgattaacaccgccgtcgaaacccaaggtaccaccccgcttgccaactaccagaagctggcgccggtcaccgacaccttcttattcgacataaagcagattaacagcgaacaccacaaggcgatgctcggcatcggtaacgaagggatccgccgcaatctcgaatggctggtggattccggcgccaacgtcattgtgcgtatgccgctcattcgcggctacaacgactcattcgacgccattaccggcgccattgattacgtacagaagctggcgaagcgtggaaatatccgccgcatcgacatgctgccgtaccaccagttgggacgcaaaaagtacgaacgcctggatatgccctacccgattacccaggacccgtcttattcaccggacgaactggaccggctggaaaccttcttccggcaatttgattttgatattcgcttagtccgccattaa

SEQ ID NO: 215569 - DNA, 399 bp, Klebsiella pneumoniae
atgaaaagtttaggcgtaattgaaacgcgaggatgggtcgccgccattcaggccgtcgacgccgcctgtaaagctgcgggagtgacctgcattggctatcgtaaaccaggctccgggctggtgagcgtctgctttgaaggggagatcagcgccattcacaccgccattgaacgcggcgtggcggtggcaggcgccgagcacaccgtgaagtcattggtgattgcccgcccggagcgctgcgtggttgaagcgttaagcaacctcaaaggcaacccgccgcctgcgaaaaaagcggccgaacaggtggttatccccgccccggaacccatcgtcccccctgccgccccgaacgaaacggaagataaacatccggcgctgaagaaagggaagaagtcatga

SEQ ID NO: 215570 - DNA, 621 bp, Klebsiella pneumoniae
atgatcgacaccctggttcgcgaaaaaatcgccgctcgcctgagcgcaacggcgccggcgatcccggtggggatctccaaccgccacgtccatctcgcgcaacaggacgtcgaggcgttgttcggcaaaggctacagcctgacgccgtttaaaccgctgcgccagccggggcagttcgccgcccaggagtgcgtgaccgttgtcggaccgaaaggctcgctgaccaacgtccgtgtcctcgggccgacccgcccgctatcgcaactggaagtatcgcgcgccgactgtttcacgctcgggattaaggcgccggttcgtgagtccggccagctggagaatgccggtagcgcgctgctgattggccccgcaggccacgttgaactccattcgcaggtgatctgcgcctggcggcatattcatatgtcgccgcaggatgcgcgccagctcaacgtcagcaatggccagaaggtcagtgtgcgcagcaatggcgagcgccagctgactttcgacgaagtggtggtgcgggtgcgcgatgacttcgcgctggagtttcacatcgacaccgaagaagccaatgccgccgggttgaaaaacggcgcgcaggtgacgctcatcggctaa

SEQ ID NO: 215571 - DNA, 669 bp, Klebsiella pneumoniae
atgaccgacgaacagattgaaggtttagttacgcggattttgcagcgcctgcgcccgccggtactggtgatggtgaccgccgctgacggctatcgcgcggcgatccgccagcgcctggcgggctgcggctacccgctgcgcctcgcgctggaggagggtctcgccgacgccaccgcgtggcgagaggtgggcgagattatcccgtcatcgacctggcaggatctcctgccgtcagcgccgtggcgggcggtactgctaccgtttctcgattatccgcaagcctcggatctgctgaacggcaccctgcgcaatccggtctcccgctgcgcgcacgaggcgctgctggcgggtattccggtgctggcgctgcgctaccactgcgatccgcacagcgagctcaaccggctgcgcggcgcgcaggccggcagcgcctacgccggacatctgcagaccacgctggcccgtctggaagcctgcggcgtcttcctcggcaccattaatgagctgctggcgaagctggacgcgcccaccgcgcctgccgccgtcaacagcgaaccgcgccgttatcttaccgtcacagacgtggtgaataatccggcgctggcggcggccccgcgcgctcagctgaccgatgcggccattgattacttaaaaaacagaaagatatga

SEQ ID NO: 215572 - DNA, 414 bp, Klebsiella pneumoniae
atgtcctcgaaaacaaaatgctggttatggatgctgctggttatcctctccgaaacctcggcaacctcgacgttaaaaatgttcggtagcagtgaaggcggcagcaaaatgctgctgctcgggctgctgattgcgctttactgcacctgctattactcgctctcaagggcggtgaaagatatcccggtcggcctggcgtacgccacctggtccggcaccggcattttggtggtctcgacgctgggaatggcattctacggccagcacccggataccgccgccatcatcggcatggcggtgatcgccagcggcatcgttatcatgaacctgttctcgaagatgggttccgaagcgagcgaagaggacgcgcccgccgcgccagccgccgccatggataagaacatcgctaactaa

SEQ ID NO: 215573 - DNA, 330 bp, Klebsiella pneumoniae
atgtttaatctcggatttttatggctggcgctgtctatcggctccgaaatcaccggcacctcgatgatcaaaaaaaccaacggcttcagcaagctggccccttcggtgctggtggtctgcgcctacggcctgtgctacttcgccctcacccgcgcgatgagcaccatcccggtgggcgtggcctactcgctgtggtgcggcttcggtatcgtcggcgtcaccatctgctccatgatcctctataagcagaaaccggatctggcggccattatcgccatggcgctgattatctccggcggcgtgatcatgaacgtcttctcgaccatgtaa

SEQ ID NO: 215574 - DNA, 1008 bp, Klebsiella pneumoniae
atgaaccatccacaaaccatcctcaccggcgaccgcccgaccggccaacttcatcttggccactacgtcggctcgctgcgccagcgcgtcgcgctgcagcataaccaccagcaatttatcctgatcgccgacctgcaagggctcacggacaacggcagcaatccgcaaaaaatcagccaccatatcctcgaagtcatggccgattatctggccgtcggcatcgaccccaggctcaccactatttgcctgcagtccgccctgccggcgctggcggagctcagcgcgctgtatatgaatatcgtcaccgtcgcccgcgtagaacgtaatccgacggtcaaaaatgagattgcccagaagggattcgcccgctcgctgccggtgggttttctcgcctatccgattagccaggcggccgatatcaccgcgttcaaggccgaactggtgccggtgggcgacgatcagctaccgatgattgaacagaccaacgagatcgtccacaagatgaatagcctcaccggcgagccggtgctgcgccactgcaaggcgctactcagcgaagtgagtcgcctgccgggcgtcgatggcaacgccaaaatgtcgaaatcgctgggcaatacgctgacattatcggccacagaggaggagatccaccacgcggtcagcgcgatgtataccgacccgacgcacctgagagtcagcgatccggggcatgtcgagggcaacgtggtgtttacctatctcgatgctttccatagcgataaggcgctggtggcagagatgaaagcccactatcagcgcggcgggctgggcgatcgccagtgtaagaatgagctggagacctgcttgcagacgctactggcgccgatccgcgaacgcagggccacttttattcaggataaagggatgctgctggagctgctgcgccagggcagcgaacgcgcccaccacctcacacagcagacgctgcatgaggtgaagcgtgggctgggtctgccggtgctgttctga

SEQ ID NO: 215575 - DNA, 2745 bp, Klebsiella pneumoniae
atgaaactaacgccgcaggatacctcgccccccgtcgccctgctggaacacgttggtcagcagtttggcgccaccatcgcgctgcgcgatatcagtctggcgatcccggcacggcgtatggttggcctgattggcccggacggcgtcggcaaatcgagcctgctttcgctgatcgccggggcgcggaccatcgagcaggggaacgtgatggtgcttggcggcgatatgcgcgatgtgcatcaccgccgcgaggtgtgcccgaaaatcgcgtggatgccgcaggggctggggaaaaacctctatcacactctctcggtgtatgaaaacgtcgacttcttcgcccgcctgttcggccacgataaagccgagcgcgaactgcgcatcaacgagctgctgcagagtaccgggctggcgccgtttcgcgatcgccccgccggaaaactctccggtgggatgaagcaaaagctcggcctgtgctgcgcgctgatccacgatccgcagctgctgatccttgatgaaccgaccaccggcgtcgatcccctctcccgggcgcagttctgggagcttatcgacagtattcgccagcgccagccggcgatgagcgtgctggtggccaccgcctacatggaagaggccgagcgctttgactggctggtggcgatgaacgccggcgaggtgctggcgaccggcagcgccgcagagctcaaagcccagaccggcagccagaccctggagcaggcgtttatcgccctgctgccagaagcacagcgtcgggcgcatagggcggtagttatcccaccgcgcgacagccgtgaggaagagatcgccatcgaagcgcgcggcctgaccatgcgcttcggcaactttgttgccgtcgaccacgttaatttccgcatcgcccgcggtgaaatcttcggcttcctcggctccaacggctgcggcaaatccaccaccatgaagatgctcaccggcctgctgcccgccagcgaaggtgaagcctggctgttcggccagccggtcgacccgaaggatatcgccacccgccagcgggtgggctatatgtcgcaggccttctcgctctatagcgagctgaccgtccggcaaaacctcgagctgcacgcccgcctgttccatattccggacggcgaaatccccggccgggtggcggaaatgtgcgagcgctttatgctgaccgaggttgaagacgcgcttcccgccgatctgccgctggggatccgtcagcgcctgtcgttagcggtggcggtcatccatcgcccggagatgctgatcctcgacgagccgacctccggcgtcgacccggtggcgcgggatatgttctggcagctgatggtagacctcgcgcggcaggatcaggtgaccatttttatctccacccactttatgaatgaggcggaacgctgcgatcgtatctccctgatgcacgccggcaaagtgctggccagcgatacgccgcaggcgctggtcgagcagcgcggttcaaacagcctggaagaggcgtttatcgcctggcttaaagaggcccagccgtcctctccagtaccagaagaacccacgtctgctgtggcatcgcattccggacatacggctccacggcaggccttcagtcttcgccggctgtttagctatagccgccgcgaggcgctggagctgcgccgcgatccggtacgatcgacgctggcgctgctggggacggtgatcctgatgtttatcatggggtatgggatcagcatggacgttgaggatctgcgctttgccgtcctcgaccgcgatcaaaccctcagcagccagggctggtcgcagaatctcgctggctcacgctactttatcgaacaggcgccgctgcgcagctatgacgaactggaccgccggatgcgcgacggcgagctggcggtggcgatagagatcccgccgaactttggccgcgatatcgcccgcggcacgccggtgcaaatcggcgtgtgggtggacggcgcgatgcccaaccgcgcggaaaccgtgcgcggctacatacaggcgatgcatctggcctggctgcaggagatgaccggccggcagagcagcccgcagcgcgatacctcgctcatctccatcgagacccgctatcgctacaatccagatgtgaagagcctgccggccatcgtcccggcggtgatcccgctgctgctgatgatgatcccggcgatgctcagcgccctgagcgtagtgcgtgagaaagagctcggatcgattatcaacttgtacgtgacgccaaccacccgcagcgaattcctgctcggcaagcagctgccttacatcgtactggggatgtttaacttcttcctgctgtgcgcgctgtcggtctttgtctttggcgtcgcgcataaggggagtttcctgacgctgaccctggcggcgctgctgtatgtcaccatcgccactggtctggggctgctgatctcaacctttatgaagagccaaatcgccgctattttcggtaccgcgattattacgctgatcccggcaacccagttttccggaatgatcgatccggtggcctcgctggaaggtcccggacgctggattgggcaaatctacccgaccagccacttcctgactatcgcccgcgggaccttttccaaagcgctgaatattagcgatttgtggggctcattcattccgctactgattgcggtgccgctggtgctcgggttgagcgtgctgctgctgaagaaacaggagggatga

SEQ ID NO: 215576 - DNA, 678 bp, Klebsiella pneumoniae
atgtctactcccgctaactttaacggtgctcgtccggtgattgatgttaacgataccgcaatgctgttgattgaccatcagagcggtctgttccagaccgtcggcgatatgccgatgccagagctgcgcgctcgcgccgccgcgctggccaagatggcgtcgcttgccgggatcccggtgatcacgaccgcctccgtgccgcaggggccgaacggtccgctgatcccggagattcatgaaaacgcgccgcatgcgaaatacatcgcccgtaaaggtgagattaacgcctgggataacccggaattcgtcgccgcggtgaaagcgaccggccgtaaaacgctgattatcgccgggaccatcaccagcgtctgcatggccttcccggctatcgccgctgtcgccgacggttataaagtatttgccgtgattgacgcttccggcacctacagcaaaatggcgcaggagatcaccctggctcgcgtggtacaggccggcgtagtgccaatggataccgccgccgtcgcctctgagctgcagcgcacctggaatcgcccggacgccgcagaatgggcggaggtgtacaccaaagtcttcccggcctaccagctgctgatcgaaagctacagcaaagcgcaggacgtcgtgaagaataacgaacagctggattcccagcgctaa

SEQ ID NO: 215577 - DNA, 714 bp, Klebsiella pneumoniae
atgtcatccagtaatagtagttcaacattttcggtattaagctttgtagatggattgtgggatttagcgaaagtagcaaaattaatttatttcacactatgttttgatgttctatttttctatctaaaaggaaatggtttatttggcataaaattagggaaggaattcgatctttcacttgcagatttggccggaatgattattgctttaggaattttctcatcaataatattagaaataacaaccctatgctttaatctacttctgatacgaattaagtatagtaatctactacaaagtaaagatgagaggatcaaccaaaaatcatctactgaagtttttatgtcagaactacgagatgatgctttagaaaatggcgacgacatgtcattaaaattgtatactgaagagcaaagcaaaagagagaaaaattataaagaagggagagcagctgaaataatctcttttggaacaatttttgttttctcaatagagtggtatttatctgcatcaaatggttccagtcggatgtttattgactggttatgggaacaatcaaaacacagtgatcctacaacaccacattatctcattggtctattaatttcttcagcattactattctatgcagtatcagtctgctggcccaaagaggatggtcacaaaatatattaccccaagcttgctaagaaattgagaaaaaaagaacattag

SEQ ID NO: 215578 - DNA, 219 bp, Klebsiella pneumoniae
atgaataagaaaatattagtattgtccgttttatttggtttttcaactatgtcccatgctagtgaaccaaagtatgcttttccgcaatcagataaacaggtagtctcaaaaattaaaattcaaaatgcaccgataaatcatgataaatatggtcatggtgaggttcttgccaatggggcgtgggttaaaggaaattctggtagtcaaaacaaaaaatga

SEQ ID NO: 215579 - DNA, 1128 bp, Klebsiella pneumoniae
atgggaaaaataaaatattggttaatagcgggatttattatccttcttgcaattgtttacactgctatcagtgacaggtattctacgctttctaggttgaaatcagcaggtgaaaacggagatgtagaagctcagtatgcgttgggtctcatgtatttatatggagaaatactggatgtcgattatcagcaggcaaagatttggtatgaaaaagccgctacccaaaatgatccgcgtgcacaggttaaactcggtttgatgtatgcaaatggtctcggggtaaatcaggattatcaacaggccaaatcttggtatgaaaaagcatcggttcaaaatgatgttgatgcgcaatttttgcttggagagatgtataacgatggtctcggggtaggccaagactaccaacaggcaaagatgtggtacgaaaaagctgctgctcaaaatgatgagcgtgctcaggtcaatctcgctgttctatacgcaaagggtaatggggtagaacaggattatcgtcaggccaaaagctggtatgaaaaggctgcagctcaaaatagccctgatgcgcagttcgccattggaattctgtatgccaatgctaatggtgtagagcaggactatcagcaggcaaaagactggtatgagaaagcagcagaacaaaatttcgccaatgctcagtttaatcttggtatgttctattacaaaggtgagggagttaatcaaaactttcagcaagccagagaatggtttgaaaaagccgcgtctcaaaatcagctgaatgctcaatataatttaggtcagatctattactacggtcagggcgtaactcagagctatcgaaaggctaaggaatggttcgaaaaagcagctggggaaggtcatgtcgatgcccaatataaccttggcgtaatatacgaaaatggtgaaggggttgggcaggactttcatcaggcgagagcttggtatgaaaaggcagcttcgcaaaacgatgcgcaggcacagtttgatcttggtgttatgaatgagcttggtcaggggggaagtataaatctgaaacaagcaagaacttggtttgggctggcatgcaataatgggcataaggaaggttgcgaacgttatgaaaataattga

SEQ ID NO: 215580 - DNA, 351 bp, Klebsiella pneumoniae
atgagctttgaagctaaaaaggaacatgccattgccatcatggaaagcaagaaaatgtggcgtagtaactatgcgcctcctttgctacgcctcgcatggaaagctggcctcaagatcccaccgttgccttttgccacgttctggcaaataaccttgctgatgggaggttggtttggtccggcatgggggatttgtatgtggttttcttcatggaaggacagtggtatgcagccgggcgttgcatttgtctcaagcatagtcgcaggtatttgctttggtgttcttatggctgcgtatcattggtggcgaaaggtagttaacaatctgcctgactgggatagtctggagtaa

SEQ ID NO: 215581 - DNA, 243 bp, Klebsiella pneumoniae
atgattgatgaatttcatgtgatgtatatgtataaaaaaatccaagcagaagctgcaaccaccgacattaaaacacttgaacagcttttgaaaaagttcaggagggtggtcaatgaacgtcgtgaagaatactatcaggaaataggtgagaaaaaagcgcgtaagttgaaaatgaaaagagcacaaagattgcttgagaaaatggtgtgcgaccgagtttcgccagaagatttaagggcgtga
